United States Patent Application Publication US 2006/0003322 A1 - sequence listing, part 15

SEQ ID NO: 604562 - RNA, 22 nt, Human
cauacugaucgccuacacacag

SEQ ID NO: 604563 - RNA, 24 nt, Human
caucccggagacgccgcuggacac

SEQ ID NO: 604564 - RNA, 20 nt, Human
cauugcuaggaaucuguggg

SEQ ID NO: 604565 - RNA, 23 nt, Human
ccacaaccuggggcagggcggca

SEQ ID NO: 604566 - RNA, 22 nt, Human
cccacaaccacaugguuggcca

SEQ ID NO: 604567 - RNA, 21 nt, Human
cccacaccugcuuuccacuac

SEQ ID NO: 604568 - RNA, 18 nt, Human
ccccguaguuuccagcgc

SEQ ID NO: 604569 - RNA, 24 nt, Human
cccguaguuuccagcgcugacgcc

SEQ ID NO: 604570 - RNA, 23 nt, Human
ccggugggcucuggcuauaggug

SEQ ID NO: 604571 - RNA, 22 nt, Human
ccuacacacagccuggcgaagc

SEQ ID NO: 604572 - RNA, 23 nt, Human
ccuggugagcccugaaagugggg

SEQ ID NO: 604573 - RNA, 21 nt, Human
cggagaugaaacucgcccagc

SEQ ID NO: 604574 - RNA, 21 nt, Human
cggcaggguggccaagcccca

SEQ ID NO: 604575 - RNA, 19 nt, Human
cucacaggagacacugccc

SEQ ID NO: 604576 - RNA, 20 nt, Human
cuugcuggcauggaacucca

SEQ ID NO: 604577 - RNA, 24 nt, Human
gccuggugagcccugaaagugggg

SEQ ID NO: 604578 - RNA, 20 nt, Human
gcgcuuggugacuguggagg

SEQ ID NO: 604579 - RNA, 23 nt, Human
ggcuggucauccuugucgaaggg

SEQ ID NO: 604580 - RNA, 20 nt, Human
gggcagcggcaggguggcca

SEQ ID NO: 604581 - RNA, 25 nt, Human
uacccucaauucggccccguaguuu

SEQ ID NO: 604582 - RNA, 24 nt, Human
uauccacagccacaaccuggggca

SEQ ID NO: 604583 - RNA, 21 nt, Human
uccacagccacaaccuggggc

SEQ ID NO: 604584 - RNA, 19 nt, Human
uccaggcugagcuugaugg

SEQ ID NO: 604585 - RNA, 23 nt, Human
uccaugugacuuccaggcugagc

SEQ ID NO: 604586 - RNA, 27 nt, Human
uccuuggucucacaggagacacuuuac

SEQ ID NO: 604587 - RNA, 21 nt, Human
ugacagaagaagcagcugagg

SEQ ID NO: 604588 - RNA, 24 nt, Human
ugacagaagaagcagcugagggcu

SEQ ID NO: 604589 - RNA, 19 nt, Human
ugagcccugaaaguggggg

SEQ ID NO: 604590 - RNA, 18 nt, Human
ugaguagagggagaaaga

SEQ ID NO: 604591 - RNA, 21 nt, Human
ugccaggcugucccgggccuc

SEQ ID NO: 604592 - RNA, 22 nt, Human
ugcugagccgaggcugggaggc

SEQ ID NO: 604593 - RNA, 22 nt, Human
uggagccagcccuuacccuccc

SEQ ID NO: 604594 - RNA, 20 nt, Human
uggcauggaacuccagucgu

SEQ ID NO: 604595 - RNA, 19 nt, Human
uggcugggcagcggcaggg

SEQ ID NO: 604596 - RNA, 22 nt, Human
ugggggagggguaucuggagcc

SEQ ID NO: 604597 - RNA, 20 nt, Human
uggugacuguggaggccuug

SEQ ID NO: 604598 - RNA, 21 nt, Human
uguaaauaaaauacaaaacca

SEQ ID NO: 604599 - RNA, 19 nt, Human
ugucccgggccucucggcu

SEQ ID NO: 604600 - RNA, 21 nt, Human
uguccggugggcucuggcuau

SEQ ID NO: 604601 - RNA, 21 nt, Human
ugugggggagggguaucugga

SEQ ID NO: 604602 - RNA, 22 nt, Human
ugugggggagggguaucuggag

SEQ ID NO: 604603 - RNA, 18 nt, Human
uuguaggcaccaucccgg

SEQ ID NO: 604604 - RNA, 24 nt, Human
aaaaagaucucgaauacccaugcu

SEQ ID NO: 604605 - RNA, 22 nt, Human
aaaaaggacuccauccucugga

SEQ ID NO: 604606 - RNA, 18 nt, Human
aaaaggccuugcugugag

SEQ ID NO: 604607 - RNA, 20 nt, Human
aaacaaacaaaaaggacucc

SEQ ID NO: 604608 - RNA, 23 nt, Human
aaacaggcacaucuucaugaaca

SEQ ID NO: 604609 - RNA, 18 nt, Human
aaagagcauauuuuagga

SEQ ID NO: 604610 - RNA, 24 nt, Human
aaagugcugggauuacaggcguga

SEQ ID NO: 604611 - RNA, 24 nt, Human
aaagugcugggauuauaggcauga

SEQ ID NO: 604612 - RNA, 22 nt, Human
aaauccauuucccuauggcaca

SEQ ID NO: 604613 - RNA, 18 nt, Human
aacaaauuaacccaaaac

SEQ ID NO: 604614 - RNA, 19 nt, Human
aacauagugaaaccccauc

SEQ ID NO: 604615 - RNA, 20 nt, Human
aacauagugaaaccccaucu

SEQ ID NO: 604616 - RNA, 21 nt, Human
aacauagugaaaccccaucuc

SEQ ID NO: 604617 - RNA, 21 nt, Human
aacauagugaaaccccaucuc

SEQ ID NO: 604618 - RNA, 24 nt, Human
aaccuuguguaugucuccuuugca

SEQ ID NO: 604619 - RNA, 26 nt, Human
aagaccacaagcaugagucagagcca

SEQ ID NO: 604620 - RNA, 24 nt, Human
aagcaauccucuggccuuggccuc

SEQ ID NO: 604621 - RNA, 25 nt, Human
aagcaauccucuggccuuggccucc

SEQ ID NO: 604622 - RNA, 18 nt, Human
aagccacgacagcaacaa

SEQ ID NO: 604623 - RNA, 19 nt, Human
aaguaguugggacuacaag

SEQ ID NO: 604624 - RNA, 18 nt, Human
aaguaucugggacuacag

SEQ ID NO: 604625 - RNA, 24 nt, Human
aagugauccacuuggcucggccuc

SEQ ID NO: 604626 - RNA, 19 nt, Human
aagugcugggauuacaggc

SEQ ID NO: 604627 - RNA, 19 nt, Human
aagugcugggauuacaggc

SEQ ID NO: 604628 - RNA, 19 nt, Human
aagugcugggauuauaggc

SEQ ID NO: 604629 - RNA, 21 nt, Human
aagugcugggauuauaggcau

SEQ ID NO: 604630 - RNA, 27 nt, Human
acaccauagcagguauacaaaaaaugg

SEQ ID NO: 604631 - RNA, 22 nt, Human
acagugccgggagcuaccacgc

SEQ ID NO: 604632 - RNA, 23 nt, Human
acauuaugacucccagaugggaa

SEQ ID NO: 604633 - RNA, 19 nt, Human
acccaggcuggagugcaau

SEQ ID NO: 604634 - RNA, 20 nt, Human
accuugccucuggucucagc

SEQ ID NO: 604635 - RNA, 18 nt, Human
acgggguuucgcuauguu

SEQ ID NO: 604636 - RNA, 23 nt, Human
acgggguuucgcuauguuggcca

SEQ ID NO: 604637 - RNA, 24 nt, Human
acgggguuucgcuauguuggccag

SEQ ID NO: 604638 - RNA, 20 nt, Human
acuagggucagcuuugcuga

SEQ ID NO: 604639 - RNA, 20 nt, Human
acuccauccucuggaaagca

SEQ ID NO: 604640 - RNA, 20 nt, Human
acugcagccucaaacaggau

SEQ ID NO: 604641 - RNA, 23 nt, Human
acuuuucuuccuggcauuuagca

SEQ ID NO: 604642 - RNA, 19 nt, Human
agaaacacauuuuugggcu

SEQ ID NO: 604643 - RNA, 23 nt, Human
agacaaagaugaauaaaggggac

SEQ ID NO: 604644 - RNA, 23 nt, Human
agacagggucucgcuauguugcc

SEQ ID NO: 604645 - RNA, 23 nt, Human
agaccacaagcaugagucagagc

SEQ ID NO: 604646 - RNA, 19 nt, Human
agaggcagaggacacaggu

SEQ ID NO: 604647 - RNA, 21 nt, Human
agcaaggaggugacagcagcc

SEQ ID NO: 604648 - RNA, 20 nt, Human
agcauauaggagccuggccu

SEQ ID NO: 604649 - RNA, 27 nt, Human
agccacgacagcaacaacuuggaaucc

SEQ ID NO: 604650 - RNA, 21 nt, Human
agccauguagugagaauauag

SEQ ID NO: 604651 - RNA, 22 nt, Human
agccuaggcaacauagugaaac

SEQ ID NO: 604652 - RNA, 23 nt, Human
aggaaggaauuucauuuggcuca

SEQ ID NO: 604653 - RNA, 18 nt, Human
aggcaggaggauggcucg

SEQ ID NO: 604654 - RNA, 19 nt, Human
aggcaugagccaccguacc

SEQ ID NO: 604655 - RNA, 19 nt, Human
aggcugcugcaauacagaa

SEQ ID NO: 604656 - RNA, 26 nt, Human
aggcugcugcaauacagaauuucuuu

SEQ ID NO: 604657 - RNA, 20 nt, Human
agggcacugaacuuugccuc

SEQ ID NO: 604658 - RNA, 19 nt, Human
aggggugugggguuggcag

SEQ ID NO: 604659 - RNA, 21 nt, Human
agggucauggaauugagacag

SEQ ID NO: 604660 - RNA, 22 nt, Human
agguccuuucugaccauccuau

SEQ ID NO: 604661 - RNA, 23 nt, Human
agguggccggcacagccacauug

SEQ ID NO: 604662 - RNA, 19 nt, Human
aguagcugggauuacaggc

SEQ ID NO: 604663 - RNA, 25 nt, Human
agugagggucauggaauugagacag

SEQ ID NO: 604664 - RNA, 23 nt, Human
agugcaauggcacaaucacagcu

SEQ ID NO: 604665 - RNA, 20 nt, Human
agugcaguggcacaaucucg

SEQ ID NO: 604666 - RNA, 24 nt, Human
agugcaguggcacaaucucggcuc

SEQ ID NO: 604667 - RNA, 20 nt, Human
agugcaguggcgcgaucucg

SEQ ID NO: 604668 - RNA, 24 nt, Human
agugcaguggcgcgaucucgacuc

SEQ ID NO: 604669 - RNA, 20 nt, Human
agugguguucaaaaccucug

SEQ ID NO: 604670 - RNA, 18 nt, Human
auaaaacaaaaaacaggc

SEQ ID NO: 604671 - RNA, 19 nt, Human
aucacagcucacuggagcc

SEQ ID NO: 604672 - RNA, 23 nt, Human
aucgcuacccucccugcacccaa

SEQ ID NO: 604673 - RNA, 24 nt, Human
augaucuacccaccuuggccuccc

SEQ ID NO: 604674 - RNA, 19 nt, Human
auuacaggcgcaugccacu

SEQ ID NO: 604675 - RNA, 21 nt, Human
auucuccugccucagccuccc

SEQ ID NO: 604676 - RNA, 18 nt, Human
auucuccuggcucagccu

SEQ ID NO: 604677 - RNA, 21 nt, Human
caaaacaaacaaaaaggacuc

SEQ ID NO: 604678 - RNA, 26 nt, Human
caaaacaaacaaaaaggacuccaacu

SEQ ID NO: 604679 - RNA, 21 nt, Human
caaaauaucccaggcccagag

SEQ ID NO: 604680 - RNA, 19 nt, Human
caaagagcauauuuuagga

SEQ ID NO: 604681 - RNA, 21 nt, Human
caaagaucuucccugcucccc

SEQ ID NO: 604682 - RNA, 22 nt, Human
caacaacuuggaaucccccagg

SEQ ID NO: 604683 - RNA, 24 nt, Human
caacaagaccacaagcaugaguca

SEQ ID NO: 604684 - RNA, 21 nt, Human
caacacuuugggaggcccagg

SEQ ID NO: 604685 - RNA, 24 nt, Human
caacacuuugggaggcccaggcag

SEQ ID NO: 604686 - RNA, 24 nt, Human
caaccuccaccucccaggcucaag

SEQ ID NO: 604687 - RNA, 22 nt, Human
caacucauguacgugacugaua

SEQ ID NO: 604688 - RNA, 22 nt, Human
caagaggucugucucacuuccu

SEQ ID NO: 604689 - RNA, 22 nt, Human
caagcaauucuccugccucagc

SEQ ID NO: 604690 - RNA, 19 nt, Human
caaggaggugacagcagcc

SEQ ID NO: 604691 - RNA, 26 nt, Human
caaggcacacaaaaagccuagcaaaa

SEQ ID NO: 604692 - RNA, 22 nt, Human
caagugauucuccuggcucagc

SEQ ID NO: 604693 - RNA, 23 nt, Human
caaucugucauuuccaacacccu

SEQ ID NO: 604694 - RNA, 22 nt, Human
cacaagcaugagucagagccaa

SEQ ID NO: 604695 - RNA, 21 nt, Human
cacaaucacagcucacuggag

SEQ ID NO: 604696 - RNA, 21 nt, Human
cacaggugccaacacaccugg

SEQ ID NO: 604697 - RNA, 23 nt, Human
cacauuuuugggcugccucauga

SEQ ID NO: 604698 - RNA, 21 nt, Human
caccaugcuggccaggcuggu

SEQ ID NO: 604699 - RNA, 22 nt, Human
caccaugcuggccaggcugguc

SEQ ID NO: 604700 - RNA, 27 nt, Human
caccaugcuggccaggcuggucuagaa

SEQ ID NO: 604701 - RNA, 18 nt, Human
cacccccaggaccaaauc

SEQ ID NO: 604702 - RNA, 18 nt, Human
cacccugccuuccuugcu

SEQ ID NO: 604703 - RNA, 24 nt, Human
caccucagccucccaaguaguugg

SEQ ID NO: 604704 - RNA, 20 nt, Human
caccucucucuucccucccc

SEQ ID NO: 604705 - RNA, 23 nt, Human
caccugcuauuuccucuuuccca

SEQ ID NO: 604706 - RNA, 21 nt, Human
cacgacagcaacaacuuggaa

SEQ ID NO: 604707 - RNA, 24 nt, Human
cacgccuguaaucccaacacuuug

SEQ ID NO: 604708 - RNA, 21 nt, Human
cacgcugucuuuuauggggcc

SEQ ID NO: 604709 - RNA, 21 nt, Human
cacucugucgcccagacugcu

SEQ ID NO: 604710 - RNA, 27 nt, Human
cacucugucgcccagacugcuggagug

SEQ ID NO: 604711 - RNA, 24 nt, Human
cacuggcaaccuccaccucccagg

SEQ ID NO: 604712 - RNA, 21 nt, Human
cagaauccuccaagaacucug

SEQ ID NO: 604713 - RNA, 18 nt, Human
caggaagcugagaguggc

SEQ ID NO: 604714 - RNA, 20 nt, Human
caggaccaaauccauuuccc

SEQ ID NO: 604715 - RNA, 19 nt, Human
cagggccaggccacccagc

SEQ ID NO: 604716 - RNA, 24 nt, Human
cagggucucgcuauguugccuagg

SEQ ID NO: 604717 - RNA, 19 nt, Human
cagguucaagugauucucc

SEQ ID NO: 604718 - RNA, 21 nt, Human
cagguucaagugauucuccug

SEQ ID NO: 604719 - RNA, 18 nt, Human
cagugccgggagcuacca

SEQ ID NO: 604720 - RNA, 26 nt, Human
caucuccuuucaaccucaagacagcc

SEQ ID NO: 604721 - RNA, 24 nt, Human
caugcuggccaggcuggucuagaa

SEQ ID NO: 604722 - RNA, 22 nt, Human
ccaaagugcugggauuacaggc

SEQ ID NO: 604723 - RNA, 22 nt, Human
ccaaagugcugggauuacaggc

SEQ ID NO: 604724 - RNA, 24 nt, Human
ccaaagugcugggauuacaggcgu

SEQ ID NO: 604725 - RNA, 24 nt, Human
ccaaagugcugggauuauaggcau

SEQ ID NO: 604726 - RNA, 18 nt, Human
ccacacugcagccucaaa

SEQ ID NO: 604727 - RNA, 19 nt, Human
ccacacugcagccucaaac

SEQ ID NO: 604728 - RNA, 21 nt, Human
ccacauuucugaaccuuucca

SEQ ID NO: 604729 - RNA, 18 nt, Human
ccacccccaggaccaaau

SEQ ID NO: 604730 - RNA, 19 nt, Human
ccaccuugccccucccgag

SEQ ID NO: 604731 - RNA, 22 nt, Human
ccacgacagcaacaacuuggaa

SEQ ID NO: 604732 - RNA, 21 nt, Human
ccacgcccagccagcaauaca

SEQ ID NO: 604733 - RNA, 20 nt, Human
ccacgcccagccagcaauag

SEQ ID NO: 604734 - RNA, 18 nt, Human
ccacugguggccuuacag

SEQ ID NO: 604735 - RNA, 18 nt, Human
ccauacucacacaaaaaa

SEQ ID NO: 604736 - RNA, 23 nt, Human
cccaaguaguugggacuacaagu

SEQ ID NO: 604737 - RNA, 24 nt, Human
cccaaguaguugggacuacaagug

SEQ ID NO: 604738 - RNA, 24 nt, Human
cccaaguaucugggacuacaggca

SEQ ID NO: 604739 - RNA, 23 nt, Human
cccacagugccgggagcuaccac

SEQ ID NO: 604740 - RNA, 20 nt, Human
cccaccucagccucccaagu

SEQ ID NO: 604741 - RNA, 21 nt, Human
cccagagaguuuuauagcuga

SEQ ID NO: 604742 - RNA, 21 nt, Human
cccaggcucaagcaauucucc

SEQ ID NO: 604743 - RNA, 21 nt, Human
ccccccgccaccccacaccuc

SEQ ID NO: 604744 - RNA, 19 nt, Human
cccccgccaccccacaccu

SEQ ID NO: 604745 - RNA, 21 nt, Human
ccccuggauuagcuacugcuc

SEQ ID NO: 604746 - RNA, 22 nt, Human
ccccuuacuaaaccugcucuau

SEQ ID NO: 604747 - RNA, 23 nt, Human
ccccuuacuaaaccugcucuauc

SEQ ID NO: 604748 - RNA, 23 nt, Human
cccgaguagcugggauuacaggc

SEQ ID NO: 604749 - RNA, 24 nt, Human
cccgaguagcugggauuacaggcg

SEQ ID NO: 604750 - RNA, 18 nt, Human
cccuaucagccuucaaac

SEQ ID NO: 604751 - RNA, 21 nt, Human
cccuuacuaaaccugcucuau

SEQ ID NO: 604752 - RNA, 22 nt, Human
ccgaguagcugggauuacaggc

SEQ ID NO: 604753 - RNA, 22 nt, Human
ccgccccccgccaccccacacc

SEQ ID NO: 604754 - RNA, 21 nt, Human
ccuauccaagcucccgccccc

SEQ ID NO: 604755 - RNA, 23 nt, Human
ccuccagaaaugcccuucuccac

SEQ ID NO: 604756 - RNA, 24 nt, Human
ccucccaggcucaagcaauucucc

SEQ ID NO: 604757 - RNA, 24 nt, Human
ccucucagguucaagugauucucc

SEQ ID NO: 604758 - RNA, 20 nt, Human
ccucuggucucagcccucug

SEQ ID NO: 604759 - RNA, 24 nt, Human
ccugaccucaaaugaucuacccac

SEQ ID NO: 604760 - RNA, 23 nt, Human
ccugaccucaagugauccacuug

SEQ ID NO: 604761 - RNA, 24 nt, Human
ccugaccucaagugauccacuugg

SEQ ID NO: 604762 - RNA, 24 nt, Human
ccugcagccaguucauuagguggc

SEQ ID NO: 604763 - RNA, 24 nt, Human
ccugccucagccucccgaguagcu

SEQ ID NO: 604764 - RNA, 24 nt, Human
cgccuguaaucccaacacuuuggg

SEQ ID NO: 604765 - RNA, 21 nt, Human
cgcuacccucccugcacccaa

SEQ ID NO: 604766 - RNA, 19 nt, Human
cgcuauguuggccaggcuc

SEQ ID NO: 604767 - RNA, 24 nt, Human
cgcucugucacccaggcuggagug

SEQ ID NO: 604768 - RNA, 24 nt, Human
cgggguuucgcuauguuggccagg

SEQ ID NO: 604769 - RNA, 22 nt, Human
cuaacccuugauguagaccauc

SEQ ID NO: 604770 - RNA, 24 nt, Human
cucaaaugaucuacccaccuuggc

SEQ ID NO: 604771 - RNA, 24 nt, Human
cucaagcaauucuccugccucagc

SEQ ID NO: 604772 - RNA, 22 nt, Human
cucacgccuguaaucccaacac

SEQ ID NO: 604773 - RNA, 24 nt, Human
cucacgccuguaaucccaacacuu

SEQ ID NO: 604774 - RNA, 23 nt, Human
cucacugaaaccuccaccucuca

SEQ ID NO: 604775 - RNA, 24 nt, Human
cucacuggcaaccuccaccuccca

SEQ ID NO: 604776 - RNA, 23 nt, Human
cucagaauccuccaagaacuccu

SEQ ID NO: 604777 - RNA, 24 nt, Human
cucagccucccaaguaguugggac

SEQ ID NO: 604778 - RNA, 24 nt, Human
cucagccucccgaguagcugggau

SEQ ID NO: 604779 - RNA, 24 nt, Human
cucaggcaauccucccaccucagc

SEQ ID NO: 604780 - RNA, 19 nt, Human
cucccauacucacacaaaa

SEQ ID NO: 604781 - RNA, 20 nt, Human
cucccgccccccgccacccc

SEQ ID NO: 604782 - RNA, 24 nt, Human
cuccuuucaaccucaagacagccc

SEQ ID NO: 604783 - RNA, 24 nt, Human
cucgcucugucacccaggcuggag

SEQ ID NO: 604784 - RNA, 19 nt, Human
cucucagguucaagugauu

SEQ ID NO: 604785 - RNA, 22 nt, Human
cucuggucucagcccucugucc

SEQ ID NO: 604786 - RNA, 24 nt, Human
cugaaaccuccaccucucagguuc

SEQ ID NO: 604787 - RNA, 20 nt, Human
cugaaccuuuccagagagcu

SEQ ID NO: 604788 - RNA, 21 nt, Human
cugcguacccgcacugaccug

SEQ ID NO: 604789 - RNA, 21 nt, Human
cuugccaggacacuucaaccu

SEQ ID NO: 604790 - RNA, 20 nt, Human
cuuggcucggccucccaaag

SEQ ID NO: 604791 - RNA, 21 nt, Human
cuuugcaccugcuauuuccuc

SEQ ID NO: 604792 - RNA, 26 nt, Human
gaaaagacaaagcaagauuaaacaaa

SEQ ID NO: 604793 - RNA, 24 nt, Human
gaaagcagguaagaccuggauucu

SEQ ID NO: 604794 - RNA, 20 nt, Human
gaacagaaauaaguuaaaau

SEQ ID NO: 604795 - RNA, 21 nt, Human
gaacagaauuuuuccucccau

SEQ ID NO: 604796 - RNA, 23 nt, Human
gaccucaaaugaucuacccaccu

SEQ ID NO: 604797 - RNA, 24 nt, Human
gaccucaagugauccacuuggcuc

SEQ ID NO: 604798 - RNA, 24 nt, Human
gagacgggguuucgcuauguuggc

SEQ ID NO: 604799 - RNA, 21 nt, Human
gagcaaggaggugacagcagc

SEQ ID NO: 604800 - RNA, 23 nt, Human
gaggggugugggguuggcaggag

SEQ ID NO: 604801 - RNA, 22 nt, Human
gauauuuuggaagaggcaauga

SEQ ID NO: 604802 - RNA, 18 nt, Human
gauuacaggcgcaugcca

SEQ ID NO: 604803 - RNA, 18 nt, Human
gauuacaggcgugagcca

SEQ ID NO: 604804 - RNA, 21 nt, Human
gauuacaggcgugagccacca

SEQ ID NO: 604805 - RNA, 22 nt, Human
gauuacaggcgugagccaccac

SEQ ID NO: 604806 - RNA, 21 nt, Human
gauuauaggcaugagccaccg

SEQ ID NO: 604807 - RNA, 24 nt, Human
gauuauaggcaugagccaccguac

SEQ ID NO: 604808 - RNA, 21 nt, Human
gauucuccuggcucagccucc

SEQ ID NO: 604809 - RNA, 23 nt, Human
gcaauccucccaccucagccucc

SEQ ID NO: 604810 - RNA, 21 nt, Human
gcacagccacauuguggucuu

SEQ ID NO: 604811 - RNA, 18 nt, Human
gcaccaccaucccugggc

SEQ ID NO: 604812 - RNA, 20 nt, Human
gccccccgccaccccacacc

SEQ ID NO: 604813 - RNA, 21 nt, Human
gcuauguugccuaggcugggc

SEQ ID NO: 604814 - RNA, 20 nt, Human
gcucugggucacucaaggcu

SEQ ID NO: 604815 - RNA, 19 nt, Human
gcuggagugcaauggcaca

SEQ ID NO: 604816 - RNA, 19 nt, Human
gcuggagugcaguggcaca

SEQ ID NO: 604817 - RNA, 19 nt, Human
gcuggagugcaguggcgcg

SEQ ID NO: 604818 - RNA, 20 nt, Human
gcuucauccccaacuaucac

SEQ ID NO: 604819 - RNA, 21 nt, Human
ggacacaggugaagaaggcgu

SEQ ID NO: 604820 - RNA, 19 nt, Human
ggauuacaggcgugagcca

SEQ ID NO: 604821 - RNA, 20 nt, Human
ggcucacgccuguaauccca

SEQ ID NO: 604822 - RNA, 24 nt, Human
ggcuggucuagaacuccugaccuc

SEQ ID NO: 604823 - RNA, 23 nt, Human
gggaagaagaacugauuaagucc

SEQ ID NO: 604824 - RNA, 19 nt, Human
gggagauggaucccagugg

SEQ ID NO: 604825 - RNA, 28 nt, Human
gggcugcagucaucugaagguuuggcug

SEQ ID NO: 604826 - RNA, 23 nt, Human
gggguuucgcuauguuggccagg

SEQ ID NO: 604827 - RNA, 23 nt, Human
gggugggggugcugagugagggu

SEQ ID NO: 604828 - RNA, 20 nt, Human
gggugugggguuggcaggag

SEQ ID NO: 604829 - RNA, 26 nt, Human
ggucuuugcaccugcuauuuccucuu

SEQ ID NO: 604830 - RNA, 18 nt, Human
guagagacagggucucgc

SEQ ID NO: 604831 - RNA, 23 nt, Human
guagagacgggguuucgcuaugu

SEQ ID NO: 604832 - RNA, 18 nt, Human
guagcugggauuacaggc

SEQ ID NO: 604833 - RNA, 20 nt, Human
guccauaaaucuaauuucuc

SEQ ID NO: 604834 - RNA, 24 nt, Human
gugauccacuuggcucggccuccc

SEQ ID NO: 604835 - RNA, 24 nt, Human
gugauucuccuggcucagccuccc

SEQ ID NO: 604836 - RNA, 19 nt, Human
guguagaaacacauuuuug

SEQ ID NO: 604837 - RNA, 22 nt, Human
guguggggcuuuugagaauugg

SEQ ID NO: 604838 - RNA, 18 nt, Human
uaaacaaauacuuaacug

SEQ ID NO: 604839 - RNA, 20 nt, Human
uaauuuguauccccagugcc

SEQ ID NO: 604840 - RNA, 24 nt, Human
uacaggcgugagccaccacgccca

SEQ ID NO: 604841 - RNA, 18 nt, Human
uaccaaagcugccuuguc

SEQ ID NO: 604842 - RNA, 18 nt, Human
uaccagggccaggccacc

SEQ ID NO: 604843 - RNA, 22 nt, Human
uaccagggccaggccacccagc

SEQ ID NO: 604844 - RNA, 22 nt, Human
uacccaccuuggccucccaaag

SEQ ID NO: 604845 - RNA, 22 nt, Human
uagaacaacaccuggcacauga

SEQ ID NO: 604846 - RNA, 22 nt, Human
uagagacagggucucgcuaugu

SEQ ID NO: 604847 - RNA, 22 nt, Human
uagagacagggucucgcucugu

SEQ ID NO: 604848 - RNA, 22 nt, Human
uagagacgggguuucgcuaugu

SEQ ID NO: 604849 - RNA, 18 nt, Human
uagaggaaugaacaaggc

SEQ ID NO: 604850 - RNA, 18 nt, Human
uagcaccaccaaagagca

SEQ ID NO: 604851 - RNA, 20 nt, Human
uaggcaacauagugaaaccc

SEQ ID NO: 604852 - RNA, 24 nt, Human
uagguuuucaccaugcuggccagg

SEQ ID NO: 604853 - RNA, 18 nt, Human
uaguagagacgggguuuc

SEQ ID NO: 604854 - RNA, 24 nt, Human
uaguagagacgggguuucgcuaug

SEQ ID NO: 604855 - RNA, 24 nt, Human
uaguagagauagguuuucaccaug

SEQ ID NO: 604856 - RNA, 19 nt, Human
uaucuacagcuguauaaca

SEQ ID NO: 604857 - RNA, 22 nt, Human
uaugagaccagccuaggcaaca

SEQ ID NO: 604858 - RNA, 22 nt, Human
uaugagaccagccuaggcaaca

SEQ ID NO: 604859 - RNA, 18 nt, Human
uauguugccuaggcuggg

SEQ ID NO: 604860 - RNA, 22 nt, Human
uauguugccuaggcugggcuca

SEQ ID NO: 604861 - RNA, 24 nt, Human
uauguugccuaggcugggcucaaa

SEQ ID NO: 604862 - RNA, 21 nt, Human
uauuccuccucugcacaggcc

SEQ ID NO: 604863 - RNA, 23 nt, Human
ucaaccucaagacagcccuugaa

SEQ ID NO: 604864 - RNA, 23 nt, Human
ucacccagagcauauaggagccu

SEQ ID NO: 604865 - RNA, 18 nt, Human
ucacccaggcuggagugc

SEQ ID NO: 604866 - RNA, 24 nt, Human
ucacugaaaccuccaccucucagg

SEQ ID NO: 604867 - RNA, 22 nt, Human
ucacuggagccucaaacuccug

SEQ ID NO: 604868 - RNA, 24 nt, Human
ucacuggagccucaaacuccuggg

SEQ ID NO: 604869 - RNA, 24 nt, Human
ucacuggcaaccuccaccucccag

SEQ ID NO: 604870 - RNA, 21 nt, Human
ucagaggcagaggacacaggu

SEQ ID NO: 604871 - RNA, 20 nt, Human
ucagccucccgaguagcugg

SEQ ID NO: 604872 - RNA, 24 nt, Human
ucagccuucaaacucaggucaaaa

SEQ ID NO: 604873 - RNA, 21 nt, Human
ucaguaugggaagggacuuca

SEQ ID NO: 604874 - RNA, 19 nt, Human
uccagagagcuugaguguc

SEQ ID NO: 604875 - RNA, 24 nt, Human
ucccaaagugcugggauuacaggc

SEQ ID NO: 604876 - RNA, 24 nt, Human
ucccaaagugcugggauuauaggc

SEQ ID NO: 604877 - RNA, 18 nt, Human
ucccaaguaguugggacu

SEQ ID NO: 604878 - RNA, 24 nt, Human
ucccaaguaucugggacuacaggc

SEQ ID NO: 604879 - RNA, 18 nt, Human
ucccaggcccagagaguu

SEQ ID NO: 604880 - RNA, 21 nt, Human
ucccaggcucaagcaauucuc

SEQ ID NO: 604881 - RNA, 24 nt, Human
ucccaggcucaagcaauucuccug

SEQ ID NO: 604882 - RNA, 25 nt, Human
uccccgcaaaauaucccaggcccag

SEQ ID NO: 604883 - RNA, 24 nt, Human
ucccgaguagcugggauuacaggc

SEQ ID NO: 604884 - RNA, 21 nt, Human
ucccuauggcacaaaggcaga

SEQ ID NO: 604885 - RNA, 24 nt, Human
ucccugcuccccgcaaaauauccc

SEQ ID NO: 604886 - RNA, 21 nt, Human
uccuccaagaacucuguucac

SEQ ID NO: 604887 - RNA, 19 nt, Human
uccucuggccuuggccucc

SEQ ID NO: 604888 - RNA, 18 nt, Human
uccugaccucaaaugauc

SEQ ID NO: 604889 - RNA, 18 nt, Human
uccugggcucaggcaauc

SEQ ID NO: 604890 - RNA, 22 nt, Human
uccugggcucaggcaauccucc

SEQ ID NO: 604891 - RNA, 24 nt, Human
uccugggcucaggcaauccuccca

SEQ ID NO: 604892 - RNA, 23 nt, Human
ucgaauacccaugcuucaucccc

SEQ ID NO: 604893 - RNA, 24 nt, Human
ucgcucugucacccaggcuggagu

SEQ ID NO: 604894 - RNA, 26 nt, Human
ucucacucugucgcccagacugcugg

SEQ ID NO: 604895 - RNA, 27 nt, Human
ucucacucugucgcccagacugcugga

SEQ ID NO: 604896 - RNA, 22 nt, Human
ucucaggggucuuuaaagcuga

SEQ ID NO: 604897 - RNA, 21 nt, Human
ucucagguucaagugauucuc

SEQ ID NO: 604898 - RNA, 24 nt, Human
ucucagguucaagugauucuccug

SEQ ID NO: 604899 - RNA, 20 nt, Human
ucucccuccuuuucacucua

SEQ ID NO: 604900 - RNA, 23 nt, Human
ucucgcuauguugccuaggcugg

SEQ ID NO: 604901 - RNA, 24 nt, Human
ucucgcuauguugccuaggcuggg

SEQ ID NO: 604902 - RNA, 19 nt, Human
ucucgcucugucacccagg

SEQ ID NO: 604903 - RNA, 23 nt, Human
ucucgcucugucacccaggcugg

SEQ ID NO: 604904 - RNA, 24 nt, Human
ucucgcucugucacccaggcugga

SEQ ID NO: 604905 - RNA, 26 nt, Human
ucucgcucugucacccaggcuggagu

SEQ ID NO: 604906 - RNA, 27 nt, Human
ucucgcucugucacccaggcuggagug

SEQ ID NO: 604907 - RNA, 19 nt, Human
ucucuuguucuguuccaac

SEQ ID NO: 604908 - RNA, 23 nt, Human
ucugccacccagcuggagugcag

SEQ ID NO: 604909 - RNA, 24 nt, Human
ucugucacccaggcuggagugcaa

SEQ ID NO: 604910 - RNA, 27 nt, Human
ucugucgcccagacugcuggagugcag

SEQ ID NO: 604911 - RNA, 23 nt, Human
ucuuguccagccuccuuggggca

SEQ ID NO: 604912 - RNA, 21 nt, Human
ugaaaagacaaagcaagauua

SEQ ID NO: 604913 - RNA, 20 nt, Human
ugaaauuaggcaacaggggc

SEQ ID NO: 604914 - RNA, 21 nt, Human
ugaccagggcugcagucaucu

SEQ ID NO: 604915 - RNA, 27 nt, Human
ugaccauccuauccaagcucccgcccc

SEQ ID NO: 604916 - RNA, 20 nt, Human
ugaccucaagugauccacuu

SEQ ID NO: 604917 - RNA, 19 nt, Human
ugacucaguggagccgcag

SEQ ID NO: 604918 - RNA, 19 nt, Human
ugacugugucuuucucccu

SEQ ID NO: 604919 - RNA, 24 nt, Human
ugagaccagccuaggcaacauagu

SEQ ID NO: 604920 - RNA, 18 nt, Human
ugagugagggucauggaa

SEQ ID NO: 604921 - RNA, 21 nt, Human
ugagugagggucauggaauug

SEQ ID NO: 604922 - RNA, 21 nt, Human
ugcacaggccugggguggggg

SEQ ID NO: 604923 - RNA, 22 nt, Human
ugcaguggcacaaucucggcuc

SEQ ID NO: 604924 - RNA, 24 nt, Human
ugccucagccucccgaguagcugg

SEQ ID NO: 604925 - RNA, 20 nt, Human
ugccuccagaaaugcccuuc

SEQ ID NO: 604926 - RNA, 19 nt, Human
ugccuugucucgcaggaaa

SEQ ID NO: 604927 - RNA, 25 nt, Human
ugcgcagccccgaacccacccucaa

SEQ ID NO: 604928 - RNA, 18 nt, Human
ugcugccuccagaaaugc

SEQ ID NO: 604929 - RNA, 24 nt, Human
ugcugggauuacaggcgugagcca

SEQ ID NO: 604930 - RNA, 19 nt, Human
uggaaucccccagggaacc

SEQ ID NO: 604931 - RNA, 20 nt, Human
uggaggggugugggguuggc

SEQ ID NO: 604932 - RNA, 19 nt, Human
uggaguauuauucuuggag

SEQ ID NO: 604933 - RNA, 19 nt, Human
uggagugcaauggcacaau

SEQ ID NO: 604934 - RNA, 21 nt, Human
uggagugcaauggcacaauca

SEQ ID NO: 604935 - RNA, 23 nt, Human
uggagugcaguggcacaaucucg

SEQ ID NO: 604936 - RNA, 24 nt, Human
uggagugcaguggcacaaucucgg

SEQ ID NO: 604937 - RNA, 23 nt, Human
uggagugcaguggcgcgaucucg

SEQ ID NO: 604938 - RNA, 18 nt, Human
uggcaaccuccaccuccc

SEQ ID NO: 604939 - RNA, 24 nt, Human
uggcaaccuccaccucccaggcuc

SEQ ID NO: 604940 - RNA, 20 nt, Human
uggcacaaucacagcucacu

SEQ ID NO: 604941 - RNA, 20 nt, Human
uggcacaaucacagcucacu

SEQ ID NO: 604942 - RNA, 22 nt, Human
uggcacaaucucggcucacuga

SEQ ID NO: 604943 - RNA, 20 nt, Human
uggccaggcuccugaccucu

SEQ ID NO: 604944 - RNA, 24 nt, Human
uggccaggcuggucuagaacuccu

SEQ ID NO: 604945 - RNA, 24 nt, Human
uggcucagccucccaaguaucugg

SEQ ID NO: 604946 - RNA, 22 nt, Human
uggcugaguguuucagggucuu

SEQ ID NO: 604947 - RNA, 23 nt, Human
ugggaagggacuucacaggggua

SEQ ID NO: 604948 - RNA, 24 nt, Human
ugggaagggacuucacagggguau

SEQ ID NO: 604949 - RNA, 24 nt, Human
ugggacuacaagugugcaccacca

SEQ ID NO: 604950 - RNA, 23 nt, Human
ugggacuacaggcacaggugcca

SEQ ID NO: 604951 - RNA, 21 nt, Human
ugggagauggaucccaguggu

SEQ ID NO: 604952 - RNA, 21 nt, Human
ugggauuacaggcgcaugcca

SEQ ID NO: 604953 - RNA, 22 nt, Human
ugggauuacaggcgcaugccac

SEQ ID NO: 604954 - RNA, 22 nt, Human
ugggauuacaggcgcaugccac

SEQ ID NO: 604955 - RNA, 24 nt, Human
ugggauuacaggcgcaugccacua

SEQ ID NO: 604956 - RNA, 18 nt, Human
ugggauuacaggcgugag

SEQ ID NO: 604957 - RNA, 19 nt, Human
ugggauuacaggcgugagc

SEQ ID NO: 604958 - RNA, 22 nt, Human
ugggauuacaggcgugagccac

SEQ ID NO: 604959 - RNA, 23 nt, Human
ugggauuacaggcgugagccacc

SEQ ID NO: 604960 - RNA, 24 nt, Human
ugggauuacaggcgugagccacca

SEQ ID NO: 604961 - RNA, 22 nt, Human
ugggauuauaggcaugagccac

SEQ ID NO: 604962 - RNA, 23 nt, Human
ugggauuauaggcaugagccacc

SEQ ID NO: 604963 - RNA, 23 nt, Human
ugggauuauaggcaugagccacc

SEQ ID NO: 604964 - RNA, 24 nt, Human
ugggauuauaggcaugagccaccg

SEQ ID NO: 604965 - RNA, 18 nt, Human
uggggugggggugcugag

SEQ ID NO: 604966 - RNA, 19 nt, Human
uggugaaagaagaaaaagc

SEQ ID NO: 604967 - RNA, 24 nt, Human
uguagagacagggucucgcuaugu

SEQ ID NO: 604968 - RNA, 20 nt, Human
ugucacccaggcuggagugc

SEQ ID NO: 604969 - RNA, 25 nt, Human
ugucauucucaccaccacugacagg

SEQ ID NO: 604970 - RNA, 18 nt, Human
uguggaucaggaagcugg

SEQ ID NO: 604971 - RNA, 18 nt, Human
uuaguagagacgggguuu

SEQ ID NO: 604972 - RNA, 19 nt, Human
uuaguagagacgggguuuc

SEQ ID NO: 604973 - RNA, 19 nt, Human
uuaguagagacgggguuuc

SEQ ID NO: 604974 - RNA, 24 nt, Human
uuaguagagacgggguuucgcuau

SEQ ID NO: 604975 - RNA, 24 nt, Human
uuaguagagauagguuuucaccau

SEQ ID NO: 604976 - RNA, 20 nt, Human
uucaaaacaaacaaaaagga

SEQ ID NO: 604977 - RNA, 23 nt, Human
uucaaaacaaacaaaaaggacuc

SEQ ID NO: 604978 - RNA, 19 nt, Human
uucaagugauucuccuggc

SEQ ID NO: 604979 - RNA, 23 nt, Human
uucaagugauucuccuggcucag

SEQ ID NO: 604980 - RNA, 22 nt, Human
uucagccacucacacgguuacc

SEQ ID NO: 604981 - RNA, 21 nt, Human
uucaugcugcuucuguggauc

SEQ ID NO: 604982 - RNA, 21 nt, Human
uucuccaccuugccucugguc

SEQ ID NO: 604983 - RNA, 18 nt, Human
uuggccucccaaagugcu

SEQ ID NO: 604984 - RNA, 24 nt, Human
uuggcucggccucccaaagugcug

SEQ ID NO: 604985 - RNA, 21 nt, Human
uugguggugagccauguagug

SEQ ID NO: 604986 - RNA, 19 nt, Human
uuuauagucacucagaggc

SEQ ID NO: 604987 - RNA, 24 nt, Human
uuuauagucacucagaggcagagg

SEQ ID NO: 604988 - RNA, 19 nt, Human
uuucaaaacaaacaaaaag

SEQ ID NO: 604989 - RNA, 21 nt, Human
uuucaccaugcuggccaggcu

SEQ ID NO: 604990 - RNA, 24 nt, Human
uuucgcuauguuggccaggcuccu

SEQ ID NO: 604991 - RNA, 18 nt, Human
uuuguagagacagggucu

SEQ ID NO: 604992 - RNA, 23 nt, Human
uuuucaccaugcuggccaggcug

SEQ ID NO: 604993 - RNA, 22 nt, Human
uuuuuaguagagacgggguuuc

SEQ ID NO: 604994 - RNA, 24 nt, Human
uuuuuaguagagauagguuuucac

SEQ ID NO: 604995 - RNA, 21 nt, Human
uuuuuguauuuuuaguagaga

SEQ ID NO: 604996 - RNA, 24 nt, Human
uuuuuuaguagagacgggguuucg

SEQ ID NO: 604997 - RNA, 23 nt, Human
uuuuuuguagagacagggucucg

SEQ ID NO: 604998 - RNA, 24 nt, Human
uuuuuuguauuuuuaguagagaua

SEQ ID NO: 604999 - RNA, 22 nt, Human
uuuuuuguauuuuuaguagagg

SEQ ID NO: 605000 - RNA, 24 nt, Human
uuuuuuuuguauuuuuaguagaga

SEQ ID NO: 605001 - RNA, 22 nt, Human
aaaaaaaaaaaaaaaaaaagaa

SEQ ID NO: 605002 - RNA, 24 nt, Human
aaaaaaaaaaaaaaaagaaaagaa

SEQ ID NO: 605003 - RNA, 22 nt, Human
aaaaagcuagugcuucagccca

SEQ ID NO: 605004 - RNA, 19 nt, Human
aaaccaauuccaagaugac

SEQ ID NO: 605005 - RNA, 20 nt, Human
aaacccccugcagaggcucu

SEQ ID NO: 605006 - RNA, 25 nt, Human
aaaggugggcaauaaauaggaaucc

SEQ ID NO: 605007 - RNA, 20 nt, Human
aacaugcccacauaccacag

SEQ ID NO: 605008 - RNA, 23 nt, Human
aacaugcccacauaccacaggua

SEQ ID NO: 605009 - RNA, 22 nt, Human
aagaagggaugggaauuuuuua

SEQ ID NO: 605010 - RNA, 21 nt, Human
aagaggcuggagagagagggg

SEQ ID NO: 605011 - RNA, 20 nt, Human
acaaacaguuucauaaagag

SEQ ID NO: 605012 - RNA, 20 nt, Human
acgagcccccagguaugccc

SEQ ID NO: 605013 - RNA, 25 nt, Human
acgcaaaccccuaaaccuguccccu

SEQ ID NO: 605014 - RNA, 23 nt, Human
acgcagcauccaggagucgaaac

SEQ ID NO: 605015 - RNA, 21 nt, Human
acuggagcacagcuggaucca

SEQ ID NO: 605016 - RNA, 23 nt, Human
acuggccucauaucccuuguggc

SEQ ID NO: 605017 - RNA, 21 nt, Human
agaaaagaaaaaaaugcucau

SEQ ID NO: 605018 - RNA, 18 nt, Human
agaaagcucaggccaugc

SEQ ID NO: 605019 - RNA, 24 nt, Human
agacagcgcaaagggaaagucagg

SEQ ID NO: 605020 - RNA, 21 nt, Human
agagaacaguggcccaugaug

SEQ ID NO: 605021 - RNA, 22 nt, Human
agagagggguagguugccugug

SEQ ID NO: 605022 - RNA, 19 nt, Human
agagcugagcuguucacag

SEQ ID NO: 605023 - RNA, 19 nt, Human
agaggcucuccagaaagcu

SEQ ID NO: 605024 - RNA, 24 nt, Human
agaggcuggagagagagggguagg

SEQ ID NO: 605025 - RNA, 22 nt, Human
agagggggcuuccucuggggac

SEQ ID NO: 605026 - RNA, 24 nt, Human
agaugggucuccagguucuggggc

SEQ ID NO: 605027 - RNA, 19 nt, Human
agcaagacagccuucccca

SEQ ID NO: 605028 - RNA, 24 nt, Human
agccagguaucuuggcacauucuu

SEQ ID NO: 605029 - RNA, 22 nt, Human
agcuaacauacacagcggacac

SEQ ID NO: 605030 - RNA, 20 nt, Human
agcuaccaaaaagcuagugc

SEQ ID NO: 605031 - RNA, 25 nt, Human
agcuucucucucccaguuucccucc

SEQ ID NO: 605032 - RNA, 19 nt, Human
aggaagccccagucugccg

SEQ ID NO: 605033 - RNA, 18 nt, Human
aggaagcccuuagagagc

SEQ ID NO: 605034 - RNA, 20 nt, Human
agucagaguggaggaggagg

SEQ ID NO: 605035 - RNA, 20 nt, Human
aucccaaaggcccucuaccu

SEQ ID NO: 605036 - RNA, 22 nt, Human
caaaccccuaaaccuguccccu

SEQ ID NO: 605037 - RNA, 24 nt, Human
caaaccccuaaaccuguccccuca

SEQ ID NO: 605038 - RNA, 18 nt, Human
caaagagaacaguggccc

SEQ ID NO: 605039 - RNA, 18 nt, Human
caaagcggaugccaaacc

SEQ ID NO: 605040 - RNA, 21 nt, Human
caaccucaaggagaaacagcu

SEQ ID NO: 605041 - RNA, 23 nt, Human
caaccucaaggagaaacagcuga

SEQ ID NO: 605042 - RNA, 21 nt, Human
caagcacaccgacuguggggc

SEQ ID NO: 605043 - RNA, 18 nt, Human
cacaaacccucuauuucu

SEQ ID NO: 605044 - RNA, 23 nt, Human
cacccucugguggcacuggccuc

SEQ ID NO: 605045 - RNA, 19 nt, Human
caccuuaacaucccaaagg

SEQ ID NO: 605046 - RNA, 22 nt, Human
cacuugcugggaacccuggagg

SEQ ID NO: 605047 - RNA, 23 nt, Human
cagacccagccacagggcccuga

SEQ ID NO: 605048 - RNA, 24 nt, Human
cagaggcaaaaacccccauuaaaa

SEQ ID NO: 605049 - RNA, 21 nt, Human
cagcaaggugccccgucacug

SEQ ID NO: 605050 - RNA, 22 nt, Human
cagcgcaaagggaaagucaggc

SEQ ID NO: 605051 - RNA, 19 nt, Human
cagcuggauccacgaugca

SEQ ID NO: 605052 - RNA, 21 nt, Human
cagggacagaugaggugggag

SEQ ID NO: 605053 - RNA, 21 nt, Human
cagguaucuuggcacauucuu

SEQ ID NO: 605054 - RNA, 23 nt, Human
cagguucuggggcuggggcuucu

SEQ ID NO: 605055 - RNA, 19 nt, Human
cauccugcucugcaucuca

SEQ ID NO: 605056 - RNA, 21 nt, Human
caucuggagcuagcagugacc

SEQ ID NO: 605057 - RNA, 18 nt, Human
cauuucacauguccauga

SEQ ID NO: 605058 - RNA, 19 nt, Human
ccaaagcggaugccaaacc

SEQ ID NO: 605059 - RNA, 19 nt, Human
cccacgagacagcgcaaag

SEQ ID NO: 605060 - RNA, 18 nt, Human
cccaggaggaagccccag

SEQ ID NO: 605061 - RNA, 21 nt, Human
ccccuaaaccuguccccucaa

SEQ ID NO: 605062 - RNA, 22 nt, Human
ccccuaaaccuguccccucaaa

SEQ ID NO: 605063 - RNA, 26 nt, Human
cccgcagccaaagcuggagaaggagc

SEQ ID NO: 605064 - RNA, 24 nt, Human
cccucaaagagaacaguggcccau

SEQ ID NO: 605065 - RNA, 22 nt, Human
ccgaacuucuaaacaaacacuc

SEQ ID NO: 605066 - RNA, 26 nt, Human
ccgcaaccucaaggagaagggaacgc

SEQ ID NO: 605067 - RNA, 21 nt, Human
ccuaacccuaggagcauggga

SEQ ID NO: 605068 - RNA, 22 nt, Human
ccuauaacuacugcacccagac

SEQ ID NO: 605069 - RNA, 19 nt, Human
ccuaucucuuuggaguguu

SEQ ID NO: 605070 - RNA, 19 nt, Human
ccuaugccccaguccgagu

SEQ ID NO: 605071 - RNA, 23 nt, Human
ccugcagaggcucuccagaaagc

SEQ ID NO: 605072 - RNA, 18 nt, Human
ccuguccccucaaagaga

SEQ ID NO: 605073 - RNA, 19 nt, Human
cgaacgcaaaccccuaaac

SEQ ID NO: 605074 - RNA, 24 nt, Human
cgggagauauagauauggaggggu

SEQ ID NO: 605075 - RNA, 23 nt, Human
cguguuuguaaacugggaggcac

SEQ ID NO: 605076 - RNA, 21 nt, Human
cucggagaucuucuuggccac

SEQ ID NO: 605077 - RNA, 19 nt, Human
cucugcagcagacccagcc

SEQ ID NO: 605078 - RNA, 22 nt, Human
cuggcgggccuggaccugggcu

SEQ ID NO: 605079 - RNA, 19 nt, Human
cuuuaagaaagggccguuc

SEQ ID NO: 605080 - RNA, 27 nt, Human
gaacgcaaaccccuaaaccuguccccu

SEQ ID NO: 605081 - RNA, 24 nt, Human
gaaggagagucaugcccauggaga

SEQ ID NO: 605082 - RNA, 18 nt, Human
gaauccaacaggccuaag

SEQ ID NO: 605083 - RNA, 22 nt, Human
gaccugggcuccaggaaaaggu

SEQ ID NO: 605084 - RNA, 20 nt, Human
gacuggagcacagcuggauc

SEQ ID NO: 605085 - RNA, 21 nt, Human
gagaaggagcuggggucucag

SEQ ID NO: 605086 - RNA, 23 nt, Human
gagacagcgcaaagggaaaguca

SEQ ID NO: 605087 - RNA, 18 nt, Human
gaggggaauggaucggaa

SEQ ID NO: 605088 - RNA, 24 nt, Human
gcaaaacacaucauugugagauaa

SEQ ID NO: 605089 - RNA, 28 nt, Human
gcaaaccccuaaaccuguccccucaaag

SEQ ID NO: 605090 - RNA, 23 nt, Human
gcccacauaccacagguaaaaua

SEQ ID NO: 605091 - RNA, 22 nt, Human
gcccauggagaaggagaggggg

SEQ ID NO: 605092 - RNA, 23 nt, Human
gcugcucggagaucuucuuggcc

SEQ ID NO: 605093 - RNA, 22 nt, Human
gcuucugucucucucagggagg

SEQ ID NO: 605094 - RNA, 22 nt, Human
ggaccugggcuccaggaaaagg

SEQ ID NO: 605095 - RNA, 24 nt, Human
ggacuuaggaaacaugcacagcag

SEQ ID NO: 605096 - RNA, 22 nt, Human
ggaggggugagaaagaagggau

SEQ ID NO: 605097 - RNA, 22 nt, Human
ggcaccacccucugguggcacu

SEQ ID NO: 605098 - RNA, 18 nt, Human
ggccaguggcaguaaaca

SEQ ID NO: 605099 - RNA, 22 nt, Human
ggccaguggcaguaaacaugcc

SEQ ID NO: 605100 - RNA, 22 nt, Human
ggcuggagagagagggguaggu

SEQ ID NO: 605101 - RNA, 19 nt, Human
gggaauggaucggaaggga

SEQ ID NO: 605102 - RNA, 21 nt, Human
gggacaaaaaagaagaggcgg

SEQ ID NO: 605103 - RNA, 19 nt, Human
gggacagaugaggugggag

SEQ ID NO: 605104 - RNA, 24 nt, Human
gggcagggacaugccuuacucuuu

SEQ ID NO: 605105 - RNA, 24 nt, Human
ggggaauggaucggaagggaugug

SEQ ID NO: 605106 - RNA, 18 nt, Human
gucuuuuuccuacucugg

SEQ ID NO: 605107 - RNA, 19 nt, Human
guggggccugucccuugcc

SEQ ID NO: 605108 - RNA, 22 nt, Human
guguuuguaaacugggaggcac

SEQ ID NO: 605109 - RNA, 24 nt, Human
uaaagaggcuggagagagaggggu

SEQ ID NO: 605110 - RNA, 18 nt, Human
uaaggcaccuuccugagg

SEQ ID NO: 605111 - RNA, 19 nt, Human
uaagggacaaaaaagaaga

SEQ ID NO: 605112 - RNA, 23 nt, Human
uacccccuuuccaucugguggcc

SEQ ID NO: 605113 - RNA, 19 nt, Human
uacugcacccagacguagc

SEQ ID NO: 605114 - RNA, 22 nt, Human
uagcaagacagccuuccccaga

SEQ ID NO: 605115 - RNA, 26 nt, Human
uagcaagacagccuuccccagagcaa

SEQ ID NO: 605116 - RNA, 19 nt, Human
uaugaggaaaaagucuugu

SEQ ID NO: 605117 - RNA, 22 nt, Human
ucaaagagaacaguggcccaug

SEQ ID NO: 605118 - RNA, 23 nt, Human
ucaauucaauuccuccgcaaccu

SEQ ID NO: 605119 - RNA, 23 nt, Human
ucacugcugcucggagaucuucu

SEQ ID NO: 605120 - RNA, 19 nt, Human
ucagcccacaagggcgaac

SEQ ID NO: 605121 - RNA, 21 nt, Human
uccaagaugacaucugacugc

SEQ ID NO: 605122 - RNA, 18 nt, Human
uccagguucuggggcugg

SEQ ID NO: 605123 - RNA, 21 nt, Human
uccagguucuggggcuggggc

SEQ ID NO: 605124 - RNA, 19 nt, Human
ucccacgagacagcgcaaa

SEQ ID NO: 605125 - RNA, 26 nt, Human
ucccagggcauguagcaggagacccc

SEQ ID NO: 605126 - RNA, 22 nt, Human
uccccaagcugcugguccgggg

SEQ ID NO: 605127 - RNA, 19 nt, Human
uccugcucugcaucucagg

SEQ ID NO: 605128 - RNA, 19 nt, Human
ucuccagaaagcucaggcc

SEQ ID NO: 605129 - RNA, 18 nt, Human
ucuccaggucugugucuc

SEQ ID NO: 605130 - RNA, 22 nt, Human
ucuccugauagccaaggagcuc

SEQ ID NO: 605131 - RNA, 19 nt, Human
ucugccuuagggcaggacu

SEQ ID NO: 605132 - RNA, 21 nt, Human
ucuugaacaggcacagaggca

SEQ ID NO: 605133 - RNA, 21 nt, Human
ucuuuuagaaaccaauuccaa

SEQ ID NO: 605134 - RNA, 30 nt, Human
ugaacaggcacagaggcaaaaacccccauu

SEQ ID NO: 605135 - RNA, 21 nt, Human
ugaagggggaacgcuggacgg

SEQ ID NO: 605136 - RNA, 21 nt, Human
ugaccagaaagugggcaucca

SEQ ID NO: 605137 - RNA, 19 nt, Human
ugagaugggggagaugggu

SEQ ID NO: 605138 - RNA, 22 nt, Human
ugagcuagaagcagacccucca

SEQ ID NO: 605139 - RNA, 24 nt, Human
ugaggcaaacaauacccccuuucc

SEQ ID NO: 605140 - RNA, 24 nt, Human
ugaggcugguuucacaggagccag

SEQ ID NO: 605141 - RNA, 23 nt, Human
ugaggugggagcgcaggaagccc

SEQ ID NO: 605142 - RNA, 18 nt, Human
ugaguguuucucuugaag

SEQ ID NO: 605143 - RNA, 22 nt, Human
ugcccacauaccacagguaaaa

SEQ ID NO: 605144 - RNA, 21 nt, Human
ugcccagaggacacacagcaa

SEQ ID NO: 605145 - RNA, 19 nt, Human
ugccccacuccccagcacg

SEQ ID NO: 605146 - RNA, 18 nt, Human
uggaggaggaggggacag

SEQ ID NO: 605147 - RNA, 18 nt, Human
uggaggggugagaaagaa

SEQ ID NO: 605148 - RNA, 23 nt, Human
uggaggguccccaagcugcuggu

SEQ ID NO: 605149 - RNA, 21 nt, Human
uggcccaggaggaagccccag

SEQ ID NO: 605150 - RNA, 18 nt, Human
ugguccggggcguggcag

SEQ ID NO: 605151 - RNA, 22 nt, Human
ugguggccucgaaggagaguca

SEQ ID NO: 605152 - RNA, 23 nt, Human
uguaacagcaguugugagauggg

SEQ ID NO: 605153 - RNA, 23 nt, Human
uguagcaggagaccacagcuucu

SEQ ID NO: 605154 - RNA, 19 nt, Human
uguccaggauucuccugau

SEQ ID NO: 605155 - RNA, 21 nt, Human
uguccaggauucuccugauag

SEQ ID NO: 605156 - RNA, 19 nt, Human
ugucccuugccccacuccc

SEQ ID NO: 605157 - RNA, 33 nt, Human
uucagacuuuguuaaaaaaaaaaaaaaaaaaaa

SEQ ID NO: 605158 - RNA, 18 nt, Human
uucaucuucugccuuagg

SEQ ID NO: 605159 - RNA, 22 nt, Human
uucgggaugaguguuucucuug

SEQ ID NO: 605160 - RNA, 21 nt, Human
uucuccugauagccaaggagc

SEQ ID NO: 605161 - RNA, 24 nt, Human
uucuuucucacucacuuccuuaaa

SEQ ID NO: 605162 - RNA, 22 nt, Human
uuguacauauaucaaucucccu

SEQ ID NO: 605163 - RNA, 24 nt, Human
uuuagcaagacagccuuccccaga

SEQ ID NO: 605164 - RNA, 22 nt, Human
uuuguccaucucagaacagagc

SEQ ID NO: 605165 - RNA, 20 nt, Human
uuuucucuuccagcucccag

SEQ ID NO: 605166 - RNA, 21 nt, Human
aaacauaaaacaaaccugcgu

SEQ ID NO: 605167 - RNA, 21 nt, Human
aaacgagacacaauuacagaa

SEQ ID NO: 605168 - RNA, 23 nt, Human
aaccucagagcccauguuucacc

SEQ ID NO: 605169 - RNA, 20 nt, Human
aauguccuucugggcucucc

SEQ ID NO: 605170 - RNA, 21 nt, Human
acuggccuugcccucuuuucc

SEQ ID NO: 605171 - RNA, 20 nt, Human
agauuccaggacccaggaaa

SEQ ID NO: 605172 - RNA, 23 nt, Human
agcaggggucccggcuccugcgc

SEQ ID NO: 605173 - RNA, 23 nt, Human
agccuggcucucccccuggccuc

SEQ ID NO: 605174 - RNA, 21 nt, Human
aggacacagguucaguccugc

SEQ ID NO: 605175 - RNA, 21 nt, Human
aggcagguagguuauccuuga

SEQ ID NO: 605176 - RNA, 22 nt, Human
agguagccaaccucagagccca

SEQ ID NO: 605177 - RNA, 22 nt, Human
agugugcuccuuccugggcagc

SEQ ID NO: 605178 - RNA, 22 nt, Human
aucagugacagcggcuaagguu

SEQ ID NO: 605179 - RNA, 18 nt, Human
augcagcagcaggggcuc

SEQ ID NO: 605180 - RNA, 21 nt, Human
auggugacuagaaggugguag

SEQ ID NO: 605181 - RNA, 23 nt, Human
caccccuggccuggagugugcuc

SEQ ID NO: 605182 - RNA, 18 nt, Human
cagcagcaggggcucggc

SEQ ID NO: 605183 - RNA, 19 nt, Human
caggacacagguucagucc

SEQ ID NO: 605184 - RNA, 19 nt, Human
cauaaaacaaaccugcgug

SEQ ID NO: 605185 - RNA, 21 nt, Human
caugcagcagcaggggcucgg

SEQ ID NO: 605186 - RNA, 20 nt, Human
ccacugggcagugaaggcuc

SEQ ID NO: 605187 - RNA, 22 nt, Human
ccagcaggugcacagcgcggcc

SEQ ID NO: 605188 - RNA, 20 nt, Human
ccagggcugccacugggcag

SEQ ID NO: 605189 - RNA, 19 nt, Human
ccccagggcugccacuggg

SEQ ID NO: 605190 - RNA, 23 nt, Human
ccccugccugugugacccacccg

SEQ ID NO: 605191 - RNA, 23 nt, Human
cccgugccucucuucagcuggga

SEQ ID NO: 605192 - RNA, 20 nt, Human
cccugaggagccagaggcua

SEQ ID NO: 605193 - RNA, 18 nt, Human
ccugcucugugccugucc

SEQ ID NO: 605194 - RNA, 24 nt, Human
ccugugaccugggcaaugcccagc

SEQ ID NO: 605195 - RNA, 20 nt, Human
ccuucugggcucuccccacc

SEQ ID NO: 605196 - RNA, 23 nt, Human
cuacggacucucuccugugaccu

SEQ ID NO: 605197 - RNA, 21 nt, Human
cucagagcccauguuucaccc

SEQ ID NO: 605198 - RNA, 24 nt, Human
cucguugcguuugguccgaccacu

SEQ ID NO: 605199 - RNA, 18 nt, Human
cucuccccaccuuccucu

SEQ ID NO: 605200 - RNA, 21 nt, Human
cugccaugcaccccuggccug

SEQ ID NO: 605201 - RNA, 18 nt, Human
cugcucugugccugucca

SEQ ID NO: 605202 - RNA, 21 nt, Human
cuggccuugcccucuuuucca

SEQ ID NO: 605203 - RNA, 21 nt, Human
gaaggcucuucaggacacagg

SEQ ID NO: 605204 - RNA, 20 nt, Human
gaagugggggauccuggcca

SEQ ID NO: 605205 - RNA, 19 nt, Human
gaggagccagaggcuagca

SEQ ID NO: 605206 - RNA, 19 nt, Human
gcagccccugcucugugcc

SEQ ID NO: 605207 - RNA, 18 nt, Human
gcccauguuucaccccug

SEQ ID NO: 605208 - RNA, 21 nt, Human
gccuggagugugcuccuuccu

SEQ ID NO: 605209 - RNA, 22 nt, Human
gccuggagugugcuccuuccug

SEQ ID NO: 605210 - RNA, 18 nt, Human
gccuugcccucuuuucca

SEQ ID NO: 605211 - RNA, 18 nt, Human
gcucugugccuguccagu

SEQ ID NO: 605212 - RNA, 22 nt, Human
gcucugugccuguccagugcug

SEQ ID NO: 605213 - RNA, 19 nt, Human
ggcucuccccaccuuccuc

SEQ ID NO: 605214 - RNA, 20 nt, Human
gggauccuggccaagucacc

SEQ ID NO: 605215 - RNA, 25 nt, Human
gggcugccacugggcagugaaggcu

SEQ ID NO: 605216 - RNA, 24 nt, Human
gguaggagggaggcuucuaggagc

SEQ ID NO: 605217 - RNA, 19 nt, Human
uagauuccaggacccagga

SEQ ID NO: 605218 - RNA, 22 nt, Human
uagccaaccucagagcccaugu

SEQ ID NO: 605219 - RNA, 19 nt, Human
ucacuugggagccugcucc

SEQ ID NO: 605220 - RNA, 23 nt, Human
ucacuugggagccugcuccuggg

SEQ ID NO: 605221 - RNA, 24 nt, Human
ucacuugggagccugcuccugggu

SEQ ID NO: 605222 - RNA, 20 nt, Human
ucagagcccauguuucaccc

SEQ ID NO: 605223 - RNA, 24 nt, Human
ucagagcccauguuucaccccugc

SEQ ID NO: 605224 - RNA, 19 nt, Human
ucccccuggccucaaaucc

SEQ ID NO: 605225 - RNA, 20 nt, Human
ucccccuggccucaaauccc

SEQ ID NO: 605226 - RNA, 24 nt, Human
ucccggcuccugcgcaggucucua

SEQ ID NO: 605227 - RNA, 28 nt, Human
ucggcagugaggacuggccuugcccucu

SEQ ID NO: 605228 - RNA, 19 nt, Human
ucucugcaggcagguaggu

SEQ ID NO: 605229 - RNA, 25 nt, Human
ucugcaauguccuucugggcucucc

SEQ ID NO: 605230 - RNA, 22 nt, Human
ugacagaaagcucccacugcuc

SEQ ID NO: 605231 - RNA, 18 nt, Human
ugagagucauuacuucug

SEQ ID NO: 605232 - RNA, 21 nt, Human
ugccagaguccccaugcaggc

SEQ ID NO: 605233 - RNA, 23 nt, Human
ugccaugcaccccuggccuggag

SEQ ID NO: 605234 - RNA, 22 nt, Human
ugggcacagcgaagugggggau

SEQ ID NO: 605235 - RNA, 24 nt, Human
ugggcacagcgaagugggggaucc

SEQ ID NO: 605236 - RNA, 18 nt, Human
ugggcagccccugcucug

SEQ ID NO: 605237 - RNA, 21 nt, Human
uggggaaaaucuuaauggcca

SEQ ID NO: 605238 - RNA, 25 nt, Human
uucucugcaggcagguagguuaucc

SEQ ID NO: 605239 - RNA, 24 nt, Human
agacagaagcccagucgguaaaca

SEQ ID NO: 605240 - RNA, 22 nt, Human
caucgcaaaguauccuaccugu

SEQ ID NO: 605241 - RNA, 19 nt, Human
cucuuaagacagaagccca

SEQ ID NO: 605242 - RNA, 18 nt, Human
gcccagucgguaaacagu

SEQ ID NO: 605243 - RNA, 24 nt, Human
uaagacagaagcccagucgguaaa

SEQ ID NO: 605244 - RNA, 21 nt, Human
uuuucuuggcucuuaagacag

SEQ ID NO: 605245 - RNA, 20 nt, Human
aaaauauuccaugauguccc

SEQ ID NO: 605246 - RNA, 22 nt, Human
aagcggguaccgucccuuccau

SEQ ID NO: 605247 - RNA, 19 nt, Human
accucuacccuggcuuccc

SEQ ID NO: 605248 - RNA, 20 nt, Human
agagccagggggcccggcaa

SEQ ID NO: 605249 - RNA, 24 nt, Human
aggcagaggcagagaaugccagaa

SEQ ID NO: 605250 - RNA, 21 nt, Human
agggggcuggaaagggggccc

SEQ ID NO: 605251 - RNA, 18 nt, Human
caagaauaugaggcagag

SEQ ID NO: 605252 - RNA, 23 nt, Human
cacagauuaggaguggacguucu

SEQ ID NO: 605253 - RNA, 19 nt, Human
cacugcauacagagaaggu

SEQ ID NO: 605254 - RNA, 19 nt, Human
cagaagcggguaccguccc

SEQ ID NO: 605255 - RNA, 22 nt, Human
cagagcaguaaucagagcagag

SEQ ID NO: 605256 - RNA, 19 nt, Human
cagcagccgaaggacucau

SEQ ID NO: 605257 - RNA, 22 nt, Human
caggaagguccaggagguggca

SEQ ID NO: 605258 - RNA, 21 nt, Human
caggagguggcagaagcgggu

SEQ ID NO: 605259 - RNA, 20 nt, Human
caggcucauggacuagugcu

SEQ ID NO: 605260 - RNA, 23 nt, Human
caguagacagcaagauuucccag

SEQ ID NO: 605261 - RNA, 21 nt, Human
cauaacccaggugcaccaacc

SEQ ID NO: 605262 - RNA, 22 nt, Human
ccagaagagagccagggggccc

SEQ ID NO: 605263 - RNA, 18 nt, Human
ccagggagaggaaaaccg

SEQ ID NO: 605264 - RNA, 25 nt, Human
cccacagaagcacugcauacagaga

SEQ ID NO: 605265 - RNA, 21 nt, Human
cccaccucuacccuggcuucc

SEQ ID NO: 605266 - RNA, 23 nt, Human
cccaccucuacccuggcuuccca

SEQ ID NO: 605267 - RNA, 23 nt, Human
cccugcagcaagcccaccuggcc

SEQ ID NO: 605268 - RNA, 22 nt, Human
ccucuacccuggcuucccagac

SEQ ID NO: 605269 - RNA, 21 nt, Human
ccugcagcaagcccaccuggc

SEQ ID NO: 605270 - RNA, 21 nt, Human
cuaacaagaauaugaggcaga

SEQ ID NO: 605271 - RNA, 19 nt, Human
cucccacagaagcacugca

SEQ ID NO: 605272 - RNA, 22 nt, Human
cuuaccauaacccaggugcacc

SEQ ID NO: 605273 - RNA, 19 nt, Human
gaagagagccagggggccc

SEQ ID NO: 605274 - RNA, 22 nt, Human
gagaaugccagaagagagccag

SEQ ID NO: 605275 - RNA, 24 nt, Human
gcaccagcaaucugggauaugguc

SEQ ID NO: 605276 - RNA, 22 nt, Human
gcagaggcagagaaugccagaa

SEQ ID NO: 605277 - RNA, 19 nt, Human
gccuaacaagaauaugagg

SEQ ID NO: 605278 - RNA, 21 nt, Human
gccuugggaacacucgggcug

SEQ ID NO: 605279 - RNA, 19 nt, Human
ggaaaaccgcccugcccca

SEQ ID NO: 605280 - RNA, 29 nt, Human
guagaggugggcugcguagggcgagcacc

SEQ ID NO: 605281 - RNA, 26 nt, Human
uaacaagaauaugaggcagaggcaga

SEQ ID NO: 605282 - RNA, 20 nt, Human
uaacccaggugcaccagcaa

SEQ ID NO: 605283 - RNA, 22 nt, Human
uaccauaacccaggugcaccag

SEQ ID NO: 605284 - RNA, 23 nt, Human
uaccauaacccaggugcaccagc

SEQ ID NO: 605285 - RNA, 20 nt, Human
uacccuggcuucccagacuu

SEQ ID NO: 605286 - RNA, 18 nt, Human
uagggaagcaauaguccu

SEQ ID NO: 605287 - RNA, 23 nt, Human
ucagagcaaaacucaaggugcag

SEQ ID NO: 605288 - RNA, 20 nt, Human
ucagcauuuuggccuuggga

SEQ ID NO: 605289 - RNA, 24 nt, Human
ucaggaagguccaggagguggcag

SEQ ID NO: 605290 - RNA, 22 nt, Human
ucaguagacagcaagauuuccc

SEQ ID NO: 605291 - RNA, 18 nt, Human
ucauuggucagcagggaa

SEQ ID NO: 605292 - RNA, 25 nt, Human
ucccugcagcaagcccaccuggccu

SEQ ID NO: 605293 - RNA, 19 nt, Human
ugagguggcucuccucucu

SEQ ID NO: 605294 - RNA, 21 nt, Human
ugagugacaguuagaauggaa

SEQ ID NO: 605295 - RNA, 19 nt, Human
uuuuuugugauuccaagca

SEQ ID NO: 605296 - RNA, 21 nt, Human
uuuuuugugauuccaagcagg

SEQ ID NO: 605297 - RNA, 23 nt, Human
aaaaacugaauuggaggguuuuu

SEQ ID NO: 605298 - RNA, 20 nt, Human
aaagaggcaccucccgcuuu

SEQ ID NO: 605299 - RNA, 19 nt, Human
aagccagcucugcgugcug

SEQ ID NO: 605300 - RNA, 23 nt, Human
aaucacauuuuucuuuuuuacau

SEQ ID NO: 605301 - RNA, 22 nt, Human
agaagcaccuuuuaauauucau

SEQ ID NO: 605302 - RNA, 23 nt, Human
agaguaagccagaacauucacug

SEQ ID NO: 605303 - RNA, 19 nt, Human
auuuauaaaagaucuucug

SEQ ID NO: 605304 - RNA, 18 nt, Human
cagaggugggcagugcug

SEQ ID NO: 605305 - RNA, 22 nt, Human
ccgagcacuucuaucagaagcc

SEQ ID NO: 605306 - RNA, 20 nt, Human
ccgguggcuggcggugcucu

SEQ ID NO: 605307 - RNA, 19 nt, Human
ccuuaugccuuggacucug

SEQ ID NO: 605308 - RNA, 19 nt, Human
ccuuaugguucauaugagu

SEQ ID NO: 605309 - RNA, 23 nt, Human
cuuaugguucauaugaguuuauu

SEQ ID NO: 605310 - RNA, 21 nt, Human
gagaagcagcagcugcauuug

SEQ ID NO: 605311 - RNA, 20 nt, Human
gagcagaggugggcagugcu

SEQ ID NO: 605312 - RNA, 18 nt, Human
gcaguaccuguucucacg

SEQ ID NO: 605313 - RNA, 21 nt, Human
gcuuugcuuucuuucccgagc

SEQ ID NO: 605314 - RNA, 26 nt, Human
guuguaauggugagauauuuauaagg

SEQ ID NO: 605315 - RNA, 20 nt, Human
uaccuucaccaguaaugcac

SEQ ID NO: 605316 - RNA, 19 nt, Human
uaucagaagccagcucugc

SEQ ID NO: 605317 - RNA, 22 nt, Human
uccagguggcgugaucacuguc

SEQ ID NO: 605318 - RNA, 23 nt, Human
ucuggcuguccagguggcgugau

SEQ ID NO: 605319 - RNA, 19 nt, Human
ucugugaacacacguguga

SEQ ID NO: 605320 - RNA, 23 nt, Human
ugaacacacgugugaacccggcg

SEQ ID NO: 605321 - RNA, 22 nt, Human
ugccaguucagagguguuguag

SEQ ID NO: 605322 - RNA, 24 nt, Human
ugccgguggcuggcggugcucagg

SEQ ID NO: 605323 - RNA, 21 nt, Human
ugccuuggacucuggcugucc

SEQ ID NO: 605324 - RNA, 23 nt, Human
uggaaaauuagcaacauacacau

SEQ ID NO: 605325 - RNA, 22 nt, Human
uggcacuuuaauguuaguacug

SEQ ID NO: 605326 - RNA, 19 nt, Human
uggcgugaucacugucgac

SEQ ID NO: 605327 - RNA, 21 nt, Human
uggcuguccagguggcgugau

SEQ ID NO: 605328 - RNA, 23 nt, Human
ugggagcagaggugggcagugcu

SEQ ID NO: 605329 - RNA, 25 nt, Human
ugggagcagaggugggcagugcugg

SEQ ID NO: 605330 - RNA, 20 nt, Human
ugggauguggccggucuugg

SEQ ID NO: 605331 - RNA, 24 nt, Human
ugucauuuacaucaaauaugcagc

SEQ ID NO: 605332 - RNA, 18 nt, Human
uguggccggucuuggugc

SEQ ID NO: 605333 - RNA, 23 nt, Human
uguggccguagcucugugaacac

SEQ ID NO: 605334 - RNA, 24 nt, Human
uuauaaaaacugaauuggaggguu

SEQ ID NO: 605335 - RNA, 26 nt, Human
uuguuuguuuguuuguuuguuuuuuu

SEQ ID NO: 605336 - RNA, 18 nt, Human
aaacgaucaguauccccc

SEQ ID NO: 605337 - RNA, 23 nt, Human
aagaagccuccucuggugguuga

SEQ ID NO: 605338 - RNA, 22 nt, Human
acaagacaccaaguccggucac

SEQ ID NO: 605339 - RNA, 23 nt, Human
acacagguaaacaggcuccuuca

SEQ ID NO: 605340 - RNA, 24 nt, Human
acaccaaguccggucaccauggaa

SEQ ID NO: 605341 - RNA, 20 nt, Human
accauggaaaagaauuaaac

SEQ ID NO: 605342 - RNA, 25 nt, Human
accauggaaaagaauuaaaccuaga

SEQ ID NO: 605343 - RNA, 21 nt, Human
accccgccuagcccaaggccg

SEQ ID NO: 605344 - RNA, 18 nt, Human
agaaacagaagaaauagg

SEQ ID NO: 605345 - RNA, 25 nt, Human
agaaacagaagaaauaggggaccgg

SEQ ID NO: 605346 - RNA, 22 nt, Human
agaauucuuccuuuauuuacuc

SEQ ID NO: 605347 - RNA, 22 nt, Human
agaggggccgccggugcccaga

SEQ ID NO: 605348 - RNA, 25 nt, Human
aggaaaaagaaaaaagaaaccucau

SEQ ID NO: 605349 - RNA, 24 nt, Human
aggggaccccgccuagcccaaggc

SEQ ID NO: 605350 - RNA, 18 nt, Human
agugagaaacagaagaaa

SEQ ID NO: 605351 - RNA, 21 nt, Human
aucugcacucagacgcucccc

SEQ ID NO: 605352 - RNA, 18 nt, Human
caagaaagaagccuccuc

SEQ ID NO: 605353 - RNA, 22 nt, Human
cacagguaaacaggcuccuuca

SEQ ID NO: 605354 - RNA, 26 nt, Human
caccauggaaaagaauuaaaccuaga

SEQ ID NO: 605355 - RNA, 24 nt, Human
caggaaagaauuuaaaaauccauc

SEQ ID NO: 605356 - RNA, 20 nt, Human
caggcacagaaacuggcaga

SEQ ID NO: 605357 - RNA, 18 nt, Human
caguagagcgaagcugug

SEQ ID NO: 605358 - RNA, 19 nt, Human
caucagaaaggaacuguuu

SEQ ID NO: 605359 - RNA, 20 nt, Human
caugaucugcacucagacgc

SEQ ID NO: 605360 - RNA, 18 nt, Human
ccaaaauuaaaaaaagga

SEQ ID NO: 605361 - RNA, 19 nt, Human
ccaaacgaucaguaucccc

SEQ ID NO: 605362 - RNA, 22 nt, Human
ccacuucguaaccaggcuacaa

SEQ ID NO: 605363 - RNA, 27 nt, Human
cccaaaauuaaaaaaaggaaaaagaaa

SEQ ID NO: 605364 - RNA, 27 nt, Human
cccacaguucaggccaaaccggggucc

SEQ ID NO: 605365 - RNA, 22 nt, Human
ccgaagaaacaccaucacagga

SEQ ID NO: 605366 - RNA, 24 nt, Human
ccucaugaucugcacucagacgcu

SEQ ID NO: 605367 - RNA, 21 nt, Human
ccugccgagcaguagagcgaa

SEQ ID NO: 605368 - RNA, 22 nt, Human
ccuucauaacaacacugugcau

SEQ ID NO: 605369 - RNA, 20 nt, Human
cggaauugacaaauaaagcc

SEQ ID NO: 605370 - RNA, 22 nt, Human
cguaaccaggcuacaagacacc

SEQ ID NO: 605371 - RNA, 24 nt, Human
cguaaccaggcuacaagacaccaa

SEQ ID NO: 605372 - RNA, 25 nt, Human
cuacaagacaccaaguccggucacc

SEQ ID NO: 605373 - RNA, 26 nt, Human
cucauucauuuccaaaaaucaagauc

SEQ ID NO: 605374 - RNA, 24 nt, Human
cugugggcuggagcacgcugagga

SEQ ID NO: 605375 - RNA, 21 nt, Human
cuucagugagaaacagaagaa

SEQ ID NO: 605376 - RNA, 21 nt, Human
cuugguggaaaacagugggug

SEQ ID NO: 605377 - RNA, 21 nt, Human
gaagcugugggcuggagcaac

SEQ ID NO: 605378 - RNA, 21 nt, Human
gaauggugccagauuuugaac

SEQ ID NO: 605379 - RNA, 19 nt, Human
gauuacacguuccugucuc

SEQ ID NO: 605380 - RNA, 18 nt, Human
gcagccccagccagaucc

SEQ ID NO: 605381 - RNA, 18 nt, Human
gcgaagcugugggcugga

SEQ ID NO: 605382 - RNA, 26 nt, Human
ggaaauuuaaauuuuuccacuuucag

SEQ ID NO: 605383 - RNA, 23 nt, Human
ggaggacuuggcuuaaccuugag

SEQ ID NO: 605384 - RNA, 20 nt, Human
ggauuacacguuccugucuc

SEQ ID NO: 605385 - RNA, 21 nt, Human
guaaccaggcuacaagacacc

SEQ ID NO: 605386 - RNA, 22 nt, Human
uaagaaauguuuauuguucaag

SEQ ID NO: 605387 - RNA, 21 nt, Human
uaccccaaaauuaaaaaaagg

SEQ ID NO: 605388 - RNA, 22 nt, Human
uaggacuucagugagaaacaga

SEQ ID NO: 605389 - RNA, 24 nt, Human
ucaacgucccacuucguaaccagg

SEQ ID NO: 605390 - RNA, 20 nt, Human
ucaccaaggucaagggcugu

SEQ ID NO: 605391 - RNA, 18 nt, Human
ucaggccaaacaucauaa

SEQ ID NO: 605392 - RNA, 18 nt, Human
ucagugagaaacagaaga

SEQ ID NO: 605393 - RNA, 21 nt, Human
uccaacccccuuuccucuugu

SEQ ID NO: 605394 - RNA, 21 nt, Human
uccacggcagagaaaugcuaa

SEQ ID NO: 605395 - RNA, 19 nt, Human
uccacuuucaguuugaaua

SEQ ID NO: 605396 - RNA, 20 nt, Human
uccauuugguauuuuccacu

SEQ ID NO: 605397 - RNA, 24 nt, Human
ucccacuucguaaccaggcuacaa

SEQ ID NO: 605398 - RNA, 18 nt, Human
ucccagcugguccaugca

SEQ ID NO: 605399 - RNA, 23 nt, Human
ucguaugugaaucugugaauccu

SEQ ID NO: 605400 - RNA, 19 nt, Human
ucucugcaggcacagaaac

SEQ ID NO: 605401 - RNA, 24 nt, Human
ucucugcaggcacagaaacuggca

SEQ ID NO: 605402 - RNA, 26 nt, Human
ucugcaggcacagaaacuggcagacc

SEQ ID NO: 605403 - RNA, 21 nt, Human
ugacugagucuuggcucagca

SEQ ID NO: 605404 - RNA, 22 nt, Human
ugauaagcaauucuccacggca

SEQ ID NO: 605405 - RNA, 23 nt, Human
ugcccagaggccagcugcccugc

SEQ ID NO: 605406 - RNA, 22 nt, Human
uggagaacggagaaaacgacug

SEQ ID NO: 605407 - RNA, 25 nt, Human
ugguggaaaacaguggguguccaga

SEQ ID NO: 605408 - RNA, 22 nt, Human
uuaaccuugagaaacuguucuu

SEQ ID NO: 605409 - RNA, 23 nt, Human
uuaaccuugagaaacuguucuuu

SEQ ID NO: 605410 - RNA, 21 nt, Human
uucagugagaaacagaagaaa

SEQ ID NO: 605411 - RNA, 22 nt, Human
uucauuguucagaugguaaacc

SEQ ID NO: 605412 - RNA, 18 nt, Human
uucugugcaugucacccu

SEQ ID NO: 605413 - RNA, 19 nt, Human
uugauaagcaauucuccac

SEQ ID NO: 605414 - RNA, 19 nt, Human
aaaaacagcuggaaagagc

SEQ ID NO: 605415 - RNA, 19 nt, Human
aaaagcucaagucacugcc

SEQ ID NO: 605416 - RNA, 19 nt, Human
aaaagcucaagucacugcc

SEQ ID NO: 605417 - RNA, 23 nt, Human
aaagaacgacgagggcuggcaga

SEQ ID NO: 605418 - RNA, 20 nt, Human
aaagagacaacguagacuga

SEQ ID NO: 605419 - RNA, 19 nt, Human
aaagugcugggauuacagg

SEQ ID NO: 605420 - RNA, 19 nt, Human
aaagugcugggauuacagg

SEQ ID NO: 605421 - RNA, 23 nt, Human
aaagugcugggauuacaggugua

SEQ ID NO: 605422 - RNA, 18 nt, Human
aacaugcuccugugguuu

SEQ ID NO: 605423 - RNA, 21 nt, Human
aacuucacgaaggcuagaacc

SEQ ID NO: 605424 - RNA, 22 nt, Human
aagaacaccucauuguuggucc

SEQ ID NO: 605425 - RNA, 22 nt, Human
aagcaaggaccacucuggggag

SEQ ID NO: 605426 - RNA, 20 nt, Human
aagggaugaacacggggggg

SEQ ID NO: 605427 - RNA, 18 nt, Human
aagugcugggauuacagg

SEQ ID NO: 605428 - RNA, 19 nt, Human
aagugcugggauuacaggu

SEQ ID NO: 605429 - RNA, 26 nt, Human
aagugcugggauuacagguguaagcc

SEQ ID NO: 605430 - RNA, 26 nt, Human
aaugaggaggcagccacuguggagga

SEQ ID NO: 605431 - RNA, 19 nt, Human
acacacuugccggcaggga

SEQ ID NO: 605432 - RNA, 22 nt, Human
acacccagaucuuacacccagu

SEQ ID NO: 605433 - RNA, 18 nt, Human
acagguguaagccaccgc

SEQ ID NO: 605434 - RNA, 21 nt, Human
accaagauaggaaaaucaaug

SEQ ID NO: 605435 - RNA, 18 nt, Human
accacaaccuccaccucc

SEQ ID NO: 605436 - RNA, 23 nt, Human
accacgccuggcuaauuuuugua

SEQ ID NO: 605437 - RNA, 20 nt, Human
accaggaaagaggaaaggcc

SEQ ID NO: 605438 - RNA, 27 nt, Human
acucugucgccuaggcuggagugcaau

SEQ ID NO: 605439 - RNA, 28 nt, Human
agacaaaucucuuccuaaacaugcuccu

SEQ ID NO: 605440 - RNA, 20 nt, Human
agacugaacucaccuuacaa

SEQ ID NO: 605441 - RNA, 23 nt, Human
agagaagcaaucauccccauggc

SEQ ID NO: 605442 - RNA, 23 nt, Human
agagacaaaucucuuccuaaaca

SEQ ID NO: 605443 - RNA, 19 nt, Human
agagcauugugacuugaaa

SEQ ID NO: 605444 - RNA, 23 nt, Human
agaggcagucuuccucccagagu

SEQ ID NO: 605445 - RNA, 22 nt, Human
agaggcauuucugcugcagccu

SEQ ID NO: 605446 - RNA, 24 nt, Human
agcagaaccucuggcuuucuucua

SEQ ID NO: 605447 - RNA, 18 nt, Human
agcagaugcugaggucag

SEQ ID NO: 605448 - RNA, 18 nt, Human
aggaaagaggaaaggccu

SEQ ID NO: 605449 - RNA, 21 nt, Human
aggagugcaggcagaggggcc

SEQ ID NO: 605450 - RNA, 23 nt, Human
aggauuuggcuuuuuuucccugg

SEQ ID NO: 605451 - RNA, 25 nt, Human
aggcagaggcagacuuaaggucgac

SEQ ID NO: 605452 - RNA, 22 nt, Human
aggcagaggcagacuuauucca

SEQ ID NO: 605453 - RNA, 22 nt, Human
aggcagaggggccugcugcugg

SEQ ID NO: 605454 - RNA, 21 nt, Human
agggaccaacagaccuccacg

SEQ ID NO: 605455 - RNA, 22 nt, Human
agggaggcggcaacggcggugg

SEQ ID NO: 605456 - RNA, 22 nt, Human
aggggcaagccugaggagugca

SEQ ID NO: 605457 - RNA, 21 nt, Human
aggucucagauagugccucuc

SEQ ID NO: 605458 - RNA, 22 nt, Human
aguagagaugggcuuuugccau

SEQ ID NO: 605459 - RNA, 18 nt, Human
aguagcugggauuacagg

SEQ ID NO: 605460 - RNA, 21 nt, Human
agugcaauggcgugaucucag

SEQ ID NO: 605461 - RNA, 24 nt, Human
agugcaauggcgugaucucagcuc

SEQ ID NO: 605462 - RNA, 20 nt, Human
aguuaacuacaugaggaacg

SEQ ID NO: 605463 - RNA, 19 nt, Human
augauucuuaggaguccac

SEQ ID NO: 605464 - RNA, 24 nt, Human
augggcuuuugccauguugaccag

SEQ ID NO: 605465 - RNA, 25 nt, Human
auuuuuguauuuuuuaguagagaug

SEQ ID NO: 605466 - RNA, 21 nt, Human
caaaagcucaagucacugcca

SEQ ID NO: 605467 - RNA, 23 nt, Human
caaaccccagacccaggacucca

SEQ ID NO: 605468 - RNA, 24 nt, Human
caaaccccagacccaggacuccag

SEQ ID NO: 605469 - RNA, 24 nt, Human
caaagugcugggauuacaggugua

SEQ ID NO: 605470 - RNA, 23 nt, Human
caaccuccaccuccuggguucaa

SEQ ID NO: 605471 - RNA, 22 nt, Human
caagcgagucuccugccucagc

SEQ ID NO: 605472 - RNA, 24 nt, Human
cacaaccacgccuggcuaauuuuu

SEQ ID NO: 605473 - RNA, 21 nt, Human
caccacaaccuccaccuccug

SEQ ID NO: 605474 - RNA, 21 nt, Human
cacggcaguggcacuagugcc

SEQ ID NO: 605475 - RNA, 22 nt, Human
cacucugucgccuaggcuggag

SEQ ID NO: 605476 - RNA, 22 nt, Human
cacugaggcagcgaggggcaag

SEQ ID NO: 605477 - RNA, 20 nt, Human
cacugccaugagaccaggag

SEQ ID NO: 605478 - RNA, 22 nt, Human
cagaccuccacgagaacaacuu

SEQ ID NO: 605479 - RNA, 23 nt, Human
cagcagaggggccaggcugggug

SEQ ID NO: 605480 - RNA, 23 nt, Human
caggaauccaggugagaagcaag

SEQ ID NO: 605481 - RNA, 26 nt, Human
caggagccagcagggugaggcagagg

SEQ ID NO: 605482 - RNA, 18 nt, Human
caggggaggggagguugc

SEQ ID NO: 605483 - RNA, 22 nt, Human
caggugacccgccugccucagc

SEQ ID NO: 605484 - RNA, 22 nt, Human
caguguguuccucuuuggggac

SEQ ID NO: 605485 - RNA, 23 nt, Human
caugauucuuaggaguccaccaa

SEQ ID NO: 605486 - RNA, 24 nt, Human
cauguugaccaggcuggucuugaa

SEQ ID NO: 605487 - RNA, 21 nt, Human
ccaaagugcugggauuacagg

SEQ ID NO: 605488 - RNA, 21 nt, Human
ccaaagugcugggauuacagg

SEQ ID NO: 605489 - RNA, 24 nt, Human
ccaaagugcugggauuacaggugu

SEQ ID NO: 605490 - RNA, 18 nt, Human
ccacaaccuccaccuccu

SEQ ID NO: 605491 - RNA, 21 nt, Human
ccacaaccuccaccuccuggg

SEQ ID NO: 605492 - RNA, 23 nt, Human
ccacaaccuccaccuccuggguu

SEQ ID NO: 605493 - RNA, 24 nt, Human
ccacaaccuccaccuccuggguuc

SEQ ID NO: 605494 - RNA, 22 nt, Human
ccacacacuugccggcagggag

SEQ ID NO: 605495 - RNA, 20 nt, Human
ccaccaggagccagcagggu

SEQ ID NO: 605496 - RNA, 19 nt, Human
ccauguugaccaggcuggu

SEQ ID NO: 605497 - RNA, 21 nt, Human
ccauguugaccaggcuggucu

SEQ ID NO: 605498 - RNA, 21 nt, Human
cccacagcagagcucagggau

SEQ ID NO: 605499 - RNA, 21 nt, Human
cccaggagccaaaugaggagg

SEQ ID NO: 605500 - RNA, 24 nt, Human
ccccaccuacucuucccucucccu

SEQ ID NO: 605501 - RNA, 24 nt, Human
ccccagacccaggacuccagaacu

SEQ ID NO: 605502 - RNA, 26 nt, Human
ccccuccagcaaugucaacucugccu

SEQ ID NO: 605503 - RNA, 25 nt, Human
ccccugcuccagccuguugccacag

SEQ ID NO: 605504 - RNA, 23 nt, Human
cccgaguagcugggauuacaggc

SEQ ID NO: 605505 - RNA, 20 nt, Human
cccggccccaccuacucuuc

SEQ ID NO: 605506 - RNA, 18 nt, Human
cccucucccuuucauucc

SEQ ID NO: 605507 - RNA, 24 nt, Human
cccucucccuuucauucccuucua

SEQ ID NO: 605508 - RNA, 21 nt, Human
ccgcccucuacacccagaucu

SEQ ID NO: 605509 - RNA, 26 nt, Human
ccgccugccucagccucccaaagugc

SEQ ID NO: 605510 - RNA, 19 nt, Human
ccggccccaccuacucuuc

SEQ ID NO: 605511 - RNA, 23 nt, Human
ccuagagaagcaaucauccccau

SEQ ID NO: 605512 - RNA, 22 nt, Human
ccuagucccgaccuccugagga

SEQ ID NO: 605513 - RNA, 19 nt, Human
ccuccaccuccuggguuca

SEQ ID NO: 605514 - RNA, 19 nt, Human
ccucucccacccuaguccc

SEQ ID NO: 605515 - RNA, 18 nt, Human
ccugaccucaggugaccc

SEQ ID NO: 605516 - RNA, 21 nt, Human
ccugaccucaggugacccgcc

SEQ ID NO: 605517 - RNA, 23 nt, Human
ccugaccucaggugacccgccug

SEQ ID NO: 605518 - RNA, 23 nt, Human
ccugccucagccucccgaguagc

SEQ ID NO: 605519 - RNA, 21 nt, Human
ccugggaugaaacccaccagg

SEQ ID NO: 605520 - RNA, 23 nt, Human
ccuggguucaagcgagucucccc

SEQ ID NO: 605521 - RNA, 23 nt, Human
ccuggguucaagcgagucuccug

SEQ ID NO: 605522 - RNA, 21 nt, Human
ccuucaggacauggccugcag

SEQ ID NO: 605523 - RNA, 18 nt, Human
ccuucuagcacucugguc

SEQ ID NO: 605524 - RNA, 21 nt, Human
cgaggggcaagccugaggagu

SEQ ID NO: 605525 - RNA, 22 nt, Human
cggcagggaggcggcaacggcc

SEQ ID NO: 605526 - RNA, 21 nt, Human
cggugaacagugagaccagga

SEQ ID NO: 605527 - RNA, 27 nt, Human
cucaccacaaccuccaccuccuggguu

SEQ ID NO: 605528 - RNA, 24 nt, Human
cucacucugucgccuaggcuggag

SEQ ID NO: 605529 - RNA, 24 nt, Human
cucagccucccgaguagcugggau

SEQ ID NO: 605530 - RNA, 19 nt, Human
cuccagccuguugccacag

SEQ ID NO: 605531 - RNA, 18 nt, Human
cuccccaggguucugugc

SEQ ID NO: 605532 - RNA, 26 nt, Human
cuccugaccucaggugacccgccugc

SEQ ID NO: 605533 - RNA, 21 nt, Human
cuccugugguuucaugauucu

SEQ ID NO: 605534 - RNA, 23 nt, Human
cucugucgccuaggcuggagugc

SEQ ID NO: 605535 - RNA, 22 nt, Human
cugaagccgcccucuacaccca

SEQ ID NO: 605536 - RNA, 27 nt, Human
cugcccaucaagagcagcgcaaagugc

SEQ ID NO: 605537 - RNA, 23 nt, Human
cugccucagccucccaaagugcu

SEQ ID NO: 605538 - RNA, 23 nt, Human
cugccucagccucccgaguagcu

SEQ ID NO: 605539 - RNA, 25 nt, Human
cugcuccagccuguugccacagggu

SEQ ID NO: 605540 - RNA, 21 nt, Human
cugcugcccaucaagagcagc

SEQ ID NO: 605541 - RNA, 22 nt, Human
cuggcacgugcagggcugggga

SEQ ID NO: 605542 - RNA, 21 nt, Human
cuguguacacaggcuccugca

SEQ ID NO: 605543 - RNA, 19 nt, Human
gacaccagagagaaaagca

SEQ ID NO: 605544 - RNA, 21 nt, Human
gaccaacagaccuccacgaga

SEQ ID NO: 605545 - RNA, 24 nt, Human
gaccucaggugacccgccugccuc

SEQ ID NO: 605546 - RNA, 21 nt, Human
gacgagggcuggcagacaaga

SEQ ID NO: 605547 - RNA, 19 nt, Human
gagaggaggagcagcugau

SEQ ID NO: 605548 - RNA, 19 nt, Human
gaggggcaagccugaggag

SEQ ID NO: 605549 - RNA, 23 nt, Human
gaguagcugggauuacaggccac

SEQ ID NO: 605550 - RNA, 21 nt, Human
gagugcaauggcgugaucuca

SEQ ID NO: 605551 - RNA, 18 nt, Human
gauuacagguguaagcca

SEQ ID NO: 605552 - RNA, 23 nt, Human
gauuacagguguaagccaccgca

SEQ ID NO: 605553 - RNA, 19 nt, Human
gcaaaccccagacccagga

SEQ ID NO: 605554 - RNA, 20 nt, Human
gcaaggcccucucuaaggag

SEQ ID NO: 605555 - RNA, 20 nt, Human
gccauguugaccaggcuggu

SEQ ID NO: 605556 - RNA, 25 nt, Human
gccccaccuacucuucccucucccu

SEQ ID NO: 605557 - RNA, 22 nt, Human
gcccuguguacacaggcuccug

SEQ ID NO: 605558 - RNA, 20 nt, Human
gccuaggcuggagugcaaug

SEQ ID NO: 605559 - RNA, 20 nt, Human
gccuaggcuggagugcaaug

SEQ ID NO: 605560 - RNA, 24 nt, Human
gccuaggcuggagugcaauggcgu

SEQ ID NO: 605561 - RNA, 21 nt, Human
gccucagccucccaaagugcu

SEQ ID NO: 605562 - RNA, 24 nt, Human
gcgagucuccugccucagccuccc

SEQ ID NO: 605563 - RNA, 20 nt, Human
gcgguggcugcaacagcggc

SEQ ID NO: 605564 - RNA, 23 nt, Human
gcuggucuugaacuccugaccuc

SEQ ID NO: 605565 - RNA, 22 nt, Human
ggauuacagguguaagccaccg

SEQ ID NO: 605566 - RNA, 21 nt, Human
ggcagacaagaacaagcagaa

SEQ ID NO: 605567 - RNA, 20 nt, Human
ggcggcaacggcgguggcug

SEQ ID NO: 605568 - RNA, 22 nt, Human
ggcuggagugcaauggcgugau

SEQ ID NO: 605569 - RNA, 24 nt, Human
ggcuggucuugaacuccugaccuc

SEQ ID NO: 605570 - RNA, 18 nt, Human
gggaaguggagaaagaug

SEQ ID NO: 605571 - RNA, 22 nt, Human
gggcuggggaggccacagcucc

SEQ ID NO: 605572 - RNA, 22 nt, Human
gggcuuuugccauguugaccag

SEQ ID NO: 605573 - RNA, 22 nt, Human
ggguagaggugagaggcagggg

SEQ ID NO: 605574 - RNA, 19 nt, Human
ggucuugaacuccugaccu

SEQ ID NO: 605575 - RNA, 24 nt, Human
ggugaacagugagaccaggaaaga

SEQ ID NO: 605576 - RNA, 23 nt, Human
guagagaugggcuuuugccaugu

SEQ ID NO: 605577 - RNA, 18 nt, Human
guagcugggauuacaggc

SEQ ID NO: 605578 - RNA, 19 nt, Human
guccccuugagugagaggu

SEQ ID NO: 605579 - RNA, 24 nt, Human
gugacccgccugccucagccuccc

SEQ ID NO: 605580 - RNA, 24 nt, Human
guggcugcaacagcggcggcagca

SEQ ID NO: 605581 - RNA, 18 nt, Human
uaaacauuccauuugucc

SEQ ID NO: 605582 - RNA, 24 nt, Human
uaaagcugcaaggcccucucuaag

SEQ ID NO: 605583 - RNA, 19 nt, Human
uaacagcaauuccaacugc

SEQ ID NO: 605584 - RNA, 25 nt, Human
uaauuuuuguauuuuuuaguagaga

SEQ ID NO: 605585 - RNA, 24 nt, Human
uacagguguaagccaccgcacuca

SEQ ID NO: 605586 - RNA, 22 nt, Human
uagagaugggcuuuugccaugu

SEQ ID NO: 605587 - RNA, 24 nt, Human
uaguagagaugggcuuuugccaug

SEQ ID NO: 605588 - RNA, 24 nt, Human
ucaccacaaccuccaccuccuggg

SEQ ID NO: 605589 - RNA, 27 nt, Human
ucaccacaaccuccaccuccuggguuc

SEQ ID NO: 605590 - RNA, 24 nt, Human
ucacucugucgccuaggcuggagu

SEQ ID NO: 605591 - RNA, 19 nt, Human
ucacugaggcagcgagggg

SEQ ID NO: 605592 - RNA, 23 nt, Human
ucagagggaccaacagaccucca

SEQ ID NO: 605593 - RNA, 20 nt, Human
ucagccucccgaguagcugg

SEQ ID NO: 605594 - RNA, 21 nt, Human
ucaugauucuuaggaguccac

SEQ ID NO: 605595 - RNA, 18 nt, Human
uccacacacuugccggca

SEQ ID NO: 605596 - RNA, 23 nt, Human
ucccaaagugcugggauuacagg

SEQ ID NO: 605597 - RNA, 24 nt, Human
ucccaacaugagcccacuccauga

SEQ ID NO: 605598 - RNA, 24 nt, Human
ucccagagucagcuggucccaaca

SEQ ID NO: 605599 - RNA, 24 nt, Human
uccccacagcagagcucagggaua

SEQ ID NO: 605600 - RNA, 20 nt, Human
uccccaggguucugugcucc

SEQ ID NO: 605601 - RNA, 23 nt, Human
uccccauggcgggucccaagaac

SEQ ID NO: 605602 - RNA, 24 nt, Human
ucccgaguagcugggauuacaggc

SEQ ID NO: 605603 - RNA, 23 nt, Human
uccuaggagaggaggagcagcug

SEQ ID NO: 605604 - RNA, 18 nt, Human
uccuaugagagaagagga

SEQ ID NO: 605605 - RNA, 21 nt, Human
uccuggguucaagcgagucuc

SEQ ID NO: 605606 - RNA, 24 nt, Human
uccuggguucaagcgagucuccug

SEQ ID NO: 605607 - RNA, 18 nt, Human
ucgccuaggcuggagugc

SEQ ID NO: 605608 - RNA, 20 nt, Human
ucuagcacucuggucuccua

SEQ ID NO: 605609 - RNA, 23 nt, Human
ucucacucugucgccuaggcugg

SEQ ID NO: 605610 - RNA, 24 nt, Human
ucucacucugucgccuaggcugga

SEQ ID NO: 605611 - RNA, 23 nt, Human
ucucagauagugccucucccacc

SEQ ID NO: 605612 - RNA, 24 nt, Human
ucuccugccucagccucccgagua

SEQ ID NO: 605613 - RNA, 21 nt, Human
ucucuaaggaguucccagucc

SEQ ID NO: 605614 - RNA, 21 nt, Human
ucucugaagagggaggguggc

SEQ ID NO: 605615 - RNA, 19 nt, Human
ucugaagagggaggguggc

SEQ ID NO: 605616 - RNA, 19 nt, Human
ucugaggacacccggugaa

SEQ ID NO: 605617 - RNA, 24 nt, Human
ucugucgccuaggcuggagugcaa

SEQ ID NO: 605618 - RNA, 23 nt, Human
ucuugaacuccugaccucaggug

SEQ ID NO: 605619 - RNA, 24 nt, Human
ugaccaggcuggucuugaacuccu

SEQ ID NO: 605620 - RNA, 18 nt, Human
ugacccgccugccucagc

SEQ ID NO: 605621 - RNA, 18 nt, Human
ugaccucaggugacccgc

SEQ ID NO: 605622 - RNA, 24 nt, Human
ugagacuaagaacagagguauuug

SEQ ID NO: 605623 - RNA, 20 nt, Human
ugagagaagaggaaggcuuu

SEQ ID NO: 605624 - RNA, 19 nt, Human
ugagcagaugcugagguca

SEQ ID NO: 605625 - RNA, 23 nt, Human
ugaggcagcgaggggcaagccug

SEQ ID NO: 605626 - RNA, 22 nt, Human
ugauaccacuucuccccagggu

SEQ ID NO: 605627 - RNA, 24 nt, Human
ugccauguugaccaggcuggucuu

SEQ ID NO: 605628 - RNA, 27 nt, Human
ugccauguugaccaggcuggucuugaa

SEQ ID NO: 605629 - RNA, 24 nt, Human
ugccucagccucccaaagugcugg

SEQ ID NO: 605630 - RNA, 24 nt, Human
ugccucagccucccgaguagcugg

SEQ ID NO: 605631 - RNA, 19 nt, Human
ugccugggaugaaacccac

SEQ ID NO: 605632 - RNA, 26 nt, Human
ugccugggaugaaacccaccaggagc

SEQ ID NO: 605633 - RNA, 24 nt, Human
ugcuccagccuguugccacagggu

SEQ ID NO: 605634 - RNA, 25 nt, Human
ugcuccagccuguugccacagggug

SEQ ID NO: 605635 - RNA, 24 nt, Human
ugcugggauuacagguguaagcca

SEQ ID NO: 605636 - RNA, 21 nt, Human
uggaaagagacaacguagacu

SEQ ID NO: 605637 - RNA, 24 nt, Human
uggaaaugaaugggcucaagacca

SEQ ID NO: 605638 - RNA, 24 nt, Human
uggacauaaacauuccauuugucc

SEQ ID NO: 605639 - RNA, 19 nt, Human
uggagugcaauggcgugau

SEQ ID NO: 605640 - RNA, 24 nt, Human
uggagugcaauggcgugaucucag

SEQ ID NO: 605641 - RNA, 22 nt, Human
uggcaccaagcacccauugacc

SEQ ID NO: 605642 - RNA, 19 nt, Human
uggcacgugcagggcuggg

SEQ ID NO: 605643 - RNA, 19 nt, Human
uggcccggcugggccacgg

SEQ ID NO: 605644 - RNA, 24 nt, Human
uggcgugaucucagcucaccacaa

SEQ ID NO: 605645 - RNA, 18 nt, Human
uggcugcaacagcggcgg

SEQ ID NO: 605646 - RNA, 19 nt, Human
uggcuguggggaggugugc

SEQ ID NO: 605647 - RNA, 23 nt, Human
uggcuuuuuuucccuggaagagg

SEQ ID NO: 605648 - RNA, 21 nt, Human
ugggauuacaggccacaacca

SEQ ID NO: 605649 - RNA, 22 nt, Human
ugggauuacaggccacaaccac

SEQ ID NO: 605650 - RNA, 18 nt, Human
ugggauuacagguguaag

SEQ ID NO: 605651 - RNA, 19 nt, Human
ugggauuacagguguaagc

SEQ ID NO: 605652 - RNA, 21 nt, Human
ugggauuacagguguaagcca

SEQ ID NO: 605653 - RNA, 22 nt, Human
ugggauuacagguguaagccac

SEQ ID NO: 605654 - RNA, 23 nt, Human
ugggauuacagguguaagccacc

SEQ ID NO: 605655 - RNA, 24 nt, Human
ugggauuacagguguaagccaccg

SEQ ID NO: 605656 - RNA, 23 nt, Human
ugggcagagggugggaugugagc

SEQ ID NO: 605657 - RNA, 23 nt, Human
ugggccacggcaguggcacuagu

SEQ ID NO: 605658 - RNA, 24 nt, Human
ugggcuuuugccauguugaccagg

SEQ ID NO: 605659 - RNA, 19 nt, Human
uggggaccagcaaacccca

SEQ ID NO: 605660 - RNA, 22 nt, Human
uuaacagcaauuccaacugcgc

SEQ ID NO: 605661 - RNA, 18 nt, Human
uuaguagagaugggcuuu

SEQ ID NO: 605662 - RNA, 24 nt, Human
uuaguagagaugggcuuuugccau

SEQ ID NO: 605663 - RNA, 19 nt, Human
uugaaaguggcucugagag

SEQ ID NO: 605664 - RNA, 21 nt, Human
uuggggaccagcaaaccccag

SEQ ID NO: 605665 - RNA, 23 nt, Human
uuucugcugcagccugagcuaug

SEQ ID NO: 605666 - RNA, 24 nt, Human
uuugggguagaggugagaggcagg

SEQ ID NO: 605667 - RNA, 23 nt, Human
uuuugccauguugaccaggcugg

SEQ ID NO: 605668 - RNA, 24 nt, Human
uuuuuaguagagaugggcuuuugc

SEQ ID NO: 605669 - RNA, 21 nt, Human
uuuuuguauuuuuuaguagag

SEQ ID NO: 605670 - RNA, 21 nt, Human
uuuuuuaguagagaugggcuu

SEQ ID NO: 605671 - RNA, 20 nt, Human
accacagccacccucuucuc

SEQ ID NO: 605672 - RNA, 21 nt, Human
accuggccacuugucaggagc

SEQ ID NO: 605673 - RNA, 22 nt, Human
agaggcaggggcacagaggcag

SEQ ID NO: 605674 - RNA, 22 nt, Human
agcacgcccaccacagccaccc

SEQ ID NO: 605675 - RNA, 24 nt, Human
agcaguaggagacccucaugcagg

SEQ ID NO: 605676 - RNA, 22 nt, Human
aggcaggaaaggauggccagag

SEQ ID NO: 605677 - RNA, 22 nt, Human
aggcaggggagggagcuuacgg

SEQ ID NO: 605678 - RNA, 22 nt, Human
aggcugcagggcaggcuccagc

SEQ ID NO: 605679 - RNA, 24 nt, Human
agggagggagccgcaguccucagg

SEQ ID NO: 605680 - RNA, 18 nt, Human
aguccucaggggaaggga

SEQ ID NO: 605681 - RNA, 19 nt, Human
auggagcgugcugcugucc

SEQ ID NO: 605682 - RNA, 20 nt, Human
caaaggcccuagaacccuuc

SEQ ID NO: 605683 - RNA, 23 nt, Human
caccccaccuaccacugcccacc

SEQ ID NO: 605684 - RNA, 22 nt, Human
caccccagcacugccgcagacc

SEQ ID NO: 605685 - RNA, 22 nt, Human
cacccucccagaccucaagcca

SEQ ID NO: 605686 - RNA, 21 nt, Human
cacccucuucuccaggcugca

SEQ ID NO: 605687 - RNA, 21 nt, Human
cacugcagcaaggggcagagc

SEQ ID NO: 605688 - RNA, 18 nt, Human
cagcaaggugggcucacu

SEQ ID NO: 605689 - RNA, 23 nt, Human
cagcgugggacuggaggcccagg

SEQ ID NO: 605690 - RNA, 22 nt, Human
caggcuccagcuccccaugggg

SEQ ID NO: 605691 - RNA, 19 nt, Human
cagggagauggcacagcag

SEQ ID NO: 605692 - RNA, 20 nt, Human
cagggcaggcuccagcuccc

SEQ ID NO: 605693 - RNA, 18 nt, Human
cagggccccuggcuuuac

SEQ ID NO: 605694 - RNA, 25 nt, Human
ccaaaggcaagcuccagcuccagac

SEQ ID NO: 605695 - RNA, 22 nt, Human
ccacccaaaggcccuagaaccc

SEQ ID NO: 605696 - RNA, 22 nt, Human
ccacugcccaccuggugccacc

SEQ ID NO: 605697 - RNA, 24 nt, Human
ccacugcccaccuggugccacccc

SEQ ID NO: 605698 - RNA, 18 nt, Human
ccagcuccagaccaggca

SEQ ID NO: 605699 - RNA, 23 nt, Human
ccaggcauugggccagccgugcc

SEQ ID NO: 605700 - RNA, 18 nt, Human
ccaggggucugcaugugu

SEQ ID NO: 605701 - RNA, 21 nt, Human
ccaugcgggcaaaugaccaag

SEQ ID NO: 605702 - RNA, 20 nt, Human
cccaccacagccacccucuu

SEQ ID NO: 605703 - RNA, 18 nt, Human
cccagagccaccuggcca

SEQ ID NO: 605704 - RNA, 20 nt, Human
ccccagcacugccgcagacc

SEQ ID NO: 605705 - RNA, 20 nt, Human
ccccaucaggccagggcccc

SEQ ID NO: 605706 - RNA, 19 nt, Human
ccccugaccuaggcacggg

SEQ ID NO: 605707 - RNA, 23 nt, Human
cccgggcccuccccacccaaagg

SEQ ID NO: 605708 - RNA, 19 nt, Human
cccucagaaccaauguugc

SEQ ID NO: 605709 - RNA, 27 nt, Human
cccucccagaccucaagccaccccacc

SEQ ID NO: 605710 - RNA, 19 nt, Human
cccugaguccuggcuuucc

SEQ ID NO: 605711 - RNA, 21 nt, Human
cccugaguccuggcuuuccug

SEQ ID NO: 605712 - RNA, 27 nt, Human
ccuagaacccuagccuucaauccuggg

SEQ ID NO: 605713 - RNA, 22 nt, Human
ccucagaaccaauguugcagca

SEQ ID NO: 605714 - RNA, 19 nt, Human
ccuccccacccaaaggccc

SEQ ID NO: 605715 - RNA, 27 nt, Human
ccuccccacccaaaggcccuagaaccc

SEQ ID NO: 605716 - RNA, 24 nt, Human
ccucuucuccaggcugcagggcag

SEQ ID NO: 605717 - RNA, 18 nt, Human
ccuggcccagcagcuccu

SEQ ID NO: 605718 - RNA, 18 nt, Human
cgggcccuccccacccaa

SEQ ID NO: 605719 - RNA, 24 nt, Human
cggggcaggagggcccagagccac

SEQ ID NO: 605720 - RNA, 24 nt, Human
cucccaaguccugcccccugcauu

SEQ ID NO: 605721 - RNA, 18 nt, Human
cuccccaugggggcccca

SEQ ID NO: 605722 - RNA, 21 nt, Human
cucccccgccugcuggaaccu

SEQ ID NO: 605723 - RNA, 19 nt, Human
cuccuuaggcugacccuga

SEQ ID NO: 605724 - RNA, 20 nt, Human
cugcagcaguuggggccagc

SEQ ID NO: 605725 - RNA, 19 nt, Human
cugcauguguccuggcugg

SEQ ID NO: 605726 - RNA, 19 nt, Human
cugcucacuggggagggag

SEQ ID NO: 605727 - RNA, 19 nt, Human
cuuggaccaagcagucaac

SEQ ID NO: 605728 - RNA, 18 nt, Human
gacagguggaggggccaa

SEQ ID NO: 605729 - RNA, 18 nt, Human
gaccucaagccaccccac

SEQ ID NO: 605730 - RNA, 18 nt, Human
gagacccucaugcaggag

SEQ ID NO: 605731 - RNA, 23 nt, Human
gagaggcaggggcacagaggcag

SEQ ID NO: 605732 - RNA, 19 nt, Human
gagauggcacagcaggacc

SEQ ID NO: 605733 - RNA, 23 nt, Human
gaggcaggaaaggauggccagag

SEQ ID NO: 605734 - RNA, 21 nt, Human
gaggcuguccggcccgggccc

SEQ ID NO: 605735 - RNA, 21 nt, Human
gagggauggagcgugcugcug

SEQ ID NO: 605736 - RNA, 24 nt, Human
gagucagccugcccugggaaccag

SEQ ID NO: 605737 - RNA, 23 nt, Human
gcacggagccaccuggaaagcca

SEQ ID NO: 605738 - RNA, 18 nt, Human
gcaggcuccagcucccca

SEQ ID NO: 605739 - RNA, 18 nt, Human
gccaggggucugcaugug

SEQ ID NO: 605740 - RNA, 20 nt, Human
gcccuagaacccuagccuuc

SEQ ID NO: 605741 - RNA, 22 nt, Human
gccggccuggcuguagcugcac

SEQ ID NO: 605742 - RNA, 22 nt, Human
gcugcagggcaggcuccagcuc

SEQ ID NO: 605743 - RNA, 21 nt, Human
ggaaccucccaaguccugccc

SEQ ID NO: 605744 - RNA, 25 nt, Human
ggauugggaggaaagagggagccug

SEQ ID NO: 605745 - RNA, 25 nt, Human
ggcaggaaaggauggccagagccca

SEQ ID NO: 605746 - RNA, 21 nt, Human
ggccagcgugggacuggaggc

SEQ ID NO: 605747 - RNA, 19 nt, Human
ggcugcagggcaggcucca

SEQ ID NO: 605748 - RNA, 19 nt, Human
gggcaggagggcccagagc

SEQ ID NO: 605749 - RNA, 20 nt, Human
ggggcaggagggcccagagc

SEQ ID NO: 605750 - RNA, 20 nt, Human
gugccagggccaggcuugga

SEQ ID NO: 605751 - RNA, 28 nt, Human
guggggcaggggacggagcugaggcugu

SEQ ID NO: 605752 - RNA, 20 nt, Human
guggugccagagcuacgggg

SEQ ID NO: 605753 - RNA, 19 nt, Human
uaaguucuguucauggccu

SEQ ID NO: 605754 - RNA, 30 nt, Human
uaccacugcccaccuggugccaccccagcc

SEQ ID NO: 605755 - RNA, 20 nt, Human
ucacugcagcaaggggcaga

SEQ ID NO: 605756 - RNA, 18 nt, Human
ucacuggggagggaggag

SEQ ID NO: 605757 - RNA, 20 nt, Human
ucacuuggugcucucuggcc

SEQ ID NO: 605758 - RNA, 20 nt, Human
uccugcccccugcauuuccc

SEQ ID NO: 605759 - RNA, 20 nt, Human
ugcccugggaaccaggcagg

SEQ ID NO: 605760 - RNA, 23 nt, Human
ugccgcagaccuggcccagcagc

SEQ ID NO: 605761 - RNA, 23 nt, Human
uggaaagccaaaggcaagcucca

SEQ ID NO: 605762 - RNA, 19 nt, Human
uggccagggccacccuccc

SEQ ID NO: 605763 - RNA, 18 nt, Human
uggcccagcagcuccugc

SEQ ID NO: 605764 - RNA, 19 nt, Human
uggccgcagaggcagcuga

SEQ ID NO: 605765 - RNA, 23 nt, Human
uggcuuuacugcaggggagaggg

SEQ ID NO: 605766 - RNA, 20 nt, Human
ugggacuggaggcccaggug

SEQ ID NO: 605767 - RNA, 21 nt, Human
uggggccagcgugggacugga

SEQ ID NO: 605768 - RNA, 22 nt, Human
ugguggugccagagcuacgggg

SEQ ID NO: 605769 - RNA, 23 nt, Human
uuagcccuguuuugcacuggugg

SEQ ID NO: 605770 - RNA, 20 nt, Human
uuccaggaccccugaccuag

SEQ ID NO: 605771 - RNA, 19 nt, Human
uuccugaccugccguccgu

SEQ ID NO: 605772 - RNA, 21 nt, Human
uucuccaggcugcagggcagg

SEQ ID NO: 605773 - RNA, 20 nt, Human
uuuugcacugguggauugau

SEQ ID NO: 605774 - RNA, 23 nt, Human
aaaaaaaacaaaaaaacuucauu

SEQ ID NO: 605775 - RNA, 24 nt, Human
aaaaaaaacaaaaaaacuucauuu

SEQ ID NO: 605776 - RNA, 23 nt, Human
aaaaaacaaaaaaacuucauuua

SEQ ID NO: 605777 - RNA, 24 nt, Human
aaaacaaaaaaaacaaaaaaacuu

SEQ ID NO: 605778 - RNA, 24 nt, Human
aaaaggaaaacaaaaaaaacaaaa

SEQ ID NO: 605779 - RNA, 18 nt, Human
aaacaaaaaaaacaaaaa

SEQ ID NO: 605780 - RNA, 20 nt, Human
aacaacaccagcaacgcugc

SEQ ID NO: 605781 - RNA, 22 nt, Human
aacaguauuuucagcuucuuac

SEQ ID NO: 605782 - RNA, 19 nt, Human
aagcucccuuccagguauc

SEQ ID NO: 605783 - RNA, 19 nt, Human
aaggagcuggcccugugga

SEQ ID NO: 605784 - RNA, 21 nt, Human
aagguaccuuggccccugaua

SEQ ID NO: 605785 - RNA, 23 nt, Human
acaaaaaaaacaaaaaaacuuca

SEQ ID NO: 605786 - RNA, 21 nt, Human
acaagaaucgccaauacccac

SEQ ID NO: 605787 - RNA, 19 nt, Human
acacagugccucuccaucc

SEQ ID NO: 605788 - RNA, 23 nt, Human
acaggcccccacucccacacccu

SEQ ID NO: 605789 - RNA, 23 nt, Human
acauuuuuuuuuuucuggggggc

SEQ ID NO: 605790 - RNA, 19 nt, Human
acccaucagagacagugac

SEQ ID NO: 605791 - RNA, 23 nt, Human
acgaagccccagaugcuccagug

SEQ ID NO: 605792 - RNA, 19 nt, Human
acuccacccccaagaaaaa

SEQ ID NO: 605793 - RNA, 24 nt, Human
agaaagaaggggaggagccuccag

SEQ ID NO: 605794 - RNA, 22 nt, Human
agaaggaagagaaagaagggga

SEQ ID NO: 605795 - RNA, 23 nt, Human
agaaggggaggagccuccagagu

SEQ ID NO: 605796 - RNA, 23 nt, Human
agacaaauagacaaccacccaga

SEQ ID NO: 605797 - RNA, 23 nt, Human
agacaacacuggacccacagacc

SEQ ID NO: 605798 - RNA, 24 nt, Human
agacaacacuggacccacagacca

SEQ ID NO: 605799 - RNA, 19 nt, Human
agacagcccccaccccaag

SEQ ID NO: 605800 - RNA, 19 nt, Human
agacagcccccaccccaag

SEQ ID NO: 605801 - RNA, 20 nt, Human
agaccuucauagcagagggc

SEQ ID NO: 605802 - RNA, 18 nt, Human
agagaaagaaggggagga

SEQ ID NO: 605803 - RNA, 23 nt, Human
agagacccagccucuucaagggu

SEQ ID NO: 605804 - RNA, 18 nt, Human
agaggggaggggagaaag

SEQ ID NO: 605805 - RNA, 19 nt, Human
agagucccagccccaaccc

SEQ ID NO: 605806 - RNA, 26 nt, Human
agauaaacuuccguuccccaagccca

SEQ ID NO: 605807 - RNA, 21 nt, Human
agcagcugggggcacggggga

SEQ ID NO: 605808 - RNA, 22 nt, Human
agccaggcaaauacccaucaga

SEQ ID NO: 605809 - RNA, 24 nt, Human
agccauaacaauaaaucuggaagu

SEQ ID NO: 605810 - RNA, 22 nt, Human
agcggcugagggcgggagcccg

SEQ ID NO: 605811 - RNA, 24 nt, Human
aggaaagaggggaggggagaaagg

SEQ ID NO: 605812 - RNA, 18 nt, Human
aggaagagaaagaagggg

SEQ ID NO: 605813 - RNA, 21 nt, Human
aggaagagaaagaaggggagg

SEQ ID NO: 605814 - RNA, 22 nt, Human
aggcaaauacccaucagagaca

SEQ ID NO: 605815 - RNA, 26 nt, Human
aggcagaaggaagagaaaggggaccc

SEQ ID NO: 605816 - RNA, 20 nt, Human
agggaggaaaagggcauugg

SEQ ID NO: 605817 - RNA, 22 nt, Human
aggggaggggagaaaggugcuc

SEQ ID NO: 605818 - RNA, 23 nt, Human
agugacaagagcagcugggggca

SEQ ID NO: 605819 - RNA, 20 nt, Human
agugccucuccaucccuggg

SEQ ID NO: 605820 - RNA, 28 nt, Human
auacagauagagaagcaacaaagccagg

SEQ ID NO: 605821 - RNA, 24 nt, Human
aucacaagaaucgccaauacccac

SEQ ID NO: 605822 - RNA, 18 nt, Human
aucuagaaaagggugagg

SEQ ID NO: 605823 - RNA, 22 nt, Human
augauccacaaggcagagaccu

SEQ ID NO: 605824 - RNA, 22 nt, Human
auggcuggacacugacugaggc

SEQ ID NO: 605825 - RNA, 22 nt, Human
caaaaaaaacaaaaaaacuuca

SEQ ID NO: 605826 - RNA, 18 nt, Human
caaagccaggcaaauacc

SEQ ID NO: 605827 - RNA, 23 nt, Human
caaagccaggcaaauacccauca

SEQ ID NO: 605828 - RNA, 24 nt, Human
caaauacccaucagagacagugac

SEQ ID NO: 605829 - RNA, 24 nt, Human
caaauagacaaccacccagacugc

SEQ ID NO: 605830 - RNA, 22 nt, Human
caacaaagccaggcaaauaccc

SEQ ID NO: 605831 - RNA, 21 nt, Human
caagagcauucuucuaagccc

SEQ ID NO: 605832 - RNA, 19 nt, Human
cacagacagcccccacccc

SEQ ID NO: 605833 - RNA, 24 nt, Human
caccaaaaaggaaaacaaaaaaaa

SEQ ID NO: 605834 - RNA, 24 nt, Human
caccaaaaaggaaaacaaaaaaaa

SEQ ID NO: 605835 - RNA, 20 nt, Human
caccagcaacgcugcucgcc

SEQ ID NO: 605836 - RNA, 20 nt, Human
caccccaagcucccuuccag

SEQ ID NO: 605837 - RNA, 23 nt, Human
cacuauccucucccuuaugcaug

SEQ ID NO: 605838 - RNA, 19 nt, Human
cagacaaauagacaaccac

SEQ ID NO: 605839 - RNA, 24 nt, Human
cagacagcccccaccccaagcucc

SEQ ID NO: 605840 - RNA, 20 nt, Human
cagcaacgcugcucgccccg

SEQ ID NO: 605841 - RNA, 19 nt, Human
cagcggcugagggcgggag

SEQ ID NO: 605842 - RNA, 22 nt, Human
cagcuucuuacggugccaugca

SEQ ID NO: 605843 - RNA, 24 nt, Human
cagugccaaggaggucagaccggg

SEQ ID NO: 605844 - RNA, 23 nt, Human
ccagagucccagccccaaccccc

SEQ ID NO: 605845 - RNA, 19 nt, Human
ccccagaugcuccagugcc

SEQ ID NO: 605846 - RNA, 19 nt, Human
cccccaagaaaaauacccu

SEQ ID NO: 605847 - RNA, 18 nt, Human
cccccacucccacacccu

SEQ ID NO: 605848 - RNA, 20 nt, Human
cccccuuacuccacccccaa

SEQ ID NO: 605849 - RNA, 22 nt, Human
ccccgggcccccggccccgccc

SEQ ID NO: 605850 - RNA, 18 nt, Human
ccccggggcccgccgccc

SEQ ID NO: 605851 - RNA, 24 nt, Human
ccccuuacuccacccccaagaaaa

SEQ ID NO: 605852 - RNA, 21 nt, Human
cccgccgccccggcgcccgcc

SEQ ID NO: 605853 - RNA, 21 nt, Human
cccgcugccgccgccgccgcc

SEQ ID NO: 605854 - RNA, 19 nt, Human
cccucgcucuaggugcucc

SEQ ID NO: 605855 - RNA, 19 nt, Human
cccucugccauuggcuacc

SEQ ID NO: 605856 - RNA, 18 nt, Human
cccuuugcacagauccuc

SEQ ID NO: 605857 - RNA, 21 nt, Human
ccgaacccgccgccgcugccg

SEQ ID NO: 605858 - RNA, 22 nt, Human
ccgcccgcugccgccgccgccg

SEQ ID NO: 605859 - RNA, 25 nt, Human
ccgcccgcugccgccgccgccgccc

SEQ ID NO: 605860 - RNA, 25 nt, Human
ccgccgccgccgcccacacauccgg

SEQ ID NO: 605861 - RNA, 25 nt, Human
ccgccgccgccgcccacacauccgg

SEQ ID NO: 605862 - RNA, 21 nt, Human
ccgccgccgcugccgcuaacg

SEQ ID NO: 605863 - RNA, 18 nt, Human
ccgcugccgccgccgccg

SEQ ID NO: 605864 - RNA, 24 nt, Human
ccggcgcccgccguugccgccucc

SEQ ID NO: 605865 - RNA, 18 nt, Human
ccuaaagcacauuuuuuu

SEQ ID NO: 605866 - RNA, 18 nt, Human
ccucuucaaggguaucca

SEQ ID NO: 605867 - RNA, 23 nt, Human
ccugggguugaagugaggaggac

SEQ ID NO: 605868 - RNA, 19 nt, Human
ccuuugcuuccugcccucc

SEQ ID NO: 605869 - RNA, 20 nt, Human
cgaggaauggaagagggaaa

SEQ ID NO: 605870 - RNA, 19 nt, Human
cgccccggggcccgccgcc

SEQ ID NO: 605871 - RNA, 20 nt, Human
cgccgccgcccacacauccg

SEQ ID NO: 605872 - RNA, 22 nt, Human
cgccgccgcugccgcuaacgcc

SEQ ID NO: 605873 - RNA, 23 nt, Human
cggcaggaaaggcggcccgaacc

SEQ ID NO: 605874 - RNA, 20 nt, Human
cgugggcagcggcugagggc

SEQ ID NO: 605875 - RNA, 23 nt, Human
cucccaaauaggacauucuccuu

SEQ ID NO: 605876 - RNA, 21 nt, Human
cucccccuuacuccaccccca

SEQ ID NO: 605877 - RNA, 27 nt, Human
cucccccuuacuccacccccaagaaaa

SEQ ID NO: 605878 - RNA, 21 nt, Human
cugaagacagacaaauagaca

SEQ ID NO: 605879 - RNA, 22 nt, Human
cugugcauauauuuccucaacu

SEQ ID NO: 605880 - RNA, 23 nt, Human
cugugcauauauuuccucaacuc

SEQ ID NO: 605881 - RNA, 18 nt, Human
cuuugugcccagcccccc

SEQ ID NO: 605882 - RNA, 24 nt, Human
gaaaaacaaaauuaugcuggccug

SEQ ID NO: 605883 - RNA, 21 nt, Human
gaaauuggaagcagggucccu

SEQ ID NO: 605884 - RNA, 18 nt, Human
gaacaggcccccacuccc

SEQ ID NO: 605885 - RNA, 22 nt, Human
gaaggaaggcagggaggaaaag

SEQ ID NO: 605886 - RNA, 27 nt, Human
gaaggggaggagccuccagagucccag

SEQ ID NO: 605887 - RNA, 21 nt, Human
gagagguguguugguuguuuu

SEQ ID NO: 605888 - RNA, 21 nt, Human
gauagagaagcaacaaagcca

SEQ ID NO: 605889 - RNA, 19 nt, Human
gcagaaggaagagaaagaa

SEQ ID NO: 605890 - RNA, 21 nt, Human
gccaaccagcuaaaggaucac

SEQ ID NO: 605891 - RNA, 19 nt, Human
gccauaacaauaaaucugg

SEQ ID NO: 605892 - RNA, 19 nt, Human
gccccggggcccgccgccc

SEQ ID NO: 605893 - RNA, 20 nt, Human
gcccgccgccccggcgcccg

SEQ ID NO: 605894 - RNA, 21 nt, Human
gccgccgcugccgcuaacgcc

SEQ ID NO: 605895 - RNA, 21 nt, Human
gccgccuccucagucggacuc

SEQ ID NO: 605896 - RNA, 21 nt, Human
gcgcucgccgucccagucgga

SEQ ID NO: 605897 - RNA, 23 nt, Human
ggaaauaaugggggaaggaaggc

SEQ ID NO: 605898 - RNA, 19 nt, Human
ggaaggaaggcagggagga

SEQ ID NO: 605899 - RNA, 19 nt, Human
ggaaggauggauucccuug

SEQ ID NO: 605900 - RNA, 20 nt, Human
ggaaggggagaugggagcag

SEQ ID NO: 605901 - RNA, 21 nt, Human
ggagaaaggugcucaggugcu

SEQ ID NO: 605902 - RNA, 22 nt, Human
ggagcccgggcagcggagccag

SEQ ID NO: 605903 - RNA, 19 nt, Human
ggaggaaaagggcauuggg

SEQ ID NO: 605904 - RNA, 18 nt, Human
ggaggggagaaaggugcu

SEQ ID NO: 605905 - RNA, 22 nt, Human
ggcacgggggaggcagaaggaa

SEQ ID NO: 605906 - RNA, 23 nt, Human
ggcacgggggaggcagaaggaag

SEQ ID NO: 605907 - RNA, 20 nt, Human
ggcagguacacacuauccuc

SEQ ID NO: 605908 - RNA, 21 nt, Human
gggcagguacacacuauccuc

SEQ ID NO: 605909 - RNA, 20 nt, Human
gggcccccggccccgcccgc

SEQ ID NO: 605910 - RNA, 18 nt, Human
ggggaaggaaggcaggga

SEQ ID NO: 605911 - RNA, 25 nt, Human
ggggaaggggagaugggagcagggu

SEQ ID NO: 605912 - RNA, 20 nt, Human
ggggagaaaggugcucaggu

SEQ ID NO: 605913 - RNA, 25 nt, Human
ggggagaaaggugcucaggugcuag

SEQ ID NO: 605914 - RNA, 20 nt, Human
gggggaaggaaggcagggaa

SEQ ID NO: 605915 - RNA, 21 nt, Human
gggugaggaaagaggggaggg

SEQ ID NO: 605916 - RNA, 22 nt, Human
uaaagacaucucuuugacuccu

SEQ ID NO: 605917 - RNA, 18 nt, Human
uacagggcaccuaaagca

SEQ ID NO: 605918 - RNA, 26 nt, Human
uacuccacccccaagaaaaauacccu

SEQ ID NO: 605919 - RNA, 20 nt, Human
uagcagagggcagggcaggu

SEQ ID NO: 605920 - RNA, 26 nt, Human
uaucaaaaaggggaaggauggauucc

SEQ ID NO: 605921 - RNA, 24 nt, Human
ucacauuuaccuucugucuuacau

SEQ ID NO: 605922 - RNA, 21 nt, Human
ucagagacagugacaagagca

SEQ ID NO: 605923 - RNA, 26 nt, Human
ucagagacagugacaagagcagcugg

SEQ ID NO: 605924 - RNA, 22 nt, Human
uccaagauaaacuuccguuccc

SEQ ID NO: 605925 - RNA, 27 nt, Human
uccaagauaaacuuccguuccccaagc

SEQ ID NO: 605926 - RNA, 22 nt, Human
uccagagucccagccccaaccc

SEQ ID NO: 605927 - RNA, 19 nt, Human
ucccagccccaacccccuc

SEQ ID NO: 605928 - RNA, 20 nt, Human
ucccagccccaacccccucu

SEQ ID NO: 605929 - RNA, 23 nt, Human
ucccagccccaacccccucugcc

SEQ ID NO: 605930 - RNA, 19 nt, Human
ucccagucggagcugagcc

SEQ ID NO: 605931 - RNA, 20 nt, Human
ucccauauacacagcagcug

SEQ ID NO: 605932 - RNA, 18 nt, Human
ucccugggguugaaguga

SEQ ID NO: 605933 - RNA, 25 nt, Human
uccuucucuuuggucugucggacuc

SEQ ID NO: 605934 - RNA, 21 nt, Human
ucgccccggggcccgccgccc

SEQ ID NO: 605935 - RNA, 21 nt, Human
ucuaagcccuggaguagcucg

SEQ ID NO: 605936 - RNA, 19 nt, Human
ugaacgaagccccagaugc

SEQ ID NO: 605937 - RNA, 21 nt, Human
ugacaagagcagcugggggca

SEQ ID NO: 605938 - RNA, 27 nt, Human
ugacuauaaauuaggaaaaacaaaauu

SEQ ID NO: 605939 - RNA, 21 nt, Human
ugacugaggcccugcaucaca

SEQ ID NO: 605940 - RNA, 23 nt, Human
ugagccaaccagcuaaaggauca

SEQ ID NO: 605941 - RNA, 20 nt, Human
ugaggaggacuacaggcugg

SEQ ID NO: 605942 - RNA, 25 nt, Human
ugccaugcaggcuuuaccaagaccu

SEQ ID NO: 605943 - RNA, 21 nt, Human
ugccgccgccgccgcccacac

SEQ ID NO: 605944 - RNA, 18 nt, Human
ugccuguguugggaacuu

SEQ ID NO: 605945 - RNA, 21 nt, Human
ugcuccccacaaaucccuggg

SEQ ID NO: 605946 - RNA, 21 nt, Human
uggacccacagaccaagagca

SEQ ID NO: 605947 - RNA, 23 nt, Human
uggaugacagacaacacuggacc

SEQ ID NO: 605948 - RNA, 21 nt, Human
ugggcagcggcugagggcggg

SEQ ID NO: 605949 - RNA, 26 nt, Human
ugggggaaggaaggcagggaggaaaa

SEQ ID NO: 605950 - RNA, 22 nt, Human
ugggguggggggaagggauucu

SEQ ID NO: 605951 - RNA, 20 nt, Human
ugggguugaagugaggagga

SEQ ID NO: 605952 - RNA, 21 nt, Human
ugugaagagacccagccucuu

SEQ ID NO: 605953 - RNA, 22 nt, Human
uuacuccacccccaagaaaaau

SEQ ID NO: 605954 - RNA, 23 nt, Human
uuccccaagcccaccaaucccug

SEQ ID NO: 605955 - RNA, 22 nt, Human
uuccuuugcuuccugcccuccc

SEQ ID NO: 605956 - RNA, 19 nt, Human
uucuauguaguggcucuaa

SEQ ID NO: 605957 - RNA, 18 nt, Human
uugaugcccaggauuaca

SEQ ID NO: 605958 - RNA, 19 nt, Human
uugcaccaaaaaggaaaac

SEQ ID NO: 605959 - RNA, 18 nt, Human
uuuuuuuuuuuuuuucug

SEQ ID NO: 605960 - RNA, 21 nt, Human
aaacacaggaucugacuggug

SEQ ID NO: 605961 - RNA, 23 nt, Human
aacugcagggccucaauuucccu

SEQ ID NO: 605962 - RNA, 23 nt, Human
aagcugccuuuccccuguccugc

SEQ ID NO: 605963 - RNA, 23 nt, Human
aaggggcaguggggugagaaggu

SEQ ID NO: 605964 - RNA, 21 nt, Human
acacaagcucaggggcuuggg

SEQ ID NO: 605965 - RNA, 24 nt, Human
acaggaucugacuggugggcacaa

SEQ ID NO: 605966 - RNA, 18 nt, Human
acccuccccagcuccacc

SEQ ID NO: 605967 - RNA, 25 nt, Human
agcggcagcagccaggcggcuggag

SEQ ID NO: 605968 - RNA, 22 nt, Human
aggaggaggcagcggcagcagc

SEQ ID NO: 605969 - RNA, 23 nt, Human
aggcggcuggaggacaucagcga

SEQ ID NO: 605970 - RNA, 18 nt, Human
aggguggaguuggcauga

SEQ ID NO: 605971 - RNA, 19 nt, Human
agguggggugggcaguccu

SEQ ID NO: 605972 - RNA, 22 nt, Human
agguggggugggcaguccuccg

SEQ ID NO: 605973 - RNA, 23 nt, Human
caaaacacaggaucugacuggug

SEQ ID NO: 605974 - RNA, 21 nt, Human
caagccucuuccgccagugcc

SEQ ID NO: 605975 - RNA, 20 nt, Human
caaggaggaacgggaggacc

SEQ ID NO: 605976 - RNA, 23 nt, Human
cacaggaucugacuggugggcac

SEQ ID NO: 605977 - RNA, 19 nt, Human
cacccuccccagcuccacc

SEQ ID NO: 605978 - RNA, 24 nt, Human
cagaaugggugcccagagagugcc

SEQ ID NO: 605979 - RNA, 19 nt, Human
cagcaggaggaaagggugg

SEQ ID NO: 605980 - RNA, 20 nt, Human
cagcgaggacccgagcuggg

SEQ ID NO: 605981 - RNA, 18 nt, Human
caggaggaggcagcggca

SEQ ID NO: 605982 - RNA, 21 nt, Human
caggcagggcugaugguggca

SEQ ID NO: 605983 - RNA, 18 nt, Human
caggcagugacgagcugg

SEQ ID NO: 605984 - RNA, 23 nt, Human
caguggccguguuccucuggggc

SEQ ID NO: 605985 - RNA, 18 nt, Human
ccaugcugggaggugggg

SEQ ID NO: 605986 - RNA, 24 nt, Human
ccccaggccccggcaccaagccuc

SEQ ID NO: 605987 - RNA, 19 nt, Human
cccugggcuugggccuccg

SEQ ID NO: 605988 - RNA, 18 nt, Human
ccucacaggaaguggggg

SEQ ID NO: 605989 - RNA, 22 nt, Human
ccucacaggaagugggggugag

SEQ ID NO: 605990 - RNA, 21 nt, Human
ccucagagccccaggccccgg

SEQ ID NO: 605991 - RNA, 19 nt, Human
ccuccccagcuccaccgcc

SEQ ID NO: 605992 - RNA, 21 nt, Human
ccuccgccccuuacccaggag

SEQ ID NO: 605993 - RNA, 19 nt, Human
ccugcucugguuuugugga

SEQ ID NO: 605994 - RNA, 25 nt, Human
ccuggcccacccgcugguccccugg

SEQ ID NO: 605995 - RNA, 18 nt, Human
ccuggcuccccuucuccc

SEQ ID NO: 605996 - RNA, 22 nt, Human
cgggaggaccuggaugcugaug

SEQ ID NO: 605997 - RNA, 20 nt, Human
cguucgugcucccacccucc

SEQ ID NO: 605998 - RNA, 23 nt, Human
cuccagguuccugcccugggcuu

SEQ ID NO: 605999 - RNA, 20 nt, Human
cuccggcauagcaaggagga

SEQ ID NO: 606000 - RNA, 20 nt, Human
cugcccugggcuugggccuc

SEQ ID NO: 606001 - RNA, 26 nt, Human
cugcucugguuuuguggaaugagcag

SEQ ID NO: 606002 - RNA, 24 nt, Human
cuguggccaaaguguccuugcucc

SEQ ID NO: 606003 - RNA, 20 nt, Human
gagcagagguggggugggca

SEQ ID NO: 606004 - RNA, 20 nt, Human
gagccugcggugcuccccag

SEQ ID NO: 606005 - RNA, 19 nt, Human
gagguggggcuggaggagc

SEQ ID NO: 606006 - RNA, 22 nt, Human
gauggguuggugauuaaagccu

SEQ ID NO: 606007 - RNA, 25 nt, Human
gcaaggaggaacgggaggaccugga

SEQ ID NO: 606008 - RNA, 19 nt, Human
gcaccaagccucuuccgcc

SEQ ID NO: 606009 - RNA, 22 nt, Human
gcagcaaggcuccucacucccu

SEQ ID NO: 606010 - RNA, 22 nt, Human
gcccugggcuugggccuccguc

SEQ ID NO: 606011 - RNA, 19 nt, Human
gccuggcccacccgcugca

SEQ ID NO: 606012 - RNA, 20 nt, Human
gcuccagguuccugcccugg

SEQ ID NO: 606013 - RNA, 19 nt, Human
gcucccacccuccccagcu

SEQ ID NO: 606014 - RNA, 23 nt, Human
gcucccacccuccccagcuccac

SEQ ID NO: 606015 - RNA, 21 nt, Human
ggaggaacgggaggaccugga

SEQ ID NO: 606016 - RNA, 20 nt, Human
ggaggacaucagcgaggacc

SEQ ID NO: 606017 - RNA, 21 nt, Human
ggcagcagccaggcggcugga

SEQ ID NO: 606018 - RNA, 18 nt, Human
ggccaacggcuuuaaaca

SEQ ID NO: 606019 - RNA, 18 nt, Human
ggccuggcccacccgcug

SEQ ID NO: 606020 - RNA, 23 nt, Human
ggcuugggguuuaucccgagggc

SEQ ID NO: 606021 - RNA, 19 nt, Human
gggcaggcagugacgagcu

SEQ ID NO: 606022 - RNA, 20 nt, Human
gggcuggaggagcugaguuc

SEQ ID NO: 606023 - RNA, 20 nt, Human
gggcuugggccuccgucugg

SEQ ID NO: 606024 - RNA, 18 nt, Human
ggggaaggggcagugggg

SEQ ID NO: 606025 - RNA, 23 nt, Human
ggggaggcuugauguugaugggu

SEQ ID NO: 606026 - RNA, 21 nt, Human
ggugggcaguccuccgccccu

SEQ ID NO: 606027 - RNA, 22 nt, Human
gguuuuguugccaaagggcagg

SEQ ID NO: 606028 - RNA, 23 nt, Human
gucaaccucaaugcccugcucau

SEQ ID NO: 606029 - RNA, 21 nt, Human
guccuggcuccccuucucccg

SEQ ID NO: 606030 - RNA, 18 nt, Human
gugaggagccugcggugc

SEQ ID NO: 606031 - RNA, 21 nt, Human
gugcccagagagugccaugga

SEQ ID NO: 606032 - RNA, 19 nt, Human
uacccaggaggaggcagcg

SEQ ID NO: 606033 - RNA, 21 nt, Human
uagacuggacagaggugggua

SEQ ID NO: 606034 - RNA, 18 nt, Human
uaucccgagggcacaggg

SEQ ID NO: 606035 - RNA, 18 nt, Human
uccagguuccugcccugg

SEQ ID NO: 606036 - RNA, 21 nt, Human
ucccaaagccaauccuuggca

SEQ ID NO: 606037 - RNA, 21 nt, Human
uccccagaaaaggggaagggg

SEQ ID NO: 606038 - RNA, 23 nt, Human
uccccagaaaaggggaaggggca

SEQ ID NO: 606039 - RNA, 23 nt, Human
uccccagcuccaccgccuggucu

SEQ ID NO: 606040 - RNA, 23 nt, Human
uccccagcuccaccgccuggucu

SEQ ID NO: 606041 - RNA, 25 nt, Human
uccccagcuccaccgccuggucuuc

SEQ ID NO: 606042 - RNA, 21 nt, Human
ucugccuggggcccacugcau

SEQ ID NO: 606043 - RNA, 23 nt, Human
ugaacgcccacaaaaagguuugg

SEQ ID NO: 606044 - RNA, 20 nt, Human
ugaaugguagggcaccaugc

SEQ ID NO: 606045 - RNA, 19 nt, Human
ugaugguggcagggugggg

SEQ ID NO: 606046 - RNA, 19 nt, Human
ugcagggccucaauuuccc

SEQ ID NO: 606047 - RNA, 24 nt, Human
ugcaguugcccuaaggaaaaauaa

SEQ ID NO: 606048 - RNA, 19 nt, Human
ugccaggccagugucacaa

SEQ ID NO: 606049 - RNA, 18 nt, Human
ugccauggagaugaaugg

SEQ ID NO: 606050 - RNA, 21 nt, Human
ugcccagagagugccauggag

SEQ ID NO: 606051 - RNA, 30 nt, Human
ugccuaagaccaacugcguuggacaccauu

SEQ ID NO: 606052 - RNA, 18 nt, Human
ugccuggggcccacugca

SEQ ID NO: 606053 - RNA, 23 nt, Human
ugcuccagguuccugcccugggc

SEQ ID NO: 606054 - RNA, 19 nt, Human
ugcugggagguggggcugg

SEQ ID NO: 606055 - RNA, 22 nt, Human
uggaaugagcagagguggggug

SEQ ID NO: 606056 - RNA, 19 nt, Human
uggacaccauaagccacag

SEQ ID NO: 606057 - RNA, 25 nt, Human
uggcauggccuuugggacucaaaac

SEQ ID NO: 606058 - RNA, 23 nt, Human
uggcuccaggcagggcugauggu

SEQ ID NO: 606059 - RNA, 23 nt, Human
ugggagcacacaggcacagaaca

SEQ ID NO: 606060 - RNA, 18 nt, Human
ugggagguggggcuggag

SEQ ID NO: 606061 - RNA, 22 nt, Human
ugggggugaggagccugcggug

SEQ ID NO: 606062 - RNA, 21 nt, Human
uggguguggaaggauggccgg

SEQ ID NO: 606063 - RNA, 25 nt, Human
uggguguggaaggauggccggguuu

SEQ ID NO: 606064 - RNA, 23 nt, Human
uguaggguggaguuggcaugagu

SEQ ID NO: 606065 - RNA, 20 nt, Human
ugucacaagcgcuaccaucu

SEQ ID NO: 606066 - RNA, 20 nt, Human
uuaaacacaagcucaggggc

SEQ ID NO: 606067 - RNA, 23 nt, Human
uuacccaggaggaggcagcggca

SEQ ID NO: 606068 - RNA, 23 nt, Human
uuauuugaaccggccugggggag

SEQ ID NO: 606069 - RNA, 18 nt, Human
uuccccuguccugcugug

SEQ ID NO: 606070 - RNA, 24 nt, Human
aaaaagaugcacagagagacccuc

SEQ ID NO: 606071 - RNA, 22 nt, Human
aaagaugcacagagagacccuc

SEQ ID NO: 606072 - RNA, 26 nt, Human
aaaugccagagugcugcaccauuucc

SEQ ID NO: 606073 - RNA, 24 nt, Human
aacccucagagcaaccagaaggga

SEQ ID NO: 606074 - RNA, 18 nt, Human
agagagagagaagcagag

SEQ ID NO: 606075 - RNA, 19 nt, Human
agagcaugggcagcagcag

SEQ ID NO: 606076 - RNA, 19 nt, Human
agaggguagggaaggagag

SEQ ID NO: 606077 - RNA, 23 nt, Human
agaggguagggaaggagagggag

SEQ ID NO: 606078 - RNA, 20 nt, Human
agcagcaggagugagagggg

SEQ ID NO: 606079 - RNA, 19 nt, Human
agggagggcagagcauggg

SEQ ID NO: 606080 - RNA, 18 nt, Human
auggaaacacagcuugcc

SEQ ID NO: 606081 - RNA, 19 nt, Human
caaccagaagggagggcag

SEQ ID NO: 606082 - RNA, 21 nt, Human
caaccagaagggagggcagag

SEQ ID NO: 606083 - RNA, 21 nt, Human
caauaacgggggaagaaagga

SEQ ID NO: 606084 - RNA, 24 nt, Human
cacagagagacccucagagaggcc

SEQ ID NO: 606085 - RNA, 18 nt, Human
cagcagcaggagugagag

SEQ ID NO: 606086 - RNA, 20 nt, Human
cagcagcaggagugagaggg

SEQ ID NO: 606087 - RNA, 21 nt, Human
cagcagcaggagugagagggg

SEQ ID NO: 606088 - RNA, 22 nt, Human
ccaacaagcaagguagcuccag

SEQ ID NO: 606089 - RNA, 21 nt, Human
ccccaucuguuagugcaucug

SEQ ID NO: 606090 - RNA, 19 nt, Human
cccccaacaagcaagguag

SEQ ID NO: 606091 - RNA, 19 nt, Human
cccgcuccagccgauccac

SEQ ID NO: 606092 - RNA, 18 nt, Human
cccgugggguccagggag

SEQ ID NO: 606093 - RNA, 22 nt, Human
ccugggacaggggcccgugggg

SEQ ID NO: 606094 - RNA, 21 nt, Human
cguccagcuccugcugcagcc

SEQ ID NO: 606095 - RNA, 20 nt, Human
cucagagaggccaagaaaga

SEQ ID NO: 606096 - RNA, 22 nt, Human
cucccugccugccccgcuccuc

SEQ ID NO: 606097 - RNA, 24 nt, Human
cuccucuguguuuaggggucaucc

SEQ ID NO: 606098 - RNA, 27 nt, Human
cuucugucgcucaggaguucaggggug

SEQ ID NO: 606099 - RNA, 21 nt, Human
gacgcagaaaugggggaagga

SEQ ID NO: 606100 - RNA, 19 nt, Human
gagaagcagagggaauggg

SEQ ID NO: 606101 - RNA, 23 nt, Human
gagagggguccccuuguccugcc

SEQ ID NO: 606102 - RNA, 20 nt, Human
gaggguaaaggacacuccuu

SEQ ID NO: 606103 - RNA, 23 nt, Human
gauggugagaggguagggaagga

SEQ ID NO: 606104 - RNA, 19 nt, Human
gcacagagagacccucaga

SEQ ID NO: 606105 - RNA, 21 nt, Human
ggaagaaaggaggacagggag

SEQ ID NO: 606106 - RNA, 22 nt, Human
ggaagaaaggaggacagggagc

SEQ ID NO: 606107 - RNA, 24 nt, Human
ggagguugcaggggacccaggugg

SEQ ID NO: 606108 - RNA, 21 nt, Human
ggcugguggaggccuggggcc

SEQ ID NO: 606109 - RNA, 19 nt, Human
ggguagggaaggagaggga

SEQ ID NO: 606110 - RNA, 25 nt, Human
ggguuggaguuuauuucugccagag

SEQ ID NO: 606111 - RNA, 22 nt, Human
guccugccccuuugcaagggaa

SEQ ID NO: 606112 - RNA, 20 nt, Human
gugagaggguagggaaggag

SEQ ID NO: 606113 - RNA, 22 nt, Human
uacccagucccccaacaagcaa

SEQ ID NO: 606114 - RNA, 18 nt, Human
uagggaaggagagggagg

SEQ ID NO: 606115 - RNA, 18 nt, Human
ucaaggcugguggaggcc

SEQ ID NO: 606116 - RNA, 24 nt, Human
ucagagaggccaagaaagauggug

SEQ ID NO: 606117 - RNA, 20 nt, Human
uccagcuccugcugcagccg

SEQ ID NO: 606118 - RNA, 24 nt, Human
ucccccaacaagcaagguagcucc

SEQ ID NO: 606119 - RNA, 21 nt, Human
ucccugccugccccgcucccc

SEQ ID NO: 606120 - RNA, 21 nt, Human
ucugccagagccuggaggcug

SEQ ID NO: 606121 - RNA, 24 nt, Human
ucuguguuuaggggucauccuuug

SEQ ID NO: 606122 - RNA, 18 nt, Human
ugccagagccuggaggcu

SEQ ID NO: 606123 - RNA, 18 nt, Human
ugccccgcuccucugugu

SEQ ID NO: 606124 - RNA, 21 nt, Human
uggaggccuggggcuucuguc

SEQ ID NO: 606125 - RNA, 22 nt, Human
uggaggcugggaggguaaagga

SEQ ID NO: 606126 - RNA, 21 nt, Human
uggcgucguccagcuccugcu

SEQ ID NO: 606127 - RNA, 27 nt, Human
ugggacaggggcccgugggguccaggg

SEQ ID NO: 606128 - RNA, 24 nt, Human
ugggaggguaaaggacacuccuuu

SEQ ID NO: 606129 - RNA, 23 nt, Human
ugggggaaggagaguggcuacgu

SEQ ID NO: 606130 - RNA, 25 nt, Human
uguccugccccuuugcaaggguuca

SEQ ID NO: 606131 - RNA, 23 nt, Human
uuggaguuuauuucugccagagc

SEQ ID NO: 606132 - RNA, 19 nt, Human
aaaacgcaaggguguucug

SEQ ID NO: 606133 - RNA, 19 nt, Human
aaacagccgccuuucccuu

SEQ ID NO: 606134 - RNA, 19 nt, Human
aacccccguccggcuggga

SEQ ID NO: 606135 - RNA, 18 nt, Human
aagcgguccuccugccuu

SEQ ID NO: 606136 - RNA, 24 nt, Human
aagcgguccuccugccuuggccuu

SEQ ID NO: 606137 - RNA, 23 nt, Human
acagcgcuuuccacacacccugu

SEQ ID NO: 606138 - RNA, 21 nt, Human
accagccccacagcugaggcc

SEQ ID NO: 606139 - RNA, 20 nt, Human
acuacagaaguaaaagcaac

SEQ ID NO: 606140 - RNA, 21 nt, Human
acuggagugagugggcaacau

SEQ ID NO: 606141 - RNA, 21 nt, Human
acugugagcggcucgggaggg

SEQ ID NO: 606142 - RNA, 22 nt, Human
agaaaccagccccaaacucauc

SEQ ID NO: 606143 - RNA, 18 nt, Human
agaaagagccaaacagcc

SEQ ID NO: 606144 - RNA, 20 nt, Human
agaagcuaucacagaugcua

SEQ ID NO: 606145 - RNA, 22 nt, Human
agagacagggucucgcucuauu

SEQ ID NO: 606146 - RNA, 18 nt, Human
agcgguccuccugccuug

SEQ ID NO: 606147 - RNA, 24 nt, Human
agcgguccuccugccuuggccuuc

SEQ ID NO: 606148 - RNA, 18 nt, Human
aggcagaggcuguggcaa

SEQ ID NO: 606149 - RNA, 20 nt, Human
aggcagaggcuguggcaaac

SEQ ID NO: 606150 - RNA, 20 nt, Human
aggcagugccucugaguguc

SEQ ID NO: 606151 - RNA, 19 nt, Human
agguuccaggcagaggcug

SEQ ID NO: 606152 - RNA, 18 nt, Human
aguagcugggauucuagg

SEQ ID NO: 606153 - RNA, 20 nt, Human
agucccuggcccgggccucc

SEQ ID NO: 606154 - RNA, 20 nt, Human
aucacagaugcuacagggcu

SEQ ID NO: 606155 - RNA, 19 nt, Human
auugcccagguuggccuug

SEQ ID NO: 606156 - RNA, 23 nt, Human
caaaaauggagccaaggcucuaa

SEQ ID NO: 606157 - RNA, 24 nt, Human
caaaaccccgagguaaaaggcugg

SEQ ID NO: 606158 - RNA, 25 nt, Human
caacaaaacgcaaggguguucugcu

SEQ ID NO: 606159 - RNA, 27 nt, Human
caagcgguccuccugccuuggccuucc

SEQ ID NO: 606160 - RNA, 23 nt, Human
caaggugaggcucucuguccccc

SEQ ID NO: 606161 - RNA, 22 nt, Human
cacacacccaggccuucccaga

SEQ ID NO: 606162 - RNA, 25 nt, Human
cacacacccugugcccuugugaccc

SEQ ID NO: 606163 - RNA, 18 nt, Human
cagaggcuguggcaaaca

SEQ ID NO: 606164 - RNA, 21 nt, Human
cagcacagugccccguccucu

SEQ ID NO: 606165 - RNA, 25 nt, Human
caggcccccuggcucccagggaggc

SEQ ID NO: 606166 - RNA, 23 nt, Human
cagggcucagagaggggccgggg

SEQ ID NO: 606167 - RNA, 24 nt, Human
cagggucucgcucuauugcccagg

SEQ ID NO: 606168 - RNA, 22 nt, Human
caguuucacaagcgagcggcgg

SEQ ID NO: 606169 - RNA, 23 nt, Human
caugccccugcgccgggcugccc

SEQ ID NO: 606170 - RNA, 24 nt, Human
cccagaaaccagccccaaacucau

SEQ ID NO: 606171 - RNA, 24 nt, Human
ccccacagcugaggccaucuccuc

SEQ ID NO: 606172 - RNA, 25 nt, Human
ccccucaggcucccaaaccugccaa

SEQ ID NO: 606173 - RNA, 22 nt, Human
ccccuggugaagucccuggccc

SEQ ID NO: 606174 - RNA, 22 nt, Human
cccugcgccgggcugcccugcu

SEQ ID NO: 606175 - RNA, 24 nt, Human
cccuucccagaaaccagccccaaa

SEQ ID NO: 606176 - RNA, 22 nt, Human
cccuugugacccagccccuggu

SEQ ID NO: 606177 - RNA, 18 nt, Human
ccucccaggcccccuggc

SEQ ID NO: 606178 - RNA, 24 nt, Human
ccuccugccuuggccuuccgagua

SEQ ID NO: 606179 - RNA, 23 nt, Human
ccucuauggcgugguccccacuu

SEQ ID NO: 606180 - RNA, 20 nt, Human
ccuggacucaagcgguccuc

SEQ ID NO: 606181 - RNA, 23 nt, Human
ccuggcccgggccuccuugugca

SEQ ID NO: 606182 - RNA, 22 nt, Human
ccuguuggccucaaaaccccga

SEQ ID NO: 606183 - RNA, 22 nt, Human
ccuucccagaaaccagccccaa

SEQ ID NO: 606184 - RNA, 18 nt, Human
ccuugaaucccuggacuc

SEQ ID NO: 606185 - RNA, 19 nt, Human
ccuugugacccagccccug

SEQ ID NO: 606186 - RNA, 19 nt, Human
ccuuucccuucacucaaaa

SEQ ID NO: 606187 - RNA, 22 nt, Human
cgagagcaccgggagcugcagu

SEQ ID NO: 606188 - RNA, 19 nt, Human
cggcucgggaggggucucc

SEQ ID NO: 606189 - RNA, 21 nt, Human
cgggaugaaaucacagcuguu

SEQ ID NO: 606190 - RNA, 22 nt, Human
cggugaccggcucuucccccac

SEQ ID NO: 606191 - RNA, 21 nt, Human
cuaggcgcaugccccugcgcc

SEQ ID NO: 606192 - RNA, 18 nt, Human
cucaagcgguccuccugc

SEQ ID NO: 606193 - RNA, 19 nt, Human
cucacgguccacauguccc

SEQ ID NO: 606194 - RNA, 24 nt, Human
cucccaggcccccuggcucccagc

SEQ ID NO: 606195 - RNA, 18 nt, Human
cucuauugcccagguugg

SEQ ID NO: 606196 - RNA, 24 nt, Human
cucucugucccccuuuaccaggag

SEQ ID NO: 606197 - RNA, 20 nt, Human
cucugcacgggcccagugcc

SEQ ID NO: 606198 - RNA, 23 nt, Human
cucugcacgggcccagugccugg

SEQ ID NO: 606199 - RNA, 20 nt, Human
cucuucuccccgcuggcccc

SEQ ID NO: 606200 - RNA, 18 nt, Human
cugcagugggagcagacc

SEQ ID NO: 606201 - RNA, 23 nt, Human
cugccuuggccuuccgaguagcu

SEQ ID NO: 606202 - RNA, 22 nt, Human
cuucccagaaaccagccccaaa

SEQ ID NO: 606203 - RNA, 24 nt, Human
cuuggccuuccgaguagcugggau

SEQ ID NO: 606204 - RNA, 19 nt, Human
gaagucccuggcccgggcc

SEQ ID NO: 606205 - RNA, 20 nt, Human
gagagcaccgggagcugcag

SEQ ID NO: 606206 - RNA, 22 nt, Human
gagcuccacccacuugacccag

SEQ ID NO: 606207 - RNA, 26 nt, Human
gaguagcugggauucuaggcgcaugc

SEQ ID NO: 606208 - RNA, 20 nt, Human
gauucuaggcgcaugccccu

SEQ ID NO: 606209 - RNA, 26 nt, Human
gccaucuccucacugagccugggacc

SEQ ID NO: 606210 - RNA, 20 nt, Human
gccuuggccuuccgaguagc

SEQ ID NO: 606211 - RNA, 20 nt, Human
gcgccgggcugcccugcucu

SEQ ID NO: 606212 - RNA, 22 nt, Human
gcuccacccacuugacccaguc

SEQ ID NO: 606213 - RNA, 21 nt, Human
ggaaucccucgccuucugcuc

SEQ ID NO: 606214 - RNA, 24 nt, Human
ggauggugucugcaaggcagugcc

SEQ ID NO: 606215 - RNA, 25 nt, Human
ggccaucuccucacugagccuggga

SEQ ID NO: 606216 - RNA, 19 nt, Human
ggcccccuggcucccagca

SEQ ID NO: 606217 - RNA, 21 nt, Human
gugggaaugguggcaucucag

SEQ ID NO: 606218 - RNA, 22 nt, Human
uaaacguucccuucccagaaac

SEQ ID NO: 606219 - RNA, 22 nt, Human
uaaauaaacguucccuucccag

SEQ ID NO: 606220 - RNA, 22 nt, Human
uacuaaauaaacguucccuucc

SEQ ID NO: 606221 - RNA, 21 nt, Human
uaggcgcaugccccugcgccg

SEQ ID NO: 606222 - RNA, 19 nt, Human
uaucacagaugcuacaggg

SEQ ID NO: 606223 - RNA, 19 nt, Human
ucacagaugcuacagggcu

SEQ ID NO: 606224 - RNA, 21 nt, Human
ucacugagccugggaccaggu

SEQ ID NO: 606225 - RNA, 19 nt, Human
ucaguccccgugggaaugg

SEQ ID NO: 606226 - RNA, 25 nt, Human
ucccagaaaccagccccaaacucau

SEQ ID NO: 606227 - RNA, 22 nt, Human
ucccagaacacgagagcaccgg

SEQ ID NO: 606228 - RNA, 22 nt, Human
ucccucgccuucugcucuggcu

SEQ ID NO: 606229 - RNA, 24 nt, Human
ucccuggacucaagcgguccuccu

SEQ ID NO: 606230 - RNA, 25 nt, Human
ucccuggacucaagcgguccuccug

SEQ ID NO: 606231 - RNA, 19 nt, Human
uccgaguagcugggauucu

SEQ ID NO: 606232 - RNA, 23 nt, Human
uccgaguagcugggauucuaggc

SEQ ID NO: 606233 - RNA, 24 nt, Human
uccgaguagcugggauucuaggcg

SEQ ID NO: 606234 - RNA, 24 nt, Human
uccgccugcucacucuccggugac

SEQ ID NO: 606235 - RNA, 22 nt, Human
uccggcugggaaucccucgccu

SEQ ID NO: 606236 - RNA, 22 nt, Human
ucuacacuacagaaguaaaagc

SEQ ID NO: 606237 - RNA, 21 nt, Human
ucuccagaguguuugcgacuc

SEQ ID NO: 606238 - RNA, 18 nt, Human
ucucgcucuauugcccag

SEQ ID NO: 606239 - RNA, 19 nt, Human
ucucgcucuauugcccagg

SEQ ID NO: 606240 - RNA, 19 nt, Human
ucucgcucuauugcccagg

SEQ ID NO: 606241 - RNA, 23 nt, Human
ucucgcucuauugcccagguugg

SEQ ID NO: 606242 - RNA, 26 nt, Human
ucucgcucuauugcccagguuggccu

SEQ ID NO: 606243 - RNA, 27 nt, Human
ucucgcucuauugcccagguuggccuu

SEQ ID NO: 606244 - RNA, 24 nt, Human
ucugcaggugccuucucugcacgg

SEQ ID NO: 606245 - RNA, 21 nt, Human
ucuggcucagcccagcuugga

SEQ ID NO: 606246 - RNA, 19 nt, Human
ucuucaguccccgugggaa

SEQ ID NO: 606247 - RNA, 18 nt, Human
ugacccagccccugguga

SEQ ID NO: 606248 - RNA, 24 nt, Human
ugagugggcaacauggaccagccc

SEQ ID NO: 606249 - RNA, 19 nt, Human
ugcacgggcccagugccug

SEQ ID NO: 606250 - RNA, 19 nt, Human
ugccccguccucuguguuc

SEQ ID NO: 606251 - RNA, 27 nt, Human
ugccucugagugucagggagauggccc

SEQ ID NO: 606252 - RNA, 21 nt, Human
ugccuggaugccaguuugagg

SEQ ID NO: 606253 - RNA, 20 nt, Human
ugccuuggccuuccgaguaa

SEQ ID NO: 606254 - RNA, 21 nt, Human
ugcucuggcucagcccagcuu

SEQ ID NO: 606255 - RNA, 24 nt, Human
uggacucaagcgguccuccugccu

SEQ ID NO: 606256 - RNA, 21 nt, Human
uggagugagugggcaacaugg

SEQ ID NO: 606257 - RNA, 23 nt, Human
uggccccucaggcucccaaaccu

SEQ ID NO: 606258 - RNA, 19 nt, Human
uggcgugguccccacuucc

SEQ ID NO: 606259 - RNA, 24 nt, Human
uggugaagucccuggcccgggccu

SEQ ID NO: 606260 - RNA, 20 nt, Human
ugugucuucaguccccgugg

SEQ ID NO: 606261 - RNA, 23 nt, Human
uguucuguuuagacccccuucca

SEQ ID NO: 606262 - RNA, 20 nt, Human
uuaccaggagcacggauggu

SEQ ID NO: 606263 - RNA, 21 nt, Human
uucccuucccagaaaccagcc

SEQ ID NO: 606264 - RNA, 24 nt, Human
uuccgaguagcugggauucuaggc

SEQ ID NO: 606265 - RNA, 23 nt, Human
uugacccagucccgccucucuca

SEQ ID NO: 606266 - RNA, 18 nt, Human
uugcagucaugcaaggag

SEQ ID NO: 606267 - RNA, 19 nt, Human
uugugcacacacccaggcc

SEQ ID NO: 606268 - RNA, 24 nt, Human
uugugcacacacccaggccuuccc

SEQ ID NO: 606269 - RNA, 19 nt, Human
uuuagacccccuuccacuu

SEQ ID NO: 606270 - RNA, 23 nt, Human
aagacacccccaauccccaucug

SEQ ID NO: 606271 - RNA, 19 nt, Human
aaggcugaaagccagcccu

SEQ ID NO: 606272 - RNA, 18 nt, Human
aaggcugaaagccagccu

SEQ ID NO: 606273 - RNA, 21 nt, Human
acacccccaauccccaucuga

SEQ ID NO: 606274 - RNA, 19 nt, Human
acaggcaucucuggguccc

SEQ ID NO: 606275 - RNA, 22 nt, Human
agccagugaggccaccuggucc

SEQ ID NO: 606276 - RNA, 18 nt, Human
agcccgggucccaguugg

SEQ ID NO: 606277 - RNA, 20 nt, Human
agccgacggcaaacgcgcag

SEQ ID NO: 606278 - RNA, 20 nt, Human
aggccgagggcagcauggga

SEQ ID NO: 606279 - RNA, 19 nt, Human
aguccaggagccuuaggaa

SEQ ID NO: 606280 - RNA, 22 nt, Human
auccucccacccccuccugccg

SEQ ID NO: 606281 - RNA, 23 nt, Human
augcagcagccgacggcaaacgc

SEQ ID NO: 606282 - RNA, 24 nt, Human
auuaguuucuggcccuggaggugg

SEQ ID NO: 606283 - RNA, 19 nt, Human
caacacgggucccaucccc

SEQ ID NO: 606284 - RNA, 19 nt, Human
caacacgggucccaucccc

SEQ ID NO: 606285 - RNA, 20 nt, Human
caacacgggucccauccccc

SEQ ID NO: 606286 - RNA, 23 nt, Human
cacccccuccugccgcgcaggcc

SEQ ID NO: 606287 - RNA, 21 nt, Human
caccguggucuggcggaggcc

SEQ ID NO: 606288 - RNA, 25 nt, Human
cagccgacggcaaacgcgcaggcuc

SEQ ID NO: 606289 - RNA, 24 nt, Human
caugcuggaaggggguccucucca

SEQ ID NO: 606290 - RNA, 22 nt, Human
ccccgcuggccucuggagucca

SEQ ID NO: 606291 - RNA, 21 nt, Human
ccccuccugccgcgcaggccu

SEQ ID NO: 606292 - RNA, 23 nt, Human
cccuccugccgcgcaggccucac

SEQ ID NO: 606293 - RNA, 19 nt, Human
cccuuggcaggcaccgugg

SEQ ID NO: 606294 - RNA, 21 nt, Human
ccucggccagcgucgggccuc

SEQ ID NO: 606295 - RNA, 18 nt, Human
ccuuggcaggcaccgugg

SEQ ID NO: 606296 - RNA, 25 nt, Human
cgcccgcauccucccacccccuccu

SEQ ID NO: 606297 - RNA, 24 nt, Human
cggcccgcccgcauccucccaccc

SEQ ID NO: 606298 - RNA, 21 nt, Human
cguccagggcgcccugcagcu

SEQ ID NO: 606299 - RNA, 22 nt, Human
cguccagggcgcccugcagcuc

SEQ ID NO: 606300 - RNA, 21 nt, Human
cucccacccccuccugccgcg

SEQ ID NO: 606301 - RNA, 18 nt, Human
cuccccgcuggccucugg

SEQ ID NO: 606302 - RNA, 22 nt, Human
cugcagcucggccaccagccug

SEQ ID NO: 606303 - RNA, 19 nt, Human
cuuguggacugggugugca

SEQ ID NO: 606304 - RNA, 24 nt, Human
gagaaaacagagggagccgguacc

SEQ ID NO: 606305 - RNA, 19 nt, Human
gcaaacgcgcaggcucugc

SEQ ID NO: 606306 - RNA, 18 nt, Human
gccaccagccugggggac

SEQ ID NO: 606307 - RNA, 24 nt, Human
gccaccagccugggggacgcaccg

SEQ ID NO: 606308 - RNA, 19 nt, Human
gccccgcgccuggcuaccg

SEQ ID NO: 606309 - RNA, 19 nt, Human
gcuucaaagcccggguccc

SEQ ID NO: 606310 - RNA, 18 nt, Human
ggacugggugugcaugcu

SEQ ID NO: 606311 - RNA, 20 nt, Human
ggaggcccuuggugggucuc

SEQ ID NO: 606312 - RNA, 20 nt, Human
ggcgcucaggguggcccuug

SEQ ID NO: 606313 - RNA, 23 nt, Human
gucucucucuccggccuuaguga

SEQ ID NO: 606314 - RNA, 21 nt, Human
uagauuucaggcugggggccu

SEQ ID NO: 606315 - RNA, 18 nt, Human
uaggaaggcugaaagcca

SEQ ID NO: 606316 - RNA, 18 nt, Human
uaggaaggcugaaagcca

SEQ ID NO: 606317 - RNA, 25 nt, Human
uaguuucuggcccuggagguggcuu

SEQ ID NO: 606318 - RNA, 23 nt, Human
ucuacagugagagaaaacagagg

SEQ ID NO: 606319 - RNA, 21 nt, Human
ucucuggguccccgagcacag

SEQ ID NO: 606320 - RNA, 19 nt, Human
ugagaagagccagugaggc

SEQ ID NO: 606321 - RNA, 20 nt, Human
ugcagcucggccaccagccu

SEQ ID NO: 606322 - RNA, 18 nt, Human
ugccagaagaggugacaa

SEQ ID NO: 606323 - RNA, 26 nt, Human
ugccagaagaggugacaauggaccua

SEQ ID NO: 606324 - RNA, 23 nt, Human
uggccucuggaguccaggagccu

SEQ ID NO: 606325 - RNA, 19 nt, Human
uggccuggggaaugcggug

SEQ ID NO: 606326 - RNA, 21 nt, Human
uggcuucaaagcccggguccc

SEQ ID NO: 606327 - RNA, 18 nt, Human
ugggucagaaacuccaac

SEQ ID NO: 606328 - RNA, 21 nt, Human
ugggucagaaacuccaacucu

SEQ ID NO: 606329 - RNA, 18 nt, Human
uggucuggcggaggcccu

SEQ ID NO: 606330 - RNA, 20 nt, Human
ugucucucucuccggccuua

SEQ ID NO: 606331 - RNA, 24 nt, Human
uucccagggaagcacaggcaucuc

SEQ ID NO: 606332 - RNA, 23 nt, Human
uucuggcccuggagguggcuuca

SEQ ID NO: 606333 - RNA, 23 nt, Human
aaaaacaaaaaacaaacaaacaa

SEQ ID NO: 606334 - RNA, 25 nt, Human
aaaaacagcaauaaacguucugcac

SEQ ID NO: 606335 - RNA, 21 nt, Human
aaaacaaaaaacaaacaaaca

SEQ ID NO: 606336 - RNA, 25 nt, Human
aaacaaacaaaaacccaaccaaaca

SEQ ID NO: 606337 - RNA, 20 nt, Human
aaacaaacaaacaaaaaccc

SEQ ID NO: 606338 - RNA, 21 nt, Human
aaacaaacaaacaaaaaccca

SEQ ID NO: 606339 - RNA, 27 nt, Human
aaacaaacaaacaaaaacccaaccaaa

SEQ ID NO: 606340 - RNA, 19 nt, Human
aaacaaaccccagcucucc

SEQ ID NO: 606341 - RNA, 24 nt, Human
aaagcaaaaacaaaaaacaaacaa

SEQ ID NO: 606342 - RNA, 30 nt, Human
aaauaaaaaugcaaauuaguuucauaaccc

SEQ ID NO: 606343 - RNA, 19 nt, Human
aacaaaaaacaaacaaaca

SEQ ID NO: 606344 - RNA, 22 nt, Human
aacacaaaaacagcaauaaacg

SEQ ID NO: 606345 - RNA, 19 nt, Human
aaccaaacaauaguacucc

SEQ ID NO: 606346 - RNA, 21 nt, Human
aagacuucucacaccagccag

SEQ ID NO: 606347 - RNA, 27 nt, Human
aagcaaaaacaaaaaacaaacaaacaa

SEQ ID NO: 606348 - RNA, 21 nt, Human
aaguacaaaaaccugcauuga

SEQ ID NO: 606349 - RNA, 26 nt, Human
aaugacaaaaguaaaagcaggaggaa

SEQ ID NO: 606350 - RNA, 21 nt, Human
acaaacaaaaacccaaccaaa

SEQ ID NO: 606351 - RNA, 23 nt, Human
acaaacaaaaacccaaccaaaca

SEQ ID NO: 606352 - RNA, 21 nt, Human
acaggaaauaaaacuuuuuca

SEQ ID NO: 606353 - RNA, 23 nt, Human
agagggggaacuucaaagaggau

SEQ ID NO: 606354 - RNA, 23 nt, Human
agcaaaaacaaaaaacaaacaaa

SEQ ID NO: 606355 - RNA, 22 nt, Human
agccgcacagcacggaguagcc

SEQ ID NO: 606356 - RNA, 19 nt, Human
aggaauauuaaacacaugg

SEQ ID NO: 606357 - RNA, 19 nt, Human
aggcaucaaacauuauacu

SEQ ID NO: 606358 - RNA, 23 nt, Human
agguaaacauuuuagaaaaaaca

SEQ ID NO: 606359 - RNA, 23 nt, Human
aguacucuuucuccucacaaaca

SEQ ID NO: 606360 - RNA, 20 nt, Human
aguuugucucuguucucuuc

SEQ ID NO: 606361 - RNA, 19 nt, Human
aucaaaaagcauaucugga

SEQ ID NO: 606362 - RNA, 25 nt, Human
augcuaacggaagacuucucacacc

SEQ ID NO: 606363 - RNA, 20 nt, Human
caaacaaaaacccaaccaaa

SEQ ID NO: 606364 - RNA, 22 nt, Human
caaacaaaaacccaaccaaaca

SEQ ID NO: 606365 - RNA, 22 nt, Human
caaacaaacaaaaacccaacca

SEQ ID NO: 606366 - RNA, 23 nt, Human
caaacaaaccccagcucucccag

SEQ ID NO: 606367 - RNA, 18 nt, Human
caaaguuucuggagcauu

SEQ ID NO: 606368 - RNA, 25 nt, Human
caaauaaaaaugcaaauuaguuuca

SEQ ID NO: 606369 - RNA, 19 nt, Human
caagaaaaugacaaaagua

SEQ ID NO: 606370 - RNA, 25 nt, Human
caagaccaagagaguaaauaucaac

SEQ ID NO: 606371 - RNA, 21 nt, Human
caagcaccucuuggcaauaaa

SEQ ID NO: 606372 - RNA, 19 nt, Human
cacaaaaacagcaauaaac

SEQ ID NO: 606373 - RNA, 21 nt, Human
cacaaacaaaccccagcucuc

SEQ ID NO: 606374 - RNA, 19 nt, Human
cacgcagccugcuggggcu

SEQ ID NO: 606375 - RNA, 20 nt, Human
cacuaacagguuggcaaagu

SEQ ID NO: 606376 - RNA, 20 nt, Human
cacugcuuuagcaaagagag

SEQ ID NO: 606377 - RNA, 25 nt, Human
cacuucuaacuuuagaauuucauuu

SEQ ID NO: 606378 - RNA, 24 nt, Human
cagaagaaauaaaguugcaaaaua

SEQ ID NO: 606379 - RNA, 18 nt, Human
cagauucacagucaauga

SEQ ID NO: 606380 - RNA, 23 nt, Human
caugucagaagaaauaaaguugc

SEQ ID NO: 606381 - RNA, 23 nt, Human
ccaaccaaacaauaguacuccuu

SEQ ID NO: 606382 - RNA, 21 nt, Human
ccgcagccguucggcccgggc

SEQ ID NO: 606383 - RNA, 26 nt, Human
ccggagacggcggcgcucggcuccuc

SEQ ID NO: 606384 - RNA, 20 nt, Human
ccucacaaacaaaccccagc

SEQ ID NO: 606385 - RNA, 18 nt, Human
ccucggcgcccagguguc

SEQ ID NO: 606386 - RNA, 21 nt, Human
ccuggaauucucuaccuucuc

SEQ ID NO: 606387 - RNA, 19 nt, Human
ccuggccacaugguacuca

SEQ ID NO: 606388 - RNA, 23 nt, Human
cgcccagguguccgcagccguuc

SEQ ID NO: 606389 - RNA, 23 nt, Human
cggaagacuucucacaccagcca

SEQ ID NO: 606390 - RNA, 24 nt, Human
cuccucacaaacaaaccccagcuc

SEQ ID NO: 606391 - RNA, 22 nt, Human
cucuaugcuaacggaagacuuc

SEQ ID NO: 606392 - RNA, 23 nt, Human
cugcaugcagagcuaaaaugcag

SEQ ID NO: 606393 - RNA, 22 nt, Human
cuuaaaaaguaaaaaaaucacc

SEQ ID NO: 606394 - RNA, 20 nt, Human
gaagauaccucacaagagaa

SEQ ID NO: 606395 - RNA, 18 nt, Human
gagaugauacgcuuugca

SEQ ID NO: 606396 - RNA, 21 nt, Human
gaucagaaaugaagaccaaga

SEQ ID NO: 606397 - RNA, 23 nt, Human
gaugauacgcuuugcagaagaga

SEQ ID NO: 606398 - RNA, 18 nt, Human
gcagaagagaggcaucaa

SEQ ID NO: 606399 - RNA, 19 nt, Human
gcguccugcuccucguucc

SEQ ID NO: 606400 - RNA, 19 nt, Human
gcuaaaaugcaggugugcu

SEQ ID NO: 606401 - RNA, 22 nt, Human
ggagcagaggaaaacaucaaaa

SEQ ID NO: 606402 - RNA, 20 nt, Human
ggaguccuugguuagcugca

SEQ ID NO: 606403 - RNA, 18 nt, Human
gggggaacuucaaagagg

SEQ ID NO: 606404 - RNA, 24 nt, Human
gguguauuuacuugaucagaaaug

SEQ ID NO: 606405 - RNA, 19 nt, Human
guccugcuccucguucccc

SEQ ID NO: 606406 - RNA, 20 nt, Human
gugaagcagaaucauggggc

SEQ ID NO: 606407 - RNA, 25 nt, Human
gugauucccccucccucaaaccaag

SEQ ID NO: 606408 - RNA, 22 nt, Human
uaaaagcaaaaacaaaaaacaa

SEQ ID NO: 606409 - RNA, 25 nt, Human
uaaaagcaaaaacaaaaaacaaaca

SEQ ID NO: 606410 - RNA, 19 nt, Human
uaaacugguuuacacccuu

SEQ ID NO: 606411 - RNA, 20 nt, Human
uaaguacaaaaaccugcauu

SEQ ID NO: 606412 - RNA, 22 nt, Human
uacacacaugcacaacacugug

SEQ ID NO: 606413 - RNA, 28 nt, Human
uacacacaugcacaacacugugucugca

SEQ ID NO: 606414 - RNA, 23 nt, Human
uauaauaaacugguuuacacccu

SEQ ID NO: 606415 - RNA, 19 nt, Human
uauaauagggcuaccaaga

SEQ ID NO: 606416 - RNA, 20 nt, Human
uauacaauacacacaugcac

SEQ ID NO: 606417 - RNA, 21 nt, Human
uaucaagaaaaugacaaaagu

SEQ ID NO: 606418 - RNA, 22 nt, Human
uaucaagaaaaugacaaaagua

SEQ ID NO: 606419 - RNA, 23 nt, Human
ucacaaacaaaccccagcucucc

SEQ ID NO: 606420 - RNA, 18 nt, Human
ucaccgggagcacucccc

SEQ ID NO: 606421 - RNA, 19 nt, Human
ucaccgggagcacuccccu

SEQ ID NO: 606422 - RNA, 18 nt, Human
ucaguuucacuuacaaau

SEQ ID NO: 606423 - RNA, 23 nt, Human
ucauaaccacaauucaauuuauc

SEQ ID NO: 606424 - RNA, 20 nt, Human
uccacaguacucuuucuccu

SEQ ID NO: 606425 - RNA, 22 nt, Human
uccauguaguucgucauacaga

SEQ ID NO: 606426 - RNA, 18 nt, Human
ucccucaaaccaagucca

SEQ ID NO: 606427 - RNA, 25 nt, Human
ucucuuccuucacugcuuuagcaaa

SEQ ID NO: 606428 - RNA, 21 nt, Human
ucugugauucccccucccuca

SEQ ID NO: 606429 - RNA, 19 nt, Human
ugacaaaaguaaaagcagg

SEQ ID NO: 606430 - RNA, 21 nt, Human
ugagaugauacgcuuugcaga

SEQ ID NO: 606431 - RNA, 22 nt, Human
ugaucagaaaugaagaccaaga

SEQ ID NO: 606432 - RNA, 19 nt, Human
ugaugggucugguaacugc

SEQ ID NO: 606433 - RNA, 24 nt, Human
ugcaggugugcugacuucuuggag

SEQ ID NO: 606434 - RNA, 18 nt, Human
ugcuggggcugcaugcag

SEQ ID NO: 606435 - RNA, 21 nt, Human
uggagcagaggaaaacaucaa

SEQ ID NO: 606436 - RNA, 21 nt, Human
uggggccagacugagguugga

SEQ ID NO: 606437 - RNA, 28 nt, Human
uggugcacauauacaauacacacaugca

SEQ ID NO: 606438 - RNA, 18 nt, Human
ugucagaagaaauaaagu

SEQ ID NO: 606439 - RNA, 19 nt, Human
ugucagaagaaauaaaguu

SEQ ID NO: 606440 - RNA, 24 nt, Human
uucaaacacaaaaacagcaauaaa

SEQ ID NO: 606441 - RNA, 22 nt, Human
uucacaguccaaagaguuuguc

SEQ ID NO: 606442 - RNA, 22 nt, Human
uucaccgggagcacuccccuca

SEQ ID NO: 606443 - RNA, 18 nt, Human
uucacuccaugucagaag

SEQ ID NO: 606444 - RNA, 20 nt, Human
uuccaacagugaagcagaau

SEQ ID NO: 606445 - RNA, 19 nt, Human
uuccuuccagauacacaau

SEQ ID NO: 606446 - RNA, 21 nt, Human
uuuaucaaacuuuuucugaag

SEQ ID NO: 606447 - RNA, 19 nt, Human
uuuccauguaguucgucau

SEQ ID NO: 606448 - RNA, 18 nt, Human
uuugcagaagagaggcau

SEQ ID NO: 606449 - RNA, 19 nt, Human
uuuguagucacucauaggu

SEQ ID NO: 606450 - RNA, 23 nt, Human
uuuuagaacuggaacaugcugcu

SEQ ID NO: 606451 - RNA, 20 nt, Human
uuuuuuuuuuuuuuauucgg

SEQ ID NO: 606452 - RNA, 26 nt, Human
uuuuuuuuuuuuuuuuuuuuauucgg

SEQ ID NO: 606453 - RNA, 18 nt, Human
aaaaaaagcacaacggag

SEQ ID NO: 606454 - RNA, 24 nt, Human
aaacaacaauuccaucuuaaaaca

SEQ ID NO: 606455 - RNA, 22 nt, Human
aagacucacagagccagggaca

SEQ ID NO: 606456 - RNA, 23 nt, Human
aagacucacagagccagggacac

SEQ ID NO: 606457 - RNA, 25 nt, Human
agaacauauucauguacaaagccaa

SEQ ID NO: 606458 - RNA, 25 nt, Human
agauguaaugcaggcugguuaacag

SEQ ID NO: 606459 - RNA, 21 nt, Human
agcagugaugcccugcaaaca

SEQ ID NO: 606460 - RNA, 18 nt, Human
agcauuuugugaacaggc

SEQ ID NO: 606461 - RNA, 21 nt, Human
aggaaaaaaaaagcacaacgg

SEQ ID NO: 606462 - RNA, 23 nt, Human
aggcaaauaagaucaagagagca

SEQ ID NO: 606463 - RNA, 21 nt, Human
aggcaggcagcaggagauauc

SEQ ID NO: 606464 - RNA, 26 nt, Human
cacaauucugauagcuuugauuaucu

SEQ ID NO: 606465 - RNA, 23 nt, Human
caggcgaugacccaguuuguacc

SEQ ID NO: 606466 - RNA, 18 nt, Human
cccuuuuccuccuuuauc

SEQ ID NO: 606467 - RNA, 23 nt, Human
cccuuuuccuccuuuaucugggg

SEQ ID NO: 606468 - RNA, 20 nt, Human
ccugaguauagaguaugagg

SEQ ID NO: 606469 - RNA, 22 nt, Human
ccugcaaacagucuaaugggcc

SEQ ID NO: 606470 - RNA, 20 nt, Human
ccuugaucuccaggaaaaga

SEQ ID NO: 606471 - RNA, 20 nt, Human
cgaggcaauaacaagcucag

SEQ ID NO: 606472 - RNA, 22 nt, Human
cucacagagccagggacaccca

SEQ ID NO: 606473 - RNA, 18 nt, Human
cucuguacaaccaugagg

SEQ ID NO: 606474 - RNA, 25 nt, Human
cugacagcuuuucuagacagggagu

SEQ ID NO: 606475 - RNA, 26 nt, Human
cuucuggguugacugcugaguuaugc

SEQ ID NO: 606476 - RNA, 20 nt, Human
cuuggguuaaagggccuggg

SEQ ID NO: 606477 - RNA, 20 nt, Human
gaaaaaaaaagcacaacgga

SEQ ID NO: 606478 - RNA, 20 nt, Human
gaagaggaaaaaaaaagcac

SEQ ID NO: 606479 - RNA, 22 nt, Human
gaagaggaaaaaaaaagcacaa

SEQ ID NO: 606480 - RNA, 22 nt, Human
gauuucuccuuggccauggguu

SEQ ID NO: 606481 - RNA, 19 nt, Human
gcauccuugaucuccagga

SEQ ID NO: 606482 - RNA, 23 nt, Human
gcuagugaaacuguacaucugaa

SEQ ID NO: 606483 - RNA, 23 nt, Human
gcuuuguggcuagugaaacugua

SEQ ID NO: 606484 - RNA, 25 nt, Human
gcuuuucuagacagggaguagaauu

SEQ ID NO: 606485 - RNA, 18 nt, Human
ggaagacucacagagcca

SEQ ID NO: 606486 - RNA, 21 nt, Human
ggagggauacgucugugagga

SEQ ID NO: 606487 - RNA, 20 nt, Human
guaaauggucagggaucuuc

SEQ ID NO: 606488 - RNA, 21 nt, Human
uaaaacaggcauuuuaaaagc

SEQ ID NO: 606489 - RNA, 18 nt, Human
uaaauggucagggaucuu

SEQ ID NO: 606490 - RNA, 26 nt, Human
uaacaagcucaguuuaaccauuuccc

SEQ ID NO: 606491 - RNA, 22 nt, Human
uaauuuccaaagacaaagacaa

SEQ ID NO: 606492 - RNA, 26 nt, Human
uacaaccaugaggaagaugaggcaaa

SEQ ID NO: 606493 - RNA, 28 nt, Human
uacagaacauauucauguacaaagccaa

SEQ ID NO: 606494 - RNA, 18 nt, Human
uagggguguacaagacgg

SEQ ID NO: 606495 - RNA, 20 nt, Human
ucagcacccaaguccugacu

SEQ ID NO: 606496 - RNA, 19 nt, Human
uccagauguaaugcaggcu

SEQ ID NO: 606497 - RNA, 18 nt, Human
uccaggaaaagagauuag

SEQ ID NO: 606498 - RNA, 21 nt, Human
ucccuauaauucucuauggcc

SEQ ID NO: 606499 - RNA, 19 nt, Human
ucccugcaggcaggcagca

SEQ ID NO: 606500 - RNA, 24 nt, Human
ucccugcaggcaggcagcaggaga

SEQ ID NO: 606501 - RNA, 18 nt, Human
uccuugaucuccaggaaa

SEQ ID NO: 606502 - RNA, 27 nt, Human
ucuccgaggcaauaacaagcucaguuu

SEQ ID NO: 606503 - RNA, 18 nt, Human
ucugccuuucccuuuucc

SEQ ID NO: 606504 - RNA, 18 nt, Human
ugaaagagcacuuguaca

SEQ ID NO: 606505 - RNA, 21 nt, Human
ugaagcuguccaaacucccag

SEQ ID NO: 606506 - RNA, 23 nt, Human
ugacccaguuuguaccugugcuu

SEQ ID NO: 606507 - RNA, 19 nt, Human
ugaggcaaauaagaucaag

SEQ ID NO: 606508 - RNA, 20 nt, Human
ugauagcuuugauuaucugu

SEQ ID NO: 606509 - RNA, 21 nt, Human
ugcacaaucuggauacccaaa

SEQ ID NO: 606510 - RNA, 18 nt, Human
uggaagacucacagagcc

SEQ ID NO: 606511 - RNA, 20 nt, Human
ugggacaggauucugguucu

SEQ ID NO: 606512 - RNA, 25 nt, Human
uggguucuuggguuaaagggccugg

SEQ ID NO: 606513 - RNA, 22 nt, Human
uguacaucugaagcuguccaaa

SEQ ID NO: 606514 - RNA, 20 nt, Human
ugucagggggaagcagugau

SEQ ID NO: 606515 - RNA, 19 nt, Human
uuaaaacaggcauuuuaaa

SEQ ID NO: 606516 - RNA, 22 nt, Human
uuaaaacaggcauuuuaaaagc

SEQ ID NO: 606517 - RNA, 21 nt, Human
uucccuuuuccuccuuuaucu

SEQ ID NO: 606518 - RNA, 19 nt, Human
uugcuaaaacauggauuua

SEQ ID NO: 606519 - RNA, 23 nt, Human
uuguaccugugcuuuguggcuag

SEQ ID NO: 606520 - RNA, 19 nt, Human
uuuccaaagacaaagacaa

SEQ ID NO: 606521 - RNA, 23 nt, Human
uuucuccuuggccauggguucuu

SEQ ID NO: 606522 - RNA, 18 nt, Human
uuugcuaaaacauggauu

SEQ ID NO: 606523 - RNA, 23 nt, Human
uuuucuagacagggaguagaauu

SEQ ID NO: 606524 - RNA, 18 nt, Human
uuuuuuuuuuuuuuuuug

SEQ ID NO: 606525 - RNA, 20 nt, Human
uuuuuuuuuuuuuuuuugcu

SEQ ID NO: 606526 - RNA, 21 nt, Human
aaacuggucuuucuauucuca

SEQ ID NO: 606527 - RNA, 18 nt, Human
aaagauaucuuuuguucc

SEQ ID NO: 606528 - RNA, 20 nt, Human
aaaugaaaaaucuguaaaga

SEQ ID NO: 606529 - RNA, 20 nt, Human
aacacaaucuucccaugcug

SEQ ID NO: 606530 - RNA, 18 nt, Human
aaggacgugccggaaaaa

SEQ ID NO: 606531 - RNA, 18 nt, Human
aagugcauaagccugaaa

SEQ ID NO: 606532 - RNA, 19 nt, Human
aauuucugaauuuuucccc

SEQ ID NO: 606533 - RNA, 19 nt, Human
agacaauaucucaguucuu

SEQ ID NO: 606534 - RNA, 22 nt, Human
aggaaaagaaaacuuuggccaa

SEQ ID NO: 606535 - RNA, 22 nt, Human
aggcaggcaggcaagcaggaau

SEQ ID NO: 606536 - RNA, 21 nt, Human
auaaaacagagagacacagaa

SEQ ID NO: 606537 - RNA, 23 nt, Human
auaaaauguaccaucuagcaccc

SEQ ID NO: 606538 - RNA, 23 nt, Human
auaacaacauauaauacaaguuu

SEQ ID NO: 606539 - RNA, 18 nt, Human
aucucaguucuuuuuaaa

SEQ ID NO: 606540 - RNA, 22 nt, Human
auugcagacagccccugguggu

SEQ ID NO: 606541 - RNA, 19 nt, Human
caauauaaguauacaagac

SEQ ID NO: 606542 - RNA, 22 nt, Human
cacuccaugcucaaaugaaaaa

SEQ ID NO: 606543 - RNA, 22 nt, Human
cagcaauggcuccaaagacucu

SEQ ID NO: 606544 - RNA, 29 nt, Human
cauaacaacauauaauacaaguuucaaaa

SEQ ID NO: 606545 - RNA, 20 nt, Human
cauauacauaaagugcaugg

SEQ ID NO: 606546 - RNA, 20 nt, Human
caucacguuuuuccaaagga

SEQ ID NO: 606547 - RNA, 21 nt, Human
ccaaugccuguaaauaccaga

SEQ ID NO: 606548 - RNA, 18 nt, Human
ccuaagcuggauucaggg

SEQ ID NO: 606549 - RNA, 22 nt, Human
ccuuuuaaacucugaagacaaa

SEQ ID NO: 606550 - RNA, 20 nt, Human
cgauacucuucaucacguuu

SEQ ID NO: 606551 - RNA, 18 nt, Human
cggcaacagaaagcggcg

SEQ ID NO: 606552 - RNA, 19 nt, Human
cugaacuaaguaaccuaag

SEQ ID NO: 606553 - RNA, 21 nt, Human
cugauucccaacauuuaagaa

SEQ ID NO: 606554 - RNA, 19 nt, Human
gaacacaaucuucccaugc

SEQ ID NO: 606555 - RNA, 18 nt, Human
gauacucuucaucacguu

SEQ ID NO: 606556 - RNA, 20 nt, Human
gccccugguggucaucaucu

SEQ ID NO: 606557 - RNA, 24 nt, Human
ggaaaagaaaacuuuggccaauau

SEQ ID NO: 606558 - RNA, 19 nt, Human
ggcaggcaggcaggcaagc

SEQ ID NO: 606559 - RNA, 20 nt, Human
uaaaacagagagacacagaa

SEQ ID NO: 606560 - RNA, 23 nt, Human
uaaaacauuauuauauaauagca

SEQ ID NO: 606561 - RNA, 20 nt, Human
uaaaagaaaugaaguggaaa

SEQ ID NO: 606562 - RNA, 25 nt, Human
uaaaucacauagacaugguuaaaga

SEQ ID NO: 606563 - RNA, 21 nt, Human
uaacauaaaacagagagacac

SEQ ID NO: 606564 - RNA, 23 nt, Human
uaagugcauaagccugaaacugg

SEQ ID NO: 606565 - RNA, 20 nt, Human
uaccaguauuuuuaagccag

SEQ ID NO: 606566 - RNA, 22 nt, Human
uagcugaaggagcucaaaauau

SEQ ID NO: 606567 - RNA, 19 nt, Human
uauacauauagaacuacau

SEQ ID NO: 606568 - RNA, 21 nt, Human
uaucucaguucuuuuuaaaau

SEQ ID NO: 606569 - RNA, 22 nt, Human
ucccaugcuguauucacaugcu

SEQ ID NO: 606570 - RNA, 18 nt, Human
ucucacuccaugcucaaa

SEQ ID NO: 606571 - RNA, 25 nt, Human
ugaauaacugauucccaacauuuaa

SEQ ID NO: 606572 - RNA, 23 nt, Human
ugaauaucuucacuucgauacuc

SEQ ID NO: 606573 - RNA, 21 nt, Human
ugcgcccggcaacagaaagcg

SEQ ID NO: 606574 - RNA, 21 nt, Human
uguaaauaccagaauuccauc

SEQ ID NO: 606575 - RNA, 22 nt, Human
uguaccaucuagcaccaaugcc

SEQ ID NO: 606576 - RNA, 19 nt, Human
uguuccuccaaucuucuga

SEQ ID NO: 606577 - RNA, 23 nt, Human
uuagagccuuggguaagaugauu

SEQ ID NO: 606578 - RNA, 19 nt, Human
uucacugcuucauguaaac

SEQ ID NO: 606579 - RNA, 20 nt, Human
uucacuucgauacucuucau

SEQ ID NO: 606580 - RNA, 20 nt, Human
uucauuugguauauacauau

SEQ ID NO: 606581 - RNA, 19 nt, Human
uucuauucucacuccaugc

SEQ ID NO: 606582 - RNA, 24 nt, Human
uuuaaaagaaaugaaguggaaaau

SEQ ID NO: 606583 - RNA, 19 nt, Human
uuuaucucuagcuuccugu

SEQ ID NO: 606584 - RNA, 22 nt, Human
uuucuauucucacuccaugcuc

SEQ ID NO: 606585 - RNA, 22 nt, Human
uuuuaagccagauuuuccugga

SEQ ID NO: 606586 - RNA, 20 nt, Human
uuuuagaguuuucagcaaug

SEQ ID NO: 606587 - RNA, 19 nt, Human
acacacaguauuccccuag

SEQ ID NO: 606588 - RNA, 23 nt, Human
acacaguauuccccuaguauuca

SEQ ID NO: 606589 - RNA, 20 nt, Human
acauaucagugcccaaacgc

SEQ ID NO: 606590 - RNA, 23 nt, Human
accuccuuguaauccuucuccag

SEQ ID NO: 606591 - RNA, 21 nt, Human
acucacccuccuccaugcccu

SEQ ID NO: 606592 - RNA, 23 nt, Human
aggcaccacagugggaggcuggu

SEQ ID NO: 606593 - RNA, 22 nt, Human
auccccccuaucuuuucuuccc

SEQ ID NO: 606594 - RNA, 20 nt, Human
caaacugaaugcugcacuug

SEQ ID NO: 606595 - RNA, 18 nt, Human
cacacaguauuccccuag

SEQ ID NO: 606596 - RNA, 18 nt, Human
cacagaaccacccccccc

SEQ ID NO: 606597 - RNA, 20 nt, Human
caccccccccccgugacuca

SEQ ID NO: 606598 - RNA, 22 nt, Human
cagcaauggcagcguugacauc

SEQ ID NO: 606599 - RNA, 20 nt, Human
caugcacauggcacguugca

SEQ ID NO: 606600 - RNA, 22 nt, Human
cauguugcucagcaugcacaug

SEQ ID NO: 606601 - RNA, 19 nt, Human
ccacacuauccaugcccac

SEQ ID NO: 606602 - RNA, 19 nt, Human
ccacacuccacacuaucca

SEQ ID NO: 606603 - RNA, 18 nt, Human
ccacagaaccaccccccc

SEQ ID NO: 606604 - RNA, 21 nt, Human
ccacagaaccacccccccccc

SEQ ID NO: 606605 - RNA, 21 nt, Human
ccacagugggaggcuggugau

SEQ ID NO: 606606 - RNA, 20 nt, Human
ccaccccccccccgugacuc

SEQ ID NO: 606607 - RNA, 23 nt, Human
ccaccccccccccgugacucagc

SEQ ID NO: 606608 - RNA, 19 nt, Human
ccaggucacucccaggcac

SEQ ID NO: 606609 - RNA, 22 nt, Human
ccaggucacucccaggcaccac

SEQ ID NO: 606610 - RNA, 25 nt, Human
cccacacuccacacuauccaugccc

SEQ ID NO: 606611 - RNA, 22 nt, Human
cccccccgugacucagcaccuc

SEQ ID NO: 606612 - RNA, 21 nt, Human
ccccccgugacucagcacccc

SEQ ID NO: 606613 - RNA, 22 nt, Human
cccccgugacucagcaccccgc

SEQ ID NO: 606614 - RNA, 21 nt, Human
ccccuaguauucauccccccu

SEQ ID NO: 606615 - RNA, 22 nt, Human
ccccuaucuuuucuuccccaca

SEQ ID NO: 606616 - RNA, 22 nt, Human
cucacccacauaucagugccca

SEQ ID NO: 606617 - RNA, 24 nt, Human
cuccacacuauccaugcccaccuc

SEQ ID NO: 606618 - RNA, 21 nt, Human
cuccagccgaagcccgggugc

SEQ ID NO: 606619 - RNA, 19 nt, Human
cucuccagccgaagcccgg

SEQ ID NO: 606620 - RNA, 22 nt, Human
cugaagcgagcuggcccucucc

SEQ ID NO: 606621 - RNA, 19 nt, Human
cuguguaugcauuccaacu

SEQ ID NO: 606622 - RNA, 23 nt, Human
gccuccugaagcgagcuggcccu

SEQ ID NO: 606623 - RNA, 20 nt, Human
gcgggcccaggccauagugg

SEQ ID NO: 606624 - RNA, 20 nt, Human
gguauagcaggcagcaggcc

SEQ ID NO: 606625 - RNA, 18 nt, Human
uaggacagacacacagua

SEQ ID NO: 606626 - RNA, 19 nt, Human
ucagugcccaaacgcccuc

SEQ ID NO: 606627 - RNA, 20 nt, Human
ucaugggccuuggagaacuc

SEQ ID NO: 606628 - RNA, 22 nt, Human
uccaacuauccacagaaccacc

SEQ ID NO: 606629 - RNA, 24 nt, Human
uccacagaaccaccccccccccgu

SEQ ID NO: 606630 - RNA, 22 nt, Human
uccaugcccaccuccuuguaau

SEQ ID NO: 606631 - RNA, 21 nt, Human
ucuguguaugcauuccaacua

SEQ ID NO: 606632 - RNA, 22 nt, Human
ugaaugcugcacuuggucuuga

SEQ ID NO: 606633 - RNA, 24 nt, Human
ugauaucaaccuuaaagccugugg

SEQ ID NO: 606634 - RNA, 18 nt, Human
ugcacauggcacguugca

SEQ ID NO: 606635 - RNA, 21 nt, Human
ugcacauggcacguugcacuu

SEQ ID NO: 606636 - RNA, 18 nt, Human
ugcacuuggucuugaugg

SEQ ID NO: 606637 - RNA, 22 nt, Human
ugcccaaacgcccucuuggcau

SEQ ID NO: 606638 - RNA, 20 nt, Human
uggcagcaauggcagcguug

SEQ ID NO: 606639 - RNA, 19 nt, Human
uggcauacaucaggucaaa

SEQ ID NO: 606640 - RNA, 20 nt, Human
ugguccaggcgggcccaggg

SEQ ID NO: 606641 - RNA, 24 nt, Human
uggugggaacgggguucggccucc

SEQ ID NO: 606642 - RNA, 24 nt, Human
uuaaagccuguggggcaccagucc

SEQ ID NO: 606643 - RNA, 18 nt, Human
uuuaccaggucacuccca

SEQ ID NO: 606644 - RNA, 23 nt, Human
uuuaccaggucacucccaggcac

SEQ ID NO: 606645 - RNA, 19 nt, Human
aagccagcaaccacggggc

SEQ ID NO: 606646 - RNA, 22 nt, Human
acggggcucuggagaaucgggg

SEQ ID NO: 606647 - RNA, 19 nt, Human
cagagucacgcaagcagag

SEQ ID NO: 606648 - RNA, 25 nt, Human
ccacggggcucuggagaaucgggga

SEQ ID NO: 606649 - RNA, 20 nt, Human
ccuccuguggacacggggcu

SEQ ID NO: 606650 - RNA, 21 nt, Human
cgagguggccuccuguggaca

SEQ ID NO: 606651 - RNA, 22 nt, Human
gagcagagucacgcaagcagag

SEQ ID NO: 606652 - RNA, 23 nt, Human
ucuggagaaucggggagcagagu

SEQ ID NO: 606653 - RNA, 20 nt, Human
gcaguaauuacaaagguuaa

SEQ ID NO: 606654 - RNA, 20 nt, Human
uaacaguuauaauuacacac

SEQ ID NO: 606655 - RNA, 27 nt, Human
ugauuccaauaaauaucacaggaaaua

SEQ ID NO: 606656 - RNA, 25 nt, Human
uuaaagacucuuccaucucaaauaa

SEQ ID NO: 606657 - RNA, 18 nt, Human
uugacauaggaaagccua

SEQ ID NO: 606658 - RNA, 21 nt, Human
aaaauaccucuguuccaccug

SEQ ID NO: 606659 - RNA, 20 nt, Human
accucuguuccaccugagag

SEQ ID NO: 606660 - RNA, 24 nt, Human
accucuguuccaccugagagcaag

SEQ ID NO: 606661 - RNA, 24 nt, Human
aggcagucggggauggggcggggu

SEQ ID NO: 606662 - RNA, 22 nt, Human
aggcgguccagggcaaugcagu

SEQ ID NO: 606663 - RNA, 19 nt, Human
caagacauucccccucccc

SEQ ID NO: 606664 - RNA, 22 nt, Human
caggcuagagagacccaaaaua

SEQ ID NO: 606665 - RNA, 20 nt, Human
ccaccugagagcaaggugga

SEQ ID NO: 606666 - RNA, 23 nt, Human
cccaaaauaccucuguuccaccu

SEQ ID NO: 606667 - RNA, 24 nt, Human
cccaagacauuuucagacuuaaaa

SEQ ID NO: 606668 - RNA, 20 nt, Human
ccugagagcaagguggaagu

SEQ ID NO: 606669 - RNA, 24 nt, Human
cgcuggacuugcgguccgucuccu

SEQ ID NO: 606670 - RNA, 20 nt, Human
cuagagagacccaaaauacc

SEQ ID NO: 606671 - RNA, 23 nt, Human
uaaagucaguguuacaggugcug

SEQ ID NO: 606672 - RNA, 23 nt, Human
ugagucgucuguggguacgcugg

SEQ ID NO: 606673 - RNA, 21 nt, Human
ugggauaaaggaggcggucca

SEQ ID NO: 606674 - RNA, 18 nt, Human
uguggguacgcuggacuu

SEQ ID NO: 606675 - RNA, 22 nt, Human
uucaggcuagagagacccaaaa

SEQ ID NO: 606676 - RNA, 23 nt, Human
aaaaaaaaaaaaaaaaaaaagag

SEQ ID NO: 606677 - RNA, 19 nt, Human
aaagugcugggauuacagg

SEQ ID NO: 606678 - RNA, 22 nt, Human
aaagugcugggauuacaggcau

SEQ ID NO: 606679 - RNA, 24 nt, Human
aaagugcugggauuacaggcauca

SEQ ID NO: 606680 - RNA, 19 nt, Human
aacguggugaaacccgucu

SEQ ID NO: 606681 - RNA, 20 nt, Human
aacguggugaaacccgucuc

SEQ ID NO: 606682 - RNA, 20 nt, Human
aacuuccgccucccggcuuc

SEQ ID NO: 606683 - RNA, 21 nt, Human
aagccgaggcggguggaucac

SEQ ID NO: 606684 - RNA, 24 nt, Human
aagcggggguugccgugagccgag

SEQ ID NO: 606685 - RNA, 19 nt, Human
aagugcugggauuacaggc

SEQ ID NO: 606686 - RNA, 21 nt, Human
aagugcugggauuacaggcau

SEQ ID NO: 606687 - RNA, 18 nt, Human
aauugcuugaacccggga

SEQ ID NO: 606688 - RNA, 24 nt, Human
aauuuuguauuuucaguagagacg

SEQ ID NO: 606689 - RNA, 19 nt, Human
acaaugcccggcuaauuuu

SEQ ID NO: 606690 - RNA, 21 nt, Human
acaggcaucagccacugcgcc

SEQ ID NO: 606691 - RNA, 20 nt, Human
acgggguuucuccauggugg

SEQ ID NO: 606692 - RNA, 24 nt, Human
acgggguuucuccaugguggucag

SEQ ID NO: 606693 - RNA, 24 nt, Human
acucuuguugcccaggcuggagug

SEQ ID NO: 606694 - RNA, 18 nt, Human
acugcauuccagccuggg

SEQ ID NO: 606695 - RNA, 21 nt, Human
acugcauuccagccugggcaa

SEQ ID NO: 606696 - RNA, 25 nt, Human
acugcauuccagccugggcaacaag

SEQ ID NO: 606697 - RNA, 18 nt, Human
agagauucuccuaccuca

SEQ ID NO: 606698 - RNA, 24 nt, Human
agagauucuccuaccucagcuucc

SEQ ID NO: 606699 - RNA, 23 nt, Human
agcacgguggcucacgcccguaa

SEQ ID NO: 606700 - RNA, 23 nt, Human
agccgggcaugguggcggaugcc

SEQ ID NO: 606701 - RNA, 22 nt, Human
agccuggccaacguggugaaac

SEQ ID NO: 606702 - RNA, 24 nt, Human
agccuggccaacguggugaaaccc

SEQ ID NO: 606703 - RNA, 21 nt, Human
aggaggacccagccuuauaug

SEQ ID NO: 606704 - RNA, 21 nt, Human
aggcagccaaaggccucugga

SEQ ID NO: 606705 - RNA, 24 nt, Human
aggcaggagaauugcuugaacccg

SEQ ID NO: 606706 - RNA, 23 nt, Human
aggcaugcaccaccacaaugccc

SEQ ID NO: 606707 - RNA, 26 nt, Human
aggcggguggaucaccugacgucagg

SEQ ID NO: 606708 - RNA, 21 nt, Human
aggcugaggcaggagaauugc

SEQ ID NO: 606709 - RNA, 24 nt, Human
aggcugaggcaggagaauugcuug

SEQ ID NO: 606710 - RNA, 25 nt, Human
aggcuggagugcaguggcgcgaucu

SEQ ID NO: 606711 - RNA, 24 nt, Human
aggugauccacccaucuuggccuc

SEQ ID NO: 606712 - RNA, 21 nt, Human
aguagcugggguuacaggcau

SEQ ID NO: 606713 - RNA, 20 nt, Human
agugcaguggcgcgaucucg

SEQ ID NO: 606714 - RNA, 23 nt, Human
agugcaguggcgcgaucucggcu

SEQ ID NO: 606715 - RNA, 24 nt, Human
agugcaguggcgcgaucucggcuc

SEQ ID NO: 606716 - RNA, 18 nt, Human
agugcugggauuacaggc

SEQ ID NO: 606717 - RNA, 24 nt, Human
aucgugccacugcauuccagccug

SEQ ID NO: 606718 - RNA, 24 nt, Human
caaagugcugggauuacaggcauc

SEQ ID NO: 606719 - RNA, 26 nt, Human
caacaagagugaaacuccgccccaaa

SEQ ID NO: 606720 - RNA, 23 nt, Human
caacguggugaaacccgucucua

SEQ ID NO: 606721 - RNA, 24 nt, Human
caagaccagccuggccaacguggu

SEQ ID NO: 606722 - RNA, 21 nt, Human
caccacaacuuccgccucccg

SEQ ID NO: 606723 - RNA, 22 nt, Human
cacccaucuuggccucccaaag

SEQ ID NO: 606724 - RNA, 23 nt, Human
cacccaucuuggccucccaaagu

SEQ ID NO: 606725 - RNA, 24 nt, Human
cacccaucuuggccucccaaagug

SEQ ID NO: 606726 - RNA, 24 nt, Human
cacgcccguaaucccagcacuuug

SEQ ID NO: 606727 - RNA, 24 nt, Human
cacucuuguugcccaggcuggagu

SEQ ID NO: 606728 - RNA, 19 nt, Human
cacugcauuccagccuggg

SEQ ID NO: 606729 - RNA, 22 nt, Human
cacugcauuccagccugggcaa

SEQ ID NO: 606730 - RNA, 23 nt, Human
cacugcauuccagccugggcaac

SEQ ID NO: 606731 - RNA, 24 nt, Human
cacugcauuccagccugggcaaca

SEQ ID NO: 606732 - RNA, 24 nt, Human
cagcacuuugggaagccgaggcgg

SEQ ID NO: 606733 - RNA, 24 nt, Human
cagccacucgagaggcugaggcag

SEQ ID NO: 606734 - RNA, 21 nt, Human
cagccugggcaacaagaguga

SEQ ID NO: 606735 - RNA, 21 nt, Human
cagcuucccgaguagcugggg

SEQ ID NO: 606736 - RNA, 24 nt, Human
caguagagacgggguuucuccaug

SEQ ID NO: 606737 - RNA, 24 nt, Human
cauuccagccugggcaacaagagu

SEQ ID NO: 606738 - RNA, 25 nt, Human
cauuccagccugggcaacaagagug

SEQ ID NO: 606739 - RNA, 22 nt, Human
ccaaaaaaaaaaaaaaaaaaaa

SEQ ID NO: 606740 - RNA, 23 nt, Human
ccaaaaaaaaaaaaaaaaaaaaa

SEQ ID NO: 606741 - RNA, 18 nt, Human
ccaaaggccucuggacug

SEQ ID NO: 606742 - RNA, 23 nt, Human
ccaaagugcugggauuacaggca

SEQ ID NO: 606743 - RNA, 24 nt, Human
ccaaagugcugggauuacaggcau

SEQ ID NO: 606744 - RNA, 20 nt, Human
ccacugcauuccagccuggg

SEQ ID NO: 606745 - RNA, 20 nt, Human
ccacugcauuccagccuggg

SEQ ID NO: 606746 - RNA, 21 nt, Human
ccacugcauuccagccugggc

SEQ ID NO: 606747 - RNA, 23 nt, Human
ccacugcauuccagccugggcaa

SEQ ID NO: 606748 - RNA, 24 nt, Human
ccacugcauuccagccugggcaac

SEQ ID NO: 606749 - RNA, 19 nt, Human
ccaugguggucaggcuggu

SEQ ID NO: 606750 - RNA, 23 nt, Human
ccaugguggucaggcuggucucg

SEQ ID NO: 606751 - RNA, 18 nt, Human
cccaaaaaaaaaaaaaaa

SEQ ID NO: 606752 - RNA, 24 nt, Human
cccaaagugcugggauuacaggca

SEQ ID NO: 606753 - RNA, 18 nt, Human
ccccggccccagcugcuc

SEQ ID NO: 606754 - RNA, 23 nt, Human
cccgaguagcugggguuacaggc

SEQ ID NO: 606755 - RNA, 24 nt, Human
cccgaguagcugggguuacaggca

SEQ ID NO: 606756 - RNA, 22 nt, Human
cccguaaucccagcacuuuggg

SEQ ID NO: 606757 - RNA, 22 nt, Human
cccgucucuauuaaaaauacaa

SEQ ID NO: 606758 - RNA, 23 nt, Human
ccgaguagcugggguuacaggca

SEQ ID NO: 606759 - RNA, 24 nt, Human
ccgaguagcugggguuacaggcau

SEQ ID NO: 606760 - RNA, 18 nt, Human
ccgugagccgagaucgug

SEQ ID NO: 606761 - RNA, 24 nt, Human
ccuaccucagcuucccgaguagcu

SEQ ID NO: 606762 - RNA, 24 nt, Human
ccucccggcuucaagagauucucc

SEQ ID NO: 606763 - RNA, 23 nt, Human
ccugaccucaggugauccaccca

SEQ ID NO: 606764 - RNA, 24 nt, Human
ccugaccucaggugauccacccau

SEQ ID NO: 606765 - RNA, 22 nt, Human
ccuggccaacguggugaaaccc

SEQ ID NO: 606766 - RNA, 23 nt, Human
ccuggccaacguggugaaacccg

SEQ ID NO: 606767 - RNA, 19 nt, Human
ccuguaaucccagccacuc

SEQ ID NO: 606768 - RNA, 24 nt, Human
cgagaucgugccacugcauuccag

SEQ ID NO: 606769 - RNA, 19 nt, Human
cgaggcggguggaucaccu

SEQ ID NO: 606770 - RNA, 20 nt, Human
cgaggcggguggaucaccug

SEQ ID NO: 606771 - RNA, 22 nt, Human
cgccccaaaaaaaaaaaaaaaa

SEQ ID NO: 606772 - RNA, 23 nt, Human
cgcccguaaucccagcacuuugg

SEQ ID NO: 606773 - RNA, 27 nt, Human
cgcccguaaucccagcacuuugggaag

SEQ ID NO: 606774 - RNA, 24 nt, Human
cggguggaucaccugacgucagga

SEQ ID NO: 606775 - RNA, 22 nt, Human
cucacgcccguaaucccagcac

SEQ ID NO: 606776 - RNA, 24 nt, Human
cucacgcccguaaucccagcacuu

SEQ ID NO: 606777 - RNA, 24 nt, Human
cucagcuucccgaguagcuggggu

SEQ ID NO: 606778 - RNA, 24 nt, Human
cucaggugauccacccaucuuggc

SEQ ID NO: 606779 - RNA, 24 nt, Human
cuccaugguggucaggcuggucuc

SEQ ID NO: 606780 - RNA, 19 nt, Human
cuccgccccaaaaaaaaaa

SEQ ID NO: 606781 - RNA, 24 nt, Human
cuccgccccaaaaaaaaaaaaaaa

SEQ ID NO: 606782 - RNA, 23 nt, Human
cucggagcccuaacucucccgga

SEQ ID NO: 606783 - RNA, 18 nt, Human
cucuuguugcccaggcug

SEQ ID NO: 606784 - RNA, 18 nt, Human
cuucuugacccugccuug

SEQ ID NO: 606785 - RNA, 24 nt, Human
cuugacccugccuuggcuguuggg

SEQ ID NO: 606786 - RNA, 24 nt, Human
cuuguugcccaggcuggagugcag

SEQ ID NO: 606787 - RNA, 23 nt, Human
gaccucaggugauccacccaucu

SEQ ID NO: 606788 - RNA, 23 nt, Human
gagacgggguuucuccauggugg

SEQ ID NO: 606789 - RNA, 25 nt, Human
gaggcggguggaucaccugacguca

SEQ ID NO: 606790 - RNA, 24 nt, Human
gaguagcugggguuacaggcaugc

SEQ ID NO: 606791 - RNA, 18 nt, Human
gaucaccugacgucagga

SEQ ID NO: 606792 - RNA, 24 nt, Human
gaucaccugacgucaggaguacaa

SEQ ID NO: 606793 - RNA, 18 nt, Human
gauuacaggcaucagcca

SEQ ID NO: 606794 - RNA, 22 nt, Human
gauuacaggcaucagccacugc

SEQ ID NO: 606795 - RNA, 22 nt, Human
gauuacaggcaucagccacugc

SEQ ID NO: 606796 - RNA, 23 nt, Human
gcaccaccacaaugcccggcuaa

SEQ ID NO: 606797 - RNA, 23 nt, Human
gccaacguggugaaacccgucuc

SEQ ID NO: 606798 - RNA, 22 nt, Human
gccacugcauuccagccugggc

SEQ ID NO: 606799 - RNA, 24 nt, Human
gccacugcauuccagccugggcaa

SEQ ID NO: 606800 - RNA, 19 nt, Human
gcccaggcuggagugcagu

SEQ ID NO: 606801 - RNA, 20 nt, Human
gccgagaucgugccacugca

SEQ ID NO: 606802 - RNA, 19 nt, Human
gcuggagugcaguggcgcg

SEQ ID NO: 606803 - RNA, 23 nt, Human
gcuggucucgaacuccugaccuc

SEQ ID NO: 606804 - RNA, 22 nt, Human
ggauuacaggcaucagccacug

SEQ ID NO: 606805 - RNA, 21 nt, Human
ggcggaugccuguaaucccag

SEQ ID NO: 606806 - RNA, 21 nt, Human
ggcucacgcccguaaucccag

SEQ ID NO: 606807 - RNA, 24 nt, Human
ggcuggucucgaacuccugaccuc

SEQ ID NO: 606808 - RNA, 24 nt, Human
gggcaugguggcggaugccuguaa

SEQ ID NO: 606809 - RNA, 24 nt, Human
ggggguugccgugagccgagaucg

SEQ ID NO: 606810 - RNA, 23 nt, Human
gggguugccgugagccgagaucg

SEQ ID NO: 606811 - RNA, 24 nt, Human
ggguggaucaccugacgucaggag

SEQ ID NO: 606812 - RNA, 19 nt, Human
ggucucgaacuccugaccu

SEQ ID NO: 606813 - RNA, 24 nt, Human
gguggcggaugccuguaaucccag

SEQ ID NO: 606814 - RNA, 18 nt, Human
guagcugggguuacaggc

SEQ ID NO: 606815 - RNA, 20 nt, Human
guagcugggguuacaggcau

SEQ ID NO: 606816 - RNA, 24 nt, Human
gugauccacccaucuuggccuccc

SEQ ID NO: 606817 - RNA, 23 nt, Human
guggcucacgcccguaaucccag

SEQ ID NO: 606818 - RNA, 20 nt, Human
guggucaggcuggucucgaa

SEQ ID NO: 606819 - RNA, 21 nt, Human
uaaaaauacaaaaacuagccg

SEQ ID NO: 606820 - RNA, 19 nt, Human
uaaguccuggguccaggcc

SEQ ID NO: 606821 - RNA, 23 nt, Human
uaauuuuguauuuucaguagaga

SEQ ID NO: 606822 - RNA, 24 nt, Human
uacaagaccagccuggccaacgug

SEQ ID NO: 606823 - RNA, 22 nt, Human
uacaggcaucagccacugcgcc

SEQ ID NO: 606824 - RNA, 24 nt, Human
uaccucagcuucccgaguagcugg

SEQ ID NO: 606825 - RNA, 24 nt, Human
ucaccacaacuuccgccucccggc

SEQ ID NO: 606826 - RNA, 27 nt, Human
ucaccacaacuuccgccucccggcuuc

SEQ ID NO: 606827 - RNA, 22 nt, Human
ucacucuuguugcccaggcugg

SEQ ID NO: 606828 - RNA, 23 nt, Human
ucacucuuguugcccaggcugga

SEQ ID NO: 606829 - RNA, 20 nt, Human
ucagcuucccgaguagcugg

SEQ ID NO: 606830 - RNA, 24 nt, Human
ucaguagagacgggguuucuccau

SEQ ID NO: 606831 - RNA, 20 nt, Human
uccagccugggcaacaagag

SEQ ID NO: 606832 - RNA, 20 nt, Human
uccaggccaaaggaggaccc

SEQ ID NO: 606833 - RNA, 24 nt, Human
ucccaaagugcugggauuacaggc

SEQ ID NO: 606834 - RNA, 24 nt, Human
ucccgaguagcugggguuacaggc

SEQ ID NO: 606835 - RNA, 24 nt, Human
ucccggcuucaagagauucuccug

SEQ ID NO: 606836 - RNA, 23 nt, Human
uccgccccaaaaaaaaaaaaaaa

SEQ ID NO: 606837 - RNA, 25 nt, Human
uccgccccaaaaaaaaaaaaaaaaa

SEQ ID NO: 606838 - RNA, 23 nt, Human
ucgugccacugcauuccagccug

SEQ ID NO: 606839 - RNA, 23 nt, Human
ucucgaacuccugaccucaggug

SEQ ID NO: 606840 - RNA, 21 nt, Human
ucucuauuaaaaauacaaaaa

SEQ ID NO: 606841 - RNA, 24 nt, Human
ucuugacccugccuuggcuguugg

SEQ ID NO: 606842 - RNA, 20 nt, Human
ucuuggccucccaaagugcu

SEQ ID NO: 606843 - RNA, 22 nt, Human
ucuuguugcccaggcuggagug

SEQ ID NO: 606844 - RNA, 21 nt, Human
ugaccucaggugauccaccca

SEQ ID NO: 606845 - RNA, 24 nt, Human
ugaccucaggugauccacccaucu

SEQ ID NO: 606846 - RNA, 22 nt, Human
ugagccgagaucgugccacugc

SEQ ID NO: 606847 - RNA, 24 nt, Human
ugaggcaggagaauugcuugaacc

SEQ ID NO: 606848 - RNA, 25 nt, Human
ugaggcaggagaauugcuugaaccc

SEQ ID NO: 606849 - RNA, 24 nt, Human
ugauccacccaucuuggccuccca

SEQ ID NO: 606850 - RNA, 18 nt, Human
ugcccaggcuggagugca

SEQ ID NO: 606851 - RNA, 21 nt, Human
ugcccaggcuggagugcagug

SEQ ID NO: 606852 - RNA, 22 nt, Human
ugcccaggcuggagugcagugg

SEQ ID NO: 606853 - RNA, 24 nt, Human
ugcccaggcuggagugcaguggcg

SEQ ID NO: 606854 - RNA, 23 nt, Human
ugcccggcuaauuuuguauuuuc

SEQ ID NO: 606855 - RNA, 23 nt, Human
ugccgugagccgagaucgugcca

SEQ ID NO: 606856 - RNA, 19 nt, Human
ugccuugggccgagcacgg

SEQ ID NO: 606857 - RNA, 20 nt, Human
ugcugggauuacaggcauca

SEQ ID NO: 606858 - RNA, 23 nt, Human
uggagugcaguggcgcgaucucg

SEQ ID NO: 606859 - RNA, 24 nt, Human
uggagugcaguggcgcgaucucgg

SEQ ID NO: 606860 - RNA, 19 nt, Human
uggaucaccugacgucagg

SEQ ID NO: 606861 - RNA, 27 nt, Human
uggaucaccugacgucaggaguacaag

SEQ ID NO: 606862 - RNA, 23 nt, Human
uggccaacguggugaaacccguc

SEQ ID NO: 606863 - RNA, 24 nt, Human
uggcgcgaucucggcucaccacaa

SEQ ID NO: 606864 - RNA, 22 nt, Human
uggcucacgcccguaaucccag

SEQ ID NO: 606865 - RNA, 24 nt, Human
uggcucacgcccguaaucccagca

SEQ ID NO: 606866 - RNA, 24 nt, Human
ugggaagccgaggcggguggauca

SEQ ID NO: 606867 - RNA, 21 nt, Human
ugggauuacaggcaucagcca

SEQ ID NO: 606868 - RNA, 22 nt, Human
ugggauuacaggcaucagccac

SEQ ID NO: 606869 - RNA, 22 nt, Human
ugggauuacaggcaucagccac

SEQ ID NO: 606870 - RNA, 24 nt, Human
ugggauuacaggcaucagccacug

SEQ ID NO: 606871 - RNA, 24 nt, Human
ugggauuacaggcaucagccacug

SEQ ID NO: 606872 - RNA, 21 nt, Human
ugggguuacaggcaugcacca

SEQ ID NO: 606873 - RNA, 24 nt, Human
ugggguuacaggcaugcaccacca

SEQ ID NO: 606874 - RNA, 24 nt, Human
uggucaggcuggucucgaacuccu

SEQ ID NO: 606875 - RNA, 24 nt, Human
ugguggcggaugccuguaauccca

SEQ ID NO: 606876 - RNA, 18 nt, Human
uucaagagauucuccugc

SEQ ID NO: 606877 - RNA, 24 nt, Human
uucacucuuguugcccaggcugga

SEQ ID NO: 606878 - RNA, 24 nt, Human
uugcccaggcuggagugcaguggc

SEQ ID NO: 606879 - RNA, 22 nt, Human
uugccgugagccgagaucgugc

SEQ ID NO: 606880 - RNA, 23 nt, Human
uugcuugaacccgggaagcgggg

SEQ ID NO: 606881 - RNA, 24 nt, Human
uugggccgagcacgguggcucacg

SEQ ID NO: 606882 - RNA, 24 nt, Human
uuucacucuuguugcccaggcugg

SEQ ID NO: 606883 - RNA, 20 nt, Human
uuuuguauuuucaguagaga

SEQ ID NO: 606884 - RNA, 19 nt, Human
aaaugaaugcuagcacaug

SEQ ID NO: 606885 - RNA, 23 nt, Human
agaccucuuucuucucuccacuu

SEQ ID NO: 606886 - RNA, 22 nt, Human
agcauuuagaccucuuucuucu

SEQ ID NO: 606887 - RNA, 22 nt, Human
agcugcugacacaaauugaaca

SEQ ID NO: 606888 - RNA, 27 nt, Human
auuuagaccucuuucuucucuccacuu

SEQ ID NO: 606889 - RNA, 20 nt, Human
caccuggcucccgcccccgc

SEQ ID NO: 606890 - RNA, 24 nt, Human
cacguaaaaagcccaccagucaag

SEQ ID NO: 606891 - RNA, 20 nt, Human
cacuccaaaucacauuccau

SEQ ID NO: 606892 - RNA, 26 nt, Human
cagccacuuccugcucggugcccggg

SEQ ID NO: 606893 - RNA, 23 nt, Human
ccauccuucucagcauuuagacc

SEQ ID NO: 606894 - RNA, 24 nt, Human
ccccgcccuguugcaccgcgagga

SEQ ID NO: 606895 - RNA, 19 nt, Human
ccucccggggccguccagc

SEQ ID NO: 606896 - RNA, 21 nt, Human
cgaggcgggcgcgccgaggcc

SEQ ID NO: 606897 - RNA, 20 nt, Human
cucccgcccccgcgcggccg

SEQ ID NO: 606898 - RNA, 26 nt, Human
cugcauuguuccuauuuuaguacaug

SEQ ID NO: 606899 - RNA, 18 nt, Human
gagcagccgggcucugag

SEQ ID NO: 606900 - RNA, 21 nt, Human
gaggcgggcgcgccgaggcca

SEQ ID NO: 606901 - RNA, 19 nt, Human
gccuggccgggcgcugccu

SEQ ID NO: 606902 - RNA, 18 nt, Human
gcggccgccuccccgccc

SEQ ID NO: 606903 - RNA, 19 nt, Human
gcugcggccgccuccccgc

SEQ ID NO: 606904 - RNA, 20 nt, Human
ggcggucugcggccucccgg

SEQ ID NO: 606905 - RNA, 20 nt, Human
gggaaaggacugaaaugaau

SEQ ID NO: 606906 - RNA, 23 nt, Human
guccaggguguggggaacacucc

SEQ ID NO: 606907 - RNA, 21 nt, Human
uaacaggccaacagccauccu

SEQ ID NO: 606908 - RNA, 21 nt, Human
uaaucacuagggagaggucca

SEQ ID NO: 606909 - RNA, 20 nt, Human
uacacguaaaaagcccacca

SEQ ID NO: 606910 - RNA, 19 nt, Human
uaggugcucccagccuggc

SEQ ID NO: 606911 - RNA, 21 nt, Human
uccccgauuguccauagacgc

SEQ ID NO: 606912 - RNA, 22 nt, Human
uccccgauuguccauagacgcu

SEQ ID NO: 606913 - RNA, 18 nt, Human
uccggcucgggcugcggc

SEQ ID NO: 606914 - RNA, 20 nt, Human
uccggcucgggcugcggccg

SEQ ID NO: 606915 - RNA, 23 nt, Human
ucgcucccggcgcucgggcuccg

SEQ ID NO: 606916 - RNA, 25 nt, Human
ucuuuugggagugagguuguggggc

SEQ ID NO: 606917 - RNA, 24 nt, Human
ugacuugcaauucuaacuuaguac

SEQ ID NO: 606918 - RNA, 21 nt, Human
ugaggugggggaaaggacuga

SEQ ID NO: 606919 - RNA, 24 nt, Human
ugaggugggggaaaggacugaaau

SEQ ID NO: 606920 - RNA, 23 nt, Human
ugauagcauuaguuuucagaaaa

SEQ ID NO: 606921 - RNA, 22 nt, Human
ugcccgggcgaggcgggcgcgc

SEQ ID NO: 606922 - RNA, 18 nt, Human
ugggagaagccaccuaug

SEQ ID NO: 606923 - RNA, 19 nt, Human
uuagaccucuuucuucucu

SEQ ID NO: 606924 - RNA, 24 nt, Human
uuaguacaugggcuacugaaacaa

SEQ ID NO: 606925 - RNA, 26 nt, Human
uugaaaggugagauuuuuauagggag

SEQ ID NO: 606926 - RNA, 20 nt, Human
aauuccugugccugcacuca

SEQ ID NO: 606927 - RNA, 22 nt, Human
aauucucuggacugcacugacu

SEQ ID NO: 606928 - RNA, 20 nt, Human
agugaaauaaacucuaggcu

SEQ ID NO: 606929 - RNA, 20 nt, Human
caacgagaaaaucuucccuu

SEQ ID NO: 606930 - RNA, 23 nt, Human
caauuccugugccugcacucaga

SEQ ID NO: 606931 - RNA, 19 nt, Human
caucuggaugauggugauu

SEQ ID NO: 606932 - RNA, 24 nt, Human
ccuuucucacagcugcuuuccucg

SEQ ID NO: 606933 - RNA, 19 nt, Human
cucggccaccaccucucca

SEQ ID NO: 606934 - RNA, 23 nt, Human
cucucggccaccaccucuccauc

SEQ ID NO: 606935 - RNA, 23 nt, Human
cugaaucaugaacaguaauugag

SEQ ID NO: 606936 - RNA, 28 nt, Human
cugacagccuuucucacagcugcuuucc

SEQ ID NO: 606937 - RNA, 20 nt, Human
cuuucucacagcugcuuucc

SEQ ID NO: 606938 - RNA, 24 nt, Human
gccaaaccauacuucaccagaucc

SEQ ID NO: 606939 - RNA, 21 nt, Human
gcgucagcugcaaacugcugc

SEQ ID NO: 606940 - RNA, 18 nt, Human
gcugcucuccuggcugca

SEQ ID NO: 606941 - RNA, 18 nt, Human
ggcaauuguaaauugcca

SEQ ID NO: 606942 - RNA, 18 nt, Human
gguaauaauucaauaaac

SEQ ID NO: 606943 - RNA, 19 nt, Human
ggugauuguugucguggau

SEQ ID NO: 606944 - RNA, 18 nt, Human
uaccacaucagccaaacc

SEQ ID NO: 606945 - RNA, 25 nt, Human
uaccacaucagccaaaccauacuuc

SEQ ID NO: 606946 - RNA, 21 nt, Human
uagcaaaaacucaucuacaua

SEQ ID NO: 606947 - RNA, 22 nt, Human
uagguugauaucaaccaaucga

SEQ ID NO: 606948 - RNA, 23 nt, Human
ucagaccaacucgagcacaaccc

SEQ ID NO: 606949 - RNA, 22 nt, Human
ucaucuggaugauggugauugu

SEQ ID NO: 606950 - RNA, 21 nt, Human
uccaucuugaguggucugaga

SEQ ID NO: 606951 - RNA, 22 nt, Human
ucuccuggcugcagaucuugcc

SEQ ID NO: 606952 - RNA, 20 nt, Human
ucucuggacugcacugacuc

SEQ ID NO: 606953 - RNA, 24 nt, Human
ucuucccuuuuguuuacuuggguu

SEQ ID NO: 606954 - RNA, 21 nt, Human
ugaaacaccaauuccugugcc

SEQ ID NO: 606955 - RNA, 20 nt, Human
ugaacaguaauugagguugg

SEQ ID NO: 606956 - RNA, 18 nt, Human
ugaaucaugaacaguaau

SEQ ID NO: 606957 - RNA, 22 nt, Human
ugaccugacagccuuucucaca

SEQ ID NO: 606958 - RNA, 18 nt, Human
ugacugcuuucaucccua

SEQ ID NO: 606959 - RNA, 20 nt, Human
ugaugaaacaccaauuccug

SEQ ID NO: 606960 - RNA, 18 nt, Human
uggaguucugguugcuaa

SEQ ID NO: 606961 - RNA, 23 nt, Human
uggccaaaagaguccagcuucaa

SEQ ID NO: 606962 - RNA, 21 nt, Human
uggcccaucugaugggaguug

SEQ ID NO: 606963 - RNA, 22 nt, Human
uggcugugagcuggaguauuau

SEQ ID NO: 606964 - RNA, 20 nt, Human
uguagcaaaaacucaucuac

SEQ ID NO: 606965 - RNA, 23 nt, Human
uuaucgucauuguuggaguucug

SEQ ID NO: 606966 - RNA, 21 nt, Human
uucaucccuauaucagugaug

SEQ ID NO: 606967 - RNA, 25 nt, Human
uucucuggacugcacugacucucca

SEQ ID NO: 606968 - RNA, 20 nt, Human
uuggaguucugguugcuaac

SEQ ID NO: 606969 - RNA, 19 nt, Human
uuggcauuguuauucuggg

SEQ ID NO: 606970 - RNA, 21 nt, Human
aaccgagcagccucaacgaga

SEQ ID NO: 606971 - RNA, 21 nt, Human
aggggagggcuaugcgguccu

SEQ ID NO: 606972 - RNA, 23 nt, Human
aggggagggguguagacaguuaa

SEQ ID NO: 606973 - RNA, 19 nt, Human
cacuucuuccuucauccug

SEQ ID NO: 606974 - RNA, 19 nt, Human
ccaaacacacacugaggac

SEQ ID NO: 606975 - RNA, 21 nt, Human
ccacaaccgagcagccucaac

SEQ ID NO: 606976 - RNA, 20 nt, Human
ccacagauucuaagucuuca

SEQ ID NO: 606977 - RNA, 21 nt, Human
ccagagccagcguuucuggcc

SEQ ID NO: 606978 - RNA, 23 nt, Human
ccaggcaccuagccgcauaagau

SEQ ID NO: 606979 - RNA, 20 nt, Human
ccaucaacuucugucuucuc

SEQ ID NO: 606980 - RNA, 20 nt, Human
cccuaaaauucacauugcac

SEQ ID NO: 606981 - RNA, 23 nt, Human
ccucuugcuguuacuucccaggc

SEQ ID NO: 606982 - RNA, 25 nt, Human
cuaaaauucacauugcacuuuguac

SEQ ID NO: 606983 - RNA, 22 nt, Human
cuggccacaaccgagcagccuc

SEQ ID NO: 606984 - RNA, 21 nt, Human
gaaauguccguccacauucuc

SEQ ID NO: 606985 - RNA, 19 nt, Human
gacauuaagauggcgaaag

SEQ ID NO: 606986 - RNA, 25 nt, Human
gaggugcuucuucucccuaaaauuc

SEQ ID NO: 606987 - RNA, 22 nt, Human
gccacaaccgagcagccucaac

SEQ ID NO: 606988 - RNA, 21 nt, Human
gccucaacgagagggguuggu

SEQ ID NO: 606989 - RNA, 23 nt, Human
ggaggggagggcuaugcgguccu

SEQ ID NO: 606990 - RNA, 19 nt, Human
ggggaggggagggcuaugc

SEQ ID NO: 606991 - RNA, 25 nt, Human
ggggggaggggagggcuaugcgguc

SEQ ID NO: 606992 - RNA, 26 nt, Human
uagcaggugacucagaaucacucucu

SEQ ID NO: 606993 - RNA, 18 nt, Human
uaugccuguggaggugcu

SEQ ID NO: 606994 - RNA, 19 nt, Human
uaugccuguggaggugcuu

SEQ ID NO: 606995 - RNA, 25 nt, Human
uauuugaaagaaaagugcuaguaug

SEQ ID NO: 606996 - RNA, 23 nt, Human
ucaacgagagggguuggugacug

SEQ ID NO: 606997 - RNA, 20 nt, Human
ucaguugauucaggcuucac

SEQ ID NO: 606998 - RNA, 23 nt, Human
uccacagauucuaagucuucauc

SEQ ID NO: 606999 - RNA, 19 nt, Human
ucuucacagcaguaguacc

SEQ ID NO: 607000 - RNA, 20 nt, Human
uguaaucgugcacuucuucc

SEQ ID NO: 607001 - RNA, 24 nt, Human
ugucuucucuccuggugaauaauc

SEQ ID NO: 607002 - RNA, 18 nt, Human
ugugcaaugccucgaugg

SEQ ID NO: 607003 - RNA, 23 nt, Human
uguggaggugcuucuucucccua

SEQ ID NO: 607004 - RNA, 23 nt, Human
uguugcacaaauguuuuagggca

SEQ ID NO: 607005 - RNA, 21 nt, Human
uucccaggcaccuagccgcau

SEQ ID NO: 607006 - RNA, 22 nt, Human
uucugugagucuacugcuugua

SEQ ID NO: 607007 - RNA, 18 nt, Human
uuuaucuuuuucaugggu

SEQ ID NO: 607008 - RNA, 23 nt, Human
uuuaucuuuuucauggguuuuag

SEQ ID NO: 607009 - RNA, 23 nt, Human
aaaaauugggagaaaauagacaa

SEQ ID NO: 607010 - RNA, 19 nt, Human
aaagugcugggauuacagg

SEQ ID NO: 607011 - RNA, 24 nt, Human
aaagugcugggauuacaggugcga

SEQ ID NO: 607012 - RNA, 20 nt, Human
aaccuccgccuccgaggcuc

SEQ ID NO: 607013 - RNA, 25 nt, Human
aagcacagaaaaaggcauacugugc

SEQ ID NO: 607014 - RNA, 25 nt, Human
aagcgauccucccaccucagucucc

SEQ ID NO: 607015 - RNA, 18 nt, Human
aagugcugggauuacagg

SEQ ID NO: 607016 - RNA, 19 nt, Human
aagugcugggauuacaggu

SEQ ID NO: 607017 - RNA, 26 nt, Human
aagugcugggauuacaggugcgagcc

SEQ ID NO: 607018 - RNA, 23 nt, Human
aauaaauucaaacaagcuugagc

SEQ ID NO: 607019 - RNA, 18 nt, Human
aauagacaacaacaagac

SEQ ID NO: 607020 - RNA, 22 nt, Human
aauuucaaaaaaaaauugggag

SEQ ID NO: 607021 - RNA, 19 nt, Human
acacuuugaccuugggcuu

SEQ ID NO: 607022 - RNA, 19 nt, Human
acagaaaaaggcauacugu

SEQ ID NO: 607023 - RNA, 18 nt, Human
acaggguuuugccauguu

SEQ ID NO: 607024 - RNA, 19 nt, Human
acaggguuuugccauguug

SEQ ID NO: 607025 - RNA, 24 nt, Human
acaggguuuugccauguuguccag

SEQ ID NO: 607026 - RNA, 21 nt, Human
accacaggugugugccaccau

SEQ ID NO: 607027 - RNA, 24 nt, Human
acuccagccuaggugacagaguga

SEQ ID NO: 607028 - RNA, 24 nt, Human
acugcacuccagccuaggugacag

SEQ ID NO: 607029 - RNA, 26 nt, Human
acugcacuccagccuaggugacagag

SEQ ID NO: 607030 - RNA, 18 nt, Human
acuguguuugggaacugg

SEQ ID NO: 607031 - RNA, 26 nt, Human
agaaaauagacaacaacaagacaaaa

SEQ ID NO: 607032 - RNA, 18 nt, Human
agacaggguuuugccaug

SEQ ID NO: 607033 - RNA, 19 nt, Human
agagacaggguuuugccau

SEQ ID NO: 607034 - RNA, 21 nt, Human
agagacaggguuuugccaugu

SEQ ID NO: 607035 - RNA, 18 nt, Human
agcacaguccucuggcuu

SEQ ID NO: 607036 - RNA, 24 nt, Human
agccuaggugacagagugaggcuc

SEQ ID NO: 607037 - RNA, 20 nt, Human
agcuagccacucgcagcaca

SEQ ID NO: 607038 - RNA, 20 nt, Human
aggcaggaggaugacuggaa

SEQ ID NO: 607039 - RNA, 24 nt, Human
aggcaggaggaugacuggaaucug

SEQ ID NO: 607040 - RNA, 24 nt, Human
aguaccggggcagugagggaggga

SEQ ID NO: 607041 - RNA, 23 nt, Human
aguagcugggaccacaggugugu

SEQ ID NO: 607042 - RNA, 25 nt, Human
aguagcugggaccacaggugugugc

SEQ ID NO: 607043 - RNA, 21 nt, Human
aguccuugaauagcacagucc

SEQ ID NO: 607044 - RNA, 19 nt, Human
agucuugugaaaggagugg

SEQ ID NO: 607045 - RNA, 21 nt, Human
aucuaaacuggcuuugcagaa

SEQ ID NO: 607046 - RNA, 20 nt, Human
auugcaccacugcacuccag

SEQ ID NO: 607047 - RNA, 24 nt, Human
caaagugcugggauuacaggugcg

SEQ ID NO: 607048 - RNA, 20 nt, Human
caagcgauccucccaccuca

SEQ ID NO: 607049 - RNA, 27 nt, Human
caagcgauccucccaccucagucuccu

SEQ ID NO: 607050 - RNA, 24 nt, Human
caagcgaucugccugccucagccc

SEQ ID NO: 607051 - RNA, 26 nt, Human
caccacugcacuccagccuaggugac

SEQ ID NO: 607052 - RNA, 24 nt, Human
caccaugccuggcuaauuuuugua

SEQ ID NO: 607053 - RNA, 23 nt, Human
caccucagucuccugaguagcug

SEQ ID NO: 607054 - RNA, 24 nt, Human
caccucagucuccugaguagcugg

SEQ ID NO: 607055 - RNA, 22 nt, Human
cacuccagccuaggugacagag

SEQ ID NO: 607056 - RNA, 22 nt, Human
cacuccagccuaggugacagag

SEQ ID NO: 607057 - RNA, 24 nt, Human
cacuccagccuaggugacagagug

SEQ ID NO: 607058 - RNA, 19 nt, Human
cacugcacuccagccuagg

SEQ ID NO: 607059 - RNA, 19 nt, Human
cacugcacuccagccuagg

SEQ ID NO: 607060 - RNA, 23 nt, Human
cacugcacuccagccuaggugac

SEQ ID NO: 607061 - RNA, 25 nt, Human
cacugcacuccagccuaggugacag

SEQ ID NO: 607062 - RNA, 18 nt, Human
cacuuguuuuuuccuauu

SEQ ID NO: 607063 - RNA, 24 nt, Human
caggguuuugccauguuguccagg

SEQ ID NO: 607064 - RNA, 25 nt, Human
caggugugugccaccaugccuggcu

SEQ ID NO: 607065 - RNA, 20 nt, Human
cagucuccugaguagcuggg

SEQ ID NO: 607066 - RNA, 24 nt, Human
cauguuguccaggcuggucuugaa

SEQ ID NO: 607067 - RNA, 20 nt, Human
cauugcaccuggccuaacaa

SEQ ID NO: 607068 - RNA, 21 nt, Human
ccaaagugcugggauuacagg

SEQ ID NO: 607069 - RNA, 21 nt, Human
ccaaagugcugggauuacagg

SEQ ID NO: 607070 - RNA, 22 nt, Human
ccaaagugcugggauuacaggu

SEQ ID NO: 607071 - RNA, 19 nt, Human
ccacugcacuccagccuag

SEQ ID NO: 607072 - RNA, 20 nt, Human
ccacugcacuccagccuagg

SEQ ID NO: 607073 - RNA, 20 nt, Human
ccacugcacuccagccuagg

SEQ ID NO: 607074 - RNA, 21 nt, Human
ccacugcacuccagccuaggu

SEQ ID NO: 607075 - RNA, 24 nt, Human
ccacugcacuccagccuaggugac

SEQ ID NO: 607076 - RNA, 25 nt, Human
ccacugcacuccagccuaggugaca

SEQ ID NO: 607077 - RNA, 25 nt, Human
ccagggcgaaggucggggccgagaa

SEQ ID NO: 607078 - RNA, 19 nt, Human
ccauguuguccaggcuggu

SEQ ID NO: 607079 - RNA, 21 nt, Human
ccauguuguccaggcuggucu

SEQ ID NO: 607080 - RNA, 21 nt, Human
ccauguuguccaggcuggucu

SEQ ID NO: 607081 - RNA, 24 nt, Human
cccaccucagucuccugaguagcu

SEQ ID NO: 607082 - RNA, 18 nt, Human
cccagggcucugcccagc

SEQ ID NO: 607083 - RNA, 23 nt, Human
ccccaaagugcugggauuacagg

SEQ ID NO: 607084 - RNA, 18 nt, Human
ccccagggcucugcccag

SEQ ID NO: 607085 - RNA, 23 nt, Human
cccuguggucccagcuucuuggg

SEQ ID NO: 607086 - RNA, 22 nt, Human
ccuaggugacagagugaggcuc

SEQ ID NO: 607087 - RNA, 24 nt, Human
ccucccaccucagucuccugagua

SEQ ID NO: 607088 - RNA, 19 nt, Human
ccucgacacagcgccccuc

SEQ ID NO: 607089 - RNA, 22 nt, Human
ccucgacacagcgccccucccg

SEQ ID NO: 607090 - RNA, 21 nt, Human
ccugagcucaagcgaucugcc

SEQ ID NO: 607091 - RNA, 22 nt, Human
ccuguggucccagcuucuuggg

SEQ ID NO: 607092 - RNA, 25 nt, Human
ccuguggucccagcuucuugggugg

SEQ ID NO: 607093 - RNA, 23 nt, Human
cgcagugguacaaucucagcuca

SEQ ID NO: 607094 - RNA, 23 nt, Human
cgcgcccccagggcucugcccag

SEQ ID NO: 607095 - RNA, 24 nt, Human
cucaagcgauccucccaccucagu

SEQ ID NO: 607096 - RNA, 21 nt, Human
cucagccccccaaagugcugg

SEQ ID NO: 607097 - RNA, 24 nt, Human
cucagucuccugaguagcugggac

SEQ ID NO: 607098 - RNA, 24 nt, Human
cuccugaguagcugggaccacagg

SEQ ID NO: 607099 - RNA, 22 nt, Human
cugcagugagccauaauugcac

SEQ ID NO: 607100 - RNA, 22 nt, Human
cuuaaaaugcacaaaggagcuc

SEQ ID NO: 607101 - RNA, 23 nt, Human
gacacagcgccccucccggcacc

SEQ ID NO: 607102 - RNA, 19 nt, Human
gacaggguuuugccauguu

SEQ ID NO: 607103 - RNA, 23 nt, Human
gacaggguuuugccauguugucc

SEQ ID NO: 607104 - RNA, 18 nt, Human
gagacaaggucucaccau

SEQ ID NO: 607105 - RNA, 24 nt, Human
gagcucaagcgaucugccugccuc

SEQ ID NO: 607106 - RNA, 18 nt, Human
gauuacaggugcgagcca

SEQ ID NO: 607107 - RNA, 18 nt, Human
gauuacaggugcgagcca

SEQ ID NO: 607108 - RNA, 23 nt, Human
gauuacaggugcgagccauugca

SEQ ID NO: 607109 - RNA, 20 nt, Human
gcaaccuccgccuccgaggc

SEQ ID NO: 607110 - RNA, 24 nt, Human
gcacuccagccuaggugacagagu

SEQ ID NO: 607111 - RNA, 25 nt, Human
gcagaacauacuguggacuuccccc

SEQ ID NO: 607112 - RNA, 21 nt, Human
gcagggcgcacacacggggcg

SEQ ID NO: 607113 - RNA, 21 nt, Human
gcagugguacaaucucagcuc

SEQ ID NO: 607114 - RNA, 19 nt, Human
gccauguuguccaggcugg

SEQ ID NO: 607115 - RNA, 20 nt, Human
gccauguuguccaggcuggu

SEQ ID NO: 607116 - RNA, 18 nt, Human
gcgaucugccugccucag

SEQ ID NO: 607117 - RNA, 21 nt, Human
gcgaucugccugccucagccc

SEQ ID NO: 607118 - RNA, 20 nt, Human
ggagagacaggguuuugcca

SEQ ID NO: 607119 - RNA, 19 nt, Human
ggagguugaaacugcagug

SEQ ID NO: 607120 - RNA, 18 nt, Human
ggcgaaggucggggccga

SEQ ID NO: 607121 - RNA, 24 nt, Human
ggcuggucuugaacuccugagcuc

SEQ ID NO: 607122 - RNA, 24 nt, Human
guagcugggaccacaggugugugc

SEQ ID NO: 607123 - RNA, 21 nt, Human
gugcauuuucacuuguuuuuu

SEQ ID NO: 607124 - RNA, 23 nt, Human
guuuugccauguuguccaggcug

SEQ ID NO: 607125 - RNA, 24 nt, Human
guuuugccauguuguccaggcugg

SEQ ID NO: 607126 - RNA, 24 nt, Human
uaacuuguaagcggcgaucaacca

SEQ ID NO: 607127 - RNA, 18 nt, Human
uaagccuaaacaaauaaa

SEQ ID NO: 607128 - RNA, 23 nt, Human
uaagugcagggcgcacacacggu

SEQ ID NO: 607129 - RNA, 18 nt, Human
uaauacacuuugaccuug

SEQ ID NO: 607130 - RNA, 22 nt, Human
uaauuuuuguauucuugggaga

SEQ ID NO: 607131 - RNA, 21 nt, Human
uagauguaauaaauucaaaca

SEQ ID NO: 607132 - RNA, 23 nt, Human
uagcugggaccacaggugugugc

SEQ ID NO: 607133 - RNA, 20 nt, Human
ucacugcaaccuccgccucc

SEQ ID NO: 607134 - RNA, 21 nt, Human
ucacugcaaccuccgccuccg

SEQ ID NO: 607135 - RNA, 24 nt, Human
ucacugcaaccuccgccuccgagg

SEQ ID NO: 607136 - RNA, 25 nt, Human
ucacugcaaccuccgccuccgaggc

SEQ ID NO: 607137 - RNA, 26 nt, Human
ucacugcaaccuccgccuccgaggcu

SEQ ID NO: 607138 - RNA, 20 nt, Human
ucagccccccaaagugcugg

SEQ ID NO: 607139 - RNA, 23 nt, Human
ucagucuccugaguagcugggac

SEQ ID NO: 607140 - RNA, 23 nt, Human
uccagccuaggugacagagugag

SEQ ID NO: 607141 - RNA, 24 nt, Human
uccagccuaggugacagagugagg

SEQ ID NO: 607142 - RNA, 22 nt, Human
ucccuguggucccagcuucuug

SEQ ID NO: 607143 - RNA, 23 nt, Human
ucccuguggucccagcuucuugg

SEQ ID NO: 607144 - RNA, 24 nt, Human
uccugaguagcugggaccacaggu

SEQ ID NO: 607145 - RNA, 24 nt, Human
ucucaccaugucacccaguuugga

SEQ ID NO: 607146 - RNA, 23 nt, Human
ucuugaacuccugagcucaagcg

SEQ ID NO: 607147 - RNA, 25 nt, Human
ugaaaauaaugucagcaugggcugu

SEQ ID NO: 607148 - RNA, 20 nt, Human
ugacaaaacggcaggaaaag

SEQ ID NO: 607149 - RNA, 25 nt, Human
ugaggcaggaggaugacuggaaucc

SEQ ID NO: 607150 - RNA, 25 nt, Human
ugaggcaggaggaugacuggaaucu

SEQ ID NO: 607151 - RNA, 19 nt, Human
ugaguaccggggcagugag

SEQ ID NO: 607152 - RNA, 19 nt, Human
ugaucccuguggucccagc

SEQ ID NO: 607153 - RNA, 19 nt, Human
ugcaaugguuucuggaauu

SEQ ID NO: 607154 - RNA, 21 nt, Human
ugcaccacugcacuccagccu

SEQ ID NO: 607155 - RNA, 22 nt, Human
ugcagugagccauaauugcacc

SEQ ID NO: 607156 - RNA, 24 nt, Human
ugccauguuguccaggcuggucuu

SEQ ID NO: 607157 - RNA, 27 nt, Human
ugccauguuguccaggcuggucuugaa

SEQ ID NO: 607158 - RNA, 24 nt, Human
ugccucagccccccaaagugcugg

SEQ ID NO: 607159 - RNA, 28 nt, Human
ugccuggcuaauuuuuguauucuuggga

SEQ ID NO: 607160 - RNA, 24 nt, Human
ugcugggauuacaggugcgagcca

SEQ ID NO: 607161 - RNA, 24 nt, Human
ugcuuuucaucuaaacuggcuuug

SEQ ID NO: 607162 - RNA, 24 nt, Human
uggagcgcagugguacaaucucag

SEQ ID NO: 607163 - RNA, 20 nt, Human
uggccagaaccucccagggc

SEQ ID NO: 607164 - RNA, 19 nt, Human
uggcugaggcaggaggaug

SEQ ID NO: 607165 - RNA, 19 nt, Human
ugggaagagucugacugug

SEQ ID NO: 607166 - RNA, 21 nt, Human
ugggaccacaggugugugcca

SEQ ID NO: 607167 - RNA, 24 nt, Human
ugggaccacaggugugugccacca

SEQ ID NO: 607168 - RNA, 24 nt, Human
ugggagagacaggguuuugccaug

SEQ ID NO: 607169 - RNA, 24 nt, Human
ugggagguugaaacugcagugagc

SEQ ID NO: 607170 - RNA, 19 nt, Human
ugggauuacaggugcgagc

SEQ ID NO: 607171 - RNA, 21 nt, Human
ugggauuacaggugcgagcca

SEQ ID NO: 607172 - RNA, 21 nt, Human
ugggauuacaggugcgagcca

SEQ ID NO: 607173 - RNA, 21 nt, Human
ugggauuacaggugcgagcca

SEQ ID NO: 607174 - RNA, 22 nt, Human
ugggauuacaggugcgagccau

SEQ ID NO: 607175 - RNA, 24 nt, Human
ugggauuacaggugcgagccauug

SEQ ID NO: 607176 - RNA, 27 nt, Human
ugggauuacaggugcgagccauugcac

SEQ ID NO: 607177 - RNA, 18 nt, Human
uggguggcugaggcagga

SEQ ID NO: 607178 - RNA, 24 nt, Human
ugguacaaucucagcucacugcaa

SEQ ID NO: 607179 - RNA, 27 nt, Human
uguacuuccccaauuuuaaccccuggg

SEQ ID NO: 607180 - RNA, 24 nt, Human
uguccaggcuggucuugaacuccu

SEQ ID NO: 607181 - RNA, 20 nt, Human
uucaaagcacagaaaaaggc

SEQ ID NO: 607182 - RNA, 20 nt, Human
uucacuuguuuuuuccuauu

SEQ ID NO: 607183 - RNA, 21 nt, Human
uucuugggagagacaggguuu

SEQ ID NO: 607184 - RNA, 26 nt, Human
uucuuuuuuucucauugucuuuugag

SEQ ID NO: 607185 - RNA, 19 nt, Human
uugaaugcuuauaaaaauc

SEQ ID NO: 607186 - RNA, 24 nt, Human
uugggagagacaggguuuugccau

SEQ ID NO: 607187 - RNA, 24 nt, Human
uuguauucuugggagagacagggu

SEQ ID NO: 607188 - RNA, 31 nt, Human
uuugcagaacauacuguggacuuccccuuuu

SEQ ID NO: 607189 - RNA, 23 nt, Human
uuuugccauguuguccaggcugg

SEQ ID NO: 607190 - RNA, 23 nt, Human
caggcaccgggcacguccgcgcc

SEQ ID NO: 607191 - RNA, 18 nt, Human
cgccggccggggcaccgg

SEQ ID NO: 607192 - RNA, 20 nt, Human
aaaugcagccacucccaccg

SEQ ID NO: 607193 - RNA, 22 nt, Human
aaucugggagaagaauauguuc

SEQ ID NO: 607194 - RNA, 22 nt, Human
agaaguucuuuggcuagguugg

SEQ ID NO: 607195 - RNA, 18 nt, Human
aggaagaaaaggucucau

SEQ ID NO: 607196 - RNA, 18 nt, Human
cacucccaccggcaggau

SEQ ID NO: 607197 - RNA, 20 nt, Human
caggccgaggaaagcucagc

SEQ ID NO: 607198 - RNA, 20 nt, Human
cauggucucccgagggcgga

SEQ ID NO: 607199 - RNA, 26 nt, Human
ccucuuacaaaucaaagcuauaagac

SEQ ID NO: 607200 - RNA, 20 nt, Human
cgccuggccucgcgcgugag

SEQ ID NO: 607201 - RNA, 19 nt, Human
cuccggugucgugaagugg

SEQ ID NO: 607202 - RNA, 20 nt, Human
cucggggccucgccuggccu

SEQ ID NO: 607203 - RNA, 22 nt, Human
cugcagcauggucucccgaggg

SEQ ID NO: 607204 - RNA, 23 nt, Human
cugccagcaaugcaaaucuuccc

SEQ ID NO: 607205 - RNA, 20 nt, Human
gaagaggggugagcgcggug

SEQ ID NO: 607206 - RNA, 22 nt, Human
gagaaaaguagaaccuuacagc

SEQ ID NO: 607207 - RNA, 22 nt, Human
gccccgggacugcggggcgacg

SEQ ID NO: 607208 - RNA, 19 nt, Human
gccucggggccucgccugg

SEQ ID NO: 607209 - RNA, 22 nt, Human
gcugcccgcgaaggccguuugg

SEQ ID NO: 607210 - RNA, 20 nt, Human
ggacguggcggcgaagaggg

SEQ ID NO: 607211 - RNA, 20 nt, Human
gggagccccgggacugcggg

SEQ ID NO: 607212 - RNA, 22 nt, Human
gggcaggggggucgcagccucu

SEQ ID NO: 607213 - RNA, 22 nt, Human
ggugacaauuaggccuuauaaa

SEQ ID NO: 607214 - RNA, 20 nt, Human
ggugagcgcggugcccgggg

SEQ ID NO: 607215 - RNA, 24 nt, Human
guggcggcgaagaggggugagcgc

SEQ ID NO: 607216 - RNA, 24 nt, Human
uauaaauucacaugagacaaagau

SEQ ID NO: 607217 - RNA, 24 nt, Human
uccccagaaagggaaggaagaaaa

SEQ ID NO: 607218 - RNA, 21 nt, Human
ucuggcgcccgguucgcuccg

SEQ ID NO: 607219 - RNA, 20 nt, Human
ugaaaaacuauuacaauugu

SEQ ID NO: 607220 - RNA, 19 nt, Human
ugaaguggugggcgccucg

SEQ ID NO: 607221 - RNA, 19 nt, Human
ugagacaaagaugccaacc

SEQ ID NO: 607222 - RNA, 23 nt, Human
ugccagcaaugcaaaucuuccca

SEQ ID NO: 607223 - RNA, 20 nt, Human
uggcuagguuggauuguuga

SEQ ID NO: 607224 - RNA, 21 nt, Human
ugggagccccgggacugcggg

SEQ ID NO: 607225 - RNA, 21 nt, Human
uuaaagaaauuaugaaaaacu

SEQ ID NO: 607226 - RNA, 19 nt, Human
uucccggggcuucggggac

SEQ ID NO: 607227 - RNA, 19 nt, Human
aaaaaggacaaauagaaau

SEQ ID NO: 607228 - RNA, 19 nt, Human
aaaacaaaaaaaggacaaa

SEQ ID NO: 607229 - RNA, 25 nt, Human
aaagagaucccuuccuucgccuuuu

SEQ ID NO: 607230 - RNA, 19 nt, Human
aacagaaaacaaaaaaagg

SEQ ID NO: 607231 - RNA, 23 nt, Human
aaucacaaugucccaaaagagau

SEQ ID NO: 607232 - RNA, 25 nt, Human
acaaaaaaaggacaaauagaaauac

SEQ ID NO: 607233 - RNA, 21 nt, Human
acaaacaaaaaagaugaaucu

SEQ ID NO: 607234 - RNA, 18 nt, Human
agaaaacaaaaaaaggac

SEQ ID NO: 607235 - RNA, 18 nt, Human
agaaaacaaaaaaaggac

SEQ ID NO: 607236 - RNA, 21 nt, Human
agaaaacaaaaaaaggacaaa

SEQ ID NO: 607237 - RNA, 25 nt, Human
agaaaaucauuuucuccuccuaggc

SEQ ID NO: 607238 - RNA, 22 nt, Human
agaacagaaaacaaaaaaagga

SEQ ID NO: 607239 - RNA, 19 nt, Human
aucccaucuuucuucucua

SEQ ID NO: 607240 - RNA, 20 nt, Human
augcaucuuuuaagagaaaa

SEQ ID NO: 607241 - RNA, 19 nt, Human
caaaaaagaugaaucucac

SEQ ID NO: 607242 - RNA, 27 nt, Human
caauuagaacagaaaacaaaaaaagga

SEQ ID NO: 607243 - RNA, 23 nt, Human
cacaaacaaaaaagaugaaucuc

SEQ ID NO: 607244 - RNA, 18 nt, Human
cacacaaacaaaaaagau

SEQ ID NO: 607245 - RNA, 21 nt, Human
caucuuuguuguugucacuac

SEQ ID NO: 607246 - RNA, 21 nt, Human
cauuuucuccuccuaggccua

SEQ ID NO: 607247 - RNA, 22 nt, Human
cguaugauacaugcaucuuuua

SEQ ID NO: 607248 - RNA, 21 nt, Human
cuaaaacaaucacaauguccc

SEQ ID NO: 607249 - RNA, 19 nt, Human
cuaaugaaagcuaauuaaa

SEQ ID NO: 607250 - RNA, 24 nt, Human
cuauagccacuacauaugucccug

SEQ ID NO: 607251 - RNA, 19 nt, Human
gaacagaaaacaaaaaaag

SEQ ID NO: 607252 - RNA, 21 nt, Human
gaacagaaaacaaaaaaagga

SEQ ID NO: 607253 - RNA, 21 nt, Human
gcuuugguauauaaugaaguu

SEQ ID NO: 607254 - RNA, 20 nt, Human
uaaaacaaucacaauguccc

SEQ ID NO: 607255 - RNA, 18 nt, Human
uaagagaaaaccgaagug

SEQ ID NO: 607256 - RNA, 20 nt, Human
uaaguaaaccuauagccacu

SEQ ID NO: 607257 - RNA, 21 nt, Human
uaaguaaaccuauagccacua

SEQ ID NO: 607258 - RNA, 22 nt, Human
uaauaauugaggauccguacac

SEQ ID NO: 607259 - RNA, 22 nt, Human
uaauagaaagaaaaucauuuuc

SEQ ID NO: 607260 - RNA, 23 nt, Human
uaauagaauuuucccugugauuu

SEQ ID NO: 607261 - RNA, 21 nt, Human
uauagccacuacauauguccc

SEQ ID NO: 607262 - RNA, 24 nt, Human
uaugucccugacaauuagaacaga

SEQ ID NO: 607263 - RNA, 21 nt, Human
ucacuagaggugggucuuuau

SEQ ID NO: 607264 - RNA, 21 nt, Human
ucucugcuaaaacaaucacaa

SEQ ID NO: 607265 - RNA, 21 nt, Human
ugacauaaggggaaauaaguu

SEQ ID NO: 607266 - RNA, 23 nt, Human
ugacuugcuuaaagcacguauga

SEQ ID NO: 607267 - RNA, 18 nt, Human
ugauguagacagacagca

SEQ ID NO: 607268 - RNA, 24 nt, Human
uuaaacauguaauagaauuuuccc

SEQ ID NO: 607269 - RNA, 22 nt, Human
aaggggggggaugaaaagagga

SEQ ID NO: 607270 - RNA, 28 nt, Human
aagugcuuuucgggggggccggucugcc

SEQ ID NO: 607271 - RNA, 22 nt, Human
aaucuguaagacguuuccuauc

SEQ ID NO: 607272 - RNA, 18 nt, Human
acccuggaguuggcugca

SEQ ID NO: 607273 - RNA, 18 nt, Human
agaaaaccuggggaacug

SEQ ID NO: 607274 - RNA, 18 nt, Human
agccgauuuagaaugccc

SEQ ID NO: 607275 - RNA, 21 nt, Human
aggggggggaugaaaagagga

SEQ ID NO: 607276 - RNA, 21 nt, Human
cagaagagccuucccgcuucc

SEQ ID NO: 607277 - RNA, 20 nt, Human
cagcaggugagaccuccuuc

SEQ ID NO: 607278 - RNA, 23 nt, Human
caggacaaggcgaagugcuuuuc

SEQ ID NO: 607279 - RNA, 18 nt, Human
ccaacuccgcagcaaaau

SEQ ID NO: 607280 - RNA, 23 nt, Human
cccgcuucccuccaccauguccc

SEQ ID NO: 607281 - RNA, 19 nt, Human
ccuccaccaugucccccuu

SEQ ID NO: 607282 - RNA, 18 nt, Human
ccuucccgcuucccucca

SEQ ID NO: 607283 - RNA, 24 nt, Human
cgggggggcccuugggucugggcu

SEQ ID NO: 607284 - RNA, 20 nt, Human
cugcagcucuccacaaucug

SEQ ID NO: 607285 - RNA, 20 nt, Human
cuggggcgucccagggcugg

SEQ ID NO: 607286 - RNA, 22 nt, Human
cuucccgcuucccuccaccaug

SEQ ID NO: 607287 - RNA, 21 nt, Human
gaggagaaaaccuggggaacu

SEQ ID NO: 607288 - RNA, 18 nt, Human
gaguaguaaaugcucucc

SEQ ID NO: 607289 - RNA, 21 nt, Human
gcaaaaugaggagaaaaccug

SEQ ID NO: 607290 - RNA, 26 nt, Human
ggcggaagcugcggaggucagccaag

SEQ ID NO: 607291 - RNA, 21 nt, Human
gggaaggggggggaugaaaag

SEQ ID NO: 607292 - RNA, 18 nt, Human
gggcccuugggucugggc

SEQ ID NO: 607293 - RNA, 18 nt, Human
ggggggaaggggggggau

SEQ ID NO: 607294 - RNA, 25 nt, Human
gugcuuuucgggggggcccuugggu

SEQ ID NO: 607295 - RNA, 20 nt, Human
guuggggggggggaaggggg

SEQ ID NO: 607296 - RNA, 23 nt, Human
uagaucgugcgaugccacagaag

SEQ ID NO: 607297 - RNA, 22 nt, Human
uagccagagucgggcggaagcu

SEQ ID NO: 607298 - RNA, 18 nt, Human
ucaaagcucgacuccugc

SEQ ID NO: 607299 - RNA, 21 nt, Human
ucaaggcaguagccuccaaga

SEQ ID NO: 607300 - RNA, 18 nt, Human
ucccuagaggucaucuuc

SEQ ID NO: 607301 - RNA, 21 nt, Human
uccucagacuggaaacccugg

SEQ ID NO: 607302 - RNA, 19 nt, Human
ugaaaagaggagccggagu

SEQ ID NO: 607303 - RNA, 20 nt, Human
ugauggcgaccagucuacac

SEQ ID NO: 607304 - RNA, 21 nt, Human
ugcagggucuuguccuucacc

SEQ ID NO: 607305 - RNA, 19 nt, Human
ugggaugacagcagcgagg

SEQ ID NO: 607306 - RNA, 19 nt, Human
uggggggggggaagggggg

SEQ ID NO: 607307 - RNA, 22 nt, Human
uggggggggggaagggggggga

SEQ ID NO: 607308 - RNA, 18 nt, Human
ugggucugggcugguccc

SEQ ID NO: 607309 - RNA, 25 nt, Human
uucaccugcuggggcgucccagggc

SEQ ID NO: 607310 - RNA, 19 nt, Human
aaagugcugggguuacagg

SEQ ID NO: 607311 - RNA, 19 nt, Human
aaagugcugggguuacagg

SEQ ID NO: 607312 - RNA, 23 nt, Human
aaagugcugggguuacaggugua

SEQ ID NO: 607313 - RNA, 27 nt, Human
aaggcuucucucccguaugaauguucu

SEQ ID NO: 607314 - RNA, 26 nt, Human
aagugcugggguuacagguguaagcc

SEQ ID NO: 607315 - RNA, 22 nt, Human
aaucucugcucggugcaacccc

SEQ ID NO: 607316 - RNA, 20 nt, Human
aaugacugaccaaacuucug

SEQ ID NO: 607317 - RNA, 25 nt, Human
aauuuuguauuuuuuaguagagaca

SEQ ID NO: 607318 - RNA, 18 nt, Human
agacaggguuucaccgug

SEQ ID NO: 607319 - RNA, 20 nt, Human
agacaggguuucaccguggu

SEQ ID NO: 607320 - RNA, 19 nt, Human
agagacaggguuucaccgu

SEQ ID NO: 607321 - RNA, 19 nt, Human
agugcaguggugcaaucuc

SEQ ID NO: 607322 - RNA, 21 nt, Human
agugcaguggugcaaucucug

SEQ ID NO: 607323 - RNA, 19 nt, Human
caaaaggcuucucucccgu

SEQ ID NO: 607324 - RNA, 24 nt, Human
caaagugcugggguuacaggugua

SEQ ID NO: 607325 - RNA, 18 nt, Human
caacccccaccuccuggg

SEQ ID NO: 607326 - RNA, 23 nt, Human
caacccccaccuccuggguucaa

SEQ ID NO: 607327 - RNA, 20 nt, Human
caagcgauucuccugccuca

SEQ ID NO: 607328 - RNA, 22 nt, Human
caagcgauucuccugccucagc

SEQ ID NO: 607329 - RNA, 21 nt, Human
caauuacugcauucaaaaggc

SEQ ID NO: 607330 - RNA, 22 nt, Human
caccaccacgcccagcuaauuu

SEQ ID NO: 607331 - RNA, 20 nt, Human
cagccaguaauucuuaucaa

SEQ ID NO: 607332 - RNA, 21 nt, Human
caggugcgcaccaccacgccc

SEQ ID NO: 607333 - RNA, 24 nt, Human
caguagcugagauuacaggugcgc

SEQ ID NO: 607334 - RNA, 20 nt, Human
ccaaagugcugggguuacag

SEQ ID NO: 607335 - RNA, 20 nt, Human
ccaaagugcugggguuacag

SEQ ID NO: 607336 - RNA, 21 nt, Human
ccaaagugcugggguuacagg

SEQ ID NO: 607337 - RNA, 24 nt, Human
ccaaagugcugggguuacaggugu

SEQ ID NO: 607338 - RNA, 22 nt, Human
ccaaugacuuuugcucuuuggc

SEQ ID NO: 607339 - RNA, 24 nt, Human
ccaccuccuggguucaagcgauuc

SEQ ID NO: 607340 - RNA, 20 nt, Human
ccaguagcugagauuacagg

SEQ ID NO: 607341 - RNA, 26 nt, Human
ccgccugucucagccucccaaagugc

SEQ ID NO: 607342 - RNA, 24 nt, Human
ccuccuggguucaagcgauucucc

SEQ ID NO: 607343 - RNA, 23 nt, Human
ccugccucagccucuccaguagc

SEQ ID NO: 607344 - RNA, 24 nt, Human
ccugccucagccucuccaguagcu

SEQ ID NO: 607345 - RNA, 23 nt, Human
ccuggguucaagcgauucuccug

SEQ ID NO: 607346 - RNA, 24 nt, Human
cgugauccgccugucucagccucc

SEQ ID NO: 607347 - RNA, 25 nt, Human
cuaauuuuguauuuuuuaguagaga

SEQ ID NO: 607348 - RNA, 21 nt, Human
cuccuggguucaagcgauucu

SEQ ID NO: 607349 - RNA, 20 nt, Human
cucuguugcccagacuggag

SEQ ID NO: 607350 - RNA, 23 nt, Human
cucuguugcccagacuggagugc

SEQ ID NO: 607351 - RNA, 24 nt, Human
cucuugaccucgugauccgccugu

SEQ ID NO: 607352 - RNA, 23 nt, Human
cugucucagccucccaaagugcu

SEQ ID NO: 607353 - RNA, 24 nt, Human
cugucucagccucccaaagugcug

SEQ ID NO: 607354 - RNA, 21 nt, Human
gacaggguuucaccguggucu

SEQ ID NO: 607355 - RNA, 22 nt, Human
gaccucgugauccgccugucuc

SEQ ID NO: 607356 - RNA, 24 nt, Human
gaccucgugauccgccugucucag

SEQ ID NO: 607357 - RNA, 20 nt, Human
gauucuccugccucagccuc

SEQ ID NO: 607358 - RNA, 22 nt, Human
gcaacccccaccuccuggguuc

SEQ ID NO: 607359 - RNA, 24 nt, Human
gcgauucuccugccucagccucuc

SEQ ID NO: 607360 - RNA, 22 nt, Human
ggguuacagguguaagccacug

SEQ ID NO: 607361 - RNA, 18 nt, Human
gguuacagguguaagcca

SEQ ID NO: 607362 - RNA, 22 nt, Human
gguuacagguguaagccacugc

SEQ ID NO: 607363 - RNA, 24 nt, Human
gugauccgccugucucagccuccc

SEQ ID NO: 607364 - RNA, 24 nt, Human
uacaggugcgcaccaccacgccca

SEQ ID NO: 607365 - RNA, 24 nt, Human
uacagguguaagccacugcgccca

SEQ ID NO: 607366 - RNA, 22 nt, Human
uagagacaggguuucaccgugg

SEQ ID NO: 607367 - RNA, 19 nt, Human
uaggauggaugagaucugu

SEQ ID NO: 607368 - RNA, 21 nt, Human
uaguagagacaggguuucacc

SEQ ID NO: 607369 - RNA, 24 nt, Human
uaguagagacaggguuucaccgug

SEQ ID NO: 607370 - RNA, 21 nt, Human
ucaaauccugaggucaaaauc

SEQ ID NO: 607371 - RNA, 19 nt, Human
ucaagcgauucuccugccu

SEQ ID NO: 607372 - RNA, 20 nt, Human
ucagccucccaaagugcugg

SEQ ID NO: 607373 - RNA, 23 nt, Human
uccaguagcugagauuacaggug

SEQ ID NO: 607374 - RNA, 23 nt, Human
ucccaaagugcugggguuacagg

SEQ ID NO: 607375 - RNA, 21 nt, Human
uccuggguucaagcgauucuc

SEQ ID NO: 607376 - RNA, 24 nt, Human
uccuggguucaagcgauucuccug

SEQ ID NO: 607377 - RNA, 24 nt, Human
ucggugcaacccccaccuccuggg

SEQ ID NO: 607378 - RNA, 24 nt, Human
ucuccaguagcugagauuacaggu

SEQ ID NO: 607379 - RNA, 26 nt, Human
ucuccugccucagccucuccaguagc

SEQ ID NO: 607380 - RNA, 24 nt, Human
ucuugcucuguugcccagacugga

SEQ ID NO: 607381 - RNA, 24 nt, Human
ucuuuccacugugaauucucugau

SEQ ID NO: 607382 - RNA, 19 nt, Human
ugacugaccaaacuucuga

SEQ ID NO: 607383 - RNA, 21 nt, Human
ugagauuacaggugcgcacca

SEQ ID NO: 607384 - RNA, 24 nt, Human
ugagauuacaggugcgcaccacca

SEQ ID NO: 607385 - RNA, 24 nt, Human
ugauugaagcuuuccccacauuua

SEQ ID NO: 607386 - RNA, 22 nt, Human
ugccauauguuugauagccuca

SEQ ID NO: 607387 - RNA, 21 nt, Human
ugcccagacuggagugcagug

SEQ ID NO: 607388 - RNA, 24 nt, Human
ugcccagacuggagugcaguggug

SEQ ID NO: 607389 - RNA, 21 nt, Human
ugccucagccucuccaguagc

SEQ ID NO: 607390 - RNA, 24 nt, Human
ugccucagccucuccaguagcuga

SEQ ID NO: 607391 - RNA, 21 nt, Human
ugcgcaccaccacgcccagcu

SEQ ID NO: 607392 - RNA, 18 nt, Human
uggagugcaguggugcaa

SEQ ID NO: 607393 - RNA, 22 nt, Human
uggagugcaguggugcaaucuc

SEQ ID NO: 607394 - RNA, 22 nt, Human
ugggguuacagguguaagccac

SEQ ID NO: 607395 - RNA, 22 nt, Human
ugggguuacagguguaagccac

SEQ ID NO: 607396 - RNA, 24 nt, Human
ugggguuacagguguaagccacug

SEQ ID NO: 607397 - RNA, 23 nt, Human
uggguucaagcgauucuccugcc

SEQ ID NO: 607398 - RNA, 24 nt, Human
uguagaauaaggguuguucuuuga

SEQ ID NO: 607399 - RNA, 24 nt, Human
ugucucagccucccaaagugcugg

SEQ ID NO: 607400 - RNA, 21 nt, Human
uguugcccagacuggagugca

SEQ ID NO: 607401 - RNA, 20 nt, Human
uuacagguguaagccacugc

SEQ ID NO: 607402 - RNA, 21 nt, Human
uuacugcauucaaaaggcuuc

SEQ ID NO: 607403 - RNA, 22 nt, Human
uuaguagagacaggguuucacc

SEQ ID NO: 607404 - RNA, 24 nt, Human
uuaguagagacaggguuucaccgu

SEQ ID NO: 607405 - RNA, 21 nt, Human
uucaagcgauucuccugccuc

SEQ ID NO: 607406 - RNA, 23 nt, Human
uucaagcgauucuccugccucag

SEQ ID NO: 607407 - RNA, 24 nt, Human
uucaagcgauucuccugccucagc

SEQ ID NO: 607408 - RNA, 19 nt, Human
uucacaaugacugaccaaa

SEQ ID NO: 607409 - RNA, 24 nt, Human
uugcccagacuggagugcaguggu

SEQ ID NO: 607410 - RNA, 20 nt, Human
uuuuguauuuuuuaguagag

SEQ ID NO: 607411 - RNA, 21 nt, Human
uuuuguauuuuuuaguagaga

SEQ ID NO: 607412 - RNA, 24 nt, Human
uuuuuaguagagacaggguuucac

SEQ ID NO: 607413 - RNA, 23 nt, Human
uuuuuuaguagagacaggguuuc

SEQ ID NO: 607414 - RNA, 26 nt, Human
aacccguuugcuccuuccucagcucc

SEQ ID NO: 607415 - RNA, 18 nt, Human
aacuuguuccaccucccc

SEQ ID NO: 607416 - RNA, 26 nt, Human
aaguagccagccacggggccuagagc

SEQ ID NO: 607417 - RNA, 19 nt, Human
acagccgggaacacacauu

SEQ ID NO: 607418 - RNA, 20 nt, Human
acuucuauccccuacuccuc

SEQ ID NO: 607419 - RNA, 18 nt, Human
agcuggucaggacagugc

SEQ ID NO: 607420 - RNA, 22 nt, Human
caaguucuugcccaggaucaca

SEQ ID NO: 607421 - RNA, 23 nt, Human
cacacagccgggaacacacauuc

SEQ ID NO: 607422 - RNA, 23 nt, Human
caccccaaucgugacuccccaga

SEQ ID NO: 607423 - RNA, 22 nt, Human
cagcaacuuguuccaccucccc

SEQ ID NO: 607424 - RNA, 23 nt, Human
cagcaacuuguuccaccucccca

SEQ ID NO: 607425 - RNA, 18 nt, Human
cagcaaggacuagaagua

SEQ ID NO: 607426 - RNA, 21 nt, Human
cagcagguuugcucaucuccc

SEQ ID NO: 607427 - RNA, 21 nt, Human
cagggguccuugggcaggucc

SEQ ID NO: 607428 - RNA, 19 nt, Human
caguccggagccgcggcgg

SEQ ID NO: 607429 - RNA, 25 nt, Human
ccaagaggccucucccucccccuuc

SEQ ID NO: 607430 - RNA, 24 nt, Human
ccacagggaccaagaggccucucc

SEQ ID NO: 607431 - RNA, 18 nt, Human
ccagggaggucaaguucu

SEQ ID NO: 607432 - RNA, 18 nt, Human
cccggggccagucccggg

SEQ ID NO: 607433 - RNA, 21 nt, Human
cccggggccagucccggggcc

SEQ ID NO: 607434 - RNA, 22 nt, Human
cccggggccagucccggggcca

SEQ ID NO: 607435 - RNA, 18 nt, Human
cccuacuccucccuccuu

SEQ ID NO: 607436 - RNA, 18 nt, Human
cccuacuccucccuccuu

SEQ ID NO: 607437 - RNA, 21 nt, Human
ccuucgccgcgggagcaggga

SEQ ID NO: 607438 - RNA, 27 nt, Human
cgcgaaaacccguuugcuccuuccuca

SEQ ID NO: 607439 - RNA, 29 nt, Human
cucccaccccaaucgugacuccccagacc

SEQ ID NO: 607440 - RNA, 29 nt, Human
cucccaccccaaucgugacuccccagacc

SEQ ID NO: 607441 - RNA, 20 nt, Human
cuccccagaccgggucucca

SEQ ID NO: 607442 - RNA, 22 nt, Human
gaaauacuucuauccccuacuc

SEQ ID NO: 607443 - RNA, 18 nt, Human
gaacacacauuccaaaac

SEQ ID NO: 607444 - RNA, 19 nt, Human
gaucacacagccgggaaca

SEQ ID NO: 607445 - RNA, 20 nt, Human
gcaaaggcacccagcgcgcc

SEQ ID NO: 607446 - RNA, 19 nt, Human
gccgggaacacacauucca

SEQ ID NO: 607447 - RNA, 22 nt, Human
gggaacacacauuccaaaaccc

SEQ ID NO: 607448 - RNA, 20 nt, Human
uaaguagccagccacggggc

SEQ ID NO: 607449 - RNA, 20 nt, Human
uagaaguaacuuugguggca

SEQ ID NO: 607450 - RNA, 20 nt, Human
uaugcugggcacuuugccau

SEQ ID NO: 607451 - RNA, 21 nt, Human
ucacugaccucugcaugggag

SEQ ID NO: 607452 - RNA, 20 nt, Human
uccaccuccccaagguucag

SEQ ID NO: 607453 - RNA, 26 nt, Human
uccgugcccggggccagucccggggc

SEQ ID NO: 607454 - RNA, 19 nt, Human
ucgccgcgggagcagggaa

SEQ ID NO: 607455 - RNA, 19 nt, Human
ugcagggguccuugggcag

SEQ ID NO: 607456 - RNA, 26 nt, Human
ugcccaggaucacacagccgggaacu

SEQ ID NO: 607457 - RNA, 18 nt, Human
ugcuccuuccucagcucc

SEQ ID NO: 607458 - RNA, 19 nt, Human
ugcuccuuccucagcuccc

SEQ ID NO: 607459 - RNA, 19 nt, Human
uugcuccuuccucagcucc

SEQ ID NO: 607460 - RNA, 21 nt, Human
aaacagcaauaaauuaaauca

SEQ ID NO: 607461 - RNA, 22 nt, Human
aacaccaaaaagcaucuacgca

SEQ ID NO: 607462 - RNA, 22 nt, Human
aacauuuacaaggacacauaca

SEQ ID NO: 607463 - RNA, 21 nt, Human
aacgaacaaacucacagcaac

SEQ ID NO: 607464 - RNA, 25 nt, Human
aagccagcuacauucuuaaaaccag

SEQ ID NO: 607465 - RNA, 22 nt, Human
aaugaagaggccacccuguuuc

SEQ ID NO: 607466 - RNA, 25 nt, Human
acaaugaugaccauaagacagacac

SEQ ID NO: 607467 - RNA, 23 nt, Human
acaccaaagccaggcuuguugga

SEQ ID NO: 607468 - RNA, 22 nt, Human
agacaguggcaaugggcaaagc

SEQ ID NO: 607469 - RNA, 25 nt, Human
agaggccacccuguuuccaaauccu

SEQ ID NO: 607470 - RNA, 23 nt, Human
agugaugcugaauguggaugugg

SEQ ID NO: 607471 - RNA, 20 nt, Human
auaaaacccaugaaaugucu

SEQ ID NO: 607472 - RNA, 20 nt, Human
auaaauaaugaagaggccac

SEQ ID NO: 607473 - RNA, 25 nt, Human
aucaagcuucugauucuucuugcug

SEQ ID NO: 607474 - RNA, 21 nt, Human
aucucauucucuccgcuucca

SEQ ID NO: 607475 - RNA, 24 nt, Human
aucucauucucuccgcuuccacaa

SEQ ID NO: 607476 - RNA, 27 nt, Human
auggauuuuuacucaugagaucuggcu

SEQ ID NO: 607477 - RNA, 23 nt, Human
caaaucucuccccuaugaaucau

SEQ ID NO: 607478 - RNA, 23 nt, Human
caacacaaaggucugcaacgaac

SEQ ID NO: 607479 - RNA, 23 nt, Human
cagaaggggcaguaaagacagug

SEQ ID NO: 607480 - RNA, 21 nt, Human
cagauucccaggacccaacac

SEQ ID NO: 607481 - RNA, 22 nt, Human
caggguaaaauccuauagaauu

SEQ ID NO: 607482 - RNA, 21 nt, Human
caguauguaacgugugcagcu

SEQ ID NO: 607483 - RNA, 21 nt, Human
cauaagacagacacuuauuuc

SEQ ID NO: 607484 - RNA, 22 nt, Human
cauaagacagacacuuauuucc

SEQ ID NO: 607485 - RNA, 21 nt, Human
caugcaccgugacagcuuugu

SEQ ID NO: 607486 - RNA, 19 nt, Human
ccaaagccaggcuuguugg

SEQ ID NO: 607487 - RNA, 22 nt, Human
ccaaagccaggcuuguuggagu

SEQ ID NO: 607488 - RNA, 23 nt, Human
ccaacuuccucauguagccccaa

SEQ ID NO: 607489 - RNA, 22 nt, Human
ccaccaugcacagggaacaaag

SEQ ID NO: 607490 - RNA, 19 nt, Human
ccagaagacaggggucaca

SEQ ID NO: 607491 - RNA, 18 nt, Human
cccaaagagauuuccaca

SEQ ID NO: 607492 - RNA, 23 nt, Human
cccaaagagauuuccacaaauag

SEQ ID NO: 607493 - RNA, 19 nt, Human
ccuauccaaaaaucuaaga

SEQ ID NO: 607494 - RNA, 21 nt, Human
ccuggccccccuauccaaaaa

SEQ ID NO: 607495 - RNA, 24 nt, Human
ccuguuuccaaaucugaauuugcc

SEQ ID NO: 607496 - RNA, 19 nt, Human
cuccuuuucuacacaaaac

SEQ ID NO: 607497 - RNA, 21 nt, Human
cucuccccuaugaaucaucuc

SEQ ID NO: 607498 - RNA, 22 nt, Human
cucuugguuucaauuauccacc

SEQ ID NO: 607499 - RNA, 18 nt, Human
cuggccccccuauccaaa

SEQ ID NO: 607500 - RNA, 19 nt, Human
cuucuauuucuguuagagg

SEQ ID NO: 607501 - RNA, 20 nt, Human
gaagaggccacccuguuucc

SEQ ID NO: 607502 - RNA, 21 nt, Human
gacuggaugagaaaauacuga

SEQ ID NO: 607503 - RNA, 22 nt, Human
gaucucccaaagagauuuccac

SEQ ID NO: 607504 - RNA, 20 nt, Human
gauucuucuugcugaguaug

SEQ ID NO: 607505 - RNA, 18 nt, Human
gcacuaguuucucuuucu

SEQ ID NO: 607506 - RNA, 21 nt, Human
gccuacucacaaauuucuacc

SEQ ID NO: 607507 - RNA, 21 nt, Human
gcuacauucuuaaaaccagca

SEQ ID NO: 607508 - RNA, 22 nt, Human
ggcaagaugcugacacauccuu

SEQ ID NO: 607509 - RNA, 23 nt, Human
gggcaagaugcugacacauccuu

SEQ ID NO: 607510 - RNA, 21 nt, Human
ggguggaggggcagaaggggc

SEQ ID NO: 607511 - RNA, 22 nt, Human
gguggaggggcagaaggggcag

SEQ ID NO: 607512 - RNA, 22 nt, Human
uaaagacaacugaaaaagaagc

SEQ ID NO: 607513 - RNA, 24 nt, Human
uaaagacaacugaaaaagaagcug

SEQ ID NO: 607514 - RNA, 24 nt, Human
uaaagacaguggcaaugggcaaag

SEQ ID NO: 607515 - RNA, 23 nt, Human
uaaauuauccuuuuugaaaucug

SEQ ID NO: 607516 - RNA, 21 nt, Human
uaagaagacaaugaugaccau

SEQ ID NO: 607517 - RNA, 25 nt, Human
uaagacagacacuuauuuccaacac

SEQ ID NO: 607518 - RNA, 21 nt, Human
uaaugagaaauuugaacaaac

SEQ ID NO: 607519 - RNA, 25 nt, Human
uaccuggccccccuauccaaaaauc

SEQ ID NO: 607520 - RNA, 19 nt, Human
uacucugaguacguggcau

SEQ ID NO: 607521 - RNA, 23 nt, Human
uaggucgaggggccuaauuuggg

SEQ ID NO: 607522 - RNA, 18 nt, Human
uauguugugauuuacacu

SEQ ID NO: 607523 - RNA, 23 nt, Human
ucagcucauuaccaacuuccuca

SEQ ID NO: 607524 - RNA, 25 nt, Human
ucaucucauucucuccgcuuccaca

SEQ ID NO: 607525 - RNA, 18 nt, Human
ucaucucccacugauaua

SEQ ID NO: 607526 - RNA, 21 nt, Human
ucaugcaccgugacagcuuug

SEQ ID NO: 607527 - RNA, 19 nt, Human
uccaaaaaucuaagaagac

SEQ ID NO: 607528 - RNA, 25 nt, Human
uccacaaauagccaguguauacugg

SEQ ID NO: 607529 - RNA, 21 nt, Human
uccaccaugcacagggaacaa

SEQ ID NO: 607530 - RNA, 28 nt, Human
ucugaacaccaucaucucauucucuccg

SEQ ID NO: 607531 - RNA, 20 nt, Human
ucugagucucccccuaccug

SEQ ID NO: 607532 - RNA, 22 nt, Human
ucuguccaacuaucaugcaccg

SEQ ID NO: 607533 - RNA, 21 nt, Human
ugaaaagccagcuacauucuu

SEQ ID NO: 607534 - RNA, 23 nt, Human
ugaacaaacuccaauccagcacc

SEQ ID NO: 607535 - RNA, 19 nt, Human
ugaaucaaagcaaugcagc

SEQ ID NO: 607536 - RNA, 21 nt, Human
ugagggagagauggacucuau

SEQ ID NO: 607537 - RNA, 24 nt, Human
ugaguucuaaagacaacugaaaaa

SEQ ID NO: 607538 - RNA, 20 nt, Human
uggggugugauuaaauaaaa

SEQ ID NO: 607539 - RNA, 23 nt, Human
ugguaaguaggcccuuuauuccu

SEQ ID NO: 607540 - RNA, 25 nt, Human
ugguagccuauguugugauuuacac

SEQ ID NO: 607541 - RNA, 18 nt, Human
uguccaacuaucaugcac

SEQ ID NO: 607542 - RNA, 19 nt, Human
ugucccaagaaacacaggg

SEQ ID NO: 607543 - RNA, 26 nt, Human
uguggguggaggggcagaaggggcag

SEQ ID NO: 607544 - RNA, 23 nt, Human
uguuccuuccaguuuauaaacac

SEQ ID NO: 607545 - RNA, 19 nt, Human
uuaaaacuugaacacugac

SEQ ID NO: 607546 - RNA, 18 nt, Human
uuacucucaugucugcau

SEQ ID NO: 607547 - RNA, 22 nt, Human
uugaaacacuuccauuguguuu

SEQ ID NO: 607548 - RNA, 21 nt, Human
uugaaggggcacuaaauuauu

SEQ ID NO: 607549 - RNA, 22 nt, Human
uuuauaaacacucacaguggcc

SEQ ID NO: 607550 - RNA, 19 nt, Human
uuugaaaucugaacacccu

SEQ ID NO: 607551 - RNA, 19 nt, Human
uuugaccuguaucaauguc

SEQ ID NO: 607552 - RNA, 21 nt, Human
uuuuugaaaucugaacacccu

SEQ ID NO: 607553 - RNA, 23 nt, Human
aaacaagccgaacaaaccggacc

SEQ ID NO: 607554 - RNA, 22 nt, Human
aaacacaggcaauacacagaca

SEQ ID NO: 607555 - RNA, 22 nt, Human
aaacaggaaaaaaaaaaaccug

SEQ ID NO: 607556 - RNA, 23 nt, Human
aaacaggaaaaaaaaaaagggac

SEQ ID NO: 607557 - RNA, 24 nt, Human
aaauccgaaaauccaaaaccugaa

SEQ ID NO: 607558 - RNA, 21 nt, Human
aacacaggcaauacacagaca

SEQ ID NO: 607559 - RNA, 18 nt, Human
aacaggaaaaaaaaaaac

SEQ ID NO: 607560 - RNA, 21 nt, Human
aacaugggggcagacuucccc

SEQ ID NO: 607561 - RNA, 21 nt, Human
aagccguggggaaaggacaau

SEQ ID NO: 607562 - RNA, 28 nt, Human
aaguaucccaaauccgaaaauccaaaac

SEQ ID NO: 607563 - RNA, 19 nt, Human
aauacagugcucaaacagu

SEQ ID NO: 607564 - RNA, 19 nt, Human
aauccaaaaccugaaaagc

SEQ ID NO: 607565 - RNA, 22 nt, Human
aaucccgggaccuccgagcccc

SEQ ID NO: 607566 - RNA, 18 nt, Human
acaaacacaggcaauaca

SEQ ID NO: 607567 - RNA, 20 nt, Human
acacaaacacaggcaauaca

SEQ ID NO: 607568 - RNA, 18 nt, Human
acugaaacaugggggcag

SEQ ID NO: 607569 - RNA, 22 nt, Human
acuuaagaaacaggaaaaaaaa

SEQ ID NO: 607570 - RNA, 21 nt, Human
agauuauacucucuugguaua

SEQ ID NO: 607571 - RNA, 18 nt, Human
aggaaaaaaaaaaaccug

SEQ ID NO: 607572 - RNA, 21 nt, Human
agguaaaacagggaugguauu

SEQ ID NO: 607573 - RNA, 18 nt, Human
aguaucccaaauccgaaa

SEQ ID NO: 607574 - RNA, 19 nt, Human
aguuuauguuugacuguac

SEQ ID NO: 607575 - RNA, 18 nt, Human
auaaauguuuccuccagu

SEQ ID NO: 607576 - RNA, 21 nt, Human
caagaacagauaaauacagug

SEQ ID NO: 607577 - RNA, 24 nt, Human
caagaacagauaaauacagugcuc

SEQ ID NO: 607578 - RNA, 20 nt, Human
caagucccggguccuuuccc

SEQ ID NO: 607579 - RNA, 22 nt, Human
cacagacaccagguaaaacagg

SEQ ID NO: 607580 - RNA, 23 nt, Human
caccguaaucccgggaccuccga

SEQ ID NO: 607581 - RNA, 24 nt, Human
caccuguagaacugugagucaauu

SEQ ID NO: 607582 - RNA, 21 nt, Human
cacuguucaagucccgggucc

SEQ ID NO: 607583 - RNA, 20 nt, Human
caugauaaaccuugguuucu

SEQ ID NO: 607584 - RNA, 24 nt, Human
ccaaaaccugaaaagcucuaauga

SEQ ID NO: 607585 - RNA, 26 nt, Human
ccaacagccucuacugcuuguuuccc

SEQ ID NO: 607586 - RNA, 21 nt, Human
ccccuggggcugugcgguggc

SEQ ID NO: 607587 - RNA, 21 nt, Human
cccgggaccuccgagccccug

SEQ ID NO: 607588 - RNA, 20 nt, Human
cccuuugcccuccuccucug

SEQ ID NO: 607589 - RNA, 26 nt, Human
ccuccacagccaugcuuccuguauca

SEQ ID NO: 607590 - RNA, 22 nt, Human
ccuccgagccccugcuccgcgg

SEQ ID NO: 607591 - RNA, 22 nt, Human
ccuuugcccuccuccucuggcu

SEQ ID NO: 607592 - RNA, 25 nt, Human
cggggccagcuucaaaguccaaccc

SEQ ID NO: 607593 - RNA, 23 nt, Human
cuagucaaguaucccaaauccga

SEQ ID NO: 607594 - RNA, 27 nt, Human
cuccacagccaugcuuccuguaucacc

SEQ ID NO: 607595 - RNA, 22 nt, Human
cugcuuccgcuucaccuuccgc

SEQ ID NO: 607596 - RNA, 21 nt, Human
gaaaauccaaaaccugaaaag

SEQ ID NO: 607597 - RNA, 22 nt, Human
gaaaauccaaaaccugaaaagc

SEQ ID NO: 607598 - RNA, 20 nt, Human
gaaacaggaaaaaaaaaaac

SEQ ID NO: 607599 - RNA, 21 nt, Human
gaaacaggaaaaaaaaaaacc

SEQ ID NO: 607600 - RNA, 18 nt, Human
gaaaggacaauguuccca

SEQ ID NO: 607601 - RNA, 22 nt, Human
gaaagugugcagcaucugcccc

SEQ ID NO: 607602 - RNA, 21 nt, Human
gaugguauuucuggaugguuu

SEQ ID NO: 607603 - RNA, 19 nt, Human
gcaccguaaucccgggacc

SEQ ID NO: 607604 - RNA, 22 nt, Human
gcggcgugcggccgcuggcgcc

SEQ ID NO: 607605 - RNA, 23 nt, Human
gcugugcgguggccgucggcggg

SEQ ID NO: 607606 - RNA, 22 nt, Human
ggagacguaccccucccuaauc

SEQ ID NO: 607607 - RNA, 22 nt, Human
uaagaaacaggaaaaaaaaaaa

SEQ ID NO: 607608 - RNA, 21 nt, Human
uacaccccuggggcugugcgg

SEQ ID NO: 607609 - RNA, 21 nt, Human
uagagcaugauaaaccuuggu

SEQ ID NO: 607610 - RNA, 18 nt, Human
uaucugaaaugcuuggga

SEQ ID NO: 607611 - RNA, 18 nt, Human
uauuucuggaugguuuaa

SEQ ID NO: 607612 - RNA, 25 nt, Human
ucaaaguccaacccacaaggcacag

SEQ ID NO: 607613 - RNA, 21 nt, Human
ucacagguaggaccacuuccc

SEQ ID NO: 607614 - RNA, 19 nt, Human
uccaaaaccugaaaagcuc

SEQ ID NO: 607615 - RNA, 19 nt, Human
ucccgggaccuccgagccc

SEQ ID NO: 607616 - RNA, 22 nt, Human
ucccgggaccuccgagccccug

SEQ ID NO: 607617 - RNA, 19 nt, Human
uccuagagcaugauaaacc

SEQ ID NO: 607618 - RNA, 21 nt, Human
uccuagagcaugauaaaccuu

SEQ ID NO: 607619 - RNA, 24 nt, Human
ucuucgguguuggaggaggggccu

SEQ ID NO: 607620 - RNA, 25 nt, Human
ucuuuuagacuuugguuuuuuugug

SEQ ID NO: 607621 - RNA, 18 nt, Human
ugacugaaacaugggggc

SEQ ID NO: 607622 - RNA, 19 nt, Human
ugccaagauuaaccaacag

SEQ ID NO: 607623 - RNA, 21 nt, Human
ugcccuccuccucuggcucua

SEQ ID NO: 607624 - RNA, 26 nt, Human
ugcucuguguccccacacaaaucuca

SEQ ID NO: 607625 - RNA, 23 nt, Human
uggaggaggggccuggagggagg

SEQ ID NO: 607626 - RNA, 19 nt, Human
uggagggaggugacugaaa

SEQ ID NO: 607627 - RNA, 23 nt, Human
uggggcugugcgguggccgucgg

SEQ ID NO: 607628 - RNA, 25 nt, Human
uggggcugugcgguggccgucggcg

SEQ ID NO: 607629 - RNA, 27 nt, Human
ugggggagacguaccccucccuaauuc

SEQ ID NO: 607630 - RNA, 26 nt, Human
ugguuuucaugauuaaagccguggag

SEQ ID NO: 607631 - RNA, 24 nt, Human
uguacuuaagaaacaggaaaaaaa

SEQ ID NO: 607632 - RNA, 23 nt, Human
ugugcgguggccgucggcggggc

SEQ ID NO: 607633 - RNA, 20 nt, Human
uguguacaagaacguacaug

SEQ ID NO: 607634 - RNA, 24 nt, Human
uguuuccucgucuguguuuaacac

SEQ ID NO: 607635 - RNA, 25 nt, Human
uuaagaaacaggaaaaaaaaaaacc

SEQ ID NO: 607636 - RNA, 21 nt, Human
uucaugauuaaagccgugggg

SEQ ID NO: 607637 - RNA, 21 nt, Human
uucaugguguacauuucacaa

SEQ ID NO: 607638 - RNA, 25 nt, Human
uugguuuuuuuguguguuuuggaau

SEQ ID NO: 607639 - RNA, 21 nt, Human
uuugcccuccuccucuggcuc

SEQ ID NO: 607640 - RNA, 18 nt, Human
aaacacuaaaaacuagua

SEQ ID NO: 607641 - RNA, 18 nt, Human
aaacaggaaggaaugucu

SEQ ID NO: 607642 - RNA, 25 nt, Human
aaaccaaggaccaggcccguagaaa

SEQ ID NO: 607643 - RNA, 24 nt, Human
aaagugcugggauuacgggcauga

SEQ ID NO: 607644 - RNA, 22 nt, Human
aacacucccuuucaauaaagac

SEQ ID NO: 607645 - RNA, 21 nt, Human
aaccugugagugcagaggcac

SEQ ID NO: 607646 - RNA, 18 nt, Human
aacuuguaaucaguagca

SEQ ID NO: 607647 - RNA, 21 nt, Human
aagagggguccagcacagccc

SEQ ID NO: 607648 - RNA, 22 nt, Human
aagcaaguuccaaaugcacuga

SEQ ID NO: 607649 - RNA, 22 nt, Human
aagccacagcagcaucacagcc

SEQ ID NO: 607650 - RNA, 24 nt, Human
aaggacaugcacaaaucccugggg

SEQ ID NO: 607651 - RNA, 21 nt, Human
aagguagcugucaacuugaaa

SEQ ID NO: 607652 - RNA, 19 nt, Human
aagugcugggauuacgggc

SEQ ID NO: 607653 - RNA, 21 nt, Human
aagugcugggauuacgggcau

SEQ ID NO: 607654 - RNA, 26 nt, Human
aagugcugggauuacgggcaugagcc

SEQ ID NO: 607655 - RNA, 18 nt, Human
aaugguaaaugugauuca

SEQ ID NO: 607656 - RNA, 23 nt, Human
acagcagcaucacagccuuugcc

SEQ ID NO: 607657 - RNA, 22 nt, Human
acaguaaugcaaggcgcacguc

SEQ ID NO: 607658 - RNA, 23 nt, Human
acauccaugagaggccacucaga

SEQ ID NO: 607659 - RNA, 19 nt, Human
accuugggugaucugcuug

SEQ ID NO: 607660 - RNA, 23 nt, Human
agaaacaggaaggaaugucuggc

SEQ ID NO: 607661 - RNA, 20 nt, Human
agaaacgagcagcugacuca

SEQ ID NO: 607662 - RNA, 21 nt, Human
agaaagccacagcagcaucac

SEQ ID NO: 607663 - RNA, 19 nt, Human
agaaauguuuauucugucc

SEQ ID NO: 607664 - RNA, 21 nt, Human
agaaauucuccaccaaggggc

SEQ ID NO: 607665 - RNA, 21 nt, Human
agaagcgaaaagaggggucca

SEQ ID NO: 607666 - RNA, 22 nt, Human
agacgccacaucagccugagca

SEQ ID NO: 607667 - RNA, 21 nt, Human
agcaaguagaaaaaaauguca

SEQ ID NO: 607668 - RNA, 18 nt, Human
agcaucaacauugucuga

SEQ ID NO: 607669 - RNA, 23 nt, Human
agccacagcagcaucacagccuu

SEQ ID NO: 607670 - RNA, 18 nt, Human
aggcaggucaguugcaga

SEQ ID NO: 607671 - RNA, 24 nt, Human
aggcaggugccggccaaaagggac

SEQ ID NO: 607672 - RNA, 22 nt, Human
aggcuucugggucaacacuccc

SEQ ID NO: 607673 - RNA, 24 nt, Human
agguagcugucaacuugaaauuca

SEQ ID NO: 607674 - RNA, 24 nt, Human
aggugcggaauccacagaaugacc

SEQ ID NO: 607675 - RNA, 22 nt, Human
aguuggccaggcuggucuugaa

SEQ ID NO: 607676 - RNA, 24 nt, Human
caaagugcugggauuacgggcaug

SEQ ID NO: 607677 - RNA, 19 nt, Human
caacugagucacuggaaaa

SEQ ID NO: 607678 - RNA, 22 nt, Human
caaguagaaaaaaaugucacuc

SEQ ID NO: 607679 - RNA, 19 nt, Human
cacaacagauucgccucca

SEQ ID NO: 607680 - RNA, 24 nt, Human
cacacacuuaggcucgccugugca

SEQ ID NO: 607681 - RNA, 24 nt, Human
cacauccaugagaggccacucaga

SEQ ID NO: 607682 - RNA, 19 nt, Human
cacuuguguucucaucagc

SEQ ID NO: 607683 - RNA, 26 nt, Human
cagaagcaacuucacacccaccauaa

SEQ ID NO: 607684 - RNA, 22 nt, Human
cagaagcaaguagaaaaaaaug

SEQ ID NO: 607685 - RNA, 26 nt, Human
cagcacgggaggacuaugaccaccua

SEQ ID NO: 607686 - RNA, 25 nt, Human
cagcugacucaaguuauuccaaugc

SEQ ID NO: 607687 - RNA, 20 nt, Human
caggggcuucugcuucaccc

SEQ ID NO: 607688 - RNA, 23 nt, Human
caguagcaucaacauugucugag

SEQ ID NO: 607689 - RNA, 22 nt, Human
cauaguguacacuguccacagu

SEQ ID NO: 607690 - RNA, 24 nt, Human
caugugggcugcagugcagucacc

SEQ ID NO: 607691 - RNA, 24 nt, Human
ccaaagugcugggauuacgggcau

SEQ ID NO: 607692 - RNA, 23 nt, Human
ccaacaucacaaacuccuugucu

SEQ ID NO: 607693 - RNA, 19 nt, Human
ccaaguuggccaggcuggu

SEQ ID NO: 607694 - RNA, 21 nt, Human
ccacugcuccuggccucaggc

SEQ ID NO: 607695 - RNA, 22 nt, Human
ccauaccauggcgcuccaggca

SEQ ID NO: 607696 - RNA, 28 nt, Human
cccacgauucuuccugacagccugaaac

SEQ ID NO: 607697 - RNA, 21 nt, Human
cccauaccauggcgcuccagg

SEQ ID NO: 607698 - RNA, 18 nt, Human
ccccaaauacuguaaaau

SEQ ID NO: 607699 - RNA, 23 nt, Human
ccccaggggcuucugcuucaccc

SEQ ID NO: 607700 - RNA, 28 nt, Human
ccccaggggcuucugcuuccuccgcggg

SEQ ID NO: 607701 - RNA, 19 nt, Human
ccccauaccauggcgcucc

SEQ ID NO: 607702 - RNA, 24 nt, Human
ccccauaccauggcgcuccaggca

SEQ ID NO: 607703 - RNA, 21 nt, Human
ccgagaaauucuccaccaagg

SEQ ID NO: 607704 - RNA, 21 nt, Human
ccguguucugcgccacagugg

SEQ ID NO: 607705 - RNA, 24 nt, Human
ccugacagccugaaacagcaggcu

SEQ ID NO: 607706 - RNA, 23 nt, Human
ccugaccuugggugaucugcuug

SEQ ID NO: 607707 - RNA, 21 nt, Human
ccugugcacacacucacacca

SEQ ID NO: 607708 - RNA, 20 nt, Human
ccuugggucugggccuuuug

SEQ ID NO: 607709 - RNA, 24 nt, Human
ccuuuuggguuugggucccucugu

SEQ ID NO: 607710 - RNA, 20 nt, Human
cgacauucaccccacugcac

SEQ ID NO: 607711 - RNA, 22 nt, Human
cggaauccacagaaugacccac

SEQ ID NO: 607712 - RNA, 24 nt, Human
cuccaaguuggccaggcuggucuu

SEQ ID NO: 607713 - RNA, 20 nt, Human
cuccagccguguucugcgcc

SEQ ID NO: 607714 - RNA, 24 nt, Human
cucccagcaugcaugcugugacga

SEQ ID NO: 607715 - RNA, 22 nt, Human
cuccugaccuugggugaucugc

SEQ ID NO: 607716 - RNA, 18 nt, Human
cugcugccagagucccca

SEQ ID NO: 607717 - RNA, 19 nt, Human
cugugcggccaaggcaggu

SEQ ID NO: 607718 - RNA, 24 nt, Human
cuuccccauaccauggcgcuccag

SEQ ID NO: 607719 - RNA, 22 nt, Human
cuuggucucccaaagugcuggg

SEQ ID NO: 607720 - RNA, 21 nt, Human
gaacaacaugccaucaaagca

SEQ ID NO: 607721 - RNA, 18 nt, Human
gaaccaggacuggcucac

SEQ ID NO: 607722 - RNA, 18 nt, Human
gagcaagcuugagucucc

SEQ ID NO: 607723 - RNA, 19 nt, Human
gagcaggcuugggucccca

SEQ ID NO: 607724 - RNA, 20 nt, Human
gagcugggguuucuccaagu

SEQ ID NO: 607725 - RNA, 22 nt, Human
gaggaaccuugggucucaggag

SEQ ID NO: 607726 - RNA, 18 nt, Human
gauuacgggcaugagcca

SEQ ID NO: 607727 - RNA, 19 nt, Human
gauuacgggcaugagccac

SEQ ID NO: 607728 - RNA, 21 nt, Human
gauuacgggcaugagccacug

SEQ ID NO: 607729 - RNA, 19 nt, Human
gcacugaggccucucaaaa

SEQ ID NO: 607730 - RNA, 24 nt, Human
gcaguuccaggcaggugccggcca

SEQ ID NO: 607731 - RNA, 22 nt, Human
gccacagcagcaucacagccuu

SEQ ID NO: 607732 - RNA, 22 nt, Human
gcuaugaugacuccagccgugu

SEQ ID NO: 607733 - RNA, 18 nt, Human
ggaagaccgacugccagg

SEQ ID NO: 607734 - RNA, 19 nt, Human
ggcccaaggcucaguuccc

SEQ ID NO: 607735 - RNA, 23 nt, Human
ggcuggucuugaacuccugaccu

SEQ ID NO: 607736 - RNA, 18 nt, Human
gggaagguggcgcccuuu

SEQ ID NO: 607737 - RNA, 22 nt, Human
ggguuucuccaaguuggccagg

SEQ ID NO: 607738 - RNA, 19 nt, Human
ggucuugaacuccugaccu

SEQ ID NO: 607739 - RNA, 21 nt, Human
ggugggcugccagagacaugu

SEQ ID NO: 607740 - RNA, 22 nt, Human
gguuccaccuguccuuccccau

SEQ ID NO: 607741 - RNA, 19 nt, Human
gucuuggucucccaaagug

SEQ ID NO: 607742 - RNA, 21 nt, Human
guggagccaagggacagccuc

SEQ ID NO: 607743 - RNA, 24 nt, Human
uaacuauauuuauauauaaauccc

SEQ ID NO: 607744 - RNA, 19 nt, Human
uaaugguaaaugugauuca

SEQ ID NO: 607745 - RNA, 24 nt, Human
uaaugguaaaugugauucagucuc

SEQ ID NO: 607746 - RNA, 19 nt, Human
uacacgcauucacauccau

SEQ ID NO: 607747 - RNA, 21 nt, Human
uacacugaacaacaugccauu

SEQ ID NO: 607748 - RNA, 18 nt, Human
uaccccaggggcuucugc

SEQ ID NO: 607749 - RNA, 23 nt, Human
uaccccaggggcuucugcuucac

SEQ ID NO: 607750 - RNA, 24 nt, Human
uacgggcaugagccacugcuccug

SEQ ID NO: 607751 - RNA, 21 nt, Human
uagaaagccacagcagcauca

SEQ ID NO: 607752 - RNA, 18 nt, Human
uagaaggaucuguugugg

SEQ ID NO: 607753 - RNA, 22 nt, Human
ucacaccauaguguacacuggu

SEQ ID NO: 607754 - RNA, 23 nt, Human
ucaguucccugggccagugccuc

SEQ ID NO: 607755 - RNA, 23 nt, Human
uccaacaucacaaacuccuuguc

SEQ ID NO: 607756 - RNA, 24 nt, Human
uccaaugcauaagcaaguuccaaa

SEQ ID NO: 607757 - RNA, 25 nt, Human
uccacaguggcacugccugcuacuu

SEQ ID NO: 607758 - RNA, 24 nt, Human
ucccaaagugcugggauuacgggc

SEQ ID NO: 607759 - RNA, 18 nt, Human
uccccaaauacuguaaaa

SEQ ID NO: 607760 - RNA, 23 nt, Human
uccccagggcccauagaaagcca

SEQ ID NO: 607761 - RNA, 20 nt, Human
uccccauaccauggcgcucc

SEQ ID NO: 607762 - RNA, 18 nt, Human
ucccugagaagguagcug

SEQ ID NO: 607763 - RNA, 20 nt, Human
ucccuguuucuuucaaaaac

SEQ ID NO: 607764 - RNA, 24 nt, Human
ucuccaaguuggccaggcuggucu

SEQ ID NO: 607765 - RNA, 22 nt, Human
ucucuggguugcauuucaucau

SEQ ID NO: 607766 - RNA, 21 nt, Human
ucugcgccacaguggguggag

SEQ ID NO: 607767 - RNA, 23 nt, Human
ucuugaacuccugaccuugggug

SEQ ID NO: 607768 - RNA, 23 nt, Human
ugacagcagggagagaagcgaaa

SEQ ID NO: 607769 - RNA, 18 nt, Human
ugaggccucucaaaaucc

SEQ ID NO: 607770 - RNA, 27 nt, Human
ugaggcuucugggucaacacucccuuu

SEQ ID NO: 607771 - RNA, 21 nt, Human
ugaguacacacacuuaggcuc

SEQ ID NO: 607772 - RNA, 20 nt, Human
ugagucuccgggcacaucuc

SEQ ID NO: 607773 - RNA, 24 nt, Human
ugaguuucaacugagucacuggaa

SEQ ID NO: 607774 - RNA, 22 nt, Human
ugcacaaaucccuggggagugu

SEQ ID NO: 607775 - RNA, 18 nt, Human
ugcacacacucacaccau

SEQ ID NO: 607776 - RNA, 25 nt, Human
ugcacucaucaucaucaaugugacu

SEQ ID NO: 607777 - RNA, 18 nt, Human
ugcggaauccacagaaug

SEQ ID NO: 607778 - RNA, 21 nt, Human
uggaaacaaauaaaugaaagc

SEQ ID NO: 607779 - RNA, 23 nt, Human
uggagugcucacaguggguccuc

SEQ ID NO: 607780 - RNA, 22 nt, Human
uggcaacccaccaagggucaga

SEQ ID NO: 607781 - RNA, 24 nt, Human
uggccaggcuggucuugaacuccu

SEQ ID NO: 607782 - RNA, 23 nt, Human
ugggaagguggcgcccuuugugg

SEQ ID NO: 607783 - RNA, 19 nt, Human
ugggauuacgggcaugagc

SEQ ID NO: 607784 - RNA, 22 nt, Human
ugggauuacgggcaugagccac

SEQ ID NO: 607785 - RNA, 22 nt, Human
ugggauuacgggcaugagccac

SEQ ID NO: 607786 - RNA, 23 nt, Human
ugggauuacgggcaugagccacu

SEQ ID NO: 607787 - RNA, 24 nt, Human
ugggauuacgggcaugagccacug

SEQ ID NO: 607788 - RNA, 20 nt, Human
ugggguagaaaccaaggacc

SEQ ID NO: 607789 - RNA, 24 nt, Human
ugggguuucuccaaguuggccagg

SEQ ID NO: 607790 - RNA, 21 nt, Human
uggguggagugcucacagugg

SEQ ID NO: 607791 - RNA, 21 nt, Human
uggguuugggucccucugugc

SEQ ID NO: 607792 - RNA, 18 nt, Human
ugugacuguuguuuuaga

SEQ ID NO: 607793 - RNA, 27 nt, Human
ugugcacacacucacaccauaguguac

SEQ ID NO: 607794 - RNA, 19 nt, Human
uguggucaggguuccaccu

SEQ ID NO: 607795 - RNA, 21 nt, Human
uguuaaugaaggaaccuguga

SEQ ID NO: 607796 - RNA, 27 nt, Human
uuacucaaaucaauucagguagugugu

SEQ ID NO: 607797 - RNA, 19 nt, Human
uuagagcugcagcucucca

SEQ ID NO: 607798 - RNA, 24 nt, Human
uuccaaugcauaagcaaguuccaa

SEQ ID NO: 607799 - RNA, 18 nt, Human
uugcauccuuuucaggcc

SEQ ID NO: 607800 - RNA, 24 nt, Human
aaaccaccaaagcacaccuaacaa

SEQ ID NO: 607801 - RNA, 18 nt, Human
aacaaguuuacugcuuca

SEQ ID NO: 607802 - RNA, 19 nt, Human
aacaaguuuacugcuucag

SEQ ID NO: 607803 - RNA, 24 nt, Human
aaccguaacaguggagcagcugcc

SEQ ID NO: 607804 - RNA, 24 nt, Human
aaggaaaaacaacaguacguaaug

SEQ ID NO: 607805 - RNA, 21 nt, Human
aaugauaaagaaauguagaga

SEQ ID NO: 607806 - RNA, 23 nt, Human
aauguagagacaacccuagggga

SEQ ID NO: 607807 - RNA, 19 nt, Human
aauuacacugaagaaaaca

SEQ ID NO: 607808 - RNA, 21 nt, Human
aauuaccaagaacaauuacac

SEQ ID NO: 607809 - RNA, 22 nt, Human
acacaaccccccccauuucccc

SEQ ID NO: 607810 - RNA, 23 nt, Human
acacacacacacacacacacaca

SEQ ID NO: 607811 - RNA, 18 nt, Human
acgcugcggaggcagcag

SEQ ID NO: 607812 - RNA, 24 nt, Human
acuaucaauuugacugcaugcauc

SEQ ID NO: 607813 - RNA, 21 nt, Human
acucuucccacacaacccccc

SEQ ID NO: 607814 - RNA, 23 nt, Human
acucuucccacacaacccccccc

SEQ ID NO: 607815 - RNA, 24 nt, Human
acucuucccacacaacccccccca

SEQ ID NO: 607816 - RNA, 26 nt, Human
agagaacagguagaguuugaggcuca

SEQ ID NO: 607817 - RNA, 22 nt, Human
agcuggggggacgcugcggagg

SEQ ID NO: 607818 - RNA, 21 nt, Human
aguacguaaugaaaaaagcaa

SEQ ID NO: 607819 - RNA, 21 nt, Human
auacauguacaugcagcaaga

SEQ ID NO: 607820 - RNA, 21 nt, Human
auguacaugcagcaagaugug

SEQ ID NO: 607821 - RNA, 23 nt, Human
caaaugaaaaacacacacugaca

SEQ ID NO: 607822 - RNA, 21 nt, Human
caagaacaauuacacugaaga

SEQ ID NO: 607823 - RNA, 19 nt, Human
caauuugacugcaugcauc

SEQ ID NO: 607824 - RNA, 22 nt, Human
cacaaccccccccauuucccca

SEQ ID NO: 607825 - RNA, 20 nt, Human
cacaauaauauuaaaaccac

SEQ ID NO: 607826 - RNA, 21 nt, Human
cacacaaucucacagucacau

SEQ ID NO: 607827 - RNA, 20 nt, Human
cacacacacacacacacaca

SEQ ID NO: 607828 - RNA, 20 nt, Human
cacacacacacacacacaca

SEQ ID NO: 607829 - RNA, 20 nt, Human
cacacacacacacacacaca

SEQ ID NO: 607830 - RNA, 29 nt, Human
cacacacacacacacacacacacagagua

SEQ ID NO: 607831 - RNA, 27 nt, Human
cacacacacacacagaguaguuaaaua

SEQ ID NO: 607832 - RNA, 19 nt, Human
cagcuaaacccuacccacu

SEQ ID NO: 607833 - RNA, 22 nt, Human
cauguacaugcagcaagaugug

SEQ ID NO: 607834 - RNA, 23 nt, Human
cccaacuaauccuucugauuugc

SEQ ID NO: 607835 - RNA, 28 nt, Human
cccacacaaccccccccauuuccccauc

SEQ ID NO: 607836 - RNA, 22 nt, Human
ccccaagauaaauaaaucaaau

SEQ ID NO: 607837 - RNA, 19 nt, Human
ccccagcuaaacccuaccc

SEQ ID NO: 607838 - RNA, 21 nt, Human
ccccagcuaaacccuacccac

SEQ ID NO: 607839 - RNA, 18 nt, Human
cccccauuuccccauccc

SEQ ID NO: 607840 - RNA, 28 nt, Human
cccccccauuuccccaucccuggcacaa

SEQ ID NO: 607841 - RNA, 22 nt, Human
ccguauacauguacaugcagug

SEQ ID NO: 607842 - RNA, 20 nt, Human
cgcacacacacacacacaca

SEQ ID NO: 607843 - RNA, 20 nt, Human
cucugcuugugugugcguga

SEQ ID NO: 607844 - RNA, 22 nt, Human
cuucccacacaaccccccccau

SEQ ID NO: 607845 - RNA, 21 nt, Human
cuugugugugcgugagugugu

SEQ ID NO: 607846 - RNA, 23 nt, Human
gaaugagagaaauaaaacagaga

SEQ ID NO: 607847 - RNA, 24 nt, Human
gagaauaguggaagugaggcaacc

SEQ ID NO: 607848 - RNA, 23 nt, Human
gcacacacacacacacacacaca

SEQ ID NO: 607849 - RNA, 19 nt, Human
gcacaccuaacaaggaaaa

SEQ ID NO: 607850 - RNA, 23 nt, Human
gcacaccuaacaaggaaaaacaa

SEQ ID NO: 607851 - RNA, 21 nt, Human
gcacagggagagcugggggga

SEQ ID NO: 607852 - RNA, 22 nt, Human
gcagcaggcagcuagaaugaca

SEQ ID NO: 607853 - RNA, 23 nt, Human
gcuggggggacgcugcggaggca

SEQ ID NO: 607854 - RNA, 22 nt, Human
gcuugugugugcgugagugugu

SEQ ID NO: 607855 - RNA, 19 nt, Human
ggaagguccacucuuugca

SEQ ID NO: 607856 - RNA, 22 nt, Human
ggaagugaggcaacuuugggcu

SEQ ID NO: 607857 - RNA, 24 nt, Human
ggagcagcugccaaauccugguug

SEQ ID NO: 607858 - RNA, 21 nt, Human
guagccguauacauguacaug

SEQ ID NO: 607859 - RNA, 21 nt, Human
guccacucuuugcacuuccac

SEQ ID NO: 607860 - RNA, 22 nt, Human
gucccaacuaauccuucugauu

SEQ ID NO: 607861 - RNA, 19 nt, Human
gugcaggauuaguucaaga

SEQ ID NO: 607862 - RNA, 23 nt, Human
gugcgcacacacacacacacaca

SEQ ID NO: 607863 - RNA, 22 nt, Human
uaaacaacuguuggacuagagc

SEQ ID NO: 607864 - RNA, 27 nt, Human
uaacaaggaaaaacaacaguacguaau

SEQ ID NO: 607865 - RNA, 28 nt, Human
uaacaaggaaaaacaacaguacguaaug

SEQ ID NO: 607866 - RNA, 25 nt, Human
uaauauuaaaaccaccaaagcacac

SEQ ID NO: 607867 - RNA, 22 nt, Human
uacugcuucaguuucaaacugu

SEQ ID NO: 607868 - RNA, 18 nt, Human
uagcacagggagagcugg

SEQ ID NO: 607869 - RNA, 19 nt, Human
uagcacagggagagcuggg

SEQ ID NO: 607870 - RNA, 24 nt, Human
uagcauauagauguacacaagcca

SEQ ID NO: 607871 - RNA, 20 nt, Human
ucaagaucagcgccuucucu

SEQ ID NO: 607872 - RNA, 20 nt, Human
ucagugaagaaucaguaaga

SEQ ID NO: 607873 - RNA, 22 nt, Human
ucaguguccgaaauugaauguu

SEQ ID NO: 607874 - RNA, 19 nt, Human
uccaaggugcaggcaguua

SEQ ID NO: 607875 - RNA, 22 nt, Human
ucccacacaaccccccccauuu

SEQ ID NO: 607876 - RNA, 20 nt, Human
ugaaaaagaugucuggaaac

SEQ ID NO: 607877 - RNA, 21 nt, Human
ugaaagaaugagagaaauaaa

SEQ ID NO: 607878 - RNA, 25 nt, Human
ugcgcacacacacacacacacacac

SEQ ID NO: 607879 - RNA, 22 nt, Human
ugcuggaaucaaucuauaaagg

SEQ ID NO: 607880 - RNA, 18 nt, Human
uggaaucaaucuauaaag

SEQ ID NO: 607881 - RNA, 23 nt, Human
uggagcagcugccaaauccuggu

SEQ ID NO: 607882 - RNA, 23 nt, Human
uggggggacgcugcggaggcagc

SEQ ID NO: 607883 - RNA, 18 nt, Human
ugucauggacgcaacugc

SEQ ID NO: 607884 - RNA, 20 nt, Human
ugugagaguugccccagagu

SEQ ID NO: 607885 - RNA, 18 nt, Human
ugugcgcgugcgcgcgug

SEQ ID NO: 607886 - RNA, 24 nt, Human
ugugcgcgugcgcgcgugcgcaca

SEQ ID NO: 607887 - RNA, 22 nt, Human
ugugugcgcgugcgcgcgugcg

SEQ ID NO: 607888 - RNA, 22 nt, Human
ugugugcgcgugcgcgcgugcg

SEQ ID NO: 607889 - RNA, 28 nt, Human
ugugugcgugagugugugcgcgugcgcg

SEQ ID NO: 607890 - RNA, 20 nt, Human
ugugugugcgugagugugug

SEQ ID NO: 607891 - RNA, 21 nt, Human
ugugugugcgugagugugugc

SEQ ID NO: 607892 - RNA, 18 nt, Human
uuaaaaccaccaaagcac

SEQ ID NO: 607893 - RNA, 21 nt, Human
uuacugcuucaguuucaaacu

SEQ ID NO: 607894 - RNA, 24 nt, Human
uucccacacacaaucucacaguca

SEQ ID NO: 607895 - RNA, 22 nt, Human
uucccccagcuaaacccuaccc

SEQ ID NO: 607896 - RNA, 23 nt, Human
uugaauguuuuuuuuuuucuccu

SEQ ID NO: 607897 - RNA, 24 nt, Human
aaagugcugggauuacaggcguga

SEQ ID NO: 607898 - RNA, 20 nt, Human
aacaucuucaaagaguuuca

SEQ ID NO: 607899 - RNA, 18 nt, Human
aagaaugacccaggaacc

SEQ ID NO: 607900 - RNA, 22 nt, Human
aagaaugacccaggaacccuga

SEQ ID NO: 607901 - RNA, 18 nt, Human
aagagugacccaggagcc

SEQ ID NO: 607902 - RNA, 18 nt, Human
aaggccugggcggcagga

SEQ ID NO: 607903 - RNA, 19 nt, Human
aagugcugggauuacaggc

SEQ ID NO: 607904 - RNA, 19 nt, Human
aagugcugggauuacaggc

SEQ ID NO: 607905 - RNA, 26 nt, Human
aagugcugggauuacaggcgugagcc

SEQ ID NO: 607906 - RNA, 19 nt, Human
acaggguuucaccguguua

SEQ ID NO: 607907 - RNA, 20 nt, Human
acaggguuucaccguguuag

SEQ ID NO: 607908 - RNA, 21 nt, Human
acaggguuucaccguguuagc

SEQ ID NO: 607909 - RNA, 24 nt, Human
acaggguuucaccguguuagccag

SEQ ID NO: 607910 - RNA, 22 nt, Human
acccccacccccggccccaggc

SEQ ID NO: 607911 - RNA, 20 nt, Human
acccugagaaggcccaagag

SEQ ID NO: 607912 - RNA, 21 nt, Human
acccugagaaggcccaagagu

SEQ ID NO: 607913 - RNA, 24 nt, Human
accguguuagccagguuggucucg

SEQ ID NO: 607914 - RNA, 21 nt, Human
accuccaaggccugggcggca

SEQ ID NO: 607915 - RNA, 25 nt, Human
accucccagguucacaccauucucc

SEQ ID NO: 607916 - RNA, 20 nt, Human
acugcaagcuccaccuccca

SEQ ID NO: 607917 - RNA, 18 nt, Human
agaaggaaggacgcugcc

SEQ ID NO: 607918 - RNA, 20 nt, Human
agaccggaaggcucagggug

SEQ ID NO: 607919 - RNA, 22 nt, Human
agagggcgaggggacauagagc

SEQ ID NO: 607920 - RNA, 21 nt, Human
agagugacccaggagcccuca

SEQ ID NO: 607921 - RNA, 22 nt, Human
agcagccuggggaacgcuuucc

SEQ ID NO: 607922 - RNA, 22 nt, Human
agccccauuccgggagggugac

SEQ ID NO: 607923 - RNA, 22 nt, Human
agcccugcagcccccccacccc

SEQ ID NO: 607924 - RNA, 19 nt, Human
agcgacaggguuucaccgu

SEQ ID NO: 607925 - RNA, 18 nt, Human
agcgggaggggccgcucg

SEQ ID NO: 607926 - RNA, 22 nt, Human
aggcucccagcaggaggcgucu

SEQ ID NO: 607927 - RNA, 25 nt, Human
aggcuggagugcaguagugugaucu

SEQ ID NO: 607928 - RNA, 23 nt, Human
aguaccuccaaggccugggcggc

SEQ ID NO: 607929 - RNA, 18 nt, Human
aguagcugggacuacagg

SEQ ID NO: 607930 - RNA, 19 nt, Human
aguagcugggacuacaggc

SEQ ID NO: 607931 - RNA, 21 nt, Human
agucaggagaggcgcagccgu

SEQ ID NO: 607932 - RNA, 20 nt, Human
agugcaguagugugaucucg

SEQ ID NO: 607933 - RNA, 24 nt, Human
agugcaguagugugaucucggcuc

SEQ ID NO: 607934 - RNA, 19 nt, Human
auagagcccuguguagggg

SEQ ID NO: 607935 - RNA, 20 nt, Human
auguaggggcugcggggggc

SEQ ID NO: 607936 - RNA, 21 nt, Human
auucuccugccucagccuccc

SEQ ID NO: 607937 - RNA, 24 nt, Human
caaagugcugggauuacaggcgug

SEQ ID NO: 607938 - RNA, 23 nt, Human
caagaggguguaaguuccaagaa

SEQ ID NO: 607939 - RNA, 22 nt, Human
cacaccauucuccugccucagc

SEQ ID NO: 607940 - RNA, 18 nt, Human
cacaccauuguucucagg

SEQ ID NO: 607941 - RNA, 18 nt, Human
cacccccuuccuccaccc

SEQ ID NO: 607942 - RNA, 20 nt, Human
cacccccuuccuccacccag

SEQ ID NO: 607943 - RNA, 19 nt, Human
cacccccuuccuccaccuc

SEQ ID NO: 607944 - RNA, 21 nt, Human
caccguguuagccagguuggu

SEQ ID NO: 607945 - RNA, 24 nt, Human
caccguguuagccagguuggucuc

SEQ ID NO: 607946 - RNA, 20 nt, Human
caccucucacgcccagaccu

SEQ ID NO: 607947 - RNA, 21 nt, Human
cacugcaagcuccaccuccca

SEQ ID NO: 607948 - RNA, 24 nt, Human
cagcaacaaacguucuccugagca

SEQ ID NO: 607949 - RNA, 18 nt, Human
cagcaguaccuccaaggc

SEQ ID NO: 607950 - RNA, 19 nt, Human
cagcccccccacccccacc

SEQ ID NO: 607951 - RNA, 22 nt, Human
cagcccccccacccccaccccc

SEQ ID NO: 607952 - RNA, 24 nt, Human
cagcguguagccuccucccaggau

SEQ ID NO: 607953 - RNA, 19 nt, Human
caggagaggcgcagccgug

SEQ ID NO: 607954 - RNA, 18 nt, Human
caggagcccucagauggc

SEQ ID NO: 607955 - RNA, 21 nt, Human
caggcgcccgccaccacgccc

SEQ ID NO: 607956 - RNA, 21 nt, Human
cagggcagggggagcacaggg

SEQ ID NO: 607957 - RNA, 24 nt, Human
caggguuucaccguguuagccagg

SEQ ID NO: 607958 - RNA, 19 nt, Human
cagguggguaugggagggg

SEQ ID NO: 607959 - RNA, 22 nt, Human
cauuccgggagggugacugucc

SEQ ID NO: 607960 - RNA, 20 nt, Human
ccaaagugcugggauuacag

SEQ ID NO: 607961 - RNA, 22 nt, Human
ccaaagugcugggauuacaggc

SEQ ID NO: 607962 - RNA, 22 nt, Human
ccaaagugcugggauuacaggc

SEQ ID NO: 607963 - RNA, 24 nt, Human
ccaaagugcugggauuacaggcgu

SEQ ID NO: 607964 - RNA, 19 nt, Human
ccaagaacgcgagucucug

SEQ ID NO: 607965 - RNA, 19 nt, Human
ccagggcagggggagcaca

SEQ ID NO: 607966 - RNA, 20 nt, Human
ccauggagaccggaaggcuc

SEQ ID NO: 607967 - RNA, 21 nt, Human
cccacacgcggugugucccug

SEQ ID NO: 607968 - RNA, 21 nt, Human
cccacaggccuuggaucucug

SEQ ID NO: 607969 - RNA, 22 nt, Human
cccacccccacccccggcccca

SEQ ID NO: 607970 - RNA, 22 nt, Human
cccacccccggccccaggcagc

SEQ ID NO: 607971 - RNA, 23 nt, Human
cccaggcagcaguaccuccaagg

SEQ ID NO: 607972 - RNA, 22 nt, Human
cccagggcagggggagcacagg

SEQ ID NO: 607973 - RNA, 20 nt, Human
cccagguucacaccauucuc

SEQ ID NO: 607974 - RNA, 19 nt, Human
ccccacccccggccccagg

SEQ ID NO: 607975 - RNA, 23 nt, Human
cccccacccccacccccggcccc

SEQ ID NO: 607976 - RNA, 23 nt, Human
ccccccacccccacccccggccc

SEQ ID NO: 607977 - RNA, 28 nt, Human
ccccccacccccacccccggccccaggc

SEQ ID NO: 607978 - RNA, 23 nt, Human
cccgaguagcugggacuacaggc

SEQ ID NO: 607979 - RNA, 24 nt, Human
cccgaguagcugggacuacaggcg

SEQ ID NO: 607980 - RNA, 21 nt, Human
cccgccaccacgcccagcuaa

SEQ ID NO: 607981 - RNA, 18 nt, Human
cccuuggcuugugguggc

SEQ ID NO: 607982 - RNA, 26 nt, Human
ccgcccgccucagccucccaaagugc

SEQ ID NO: 607983 - RNA, 24 nt, Human
ccgccucagccucccaaagugcug

SEQ ID NO: 607984 - RNA, 25 nt, Human
ccggagcaggaggguggcugucuuu

SEQ ID NO: 607985 - RNA, 18 nt, Human
ccucccuccgugccggag

SEQ ID NO: 607986 - RNA, 22 nt, Human
ccuccgugccggaggcuggugg

SEQ ID NO: 607987 - RNA, 25 nt, Human
ccucucacgcccagaccucccuugg

SEQ ID NO: 607988 - RNA, 18 nt, Human
cgcccagaccucccuugg

SEQ ID NO: 607989 - RNA, 24 nt, Human
cggagucuugcuuugucgcccagg

SEQ ID NO: 607990 - RNA, 20 nt, Human
cgguuggaaggugacugccc

SEQ ID NO: 607991 - RNA, 24 nt, Human
cgugauccgcccgccucagccucc

SEQ ID NO: 607992 - RNA, 24 nt, Human
cguggcccacaggccuuggaucuc

SEQ ID NO: 607993 - RNA, 24 nt, Human
cucacugcaagcuccaccucccag

SEQ ID NO: 607994 - RNA, 24 nt, Human
cucagccucccgaguagcugggac

SEQ ID NO: 607995 - RNA, 23 nt, Human
cucaggguggguaaaaauagcaa

SEQ ID NO: 607996 - RNA, 22 nt, Human
cucccugggugcuaaauccugg

SEQ ID NO: 607997 - RNA, 22 nt, Human
cucccuuggcuugugguggccu

SEQ ID NO: 607998 - RNA, 24 nt, Human
cuccugaccucgugauccgcccgc

SEQ ID NO: 607999 - RNA, 21 nt, Human
cugcaagcacgcucccuuccu

SEQ ID NO: 608000 - RNA, 24 nt, Human
cugcaagcuccaccucccagguuc

SEQ ID NO: 608001 - RNA, 23 nt, Human
cugccucagccucccgaguagcu

SEQ ID NO: 608002 - RNA, 20 nt, Human
cuggaaucugcuguuuggag

SEQ ID NO: 608003 - RNA, 19 nt, Human
cuggcuugcagccacccac

SEQ ID NO: 608004 - RNA, 19 nt, Human
cuugcagccacccacacgc

SEQ ID NO: 608005 - RNA, 22 nt, Human
cuuggcuugugguggccuugac

SEQ ID NO: 608006 - RNA, 20 nt, Human
cuuugucgcccaggcuggag

SEQ ID NO: 608007 - RNA, 25 nt, Human
gacccaggagcccucagauggccca

SEQ ID NO: 608008 - RNA, 18 nt, Human
gaccucccuuggcuugug

SEQ ID NO: 608009 - RNA, 22 nt, Human
gaccucgugauccgcccgccuc

SEQ ID NO: 608010 - RNA, 24 nt, Human
gaccucgugauccgcccgccucag

SEQ ID NO: 608011 - RNA, 25 nt, Human
gacggagucuugcuuugucgcccag

SEQ ID NO: 608012 - RNA, 18 nt, Human
gagaaggaaggacgcugc

SEQ ID NO: 608013 - RNA, 21 nt, Human
gagcuuuguccccgcgcaggg

SEQ ID NO: 608014 - RNA, 25 nt, Human
gaggacagagggcccaggcugggag

SEQ ID NO: 608015 - RNA, 20 nt, Human
gagggauccagggugauucc

SEQ ID NO: 608016 - RNA, 25 nt, Human
gaguagcugggacuacaggcgcccg

SEQ ID NO: 608017 - RNA, 23 nt, Human
gauccggagcaggaggguggcug

SEQ ID NO: 608018 - RNA, 18 nt, Human
gauuacaggcgugagcca

SEQ ID NO: 608019 - RNA, 22 nt, Human
gauuacaggcgugagccacugc

SEQ ID NO: 608020 - RNA, 22 nt, Human
gauuacaggcgugagccacugc

SEQ ID NO: 608021 - RNA, 18 nt, Human
gcaagcuccaccucccag

SEQ ID NO: 608022 - RNA, 21 nt, Human
gcagcccccccacccccaccc

SEQ ID NO: 608023 - RNA, 23 nt, Human
gcagcccccccacccccaccccc

SEQ ID NO: 608024 - RNA, 19 nt, Human
gcagggcacccccuuccuc

SEQ ID NO: 608025 - RNA, 24 nt, Human
gcagggcacccccuuccuccaccc

SEQ ID NO: 608026 - RNA, 24 nt, Human
gccaggcagguugcugucucagcg

SEQ ID NO: 608027 - RNA, 19 nt, Human
gcccaggcuggagugcagu

SEQ ID NO: 608028 - RNA, 19 nt, Human
gcccccccacccccacccc

SEQ ID NO: 608029 - RNA, 21 nt, Human
gcccugcagcccccccacccc

SEQ ID NO: 608030 - RNA, 20 nt, Human
gcccuguguagggguuucuc

SEQ ID NO: 608031 - RNA, 18 nt, Human
gccgccuggaaucugcug

SEQ ID NO: 608032 - RNA, 23 nt, Human
gccucagccucccaaagugcugg

SEQ ID NO: 608033 - RNA, 20 nt, Human
gccucagccucccgaguagc

SEQ ID NO: 608034 - RNA, 21 nt, Human
gcugggagucuagcgggaggg

SEQ ID NO: 608035 - RNA, 24 nt, Human
ggaagcccugcagcccccccaccc

SEQ ID NO: 608036 - RNA, 23 nt, Human
ggagucuugcuuugucgcccagg

SEQ ID NO: 608037 - RNA, 18 nt, Human
ggcgggcguggcaggcuc

SEQ ID NO: 608038 - RNA, 21 nt, Human
gggcuucccaggccaggcagg

SEQ ID NO: 608039 - RNA, 23 nt, Human
ggggagggauccagggugauucc

SEQ ID NO: 608040 - RNA, 19 nt, Human
gggggagcaccaggugggu

SEQ ID NO: 608041 - RNA, 18 nt, Human
ggguaugggagggggcca

SEQ ID NO: 608042 - RNA, 20 nt, Human
ggguaugggagggggccagg

SEQ ID NO: 608043 - RNA, 20 nt, Human
ggucucgaucuccugaccuc

SEQ ID NO: 608044 - RNA, 21 nt, Human
gugagccacugcgccaagagc

SEQ ID NO: 608045 - RNA, 24 nt, Human
gugauccgcccgccucagccuccc

SEQ ID NO: 608046 - RNA, 21 nt, Human
gugaucucggcucacugcaag

SEQ ID NO: 608047 - RNA, 22 nt, Human
guggggagggauccagggugau

SEQ ID NO: 608048 - RNA, 19 nt, Human
uaaaaauagcaaacccaag

SEQ ID NO: 608049 - RNA, 24 nt, Human
uacaggcgcccgccaccacgccca

SEQ ID NO: 608050 - RNA, 19 nt, Human
uacaggcgugagccacugc

SEQ ID NO: 608051 - RNA, 23 nt, Human
uacaggcgugagccacugcgcca

SEQ ID NO: 608052 - RNA, 21 nt, Human
uaccuccaaggccugggcggc

SEQ ID NO: 608053 - RNA, 24 nt, Human
uagccagguuggucucgaucuccu

SEQ ID NO: 608054 - RNA, 24 nt, Human
uaggagcgacaggguuucaccgug

SEQ ID NO: 608055 - RNA, 21 nt, Human
ucacaccauucuccugccuca

SEQ ID NO: 608056 - RNA, 24 nt, Human
ucaccguguuagccagguuggucu

SEQ ID NO: 608057 - RNA, 19 nt, Human
ucacugcaagcuccaccuc

SEQ ID NO: 608058 - RNA, 24 nt, Human
ucacugcaagcuccaccucccagg

SEQ ID NO: 608059 - RNA, 23 nt, Human
ucagccucccgaguagcugggac

SEQ ID NO: 608060 - RNA, 24 nt, Human
ucccaaagugcugggauuacaggc

SEQ ID NO: 608061 - RNA, 24 nt, Human
ucccagccccgagaaaggaagccc

SEQ ID NO: 608062 - RNA, 20 nt, Human
ucccagguucacaccauucu

SEQ ID NO: 608063 - RNA, 21 nt, Human
ucccagguucacaccauucuc

SEQ ID NO: 608064 - RNA, 24 nt, Human
ucccagguucacaccauucuccug

SEQ ID NO: 608065 - RNA, 20 nt, Human
uccccgagcgggggggugac

SEQ ID NO: 608066 - RNA, 24 nt, Human
ucccgaguagcugggacuacaggc

SEQ ID NO: 608067 - RNA, 25 nt, Human
ucccgcagagcugcuccaaggggcc

SEQ ID NO: 608068 - RNA, 21 nt, Human
uccgcccgccucagccuccca

SEQ ID NO: 608069 - RNA, 24 nt, Human
ucgcccaggcuggagugcaguagu

SEQ ID NO: 608070 - RNA, 24 nt, Human
ucuccugccucagccucccgagua

SEQ ID NO: 608071 - RNA, 23 nt, Human
ucuugcuuugucgcccaggcugg

SEQ ID NO: 608072 - RNA, 24 nt, Human
ucuugcuuugucgcccaggcugga

SEQ ID NO: 608073 - RNA, 24 nt, Human
ugacccaggaacccugagaaggcc

SEQ ID NO: 608074 - RNA, 23 nt, Human
ugacuguccccgagcaggggggu

SEQ ID NO: 608075 - RNA, 23 nt, Human
ugacuguccccgagcaggggggu

SEQ ID NO: 608076 - RNA, 23 nt, Human
ugacuguccccgagcggggggau

SEQ ID NO: 608077 - RNA, 23 nt, Human
ugacuguccccgagcgggggggu

SEQ ID NO: 608078 - RNA, 24 nt, Human
ugagcagccuggggaacgcuuucc

SEQ ID NO: 608079 - RNA, 20 nt, Human
ugagccacugcgccaagagc

SEQ ID NO: 608080 - RNA, 22 nt, Human
ugcaguagugugaucucggcuc

SEQ ID NO: 608081 - RNA, 26 nt, Human
ugccacagccacggagagcuuugucc

SEQ ID NO: 608082 - RNA, 24 nt, Human
ugccucagccucccgaguagcugg

SEQ ID NO: 608083 - RNA, 21 nt, Human
ugccuggaggacagagggccc

SEQ ID NO: 608084 - RNA, 24 nt, Human
ugcugggauuacaggcgugagcca

SEQ ID NO: 608085 - RNA, 22 nt, Human
ugcugugggguucccgcagagc

SEQ ID NO: 608086 - RNA, 24 nt, Human
uggaacaucuucaaagaguuucag

SEQ ID NO: 608087 - RNA, 21 nt, Human
uggaaucugcuguuuggaggc

SEQ ID NO: 608088 - RNA, 19 nt, Human
uggagugcaguagugugau

SEQ ID NO: 608089 - RNA, 23 nt, Human
uggagugcaguagugugaucucg

SEQ ID NO: 608090 - RNA, 24 nt, Human
uggagugcaguagugugaucucgg

SEQ ID NO: 608091 - RNA, 22 nt, Human
uggcaggcucccagcaggaggc

SEQ ID NO: 608092 - RNA, 19 nt, Human
uggcccaagagcaccccga

SEQ ID NO: 608093 - RNA, 21 nt, Human
ugggacuacaggcgcccgcca

SEQ ID NO: 608094 - RNA, 22 nt, Human
ugggacuacaggcgcccgccac

SEQ ID NO: 608095 - RNA, 24 nt, Human
ugggacuacaggcgcccgccacca

SEQ ID NO: 608096 - RNA, 18 nt, Human
ugggauuacaggcgugag

SEQ ID NO: 608097 - RNA, 19 nt, Human
ugggauuacaggcgugagc

SEQ ID NO: 608098 - RNA, 22 nt, Human
ugggauuacaggcgugagccac

SEQ ID NO: 608099 - RNA, 22 nt, Human
ugggauuacaggcgugagccac

SEQ ID NO: 608100 - RNA, 24 nt, Human
ugggauuacaggcgugagccacug

SEQ ID NO: 608101 - RNA, 26 nt, Human
ugggauuacaggcgugagccacugcg

SEQ ID NO: 608102 - RNA, 30 nt, Human
ugggauuacaggcgugagccacugcgccaa

SEQ ID NO: 608103 - RNA, 22 nt, Human
uggggagggauccagggugauu

SEQ ID NO: 608104 - RNA, 24 nt, Human
uuaggagcgacaggguuucaccgu

SEQ ID NO: 608105 - RNA, 25 nt, Human
uucccagccccgagaaaggaagccc

SEQ ID NO: 608106 - RNA, 24 nt, Human
uugcuuugucgcccaggcuggagu

SEQ ID NO: 608107 - RNA, 21 nt, Human
uugggggagcaccaggugggu

SEQ ID NO: 608108 - RNA, 19 nt, Human
uuucaccguguuagccagg

SEQ ID NO: 608109 - RNA, 24 nt, Human
uuugucgcccaggcuggagugcag

SEQ ID NO: 608110 - RNA, 24 nt, Human
uuuuuaggagcgacaggguuucac

SEQ ID NO: 608111 - RNA, 21 nt, Human
ccagcugcagccucuggcugu

SEQ ID NO: 608112 - RNA, 19 nt, Human
cugcagccucuggcugucc

SEQ ID NO: 608113 - RNA, 25 nt, Human
gaugcaggugaguugagcccuggca

SEQ ID NO: 608114 - RNA, 20 nt, Human
uccagcugcagccucuggcu

SEQ ID NO: 608115 - RNA, 19 nt, Human
uggcaaagagcugucagag

SEQ ID NO: 608116 - RNA, 21 nt, Human
uggcaaagagcugucagagaa

SEQ ID NO: 608117 - RNA, 23 nt, Human
aaagggacuguucugcugcggug

SEQ ID NO: 608118 - RNA, 28 nt, Human
aaugacaaaggaagagacuugggagaga

SEQ ID NO: 608119 - RNA, 25 nt, Human
acaccuggcccucggucugcccagu

SEQ ID NO: 608120 - RNA, 23 nt, Human
acagaauaugccacccggugccc

SEQ ID NO: 608121 - RNA, 21 nt, Human
acccagugggcacagaagucc

SEQ ID NO: 608122 - RNA, 20 nt, Human
acguggcaagccagcaagau

SEQ ID NO: 608123 - RNA, 25 nt, Human
acuguucugcugcggugcccuaaga

SEQ ID NO: 608124 - RNA, 22 nt, Human
agagaagacaggagaguggcua

SEQ ID NO: 608125 - RNA, 23 nt, Human
agagaugcauacuuucugggacc

SEQ ID NO: 608126 - RNA, 18 nt, Human
agagauguaaaaucccua

SEQ ID NO: 608127 - RNA, 23 nt, Human
agagguuacaggaacagcucugc

SEQ ID NO: 608128 - RNA, 21 nt, Human
aggaaagagccagugugcugg

SEQ ID NO: 608129 - RNA, 21 nt, Human
aggcuuuuaagauuagaaaug

SEQ ID NO: 608130 - RNA, 19 nt, Human
aguguccucuuucaaaaga

SEQ ID NO: 608131 - RNA, 19 nt, Human
augcauacuuucugggacc

SEQ ID NO: 608132 - RNA, 21 nt, Human
auggaauguggagaaggcccc

SEQ ID NO: 608133 - RNA, 23 nt, Human
augggcucagggcugacaauguu

SEQ ID NO: 608134 - RNA, 20 nt, Human
auguggggacagaauaugcc

SEQ ID NO: 608135 - RNA, 22 nt, Human
caaaacaaugcaaagaaaaaaa

SEQ ID NO: 608136 - RNA, 23 nt, Human
cacccaggcuugaguuuggaggc

SEQ ID NO: 608137 - RNA, 23 nt, Human
caccccaaugaccggggccugga

SEQ ID NO: 608138 - RNA, 24 nt, Human
cagagcaccccgaaaugccaucuc

SEQ ID NO: 608139 - RNA, 22 nt, Human
cagccgggcugaaggugggagg

SEQ ID NO: 608140 - RNA, 23 nt, Human
cagccgggcugaaggugggaggc

SEQ ID NO: 608141 - RNA, 21 nt, Human
cagcugucugucauuuaggag

SEQ ID NO: 608142 - RNA, 20 nt, Human
cagggccccuauuucuuguc

SEQ ID NO: 608143 - RNA, 18 nt, Human
caucugcugguuacauuu

SEQ ID NO: 608144 - RNA, 21 nt, Human
ccaacagagauccagacauga

SEQ ID NO: 608145 - RNA, 19 nt, Human
ccaaugaccggggccugga

SEQ ID NO: 608146 - RNA, 24 nt, Human
ccaucccuggcccucacaccuggc

SEQ ID NO: 608147 - RNA, 24 nt, Human
ccgccaccugugucuuucugaucu

SEQ ID NO: 608148 - RNA, 23 nt, Human
ccgcugcccaguugucagaguug

SEQ ID NO: 608149 - RNA, 21 nt, Human
ccggcggccaccguggucacc

SEQ ID NO: 608150 - RNA, 22 nt, Human
cgucacucuuucuucccugcaa

SEQ ID NO: 608151 - RNA, 19 nt, Human
cgugcgucacucuuucuuc

SEQ ID NO: 608152 - RNA, 20 nt, Human
cuaagaggaguggaugacuc

SEQ ID NO: 608153 - RNA, 27 nt, Human
cucagucagauugggaauuaaacccaa

SEQ ID NO: 608154 - RNA, 21 nt, Human
cugauuuccaaaacaaaggca

SEQ ID NO: 608155 - RNA, 21 nt, Human
cugcacccagcagcuuuggug

SEQ ID NO: 608156 - RNA, 19 nt, Human
cugcggugcccuaagagga

SEQ ID NO: 608157 - RNA, 19 nt, Human
cugggaguaaguuucuuuc

SEQ ID NO: 608158 - RNA, 18 nt, Human
cuugaacugggaguaagu

SEQ ID NO: 608159 - RNA, 23 nt, Human
gaaaaaacccacccaggcuugag

SEQ ID NO: 608160 - RNA, 18 nt, Human
gaacguggcaagccagca

SEQ ID NO: 608161 - RNA, 18 nt, Human
gacuugggagagaagaca

SEQ ID NO: 608162 - RNA, 18 nt, Human
gagagaagacaggagagu

SEQ ID NO: 608163 - RNA, 18 nt, Human
gagagaagacaggagagu

SEQ ID NO: 608164 - RNA, 25 nt, Human
gccccaaacuagggacuccaguccu

SEQ ID NO: 608165 - RNA, 24 nt, Human
gcgugcgucacucuuucuucccug

SEQ ID NO: 608166 - RNA, 23 nt, Human
gcucugaauguccucauggaugg

SEQ ID NO: 608167 - RNA, 19 nt, Human
gcugccugcacccagcagc

SEQ ID NO: 608168 - RNA, 20 nt, Human
ggaggcugggccacuccaua

SEQ ID NO: 608169 - RNA, 18 nt, Human
ggcccucggucugcccag

SEQ ID NO: 608170 - RNA, 18 nt, Human
ggcucaggaccaccacag

SEQ ID NO: 608171 - RNA, 21 nt, Human
gggcacagaaguccugcaggg

SEQ ID NO: 608172 - RNA, 20 nt, Human
ggguuuuaugugggaaggcu

SEQ ID NO: 608173 - RNA, 23 nt, Human
guagacaccccguugggccagac

SEQ ID NO: 608174 - RNA, 20 nt, Human
guggggcagaucccagcuug

SEQ ID NO: 608175 - RNA, 25 nt, Human
uaaauagagaagcgaguuacaugga

SEQ ID NO: 608176 - RNA, 21 nt, Human
uaaccaaaacaaugcaaagaa

SEQ ID NO: 608177 - RNA, 23 nt, Human
ucauggauggaauguggagaagg

SEQ ID NO: 608178 - RNA, 22 nt, Human
ucccuggcccucacaccuggcc

SEQ ID NO: 608179 - RNA, 23 nt, Human
ucccuggcccucacaccuggccc

SEQ ID NO: 608180 - RNA, 23 nt, Human
ucugccgaaaggcagagcacccc

SEQ ID NO: 608181 - RNA, 20 nt, Human
ucuuaaagcaagaguuuacc

SEQ ID NO: 608182 - RNA, 18 nt, Human
ucuuuuuuuuuuuuuuuu

SEQ ID NO: 608183 - RNA, 22 nt, Human
ugacaaaggaagagacuuggga

SEQ ID NO: 608184 - RNA, 21 nt, Human
ugacauuagaucugacagaca

SEQ ID NO: 608185 - RNA, 18 nt, Human
ugacgccaucacgcagag

SEQ ID NO: 608186 - RNA, 19 nt, Human
ugaguuuggaggcauuugu

SEQ ID NO: 608187 - RNA, 24 nt, Human
ugcaaagaaaaaaaucaauuuagu

SEQ ID NO: 608188 - RNA, 23 nt, Human
ugccuugggcuuuggcauagccu

SEQ ID NO: 608189 - RNA, 24 nt, Human
ugcugagccccaaacuagggacuc

SEQ ID NO: 608190 - RNA, 21 nt, Human
uggaauuucgaggaaagagcc

SEQ ID NO: 608191 - RNA, 20 nt, Human
uggcaagccagcaagaucuu

SEQ ID NO: 608192 - RNA, 21 nt, Human
uggcaagccagcaagaucuug

SEQ ID NO: 608193 - RNA, 18 nt, Human
ugggaaggcugggaaguu

SEQ ID NO: 608194 - RNA, 20 nt, Human
ugggaccgucuaguguccuc

SEQ ID NO: 608195 - RNA, 24 nt, Human
ugggaggcugggccacuccauagg

SEQ ID NO: 608196 - RNA, 23 nt, Human
ugggcucagggcugacaauguuu

SEQ ID NO: 608197 - RNA, 24 nt, Human
uggggcagaucccagcuuggugcu

SEQ ID NO: 608198 - RNA, 25 nt, Human
ugguagagggaaucuuagcagggcc

SEQ ID NO: 608199 - RNA, 18 nt, Human
ugucagaguugguaacuc

SEQ ID NO: 608200 - RNA, 22 nt, Human
ugucagaguugguaacucauga

SEQ ID NO: 608201 - RNA, 23 nt, Human
uuaaaaaauaugcaguuguuuga

SEQ ID NO: 608202 - RNA, 26 nt, Human
uucccugcaaauauaaggggcuccau

SEQ ID NO: 608203 - RNA, 20 nt, Human
uuucuuguccccucccuucc

SEQ ID NO: 608204 - RNA, 23 nt, Human
uuugacauuagaucugacagaca

SEQ ID NO: 608205 - RNA, 20 nt, Human
uuuuuuuuuuuuuaaaggga

SEQ ID NO: 608206 - RNA, 23 nt, Human
uuuuuuuuuuuuuuuuuaaaggg

SEQ ID NO: 608207 - RNA, 24 nt, Human
aaagugcugggauuacaggcauga

SEQ ID NO: 608208 - RNA, 23 nt, Human
aacaagccauucuagccaaagcc

SEQ ID NO: 608209 - RNA, 21 nt, Human
aagagcucuuccauccuccca

SEQ ID NO: 608210 - RNA, 22 nt, Human
aagagcucuuccauccucccag

SEQ ID NO: 608211 - RNA, 24 nt, Human
aagugaucugccugccuuggccuc

SEQ ID NO: 608212 - RNA, 19 nt, Human
aagugcugggauuacaggc

SEQ ID NO: 608213 - RNA, 21 nt, Human
aagugcugggauuacaggcau

SEQ ID NO: 608214 - RNA, 26 nt, Human
aagugcugggauuacaggcaugagcc

SEQ ID NO: 608215 - RNA, 21 nt, Human
acacauuucaccuccccugcu

SEQ ID NO: 608216 - RNA, 24 nt, Human
accauguugccugggcuggucuug

SEQ ID NO: 608217 - RNA, 18 nt, Human
accccggggcccuagccu

SEQ ID NO: 608218 - RNA, 22 nt, Human
accuggcuaggaaccuuggagc

SEQ ID NO: 608219 - RNA, 21 nt, Human
acugcuuggacuuguaccggg

SEQ ID NO: 608220 - RNA, 21 nt, Human
acuuguaccgggagggacuuc

SEQ ID NO: 608221 - RNA, 23 nt, Human
acuuguaccgggagggacuucag

SEQ ID NO: 608222 - RNA, 22 nt, Human
agaaggucaggggugggagcgc

SEQ ID NO: 608223 - RNA, 23 nt, Human
agacaacaccuggucucccuggc

SEQ ID NO: 608224 - RNA, 19 nt, Human
agacagaaaagaucugaac

SEQ ID NO: 608225 - RNA, 18 nt, Human
agagcacccaccuggcua

SEQ ID NO: 608226 - RNA, 19 nt, Human
agagcacccaccuggcuag

SEQ ID NO: 608227 - RNA, 18 nt, Human
agagcucuuccauccucc

SEQ ID NO: 608228 - RNA, 25 nt, Human
agcuagguugaucauccuggaagcu

SEQ ID NO: 608229 - RNA, 18 nt, Human
agggacacaaugcuuucu

SEQ ID NO: 608230 - RNA, 20 nt, Human
aggggaucagggcaagcugg

SEQ ID NO: 608231 - RNA, 22 nt, Human
augaagcugaggagaaggucag

SEQ ID NO: 608232 - RNA, 23 nt, Human
auggggucaccauguugccuggg

SEQ ID NO: 608233 - RNA, 24 nt, Human
caaagugcugggauuacaggcaug

SEQ ID NO: 608234 - RNA, 26 nt, Human
caacaaugcaaguauaaacacaugug

SEQ ID NO: 608235 - RNA, 22 nt, Human
caagugaucugccugccuuggc

SEQ ID NO: 608236 - RNA, 19 nt, Human
caaugcaaguauaaacaca

SEQ ID NO: 608237 - RNA, 23 nt, Human
caccauguugccugggcuggucu

SEQ ID NO: 608238 - RNA, 24 nt, Human
caccauguugccugggcuggucuu

SEQ ID NO: 608239 - RNA, 23 nt, Human
caccuccccugcuuccagcggcc

SEQ ID NO: 608240 - RNA, 24 nt, Human
caccuggucucccuggcuggggac

SEQ ID NO: 608241 - RNA, 23 nt, Human
cacuacuuggcccaaaccaaacc

SEQ ID NO: 608242 - RNA, 21 nt, Human
cagccccagcaggaacaagcc

SEQ ID NO: 608243 - RNA, 20 nt, Human
caggaacaagccauucuagc

SEQ ID NO: 608244 - RNA, 19 nt, Human
cauguugccugggcugguc

SEQ ID NO: 608245 - RNA, 20 nt, Human
cauguugccugggcuggucu

SEQ ID NO: 608246 - RNA, 24 nt, Human
cauguugccugggcuggucuugaa

SEQ ID NO: 608247 - RNA, 23 nt, Human
ccaaagugcugggauuacaggca

SEQ ID NO: 608248 - RNA, 24 nt, Human
ccaaagugcugggauuacaggcau

SEQ ID NO: 608249 - RNA, 21 nt, Human
ccagacagaaaagaucugaac

SEQ ID NO: 608250 - RNA, 24 nt, Human
cccaaagugcugggauuacaggca

SEQ ID NO: 608251 - RNA, 25 nt, Human
cccgccacuuuaugggaccugggga

SEQ ID NO: 608252 - RNA, 23 nt, Human
cccuuccucccuuuugcaauccc

SEQ ID NO: 608253 - RNA, 19 nt, Human
ccuacgcuacgaugcuccc

SEQ ID NO: 608254 - RNA, 19 nt, Human
ccuccugaaacucccugaa

SEQ ID NO: 608255 - RNA, 22 nt, Human
ccugccuuggccucccaaagug

SEQ ID NO: 608256 - RNA, 18 nt, Human
ccuggccucaagugaucu

SEQ ID NO: 608257 - RNA, 21 nt, Human
ccuggccucaagugaucugcc

SEQ ID NO: 608258 - RNA, 23 nt, Human
ccuggccucaagugaucugccug

SEQ ID NO: 608259 - RNA, 22 nt, Human
cgagaguucucuccuccacugg

SEQ ID NO: 608260 - RNA, 22 nt, Human
cuaacuuugcagagcacccacc

SEQ ID NO: 608261 - RNA, 20 nt, Human
cucaagugaucugccugccu

SEQ ID NO: 608262 - RNA, 27 nt, Human
cuccccugcuuccagcggccggggugg

SEQ ID NO: 608263 - RNA, 25 nt, Human
cucccuuccucccuuuugcaauccc

SEQ ID NO: 608264 - RNA, 23 nt, Human
cugccuuggccucccaaagugcu

SEQ ID NO: 608265 - RNA, 21 nt, Human
cuucgaagagcucuuccaucc

SEQ ID NO: 608266 - RNA, 22 nt, Human
cuucucuagcucacugguccga

SEQ ID NO: 608267 - RNA, 25 nt, Human
cuuuuguuccuccaucucaguucua

SEQ ID NO: 608268 - RNA, 21 nt, Human
gaggaaaagagccagacagaa

SEQ ID NO: 608269 - RNA, 18 nt, Human
gauuacaggcaugagcca

SEQ ID NO: 608270 - RNA, 22 nt, Human
gauuacaggcaugagccaccgc

SEQ ID NO: 608271 - RNA, 22 nt, Human
gauuacaggcaugagccaccgc

SEQ ID NO: 608272 - RNA, 22 nt, Human
gccuuggccucccaaagugcug

SEQ ID NO: 608273 - RNA, 24 nt, Human
gcugaggagaaggucagggguggg

SEQ ID NO: 608274 - RNA, 23 nt, Human
gcuggucuugaacuccuggccuc

SEQ ID NO: 608275 - RNA, 21 nt, Human
ggagagcagugaggguaggga

SEQ ID NO: 608276 - RNA, 19 nt, Human
ggaucagggcaagcugggc

SEQ ID NO: 608277 - RNA, 22 nt, Human
ggauuacaggcaugagccaccg

SEQ ID NO: 608278 - RNA, 18 nt, Human
ggcaagcugggccaggcu

SEQ ID NO: 608279 - RNA, 24 nt, Human
ggcccacaucuuuccucuaaccuu

SEQ ID NO: 608280 - RNA, 24 nt, Human
ggccucaagugaucugccugccuu

SEQ ID NO: 608281 - RNA, 21 nt, Human
ggcuaagggacuaaagggaca

SEQ ID NO: 608282 - RNA, 24 nt, Human
ggcuggucuugaacuccuggccuc

SEQ ID NO: 608283 - RNA, 21 nt, Human
gggaccuggggagugggaggg

SEQ ID NO: 608284 - RNA, 20 nt, Human
gggcacaggagagcagugag

SEQ ID NO: 608285 - RNA, 20 nt, Human
gggcuggucuugaacuccug

SEQ ID NO: 608286 - RNA, 18 nt, Human
ggggacacgaagagcaaa

SEQ ID NO: 608287 - RNA, 21 nt, Human
ggggagugggaggggacuggg

SEQ ID NO: 608288 - RNA, 21 nt, Human
gguagagauggggucaccaug

SEQ ID NO: 608289 - RNA, 21 nt, Human
ggucaggggugggagcgcguu

SEQ ID NO: 608290 - RNA, 20 nt, Human
guagagauggggucaccaug

SEQ ID NO: 608291 - RNA, 21 nt, Human
guagagauggggucaccaugu

SEQ ID NO: 608292 - RNA, 20 nt, Human
ucaggggaucagggcaagcu

SEQ ID NO: 608293 - RNA, 18 nt, Human
uccacuggggaaagaugc

SEQ ID NO: 608294 - RNA, 19 nt, Human
uccacuggggaaagaugca

SEQ ID NO: 608295 - RNA, 24 nt, Human
ucccaaagugcugggauuacaggc

SEQ ID NO: 608296 - RNA, 19 nt, Human
ucucccuggcuggggacug

SEQ ID NO: 608297 - RNA, 21 nt, Human
ucuugaacuccuggccucaag

SEQ ID NO: 608298 - RNA, 19 nt, Human
ucuuugcccuaacuuugca

SEQ ID NO: 608299 - RNA, 20 nt, Human
ugccaaaaaggcaauuggac

SEQ ID NO: 608300 - RNA, 23 nt, Human
ugccaaaaaggcaauuggacccc

SEQ ID NO: 608301 - RNA, 18 nt, Human
ugccugccuuggccuccc

SEQ ID NO: 608302 - RNA, 24 nt, Human
ugccugggcuggucuugaacuccu

SEQ ID NO: 608303 - RNA, 21 nt, Human
ugccuuugccaaaaaggcaau

SEQ ID NO: 608304 - RNA, 22 nt, Human
uggaagcugaggaacuugaggu

SEQ ID NO: 608305 - RNA, 26 nt, Human
uggacacauuucaccuccccugcuuc

SEQ ID NO: 608306 - RNA, 18 nt, Human
uggccucaagugaucugc

SEQ ID NO: 608307 - RNA, 20 nt, Human
uggccucaagugaucugccu

SEQ ID NO: 608308 - RNA, 24 nt, Human
uggccucaagugaucugccugccu

SEQ ID NO: 608309 - RNA, 24 nt, Human
uggcuggggacugcuuggacuugu

SEQ ID NO: 608310 - RNA, 18 nt, Human
ugggaggggugcugagug

SEQ ID NO: 608311 - RNA, 18 nt, Human
ugggauuacaggcaugag

SEQ ID NO: 608312 - RNA, 19 nt, Human
ugggauuacaggcaugagc

SEQ ID NO: 608313 - RNA, 21 nt, Human
ugggauuacaggcaugagcca

SEQ ID NO: 608314 - RNA, 22 nt, Human
ugggauuacaggcaugagccac

SEQ ID NO: 608315 - RNA, 23 nt, Human
ugggauuacaggcaugagccacc

SEQ ID NO: 608316 - RNA, 24 nt, Human
ugggauuacaggcaugagccaccg

SEQ ID NO: 608317 - RNA, 25 nt, Human
ugggauuacaggcaugagccaccgc

SEQ ID NO: 608318 - RNA, 23 nt, Human
ugggcuggucuugaacuccuggc

SEQ ID NO: 608319 - RNA, 22 nt, Human
uggggucaccauguugccuggg

SEQ ID NO: 608320 - RNA, 23 nt, Human
ugguccgagaguucucuccucca

SEQ ID NO: 608321 - RNA, 19 nt, Human
ugugccgauguguguggga

SEQ ID NO: 608322 - RNA, 20 nt, Human
uuaugggaccuggggagugg

SEQ ID NO: 608323 - RNA, 19 nt, Human
uucaccuccccugcuucca

SEQ ID NO: 608324 - RNA, 24 nt, Human
uuccuugugugcaagacucacagu

SEQ ID NO: 608325 - RNA, 19 nt, Human
uuggcccaaaccaaacccc

SEQ ID NO: 608326 - RNA, 18 nt, Human
uuggccucccaaagugcu

SEQ ID NO: 608327 - RNA, 19 nt, Human
uuggcucccuuccucccuu

SEQ ID NO: 608328 - RNA, 21 nt, Human
uuguguuaauaaccugggcac

SEQ ID NO: 608329 - RNA, 21 nt, Human
uuugcaaucccccaagugugc

SEQ ID NO: 608330 - RNA, 25 nt, Human
aaacaauucuuaugccucagccucc

SEQ ID NO: 608331 - RNA, 18 nt, Human
aaagugcugggauuacaa

SEQ ID NO: 608332 - RNA, 18 nt, Human
aaagugcugggauuacaa

SEQ ID NO: 608333 - RNA, 24 nt, Human
aaagugcugggauuacaaguguga

SEQ ID NO: 608334 - RNA, 24 nt, Human
aaagugcugggauuacaaguguga

SEQ ID NO: 608335 - RNA, 24 nt, Human
aaagugcugggauuacaggcguga

SEQ ID NO: 608336 - RNA, 19 nt, Human
aacaugcugauuucacugg

SEQ ID NO: 608337 - RNA, 20 nt, Human
aacaugcugauuucacuggg

SEQ ID NO: 608338 - RNA, 20 nt, Human
aaccucugccucccaggcuc

SEQ ID NO: 608339 - RNA, 18 nt, Human
aacugagaaagugccaca

SEQ ID NO: 608340 - RNA, 19 nt, Human
aaguagcugggauuacagg

SEQ ID NO: 608341 - RNA, 24 nt, Human
aaguagcugggauuacaggcacgc

SEQ ID NO: 608342 - RNA, 18 nt, Human
aagugauccgcccgccuc

SEQ ID NO: 608343 - RNA, 18 nt, Human
aagugcugggauuacaag

SEQ ID NO: 608344 - RNA, 18 nt, Human
aagugcugggauuacaag

SEQ ID NO: 608345 - RNA, 19 nt, Human
aagugcugggauuacaagu

SEQ ID NO: 608346 - RNA, 19 nt, Human
aagugcugggauuacaagu

SEQ ID NO: 608347 - RNA, 26 nt, Human
aagugcugggauuacaagugugagcc

SEQ ID NO: 608348 - RNA, 26 nt, Human
aagugcugggauuacaagugugagcc

SEQ ID NO: 608349 - RNA, 19 nt, Human
aagugcugggauuacaggc

SEQ ID NO: 608350 - RNA, 19 nt, Human
aagugcugggauuacaggc

SEQ ID NO: 608351 - RNA, 26 nt, Human
aagugcugggauuacaggcgugagcc

SEQ ID NO: 608352 - RNA, 20 nt, Human
aaucucugccucccaggcuc

SEQ ID NO: 608353 - RNA, 23 nt, Human
aauuucuguauuuuuaguagaga

SEQ ID NO: 608354 - RNA, 21 nt, Human
acaguggcgcaaucuuggcuc

SEQ ID NO: 608355 - RNA, 22 nt, Human
accaggcuggagugcaguggug

SEQ ID NO: 608356 - RNA, 24 nt, Human
accauguuggccaggauggucucg

SEQ ID NO: 608357 - RNA, 24 nt, Human
acccagcugauuuuucuauuuuua

SEQ ID NO: 608358 - RNA, 24 nt, Human
accucaugauccgcccaccuuggc

SEQ ID NO: 608359 - RNA, 24 nt, Human
accuugugauccgccugccucggc

SEQ ID NO: 608360 - RNA, 18 nt, Human
acgggguuucaccauguu

SEQ ID NO: 608361 - RNA, 23 nt, Human
acgggguuucaccauguuggcca

SEQ ID NO: 608362 - RNA, 24 nt, Human
acgggguuucaccauguuggccag

SEQ ID NO: 608363 - RNA, 18 nt, Human
agaagaaaacaucaggag

SEQ ID NO: 608364 - RNA, 23 nt, Human
agagggagaagaaaacaucagga

SEQ ID NO: 608365 - RNA, 21 nt, Human
agccaccacgccccgccuaga

SEQ ID NO: 608366 - RNA, 24 nt, Human
aggaugucuguugcccaggcugga

SEQ ID NO: 608367 - RNA, 25 nt, Human
aggcuggagugcaguggugcgaucu

SEQ ID NO: 608368 - RNA, 20 nt, Human
aguacaguggcgcaaucuug

SEQ ID NO: 608369 - RNA, 24 nt, Human
aguacaguggcgcaaucuuggcuc

SEQ ID NO: 608370 - RNA, 22 nt, Human
aguagagacgggguuucaccau

SEQ ID NO: 608371 - RNA, 19 nt, Human
aguagcugggacuacaggc

SEQ ID NO: 608372 - RNA, 21 nt, Human
aguagcugggacuacaggcau

SEQ ID NO: 608373 - RNA, 23 nt, Human
aguagcugguauuacaggcgugu

SEQ ID NO: 608374 - RNA, 19 nt, Human
aguaggcaaauucucaaau

SEQ ID NO: 608375 - RNA, 20 nt, Human
aguauaguggcgcgaucucg

SEQ ID NO: 608376 - RNA, 24 nt, Human
aguauaguggcgcgaucucggcuc

SEQ ID NO: 608377 - RNA, 20 nt, Human
agugcaguggugcgaucucg

SEQ ID NO: 608378 - RNA, 23 nt, Human
agugcaguggugcgaucucggcu

SEQ ID NO: 608379 - RNA, 24 nt, Human
agugcaguggugcgaucucggcuc

SEQ ID NO: 608380 - RNA, 24 nt, Human
agugcugggauuacaagugugagc

SEQ ID NO: 608381 - RNA, 24 nt, Human
agugcugggauuacaagugugagc

SEQ ID NO: 608382 - RNA, 18 nt, Human
agugcugggauuacaggc

SEQ ID NO: 608383 - RNA, 19 nt, Human
aguggcgcgaucucggcuc

SEQ ID NO: 608384 - RNA, 22 nt, Human
augccucagccucccaaguagc

SEQ ID NO: 608385 - RNA, 18 nt, Human
augggguuucaccacguu

SEQ ID NO: 608386 - RNA, 20 nt, Human
augggguuucaccacguugg

SEQ ID NO: 608387 - RNA, 21 nt, Human
augucuguugcccaggcugga

SEQ ID NO: 608388 - RNA, 22 nt, Human
auuuuucuauuuuuaguagaga

SEQ ID NO: 608389 - RNA, 24 nt, Human
auuuuucuauuuuuaguagagaug

SEQ ID NO: 608390 - RNA, 24 nt, Human
auuuuuguauuuuuaguagagacg

SEQ ID NO: 608391 - RNA, 24 nt, Human
caaagugcugggauuacaagugug

SEQ ID NO: 608392 - RNA, 24 nt, Human
caaagugcugggauuacaagugug

SEQ ID NO: 608393 - RNA, 24 nt, Human
caaagugcugggauuacaggcgug

SEQ ID NO: 608394 - RNA, 23 nt, Human
caaccucugccucccaggcucaa

SEQ ID NO: 608395 - RNA, 21 nt, Human
caacugaacucagggcagagc

SEQ ID NO: 608396 - RNA, 24 nt, Human
caagcaauucuuaugccucagcca

SEQ ID NO: 608397 - RNA, 22 nt, Human
caaguuucugaaucggccuauu

SEQ ID NO: 608398 - RNA, 18 nt, Human
caccacgcccagccaggc

SEQ ID NO: 608399 - RNA, 22 nt, Human
caccacgccccgccuagaacuc

SEQ ID NO: 608400 - RNA, 18 nt, Human
caccacguuggccaggau

SEQ ID NO: 608401 - RNA, 22 nt, Human
caccacguuggccaggaugguc

SEQ ID NO: 608402 - RNA, 24 nt, Human
caccacguuggccaggauggucuc

SEQ ID NO: 608403 - RNA, 24 nt, Human
caccaugcccagcuaauuuuugua

SEQ ID NO: 608404 - RNA, 18 nt, Human
caccauguuggccaggau

SEQ ID NO: 608405 - RNA, 22 nt, Human
caccauguuggccaggaugguc

SEQ ID NO: 608406 - RNA, 24 nt, Human
caccauguuggccaggauggucuc

SEQ ID NO: 608407 - RNA, 18 nt, Human
cacugcaaccucugccuc

SEQ ID NO: 608408 - RNA, 21 nt, Human
cacugcaaccucugccuccca

SEQ ID NO: 608409 - RNA, 25 nt, Human
cagcagcuagaacagcagugcacac

SEQ ID NO: 608410 - RNA, 19 nt, Human
caggaugucuguugcccag

SEQ ID NO: 608411 - RNA, 20 nt, Human
caggucuuugggaaguucug

SEQ ID NO: 608412 - RNA, 23 nt, Human
cagguucccucauuaucugaggg

SEQ ID NO: 608413 - RNA, 24 nt, Human
cauguuggccaggcuggucuugaa

SEQ ID NO: 608414 - RNA, 21 nt, Human
cauugcacucaaguuucugaa

SEQ ID NO: 608415 - RNA, 21 nt, Human
ccaaagugcugggauuacaag

SEQ ID NO: 608416 - RNA, 21 nt, Human
ccaaagugcugggauuacaag

SEQ ID NO: 608417 - RNA, 24 nt, Human
ccaaagugcugggauuacaagugu

SEQ ID NO: 608418 - RNA, 24 nt, Human
ccaaagugcugggauuacaagugu

SEQ ID NO: 608419 - RNA, 22 nt, Human
ccaaagugcugggauuacaggc

SEQ ID NO: 608420 - RNA, 22 nt, Human
ccaaagugcugggauuacaggc

SEQ ID NO: 608421 - RNA, 24 nt, Human
ccaaagugcugggauuacaggcgu

SEQ ID NO: 608422 - RNA, 18 nt, Human
ccaaccuaacauuuagga

SEQ ID NO: 608423 - RNA, 23 nt, Human
ccaaguagcugggauuacaggca

SEQ ID NO: 608424 - RNA, 18 nt, Human
ccaccugaguagcuggua

SEQ ID NO: 608425 - RNA, 19 nt, Human
ccauguuggccaggcuggu

SEQ ID NO: 608426 - RNA, 21 nt, Human
ccauguuggccaggcuggucu

SEQ ID NO: 608427 - RNA, 21 nt, Human
ccauguuggccaggcuggucu

SEQ ID NO: 608428 - RNA, 23 nt, Human
cccaaguagcugggauuacaggc

SEQ ID NO: 608429 - RNA, 24 nt, Human
cccaaguagcugggauuacaggca

SEQ ID NO: 608430 - RNA, 22 nt, Human
cccaggcuggaguauaguggcg

SEQ ID NO: 608431 - RNA, 20 nt, Human
ccgccgcggcuuagccggcc

SEQ ID NO: 608432 - RNA, 24 nt, Human
ccuaacauuuaggaaaauggagag

SEQ ID NO: 608433 - RNA, 23 nt, Human
ccugaguagcugguauuacaggc

SEQ ID NO: 608434 - RNA, 18 nt, Human
ccuggccucaagugaucc

SEQ ID NO: 608435 - RNA, 18 nt, Human
ccuggccucaagugaucc

SEQ ID NO: 608436 - RNA, 22 nt, Human
ccuggccucaagugauccgccc

SEQ ID NO: 608437 - RNA, 24 nt, Human
cgccucagcaucccaaagugcugg

SEQ ID NO: 608438 - RNA, 18 nt, Human
cggcaccacacccagcug

SEQ ID NO: 608439 - RNA, 24 nt, Human
cgggguuucaccauguuggccagg

SEQ ID NO: 608440 - RNA, 22 nt, Human
cgguuacaaguccacaaacugu

SEQ ID NO: 608441 - RNA, 19 nt, Human
cucaagcaauucuuaugcc

SEQ ID NO: 608442 - RNA, 24 nt, Human
cucacugcaaccucugccucccag

SEQ ID NO: 608443 - RNA, 24 nt, Human
cucacugcaaccucugccucccag

SEQ ID NO: 608444 - RNA, 23 nt, Human
cucagccucccaaguagcuggga

SEQ ID NO: 608445 - RNA, 20 nt, Human
cuccugaccucaugauccgc

SEQ ID NO: 608446 - RNA, 24 nt, Human
cucuggaccuugugauccgccugc

SEQ ID NO: 608447 - RNA, 23 nt, Human
cugcaaccucugccucccaggcu

SEQ ID NO: 608448 - RNA, 21 nt, Human
cugcagguaggaacacuuccu

SEQ ID NO: 608449 - RNA, 23 nt, Human
cugccucacccuucugaguagcu

SEQ ID NO: 608450 - RNA, 23 nt, Human
cugccucggccucccaaagugcu

SEQ ID NO: 608451 - RNA, 25 nt, Human
cuuaugccucagccucccaaguagc

SEQ ID NO: 608452 - RNA, 20 nt, Human
cuuccugcagguaggaacac

SEQ ID NO: 608453 - RNA, 20 nt, Human
cuuugggaaguucuggggcc

SEQ ID NO: 608454 - RNA, 20 nt, Human
gaacacuuccucugcaguca

SEQ ID NO: 608455 - RNA, 22 nt, Human
gaaguucuggggccaggaaacc

SEQ ID NO: 608456 - RNA, 24 nt, Human
gaauuucuguauuuuuaguagaga

SEQ ID NO: 608457 - RNA, 25 nt, Human
gaccucaugauccgcccaccuuggc

SEQ ID NO: 608458 - RNA, 22 nt, Human
gaccuugugauccgccugccuc

SEQ ID NO: 608459 - RNA, 24 nt, Human
gaccuugugauccgccugccucgg

SEQ ID NO: 608460 - RNA, 24 nt, Human
gacuacaggcaugccccaccaugc

SEQ ID NO: 608461 - RNA, 20 nt, Human
gagaagaaaacaucaggagc

SEQ ID NO: 608462 - RNA, 24 nt, Human
gagacgggguuucaccauguuggc

SEQ ID NO: 608463 - RNA, 20 nt, Human
gagaugggguuucaccacgu

SEQ ID NO: 608464 - RNA, 24 nt, Human
gagaugggguuucaccacguuggc

SEQ ID NO: 608465 - RNA, 24 nt, Human
gaguagcugggacuacaggcaugc

SEQ ID NO: 608466 - RNA, 24 nt, Human
gaugucuguugcccaggcuggagu

SEQ ID NO: 608467 - RNA, 18 nt, Human
gauuacaagugugagcca

SEQ ID NO: 608468 - RNA, 18 nt, Human
gauuacaagugugagcca

SEQ ID NO: 608469 - RNA, 18 nt, Human
gauuacaggcgugagcca

SEQ ID NO: 608470 - RNA, 21 nt, Human
gauuacaggcgugagccacca

SEQ ID NO: 608471 - RNA, 22 nt, Human
gauuacaggcgugagccaccac

SEQ ID NO: 608472 - RNA, 22 nt, Human
gcaaccucugccucccaggcuc

SEQ ID NO: 608473 - RNA, 19 nt, Human
gcagucccaggugaaggcu

SEQ ID NO: 608474 - RNA, 20 nt, Human
gccauguuggccaggcuggu

SEQ ID NO: 608475 - RNA, 22 nt, Human
gccauguuggccaggcuggucu

SEQ ID NO: 608476 - RNA, 22 nt, Human
gcccagcuaauuuuuguauuuu

SEQ ID NO: 608477 - RNA, 19 nt, Human
gccuagaacucuuauagag

SEQ ID NO: 608478 - RNA, 21 nt, Human
gcucacugcaaccucugccuc

SEQ ID NO: 608479 - RNA, 21 nt, Human
gcucugucaccaggcuggagu

SEQ ID NO: 608480 - RNA, 25 nt, Human
gcucuguugcccaagcuggaguaca

SEQ ID NO: 608481 - RNA, 19 nt, Human
gcuggaguacaguggcgca

SEQ ID NO: 608482 - RNA, 23 nt, Human
gcuggucuugaacuccuggccuc

SEQ ID NO: 608483 - RNA, 19 nt, Human
ggauuacaggcgugagcca

SEQ ID NO: 608484 - RNA, 22 nt, Human
ggauuuugccauguuggccagg

SEQ ID NO: 608485 - RNA, 24 nt, Human
ggccucaagugauccgcccgccuc

SEQ ID NO: 608486 - RNA, 24 nt, Human
ggcuggucuugaacuccuggccuc

SEQ ID NO: 608487 - RNA, 18 nt, Human
gggauuuugccauguugg

SEQ ID NO: 608488 - RNA, 22 nt, Human
gggauuuugccauguuggccag

SEQ ID NO: 608489 - RNA, 22 nt, Human
gggguuucaccacguuggccag

SEQ ID NO: 608490 - RNA, 23 nt, Human
gggguuucaccauguuggccagg

SEQ ID NO: 608491 - RNA, 20 nt, Human
ggucucgaucuccugaccuc

SEQ ID NO: 608492 - RNA, 24 nt, Human
gguuucaccauguuggccaggaug

SEQ ID NO: 608493 - RNA, 23 nt, Human
guagagacgggguuucaccaugu

SEQ ID NO: 608494 - RNA, 23 nt, Human
guagagaugggauuuugccaugu

SEQ ID NO: 608495 - RNA, 18 nt, Human
guagcugggauuacaggc

SEQ ID NO: 608496 - RNA, 24 nt, Human
gugauccgcccgccucagcauccc

SEQ ID NO: 608497 - RNA, 19 nt, Human
gugugagccaccacgcccc

SEQ ID NO: 608498 - RNA, 19 nt, Human
uaaaaauggcaaaaaccac

SEQ ID NO: 608499 - RNA, 19 nt, Human
uaacugagaaagugccaca

SEQ ID NO: 608500 - RNA, 24 nt, Human
uaauuuuuguauuuuuaguagaga

SEQ ID NO: 608501 - RNA, 23 nt, Human
uacaagugugagccaccacgccc

SEQ ID NO: 608502 - RNA, 22 nt, Human
uacaagugugagccaccgcucc

SEQ ID NO: 608503 - RNA, 24 nt, Human
uacaggcaugccccaccaugccca

SEQ ID NO: 608504 - RNA, 24 nt, Human
uacaggcgugagccaccacgccca

SEQ ID NO: 608505 - RNA, 23 nt, Human
uacaguggcgcaaucuuggcuca

SEQ ID NO: 608506 - RNA, 24 nt, Human
uagagaaugaagaaugcguuuuga

SEQ ID NO: 608507 - RNA, 22 nt, Human
uagagacgggguuucaccaugu

SEQ ID NO: 608508 - RNA, 22 nt, Human
uagagaugggauuuugccaugu

SEQ ID NO: 608509 - RNA, 22 nt, Human
uagagaugggguuucaccacgu

SEQ ID NO: 608510 - RNA, 19 nt, Human
uagccggccggagcccacg

SEQ ID NO: 608511 - RNA, 24 nt, Human
uaguagagacgggguuucaccaug

SEQ ID NO: 608512 - RNA, 25 nt, Human
uaguagagacgggguuucaccaugu

SEQ ID NO: 608513 - RNA, 24 nt, Human
uaguagagaugggauuuugccaug

SEQ ID NO: 608514 - RNA, 19 nt, Human
uaguagagaugggguuuca

SEQ ID NO: 608515 - RNA, 24 nt, Human
uaguagagaugggguuucaccacg

SEQ ID NO: 608516 - RNA, 26 nt, Human
uaguagagaugggguuucaccacguu

SEQ ID NO: 608517 - RNA, 18 nt, Human
uauuacaggcgugugcca

SEQ ID NO: 608518 - RNA, 24 nt, Human
ucaccacguuggccaggauggucu

SEQ ID NO: 608519 - RNA, 24 nt, Human
ucaccaggcuggagugcaguggug

SEQ ID NO: 608520 - RNA, 24 nt, Human
ucaccauguuggccaggauggucu

SEQ ID NO: 608521 - RNA, 23 nt, Human
ucacccuucugaguagcugggac

SEQ ID NO: 608522 - RNA, 19 nt, Human
ucacugcaaccucugccuc

SEQ ID NO: 608523 - RNA, 24 nt, Human
ucacugcaaccucugccucccagg

SEQ ID NO: 608524 - RNA, 25 nt, Human
ucacugcaaccucugccucccaggc

SEQ ID NO: 608525 - RNA, 18 nt, Human
ucacugcagucuccgccu

SEQ ID NO: 608526 - RNA, 20 nt, Human
ucacugcagucuccgccucg

SEQ ID NO: 608527 - RNA, 23 nt, Human
ucacugcagucuccgccucgcgg

SEQ ID NO: 608528 - RNA, 24 nt, Human
ucacugcagucuccgccucgcggg

SEQ ID NO: 608529 - RNA, 18 nt, Human
ucacuggggauguggcag

SEQ ID NO: 608530 - RNA, 22 nt, Human
ucagcagcuagaacagcagugc

SEQ ID NO: 608531 - RNA, 20 nt, Human
ucagccucccaaguagcugg

SEQ ID NO: 608532 - RNA, 19 nt, Human
ucagugcaaucucugccuc

SEQ ID NO: 608533 - RNA, 24 nt, Human
ucagugcaaucucugccucccagg

SEQ ID NO: 608534 - RNA, 18 nt, Human
ucccaaagugcugggauu

SEQ ID NO: 608535 - RNA, 18 nt, Human
ucccaaagugcugggauu

SEQ ID NO: 608536 - RNA, 23 nt, Human
ucccaaagugcugggauuacaag

SEQ ID NO: 608537 - RNA, 23 nt, Human
ucccaaagugcugggauuacaag

SEQ ID NO: 608538 - RNA, 24 nt, Human
ucccaaagugcugggauuacaggc

SEQ ID NO: 608539 - RNA, 24 nt, Human
ucccaaguagcugggauuacaggc

SEQ ID NO: 608540 - RNA, 20 nt, Human
ucccaggcucaaacaauucu

SEQ ID NO: 608541 - RNA, 20 nt, Human
ucccaggcucaagcaauucu

SEQ ID NO: 608542 - RNA, 20 nt, Human
ucccaggcucaagcaauucu

SEQ ID NO: 608543 - RNA, 21 nt, Human
uccgcccgccucagcauccca

SEQ ID NO: 608544 - RNA, 22 nt, Human
uccucugcagucagagggagaa

SEQ ID NO: 608545 - RNA, 23 nt, Human
ucugaguagcugggacuacaggc

SEQ ID NO: 608546 - RNA, 24 nt, Human
ucugaguagcugggacuacaggca

SEQ ID NO: 608547 - RNA, 21 nt, Human
ucugccucccaggcucaaaca

SEQ ID NO: 608548 - RNA, 23 nt, Human
ucugucaccaggcuggagugcag

SEQ ID NO: 608549 - RNA, 18 nt, Human
ucuguugcccaggcugga

SEQ ID NO: 608550 - RNA, 21 nt, Human
ucuugaacuccuggccucaag

SEQ ID NO: 608551 - RNA, 22 nt, Human
ucuugcucuguugcccaagcug

SEQ ID NO: 608552 - RNA, 23 nt, Human
ucuugcucuguugcccaagcugg

SEQ ID NO: 608553 - RNA, 24 nt, Human
ucuugcucuguugcccaagcugga

SEQ ID NO: 608554 - RNA, 24 nt, Human
ucuuuuuuuuuugagauggagucu

SEQ ID NO: 608555 - RNA, 21 nt, Human
ugacaggugccuuccugcagg

SEQ ID NO: 608556 - RNA, 18 nt, Human
ugagaaagugccacagua

SEQ ID NO: 608557 - RNA, 22 nt, Human
ugagauggagucuugcucuguu

SEQ ID NO: 608558 - RNA, 19 nt, Human
ugaguaggcaaauucucaa

SEQ ID NO: 608559 - RNA, 25 nt, Human
ugagugaacgcccugugugacaggu

SEQ ID NO: 608560 - RNA, 24 nt, Human
ugauccgcccaccuuggccuccca

SEQ ID NO: 608561 - RNA, 24 nt, Human
ugauuuuucuauuuuuaguagaga

SEQ ID NO: 608562 - RNA, 18 nt, Human
ugcacacacagcaggugc

SEQ ID NO: 608563 - RNA, 22 nt, Human
ugcaguggugcgaucucggcuc

SEQ ID NO: 608564 - RNA, 27 nt, Human
ugccauguuggccaggcuggucuugaa

SEQ ID NO: 608565 - RNA, 21 nt, Human
ugcccaagcuggaguacagug

SEQ ID NO: 608566 - RNA, 21 nt, Human
ugcccaggcuggaguauagug

SEQ ID NO: 608567 - RNA, 21 nt, Human
ugcccaggcuggaguauagug

SEQ ID NO: 608568 - RNA, 18 nt, Human
ugccccaccaugcccagc

SEQ ID NO: 608569 - RNA, 21 nt, Human
ugccucagccaccugaguagc

SEQ ID NO: 608570 - RNA, 22 nt, Human
ugccucagccaccugaguagcu

SEQ ID NO: 608571 - RNA, 24 nt, Human
ugccucagccaccugaguagcugg

SEQ ID NO: 608572 - RNA, 22 nt, Human
ugccucagccucccaaguagcu

SEQ ID NO: 608573 - RNA, 24 nt, Human
ugccucagccucccaaguagcugg

SEQ ID NO: 608574 - RNA, 21 nt, Human
ugccucggccucccaaagugc

SEQ ID NO: 608575 - RNA, 24 nt, Human
ugccucggccucccaaagugcugg

SEQ ID NO: 608576 - RNA, 19 nt, Human
ugcucuguugcccaagcug

SEQ ID NO: 608577 - RNA, 24 nt, Human
ugcugggauuacaagugugagcca

SEQ ID NO: 608578 - RNA, 26 nt, Human
ugcugggauuacaagugugagccacc

SEQ ID NO: 608579 - RNA, 24 nt, Human
ugcugggauuacaggcgugagcca

SEQ ID NO: 608580 - RNA, 24 nt, Human
uggaguacaguggcgcaaucuugg

SEQ ID NO: 608581 - RNA, 24 nt, Human
uggaguauaguggcgcgaucucgg

SEQ ID NO: 608582 - RNA, 23 nt, Human
uggagugcaguggugcgaucucg

SEQ ID NO: 608583 - RNA, 24 nt, Human
uggagugcaguggugcgaucucgg

SEQ ID NO: 608584 - RNA, 21 nt, Human
uggccaggauggucucgaucu

SEQ ID NO: 608585 - RNA, 24 nt, Human
uggccaggauggucucgaucuccu

SEQ ID NO: 608586 - RNA, 24 nt, Human
uggccaggcuggucuugaacuccu

SEQ ID NO: 608587 - RNA, 18 nt, Human
uggccucaagugauccgc

SEQ ID NO: 608588 - RNA, 24 nt, Human
uggccucaagugauccgcccgccu

SEQ ID NO: 608589 - RNA, 24 nt, Human
ugggacuacaggcaugccccacca

SEQ ID NO: 608590 - RNA, 25 nt, Human
ugggacuacaggcaugccccaccau

SEQ ID NO: 608591 - RNA, 18 nt, Human
ugggauuacaagugugag

SEQ ID NO: 608592 - RNA, 19 nt, Human
ugggauuacaagugugagc

SEQ ID NO: 608593 - RNA, 19 nt, Human
ugggauuacaagugugagc

SEQ ID NO: 608594 - RNA, 21 nt, Human
ugggauuacaagugugagcca

SEQ ID NO: 608595 - RNA, 22 nt, Human
ugggauuacaagugugagccac

SEQ ID NO: 608596 - RNA, 22 nt, Human
ugggauuacaagugugagccac

SEQ ID NO: 608597 - RNA, 23 nt, Human
ugggauuacaagugugagccacc

SEQ ID NO: 608598 - RNA, 23 nt, Human
ugggauuacaagugugagccacc

SEQ ID NO: 608599 - RNA, 24 nt, Human
ugggauuacaagugugagccacca

SEQ ID NO: 608600 - RNA, 24 nt, Human
ugggauuacaagugugagccaccg

SEQ ID NO: 608601 - RNA, 24 nt, Human
ugggauuacaggcacgcggcacca

SEQ ID NO: 608602 - RNA, 18 nt, Human
ugggauuacaggcgugag

SEQ ID NO: 608603 - RNA, 19 nt, Human
ugggauuacaggcgugagc

SEQ ID NO: 608604 - RNA, 22 nt, Human
ugggauuacaggcgugagccac

SEQ ID NO: 608605 - RNA, 23 nt, Human
ugggauuacaggcgugagccacc

SEQ ID NO: 608606 - RNA, 24 nt, Human
ugggauuacaggcgugagccacca

SEQ ID NO: 608607 - RNA, 24 nt, Human
ugggauuuugccauguuggccagg

SEQ ID NO: 608608 - RNA, 24 nt, Human
ugggguuucaccacguuggccagg

SEQ ID NO: 608609 - RNA, 18 nt, Human
ugguauuacaggcgugug

SEQ ID NO: 608610 - RNA, 21 nt, Human
ugguauuacaggcgugugcca

SEQ ID NO: 608611 - RNA, 24 nt, Human
uggugcgaucucggcucacugcag

SEQ ID NO: 608612 - RNA, 21 nt, Human
uguauuuuuaguagagacggg

SEQ ID NO: 608613 - RNA, 18 nt, Human
ugucuguugcccaggcug

SEQ ID NO: 608614 - RNA, 20 nt, Human
ugucuguugcccaggcugga

SEQ ID NO: 608615 - RNA, 21 nt, Human
ugucuguugcccaggcuggag

SEQ ID NO: 608616 - RNA, 22 nt, Human
ugugacaggugccuuccugcag

SEQ ID NO: 608617 - RNA, 19 nt, Human
ugugugacaggugccuucc

SEQ ID NO: 608618 - RNA, 21 nt, Human
ugugugacaggugccuuccug

SEQ ID NO: 608619 - RNA, 25 nt, Human
uguuuaacuggacauaugugaggug

SEQ ID NO: 608620 - RNA, 20 nt, Human
uuacaggcacgcggcaccac

SEQ ID NO: 608621 - RNA, 18 nt, Human
uuaguagagacgggguuu

SEQ ID NO: 608622 - RNA, 22 nt, Human
uuaguagagacgggguuucacc

SEQ ID NO: 608623 - RNA, 24 nt, Human
uuaguagagacgggguuucaccau

SEQ ID NO: 608624 - RNA, 18 nt, Human
uuaguagagaugggauuu

SEQ ID NO: 608625 - RNA, 18 nt, Human
uuaguagagaugggauuu

SEQ ID NO: 608626 - RNA, 24 nt, Human
uuaguagagaugggauuuugccau

SEQ ID NO: 608627 - RNA, 18 nt, Human
uuaguagagaugggguuu

SEQ ID NO: 608628 - RNA, 22 nt, Human
uuaguagagaugggguuucacc

SEQ ID NO: 608629 - RNA, 25 nt, Human
uuaguagagaugggguuucaccacg

SEQ ID NO: 608630 - RNA, 21 nt, Human
uucagaucugcaccgagaaac

SEQ ID NO: 608631 - RNA, 24 nt, Human
uucugaguagcugggacuacaggc

SEQ ID NO: 608632 - RNA, 20 nt, Human
uucuguauuuuuaguagaga

SEQ ID NO: 608633 - RNA, 21 nt, Human
uugagauggagucuugcucug

SEQ ID NO: 608634 - RNA, 24 nt, Human
uugcccaggcuggaguauaguggc

SEQ ID NO: 608635 - RNA, 18 nt, Human
uuggccucccaaagugcu

SEQ ID NO: 608636 - RNA, 23 nt, Human
uuguauuuuuaguagagacgggg

SEQ ID NO: 608637 - RNA, 19 nt, Human
uuucaccacguuggccagg

SEQ ID NO: 608638 - RNA, 19 nt, Human
uuucaccauguuggccagg

SEQ ID NO: 608639 - RNA, 20 nt, Human
uuucaccauguuggccagga

SEQ ID NO: 608640 - RNA, 20 nt, Human
uuucuguauuuuuaguagag

SEQ ID NO: 608641 - RNA, 23 nt, Human
uuuugccauguuggccaggcugg

SEQ ID NO: 608642 - RNA, 24 nt, Human
uuuuuaguagagacgggguuucac

SEQ ID NO: 608643 - RNA, 24 nt, Human
uuuuuaguagagaugggauuuugc

SEQ ID NO: 608644 - RNA, 24 nt, Human
uuuuuaguagagaugggguuucac

SEQ ID NO: 608645 - RNA, 20 nt, Human
uuuuucuauuuuuaguagag

SEQ ID NO: 608646 - RNA, 20 nt, Human
uuuuuguauuuuuaguagag

SEQ ID NO: 608647 - RNA, 25 nt, Human
aaacaccacccaacauggacaagga

SEQ ID NO: 608648 - RNA, 22 nt, Human
aaacccuccgugcacgagcucc

SEQ ID NO: 608649 - RNA, 24 nt, Human
aaagaaaaaacacagcuuuauugg

SEQ ID NO: 608650 - RNA, 21 nt, Human
aaaggggcccuggggcccagg

SEQ ID NO: 608651 - RNA, 24 nt, Human
aagcagcccagcuccaccacaggc

SEQ ID NO: 608652 - RNA, 20 nt, Human
aaugcaaaaggaaagugaga

SEQ ID NO: 608653 - RNA, 19 nt, Human
acaaaacaaacagaacaag

SEQ ID NO: 608654 - RNA, 19 nt, Human
acagaagugugucccagaa

SEQ ID NO: 608655 - RNA, 18 nt, Human
accacaggcauaaaaaua

SEQ ID NO: 608656 - RNA, 24 nt, Human
agaaacaccacccaacauggacaa

SEQ ID NO: 608657 - RNA, 20 nt, Human
agaaaucuuuccguucccuu

SEQ ID NO: 608658 - RNA, 24 nt, Human
agaacaagauauucauauuaaugc

SEQ ID NO: 608659 - RNA, 20 nt, Human
agacaaaacaaacagaacaa

SEQ ID NO: 608660 - RNA, 18 nt, Human
agaguacugaggcuucca

SEQ ID NO: 608661 - RNA, 22 nt, Human
agcagucgguccccccggccuc

SEQ ID NO: 608662 - RNA, 19 nt, Human
aggagacaaaacaaacaga

SEQ ID NO: 608663 - RNA, 18 nt, Human
aggcggcccaggccagcg

SEQ ID NO: 608664 - RNA, 23 nt, Human
agucagggcucugacagggcuuc

SEQ ID NO: 608665 - RNA, 22 nt, Human
agugguucuacuccagucacag

SEQ ID NO: 608666 - RNA, 18 nt, Human
aguuuuaagaaaucuuuc

SEQ ID NO: 608667 - RNA, 19 nt, Human
auuuguaaacaucuuaccc

SEQ ID NO: 608668 - RNA, 22 nt, Human
caacaccccacaguguggcacu

SEQ ID NO: 608669 - RNA, 21 nt, Human
caagguggagcccuuuccacc

SEQ ID NO: 608670 - RNA, 20 nt, Human
cacagcagcagcuacaaaca

SEQ ID NO: 608671 - RNA, 20 nt, Human
cacaguguggcacuggaagg

SEQ ID NO: 608672 - RNA, 19 nt, Human
cagaguacugaggcuucca

SEQ ID NO: 608673 - RNA, 19 nt, Human
cagcagcagcuacaaacag

SEQ ID NO: 608674 - RNA, 20 nt, Human
cagcagcagcuacaaacagg

SEQ ID NO: 608675 - RNA, 20 nt, Human
ccacaggcauaaaaauagga

SEQ ID NO: 608676 - RNA, 27 nt, Human
ccagaacacugaaaacuuugggaaccc

SEQ ID NO: 608677 - RNA, 22 nt, Human
ccaguccugccacugucaggag

SEQ ID NO: 608678 - RNA, 19 nt, Human
cccagcuccaccacaggca

SEQ ID NO: 608679 - RNA, 22 nt, Human
cccagcuccaccacaggcauaa

SEQ ID NO: 608680 - RNA, 19 nt, Human
ccccaugggacugggcagg

SEQ ID NO: 608681 - RNA, 21 nt, Human
ccccgggcgccaagagcaguc

SEQ ID NO: 608682 - RNA, 23 nt, Human
cccuacacccugacucaacgaau

SEQ ID NO: 608683 - RNA, 21 nt, Human
ccgugcacgagcuccuccagu

SEQ ID NO: 608684 - RNA, 28 nt, Human
ccucccgccggcaaaggggcccuggggc

SEQ ID NO: 608685 - RNA, 20 nt, Human
ccugaccccgggcgccaaga

SEQ ID NO: 608686 - RNA, 18 nt, Human
ccuggaacucacuuuuca

SEQ ID NO: 608687 - RNA, 25 nt, Human
ccuuuuauacucuguggccucuaac

SEQ ID NO: 608688 - RNA, 20 nt, Human
cgcaccugccaaugugcugc

SEQ ID NO: 608689 - RNA, 24 nt, Human
cgcccgggagccgagguuucccgg

SEQ ID NO: 608690 - RNA, 19 nt, Human
cggcccaggccagcgccgg

SEQ ID NO: 608691 - RNA, 23 nt, Human
cuagggucuccccaugggacugg

SEQ ID NO: 608692 - RNA, 23 nt, Human
cucccuuccccacuaagcagccc

SEQ ID NO: 608693 - RNA, 19 nt, Human
cuccgugcacgagcuccuc

SEQ ID NO: 608694 - RNA, 24 nt, Human
cuggaagggaccuaaaaacccacc

SEQ ID NO: 608695 - RNA, 22 nt, Human
cuggaauuucccuacacccuga

SEQ ID NO: 608696 - RNA, 21 nt, Human
cuggacaccucgggacauccu

SEQ ID NO: 608697 - RNA, 22 nt, Human
cuggaggcggaggcuagaaaca

SEQ ID NO: 608698 - RNA, 18 nt, Human
cuucccagggcccaaugc

SEQ ID NO: 608699 - RNA, 18 nt, Human
cuuuccguucccugaagu

SEQ ID NO: 608700 - RNA, 19 nt, Human
gaaacaccacccaacaugg

SEQ ID NO: 608701 - RNA, 19 nt, Human
gacugggcagggcgugucc

SEQ ID NO: 608702 - RNA, 19 nt, Human
gaggaugggagaaguugag

SEQ ID NO: 608703 - RNA, 19 nt, Human
gaggcggaggcuagaaaca

SEQ ID NO: 608704 - RNA, 21 nt, Human
gcccacugggucagcaguggu

SEQ ID NO: 608705 - RNA, 21 nt, Human
gcccgggagccgagguuuccc

SEQ ID NO: 608706 - RNA, 22 nt, Human
gcccuuuccaccacuucuggcc

SEQ ID NO: 608707 - RNA, 21 nt, Human
gcgaggcccggcgcggccgcg

SEQ ID NO: 608708 - RNA, 18 nt, Human
gcggaggcuagaaacacc

SEQ ID NO: 608709 - RNA, 24 nt, Human
gcggccccucaacaccccacagug

SEQ ID NO: 608710 - RNA, 24 nt, Human
gcuuucuccuuuccccuuccccac

SEQ ID NO: 608711 - RNA, 24 nt, Human
ggaaggacagaagugugucccaga

SEQ ID NO: 608712 - RNA, 22 nt, Human
ggacagaagugugucccagaac

SEQ ID NO: 608713 - RNA, 18 nt, Human
ggagcccuuuccaccacu

SEQ ID NO: 608714 - RNA, 19 nt, Human
ggcagggucaggggugaga

SEQ ID NO: 608715 - RNA, 24 nt, Human
ggccucuaaccuuccuggaacucu

SEQ ID NO: 608716 - RNA, 25 nt, Human
ggccugggugccugucgcccgggag

SEQ ID NO: 608717 - RNA, 21 nt, Human
ggcugagaagggccugggugc

SEQ ID NO: 608718 - RNA, 19 nt, Human
gggcugagaagggccuggg

SEQ ID NO: 608719 - RNA, 22 nt, Human
guggaucuggguuuuagucagg

SEQ ID NO: 608720 - RNA, 22 nt, Human
uaagcagcccagcuccaccaca

SEQ ID NO: 608721 - RNA, 22 nt, Human
uacccauguccuugaccggccu

SEQ ID NO: 608722 - RNA, 27 nt, Human
uacccauguccuugaccggccuuuucg

SEQ ID NO: 608723 - RNA, 26 nt, Human
uacucuguggccucuaaccuuccugg

SEQ ID NO: 608724 - RNA, 18 nt, Human
uaggaggugagaggaugg

SEQ ID NO: 608725 - RNA, 19 nt, Human
uauaccauuguuccacugu

SEQ ID NO: 608726 - RNA, 21 nt, Human
ucacagcagcagcuacaaaca

SEQ ID NO: 608727 - RNA, 22 nt, Human
ucacccgccuggaggcggaggc

SEQ ID NO: 608728 - RNA, 20 nt, Human
ucacgugugcgcaccugccu

SEQ ID NO: 608729 - RNA, 23 nt, Human
ucacuuuuaaaucuauccaaauu

SEQ ID NO: 608730 - RNA, 22 nt, Human
ucaguagccuuuucugucuuuu

SEQ ID NO: 608731 - RNA, 18 nt, Human
uccaccacuucuggccau

SEQ ID NO: 608732 - RNA, 23 nt, Human
uccaccacuucuggccauuacgu

SEQ ID NO: 608733 - RNA, 24 nt, Human
uccaccacuucuggccauuacguc

SEQ ID NO: 608734 - RNA, 20 nt, Human
ucccggccuccccugacccc

SEQ ID NO: 608735 - RNA, 22 nt, Human
uccucacccgccuggaggcgga

SEQ ID NO: 608736 - RNA, 20 nt, Human
uccuggaacucacuuuucag

SEQ ID NO: 608737 - RNA, 20 nt, Human
ucgguccccccggccucccg

SEQ ID NO: 608738 - RNA, 24 nt, Human
ucucaaaugaugucuugacaaauu

SEQ ID NO: 608739 - RNA, 21 nt, Human
ucucaggagacaaaacaaaca

SEQ ID NO: 608740 - RNA, 20 nt, Human
ucuccuuuccccuuccccac

SEQ ID NO: 608741 - RNA, 20 nt, Human
ucuguggccucuaaccuucc

SEQ ID NO: 608742 - RNA, 25 nt, Human
ugaugucuugacaaauuaaaguuuu

SEQ ID NO: 608743 - RNA, 21 nt, Human
ugcaacaaaugaggggaagaa

SEQ ID NO: 608744 - RNA, 22 nt, Human
ugcacagaaacaccacccaaca

SEQ ID NO: 608745 - RNA, 21 nt, Human
ugccacugucaggagggucag

SEQ ID NO: 608746 - RNA, 21 nt, Human
ugccucgcgcggccccucaac

SEQ ID NO: 608747 - RNA, 23 nt, Human
uggaagggaccuaaaaacccacc

SEQ ID NO: 608748 - RNA, 19 nt, Human
uggaagggccugccucgcg

SEQ ID NO: 608749 - RNA, 22 nt, Human
uggaggcggaggcuagaaacac

SEQ ID NO: 608750 - RNA, 23 nt, Human
uggcuuccgaaauggaauuccuu

SEQ ID NO: 608751 - RNA, 23 nt, Human
ugggaacccaguguucaguguug

SEQ ID NO: 608752 - RNA, 19 nt, Human
ugggagaaguugagggaug

SEQ ID NO: 608753 - RNA, 20 nt, Human
ugggagaaguugagggaugg

SEQ ID NO: 608754 - RNA, 20 nt, Human
ugggagaaguugagggaugg

SEQ ID NO: 608755 - RNA, 21 nt, Human
ugggagaaguugagggaugga

SEQ ID NO: 608756 - RNA, 24 nt, Human
uguaaagaaaaaacacagcuuuau

SEQ ID NO: 608757 - RNA, 19 nt, Human
uguuccacuguuuaguuuu

SEQ ID NO: 608758 - RNA, 22 nt, Human
uucaguagccuuuucugucuuu

SEQ ID NO: 608759 - RNA, 18 nt, Human
uucccagggcccaaugcc

SEQ ID NO: 608760 - RNA, 18 nt, Human
uuucccggccuccccuga

SEQ ID NO: 608761 - RNA, 20 nt, Human
uuuucugucuuuuccuuccu

SEQ ID NO: 608762 - RNA, 20 nt, Human
uuuucugucuuuuccuuccu

SEQ ID NO: 608763 - RNA, 21 nt, Human
aagaagcugggguaucccggg

SEQ ID NO: 608764 - RNA, 23 nt, Human
acagaagcacacaggagccucca

SEQ ID NO: 608765 - RNA, 24 nt, Human
agacagggccugcugcugagcccc

SEQ ID NO: 608766 - RNA, 20 nt, Human
aggcgaagugggcuacaacc

SEQ ID NO: 608767 - RNA, 20 nt, Human
agucuuuuuuuuuuuuuuuu

SEQ ID NO: 608768 - RNA, 23 nt, Human
agucuuuuuuuuuuuuuuuuucc

SEQ ID NO: 608769 - RNA, 19 nt, Human
auaggaaaaaaaaaauccu

SEQ ID NO: 608770 - RNA, 23 nt, Human
auagugcagacgacacacagcgc

SEQ ID NO: 608771 - RNA, 23 nt, Human
aucaagucuuuuuuuuuuuuuuu

SEQ ID NO: 608772 - RNA, 20 nt, Human
caacacagauugcucagccc

SEQ ID NO: 608773 - RNA, 23 nt, Human
caagucuuuuuuuuuuuuuuuuu

SEQ ID NO: 608774 - RNA, 18 nt, Human
cacacagcgccuauguaa

SEQ ID NO: 608775 - RNA, 23 nt, Human
cacagcucccaggagcacagcca

SEQ ID NO: 608776 - RNA, 25 nt, Human
cacaggagccuccagggcaucugca

SEQ ID NO: 608777 - RNA, 22 nt, Human
cagagcaagaaacaaaggaaaa

SEQ ID NO: 608778 - RNA, 22 nt, Human
cagaggcugggaggagaggggg

SEQ ID NO: 608779 - RNA, 20 nt, Human
cagaguggcucuccuggguu

SEQ ID NO: 608780 - RNA, 19 nt, Human
cagcauucuccaaauagac

SEQ ID NO: 608781 - RNA, 27 nt, Human
cagccccuuggcuucaaagcacuccuu

SEQ ID NO: 608782 - RNA, 19 nt, Human
cccaaccaggugugggaug

SEQ ID NO: 608783 - RNA, 18 nt, Human
cccgggugugcagaggcg

SEQ ID NO: 608784 - RNA, 20 nt, Human
cccgggugugcagaggcggg

SEQ ID NO: 608785 - RNA, 18 nt, Human
ccucaaguggcugcugug

SEQ ID NO: 608786 - RNA, 22 nt, Human
ccugcugcugagccccucugac

SEQ ID NO: 608787 - RNA, 19 nt, Human
ccugcuggaggaacgggag

SEQ ID NO: 608788 - RNA, 24 nt, Human
cuaaaacuucaggaguuccaacgg

SEQ ID NO: 608789 - RNA, 22 nt, Human
cucagcccugcccucaaguggc

SEQ ID NO: 608790 - RNA, 21 nt, Human
cucugaccagaguggcucucc

SEQ ID NO: 608791 - RNA, 21 nt, Human
cugaacuugaaaaaucucaca

SEQ ID NO: 608792 - RNA, 24 nt, Human
cugugccagggacagaaagggggu

SEQ ID NO: 608793 - RNA, 23 nt, Human
cuuuuuuuuuuuuuuuuuccuuu

SEQ ID NO: 608794 - RNA, 24 nt, Human
cuuuuuuuuuuuuuuuuuccuuua

SEQ ID NO: 608795 - RNA, 22 nt, Human
gaacagcuugagggaaagaagc

SEQ ID NO: 608796 - RNA, 28 nt, Human
gaaucaagucuuuuuuuuuuuuuuuuuc

SEQ ID NO: 608797 - RNA, 21 nt, Human
gacccaggaacccagcuggug

SEQ ID NO: 608798 - RNA, 24 nt, Human
gacuuagccgcacucacuaauagg

SEQ ID NO: 608799 - RNA, 21 nt, Human
gagacagggccugcugcugag

SEQ ID NO: 608800 - RNA, 21 nt, Human
gaggcugggaggagagggggc

SEQ ID NO: 608801 - RNA, 26 nt, Human
gcacagcucccaggagcacagccaga

SEQ ID NO: 608802 - RNA, 21 nt, Human
gccugccaggaacagucacag

SEQ ID NO: 608803 - RNA, 20 nt, Human
gcuacaaccggccugcuguu

SEQ ID NO: 608804 - RNA, 18 nt, Human
gcugugggacagugggag

SEQ ID NO: 608805 - RNA, 22 nt, Human
gcuugagggaaagaagcugggg

SEQ ID NO: 608806 - RNA, 21 nt, Human
gcuuugacgcauagugcagac

SEQ ID NO: 608807 - RNA, 25 nt, Human
ggaaagaagcugggguaucccgggu

SEQ ID NO: 608808 - RNA, 19 nt, Human
ggacagaaagggggugugg

SEQ ID NO: 608809 - RNA, 22 nt, Human
ggacaggcagaggcugggagga

SEQ ID NO: 608810 - RNA, 18 nt, Human
ggagcacagccagacccc

SEQ ID NO: 608811 - RNA, 19 nt, Human
ggcaucugcaggccucuca

SEQ ID NO: 608812 - RNA, 21 nt, Human
ggcugggaggagagggggcug

SEQ ID NO: 608813 - RNA, 23 nt, Human
gggaaagaagcugggguaucccg

SEQ ID NO: 608814 - RNA, 18 nt, Human
gggacaggcagaggcugg

SEQ ID NO: 608815 - RNA, 18 nt, Human
gggacagugggaggacuc

SEQ ID NO: 608816 - RNA, 18 nt, Human
ggggguguggaugcggag

SEQ ID NO: 608817 - RNA, 19 nt, Human
gucacagaagcacacagga

SEQ ID NO: 608818 - RNA, 18 nt, Human
gugacuucugaugaaacu

SEQ ID NO: 608819 - RNA, 19 nt, Human
uaccugggauaugcacagg

SEQ ID NO: 608820 - RNA, 19 nt, Human
uaccugggauaugcacagg

SEQ ID NO: 608821 - RNA, 22 nt, Human
uaccugggauaugcacaggugu

SEQ ID NO: 608822 - RNA, 23 nt, Human
uauguaauaggaaaaaaaaaauc

SEQ ID NO: 608823 - RNA, 21 nt, Human
ucccaggagcacagccagacc

SEQ ID NO: 608824 - RNA, 22 nt, Human
ucugcaggccucucaggugagg

SEQ ID NO: 608825 - RNA, 19 nt, Human
ucugugggacaggcagagg

SEQ ID NO: 608826 - RNA, 23 nt, Human
ucuuuuuuuuuuuuuuuuuccuu

SEQ ID NO: 608827 - RNA, 21 nt, Human
ugaaacuugacccaggaaccc

SEQ ID NO: 608828 - RNA, 26 nt, Human
ugaacagcuugagggaaagaagcugg

SEQ ID NO: 608829 - RNA, 20 nt, Human
ugacccaggaacccagcugg

SEQ ID NO: 608830 - RNA, 21 nt, Human
ugcaucaggcugcacuuuauc

SEQ ID NO: 608831 - RNA, 24 nt, Human
ugccaggaacagucacagaagcac

SEQ ID NO: 608832 - RNA, 20 nt, Human
ugcucagccccuuggcuuca

SEQ ID NO: 608833 - RNA, 20 nt, Human
uggaguuucugaacuugaaa

SEQ ID NO: 608834 - RNA, 24 nt, Human
ugggacagugggaggacucaauau

SEQ ID NO: 608835 - RNA, 18 nt, Human
ugggaggagagggggcug

SEQ ID NO: 608836 - RNA, 20 nt, Human
ugggaggagagggggcuggg

SEQ ID NO: 608837 - RNA, 21 nt, Human
ugggaugagggguggauacag

SEQ ID NO: 608838 - RNA, 18 nt, Human
uucaagggacaagcuucc

SEQ ID NO: 608839 - RNA, 20 nt, Human
uugaaaaaucucacacuuuu

SEQ ID NO: 608840 - RNA, 19 nt, Human
uugcucagccccuuggcuu

SEQ ID NO: 608841 - RNA, 24 nt, Human
uuuuuuuuuuuuuuuccuuuaggg

SEQ ID NO: 608842 - RNA, 19 nt, Human
aaagugcuaggauuacagg

SEQ ID NO: 608843 - RNA, 24 nt, Human
aaagugcuaggauuacaggcggga

SEQ ID NO: 608844 - RNA, 19 nt, Human
aaguagcugagauuacagg

SEQ ID NO: 608845 - RNA, 26 nt, Human
aaguagcugagauuacaggcgcacgc

SEQ ID NO: 608846 - RNA, 27 nt, Human
aagugauucuccugccccaggcuccca

SEQ ID NO: 608847 - RNA, 26 nt, Human
aagugcuaggauuacaggcgggagcc

SEQ ID NO: 608848 - RNA, 20 nt, Human
acaccccagcaagagaagcc

SEQ ID NO: 608849 - RNA, 19 nt, Human
accgauucaaucaccggcc

SEQ ID NO: 608850 - RNA, 21 nt, Human
accugcagggccgccuccccc

SEQ ID NO: 608851 - RNA, 19 nt, Human
agacaccaacgcgaugucc

SEQ ID NO: 608852 - RNA, 24 nt, Human
agacaccaacgcgauguccuacaa

SEQ ID NO: 608853 - RNA, 22 nt, Human
agaucuccgcucacugcaaccu

SEQ ID NO: 608854 - RNA, 22 nt, Human
agcccugucucuccugauugcu

SEQ ID NO: 608855 - RNA, 22 nt, Human
agcucgaugagcugggccggug

SEQ ID NO: 608856 - RNA, 18 nt, Human
aggcgggcggccggcccg

SEQ ID NO: 608857 - RNA, 25 nt, Human
aggcguugaaauacauggaugaacc

SEQ ID NO: 608858 - RNA, 21 nt, Human
agggccgccucccccacgccg

SEQ ID NO: 608859 - RNA, 21 nt, Human
agguucaagugauucuccugc

SEQ ID NO: 608860 - RNA, 22 nt, Human
agguucaagugauucuccugcc

SEQ ID NO: 608861 - RNA, 19 nt, Human
auccgcccgccucggccuc

SEQ ID NO: 608862 - RNA, 27 nt, Human
caaagugcuaggauuacaggcgggagc

SEQ ID NO: 608863 - RNA, 19 nt, Human
caagagaagccggggccuc

SEQ ID NO: 608864 - RNA, 22 nt, Human
caauuucggcaagaauuaggga

SEQ ID NO: 608865 - RNA, 18 nt, Human
caccccgccuucaccaac

SEQ ID NO: 608866 - RNA, 18 nt, Human
caccgcacccggccaagu

SEQ ID NO: 608867 - RNA, 24 nt, Human
cacgccaccacgcccaauuaauuu

SEQ ID NO: 608868 - RNA, 21 nt, Human
cacugcaaccuccgccuccca

SEQ ID NO: 608869 - RNA, 21 nt, Human
cagaacaccagcaguuggaac

SEQ ID NO: 608870 - RNA, 24 nt, Human
cagaccccugagaccuccccgccu

SEQ ID NO: 608871 - RNA, 24 nt, Human
cagcaagagaagccggggccucag

SEQ ID NO: 608872 - RNA, 21 nt, Human
cagcucuccaacucccucuca

SEQ ID NO: 608873 - RNA, 19 nt, Human
ccaaagugcuaggauuaca

SEQ ID NO: 608874 - RNA, 18 nt, Human
ccaagccaaggcggaugg

SEQ ID NO: 608875 - RNA, 22 nt, Human
ccaaguagcugagauuacaggc

SEQ ID NO: 608876 - RNA, 20 nt, Human
ccagcucuccaacucccucu

SEQ ID NO: 608877 - RNA, 21 nt, Human
ccagcucuccaacucccucuc

SEQ ID NO: 608878 - RNA, 19 nt, Human
ccauguuggccaggauggu

SEQ ID NO: 608879 - RNA, 21 nt, Human
ccauguuggccaggauggucu

SEQ ID NO: 608880 - RNA, 21 nt, Human
ccauguuggccaggauggucu

SEQ ID NO: 608881 - RNA, 19 nt, Human
cccaaguagcugagauuac

SEQ ID NO: 608882 - RNA, 24 nt, Human
cccaaguagcugagauuacaggcg

SEQ ID NO: 608883 - RNA, 24 nt, Human
cccaauuaauuuuuuguauuuuua

SEQ ID NO: 608884 - RNA, 23 nt, Human
cccagguucaagugauucuccuc

SEQ ID NO: 608885 - RNA, 23 nt, Human
cccagguucaagugauucuccug

SEQ ID NO: 608886 - RNA, 21 nt, Human
ccccaccccgccuucaccaac

SEQ ID NO: 608887 - RNA, 18 nt, Human
ccccacgccgcgcccgag

SEQ ID NO: 608888 - RNA, 19 nt, Human
ccccaggcucccaaguagc

SEQ ID NO: 608889 - RNA, 20 nt, Human
cccccaccccgccuucacca

SEQ ID NO: 608890 - RNA, 24 nt, Human
cccccaccccgccuucaccaaccc

SEQ ID NO: 608891 - RNA, 23 nt, Human
ccccccaccccgccuucaccaac

SEQ ID NO: 608892 - RNA, 20 nt, Human
cccccccaccccgccuucac

SEQ ID NO: 608893 - RNA, 23 nt, Human
cccccggccucggccucgcgccc

SEQ ID NO: 608894 - RNA, 22 nt, Human
cccccuucucagguuccaauuu

SEQ ID NO: 608895 - RNA, 19 nt, Human
ccccggccucggccucgcg

SEQ ID NO: 608896 - RNA, 18 nt, Human
ccccugagaccuccccgc

SEQ ID NO: 608897 - RNA, 20 nt, Human
ccccugagaccuccccgccu

SEQ ID NO: 608898 - RNA, 21 nt, Human
ccccuuccuaacugccccccc

SEQ ID NO: 608899 - RNA, 28 nt, Human
cccggccucggccucgcgcccaccaggc

SEQ ID NO: 608900 - RNA, 19 nt, Human
cccggguacgcaccugcag

SEQ ID NO: 608901 - RNA, 22 nt, Human
cccuccuguucacagcugggaa

SEQ ID NO: 608902 - RNA, 18 nt, Human
cccugucugggcgccccc

SEQ ID NO: 608903 - RNA, 21 nt, Human
cccugucugggcgcccccuuc

SEQ ID NO: 608904 - RNA, 21 nt, Human
ccgccccguucucucggccgc

SEQ ID NO: 608905 - RNA, 24 nt, Human
ccgccucccagguucaagugauuc

SEQ ID NO: 608906 - RNA, 22 nt, Human
ccgccucugggaaucgccuccc

SEQ ID NO: 608907 - RNA, 24 nt, Human
ccgcgcccucagcccucccgaauc

SEQ ID NO: 608908 - RNA, 19 nt, Human
ccggccucggccucgcgcc

SEQ ID NO: 608909 - RNA, 28 nt, Human
ccggggaccccacgacccccuucucagg

SEQ ID NO: 608910 - RNA, 22 nt, Human
ccuaacugcccccccaccccgc

SEQ ID NO: 608911 - RNA, 24 nt, Human
ccucccagguucaagugauucucc

SEQ ID NO: 608912 - RNA, 22 nt, Human
ccuccuguucacagcugggaag

SEQ ID NO: 608913 - RNA, 19 nt, Human
ccucggccucgcgcccacc

SEQ ID NO: 608914 - RNA, 18 nt, Human
ccuuccccgagcccuguc

SEQ ID NO: 608915 - RNA, 24 nt, Human
cgacaccccagcaagagaagccgg

SEQ ID NO: 608916 - RNA, 22 nt, Human
cgacccccuucucagguuccaa

SEQ ID NO: 608917 - RNA, 22 nt, Human
cgcccaggcuaaaguacagugc

SEQ ID NO: 608918 - RNA, 21 nt, Human
cgccccguucucucggccgcg

SEQ ID NO: 608919 - RNA, 22 nt, Human
cgccucccagguucaagugauu

SEQ ID NO: 608920 - RNA, 24 nt, Human
cgccucggccucccaaagugcuag

SEQ ID NO: 608921 - RNA, 25 nt, Human
cgccuucaccaacccgaagcccgag

SEQ ID NO: 608922 - RNA, 25 nt, Human
cggcggcggugaccgccccguucuc

SEQ ID NO: 608923 - RNA, 20 nt, Human
cgggagccaccgcacccggc

SEQ ID NO: 608924 - RNA, 21 nt, Human
cuaaaguacagugcccagauc

SEQ ID NO: 608925 - RNA, 24 nt, Human
cucacugcaaccuccgccucccag

SEQ ID NO: 608926 - RNA, 21 nt, Human
cuccacaccaaccagcucucc

SEQ ID NO: 608927 - RNA, 25 nt, Human
cucccaagccaaggcggaugcaggc

SEQ ID NO: 608928 - RNA, 21 nt, Human
cucccaaguagcugagauuac

SEQ ID NO: 608929 - RNA, 18 nt, Human
cucccagguucaagugau

SEQ ID NO: 608930 - RNA, 19 nt, Human
cucuccaacucccucucag

SEQ ID NO: 608931 - RNA, 20 nt, Human
cucugucgcccaggcuaaag

SEQ ID NO: 608932 - RNA, 23 nt, Human
cucugucgcccaggcuaaaguac

SEQ ID NO: 608933 - RNA, 24 nt, Human
cucuugaccgugugauccgcccgc

SEQ ID NO: 608934 - RNA, 23 nt, Human
cugcaaccuccgccucccagguu

SEQ ID NO: 608935 - RNA, 24 nt, Human
cugcaaccuccgccucccagguuc

SEQ ID NO: 608936 - RNA, 20 nt, Human
cugcagggccgccuccccca

SEQ ID NO: 608937 - RNA, 18 nt, Human
cuugcagaacaccagcag

SEQ ID NO: 608938 - RNA, 24 nt, Human
gaaaacgauuccucuacccacaga

SEQ ID NO: 608939 - RNA, 22 nt, Human
gaaauacauggaugaaccaccg

SEQ ID NO: 608940 - RNA, 18 nt, Human
gaaucgacaccccagcaa

SEQ ID NO: 608941 - RNA, 20 nt, Human
gaccccacgacccccuucuc

SEQ ID NO: 608942 - RNA, 24 nt, Human
gaccgugugauccgcccgccucgg

SEQ ID NO: 608943 - RNA, 18 nt, Human
gagcuagugcagaaccca

SEQ ID NO: 608944 - RNA, 18 nt, Human
gauuacaggcgcacgcca

SEQ ID NO: 608945 - RNA, 18 nt, Human
gauuacaggcgggagcca

SEQ ID NO: 608946 - RNA, 24 nt, Human
gauucaaucaccggccacugcccc

SEQ ID NO: 608947 - RNA, 22 nt, Human
gcaaccuccgccucccagguuc

SEQ ID NO: 608948 - RNA, 18 nt, Human
gcacggggcggacaggag

SEQ ID NO: 608949 - RNA, 22 nt, Human
gccauguuggccaggauggucu

SEQ ID NO: 608950 - RNA, 21 nt, Human
gcccaauuaauuuuuuguauu

SEQ ID NO: 608951 - RNA, 26 nt, Human
gcccccccaccccgccuucaccaacc

SEQ ID NO: 608952 - RNA, 24 nt, Human
gccccguucucucggccgcgcccu

SEQ ID NO: 608953 - RNA, 20 nt, Human
gcccucccgaaucgacaccc

SEQ ID NO: 608954 - RNA, 18 nt, Human
gcggaugcaggccuggcg

SEQ ID NO: 608955 - RNA, 18 nt, Human
gcuaaaguacagugccca

SEQ ID NO: 608956 - RNA, 22 nt, Human
ggaugaaccaccgacccgcaag

SEQ ID NO: 608957 - RNA, 22 nt, Human
ggauuacaggcgggagccaccg

SEQ ID NO: 608958 - RNA, 22 nt, Human
gggaagaagcucgaugagcugg

SEQ ID NO: 608959 - RNA, 21 nt, Human
gggaggcggggagucucagag

SEQ ID NO: 608960 - RNA, 19 nt, Human
ggggguuuugccauguugg

SEQ ID NO: 608961 - RNA, 24 nt, Human
ggggguuuugccauguuggccagg

SEQ ID NO: 608962 - RNA, 22 nt, Human
gggguuuugccauguuggccag

SEQ ID NO: 608963 - RNA, 23 nt, Human
gggguuuugccauguuggccagg

SEQ ID NO: 608964 - RNA, 24 nt, Human
ggucucucugucgcccaggcuaaa

SEQ ID NO: 608965 - RNA, 24 nt, Human
gugauccgcccgccucggccuccc

SEQ ID NO: 608966 - RNA, 24 nt, Human
uaacagucucaaagagaaaacgau

SEQ ID NO: 608967 - RNA, 24 nt, Human
uaauuuuuuguauuuuuagucgag

SEQ ID NO: 608968 - RNA, 25 nt, Human
uaauuuuuuguauuuuuagucgaga

SEQ ID NO: 608969 - RNA, 24 nt, Human
uacaaaggccugaagacgcgcagc

SEQ ID NO: 608970 - RNA, 24 nt, Human
uacaggcgcacgccaccacgccca

SEQ ID NO: 608971 - RNA, 23 nt, Human
uacaggcgggagccaccgcaccc

SEQ ID NO: 608972 - RNA, 21 nt, Human
uaggauuacaggcgggagcca

SEQ ID NO: 608973 - RNA, 22 nt, Human
uaggauuacaggcgggagccac

SEQ ID NO: 608974 - RNA, 23 nt, Human
uaggauuacaggcgggagccacc

SEQ ID NO: 608975 - RNA, 24 nt, Human
uaggauuacaggcgggagccaccg

SEQ ID NO: 608976 - RNA, 25 nt, Human
uagucgagauggggguuuugccaug

SEQ ID NO: 608977 - RNA, 19 nt, Human
ucacugcaaccuccgccuc

SEQ ID NO: 608978 - RNA, 24 nt, Human
ucacugcaaccuccgccucccagg

SEQ ID NO: 608979 - RNA, 25 nt, Human
ucacugcaaccuccgccucccaggu

SEQ ID NO: 608980 - RNA, 27 nt, Human
ucacugcaaccuccgccucccagguuc

SEQ ID NO: 608981 - RNA, 23 nt, Human
uccacaccaaccagcucuccaac

SEQ ID NO: 608982 - RNA, 24 nt, Human
ucccaaagugcuaggauuacaggc

SEQ ID NO: 608983 - RNA, 24 nt, Human
ucccaaguagcugagauuacaggc

SEQ ID NO: 608984 - RNA, 22 nt, Human
ucccacaagaccaccccgacuu

SEQ ID NO: 608985 - RNA, 21 nt, Human
ucccagguucaagugauucuc

SEQ ID NO: 608986 - RNA, 24 nt, Human
ucccagguucaagugauucuccug

SEQ ID NO: 608987 - RNA, 18 nt, Human
ucccuccacaccaaccag

SEQ ID NO: 608988 - RNA, 21 nt, Human
uccuaacugcccccccacccc

SEQ ID NO: 608989 - RNA, 22 nt, Human
uccugauugcucccaagccaag

SEQ ID NO: 608990 - RNA, 21 nt, Human
ucgacaccccagcaagagaag

SEQ ID NO: 608991 - RNA, 18 nt, Human
ucggccucccaaagugcu

SEQ ID NO: 608992 - RNA, 22 nt, Human
ucucucugucgcccaggcuaaa

SEQ ID NO: 608993 - RNA, 24 nt, Human
ucucucugucgcccaggcuaaagu

SEQ ID NO: 608994 - RNA, 21 nt, Human
ucucuuccgccgcagccccgg

SEQ ID NO: 608995 - RNA, 22 nt, Human
ucucuugaccgugugauccgcc

SEQ ID NO: 608996 - RNA, 22 nt, Human
ucugucaccaauugcccggagc

SEQ ID NO: 608997 - RNA, 24 nt, Human
ucugucgcccaggcuaaaguacag

SEQ ID NO: 608998 - RNA, 19 nt, Human
ugaccgauucaaucaccgg

SEQ ID NO: 608999 - RNA, 18 nt, Human
ugagaugggucucucugu

SEQ ID NO: 609000 - RNA, 22 nt, Human
ugagauuacaggcgcacgccac

SEQ ID NO: 609001 - RNA, 24 nt, Human
ugagauuacaggcgcacgccacca

SEQ ID NO: 609002 - RNA, 20 nt, Human
ugccaagugcagacgguggg

SEQ ID NO: 609003 - RNA, 22 nt, Human
ugccauguuggccaggaugguc

SEQ ID NO: 609004 - RNA, 24 nt, Human
ugccauguuggccaggauggucuu

SEQ ID NO: 609005 - RNA, 21 nt, Human
ugccccaggcucccaaguagc

SEQ ID NO: 609006 - RNA, 24 nt, Human
ugccccaggcucccaaguagcuga

SEQ ID NO: 609007 - RNA, 20 nt, Human
ugcccggagcuagugcagaa

SEQ ID NO: 609008 - RNA, 24 nt, Human
ugcuaggauuacaggcgggagcca

SEQ ID NO: 609009 - RNA, 24 nt, Human
uggccaggauggucuugaucucuu

SEQ ID NO: 609010 - RNA, 23 nt, Human
ugggaggcggggagucucagagg

SEQ ID NO: 609011 - RNA, 24 nt, Human
uggggguuuugccauguuggccag

SEQ ID NO: 609012 - RNA, 25 nt, Human
uuagucgagauggggguuuugccau

SEQ ID NO: 609013 - RNA, 25 nt, Human
uucaagugauucuccugccccaggc

SEQ ID NO: 609014 - RNA, 23 nt, Human
uucuccugccccaggcucccaag

SEQ ID NO: 609015 - RNA, 19 nt, Human
uugcccggagcuagugcag

SEQ ID NO: 609016 - RNA, 24 nt, Human
uuguauuuuuagucgagauggggg

SEQ ID NO: 609017 - RNA, 18 nt, Human
uuuacaggaaauaacauu

SEQ ID NO: 609018 - RNA, 21 nt, Human
uuuuaaaaaaugaaaauauuu

SEQ ID NO: 609019 - RNA, 20 nt, Human
uuuuguauuuuuagucgaga

SEQ ID NO: 609020 - RNA, 18 nt, Human
uuuuuagucgagaugggg

SEQ ID NO: 609021 - RNA, 21 nt, Human
uuuuuguauuuuuagucgaga

SEQ ID NO: 609022 - RNA, 24 nt, Human
aaaaaaagaaaaaaaaagaaagaa

SEQ ID NO: 609023 - RNA, 25 nt, Human
aaaaaaagaaagaaaagguaaaaag

SEQ ID NO: 609024 - RNA, 18 nt, Human
aacuccuggugacagagu

SEQ ID NO: 609025 - RNA, 19 nt, Human
aacuugcccuucuuccucc

SEQ ID NO: 609026 - RNA, 18 nt, Human
aagaaaaaaaaagaaaga

SEQ ID NO: 609027 - RNA, 19 nt, Human
aagagaaacccagggcagc

SEQ ID NO: 609028 - RNA, 22 nt, Human
aagcacaucaagcgaaagcucu

SEQ ID NO: 609029 - RNA, 20 nt, Human
aagcaccagcccuggcuacc

SEQ ID NO: 609030 - RNA, 23 nt, Human
acacguggcugggccgaaguggg

SEQ ID NO: 609031 - RNA, 22 nt, Human
acagcuccuuagcugcccucag

SEQ ID NO: 609032 - RNA, 19 nt, Human
acaggcuugaauguacggu

SEQ ID NO: 609033 - RNA, 20 nt, Human
acuuaugacuaucucucccu

SEQ ID NO: 609034 - RNA, 19 nt, Human
acuuguuucacuuuuccuc

SEQ ID NO: 609035 - RNA, 23 nt, Human
agaagaagacaggaugcuacaaa

SEQ ID NO: 609036 - RNA, 24 nt, Human
agaagaagacaggaugcuacaaag

SEQ ID NO: 609037 - RNA, 18 nt, Human
agaagacaggaugcuaca

SEQ ID NO: 609038 - RNA, 19 nt, Human
agaggaaggagaucgggga

SEQ ID NO: 609039 - RNA, 19 nt, Human
agccaaugagcucauggcc

SEQ ID NO: 609040 - RNA, 20 nt, Human
agccccuaugucccacccag

SEQ ID NO: 609041 - RNA, 21 nt, Human
agcccuggcuacccagccucc

SEQ ID NO: 609042 - RNA, 19 nt, Human
agccugcaucugaacuugc

SEQ ID NO: 609043 - RNA, 23 nt, Human
aggaaggagaucggggagcauga

SEQ ID NO: 609044 - RNA, 18 nt, Human
aggcaaggaaaggcccca

SEQ ID NO: 609045 - RNA, 23 nt, Human
aggcaaggaaaggccccagcagc

SEQ ID NO: 609046 - RNA, 21 nt, Human
aggcagaagagcccuccagag

SEQ ID NO: 609047 - RNA, 26 nt, Human
agggauugaguaagagaaacccaggg

SEQ ID NO: 609048 - RNA, 18 nt, Human
aguguuguggggcaagcu

SEQ ID NO: 609049 - RNA, 24 nt, Human
auaggacaagaaaaggauacaaaa

SEQ ID NO: 609050 - RNA, 23 nt, Human
augagcucauggccucagggguu

SEQ ID NO: 609051 - RNA, 18 nt, Human
augugccauauccacuuu

SEQ ID NO: 609052 - RNA, 22 nt, Human
caaaccaggcagcacagaagaa

SEQ ID NO: 609053 - RNA, 23 nt, Human
caaaccuaaccuccgccgaauuc

SEQ ID NO: 609054 - RNA, 31 nt, Human
cacagcuucaaccuucuccucuaccccuuuu

SEQ ID NO: 609055 - RNA, 21 nt, Human
caccagcccuggcuacccagc

SEQ ID NO: 609056 - RNA, 25 nt, Human
cacccugaccacagccagccacacc

SEQ ID NO: 609057 - RNA, 20 nt, Human
cacgcuagcuccacucccaa

SEQ ID NO: 609058 - RNA, 18 nt, Human
cacgugugacugagagau

SEQ ID NO: 609059 - RNA, 22 nt, Human
cagcaaaucaucugacucuagu

SEQ ID NO: 609060 - RNA, 20 nt, Human
cagcagccugcacaggcucu

SEQ ID NO: 609061 - RNA, 23 nt, Human
cagccccuaugucccacccagga

SEQ ID NO: 609062 - RNA, 26 nt, Human
cagccuaccugaacucccucacacug

SEQ ID NO: 609063 - RNA, 25 nt, Human
caggaugcuacaaaggcagccaaug

SEQ ID NO: 609064 - RNA, 26 nt, Human
caggcccaagacccaugccccgaggg

SEQ ID NO: 609065 - RNA, 27 nt, Human
cauauccacuuucaucaucugggcuaa

SEQ ID NO: 609066 - RNA, 20 nt, Human
cauccucuuccucccccaag

SEQ ID NO: 609067 - RNA, 21 nt, Human
caucuccccacgagaaacuug

SEQ ID NO: 609068 - RNA, 19 nt, Human
ccacaggucauccuuggug

SEQ ID NO: 609069 - RNA, 19 nt, Human
ccagccacccagccugcau

SEQ ID NO: 609070 - RNA, 26 nt, Human
ccaggacaaccccuaggagguuuuga

SEQ ID NO: 609071 - RNA, 23 nt, Human
cccagcagcucuguccccuaccc

SEQ ID NO: 609072 - RNA, 23 nt, Human
cccagccacccagccugcaucug

SEQ ID NO: 609073 - RNA, 24 nt, Human
cccagggcagcccugccacagaga

SEQ ID NO: 609074 - RNA, 23 nt, Human
ccccagcagcucuguccccuacc

SEQ ID NO: 609075 - RNA, 19 nt, Human
ccccaucucucucagcccc

SEQ ID NO: 609076 - RNA, 20 nt, Human
cccccaucucucucagcccc

SEQ ID NO: 609077 - RNA, 19 nt, Human
ccccuaugucccacccagg

SEQ ID NO: 609078 - RNA, 22 nt, Human
cccuacccugggcucugccucc

SEQ ID NO: 609079 - RNA, 19 nt, Human
cccuaccuagaggcacagg

SEQ ID NO: 609080 - RNA, 18 nt, Human
cccucacacugaugcucc

SEQ ID NO: 609081 - RNA, 18 nt, Human
cccuuccuuuuuucuguc

SEQ ID NO: 609082 - RNA, 20 nt, Human
cccuuccuuuuuucugucug

SEQ ID NO: 609083 - RNA, 18 nt, Human
cccuucuuccuccuuccu

SEQ ID NO: 609084 - RNA, 20 nt, Human
ccuccagaguagucccuuag

SEQ ID NO: 609085 - RNA, 23 nt, Human
ccuggacagcaaacuucucucuu

SEQ ID NO: 609086 - RNA, 21 nt, Human
ccuggcuacccagccucccuu

SEQ ID NO: 609087 - RNA, 22 nt, Human
ccuggcuacccagccucccuug

SEQ ID NO: 609088 - RNA, 18 nt, Human
cgggagugcgcugauggu

SEQ ID NO: 609089 - RNA, 21 nt, Human
cuacccugggcucugccucca

SEQ ID NO: 609090 - RNA, 21 nt, Human
cucccaaaccuaaccuccgcc

SEQ ID NO: 609091 - RNA, 18 nt, Human
cuccuggugacagagugg

SEQ ID NO: 609092 - RNA, 19 nt, Human
cucuccuucccacucacua

SEQ ID NO: 609093 - RNA, 22 nt, Human
cugaacuugcccuucuuccucc

SEQ ID NO: 609094 - RNA, 20 nt, Human
cugauauugaaaaaaagaaa

SEQ ID NO: 609095 - RNA, 18 nt, Human
cugcuugcaucuguugag

SEQ ID NO: 609096 - RNA, 21 nt, Human
cuugggacaacagguaggugc

SEQ ID NO: 609097 - RNA, 23 nt, Human
gaaaggccccagcagcucugucc

SEQ ID NO: 609098 - RNA, 18 nt, Human
gaaccgaggcagccaagg

SEQ ID NO: 609099 - RNA, 22 nt, Human
gaacucccucacacugaugcuc

SEQ ID NO: 609100 - RNA, 20 nt, Human
gaagaagacaggaugcuaca

SEQ ID NO: 609101 - RNA, 18 nt, Human
gagaaacccagggcagcc

SEQ ID NO: 609102 - RNA, 18 nt, Human
gaggagcugagccaaugg

SEQ ID NO: 609103 - RNA, 24 nt, Human
gaggagcugagccaauggcgggag

SEQ ID NO: 609104 - RNA, 18 nt, Human
gccagcuucacagucaug

SEQ ID NO: 609105 - RNA, 18 nt, Human
gccccagcagcucugucc

SEQ ID NO: 609106 - RNA, 19 nt, Human
gccuaccugaacucccuca

SEQ ID NO: 609107 - RNA, 18 nt, Human
gcugcaaacacguggcug

SEQ ID NO: 609108 - RNA, 20 nt, Human
ggaaaggccccagcagcucu

SEQ ID NO: 609109 - RNA, 21 nt, Human
ggacaagaaaaggauacaaaa

SEQ ID NO: 609110 - RNA, 22 nt, Human
ggcaccugccacagcagcuccc

SEQ ID NO: 609111 - RNA, 20 nt, Human
ggcagccaaggaaugugagc

SEQ ID NO: 609112 - RNA, 19 nt, Human
ggccccagcagcucugucc

SEQ ID NO: 609113 - RNA, 23 nt, Human
ggccucagggguuuuaagcacca

SEQ ID NO: 609114 - RNA, 20 nt, Human
gggccgaagugggcaaugcc

SEQ ID NO: 609115 - RNA, 20 nt, Human
gggccgaagugggcaaugcc

SEQ ID NO: 609116 - RNA, 18 nt, Human
gggcugccuggggcucgu

SEQ ID NO: 609117 - RNA, 18 nt, Human
ggggaugggaguggggaa

SEQ ID NO: 609118 - RNA, 23 nt, Human
ggggcucccguucacucuggggg

SEQ ID NO: 609119 - RNA, 20 nt, Human
guagcacccugaccacagcc

SEQ ID NO: 609120 - RNA, 25 nt, Human
uaaaaagguaaucugugacacaaaa

SEQ ID NO: 609121 - RNA, 19 nt, Human
uaaccuccgccgaauucuc

SEQ ID NO: 609122 - RNA, 26 nt, Human
uaagagaaacccagggcagcccugcc

SEQ ID NO: 609123 - RNA, 24 nt, Human
uacagcaaaucaucugacucuagu

SEQ ID NO: 609124 - RNA, 25 nt, Human
uacagcaaaucaucugacucuagua

SEQ ID NO: 609125 - RNA, 26 nt, Human
uacagcaaaucaucugacucuaguaa

SEQ ID NO: 609126 - RNA, 22 nt, Human
uaccugaacucccucacacuga

SEQ ID NO: 609127 - RNA, 20 nt, Human
uagaggaaggagaucgggga

SEQ ID NO: 609128 - RNA, 21 nt, Human
uagcacgcuagcuccacuccc

SEQ ID NO: 609129 - RNA, 21 nt, Human
uaguagcacccugaccacagc

SEQ ID NO: 609130 - RNA, 25 nt, Human
uaugacuaucucucccuuucuccaa

SEQ ID NO: 609131 - RNA, 22 nt, Human
uaugucccacccaggacaaagc

SEQ ID NO: 609132 - RNA, 25 nt, Human
ucacucaucauacuaaugugauucc

SEQ ID NO: 609133 - RNA, 19 nt, Human
ucacuuguuucacuuuucc

SEQ ID NO: 609134 - RNA, 19 nt, Human
ucagaacaguggccuacug

SEQ ID NO: 609135 - RNA, 21 nt, Human
ucagaacaguggccuacuggg

SEQ ID NO: 609136 - RNA, 20 nt, Human
ucaggcccaagacccaugcc

SEQ ID NO: 609137 - RNA, 22 nt, Human
ucaugccacacugccaacacag

SEQ ID NO: 609138 - RNA, 24 nt, Human
ucccacagcaggggcucccguuca

SEQ ID NO: 609139 - RNA, 18 nt, Human
ucccacccaggacaaagc

SEQ ID NO: 609140 - RNA, 22 nt, Human
uccgccccagugccugccaccu

SEQ ID NO: 609141 - RNA, 18 nt, Human
uccgccgaauucucugca

SEQ ID NO: 609142 - RNA, 21 nt, Human
ucgccagcuucacagucaugc

SEQ ID NO: 609143 - RNA, 18 nt, Human
ucucacucuccuucccac

SEQ ID NO: 609144 - RNA, 21 nt, Human
ucucagccccuaugucccacc

SEQ ID NO: 609145 - RNA, 23 nt, Human
ucuccccccaucucucucagccc

SEQ ID NO: 609146 - RNA, 20 nt, Human
ucucucagccccuauguccc

SEQ ID NO: 609147 - RNA, 19 nt, Human
ucugggggcaccugccaca

SEQ ID NO: 609148 - RNA, 21 nt, Human
ucugucuugguagggcuugau

SEQ ID NO: 609149 - RNA, 21 nt, Human
ucuuccacuuaugacuaucuc

SEQ ID NO: 609150 - RNA, 26 nt, Human
ugaaggcucuggcuuuaggagugcuc

SEQ ID NO: 609151 - RNA, 21 nt, Human
ugaauguacgguuuuuccaau

SEQ ID NO: 609152 - RNA, 26 nt, Human
ugacacaauccaaaugcuuacacucc

SEQ ID NO: 609153 - RNA, 20 nt, Human
ugacucccaggacaaccccu

SEQ ID NO: 609154 - RNA, 20 nt, Human
ugacucccaggacaaccccu

SEQ ID NO: 609155 - RNA, 19 nt, Human
ugacuuuugacauuaguga

SEQ ID NO: 609156 - RNA, 21 nt, Human
ugagaagcucagcagaugggc

SEQ ID NO: 609157 - RNA, 18 nt, Human
ugagaucaaaccaggcaa

SEQ ID NO: 609158 - RNA, 23 nt, Human
ugagcgccugucagccuacgacc

SEQ ID NO: 609159 - RNA, 19 nt, Human
ugaguaagagaaacccagg

SEQ ID NO: 609160 - RNA, 23 nt, Human
ugcacacccacacugcuugcauc

SEQ ID NO: 609161 - RNA, 18 nt, Human
ugcaucuguugaguguug

SEQ ID NO: 609162 - RNA, 18 nt, Human
ugccaggcagaagagccc

SEQ ID NO: 609163 - RNA, 22 nt, Human
ugccucauuuccauuuccuuca

SEQ ID NO: 609164 - RNA, 22 nt, Human
ugccuccaucuccccacgagaa

SEQ ID NO: 609165 - RNA, 21 nt, Human
ugccuggggcucgucagcagc

SEQ ID NO: 609166 - RNA, 19 nt, Human
uggcugggccgaagugggc

SEQ ID NO: 609167 - RNA, 19 nt, Human
ugggccgaagugggcaaug

SEQ ID NO: 609168 - RNA, 18 nt, Human
ugggggaugggagugggg

SEQ ID NO: 609169 - RNA, 19 nt, Human
ugguagaggaaggagaucg

SEQ ID NO: 609170 - RNA, 20 nt, Human
ugucuccccccaucucucuc

SEQ ID NO: 609171 - RNA, 18 nt, Human
uguucagcauccgauggc

SEQ ID NO: 609172 - RNA, 19 nt, Human
uuaaacuccuggugacaga

SEQ ID NO: 609173 - RNA, 19 nt, Human
uuaagcaccagcccuggcu

SEQ ID NO: 609174 - RNA, 22 nt, Human
uuaagcaccagcccuggcuacc

SEQ ID NO: 609175 - RNA, 20 nt, Human
uuagugaguuaauucuuaac

SEQ ID NO: 609176 - RNA, 23 nt, Human
uucacaaaguucccacagcaggg

SEQ ID NO: 609177 - RNA, 18 nt, Human
uucacagucaugcaggga

SEQ ID NO: 609178 - RNA, 26 nt, Human
uucagcauccgauggcaguccacagg

SEQ ID NO: 609179 - RNA, 21 nt, Human
uucccaggcaaggaaaggccc

SEQ ID NO: 609180 - RNA, 24 nt, Human
uucugucugucuugguagggcuug

SEQ ID NO: 609181 - RNA, 22 nt, Human
uuuccauuuccuucacaucugu

SEQ ID NO: 609182 - RNA, 19 nt, Human
uuuuaagcaccagcccugg

SEQ ID NO: 609183 - RNA, 18 nt, Human
acacaauacaaaagacac

SEQ ID NO: 609184 - RNA, 22 nt, Human
acucuaaauuuuuaaaaaugga

SEQ ID NO: 609185 - RNA, 23 nt, Human
auaaauauaacuuuccaguccau

SEQ ID NO: 609186 - RNA, 24 nt, Human
auauaaauauaacuuuccagucca

SEQ ID NO: 609187 - RNA, 22 nt, Human
auguacauaggcaauuaucaua

SEQ ID NO: 609188 - RNA, 23 nt, Human
caaaagacacaggcuaaaacagg

SEQ ID NO: 609189 - RNA, 31 nt, Human
cacaauacaaaagacacaggcuaaaacaggg

SEQ ID NO: 609190 - RNA, 19 nt, Human
cacacaauacaaaagacac

SEQ ID NO: 609191 - RNA, 19 nt, Human
cacaggcuaaaacaggccu

SEQ ID NO: 609192 - RNA, 21 nt, Human
cagaguagagcgcaagcuauu

SEQ ID NO: 609193 - RNA, 24 nt, Human
ccuaugacaaugccauuguuuauu

SEQ ID NO: 609194 - RNA, 25 nt, Human
cuaagauauauaccuaaugaagauu

SEQ ID NO: 609195 - RNA, 25 nt, Human
cucaacagaagcuccaacguuuucc

SEQ ID NO: 609196 - RNA, 21 nt, Human
cucaguaacacagaaauaaga

SEQ ID NO: 609197 - RNA, 19 nt, Human
uaaaaggaaggccuaugac

SEQ ID NO: 609198 - RNA, 22 nt, Human
uaacgcagcccuucuauuuccc

SEQ ID NO: 609199 - RNA, 21 nt, Human
uaagugauuaggguccucagu

SEQ ID NO: 609200 - RNA, 24 nt, Human
uacaaaagacacaggcuaaaacag

SEQ ID NO: 609201 - RNA, 21 nt, Human
uagaauucuuuagcaacacac

SEQ ID NO: 609202 - RNA, 21 nt, Human
ucacugucuuuccugaaguuc

SEQ ID NO: 609203 - RNA, 24 nt, Human
ucagaaagagacuucauaaaaaca

SEQ ID NO: 609204 - RNA, 22 nt, Human
uccacagcaauuuucuaacccu

SEQ ID NO: 609205 - RNA, 23 nt, Human
uccacauaacuacagaguagagc

SEQ ID NO: 609206 - RNA, 21 nt, Human
ugaaauagguauauuuggaua

SEQ ID NO: 609207 - RNA, 19 nt, Human
uggauguuccacagcaauu

SEQ ID NO: 609208 - RNA, 20 nt, Human
uuuccauuuuucacugucuu

SEQ ID NO: 609209 - RNA, 20 nt, Human
aaaguccccuccagcuuucc

SEQ ID NO: 609210 - RNA, 21 nt, Human
aagaggggaccuggggcugcc

SEQ ID NO: 609211 - RNA, 20 nt, Human
aagcagcauuuggaaugcag

SEQ ID NO: 609212 - RNA, 19 nt, Human
aaggagcugcaagaacagg

SEQ ID NO: 609213 - RNA, 19 nt, Human
aaggagcugcaagaacagg

SEQ ID NO: 609214 - RNA, 21 nt, Human
aaggagucucggcgaugccug

SEQ ID NO: 609215 - RNA, 20 nt, Human
acacugcagcuaugcugggc

SEQ ID NO: 609216 - RNA, 24 nt, Human
accccgucugcccaggguuguucc

SEQ ID NO: 609217 - RNA, 21 nt, Human
agaaggggucagauggacagg

SEQ ID NO: 609218 - RNA, 19 nt, Human
agagccuuccagaagacuc

SEQ ID NO: 609219 - RNA, 18 nt, Human
agauucaggcagucagca

SEQ ID NO: 609220 - RNA, 18 nt, Human
agcccaguuagauggcug

SEQ ID NO: 609221 - RNA, 23 nt, Human
aggacccaaggagucucggcgau

SEQ ID NO: 609222 - RNA, 20 nt, Human
aggcagccucagcagagauu

SEQ ID NO: 609223 - RNA, 20 nt, Human
aggccuuggagcagcagcuu

SEQ ID NO: 609224 - RNA, 22 nt, Human
aggcggaaggacacaggucccu

SEQ ID NO: 609225 - RNA, 18 nt, Human
aggguggggccucugagc

SEQ ID NO: 609226 - RNA, 25 nt, Human
augagacagaacgcuacaaucuguu

SEQ ID NO: 609227 - RNA, 19 nt, Human
auggagcaugccaaggucc

SEQ ID NO: 609228 - RNA, 25 nt, Human
auggcgcggcccuccugccagcacc

SEQ ID NO: 609229 - RNA, 18 nt, Human
auggcuuugugacacugc

SEQ ID NO: 609230 - RNA, 21 nt, Human
caaggcacaggacugcccccu

SEQ ID NO: 609231 - RNA, 25 nt, Human
cacaaggccaggcccuacaagacag

SEQ ID NO: 609232 - RNA, 20 nt, Human
caccugcggcacugacagca

SEQ ID NO: 609233 - RNA, 23 nt, Human
cacugggucagcccuggggaugg

SEQ ID NO: 609234 - RNA, 18 nt, Human
cagaagcagggaggggag

SEQ ID NO: 609235 - RNA, 21 nt, Human
cagcacccugagagcccgugg

SEQ ID NO: 609236 - RNA, 19 nt, Human
cagcaggcagagguuucca

SEQ ID NO: 609237 - RNA, 19 nt, Human
cagcaugagggagggcggg

SEQ ID NO: 609238 - RNA, 19 nt, Human
cagcuuuccaggaaggagc

SEQ ID NO: 609239 - RNA, 19 nt, Human
caggguggggccucugagc

SEQ ID NO: 609240 - RNA, 20 nt, Human
caucggagggcagggcaggc

SEQ ID NO: 609241 - RNA, 25 nt, Human
caucucugcccucagaggcugaggg

SEQ ID NO: 609242 - RNA, 23 nt, Human
cauggugcggcccucccgccagc

SEQ ID NO: 609243 - RNA, 22 nt, Human
ccaggaaggagcugcaagaaca

SEQ ID NO: 609244 - RNA, 24 nt, Human
ccaggccuuggagcagcagcuugu

SEQ ID NO: 609245 - RNA, 24 nt, Human
cccacgguguucuguucccgagcc

SEQ ID NO: 609246 - RNA, 19 nt, Human
cccaggguuguuccucccu

SEQ ID NO: 609247 - RNA, 23 nt, Human
ccccaccccaccccugcaucgga

SEQ ID NO: 609248 - RNA, 19 nt, Human
ccccagcacccugagagcc

SEQ ID NO: 609249 - RNA, 20 nt, Human
ccccagcacccugagagccc

SEQ ID NO: 609250 - RNA, 21 nt, Human
cccccaggcugcccaccccuc

SEQ ID NO: 609251 - RNA, 24 nt, Human
cccccaggcuucuuugggcugguu

SEQ ID NO: 609252 - RNA, 19 nt, Human
ccccccaccccaccccugc

SEQ ID NO: 609253 - RNA, 22 nt, Human
cccccugcccacaaggccaggc

SEQ ID NO: 609254 - RNA, 19 nt, Human
ccccuggccccagcugagu

SEQ ID NO: 609255 - RNA, 25 nt, Human
cccguggcugggcagcucuggaggc

SEQ ID NO: 609256 - RNA, 22 nt, Human
cccucagaggcugagggcccac

SEQ ID NO: 609257 - RNA, 20 nt, Human
cccugagaccccgucugccc

SEQ ID NO: 609258 - RNA, 27 nt, Human
cccugcccacaaggccaggcccuacaa

SEQ ID NO: 609259 - RNA, 20 nt, Human
ccgccccccaccccaccccu

SEQ ID NO: 609260 - RNA, 18 nt, Human
ccucccucucccuccucc

SEQ ID NO: 609261 - RNA, 21 nt, Human
ccucccucucccuccuccuca

SEQ ID NO: 609262 - RNA, 22 nt, Human
ccuccuccucaggcuggggcag

SEQ ID NO: 609263 - RNA, 24 nt, Human
ccuccugucugcauguggccaggc

SEQ ID NO: 609264 - RNA, 19 nt, Human
ccugagaccccgucugccc

SEQ ID NO: 609265 - RNA, 22 nt, Human
ccugagaccccgucugcccagg

SEQ ID NO: 609266 - RNA, 26 nt, Human
ccugcagcuggggcaggccgacgagc

SEQ ID NO: 609267 - RNA, 20 nt, Human
ccugcaucggagggcagggc

SEQ ID NO: 609268 - RNA, 22 nt, Human
ccugccagcaccgucaaggagg

SEQ ID NO: 609269 - RNA, 20 nt, Human
ccuucauucugagggccccu

SEQ ID NO: 609270 - RNA, 21 nt, Human
cgcauccuggaggcgaaggga

SEQ ID NO: 609271 - RNA, 22 nt, Human
cgccccccaccccaccccugca

SEQ ID NO: 609272 - RNA, 20 nt, Human
cggggaggacccaaggaguc

SEQ ID NO: 609273 - RNA, 18 nt, Human
cgucaaggagggggaugc

SEQ ID NO: 609274 - RNA, 23 nt, Human
cguggcugggcagcucuggaggc

SEQ ID NO: 609275 - RNA, 24 nt, Human
cguguagcaccgggccugcagcug

SEQ ID NO: 609276 - RNA, 22 nt, Human
cucagcgcauccuggaggcgaa

SEQ ID NO: 609277 - RNA, 19 nt, Human
cucccucucccuccuccuc

SEQ ID NO: 609278 - RNA, 21 nt, Human
cugcagcuggggcaggccgac

SEQ ID NO: 609279 - RNA, 27 nt, Human
cugcccacaaggccaggcccuacaaga

SEQ ID NO: 609280 - RNA, 21 nt, Human
cugcuccugccuggugccuga

SEQ ID NO: 609281 - RNA, 19 nt, Human
gacuccgccccccacccca

SEQ ID NO: 609282 - RNA, 19 nt, Human
gagccuuugugucugcugu

SEQ ID NO: 609283 - RNA, 19 nt, Human
gagcucagcuuccuccugu

SEQ ID NO: 609284 - RNA, 19 nt, Human
gagcugaagagccuuugug

SEQ ID NO: 609285 - RNA, 22 nt, Human
gaggacccaaggagucucggcg

SEQ ID NO: 609286 - RNA, 18 nt, Human
gagugggagaggcccagu

SEQ ID NO: 609287 - RNA, 20 nt, Human
gccacuccucaccccccagg

SEQ ID NO: 609288 - RNA, 19 nt, Human
gcccaccccucaucagccc

SEQ ID NO: 609289 - RNA, 19 nt, Human
gccccagcacccugagagc

SEQ ID NO: 609290 - RNA, 20 nt, Human
gccccccaccccaccccugc

SEQ ID NO: 609291 - RNA, 20 nt, Human
gccgcuaggacccucugcca

SEQ ID NO: 609292 - RNA, 20 nt, Human
gcggcccucccgccagcacu

SEQ ID NO: 609293 - RNA, 19 nt, Human
gcugaaggguggggccugg

SEQ ID NO: 609294 - RNA, 20 nt, Human
ggaaagccucccccaggcug

SEQ ID NO: 609295 - RNA, 21 nt, Human
ggacccaaggagucucggcga

SEQ ID NO: 609296 - RNA, 19 nt, Human
ggacugcccccugcccaca

SEQ ID NO: 609297 - RNA, 21 nt, Human
ggagggcggggaggacccaag

SEQ ID NO: 609298 - RNA, 20 nt, Human
ggaugcugcuccugccuggu

SEQ ID NO: 609299 - RNA, 20 nt, Human
ggcagggcaggcagcaagca

SEQ ID NO: 609300 - RNA, 27 nt, Human
ggcagguguggggcaggggggaggucc

SEQ ID NO: 609301 - RNA, 23 nt, Human
ggccccuggccccagcugaguuc

SEQ ID NO: 609302 - RNA, 21 nt, Human
ggcccuccugccagcaccguc

SEQ ID NO: 609303 - RNA, 23 nt, Human
ggcggcugaaggguggggccugg

SEQ ID NO: 609304 - RNA, 18 nt, Human
ggcgggacuccgcccccc

SEQ ID NO: 609305 - RNA, 22 nt, Human
gggccacuccucaccccccagg

SEQ ID NO: 609306 - RNA, 20 nt, Human
gggcccacaaggcacaggac

SEQ ID NO: 609307 - RNA, 19 nt, Human
gggcgcugagcugggcccg

SEQ ID NO: 609308 - RNA, 19 nt, Human
gggcugagccucagagcuc

SEQ ID NO: 609309 - RNA, 23 nt, Human
ggggagccggcggccgcuggggg

SEQ ID NO: 609310 - RNA, 23 nt, Human
ggggcaggguggggccucugagc

SEQ ID NO: 609311 - RNA, 19 nt, Human
gguguggggcagggugggg

SEQ ID NO: 609312 - RNA, 21 nt, Human
guccauggcagagccuuccag

SEQ ID NO: 609313 - RNA, 21 nt, Human
guguggggcaggguggggccu

SEQ ID NO: 609314 - RNA, 21 nt, Human
guucaacacugggcuggacac

SEQ ID NO: 609315 - RNA, 21 nt, Human
guuccucccucucccuccucc

SEQ ID NO: 609316 - RNA, 18 nt, Human
ucagagcucugugcuugc

SEQ ID NO: 609317 - RNA, 21 nt, Human
ucagcaggucagcugaaugga

SEQ ID NO: 609318 - RNA, 26 nt, Human
ucagcgcauccuggaggcgaagggag

SEQ ID NO: 609319 - RNA, 21 nt, Human
ucccagggcacugguaacugc

SEQ ID NO: 609320 - RNA, 22 nt, Human
ucccugagaccccgucugccca

SEQ ID NO: 609321 - RNA, 19 nt, Human
uccucccucucccuccucc

SEQ ID NO: 609322 - RNA, 21 nt, Human
ucucccuccuccucaggcugg

SEQ ID NO: 609323 - RNA, 19 nt, Human
ugaaggguggggccuggug

SEQ ID NO: 609324 - RNA, 24 nt, Human
ugagaccccgucugcccaggguug

SEQ ID NO: 609325 - RNA, 23 nt, Human
ugagagcccguggcugggcagcu

SEQ ID NO: 609326 - RNA, 23 nt, Human
ugcaagaacaggcagcggagugg

SEQ ID NO: 609327 - RNA, 21 nt, Human
ugcagaaaacagaagggguca

SEQ ID NO: 609328 - RNA, 20 nt, Human
ugcagcuaugcugggcggga

SEQ ID NO: 609329 - RNA, 22 nt, Human
ugccagcaccgucaaggagggg

SEQ ID NO: 609330 - RNA, 19 nt, Human
ugcccaccccucaucagcc

SEQ ID NO: 609331 - RNA, 19 nt, Human
ugccccagcacccugagag

SEQ ID NO: 609332 - RNA, 20 nt, Human
ugcggcccucccgccagcac

SEQ ID NO: 609333 - RNA, 20 nt, Human
uggagagggcgcugagcugg

SEQ ID NO: 609334 - RNA, 21 nt, Human
uggccaggccuuggagcagca

SEQ ID NO: 609335 - RNA, 23 nt, Human
uggccaggccuuggagcagcagc

SEQ ID NO: 609336 - RNA, 21 nt, Human
uggcugggcagcucuggaggc

SEQ ID NO: 609337 - RNA, 19 nt, Human
ugggagaggcccagugagg

SEQ ID NO: 609338 - RNA, 21 nt, Human
uggggccucugagcccgagga

SEQ ID NO: 609339 - RNA, 19 nt, Human
ugucccgaggcuccugugc

SEQ ID NO: 609340 - RNA, 18 nt, Human
ugugccagggggcugagc

SEQ ID NO: 609341 - RNA, 22 nt, Human
uguggcagcaugagggagggcg

SEQ ID NO: 609342 - RNA, 19 nt, Human
uguggccaggccuuggagc

SEQ ID NO: 609343 - RNA, 20 nt, Human
uuccuccugucugcaugugg

SEQ ID NO: 609344 - RNA, 19 nt, Human
uucuuugggcugguucugg

SEQ ID NO: 609345 - RNA, 22 nt, Human
uucuuugggcugguucuggaag

SEQ ID NO: 609346 - RNA, 24 nt, Human
aaaagcacccaauaugggauccuc

SEQ ID NO: 609347 - RNA, 20 nt, Human
aaaaugguucucuccaacca

SEQ ID NO: 609348 - RNA, 23 nt, Human
aaacaaaacaaaaauugcuucca

SEQ ID NO: 609349 - RNA, 21 nt, Human
aaacaaaggcaagacagccac

SEQ ID NO: 609350 - RNA, 25 nt, Human
aaacaagacaucuuacgaaacagaa

SEQ ID NO: 609351 - RNA, 22 nt, Human
aaacagaaagcaagaccacuuc

SEQ ID NO: 609352 - RNA, 24 nt, Human
aaacagaaagcaagaccacuucgg

SEQ ID NO: 609353 - RNA, 19 nt, Human
aaacgcccauguacauccc

SEQ ID NO: 609354 - RNA, 22 nt, Human
aaacucaugcccuguaaguaug

SEQ ID NO: 609355 - RNA, 26 nt, Human
aaagaacaugcugagcacaagcugcg

SEQ ID NO: 609356 - RNA, 22 nt, Human
aaaggagcacagacccuccacg

SEQ ID NO: 609357 - RNA, 21 nt, Human
aaagucuuuaaugcuaaaaac

SEQ ID NO: 609358 - RNA, 18 nt, Human
aacagaaagcaagaccac

SEQ ID NO: 609359 - RNA, 20 nt, Human
aacggagguuggcaaaggaa

SEQ ID NO: 609360 - RNA, 21 nt, Human
aagagucuuccugagggcccc

SEQ ID NO: 609361 - RNA, 24 nt, Human
aagcugcgagucagaauaaaaaca

SEQ ID NO: 609362 - RNA, 18 nt, Human
aaggcaagacagccaccc

SEQ ID NO: 609363 - RNA, 19 nt, Human
acaugcuugagaucagugg

SEQ ID NO: 609364 - RNA, 22 nt, Human
acccucacaauccccagguccc

SEQ ID NO: 609365 - RNA, 24 nt, Human
acugugccucgcaaggcaaacacu

SEQ ID NO: 609366 - RNA, 19 nt, Human
acuuggcugagcucuccuc

SEQ ID NO: 609367 - RNA, 21 nt, Human
agaacggagguuggcaaagga

SEQ ID NO: 609368 - RNA, 21 nt, Human
agcaggauuucaauacacgug

SEQ ID NO: 609369 - RNA, 19 nt, Human
agccacacucaaagccuag

SEQ ID NO: 609370 - RNA, 18 nt, Human
aggaaaaaaaaacaacaa

SEQ ID NO: 609371 - RNA, 22 nt, Human
aggaaaaaaaaacaacaacaaa

SEQ ID NO: 609372 - RNA, 18 nt, Human
aggugggacuaagcaaau

SEQ ID NO: 609373 - RNA, 20 nt, Human
caaacgcccauguacauccc

SEQ ID NO: 609374 - RNA, 18 nt, Human
caaagaacaugcugagca

SEQ ID NO: 609375 - RNA, 23 nt, Human
caaaggcaagacagccacccacu

SEQ ID NO: 609376 - RNA, 24 nt, Human
caacaaaugaacgugcagccuccu

SEQ ID NO: 609377 - RNA, 21 nt, Human
caaccccaaacuaaaccaaag

SEQ ID NO: 609378 - RNA, 21 nt, Human
caagacagguauuccucaaac

SEQ ID NO: 609379 - RNA, 18 nt, Human
caaugugucccccaaccc

SEQ ID NO: 609380 - RNA, 19 nt, Human
caccaagccauccuuuugu

SEQ ID NO: 609381 - RNA, 21 nt, Human
caccccgucucuuuucuuacu

SEQ ID NO: 609382 - RNA, 18 nt, Human
cacugugccucgcaaggc

SEQ ID NO: 609383 - RNA, 22 nt, Human
cagacagauacaagaacuugaa

SEQ ID NO: 609384 - RNA, 21 nt, Human
cagcaaagaauagaaaagucu

SEQ ID NO: 609385 - RNA, 22 nt, Human
cagcaaagaauagaaaagucuu

SEQ ID NO: 609386 - RNA, 21 nt, Human
cagcagacagcugccuuccug

SEQ ID NO: 609387 - RNA, 20 nt, Human
cagccacccacugugccucc

SEQ ID NO: 609388 - RNA, 20 nt, Human
cagccacccacugugccucg

SEQ ID NO: 609389 - RNA, 23 nt, Human
cagccuccaagacguggaaucuu

SEQ ID NO: 609390 - RNA, 26 nt, Human
caggccccucugcauagagccaggga

SEQ ID NO: 609391 - RNA, 22 nt, Human
cagguauuccucaaacaaaaca

SEQ ID NO: 609392 - RNA, 28 nt, Human
caggucccagaacagacagauacaagaa

SEQ ID NO: 609393 - RNA, 22 nt, Human
ccaaagaacaugcugagcacaa

SEQ ID NO: 609394 - RNA, 25 nt, Human
ccaacacaggccgcagcgaccacag

SEQ ID NO: 609395 - RNA, 23 nt, Human
ccaaccccaaacuaaaccaaaga

SEQ ID NO: 609396 - RNA, 21 nt, Human
ccaccaagccauccuuuugua

SEQ ID NO: 609397 - RNA, 18 nt, Human
ccagaacagacagauaca

SEQ ID NO: 609398 - RNA, 21 nt, Human
ccagggaaagaaaagcaccca

SEQ ID NO: 609399 - RNA, 22 nt, Human
ccaugcugagauuuucagcugc

SEQ ID NO: 609400 - RNA, 19 nt, Human
cccaaccccaaacuaaacc

SEQ ID NO: 609401 - RNA, 24 nt, Human
cccaaccccaaacuaaaccaaaga

SEQ ID NO: 609402 - RNA, 24 nt, Human
cccauguacaucccacuccccaaa

SEQ ID NO: 609403 - RNA, 21 nt, Human
ccccaaacuaaaccaaagaac

SEQ ID NO: 609404 - RNA, 18 nt, Human
ccccaaccccaaacuaaa

SEQ ID NO: 609405 - RNA, 25 nt, Human
ccccaggucccagaacagacagaua

SEQ ID NO: 609406 - RNA, 21 nt, Human
cccccaaccccaaacuaaacc

SEQ ID NO: 609407 - RNA, 22 nt, Human
ccccucugcauagagccaggga

SEQ ID NO: 609408 - RNA, 23 nt, Human
ccugcugccucacuuggcugagc

SEQ ID NO: 609409 - RNA, 21 nt, Human
ccuguaaguaugugguggaga

SEQ ID NO: 609410 - RNA, 20 nt, Human
ccuuuuguacccuagccacc

SEQ ID NO: 609411 - RNA, 24 nt, Human
cggccccugccacagucuccagga

SEQ ID NO: 609412 - RNA, 19 nt, Human
cucaggcauacacaccaac

SEQ ID NO: 609413 - RNA, 19 nt, Human
cugcugggugaacaaugug

SEQ ID NO: 609414 - RNA, 21 nt, Human
cuuccuggcggccccugccac

SEQ ID NO: 609415 - RNA, 22 nt, Human
cuuccuggcggccccugccaca

SEQ ID NO: 609416 - RNA, 24 nt, Human
gaccacagaaggcuggaauuugua

SEQ ID NO: 609417 - RNA, 22 nt, Human
gagauccucugcaggucucugg

SEQ ID NO: 609418 - RNA, 18 nt, Human
gcacauaaauagaacgga

SEQ ID NO: 609419 - RNA, 19 nt, Human
gcccauguacaucccacuc

SEQ ID NO: 609420 - RNA, 22 nt, Human
gcccauguacaucccacucccc

SEQ ID NO: 609421 - RNA, 19 nt, Human
gccucgcaaggcaaacacu

SEQ ID NO: 609422 - RNA, 21 nt, Human
gcugagcucuccucuucagug

SEQ ID NO: 609423 - RNA, 20 nt, Human
gcugccccuccuuuuucagc

SEQ ID NO: 609424 - RNA, 23 nt, Human
ggaauccaagacagguauuccuc

SEQ ID NO: 609425 - RNA, 18 nt, Human
ggcagagucuuauccaca

SEQ ID NO: 609426 - RNA, 22 nt, Human
gggaaagaaaagcacccaauau

SEQ ID NO: 609427 - RNA, 20 nt, Human
gggucgugcuggcugugagg

SEQ ID NO: 609428 - RNA, 24 nt, Human
gucauacacuaccagcaggauuuc

SEQ ID NO: 609429 - RNA, 19 nt, Human
uacgaaacagaaagcaaga

SEQ ID NO: 609430 - RNA, 24 nt, Human
uagaaaagucuuuaaugcuaaaaa

SEQ ID NO: 609431 - RNA, 20 nt, Human
uagacuggguuaaacucaug

SEQ ID NO: 609432 - RNA, 24 nt, Human
uaucuaaaaggcugaaaaugguuu

SEQ ID NO: 609433 - RNA, 19 nt, Human
ucaaacgcccauguacauc

SEQ ID NO: 609434 - RNA, 18 nt, Human
ucaaguaucaccaaaucc

SEQ ID NO: 609435 - RNA, 22 nt, Human
ucacaauccccaggucccagaa

SEQ ID NO: 609436 - RNA, 18 nt, Human
ucacugggccccugugug

SEQ ID NO: 609437 - RNA, 19 nt, Human
ucagaauaaaaacauauug

SEQ ID NO: 609438 - RNA, 24 nt, Human
ucagcugcucuggaaagauucacc

SEQ ID NO: 609439 - RNA, 23 nt, Human
uccaguagggagaaagcugcagg

SEQ ID NO: 609440 - RNA, 19 nt, Human
uccaugcugagauuuucag

SEQ ID NO: 609441 - RNA, 19 nt, Human
ucccccaaccccaaacuaa

SEQ ID NO: 609442 - RNA, 24 nt, Human
ucccuaaauacuggcuuuugaucc

SEQ ID NO: 609443 - RNA, 20 nt, Human
uccgaucugacucagcagca

SEQ ID NO: 609444 - RNA, 19 nt, Human
uccugagaacacgccaggc

SEQ ID NO: 609445 - RNA, 20 nt, Human
ucuccaaggcuuccucguga

SEQ ID NO: 609446 - RNA, 18 nt, Human
ucuccuggccucuuauca

SEQ ID NO: 609447 - RNA, 18 nt, Human
ugaaaaugguuuuagguu

SEQ ID NO: 609448 - RNA, 18 nt, Human
ugacucagcagcagacag

SEQ ID NO: 609449 - RNA, 23 nt, Human
ugagaucaguggucuguguccag

SEQ ID NO: 609450 - RNA, 24 nt, Human
ugagaucaguggucuguguccagu

SEQ ID NO: 609451 - RNA, 23 nt, Human
ugagggaacccucacaaucccca

SEQ ID NO: 609452 - RNA, 21 nt, Human
ugagggcccucucgcugcaga

SEQ ID NO: 609453 - RNA, 24 nt, Human
ugcaggucucugguccaguaggga

SEQ ID NO: 609454 - RNA, 26 nt, Human
ugcaggucucugguccaguagggaga

SEQ ID NO: 609455 - RNA, 23 nt, Human
ugccaucagcaaagaauagaaaa

SEQ ID NO: 609456 - RNA, 20 nt, Human
ugccucacuuggcugagcuc

SEQ ID NO: 609457 - RNA, 21 nt, Human
uggaaucuuccggaaccgaga

SEQ ID NO: 609458 - RNA, 21 nt, Human
uggaggccccaacacaggccg

SEQ ID NO: 609459 - RNA, 18 nt, Human
uggcaaggggcuaaggaa

SEQ ID NO: 609460 - RNA, 21 nt, Human
uggcaaggggcuaaggaaucc

SEQ ID NO: 609461 - RNA, 19 nt, Human
uggcugagcucuccucuuc

SEQ ID NO: 609462 - RNA, 23 nt, Human
uggcugagcucuccucuucagug

SEQ ID NO: 609463 - RNA, 18 nt, Human
ugggugaacaaugugucc

SEQ ID NO: 609464 - RNA, 21 nt, Human
uguuauugaauguuuugcucu

SEQ ID NO: 609465 - RNA, 22 nt, Human
uuaaugcuaaaaacuggacaug

SEQ ID NO: 609466 - RNA, 19 nt, Human
uuauugaauguuuugcucu

SEQ ID NO: 609467 - RNA, 19 nt, Human
uuccucugcccacaucucc

SEQ ID NO: 609468 - RNA, 24 nt, Human
uucucagaggaaugcucucgggug

SEQ ID NO: 609469 - RNA, 19 nt, Human
uugcaccucccaguucugc

SEQ ID NO: 609470 - RNA, 23 nt, Human
uuuaaugcuaaaaacuggacaug

SEQ ID NO: 609471 - RNA, 23 nt, Human
uuuuuuuuuuuuuuuuuagcagg

SEQ ID NO: 609472 - RNA, 22 nt, Human
aaaaaaaaaaaauugccgagga

SEQ ID NO: 609473 - RNA, 22 nt, Human
aaaacaggagauggaaaggccc

SEQ ID NO: 609474 - RNA, 18 nt, Human
aaaagccaaaggccucug

SEQ ID NO: 609475 - RNA, 19 nt, Human
aaaagcccccagaccugga

SEQ ID NO: 609476 - RNA, 22 nt, Human
aaacaggagauggaaaggccca

SEQ ID NO: 609477 - RNA, 25 nt, Human
aaacaggagauggaaaggcccaggg

SEQ ID NO: 609478 - RNA, 23 nt, Human
aaacauccuuccaaaaggucccc

SEQ ID NO: 609479 - RNA, 20 nt, Human
aaccacagagaauaaacauc

SEQ ID NO: 609480 - RNA, 22 nt, Human
aaccuccugcuccagaaaugcc

SEQ ID NO: 609481 - RNA, 24 nt, Human
aacugaaaaaguaagcccaagcau

SEQ ID NO: 609482 - RNA, 25 nt, Human
aagcccccagaccuggagggagcag

SEQ ID NO: 609483 - RNA, 21 nt, Human
aaguaagcccaagcaugauua

SEQ ID NO: 609484 - RNA, 22 nt, Human
aaguacaaugggucuauacuga

SEQ ID NO: 609485 - RNA, 18 nt, Human
aagucaaauccagauaga

SEQ ID NO: 609486 - RNA, 27 nt, Human
acacacgcaugcaugcacauaugcuua

SEQ ID NO: 609487 - RNA, 21 nt, Human
acagagaauaaacauccuucc

SEQ ID NO: 609488 - RNA, 20 nt, Human
acauucccagagcccugcug

SEQ ID NO: 609489 - RNA, 21 nt, Human
agagcccugcugaguaggggc

SEQ ID NO: 609490 - RNA, 18 nt, Human
agcacuguaaagcaugga

SEQ ID NO: 609491 - RNA, 23 nt, Human
agcuguuaucagugagaccgaca

SEQ ID NO: 609492 - RNA, 22 nt, Human
aggagauggaaaggcccagggg

SEQ ID NO: 609493 - RNA, 20 nt, Human
aggcucaaugaaagacaggg

SEQ ID NO: 609494 - RNA, 20 nt, Human
auaaagcaagagccccccuc

SEQ ID NO: 609495 - RNA, 24 nt, Human
auaaauacuagucucaaauguuaa

SEQ ID NO: 609496 - RNA, 18 nt, Human
aucaguuacauaaauuau

SEQ ID NO: 609497 - RNA, 22 nt, Human
auccugaaccacuuccagucuc

SEQ ID NO: 609498 - RNA, 19 nt, Human
augcuagaaauucucagca

SEQ ID NO: 609499 - RNA, 20 nt, Human
caagagcacaauucuaaucc

SEQ ID NO: 609500 - RNA, 19 nt, Human
caagcuuuuugacuuaaaa

SEQ ID NO: 609501 - RNA, 21 nt, Human
caagguggauaaaagccccca

SEQ ID NO: 609502 - RNA, 24 nt, Human
caauucuaaucaaucauauuucaa

SEQ ID NO: 609503 - RNA, 27 nt, Human
cacauaugcuuaaccuuacaaacugaa

SEQ ID NO: 609504 - RNA, 24 nt, Human
caccaaaauaaagagguuuacaac

SEQ ID NO: 609505 - RNA, 23 nt, Human
caccguggcagcuuagacugauc

SEQ ID NO: 609506 - RNA, 24 nt, Human
cagaaagugaccauuaggcaacug

SEQ ID NO: 609507 - RNA, 24 nt, Human
cagagggggagccuugucuuuuuu

SEQ ID NO: 609508 - RNA, 24 nt, Human
cagcaauucugaaacuaaaauaag

SEQ ID NO: 609509 - RNA, 19 nt, Human
cagcaccgugccaaggccu

SEQ ID NO: 609510 - RNA, 24 nt, Human
cagcacuguaaagcauggaaacau

SEQ ID NO: 609511 - RNA, 20 nt, Human
caggacaguacccuaaagga

SEQ ID NO: 609512 - RNA, 18 nt, Human
cauaaaccuccacaucac

SEQ ID NO: 609513 - RNA, 21 nt, Human
caucacuaggaaccuaaaggg

SEQ ID NO: 609514 - RNA, 31 nt, Human
cauuuauauacacacgcaugcaugcacauag

SEQ ID NO: 609515 - RNA, 19 nt, Human
ccagagcccugcugaguag

SEQ ID NO: 609516 - RNA, 25 nt, Human
ccagucucuuuucccaggagcucug

SEQ ID NO: 609517 - RNA, 20 nt, Human
ccccaagugcuucacaugcu

SEQ ID NO: 609518 - RNA, 19 nt, Human
ccccagugcagcuuuuccu

SEQ ID NO: 609519 - RNA, 18 nt, Human
ccgugcuugcguuucucu

SEQ ID NO: 609520 - RNA, 21 nt, Human
ccugggucaaaagccaaaggc

SEQ ID NO: 609521 - RNA, 22 nt, Human
ccuuccaaaagguccugcccac

SEQ ID NO: 609522 - RNA, 22 nt, Human
cgaugguaaaaaguuguaaacu

SEQ ID NO: 609523 - RNA, 20 nt, Human
cuccaaaggccaacacaucc

SEQ ID NO: 609524 - RNA, 26 nt, Human
cuccagccucgcggcccuccuggguc

SEQ ID NO: 609525 - RNA, 23 nt, Human
cuuagacugaucuucaccuucuc

SEQ ID NO: 609526 - RNA, 24 nt, Human
cuuaggaugaaaaugaaauaacuc

SEQ ID NO: 609527 - RNA, 20 nt, Human
gaaaggcccagagaugagga

SEQ ID NO: 609528 - RNA, 18 nt, Human
gaacuccaaaggccaaca

SEQ ID NO: 609529 - RNA, 18 nt, Human
gacagggcagcuccagcc

SEQ ID NO: 609530 - RNA, 18 nt, Human
gaggaguucccucuccac

SEQ ID NO: 609531 - RNA, 21 nt, Human
gaucugagucaggcuggcaag

SEQ ID NO: 609532 - RNA, 20 nt, Human
ggaaaugcuaaggcucaaug

SEQ ID NO: 609533 - RNA, 21 nt, Human
ggagauggaaaggcccagggg

SEQ ID NO: 609534 - RNA, 23 nt, Human
gggcagcuccagccucgcggccc

SEQ ID NO: 609535 - RNA, 29 nt, Human
guccugcccacaucuccccucucucccaa

SEQ ID NO: 609536 - RNA, 20 nt, Human
gucucuuuucccaggagcuc

SEQ ID NO: 609537 - RNA, 18 nt, Human
uaaaccuccacaucacua

SEQ ID NO: 609538 - RNA, 22 nt, Human
uaaccacagagaauaaacaucc

SEQ ID NO: 609539 - RNA, 21 nt, Human
uaaggcucaaugaaagacagg

SEQ ID NO: 609540 - RNA, 19 nt, Human
uaauugaugacugcucucc

SEQ ID NO: 609541 - RNA, 21 nt, Human
uaauugaugacugcucuccuc

SEQ ID NO: 609542 - RNA, 18 nt, Human
uacacaagccauuguggg

SEQ ID NO: 609543 - RNA, 18 nt, Human
uacagucuauuuacugca

SEQ ID NO: 609544 - RNA, 24 nt, Human
uaggaaagcaugaugagaaagucc

SEQ ID NO: 609545 - RNA, 25 nt, Human
uauacacacgcaugcaugcacauau

SEQ ID NO: 609546 - RNA, 21 nt, Human
uauacacacgcaugcauggug

SEQ ID NO: 609547 - RNA, 20 nt, Human
uauauacacacgcaugcaug

SEQ ID NO: 609548 - RNA, 22 nt, Human
ucaccccacugaaaaugaacag

SEQ ID NO: 609549 - RNA, 19 nt, Human
uccaacaucggagggagaa

SEQ ID NO: 609550 - RNA, 20 nt, Human
uccucacccaccaguggggu

SEQ ID NO: 609551 - RNA, 24 nt, Human
uccugggucaaaagccaaaggccu

SEQ ID NO: 609552 - RNA, 21 nt, Human
uccuuccaaaagguccugccc

SEQ ID NO: 609553 - RNA, 18 nt, Human
ucuccccaccccagugca

SEQ ID NO: 609554 - RNA, 19 nt, Human
ucucucacacaacgggaga

SEQ ID NO: 609555 - RNA, 24 nt, Human
ucuggagcuguuaucagugagacc

SEQ ID NO: 609556 - RNA, 19 nt, Human
ugaagacucaccccacuga

SEQ ID NO: 609557 - RNA, 18 nt, Human
ugacuuaaaaaaaaaaaa

SEQ ID NO: 609558 - RNA, 21 nt, Human
ugagaggaagccugagaggga

SEQ ID NO: 609559 - RNA, 21 nt, Human
ugagagggaaaugcuaaggcu

SEQ ID NO: 609560 - RNA, 24 nt, Human
ugagcuugagaggaagccugagag

SEQ ID NO: 609561 - RNA, 21 nt, Human
ugcacaaauaucaaaugugua

SEQ ID NO: 609562 - RNA, 19 nt, Human
ugcuaccuacugaugcucc

SEQ ID NO: 609563 - RNA, 22 nt, Human
ugcuccagaaaugccaggagca

SEQ ID NO: 609564 - RNA, 18 nt, Human
ugcugaguaggggcuuca

SEQ ID NO: 609565 - RNA, 24 nt, Human
uggacauuucucucccaucacucu

SEQ ID NO: 609566 - RNA, 18 nt, Human
uguaaacuggcuaacagu

SEQ ID NO: 609567 - RNA, 21 nt, Human
uguccugacaaccuccugcuc

SEQ ID NO: 609568 - RNA, 20 nt, Human
uguuugaaauucucagcaga

SEQ ID NO: 609569 - RNA, 22 nt, Human
uuaaguacaaugggucuauacu

SEQ ID NO: 609570 - RNA, 25 nt, Human
uugcuaccuacugaugcuccauuug

SEQ ID NO: 609571 - RNA, 18 nt, Human
uuguguuuuuagugugaa

SEQ ID NO: 609572 - RNA, 23 nt, Human
uuuacaacaacgguuuccccuua

SEQ ID NO: 609573 - RNA, 18 nt, Human
uuuguuugaaauucucag

SEQ ID NO: 609574 - RNA, 26 nt, Human
uuuuccaugcuuccuggagaauccuc

SEQ ID NO: 609575 - RNA, 22 nt, Human
uuuucuggagcuguuaucagug

SEQ ID NO: 609576 - RNA, 20 nt, Human
uuuuggacauuucucuccca

SEQ ID NO: 609577 - RNA, 24 nt, Human
aaagugcugggauuacaggcguga

SEQ ID NO: 609578 - RNA, 19 nt, Human
aagugcugggauuacaggc

SEQ ID NO: 609579 - RNA, 19 nt, Human
aagugcugggauuacaggc

SEQ ID NO: 609580 - RNA, 26 nt, Human
aagugcugggauuacaggcgugagcc

SEQ ID NO: 609581 - RNA, 18 nt, Human
accagcagaugcugggac

SEQ ID NO: 609582 - RNA, 18 nt, Human
acucuaccccagagaggg

SEQ ID NO: 609583 - RNA, 19 nt, Human
agagaugggguuucaccgu

SEQ ID NO: 609584 - RNA, 20 nt, Human
aggaggcccugaggugagga

SEQ ID NO: 609585 - RNA, 18 nt, Human
aguagagaugggguuuca

SEQ ID NO: 609586 - RNA, 20 nt, Human
aguagagaugggguuucacc

SEQ ID NO: 609587 - RNA, 21 nt, Human
aguagagaugggguuucaccg

SEQ ID NO: 609588 - RNA, 23 nt, Human
aguagagaugggguuucaccgug

SEQ ID NO: 609589 - RNA, 24 nt, Human
aguagagaugggguuucaccgugu

SEQ ID NO: 609590 - RNA, 24 nt, Human
augauccgcccgccucggccuccc

SEQ ID NO: 609591 - RNA, 19 nt, Human
augcuaccaucucagcauc

SEQ ID NO: 609592 - RNA, 19 nt, Human
augggguuucaccguguua

SEQ ID NO: 609593 - RNA, 20 nt, Human
augggguuucaccguguuag

SEQ ID NO: 609594 - RNA, 24 nt, Human
augggguuucaccguguuagccag

SEQ ID NO: 609595 - RNA, 19 nt, Human
auuucuaugcuaccaucuc

SEQ ID NO: 609596 - RNA, 24 nt, Human
caaagugcugggauuacaggcgug

SEQ ID NO: 609597 - RNA, 20 nt, Human
cacagugcuugguuuugcac

SEQ ID NO: 609598 - RNA, 18 nt, Human
caccguguuagccagggu

SEQ ID NO: 609599 - RNA, 24 nt, Human
caccguguuagccaggguggucuu

SEQ ID NO: 609600 - RNA, 24 nt, Human
cagcacucugggcacaaugacacu

SEQ ID NO: 609601 - RNA, 24 nt, Human
cagcaggccucaccuugcagcacu

SEQ ID NO: 609602 - RNA, 20 nt, Human
ccaaagugcugggauuacag

SEQ ID NO: 609603 - RNA, 22 nt, Human
ccaaagugcugggauuacaggc

SEQ ID NO: 609604 - RNA, 22 nt, Human
ccaaagugcugggauuacaggc

SEQ ID NO: 609605 - RNA, 24 nt, Human
ccaaagugcugggauuacaggcgu

SEQ ID NO: 609606 - RNA, 23 nt, Human
cccacagugcuugguuuugcacu

SEQ ID NO: 609607 - RNA, 23 nt, Human
cccaccagacagguuuaaagagg

SEQ ID NO: 609608 - RNA, 19 nt, Human
cccagggguucugguuggg

SEQ ID NO: 609609 - RNA, 18 nt, Human
cucaugauccgcccgccu

SEQ ID NO: 609610 - RNA, 24 nt, Human
cuccugaccucaugauccgcccgc

SEQ ID NO: 609611 - RNA, 19 nt, Human
cuggccgggcagugugcug

SEQ ID NO: 609612 - RNA, 26 nt, Human
gaaaccucuucauucacagggcacuc

SEQ ID NO: 609613 - RNA, 22 nt, Human
gaccucaugauccgcccgccuc

SEQ ID NO: 609614 - RNA, 24 nt, Human
gagaugggguuucaccguguuagc

SEQ ID NO: 609615 - RNA, 22 nt, Human
gaggggaggggugccacuuccu

SEQ ID NO: 609616 - RNA, 20 nt, Human
gaggugaggauaucuggggg

SEQ ID NO: 609617 - RNA, 18 nt, Human
gauuacaggcgugagcca

SEQ ID NO: 609618 - RNA, 22 nt, Human
gauuacaggcgugagccaccgc

SEQ ID NO: 609619 - RNA, 22 nt, Human
gauuacaggcgugagccaccgc

SEQ ID NO: 609620 - RNA, 23 nt, Human
gccucggccucccaaagugcugg

SEQ ID NO: 609621 - RNA, 21 nt, Human
ggcagugugcugggcccugcc

SEQ ID NO: 609622 - RNA, 22 nt, Human
gggguuucaccguguuagccag

SEQ ID NO: 609623 - RNA, 22 nt, Human
ggguuucaccguguuagccagg

SEQ ID NO: 609624 - RNA, 23 nt, Human
gguggucuugaucuccugaccuc

SEQ ID NO: 609625 - RNA, 21 nt, Human
ggugguucuuggagaacauau

SEQ ID NO: 609626 - RNA, 19 nt, Human
guagagaugggguuucacc

SEQ ID NO: 609627 - RNA, 23 nt, Human
uacaggcgugagccaccgcgccc

SEQ ID NO: 609628 - RNA, 23 nt, Human
uaccccagagagggaaacaccau

SEQ ID NO: 609629 - RNA, 22 nt, Human
uaggaggacuggccgggcagug

SEQ ID NO: 609630 - RNA, 24 nt, Human
ucaccguguuagccaggguggucu

SEQ ID NO: 609631 - RNA, 24 nt, Human
ucaccuugcagcacucugggcaca

SEQ ID NO: 609632 - RNA, 21 nt, Human
uccacuguagucucuaggaug

SEQ ID NO: 609633 - RNA, 24 nt, Human
ucccaaagugcugggauuacaggc

SEQ ID NO: 609634 - RNA, 23 nt, Human
ucccagggguucugguugggacu

SEQ ID NO: 609635 - RNA, 18 nt, Human
ucggccucccaaagugcu

SEQ ID NO: 609636 - RNA, 20 nt, Human
ugaggagacagaccaggugg

SEQ ID NO: 609637 - RNA, 21 nt, Human
ugaggugaggauaucuggggg

SEQ ID NO: 609638 - RNA, 24 nt, Human
ugcugggauuacaggcgugagcca

SEQ ID NO: 609639 - RNA, 18 nt, Human
ugcuugguuuugcacuca

SEQ ID NO: 609640 - RNA, 21 nt, Human
uggccgggcagugugcugggc

SEQ ID NO: 609641 - RNA, 18 nt, Human
ugggauuacaggcgugag

SEQ ID NO: 609642 - RNA, 19 nt, Human
ugggauuacaggcgugagc

SEQ ID NO: 609643 - RNA, 21 nt, Human
ugggauuacaggcgugagcca

SEQ ID NO: 609644 - RNA, 22 nt, Human
ugggauuacaggcgugagccac

SEQ ID NO: 609645 - RNA, 23 nt, Human
ugggauuacaggcgugagccacc

SEQ ID NO: 609646 - RNA, 24 nt, Human
ugggauuacaggcgugagccaccg

SEQ ID NO: 609647 - RNA, 27 nt, Human
uggggagcugcagagcuuagcagcugg

SEQ ID NO: 609648 - RNA, 24 nt, Human
ugggguuucaccguguuagccagg

SEQ ID NO: 609649 - RNA, 20 nt, Human
ugguucuuggagaacauaug

SEQ ID NO: 609650 - RNA, 21 nt, Human
uguggugaggggaggggugcc

SEQ ID NO: 609651 - RNA, 22 nt, Human
uguggugaggggaggggugcca

SEQ ID NO: 609652 - RNA, 18 nt, Human
uucaccguguuagccagg

SEQ ID NO: 609653 - RNA, 19 nt, Human
uuccucuuugcccagcgag

SEQ ID NO: 609654 - RNA, 19 nt, Human
uuccuggaggacgucucug

SEQ ID NO: 609655 - RNA, 19 nt, Human
uuucaccguguuagccagg

SEQ ID NO: 609656 - RNA, 20 nt, Human
uuugcaaaaaaaggaggccu

SEQ ID NO: 609657 - RNA, 18 nt, Human
aaaggccacugaccaagu

SEQ ID NO: 609658 - RNA, 18 nt, Human
aaaggccacugaccaagu

SEQ ID NO: 609659 - RNA, 22 nt, Human
aaggcauccccacacccucccu

SEQ ID NO: 609660 - RNA, 19 nt, Human
acaccgauguccccacaga

SEQ ID NO: 609661 - RNA, 21 nt, Human
acaccgauguccccacagaca

SEQ ID NO: 609662 - RNA, 24 nt, Human
acaucauucacugagaauuuccaa

SEQ ID NO: 609663 - RNA, 18 nt, Human
acccaggcuucugccugg

SEQ ID NO: 609664 - RNA, 19 nt, Human
acccugaggacgacgaagg

SEQ ID NO: 609665 - RNA, 19 nt, Human
acccugaggacgacgaagg

SEQ ID NO: 609666 - RNA, 19 nt, Human
acccugcagggcccagucc

SEQ ID NO: 609667 - RNA, 21 nt, Human
acggcggcggggacuccgggc

SEQ ID NO: 609668 - RNA, 19 nt, Human
agacccacccagacccugc

SEQ ID NO: 609669 - RNA, 20 nt, Human
aggcagcuccacuggugaaa

SEQ ID NO: 609670 - RNA, 20 nt, Human
aggcagcuccacuggugaaa

SEQ ID NO: 609671 - RNA, 19 nt, Human
aggcggugcaggcugggag

SEQ ID NO: 609672 - RNA, 19 nt, Human
aggcggugcaggcugggag

SEQ ID NO: 609673 - RNA, 20 nt, Human
aggcugggagcccugcccag

SEQ ID NO: 609674 - RNA, 20 nt, Human
aggcugggagcccugcccag

SEQ ID NO: 609675 - RNA, 25 nt, Human
agggggaaggaggaagaacuggggc

SEQ ID NO: 609676 - RNA, 25 nt, Human
agggggaaggaggaagaacuggggc

SEQ ID NO: 609677 - RNA, 20 nt, Human
aggguaggggaaggggagga

SEQ ID NO: 609678 - RNA, 26 nt, Human
caaguccagacccugaggacgacgaa

SEQ ID NO: 609679 - RNA, 26 nt, Human
caaguccagacccugaggacgacgaa

SEQ ID NO: 609680 - RNA, 20 nt, Human
cacacccucccuccccuuca

SEQ ID NO: 609681 - RNA, 27 nt, Human
cagcuccacuggugaaaggccacugac

SEQ ID NO: 609682 - RNA, 27 nt, Human
cagcuccacuggugaaaggccacugac

SEQ ID NO: 609683 - RNA, 18 nt, Human
caggccccuggcagccac

SEQ ID NO: 609684 - RNA, 18 nt, Human
caggccccuggcagccac

SEQ ID NO: 609685 - RNA, 23 nt, Human
caggcuucuacuuuggccccaca

SEQ ID NO: 609686 - RNA, 19 nt, Human
cauccuuggggcugggcuu

SEQ ID NO: 609687 - RNA, 25 nt, Human
caugucuugcuucauccuuggggcu

SEQ ID NO: 609688 - RNA, 23 nt, Human
ccacacccucccuccccuucaug

SEQ ID NO: 609689 - RNA, 21 nt, Human
ccagccccaguuugggucugu

SEQ ID NO: 609690 - RNA, 21 nt, Human
ccagccccaguuugggucugu

SEQ ID NO: 609691 - RNA, 25 nt, Human
ccaggcccaggccagucagucaccc

SEQ ID NO: 609692 - RNA, 25 nt, Human
ccaggcccaggccagucagucaccc

SEQ ID NO: 609693 - RNA, 22 nt, Human
cccacacccucccuccccuuca

SEQ ID NO: 609694 - RNA, 27 nt, Human
cccagaggcccaagaaggccauggacu

SEQ ID NO: 609695 - RNA, 27 nt, Human
cccagaggcccaagaaggccauggacu

SEQ ID NO: 609696 - RNA, 18 nt, Human
cccagccccaguuugggu

SEQ ID NO: 609697 - RNA, 23 nt, Human
ccccacacccucccuccccuuca

SEQ ID NO: 609698 - RNA, 27 nt, Human
ccccuggcagccacgaggagcagaggc

SEQ ID NO: 609699 - RNA, 27 nt, Human
ccccuggcagccacgaggagcagaggc

SEQ ID NO: 609700 - RNA, 18 nt, Human
cccuucacaccgaugucc

SEQ ID NO: 609701 - RNA, 19 nt, Human
cccuucacaccgauguccc

SEQ ID NO: 609702 - RNA, 22 nt, Human
ccuggccuccccuggggguggg

SEQ ID NO: 609703 - RNA, 18 nt, Human
ccugggaaagggggaagg

SEQ ID NO: 609704 - RNA, 18 nt, Human
ccugggaaagggggaagg

SEQ ID NO: 609705 - RNA, 19 nt, Human
ccuucucccugggaaggca

SEQ ID NO: 609706 - RNA, 19 nt, Human
ccuucucccugggaaggca

SEQ ID NO: 609707 - RNA, 18 nt, Human
cggggcagaagccugaga

SEQ ID NO: 609708 - RNA, 19 nt, Human
cuacuuuggccccacagcc

SEQ ID NO: 609709 - RNA, 23 nt, Human
cucccgcagcccgcaggcuucua

SEQ ID NO: 609710 - RNA, 22 nt, Human
cugccuggccuccccugggggu

SEQ ID NO: 609711 - RNA, 23 nt, Human
cuucccugccccaugugacaccu

SEQ ID NO: 609712 - RNA, 23 nt, Human
cuucccugccccaugugacaccu

SEQ ID NO: 609713 - RNA, 21 nt, Human
cuucccuucacaccgaugucc

SEQ ID NO: 609714 - RNA, 18 nt, Human
gaacagaggcagaggagg

SEQ ID NO: 609715 - RNA, 18 nt, Human
gaacagaggcagaggagg

SEQ ID NO: 609716 - RNA, 21 nt, Human
gaggcccagccccaguuuggg

SEQ ID NO: 609717 - RNA, 21 nt, Human
gaggcccagccccaguuuggg

SEQ ID NO: 609718 - RNA, 24 nt, Human
gaggcccagccccaguuugggucu

SEQ ID NO: 609719 - RNA, 24 nt, Human
gaggcccagccccaguuugggucu

SEQ ID NO: 609720 - RNA, 20 nt, Human
gcaaggcauccccacacccu

SEQ ID NO: 609721 - RNA, 25 nt, Human
gcaaggcauccccacacccucccuc

SEQ ID NO: 609722 - RNA, 22 nt, Human
gcagcuccacuggugaaaggcc

SEQ ID NO: 609723 - RNA, 22 nt, Human
gcagcuccacuggugaaaggcc

SEQ ID NO: 609724 - RNA, 19 nt, Human
gcccagccccaguuugggu

SEQ ID NO: 609725 - RNA, 20 nt, Human
gcuacggccccacaugucuu

SEQ ID NO: 609726 - RNA, 20 nt, Human
gcuacggccccacaugucuu

SEQ ID NO: 609727 - RNA, 21 nt, Human
gcugugacccaggcuucugcc

SEQ ID NO: 609728 - RNA, 22 nt, Human
gcugugacccaggcuucugccu

SEQ ID NO: 609729 - RNA, 25 nt, Human
ggaaagcuaugacccaguuugcuga

SEQ ID NO: 609730 - RNA, 25 nt, Human
ggaaagcuaugacccaguuugcuga

SEQ ID NO: 609731 - RNA, 23 nt, Human
ggauagaggcccagccccaguuu

SEQ ID NO: 609732 - RNA, 23 nt, Human
ggauagaggcccagccccaguuu

SEQ ID NO: 609733 - RNA, 22 nt, Human
ggccucggggcagaagccugag

SEQ ID NO: 609734 - RNA, 22 nt, Human
ggccucggggcagaagccugag

SEQ ID NO: 609735 - RNA, 24 nt, Human
ggcggcggggacuccgggcggggc

SEQ ID NO: 609736 - RNA, 21 nt, Human
gucugugcuggggcuggcaga

SEQ ID NO: 609737 - RNA, 21 nt, Human
gucugugcuggggcuggcaga

SEQ ID NO: 609738 - RNA, 22 nt, Human
ucagaacacuccagacagccga

SEQ ID NO: 609739 - RNA, 22 nt, Human
ucagaacacuccagacagccga

SEQ ID NO: 609740 - RNA, 20 nt, Human
ucagucacccaggcuacagc

SEQ ID NO: 609741 - RNA, 20 nt, Human
ucagucacccaggcuacagc

SEQ ID NO: 609742 - RNA, 21 nt, Human
ucauucacugagaauuuccaa

SEQ ID NO: 609743 - RNA, 21 nt, Human
uccccacacccucccuccccu

SEQ ID NO: 609744 - RNA, 22 nt, Human
uccccacacccucccuccccuu

SEQ ID NO: 609745 - RNA, 24 nt, Human
uccccacagacaggccugcugggc

SEQ ID NO: 609746 - RNA, 21 nt, Human
uccccaccccaggcccaggcc

SEQ ID NO: 609747 - RNA, 21 nt, Human
uccccaccccaggcccaggcc

SEQ ID NO: 609748 - RNA, 18 nt, Human
uccugggaaagggggaag

SEQ ID NO: 609749 - RNA, 21 nt, Human
uccugggaaagggggaaggag

SEQ ID NO: 609750 - RNA, 21 nt, Human
uccugggaaagggggaaggag

SEQ ID NO: 609751 - RNA, 20 nt, Human
uccuuggggcugggcuucug

SEQ ID NO: 609752 - RNA, 23 nt, Human
uccuuggggcugggcuucugguu

SEQ ID NO: 609753 - RNA, 22 nt, Human
ucugugcccagaggcccaagaa

SEQ ID NO: 609754 - RNA, 22 nt, Human
ucugugcccagaggcccaagaa

SEQ ID NO: 609755 - RNA, 22 nt, Human
ucugugcuggggcuggcagaac

SEQ ID NO: 609756 - RNA, 22 nt, Human
ucugugcuggggcuggcagaac

SEQ ID NO: 609757 - RNA, 19 nt, Human
ugacaccucgcuacggccc

SEQ ID NO: 609758 - RNA, 24 nt, Human
ugaccaaguccagacccugaggac

SEQ ID NO: 609759 - RNA, 24 nt, Human
ugaccaaguccagacccugaggac

SEQ ID NO: 609760 - RNA, 19 nt, Human
ugagagccgcucccgcagc

SEQ ID NO: 609761 - RNA, 20 nt, Human
ugagagccgcucccgcagcc

SEQ ID NO: 609762 - RNA, 22 nt, Human
ugagcuguggggaaagcuauga

SEQ ID NO: 609763 - RNA, 22 nt, Human
ugagcuguggggaaagcuauga

SEQ ID NO: 609764 - RNA, 21 nt, Human
ugcaucaagaggaggcucagg

SEQ ID NO: 609765 - RNA, 21 nt, Human
ugcaucaagaggaggcucagg

SEQ ID NO: 609766 - RNA, 21 nt, Human
ugcccagaggcccaagaaggc

SEQ ID NO: 609767 - RNA, 21 nt, Human
ugcccagaggcccaagaaggc

SEQ ID NO: 609768 - RNA, 21 nt, Human
ugcccaggccccaggcugagc

SEQ ID NO: 609769 - RNA, 21 nt, Human
ugcccaggccccaggcugagc

SEQ ID NO: 609770 - RNA, 23 nt, Human
ugccuagaccuguguaccagcgc

SEQ ID NO: 609771 - RNA, 23 nt, Human
ugccuagaccuguguaccagcgc

SEQ ID NO: 609772 - RNA, 21 nt, Human
uggaaccaugcaguucugggu

SEQ ID NO: 609773 - RNA, 26 nt, Human
uggcagugggaggcggugcaggcugg

SEQ ID NO: 609774 - RNA, 26 nt, Human
uggcagugggaggcggugcaggcugg

SEQ ID NO: 609775 - RNA, 19 nt, Human
uggccuccccugggggugg

SEQ ID NO: 609776 - RNA, 20 nt, Human
uggccuccccuggggguggg

SEQ ID NO: 609777 - RNA, 19 nt, Human
uggcucugugcccagaggc

SEQ ID NO: 609778 - RNA, 19 nt, Human
uggcucugugcccagaggc

SEQ ID NO: 609779 - RNA, 23 nt, Human
uggcuuggggacguccccacccc

SEQ ID NO: 609780 - RNA, 23 nt, Human
uggcuuggggacguccccacccc

SEQ ID NO: 609781 - RNA, 20 nt, Human
ugggaaggcagcuccacugg

SEQ ID NO: 609782 - RNA, 20 nt, Human
ugggaaggcagcuccacugg

SEQ ID NO: 609783 - RNA, 21 nt, Human
ugggaggcggugcaggcuggg

SEQ ID NO: 609784 - RNA, 21 nt, Human
ugggaggcggugcaggcuggg

SEQ ID NO: 609785 - RNA, 18 nt, Human
ugggccaggggccagcau

SEQ ID NO: 609786 - RNA, 19 nt, Human
ugggcuggccuuuccuggg

SEQ ID NO: 609787 - RNA, 19 nt, Human
ugggcuggccuuuccuggg

SEQ ID NO: 609788 - RNA, 18 nt, Human
ugggucugugcuggggcu

SEQ ID NO: 609789 - RNA, 18 nt, Human
ugggucugugcuggggcu

SEQ ID NO: 609790 - RNA, 24 nt, Human
ugggucugugcuggggcuggcaga

SEQ ID NO: 609791 - RNA, 24 nt, Human
ugggucugugcuggggcuggcaga

SEQ ID NO: 609792 - RNA, 18 nt, Human
uguaccagcgcucugggg

SEQ ID NO: 609793 - RNA, 18 nt, Human
uguaccagcgcucugggg

SEQ ID NO: 609794 - RNA, 21 nt, Human
ugugacaccucgcuacggccc

SEQ ID NO: 609795 - RNA, 19 nt, Human
uuccugggaaagggggaag

SEQ ID NO: 609796 - RNA, 20 nt, Human
uuggccccacagccccggag

SEQ ID NO: 609797 - RNA, 19 nt, Human
aaaaacacacacacacaac

SEQ ID NO: 609798 - RNA, 23 nt, Human
aaaaacacacacacacaacuaca

SEQ ID NO: 609799 - RNA, 26 nt, Human
aaacguuuacaaacaaaaagauuuuc

SEQ ID NO: 609800 - RNA, 24 nt, Human
aaagugcugagauuacaggcauga

SEQ ID NO: 609801 - RNA, 24 nt, Human
aaagugcugggauuacagguguga

SEQ ID NO: 609802 - RNA, 24 nt, Human
aacaacauaccaagucaucacagg

SEQ ID NO: 609803 - RNA, 22 nt, Human
aacauaccaagucaucacagaa

SEQ ID NO: 609804 - RNA, 23 nt, Human
aacuccagugauccacccaccuc

SEQ ID NO: 609805 - RNA, 23 nt, Human
aagcgcggcggcagcagcgggcc

SEQ ID NO: 609806 - RNA, 24 nt, Human
aaguagcugggauuacaggcaggu

SEQ ID NO: 609807 - RNA, 26 nt, Human
aaguagcugggauuacaggcaggugc

SEQ ID NO: 609808 - RNA, 25 nt, Human
aagugauucuccugccucagccucc

SEQ ID NO: 609809 - RNA, 26 nt, Human
aagugcugagauuacaggcaugagcc

SEQ ID NO: 609810 - RNA, 18 nt, Human
aagugcugggauuacagg

SEQ ID NO: 609811 - RNA, 19 nt, Human
aagugcugggauuacaggu

SEQ ID NO: 609812 - RNA, 26 nt, Human
aagugcugggauuacaggugugagcc

SEQ ID NO: 609813 - RNA, 24 nt, Human
acaaacaaaaagauuuucgaugca

SEQ ID NO: 609814 - RNA, 22 nt, Human
acaggucagggaaccaaaacac

SEQ ID NO: 609815 - RNA, 23 nt, Human
accaaggcuggagugcaguggug

SEQ ID NO: 609816 - RNA, 24 nt, Human
accaaggcuggagugcaguggugu

SEQ ID NO: 609817 - RNA, 22 nt, Human
acccaggcuggagugcacaauu

SEQ ID NO: 609818 - RNA, 23 nt, Human
accucagccucccaaagugcuga

SEQ ID NO: 609819 - RNA, 24 nt, Human
accucgugauccgcccaucuuggc

SEQ ID NO: 609820 - RNA, 24 nt, Human
acuauguuggccaggcuggucucg

SEQ ID NO: 609821 - RNA, 25 nt, Human
acucugucaccaaggcuggagugca

SEQ ID NO: 609822 - RNA, 19 nt, Human
agagaugggguuucacuau

SEQ ID NO: 609823 - RNA, 21 nt, Human
agaguuaugcaccguccccuc

SEQ ID NO: 609824 - RNA, 19 nt, Human
agauuacaggcaugagcca

SEQ ID NO: 609825 - RNA, 22 nt, Human
agauuacaggcaugagccacca

SEQ ID NO: 609826 - RNA, 20 nt, Human
agccaccacgccuggcccca

SEQ ID NO: 609827 - RNA, 22 nt, Human
agcggcgggagcccagcgcaca

SEQ ID NO: 609828 - RNA, 23 nt, Human
aggaaccccagggcuucugaugg

SEQ ID NO: 609829 - RNA, 23 nt, Human
aggcaaaaacacacacacacaac

SEQ ID NO: 609830 - RNA, 25 nt, Human
aggcuggagugcaguggugugaucu

SEQ ID NO: 609831 - RNA, 22 nt, Human
aguagagaugggguuucaccau

SEQ ID NO: 609832 - RNA, 19 nt, Human
agugauccacccaccucag

SEQ ID NO: 609833 - RNA, 19 nt, Human
agugcaguggugugaucuc

SEQ ID NO: 609834 - RNA, 21 nt, Human
agugcaguggugugaucucag

SEQ ID NO: 609835 - RNA, 23 nt, Human
agugcaguggugugaucucagcu

SEQ ID NO: 609836 - RNA, 24 nt, Human
agugcaguggugugaucucagcuc

SEQ ID NO: 609837 - RNA, 23 nt, Human
agugggaacuugguuuuguuuug

SEQ ID NO: 609838 - RNA, 18 nt, Human
aguggugugaucucagcu

SEQ ID NO: 609839 - RNA, 21 nt, Human
augagccaccacgccuggccc

SEQ ID NO: 609840 - RNA, 24 nt, Human
augauucucgcgggcucccugucc

SEQ ID NO: 609841 - RNA, 22 nt, Human
augggguuucaccauguuggcc

SEQ ID NO: 609842 - RNA, 23 nt, Human
augggguuucaccauguuggcca

SEQ ID NO: 609843 - RNA, 24 nt, Human
augggguuucaccauguuggccag

SEQ ID NO: 609844 - RNA, 24 nt, Human
augggguuucacuauguuggccag

SEQ ID NO: 609845 - RNA, 24 nt, Human
auuucuguauuuuuaguagagaug

SEQ ID NO: 609846 - RNA, 18 nt, Human
caaaauauucccuagaaa

SEQ ID NO: 609847 - RNA, 24 nt, Human
caaagugcugagauuacaggcaug

SEQ ID NO: 609848 - RNA, 24 nt, Human
caaagugcugggauuacaggugug

SEQ ID NO: 609849 - RNA, 22 nt, Human
caagugauucuccugccucagc

SEQ ID NO: 609850 - RNA, 24 nt, Human
cacacacacaacuacaaaauauuc

SEQ ID NO: 609851 - RNA, 22 nt, Human
caccaacagucugguccugucc

SEQ ID NO: 609852 - RNA, 24 nt, Human
caccaaggcuggagugcaguggug

SEQ ID NO: 609853 - RNA, 20 nt, Human
caccacaacuucugccuccc

SEQ ID NO: 609854 - RNA, 21 nt, Human
caccacaacuucugccuccca

SEQ ID NO: 609855 - RNA, 22 nt, Human
caccacaacuucugccucccag

SEQ ID NO: 609856 - RNA, 18 nt, Human
caccauguuggccagggu

SEQ ID NO: 609857 - RNA, 22 nt, Human
caccauguuggccagggugguc

SEQ ID NO: 609858 - RNA, 24 nt, Human
caccauguuggccaggguggucuc

SEQ ID NO: 609859 - RNA, 22 nt, Human
cacccaccucagccucccaaag

SEQ ID NO: 609860 - RNA, 23 nt, Human
cacccaccucagccucccaaagu

SEQ ID NO: 609861 - RNA, 23 nt, Human
cacgccuggccccaaacugacuc

SEQ ID NO: 609862 - RNA, 20 nt, Human
cacggcccucagaugacaga

SEQ ID NO: 609863 - RNA, 21 nt, Human
cacuauguuggccaggcuggu

SEQ ID NO: 609864 - RNA, 24 nt, Human
cacuauguuggccaggcuggucuc

SEQ ID NO: 609865 - RNA, 24 nt, Human
cacucugucaccaaggcuggagug

SEQ ID NO: 609866 - RNA, 22 nt, Human
cacugcuuggggaauaauucca

SEQ ID NO: 609867 - RNA, 18 nt, Human
cagcagccugaggagcug

SEQ ID NO: 609868 - RNA, 24 nt, Human
caggcugcaggaacuggaugcuaa

SEQ ID NO: 609869 - RNA, 19 nt, Human
cagggacacggcccucaga

SEQ ID NO: 609870 - RNA, 20 nt, Human
caggugccaccaugccuggc

SEQ ID NO: 609871 - RNA, 24 nt, Human
caggugugagccacugugccuggc

SEQ ID NO: 609872 - RNA, 20 nt, Human
caugugccacagaaauagag

SEQ ID NO: 609873 - RNA, 23 nt, Human
caugugccacagaaauagagcuu

SEQ ID NO: 609874 - RNA, 23 nt, Human
ccaaagugcugagauuacaggca

SEQ ID NO: 609875 - RNA, 24 nt, Human
ccaaagugcugagauuacaggcau

SEQ ID NO: 609876 - RNA, 21 nt, Human
ccaaagugcugggauuacagg

SEQ ID NO: 609877 - RNA, 21 nt, Human
ccaaagugcugggauuacagg

SEQ ID NO: 609878 - RNA, 24 nt, Human
ccaaagugcugggauuacaggugu

SEQ ID NO: 609879 - RNA, 23 nt, Human
ccaacccugacgugcagggcaga

SEQ ID NO: 609880 - RNA, 20 nt, Human
ccaaggcaaaaacacacaca

SEQ ID NO: 609881 - RNA, 23 nt, Human
ccaaguagcugggauuacaggca

SEQ ID NO: 609882 - RNA, 18 nt, Human
ccaagucaucacagaaga

SEQ ID NO: 609883 - RNA, 23 nt, Human
ccacaacuucugccucccagguu

SEQ ID NO: 609884 - RNA, 24 nt, Human
ccacaacuucugccucccagguuc

SEQ ID NO: 609885 - RNA, 20 nt, Human
ccacagugaccccagcuuuu

SEQ ID NO: 609886 - RNA, 26 nt, Human
ccacccaccucagccucccaaagugc

SEQ ID NO: 609887 - RNA, 24 nt, Human
ccaccuccugggcucaagugauuc

SEQ ID NO: 609888 - RNA, 19 nt, Human
ccacugugccuggccgggg

SEQ ID NO: 609889 - RNA, 23 nt, Human
ccagagcucacggccgucugcac

SEQ ID NO: 609890 - RNA, 22 nt, Human
ccaggaacuugugaacugcuaa

SEQ ID NO: 609891 - RNA, 19 nt, Human
ccaggcugcaggaacugga

SEQ ID NO: 609892 - RNA, 19 nt, Human
ccagugauccacccaccuc

SEQ ID NO: 609893 - RNA, 27 nt, Human
ccagugauccacccaccucagccuccc

SEQ ID NO: 609894 - RNA, 23 nt, Human
cccaaguagcugggauuacaggc

SEQ ID NO: 609895 - RNA, 24 nt, Human
cccaaguagcugggauuacaggca

SEQ ID NO: 609896 - RNA, 21 nt, Human
cccagguucaagcaauucgcc

SEQ ID NO: 609897 - RNA, 23 nt, Human
cccagguucaagcaauucgccug

SEQ ID NO: 609898 - RNA, 22 nt, Human
cccaucuuggccucccaaagug

SEQ ID NO: 609899 - RNA, 18 nt, Human
ccccagggcuucugaugg

SEQ ID NO: 609900 - RNA, 21 nt, Human
cccuagaaaaaugcaagaucc

SEQ ID NO: 609901 - RNA, 18 nt, Human
ccggggcccgagacgggc

SEQ ID NO: 609902 - RNA, 22 nt, Human
ccuccaccuccugggcucaagu

SEQ ID NO: 609903 - RNA, 21 nt, Human
ccucccagguucaagcaauuc

SEQ ID NO: 609904 - RNA, 21 nt, Human
ccuccugggcucaagugauuc

SEQ ID NO: 609905 - RNA, 24 nt, Human
ccuccugggcucaagugauucucc

SEQ ID NO: 609906 - RNA, 20 nt, Human
ccugaggagcugggacuaca

SEQ ID NO: 609907 - RNA, 23 nt, Human
ccugaggagcugggacuacaggc

SEQ ID NO: 609908 - RNA, 24 nt, Human
ccugaggagcugggacuacaggca

SEQ ID NO: 609909 - RNA, 23 nt, Human
ccugccucagccucccaaguagc

SEQ ID NO: 609910 - RNA, 24 nt, Human
ccuggccccaaacugacucuugac

SEQ ID NO: 609911 - RNA, 23 nt, Human
ccugggcucaagugauucuccuc

SEQ ID NO: 609912 - RNA, 23 nt, Human
ccugggcucaagugauucuccug

SEQ ID NO: 609913 - RNA, 18 nt, Human
cgacaccaugcccggcua

SEQ ID NO: 609914 - RNA, 24 nt, Human
cgcucuguuacccaggcuggagug

SEQ ID NO: 609915 - RNA, 24 nt, Human
cggcucacggggggccaggaaccc

SEQ ID NO: 609916 - RNA, 20 nt, Human
cgggagcccagcgcacagag

SEQ ID NO: 609917 - RNA, 23 nt, Human
cggggggccaggaaccccagggc

SEQ ID NO: 609918 - RNA, 24 nt, Human
cuaacauaaacacaaaaacagguc

SEQ ID NO: 609919 - RNA, 23 nt, Human
cucaagugauucuccugccucag

SEQ ID NO: 609920 - RNA, 24 nt, Human
cucaagugauucuccugccucagc

SEQ ID NO: 609921 - RNA, 24 nt, Human
cucaccacaacuucugccucccag

SEQ ID NO: 609922 - RNA, 24 nt, Human
cucacucugucaccaaggcuggag

SEQ ID NO: 609923 - RNA, 24 nt, Human
cucagccucccaaguagcugggau

SEQ ID NO: 609924 - RNA, 21 nt, Human
cucccaaagugcugagauuac

SEQ ID NO: 609925 - RNA, 22 nt, Human
cuccugaccucgugauccgccc

SEQ ID NO: 609926 - RNA, 21 nt, Human
cuccugggcucaagugauucu

SEQ ID NO: 609927 - RNA, 25 nt, Human
cuccugggcucaagugauucuccug

SEQ ID NO: 609928 - RNA, 18 nt, Human
cucgcgggcucccugucu

SEQ ID NO: 609929 - RNA, 24 nt, Human
cucgcucuguuacccaggcuggag

SEQ ID NO: 609930 - RNA, 22 nt, Human
cucgcugaaaccuccaccuccu

SEQ ID NO: 609931 - RNA, 24 nt, Human
cucgcugaaaccuccaccuccugg

SEQ ID NO: 609932 - RNA, 21 nt, Human
cucuguuuagguuugcccaga

SEQ ID NO: 609933 - RNA, 24 nt, Human
cugaaaccuccaccuccugggcuc

SEQ ID NO: 609934 - RNA, 23 nt, Human
cugccucagccucccaaguagcu

SEQ ID NO: 609935 - RNA, 20 nt, Human
cugcuaaggggaugaccagg

SEQ ID NO: 609936 - RNA, 24 nt, Human
cuggagugcaguggugugaucuca

SEQ ID NO: 609937 - RNA, 23 nt, Human
cuguauuuuuaguagagaugggg

SEQ ID NO: 609938 - RNA, 20 nt, Human
gaauguuaucuggaaugcag

SEQ ID NO: 609939 - RNA, 19 nt, Human
gaccaaagaaucugauuug

SEQ ID NO: 609940 - RNA, 22 nt, Human
gaccaaggcaaaaacacacaca

SEQ ID NO: 609941 - RNA, 21 nt, Human
gaccucgugauccgcccaucu

SEQ ID NO: 609942 - RNA, 24 nt, Human
gaccucgugauccgcccaucuugg

SEQ ID NO: 609943 - RNA, 25 nt, Human
gaccucgugauccgcccaucuuggc

SEQ ID NO: 609944 - RNA, 18 nt, Human
gagaugggguuucaccau

SEQ ID NO: 609945 - RNA, 24 nt, Human
gagaugggguuucaccauguuggc

SEQ ID NO: 609946 - RNA, 20 nt, Human
gagaugggguuucacuaugu

SEQ ID NO: 609947 - RNA, 24 nt, Human
gagaugggguuucacuauguuggc

SEQ ID NO: 609948 - RNA, 22 nt, Human
gagccaccacgccuggccccaa

SEQ ID NO: 609949 - RNA, 25 nt, Human
gagcgguagcacguagcgcggguaa

SEQ ID NO: 609950 - RNA, 21 nt, Human
gaugacagacuccaggaagaa

SEQ ID NO: 609951 - RNA, 24 nt, Human
gauuacaggcaggugccaccaugc

SEQ ID NO: 609952 - RNA, 18 nt, Human
gauuacaggcaugagcca

SEQ ID NO: 609953 - RNA, 22 nt, Human
gauuacaggcaugagccaccac

SEQ ID NO: 609954 - RNA, 18 nt, Human
gauuacaggugugagcca

SEQ ID NO: 609955 - RNA, 19 nt, Human
gauuacaggugugagccac

SEQ ID NO: 609956 - RNA, 21 nt, Human
gauuacaggugugagccacug

SEQ ID NO: 609957 - RNA, 21 nt, Human
gauucuccugccucagccucc

SEQ ID NO: 609958 - RNA, 33 nt, Human
gcagccugaggagcugggacuacaggcacgccg

SEQ ID NO: 609959 - RNA, 18 nt, Human
gcaggcaacgcauccucc

SEQ ID NO: 609960 - RNA, 20 nt, Human
gcccagagcucacggccguc

SEQ ID NO: 609961 - RNA, 19 nt, Human
gcggacuggguccggggcc

SEQ ID NO: 609962 - RNA, 18 nt, Human
gcuaaggggaugaccagg

SEQ ID NO: 609963 - RNA, 26 nt, Human
gcucuguuacccaggcuggagugcac

SEQ ID NO: 609964 - RNA, 23 nt, Human
gcuggagugcacaaucucggcuc

SEQ ID NO: 609965 - RNA, 23 nt, Human
gcuggucucgaacuccugaccuc

SEQ ID NO: 609966 - RNA, 18 nt, Human
ggaagaaagagcaugaga

SEQ ID NO: 609967 - RNA, 19 nt, Human
ggaucuggguggaugccaa

SEQ ID NO: 609968 - RNA, 22 nt, Human
ggaugccaacccugacgugcag

SEQ ID NO: 609969 - RNA, 19 nt, Human
ggccaggguggucucaaac

SEQ ID NO: 609970 - RNA, 19 nt, Human
ggcgcgcagcagcggcggg

SEQ ID NO: 609971 - RNA, 19 nt, Human
ggcgggagcccagcgcaca

SEQ ID NO: 609972 - RNA, 22 nt, Human
ggcuggagugcaguggugugau

SEQ ID NO: 609973 - RNA, 24 nt, Human
ggcuggucucgaacuccugaccuc

SEQ ID NO: 609974 - RNA, 23 nt, Human
gggcagagcaccaggcugcagga

SEQ ID NO: 609975 - RNA, 20 nt, Human
gggccaggaaccccagggcu

SEQ ID NO: 609976 - RNA, 22 nt, Human
gggcucaagugauucuccugcc

SEQ ID NO: 609977 - RNA, 27 nt, Human
gggggccggggaaggagucaccaacag

SEQ ID NO: 609978 - RNA, 22 nt, Human
gggguuucaccauguuggccag

SEQ ID NO: 609979 - RNA, 23 nt, Human
gggguuucaccauguuggccagg

SEQ ID NO: 609980 - RNA, 22 nt, Human
gggguuucacuauguuggccag

SEQ ID NO: 609981 - RNA, 23 nt, Human
gggguuucacuauguuggccagg

SEQ ID NO: 609982 - RNA, 18 nt, Human
ggguuucacuauguuggc

SEQ ID NO: 609983 - RNA, 20 nt, Human
gguagcacguagcgcgggua

SEQ ID NO: 609984 - RNA, 23 nt, Human
ggucagggaaccaaaacacugug

SEQ ID NO: 609985 - RNA, 19 nt, Human
ggucucgaacuccugaccu

SEQ ID NO: 609986 - RNA, 21 nt, Human
ggugugaucucagcucgcuga

SEQ ID NO: 609987 - RNA, 23 nt, Human
guagagaugggguuucaccaugu

SEQ ID NO: 609988 - RNA, 24 nt, Human
gugauccacccaccucagccuccc

SEQ ID NO: 609989 - RNA, 24 nt, Human
gugauucuccugccucagccuccc

SEQ ID NO: 609990 - RNA, 22 nt, Human
uaacauaaacacaaaaacaggu

SEQ ID NO: 609991 - RNA, 24 nt, Human
uaauuucuguauuuuuaguagaga

SEQ ID NO: 609992 - RNA, 23 nt, Human
uaauuuuuguuuuaguagagaug

SEQ ID NO: 609993 - RNA, 22 nt, Human
uacaggcaggugccaccaugcc

SEQ ID NO: 609994 - RNA, 22 nt, Human
uacaggcaugagccaccacgcc

SEQ ID NO: 609995 - RNA, 22 nt, Human
uacaggugugagccacugugcc

SEQ ID NO: 609996 - RNA, 22 nt, Human
uacaggugugagccacugugcc

SEQ ID NO: 609997 - RNA, 23 nt, Human
uacaggugugagccacugugccu

SEQ ID NO: 609998 - RNA, 19 nt, Human
uacccaggcuggagugcac

SEQ ID NO: 609999 - RNA, 22 nt, Human
uacccaggcuggagugcacaau

SEQ ID NO: 610000 - RNA, 22 nt, Human
uagagaugggguuucaccaugu

SEQ ID NO: 610001 - RNA, 22 nt, Human
uagagaugggguuucacuaugu

SEQ ID NO: 610002 - RNA, 24 nt, Human
uaguagagaugggguuucaccaug

SEQ ID NO: 610003 - RNA, 26 nt, Human
uaguagagaugggguuucaccauguu

SEQ ID NO: 610004 - RNA, 24 nt, Human
uaguagagaugggguuucacuaug

SEQ ID NO: 610005 - RNA, 24 nt, Human
uauguuggccaggcuggucucgaa

SEQ ID NO: 610006 - RNA, 19 nt, Human
ucaaaagacaugugccaca

SEQ ID NO: 610007 - RNA, 25 nt, Human
ucaaaagacaugugccacagaaaua

SEQ ID NO: 610008 - RNA, 24 nt, Human
ucaccacaacuucugccucccagg

SEQ ID NO: 610009 - RNA, 25 nt, Human
ucaccacaacuucugccucccaggu

SEQ ID NO: 610010 - RNA, 24 nt, Human
ucaccauguuggccaggguggucu

SEQ ID NO: 610011 - RNA, 22 nt, Human
ucacuauguuggccaggcuggu

SEQ ID NO: 610012 - RNA, 25 nt, Human
ucagacaggcaucaccagugggaac

SEQ ID NO: 610013 - RNA, 20 nt, Human
ucagauccuaacauaaacac

SEQ ID NO: 610014 - RNA, 18 nt, Human
ucagccucccaaagugcu

SEQ ID NO: 610015 - RNA, 20 nt, Human
ucagccucccaaguagcugg

SEQ ID NO: 610016 - RNA, 21 nt, Human
uccacccaccucagccuccca

SEQ ID NO: 610017 - RNA, 20 nt, Human
uccaucuggaucugggugga

SEQ ID NO: 610018 - RNA, 24 nt, Human
ucccaaagugcugagauuacaggc

SEQ ID NO: 610019 - RNA, 23 nt, Human
ucccaaagugcugggauuacagg

SEQ ID NO: 610020 - RNA, 24 nt, Human
ucccaaguagcugggauuacaggc

SEQ ID NO: 610021 - RNA, 19 nt, Human
ucccagguucaagcaauuc

SEQ ID NO: 610022 - RNA, 21 nt, Human
ucccagguucaagcaauucgc

SEQ ID NO: 610023 - RNA, 24 nt, Human
ucccagguucaagcaauucgccug

SEQ ID NO: 610024 - RNA, 24 nt, Human
ucccuagaaaaaugcaagauccuc

SEQ ID NO: 610025 - RNA, 19 nt, Human
uccucguccccuuacccag

SEQ ID NO: 610026 - RNA, 21 nt, Human
uccugggcucaagugauucuc

SEQ ID NO: 610027 - RNA, 24 nt, Human
uccugggcucaagugauucuccug

SEQ ID NO: 610028 - RNA, 24 nt, Human
ucgcucuguuacccaggcuggagu

SEQ ID NO: 610029 - RNA, 24 nt, Human
ucgcugaaaccuccaccuccuggg

SEQ ID NO: 610030 - RNA, 25 nt, Human
ucuacagccacagugaccccagcuu

SEQ ID NO: 610031 - RNA, 24 nt, Human
ucucacucugucaccaaggcugga

SEQ ID NO: 610032 - RNA, 26 nt, Human
ucuccugccucagccucccaaguagc

SEQ ID NO: 610033 - RNA, 19 nt, Human
ucucgaacuccugaccucg

SEQ ID NO: 610034 - RNA, 19 nt, Human
ucucgcucuguuacccagg

SEQ ID NO: 610035 - RNA, 23 nt, Human
ucucgcucuguuacccaggcugg

SEQ ID NO: 610036 - RNA, 24 nt, Human
ucucgcucuguuacccaggcugga

SEQ ID NO: 610037 - RNA, 26 nt, Human
ucucgcucuguuacccaggcuggagu

SEQ ID NO: 610038 - RNA, 24 nt, Human
ucugucaccaaggcuggagugcag

SEQ ID NO: 610039 - RNA, 18 nt, Human
ucuguuacccaggcugga

SEQ ID NO: 610040 - RNA, 24 nt, Human
ucuguuacccaggcuggagugcac

SEQ ID NO: 610041 - RNA, 20 nt, Human
ucuuggccucccaaagugcu

SEQ ID NO: 610042 - RNA, 22 nt, Human
ugagauggagucucgcucuguu

SEQ ID NO: 610043 - RNA, 22 nt, Human
ugagauuacaggcaugagccac

SEQ ID NO: 610044 - RNA, 23 nt, Human
ugagauuacaggcaugagccacc

SEQ ID NO: 610045 - RNA, 24 nt, Human
ugagauuacaggcaugagccacca

SEQ ID NO: 610046 - RNA, 24 nt, Human
ugagauuacaggcaugagccacca

SEQ ID NO: 610047 - RNA, 21 nt, Human
ugagggaagaggaggcaaagg

SEQ ID NO: 610048 - RNA, 24 nt, Human
ugauccacccaccucagccuccca

SEQ ID NO: 610049 - RNA, 24 nt, Human
ugauccgcccaucuuggccuccca

SEQ ID NO: 610050 - RNA, 20 nt, Human
ugauucuccugccucagccu

SEQ ID NO: 610051 - RNA, 27 nt, Human
ugcaagauccuccgaaaaucaagaucu

SEQ ID NO: 610052 - RNA, 23 nt, Human
ugcacaaucucggcucaccacaa

SEQ ID NO: 610053 - RNA, 24 nt, Human
ugcccggcuaauuucuguauuuuu

SEQ ID NO: 610054 - RNA, 24 nt, Human
ugccucagccucccaaguagcugg

SEQ ID NO: 610055 - RNA, 21 nt, Human
ugcgcugacacggacgcgaag

SEQ ID NO: 610056 - RNA, 24 nt, Human
ugcugggauuacaggugugagcca

SEQ ID NO: 610057 - RNA, 21 nt, Human
uggaacauuugccaggaacuu

SEQ ID NO: 610058 - RNA, 18 nt, Human
uggacacccccacugcca

SEQ ID NO: 610059 - RNA, 22 nt, Human
uggagugcacaaucucggcuca

SEQ ID NO: 610060 - RNA, 19 nt, Human
uggagugcaguggugugau

SEQ ID NO: 610061 - RNA, 24 nt, Human
uggagugcaguggugugaucucag

SEQ ID NO: 610062 - RNA, 24 nt, Human
uggccaggcuggucucgaacuccu

SEQ ID NO: 610063 - RNA, 21 nt, Human
uggccaggguggucucaaacu

SEQ ID NO: 610064 - RNA, 24 nt, Human
ugggacuacaggcacgcgacacca

SEQ ID NO: 610065 - RNA, 21 nt, Human
ugggauuacaggcaggugcca

SEQ ID NO: 610066 - RNA, 22 nt, Human
ugggauuacaggcaggugccac

SEQ ID NO: 610067 - RNA, 24 nt, Human
ugggauuacaggcaggugccacca

SEQ ID NO: 610068 - RNA, 25 nt, Human
ugggauuacaggcaggugccaccau

SEQ ID NO: 610069 - RNA, 18 nt, Human
ugggauuacaggugugag

SEQ ID NO: 610070 - RNA, 21 nt, Human
ugggauuacaggugugagcca

SEQ ID NO: 610071 - RNA, 22 nt, Human
ugggauuacaggugugagccac

SEQ ID NO: 610072 - RNA, 22 nt, Human
ugggauuacaggugugagccac

SEQ ID NO: 610073 - RNA, 22 nt, Human
ugggauuacaggugugagccac

SEQ ID NO: 610074 - RNA, 24 nt, Human
ugggauuacaggugugagccacug

SEQ ID NO: 610075 - RNA, 18 nt, Human
ugggcucaagugauucuc

SEQ ID NO: 610076 - RNA, 24 nt, Human
ugggcucaagugauucuccugccu

SEQ ID NO: 610077 - RNA, 18 nt, Human
ugggggccggggaaggag

SEQ ID NO: 610078 - RNA, 24 nt, Human
ugggguuucaccauguuggccagg

SEQ ID NO: 610079 - RNA, 24 nt, Human
ugggguuucacuauguuggccagg

SEQ ID NO: 610080 - RNA, 18 nt, Human
uggugagggaagaggagg

SEQ ID NO: 610081 - RNA, 22 nt, Human
uggugugaucucagcucgcuga

SEQ ID NO: 610082 - RNA, 20 nt, Human
ugucugcuuggugacccugu

SEQ ID NO: 610083 - RNA, 19 nt, Human
ugugcauaggacacgggca

SEQ ID NO: 610084 - RNA, 24 nt, Human
uguuuuguuuuuuuuugagaugga

SEQ ID NO: 610085 - RNA, 23 nt, Human
uguuuuuuuuugagauggagucu

SEQ ID NO: 610086 - RNA, 18 nt, Human
uuacccaggcuggagugc

SEQ ID NO: 610087 - RNA, 18 nt, Human
uuaguagagaugggguuu

SEQ ID NO: 610088 - RNA, 18 nt, Human
uuaguagagaugggguuu

SEQ ID NO: 610089 - RNA, 21 nt, Human
uuaguagagaugggguuucac

SEQ ID NO: 610090 - RNA, 21 nt, Human
uuaguagagaugggguuucac

SEQ ID NO: 610091 - RNA, 22 nt, Human
uuaguagagaugggguuucacc

SEQ ID NO: 610092 - RNA, 24 nt, Human
uuaguagagaugggguuucaccau

SEQ ID NO: 610093 - RNA, 24 nt, Human
uuaguagagaugggguuucacuau

SEQ ID NO: 610094 - RNA, 21 nt, Human
uucaagcaauucgccugccuc

SEQ ID NO: 610095 - RNA, 23 nt, Human
uugguuuuguuuuguuuuuuuuu

SEQ ID NO: 610096 - RNA, 19 nt, Human
uuucaccauguuggccagg

SEQ ID NO: 610097 - RNA, 23 nt, Human
uuucacuauguuggccaggcugu

SEQ ID NO: 610098 - RNA, 20 nt, Human
uuucuguauuuuuaguagag

SEQ ID NO: 610099 - RNA, 20 nt, Human
uuugaagcuucucucgaagc

SEQ ID NO: 610100 - RNA, 23 nt, Human
uuuuaguagagaugggguuucac

SEQ ID NO: 610101 - RNA, 18 nt, Human
uuuugaagcuucucucga

SEQ ID NO: 610102 - RNA, 24 nt, Human
uuuuuaguagagaugggguuucac

SEQ ID NO: 610103 - RNA, 22 nt, Human
uuuuuuuuugagauggagucuc

SEQ ID NO: 610104 - RNA, 19 nt, Human
aaaacaagaacucuggagc

SEQ ID NO: 610105 - RNA, 18 nt, Human
aaauaacugcugaaagcu

SEQ ID NO: 610106 - RNA, 18 nt, Human
aacaaguuaacacuugga

SEQ ID NO: 610107 - RNA, 18 nt, Human
aacaguaaauaccccauu

SEQ ID NO: 610108 - RNA, 24 nt, Human
acacugaagaaaaugggaaaaaaa

SEQ ID NO: 610109 - RNA, 25 nt, Human
acauuuauuacauucauaggguuuu

SEQ ID NO: 610110 - RNA, 22 nt, Human
acucuggagccaaucucagcuc

SEQ ID NO: 610111 - RNA, 19 nt, Human
agaguuuuccauccaguac

SEQ ID NO: 610112 - RNA, 23 nt, Human
aggauccuucaacaucucugcuu

SEQ ID NO: 610113 - RNA, 23 nt, Human
aggcugagcgauuccuaaaaacu

SEQ ID NO: 610114 - RNA, 21 nt, Human
agguuuuucccuuagcaauuc

SEQ ID NO: 610115 - RNA, 18 nt, Human
aguaaguauguauauaca

SEQ ID NO: 610116 - RNA, 27 nt, Human
caaaagguuucucuccuguaugagucc

SEQ ID NO: 610117 - RNA, 24 nt, Human
caaacuaauugcccaacaaugcag

SEQ ID NO: 610118 - RNA, 19 nt, Human
caaauguacaagaaacgaa

SEQ ID NO: 610119 - RNA, 22 nt, Human
cagcacauaaguguuauaugua

SEQ ID NO: 610120 - RNA, 24 nt, Human
cagcugaaggcuuuuccacauuua

SEQ ID NO: 610121 - RNA, 22 nt, Human
caguaugaguuuucuuauguug

SEQ ID NO: 610122 - RNA, 25 nt, Human
ccaguugaaagauuucccacacuca

SEQ ID NO: 610123 - RNA, 20 nt, Human
ccccacagucaugguccucc

SEQ ID NO: 610124 - RNA, 21 nt, Human
ccguuagucaucucauucauu

SEQ ID NO: 610125 - RNA, 26 nt, Human
ccucugauguccaauaagaugagagu

SEQ ID NO: 610126 - RNA, 19 nt, Human
cuaaauaacugcugaaagc

SEQ ID NO: 610127 - RNA, 18 nt, Human
cuccugggcacccagacc

SEQ ID NO: 610128 - RNA, 23 nt, Human
cugaaugauuucccacauucagu

SEQ ID NO: 610129 - RNA, 25 nt, Human
cugcaguguaagugcuuguauguug

SEQ ID NO: 610130 - RNA, 19 nt, Human
cugguagaccauaagggga

SEQ ID NO: 610131 - RNA, 18 nt, Human
cuuuuccauggaucuuuc

SEQ ID NO: 610132 - RNA, 21 nt, Human
gagccaaucucagcucuacuc

SEQ ID NO: 610133 - RNA, 20 nt, Human
gaucacuuucuguccagcaa

SEQ ID NO: 610134 - RNA, 24 nt, Human
gcugaaaacaagaacucuggagcc

SEQ ID NO: 610135 - RNA, 22 nt, Human
uaaaagaugccucauuccccac

SEQ ID NO: 610136 - RNA, 22 nt, Human
uaaaggggacuaaacaaguuaa

SEQ ID NO: 610137 - RNA, 23 nt, Human
ucaauacuauuauuuuucuuaca

SEQ ID NO: 610138 - RNA, 21 nt, Human
ucaguacauucaaaagguuuc

SEQ ID NO: 610139 - RNA, 19 nt, Human
ucauuccccacagucaugg

SEQ ID NO: 610140 - RNA, 21 nt, Human
ucccuauucuuuuccuucaug

SEQ ID NO: 610141 - RNA, 23 nt, Human
ucccuauucuuuuccuucauggg

SEQ ID NO: 610142 - RNA, 21 nt, Human
ucccuuagcaauucacaccaa

SEQ ID NO: 610143 - RNA, 21 nt, Human
ucucaacuggguuaacuuuuc

SEQ ID NO: 610144 - RNA, 20 nt, Human
ucucugcaguguaagugcuu

SEQ ID NO: 610145 - RNA, 26 nt, Human
ucucuuauguacaauaagaugagaau

SEQ ID NO: 610146 - RNA, 23 nt, Human
ucugcauaagguuuuucccuuag

SEQ ID NO: 610147 - RNA, 22 nt, Human
ugaaaacaagaacucuggagcc

SEQ ID NO: 610148 - RNA, 24 nt, Human
ugaaaacaagaacucuggagccaa

SEQ ID NO: 610149 - RNA, 19 nt, Human
ugccucauuccccacaguc

SEQ ID NO: 610150 - RNA, 30 nt, Human
ugccucauuccccacagucaugguccucaa

SEQ ID NO: 610151 - RNA, 21 nt, Human
ugcuucagcuuagccauuugu

SEQ ID NO: 610152 - RNA, 20 nt, Human
uggaaagcauuuaaaagaaa

SEQ ID NO: 610153 - RNA, 20 nt, Human
uggcugaaaacaagaacucu

SEQ ID NO: 610154 - RNA, 22 nt, Human
ugggaaaaaaaaucacuggaga

SEQ ID NO: 610155 - RNA, 18 nt, Human
ugggguaacaguaccuau

SEQ ID NO: 610156 - RNA, 19 nt, Human
uguuuauaggguuuuccuc

SEQ ID NO: 610157 - RNA, 19 nt, Human
uuacaguaaguauguauau

SEQ ID NO: 610158 - RNA, 18 nt, Human
uuaucaaaucucugcuau

SEQ ID NO: 610159 - RNA, 18 nt, Human
uucaguacauucaaaagg

SEQ ID NO: 610160 - RNA, 19 nt, Human
uucccacacucauuacaaa

SEQ ID NO: 610161 - RNA, 21 nt, Human
uucuacaauuaugcacaaaau

SEQ ID NO: 610162 - RNA, 26 nt, Human
uuucuuauguugaauaagguaagagc

SEQ ID NO: 610163 - RNA, 24 nt, Human
uuuuccauggaucuuucagguccu

SEQ ID NO: 610164 - RNA, 24 nt, Human
uuuuucccuuagcaauucacacca

SEQ ID NO: 610165 - RNA, 21 nt, Human
aagaagaaaagagguacagaa

SEQ ID NO: 610166 - RNA, 28 nt, Human
aagaagaaaagagguacagaacacccag

SEQ ID NO: 610167 - RNA, 24 nt, Human
aagcgagagaaacaagugcaggaa

SEQ ID NO: 610168 - RNA, 24 nt, Human
aagcgauccgcccgccucggccuc

SEQ ID NO: 610169 - RNA, 18 nt, Human
acaggguuucgccauguu

SEQ ID NO: 610170 - RNA, 19 nt, Human
acaggguuucgccauguug

SEQ ID NO: 610171 - RNA, 21 nt, Human
acaggguuucgccauguugcc

SEQ ID NO: 610172 - RNA, 23 nt, Human
acaggguuucgccauguugccua

SEQ ID NO: 610173 - RNA, 24 nt, Human
acaggguuucgccauguugccuag

SEQ ID NO: 610174 - RNA, 24 nt, Human
acagugcugggauuccaggcguga

SEQ ID NO: 610175 - RNA, 20 nt, Human
accuggucuccugggcucaa

SEQ ID NO: 610176 - RNA, 21 nt, Human
agaacacccagaggugcccuc

SEQ ID NO: 610177 - RNA, 20 nt, Human
agaagccaaaaagacaggug

SEQ ID NO: 610178 - RNA, 18 nt, Human
agacaggguuucgccaug

SEQ ID NO: 610179 - RNA, 18 nt, Human
agacaggguuucgccaug

SEQ ID NO: 610180 - RNA, 23 nt, Human
agacaggguuucgccauguugcc

SEQ ID NO: 610181 - RNA, 18 nt, Human
agaggaagggaaaguugg

SEQ ID NO: 610182 - RNA, 23 nt, Human
agcagcgcguccgccucccgcgc

SEQ ID NO: 610183 - RNA, 23 nt, Human
agcgagagaaacaagugcaggaa

SEQ ID NO: 610184 - RNA, 18 nt, Human
agcggugggaaagggggg

SEQ ID NO: 610185 - RNA, 20 nt, Human
agcuccuuaggagaaggugg

SEQ ID NO: 610186 - RNA, 22 nt, Human
aggaaggcggggguaggggagc

SEQ ID NO: 610187 - RNA, 22 nt, Human
aggaggaaggagggagguccag

SEQ ID NO: 610188 - RNA, 26 nt, Human
aggcaaaaggaaacaccuugagcugg

SEQ ID NO: 610189 - RNA, 18 nt, Human
aggcggggguaggggagc

SEQ ID NO: 610190 - RNA, 19 nt, Human
aggcuggucuccaaccugg

SEQ ID NO: 610191 - RNA, 22 nt, Human
aggugcccucgauuccgucuug

SEQ ID NO: 610192 - RNA, 22 nt, Human
agugcugggauuccaggcguga

SEQ ID NO: 610193 - RNA, 18 nt, Human
aguuggggcuuacugcag

SEQ ID NO: 610194 - RNA, 24 nt, Human
cacagugcugggauuccaggcgug

SEQ ID NO: 610195 - RNA, 19 nt, Human
cagaggugcccucgauucc

SEQ ID NO: 610196 - RNA, 21 nt, Human
caggcaaaaggaaacaccuug

SEQ ID NO: 610197 - RNA, 24 nt, Human
caggguuucgccauguugccuagg

SEQ ID NO: 610198 - RNA, 18 nt, Human
caggugagcagcgcgucc

SEQ ID NO: 610199 - RNA, 19 nt, Human
cauguugccuaggcugguc

SEQ ID NO: 610200 - RNA, 24 nt, Human
cauguugccuaggcuggucuccaa

SEQ ID NO: 610201 - RNA, 21 nt, Human
ccaaggugcaagaagaaaaga

SEQ ID NO: 610202 - RNA, 24 nt, Human
ccacagugcugggauuccaggcgu

SEQ ID NO: 610203 - RNA, 20 nt, Human
ccagcaauaaagcgagagaa

SEQ ID NO: 610204 - RNA, 22 nt, Human
cccggccuauuuacuuuucuua

SEQ ID NO: 610205 - RNA, 20 nt, Human
cccugccucagccacuccuc

SEQ ID NO: 610206 - RNA, 22 nt, Human
cccugccucagccacuccuccu

SEQ ID NO: 610207 - RNA, 23 nt, Human
cccugccucagccacuccuccug

SEQ ID NO: 610208 - RNA, 21 nt, Human
cccuucuuccaucccacgucc

SEQ ID NO: 610209 - RNA, 19 nt, Human
ccggcagucaugggagaag

SEQ ID NO: 610210 - RNA, 22 nt, Human
ccucccgcgcacaggugagggc

SEQ ID NO: 610211 - RNA, 18 nt, Human
ccugggcucaagcgaucc

SEQ ID NO: 610212 - RNA, 22 nt, Human
ccugggcucaagcgauccgccc

SEQ ID NO: 610213 - RNA, 22 nt, Human
ccugggcucaagcgauccgccc

SEQ ID NO: 610214 - RNA, 24 nt, Human
cgccauguugccuaggcuggucuc

SEQ ID NO: 610215 - RNA, 24 nt, Human
cgccccuaggccuugcggcggcuu

SEQ ID NO: 610216 - RNA, 24 nt, Human
cgccucggccucccacagugcugg

SEQ ID NO: 610217 - RNA, 20 nt, Human
cggcuuggcaggaaggcggg

SEQ ID NO: 610218 - RNA, 22 nt, Human
cuccaaccuggucuccugggcu

SEQ ID NO: 610219 - RNA, 21 nt, Human
cuccugggcucaagcgauccg

SEQ ID NO: 610220 - RNA, 21 nt, Human
cugguuaccaggcaaaaggaa

SEQ ID NO: 610221 - RNA, 23 nt, Human
gagaaacaagugcaggaaacugg

SEQ ID NO: 610222 - RNA, 21 nt, Human
gagaagguggggaggaggaag

SEQ ID NO: 610223 - RNA, 22 nt, Human
gaggaagggaaaguuggggcuu

SEQ ID NO: 610224 - RNA, 20 nt, Human
gagguacagaacacccagag

SEQ ID NO: 610225 - RNA, 23 nt, Human
gaggugcccucgauuccgucuug

SEQ ID NO: 610226 - RNA, 21 nt, Human
gcccgccccuaggccuugcgg

SEQ ID NO: 610227 - RNA, 22 nt, Human
gcccugccucagccacuccucc

SEQ ID NO: 610228 - RNA, 24 nt, Human
gcccugccucagccacuccuccug

SEQ ID NO: 610229 - RNA, 20 nt, Human
gccuaggcuggucuccaacc

SEQ ID NO: 610230 - RNA, 18 nt, Human
gccuauuuacuuuucuua

SEQ ID NO: 610231 - RNA, 24 nt, Human
gcgauccgcccgccucggccuccc

SEQ ID NO: 610232 - RNA, 18 nt, Human
ggagggagguccaggccc

SEQ ID NO: 610233 - RNA, 24 nt, Human
gggcucaagcgauccgcccgccuc

SEQ ID NO: 610234 - RNA, 21 nt, Human
ggggagcggugggaaaggggg

SEQ ID NO: 610235 - RNA, 18 nt, Human
gugggaaagggggguggg

SEQ ID NO: 610236 - RNA, 21 nt, Human
uagagacaggguuucgccaug

SEQ ID NO: 610237 - RNA, 22 nt, Human
uagagacaggguuucgccaugu

SEQ ID NO: 610238 - RNA, 22 nt, Human
uaggagaagguggggaggagga

SEQ ID NO: 610239 - RNA, 24 nt, Human
ucccacagugcugggauuccaggc

SEQ ID NO: 610240 - RNA, 18 nt, Human
uccugggcucaagcgauc

SEQ ID NO: 610241 - RNA, 20 nt, Human
uccugggcucaagcgauccg

SEQ ID NO: 610242 - RNA, 20 nt, Human
uccuuaggagaagguggggg

SEQ ID NO: 610243 - RNA, 22 nt, Human
ucgccauguugccuaggcuggu

SEQ ID NO: 610244 - RNA, 21 nt, Human
ucugccugucggcggcggcac

SEQ ID NO: 610245 - RNA, 22 nt, Human
ucuuccaucccacguccuccac

SEQ ID NO: 610246 - RNA, 18 nt, Human
ucuugcacuugcccuucu

SEQ ID NO: 610247 - RNA, 21 nt, Human
ugcaagaagaaaagagguaca

SEQ ID NO: 610248 - RNA, 21 nt, Human
ugccuaggcuggucuccaacc

SEQ ID NO: 610249 - RNA, 19 nt, Human
ugccucagccacuccuccu

SEQ ID NO: 610250 - RNA, 21 nt, Human
uggcaggaaggcggggguagg

SEQ ID NO: 610251 - RNA, 19 nt, Human
uggccaggagcuaccagcg

SEQ ID NO: 610252 - RNA, 22 nt, Human
ugggagaagccaaaaagacagg

SEQ ID NO: 610253 - RNA, 18 nt, Human
ugggauuccaggcgugag

SEQ ID NO: 610254 - RNA, 19 nt, Human
ugggauuccaggcgugagc

SEQ ID NO: 610255 - RNA, 24 nt, Human
ugggauuccaggcgugagcuaccg

SEQ ID NO: 610256 - RNA, 23 nt, Human
uggggaggaggaaggagggaggu

SEQ ID NO: 610257 - RNA, 21 nt, Human
uuccaucccacguccuccacu

SEQ ID NO: 610258 - RNA, 20 nt, Human
uugcacuugcccuucuccca

SEQ ID NO: 610259 - RNA, 24 nt, Human
uuucgccauguugccuaggcuggu

SEQ ID NO: 610260 - RNA, 25 nt, Human
aaaaaaacuuaaacaaagaacaaag

SEQ ID NO: 610261 - RNA, 20 nt, Human
aaacacagaagacuagaaau

SEQ ID NO: 610262 - RNA, 23 nt, Human
aaacacuaaaagaauuuaaauaa

SEQ ID NO: 610263 - RNA, 27 nt, Human
aaaccaaacuuacuuacagaaaaaaua

SEQ ID NO: 610264 - RNA, 22 nt, Human
aaccuccaucuccucuuuccuc

SEQ ID NO: 610265 - RNA, 21 nt, Human
aacuacauucaggaaaaaaaa

SEQ ID NO: 610266 - RNA, 21 nt, Human
aagcaagcuuucuauaagcuu

SEQ ID NO: 610267 - RNA, 21 nt, Human
aauggagaaucacuaaaacug

SEQ ID NO: 610268 - RNA, 19 nt, Human
acuacauucaggaaaaaaa

SEQ ID NO: 610269 - RNA, 24 nt, Human
aggaaaaaaaacuuaaacaaagaa

SEQ ID NO: 610270 - RNA, 25 nt, Human
aguauuggaauuuuaaaugacauaa

SEQ ID NO: 610271 - RNA, 20 nt, Human
aucaauucccucuaagcuga

SEQ ID NO: 610272 - RNA, 19 nt, Human
aucagcuucacaaccucaa

SEQ ID NO: 610273 - RNA, 22 nt, Human
aucagcuucacaaccucaaugg

SEQ ID NO: 610274 - RNA, 25 nt, Human
aucuccucuuuccucuucucuuuca

SEQ ID NO: 610275 - RNA, 18 nt, Human
auuuauagccauuuccuc

SEQ ID NO: 610276 - RNA, 21 nt, Human
caaccucaauggaaauuaaau

SEQ ID NO: 610277 - RNA, 20 nt, Human
caucuccucuuuccucuucu

SEQ ID NO: 610278 - RNA, 20 nt, Human
cauuucuaugcauguauaug

SEQ ID NO: 610279 - RNA, 18 nt, Human
ccacauauuugacaccuu

SEQ ID NO: 610280 - RNA, 20 nt, Human
ccauuaaccgaguaugaagc

SEQ ID NO: 610281 - RNA, 20 nt, Human
ccuccaucuccucuuuccuc

SEQ ID NO: 610282 - RNA, 19 nt, Human
ccucuucucuuucaugucc

SEQ ID NO: 610283 - RNA, 20 nt, Human
ccucuuuccucuucucuuuc

SEQ ID NO: 610284 - RNA, 23 nt, Human
cuuuccucuucucuuucaugucc

SEQ ID NO: 610285 - RNA, 22 nt, Human
gaaaaaaaacuuaaacaaagaa

SEQ ID NO: 610286 - RNA, 23 nt, Human
gaaaaaccuccaucuccucuuuc

SEQ ID NO: 610287 - RNA, 18 nt, Human
gcuaaacacagaagacua

SEQ ID NO: 610288 - RNA, 23 nt, Human
gcuuguucuucauugcccgugag

SEQ ID NO: 610289 - RNA, 18 nt, Human
ggucauuuuagcaguuuu

SEQ ID NO: 610290 - RNA, 21 nt, Human
uaaaagcaucuguugcuccaa

SEQ ID NO: 610291 - RNA, 26 nt, Human
uaaacacagaaaaaccuccaucuccu

SEQ ID NO: 610292 - RNA, 23 nt, Human
uaaagaguacgcuaaaagguaua

SEQ ID NO: 610293 - RNA, 21 nt, Human
uacaggcaucaaaaacuucaa

SEQ ID NO: 610294 - RNA, 20 nt, Human
uacaucaaaauuugguggcc

SEQ ID NO: 610295 - RNA, 21 nt, Human
uacuauaagauuuuacacaaa

SEQ ID NO: 610296 - RNA, 18 nt, Human
uacuguuuucgcuuuucu

SEQ ID NO: 610297 - RNA, 19 nt, Human
uagaaaucaaauaguuuca

SEQ ID NO: 610298 - RNA, 25 nt, Human
uagcaguuuuauucaacagaugcca

SEQ ID NO: 610299 - RNA, 22 nt, Human
uauaagauuuuacacaaaguua

SEQ ID NO: 610300 - RNA, 22 nt, Human
uaucauggauuuacuuacaagg

SEQ ID NO: 610301 - RNA, 22 nt, Human
ucaccaagaaacugcaaauuuc

SEQ ID NO: 610302 - RNA, 19 nt, Human
ucaccagcaucuuucguaa

SEQ ID NO: 610303 - RNA, 21 nt, Human
ucuccucuuuccucuucucuu

SEQ ID NO: 610304 - RNA, 20 nt, Human
ucuggaguuauaucagcuuc

SEQ ID NO: 610305 - RNA, 22 nt, Human
ucuuuccucuucucuuucaugu

SEQ ID NO: 610306 - RNA, 20 nt, Human
ucuuucugaaaaaguuucau

SEQ ID NO: 610307 - RNA, 22 nt, Human
ugaaaccaaacuuacuuacaga

SEQ ID NO: 610308 - RNA, 23 nt, Human
ugcuccaagugcaugguuuuugu

SEQ ID NO: 610309 - RNA, 23 nt, Human
uggagaaucacuaaaacuggaaa

SEQ ID NO: 610310 - RNA, 24 nt, Human
uggauaaacacagaaaaaccucca

SEQ ID NO: 610311 - RNA, 22 nt, Human
uguacacuaccugaaggaaauc

SEQ ID NO: 610312 - RNA, 23 nt, Human
uucauaaaacuaaauagcaaacu

SEQ ID NO: 610313 - RNA, 23 nt, Human
uucuacaccaguucauuuaucuc

SEQ ID NO: 610314 - RNA, 25 nt, Human
uuguuuuuucuuucugaaaaaguuu

SEQ ID NO: 610315 - RNA, 24 nt, Human
uuuauagccauuuccucauauuuu

SEQ ID NO: 610316 - RNA, 21 nt, Human
uuuucuggauuacuuaaaaca

SEQ ID NO: 610317 - RNA, 20 nt, Human
aaaaggccugagacagaggg

SEQ ID NO: 610318 - RNA, 23 nt, Human
aagcacaaaauagacccauguug

SEQ ID NO: 610319 - RNA, 19 nt, Human
aagcagccugugggaaaag

SEQ ID NO: 610320 - RNA, 22 nt, Human
aauaucuuuccugccaagcagc

SEQ ID NO: 610321 - RNA, 19 nt, Human
aaucuuuaccaaacuuuuc

SEQ ID NO: 610322 - RNA, 19 nt, Human
agagaauucuauggccaca

SEQ ID NO: 610323 - RNA, 21 nt, Human
agaggaauaucuuuccugcca

SEQ ID NO: 610324 - RNA, 22 nt, Human
aggguccaucccggugaacagc

SEQ ID NO: 610325 - RNA, 24 nt, Human
agguguggaagcagggaagugagg

SEQ ID NO: 610326 - RNA, 21 nt, Human
caccaugauggccacacgguc

SEQ ID NO: 610327 - RNA, 23 nt, Human
caccuagggagaccagguuucug

SEQ ID NO: 610328 - RNA, 19 nt, Human
cagguaacuuacaugccau

SEQ ID NO: 610329 - RNA, 24 nt, Human
caucaacauuucccagcgccugcu

SEQ ID NO: 610330 - RNA, 18 nt, Human
caucccggugaacagcuc

SEQ ID NO: 610331 - RNA, 19 nt, Human
cauuuccacucuucuggag

SEQ ID NO: 610332 - RNA, 22 nt, Human
ccaagcagccugugggaaaagc

SEQ ID NO: 610333 - RNA, 21 nt, Human
ccaauacccgcagguuacaga

SEQ ID NO: 610334 - RNA, 25 nt, Human
cccucaggguccaucccggugaaca

SEQ ID NO: 610335 - RNA, 21 nt, Human
ccgcagguuacagagcgaugg

SEQ ID NO: 610336 - RNA, 19 nt, Human
ccucccugagguguggaag

SEQ ID NO: 610337 - RNA, 20 nt, Human
ccugagacagaggguggaca

SEQ ID NO: 610338 - RNA, 21 nt, Human
ccugccaagcagccuguggga

SEQ ID NO: 610339 - RNA, 21 nt, Human
ccugugggaaaagcuucaaaa

SEQ ID NO: 610340 - RNA, 23 nt, Human
ccuucauccuaaaauuuuuaaaa

SEQ ID NO: 610341 - RNA, 23 nt, Human
cgccugcucuuuacagaguucua

SEQ ID NO: 610342 - RNA, 22 nt, Human
cucccugagguguggaagcagg

SEQ ID NO: 610343 - RNA, 20 nt, Human
cugaggcucuggcaaaauca

SEQ ID NO: 610344 - RNA, 19 nt, Human
cuggcaaaaucaccgaggc

SEQ ID NO: 610345 - RNA, 26 nt, Human
cugggcaggguccaggcauuuccacu

SEQ ID NO: 610346 - RNA, 21 nt, Human
gaacaccugcuccaagguagc

SEQ ID NO: 610347 - RNA, 25 nt, Human
gaaccaauacaccuuagcguuccug

SEQ ID NO: 610348 - RNA, 20 nt, Human
gaauucuauggccacauccc

SEQ ID NO: 610349 - RNA, 19 nt, Human
gagcagcaucuuugcccag

SEQ ID NO: 610350 - RNA, 20 nt, Human
gagcagcaucuuugcccagu

SEQ ID NO: 610351 - RNA, 18 nt, Human
ggaggcugaggcucuggc

SEQ ID NO: 610352 - RNA, 26 nt, Human
gucugaguuuguuaauuuugucugcu

SEQ ID NO: 610353 - RNA, 21 nt, Human
uaagaacaccugcuccaaggu

SEQ ID NO: 610354 - RNA, 18 nt, Human
uagaguuuucacgggagc

SEQ ID NO: 610355 - RNA, 22 nt, Human
uagguucuuucauuuuuauuuc

SEQ ID NO: 610356 - RNA, 20 nt, Human
ucccgugggagaaguuucca

SEQ ID NO: 610357 - RNA, 23 nt, Human
ucccugaauguuaaggguuccau

SEQ ID NO: 610358 - RNA, 20 nt, Human
ucccugagguguggaagcag

SEQ ID NO: 610359 - RNA, 21 nt, Human
uccuuucacggcugcauacaa

SEQ ID NO: 610360 - RNA, 20 nt, Human
ucuaagaacaccugcuccaa

SEQ ID NO: 610361 - RNA, 19 nt, Human
ucuuguagaauuauggaac

SEQ ID NO: 610362 - RNA, 22 nt, Human
ugauaauaaccaaaaacaaacc

SEQ ID NO: 610363 - RNA, 23 nt, Human
ugccuuuaauuugaaaaaggccu

SEQ ID NO: 610364 - RNA, 26 nt, Human
uggaggcugaggcucuggcaaaauca

SEQ ID NO: 610365 - RNA, 20 nt, Human
uggggaugaauaacaugucu

SEQ ID NO: 610366 - RNA, 20 nt, Human
uguuggggaugaauaacaug

SEQ ID NO: 610367 - RNA, 19 nt, Human
uucuccaacaucacaucuc

SEQ ID NO: 610368 - RNA, 19 nt, Human
uucuguaguucuccaacau

SEQ ID NO: 610369 - RNA, 22 nt, Human
uugaaggucuguuucacugccu

SEQ ID NO: 610370 - RNA, 30 nt, Human
uuucacggcugcauacaacuccaaaugcuu

SEQ ID NO: 610371 - RNA, 26 nt, Human
uuuccacucuucuggagagaauucua

SEQ ID NO: 610372 - RNA, 18 nt, Human
uuucccagcgccugcucu

SEQ ID NO: 610373 - RNA, 23 nt, Human
aaguggcuucggggaugaaauac

SEQ ID NO: 610374 - RNA, 28 nt, Human
aaugaugaaggaaaccgaaaaauuggaa

SEQ ID NO: 610375 - RNA, 25 nt, Human
gagaaugaugaaggaaaccgguacc

SEQ ID NO: 610376 - RNA, 24 nt, Human
uauguauucaaaauaagaaaagga

SEQ ID NO: 610377 - RNA, 20 nt, Human
uuaggauuuuauguagcuug

SEQ ID NO: 610378 - RNA, 20 nt, Human
uucaaaauaagaaaaggaaa

SEQ ID NO: 610379 - RNA, 25 nt, Human
uuggcugauaaaacuagaaaauaaa

SEQ ID NO: 610380 - RNA, 22 nt, Human
agagggaggagggugagggggc

SEQ ID NO: 610381 - RNA, 23 nt, Human
agagggaggagggugagggggcu

SEQ ID NO: 610382 - RNA, 22 nt, Human
agcgucgaucgcggugcagcgg

SEQ ID NO: 610383 - RNA, 18 nt, Human
aggaggagggagagggag

SEQ ID NO: 610384 - RNA, 22 nt, Human
aggagggugagggggcuggggu

SEQ ID NO: 610385 - RNA, 23 nt, Human
aggcagcgccgcugggggggcgg

SEQ ID NO: 610386 - RNA, 18 nt, Human
agggagagggaggagggu

SEQ ID NO: 610387 - RNA, 22 nt, Human
aguccgguggggaaggguuggg

SEQ ID NO: 610388 - RNA, 22 nt, Human
cagcgucgaucgcggugcagcg

SEQ ID NO: 610389 - RNA, 18 nt, Human
caguaguggagguugcag

SEQ ID NO: 610390 - RNA, 25 nt, Human
ccgccgccaccgccgcuggccccgg

SEQ ID NO: 610391 - RNA, 24 nt, Human
ccgccgccgccaccgccgcuggcc

SEQ ID NO: 610392 - RNA, 18 nt, Human
ccgccgccgccgccaccg

SEQ ID NO: 610393 - RNA, 22 nt, Human
ccgccgccgccgccaccgccgc

SEQ ID NO: 610394 - RNA, 22 nt, Human
ccucgccgccuccccuccucca

SEQ ID NO: 610395 - RNA, 21 nt, Human
cgccuccgccgccgccgccac

SEQ ID NO: 610396 - RNA, 22 nt, Human
cuccccuccuccaccgacgccu

SEQ ID NO: 610397 - RNA, 21 nt, Human
cuccgccgccgccgccaccgc

SEQ ID NO: 610398 - RNA, 19 nt, Human
cuccuccaccgacgccucc

SEQ ID NO: 610399 - RNA, 19 nt, Human
gagcaccggggaggcgagc

SEQ ID NO: 610400 - RNA, 21 nt, Human
gaggagggagagggaggaggg

SEQ ID NO: 610401 - RNA, 21 nt, Human
gaggagggugagggggcuggg

SEQ ID NO: 610402 - RNA, 19 nt, Human
gccaccgccgcuggccccg

SEQ ID NO: 610403 - RNA, 20 nt, Human
gcgagcucccggggcgggug

SEQ ID NO: 610404 - RNA, 20 nt, Human
gcggcgacggcaggugggga

SEQ ID NO: 610405 - RNA, 22 nt, Human
ggagagggaggagggugagggg

SEQ ID NO: 610406 - RNA, 22 nt, Human
ggaggagggagagggaggaggg

SEQ ID NO: 610407 - RNA, 26 nt, Human
ggagggagagggaggagggugagggg

SEQ ID NO: 610408 - RNA, 22 nt, Human
ggcgacggcagguggggaggga

SEQ ID NO: 610409 - RNA, 23 nt, Human
gggaggagggugagggggcuggg

SEQ ID NO: 610410 - RNA, 23 nt, Human
ggggagggcgggggagcaccggg

SEQ ID NO: 610411 - RNA, 19 nt, Human
ggggcggggagggcggggg

SEQ ID NO: 610412 - RNA, 18 nt, Human
ggugagggggcuggggug

SEQ ID NO: 610413 - RNA, 22 nt, Human
ggugcagcgggagcugcgccuc

SEQ ID NO: 610414 - RNA, 25 nt, Human
uaaauaaauacacaguccggugggg

SEQ ID NO: 610415 - RNA, 19 nt, Human
ucgccgccuccccuccucc

SEQ ID NO: 610416 - RNA, 18 nt, Human
uggggagggaggaggagg

SEQ ID NO: 610417 - RNA, 22 nt, Human
uggggagggaggaggagggaga

SEQ ID NO: 610418 - RNA, 25 nt, Human
uggggagggaggaggagggagaggg

SEQ ID NO: 610419 - RNA, 18 nt, Human
ugggggggcggggagggc

SEQ ID NO: 610420 - RNA, 23 nt, Human
aaaccacaggcaaagcugacuua

SEQ ID NO: 610421 - RNA, 19 nt, Human
aaaucccccaucuacuuuc

SEQ ID NO: 610422 - RNA, 24 nt, Human
aaauugcugggauuacaggcauga

SEQ ID NO: 610423 - RNA, 19 nt, Human
aacagagugacgucauaga

SEQ ID NO: 610424 - RNA, 21 nt, Human
aacaucuucacagccacuuug

SEQ ID NO: 610425 - RNA, 22 nt, Human
aaccacaggcaaagcugacuua

SEQ ID NO: 610426 - RNA, 22 nt, Human
aagcagaccaaaugcaccucuu

SEQ ID NO: 610427 - RNA, 18 nt, Human
aagcagcaagccccaccc

SEQ ID NO: 610428 - RNA, 24 nt, Human
aagcccuggccccgcagucaccag

SEQ ID NO: 610429 - RNA, 18 nt, Human
aagccugcugcggcugcc

SEQ ID NO: 610430 - RNA, 20 nt, Human
aagcucuucucugagcugag

SEQ ID NO: 610431 - RNA, 27 nt, Human
aaggcaacucaguucaccuguccaggc

SEQ ID NO: 610432 - RNA, 20 nt, Human
aaggugcugggauuacaggc

SEQ ID NO: 610433 - RNA, 24 nt, Human
aaggugcugggauuacaggcguga

SEQ ID NO: 610434 - RNA, 18 nt, Human
aagugauccacccgccuc

SEQ ID NO: 610435 - RNA, 24 nt, Human
acacccccuccacucccagguaac

SEQ ID NO: 610436 - RNA, 19 nt, Human
acaguucucuucucuaccc

SEQ ID NO: 610437 - RNA, 20 nt, Human
accagagaagcuguucugcu

SEQ ID NO: 610438 - RNA, 18 nt, Human
accccccaccccauugcc

SEQ ID NO: 610439 - RNA, 24 nt, Human
accgcaaccuccgccucccguguu

SEQ ID NO: 610440 - RNA, 20 nt, Human
acgccaaggaacagagugac

SEQ ID NO: 610441 - RNA, 20 nt, Human
acuugauucucuccucccca

SEQ ID NO: 610442 - RNA, 22 nt, Human
acuuuuuguauuuuuaguagag

SEQ ID NO: 610443 - RNA, 23 nt, Human
agaagaaccccagaguucaugga

SEQ ID NO: 610444 - RNA, 23 nt, Human
agagacggcagcaggcaaacagg

SEQ ID NO: 610445 - RNA, 26 nt, Human
agaggcagguguacgggugggaggcc

SEQ ID NO: 610446 - RNA, 21 nt, Human
agaguucauggaugcacugga

SEQ ID NO: 610447 - RNA, 21 nt, Human
agcaaggaagggggacggggu

SEQ ID NO: 610448 - RNA, 24 nt, Human
agcagaaaguggaaugaagggacc

SEQ ID NO: 610449 - RNA, 20 nt, Human
agcagaggcagguguacggg

SEQ ID NO: 610450 - RNA, 18 nt, Human
agcaggcuuggagggccc

SEQ ID NO: 610451 - RNA, 22 nt, Human
agccagaaaauaaggcccaaag

SEQ ID NO: 610452 - RNA, 18 nt, Human
aggaaagccugcaagcga

SEQ ID NO: 610453 - RNA, 18 nt, Human
aggauaaacaccugacca

SEQ ID NO: 610454 - RNA, 22 nt, Human
aggcaccccaucuccaccucuc

SEQ ID NO: 610455 - RNA, 23 nt, Human
aggcgugagccacugugccuggc

SEQ ID NO: 610456 - RNA, 19 nt, Human
agggauggccuagaaccau

SEQ ID NO: 610457 - RNA, 22 nt, Human
agggcccuaucugagacuuuuc

SEQ ID NO: 610458 - RNA, 24 nt, Human
aguacaauggcgugaucuuggcuc

SEQ ID NO: 610459 - RNA, 22 nt, Human
aguagagaugggguuucaccau

SEQ ID NO: 610460 - RNA, 21 nt, Human
aguagcuggaauuacaggcau

SEQ ID NO: 610461 - RNA, 21 nt, Human
aguagcugggauuauaggcau

SEQ ID NO: 610462 - RNA, 20 nt, Human
agugcaauggcgcgaucucg

SEQ ID NO: 610463 - RNA, 20 nt, Human
auaaacaccugaccacaacc

SEQ ID NO: 610464 - RNA, 20 nt, Human
auccaggauaaacaccugac

SEQ ID NO: 610465 - RNA, 20 nt, Human
aucgugaagccugcugcggc

SEQ ID NO: 610466 - RNA, 22 nt, Human
aucgugaagccugcugcggcug

SEQ ID NO: 610467 - RNA, 22 nt, Human
aucgugcuacacaagccccauc

SEQ ID NO: 610468 - RNA, 19 nt, Human
auggaacacgcuuugcccc

SEQ ID NO: 610469 - RNA, 20 nt, Human
auggauccaggauaaacacc

SEQ ID NO: 610470 - RNA, 18 nt, Human
auggcccuucucugcaaa

SEQ ID NO: 610471 - RNA, 24 nt, Human
augggguuucaccauuuugaccag

SEQ ID NO: 610472 - RNA, 20 nt, Human
caaaccacaggcaaagcuga

SEQ ID NO: 610473 - RNA, 22 nt, Human
caaagcugacuuaauuuccaaa

SEQ ID NO: 610474 - RNA, 23 nt, Human
caaccuccaccucccggguucaa

SEQ ID NO: 610475 - RNA, 21 nt, Human
caacucaguucaccuguccag

SEQ ID NO: 610476 - RNA, 21 nt, Human
caagcagcaagccccaccccu

SEQ ID NO: 610477 - RNA, 22 nt, Human
caagugauccacccgccucacc

SEQ ID NO: 610478 - RNA, 22 nt, Human
caagugaucuuccugccucggc

SEQ ID NO: 610479 - RNA, 22 nt, Human
cacaagccccaucuucauuaau

SEQ ID NO: 610480 - RNA, 23 nt, Human
cacacaccugugccaucuguacc

SEQ ID NO: 610481 - RNA, 22 nt, Human
caccaccugcccaaagcagccc

SEQ ID NO: 610482 - RNA, 21 nt, Human
caccagagaagcuguucugcu

SEQ ID NO: 610483 - RNA, 18 nt, Human
cacccaaaucucaucuug

SEQ ID NO: 610484 - RNA, 20 nt, Human
caccccccaccccauugcca

SEQ ID NO: 610485 - RNA, 21 nt, Human
caccccccaccccauugccac

SEQ ID NO: 610486 - RNA, 22 nt, Human
caccccccaccccauugccaca

SEQ ID NO: 610487 - RNA, 20 nt, Human
caccuguuggccaggcuggu

SEQ ID NO: 610488 - RNA, 23 nt, Human
caccuguuggccaggcuggucuc

SEQ ID NO: 610489 - RNA, 21 nt, Human
cacugcaaccuccaccucccg

SEQ ID NO: 610490 - RNA, 23 nt, Human
cacugcaaccuccaccucccggg

SEQ ID NO: 610491 - RNA, 19 nt, Human
cacugcacccagccugagc

SEQ ID NO: 610492 - RNA, 23 nt, Human
cacugcacccagccugagcgcuc

SEQ ID NO: 610493 - RNA, 22 nt, Human
cagauguuucugaguccucugu

SEQ ID NO: 610494 - RNA, 22 nt, Human
cagcaagccccaccccugggcu

SEQ ID NO: 610495 - RNA, 22 nt, Human
cagcagcaagcccuggccccgc

SEQ ID NO: 610496 - RNA, 20 nt, Human
cagcaggcaaacaggauaca

SEQ ID NO: 610497 - RNA, 22 nt, Human
cagcagugugaaaauggacuaa

SEQ ID NO: 610498 - RNA, 20 nt, Human
cagccuccugaguagcuggg

SEQ ID NO: 610499 - RNA, 26 nt, Human
cagcggagcaggugugggcagcaaag

SEQ ID NO: 610500 - RNA, 26 nt, Human
cagcucccagcgagggucuucgggaa

SEQ ID NO: 610501 - RNA, 18 nt, Human
caggagggugggcugcuc

SEQ ID NO: 610502 - RNA, 22 nt, Human
caggcacccagggauccugcaa

SEQ ID NO: 610503 - RNA, 18 nt, Human
caggguguuagcaggcuu

SEQ ID NO: 610504 - RNA, 26 nt, Human
cagguaaccccaagcaggcagcggag

SEQ ID NO: 610505 - RNA, 19 nt, Human
caguacaggagggugggcu

SEQ ID NO: 610506 - RNA, 19 nt, Human
cagucaccagccaccaccc

SEQ ID NO: 610507 - RNA, 19 nt, Human
cauuucaugaaccuucacc

SEQ ID NO: 610508 - RNA, 24 nt, Human
cauuuuauaacugaucauugcagu

SEQ ID NO: 610509 - RNA, 26 nt, Human
ccaaagcuauaaauuagggacaaugg

SEQ ID NO: 610510 - RNA, 23 nt, Human
ccaaauugcugggauuacaggca

SEQ ID NO: 610511 - RNA, 24 nt, Human
ccaaauugcugggauuacaggcau

SEQ ID NO: 610512 - RNA, 18 nt, Human
ccaaggacggaaggagcc

SEQ ID NO: 610513 - RNA, 20 nt, Human
ccaaggugcugggauuacag

SEQ ID NO: 610514 - RNA, 22 nt, Human
ccaaggugcugggauuacaggc

SEQ ID NO: 610515 - RNA, 22 nt, Human
ccaaggugcugggauuacaggc

SEQ ID NO: 610516 - RNA, 24 nt, Human
ccaaggugcugggauuacaggcgu

SEQ ID NO: 610517 - RNA, 23 nt, Human
ccacucccagguaaccccaagca

SEQ ID NO: 610518 - RNA, 19 nt, Human
ccacugcacccagccugag

SEQ ID NO: 610519 - RNA, 19 nt, Human
ccacugcacccagccugag

SEQ ID NO: 610520 - RNA, 20 nt, Human
ccacugcacccagccugagc

SEQ ID NO: 610521 - RNA, 21 nt, Human
ccacugugccuggccuauuua

SEQ ID NO: 610522 - RNA, 23 nt, Human
ccagaaaauaaggcccaaagcua

SEQ ID NO: 610523 - RNA, 20 nt, Human
ccagcccgauagccucugcc

SEQ ID NO: 610524 - RNA, 20 nt, Human
ccaggcuggucuccaacucc

SEQ ID NO: 610525 - RNA, 18 nt, Human
ccauaauuacucagcugc

SEQ ID NO: 610526 - RNA, 18 nt, Human
cccaaagcagcccucucc

SEQ ID NO: 610527 - RNA, 24 nt, Human
cccaaauugcugggauuacaggca

SEQ ID NO: 610528 - RNA, 19 nt, Human
cccaagcuggaguacaaug

SEQ ID NO: 610529 - RNA, 19 nt, Human
cccaaggacggaaggagcc

SEQ ID NO: 610530 - RNA, 26 nt, Human
ccccaccccauugccacagcagcuaa

SEQ ID NO: 610531 - RNA, 27 nt, Human
ccccaccccugggcugagcacuugaga

SEQ ID NO: 610532 - RNA, 23 nt, Human
cccgaguagcuggaauuacaggc

SEQ ID NO: 610533 - RNA, 21 nt, Human
cccgcagucaccagccaccac

SEQ ID NO: 610534 - RNA, 19 nt, Human
cccugggcugagcacuuga

SEQ ID NO: 610535 - RNA, 19 nt, Human
cccuguacaagcucucuuc

SEQ ID NO: 610536 - RNA, 24 nt, Human
ccgaguagcuggaauuacaggcau

SEQ ID NO: 610537 - RNA, 24 nt, Human
ccgcaaccuccgccucccguguuc

SEQ ID NO: 610538 - RNA, 24 nt, Human
ccgccucacccucccaaggugcug

SEQ ID NO: 610539 - RNA, 24 nt, Human
ccucccguguucaaacgauucucc

SEQ ID NO: 610540 - RNA, 18 nt, Human
ccucucuuaacccccuuc

SEQ ID NO: 610541 - RNA, 22 nt, Human
ccugaccucaagugauccaccc

SEQ ID NO: 610542 - RNA, 26 nt, Human
ccugaccucaagugauccacccgccu

SEQ ID NO: 610543 - RNA, 23 nt, Human
ccugaguagcugggauuauaggc

SEQ ID NO: 610544 - RNA, 24 nt, Human
ccugaguagcugggauuauaggca

SEQ ID NO: 610545 - RNA, 23 nt, Human
ccugaucucaagugaucuuccug

SEQ ID NO: 610546 - RNA, 20 nt, Human
ccuguacaagcucucuucuc

SEQ ID NO: 610547 - RNA, 19 nt, Human
ccugucuccuguccccugg

SEQ ID NO: 610548 - RNA, 20 nt, Human
ccuuccacaggccuccuccc

SEQ ID NO: 610549 - RNA, 19 nt, Human
ccuugggacugauacccca

SEQ ID NO: 610550 - RNA, 18 nt, Human
cgugaagccugcugcggc

SEQ ID NO: 610551 - RNA, 20 nt, Human
cguugcccaagcuggagugc

SEQ ID NO: 610552 - RNA, 18 nt, Human
cuagaaccaucgugcuac

SEQ ID NO: 610553 - RNA, 24 nt, Human
cucaagugaucuuccugccucggc

SEQ ID NO: 610554 - RNA, 24 nt, Human
cucacugcaaccuccaccucccgg

SEQ ID NO: 610555 - RNA, 21 nt, Human
cuccccacuucauccaaacug

SEQ ID NO: 610556 - RNA, 21 nt, Human
cuccuccccacuucauccaaa

SEQ ID NO: 610557 - RNA, 18 nt, Human
cucguugcccaagcugga

SEQ ID NO: 610558 - RNA, 19 nt, Human
cucucuguauuucacccaa

SEQ ID NO: 610559 - RNA, 19 nt, Human
cucugugccuugcccagaa

SEQ ID NO: 610560 - RNA, 26 nt, Human
cucuuagaccauaauuacucagcugg

SEQ ID NO: 610561 - RNA, 24 nt, Human
cugaguagcugggauuauaggcau

SEQ ID NO: 610562 - RNA, 18 nt, Human
cugcaaccuccaccuccc

SEQ ID NO: 610563 - RNA, 23 nt, Human
cugcaaccuccaccucccggguu

SEQ ID NO: 610564 - RNA, 25 nt, Human
cugcaggcuccuuccucccuggcuc

SEQ ID NO: 610565 - RNA, 23 nt, Human
cugccacagccucccgaguagcu

SEQ ID NO: 610566 - RNA, 19 nt, Human
cugccucggccucccaaau

SEQ ID NO: 610567 - RNA, 20 nt, Human
cugcucuuugcaagcagcaa

SEQ ID NO: 610568 - RNA, 18 nt, Human
cugugucaucucuguagg

SEQ ID NO: 610569 - RNA, 21 nt, Human
cuuacacuucaacaucuucac

SEQ ID NO: 610570 - RNA, 21 nt, Human
cuuugcaaggacagaagcauc

SEQ ID NO: 610571 - RNA, 21 nt, Human
cuuuuguauuuuuuaguagag

SEQ ID NO: 610572 - RNA, 24 nt, Human
cuuuuuguauuuuuaguagagaug

SEQ ID NO: 610573 - RNA, 21 nt, Human
gaacacccccuccacucccag

SEQ ID NO: 610574 - RNA, 21 nt, Human
gaaggagccugcccuggagga

SEQ ID NO: 610575 - RNA, 26 nt, Human
gaccauaauuacucagcugccucugg

SEQ ID NO: 610576 - RNA, 24 nt, Human
gaccucaagugauccacccgccuc

SEQ ID NO: 610577 - RNA, 20 nt, Human
gacugggauuguggcacuag

SEQ ID NO: 610578 - RNA, 19 nt, Human
gagaagagguguagggccc

SEQ ID NO: 610579 - RNA, 18 nt, Human
gagaugggguuucaccau

SEQ ID NO: 610580 - RNA, 23 nt, Human
gagaugggguuucaccuguuggc

SEQ ID NO: 610581 - RNA, 23 nt, Human
gagcagaggcagguguacgggug

SEQ ID NO: 610582 - RNA, 24 nt, Human
gaguagcuggaauuacaggcaugc

SEQ ID NO: 610583 - RNA, 22 nt, Human
gaguagcugggauuauaggcau

SEQ ID NO: 610584 - RNA, 24 nt, Human
gaguagcugggauuauaggcaugc

SEQ ID NO: 610585 - RNA, 18 nt, Human
gaguaucucccaagcugg

SEQ ID NO: 610586 - RNA, 24 nt, Human
gaucucaagugaucuuccugccuc

SEQ ID NO: 610587 - RNA, 24 nt, Human
gaugggguuucaccuguuggccag

SEQ ID NO: 610588 - RNA, 18 nt, Human
gauuacaggcaugagcca

SEQ ID NO: 610589 - RNA, 22 nt, Human
gauuacaggcaugagccacugc

SEQ ID NO: 610590 - RNA, 23 nt, Human
gauuacaggcaugagccacugca

SEQ ID NO: 610591 - RNA, 18 nt, Human
gauuacaggcgugagcca

SEQ ID NO: 610592 - RNA, 21 nt, Human
gauuacaggcgugagccacug

SEQ ID NO: 610593 - RNA, 24 nt, Human
gauuacaggcgugagccacugugc

SEQ ID NO: 610594 - RNA, 19 nt, Human
gauucagcccucaaagcug

SEQ ID NO: 610595 - RNA, 22 nt, Human
gcaaccuccaccucccggguuc

SEQ ID NO: 610596 - RNA, 22 nt, Human
gcaccagagaagcuguucugcu

SEQ ID NO: 610597 - RNA, 27 nt, Human
gcaguacaggagggugggcugcucuuu

SEQ ID NO: 610598 - RNA, 21 nt, Human
gccacugcacccagccugagc

SEQ ID NO: 610599 - RNA, 18 nt, Human
gccgaaccagaagaaccc

SEQ ID NO: 610600 - RNA, 23 nt, Human
gccucacccucccaaggugcugg

SEQ ID NO: 610601 - RNA, 20 nt, Human
gcgucagccuccugaguagc

SEQ ID NO: 610602 - RNA, 22 nt, Human
gcgucagccuccugaguagcug

SEQ ID NO: 610603 - RNA, 21 nt, Human
gcucagcuggacuggagaggu

SEQ ID NO: 610604 - RNA, 19 nt, Human
gcucguugcccaagcugga

SEQ ID NO: 610605 - RNA, 18 nt, Human
gcugcacauucuguccaa

SEQ ID NO: 610606 - RNA, 19 nt, Human
gcuggagugcaauggcgcg

SEQ ID NO: 610607 - RNA, 23 nt, Human
gcuggucuccaacuccugaccuc

SEQ ID NO: 610608 - RNA, 24 nt, Human
ggaaagccagucuggccggcaccc

SEQ ID NO: 610609 - RNA, 18 nt, Human
ggacugggauuguggcac

SEQ ID NO: 610610 - RNA, 21 nt, Human
ggacuucacucaccuuuaaaa

SEQ ID NO: 610611 - RNA, 29 nt, Human
ggaggacuugcagugugauauggagggug

SEQ ID NO: 610612 - RNA, 19 nt, Human
ggaggagucgggcugcagg

SEQ ID NO: 610613 - RNA, 22 nt, Human
ggauuacaggcaugagccacug

SEQ ID NO: 610614 - RNA, 22 nt, Human
ggcaggauaaaggcuaagggag

SEQ ID NO: 610615 - RNA, 23 nt, Human
ggcagguguacgggugggaggcc

SEQ ID NO: 610616 - RNA, 24 nt, Human
ggcccagagagagagguggugcug

SEQ ID NO: 610617 - RNA, 22 nt, Human
ggccgaaccagaagaaccccag

SEQ ID NO: 610618 - RNA, 22 nt, Human
ggcgaggucaucacugcuggcc

SEQ ID NO: 610619 - RNA, 24 nt, Human
ggcuggucuccaacuccugaccuc

SEQ ID NO: 610620 - RNA, 23 nt, Human
gggaggcugcuggacccaaggac

SEQ ID NO: 610621 - RNA, 20 nt, Human
gggcagggauguggugagga

SEQ ID NO: 610622 - RNA, 19 nt, Human
gggcuacacuagcuugaaa

SEQ ID NO: 610623 - RNA, 22 nt, Human
gggguuucaccauuuugaccag

SEQ ID NO: 610624 - RNA, 21 nt, Human
gggguuucaccuguuggccag

SEQ ID NO: 610625 - RNA, 21 nt, Human
ggguuucaccuguuggccagg

SEQ ID NO: 610626 - RNA, 20 nt, Human
ggucucgaacuccugaucuc

SEQ ID NO: 610627 - RNA, 18 nt, Human
ggugcugggauuacaggc

SEQ ID NO: 610628 - RNA, 18 nt, Human
guagcugggauuauaggc

SEQ ID NO: 610629 - RNA, 20 nt, Human
guagcugggauuauaggcau

SEQ ID NO: 610630 - RNA, 20 nt, Human
guauuuuuuaguagagaugg

SEQ ID NO: 610631 - RNA, 19 nt, Human
guccaugcgaggucccgcu

SEQ ID NO: 610632 - RNA, 19 nt, Human
guccauuaaaccucuuucu

SEQ ID NO: 610633 - RNA, 20 nt, Human
gucuuggguaugucuuucuc

SEQ ID NO: 610634 - RNA, 24 nt, Human
gugaauaaaucucacgagaucuga

SEQ ID NO: 610635 - RNA, 24 nt, Human
gugauccacccgccucacccuccc

SEQ ID NO: 610636 - RNA, 21 nt, Human
gugcugggauuacaggcguga

SEQ ID NO: 610637 - RNA, 20 nt, Human
guggcggcagggggcggagu

SEQ ID NO: 610638 - RNA, 18 nt, Human
gugggcagcaaaggcacc

SEQ ID NO: 610639 - RNA, 19 nt, Human
uaaaccucugccaaagcag

SEQ ID NO: 610640 - RNA, 21 nt, Human
uaacaugcggggacacagaug

SEQ ID NO: 610641 - RNA, 19 nt, Human
uaaccccaagcaggcagcg

SEQ ID NO: 610642 - RNA, 21 nt, Human
uaaccgcaaccuccgccuccc

SEQ ID NO: 610643 - RNA, 25 nt, Human
uaacuuuuguauuuuuuaguagaga

SEQ ID NO: 610644 - RNA, 18 nt, Human
uaaggcccaaagcuauaa

SEQ ID NO: 610645 - RNA, 19 nt, Human
uaagggagugggguaugug

SEQ ID NO: 610646 - RNA, 24 nt, Human
uacaggcaugagccacugcaccca

SEQ ID NO: 610647 - RNA, 23 nt, Human
uacaggcaugcgccaccacgccc

SEQ ID NO: 610648 - RNA, 22 nt, Human
uacaggcgugagccacugugcc

SEQ ID NO: 610649 - RNA, 23 nt, Human
uacaggcgugagccacugugccu

SEQ ID NO: 610650 - RNA, 19 nt, Human
uacauggacaucgugaagc

SEQ ID NO: 610651 - RNA, 24 nt, Human
uacuuuuuguauuuuuaguagaga

SEQ ID NO: 610652 - RNA, 18 nt, Human
uagaauagcaagcaagga

SEQ ID NO: 610653 - RNA, 21 nt, Human
uagaauagcaagcaaggaaug

SEQ ID NO: 610654 - RNA, 20 nt, Human
uagacgaugaccgaccccac

SEQ ID NO: 610655 - RNA, 19 nt, Human
uagacgaugaccgaccccc

SEQ ID NO: 610656 - RNA, 23 nt, Human
uagcuuauggauuccuaacuccc

SEQ ID NO: 610657 - RNA, 19 nt, Human
uaguagagaugggguuuca

SEQ ID NO: 610658 - RNA, 21 nt, Human
uaguagagaugggguuucacc

SEQ ID NO: 610659 - RNA, 23 nt, Human
uaguagagaugggguuucaccau

SEQ ID NO: 610660 - RNA, 23 nt, Human
uaguagagaugggguuucaccug

SEQ ID NO: 610661 - RNA, 22 nt, Human
uaguauacacaccuuccaccac

SEQ ID NO: 610662 - RNA, 24 nt, Human
uaugcgucagccuccugaguagcu

SEQ ID NO: 610663 - RNA, 19 nt, Human
uauuccucugugccuugcc

SEQ ID NO: 610664 - RNA, 19 nt, Human
ucaccccccaccccauugc

SEQ ID NO: 610665 - RNA, 23 nt, Human
ucacugcaaccuccaccucccgg

SEQ ID NO: 610666 - RNA, 24 nt, Human
ucacugcaaccuccaccucccggg

SEQ ID NO: 610667 - RNA, 25 nt, Human
ucacugcaaccuccaccucccgggu

SEQ ID NO: 610668 - RNA, 26 nt, Human
ucacugcaaccuccaccucccggguu

SEQ ID NO: 610669 - RNA, 19 nt, Human
ucagcagugugaaaaugga

SEQ ID NO: 610670 - RNA, 18 nt, Human
ucagcccucaaagcuggg

SEQ ID NO: 610671 - RNA, 20 nt, Human
ucagcccucaaagcuggggc

SEQ ID NO: 610672 - RNA, 20 nt, Human
ucagccuccugaguagcugg

SEQ ID NO: 610673 - RNA, 19 nt, Human
ucaguacccagcggagggg

SEQ ID NO: 610674 - RNA, 22 nt, Human
ucauacucagagaccccugcuu

SEQ ID NO: 610675 - RNA, 22 nt, Human
uccaaagaccaugguaggccag

SEQ ID NO: 610676 - RNA, 24 nt, Human
uccagaaugagcacaggcuucuga

SEQ ID NO: 610677 - RNA, 22 nt, Human
uccaugucccaggaguccggag

SEQ ID NO: 610678 - RNA, 25 nt, Human
uccaugucccaggaguccggaggac

SEQ ID NO: 610679 - RNA, 24 nt, Human
ucccaaauugcugggauuacaggc

SEQ ID NO: 610680 - RNA, 22 nt, Human
ucccaagcuggaguacaauggc

SEQ ID NO: 610681 - RNA, 24 nt, Human
ucccaaggugcugggauuacaggc

SEQ ID NO: 610682 - RNA, 23 nt, Human
ucccagggguuugccuaagaccc

SEQ ID NO: 610683 - RNA, 25 nt, Human
uccccacccaaaucucaucuugaau

SEQ ID NO: 610684 - RNA, 24 nt, Human
ucccgaguagcuggaauuacaggc

SEQ ID NO: 610685 - RNA, 19 nt, Human
ucccggguucaagcaaguc

SEQ ID NO: 610686 - RNA, 20 nt, Human
ucccggguucaagcaagucu

SEQ ID NO: 610687 - RNA, 21 nt, Human
ucccguguucaaacgauucuc

SEQ ID NO: 610688 - RNA, 24 nt, Human
ucccguguucaaacgauucuccug

SEQ ID NO: 610689 - RNA, 19 nt, Human
ucccuaagaagacacgggg

SEQ ID NO: 610690 - RNA, 18 nt, Human
uccugagccuccuugcuc

SEQ ID NO: 610691 - RNA, 24 nt, Human
uccugaguagcugggauuauaggc

SEQ ID NO: 610692 - RNA, 21 nt, Human
ucgugaagccugcugcggcug

SEQ ID NO: 610693 - RNA, 20 nt, Human
ucuccuguccccugggaacu

SEQ ID NO: 610694 - RNA, 23 nt, Human
ucuccuguccccugggaacuuuu

SEQ ID NO: 610695 - RNA, 21 nt, Human
ucucgaacuccugaucucaag

SEQ ID NO: 610696 - RNA, 21 nt, Human
ucucuucucgucugccgccau

SEQ ID NO: 610697 - RNA, 19 nt, Human
ucugcaauugugaggccuc

SEQ ID NO: 610698 - RNA, 19 nt, Human
ucugccaacaccaccugcc

SEQ ID NO: 610699 - RNA, 21 nt, Human
ucuggacuucacucaccuuua

SEQ ID NO: 610700 - RNA, 23 nt, Human
ucuuucgggggaaacagagagug

SEQ ID NO: 610701 - RNA, 18 nt, Human
ucuuugcaagcagcaagc

SEQ ID NO: 610702 - RNA, 18 nt, Human
ugaaccuucaccgcccag

SEQ ID NO: 610703 - RNA, 18 nt, Human
ugacagaggacaggaggg

SEQ ID NO: 610704 - RNA, 24 nt, Human
ugaccagacuggucucgaacuccu

SEQ ID NO: 610705 - RNA, 24 nt, Human
ugaccucaagugauccacccgccu

SEQ ID NO: 610706 - RNA, 25 nt, Human
ugacucaugggggcaggucuucccu

SEQ ID NO: 610707 - RNA, 23 nt, Human
ugaucucaagugaucuuccugcc

SEQ ID NO: 610708 - RNA, 24 nt, Human
ugaucucaagugaucuuccugccu

SEQ ID NO: 610709 - RNA, 19 nt, Human
ugaugacagaggacaggag

SEQ ID NO: 610710 - RNA, 24 nt, Human
ugcaaaacuagggaagcucuucuc

SEQ ID NO: 610711 - RNA, 23 nt, Human
ugcaggguaaacccagaucccgg

SEQ ID NO: 610712 - RNA, 23 nt, Human
ugccacagcagcuaagccaguuc

SEQ ID NO: 610713 - RNA, 24 nt, Human
ugccacagccucccgaguagcugg

SEQ ID NO: 610714 - RNA, 23 nt, Human
ugcccaaagcagcccucucccag

SEQ ID NO: 610715 - RNA, 21 nt, Human
ugcccaagcuggagugcaaug

SEQ ID NO: 610716 - RNA, 21 nt, Human
ugccucggccucccaaauugc

SEQ ID NO: 610717 - RNA, 24 nt, Human
ugccucggccucccaaauugcugg

SEQ ID NO: 610718 - RNA, 23 nt, Human
ugcgccugcaaaacuagggaagc

SEQ ID NO: 610719 - RNA, 24 nt, Human
ugcgucagccuccugaguagcugg

SEQ ID NO: 610720 - RNA, 20 nt, Human
ugcgugcaggcccccagcag

SEQ ID NO: 610721 - RNA, 21 nt, Human
ugcgugcaggcccccagcagg

SEQ ID NO: 610722 - RNA, 21 nt, Human
ugcucagcuggacuggagagg

SEQ ID NO: 610723 - RNA, 23 nt, Human
ugcucguugcccaagcuggagug

SEQ ID NO: 610724 - RNA, 20 nt, Human
ugcugggauuacaggcauga

SEQ ID NO: 610725 - RNA, 24 nt, Human
ugcugggauuacaggcgugagcca

SEQ ID NO: 610726 - RNA, 22 nt, Human
ugcugggcccgaggccugcugu

SEQ ID NO: 610727 - RNA, 21 nt, Human
uggaauuacaggcaugcgcca

SEQ ID NO: 610728 - RNA, 22 nt, Human
uggaauuacaggcaugcgccac

SEQ ID NO: 610729 - RNA, 24 nt, Human
uggaauuacaggcaugcgccacca

SEQ ID NO: 610730 - RNA, 19 nt, Human
uggaguacaauggcgugau

SEQ ID NO: 610731 - RNA, 23 nt, Human
uggaguacaauggcgugaucuug

SEQ ID NO: 610732 - RNA, 24 nt, Human
uggaguacaauggcgugaucuugg

SEQ ID NO: 610733 - RNA, 23 nt, Human
uggagugcaauggcgcgaucucg

SEQ ID NO: 610734 - RNA, 24 nt, Human
uggagugcaauggcgcgaucucgg

SEQ ID NO: 610735 - RNA, 22 nt, Human
uggcaaguucuagcuaggacug

SEQ ID NO: 610736 - RNA, 24 nt, Human
uggccaggcuggucuccaacuccu

SEQ ID NO: 610737 - RNA, 20 nt, Human
ugggaagggaggagggcagg

SEQ ID NO: 610738 - RNA, 21 nt, Human
ugggaagggaggagggcagga

SEQ ID NO: 610739 - RNA, 20 nt, Human
ugggacaagauuuucuuugc

SEQ ID NO: 610740 - RNA, 19 nt, Human
ugggagaggagagacggca

SEQ ID NO: 610741 - RNA, 25 nt, Human
ugggagccguuguugcaauaggugg

SEQ ID NO: 610742 - RNA, 23 nt, Human
ugggaggccuccgugcgccugcc

SEQ ID NO: 610743 - RNA, 19 nt, Human
ugggauuacaggcaugagc

SEQ ID NO: 610744 - RNA, 21 nt, Human
ugggauuacaggcaugagcca

SEQ ID NO: 610745 - RNA, 22 nt, Human
ugggauuacaggcaugagccac

SEQ ID NO: 610746 - RNA, 22 nt, Human
ugggauuacaggcaugagccac

SEQ ID NO: 610747 - RNA, 24 nt, Human
ugggauuacaggcaugagccacug

SEQ ID NO: 610748 - RNA, 26 nt, Human
ugggauuacaggcaugagccacugca

SEQ ID NO: 610749 - RNA, 21 nt, Human
ugggauuacaggcgugagcca

SEQ ID NO: 610750 - RNA, 22 nt, Human
ugggauuacaggcgugagccac

SEQ ID NO: 610751 - RNA, 22 nt, Human
ugggauuacaggcgugagccac

SEQ ID NO: 610752 - RNA, 22 nt, Human
ugggauuacaggcgugagccac

SEQ ID NO: 610753 - RNA, 23 nt, Human
ugggauuacaggcgugagccacu

SEQ ID NO: 610754 - RNA, 24 nt, Human
ugggauuacaggcgugagccacug

SEQ ID NO: 610755 - RNA, 18 nt, Human
ugggauuauaggcaugcg

SEQ ID NO: 610756 - RNA, 20 nt, Human
ugggauuauaggcaugcgug

SEQ ID NO: 610757 - RNA, 24 nt, Human
ugggauuauaggcaugcgugacca

SEQ ID NO: 610758 - RNA, 24 nt, Human
ugggcugcucuuugcaagcagcaa

SEQ ID NO: 610759 - RNA, 18 nt, Human
ugggguuucaccauuuug

SEQ ID NO: 610760 - RNA, 23 nt, Human
ugggguuucaccuguuggccagg

SEQ ID NO: 610761 - RNA, 18 nt, Human
uggugaggaaagccugca

SEQ ID NO: 610762 - RNA, 21 nt, Human
uguauuuuuaguagagauggg

SEQ ID NO: 610763 - RNA, 23 nt, Human
ugucccgaggcagcucccagcga

SEQ ID NO: 610764 - RNA, 23 nt, Human
ugucuguguaucugauguucuuu

SEQ ID NO: 610765 - RNA, 26 nt, Human
ugugcacagccaucuggcuguggaag

SEQ ID NO: 610766 - RNA, 24 nt, Human
uuagaggcccagagagagaggugg

SEQ ID NO: 610767 - RNA, 18 nt, Human
uuaguagagaugggguuu

SEQ ID NO: 610768 - RNA, 22 nt, Human
uuaguagagaugggguuucacc

SEQ ID NO: 610769 - RNA, 22 nt, Human
uuaguagagaugggguuucacc

SEQ ID NO: 610770 - RNA, 24 nt, Human
uuaguagagaugggguuucaccau

SEQ ID NO: 610771 - RNA, 23 nt, Human
uuaguagagaugggguuucaccu

SEQ ID NO: 610772 - RNA, 25 nt, Human
uuaguagagaugggguuucaccugu

SEQ ID NO: 610773 - RNA, 19 nt, Human
uucaaacgauucuccugcc

SEQ ID NO: 610774 - RNA, 25 nt, Human
uucaaauucuacucauaggccccaa

SEQ ID NO: 610775 - RNA, 18 nt, Human
uucaagcaagucuuaugc

SEQ ID NO: 610776 - RNA, 26 nt, Human
uucacucaccuuuaaaauaagcagac

SEQ ID NO: 610777 - RNA, 28 nt, Human
uucagcacgagaggcugggaggcuuuca

SEQ ID NO: 610778 - RNA, 19 nt, Human
uuccugagccuccuugcuc

SEQ ID NO: 610779 - RNA, 23 nt, Human
uuccugccucggccucccaaauu

SEQ ID NO: 610780 - RNA, 22 nt, Human
uucugcaggccacaguaccugg

SEQ ID NO: 610781 - RNA, 19 nt, Human
uugauucucuccuccccac

SEQ ID NO: 610782 - RNA, 18 nt, Human
uugcccaagcuggagugc

SEQ ID NO: 610783 - RNA, 19 nt, Human
uugcucguugcccaagcug

SEQ ID NO: 610784 - RNA, 21 nt, Human
uugcucguugcccaagcugga

SEQ ID NO: 610785 - RNA, 18 nt, Human
uuggcugcacauucuguc

SEQ ID NO: 610786 - RNA, 23 nt, Human
uuguauuuuuaguagagaugggg

SEQ ID NO: 610787 - RNA, 21 nt, Human
uuucaccuguuggccaggcug

SEQ ID NO: 610788 - RNA, 23 nt, Human
uuucaccuguuggccaggcuggu

SEQ ID NO: 610789 - RNA, 25 nt, Human
uuucucagcagugugaaaauggacu

SEQ ID NO: 610790 - RNA, 24 nt, Human
uuuggcuguguccccacccaaauc

SEQ ID NO: 610791 - RNA, 23 nt, Human
uuuugcucguugcccaagcugga

SEQ ID NO: 610792 - RNA, 23 nt, Human
uuuuguauuuuuuaguagagaug

SEQ ID NO: 610793 - RNA, 24 nt, Human
uuuuuaguagagaugggguuucac

SEQ ID NO: 610794 - RNA, 24 nt, Human
uuuuuaguagagaugggguuucac

SEQ ID NO: 610795 - RNA, 21 nt, Human
uuuuuguauuuuuaguagaga

SEQ ID NO: 610796 - RNA, 23 nt, Human
uuuuuuaguagagaugggguuuc

SEQ ID NO: 610797 - RNA, 24 nt, Human
aaaaugcugagauuacagauguga

SEQ ID NO: 610798 - RNA, 22 nt, Human
aaacaaauguaaaaguuuccac

SEQ ID NO: 610799 - RNA, 20 nt, Human
aaaggagagcaugggcuuga

SEQ ID NO: 610800 - RNA, 21 nt, Human
aaaggccagaugcagagaagu

SEQ ID NO: 610801 - RNA, 23 nt, Human
aaaugcugggauuguaggcauga

SEQ ID NO: 610802 - RNA, 22 nt, Human
aacagugguggaaaauaagcaa

SEQ ID NO: 610803 - RNA, 25 nt, Human
aagcaauccucccaccugagccucc

SEQ ID NO: 610804 - RNA, 27 nt, Human
aagcaauucucuugacucacccucccg

SEQ ID NO: 610805 - RNA, 19 nt, Human
aagugcugggauuacaggc

SEQ ID NO: 610806 - RNA, 21 nt, Human
aagugcugggauuacaggcau

SEQ ID NO: 610807 - RNA, 23 nt, Human
aagugcugggauuacaggcauga

SEQ ID NO: 610808 - RNA, 23 nt, Human
aaugucacuauuauggcucugac

SEQ ID NO: 610809 - RNA, 21 nt, Human
acacgcaaggugcacgacgug

SEQ ID NO: 610810 - RNA, 24 nt, Human
acagagcaagcacacaguaggugc

SEQ ID NO: 610811 - RNA, 18 nt, Human
acagagcaccggcgucuc

SEQ ID NO: 610812 - RNA, 23 nt, Human
acaggugcccgccaccacgcccg

SEQ ID NO: 610813 - RNA, 22 nt, Human
acaugcaaaagagcccccggga

SEQ ID NO: 610814 - RNA, 28 nt, Human
accacaguacaggcgcuagacacacauu

SEQ ID NO: 610815 - RNA, 24 nt, Human
acccccagaggaugcgccuucucc

SEQ ID NO: 610816 - RNA, 19 nt, Human
accgcuuaggaaugacugc

SEQ ID NO: 610817 - RNA, 23 nt, Human
accucagccuccugaguaacugg

SEQ ID NO: 610818 - RNA, 21 nt, Human
accugggacacaggagggcuc

SEQ ID NO: 610819 - RNA, 22 nt, Human
acgacccccagaggaugcgccc

SEQ ID NO: 610820 - RNA, 18 nt, Human
acgacgugcucacuaagc

SEQ ID NO: 610821 - RNA, 18 nt, Human
acgggguuucaccguguu

SEQ ID NO: 610822 - RNA, 23 nt, Human
acgggguuucaccguguuggcca

SEQ ID NO: 610823 - RNA, 24 nt, Human
acgggguuucaccguguuggccag

SEQ ID NO: 610824 - RNA, 24 nt, Human
acguuuguauuuuuaguagagacg

SEQ ID NO: 610825 - RNA, 23 nt, Human
acuauuuaucaagcaccuacuac

SEQ ID NO: 610826 - RNA, 18 nt, Human
acucuauuauccaggcug

SEQ ID NO: 610827 - RNA, 28 nt, Human
acucuuuggaaggccuuuuuuuucuuuu

SEQ ID NO: 610828 - RNA, 19 nt, Human
acugugggccaccagggca

SEQ ID NO: 610829 - RNA, 20 nt, Human
agaaccaaguucaaacagga

SEQ ID NO: 610830 - RNA, 19 nt, Human
agaagccaacugugcccau

SEQ ID NO: 610831 - RNA, 25 nt, Human
agacaggagggaaaugggcccaagg

SEQ ID NO: 610832 - RNA, 23 nt, Human
agacagggucucacuauguugcc

SEQ ID NO: 610833 - RNA, 18 nt, Human
agagaguugggaugaacc

SEQ ID NO: 610834 - RNA, 19 nt, Human
agagccagggaccaaacag

SEQ ID NO: 610835 - RNA, 19 nt, Human
agaggaaagggcuggaaga

SEQ ID NO: 610836 - RNA, 21 nt, Human
agaggaaagggcuggaagaga

SEQ ID NO: 610837 - RNA, 19 nt, Human
agagggcaggcacguaggc

SEQ ID NO: 610838 - RNA, 24 nt, Human
agaugcuggagggcugaagaaguu

SEQ ID NO: 610839 - RNA, 23 nt, Human
agauuacagaugugagccacugc

SEQ ID NO: 610840 - RNA, 18 nt, Human
agccaacuccagcucucc

SEQ ID NO: 610841 - RNA, 19 nt, Human
agccagggaagcagggcuc

SEQ ID NO: 610842 - RNA, 24 nt, Human
agcuggucucaaacuccuggccuc

SEQ ID NO: 610843 - RNA, 26 nt, Human
aggaaacaaagaacuaacagagcaag

SEQ ID NO: 610844 - RNA, 18 nt, Human
aggaagaaggggaucagu

SEQ ID NO: 610845 - RNA, 23 nt, Human
aggagggaaaugggcccaaggac

SEQ ID NO: 610846 - RNA, 18 nt, Human
aggcacgguguccuugcc

SEQ ID NO: 610847 - RNA, 19 nt, Human
aggcaggacugaugcuggu

SEQ ID NO: 610848 - RNA, 20 nt, Human
aggcaggcuagcaggguggg

SEQ ID NO: 610849 - RNA, 20 nt, Human
aggcaugagucacugcaccc

SEQ ID NO: 610850 - RNA, 18 nt, Human
aggcucagaacggagcag

SEQ ID NO: 610851 - RNA, 23 nt, Human
aggcugaaggcugagggcagcug

SEQ ID NO: 610852 - RNA, 19 nt, Human
aggcugauuccuacuuacu

SEQ ID NO: 610853 - RNA, 25 nt, Human
aggcuggagugcagugacgcgaucu

SEQ ID NO: 610854 - RNA, 21 nt, Human
aggcuuccagccagggaagcc

SEQ ID NO: 610855 - RNA, 20 nt, Human
agugcagugacgcgaucucg

SEQ ID NO: 610856 - RNA, 24 nt, Human
agugcagugacgcgaucucggcuc

SEQ ID NO: 610857 - RNA, 18 nt, Human
aguugccagaaaucacca

SEQ ID NO: 610858 - RNA, 22 nt, Human
auccagacaagcccgucugcag

SEQ ID NO: 610859 - RNA, 18 nt, Human
auccucccaccugagccu

SEQ ID NO: 610860 - RNA, 18 nt, Human
augagaugggagacacac

SEQ ID NO: 610861 - RNA, 19 nt, Human
caaaagagcccccgggaga

SEQ ID NO: 610862 - RNA, 24 nt, Human
caaaugcugggauuguaggcauga

SEQ ID NO: 610863 - RNA, 23 nt, Human
caaccuccaccucccagguucaa

SEQ ID NO: 610864 - RNA, 20 nt, Human
caaggagccuggacuugaag

SEQ ID NO: 610865 - RNA, 19 nt, Human
caaggugcacgacgugcuc

SEQ ID NO: 610866 - RNA, 22 nt, Human
caaguguuccaccugccucggc

SEQ ID NO: 610867 - RNA, 23 nt, Human
cacagcaaacaaggauccagaca

SEQ ID NO: 610868 - RNA, 21 nt, Human
cacaguaggugcuccaagaac

SEQ ID NO: 610869 - RNA, 24 nt, Human
caccccaagagcauccaauuuaga

SEQ ID NO: 610870 - RNA, 24 nt, Human
cacccccucuguggcuacaccaag

SEQ ID NO: 610871 - RNA, 23 nt, Human
cacccugggcuggugccaggguc

SEQ ID NO: 610872 - RNA, 26 nt, Human
caccgaggcucagaacggagcagugg

SEQ ID NO: 610873 - RNA, 19 nt, Human
caccguguuggccagccug

SEQ ID NO: 610874 - RNA, 21 nt, Human
caccguguuggccagccuggu

SEQ ID NO: 610875 - RNA, 24 nt, Human
caccguguuggccagccuggucuc

SEQ ID NO: 610876 - RNA, 23 nt, Human
caccugagccucccaaaugcugg

SEQ ID NO: 610877 - RNA, 20 nt, Human
caccugggacacaggagggc

SEQ ID NO: 610878 - RNA, 20 nt, Human
caccuuuuccccuugaggca

SEQ ID NO: 610879 - RNA, 21 nt, Human
cacgcaccugggacacaggag

SEQ ID NO: 610880 - RNA, 24 nt, Human
cacuauguugcccaaacuggucuc

SEQ ID NO: 610881 - RNA, 27 nt, Human
cacuauguugcccaaacuggucucaaa

SEQ ID NO: 610882 - RNA, 24 nt, Human
cacuauguugcccaagcuggucuc

SEQ ID NO: 610883 - RNA, 27 nt, Human
cacuauguugcccaagcuggucucaaa

SEQ ID NO: 610884 - RNA, 23 nt, Human
cacucuauuauccaggcuggaau

SEQ ID NO: 610885 - RNA, 25 nt, Human
cacucuccucccccagcaagccaag

SEQ ID NO: 610886 - RNA, 21 nt, Human
cacugauucacagcuacuucg

SEQ ID NO: 610887 - RNA, 21 nt, Human
cacugcaaccuccaccuccca

SEQ ID NO: 610888 - RNA, 18 nt, Human
cacuguauuucucuuuug

SEQ ID NO: 610889 - RNA, 18 nt, Human
cagacgcggagcugaagg

SEQ ID NO: 610890 - RNA, 21 nt, Human
cagaguuccucaguuuuuuuc

SEQ ID NO: 610891 - RNA, 19 nt, Human
cagcaaauacugcucccau

SEQ ID NO: 610892 - RNA, 21 nt, Human
cagccacacaaguggaaauuu

SEQ ID NO: 610893 - RNA, 20 nt, Human
cagccucaaauuccugggcu

SEQ ID NO: 610894 - RNA, 19 nt, Human
cagccuccugaguaacugg

SEQ ID NO: 610895 - RNA, 19 nt, Human
cagcucccuucugaugcuc

SEQ ID NO: 610896 - RNA, 21 nt, Human
caggagggaaaugggcccaag

SEQ ID NO: 610897 - RNA, 18 nt, Human
cagggccagcgaucaagg

SEQ ID NO: 610898 - RNA, 18 nt, Human
cagggucucacuauguug

SEQ ID NO: 610899 - RNA, 24 nt, Human
cagggucucacuauguugcccaag

SEQ ID NO: 610900 - RNA, 19 nt, Human
caggugcccgccaccacgc

SEQ ID NO: 610901 - RNA, 21 nt, Human
caggugcccgccaccacgccc

SEQ ID NO: 610902 - RNA, 21 nt, Human
caugccggguccuccucccca

SEQ ID NO: 610903 - RNA, 18 nt, Human
cauuucaucauucugcgc

SEQ ID NO: 610904 - RNA, 24 nt, Human
ccaaaaugcugagauuacagaugu

SEQ ID NO: 610905 - RNA, 24 nt, Human
ccaaacagugguggaaaauaagcc

SEQ ID NO: 610906 - RNA, 23 nt, Human
ccaaaugcugggauuguaggcau

SEQ ID NO: 610907 - RNA, 25 nt, Human
ccaggccaacccgacagcccaacuc

SEQ ID NO: 610908 - RNA, 20 nt, Human
ccaggcuggaaugcagugac

SEQ ID NO: 610909 - RNA, 24 nt, Human
cccaaaugcugggauuguaggcau

SEQ ID NO: 610910 - RNA, 24 nt, Human
cccacaccucauuuuccgacuauu

SEQ ID NO: 610911 - RNA, 18 nt, Human
cccacccuaccccagcac

SEQ ID NO: 610912 - RNA, 20 nt, Human
cccacccuaccccagcacau

SEQ ID NO: 610913 - RNA, 19 nt, Human
cccacgacagccaucccgg

SEQ ID NO: 610914 - RNA, 20 nt, Human
cccagcaagccaagggcugu

SEQ ID NO: 610915 - RNA, 20 nt, Human
cccagguucaagcaauucuc

SEQ ID NO: 610916 - RNA, 27 nt, Human
ccccacccuaccccagcacaucugcaa

SEQ ID NO: 610917 - RNA, 18 nt, Human
ccccacgacagccauccc

SEQ ID NO: 610918 - RNA, 23 nt, Human
cccccuucccccauugauacucc

SEQ ID NO: 610919 - RNA, 24 nt, Human
ccccgggagacaggagggaaaugg

SEQ ID NO: 610920 - RNA, 24 nt, Human
cccgaagugcugggauuacaggca

SEQ ID NO: 610921 - RNA, 24 nt, Human
ccgaagugcugggauuacaggcau

SEQ ID NO: 610922 - RNA, 20 nt, Human
ccggguccuccuccccauca

SEQ ID NO: 610923 - RNA, 18 nt, Human
ccucccaaaugcugggau

SEQ ID NO: 610924 - RNA, 24 nt, Human
ccucccagguucaagcaauucucu

SEQ ID NO: 610925 - RNA, 21 nt, Human
ccugagccucccaaaugcugg

SEQ ID NO: 610926 - RNA, 23 nt, Human
ccugaucucaaguguuccaccug

SEQ ID NO: 610927 - RNA, 18 nt, Human
ccugcaggucucggcagc

SEQ ID NO: 610928 - RNA, 22 nt, Human
ccugcaggucucggcagcugga

SEQ ID NO: 610929 - RNA, 24 nt, Human
ccugccucggccucccgaagugcu

SEQ ID NO: 610930 - RNA, 24 nt, Human
ccuggccucaagcaauccucccac

SEQ ID NO: 610931 - RNA, 23 nt, Human
ccuggcguuuccaccucggcuuc

SEQ ID NO: 610932 - RNA, 22 nt, Human
cggaggggguuccugggaggcc

SEQ ID NO: 610933 - RNA, 23 nt, Human
cgggguuucaccguguuggccag

SEQ ID NO: 610934 - RNA, 20 nt, Human
cuacugcaccuggucuaaag

SEQ ID NO: 610935 - RNA, 24 nt, Human
cuacugcaccuggucuaaaggugc

SEQ ID NO: 610936 - RNA, 18 nt, Human
cucaaaagaucucucacc

SEQ ID NO: 610937 - RNA, 24 nt, Human
cucaagcaauccucccaccugagc

SEQ ID NO: 610938 - RNA, 20 nt, Human
cucacucuauuauccaggcc

SEQ ID NO: 610939 - RNA, 24 nt, Human
cucacugcaaccuccaccucccag

SEQ ID NO: 610940 - RNA, 21 nt, Human
cucccaaaaugcugagauuac

SEQ ID NO: 610941 - RNA, 23 nt, Human
cucccaccugagccucccaaaug

SEQ ID NO: 610942 - RNA, 19 nt, Human
cucgcacgcccccacccua

SEQ ID NO: 610943 - RNA, 24 nt, Human
cucgcacgcccccacccuacccca

SEQ ID NO: 610944 - RNA, 21 nt, Human
cucgcugcagccucaaauucc

SEQ ID NO: 610945 - RNA, 23 nt, Human
cugcaaccuccaccucccagguu

SEQ ID NO: 610946 - RNA, 21 nt, Human
cuggccucaagcaauccuccc

SEQ ID NO: 610947 - RNA, 22 nt, Human
cuggccucaagcaauccuccca

SEQ ID NO: 610948 - RNA, 19 nt, Human
cuggggaagucccaggcag

SEQ ID NO: 610949 - RNA, 21 nt, Human
cuggggccuccaggaagaagg

SEQ ID NO: 610950 - RNA, 21 nt, Human
cuggugccagggucggggcca

SEQ ID NO: 610951 - RNA, 21 nt, Human
cugugggccaccagggcaagc

SEQ ID NO: 610952 - RNA, 18 nt, Human
cuucaaaacuagcggucc

SEQ ID NO: 610953 - RNA, 18 nt, Human
cuugaaguaagacucaac

SEQ ID NO: 610954 - RNA, 22 nt, Human
cuugcucgucuguaccaagauc

SEQ ID NO: 610955 - RNA, 24 nt, Human
gaaggaaacaaagaacuaacagag

SEQ ID NO: 610956 - RNA, 24 nt, Human
gaagugcugggauuacaggcauga

SEQ ID NO: 610957 - RNA, 19 nt, Human
gaaguggaacaauggaacc

SEQ ID NO: 610958 - RNA, 24 nt, Human
gagacgggguuucaccguguuggc

SEQ ID NO: 610959 - RNA, 22 nt, Human
gagcauccaauuuagaggaggg

SEQ ID NO: 610960 - RNA, 24 nt, Human
gaucucaaguguuccaccugccuc

SEQ ID NO: 610961 - RNA, 22 nt, Human
gaugcgccuucuccacccccuc

SEQ ID NO: 610962 - RNA, 18 nt, Human
gauuacagaugugagcca

SEQ ID NO: 610963 - RNA, 22 nt, Human
gauuacagaugugagccacugc

SEQ ID NO: 610964 - RNA, 19 nt, Human
gauuacaggcaugagcuac

SEQ ID NO: 610965 - RNA, 23 nt, Human
gauuacaggcaugagcuacugca

SEQ ID NO: 610966 - RNA, 22 nt, Human
gauuguaggcaugagucacugc

SEQ ID NO: 610967 - RNA, 23 nt, Human
gauuguaggcaugagucacugca

SEQ ID NO: 610968 - RNA, 21 nt, Human
gcaaaaaaaggagagcauggg

SEQ ID NO: 610969 - RNA, 22 nt, Human
gcaaccuccaccucccagguuc

SEQ ID NO: 610970 - RNA, 18 nt, Human
gcaccggcgucuccuuuc

SEQ ID NO: 610971 - RNA, 19 nt, Human
gccaugucccucugggaga

SEQ ID NO: 610972 - RNA, 18 nt, Human
gcccagccacaaugagau

SEQ ID NO: 610973 - RNA, 26 nt, Human
gcccagggcugcagauauacagcagu

SEQ ID NO: 610974 - RNA, 18 nt, Human
gcccccacccuaccccag

SEQ ID NO: 610975 - RNA, 19 nt, Human
gcgccacugacucugggac

SEQ ID NO: 610976 - RNA, 18 nt, Human
gcgucuccuuucagcaca

SEQ ID NO: 610977 - RNA, 18 nt, Human
gcuccucugggcugugau

SEQ ID NO: 610978 - RNA, 19 nt, Human
gcugcagccucaaauuccu

SEQ ID NO: 610979 - RNA, 25 nt, Human
gcuggaaugcagugacgugaucccu

SEQ ID NO: 610980 - RNA, 19 nt, Human
gcuggagugcagugacgcg

SEQ ID NO: 610981 - RNA, 19 nt, Human
gcugguugcuggucugcuu

SEQ ID NO: 610982 - RNA, 20 nt, Human
ggagacaggagggaaauggg

SEQ ID NO: 610983 - RNA, 21 nt, Human
ggagacaggagggaaaugggc

SEQ ID NO: 610984 - RNA, 22 nt, Human
ggauuacaggcaugagcuacug

SEQ ID NO: 610985 - RNA, 19 nt, Human
gggaagcuucuaccagcug

SEQ ID NO: 610986 - RNA, 20 nt, Human
gggcaucaagggagaggcuu

SEQ ID NO: 610987 - RNA, 20 nt, Human
ggggaucagucuggagacuc

SEQ ID NO: 610988 - RNA, 22 nt, Human
gggguuucaccguguuggccag

SEQ ID NO: 610989 - RNA, 18 nt, Human
ggguuccugggaggcagg

SEQ ID NO: 610990 - RNA, 24 nt, Human
gguaggguggggcucccuggcguu

SEQ ID NO: 610991 - RNA, 20 nt, Human
gguccacgacccccagagga

SEQ ID NO: 610992 - RNA, 21 nt, Human
ggucggggccaaggccguccu

SEQ ID NO: 610993 - RNA, 18 nt, Human
ggucuccaacuccugauc

SEQ ID NO: 610994 - RNA, 20 nt, Human
ggugggggcagaggaaaggg

SEQ ID NO: 610995 - RNA, 23 nt, Human
guagagacgggguuucaccgugu

SEQ ID NO: 610996 - RNA, 22 nt, Human
guagagaugagaucucacuaug

SEQ ID NO: 610997 - RNA, 23 nt, Human
guugcuggucugcuuuuccacgc

SEQ ID NO: 610998 - RNA, 20 nt, Human
uaaaaaacacaaaaaaacua

SEQ ID NO: 610999 - RNA, 23 nt, Human
uaaaccucugcgaguucuccagg

SEQ ID NO: 611000 - RNA, 23 nt, Human
uaaaggugcauuuuuguaauguc

SEQ ID NO: 611001 - RNA, 23 nt, Human
uaacguuuguauuuuuaguagag

SEQ ID NO: 611002 - RNA, 24 nt, Human
uaacguuuguauuuuuaguagaga

SEQ ID NO: 611003 - RNA, 24 nt, Human
uacagcagugaacagaauaaacaa

SEQ ID NO: 611004 - RNA, 22 nt, Human
uacaggcaugagcuacugcacc

SEQ ID NO: 611005 - RNA, 23 nt, Human
uacaggugcccgccaccacgccc

SEQ ID NO: 611006 - RNA, 21 nt, Human
uaccacaguacaggcgcuaga

SEQ ID NO: 611007 - RNA, 22 nt, Human
uacccuagguucagaugccagc

SEQ ID NO: 611008 - RNA, 19 nt, Human
uagaaacgggcaagcauug

SEQ ID NO: 611009 - RNA, 22 nt, Human
uagagacagggucucacuaugu

SEQ ID NO: 611010 - RNA, 22 nt, Human
uagagaugagaucucacuaugu

SEQ ID NO: 611011 - RNA, 20 nt, Human
uagcagggugggcaccaagc

SEQ ID NO: 611012 - RNA, 24 nt, Human
uagcucuguuguccaggcuggagu

SEQ ID NO: 611013 - RNA, 21 nt, Human
uaguagagacgggguuucacc

SEQ ID NO: 611014 - RNA, 24 nt, Human
uaguagagacgggguuucaccgug

SEQ ID NO: 611015 - RNA, 26 nt, Human
uaguagagacgggguuucaccguugg

SEQ ID NO: 611016 - RNA, 22 nt, Human
uagugaaagcugaaugaaugaa

SEQ ID NO: 611017 - RNA, 24 nt, Human
uauccaggcuggaaugcagugacg

SEQ ID NO: 611018 - RNA, 24 nt, Human
uauggagccaacuccagcucuccu

SEQ ID NO: 611019 - RNA, 24 nt, Human
uauguugcccaaacuggucucaaa

SEQ ID NO: 611020 - RNA, 23 nt, Human
uauguugcccaagcuggucucaa

SEQ ID NO: 611021 - RNA, 24 nt, Human
uauguugcccaagcuggucucaaa

SEQ ID NO: 611022 - RNA, 22 nt, Human
ucaaaacuagcggucccaccac

SEQ ID NO: 611023 - RNA, 21 nt, Human
ucaaagucacccaccugggca

SEQ ID NO: 611024 - RNA, 20 nt, Human
ucaagcaccuacuacgugcc

SEQ ID NO: 611025 - RNA, 24 nt, Human
ucaccguguuggccagccuggucu

SEQ ID NO: 611026 - RNA, 25 nt, Human
ucaccguguuggccagccuggucuc

SEQ ID NO: 611027 - RNA, 23 nt, Human
ucacgcaccugggacacaggagg

SEQ ID NO: 611028 - RNA, 24 nt, Human
ucacugcaaccuccaccucccagg

SEQ ID NO: 611029 - RNA, 25 nt, Human
ucacugcaaccuccaccucccaggu

SEQ ID NO: 611030 - RNA, 27 nt, Human
ucacugcaaccuccaccucccagguuc

SEQ ID NO: 611031 - RNA, 24 nt, Human
ucauggaggugugucugagacgga

SEQ ID NO: 611032 - RNA, 21 nt, Human
uccaaccucgcacgcccccac

SEQ ID NO: 611033 - RNA, 19 nt, Human
uccaagggagagagggaaa

SEQ ID NO: 611034 - RNA, 22 nt, Human
ucccaaaugcugggauuguagg

SEQ ID NO: 611035 - RNA, 23 nt, Human
ucccaaaugcugggauuguaggc

SEQ ID NO: 611036 - RNA, 22 nt, Human
ucccaggcaggcuagcagggug

SEQ ID NO: 611037 - RNA, 21 nt, Human
ucccagguucaagcaauucuc

SEQ ID NO: 611038 - RNA, 21 nt, Human
ucccagguucaagcaauucuc

SEQ ID NO: 611039 - RNA, 24 nt, Human
ucccagguucaagcaauucucuug

SEQ ID NO: 611040 - RNA, 24 nt, Human
ucccccuucccccauugauacucc

SEQ ID NO: 611041 - RNA, 19 nt, Human
ucccgaagugcugggauua

SEQ ID NO: 611042 - RNA, 24 nt, Human
ucccgaagugcugggauuacaggc

SEQ ID NO: 611043 - RNA, 18 nt, Human
ucccugguucuccucccc

SEQ ID NO: 611044 - RNA, 18 nt, Human
uccgagacacccuuccuc

SEQ ID NO: 611045 - RNA, 19 nt, Human
uccugggcucaaaagaucu

SEQ ID NO: 611046 - RNA, 20 nt, Human
uccugggcucaaaagaucuc

SEQ ID NO: 611047 - RNA, 21 nt, Human
uccugggcucaaaagaucucu

SEQ ID NO: 611048 - RNA, 22 nt, Human
uccugggcucaaaagaucucuc

SEQ ID NO: 611049 - RNA, 19 nt, Human
uccuuggcaggacuguccu

SEQ ID NO: 611050 - RNA, 24 nt, Human
ucgcugcagccucaaauuccuggg

SEQ ID NO: 611051 - RNA, 18 nt, Human
ucggccucccgaagugcu

SEQ ID NO: 611052 - RNA, 23 nt, Human
ucuagcucuguuguccaggcugg

SEQ ID NO: 611053 - RNA, 24 nt, Human
ucuagcucuguuguccaggcugga

SEQ ID NO: 611054 - RNA, 23 nt, Human
ucucacuauguugcccaaacugg

SEQ ID NO: 611055 - RNA, 26 nt, Human
ucucacuauguugcccaaacuggucu

SEQ ID NO: 611056 - RNA, 27 nt, Human
ucucacuauguugcccaaacuggucuc

SEQ ID NO: 611057 - RNA, 23 nt, Human
ucucacuauguugcccaagcugg

SEQ ID NO: 611058 - RNA, 24 nt, Human
ucucacuauguugcccaagcuggu

SEQ ID NO: 611059 - RNA, 26 nt, Human
ucucacuauguugcccaagcuggucu

SEQ ID NO: 611060 - RNA, 27 nt, Human
ucucacuauguugcccaagcuggucuc

SEQ ID NO: 611061 - RNA, 24 nt, Human
ucucacucuauuauccaggcugga

SEQ ID NO: 611062 - RNA, 23 nt, Human
ucugaggcaguugccagaaauca

SEQ ID NO: 611063 - RNA, 24 nt, Human
ucuggagacucucaaugucccaca

SEQ ID NO: 611064 - RNA, 24 nt, Human
ucuguuguccaggcuggagugcag

SEQ ID NO: 611065 - RNA, 25 nt, Human
ugaaaaacugcacccccuguucuaa

SEQ ID NO: 611066 - RNA, 21 nt, Human
ugaaagcgagaaacaaaugua

SEQ ID NO: 611067 - RNA, 22 nt, Human
ugaagaaguuagugaaagcuga

SEQ ID NO: 611068 - RNA, 22 nt, Human
ugacaccaggucaaagucaccc

SEQ ID NO: 611069 - RNA, 19 nt, Human
ugagacaguauguauagaa

SEQ ID NO: 611070 - RNA, 25 nt, Human
ugagacccccgcucgaccaugugcg

SEQ ID NO: 611071 - RNA, 23 nt, Human
ugagaucucacuauguugcccaa

SEQ ID NO: 611072 - RNA, 22 nt, Human
ugagauuacagaugugagccac

SEQ ID NO: 611073 - RNA, 22 nt, Human
ugagauuacagaugugagccac

SEQ ID NO: 611074 - RNA, 24 nt, Human
ugagauuacagaugugagccacug

SEQ ID NO: 611075 - RNA, 22 nt, Human
ugagggcagcugggugggggca

SEQ ID NO: 611076 - RNA, 20 nt, Human
ugauauuugaagaaacuggg

SEQ ID NO: 611077 - RNA, 22 nt, Human
ugaugcuggugcuaaugcuggg

SEQ ID NO: 611078 - RNA, 19 nt, Human
ugauggggagagagaacca

SEQ ID NO: 611079 - RNA, 21 nt, Human
ugauggggagagagaaccagg

SEQ ID NO: 611080 - RNA, 18 nt, Human
ugcagaaggggugaggcc

SEQ ID NO: 611081 - RNA, 22 nt, Human
ugcagaaggggugaggccaucc

SEQ ID NO: 611082 - RNA, 22 nt, Human
ugcagugacgcgaucucggcuc

SEQ ID NO: 611083 - RNA, 23 nt, Human
ugccgccucucucuggcccgcuu

SEQ ID NO: 611084 - RNA, 21 nt, Human
ugccucggccucccgaagugc

SEQ ID NO: 611085 - RNA, 24 nt, Human
ugccucggccucccgaagugcugg

SEQ ID NO: 611086 - RNA, 24 nt, Human
ugcugagauuacagaugugagcca

SEQ ID NO: 611087 - RNA, 20 nt, Human
ugcugggauuacaggcauga

SEQ ID NO: 611088 - RNA, 19 nt, Human
uggaaaauaagcaaaaaaa

SEQ ID NO: 611089 - RNA, 20 nt, Human
uggaacccccagaaugagac

SEQ ID NO: 611090 - RNA, 21 nt, Human
uggaacuauaggcacacacca

SEQ ID NO: 611091 - RNA, 24 nt, Human
uggaacuauaggcacacaccacug

SEQ ID NO: 611092 - RNA, 20 nt, Human
uggaagguccacgaccccca

SEQ ID NO: 611093 - RNA, 19 nt, Human
uggaaugcagugacgugau

SEQ ID NO: 611094 - RNA, 28 nt, Human
uggaaugcagugacgugauggcucuagc

SEQ ID NO: 611095 - RNA, 23 nt, Human
uggaggacuaacgacccaaaggc

SEQ ID NO: 611096 - RNA, 19 nt, Human
uggagugcagugacgcgau

SEQ ID NO: 611097 - RNA, 23 nt, Human
uggagugcagugacgcgaucucg

SEQ ID NO: 611098 - RNA, 24 nt, Human
uggagugcagugacgcgaucucgg

SEQ ID NO: 611099 - RNA, 24 nt, Human
uggccagccuggucuccaacuccu

SEQ ID NO: 611100 - RNA, 20 nt, Human
uggccucaagcaauccuccc

SEQ ID NO: 611101 - RNA, 21 nt, Human
uggccucaagcaauccuccca

SEQ ID NO: 611102 - RNA, 18 nt, Human
uggcucaaaucacagcaa

SEQ ID NO: 611103 - RNA, 22 nt, Human
ugggaugugaggcagggaccaa

SEQ ID NO: 611104 - RNA, 19 nt, Human
ugggauuacaggcaugagc

SEQ ID NO: 611105 - RNA, 22 nt, Human
ugggauuacaggcaugagcuac

SEQ ID NO: 611106 - RNA, 22 nt, Human
ugggauuacaggcaugagcuac

SEQ ID NO: 611107 - RNA, 24 nt, Human
ugggauuacaggcaugagcuacug

SEQ ID NO: 611108 - RNA, 24 nt, Human
ugggauuacaggcaugagcuacug

SEQ ID NO: 611109 - RNA, 18 nt, Human
ugggauuguaggcaugag

SEQ ID NO: 611110 - RNA, 22 nt, Human
ugggauuguaggcaugagucac

SEQ ID NO: 611111 - RNA, 22 nt, Human
ugggauuguaggcaugagucac

SEQ ID NO: 611112 - RNA, 24 nt, Human
ugggauuguaggcaugagucacug

SEQ ID NO: 611113 - RNA, 20 nt, Human
ugggcagagggcaggcacgu

SEQ ID NO: 611114 - RNA, 22 nt, Human
ugggcucuuuccuaaaugacau

SEQ ID NO: 611115 - RNA, 21 nt, Human
uggggaccuggaaccagggau

SEQ ID NO: 611116 - RNA, 21 nt, Human
ugggggcagaggaaagggcug

SEQ ID NO: 611117 - RNA, 25 nt, Human
ugggugggggcagaggaaagggcug

SEQ ID NO: 611118 - RNA, 26 nt, Human
ugggugggggcagaggaaagggcugg

SEQ ID NO: 611119 - RNA, 24 nt, Human
ugguagagaugagaucucacuaug

SEQ ID NO: 611120 - RNA, 21 nt, Human
ugguauuacaggugcccgcca

SEQ ID NO: 611121 - RNA, 22 nt, Human
ugguauuacaggugcccgccac

SEQ ID NO: 611122 - RNA, 24 nt, Human
ugguauuacaggugcccgccacca

SEQ ID NO: 611123 - RNA, 21 nt, Human
ugguugcuggucugcuuuucc

SEQ ID NO: 611124 - RNA, 21 nt, Human
uguauuuuuaguagagacggg

SEQ ID NO: 611125 - RNA, 20 nt, Human
uguccaggcuggagugcagu

SEQ ID NO: 611126 - RNA, 24 nt, Human
uguccaggcuggagugcagugacg

SEQ ID NO: 611127 - RNA, 18 nt, Human
uguggcuacaccaaggga

SEQ ID NO: 611128 - RNA, 22 nt, Human
ugugguuucugucuucuugaac

SEQ ID NO: 611129 - RNA, 19 nt, Human
uguuguccaggcuggagug

SEQ ID NO: 611130 - RNA, 20 nt, Human
uuaacccuucaauugucaac

SEQ ID NO: 611131 - RNA, 22 nt, Human
uuaauccucacaaucaaccacc

SEQ ID NO: 611132 - RNA, 18 nt, Human
uuaguagagacgggguuu

SEQ ID NO: 611133 - RNA, 22 nt, Human
uuaguagagacgggguuucacc

SEQ ID NO: 611134 - RNA, 24 nt, Human
uuaguagagacgggguuucaccgu

SEQ ID NO: 611135 - RNA, 23 nt, Human
uucaagcaauucucuugacucac

SEQ ID NO: 611136 - RNA, 24 nt, Human
uucccccgcacagcacuggccccc

SEQ ID NO: 611137 - RNA, 23 nt, Human
uuccucaggccaucccugguucu

SEQ ID NO: 611138 - RNA, 20 nt, Human
uuccuccagugaggcugaag

SEQ ID NO: 611139 - RNA, 23 nt, Human
uuccugcaggucucggcagcugg

SEQ ID NO: 611140 - RNA, 21 nt, Human
uuccugggcucaaaagaucuc

SEQ ID NO: 611141 - RNA, 21 nt, Human
uucucuuuuguucuuugcacc

SEQ ID NO: 611142 - RNA, 22 nt, Human
uucucuuuuguucuuugcaccu

SEQ ID NO: 611143 - RNA, 24 nt, Human
uugccagggagagccuuuccucag

SEQ ID NO: 611144 - RNA, 24 nt, Human
uugcuagagacagggucucacuau

SEQ ID NO: 611145 - RNA, 21 nt, Human
uugcugccgccucucucuggc

SEQ ID NO: 611146 - RNA, 24 nt, Human
uugcugccgccucucucuggcccg

SEQ ID NO: 611147 - RNA, 24 nt, Human
uuggaaggccuuuuuuuucuuuuc

SEQ ID NO: 611148 - RNA, 19 nt, Human
uuggccagccuggucucca

SEQ ID NO: 611149 - RNA, 24 nt, Human
uugguagagaugagaucucacuau

SEQ ID NO: 611150 - RNA, 23 nt, Human
uuguauuuuuaguagagacgggg

SEQ ID NO: 611151 - RNA, 24 nt, Human
uuguccaggcuggagugcagugac

SEQ ID NO: 611152 - RNA, 20 nt, Human
uuucaccguguuggccagcu

SEQ ID NO: 611153 - RNA, 18 nt, Human
uuuccagcucccagaagc

SEQ ID NO: 611154 - RNA, 24 nt, Human
uuugaagaaacugggaugugaggc

SEQ ID NO: 611155 - RNA, 24 nt, Human
uuugagaauagcuucagauuuaca

SEQ ID NO: 611156 - RNA, 19 nt, Human
uuugugguuucugucuucu

SEQ ID NO: 611157 - RNA, 24 nt, Human
uuuuuaguagagacgggguuucac

SEQ ID NO: 611158 - RNA, 24 nt, Human
uuuuugguagagaugagaucucac

SEQ ID NO: 611159 - RNA, 18 nt, Human
uuuuuugguagagaugag

SEQ ID NO: 611160 - RNA, 24 nt, Human
aaagugcugggauuacaggcguga

SEQ ID NO: 611161 - RNA, 19 nt, Human
aagugcugggauuacaggc

SEQ ID NO: 611162 - RNA, 19 nt, Human
aagugcugggauuacaggc

SEQ ID NO: 611163 - RNA, 26 nt, Human
aagugcugggauuacaggcgugagcc

SEQ ID NO: 611164 - RNA, 24 nt, Human
acagcguuucaccguguuggccag

SEQ ID NO: 611165 - RNA, 24 nt, Human
accguguuggccagccuggucucg

SEQ ID NO: 611166 - RNA, 24 nt, Human
acucuuguugcccaggcuggagug

SEQ ID NO: 611167 - RNA, 24 nt, Human
agaccucaggugaucccccugccu

SEQ ID NO: 611168 - RNA, 18 nt, Human
aggugaucccccugccuc

SEQ ID NO: 611169 - RNA, 21 nt, Human
agguucaagugauucuccugc

SEQ ID NO: 611170 - RNA, 22 nt, Human
agguucaagugauucuccugcc

SEQ ID NO: 611171 - RNA, 28 nt, Human
agguugagucuacacagaggaacacuuc

SEQ ID NO: 611172 - RNA, 20 nt, Human
aguagagacagcguuucacc

SEQ ID NO: 611173 - RNA, 19 nt, Human
aguagcugggauuacaggc

SEQ ID NO: 611174 - RNA, 24 nt, Human
agugauucuccugccucagccucc

SEQ ID NO: 611175 - RNA, 18 nt, Human
agugcugggauuacaggc

SEQ ID NO: 611176 - RNA, 18 nt, Human
auucuccugccucagccu

SEQ ID NO: 611177 - RNA, 24 nt, Human
auuuuuguauuuuuaguagagaca

SEQ ID NO: 611178 - RNA, 24 nt, Human
caaagugcugggauuacaggcgug

SEQ ID NO: 611179 - RNA, 20 nt, Human
caagugauucuccugccuca

SEQ ID NO: 611180 - RNA, 22 nt, Human
caagugauucuccugccucagc

SEQ ID NO: 611181 - RNA, 24 nt, Human
caccacacccagcuaauuuuugua

SEQ ID NO: 611182 - RNA, 19 nt, Human
caccguguuggccagccug

SEQ ID NO: 611183 - RNA, 21 nt, Human
caccguguuggccagccuggu

SEQ ID NO: 611184 - RNA, 24 nt, Human
caccguguuggccagccuggucuc

SEQ ID NO: 611185 - RNA, 24 nt, Human
cacucuuguugcccaggcuggagu

SEQ ID NO: 611186 - RNA, 21 nt, Human
cacugcaaccuccgccuccca

SEQ ID NO: 611187 - RNA, 19 nt, Human
cagcguuucaccguguugg

SEQ ID NO: 611188 - RNA, 22 nt, Human
caggugaucccccugccucggc

SEQ ID NO: 611189 - RNA, 23 nt, Human
cauggugugaugcuugcuccgca

SEQ ID NO: 611190 - RNA, 20 nt, Human
ccaaagugcugggauuacag

SEQ ID NO: 611191 - RNA, 22 nt, Human
ccaaagugcugggauuacaggc

SEQ ID NO: 611192 - RNA, 22 nt, Human
ccaaagugcugggauuacaggc

SEQ ID NO: 611193 - RNA, 24 nt, Human
ccaaagugcugggauuacaggcgu

SEQ ID NO: 611194 - RNA, 23 nt, Human
cccagguucaagugauucuccuc

SEQ ID NO: 611195 - RNA, 23 nt, Human
cccagguucaagugauucuccug

SEQ ID NO: 611196 - RNA, 26 nt, Human
cccccugccucggccucccaaagugc

SEQ ID NO: 611197 - RNA, 23 nt, Human
cccgaguagcugggauuacaggc

SEQ ID NO: 611198 - RNA, 24 nt, Human
cccgaguagcugggauuacaggcg

SEQ ID NO: 611199 - RNA, 22 nt, Human
ccgaguagcugggauuacaggc

SEQ ID NO: 611200 - RNA, 24 nt, Human
ccgaguagcugggauuacaggcgu

SEQ ID NO: 611201 - RNA, 24 nt, Human
ccgccucccagguucaagugauuc

SEQ ID NO: 611202 - RNA, 24 nt, Human
ccucccagguucaagugauucucc

SEQ ID NO: 611203 - RNA, 24 nt, Human
ccugccucagccucccgaguagcu

SEQ ID NO: 611204 - RNA, 24 nt, Human
ccugccucggccucccaaagugcu

SEQ ID NO: 611205 - RNA, 22 nt, Human
cgccucccagguucaagugauu

SEQ ID NO: 611206 - RNA, 18 nt, Human
cgugcaccaccacaccca

SEQ ID NO: 611207 - RNA, 23 nt, Human
cgugcaccaccacacccagcuaa

SEQ ID NO: 611208 - RNA, 23 nt, Human
cuaauuuuuguauuuuuaguaga

SEQ ID NO: 611209 - RNA, 24 nt, Human
cucacugcaaccuccgccucccag

SEQ ID NO: 611210 - RNA, 24 nt, Human
cucagccucccgaguagcugggau

SEQ ID NO: 611211 - RNA, 19 nt, Human
cucccagguucaagugauu

SEQ ID NO: 611212 - RNA, 18 nt, Human
cucuuguugcccaggcug

SEQ ID NO: 611213 - RNA, 23 nt, Human
cugcaaccuccgccucccagguu

SEQ ID NO: 611214 - RNA, 24 nt, Human
cugcaaccuccgccucccagguuc

SEQ ID NO: 611215 - RNA, 24 nt, Human
cuggagugcaauggcaugaucucg

SEQ ID NO: 611216 - RNA, 24 nt, Human
cuuguugcccaggcuggagugcaa

SEQ ID NO: 611217 - RNA, 23 nt, Human
gaccucaggugaucccccugccu

SEQ ID NO: 611218 - RNA, 24 nt, Human
gaccucaggugaucccccugccuc

SEQ ID NO: 611219 - RNA, 24 nt, Human
gaguagcugggauuacaggcgugc

SEQ ID NO: 611220 - RNA, 18 nt, Human
gauuacaggcgugagcca

SEQ ID NO: 611221 - RNA, 21 nt, Human
gauuacaggcgugagccacca

SEQ ID NO: 611222 - RNA, 22 nt, Human
gauuacaggcgugagccaccac

SEQ ID NO: 611223 - RNA, 22 nt, Human
gcaaccuccgccucccagguuc

SEQ ID NO: 611224 - RNA, 24 nt, Human
gcccaggcuggagugcaauggcau

SEQ ID NO: 611225 - RNA, 20 nt, Human
gccucagccucccgaguagc

SEQ ID NO: 611226 - RNA, 19 nt, Human
gcuggagugcaauggcaug

SEQ ID NO: 611227 - RNA, 19 nt, Human
ggauuacaggcgugagcca

SEQ ID NO: 611228 - RNA, 18 nt, Human
guagcugggauuacaggc

SEQ ID NO: 611229 - RNA, 18 nt, Human
guagcugggauuacaggc

SEQ ID NO: 611230 - RNA, 24 nt, Human
gugauucuccugccucagccuccc

SEQ ID NO: 611231 - RNA, 24 nt, Human
uaauuuuuguauuuuuaguagaga

SEQ ID NO: 611232 - RNA, 23 nt, Human
uacaggcgugagccaccacgccc

SEQ ID NO: 611233 - RNA, 24 nt, Human
uacaggcgugcaccaccacaccca

SEQ ID NO: 611234 - RNA, 21 nt, Human
uaguagagacagcguuucacc

SEQ ID NO: 611235 - RNA, 24 nt, Human
uaguagagacagcguuucaccgug

SEQ ID NO: 611236 - RNA, 26 nt, Human
uaguagagacagcguuucaccguguu

SEQ ID NO: 611237 - RNA, 19 nt, Human
ucaagugauucuccugccu

SEQ ID NO: 611238 - RNA, 24 nt, Human
ucaccguguuggccagccuggucu

SEQ ID NO: 611239 - RNA, 22 nt, Human
ucacucuuguugcccaggcugg

SEQ ID NO: 611240 - RNA, 23 nt, Human
ucacucuuguugcccaggcugga

SEQ ID NO: 611241 - RNA, 19 nt, Human
ucacugcaaccuccgccuc

SEQ ID NO: 611242 - RNA, 24 nt, Human
ucacugcaaccuccgccucccagg

SEQ ID NO: 611243 - RNA, 25 nt, Human
ucacugcaaccuccgccucccaggu

SEQ ID NO: 611244 - RNA, 27 nt, Human
ucacugcaaccuccgccucccagguuc

SEQ ID NO: 611245 - RNA, 20 nt, Human
ucagccucccgaguagcugg

SEQ ID NO: 611246 - RNA, 24 nt, Human
ucccaaagugcugggauuacaggc

SEQ ID NO: 611247 - RNA, 21 nt, Human
ucccagguucaagugauucuc

SEQ ID NO: 611248 - RNA, 24 nt, Human
ucccagguucaagugauucuccug

SEQ ID NO: 611249 - RNA, 19 nt, Human
ucccccugccucggccucc

SEQ ID NO: 611250 - RNA, 24 nt, Human
ucccgaguagcugggauuacaggc

SEQ ID NO: 611251 - RNA, 18 nt, Human
ucggccucccaaagugcu

SEQ ID NO: 611252 - RNA, 24 nt, Human
ucuccugccucagccucccgagua

SEQ ID NO: 611253 - RNA, 22 nt, Human
ucuuguugcccaggcuggagug

SEQ ID NO: 611254 - RNA, 18 nt, Human
ugcccaggcuggagugca

SEQ ID NO: 611255 - RNA, 21 nt, Human
ugcccaggcuggagugcaaug

SEQ ID NO: 611256 - RNA, 24 nt, Human
ugcccaggcuggagugcaauggca

SEQ ID NO: 611257 - RNA, 24 nt, Human
ugccucagccucccgaguagcugg

SEQ ID NO: 611258 - RNA, 21 nt, Human
ugccucggccucccaaagugc

SEQ ID NO: 611259 - RNA, 24 nt, Human
ugccucggccucccaaagugcugg

SEQ ID NO: 611260 - RNA, 24 nt, Human
ugcugggauuacaggcgugagcca

SEQ ID NO: 611261 - RNA, 19 nt, Human
uggagugcaauggcaugau

SEQ ID NO: 611262 - RNA, 23 nt, Human
uggagugcaauggcaugaucucg

SEQ ID NO: 611263 - RNA, 23 nt, Human
uggccagccuggucucgaacucg

SEQ ID NO: 611264 - RNA, 18 nt, Human
ugggauuacaggcgugag

SEQ ID NO: 611265 - RNA, 19 nt, Human
ugggauuacaggcgugagc

SEQ ID NO: 611266 - RNA, 22 nt, Human
ugggauuacaggcgugagccac

SEQ ID NO: 611267 - RNA, 23 nt, Human
ugggauuacaggcgugagccacc

SEQ ID NO: 611268 - RNA, 24 nt, Human
ugggauuacaggcgugagccacca

SEQ ID NO: 611269 - RNA, 21 nt, Human
ugggauuacaggcgugcacca

SEQ ID NO: 611270 - RNA, 22 nt, Human
ugggauuacaggcgugcaccac

SEQ ID NO: 611271 - RNA, 24 nt, Human
ugggauuacaggcgugcaccacca

SEQ ID NO: 611272 - RNA, 21 nt, Human
uguucuuccccuuugguggca

SEQ ID NO: 611273 - RNA, 20 nt, Human
uguugcccaggcuggagugc

SEQ ID NO: 611274 - RNA, 22 nt, Human
uuaguagagacagcguuucacc

SEQ ID NO: 611275 - RNA, 24 nt, Human
uuaguagagacagcguuucaccgu

SEQ ID NO: 611276 - RNA, 21 nt, Human
uucaagugauucuccugccuc

SEQ ID NO: 611277 - RNA, 23 nt, Human
uucaagugauucuccugccucag

SEQ ID NO: 611278 - RNA, 24 nt, Human
uucaagugauucuccugccucagc

SEQ ID NO: 611279 - RNA, 24 nt, Human
uucacucuuguugcccaggcugga

SEQ ID NO: 611280 - RNA, 18 nt, Human
uugcccaggcuggagugc

SEQ ID NO: 611281 - RNA, 19 nt, Human
uuggccagccuggucucga

SEQ ID NO: 611282 - RNA, 21 nt, Human
uuucaccguguuggccagccu

SEQ ID NO: 611283 - RNA, 24 nt, Human
uuucacucuuguugcccaggcugg

SEQ ID NO: 611284 - RNA, 23 nt, Human
uuuguauuuuuaguagagacagc

SEQ ID NO: 611285 - RNA, 24 nt, Human
uuuuuaguagagacagcguuucac

SEQ ID NO: 611286 - RNA, 20 nt, Human
uuuuuguauuuuuaguagag

SEQ ID NO: 611287 - RNA, 24 nt, Human
aaagugcugggauuacaggcguga

SEQ ID NO: 611288 - RNA, 24 nt, Human
aaagugcugggauuacagguguga

SEQ ID NO: 611289 - RNA, 23 nt, Human
aacauccccuggagugacaagga

SEQ ID NO: 611290 - RNA, 21 nt, Human
aaccaaagaccccugggcucu

SEQ ID NO: 611291 - RNA, 25 nt, Human
aagcucuuggcucacggcaacaucc

SEQ ID NO: 611292 - RNA, 19 nt, Human
aaguagcugggacuacaga

SEQ ID NO: 611293 - RNA, 24 nt, Human
aaguagcugggacuacagaugggu

SEQ ID NO: 611294 - RNA, 26 nt, Human
aaguagcugggacuacagaugggugc

SEQ ID NO: 611295 - RNA, 18 nt, Human
aagugcugggauuacagg

SEQ ID NO: 611296 - RNA, 19 nt, Human
aagugcugggauuacaggc

SEQ ID NO: 611297 - RNA, 19 nt, Human
aagugcugggauuacaggc

SEQ ID NO: 611298 - RNA, 26 nt, Human
aagugcugggauuacaggcgugagcc

SEQ ID NO: 611299 - RNA, 19 nt, Human
aagugcugggauuacaggu

SEQ ID NO: 611300 - RNA, 26 nt, Human
aagugcugggauuacaggugugagcc

SEQ ID NO: 611301 - RNA, 18 nt, Human
acaacuucuaagaggccg

SEQ ID NO: 611302 - RNA, 18 nt, Human
acaccgcacucuggccgg

SEQ ID NO: 611303 - RNA, 19 nt, Human
acacuggucucgcuggugg

SEQ ID NO: 611304 - RNA, 21 nt, Human
acaggcaccugccaccaugcc

SEQ ID NO: 611305 - RNA, 22 nt, Human
accacaggacagagaucgagac

SEQ ID NO: 611306 - RNA, 20 nt, Human
acccuggcucugagccccug

SEQ ID NO: 611307 - RNA, 23 nt, Human
accucagccucccaaguagcugg

SEQ ID NO: 611308 - RNA, 21 nt, Human
acgcaggaggugcaaccaaag

SEQ ID NO: 611309 - RNA, 18 nt, Human
acgccuggggcugugcuc

SEQ ID NO: 611310 - RNA, 18 nt, Human
acgggguuucaccguguu

SEQ ID NO: 611311 - RNA, 19 nt, Human
acgggguuucaccguguua

SEQ ID NO: 611312 - RNA, 20 nt, Human
acgggguuucaccguguuag

SEQ ID NO: 611313 - RNA, 22 nt, Human
acgggguuucaccguguuagcc

SEQ ID NO: 611314 - RNA, 24 nt, Human
acgggguuucaccguguuagccgg

SEQ ID NO: 611315 - RNA, 19 nt, Human
acucucagucccagcaucu

SEQ ID NO: 611316 - RNA, 20 nt, Human
agaugccagcccgacugugg

SEQ ID NO: 611317 - RNA, 24 nt, Human
agcagggacggaggcuccaccaug

SEQ ID NO: 611318 - RNA, 19 nt, Human
agccaccacacuggucucg

SEQ ID NO: 611319 - RNA, 19 nt, Human
agccccucuccacccuccc

SEQ ID NO: 611320 - RNA, 18 nt, Human
aggaggcccuucagaccc

SEQ ID NO: 611321 - RNA, 25 nt, Human
aggcgauccucccaccucagccucc

SEQ ID NO: 611322 - RNA, 25 nt, Human
aggcuggagugcaguggugugaucu

SEQ ID NO: 611323 - RNA, 23 nt, Human
agggauccaccugccuugacuuc

SEQ ID NO: 611324 - RNA, 20 nt, Human
aguagagacgggguuucacc

SEQ ID NO: 611325 - RNA, 21 nt, Human
aguagagacgggguuucaccg

SEQ ID NO: 611326 - RNA, 18 nt, Human
aguagcugggacuacagg

SEQ ID NO: 611327 - RNA, 19 nt, Human
aguagcugggacuacaggc

SEQ ID NO: 611328 - RNA, 19 nt, Human
agugcaguggugugaucuc

SEQ ID NO: 611329 - RNA, 20 nt, Human
agugcaguggugugaucucg

SEQ ID NO: 611330 - RNA, 23 nt, Human
agugcaguggugugaucucggcu

SEQ ID NO: 611331 - RNA, 24 nt, Human
agugcaguggugugaucucggcuc

SEQ ID NO: 611332 - RNA, 22 nt, Human
agugcauacaccccuacuccag

SEQ ID NO: 611333 - RNA, 18 nt, Human
agugcugggauuacaggc

SEQ ID NO: 611334 - RNA, 18 nt, Human
augagcagggacggaggc

SEQ ID NO: 611335 - RNA, 19 nt, Human
auguugcccaggcuggucu

SEQ ID NO: 611336 - RNA, 24 nt, Human
caaagugcugggauuacaggcgug

SEQ ID NO: 611337 - RNA, 24 nt, Human
caaagugcugggauuacaggugug

SEQ ID NO: 611338 - RNA, 18 nt, Human
caaccaaagaccccuggg

SEQ ID NO: 611339 - RNA, 23 nt, Human
caagcucuuggcucacggcaaca

SEQ ID NO: 611340 - RNA, 24 nt, Human
caccacacuggucucgcugguggu

SEQ ID NO: 611341 - RNA, 21 nt, Human
caccaugacacucucaguccc

SEQ ID NO: 611342 - RNA, 24 nt, Human
caccguguuagccgggauggucuc

SEQ ID NO: 611343 - RNA, 23 nt, Human
caccugccuugacuucccaaagu

SEQ ID NO: 611344 - RNA, 22 nt, Human
cacgccauucuucugccucagc

SEQ ID NO: 611345 - RNA, 21 nt, Human
cacuguaagcuccaccuccca

SEQ ID NO: 611346 - RNA, 22 nt, Human
cagagggaaagcugaccaggac

SEQ ID NO: 611347 - RNA, 25 nt, Human
cagcaacauccccuggagugacugg

SEQ ID NO: 611348 - RNA, 18 nt, Human
cagcacaccgcacucugg

SEQ ID NO: 611349 - RNA, 24 nt, Human
cagcaucuccucagcccagucacc

SEQ ID NO: 611350 - RNA, 24 nt, Human
cagggucuugcucuguugcccagg

SEQ ID NO: 611351 - RNA, 18 nt, Human
caggugggguaaaggcag

SEQ ID NO: 611352 - RNA, 27 nt, Human
caucucagccugcagugcauacacccc

SEQ ID NO: 611353 - RNA, 21 nt, Human
caucuccucagcccagucacc

SEQ ID NO: 611354 - RNA, 21 nt, Human
ccaaagugcugggauuacagg

SEQ ID NO: 611355 - RNA, 21 nt, Human
ccaaagugcugggauuacagg

SEQ ID NO: 611356 - RNA, 22 nt, Human
ccaaagugcugggauuacaggc

SEQ ID NO: 611357 - RNA, 22 nt, Human
ccaaagugcugggauuacaggc

SEQ ID NO: 611358 - RNA, 24 nt, Human
ccaaagugcugggauuacaggcgu

SEQ ID NO: 611359 - RNA, 24 nt, Human
ccaaagugcugggauuacaggugu

SEQ ID NO: 611360 - RNA, 21 nt, Human
ccacaggacagagaucgagac

SEQ ID NO: 611361 - RNA, 20 nt, Human
ccaccgcgcccagcccugcc

SEQ ID NO: 611362 - RNA, 20 nt, Human
ccaccgcgcccagcccugcc

SEQ ID NO: 611363 - RNA, 22 nt, Human
ccagcacagcacaccgcacucu

SEQ ID NO: 611364 - RNA, 27 nt, Human
ccagcacagcacaccgcacucuggccg

SEQ ID NO: 611365 - RNA, 22 nt, Human
ccagcaucuccucagcccaguc

SEQ ID NO: 611366 - RNA, 27 nt, Human
ccagcccugccuggcuaguuuuuguaa

SEQ ID NO: 611367 - RNA, 20 nt, Human
ccaggcuggagugcaguggu

SEQ ID NO: 611368 - RNA, 23 nt, Human
cccaaguagcugggacuacagau

SEQ ID NO: 611369 - RNA, 23 nt, Human
cccaccucagccucccaaguagc

SEQ ID NO: 611370 - RNA, 22 nt, Human
cccaggcuggagugcaguggug

SEQ ID NO: 611371 - RNA, 21 nt, Human
ccccaggcuggagugcagugg

SEQ ID NO: 611372 - RNA, 24 nt, Human
ccccugaucacaccugcugacacc

SEQ ID NO: 611373 - RNA, 18 nt, Human
ccccugggcucucacagg

SEQ ID NO: 611374 - RNA, 23 nt, Human
cccgaguagcugggacuacaggc

SEQ ID NO: 611375 - RNA, 24 nt, Human
cccgaguagcugggacuacaggca

SEQ ID NO: 611376 - RNA, 22 nt, Human
cccuacuccaggccugucccuc

SEQ ID NO: 611377 - RNA, 25 nt, Human
cccucaggcucaggcgauccuccca

SEQ ID NO: 611378 - RNA, 20 nt, Human
cccuggagugacaaggacuc

SEQ ID NO: 611379 - RNA, 21 nt, Human
cccugggcucucacaggaccc

SEQ ID NO: 611380 - RNA, 22 nt, Human
cccugggcucucacaggacccu

SEQ ID NO: 611381 - RNA, 24 nt, Human
ccucccaaguucacgccauucuuc

SEQ ID NO: 611382 - RNA, 23 nt, Human
ccucccaccucagccucccaagu

SEQ ID NO: 611383 - RNA, 24 nt, Human
ccuccugcuggacacuugccccuc

SEQ ID NO: 611384 - RNA, 18 nt, Human
ccucugcacccugggagu

SEQ ID NO: 611385 - RNA, 21 nt, Human
ccugagcucaagggauccacc

SEQ ID NO: 611386 - RNA, 22 nt, Human
ccugaucacaccugcugacacc

SEQ ID NO: 611387 - RNA, 22 nt, Human
cgagauccgcccgccucggccu

SEQ ID NO: 611388 - RNA, 24 nt, Human
cgccucggccucccaaagugcugg

SEQ ID NO: 611389 - RNA, 18 nt, Human
cgccucuggggugugggg

SEQ ID NO: 611390 - RNA, 23 nt, Human
cgcgcccagcccugccuggcuag

SEQ ID NO: 611391 - RNA, 23 nt, Human
cgcgucugacucucuuccugcag

SEQ ID NO: 611392 - RNA, 20 nt, Human
cggcaacaucccccucaggc

SEQ ID NO: 611393 - RNA, 24 nt, Human
cgggguuucaccguguuagccggg

SEQ ID NO: 611394 - RNA, 24 nt, Human
cucacaggacccuggcucugagcc

SEQ ID NO: 611395 - RNA, 21 nt, Human
cucacggcaacaucccccuca

SEQ ID NO: 611396 - RNA, 24 nt, Human
cucacuguaagcuccaccucccaa

SEQ ID NO: 611397 - RNA, 21 nt, Human
cucagccccucuccacccucc

SEQ ID NO: 611398 - RNA, 24 nt, Human
cucagccucccaaguagcugggac

SEQ ID NO: 611399 - RNA, 24 nt, Human
cucagccucccgaguagcugggac

SEQ ID NO: 611400 - RNA, 24 nt, Human
cucaggcgauccucccaccucagc

SEQ ID NO: 611401 - RNA, 20 nt, Human
cucaggcucaggcgauccuc

SEQ ID NO: 611402 - RNA, 19 nt, Human
cucaucucagccugcagug

SEQ ID NO: 611403 - RNA, 19 nt, Human
cuccagcacagcacaccgc

SEQ ID NO: 611404 - RNA, 24 nt, Human
cuccugaccucgagauccgcccgc

SEQ ID NO: 611405 - RNA, 24 nt, Human
cucgcucugucccccaggcuggag

SEQ ID NO: 611406 - RNA, 19 nt, Human
cucuggguggcagugaggu

SEQ ID NO: 611407 - RNA, 20 nt, Human
cucugucccccaggcuggag

SEQ ID NO: 611408 - RNA, 20 nt, Human
cucuguugcccaggcuggag

SEQ ID NO: 611409 - RNA, 23 nt, Human
cugccucagccucccgaguagcu

SEQ ID NO: 611410 - RNA, 24 nt, Human
cuguaagcuccaccucccaaguuc

SEQ ID NO: 611411 - RNA, 23 nt, Human
cuucccugccacacccucugccc

SEQ ID NO: 611412 - RNA, 21 nt, Human
cuugcucuguugcccaggcug

SEQ ID NO: 611413 - RNA, 24 nt, Human
gacuacaggcaccugccaccaugc

SEQ ID NO: 611414 - RNA, 21 nt, Human
gagacagggucuugcucuguu

SEQ ID NO: 611415 - RNA, 24 nt, Human
gagacgggguuucaccguguuagc

SEQ ID NO: 611416 - RNA, 24 nt, Human
gagcucaagggauccaccugccuu

SEQ ID NO: 611417 - RNA, 18 nt, Human
gaggaggcccuucagacc

SEQ ID NO: 611418 - RNA, 27 nt, Human
gaggcccuucagaccccgcaggccucu

SEQ ID NO: 611419 - RNA, 25 nt, Human
gaguagcugggacuacaggcaccug

SEQ ID NO: 611420 - RNA, 18 nt, Human
gagugcugagugagcagc

SEQ ID NO: 611421 - RNA, 22 nt, Human
gauccgcccgccucggccuccc

SEQ ID NO: 611422 - RNA, 18 nt, Human
gauuacaggcgugagcca

SEQ ID NO: 611423 - RNA, 22 nt, Human
gauuacaggcgugagccaccgc

SEQ ID NO: 611424 - RNA, 22 nt, Human
gauuacaggcgugagccaccgc

SEQ ID NO: 611425 - RNA, 18 nt, Human
gauuacaggugugagcca

SEQ ID NO: 611426 - RNA, 21 nt, Human
gauuacaggugugagccacca

SEQ ID NO: 611427 - RNA, 22 nt, Human
gauuacaggugugagccaccac

SEQ ID NO: 611428 - RNA, 22 nt, Human
gcaacaucccccucaggcucag

SEQ ID NO: 611429 - RNA, 25 nt, Human
gcccagcuaauuuuuuuuguauuuu

SEQ ID NO: 611430 - RNA, 19 nt, Human
gcccaggcuggaguccagu

SEQ ID NO: 611431 - RNA, 25 nt, Human
gcucuguugcccaggcuggagucca

SEQ ID NO: 611432 - RNA, 24 nt, Human
ggauggucucaaucuccugaccuc

SEQ ID NO: 611433 - RNA, 23 nt, Human
ggccagcauauggcaucugugug

SEQ ID NO: 611434 - RNA, 22 nt, Human
ggcuggagugcaguggugugau

SEQ ID NO: 611435 - RNA, 24 nt, Human
ggcuggucuugaacuccugagcuc

SEQ ID NO: 611436 - RNA, 22 nt, Human
gggagucucuguuucagccucc

SEQ ID NO: 611437 - RNA, 24 nt, Human
gggauccaccugccuugacuuccc

SEQ ID NO: 611438 - RNA, 28 nt, Human
gggcccaggugggguaaaggggacugcc

SEQ ID NO: 611439 - RNA, 20 nt, Human
gggggcugagugcuggagug

SEQ ID NO: 611440 - RNA, 23 nt, Human
gggguuucaccguguuagccggg

SEQ ID NO: 611441 - RNA, 21 nt, Human
ggguguggggguguugguccu

SEQ ID NO: 611442 - RNA, 23 nt, Human
guagagacgggguuucaccgugu

SEQ ID NO: 611443 - RNA, 18 nt, Human
guagagauggggucuugc

SEQ ID NO: 611444 - RNA, 19 nt, Human
guauuuuuuguagagaugg

SEQ ID NO: 611445 - RNA, 21 nt, Human
gucccagcaucuccucagccc

SEQ ID NO: 611446 - RNA, 24 nt, Human
gucuugcucuguugcccaggcugg

SEQ ID NO: 611447 - RNA, 23 nt, Human
guuuuuuuuuuuuuuuuuuuggg

SEQ ID NO: 611448 - RNA, 24 nt, Human
uacaggcaccugccaccaugccca

SEQ ID NO: 611449 - RNA, 24 nt, Human
uacaggcgugagccaccgcgccca

SEQ ID NO: 611450 - RNA, 21 nt, Human
uacaggugugagccaccacac

SEQ ID NO: 611451 - RNA, 21 nt, Human
uacaggugugagccaccacac

SEQ ID NO: 611452 - RNA, 22 nt, Human
uacaggugugagccaccacacu

SEQ ID NO: 611453 - RNA, 22 nt, Human
uagagauggggucuugcuaugu

SEQ ID NO: 611454 - RNA, 21 nt, Human
uaguagagacgggguuucacc

SEQ ID NO: 611455 - RNA, 24 nt, Human
uaguagagacgggguuucaccgug

SEQ ID NO: 611456 - RNA, 26 nt, Human
uaguagagacgggguuucaccguguu

SEQ ID NO: 611457 - RNA, 24 nt, Human
uaguuuuuguauuuuuuguagaga

SEQ ID NO: 611458 - RNA, 23 nt, Human
uauguugcccaggcuggucuuga

SEQ ID NO: 611459 - RNA, 24 nt, Human
uauguugcccaggcuggucuugaa

SEQ ID NO: 611460 - RNA, 24 nt, Human
ucaccguguuagccgggauggucu

SEQ ID NO: 611461 - RNA, 19 nt, Human
ucacugccucucacugggc

SEQ ID NO: 611462 - RNA, 19 nt, Human
ucacuguaagcuccaccuc

SEQ ID NO: 611463 - RNA, 24 nt, Human
ucacuguaagcuccaccucccaag

SEQ ID NO: 611464 - RNA, 20 nt, Human
ucagccccucuccacccucc

SEQ ID NO: 611465 - RNA, 18 nt, Human
ucagccucccaaguagcu

SEQ ID NO: 611466 - RNA, 20 nt, Human
ucagccucccaaguagcugg

SEQ ID NO: 611467 - RNA, 23 nt, Human
ucagccucccgaguagcugggac

SEQ ID NO: 611468 - RNA, 23 nt, Human
ucccaaagugcugggauuacagg

SEQ ID NO: 611469 - RNA, 24 nt, Human
ucccaaagugcugggauuacaggc

SEQ ID NO: 611470 - RNA, 23 nt, Human
ucccaaguagcugggacuacaga

SEQ ID NO: 611471 - RNA, 20 nt, Human
ucccaaguucacgccauucu

SEQ ID NO: 611472 - RNA, 24 nt, Human
ucccaaguucacgccauucuucug

SEQ ID NO: 611473 - RNA, 24 nt, Human
ucccccaggcuggagugcaguggu

SEQ ID NO: 611474 - RNA, 24 nt, Human
ucccgaguagcugggacuacaggc

SEQ ID NO: 611475 - RNA, 18 nt, Human
ucccucagccccucucca

SEQ ID NO: 611476 - RNA, 27 nt, Human
uccucccaccucagccucccaaguagc

SEQ ID NO: 611477 - RNA, 18 nt, Human
ucggccucccaaagugcu

SEQ ID NO: 611478 - RNA, 18 nt, Human
ucucacaggacccuggcu

SEQ ID NO: 611479 - RNA, 22 nt, Human
ucucacuucccugccacacccu

SEQ ID NO: 611480 - RNA, 22 nt, Human
ucucgcucugucccccaggcug

SEQ ID NO: 611481 - RNA, 23 nt, Human
ucucgcucugucccccaggcugg

SEQ ID NO: 611482 - RNA, 24 nt, Human
ucucgcucugucccccaggcugga

SEQ ID NO: 611483 - RNA, 23 nt, Human
ucucgcuggugguuuucccccgg

SEQ ID NO: 611484 - RNA, 19 nt, Human
ucuggccggcugucuuccc

SEQ ID NO: 611485 - RNA, 20 nt, Human
ucugggaaggugggagucuc

SEQ ID NO: 611486 - RNA, 19 nt, Human
ucugucccccaggcuggag

SEQ ID NO: 611487 - RNA, 24 nt, Human
ucugucccccaggcuggagugcag

SEQ ID NO: 611488 - RNA, 22 nt, Human
ucuguguggcacugcccaggag

SEQ ID NO: 611489 - RNA, 18 nt, Human
ucuguugcccaggcugga

SEQ ID NO: 611490 - RNA, 22 nt, Human
ucuugaacuccugagcucaagg

SEQ ID NO: 611491 - RNA, 18 nt, Human
ucuugcuauguugcccag

SEQ ID NO: 611492 - RNA, 19 nt, Human
ucuugcuauguugcccagg

SEQ ID NO: 611493 - RNA, 23 nt, Human
ucuugcuauguugcccaggcugg

SEQ ID NO: 611494 - RNA, 24 nt, Human
ucuugcuauguugcccaggcuggu

SEQ ID NO: 611495 - RNA, 22 nt, Human
ucuugcucuguugcccaggcug

SEQ ID NO: 611496 - RNA, 23 nt, Human
ucuugcucuguugcccaggcugg

SEQ ID NO: 611497 - RNA, 24 nt, Human
ucuugcucuguugcccaggcugga

SEQ ID NO: 611498 - RNA, 22 nt, Human
ugagacggagucucgcucuguc

SEQ ID NO: 611499 - RNA, 20 nt, Human
ugagccccugaucacaccug

SEQ ID NO: 611500 - RNA, 20 nt, Human
ugagugagcagcaacauccc

SEQ ID NO: 611501 - RNA, 22 nt, Human
ugcaguggugugaucucggcuc

SEQ ID NO: 611502 - RNA, 27 nt, Human
ugcccaggcuggaguccagucacaagc

SEQ ID NO: 611503 - RNA, 24 nt, Human
ugcccaggcuggucuugaacuccu

SEQ ID NO: 611504 - RNA, 28 nt, Human
ugcccaggcuggucuugaacuccugagc

SEQ ID NO: 611505 - RNA, 24 nt, Human
ugccucagccucccgaguagcugg

SEQ ID NO: 611506 - RNA, 24 nt, Human
ugcuauguugcccaggcuggucuu

SEQ ID NO: 611507 - RNA, 27 nt, Human
ugcuauguugcccaggcuggucuugaa

SEQ ID NO: 611508 - RNA, 24 nt, Human
ugcugggauuacaggcgugagcca

SEQ ID NO: 611509 - RNA, 24 nt, Human
ugcugggauuacaggugugagcca

SEQ ID NO: 611510 - RNA, 19 nt, Human
uggagugcaguggugugau

SEQ ID NO: 611511 - RNA, 23 nt, Human
uggagugcaguggugugaucucg

SEQ ID NO: 611512 - RNA, 24 nt, Human
uggagugcaguggugugaucucgg

SEQ ID NO: 611513 - RNA, 24 nt, Human
uggcuaguuuuuuuuuuuuuuuuu

SEQ ID NO: 611514 - RNA, 21 nt, Human
ugggacuacagaugggugcca

SEQ ID NO: 611515 - RNA, 24 nt, Human
ugggacuacagaugggugccacca

SEQ ID NO: 611516 - RNA, 21 nt, Human
ugggacuacaggcaccugcca

SEQ ID NO: 611517 - RNA, 22 nt, Human
ugggacuacaggcaccugccac

SEQ ID NO: 611518 - RNA, 24 nt, Human
ugggacuacaggcaccugccacca

SEQ ID NO: 611519 - RNA, 25 nt, Human
ugggacuacaggcaccugccaccau

SEQ ID NO: 611520 - RNA, 18 nt, Human
ugggauuacaggcgugag

SEQ ID NO: 611521 - RNA, 19 nt, Human
ugggauuacaggcgugagc

SEQ ID NO: 611522 - RNA, 21 nt, Human
ugggauuacaggcgugagcca

SEQ ID NO: 611523 - RNA, 22 nt, Human
ugggauuacaggcgugagccac

SEQ ID NO: 611524 - RNA, 23 nt, Human
ugggauuacaggcgugagccacc

SEQ ID NO: 611525 - RNA, 24 nt, Human
ugggauuacaggcgugagccaccg

SEQ ID NO: 611526 - RNA, 18 nt, Human
ugggauuacaggugugag

SEQ ID NO: 611527 - RNA, 19 nt, Human
ugggauuacaggugugagc

SEQ ID NO: 611528 - RNA, 22 nt, Human
ugggauuacaggugugagccac

SEQ ID NO: 611529 - RNA, 23 nt, Human
ugggauuacaggugugagccacc

SEQ ID NO: 611530 - RNA, 24 nt, Human
ugggauuacaggugugagccacca

SEQ ID NO: 611531 - RNA, 24 nt, Human
uggggucuugcuauguugcccagg

SEQ ID NO: 611532 - RNA, 19 nt, Human
uggucccugggcacuuccc

SEQ ID NO: 611533 - RNA, 21 nt, Human
uggucccugggcacuucccug

SEQ ID NO: 611534 - RNA, 24 nt, Human
uggugugaucucggcucacuguaa

SEQ ID NO: 611535 - RNA, 24 nt, Human
uguagagauggggucuugcuaugu

SEQ ID NO: 611536 - RNA, 21 nt, Human
uguauuuuuaguagagacggg

SEQ ID NO: 611537 - RNA, 21 nt, Human
uguguggcacugcccaggaga

SEQ ID NO: 611538 - RNA, 22 nt, Human
uguguggcacugcccaggagac

SEQ ID NO: 611539 - RNA, 18 nt, Human
uuaguagagacgggguuu

SEQ ID NO: 611540 - RNA, 22 nt, Human
uuaguagagacgggguuucacc

SEQ ID NO: 611541 - RNA, 24 nt, Human
uuaguagagacgggguuucaccgu

SEQ ID NO: 611542 - RNA, 19 nt, Human
uucccugccacacccucug

SEQ ID NO: 611543 - RNA, 24 nt, Human
uugcucuguugcccaggcuggagu

SEQ ID NO: 611544 - RNA, 24 nt, Human
uuguagagauggggucuugcuaug

SEQ ID NO: 611545 - RNA, 23 nt, Human
uuguauuuuuaguagagacgggg

SEQ ID NO: 611546 - RNA, 19 nt, Human
uuucaccguguuagccggg

SEQ ID NO: 611547 - RNA, 20 nt, Human
uuuguagagauggggucuug

SEQ ID NO: 611548 - RNA, 24 nt, Human
uuuguagagauggggucuugcuau

SEQ ID NO: 611549 - RNA, 20 nt, Human
uuugucacgccuggggcugu

SEQ ID NO: 611550 - RNA, 21 nt, Human
uuuuguauuuuuaguagagac

SEQ ID NO: 611551 - RNA, 24 nt, Human
uuuuuaguagagacgggguuucac

SEQ ID NO: 611552 - RNA, 21 nt, Human
uuuuuguauuuuuaguagaga

SEQ ID NO: 611553 - RNA, 20 nt, Human
uuuuuguauuuuuuguagag

SEQ ID NO: 611554 - RNA, 21 nt, Human
uuuuuguauuuuuuguagaga

SEQ ID NO: 611555 - RNA, 23 nt, Human
uuuuuguauuuuuuguagagaug

SEQ ID NO: 611556 - RNA, 24 nt, Human
uuuuuuguagagauggggucuugc

SEQ ID NO: 611557 - RNA, 21 nt, Human
uuuuuuguauuuuuaguagag

SEQ ID NO: 611558 - RNA, 25 nt, Human
uuuuuuuuuuuugagacggagucuc

SEQ ID NO: 611559 - RNA, 22 nt, Human
uuuuuuuuuuuuuugagacgga

SEQ ID NO: 611560 - RNA, 19 nt, Human
aaaaaaaaaaaaaaaggca

SEQ ID NO: 611561 - RNA, 23 nt, Human
aaaaaaaaaaaaaaaggcagcca

SEQ ID NO: 611562 - RNA, 28 nt, Human
aaaaaaaaaaaaggcagccaggaccuga

SEQ ID NO: 611563 - RNA, 19 nt, Human
aaaauuuuccccagcacac

SEQ ID NO: 611564 - RNA, 19 nt, Human
aaagaaacaggacuuugca

SEQ ID NO: 611565 - RNA, 22 nt, Human
aaagcucccccuucagcugccc

SEQ ID NO: 611566 - RNA, 19 nt, Human
aagcaggggguggagagcg

SEQ ID NO: 611567 - RNA, 26 nt, Human
aagcaggggguggagagcgggggacc

SEQ ID NO: 611568 - RNA, 27 nt, Human
aagcaggggguggagagcgggggaccc

SEQ ID NO: 611569 - RNA, 24 nt, Human
acaaagcaagaccauguaugucuu

SEQ ID NO: 611570 - RNA, 24 nt, Human
acacugccacugcacuccagccug

SEQ ID NO: 611571 - RNA, 19 nt, Human
accucauccaagagaugau

SEQ ID NO: 611572 - RNA, 20 nt, Human
acucuacugcccaguauugg

SEQ ID NO: 611573 - RNA, 18 nt, Human
acugcacuccagccuggg

SEQ ID NO: 611574 - RNA, 23 nt, Human
acugcacuccagccugggcgaca

SEQ ID NO: 611575 - RNA, 21 nt, Human
agcaacucgggcugagguggg

SEQ ID NO: 611576 - RNA, 23 nt, Human
agcacuuugggaggcugaggcag

SEQ ID NO: 611577 - RNA, 24 nt, Human
agcacuuugggaggcugaggcagg

SEQ ID NO: 611578 - RNA, 20 nt, Human
agcgcaugggucacugcugg

SEQ ID NO: 611579 - RNA, 23 nt, Human
agcuggguaugguggcgugugcc

SEQ ID NO: 611580 - RNA, 24 nt, Human
aggauugcuugagcucaggaguuc

SEQ ID NO: 611581 - RNA, 19 nt, Human
aggcaggaggauugcuuga

SEQ ID NO: 611582 - RNA, 23 nt, Human
aggcaggaggauugcuugagcuc

SEQ ID NO: 611583 - RNA, 21 nt, Human
aggcugaggcaggaggauugc

SEQ ID NO: 611584 - RNA, 24 nt, Human
aggcugaggcaggaggauugcuug

SEQ ID NO: 611585 - RNA, 24 nt, Human
agguugaggcugcagugagccaug

SEQ ID NO: 611586 - RNA, 24 nt, Human
aguggcucacgccuguaauccuag

SEQ ID NO: 611587 - RNA, 19 nt, Human
auugcuugagcccagcagg

SEQ ID NO: 611588 - RNA, 18 nt, Human
caccucuaagcauauucu

SEQ ID NO: 611589 - RNA, 19 nt, Human
caccuggcauuagggccag

SEQ ID NO: 611590 - RNA, 20 nt, Human
cacgccuguaauccuagcac

SEQ ID NO: 611591 - RNA, 24 nt, Human
cacgccuguaauccuagcacuuug

SEQ ID NO: 611592 - RNA, 19 nt, Human
cacugcacuccagccuggg

SEQ ID NO: 611593 - RNA, 20 nt, Human
cacugcacuccagccugggc

SEQ ID NO: 611594 - RNA, 22 nt, Human
cacugcacuccagccugggcga

SEQ ID NO: 611595 - RNA, 23 nt, Human
cacugcacuccagccugggcgac

SEQ ID NO: 611596 - RNA, 24 nt, Human
cacugcacuccagccugggcgaca

SEQ ID NO: 611597 - RNA, 26 nt, Human
cacugcacuccagccugggcgacaaa

SEQ ID NO: 611598 - RNA, 20 nt, Human
cacugcuggcccagacuccu

SEQ ID NO: 611599 - RNA, 19 nt, Human
cagauaggccccaaguccu

SEQ ID NO: 611600 - RNA, 22 nt, Human
cagggccacaccucauccaaga

SEQ ID NO: 611601 - RNA, 19 nt, Human
caggggguggagagcggca

SEQ ID NO: 611602 - RNA, 23 nt, Human
caggggguggagagcggcaacug

SEQ ID NO: 611603 - RNA, 21 nt, Human
cagugagccaugacacugcca

SEQ ID NO: 611604 - RNA, 22 nt, Human
caugucucaagcucugggagaa

SEQ ID NO: 611605 - RNA, 24 nt, Human
caugucucaagcucugggagaagg

SEQ ID NO: 611606 - RNA, 19 nt, Human
ccacaggucugcgcaggca

SEQ ID NO: 611607 - RNA, 20 nt, Human
ccacugcacuccagccuggg

SEQ ID NO: 611608 - RNA, 20 nt, Human
ccacugcacuccagccuggg

SEQ ID NO: 611609 - RNA, 21 nt, Human
ccacugcacuccagccugggc

SEQ ID NO: 611610 - RNA, 21 nt, Human
ccacugcacuccagccugggc

SEQ ID NO: 611611 - RNA, 24 nt, Human
ccacugcacuccagccugggcgac

SEQ ID NO: 611612 - RNA, 24 nt, Human
ccagggcagggccacacaccugcc

SEQ ID NO: 611613 - RNA, 21 nt, Human
cccacacucacuacggggcca

SEQ ID NO: 611614 - RNA, 20 nt, Human
cccagcaacucgggcugagg

SEQ ID NO: 611615 - RNA, 24 nt, Human
cccagcaacucgggcugagguggg

SEQ ID NO: 611616 - RNA, 23 nt, Human
ccccuucagcugcccaugagggc

SEQ ID NO: 611617 - RNA, 20 nt, Human
ccuauggcagcagggggcuc

SEQ ID NO: 611618 - RNA, 22 nt, Human
ccugucaucccagcaacucggg

SEQ ID NO: 611619 - RNA, 22 nt, Human
ccuuccacgagcaggcgagggu

SEQ ID NO: 611620 - RNA, 23 nt, Human
cgaaacucuacugcccaguauug

SEQ ID NO: 611621 - RNA, 18 nt, Human
cgccuguaauccuagcac

SEQ ID NO: 611622 - RNA, 24 nt, Human
cgccuguaauccuagcacuuuggg

SEQ ID NO: 611623 - RNA, 24 nt, Human
cggguaaguggcucacgccuguaa

SEQ ID NO: 611624 - RNA, 24 nt, Human
cucacgccuguaauccuagcacuu

SEQ ID NO: 611625 - RNA, 22 nt, Human
cucauggaggccucaaaagggc

SEQ ID NO: 611626 - RNA, 19 nt, Human
cuccaaaaccugcccucuc

SEQ ID NO: 611627 - RNA, 23 nt, Human
cucucagguaaauacagcagcac

SEQ ID NO: 611628 - RNA, 20 nt, Human
cuugagcucaggaguucaag

SEQ ID NO: 611629 - RNA, 23 nt, Human
cuugagcucaggaguucaagacu

SEQ ID NO: 611630 - RNA, 19 nt, Human
gaaggaacgggcacagcag

SEQ ID NO: 611631 - RNA, 21 nt, Human
gacacugccacugcacuccag

SEQ ID NO: 611632 - RNA, 24 nt, Human
gaggugggaggauugcuugagccc

SEQ ID NO: 611633 - RNA, 24 nt, Human
gauugcuugagcucaggaguucaa

SEQ ID NO: 611634 - RNA, 22 nt, Human
gccacugcacuccagccugggc

SEQ ID NO: 611635 - RNA, 24 nt, Human
gccacugcacuccagccugggcga

SEQ ID NO: 611636 - RNA, 24 nt, Human
gcccagcagguugaggcugcagug

SEQ ID NO: 611637 - RNA, 21 nt, Human
gccccaaguccuauggcagca

SEQ ID NO: 611638 - RNA, 21 nt, Human
gccugggcaacauagugagac

SEQ ID NO: 611639 - RNA, 22 nt, Human
gccugggcaacauagugagacc

SEQ ID NO: 611640 - RNA, 23 nt, Human
gccugggcaacauagugagaccu

SEQ ID NO: 611641 - RNA, 20 nt, Human
ggaauuucucuaaagcgcau

SEQ ID NO: 611642 - RNA, 23 nt, Human
ggacuuugcacgcucaccuggca

SEQ ID NO: 611643 - RNA, 23 nt, Human
ggauugcuugagcucaggaguuc

SEQ ID NO: 611644 - RNA, 19 nt, Human
ggccacaccucauccaaga

SEQ ID NO: 611645 - RNA, 18 nt, Human
ggccccacacucacuacg

SEQ ID NO: 611646 - RNA, 24 nt, Human
gggcugaggugggaggauugcuug

SEQ ID NO: 611647 - RNA, 18 nt, Human
ggguaugguggcgugugc

SEQ ID NO: 611648 - RNA, 28 nt, Human
guaugucuuuaaaaaaaaaaaaaaaaaa

SEQ ID NO: 611649 - RNA, 22 nt, Human
uaaggaaaggaaccugggguag

SEQ ID NO: 611650 - RNA, 25 nt, Human
uagcacuuugggaggcugaggcagg

SEQ ID NO: 611651 - RNA, 22 nt, Human
uaggccccaaguccuauggcag

SEQ ID NO: 611652 - RNA, 19 nt, Human
uauaaaaauuagcugggua

SEQ ID NO: 611653 - RNA, 25 nt, Human
uauuccacaggucugcgcaggcaug

SEQ ID NO: 611654 - RNA, 18 nt, Human
uauucugggaggaguggg

SEQ ID NO: 611655 - RNA, 20 nt, Human
ucaaaagggcaggaccagca

SEQ ID NO: 611656 - RNA, 20 nt, Human
ucagguaaauacagcagcac

SEQ ID NO: 611657 - RNA, 24 nt, Human
uccagccugggcgacaaagcaaga

SEQ ID NO: 611658 - RNA, 24 nt, Human
ucucuaaagcgcaucgcccggucc

SEQ ID NO: 611659 - RNA, 23 nt, Human
ucucuggguuggaagagccuuug

SEQ ID NO: 611660 - RNA, 20 nt, Human
ucuuuaaaaaaaaaaaaaaa

SEQ ID NO: 611661 - RNA, 23 nt, Human
ugaaaagcauagcucucagguaa

SEQ ID NO: 611662 - RNA, 21 nt, Human
ugaaauaauagggaauuucuc

SEQ ID NO: 611663 - RNA, 18 nt, Human
ugagccaugacacugcca

SEQ ID NO: 611664 - RNA, 22 nt, Human
ugagcccagcagguugaggcug

SEQ ID NO: 611665 - RNA, 24 nt, Human
ugaggcaggaggauugcuugagcu

SEQ ID NO: 611666 - RNA, 25 nt, Human
ugaggcaggaggauugcuugagcuc

SEQ ID NO: 611667 - RNA, 19 nt, Human
ugagggcacaggugggccc

SEQ ID NO: 611668 - RNA, 20 nt, Human
ugaggugggaggauugcuug

SEQ ID NO: 611669 - RNA, 22 nt, Human
ugaggugggaggauugcuugag

SEQ ID NO: 611670 - RNA, 23 nt, Human
ugaggugggaggauugcuugagc

SEQ ID NO: 611671 - RNA, 24 nt, Human
ugaggugggaggauugcuugagcc

SEQ ID NO: 611672 - RNA, 23 nt, Human
ugcaccaaauggccccagacucc

SEQ ID NO: 611673 - RNA, 20 nt, Human
ugcagugagccaugacacug

SEQ ID NO: 611674 - RNA, 23 nt, Human
ugccugucaucccagcaacucgg

SEQ ID NO: 611675 - RNA, 22 nt, Human
ugcuggcccagacuccuuccac

SEQ ID NO: 611676 - RNA, 22 nt, Human
uggcagauaggccccaaguccu

SEQ ID NO: 611677 - RNA, 24 nt, Human
uggcgugugccugucaucccagca

SEQ ID NO: 611678 - RNA, 24 nt, Human
uggcucacgccuguaauccuagca

SEQ ID NO: 611679 - RNA, 20 nt, Human
ugggaggaguggguuuuaug

SEQ ID NO: 611680 - RNA, 21 nt, Human
ugggaggaguggguuuuauga

SEQ ID NO: 611681 - RNA, 23 nt, Human
ugggaggaguggguuuuaugagg

SEQ ID NO: 611682 - RNA, 20 nt, Human
ugggaggcugaggcaggagg

SEQ ID NO: 611683 - RNA, 22 nt, Human
ugggaggcugaggcaggaggau

SEQ ID NO: 611684 - RNA, 23 nt, Human
ugggggcagauggguucucuggg

SEQ ID NO: 611685 - RNA, 24 nt, Human
ugguggcgugugccugucauccca

SEQ ID NO: 611686 - RNA, 19 nt, Human
uguaaagacaaagaaacag

SEQ ID NO: 611687 - RNA, 23 nt, Human
ugugcugcaguugugaagauggc

SEQ ID NO: 611688 - RNA, 20 nt, Human
uuaaaaaaaaaaaaaaaaaa

SEQ ID NO: 611689 - RNA, 19 nt, Human
uuagcuggguaugguggcg

SEQ ID NO: 611690 - RNA, 24 nt, Human
uuagcuggguaugguggcgugugc

SEQ ID NO: 611691 - RNA, 18 nt, Human
uucaguaaggaaaggaac

SEQ ID NO: 611692 - RNA, 20 nt, Human
uuccucagcagagacccuag

SEQ ID NO: 611693 - RNA, 22 nt, Human
uucugggaggaguggguuuuau

SEQ ID NO: 611694 - RNA, 18 nt, Human
uugcuugagcccagcagg

SEQ ID NO: 611695 - RNA, 20 nt, Human
uugggaggcugaggcaggag

SEQ ID NO: 611696 - RNA, 20 nt, Human
uuuguauucugguuuuuguu

SEQ ID NO: 611697 - RNA, 23 nt, Human
aaaagaaacaucuuaaggcuuua

SEQ ID NO: 611698 - RNA, 19 nt, Human
aaccagcgaccccacacuu

SEQ ID NO: 611699 - RNA, 19 nt, Human
acccccauccccaaaccuc

SEQ ID NO: 611700 - RNA, 23 nt, Human
acccccauccccaaaccucucau

SEQ ID NO: 611701 - RNA, 25 nt, Human
accccuaaacacccccauccccaaa

SEQ ID NO: 611702 - RNA, 22 nt, Human
acuuccccaccaaccagcgacc

SEQ ID NO: 611703 - RNA, 21 nt, Human
agccguguguccccaaggaau

SEQ ID NO: 611704 - RNA, 24 nt, Human
aggaggauguggauagguuacaug

SEQ ID NO: 611705 - RNA, 22 nt, Human
caaccagcgaccccacacuuca

SEQ ID NO: 611706 - RNA, 22 nt, Human
cacccccauccccaaaccucuc

SEQ ID NO: 611707 - RNA, 23 nt, Human
cacccccauccccaaaccucuca

SEQ ID NO: 611708 - RNA, 23 nt, Human
caccucccgucccaggauucgcc

SEQ ID NO: 611709 - RNA, 31 nt, Human
cagggugaaaaccccacgagggaacccacuu

SEQ ID NO: 611710 - RNA, 22 nt, Human
ccaaggaauggaaaccugagcc

SEQ ID NO: 611711 - RNA, 24 nt, Human
cccaaggaauggaaaccugagccc

SEQ ID NO: 611712 - RNA, 21 nt, Human
cccaagguuccccgcugccag

SEQ ID NO: 611713 - RNA, 20 nt, Human
ccccaccaaccagcgacccc

SEQ ID NO: 611714 - RNA, 22 nt, Human
ccccacugccucgcgggggccg

SEQ ID NO: 611715 - RNA, 22 nt, Human
ccccuaaacacccccaucccca

SEQ ID NO: 611716 - RNA, 23 nt, Human
ccccuaaacacccccauccccaa

SEQ ID NO: 611717 - RNA, 24 nt, Human
ccccuaaacacccccauccccaaa

SEQ ID NO: 611718 - RNA, 23 nt, Human
cccuaaacacccccauccccaaa

SEQ ID NO: 611719 - RNA, 21 nt, Human
ccugugccgguuacagccgca

SEQ ID NO: 611720 - RNA, 23 nt, Human
cgccccuguccagaccccuaaac

SEQ ID NO: 611721 - RNA, 22 nt, Human
cgcggugucccguguucucccc

SEQ ID NO: 611722 - RNA, 22 nt, Human
cuggcgccaagcagggugaaaa

SEQ ID NO: 611723 - RNA, 22 nt, Human
gaccccuaaacacccccauccc

SEQ ID NO: 611724 - RNA, 18 nt, Human
gaucucggagagcugcuc

SEQ ID NO: 611725 - RNA, 22 nt, Human
gcgaaccugugccgguuacagc

SEQ ID NO: 611726 - RNA, 23 nt, Human
ggaggcggaacuggggucuucuc

SEQ ID NO: 611727 - RNA, 18 nt, Human
gggaacccacucagcagg

SEQ ID NO: 611728 - RNA, 25 nt, Human
gucacuuccccaccaaccagcgacc

SEQ ID NO: 611729 - RNA, 21 nt, Human
uaaaauuaaugaaugcuuuuc

SEQ ID NO: 611730 - RNA, 23 nt, Human
uaaacacccccauccccaaaccu

SEQ ID NO: 611731 - RNA, 22 nt, Human
uaaacacccccauccccaaacu

SEQ ID NO: 611732 - RNA, 19 nt, Human
uaccauguguuugcauuca

SEQ ID NO: 611733 - RNA, 21 nt, Human
uagguaugcuuagggggucug

SEQ ID NO: 611734 - RNA, 22 nt, Human
ucccaggauucgccugucacuu

SEQ ID NO: 611735 - RNA, 20 nt, Human
ucuccucucccccuauuaaa

SEQ ID NO: 611736 - RNA, 24 nt, Human
ucucggagagcugcucgaguugcc

SEQ ID NO: 611737 - RNA, 20 nt, Human
ucugcugcaggccuuggagu

SEQ ID NO: 611738 - RNA, 25 nt, Human
ucuucucuccucucccccuauuaaa

SEQ ID NO: 611739 - RNA, 22 nt, Human
ugaauuccaacggaaaggcugg

SEQ ID NO: 611740 - RNA, 18 nt, Human
uggaaaccugagccccac

SEQ ID NO: 611741 - RNA, 19 nt, Human
uggaaaccugagccccacu

SEQ ID NO: 611742 - RNA, 23 nt, Human
uggaaaccugagccccacugccu

SEQ ID NO: 611743 - RNA, 20 nt, Human
aagaucccuuacaacugugg

SEQ ID NO: 611744 - RNA, 21 nt, Human
aggcgggaggcgggaggcggg

SEQ ID NO: 611745 - RNA, 18 nt, Human
ccacaagaucccuuacaa

SEQ ID NO: 611746 - RNA, 26 nt, Human
ccuuacaacuguggccuggugccgcc

SEQ ID NO: 611747 - RNA, 21 nt, Human
cugacagccacaagaucccuu

SEQ ID NO: 611748 - RNA, 24 nt, Human
uggagggaggcgggaggcgggagg

SEQ ID NO: 611749 - RNA, 19 nt, Human
uguggccuggugccgccgc

SEQ ID NO: 611750 - RNA, 23 nt, Human
uugaccaacaacauggggucuga

SEQ ID NO: 611751 - RNA, 22 nt, Human
aagcaguaaggaaaugcaaacc

SEQ ID NO: 611752 - RNA, 25 nt, Human
aagcaguaaggaaaugcaaaccuga

SEQ ID NO: 611753 - RNA, 21 nt, Human
agaagcucuuuaaagaaguug

SEQ ID NO: 611754 - RNA, 18 nt, Human
aggcaguucugccaccac

SEQ ID NO: 611755 - RNA, 22 nt, Human
aggcaguucugccaccaccggg

SEQ ID NO: 611756 - RNA, 23 nt, Human
aggcauuugauucugcaaaggca

SEQ ID NO: 611757 - RNA, 23 nt, Human
cacccuccuugcuaagccuccaa

SEQ ID NO: 611758 - RNA, 24 nt, Human
ccacgugugcgacucucuguaacc

SEQ ID NO: 611759 - RNA, 19 nt, Human
ccggcaccacccuccuugc

SEQ ID NO: 611760 - RNA, 23 nt, Human
cgcacaggcaguucugccaccac

SEQ ID NO: 611761 - RNA, 21 nt, Human
cggcaccacccuccuugcuaa

SEQ ID NO: 611762 - RNA, 20 nt, Human
cugccaccaccgggcggagg

SEQ ID NO: 611763 - RNA, 23 nt, Human
gauacauuggaauugugccuuuu

SEQ ID NO: 611764 - RNA, 19 nt, Human
gcgcagcccacguggaagc

SEQ ID NO: 611765 - RNA, 24 nt, Human
uaaaugauacauuggaauugugcc

SEQ ID NO: 611766 - RNA, 19 nt, Human
uaggcccgacaugacgccc

SEQ ID NO: 611767 - RNA, 22 nt, Human
ucugccaccaccgggcggaggc

SEQ ID NO: 611768 - RNA, 24 nt, Human
ugacgcccggcggcgcagcccacg

SEQ ID NO: 611769 - RNA, 20 nt, Human
ugccuuuucuaccacacugg

SEQ ID NO: 611770 - RNA, 19 nt, Human
uguagagcgugucucuuag

SEQ ID NO: 611771 - RNA, 24 nt, Human
uuaaagaaguuguuucuuccaaaa

SEQ ID NO: 611772 - RNA, 21 nt, Human
uucaagacaaagcaguaagga

SEQ ID NO: 611773 - RNA, 18 nt, Human
aaacaggguuucaccgug

SEQ ID NO: 611774 - RNA, 18 nt, Human
aaagugcuggauuacagg

SEQ ID NO: 611775 - RNA, 23 nt, Human
aaagugcuggauuacaggcguga

SEQ ID NO: 611776 - RNA, 24 nt, Human
aaagugcugggauuauagguguga

SEQ ID NO: 611777 - RNA, 18 nt, Human
aagugcugggauuauagg

SEQ ID NO: 611778 - RNA, 26 nt, Human
aagugcugggauuauaggugugagcc

SEQ ID NO: 611779 - RNA, 23 nt, Human
acaggcacccgccaccacgcccg

SEQ ID NO: 611780 - RNA, 18 nt, Human
acaggguuucaccguguu

SEQ ID NO: 611781 - RNA, 19 nt, Human
acaggguuucaccguguua

SEQ ID NO: 611782 - RNA, 20 nt, Human
acaggguuucaccguguuag

SEQ ID NO: 611783 - RNA, 24 nt, Human
acaggguuucaccguguuagccag

SEQ ID NO: 611784 - RNA, 21 nt, Human
accaugcccugccuaaucuug

SEQ ID NO: 611785 - RNA, 20 nt, Human
acgggguuucuccauguugg

SEQ ID NO: 611786 - RNA, 21 nt, Human
acgggguuucuccauguuggu

SEQ ID NO: 611787 - RNA, 24 nt, Human
acgggguuucuccauguuggucag

SEQ ID NO: 611788 - RNA, 20 nt, Human
acugcaagcuccgccuccca

SEQ ID NO: 611789 - RNA, 18 nt, Human
agccaccucgcccagccc

SEQ ID NO: 611790 - RNA, 24 nt, Human
agcgauucuccugccucagccucc

SEQ ID NO: 611791 - RNA, 20 nt, Human
aggcacccgccaccacgccc

SEQ ID NO: 611792 - RNA, 18 nt, Human
aggcaggaaaaaaacggc

SEQ ID NO: 611793 - RNA, 21 nt, Human
aggcaggaaaaaaacggcagg

SEQ ID NO: 611794 - RNA, 22 nt, Human
aggcaggaaaaaaacggcaggg

SEQ ID NO: 611795 - RNA, 22 nt, Human
aggcaggaaaaaaacggcaggu

SEQ ID NO: 611796 - RNA, 20 nt, Human
aggcaggaguggaagguagg

SEQ ID NO: 611797 - RNA, 23 nt, Human
aggcaggaguggaagguaggugg

SEQ ID NO: 611798 - RNA, 18 nt, Human
agguccccuuccuccuag

SEQ ID NO: 611799 - RNA, 24 nt, Human
aggugauccgccugccucagccuc

SEQ ID NO: 611800 - RNA, 20 nt, Human
aggugugagccaccaugccc

SEQ ID NO: 611801 - RNA, 21 nt, Human
aggugugagccaccaugcccu

SEQ ID NO: 611802 - RNA, 18 nt, Human
aguagcugggacuacagg

SEQ ID NO: 611803 - RNA, 23 nt, Human
aguagcugggacuacaggcaccc

SEQ ID NO: 611804 - RNA, 21 nt, Human
aguagcugggguuacaggcau

SEQ ID NO: 611805 - RNA, 24 nt, Human
agugcaauggcacaaucucggcuc

SEQ ID NO: 611806 - RNA, 20 nt, Human
aguggaaacaggguuucacc

SEQ ID NO: 611807 - RNA, 22 nt, Human
auuuuguauuuuuaguagagac

SEQ ID NO: 611808 - RNA, 23 nt, Human
caaagugcuggauuacaggcgug

SEQ ID NO: 611809 - RNA, 24 nt, Human
caaagugcuggauuacaggcguga

SEQ ID NO: 611810 - RNA, 24 nt, Human
caaagugcugggauuauaggugug

SEQ ID NO: 611811 - RNA, 18 nt, Human
caagcaccugguaaggcg

SEQ ID NO: 611812 - RNA, 22 nt, Human
caagcgauucuccugccucagc

SEQ ID NO: 611813 - RNA, 22 nt, Human
cacaccauucuccugccucagc

SEQ ID NO: 611814 - RNA, 18 nt, Human
caccguguuagccaggau

SEQ ID NO: 611815 - RNA, 23 nt, Human
caccguguuagccaggauggucu

SEQ ID NO: 611816 - RNA, 24 nt, Human
caccguguuagccaggauggucuu

SEQ ID NO: 611817 - RNA, 21 nt, Human
cagccuccugaguagcugggg

SEQ ID NO: 611818 - RNA, 24 nt, Human
caggguuucaccguguuagccagg

SEQ ID NO: 611819 - RNA, 22 nt, Human
caggugauccgccugccucagc

SEQ ID NO: 611820 - RNA, 19 nt, Human
ccaaagugcuggauuacag

SEQ ID NO: 611821 - RNA, 21 nt, Human
ccaaagugcuggauuacaggc

SEQ ID NO: 611822 - RNA, 23 nt, Human
ccaaagugcuggauuacaggcgu

SEQ ID NO: 611823 - RNA, 20 nt, Human
ccaaagugcugggauuauag

SEQ ID NO: 611824 - RNA, 21 nt, Human
ccaaagugcugggauuauagg

SEQ ID NO: 611825 - RNA, 24 nt, Human
ccaaagugcugggauuauaggugu

SEQ ID NO: 611826 - RNA, 23 nt, Human
ccaccucgcccagccccuaaucu

SEQ ID NO: 611827 - RNA, 19 nt, Human
ccaggcaggaaaaaaacgg

SEQ ID NO: 611828 - RNA, 21 nt, Human
ccaggcaggaaaaaaacggca

SEQ ID NO: 611829 - RNA, 19 nt, Human
ccauguuggucaggcuggu

SEQ ID NO: 611830 - RNA, 20 nt, Human
ccauguuggucaggcugguc

SEQ ID NO: 611831 - RNA, 24 nt, Human
cccaaagugcuggauuacaggcgu

SEQ ID NO: 611832 - RNA, 23 nt, Human
cccaggcaggaaaaaaacggcag

SEQ ID NO: 611833 - RNA, 19 nt, Human
cccaggcuggagugcaaug

SEQ ID NO: 611834 - RNA, 20 nt, Human
cccagguucacaccauucuc

SEQ ID NO: 611835 - RNA, 18 nt, Human
cccgaccucaggugaucc

SEQ ID NO: 611836 - RNA, 21 nt, Human
cccgaccucaggugauccgcc

SEQ ID NO: 611837 - RNA, 23 nt, Human
cccgaccucaggugauccgccug

SEQ ID NO: 611838 - RNA, 23 nt, Human
cccgaguagcugggacuacaggc

SEQ ID NO: 611839 - RNA, 24 nt, Human
cccgaguagcugggacuacaggca

SEQ ID NO: 611840 - RNA, 20 nt, Human
cccuuguugcccaggcugga

SEQ ID NO: 611841 - RNA, 21 nt, Human
cccuuguugcccaggcuggag

SEQ ID NO: 611842 - RNA, 22 nt, Human
cccuuguugcccaggcuggagu

SEQ ID NO: 611843 - RNA, 21 nt, Human
ccgcaaccuucgccuccuagg

SEQ ID NO: 611844 - RNA, 24 nt, Human
ccgcaaccuucgccuccuagguuc

SEQ ID NO: 611845 - RNA, 26 nt, Human
ccgccugccucagccucccaaagugc

SEQ ID NO: 611846 - RNA, 23 nt, Human
ccuagguucaagcgauucuccug

SEQ ID NO: 611847 - RNA, 24 nt, Human
ccuccuagguucaagcgauucucc

SEQ ID NO: 611848 - RNA, 19 nt, Human
ccuccugacaagcaccugg

SEQ ID NO: 611849 - RNA, 23 nt, Human
ccugaguagcugggguuacaggc

SEQ ID NO: 611850 - RNA, 24 nt, Human
ccugaguagcugggguuacaggca

SEQ ID NO: 611851 - RNA, 24 nt, Human
ccugccucagccucccgaguagcu

SEQ ID NO: 611852 - RNA, 23 nt, Human
ccugccucagccuccugaguagc

SEQ ID NO: 611853 - RNA, 18 nt, Human
cgaccucaggugauccgc

SEQ ID NO: 611854 - RNA, 19 nt, Human
cgccucccagguucacacc

SEQ ID NO: 611855 - RNA, 24 nt, Human
cucagccucccgaguagcugggac

SEQ ID NO: 611856 - RNA, 24 nt, Human
cucagccuccugaguagcuggggu

SEQ ID NO: 611857 - RNA, 23 nt, Human
cucaggugauccgccugccucag

SEQ ID NO: 611858 - RNA, 22 nt, Human
cuccauguuggucaggcugguc

SEQ ID NO: 611859 - RNA, 26 nt, Human
cucccgaccucaggugauccgccugc

SEQ ID NO: 611860 - RNA, 21 nt, Human
cuccgggcuagguccccuucc

SEQ ID NO: 611861 - RNA, 24 nt, Human
cuccugaccucaugauccgccugc

SEQ ID NO: 611862 - RNA, 23 nt, Human
cugaguagcugggguuacaggca

SEQ ID NO: 611863 - RNA, 24 nt, Human
cugaguagcugggguuacaggcau

SEQ ID NO: 611864 - RNA, 24 nt, Human
cugcaagcuccgccucccagguuc

SEQ ID NO: 611865 - RNA, 23 nt, Human
cugccucagccucccaaagugcu

SEQ ID NO: 611866 - RNA, 24 nt, Human
cugccucagccucccaaagugcug

SEQ ID NO: 611867 - RNA, 23 nt, Human
cugccucagccuccugaguagcu

SEQ ID NO: 611868 - RNA, 23 nt, Human
cugccucggucucccaaagugcu

SEQ ID NO: 611869 - RNA, 19 nt, Human
cuggagauguuccaggcug

SEQ ID NO: 611870 - RNA, 28 nt, Human
cuggcuaauuuuguauuuuuaguagaga

SEQ ID NO: 611871 - RNA, 21 nt, Human
cugggauuauaggugugagcc

SEQ ID NO: 611872 - RNA, 18 nt, Human
cugucacccaggcuggag

SEQ ID NO: 611873 - RNA, 19 nt, Human
cugucacccaggcuggagu

SEQ ID NO: 611874 - RNA, 24 nt, Human
cuuguugcccaggcuggagugcaa

SEQ ID NO: 611875 - RNA, 18 nt, Human
gaaacaggguuucaccgu

SEQ ID NO: 611876 - RNA, 23 nt, Human
gaccucaggugauccgccugccu

SEQ ID NO: 611877 - RNA, 24 nt, Human
gaccucaggugauccgccugccuc

SEQ ID NO: 611878 - RNA, 22 nt, Human
gaccucaugauccgccugccuc

SEQ ID NO: 611879 - RNA, 22 nt, Human
gaccucaugauccgccugccuc

SEQ ID NO: 611880 - RNA, 24 nt, Human
gaccucaugauccgccugccucgg

SEQ ID NO: 611881 - RNA, 23 nt, Human
gagacgggguuucuccauguugg

SEQ ID NO: 611882 - RNA, 24 nt, Human
gagacgggguuucuccauguuggu

SEQ ID NO: 611883 - RNA, 20 nt, Human
gaguagcugggacuacaggc

SEQ ID NO: 611884 - RNA, 22 nt, Human
gaguagcugggguuacaggcau

SEQ ID NO: 611885 - RNA, 24 nt, Human
gaguagcugggguuacaggcaugc

SEQ ID NO: 611886 - RNA, 18 nt, Human
gauuacaggcgugagcca

SEQ ID NO: 611887 - RNA, 20 nt, Human
gauuacaggcgugagccacc

SEQ ID NO: 611888 - RNA, 24 nt, Human
gauuacaggcgugagccaccucgc

SEQ ID NO: 611889 - RNA, 18 nt, Human
gauuauaggugugagcca

SEQ ID NO: 611890 - RNA, 21 nt, Human
gauuauaggugugagccacca

SEQ ID NO: 611891 - RNA, 22 nt, Human
gauuauaggugugagccaccau

SEQ ID NO: 611892 - RNA, 22 nt, Human
gcaagcuccgccucccagguuc

SEQ ID NO: 611893 - RNA, 19 nt, Human
gcccaggcuggagugcaau

SEQ ID NO: 611894 - RNA, 23 nt, Human
gcccggcuaauuuuuuguauuuu

SEQ ID NO: 611895 - RNA, 20 nt, Human
gcccuuguugcccaggcugg

SEQ ID NO: 611896 - RNA, 21 nt, Human
gcccuuguugcccaggcugga

SEQ ID NO: 611897 - RNA, 20 nt, Human
gccucagccucccgaguagc

SEQ ID NO: 611898 - RNA, 25 nt, Human
gccucccagguucacaccauucucc

SEQ ID NO: 611899 - RNA, 23 nt, Human
gcgauucuccugccucagccucc

SEQ ID NO: 611900 - RNA, 27 nt, Human
gcucugucacccaggcuggagugcugu

SEQ ID NO: 611901 - RNA, 19 nt, Human
gcuggagugcaauggcaca

SEQ ID NO: 611902 - RNA, 23 nt, Human
gcuggucuggaacucccgaccuc

SEQ ID NO: 611903 - RNA, 22 nt, Human
ggaagguagguggcugcugggg

SEQ ID NO: 611904 - RNA, 24 nt, Human
ggaagguagguggcugcuggggau

SEQ ID NO: 611905 - RNA, 24 nt, Human
ggauggucuugaucuccugaccuc

SEQ ID NO: 611906 - RNA, 20 nt, Human
ggauuacaggcgugagccac

SEQ ID NO: 611907 - RNA, 24 nt, Human
ggauuauaggugugagccaccaug

SEQ ID NO: 611908 - RNA, 23 nt, Human
gggguuucuccauguuggucagg

SEQ ID NO: 611909 - RNA, 19 nt, Human
ggguuacaggcaugcgcca

SEQ ID NO: 611910 - RNA, 22 nt, Human
ggguuucuccauguuggucagg

SEQ ID NO: 611911 - RNA, 24 nt, Human
ggugauccgccugccucagccucc

SEQ ID NO: 611912 - RNA, 23 nt, Human
guagagacgggguuucuccaugu

SEQ ID NO: 611913 - RNA, 20 nt, Human
guagcugggguuacaggcau

SEQ ID NO: 611914 - RNA, 24 nt, Human
gucuugcucugucacccaggcugg

SEQ ID NO: 611915 - RNA, 18 nt, Human
gugauccgccugccucag

SEQ ID NO: 611916 - RNA, 24 nt, Human
gugauccgccugccucagccuccc

SEQ ID NO: 611917 - RNA, 20 nt, Human
uaauuuuuuguauuuuuagu

SEQ ID NO: 611918 - RNA, 23 nt, Human
uacaggcacccgccaccacgccc

SEQ ID NO: 611919 - RNA, 22 nt, Human
uacaggcaugcgccaccacacc

SEQ ID NO: 611920 - RNA, 18 nt, Human
uacaggcgugagccaccu

SEQ ID NO: 611921 - RNA, 24 nt, Human
uaguagagacgggguuucuccaug

SEQ ID NO: 611922 - RNA, 21 nt, Human
uaguggaaacaggguuucacc

SEQ ID NO: 611923 - RNA, 24 nt, Human
uaguggaaacaggguuucaccgug

SEQ ID NO: 611924 - RNA, 26 nt, Human
uaguggaaacaggguuucaccguguu

SEQ ID NO: 611925 - RNA, 24 nt, Human
uauaggugugagccaccaugcccu

SEQ ID NO: 611926 - RNA, 21 nt, Human
ucacaccauucuccugccuca

SEQ ID NO: 611927 - RNA, 18 nt, Human
ucacccaggcuggagugc

SEQ ID NO: 611928 - RNA, 24 nt, Human
ucaccguguuagccaggauggucu

SEQ ID NO: 611929 - RNA, 18 nt, Human
ucacugcaagcuccgccu

SEQ ID NO: 611930 - RNA, 19 nt, Human
ucacugcaagcuccgccuc

SEQ ID NO: 611931 - RNA, 19 nt, Human
ucacugcaagcuccgccuc

SEQ ID NO: 611932 - RNA, 24 nt, Human
ucacugcaagcuccgccucccagg

SEQ ID NO: 611933 - RNA, 23 nt, Human
ucagccucccgaguagcugggac

SEQ ID NO: 611934 - RNA, 20 nt, Human
ucagccuccugaguagcugg

SEQ ID NO: 611935 - RNA, 19 nt, Human
ucagcucacugcaagcucc

SEQ ID NO: 611936 - RNA, 25 nt, Human
ucagcucacugcaagcuccgccucc

SEQ ID NO: 611937 - RNA, 22 nt, Human
ucaggugauccgccugccucag

SEQ ID NO: 611938 - RNA, 18 nt, Human
uccaggcuggagcggggg

SEQ ID NO: 611939 - RNA, 23 nt, Human
ucccaaagugcuggauuacaggc

SEQ ID NO: 611940 - RNA, 23 nt, Human
ucccaaagugcugggauuauagg

SEQ ID NO: 611941 - RNA, 21 nt, Human
ucccagguucacaccauucuc

SEQ ID NO: 611942 - RNA, 24 nt, Human
ucccagguucacaccauucuccug

SEQ ID NO: 611943 - RNA, 24 nt, Human
ucccgaguagcugggacuacaggc

SEQ ID NO: 611944 - RNA, 24 nt, Human
uccgcaaccuucgccuccuagguu

SEQ ID NO: 611945 - RNA, 29 nt, Human
uccgccugccucggucucccaaagugcug

SEQ ID NO: 611946 - RNA, 21 nt, Human
uccuagguucaagcgauucuc

SEQ ID NO: 611947 - RNA, 24 nt, Human
uccuagguucaagcgauucuccug

SEQ ID NO: 611948 - RNA, 24 nt, Human
uccuagugugcuuugcagcugacc

SEQ ID NO: 611949 - RNA, 24 nt, Human
uccugaguagcugggguuacaggc

SEQ ID NO: 611950 - RNA, 21 nt, Human
uccuggucccaggcuccuuag

SEQ ID NO: 611951 - RNA, 26 nt, Human
uccuuaggauucaggacugguuccca

SEQ ID NO: 611952 - RNA, 25 nt, Human
ucuccaguaugcuuuccuucccaag

SEQ ID NO: 611953 - RNA, 24 nt, Human
ucuccgcaaccuucgccuccuagg

SEQ ID NO: 611954 - RNA, 24 nt, Human
ucuccugccucagccucccgagua

SEQ ID NO: 611955 - RNA, 24 nt, Human
ucuccugccucagccuccugagua

SEQ ID NO: 611956 - RNA, 18 nt, Human
ucugucacccaggcugga

SEQ ID NO: 611957 - RNA, 22 nt, Human
ucuugcucugucacccaggcug

SEQ ID NO: 611958 - RNA, 23 nt, Human
ucuugcucugucacccaggcugg

SEQ ID NO: 611959 - RNA, 24 nt, Human
ucuugcucugucacccaggcugga

SEQ ID NO: 611960 - RNA, 20 nt, Human
ugacaagcaccugguaaggc

SEQ ID NO: 611961 - RNA, 18 nt, Human
ugagacagagucuugcuc

SEQ ID NO: 611962 - RNA, 22 nt, Human
ugagacagagucuugcucuguc

SEQ ID NO: 611963 - RNA, 18 nt, Human
ugcccaggcuggagugca

SEQ ID NO: 611964 - RNA, 21 nt, Human
ugcccaggcuggagugcaaug

SEQ ID NO: 611965 - RNA, 24 nt, Human
ugcccaggcuggagugcaauggca

SEQ ID NO: 611966 - RNA, 20 nt, Human
ugcccugccuaaucuuggau

SEQ ID NO: 611967 - RNA, 22 nt, Human
ugcccuuguugcccaggcugga

SEQ ID NO: 611968 - RNA, 24 nt, Human
ugccucagccucccaaagugcugg

SEQ ID NO: 611969 - RNA, 24 nt, Human
ugccucagccucccgaguagcugg

SEQ ID NO: 611970 - RNA, 24 nt, Human
ugccucagccuccugaguagcugg

SEQ ID NO: 611971 - RNA, 20 nt, Human
ugccugagggcaagccaggc

SEQ ID NO: 611972 - RNA, 24 nt, Human
ugcucugucacccaggcuggagug

SEQ ID NO: 611973 - RNA, 22 nt, Human
ugcuguggcuggaucucagcuc

SEQ ID NO: 611974 - RNA, 23 nt, Human
uggagugcaauggcacaaucucg

SEQ ID NO: 611975 - RNA, 24 nt, Human
uggagugcaauggcacaaucucgg

SEQ ID NO: 611976 - RNA, 20 nt, Human
uggauuacaggcgugagcca

SEQ ID NO: 611977 - RNA, 25 nt, Human
uggauuacaggcgugagccaccucg

SEQ ID NO: 611978 - RNA, 24 nt, Human
uggcacaaucucggcucuccgcaa

SEQ ID NO: 611979 - RNA, 22 nt, Human
uggcuccuggucccaggcuccu

SEQ ID NO: 611980 - RNA, 23 nt, Human
uggcuccuggucccaggcuccuu

SEQ ID NO: 611981 - RNA, 24 nt, Human
uggcuggaucucagcucacugcaa

SEQ ID NO: 611982 - RNA, 21 nt, Human
ugggacuacaggcacccgcca

SEQ ID NO: 611983 - RNA, 22 nt, Human
ugggacuacaggcacccgccac

SEQ ID NO: 611984 - RNA, 24 nt, Human
ugggacuacaggcacccgccacca

SEQ ID NO: 611985 - RNA, 18 nt, Human
ugggauuauaggugugag

SEQ ID NO: 611986 - RNA, 22 nt, Human
ugggauuauaggugugagccac

SEQ ID NO: 611987 - RNA, 23 nt, Human
ugggauuauaggugugagccacc

SEQ ID NO: 611988 - RNA, 24 nt, Human
ugggauuauaggugugagccacca

SEQ ID NO: 611989 - RNA, 25 nt, Human
ugggauuauaggugugagccaccau

SEQ ID NO: 611990 - RNA, 23 nt, Human
ugggcuggagauguuccaggcug

SEQ ID NO: 611991 - RNA, 18 nt, Human
ugggguuacaggcaugcg

SEQ ID NO: 611992 - RNA, 22 nt, Human
ugggguuacaggcaugcgccac

SEQ ID NO: 611993 - RNA, 24 nt, Human
ugggguuacaggcaugcgccacca

SEQ ID NO: 611994 - RNA, 21 nt, Human
uggucaggcuggucuggaacu

SEQ ID NO: 611995 - RNA, 23 nt, Human
uggucuggaacucccgaccucag

SEQ ID NO: 611996 - RNA, 23 nt, Human
ugguguugccugagggcaagcca

SEQ ID NO: 611997 - RNA, 21 nt, Human
uguauuuuuaguagagacggg

SEQ ID NO: 611998 - RNA, 25 nt, Human
ugucugggcuggagauguuccaggu

SEQ ID NO: 611999 - RNA, 19 nt, Human
ugugagccaccaugcccug

SEQ ID NO: 612000 - RNA, 20 nt, Human
uguugcccaggcuggagugc

SEQ ID NO: 612001 - RNA, 18 nt, Human
uuaguagagacgggguuu

SEQ ID NO: 612002 - RNA, 24 nt, Human
uuaguagagacgggguuucuccau

SEQ ID NO: 612003 - RNA, 22 nt, Human
uuaguggaaacaggguuucacc

SEQ ID NO: 612004 - RNA, 24 nt, Human
uuaguggaaacaggguuucaccgu

SEQ ID NO: 612005 - RNA, 21 nt, Human
uucaagcgauucuccugccuc

SEQ ID NO: 612006 - RNA, 23 nt, Human
uucaagcgauucuccugccucag

SEQ ID NO: 612007 - RNA, 24 nt, Human
uucaagcgauucuccugccucagc

SEQ ID NO: 612008 - RNA, 18 nt, Human
uugcccaggcuggagugc

SEQ ID NO: 612009 - RNA, 22 nt, Human
uugcccuuguugcccaggcugg

SEQ ID NO: 612010 - RNA, 23 nt, Human
uugcccuuguugcccaggcugga

SEQ ID NO: 612011 - RNA, 19 nt, Human
uuucaccguguuagccagg

SEQ ID NO: 612012 - RNA, 21 nt, Human
uuucuccauguuggucaggcu

SEQ ID NO: 612013 - RNA, 24 nt, Human
uuugcccuuguugcccaggcugga

SEQ ID NO: 612014 - RNA, 23 nt, Human
uuuugcccuuguugcccaggcug

SEQ ID NO: 612015 - RNA, 19 nt, Human
uuuuguauuuuuaguagag

SEQ ID NO: 612016 - RNA, 20 nt, Human
uuuuguauuuuuaguagaga

SEQ ID NO: 612017 - RNA, 22 nt, Human
uuuuuaguagagacgggguuuc

SEQ ID NO: 612018 - RNA, 24 nt, Human
uuuuuaguggaaacaggguuucac

SEQ ID NO: 612019 - RNA, 19 nt, Human
uuuuuguauuuuuagugga

SEQ ID NO: 612020 - RNA, 18 nt, Human
uuuuuuguauuuuuagug

SEQ ID NO: 612021 - RNA, 20 nt, Human
uuuuuuuuuuugagacagag

SEQ ID NO: 612022 - RNA, 24 nt, Human
uuuuuuuuuuuugagacagagucu

SEQ ID NO: 612023 - RNA, 18 nt, Human
uuuuuuuuuuuuuuuuug

SEQ ID NO: 612024 - RNA, 25 nt, Human
aagcaguccucccaccccagccucc

SEQ ID NO: 612025 - RNA, 19 nt, Human
aaguagcugggacuacaga

SEQ ID NO: 612026 - RNA, 27 nt, Human
aaguagcugggacuacagauacucaac

SEQ ID NO: 612027 - RNA, 21 nt, Human
acagauacucaacaccacacc

SEQ ID NO: 612028 - RNA, 25 nt, Human
accauguugcccaggcuggccucga

SEQ ID NO: 612029 - RNA, 19 nt, Human
acucuaugcccaggcugga

SEQ ID NO: 612030 - RNA, 20 nt, Human
acucuaugcccaggcuggag

SEQ ID NO: 612031 - RNA, 24 nt, Human
acucuaugcccaggcuggagugca

SEQ ID NO: 612032 - RNA, 23 nt, Human
agcaguccucccaccccagccuc

SEQ ID NO: 612033 - RNA, 25 nt, Human
aggcuggagugcaguagcucaaucu

SEQ ID NO: 612034 - RNA, 22 nt, Human
agugcugguauuacaggcguga

SEQ ID NO: 612035 - RNA, 27 nt, Human
caagcaguccucccaccccagccuccc

SEQ ID NO: 612036 - RNA, 27 nt, Human
caagcaguccucccaccccagccuccc

SEQ ID NO: 612037 - RNA, 19 nt, Human
caccacgccccaccaagau

SEQ ID NO: 612038 - RNA, 24 nt, Human
caccauguugcccaggcuggccuc

SEQ ID NO: 612039 - RNA, 27 nt, Human
caccauguugcccaggcuggccucgaa

SEQ ID NO: 612040 - RNA, 24 nt, Human
caccccagccucccaaguagcugg

SEQ ID NO: 612041 - RNA, 18 nt, Human
caccucaaccucccacag

SEQ ID NO: 612042 - RNA, 24 nt, Human
caccucaaccucccacagugcugg

SEQ ID NO: 612043 - RNA, 21 nt, Human
cagauacucaacaccacaccc

SEQ ID NO: 612044 - RNA, 24 nt, Human
cagccucaaccugcuggacucaag

SEQ ID NO: 612045 - RNA, 19 nt, Human
cauguugcccaggcuggcc

SEQ ID NO: 612046 - RNA, 21 nt, Human
cauguugcccaggcuggccuc

SEQ ID NO: 612047 - RNA, 24 nt, Human
cauguugcccaggcuggccucgaa

SEQ ID NO: 612048 - RNA, 24 nt, Human
ccacagugcugguauuacaggcgu

SEQ ID NO: 612049 - RNA, 19 nt, Human
ccaccccagccucccaagu

SEQ ID NO: 612050 - RNA, 23 nt, Human
cccaaguagcugggacuacagau

SEQ ID NO: 612051 - RNA, 23 nt, Human
cccaccccagccucccaaguagc

SEQ ID NO: 612052 - RNA, 23 nt, Human
ccccgagcgccgccggagcaacu

SEQ ID NO: 612053 - RNA, 21 nt, Human
cccgagcgccgccggagcaac

SEQ ID NO: 612054 - RNA, 19 nt, Human
cccucccucccuuccuucc

SEQ ID NO: 612055 - RNA, 23 nt, Human
ccucccaccccagccucccaagu

SEQ ID NO: 612056 - RNA, 19 nt, Human
ccucccuuccuuccuuuuu

SEQ ID NO: 612057 - RNA, 20 nt, Human
ccucccuuccuuccuuuuuc

SEQ ID NO: 612058 - RNA, 24 nt, Human
cgaucugcccaccucaaccuccca

SEQ ID NO: 612059 - RNA, 24 nt, Human
cucaagcaguccucccaccccagc

SEQ ID NO: 612060 - RNA, 21 nt, Human
cucaggcgaucugcccaccuc

SEQ ID NO: 612061 - RNA, 23 nt, Human
cugcagccucaaccugcuggacu

SEQ ID NO: 612062 - RNA, 20 nt, Human
gcccaggcuggagugcagua

SEQ ID NO: 612063 - RNA, 25 nt, Human
gcuggagugcaguagcucaaucuca

SEQ ID NO: 612064 - RNA, 22 nt, Human
ggaauuucaccauguugcccag

SEQ ID NO: 612065 - RNA, 23 nt, Human
ggaauuucaccauguugcccagg

SEQ ID NO: 612066 - RNA, 22 nt, Human
guagagauggaauuucaccaug

SEQ ID NO: 612067 - RNA, 18 nt, Human
gugaagccaccacgcccc

SEQ ID NO: 612068 - RNA, 23 nt, Human
uacagauacucaacaccacaccc

SEQ ID NO: 612069 - RNA, 22 nt, Human
uagagauggaauuucaccaugu

SEQ ID NO: 612070 - RNA, 23 nt, Human
uagcucaaucucagcucacugca

SEQ ID NO: 612071 - RNA, 20 nt, Human
uaugcccaggcuggagugca

SEQ ID NO: 612072 - RNA, 21 nt, Human
ucaccauguugcccaggcugg

SEQ ID NO: 612073 - RNA, 18 nt, Human
ucacugcagccucaaccu

SEQ ID NO: 612074 - RNA, 19 nt, Human
ucacugcagccucaaccug

SEQ ID NO: 612075 - RNA, 19 nt, Human
uccaguaguaguccaagaa

SEQ ID NO: 612076 - RNA, 18 nt, Human
ucccaaguagcugggacu

SEQ ID NO: 612077 - RNA, 24 nt, Human
ucccacagugcugguauuacaggc

SEQ ID NO: 612078 - RNA, 18 nt, Human
uccuaggcucaggcgauc

SEQ ID NO: 612079 - RNA, 20 nt, Human
uccuaggcucaggcgaucug

SEQ ID NO: 612080 - RNA, 27 nt, Human
uccucccaccccagccucccaaguagc

SEQ ID NO: 612081 - RNA, 21 nt, Human
ucugcccaccucaaccuccca

SEQ ID NO: 612082 - RNA, 19 nt, Human
ucuucugugucuucccaug

SEQ ID NO: 612083 - RNA, 22 nt, Human
ugcaguagcucaaucucagcuc

SEQ ID NO: 612084 - RNA, 19 nt, Human
ugcccaggcuggagugcag

SEQ ID NO: 612085 - RNA, 25 nt, Human
ugcccaggcuggagugcaguagcuc

SEQ ID NO: 612086 - RNA, 24 nt, Human
ugcccaggcuggccucgaacuccu

SEQ ID NO: 612087 - RNA, 24 nt, Human
uggaauuucaccauguugcccagg

SEQ ID NO: 612088 - RNA, 24 nt, Human
ugggacuacagauacucaacacca

SEQ ID NO: 612089 - RNA, 19 nt, Human
ugguauuacaggcgugaag

SEQ ID NO: 612090 - RNA, 23 nt, Human
ugguauuacaggcgugaagccac

SEQ ID NO: 612091 - RNA, 25 nt, Human
ugguauuacaggcgugaagccacca

SEQ ID NO: 612092 - RNA, 20 nt, Human
uguagagauggaauuucacc

SEQ ID NO: 612093 - RNA, 18 nt, Human
uuacaggcgugaagccac

SEQ ID NO: 612094 - RNA, 23 nt, Human
uuacucuaugcccaggcuggagu

SEQ ID NO: 612095 - RNA, 24 nt, Human
uucccucccucccuuccuuccuuu

SEQ ID NO: 612096 - RNA, 24 nt, Human
uuguagagauggaauuucaccaug

SEQ ID NO: 612097 - RNA, 24 nt, Human
uuguuggcaugguugauucccucc

SEQ ID NO: 612098 - RNA, 21 nt, Human
uuucaccauguugcccaggcu

SEQ ID NO: 612099 - RNA, 22 nt, Human
uuucaccauguugcccaggcug

SEQ ID NO: 612100 - RNA, 24 nt, Human
uuuguagagauggaauuucaccau

SEQ ID NO: 612101 - RNA, 24 nt, Human
uuuuuuguagagauggaauuucac

SEQ ID NO: 612102 - RNA, 25 nt, Human
acagugacacagaaaaaugucucac

SEQ ID NO: 612103 - RNA, 19 nt, Human
agagucaugcaugcccucc

SEQ ID NO: 612104 - RNA, 20 nt, Human
cacgcagagcaacacgcagu

SEQ ID NO: 612105 - RNA, 23 nt, Human
cagcaauaaaaacacguggcucc

SEQ ID NO: 612106 - RNA, 25 nt, Human
cagcaauaaaaacacguggcuccaa

SEQ ID NO: 612107 - RNA, 23 nt, Human
cagugagacuucugggaaggcuu

SEQ ID NO: 612108 - RNA, 18 nt, Human
ccaacagggccuagaucc

SEQ ID NO: 612109 - RNA, 21 nt, Human
cccaaaccuugagcuccccuc

SEQ ID NO: 612110 - RNA, 24 nt, Human
ccccacccaaaccuugagcucccc

SEQ ID NO: 612111 - RNA, 21 nt, Human
cccuccugaugggcucucaac

SEQ ID NO: 612112 - RNA, 19 nt, Human
ccuagauccucuggguucu

SEQ ID NO: 612113 - RNA, 27 nt, Human
cgaauuauaaaaagacaccaaaugucu

SEQ ID NO: 612114 - RNA, 19 nt, Human
cgcacggacaugggaacac

SEQ ID NO: 612115 - RNA, 22 nt, Human
cuccaagauaauacauguugcc

SEQ ID NO: 612116 - RNA, 18 nt, Human
cuccccuccccuccccaa

SEQ ID NO: 612117 - RNA, 18 nt, Human
cuccccuccccuccccaa

SEQ ID NO: 612118 - RNA, 23 nt, Human
cuggguucuccaugccccaucug

SEQ ID NO: 612119 - RNA, 24 nt, Human
cuggugggacagcugcuuuucgua

SEQ ID NO: 612120 - RNA, 18 nt, Human
gagacuucugggaaggcu

SEQ ID NO: 612121 - RNA, 21 nt, Human
uaaaaacacguggcuccaaga

SEQ ID NO: 612122 - RNA, 27 nt, Human
ucagcaauaaaaacacguggcuccaag

SEQ ID NO: 612123 - RNA, 21 nt, Human
uccucuggguucuccaugccc

SEQ ID NO: 612124 - RNA, 23 nt, Human
uccucuggguucuccaugcccca

SEQ ID NO: 612125 - RNA, 20 nt, Human
ugagacuucugggaaggcuu

SEQ ID NO: 612126 - RNA, 19 nt, Human
ugagcuccccuccccuccc

SEQ ID NO: 612127 - RNA, 20 nt, Human
ugagcuccccuccccucccc

SEQ ID NO: 612128 - RNA, 19 nt, Human
ugaguccccacccaaaccu

SEQ ID NO: 612129 - RNA, 20 nt, Human
ugggaacacacgcagagcaa

SEQ ID NO: 612130 - RNA, 21 nt, Human
ugggaaggcuuucccacagug

SEQ ID NO: 612131 - RNA, 19 nt, Human
ugggcucucaacacacgca

SEQ ID NO: 612132 - RNA, 20 nt, Human
ugggcugaguccccacccaa

SEQ ID NO: 612133 - RNA, 18 nt, Human
uggguucuccaugcccca

SEQ ID NO: 612134 - RNA, 21 nt, Human
uugagcuccccuccccucccc

SEQ ID NO: 612135 - RNA, 25 nt, Human
aaaaaaaaaagaaaaaaaaaggggg

SEQ ID NO: 612136 - RNA, 24 nt, Human
aaaaagaaaaaaaaaggcaaaccg

SEQ ID NO: 612137 - RNA, 19 nt, Human
aaaaaguuuccugggccuc

SEQ ID NO: 612138 - RNA, 20 nt, Human
aaaagaaaaaaaaaggcaaa

SEQ ID NO: 612139 - RNA, 25 nt, Human
aaaagaaaaaaaaaggcaaaccgca

SEQ ID NO: 612140 - RNA, 28 nt, Human
aaacaggcuaacacauagaccggacccc

SEQ ID NO: 612141 - RNA, 20 nt, Human
aaagaagguagagaguggga

SEQ ID NO: 612142 - RNA, 18 nt, Human
aaaggcaaaccgcaaaaa

SEQ ID NO: 612143 - RNA, 23 nt, Human
aaaggcaaaccgcaaaaaaaaau

SEQ ID NO: 612144 - RNA, 22 nt, Human
aagaaaaaaaaaggcaaaccgc

SEQ ID NO: 612145 - RNA, 24 nt, Human
aagaaaaaaaaaggcaaaccgcaa

SEQ ID NO: 612146 - RNA, 19 nt, Human
aagacccucuccaccuuaa

SEQ ID NO: 612147 - RNA, 21 nt, Human
acaaagcuuuuaguaacaguu

SEQ ID NO: 612148 - RNA, 23 nt, Human
acagccugcaggcccgagagcca

SEQ ID NO: 612149 - RNA, 27 nt, Human
acuccugccucagccucccacaugagc

SEQ ID NO: 612150 - RNA, 23 nt, Human
aggcuuuuaaacaaccgcgguuc

SEQ ID NO: 612151 - RNA, 22 nt, Human
auaauggcuucccuauaaaaca

SEQ ID NO: 612152 - RNA, 21 nt, Human
auacuccugccucagccuccc

SEQ ID NO: 612153 - RNA, 22 nt, Human
aucauaaucaaguuauuuuaau

SEQ ID NO: 612154 - RNA, 19 nt, Human
auuuuuaagcucccauuag

SEQ ID NO: 612155 - RNA, 20 nt, Human
cacaauacuccugccucagc

SEQ ID NO: 612156 - RNA, 22 nt, Human
caccuccucucucucuugcucc

SEQ ID NO: 612157 - RNA, 24 nt, Human
cagcaucuugcuauguugcucagg

SEQ ID NO: 612158 - RNA, 21 nt, Human
ccaaaaaaaaaaaaagaaaaa

SEQ ID NO: 612159 - RNA, 24 nt, Human
ccccauaugacuuggcugcuaccu

SEQ ID NO: 612160 - RNA, 26 nt, Human
ccgcgguuccaaaaaaaaaaaaagaa

SEQ ID NO: 612161 - RNA, 21 nt, Human
ccucaugaauagcuuggugcc

SEQ ID NO: 612162 - RNA, 19 nt, Human
ccuccagguucccucaggc

SEQ ID NO: 612163 - RNA, 20 nt, Human
ccuccucucucucuugcucc

SEQ ID NO: 612164 - RNA, 22 nt, Human
ccucuuuuuuuuaugaauuacc

SEQ ID NO: 612165 - RNA, 27 nt, Human
ccugcaggcccgagagccaaauaagcc

SEQ ID NO: 612166 - RNA, 19 nt, Human
ccugggccucaccagaagc

SEQ ID NO: 612167 - RNA, 18 nt, Human
cgacaccuccugcagccg

SEQ ID NO: 612168 - RNA, 20 nt, Human
cgacaccuccugcagccgca

SEQ ID NO: 612169 - RNA, 23 nt, Human
cucacaauacuccugccucagcc

SEQ ID NO: 612170 - RNA, 19 nt, Human
cuccagguucccucaggcu

SEQ ID NO: 612171 - RNA, 24 nt, Human
cugccucagccucccacaugagcu

SEQ ID NO: 612172 - RNA, 24 nt, Human
cuuaggcaagucacucugaauccc

SEQ ID NO: 612173 - RNA, 22 nt, Human
cuuuuaaacaaccgcgguucca

SEQ ID NO: 612174 - RNA, 21 nt, Human
gaaaaaaaaaggcaaaccgca

SEQ ID NO: 612175 - RNA, 22 nt, Human
gaaaucaaaagacaaagcuuuu

SEQ ID NO: 612176 - RNA, 22 nt, Human
gaaucccagguacaguuuucua

SEQ ID NO: 612177 - RNA, 22 nt, Human
gcccgagagccaaauaagccuc

SEQ ID NO: 612178 - RNA, 18 nt, Human
gcuaccauaccugguagg

SEQ ID NO: 612179 - RNA, 20 nt, Human
gcucgacaccuccugcagcc

SEQ ID NO: 612180 - RNA, 23 nt, Human
gcugaucuggaacuccuggccuc

SEQ ID NO: 612181 - RNA, 22 nt, Human
ggagguguuugggucauggagg

SEQ ID NO: 612182 - RNA, 22 nt, Human
guuccaaaaaaaaaaaaagaaa

SEQ ID NO: 612183 - RNA, 23 nt, Human
uaaugaguucucacuguuaguuc

SEQ ID NO: 612184 - RNA, 22 nt, Human
uacagacagcaucuugcuaugu

SEQ ID NO: 612185 - RNA, 21 nt, Human
uacccagaugucaauuacuaa

SEQ ID NO: 612186 - RNA, 23 nt, Human
uaggcaagucacucugaauccca

SEQ ID NO: 612187 - RNA, 20 nt, Human
uauguugcucaggcugaucu

SEQ ID NO: 612188 - RNA, 21 nt, Human
uauguugcucaggcugaucug

SEQ ID NO: 612189 - RNA, 23 nt, Human
uauguugcucaggcugaucugga

SEQ ID NO: 612190 - RNA, 24 nt, Human
uauguugcucaggcugaucuggaa

SEQ ID NO: 612191 - RNA, 21 nt, Human
uccaaaaaaaaaaaaagaaaa

SEQ ID NO: 612192 - RNA, 23 nt, Human
uccaaaaaaaaaaaaagaaaaaa

SEQ ID NO: 612193 - RNA, 25 nt, Human
uccaaaaaaaaaaaaagaaaaaaaa

SEQ ID NO: 612194 - RNA, 21 nt, Human
uccacaugguaaauaaugagu

SEQ ID NO: 612195 - RNA, 21 nt, Human
ucccacaugagcuaccauacc

SEQ ID NO: 612196 - RNA, 25 nt, Human
ucccagguacaguuuucuaaucuac

SEQ ID NO: 612197 - RNA, 21 nt, Human
ucgacaccuccugcagccgca

SEQ ID NO: 612198 - RNA, 23 nt, Human
ucggagucacaaacucggaggaa

SEQ ID NO: 612199 - RNA, 24 nt, Human
ucucuugcuccugcuauccccaua

SEQ ID NO: 612200 - RNA, 21 nt, Human
ucuuaggcaagucacucugaa

SEQ ID NO: 612201 - RNA, 18 nt, Human
ucuugcuauguugcucag

SEQ ID NO: 612202 - RNA, 19 nt, Human
ucuugcuauguugcucagg

SEQ ID NO: 612203 - RNA, 23 nt, Human
ucuugcuauguugcucaggcuga

SEQ ID NO: 612204 - RNA, 20 nt, Human
ugagcagauguuggugucau

SEQ ID NO: 612205 - RNA, 20 nt, Human
ugccucagccucccacauga

SEQ ID NO: 612206 - RNA, 22 nt, Human
ugcuauguugcucaggcugauc

SEQ ID NO: 612207 - RNA, 18 nt, Human
uggccucacaauacuccu

SEQ ID NO: 612208 - RNA, 18 nt, Human
ugggagccccccuccagg

SEQ ID NO: 612209 - RNA, 21 nt, Human
uguuggugucaugcuuguaca

SEQ ID NO: 612210 - RNA, 18 nt, Human
uuuagagccugccaccuc

SEQ ID NO: 612211 - RNA, 19 nt, Human
uuuccugggccucaccaga

SEQ ID NO: 612212 - RNA, 21 nt, Human
uuuuaagcucccauuaggugg

SEQ ID NO: 612213 - RNA, 18 nt, Human
aaaaaaacagucaccacc

SEQ ID NO: 612214 - RNA, 22 nt, Human
aaaaaaacagucaccacccaaa

SEQ ID NO: 612215 - RNA, 23 nt, Human
aaaaaaacagucaccacccaaaa

SEQ ID NO: 612216 - RNA, 24 nt, Human
aaagaugcauauuccccuuucucc

SEQ ID NO: 612217 - RNA, 22 nt, Human
aaauagagaguagccguccaua

SEQ ID NO: 612218 - RNA, 18 nt, Human
aagugaccccacagagga

SEQ ID NO: 612219 - RNA, 24 nt, Human
acaaaaacaacacucucccaucau

SEQ ID NO: 612220 - RNA, 21 nt, Human
acccaaaagaaaauagugcag

SEQ ID NO: 612221 - RNA, 25 nt, Human
agaaaaaaacagucaccacccaaaa

SEQ ID NO: 612222 - RNA, 22 nt, Human
agacaagcugguaaggccaugc

SEQ ID NO: 612223 - RNA, 18 nt, Human
agacugcaagaaucccua

SEQ ID NO: 612224 - RNA, 24 nt, Human
agaguagccguccauagagaguga

SEQ ID NO: 612225 - RNA, 19 nt, Human
agggagcaggggagcaugc

SEQ ID NO: 612226 - RNA, 20 nt, Human
aucucuuccuuccuccuaca

SEQ ID NO: 612227 - RNA, 19 nt, Human
aucuucucacaucucuguu

SEQ ID NO: 612228 - RNA, 21 nt, Human
augaaagcacaggagaagagg

SEQ ID NO: 612229 - RNA, 22 nt, Human
caaaaacaacacucucccauca

SEQ ID NO: 612230 - RNA, 22 nt, Human
caaaagaaaauagugcagacaa

SEQ ID NO: 612231 - RNA, 23 nt, Human
caaccugucaccaccggagccag

SEQ ID NO: 612232 - RNA, 18 nt, Human
caacuuuuccaccuagca

SEQ ID NO: 612233 - RNA, 20 nt, Human
caagugacaaaaacaacacu

SEQ ID NO: 612234 - RNA, 22 nt, Human
cacagcccuaccuuucucccuc

SEQ ID NO: 612235 - RNA, 22 nt, Human
caccaagucuggcuuguucuca

SEQ ID NO: 612236 - RNA, 20 nt, Human
cauagaaaaugcaauuugac

SEQ ID NO: 612237 - RNA, 18 nt, Human
ccauagcaggacagcacc

SEQ ID NO: 612238 - RNA, 22 nt, Human
ccccuuucucccaacuuuucca

SEQ ID NO: 612239 - RNA, 22 nt, Human
ccuccuaaugcuaaguggaagc

SEQ ID NO: 612240 - RNA, 21 nt, Human
ccugauuggacaggagaaaac

SEQ ID NO: 612241 - RNA, 20 nt, Human
cuacugccuagcucuucuca

SEQ ID NO: 612242 - RNA, 20 nt, Human
cuaguuuuuucccaaagcag

SEQ ID NO: 612243 - RNA, 21 nt, Human
cucauucccccuccacagucc

SEQ ID NO: 612244 - RNA, 22 nt, Human
cuguauuaucuucucacaucuc

SEQ ID NO: 612245 - RNA, 21 nt, Human
cuuugugcuagguacucuucu

SEQ ID NO: 612246 - RNA, 22 nt, Human
cuuuuggggaaagggguaggag

SEQ ID NO: 612247 - RNA, 21 nt, Human
gaccucuccuuccaaaacccc

SEQ ID NO: 612248 - RNA, 23 nt, Human
gcaagugacaaaaacaacacucu

SEQ ID NO: 612249 - RNA, 18 nt, Human
ggagcaggggagcaugcu

SEQ ID NO: 612250 - RNA, 18 nt, Human
gugaauucaccaaaacua

SEQ ID NO: 612251 - RNA, 23 nt, Human
guuauuuugagcuguauaaacca

SEQ ID NO: 612252 - RNA, 19 nt, Human
uaaaugcauuauaccauag

SEQ ID NO: 612253 - RNA, 21 nt, Human
uaaggccaugcuuuggccaca

SEQ ID NO: 612254 - RNA, 19 nt, Human
uacuagggauaucacagug

SEQ ID NO: 612255 - RNA, 22 nt, Human
uaguuuuuaaagugaccccaca

SEQ ID NO: 612256 - RNA, 19 nt, Human
uauagcuagaggcccaugu

SEQ ID NO: 612257 - RNA, 26 nt, Human
uauuaaagaccucuccuuccaaaacc

SEQ ID NO: 612258 - RNA, 21 nt, Human
uauuauguggcucaguacacc

SEQ ID NO: 612259 - RNA, 25 nt, Human
ucaaagcacucuuugccacaggucc

SEQ ID NO: 612260 - RNA, 22 nt, Human
ucacagugaacuuaagucuaaa

SEQ ID NO: 612261 - RNA, 21 nt, Human
ucuagggauaugcaaagucag

SEQ ID NO: 612262 - RNA, 25 nt, Human
ucucuuacacagcagguaccuagac

SEQ ID NO: 612263 - RNA, 22 nt, Human
ugacaaaaacaacacucuccca

SEQ ID NO: 612264 - RNA, 22 nt, Human
ugaccuguccgccuuucuccuu

SEQ ID NO: 612265 - RNA, 21 nt, Human
ugauggugaccuguccgccuu

SEQ ID NO: 612266 - RNA, 19 nt, Human
ugcaaagucagaaaaaaac

SEQ ID NO: 612267 - RNA, 25 nt, Human
ugcaaagucagaaaaaaacagucac

SEQ ID NO: 612268 - RNA, 23 nt, Human
ugccacagguccagcaguguggg

SEQ ID NO: 612269 - RNA, 21 nt, Human
ugccuagcucuucucagccca

SEQ ID NO: 612270 - RNA, 21 nt, Human
ugccugugaaacauuccaccu

SEQ ID NO: 612271 - RNA, 19 nt, Human
uggcuccuaauugcuccuu

SEQ ID NO: 612272 - RNA, 24 nt, Human
uggcuuguucucauucccccucca

SEQ ID NO: 612273 - RNA, 19 nt, Human
uggggaaagggguaggagc

SEQ ID NO: 612274 - RNA, 21 nt, Human
ugucaccaccggagccagagc

SEQ ID NO: 612275 - RNA, 21 nt, Human
uuccccuuucucccaacuuuu

SEQ ID NO: 612276 - RNA, 23 nt, Human
uugaagcuaguaguuuuuaaagu

SEQ ID NO: 612277 - RNA, 24 nt, Human
aaaaaugcagagaagcacacaaga

SEQ ID NO: 612278 - RNA, 22 nt, Human
aaagaaaacacaugacuuugca

SEQ ID NO: 612279 - RNA, 23 nt, Human
aagacaaccaucugaaaggucac

SEQ ID NO: 612280 - RNA, 22 nt, Human
aagcacacaagacaaccaucug

SEQ ID NO: 612281 - RNA, 23 nt, Human
agaaagaaaacacaugacuuugc

SEQ ID NO: 612282 - RNA, 24 nt, Human
agaaagaaaacacaugacuuugca

SEQ ID NO: 612283 - RNA, 25 nt, Human
agagcaccuguccugggcaucuggu

SEQ ID NO: 612284 - RNA, 23 nt, Human
cagagaagcacacaagacaacca

SEQ ID NO: 612285 - RNA, 25 nt, Human
cagcgggacuucuccucucacaucc

SEQ ID NO: 612286 - RNA, 23 nt, Human
caucugguugagauagcagcauc

SEQ ID NO: 612287 - RNA, 18 nt, Human
caugagucuacaauaauc

SEQ ID NO: 612288 - RNA, 24 nt, Human
ccacauuugucuuucuccaauccc

SEQ ID NO: 612289 - RNA, 18 nt, Human
ccaucugaaaguaucccu

SEQ ID NO: 612290 - RNA, 19 nt, Human
cccggucaaaacaacacug

SEQ ID NO: 612291 - RNA, 20 nt, Human
cccuuccuuucuccucuuuc

SEQ ID NO: 612292 - RNA, 18 nt, Human
ccuguuccaggugaccac

SEQ ID NO: 612293 - RNA, 23 nt, Human
cggcuucgcugggguggcuggca

SEQ ID NO: 612294 - RNA, 18 nt, Human
cucuagaucucccgguca

SEQ ID NO: 612295 - RNA, 23 nt, Human
cucucuagaucucccggucaaaa

SEQ ID NO: 612296 - RNA, 23 nt, Human
cucuucccugaacuccuauuugu

SEQ ID NO: 612297 - RNA, 22 nt, Human
cuuccuuucuccucuuucuuuu

SEQ ID NO: 612298 - RNA, 23 nt, Human
gaaaauaguaucccuuuuaguuc

SEQ ID NO: 612299 - RNA, 21 nt, Human
gaaguggggcggguggacagg

SEQ ID NO: 612300 - RNA, 24 nt, Human
gagaaagaaaacacaugacuuugc

SEQ ID NO: 612301 - RNA, 23 nt, Human
gcagaacuaucuuuugcuucuua

SEQ ID NO: 612302 - RNA, 21 nt, Human
gcgaaccgggguuccaggagc

SEQ ID NO: 612303 - RNA, 18 nt, Human
gugguccuaauggcuaga

SEQ ID NO: 612304 - RNA, 24 nt, Human
uaacagaggcugagccacauagug

SEQ ID NO: 612305 - RNA, 19 nt, Human
uaacauagauuggagaccu

SEQ ID NO: 612306 - RNA, 24 nt, Human
uaacccaguaaugcuucccuuccu

SEQ ID NO: 612307 - RNA, 23 nt, Human
uaacugacauguccauuuguggu

SEQ ID NO: 612308 - RNA, 25 nt, Human
uauauguagguguuaggcguauaua

SEQ ID NO: 612309 - RNA, 20 nt, Human
uaucccuuuuaguuccaggg

SEQ ID NO: 612310 - RNA, 23 nt, Human
uaugcuuguaugaagaauauagc

SEQ ID NO: 612311 - RNA, 24 nt, Human
ucaaaacaacacuguccuuugaag

SEQ ID NO: 612312 - RNA, 19 nt, Human
uccugugauuccaaaugcc

SEQ ID NO: 612313 - RNA, 21 nt, Human
ucugagcacucucuagaucuc

SEQ ID NO: 612314 - RNA, 21 nt, Human
ugaaaguaucccuucuuugau

SEQ ID NO: 612315 - RNA, 20 nt, Human
ugagaaagaaaacacaugac

SEQ ID NO: 612316 - RNA, 23 nt, Human
ugauuucuuccacauuugucuuu

SEQ ID NO: 612317 - RNA, 21 nt, Human
ugcagagaagcacacaagaca

SEQ ID NO: 612318 - RNA, 27 nt, Human
ugcagagaagcacacaagacaaccauc

SEQ ID NO: 612319 - RNA, 18 nt, Human
uggcaagcgaaguggggc

SEQ ID NO: 612320 - RNA, 25 nt, Human
uggcaucgccgcgaaccgggguucc

SEQ ID NO: 612321 - RNA, 20 nt, Human
uggggcggguggacagggaa

SEQ ID NO: 612322 - RNA, 24 nt, Human
ugggguggcuggcaucgccgcgaa

SEQ ID NO: 612323 - RNA, 26 nt, Human
uguaaagcacaaaaguagucuccagc

SEQ ID NO: 612324 - RNA, 23 nt, Human
uguacaagaaugucuugucuuuu

SEQ ID NO: 612325 - RNA, 19 nt, Human
uuccaggugaccacaaucc

SEQ ID NO: 612326 - RNA, 18 nt, Human
uuccuuucuccucuuucu

SEQ ID NO: 612327 - RNA, 18 nt, Human
uuccuuucuccucuuucu

SEQ ID NO: 612328 - RNA, 24 nt, Human
uucgcugggguggcuggcaucgcc

SEQ ID NO: 612329 - RNA, 19 nt, Human
uugaauuugcagaacuauc

SEQ ID NO: 612330 - RNA, 19 nt, Human
uugaucuuuuggcucuuug

SEQ ID NO: 612331 - RNA, 27 nt, Human
uuucuuauaaaaauacaggaugagagu

SEQ ID NO: 612332 - RNA, 19 nt, Human
uuugaucuuuuggcucuuu

SEQ ID NO: 612333 - RNA, 20 nt, Human
aaaaacaacaaacuaagggc

SEQ ID NO: 612334 - RNA, 22 nt, Human
aaaaagaaguaaggaaagagaa

SEQ ID NO: 612335 - RNA, 19 nt, Human
aaaacaaacaaacaaaaaa

SEQ ID NO: 612336 - RNA, 20 nt, Human
aaaacaaaggaucaaggaaa

SEQ ID NO: 612337 - RNA, 21 nt, Human
aaacuagaguuacuaccuaau

SEQ ID NO: 612338 - RNA, 19 nt, Human
aaagagcacuucuaccucc

SEQ ID NO: 612339 - RNA, 26 nt, Human
aaaguuccuuccuccucccuccacuu

SEQ ID NO: 612340 - RNA, 20 nt, Human
aacagagugagacuccaucu

SEQ ID NO: 612341 - RNA, 19 nt, Human
aacaugguaaaaccccauc

SEQ ID NO: 612342 - RNA, 20 nt, Human
aacaugguaaaaccccaucu

SEQ ID NO: 612343 - RNA, 21 nt, Human
aacaugguaaaaccccaucuc

SEQ ID NO: 612344 - RNA, 21 nt, Human
aacaugguaaaaccccaucuc

SEQ ID NO: 612345 - RNA, 21 nt, Human
aacccacagacccucuuccuc

SEQ ID NO: 612346 - RNA, 23 nt, Human
aacccgaaaacaaaggaucaagg

SEQ ID NO: 612347 - RNA, 21 nt, Human
aagaagcaccuccauccucac

SEQ ID NO: 612348 - RNA, 24 nt, Human
aagacagaagacaggcaaagagga

SEQ ID NO: 612349 - RNA, 20 nt, Human
aagacgccaccagaagaaga

SEQ ID NO: 612350 - RNA, 21 nt, Human
aagcagaaucugccacgaucu

SEQ ID NO: 612351 - RNA, 21 nt, Human
aagcagacugcaagaugaccc

SEQ ID NO: 612352 - RNA, 19 nt, Human
aagcagguggaucacgagg

SEQ ID NO: 612353 - RNA, 24 nt, Human
aagcagguggaucacgaggucaga

SEQ ID NO: 612354 - RNA, 18 nt, Human
aaggaaagagaagcacag

SEQ ID NO: 612355 - RNA, 18 nt, Human
aaggaaagagaagcacag

SEQ ID NO: 612356 - RNA, 20 nt, Human
aagggcaggccuccucugga

SEQ ID NO: 612357 - RNA, 22 nt, Human
aagggcaggccuccucuggagg

SEQ ID NO: 612358 - RNA, 21 nt, Human
aaguaaggaaagagaagcaca

SEQ ID NO: 612359 - RNA, 22 nt, Human
aaguagaaggggaaauagugag

SEQ ID NO: 612360 - RNA, 24 nt, Human
aaucgcuugaacccaggaggcaga

SEQ ID NO: 612361 - RNA, 21 nt, Human
aauuaucucuucccuuuucug

SEQ ID NO: 612362 - RNA, 20 nt, Human
acaccuggccuacccccuga

SEQ ID NO: 612363 - RNA, 21 nt, Human
acaccuguaaucucagcacuu

SEQ ID NO: 612364 - RNA, 23 nt, Human
acagagugagacuccaucucaaa

SEQ ID NO: 612365 - RNA, 24 nt, Human
acagagugagacuccaucucaaaa

SEQ ID NO: 612366 - RNA, 18 nt, Human
acagccccuccuucuagg

SEQ ID NO: 612367 - RNA, 22 nt, Human
accacauccucccuucaacaac

SEQ ID NO: 612368 - RNA, 24 nt, Human
accauacccccaacccucccaaac

SEQ ID NO: 612369 - RNA, 24 nt, Human
accccaucucugcuaaaaauacaa

SEQ ID NO: 612370 - RNA, 22 nt, Human
accuggccuacccccugacagc

SEQ ID NO: 612371 - RNA, 18 nt, Human
acuacacucuagccuggg

SEQ ID NO: 612372 - RNA, 24 nt, Human
acuacacucuagccuggguaacag

SEQ ID NO: 612373 - RNA, 21 nt, Human
acuccccccucugucuaccac

SEQ ID NO: 612374 - RNA, 24 nt, Human
acucuagccuggguaacagaguga

SEQ ID NO: 612375 - RNA, 18 nt, Human
agaaaggaggggaggagg

SEQ ID NO: 612376 - RNA, 23 nt, Human
agaaguugcagugagcugagauc

SEQ ID NO: 612377 - RNA, 24 nt, Human
agaaguugcagugagcugagauca

SEQ ID NO: 612378 - RNA, 21 nt, Human
agacaaaagaugaaaagagaa

SEQ ID NO: 612379 - RNA, 23 nt, Human
agacaaaagaugaaaagagaaca

SEQ ID NO: 612380 - RNA, 21 nt, Human
agacagaagacaggcaaagag

SEQ ID NO: 612381 - RNA, 22 nt, Human
agagagaaagaugcacagagga

SEQ ID NO: 612382 - RNA, 26 nt, Human
agagaggacagaaaggaggggaggag

SEQ ID NO: 612383 - RNA, 20 nt, Human
agaggaauuccauaaacacu

SEQ ID NO: 612384 - RNA, 18 nt, Human
agaggacagaaaggaggg

SEQ ID NO: 612385 - RNA, 24 nt, Human
agaguucauuucaucuaaaguucc

SEQ ID NO: 612386 - RNA, 20 nt, Human
agcacuuugggaggccgaag

SEQ ID NO: 612387 - RNA, 24 nt, Human
agccuggguaacagagugagacuc

SEQ ID NO: 612388 - RNA, 22 nt, Human
agcucugaugcagugaccuuga

SEQ ID NO: 612389 - RNA, 24 nt, Human
aggaaaugcaaaggcagagagaaa

SEQ ID NO: 612390 - RNA, 23 nt, Human
aggaagacagaagacaggcaaag

SEQ ID NO: 612391 - RNA, 24 nt, Human
aggaagacagaagacaggcaaaga

SEQ ID NO: 612392 - RNA, 23 nt, Human
aggacagaaaggaggggaggagg

SEQ ID NO: 612393 - RNA, 26 nt, Human
aggacagaaaggaggggaggaggggg

SEQ ID NO: 612394 - RNA, 18 nt, Human
aggagggaggaggagggc

SEQ ID NO: 612395 - RNA, 19 nt, Human
aggaggggaggagggggaa

SEQ ID NO: 612396 - RNA, 21 nt, Human
aggagucaagaucaucaagcu

SEQ ID NO: 612397 - RNA, 20 nt, Human
aggcagaaguugcagugagc

SEQ ID NO: 612398 - RNA, 24 nt, Human
aggcagaaguugcagugagcugag

SEQ ID NO: 612399 - RNA, 18 nt, Human
aggcagcucucugucccu

SEQ ID NO: 612400 - RNA, 23 nt, Human
aggcaggggaaucgcuugaaccc

SEQ ID NO: 612401 - RNA, 20 nt, Human
aggcugaggcaggggaaucg

SEQ ID NO: 612402 - RNA, 24 nt, Human
aggcugaggcaggggaaucgcuug

SEQ ID NO: 612403 - RNA, 22 nt, Human
aggcuuuggaguuuucagagaa

SEQ ID NO: 612404 - RNA, 24 nt, Human
agggaagagaaagugggagaggau

SEQ ID NO: 612405 - RNA, 23 nt, Human
agggaccacuuacagcuucugcc

SEQ ID NO: 612406 - RNA, 21 nt, Human
agggggaaaaagaaguaagga

SEQ ID NO: 612407 - RNA, 24 nt, Human
agguggaucacgaggucagaaguu

SEQ ID NO: 612408 - RNA, 24 nt, Human
aguggcuuacaccuguaaucucag

SEQ ID NO: 612409 - RNA, 23 nt, Human
aguuccaaucauaauaucucugu

SEQ ID NO: 612410 - RNA, 24 nt, Human
aucaugccacuacacucuagccug

SEQ ID NO: 612411 - RNA, 23 nt, Human
aucuaaaguuccuuccuccuccc

SEQ ID NO: 612412 - RNA, 25 nt, Human
aucucuucccuuuucugucucccca

SEQ ID NO: 612413 - RNA, 19 nt, Human
augaagcauaugcaugugu

SEQ ID NO: 612414 - RNA, 20 nt, Human
augcauguguuauaggaguu

SEQ ID NO: 612415 - RNA, 21 nt, Human
auuccaggcagcucucugucc

SEQ ID NO: 612416 - RNA, 19 nt, Human
auuccauaaacacucacca

SEQ ID NO: 612417 - RNA, 22 nt, Human
auucuugucuuuaguauguucu

SEQ ID NO: 612418 - RNA, 23 nt, Human
caaacaaaaaaucucaguuuaga

SEQ ID NO: 612419 - RNA, 21 nt, Human
caaacaaacaaaaaaucucag

SEQ ID NO: 612420 - RNA, 25 nt, Human
caaacacacauacaaacagagccac

SEQ ID NO: 612421 - RNA, 18 nt, Human
caaacuaagggcaggccu

SEQ ID NO: 612422 - RNA, 27 nt, Human
caacaacacccucacccaguuugacua

SEQ ID NO: 612423 - RNA, 21 nt, Human
caagaugacccucagucuuga

SEQ ID NO: 612424 - RNA, 20 nt, Human
caaggaaagcagaaucugcc

SEQ ID NO: 612425 - RNA, 23 nt, Human
caaguacaauguggaaugaagca

SEQ ID NO: 612426 - RNA, 19 nt, Human
cacaccuguaaucccagcu

SEQ ID NO: 612427 - RNA, 22 nt, Human
caccagaagaagaagcaccucc

SEQ ID NO: 612428 - RNA, 22 nt, Human
caccauacccccaacccuccca

SEQ ID NO: 612429 - RNA, 24 nt, Human
caccuguaaucccagcuacucagg

SEQ ID NO: 612430 - RNA, 23 nt, Human
caccuguaaucucagcacuuugg

SEQ ID NO: 612431 - RNA, 24 nt, Human
caccuguaaucucagcacuuuggg

SEQ ID NO: 612432 - RNA, 22 nt, Human
caccuuaaccccuuccaaucac

SEQ ID NO: 612433 - RNA, 24 nt, Human
caccuuaaccccuuccaaucacga

SEQ ID NO: 612434 - RNA, 24 nt, Human
cacuacacucuagccuggguaaca

SEQ ID NO: 612435 - RNA, 22 nt, Human
cacucuagccuggguaacagag

SEQ ID NO: 612436 - RNA, 22 nt, Human
cacucuagccuggguaacagag

SEQ ID NO: 612437 - RNA, 24 nt, Human
cacucuagccuggguaacagagug

SEQ ID NO: 612438 - RNA, 19 nt, Human
cagaagaagaagcaccucc

SEQ ID NO: 612439 - RNA, 20 nt, Human
cagaagaagaagcaccucca

SEQ ID NO: 612440 - RNA, 19 nt, Human
cagaagugcuaagaaaagg

SEQ ID NO: 612441 - RNA, 24 nt, Human
cagcacuuugggaggccgaagcag

SEQ ID NO: 612442 - RNA, 26 nt, Human
cagcacuuugggaggccgaagcaggu

SEQ ID NO: 612443 - RNA, 20 nt, Human
cagccaccacucuggucuug

SEQ ID NO: 612444 - RNA, 24 nt, Human
cagcuacucaggaggcugaggcag

SEQ ID NO: 612445 - RNA, 21 nt, Human
caggguagguccaucaguauc

SEQ ID NO: 612446 - RNA, 24 nt, Human
caguaagcaaacugguaaauaucu

SEQ ID NO: 612447 - RNA, 21 nt, Human
cauccucuagaggacagaaca

SEQ ID NO: 612448 - RNA, 20 nt, Human
caucucaaaaacaaacaaac

SEQ ID NO: 612449 - RNA, 23 nt, Human
ccaacccucccaaacacacauac

SEQ ID NO: 612450 - RNA, 20 nt, Human
ccacuacacucuagccuggg

SEQ ID NO: 612451 - RNA, 20 nt, Human
ccacuacacucuagccuggg

SEQ ID NO: 612452 - RNA, 21 nt, Human
ccacuacacucuagccugggu

SEQ ID NO: 612453 - RNA, 22 nt, Human
ccacuacacucuagccugggua

SEQ ID NO: 612454 - RNA, 24 nt, Human
ccacuacacucuagccuggguaac

SEQ ID NO: 612455 - RNA, 24 nt, Human
ccacuuacagcuucugcccauacc

SEQ ID NO: 612456 - RNA, 22 nt, Human
ccauacccccaacccucccaaa

SEQ ID NO: 612457 - RNA, 24 nt, Human
ccauacccccaacccucccaaaca

SEQ ID NO: 612458 - RNA, 19 nt, Human
cccaaauagucaauuacca

SEQ ID NO: 612459 - RNA, 25 nt, Human
cccaacccucccaaacacacauaca

SEQ ID NO: 612460 - RNA, 22 nt, Human
cccacagacccucuuccucaga

SEQ ID NO: 612461 - RNA, 28 nt, Human
cccccaacccucccaaacacacauacaa

SEQ ID NO: 612462 - RNA, 19 nt, Human
ccccugacagccccuccuu

SEQ ID NO: 612463 - RNA, 22 nt, Human
ccccuuuagugcacaagcucaa

SEQ ID NO: 612464 - RNA, 19 nt, Human
ccgaaaacaaaggaucaag

SEQ ID NO: 612465 - RNA, 22 nt, Human
ccuccauccucaccugagaguc

SEQ ID NO: 612466 - RNA, 18 nt, Human
ccuccucccuccacuucu

SEQ ID NO: 612467 - RNA, 24 nt, Human
ccugaccaacaugguaaaacccca

SEQ ID NO: 612468 - RNA, 22 nt, Human
ccuggguaacagagugagacuc

SEQ ID NO: 612469 - RNA, 20 nt, Human
ccuggugcaguuuguuuccu

SEQ ID NO: 612470 - RNA, 21 nt, Human
ccuguaaucccagcuacucag

SEQ ID NO: 612471 - RNA, 25 nt, Human
ccuuccuccucccuccacuucuccc

SEQ ID NO: 612472 - RNA, 20 nt, Human
cgggaaacuagaguuacuac

SEQ ID NO: 612473 - RNA, 18 nt, Human
cuccucccuccacuucuc

SEQ ID NO: 612474 - RNA, 24 nt, Human
cucuacucaccuuaaccccuucca

SEQ ID NO: 612475 - RNA, 25 nt, Human
cucucaguuccaaucauaauaucuc

SEQ ID NO: 612476 - RNA, 20 nt, Human
cucugaugcagugaccuuga

SEQ ID NO: 612477 - RNA, 18 nt, Human
cucuguuacauucccugu

SEQ ID NO: 612478 - RNA, 23 nt, Human
cugaccaacaugguaaaacccca

SEQ ID NO: 612479 - RNA, 26 nt, Human
cuggcccccucgaaucuguccuucca

SEQ ID NO: 612480 - RNA, 21 nt, Human
cuguaaucccagcuacucagg

SEQ ID NO: 612481 - RNA, 22 nt, Human
cuuacaccuguaaucucagcac

SEQ ID NO: 612482 - RNA, 19 nt, Human
cuucaacaacacccucacc

SEQ ID NO: 612483 - RNA, 21 nt, Human
gaaaaaaugcuaaaagagcac

SEQ ID NO: 612484 - RNA, 21 nt, Human
gaaaaagaaguaaggaaagag

SEQ ID NO: 612485 - RNA, 21 nt, Human
gaaaggaggggaggaggggga

SEQ ID NO: 612486 - RNA, 18 nt, Human
gaacccacagacccucuu

SEQ ID NO: 612487 - RNA, 23 nt, Human
gaagacagaagacaggcaaagag

SEQ ID NO: 612488 - RNA, 23 nt, Human
gaagcagguggaucacgagguca

SEQ ID NO: 612489 - RNA, 21 nt, Human
gacaccauacccccaacccuc

SEQ ID NO: 612490 - RNA, 23 nt, Human
gacaugguggcgcacaccuguaa

SEQ ID NO: 612491 - RNA, 21 nt, Human
gagacauagaucaacccgaaa

SEQ ID NO: 612492 - RNA, 19 nt, Human
gagcacuucuaccuccagg

SEQ ID NO: 612493 - RNA, 19 nt, Human
gaggaugggaugagagaga

SEQ ID NO: 612494 - RNA, 19 nt, Human
gaggggaggagggggaaaa

SEQ ID NO: 612495 - RNA, 20 nt, Human
gaguagagggaagagaaagu

SEQ ID NO: 612496 - RNA, 24 nt, Human
gaucacgaggucagaaguuugaga

SEQ ID NO: 612497 - RNA, 24 nt, Human
gcagaauccccuuuagugcacaag

SEQ ID NO: 612498 - RNA, 20 nt, Human
gcauagcuuagauggcagga

SEQ ID NO: 612499 - RNA, 24 nt, Human
gccacuacacucuagccuggguaa

SEQ ID NO: 612500 - RNA, 20 nt, Human
gcugagaucaugccacuaca

SEQ ID NO: 612501 - RNA, 19 nt, Human
ggaaagacaaggaagacag

SEQ ID NO: 612502 - RNA, 22 nt, Human
ggaaagagaagcacaggacagg

SEQ ID NO: 612503 - RNA, 23 nt, Human
ggaaagauuuggagcauggcaau

SEQ ID NO: 612504 - RNA, 23 nt, Human
ggaaagcagaaucugccacgauc

SEQ ID NO: 612505 - RNA, 24 nt, Human
ggaagacagaagacaggcaaagag

SEQ ID NO: 612506 - RNA, 20 nt, Human
ggaagcagaguaagauaugg

SEQ ID NO: 612507 - RNA, 25 nt, Human
ggaaggcuuuggaguuuucagagaa

SEQ ID NO: 612508 - RNA, 21 nt, Human
ggacaccauacccccaacccu

SEQ ID NO: 612509 - RNA, 22 nt, Human
ggacaccauacccccaacccuc

SEQ ID NO: 612510 - RNA, 23 nt, Human
gggaaagacaaggaagacagaag

SEQ ID NO: 612511 - RNA, 19 nt, Human
gggcaggccuccucuggag

SEQ ID NO: 612512 - RNA, 23 nt, Human
gggcaugaagaggggcaaugugg

SEQ ID NO: 612513 - RNA, 24 nt, Human
gggcucaguggcuuacaccuguaa

SEQ ID NO: 612514 - RNA, 18 nt, Human
ggggagagagauggaagc

SEQ ID NO: 612515 - RNA, 25 nt, Human
gggggaaaaagaaguaaggaaagag

SEQ ID NO: 612516 - RNA, 24 nt, Human
gguggcgcacaccuguaaucccag

SEQ ID NO: 612517 - RNA, 20 nt, Human
guaaggaaagagaagcacag

SEQ ID NO: 612518 - RNA, 26 nt, Human
gucccagagccuucuggaauuccucc

SEQ ID NO: 612519 - RNA, 18 nt, Human
gucugaaguccuucagcc

SEQ ID NO: 612520 - RNA, 24 nt, Human
guugcagugagcugagaucaugcc

SEQ ID NO: 612521 - RNA, 19 nt, Human
uaaagcagacugcaagaug

SEQ ID NO: 612522 - RNA, 21 nt, Human
uaaagcagacugcaagaugac

SEQ ID NO: 612523 - RNA, 18 nt, Human
uaacagguggccaggacu

SEQ ID NO: 612524 - RNA, 23 nt, Human
uaagggcaggccuccucuggagg

SEQ ID NO: 612525 - RNA, 23 nt, Human
uaaguagaaggggaaauagugag

SEQ ID NO: 612526 - RNA, 24 nt, Human
uacaccuguaaucucagcacuuug

SEQ ID NO: 612527 - RNA, 19 nt, Human
uaccaagucuucucaguuc

SEQ ID NO: 612528 - RNA, 22 nt, Human
uaccacauccucccuucaacaa

SEQ ID NO: 612529 - RNA, 18 nt, Human
uacccccaacccucccaa

SEQ ID NO: 612530 - RNA, 19 nt, Human
uacccccaacccucccaaa

SEQ ID NO: 612531 - RNA, 23 nt, Human
uaccuggacaccauacccccaac

SEQ ID NO: 612532 - RNA, 19 nt, Human
uagaguuacuaccuaaucc

SEQ ID NO: 612533 - RNA, 23 nt, Human
uagaugucucuuuuccugggaaa

SEQ ID NO: 612534 - RNA, 18 nt, Human
uagccggacaugguggcg

SEQ ID NO: 612535 - RNA, 20 nt, Human
uaggacugcgugugaguucc

SEQ ID NO: 612536 - RNA, 24 nt, Human
ucacgaggucagaaguuugagacc

SEQ ID NO: 612537 - RNA, 24 nt, Human
ucacuaugaauaaggguugcagaa

SEQ ID NO: 612538 - RNA, 22 nt, Human
ucaggaaucaugccuuuuuauu

SEQ ID NO: 612539 - RNA, 18 nt, Human
uccacuucucugagaaaa

SEQ ID NO: 612540 - RNA, 21 nt, Human
uccacuucucugagaaaacua

SEQ ID NO: 612541 - RNA, 22 nt, Human
uccauaaacacucaccaagggu

SEQ ID NO: 612542 - RNA, 18 nt, Human
ucccaaauagucaauuac

SEQ ID NO: 612543 - RNA, 23 nt, Human
ucccaaauagucaauuaccaagu

SEQ ID NO: 612544 - RNA, 22 nt, Human
uccccaaguagacugaaaguuc

SEQ ID NO: 612545 - RNA, 19 nt, Human
ucccuggugcaguuuguuu

SEQ ID NO: 612546 - RNA, 24 nt, Human
ucuagccuggguaacagagugaga

SEQ ID NO: 612547 - RNA, 21 nt, Human
ucuccccaaguagacugaaag

SEQ ID NO: 612548 - RNA, 21 nt, Human
ucucugcuaaaaauacaaaaa

SEQ ID NO: 612549 - RNA, 24 nt, Human
ugaaaaaaugcuaaaagagcacuu

SEQ ID NO: 612550 - RNA, 21 nt, Human
ugaagaaacuaagaggaaaag

SEQ ID NO: 612551 - RNA, 23 nt, Human
ugagaccagccugaccaacaugg

SEQ ID NO: 612552 - RNA, 24 nt, Human
ugagaccagccugaccaacauggu

SEQ ID NO: 612553 - RNA, 19 nt, Human
ugagagaagagaggggaga

SEQ ID NO: 612554 - RNA, 21 nt, Human
ugagagagaggacagaaagga

SEQ ID NO: 612555 - RNA, 24 nt, Human
ugagaucaugccacuacacucuag

SEQ ID NO: 612556 - RNA, 19 nt, Human
ugagcugagaucaugccac

SEQ ID NO: 612557 - RNA, 18 nt, Human
ugaggagggaggaggagg

SEQ ID NO: 612558 - RNA, 24 nt, Human
ugaggcaggggaaucgcuugaacc

SEQ ID NO: 612559 - RNA, 25 nt, Human
ugaggcaggggaaucgcuugaaccc

SEQ ID NO: 612560 - RNA, 21 nt, Human
ugaguagagggaagagaaagu

SEQ ID NO: 612561 - RNA, 21 nt, Human
ugauaaaugaguguuggcugu

SEQ ID NO: 612562 - RNA, 20 nt, Human
ugcauugaaucggccugagc

SEQ ID NO: 612563 - RNA, 18 nt, Human
uggaacccacagacccuc

SEQ ID NO: 612564 - RNA, 24 nt, Human
uggccaggacuuuggaacccacag

SEQ ID NO: 612565 - RNA, 21 nt, Human
uggcuuacaccuguaaucuca

SEQ ID NO: 612566 - RNA, 22 nt, Human
uggcuuacaccuguaaucucag

SEQ ID NO: 612567 - RNA, 24 nt, Human
uggcuuacaccuguaaucucagca

SEQ ID NO: 612568 - RNA, 24 nt, Human
ugggaggccgaagcagguggauca

SEQ ID NO: 612569 - RNA, 24 nt, Human
ugguggcgcacaccuguaauccca

SEQ ID NO: 612570 - RNA, 21 nt, Human
uguauauggguagcaguaagc

SEQ ID NO: 612571 - RNA, 22 nt, Human
uguauggggcaugaagaggggc

SEQ ID NO: 612572 - RNA, 19 nt, Human
ugucccugucuacaauacu

SEQ ID NO: 612573 - RNA, 20 nt, Human
uguggaaugaagcauaugca

SEQ ID NO: 612574 - RNA, 23 nt, Human
uuaucucuucccuuuucugucuc

SEQ ID NO: 612575 - RNA, 23 nt, Human
uucccugcacagaggaauuccau

SEQ ID NO: 612576 - RNA, 22 nt, Human
uucccugugccuagaacuuuac

SEQ ID NO: 612577 - RNA, 19 nt, Human
uuccucagagcagagccua

SEQ ID NO: 612578 - RNA, 19 nt, Human
uuccuggcaagguaccugg

SEQ ID NO: 612579 - RNA, 18 nt, Human
uuccugggaaaucuuccc

SEQ ID NO: 612580 - RNA, 19 nt, Human
uugcagugagcugagauca

SEQ ID NO: 612581 - RNA, 20 nt, Human
uugcagugagcugagaucau

SEQ ID NO: 612582 - RNA, 20 nt, Human
uuucuacuaagaaacacauu

SEQ ID NO: 612583 - RNA, 21 nt, Human
aacacaccaucccaaccccuc

SEQ ID NO: 612584 - RNA, 22 nt, Human
aacacaccaucccaaccccucc

SEQ ID NO: 612585 - RNA, 23 nt, Human
aacccaagcaacuaggacccaaa

SEQ ID NO: 612586 - RNA, 19 nt, Human
aagauggacaagaggaccc

SEQ ID NO: 612587 - RNA, 22 nt, Human
acuauggucccagcuuucccag

SEQ ID NO: 612588 - RNA, 22 nt, Human
acuccucugcaagcccccacug

SEQ ID NO: 612589 - RNA, 21 nt, Human
acucuuggugaccacugaggu

SEQ ID NO: 612590 - RNA, 21 nt, Human
agagaaaacacaccaucccaa

SEQ ID NO: 612591 - RNA, 24 nt, Human
cacaccaucccaaccccuccucag

SEQ ID NO: 612592 - RNA, 22 nt, Human
cacuccucugcaagcccccacu

SEQ ID NO: 612593 - RNA, 19 nt, Human
cagccccucagucaguccu

SEQ ID NO: 612594 - RNA, 18 nt, Human
cagggauggggaaggcua

SEQ ID NO: 612595 - RNA, 27 nt, Human
cagucaguccuuccucucugcuggcuu

SEQ ID NO: 612596 - RNA, 21 nt, Human
caucccaaccccuccucagga

SEQ ID NO: 612597 - RNA, 23 nt, Human
ccaaauucccauaagaggaccgg

SEQ ID NO: 612598 - RNA, 22 nt, Human
ccaaccccuccucaggacauac

SEQ ID NO: 612599 - RNA, 19 nt, Human
cccaaccccuccucaggac

SEQ ID NO: 612600 - RNA, 22 nt, Human
ccccacugugaggcuugaagau

SEQ ID NO: 612601 - RNA, 25 nt, Human
cccccugaccccagcccugcgaggc

SEQ ID NO: 612602 - RNA, 23 nt, Human
cccugaccccagcccugcgaggc

SEQ ID NO: 612603 - RNA, 27 nt, Human
ccgccgccgccguaguugcugcugccg

SEQ ID NO: 612604 - RNA, 18 nt, Human
ccggggcuccuguggguc

SEQ ID NO: 612605 - RNA, 21 nt, Human
ccuaguucucaagggagcccu

SEQ ID NO: 612606 - RNA, 20 nt, Human
ccucauaaaagggaggugag

SEQ ID NO: 612607 - RNA, 27 nt, Human
cgcugcuggguucugccgccgccgccg

SEQ ID NO: 612608 - RNA, 21 nt, Human
cuauggauuuucaggucaaac

SEQ ID NO: 612609 - RNA, 23 nt, Human
cuccccuagucuuugggcuggag

SEQ ID NO: 612610 - RNA, 24 nt, Human
cuccucugcaagcccccacuguga

SEQ ID NO: 612611 - RNA, 20 nt, Human
cucucugcuggcuucagucu

SEQ ID NO: 612612 - RNA, 24 nt, Human
cugcaagcccccacugugaggcuu

SEQ ID NO: 612613 - RNA, 19 nt, Human
cuugaagauggacaagagg

SEQ ID NO: 612614 - RNA, 21 nt, Human
cuuuccuggcuuucccucugg

SEQ ID NO: 612615 - RNA, 23 nt, Human
gaaaacacaccaucccaaccccu

SEQ ID NO: 612616 - RNA, 27 nt, Human
gaagcaauuccuguauuguccaaccca

SEQ ID NO: 612617 - RNA, 25 nt, Human
gacaagaggacccucauaaaaggga

SEQ ID NO: 612618 - RNA, 18 nt, Human
gagcacuauggucccagc

SEQ ID NO: 612619 - RNA, 23 nt, Human
gcccugcgaggcuauaccagggg

SEQ ID NO: 612620 - RNA, 24 nt, Human
gcuugaagauggacaagaggaccc

SEQ ID NO: 612621 - RNA, 22 nt, Human
ggacaagacgagggauguuccc

SEQ ID NO: 612622 - RNA, 19 nt, Human
guccuuccucucugcuggc

SEQ ID NO: 612623 - RNA, 23 nt, Human
uagugggcccugcccuauggauu

SEQ ID NO: 612624 - RNA, 23 nt, Human
uaucuugccacucuuggugacca

SEQ ID NO: 612625 - RNA, 21 nt, Human
ucagacagggauggggaaggc

SEQ ID NO: 612626 - RNA, 20 nt, Human
uccaccuccacaucgcugcu

SEQ ID NO: 612627 - RNA, 18 nt, Human
ucccucugggcaggguau

SEQ ID NO: 612628 - RNA, 24 nt, Human
uccucugcaagcccccacugugag

SEQ ID NO: 612629 - RNA, 22 nt, Human
ucuuugggcuggagcacuaugg

SEQ ID NO: 612630 - RNA, 22 nt, Human
ugaccacccacuucccaaucuu

SEQ ID NO: 612631 - RNA, 20 nt, Human
ugagugggcaagggcccccu

SEQ ID NO: 612632 - RNA, 21 nt, Human
ugcaagcccccacugugaggc

SEQ ID NO: 612633 - RNA, 18 nt, Human
ugcuggcuucagucugca

SEQ ID NO: 612634 - RNA, 22 nt, Human
uggggaaggcuaggugaguggg

SEQ ID NO: 612635 - RNA, 21 nt, Human
uucugccgccgccgccguagu

SEQ ID NO: 612636 - RNA, 24 nt, Human
uucuuuaucuugccacucuuggug

SEQ ID NO: 612637 - RNA, 21 nt, Human
aaaggugcauacucugcuuuc

SEQ ID NO: 612638 - RNA, 22 nt, Human
acagaaaaacaaguccuccccu

SEQ ID NO: 612639 - RNA, 23 nt, Human
accacaaauccacuccuggguga

SEQ ID NO: 612640 - RNA, 23 nt, Human
acuuucugagaggacugggaaau

SEQ ID NO: 612641 - RNA, 19 nt, Human
agaaaaacaaguccucccc

SEQ ID NO: 612642 - RNA, 22 nt, Human
agaaacagauaaaacucaaacg

SEQ ID NO: 612643 - RNA, 21 nt, Human
agagaaacagauaaaacucaa

SEQ ID NO: 612644 - RNA, 22 nt, Human
agagaaacagauaaaacucaaa

SEQ ID NO: 612645 - RNA, 18 nt, Human
cacacacuguucaucagg

SEQ ID NO: 612646 - RNA, 22 nt, Human
caccuuauucaaguacaaaucu

SEQ ID NO: 612647 - RNA, 21 nt, Human
cagaaaaacaaguccuccccu

SEQ ID NO: 612648 - RNA, 18 nt, Human
ccugggugagaaauaacu

SEQ ID NO: 612649 - RNA, 25 nt, Human
ccugggugagaaauaacuagcuucu

SEQ ID NO: 612650 - RNA, 21 nt, Human
cucaaggagaacaugaaaaaa

SEQ ID NO: 612651 - RNA, 22 nt, Human
cucaaggagaacaugaaaaaag

SEQ ID NO: 612652 - RNA, 23 nt, Human
cuuucaauuuccucauccuuccu

SEQ ID NO: 612653 - RNA, 20 nt, Human
gaaaaacaaguccuccccuc

SEQ ID NO: 612654 - RNA, 27 nt, Human
ggaaauaaaggagagaaaccgguaccc

SEQ ID NO: 612655 - RNA, 21 nt, Human
guacucuuguauguuguguga

SEQ ID NO: 612656 - RNA, 18 nt, Human
uaaaaagaccacaacagg

SEQ ID NO: 612657 - RNA, 20 nt, Human
uacaagcaaauccccacaca

SEQ ID NO: 612658 - RNA, 24 nt, Human
uacauacaagcaaauccccacaca

SEQ ID NO: 612659 - RNA, 22 nt, Human
uauaguaacuuguaaaagaauu

SEQ ID NO: 612660 - RNA, 26 nt, Human
ucuaaaacagaaaaacaaguccuccc

SEQ ID NO: 612661 - RNA, 18 nt, Human
ucuucaccuuauucaagu

SEQ ID NO: 612662 - RNA, 20 nt, Human
ugaaaaauagaaaaacuacc

SEQ ID NO: 612663 - RNA, 18 nt, Human
ugaaauucuucaccuuau

SEQ ID NO: 612664 - RNA, 23 nt, Human
ugaagccaaaccacaaauccacu

SEQ ID NO: 612665 - RNA, 18 nt, Human
ugaggcuaauccaguagg

SEQ ID NO: 612666 - RNA, 18 nt, Human
ugccgaauaauaauaaac

SEQ ID NO: 612667 - RNA, 22 nt, Human
ugccgaauaauaauaaacaaca

SEQ ID NO: 612668 - RNA, 26 nt, Human
ugucacaaagauuuaacgauauaagg

SEQ ID NO: 612669 - RNA, 25 nt, Human
aaagcaaugagguuuggcugaaggc

SEQ ID NO: 612670 - RNA, 27 nt, Human
aaagcaaugagguuuggcugaaggcuc

SEQ ID NO: 612671 - RNA, 24 nt, Human
aaagugcugagguuacaggcguga

SEQ ID NO: 612672 - RNA, 24 nt, Human
aagaggcccagcccaguuaggacc

SEQ ID NO: 612673 - RNA, 24 nt, Human
aagauuuuuccauacuuaccacac

SEQ ID NO: 612674 - RNA, 20 nt, Human
aaggcucucccacauuaccc

SEQ ID NO: 612675 - RNA, 19 nt, Human
aaguagcugggacuacagg

SEQ ID NO: 612676 - RNA, 20 nt, Human
aaguagcugggacuacaggc

SEQ ID NO: 612677 - RNA, 26 nt, Human
aagugcugagguuacaggcgugagcc

SEQ ID NO: 612678 - RNA, 21 nt, Human
aauaauaugcauccucugauc

SEQ ID NO: 612679 - RNA, 18 nt, Human
acaggguuucacuguguu

SEQ ID NO: 612680 - RNA, 19 nt, Human
acaggguuucacuguguua

SEQ ID NO: 612681 - RNA, 20 nt, Human
acaggguuucacuguguuag

SEQ ID NO: 612682 - RNA, 24 nt, Human
acaggguuucacuguguuagccag

SEQ ID NO: 612683 - RNA, 24 nt, Human
acauccaccaaagcccuucccaca

SEQ ID NO: 612684 - RNA, 19 nt, Human
accacaggaaagaggccca

SEQ ID NO: 612685 - RNA, 25 nt, Human
acucugucucccaggcuggagugca

SEQ ID NO: 612686 - RNA, 20 nt, Human
agacacggccacagccacgc

SEQ ID NO: 612687 - RNA, 18 nt, Human
agacaggguuucacugug

SEQ ID NO: 612688 - RNA, 19 nt, Human
agagacaggguuucacugu

SEQ ID NO: 612689 - RNA, 21 nt, Human
agaugaauacugaagcuugaa

SEQ ID NO: 612690 - RNA, 21 nt, Human
aggaagagauacaacugaaga

SEQ ID NO: 612691 - RNA, 18 nt, Human
aggcagaaaaucaccaga

SEQ ID NO: 612692 - RNA, 23 nt, Human
aggcagaaaaucaccagacaagg

SEQ ID NO: 612693 - RNA, 18 nt, Human
aggcucucccacauuacc

SEQ ID NO: 612694 - RNA, 25 nt, Human
aggcuggagugcaguggcgugaucu

SEQ ID NO: 612695 - RNA, 19 nt, Human
agguaugaauuuucugaug

SEQ ID NO: 612696 - RNA, 24 nt, Human
agguuacaggcgugagccaccgcg

SEQ ID NO: 612697 - RNA, 23 nt, Human
aguagcugggacuacaggcgccc

SEQ ID NO: 612698 - RNA, 19 nt, Human
agugcaguggcgugaucuc

SEQ ID NO: 612699 - RNA, 22 nt, Human
agugcaguggcgugaucucggc

SEQ ID NO: 612700 - RNA, 23 nt, Human
agugcaguggcgugaucucggcu

SEQ ID NO: 612701 - RNA, 24 nt, Human
agugcaguggcgugaucucggcug

SEQ ID NO: 612702 - RNA, 18 nt, Human
aucaaagcguucccacau

SEQ ID NO: 612703 - RNA, 24 nt, Human
caaagauccugucuauuaaucucc

SEQ ID NO: 612704 - RNA, 24 nt, Human
caaagugcugagguuacaggcgug

SEQ ID NO: 612705 - RNA, 31 nt, Human
caaguuggaaaggaacuuuccucacauucaa

SEQ ID NO: 612706 - RNA, 25 nt, Human
caccaggcagaaaaucaccagacaa

SEQ ID NO: 612707 - RNA, 24 nt, Human
cacccaugcaugacacccugcccc

SEQ ID NO: 612708 - RNA, 22 nt, Human
cacgccauucuccugucucagc

SEQ ID NO: 612709 - RNA, 24 nt, Human
cacucugucucccaggcuggagug

SEQ ID NO: 612710 - RNA, 18 nt, Human
cacuguguuagccaggau

SEQ ID NO: 612711 - RNA, 19 nt, Human
cacuguguuagccaggaug

SEQ ID NO: 612712 - RNA, 24 nt, Human
cacuguguuagccaggauggucuc

SEQ ID NO: 612713 - RNA, 25 nt, Human
cagcccaguuaggacuauaggccaa

SEQ ID NO: 612714 - RNA, 22 nt, Human
caggagacacggccacagccac

SEQ ID NO: 612715 - RNA, 24 nt, Human
caggguuucacuguguuagccagg

SEQ ID NO: 612716 - RNA, 27 nt, Human
caggucccgaggccuggcuuucaggaa

SEQ ID NO: 612717 - RNA, 22 nt, Human
caucauguucccaagguuucuc

SEQ ID NO: 612718 - RNA, 20 nt, Human
ccaaagugcugagguuacag

SEQ ID NO: 612719 - RNA, 22 nt, Human
ccaaagugcugagguuacaggc

SEQ ID NO: 612720 - RNA, 22 nt, Human
ccaaagugcugagguuacaggc

SEQ ID NO: 612721 - RNA, 24 nt, Human
ccaaagugcugagguuacaggcgu

SEQ ID NO: 612722 - RNA, 22 nt, Human
ccaaguagcugggacuacaggc

SEQ ID NO: 612723 - RNA, 22 nt, Human
ccacacuuguaggauuucucuc

SEQ ID NO: 612724 - RNA, 20 nt, Human
ccaccaggcagaaaaucacc

SEQ ID NO: 612725 - RNA, 20 nt, Human
ccaccgcgcccagccuauuu

SEQ ID NO: 612726 - RNA, 18 nt, Human
ccaggagacacggccaca

SEQ ID NO: 612727 - RNA, 21 nt, Human
cccaccaggcagaaaaucacc

SEQ ID NO: 612728 - RNA, 19 nt, Human
cccaggcuggagugcagug

SEQ ID NO: 612729 - RNA, 22 nt, Human
cccaggcuggagugcaguggcg

SEQ ID NO: 612730 - RNA, 18 nt, Human
ccccgcugucccugccua

SEQ ID NO: 612731 - RNA, 20 nt, Human
ccccggcucggcuccuccuc

SEQ ID NO: 612732 - RNA, 20 nt, Human
cccgaggccuggcuuucagg

SEQ ID NO: 612733 - RNA, 22 nt, Human
ccuuucucagccuccauccucu

SEQ ID NO: 612734 - RNA, 24 nt, Human
cgccucggccucccaaagugcuga

SEQ ID NO: 612735 - RNA, 18 nt, Human
cggcucggcuccuccuca

SEQ ID NO: 612736 - RNA, 21 nt, Human
cucacauucaucauguuccca

SEQ ID NO: 612737 - RNA, 24 nt, Human
cucacucugucucccaggcuggag

SEQ ID NO: 612738 - RNA, 24 nt, Human
cucagccuuccaaguagcugggac

SEQ ID NO: 612739 - RNA, 19 nt, Human
cuccagcugaaagcccuuc

SEQ ID NO: 612740 - RNA, 24 nt, Human
cuccugaccucgugaucuguccgc

SEQ ID NO: 612741 - RNA, 18 nt, Human
cucggcugacugcaagcu

SEQ ID NO: 612742 - RNA, 25 nt, Human
cugaaagcccuucuauauucacuga

SEQ ID NO: 612743 - RNA, 23 nt, Human
cugucucagccuuccaaguagcu

SEQ ID NO: 612744 - RNA, 18 nt, Human
cuucuauauucacugaau

SEQ ID NO: 612745 - RNA, 21 nt, Human
gacacggccacagccacgccc

SEQ ID NO: 612746 - RNA, 22 nt, Human
gaccucgugaucuguccgccuc

SEQ ID NO: 612747 - RNA, 24 nt, Human
gaccucgugaucuguccgccucgg

SEQ ID NO: 612748 - RNA, 22 nt, Human
gacuacaggcgcccgccaccau

SEQ ID NO: 612749 - RNA, 22 nt, Human
gagagacaggguuucacugugu

SEQ ID NO: 612750 - RNA, 19 nt, Human
gaucauggguagcugucua

SEQ ID NO: 612751 - RNA, 24 nt, Human
gccuggcuaauuuuuuuguauuuu

SEQ ID NO: 612752 - RNA, 19 nt, Human
gcuggagugcaguggcgug

SEQ ID NO: 612753 - RNA, 19 nt, Human
ggaaaggaacuuuccucac

SEQ ID NO: 612754 - RNA, 22 nt, Human
ggagagacaggguuucacugug

SEQ ID NO: 612755 - RNA, 19 nt, Human
ggaggaagagcaggauucu

SEQ ID NO: 612756 - RNA, 24 nt, Human
ggauggucucgaacuccugaccuc

SEQ ID NO: 612757 - RNA, 22 nt, Human
ggcucggcuccuccucaggacc

SEQ ID NO: 612758 - RNA, 22 nt, Human
ggcuggagugcaguggcgugau

SEQ ID NO: 612759 - RNA, 23 nt, Human
ggcugucugaugcugaauaauau

SEQ ID NO: 612760 - RNA, 21 nt, Human
gguuacaggcgugagccaccg

SEQ ID NO: 612761 - RNA, 22 nt, Human
gguuacaggcgugagccaccgc

SEQ ID NO: 612762 - RNA, 18 nt, Human
gucaguaacagcaugagg

SEQ ID NO: 612763 - RNA, 21 nt, Human
gugaucucggcugacugcaag

SEQ ID NO: 612764 - RNA, 21 nt, Human
guggaacauccaccaaagccc

SEQ ID NO: 612765 - RNA, 19 nt, Human
uaacugaaggcuugccaca

SEQ ID NO: 612766 - RNA, 26 nt, Human
uacaaauggccccaccaggcagaaaa

SEQ ID NO: 612767 - RNA, 24 nt, Human
uacaggcgugagccaccgcgccca

SEQ ID NO: 612768 - RNA, 19 nt, Human
uagcacaaauucucuaaug

SEQ ID NO: 612769 - RNA, 24 nt, Human
uagccaggauggucucgaacuccu

SEQ ID NO: 612770 - RNA, 24 nt, Human
uaggagagacaggguuucacugug

SEQ ID NO: 612771 - RNA, 20 nt, Human
ucacaaagaaagguaacaug

SEQ ID NO: 612772 - RNA, 24 nt, Human
ucaccagacaaggugauuucucag

SEQ ID NO: 612773 - RNA, 24 nt, Human
ucacuguguuagccaggauggucu

SEQ ID NO: 612774 - RNA, 21 nt, Human
ucagacuaccaggagacacgg

SEQ ID NO: 612775 - RNA, 18 nt, Human
ucagcuucuuuucagcuc

SEQ ID NO: 612776 - RNA, 23 nt, Human
uccaaguagcugggacuacaggc

SEQ ID NO: 612777 - RNA, 23 nt, Human
uccaaguagcugggacuacaggc

SEQ ID NO: 612778 - RNA, 18 nt, Human
uccacacgcacagugggc

SEQ ID NO: 612779 - RNA, 19 nt, Human
uccaccaaagcccuuccca

SEQ ID NO: 612780 - RNA, 23 nt, Human
uccaccaaagcccuucccacauu

SEQ ID NO: 612781 - RNA, 25 nt, Human
uccauacuacagcugugaaccacag

SEQ ID NO: 612782 - RNA, 28 nt, Human
uccauacuacagcugugaaccacaggaa

SEQ ID NO: 612783 - RNA, 25 nt, Human
uccauacuuaccacacuuguaggau

SEQ ID NO: 612784 - RNA, 24 nt, Human
ucccaaagugcugagguuacaggc

SEQ ID NO: 612785 - RNA, 24 nt, Human
ucccaggcuggagugcaguggcgu

SEQ ID NO: 612786 - RNA, 23 nt, Human
uccuagaccacuccauugccuca

SEQ ID NO: 612787 - RNA, 19 nt, Human
ucggagggacacacccagc

SEQ ID NO: 612788 - RNA, 18 nt, Human
ucggccucccaaagugcu

SEQ ID NO: 612789 - RNA, 20 nt, Human
ucuaccuuucucagccucca

SEQ ID NO: 612790 - RNA, 23 nt, Human
ucucacucugucucccaggcugg

SEQ ID NO: 612791 - RNA, 24 nt, Human
ucucacucugucucccaggcugga

SEQ ID NO: 612792 - RNA, 22 nt, Human
ucuccauacuacagcugugaac

SEQ ID NO: 612793 - RNA, 24 nt, Human
ucucccaggcuggagugcaguggc

SEQ ID NO: 612794 - RNA, 20 nt, Human
ucuccugggaaucucucugg

SEQ ID NO: 612795 - RNA, 26 nt, Human
ucuccugucucagccuuccaaguagc

SEQ ID NO: 612796 - RNA, 19 nt, Human
ucucgaacuccugaccucg

SEQ ID NO: 612797 - RNA, 20 nt, Human
ucucuccaguacaaguuauc

SEQ ID NO: 612798 - RNA, 21 nt, Human
ucucuuuaguaauuauugccu

SEQ ID NO: 612799 - RNA, 19 nt, Human
ucugucucccaggcuggag

SEQ ID NO: 612800 - RNA, 26 nt, Human
ucuucccacauacauuacaccuuuag

SEQ ID NO: 612801 - RNA, 22 nt, Human
ucuuuaguaauuauugccugau

SEQ ID NO: 612802 - RNA, 18 nt, Human
ugacugaaggccuuccuc

SEQ ID NO: 612803 - RNA, 19 nt, Human
ugacugcaagcucugccuc

SEQ ID NO: 612804 - RNA, 18 nt, Human
ugagaaggggaagccccg

SEQ ID NO: 612805 - RNA, 22 nt, Human
ugagaaggggaagccccggcuc

SEQ ID NO: 612806 - RNA, 24 nt, Human
ugagaaggggaagccccggcucgg

SEQ ID NO: 612807 - RNA, 22 nt, Human
ugagacggagucucacucuguc

SEQ ID NO: 612808 - RNA, 19 nt, Human
ugagaugaauacugaagcu

SEQ ID NO: 612809 - RNA, 19 nt, Human
ugagguuacaggcgugagc

SEQ ID NO: 612810 - RNA, 22 nt, Human
ugagguuacaggcgugagccac

SEQ ID NO: 612811 - RNA, 23 nt, Human
ugagguuacaggcgugagccacc

SEQ ID NO: 612812 - RNA, 24 nt, Human
ugagguuacaggcgugagccaccg

SEQ ID NO: 612813 - RNA, 18 nt, Human
ugauaaggcuccucccca

SEQ ID NO: 612814 - RNA, 23 nt, Human
ugaucaaagcguucccacauuca

SEQ ID NO: 612815 - RNA, 24 nt, Human
ugcacagucccuagcggggggcac

SEQ ID NO: 612816 - RNA, 18 nt, Human
ugcacccaugcaugacac

SEQ ID NO: 612817 - RNA, 20 nt, Human
uggaacauccaccaaagccc

SEQ ID NO: 612818 - RNA, 19 nt, Human
uggagugcaguggcgugau

SEQ ID NO: 612819 - RNA, 23 nt, Human
uggagugcaguggcgugaucucg

SEQ ID NO: 612820 - RNA, 24 nt, Human
uggagugcaguggcgugaucucgg

SEQ ID NO: 612821 - RNA, 23 nt, Human
ugggaaucucucuggaggaagag

SEQ ID NO: 612822 - RNA, 21 nt, Human
ugggacuacaggcgcccgcca

SEQ ID NO: 612823 - RNA, 22 nt, Human
ugggacuacaggcgcccgccac

SEQ ID NO: 612824 - RNA, 24 nt, Human
ugggacuacaggcgcccgccacca

SEQ ID NO: 612825 - RNA, 25 nt, Human
ugggacuacaggcgcccgccaccau

SEQ ID NO: 612826 - RNA, 19 nt, Human
ugucucagccuuccaagua

SEQ ID NO: 612827 - RNA, 21 nt, Human
ugucucccaggcuggagugca

SEQ ID NO: 612828 - RNA, 23 nt, Human
ugugaaccacaggaaagaggccc

SEQ ID NO: 612829 - RNA, 24 nt, Human
uuaggagagacaggguuucacugu

SEQ ID NO: 612830 - RNA, 21 nt, Human
uucacuguguuagccaggaug

SEQ ID NO: 612831 - RNA, 19 nt, Human
uuucacuguguuagccagg

SEQ ID NO: 612832 - RNA, 23 nt, Human
uuucccaguuucacuaaauuuga

SEQ ID NO: 612833 - RNA, 20 nt, Human
uuucucagguaugaauuuuc

SEQ ID NO: 612834 - RNA, 24 nt, Human
uuuuuaggagagacaggguuucac

SEQ ID NO: 612835 - RNA, 19 nt, Human
uuuuuuguauuuuuaggag

SEQ ID NO: 612836 - RNA, 24 nt, Human
uuuuuuguauuuuuaggagagaca

SEQ ID NO: 612837 - RNA, 24 nt, Human
aaagggcuaggauuacaggcguga

SEQ ID NO: 612838 - RNA, 24 nt, Human
aagugaucugcccgccuuggccuu

SEQ ID NO: 612839 - RNA, 23 nt, Human
aauagcugagaccacagguaugu

SEQ ID NO: 612840 - RNA, 24 nt, Human
aauuuuguauuuuuaguacagaug

SEQ ID NO: 612841 - RNA, 22 nt, Human
acagcgaguguguggccccacu

SEQ ID NO: 612842 - RNA, 25 nt, Human
acggaguuucacuguuguugcccag

SEQ ID NO: 612843 - RNA, 24 nt, Human
acuguuguugcccaggcuggagug

SEQ ID NO: 612844 - RNA, 19 nt, Human
acuuuggccccccaccgcc

SEQ ID NO: 612845 - RNA, 22 nt, Human
agagacagagucucccucuguu

SEQ ID NO: 612846 - RNA, 22 nt, Human
agaugggguuucuccauguugg

SEQ ID NO: 612847 - RNA, 23 nt, Human
agaugggguuucuccauguuggu

SEQ ID NO: 612848 - RNA, 24 nt, Human
agcgauucuccugccucagccucc

SEQ ID NO: 612849 - RNA, 24 nt, Human
agcugggauuacaagcaugcgcca

SEQ ID NO: 612850 - RNA, 21 nt, Human
aggaggaggcacccagguggc

SEQ ID NO: 612851 - RNA, 18 nt, Human
aggcaaucuuccugccuc

SEQ ID NO: 612852 - RNA, 19 nt, Human
aggcccaacaaauacaaga

SEQ ID NO: 612853 - RNA, 21 nt, Human
agggagguugagacggacagg

SEQ ID NO: 612854 - RNA, 18 nt, Human
agggcuaggauuacaggc

SEQ ID NO: 612855 - RNA, 18 nt, Human
agguggaccuggagcugg

SEQ ID NO: 612856 - RNA, 21 nt, Human
agguuggagugcagugguguu

SEQ ID NO: 612857 - RNA, 21 nt, Human
aguagcugggauuacaagcau

SEQ ID NO: 612858 - RNA, 23 nt, Human
aguagcugggauuacaagcaugc

SEQ ID NO: 612859 - RNA, 21 nt, Human
agugcaauggcgcgaucucag

SEQ ID NO: 612860 - RNA, 23 nt, Human
agugcagugguguuaccauagcu

SEQ ID NO: 612861 - RNA, 24 nt, Human
agugcagugguguuaccauagcuc

SEQ ID NO: 612862 - RNA, 24 nt, Human
aguguguggccccacuuuggcccc

SEQ ID NO: 612863 - RNA, 24 nt, Human
auagcucacugcagacuuggccuc

SEQ ID NO: 612864 - RNA, 19 nt, Human
auccuccugccuuggccuc

SEQ ID NO: 612865 - RNA, 21 nt, Human
augggguuucuccauguuggu

SEQ ID NO: 612866 - RNA, 24 nt, Human
augggguuucuccauguuggucag

SEQ ID NO: 612867 - RNA, 25 nt, Human
caaacuccugggcucaagagauccu

SEQ ID NO: 612868 - RNA, 24 nt, Human
caaagggcuaggauuacaggcgug

SEQ ID NO: 612869 - RNA, 24 nt, Human
caaagugcagaaauuucucuuaua

SEQ ID NO: 612870 - RNA, 22 nt, Human
caagagauccuccugccuuggc

SEQ ID NO: 612871 - RNA, 22 nt, Human
caagcgauucuccugccucagc

SEQ ID NO: 612872 - RNA, 22 nt, Human
cacaggcuguccgugaggcugg

SEQ ID NO: 612873 - RNA, 22 nt, Human
cacagguaugugccaccauacc

SEQ ID NO: 612874 - RNA, 18 nt, Human
cacccagguggcacuggc

SEQ ID NO: 612875 - RNA, 21 nt, Human
cacugcaaccuccgccuccug

SEQ ID NO: 612876 - RNA, 23 nt, Human
cacugcaaccuccgccuccuggg

SEQ ID NO: 612877 - RNA, 19 nt, Human
cacuggcacaggggaggag

SEQ ID NO: 612878 - RNA, 24 nt, Human
cacuguuguugcccaggcuggagu

SEQ ID NO: 612879 - RNA, 24 nt, Human
cagagucucccucuguugcccagg

SEQ ID NO: 612880 - RNA, 26 nt, Human
cagcaggagguggaccuggagcuggg

SEQ ID NO: 612881 - RNA, 22 nt, Human
cagcccccugcacaggcugucc

SEQ ID NO: 612882 - RNA, 23 nt, Human
caggaggaggcacccagguggca

SEQ ID NO: 612883 - RNA, 24 nt, Human
cagggugagcaguagcccaggccc

SEQ ID NO: 612884 - RNA, 21 nt, Human
caguuucaaagugcagaaauu

SEQ ID NO: 612885 - RNA, 22 nt, Human
ccaaagggcuaggauuacaggc

SEQ ID NO: 612886 - RNA, 22 nt, Human
ccaaagggcuaggauuacaggc

SEQ ID NO: 612887 - RNA, 24 nt, Human
ccaaagggcuaggauuacaggcgu

SEQ ID NO: 612888 - RNA, 21 nt, Human
ccaccauaccuggcuuaaaau

SEQ ID NO: 612889 - RNA, 20 nt, Human
ccaccaugcagggcaaauuu

SEQ ID NO: 612890 - RNA, 19 nt, Human
ccauguuggucaggcuggu

SEQ ID NO: 612891 - RNA, 23 nt, Human
ccauguuggucaggcuggucucg

SEQ ID NO: 612892 - RNA, 24 nt, Human
cccaggcccaacaaauacaagaca

SEQ ID NO: 612893 - RNA, 18 nt, Human
ccccaccgccucccagca

SEQ ID NO: 612894 - RNA, 19 nt, Human
ccccccaccgccucccagc

SEQ ID NO: 612895 - RNA, 20 nt, Human
ccccccaccgccucccagca

SEQ ID NO: 612896 - RNA, 19 nt, Human
cccccugcacaggcugucc

SEQ ID NO: 612897 - RNA, 19 nt, Human
cccgaguagcugggauuac

SEQ ID NO: 612898 - RNA, 23 nt, Human
cccgccuuggccuuccaaagggc

SEQ ID NO: 612899 - RNA, 23 nt, Human
cccguggcuggcuaauuuuugua

SEQ ID NO: 612900 - RNA, 24 nt, Human
ccgccuccuggguucaagcgauuc

SEQ ID NO: 612901 - RNA, 19 nt, Human
ccucccagcaggaggugga

SEQ ID NO: 612902 - RNA, 19 nt, Human
ccuccgccuccuggguuca

SEQ ID NO: 612903 - RNA, 24 nt, Human
ccuccugccuuggccuccugaaua

SEQ ID NO: 612904 - RNA, 24 nt, Human
ccuccugggcuuaggcaaucuucc

SEQ ID NO: 612905 - RNA, 24 nt, Human
ccuccuggguucaagcgauucucc

SEQ ID NO: 612906 - RNA, 23 nt, Human
ccugccucagccucccgaguagc

SEQ ID NO: 612907 - RNA, 24 nt, Human
ccugccucagccucccgaguagcu

SEQ ID NO: 612908 - RNA, 25 nt, Human
ccugccucagucucucaaaggagcu

SEQ ID NO: 612909 - RNA, 23 nt, Human
ccugccuuggccuccugaauagc

SEQ ID NO: 612910 - RNA, 20 nt, Human
ccugggcucaagagauccuc

SEQ ID NO: 612911 - RNA, 23 nt, Human
ccuggguucaagcgauucuccug

SEQ ID NO: 612912 - RNA, 18 nt, Human
cgaccucaagugaucugc

SEQ ID NO: 612913 - RNA, 22 nt, Human
cggcgguggcggggcccccggg

SEQ ID NO: 612914 - RNA, 22 nt, Human
cgggggcuccccguccccgcug

SEQ ID NO: 612915 - RNA, 18 nt, Human
cucaagagauccuccugc

SEQ ID NO: 612916 - RNA, 24 nt, Human
cucacugcaaccuccgccuccugg

SEQ ID NO: 612917 - RNA, 23 nt, Human
cucagccucccgaguagcuggga

SEQ ID NO: 612918 - RNA, 24 nt, Human
cuccauguuggucaggcuggucuc

SEQ ID NO: 612919 - RNA, 20 nt, Human
cuccccguccccgcugcggc

SEQ ID NO: 612920 - RNA, 26 nt, Human
cucccgaccucaagugaucugcccgc

SEQ ID NO: 612921 - RNA, 20 nt, Human
cuccggcggcugccgcuggu

SEQ ID NO: 612922 - RNA, 24 nt, Human
cuccugaauagcugagaccacagg

SEQ ID NO: 612923 - RNA, 21 nt, Human
cuccugccuuggccuccugaa

SEQ ID NO: 612924 - RNA, 25 nt, Human
cuccugggcucaagagauccuccug

SEQ ID NO: 612925 - RNA, 20 nt, Human
cuccugggcuuaggcaaucu

SEQ ID NO: 612926 - RNA, 21 nt, Human
cuccuggguucaagcgauucu

SEQ ID NO: 612927 - RNA, 18 nt, Human
cucuguugcccagguugg

SEQ ID NO: 612928 - RNA, 21 nt, Human
cugaagcccagcccccugcac

SEQ ID NO: 612929 - RNA, 23 nt, Human
cugcaaccuccgccuccuggguu

SEQ ID NO: 612930 - RNA, 25 nt, Human
cugcacaggcuguccgugaggcugg

SEQ ID NO: 612931 - RNA, 19 nt, Human
cugccccuugcugaagccc

SEQ ID NO: 612932 - RNA, 23 nt, Human
cugccuuggccuccugaauagcu

SEQ ID NO: 612933 - RNA, 22 nt, Human
cugggcuuaggcaaucuuccug

SEQ ID NO: 612934 - RNA, 25 nt, Human
gaauagcugagaccacagguaugug

SEQ ID NO: 612935 - RNA, 24 nt, Human
gaccucaagugaucugcccgccuu

SEQ ID NO: 612936 - RNA, 24 nt, Human
gaguaacucuggccgauccagucc

SEQ ID NO: 612937 - RNA, 21 nt, Human
gagugcaauggcgcgaucuca

SEQ ID NO: 612938 - RNA, 18 nt, Human
gauuacaggcgugagcca

SEQ ID NO: 612939 - RNA, 21 nt, Human
gauuacaggcgugagccacca

SEQ ID NO: 612940 - RNA, 24 nt, Human
gauuacaggcgugagccaccaugc

SEQ ID NO: 612941 - RNA, 22 nt, Human
gcaaccuccgccuccuggguuc

SEQ ID NO: 612942 - RNA, 18 nt, Human
gcacuggaagggcccaga

SEQ ID NO: 612943 - RNA, 19 nt, Human
gcaguagcccaggcccaac

SEQ ID NO: 612944 - RNA, 23 nt, Human
gccaaagcacuggaagggcccag

SEQ ID NO: 612945 - RNA, 19 nt, Human
gcccaggcuggagugcaau

SEQ ID NO: 612946 - RNA, 18 nt, Human
gccuccugaauagcugag

SEQ ID NO: 612947 - RNA, 24 nt, Human
gcgauucuccugccucagccuccc

SEQ ID NO: 612948 - RNA, 19 nt, Human
gcuggagugcaauggcgcg

SEQ ID NO: 612949 - RNA, 25 nt, Human
gcuggggcaggacaaggucaugggg

SEQ ID NO: 612950 - RNA, 23 nt, Human
gcuggucucgaacucccgaccuc

SEQ ID NO: 612951 - RNA, 22 nt, Human
ggaggagaggggacacagcgag

SEQ ID NO: 612952 - RNA, 21 nt, Human
ggagugcagugguguuaccau

SEQ ID NO: 612953 - RNA, 22 nt, Human
ggauuacaggcgugagccacca

SEQ ID NO: 612954 - RNA, 24 nt, Human
ggauuacaggcgugagccaccaug

SEQ ID NO: 612955 - RNA, 21 nt, Human
ggcggacggcggcgguggcgg

SEQ ID NO: 612956 - RNA, 18 nt, Human
gggcccccgggggcuccc

SEQ ID NO: 612957 - RNA, 22 nt, Human
gggcucaagagauccuccugcc

SEQ ID NO: 612958 - RNA, 18 nt, Human
gggguuucuccauguugg

SEQ ID NO: 612959 - RNA, 22 nt, Human
gggguuucuccauguuggucag

SEQ ID NO: 612960 - RNA, 18 nt, Human
gguggaccuggagcuggg

SEQ ID NO: 612961 - RNA, 18 nt, Human
guagcugggauuacaagc

SEQ ID NO: 612962 - RNA, 19 nt, Human
guauuuuuaguacagaugg

SEQ ID NO: 612963 - RNA, 25 nt, Human
gugacggcggacggcggcgguggcg

SEQ ID NO: 612964 - RNA, 24 nt, Human
guuguugcccaggcuggagugcaa

SEQ ID NO: 612965 - RNA, 25 nt, Human
uaauuuuuguauuuuuuguuugaga

SEQ ID NO: 612966 - RNA, 18 nt, Human
uacaggcgugagccacca

SEQ ID NO: 612967 - RNA, 22 nt, Human
uagagacagagucucccucugu

SEQ ID NO: 612968 - RNA, 18 nt, Human
uaggauuacaggcgugag

SEQ ID NO: 612969 - RNA, 22 nt, Human
uaggauuacaggcgugagccac

SEQ ID NO: 612970 - RNA, 24 nt, Human
uaggauuacaggcgugagccacca

SEQ ID NO: 612971 - RNA, 25 nt, Human
uaggauuacaggcgugagccaccau

SEQ ID NO: 612972 - RNA, 24 nt, Human
uaguacagaugggguuucuccaug

SEQ ID NO: 612973 - RNA, 30 nt, Human
uauuuaugugucacacacacauguacacag

SEQ ID NO: 612974 - RNA, 22 nt, Human
uauuuuuuguuugagauggggu

SEQ ID NO: 612975 - RNA, 19 nt, Human
ucaagcgauucuccugccu

SEQ ID NO: 612976 - RNA, 23 nt, Human
ucacugcaaccuccgccuccugg

SEQ ID NO: 612977 - RNA, 24 nt, Human
ucacugcaaccuccgccuccuggg

SEQ ID NO: 612978 - RNA, 25 nt, Human
ucacugcaaccuccgccuccugggu

SEQ ID NO: 612979 - RNA, 26 nt, Human
ucacugcaaccuccgccuccuggguu

SEQ ID NO: 612980 - RNA, 24 nt, Human
ucacugcagacuuggccuccuggg

SEQ ID NO: 612981 - RNA, 23 nt, Human
ucacuguuguugcccaggcugga

SEQ ID NO: 612982 - RNA, 20 nt, Human
ucagccucccgaguagcugg

SEQ ID NO: 612983 - RNA, 24 nt, Human
ucccagcaggagguggaccuggag

SEQ ID NO: 612984 - RNA, 18 nt, Human
ucccgaguagcugggauu

SEQ ID NO: 612985 - RNA, 19 nt, Human
ucccuccacgcucugcccc

SEQ ID NO: 612986 - RNA, 26 nt, Human
uccgugaggcuggggcagggguaccc

SEQ ID NO: 612987 - RNA, 18 nt, Human
uccugggcucaagagauc

SEQ ID NO: 612988 - RNA, 22 nt, Human
uccugggcucaagagauccucc

SEQ ID NO: 612989 - RNA, 21 nt, Human
uccuggguucaagcgauucuc

SEQ ID NO: 612990 - RNA, 24 nt, Human
uccuggguucaagcgauucuccug

SEQ ID NO: 612991 - RNA, 23 nt, Human
ucucaaacuccugggcucaagag

SEQ ID NO: 612992 - RNA, 18 nt, Human
ucucaaaggagcuggaag

SEQ ID NO: 612993 - RNA, 19 nt, Human
ucucccucuguugcccagg

SEQ ID NO: 612994 - RNA, 23 nt, Human
ucucccucuguugcccagguugg

SEQ ID NO: 612995 - RNA, 24 nt, Human
ucucccucuguugcccagguugga

SEQ ID NO: 612996 - RNA, 24 nt, Human
ucuccugccucagccucccgagua

SEQ ID NO: 612997 - RNA, 19 nt, Human
ucugccccuugcugaagcc

SEQ ID NO: 612998 - RNA, 24 nt, Human
ucuguugcccagguuggagugcag

SEQ ID NO: 612999 - RNA, 21 nt, Human
ugagaccacagguaugugcca

SEQ ID NO: 613000 - RNA, 24 nt, Human
ugagaccacagguaugugccacca

SEQ ID NO: 613001 - RNA, 20 nt, Human
ugagauggggucucaaacuu

SEQ ID NO: 613002 - RNA, 18 nt, Human
ugcccaggcuggagugca

SEQ ID NO: 613003 - RNA, 21 nt, Human
ugcccaggcuggagugcaaug

SEQ ID NO: 613004 - RNA, 21 nt, Human
ugcccaggcuggagugcaaug

SEQ ID NO: 613005 - RNA, 24 nt, Human
ugcccaggcuggagugcaauggcg

SEQ ID NO: 613006 - RNA, 18 nt, Human
ugcccagguuggagugca

SEQ ID NO: 613007 - RNA, 24 nt, Human
ugcccagguuggagugcaguggug

SEQ ID NO: 613008 - RNA, 24 nt, Human
ugccucagccucccgaguagcugg

SEQ ID NO: 613009 - RNA, 24 nt, Human
ugccuuggccuccugaauagcuga

SEQ ID NO: 613010 - RNA, 21 nt, Human
ugcggcggcggcuccggcggc

SEQ ID NO: 613011 - RNA, 23 nt, Human
ugcggcggcggcuccggcggcug

SEQ ID NO: 613012 - RNA, 27 nt, Human
ugcuuauucucuuagaggacaguuuca

SEQ ID NO: 613013 - RNA, 24 nt, Human
uggagugcaauggcgcgaucucag

SEQ ID NO: 613014 - RNA, 28 nt, Human
uggagugcagugguguuacggcucuagc

SEQ ID NO: 613015 - RNA, 19 nt, Human
uggcacaggggaggagagg

SEQ ID NO: 613016 - RNA, 24 nt, Human
uggcgcgaucucagcucacugcaa

SEQ ID NO: 613017 - RNA, 21 nt, Human
ugggauuacaagcaugcgcca

SEQ ID NO: 613018 - RNA, 22 nt, Human
ugggauuacaagcaugcgccac

SEQ ID NO: 613019 - RNA, 24 nt, Human
ugggauuacaagcaugcgccacca

SEQ ID NO: 613020 - RNA, 24 nt, Human
ugggcucaagagauccuccugccu

SEQ ID NO: 613021 - RNA, 24 nt, Human
ugggcuuaggcaaucuuccugccu

SEQ ID NO: 613022 - RNA, 24 nt, Human
ugggguuucuccauguuggucagg

SEQ ID NO: 613023 - RNA, 23 nt, Human
uggguucaagcgauucuccugcc

SEQ ID NO: 613024 - RNA, 24 nt, Human
uggguucaagcgauucuccugccu

SEQ ID NO: 613025 - RNA, 23 nt, Human
uggucaggcuggucucgaacucc

SEQ ID NO: 613026 - RNA, 19 nt, Human
uggucucgaacucccgacc

SEQ ID NO: 613027 - RNA, 24 nt, Human
ugguguuaccauagcucacugcag

SEQ ID NO: 613028 - RNA, 21 nt, Human
uguauuuuuaguacagauggg

SEQ ID NO: 613029 - RNA, 20 nt, Human
uguugcccaggcuggagugc

SEQ ID NO: 613030 - RNA, 18 nt, Human
uuaguacagaugggguuu

SEQ ID NO: 613031 - RNA, 24 nt, Human
uuaguacagaugggguuucuccau

SEQ ID NO: 613032 - RNA, 21 nt, Human
uucaaagugcagaaauuucuc

SEQ ID NO: 613033 - RNA, 21 nt, Human
uucaagcgauucuccugccuc

SEQ ID NO: 613034 - RNA, 23 nt, Human
uucaagcgauucuccugccucag

SEQ ID NO: 613035 - RNA, 24 nt, Human
uucaagcgauucuccugccucagc

SEQ ID NO: 613036 - RNA, 24 nt, Human
uucacuguuguugcccaggcugga

SEQ ID NO: 613037 - RNA, 18 nt, Human
uugcccaggcuggagugc

SEQ ID NO: 613038 - RNA, 26 nt, Human
uugcccagguuggagugcaguggugu

SEQ ID NO: 613039 - RNA, 23 nt, Human
uuguauuuuuaguacagaugggg

SEQ ID NO: 613040 - RNA, 22 nt, Human
uuuaaguuuuccuagaggcuca

SEQ ID NO: 613041 - RNA, 23 nt, Human
uuucacuguuguugcccaggcug

SEQ ID NO: 613042 - RNA, 24 nt, Human
uuucacuguuguugcccaggcugg

SEQ ID NO: 613043 - RNA, 21 nt, Human
uuucuccauguuggucaggcu

SEQ ID NO: 613044 - RNA, 20 nt, Human
uuuuguauuuuuaguacaga

SEQ ID NO: 613045 - RNA, 22 nt, Human
uuuuuaguacagaugggguuuc

SEQ ID NO: 613046 - RNA, 24 nt, Human
uuuuuguauuuuuuguuugagaug

SEQ ID NO: 613047 - RNA, 18 nt, Human
aaccuuccuuucccgccc

SEQ ID NO: 613048 - RNA, 18 nt, Human
accaccccaggagagggc

SEQ ID NO: 613049 - RNA, 23 nt, Human
accagccccagccccagcccggc

SEQ ID NO: 613050 - RNA, 22 nt, Human
accccaggagagggcgggguga

SEQ ID NO: 613051 - RNA, 22 nt, Human
acgccgcaaggccggccuggac

SEQ ID NO: 613052 - RNA, 18 nt, Human
agagcuagggaccuugcc

SEQ ID NO: 613053 - RNA, 20 nt, Human
aggaguaaggcggacuuagg

SEQ ID NO: 613054 - RNA, 21 nt, Human
aggcccugguauggagaaagg

SEQ ID NO: 613055 - RNA, 22 nt, Human
aguggucuaaccagccccagcc

SEQ ID NO: 613056 - RNA, 24 nt, Human
aguggucuaaccagccccagcccc

SEQ ID NO: 613057 - RNA, 18 nt, Human
auggagaaagggugaagg

SEQ ID NO: 613058 - RNA, 18 nt, Human
caagcggccccccagccc

SEQ ID NO: 613059 - RNA, 20 nt, Human
caagcggccccccagccccc

SEQ ID NO: 613060 - RNA, 18 nt, Human
cagcccccaccaccaccc

SEQ ID NO: 613061 - RNA, 21 nt, Human
cagcuucccggguccggcgcc

SEQ ID NO: 613062 - RNA, 20 nt, Human
ccacgccuucgccgcgccgu

SEQ ID NO: 613063 - RNA, 20 nt, Human
ccagccugacccuggggcag

SEQ ID NO: 613064 - RNA, 23 nt, Human
cccauggccuacaguccuuuauu

SEQ ID NO: 613065 - RNA, 18 nt, Human
ccccagccccagcccggc

SEQ ID NO: 613066 - RNA, 20 nt, Human
ccccagccccagcccggcac

SEQ ID NO: 613067 - RNA, 22 nt, Human
ccccagcccccaccaccacccc

SEQ ID NO: 613068 - RNA, 21 nt, Human
cccccaccaccaccccaggag

SEQ ID NO: 613069 - RNA, 20 nt, Human
cccccagcccccaccaccac

SEQ ID NO: 613070 - RNA, 21 nt, Human
cccccauauaugauggguccc

SEQ ID NO: 613071 - RNA, 20 nt, Human
cccgccacgccuucgccgcg

SEQ ID NO: 613072 - RNA, 26 nt, Human
cccgccccgccccgcgacgggcucca

SEQ ID NO: 613073 - RNA, 18 nt, Human
ccgccacgccuucgccgc

SEQ ID NO: 613074 - RNA, 21 nt, Human
ccgccacgccuucgccgcgcc

SEQ ID NO: 613075 - RNA, 19 nt, Human
ccuuuauuagagcgagagu

SEQ ID NO: 613076 - RNA, 24 nt, Human
cgagagucccgaggcccagccccc

SEQ ID NO: 613077 - RNA, 19 nt, Human
cgaggccaggccccagcgc

SEQ ID NO: 613078 - RNA, 24 nt, Human
cgccccgccccgcgacgggcucca

SEQ ID NO: 613079 - RNA, 19 nt, Human
cggccccccagcccccacc

SEQ ID NO: 613080 - RNA, 22 nt, Human
cucagucccgacgccgcaaggc

SEQ ID NO: 613081 - RNA, 19 nt, Human
cucgagacccggcgcccag

SEQ ID NO: 613082 - RNA, 18 nt, Human
cugacccuggggcaggca

SEQ ID NO: 613083 - RNA, 22 nt, Human
cuuuacuccgagcgcguucucc

SEQ ID NO: 613084 - RNA, 23 nt, Human
gagagucccgaggcccagccccc

SEQ ID NO: 613085 - RNA, 19 nt, Human
gagcgagagucccgaggcc

SEQ ID NO: 613086 - RNA, 18 nt, Human
gaggaccugcgcucagga

SEQ ID NO: 613087 - RNA, 18 nt, Human
gccccagcccggcaccac

SEQ ID NO: 613088 - RNA, 23 nt, Human
gcccugguauggagaaaggguga

SEQ ID NO: 613089 - RNA, 19 nt, Human
gcguggccgacugugcggg

SEQ ID NO: 613090 - RNA, 23 nt, Human
ggagagagaggaccugcgcucag

SEQ ID NO: 613091 - RNA, 19 nt, Human
ggcaggcaagcggcccccc

SEQ ID NO: 613092 - RNA, 18 nt, Human
ggcggggugagaaccgga

SEQ ID NO: 613093 - RNA, 21 nt, Human
gggccggguccaagcgccuga

SEQ ID NO: 613094 - RNA, 24 nt, Human
ggguucaaguacauggaggagagg

SEQ ID NO: 613095 - RNA, 23 nt, Human
gucuaaccagccccagccccagc

SEQ ID NO: 613096 - RNA, 21 nt, Human
gugaagggagagagaggaccu

SEQ ID NO: 613097 - RNA, 22 nt, Human
uaggccccauggccuacagucc

SEQ ID NO: 613098 - RNA, 19 nt, Human
uagggaccuugcccagccu

SEQ ID NO: 613099 - RNA, 19 nt, Human
uccuuuauuagagcgagag

SEQ ID NO: 613100 - RNA, 19 nt, Human
ugcacucgagacccggcgc

SEQ ID NO: 613101 - RNA, 19 nt, Human
uggagaaagggugaaggga

SEQ ID NO: 613102 - RNA, 21 nt, Human
uggcgggaaccacgggucccg

SEQ ID NO: 613103 - RNA, 18 nt, Human
uggggcaggcaagcggcc

SEQ ID NO: 613104 - RNA, 23 nt, Human
ugguauggagaaagggugaaggg

SEQ ID NO: 613105 - RNA, 18 nt, Human
uuuuuuuuuuuuuuuucg

SEQ ID NO: 613106 - RNA, 21 nt, Human
uuuuuuuuuuuuuuuucgugg

SEQ ID NO: 613107 - RNA, 25 nt, Human
uuuuuuuuuuuuuuuuucgugguuu

SEQ ID NO: 613108 - RNA, 21 nt, Human
aagcucgcuucguagcagccu

SEQ ID NO: 613109 - RNA, 24 nt, Human
aaguagagacgggguuucaccaug

SEQ ID NO: 613110 - RNA, 19 nt, Human
aaguagcugggacuacagg

SEQ ID NO: 613111 - RNA, 20 nt, Human
aaguagcugggacuacaggc

SEQ ID NO: 613112 - RNA, 24 nt, Human
accaucccuaaagaacuccuccca

SEQ ID NO: 613113 - RNA, 18 nt, Human
acccacuaccacacccag

SEQ ID NO: 613114 - RNA, 18 nt, Human
acgggguuucaccauguu

SEQ ID NO: 613115 - RNA, 19 nt, Human
acgggguuucaccauguua

SEQ ID NO: 613116 - RNA, 20 nt, Human
acgggguuucaccauguuag

SEQ ID NO: 613117 - RNA, 24 nt, Human
acgggguuucaccauguuagccag

SEQ ID NO: 613118 - RNA, 20 nt, Human
acugcaagcuccgccuccug

SEQ ID NO: 613119 - RNA, 18 nt, Human
agcuccgccuccuggguu

SEQ ID NO: 613120 - RNA, 19 nt, Human
aggcagccagagcuucagg

SEQ ID NO: 613121 - RNA, 25 nt, Human
aggcuggagugcaguggugccaucu

SEQ ID NO: 613122 - RNA, 22 nt, Human
aguagagacgggguuucaccau

SEQ ID NO: 613123 - RNA, 23 nt, Human
aguagagacgggguuucaccaug

SEQ ID NO: 613124 - RNA, 23 nt, Human
aguagcugggacuacaggcaccc

SEQ ID NO: 613125 - RNA, 20 nt, Human
agugcaguggugccaucucg

SEQ ID NO: 613126 - RNA, 24 nt, Human
agugcaguggugccaucucggcuc

SEQ ID NO: 613127 - RNA, 21 nt, Human
auucuccugccucagccuccc

SEQ ID NO: 613128 - RNA, 21 nt, Human
caagagcugccugagcccagc

SEQ ID NO: 613129 - RNA, 21 nt, Human
caccauguuagccagcauggu

SEQ ID NO: 613130 - RNA, 24 nt, Human
caccauguuagccagcauggucuc

SEQ ID NO: 613131 - RNA, 24 nt, Human
cacccggcaccagcugccacaacc

SEQ ID NO: 613132 - RNA, 22 nt, Human
caccucccuccuggagauucua

SEQ ID NO: 613133 - RNA, 24 nt, Human
caccugccuacuccuggugagagc

SEQ ID NO: 613134 - RNA, 22 nt, Human
cacgccauucuccugccucagc

SEQ ID NO: 613135 - RNA, 24 nt, Human
cagagucuugcucuguugcccagg

SEQ ID NO: 613136 - RNA, 23 nt, Human
caggcacccacuaccacacccag

SEQ ID NO: 613137 - RNA, 23 nt, Human
ccagcccaggcucccacccugcc

SEQ ID NO: 613138 - RNA, 18 nt, Human
cccaaggccucaggcacu

SEQ ID NO: 613139 - RNA, 22 nt, Human
cccaaggccucaggcacugcuc

SEQ ID NO: 613140 - RNA, 23 nt, Human
cccaaguagcugggacuacaggc

SEQ ID NO: 613141 - RNA, 24 nt, Human
cccaaguagcugggacuacaggca

SEQ ID NO: 613142 - RNA, 21 nt, Human
cccacccggcaccagcugcca

SEQ ID NO: 613143 - RNA, 18 nt, Human
cccagcccaggcucccac

SEQ ID NO: 613144 - RNA, 22 nt, Human
ccccgcaggccgcugcuccucc

SEQ ID NO: 613145 - RNA, 24 nt, Human
ccccgcaggccgcugcuccuccca

SEQ ID NO: 613146 - RNA, 22 nt, Human
ccccuaagccaccucccuccug

SEQ ID NO: 613147 - RNA, 26 nt, Human
ccccugagcuccuagaggaccuugga

SEQ ID NO: 613148 - RNA, 18 nt, Human
cccgacccaucgcccucc

SEQ ID NO: 613149 - RNA, 22 nt, Human
cccuaaagaacuccucccaagg

SEQ ID NO: 613150 - RNA, 22 nt, Human
cccugagcuccuagaggaccuu

SEQ ID NO: 613151 - RNA, 19 nt, Human
ccggcaccagcugccacaa

SEQ ID NO: 613152 - RNA, 22 nt, Human
ccuaagccaccucccuccugga

SEQ ID NO: 613153 - RNA, 23 nt, Human
ccuaagccaccucccuccuggag

SEQ ID NO: 613154 - RNA, 22 nt, Human
ccuccagguucaggccugaucc

SEQ ID NO: 613155 - RNA, 18 nt, Human
ccucccaagcucgcuucg

SEQ ID NO: 613156 - RNA, 22 nt, Human
cgacccaucgcccuccaccccu

SEQ ID NO: 613157 - RNA, 19 nt, Human
cgccuccuggguucacgcc

SEQ ID NO: 613158 - RNA, 19 nt, Human
cgggguuucaccauguuag

SEQ ID NO: 613159 - RNA, 19 nt, Human
cucagagacaggauccacc

SEQ ID NO: 613160 - RNA, 24 nt, Human
cucagccucccaaguagcugggac

SEQ ID NO: 613161 - RNA, 21 nt, Human
cuccuggguucacgccauucu

SEQ ID NO: 613162 - RNA, 20 nt, Human
cucuguugcccaggcuggag

SEQ ID NO: 613163 - RNA, 23 nt, Human
cugccucagccucccaaguagcu

SEQ ID NO: 613164 - RNA, 20 nt, Human
cuggugagagcucuagagag

SEQ ID NO: 613165 - RNA, 21 nt, Human
cuugcucuguugcccaggcug

SEQ ID NO: 613166 - RNA, 21 nt, Human
gaaaaggcagucaccucccac

SEQ ID NO: 613167 - RNA, 20 nt, Human
gacccaucgcccuccacccc

SEQ ID NO: 613168 - RNA, 21 nt, Human
gagacagagucuugcucuguu

SEQ ID NO: 613169 - RNA, 24 nt, Human
gagacgggguuucaccauguuagc

SEQ ID NO: 613170 - RNA, 21 nt, Human
gagcccagcccaggcucccac

SEQ ID NO: 613171 - RNA, 22 nt, Human
gagcugccugagcccagcccag

SEQ ID NO: 613172 - RNA, 19 nt, Human
gaggaccuuggagacggga

SEQ ID NO: 613173 - RNA, 21 nt, Human
gcccagcccaggcucccaccc

SEQ ID NO: 613174 - RNA, 22 nt, Human
gccccgcaggccgcugcuccuc

SEQ ID NO: 613175 - RNA, 19 nt, Human
gccccuaagccaccucccu

SEQ ID NO: 613176 - RNA, 20 nt, Human
gccucagccucccaaguagc

SEQ ID NO: 613177 - RNA, 25 nt, Human
gccuccuggguucacgccauucucc

SEQ ID NO: 613178 - RNA, 22 nt, Human
gccugagauccuuuccuagggg

SEQ ID NO: 613179 - RNA, 21 nt, Human
gccugagcccagcccaggcuc

SEQ ID NO: 613180 - RNA, 25 nt, Human
gcucuguugcccaggcuggagugca

SEQ ID NO: 613181 - RNA, 23 nt, Human
gcugccacaaccugaaaauccgc

SEQ ID NO: 613182 - RNA, 21 nt, Human
gcuggagugcaguggugccag

SEQ ID NO: 613183 - RNA, 19 nt, Human
ggaaaaggggaauccauac

SEQ ID NO: 613184 - RNA, 19 nt, Human
ggauccaccugccuacucc

SEQ ID NO: 613185 - RNA, 19 nt, Human
ggcacccacuaccacaccc

SEQ ID NO: 613186 - RNA, 19 nt, Human
ggcccggcccagcuggcug

SEQ ID NO: 613187 - RNA, 21 nt, Human
ggcccggcccagcuggcugca

SEQ ID NO: 613188 - RNA, 18 nt, Human
gggguuucaccauguuag

SEQ ID NO: 613189 - RNA, 23 nt, Human
guagagacgggguuucaccaugu

SEQ ID NO: 613190 - RNA, 25 nt, Human
uaaaauuaaaaggaaaaggcaguca

SEQ ID NO: 613191 - RNA, 19 nt, Human
uaaagaacuccucccaagg

SEQ ID NO: 613192 - RNA, 22 nt, Human
uaaagaacuccucccaaggccu

SEQ ID NO: 613193 - RNA, 24 nt, Human
uaaguagagacgggguuucaccau

SEQ ID NO: 613194 - RNA, 19 nt, Human
uaauuuuuuguauuuuaag

SEQ ID NO: 613195 - RNA, 24 nt, Human
uaauuuuuuguauuuuaaguagag

SEQ ID NO: 613196 - RNA, 25 nt, Human
uaauuuuuuguauuuuaaguagaga

SEQ ID NO: 613197 - RNA, 21 nt, Human
uagagacgggguuucaccaug

SEQ ID NO: 613198 - RNA, 22 nt, Human
uagagacgggguuucaccaugu

SEQ ID NO: 613199 - RNA, 19 nt, Human
uagccccuaagccaccucc

SEQ ID NO: 613200 - RNA, 24 nt, Human
uagccccuaagccaccucccuccu

SEQ ID NO: 613201 - RNA, 20 nt, Human
uauacaaaagaaagguguuc

SEQ ID NO: 613202 - RNA, 18 nt, Human
ucacugcaagcuccgccu

SEQ ID NO: 613203 - RNA, 23 nt, Human
ucacugcaagcuccgccuccugg

SEQ ID NO: 613204 - RNA, 24 nt, Human
ucacugcaagcuccgccuccuggg

SEQ ID NO: 613205 - RNA, 18 nt, Human
ucagccucccaaguagcu

SEQ ID NO: 613206 - RNA, 20 nt, Human
ucagccucccaaguagcugg

SEQ ID NO: 613207 - RNA, 24 nt, Human
ucccaaguagcugggacuacaggc

SEQ ID NO: 613208 - RNA, 22 nt, Human
uccccacccggcaccagcugcc

SEQ ID NO: 613209 - RNA, 19 nt, Human
uccccagggcuggggaugu

SEQ ID NO: 613210 - RNA, 24 nt, Human
uccuggguucacgccauucuccug

SEQ ID NO: 613211 - RNA, 21 nt, Human
ucuccagcuucccgacccauc

SEQ ID NO: 613212 - RNA, 26 nt, Human
ucuccugccucagccucccaaguagc

SEQ ID NO: 613213 - RNA, 18 nt, Human
ucuguugcccaggcugga

SEQ ID NO: 613214 - RNA, 24 nt, Human
ucuguugcccaggcuggagugcag

SEQ ID NO: 613215 - RNA, 22 nt, Human
ucuugcucuguugcccaggcug

SEQ ID NO: 613216 - RNA, 23 nt, Human
ucuugcucuguugcccaggcugg

SEQ ID NO: 613217 - RNA, 24 nt, Human
ucuugcucuguugcccaggcugga

SEQ ID NO: 613218 - RNA, 23 nt, Human
ugaaaguagccccuaagccaccu

SEQ ID NO: 613219 - RNA, 22 nt, Human
ugcaguggugccaucucggcuc

SEQ ID NO: 613220 - RNA, 18 nt, Human
ugcccaggcuggagugca

SEQ ID NO: 613221 - RNA, 21 nt, Human
ugcccaggcuggagugcagug

SEQ ID NO: 613222 - RNA, 24 nt, Human
ugcccaggcuggagugcaguggug

SEQ ID NO: 613223 - RNA, 24 nt, Human
ugccucagccucccaaguagcugg

SEQ ID NO: 613224 - RNA, 20 nt, Human
ugccugagcccagcccaggc

SEQ ID NO: 613225 - RNA, 28 nt, Human
uggagugcaguggugccauccuagcacg

SEQ ID NO: 613226 - RNA, 23 nt, Human
uggagugcaguggugccaucucg

SEQ ID NO: 613227 - RNA, 24 nt, Human
uggagugcaguggugccaucucgg

SEQ ID NO: 613228 - RNA, 18 nt, Human
uggcugcaggcgcagcug

SEQ ID NO: 613229 - RNA, 19 nt, Human
ugggacuacaggcacccac

SEQ ID NO: 613230 - RNA, 19 nt, Human
ugggacuacaggcacccac

SEQ ID NO: 613231 - RNA, 20 nt, Human
ugggacuacaggcacccacu

SEQ ID NO: 613232 - RNA, 21 nt, Human
ugggacuacaggcacccacua

SEQ ID NO: 613233 - RNA, 24 nt, Human
ugggacuacaggcacccacuacca

SEQ ID NO: 613234 - RNA, 20 nt, Human
uggguucacgccauucuccu

SEQ ID NO: 613235 - RNA, 24 nt, Human
uugcccaggcuggagugcaguggu

SEQ ID NO: 613236 - RNA, 24 nt, Human
uugcucuguugcccaggcuggagu

SEQ ID NO: 613237 - RNA, 18 nt, Human
uuucaccauguuagccag

SEQ ID NO: 613238 - RNA, 24 nt, Human
uuuuaaguagagacgggguuucac

SEQ ID NO: 613239 - RNA, 21 nt, Human
uuuuuguauuuuaaguagaga

SEQ ID NO: 613240 - RNA, 24 nt, Human
uuuuuuguauuuuaaguagagacg

SEQ ID NO: 613241 - RNA, 22 nt, Human
aaaugucccaccucaaccucac

SEQ ID NO: 613242 - RNA, 21 nt, Human
aagcaucuuuaaaaauuugau

SEQ ID NO: 613243 - RNA, 19 nt, Human
aagccaucuccaagccuag

SEQ ID NO: 613244 - RNA, 18 nt, Human
acggaccaaccaaagcca

SEQ ID NO: 613245 - RNA, 22 nt, Human
acugcaaacugcuagccuguag

SEQ ID NO: 613246 - RNA, 20 nt, Human
agcaggcuuuuccacagugc

SEQ ID NO: 613247 - RNA, 22 nt, Human
aggauacauacuacacgcagcg

SEQ ID NO: 613248 - RNA, 23 nt, Human
augccgcuccccgcuacugccuu

SEQ ID NO: 613249 - RNA, 21 nt, Human
auuauguucuuuccaaccacg

SEQ ID NO: 613250 - RNA, 19 nt, Human
caccucaaccucacacuca

SEQ ID NO: 613251 - RNA, 23 nt, Human
caccucaaccucacacucaauac

SEQ ID NO: 613252 - RNA, 22 nt, Human
cacgcagcgaaaaugccaacca

SEQ ID NO: 613253 - RNA, 20 nt, Human
cagaauuuucaagauggcac

SEQ ID NO: 613254 - RNA, 18 nt, Human
cagcuucucugaagaaau

SEQ ID NO: 613255 - RNA, 24 nt, Human
cagggucuucacugugcucccagg

SEQ ID NO: 613256 - RNA, 21 nt, Human
cagucugccuggcccugggcu

SEQ ID NO: 613257 - RNA, 22 nt, Human
cccacacuauagcugggcaauc

SEQ ID NO: 613258 - RNA, 24 nt, Human
ccccgcuacugccuuacacccagu

SEQ ID NO: 613259 - RNA, 22 nt, Human
cccuguagcagcugaguugcuu

SEQ ID NO: 613260 - RNA, 22 nt, Human
ccuggcccugggcucuguucca

SEQ ID NO: 613261 - RNA, 19 nt, Human
cgaaaaugccaaccacuga

SEQ ID NO: 613262 - RNA, 28 nt, Human
cggaccaaccaaagccaucuccaagccu

SEQ ID NO: 613263 - RNA, 24 nt, Human
cuagccuguagaccaaauucaacc

SEQ ID NO: 613264 - RNA, 25 nt, Human
cuggaugcugugauauuuguuaacc

SEQ ID NO: 613265 - RNA, 18 nt, Human
gacagcaugccgcucccc

SEQ ID NO: 613266 - RNA, 22 nt, Human
gaccaaccaaagccaucuccaa

SEQ ID NO: 613267 - RNA, 20 nt, Human
ggcagggagacuuccagcag

SEQ ID NO: 613268 - RNA, 27 nt, Human
uacacugggagguuucacauaaauauc

SEQ ID NO: 613269 - RNA, 25 nt, Human
ucacaucgguucuccuugcucagca

SEQ ID NO: 613270 - RNA, 19 nt, Human
ucaggggccaaccugcgcu

SEQ ID NO: 613271 - RNA, 25 nt, Human
uccaagugagaaguuagcagagucc

SEQ ID NO: 613272 - RNA, 20 nt, Human
ucccaggugccaggaugcuc

SEQ ID NO: 613273 - RNA, 21 nt, Human
ucccaggugccaggaugcucu

SEQ ID NO: 613274 - RNA, 20 nt, Human
ucccaggugccagggugcuc

SEQ ID NO: 613275 - RNA, 21 nt, Human
ucccaggugccagggugcucc

SEQ ID NO: 613276 - RNA, 24 nt, Human
ucccuaaucagaguucaguagggc

SEQ ID NO: 613277 - RNA, 18 nt, Human
ugaccuuuaguuuuccuu

SEQ ID NO: 613278 - RNA, 18 nt, Human
ugaccuuuaguuuuccuu

SEQ ID NO: 613279 - RNA, 19 nt, Human
ugaucccggauucugaccu

SEQ ID NO: 613280 - RNA, 22 nt, Human
ugccuggcccugggcucuguuc

SEQ ID NO: 613281 - RNA, 20 nt, Human
uggagcuaacagcuguuaga

SEQ ID NO: 613282 - RNA, 22 nt, Human
uggcaauacacugggagguuuc

SEQ ID NO: 613283 - RNA, 21 nt, Human
uggcaccuuuccccaaacuuc

SEQ ID NO: 613284 - RNA, 21 nt, Human
uggcagcacucucauaacuac

SEQ ID NO: 613285 - RNA, 19 nt, Human
uggcccugggcucuguucc

SEQ ID NO: 613286 - RNA, 23 nt, Human
uguuagacagcaugccgcucccc

SEQ ID NO: 613287 - RNA, 19 nt, Human
uucaagauggcaccuuucc

SEQ ID NO: 613288 - RNA, 19 nt, Human
uucacggaccaaccaaagc

SEQ ID NO: 613289 - RNA, 25 nt, Human
uucacugugcucccaggugccaggg

SEQ ID NO: 613290 - RNA, 27 nt, Human
uucuauaccauucauuaaacauagacu

SEQ ID NO: 613291 - RNA, 22 nt, Human
aagcccaaaacacuucaagcaa

SEQ ID NO: 613292 - RNA, 21 nt, Human
aggaauugccauuucagcauc

SEQ ID NO: 613293 - RNA, 24 nt, Human
augauguccuaaguagcuuccucu

SEQ ID NO: 613294 - RNA, 19 nt, Human
caagcuccuaggcuccccu

SEQ ID NO: 613295 - RNA, 21 nt, Human
caccccauuuauuaagcccaa

SEQ ID NO: 613296 - RNA, 20 nt, Human
cauuuuagauccucugguug

SEQ ID NO: 613297 - RNA, 21 nt, Human
cgcucagaggccagagccaga

SEQ ID NO: 613298 - RNA, 20 nt, Human
cugaaaaucugaaugugaca

SEQ ID NO: 613299 - RNA, 25 nt, Human
gaggccagagccagaccuagcgaaa

SEQ ID NO: 613300 - RNA, 21 nt, Human
uaagcccaaaacacuucaagc

SEQ ID NO: 613301 - RNA, 18 nt, Human
ucccagaagaucauggcc

SEQ ID NO: 613302 - RNA, 22 nt, Human
ucugagauuuuaugcccaagag

SEQ ID NO: 613303 - RNA, 22 nt, Human
ugacuagaaggucaauccaagc

SEQ ID NO: 613304 - RNA, 20 nt, Human
ugggaaaacuugcuuaaaug

SEQ ID NO: 613305 - RNA, 20 nt, Human
ugggaaagaauguguuucag

SEQ ID NO: 613306 - RNA, 27 nt, Human
ugggcagaggaggagggucgaacguuu

SEQ ID NO: 613307 - RNA, 22 nt, Human
uggugagucccagaagaucaug

SEQ ID NO: 613308 - RNA, 24 nt, Human
ugugacauuuuagauccucugguu

SEQ ID NO: 613309 - RNA, 22 nt, Human
uucuggagauggugagucccag

SEQ ID NO: 613310 - RNA, 18 nt, Human
uugguuuagucucccgau

SEQ ID NO: 613311 - RNA, 18 nt, Human
acagaugacagugaacac

SEQ ID NO: 613312 - RNA, 20 nt, Human
acaugguuuuucugaaaagu

SEQ ID NO: 613313 - RNA, 18 nt, Human
agacagaagagcaauaau

SEQ ID NO: 613314 - RNA, 23 nt, Human
aggcaaagacaggacaaacaaaa

SEQ ID NO: 613315 - RNA, 21 nt, Human
aggcacaguaucauucaaaau

SEQ ID NO: 613316 - RNA, 20 nt, Human
auggaaugacaccacauuug

SEQ ID NO: 613317 - RNA, 24 nt, Human
cagaagagcaauaaucccgagaaa

SEQ ID NO: 613318 - RNA, 24 nt, Human
caggcaaagacaggacaaacaaaa

SEQ ID NO: 613319 - RNA, 24 nt, Human
cccgagaaaauauaauuaaaauac

SEQ ID NO: 613320 - RNA, 23 nt, Human
cuuaacacuggcaaaauuuggaa

SEQ ID NO: 613321 - RNA, 23 nt, Human
gacagggaggugugguauauagg

SEQ ID NO: 613322 - RNA, 19 nt, Human
gauccaggcaaagacagga

SEQ ID NO: 613323 - RNA, 18 nt, Human
uauagcauaaaagacaug

SEQ ID NO: 613324 - RNA, 23 nt, Human
uaucuuaaaaaaaauacagagca

SEQ ID NO: 613325 - RNA, 23 nt, Human
ucaaaacugggucuacaauccau

SEQ ID NO: 613326 - RNA, 22 nt, Human
uccaggcaaagacaggacaaac

SEQ ID NO: 613327 - RNA, 18 nt, Human
ugaaaaguggacagggag

SEQ ID NO: 613328 - RNA, 23 nt, Human
ugaaaaguggacagggaggugug

SEQ ID NO: 613329 - RNA, 25 nt, Human
ugugguauauaggaaaguggcucac

SEQ ID NO: 613330 - RNA, 22 nt, Human
uuagauucuagguuucuuuuuu

SEQ ID NO: 613331 - RNA, 23 nt, Human
uucuagguuucuuuuuugguuuc

SEQ ID NO: 613332 - RNA, 22 nt, Human
agccugggcggggcuggggugg

SEQ ID NO: 613333 - RNA, 22 nt, Human
aggcacaagacgguagcccggc

SEQ ID NO: 613334 - RNA, 19 nt, Human
aggcagggaucugucugac

SEQ ID NO: 613335 - RNA, 21 nt, Human
caaggcagggaucugucugac

SEQ ID NO: 613336 - RNA, 19 nt, Human
cacuggcagcagccugggc

SEQ ID NO: 613337 - RNA, 20 nt, Human
cacuggcagcagccugggcg

SEQ ID NO: 613338 - RNA, 22 nt, Human
cagcagccugggcggggcuggg

SEQ ID NO: 613339 - RNA, 21 nt, Human
cccaccaaggcagggaucugu

SEQ ID NO: 613340 - RNA, 21 nt, Human
ccccagcuggggacaggcccc

SEQ ID NO: 613341 - RNA, 19 nt, Human
ccugagccacccacagguc

SEQ ID NO: 613342 - RNA, 22 nt, Human
cuccguucuggggucugggagg

SEQ ID NO: 613343 - RNA, 23 nt, Human
cucggcccggccucgugccgguu

SEQ ID NO: 613344 - RNA, 22 nt, Human
cuggcagcagccugggcggggc

SEQ ID NO: 613345 - RNA, 24 nt, Human
cugggguggagcccggggucugcu

SEQ ID NO: 613346 - RNA, 20 nt, Human
gcacuggcagcagccugggc

SEQ ID NO: 613347 - RNA, 19 nt, Human
gcugggguggagcccgggg

SEQ ID NO: 613348 - RNA, 20 nt, Human
ggaucugucugacuugaagc

SEQ ID NO: 613349 - RNA, 21 nt, Human
ggaucugucugacuugaagcu

SEQ ID NO: 613350 - RNA, 18 nt, Human
gggcggggcuggggugga

SEQ ID NO: 613351 - RNA, 21 nt, Human
gggcugggguggagcccgggg

SEQ ID NO: 613352 - RNA, 30 nt, Human
gucugggaggcgugggcaggagugagggcu

SEQ ID NO: 613353 - RNA, 19 nt, Human
guucuggggucugggaggc

SEQ ID NO: 613354 - RNA, 28 nt, Human
uggaaggcagaacugcccaccaaggcag

SEQ ID NO: 613355 - RNA, 21 nt, Human
uggcagcagccugggcggggc

SEQ ID NO: 613356 - RNA, 21 nt, Human
ugggcaggagugagggcccca

SEQ ID NO: 613357 - RNA, 23 nt, Human
ugggcaggagugagggccccagg

SEQ ID NO: 613358 - RNA, 24 nt, Human
ugggccugagccacccacaggucc

SEQ ID NO: 613359 - RNA, 23 nt, Human
uuuguaaaagugugcacuggcag

SEQ ID NO: 613360 - RNA, 18 nt, Human
uuuuuuuuuuuuuuuuug

SEQ ID NO: 613361 - RNA, 25 nt, Human
uuuuuuuuuuuuuuuuuugucuuuu

SEQ ID NO: 613362 - RNA, 29 nt, Human
uuuuuuuuuuuuuuuuuuugucuuuuuaa

SEQ ID NO: 613363 - RNA, 21 nt, Human
aaaaaaaaaaaaagaagaaga

SEQ ID NO: 613364 - RNA, 21 nt, Human
aaaaagaaaaaaaucuggcaa

SEQ ID NO: 613365 - RNA, 20 nt, Human
aaagcaauacaacuugagga

SEQ ID NO: 613366 - RNA, 21 nt, Human
aaaggaacccauacgguaaaa

SEQ ID NO: 613367 - RNA, 19 nt, Human
aaaucauuucagaaggucc

SEQ ID NO: 613368 - RNA, 25 nt, Human
aacauuuuaggguucuucauuguau

SEQ ID NO: 613369 - RNA, 21 nt, Human
aaccaacaggucacauaagca

SEQ ID NO: 613370 - RNA, 20 nt, Human
aaccuggcuagcccuuggga

SEQ ID NO: 613371 - RNA, 27 nt, Human
aacucauacauauacauuugcuaccau

SEQ ID NO: 613372 - RNA, 20 nt, Human
aagaagaagacacacuuugg

SEQ ID NO: 613373 - RNA, 20 nt, Human
aagaggaaauggauauaaaa

SEQ ID NO: 613374 - RNA, 30 nt, Human
aagcagaaagauaaaacuauaccccaaggg

SEQ ID NO: 613375 - RNA, 24 nt, Human
aagucgucaguaagaauuuauuac

SEQ ID NO: 613376 - RNA, 22 nt, Human
aaucacccaccaaaaggaaccc

SEQ ID NO: 613377 - RNA, 21 nt, Human
aaucauggcaaauggagagcu

SEQ ID NO: 613378 - RNA, 18 nt, Human
acacugcuacauacccgc

SEQ ID NO: 613379 - RNA, 19 nt, Human
acauauacauuugcuacca

SEQ ID NO: 613380 - RNA, 18 nt, Human
acccgcagucuguucccu

SEQ ID NO: 613381 - RNA, 18 nt, Human
acugaauccuugagcuga

SEQ ID NO: 613382 - RNA, 21 nt, Human
agaaagugggaaagaaauuag

SEQ ID NO: 613383 - RNA, 19 nt, Human
agaacgcagugauggcaac

SEQ ID NO: 613384 - RNA, 19 nt, Human
agacccccgcuguucccag

SEQ ID NO: 613385 - RNA, 22 nt, Human
aggaaauggauauaaaaccaag

SEQ ID NO: 613386 - RNA, 20 nt, Human
aggcagaagguggaggcagg

SEQ ID NO: 613387 - RNA, 21 nt, Human
aggcauuuaaaaaaaaaaaaa

SEQ ID NO: 613388 - RNA, 18 nt, Human
aggggccacugggcagga

SEQ ID NO: 613389 - RNA, 21 nt, Human
agggggaauaauggagaagga

SEQ ID NO: 613390 - RNA, 23 nt, Human
aggugcagagacuggggggaggu

SEQ ID NO: 613391 - RNA, 24 nt, Human
auaagcaacaagaacuuccaagag

SEQ ID NO: 613392 - RNA, 20 nt, Human
auccuugagcugaaucccag

SEQ ID NO: 613393 - RNA, 21 nt, Human
auuuaaaaaaaaaaaaaagaa

SEQ ID NO: 613394 - RNA, 25 nt, Human
caaaagcacagcaaagcuggagacc

SEQ ID NO: 613395 - RNA, 23 nt, Human
caacacuacagaauacaaacuca

SEQ ID NO: 613396 - RNA, 19 nt, Human
caacagccccaugcccucc

SEQ ID NO: 613397 - RNA, 22 nt, Human
caacagccccaugcccuccagg

SEQ ID NO: 613398 - RNA, 27 nt, Human
caagagauacugcugcucugacaccac

SEQ ID NO: 613399 - RNA, 28 nt, Human
caagagauacugcugcucugacaccacu

SEQ ID NO: 613400 - RNA, 23 nt, Human
caaucacccaccaaaaggaaccc

SEQ ID NO: 613401 - RNA, 19 nt, Human
cacagcaaagcaauacaac

SEQ ID NO: 613402 - RNA, 18 nt, Human
cacaggagccuguguccu

SEQ ID NO: 613403 - RNA, 18 nt, Human
cacgcaggucuccauggg

SEQ ID NO: 613404 - RNA, 21 nt, Human
cacugggcaggacagccucug

SEQ ID NO: 613405 - RNA, 20 nt, Human
cagcaugcugaugucauggc

SEQ ID NO: 613406 - RNA, 19 nt, Human
caggcagaagguggaggca

SEQ ID NO: 613407 - RNA, 19 nt, Human
caggucacauaagcaacaa

SEQ ID NO: 613408 - RNA, 18 nt, Human
caguagggcagcaccccc

SEQ ID NO: 613409 - RNA, 22 nt, Human
caguagggcagcacccccaaac

SEQ ID NO: 613410 - RNA, 18 nt, Human
ccccaaacccagggggcc

SEQ ID NO: 613411 - RNA, 24 nt, Human
ccccagacgauacuaagugaggcu

SEQ ID NO: 613412 - RNA, 22 nt, Human
cccucaccaccaugcugaaacc

SEQ ID NO: 613413 - RNA, 23 nt, Human
cccucaccaccaugcugaaaccu

SEQ ID NO: 613414 - RNA, 18 nt, Human
cccuggaaauggcgugag

SEQ ID NO: 613415 - RNA, 19 nt, Human
ccucaaucacccaccaaaa

SEQ ID NO: 613416 - RNA, 19 nt, Human
ccuuuuucccucaccacca

SEQ ID NO: 613417 - RNA, 19 nt, Human
cgcaaagaaagggaggcuc

SEQ ID NO: 613418 - RNA, 20 nt, Human
cgccuccugcaggcucacac

SEQ ID NO: 613419 - RNA, 21 nt, Human
cgccuccugcaggcucacacg

SEQ ID NO: 613420 - RNA, 19 nt, Human
cgucccuucuuccaaaagc

SEQ ID NO: 613421 - RNA, 22 nt, Human
cuacagcccucagcaccaagaa

SEQ ID NO: 613422 - RNA, 18 nt, Human
cuaccauagguucuacaa

SEQ ID NO: 613423 - RNA, 20 nt, Human
cucaccaccaugcugaaacc

SEQ ID NO: 613424 - RNA, 22 nt, Human
cuccaagagauacugcugcucu

SEQ ID NO: 613425 - RNA, 26 nt, Human
cuccaagauuuccuaauuuuugauuu

SEQ ID NO: 613426 - RNA, 24 nt, Human
cuccuuuuucccucaccaccaugc

SEQ ID NO: 613427 - RNA, 24 nt, Human
cugcugaguugaccgcaaacucca

SEQ ID NO: 613428 - RNA, 19 nt, Human
cugggugcugggccccaga

SEQ ID NO: 613429 - RNA, 22 nt, Human
cugguuugagaaacucccucau

SEQ ID NO: 613430 - RNA, 25 nt, Human
cuuugaggagggggaaaguugggug

SEQ ID NO: 613431 - RNA, 18 nt, Human
gagggggaaaguugggug

SEQ ID NO: 613432 - RNA, 20 nt, Human
gaugaaugggaggaaaauca

SEQ ID NO: 613433 - RNA, 26 nt, Human
gcauuuaaaaaaaaaaaaaagaagaa

SEQ ID NO: 613434 - RNA, 20 nt, Human
gcccugaccuccagccacau

SEQ ID NO: 613435 - RNA, 22 nt, Human
gcucagacgggugacagacccc

SEQ ID NO: 613436 - RNA, 23 nt, Human
ggaagacucuaacacaacuaagc

SEQ ID NO: 613437 - RNA, 21 nt, Human
ggagaugaugagggguugagg

SEQ ID NO: 613438 - RNA, 21 nt, Human
ggcagcacccccaaacccagg

SEQ ID NO: 613439 - RNA, 18 nt, Human
ggcucagacgggugacag

SEQ ID NO: 613440 - RNA, 18 nt, Human
gggagacgcaaagaaagg

SEQ ID NO: 613441 - RNA, 18 nt, Human
gggagggggaauaaugga

SEQ ID NO: 613442 - RNA, 18 nt, Human
gugcagagacugggggga

SEQ ID NO: 613443 - RNA, 19 nt, Human
guucuaccaaaaaagaaaa

SEQ ID NO: 613444 - RNA, 26 nt, Human
uaaaacaauuggcaagaaccaaauca

SEQ ID NO: 613445 - RNA, 19 nt, Human
uaaaaccaaggaaaguggu

SEQ ID NO: 613446 - RNA, 25 nt, Human
uaagaaaagagugucaagaaaccag

SEQ ID NO: 613447 - RNA, 20 nt, Human
uacaacuugaggacucccuc

SEQ ID NO: 613448 - RNA, 24 nt, Human
uacacugcuacauacccgcagucu

SEQ ID NO: 613449 - RNA, 22 nt, Human
uacaguaaaucacugaagcaga

SEQ ID NO: 613450 - RNA, 20 nt, Human
uacauaggaaaagguggccu

SEQ ID NO: 613451 - RNA, 28 nt, Human
uaccaaaaaagaaaaaaaucuggcaauu

SEQ ID NO: 613452 - RNA, 20 nt, Human
uaguacaaaacucuuuaaac

SEQ ID NO: 613453 - RNA, 24 nt, Human
ucaaucacccaccaaaaggaaccc

SEQ ID NO: 613454 - RNA, 21 nt, Human
ucacugaagcagaaagauaaa

SEQ ID NO: 613455 - RNA, 22 nt, Human
ucaggcaggaugaagacccaca

SEQ ID NO: 613456 - RNA, 22 nt, Human
ucagucccaugcuggaagacuc

SEQ ID NO: 613457 - RNA, 22 nt, Human
uccaugggcacugcugaguuga

SEQ ID NO: 613458 - RNA, 25 nt, Human
uccaugggcacugcugaguugaccg

SEQ ID NO: 613459 - RNA, 27 nt, Human
uccaugggcacugcugaguugaccgca

SEQ ID NO: 613460 - RNA, 21 nt, Human
ucccugugugaacagugccgu

SEQ ID NO: 613461 - RNA, 22 nt, Human
uccugaauuauuaacagaccuu

SEQ ID NO: 613462 - RNA, 19 nt, Human
uccuggagaugaugagggg

SEQ ID NO: 613463 - RNA, 18 nt, Human
uccuugagcugaauccca

SEQ ID NO: 613464 - RNA, 20 nt, Human
ucgcauagacuuugcccaag

SEQ ID NO: 613465 - RNA, 21 nt, Human
ucgcugggggccagucuuucc

SEQ ID NO: 613466 - RNA, 22 nt, Human
ucgcugggggccagucuuuccg

SEQ ID NO: 613467 - RNA, 24 nt, Human
ucgcugggggccagucuuuccggg

SEQ ID NO: 613468 - RNA, 26 nt, Human
ucuaccaaaaaagaaaaaaaucuggc

SEQ ID NO: 613469 - RNA, 19 nt, Human
ucuuccaaaagcacagcaa

SEQ ID NO: 613470 - RNA, 23 nt, Human
ugaaacagaggcugguugcugau

SEQ ID NO: 613471 - RNA, 26 nt, Human
ugaaaccgagcgcucacuggcaggug

SEQ ID NO: 613472 - RNA, 24 nt, Human
ugaagacacugaauccuugagcug

SEQ ID NO: 613473 - RNA, 23 nt, Human
ugaaucccaggugcagagacugg

SEQ ID NO: 613474 - RNA, 19 nt, Human
ugagaaacucccucaugau

SEQ ID NO: 613475 - RNA, 21 nt, Human
ugagaacgucgcugggggcca

SEQ ID NO: 613476 - RNA, 19 nt, Human
ugaggagggggaaaguugg

SEQ ID NO: 613477 - RNA, 24 nt, Human
ugaggggagcuggcgcuugcccag

SEQ ID NO: 613478 - RNA, 18 nt, Human
ugaggguggaggcuggca

SEQ ID NO: 613479 - RNA, 23 nt, Human
ugagugcagcagcuucccuaggg

SEQ ID NO: 613480 - RNA, 22 nt, Human
ugaguugaccgcaaacuccacu

SEQ ID NO: 613481 - RNA, 22 nt, Human
ugcuacaccaacacuacagaau

SEQ ID NO: 613482 - RNA, 19 nt, Human
ugcuggaagacucuaacac

SEQ ID NO: 613483 - RNA, 23 nt, Human
uggagauggcgccauaccgggcu

SEQ ID NO: 613484 - RNA, 19 nt, Human
uggcaacauggagauggcg

SEQ ID NO: 613485 - RNA, 19 nt, Human
uggcaagaaccaaaucaaa

SEQ ID NO: 613486 - RNA, 23 nt, Human
uggcgccauaccgggcuugaggc

SEQ ID NO: 613487 - RNA, 24 nt, Human
uggcuucugccagagaagccccgg

SEQ ID NO: 613488 - RNA, 22 nt, Human
ugguggucagggcuggggaagg

SEQ ID NO: 613489 - RNA, 18 nt, Human
uguaccacugggcagccu

SEQ ID NO: 613490 - RNA, 19 nt, Human
uguaggugcccaguccggg

SEQ ID NO: 613491 - RNA, 19 nt, Human
ugugccaacugggauuucu

SEQ ID NO: 613492 - RNA, 18 nt, Human
uucccaguagggcagcac

SEQ ID NO: 613493 - RNA, 21 nt, Human
uugaaacacauccuuugagga

SEQ ID NO: 613494 - RNA, 22 nt, Human
uuuauccuccuccaccacacca

SEQ ID NO: 613495 - RNA, 19 nt, Human
uuuguaaaaaugaagacac

SEQ ID NO: 613496 - RNA, 20 nt, Human
uuuguaaaaaugaagacacu

SEQ ID NO: 613497 - RNA, 20 nt, Human
aaaaacaauucaaaccacug

SEQ ID NO: 613498 - RNA, 21 nt, Human
aaaaacaauucaaaccacugg

SEQ ID NO: 613499 - RNA, 20 nt, Human
aaaauaaaacuagucacaga

SEQ ID NO: 613500 - RNA, 18 nt, Human
aaacaguagcucaucucc

SEQ ID NO: 613501 - RNA, 21 nt, Human
aaacagugcuccauggccuga

SEQ ID NO: 613502 - RNA, 22 nt, Human
aagaaaaaaagucaugugagga

SEQ ID NO: 613503 - RNA, 25 nt, Human
aagacaagaaaaaaagucaugugag

SEQ ID NO: 613504 - RNA, 23 nt, Human
acaguaccaggaaacaaucuagc

SEQ ID NO: 613505 - RNA, 18 nt, Human
accggcccgucgggcgcg

SEQ ID NO: 613506 - RNA, 18 nt, Human
agaaaaaaaggcauaagg

SEQ ID NO: 613507 - RNA, 18 nt, Human
agaaacagugcuccaugg

SEQ ID NO: 613508 - RNA, 26 nt, Human
agaaacagugcuccauggccugaagc

SEQ ID NO: 613509 - RNA, 22 nt, Human
agacaacacugccagcaacaca

SEQ ID NO: 613510 - RNA, 23 nt, Human
agacaagaaaaaaagucauguga

SEQ ID NO: 613511 - RNA, 23 nt, Human
aggaaacaaucuagccuccccgc

SEQ ID NO: 613512 - RNA, 21 nt, Human
aggcauaagggcaugagugga

SEQ ID NO: 613513 - RNA, 23 nt, Human
agggcucagucauuuuagggaga

SEQ ID NO: 613514 - RNA, 20 nt, Human
auaauauuucucccuacuuu

SEQ ID NO: 613515 - RNA, 25 nt, Human
aucuccuuaaaccuaguuuuuacca

SEQ ID NO: 613516 - RNA, 25 nt, Human
auggucggcugcuccucugcgugcc

SEQ ID NO: 613517 - RNA, 21 nt, Human
auuagaugaacccagggcuca

SEQ ID NO: 613518 - RNA, 18 nt, Human
cacccgagucgggaacau

SEQ ID NO: 613519 - RNA, 24 nt, Human
caguggcagugacaguaccaggaa

SEQ ID NO: 613520 - RNA, 19 nt, Human
cauggccugaagcaaaugg

SEQ ID NO: 613521 - RNA, 22 nt, Human
cauguugucucggggcaugguc

SEQ ID NO: 613522 - RNA, 23 nt, Human
ccaaacugaaaaaaucauuuagu

SEQ ID NO: 613523 - RNA, 20 nt, Human
ccaaaucaaagccccagugg

SEQ ID NO: 613524 - RNA, 19 nt, Human
ccaguagauccaacgccca

SEQ ID NO: 613525 - RNA, 18 nt, Human
ccagucgcccgugcuucc

SEQ ID NO: 613526 - RNA, 21 nt, Human
cccaggcuaggggguagagac

SEQ ID NO: 613527 - RNA, 25 nt, Human
cccauaaccgugcccggcggcugcu

SEQ ID NO: 613528 - RNA, 26 nt, Human
ccccauaaccgugcccggcggcugcu

SEQ ID NO: 613529 - RNA, 24 nt, Human
cccccauaaccgugcccggcggcu

SEQ ID NO: 613530 - RNA, 19 nt, Human
ccccgcccaccccgccccc

SEQ ID NO: 613531 - RNA, 23 nt, Human
ccccgcccccauaaccgugcccg

SEQ ID NO: 613532 - RNA, 19 nt, Human
cccgggucgaggcgggagg

SEQ ID NO: 613533 - RNA, 23 nt, Human
ccgcccaccccgcccccauaacc

SEQ ID NO: 613534 - RNA, 19 nt, Human
ccgcggccgccccagcugc

SEQ ID NO: 613535 - RNA, 21 nt, Human
ccugagagaauaugaaacaac

SEQ ID NO: 613536 - RNA, 19 nt, Human
cgaggaagcggcugcugcu

SEQ ID NO: 613537 - RNA, 21 nt, Human
cgccaaccucagcagccacgc

SEQ ID NO: 613538 - RNA, 19 nt, Human
cgccgccaaccucagcagc

SEQ ID NO: 613539 - RNA, 19 nt, Human
cgccgccaaccucagcagg

SEQ ID NO: 613540 - RNA, 18 nt, Human
cgccuugagcccccucuc

SEQ ID NO: 613541 - RNA, 21 nt, Human
cuccuuugaaucuucccguua

SEQ ID NO: 613542 - RNA, 30 nt, Human
cugccccauuccuccaaaucaaagccccaa

SEQ ID NO: 613543 - RNA, 24 nt, Human
cugcgugccgggaccggcccccuc

SEQ ID NO: 613544 - RNA, 21 nt, Human
cugugaucuucugugccuucu

SEQ ID NO: 613545 - RNA, 21 nt, Human
gaaguaaauaaauauagggaa

SEQ ID NO: 613546 - RNA, 20 nt, Human
gacaagaaaaaaagucaugu

SEQ ID NO: 613547 - RNA, 23 nt, Human
gagaaugauccccaaacugaaaa

SEQ ID NO: 613548 - RNA, 21 nt, Human
gaggaaagaaaauaaaucuug

SEQ ID NO: 613549 - RNA, 23 nt, Human
gauagcaagacuucauuucagga

SEQ ID NO: 613550 - RNA, 22 nt, Human
gcccaggcuaggggguagagac

SEQ ID NO: 613551 - RNA, 19 nt, Human
gccuccgcgccagaagccg

SEQ ID NO: 613552 - RNA, 19 nt, Human
gcuucagauaguccccugc

SEQ ID NO: 613553 - RNA, 21 nt, Human
ggaaacaaucuagccuccccg

SEQ ID NO: 613554 - RNA, 20 nt, Human
ggaagcgccgcggccgcccc

SEQ ID NO: 613555 - RNA, 23 nt, Human
ggcccccuccuuuccuccgcccc

SEQ ID NO: 613556 - RNA, 29 nt, Human
ggcuaggggguagagacacagcccuugug

SEQ ID NO: 613557 - RNA, 19 nt, Human
gggagugggaaguaggaag

SEQ ID NO: 613558 - RNA, 23 nt, Human
gggcauggucggcugcuccucug

SEQ ID NO: 613559 - RNA, 20 nt, Human
ggggcauggucggcugcucc

SEQ ID NO: 613560 - RNA, 23 nt, Human
gucgcgaucggaagcgccgcggc

SEQ ID NO: 613561 - RNA, 23 nt, Human
guuuggaagcauaacacauucag

SEQ ID NO: 613562 - RNA, 19 nt, Human
uaaaagcacaaaaauaaaa

SEQ ID NO: 613563 - RNA, 19 nt, Human
uaaacccuauuuaacuaag

SEQ ID NO: 613564 - RNA, 19 nt, Human
uaagacaagaaaaaaaguc

SEQ ID NO: 613565 - RNA, 20 nt, Human
uaaggaaaaccacauuagau

SEQ ID NO: 613566 - RNA, 24 nt, Human
uaaguuaaaaaacuauaagaaaaa

SEQ ID NO: 613567 - RNA, 20 nt, Human
uaaucccaaguuuuggugcc

SEQ ID NO: 613568 - RNA, 19 nt, Human
uacaugcauaguuauguug

SEQ ID NO: 613569 - RNA, 22 nt, Human
uaccaggaaacaaucuagccuc

SEQ ID NO: 613570 - RNA, 20 nt, Human
uacugggcaaagggaggaaa

SEQ ID NO: 613571 - RNA, 18 nt, Human
uagcaagacuucauuuca

SEQ ID NO: 613572 - RNA, 21 nt, Human
uagccuccccgcccaccccgg

SEQ ID NO: 613573 - RNA, 21 nt, Human
ucacagauagcaagacuucau

SEQ ID NO: 613574 - RNA, 18 nt, Human
ucacagaucuggagauuc

SEQ ID NO: 613575 - RNA, 19 nt, Human
uccccgcccaccccgcccc

SEQ ID NO: 613576 - RNA, 21 nt, Human
uccgccccuugcgguccccgg

SEQ ID NO: 613577 - RNA, 20 nt, Human
ucugcaacaugaaaucugcu

SEQ ID NO: 613578 - RNA, 22 nt, Human
ucugcaacaugaaaucugcucg

SEQ ID NO: 613579 - RNA, 18 nt, Human
ucugcucgacucacagau

SEQ ID NO: 613580 - RNA, 23 nt, Human
ugaacuaaaaacaauucaaacca

SEQ ID NO: 613581 - RNA, 21 nt, Human
ugagaaugauccccaaacuga

SEQ ID NO: 613582 - RNA, 20 nt, Human
ugaguaaaccagauguggcu

SEQ ID NO: 613583 - RNA, 22 nt, Human
uggaaguaaauaaauauaggga

SEQ ID NO: 613584 - RNA, 21 nt, Human
uggcagugacaguaccaggaa

SEQ ID NO: 613585 - RNA, 18 nt, Human
ugggagcaagaaaaccac

SEQ ID NO: 613586 - RNA, 19 nt, Human
ugggagcaagaaaaccacu

SEQ ID NO: 613587 - RNA, 22 nt, Human
ugggcaaagggaggaaagaaaa

SEQ ID NO: 613588 - RNA, 20 nt, Human
ugugguaggguagggcacgu

SEQ ID NO: 613589 - RNA, 20 nt, Human
uuccuccaaaucaaagcccc

SEQ ID NO: 613590 - RNA, 22 nt, Human
uuccuccaaaucaaagccccag

SEQ ID NO: 613591 - RNA, 22 nt, Human
uugaacuaaaaacaauucaaac

SEQ ID NO: 613592 - RNA, 24 nt, Human
uuuuuuuuuuuuuuuuuuuauuuu

SEQ ID NO: 613593 - RNA, 22 nt, Human
agcuggugagccaccucgggcc

SEQ ID NO: 613594 - RNA, 25 nt, Human
agggaagugggguguggugggaagg

SEQ ID NO: 613595 - RNA, 19 nt, Human
auagcugaggccagaaagc

SEQ ID NO: 613596 - RNA, 18 nt, Human
aucugaacagcuggugag

SEQ ID NO: 613597 - RNA, 21 nt, Human
ccuggacucuggucgccuggg

SEQ ID NO: 613598 - RNA, 19 nt, Human
cgccugggguccucugggc

SEQ ID NO: 613599 - RNA, 22 nt, Human
gcgcggcuggcggaaggcgggc

SEQ ID NO: 613600 - RNA, 19 nt, Human
ggaaguggggugugguggg

SEQ ID NO: 613601 - RNA, 19 nt, Human
ggcgcggcuggcggaaggc

SEQ ID NO: 613602 - RNA, 20 nt, Human
ggguagguggcgcagggcga

SEQ ID NO: 613603 - RNA, 24 nt, Human
ggguagguggcgcagggcgcggcu

SEQ ID NO: 613604 - RNA, 20 nt, Human
gucgccugggguccucuggg

SEQ ID NO: 613605 - RNA, 24 nt, Human
ucagccuggacucuggucgccugg

SEQ ID NO: 613606 - RNA, 21 nt, Human
ugaaaguggaaggagagggaa

SEQ ID NO: 613607 - RNA, 22 nt, Human
ugaaaguggaaggagagggaag

SEQ ID NO: 613608 - RNA, 20 nt, Human
uggaaggagagggaaguggg

SEQ ID NO: 613609 - RNA, 24 nt, Human
uggaaggagagggaaguggggugu

SEQ ID NO: 613610 - RNA, 23 nt, Human
uggugggaagggacauuccugca

SEQ ID NO: 613611 - RNA, 19 nt, Human
ugugaaaguggaaggagag

SEQ ID NO: 613612 - RNA, 21 nt, Human
ugugaaaguggaaggagaggg

SEQ ID NO: 613613 - RNA, 25 nt, Human
aaaaaaaaaaaaaaugccaucagag

SEQ ID NO: 613614 - RNA, 25 nt, Human
aaaaaaaaaaaaugccaucagagga

SEQ ID NO: 613615 - RNA, 23 nt, Human
aaaaaaaaaaugccaucagagga

SEQ ID NO: 613616 - RNA, 19 nt, Human
aaaaaugugagaaaaacua

SEQ ID NO: 613617 - RNA, 19 nt, Human
aaaaugccaucagaggaaa

SEQ ID NO: 613618 - RNA, 18 nt, Human
aaaccaccuaugugaguc

SEQ ID NO: 613619 - RNA, 26 nt, Human
aaagaaagaaacacagaacaucccua

SEQ ID NO: 613620 - RNA, 23 nt, Human
aaagagucacuuuaaucucaaaa

SEQ ID NO: 613621 - RNA, 27 nt, Human
aacaaguguuagagaacugauacacaa

SEQ ID NO: 613622 - RNA, 22 nt, Human
aacacagaacaucccuaaauac

SEQ ID NO: 613623 - RNA, 21 nt, Human
aaccuaacuaacucaccacuu

SEQ ID NO: 613624 - RNA, 18 nt, Human
aacuugcuccuuucuucu

SEQ ID NO: 613625 - RNA, 19 nt, Human
aagaaagaaacacagaaca

SEQ ID NO: 613626 - RNA, 20 nt, Human
aagcauccccaagcucacag

SEQ ID NO: 613627 - RNA, 23 nt, Human
aaggaugcucgaaccaagugcag

SEQ ID NO: 613628 - RNA, 21 nt, Human
aagggaguggagguucagaug

SEQ ID NO: 613629 - RNA, 20 nt, Human
aaugaacauuuuauuuuaaa

SEQ ID NO: 613630 - RNA, 23 nt, Human
acaaagcaggauugucaccaagg

SEQ ID NO: 613631 - RNA, 22 nt, Human
acagugccuuugccugugacca

SEQ ID NO: 613632 - RNA, 18 nt, Human
accucagcuucuguccga

SEQ ID NO: 613633 - RNA, 18 nt, Human
accucagcuucuguccga

SEQ ID NO: 613634 - RNA, 21 nt, Human
accuuagugacauuucugcug

SEQ ID NO: 613635 - RNA, 22 nt, Human
acgucacaggcccugccucagc

SEQ ID NO: 613636 - RNA, 23 nt, Human
acuucaaaaaagaaagaaacaca

SEQ ID NO: 613637 - RNA, 23 nt, Human
agaacaucccuaaauacaacguc

SEQ ID NO: 613638 - RNA, 24 nt, Human
agaacugauacacaacccuccaga

SEQ ID NO: 613639 - RNA, 21 nt, Human
agagacuauuuauauuaaaua

SEQ ID NO: 613640 - RNA, 25 nt, Human
agagaggaaauaagaauaaaaaaga

SEQ ID NO: 613641 - RNA, 19 nt, Human
agaggaaaagacaggggca

SEQ ID NO: 613642 - RNA, 18 nt, Human
agauuuugagacuguggc

SEQ ID NO: 613643 - RNA, 22 nt, Human
agcugcagcuggccuccuggaa

SEQ ID NO: 613644 - RNA, 23 nt, Human
aggagaaugaacauuaaacagaa

SEQ ID NO: 613645 - RNA, 18 nt, Human
aggaggccugggccugug

SEQ ID NO: 613646 - RNA, 22 nt, Human
aggcagcccuaggcauguucuu

SEQ ID NO: 613647 - RNA, 23 nt, Human
aggguuuccuuuagcucccguuu

SEQ ID NO: 613648 - RNA, 21 nt, Human
aggugggcuggcaccaggugg

SEQ ID NO: 613649 - RNA, 23 nt, Human
auaagacagggcccugcuuccuu

SEQ ID NO: 613650 - RNA, 19 nt, Human
aucugucccugagcugcag

SEQ ID NO: 613651 - RNA, 19 nt, Human
augaaucuguaaacacaga

SEQ ID NO: 613652 - RNA, 20 nt, Human
augaugcugagcuccagguc

SEQ ID NO: 613653 - RNA, 22 nt, Human
auucagagauuuugagacugug

SEQ ID NO: 613654 - RNA, 18 nt, Human
caaaaaagaaagaaacac

SEQ ID NO: 613655 - RNA, 19 nt, Human
caacccuccagaaaugagg

SEQ ID NO: 613656 - RNA, 23 nt, Human
caacuugcugagaauuuugccag

SEQ ID NO: 613657 - RNA, 20 nt, Human
cacaaggaacagcacugcca

SEQ ID NO: 613658 - RNA, 24 nt, Human
caccaaagacacgugacccauaag

SEQ ID NO: 613659 - RNA, 23 nt, Human
caccaagguccacauugacauga

SEQ ID NO: 613660 - RNA, 21 nt, Human
cacccuaaccaaaaaucacca

SEQ ID NO: 613661 - RNA, 24 nt, Human
caccugggucagaagaugggcccc

SEQ ID NO: 613662 - RNA, 22 nt, Human
cacgcgcaaccuguccuucaca

SEQ ID NO: 613663 - RNA, 23 nt, Human
cacuuuguucuuggaaggagaau

SEQ ID NO: 613664 - RNA, 19 nt, Human
cagagcuggugccaaaagc

SEQ ID NO: 613665 - RNA, 24 nt, Human
caucuggggugggaccugggccug

SEQ ID NO: 613666 - RNA, 23 nt, Human
caucuuccaccaaagucuaaaca

SEQ ID NO: 613667 - RNA, 21 nt, Human
ccaccccccaccaaaaagaua

SEQ ID NO: 613668 - RNA, 18 nt, Human
ccagcacccaccccccac

SEQ ID NO: 613669 - RNA, 24 nt, Human
ccaggugggugguguccacggugg

SEQ ID NO: 613670 - RNA, 24 nt, Human
ccauucaaauaccagcacccaccc

SEQ ID NO: 613671 - RNA, 22 nt, Human
cccccggauuucuuccuucuuc

SEQ ID NO: 613672 - RNA, 21 nt, Human
cccugagcugcagcuggccuc

SEQ ID NO: 613673 - RNA, 18 nt, Human
ccgagagaggccuguucu

SEQ ID NO: 613674 - RNA, 19 nt, Human
ccggagcugagccaggugc

SEQ ID NO: 613675 - RNA, 24 nt, Human
ccggagcugagccaggugcccccg

SEQ ID NO: 613676 - RNA, 20 nt, Human
ccggauuucuuccuucuucu

SEQ ID NO: 613677 - RNA, 21 nt, Human
ccuccagaaaugaggcagaga

SEQ ID NO: 613678 - RNA, 28 nt, Human
ccuccaugaugcugagcuccagguccac

SEQ ID NO: 613679 - RNA, 19 nt, Human
ccucgccccggcacuccuc

SEQ ID NO: 613680 - RNA, 24 nt, Human
ccugugaccacgaccgagagaggc

SEQ ID NO: 613681 - RNA, 21 nt, Human
ccuuuggcucugaaaagggac

SEQ ID NO: 613682 - RNA, 19 nt, Human
cuccagcagguaaggagga

SEQ ID NO: 613683 - RNA, 24 nt, Human
cuccagcugcuguucucccagguu

SEQ ID NO: 613684 - RNA, 19 nt, Human
cuccuggaaucuacccaua

SEQ ID NO: 613685 - RNA, 23 nt, Human
cuccuggaaucuacccauagcuu

SEQ ID NO: 613686 - RNA, 18 nt, Human
cucgaaccaagugcagac

SEQ ID NO: 613687 - RNA, 20 nt, Human
cucggucagauucucucuca

SEQ ID NO: 613688 - RNA, 21 nt, Human
cucgucaauuuccuucagcuu

SEQ ID NO: 613689 - RNA, 20 nt, Human
cugagcugcagcuggccucc

SEQ ID NO: 613690 - RNA, 18 nt, Human
cugggccugugcacugcu

SEQ ID NO: 613691 - RNA, 21 nt, Human
cugggccugugcacugcuggg

SEQ ID NO: 613692 - RNA, 22 nt, Human
cuuaggucuccaaagaagccuc

SEQ ID NO: 613693 - RNA, 20 nt, Human
cuucugcuccaggcucgcca

SEQ ID NO: 613694 - RNA, 22 nt, Human
gaaaagacaggggcagcacaag

SEQ ID NO: 613695 - RNA, 19 nt, Human
gaagcauccccaagcucac

SEQ ID NO: 613696 - RNA, 24 nt, Human
gaccacagcaaugaaucuguaaac

SEQ ID NO: 613697 - RNA, 19 nt, Human
gcacccaccccccaccaaa

SEQ ID NO: 613698 - RNA, 22 nt, Human
gccaaaagcaaaggcagcccua

SEQ ID NO: 613699 - RNA, 21 nt, Human
gccuuggacuggaaagaaguc

SEQ ID NO: 613700 - RNA, 21 nt, Human
gcgggggcucacauucuccag

SEQ ID NO: 613701 - RNA, 22 nt, Human
gcuggcaccaggugggguggcc

SEQ ID NO: 613702 - RNA, 23 nt, Human
ggaaaagacaggggcagcacaag

SEQ ID NO: 613703 - RNA, 22 nt, Human
ggaggcugggagugacugcuua

SEQ ID NO: 613704 - RNA, 18 nt, Human
ggcagagauaauagauga

SEQ ID NO: 613705 - RNA, 20 nt, Human
ggcgaucacccuaaccaaaa

SEQ ID NO: 613706 - RNA, 21 nt, Human
ggcucacauucuccagguggg

SEQ ID NO: 613707 - RNA, 19 nt, Human
ggggaggaggccugggccu

SEQ ID NO: 613708 - RNA, 24 nt, Human
ggggcucacauucuccaggugggu

SEQ ID NO: 613709 - RNA, 19 nt, Human
guccacgcgccugcucucc

SEQ ID NO: 613710 - RNA, 24 nt, Human
uaaauaacucuucccuuaaaaaug

SEQ ID NO: 613711 - RNA, 22 nt, Human
uaauccccaacugcuaaguauu

SEQ ID NO: 613712 - RNA, 23 nt, Human
uacaaugaacauuuuauuuuaaa

SEQ ID NO: 613713 - RNA, 19 nt, Human
uacacaacccuccagaaau

SEQ ID NO: 613714 - RNA, 21 nt, Human
uagcugaagcucuccauucac

SEQ ID NO: 613715 - RNA, 19 nt, Human
uaguugggugggcaacuuu

SEQ ID NO: 613716 - RNA, 25 nt, Human
ucaaaaaagaaagaaacacagaaca

SEQ ID NO: 613717 - RNA, 23 nt, Human
ucaaauaccagcacccacccccc

SEQ ID NO: 613718 - RNA, 20 nt, Human
ucagaggaaaagacaggggc

SEQ ID NO: 613719 - RNA, 25 nt, Human
uccaauagacuuaggucuccaaaga

SEQ ID NO: 613720 - RNA, 18 nt, Human
uccacgcgccugcucucc

SEQ ID NO: 613721 - RNA, 24 nt, Human
uccagcugcuguucucccagguuc

SEQ ID NO: 613722 - RNA, 22 nt, Human
uccaggcucgccaggacuuccu

SEQ ID NO: 613723 - RNA, 18 nt, Human
uccauucacaguaccuca

SEQ ID NO: 613724 - RNA, 19 nt, Human
ucccaaauauuuuccccau

SEQ ID NO: 613725 - RNA, 19 nt, Human
ucccugagcugcagcuggc

SEQ ID NO: 613726 - RNA, 21 nt, Human
ucccugagcugcagcuggccu

SEQ ID NO: 613727 - RNA, 25 nt, Human
ucccugagcugcagcuggccuccug

SEQ ID NO: 613728 - RNA, 20 nt, Human
uccuucagcuucugcuccag

SEQ ID NO: 613729 - RNA, 23 nt, Human
uccuucagcuucugcuccaggcu

SEQ ID NO: 613730 - RNA, 21 nt, Human
uccuucuucuuuucaagccuc

SEQ ID NO: 613731 - RNA, 25 nt, Human
uccuugauucaucuuccaccaaagu

SEQ ID NO: 613732 - RNA, 21 nt, Human
ucuccagcugcuguucuccca

SEQ ID NO: 613733 - RNA, 19 nt, Human
ucugcuccaggcucgccag

SEQ ID NO: 613734 - RNA, 19 nt, Human
ucuggaguacagugccuuu

SEQ ID NO: 613735 - RNA, 20 nt, Human
ucuuagcugaagcucuccau

SEQ ID NO: 613736 - RNA, 22 nt, Human
ucuuuaguuuuaaugguagaag

SEQ ID NO: 613737 - RNA, 18 nt, Human
ugaaaacucagucauaau

SEQ ID NO: 613738 - RNA, 19 nt, Human
ugaagcauccccaagcuca

SEQ ID NO: 613739 - RNA, 18 nt, Human
ugaaggcauggcaaagcc

SEQ ID NO: 613740 - RNA, 21 nt, Human
ugacccauaagacagggcccu

SEQ ID NO: 613741 - RNA, 22 nt, Human
ugagcuccagguccacgcgccu

SEQ ID NO: 613742 - RNA, 18 nt, Human
ugagucuguuucuuuagu

SEQ ID NO: 613743 - RNA, 22 nt, Human
ugcagaaaggacuugacaggug

SEQ ID NO: 613744 - RNA, 20 nt, Human
ugccaaaagcaaaggcagcc

SEQ ID NO: 613745 - RNA, 19 nt, Human
ugcccccggauuucuuccu

SEQ ID NO: 613746 - RNA, 20 nt, Human
ugccuaacgucacaggcccu

SEQ ID NO: 613747 - RNA, 21 nt, Human
uggaaagaagucuuuaacuua

SEQ ID NO: 613748 - RNA, 20 nt, Human
uggcaaagccauggccacuc

SEQ ID NO: 613749 - RNA, 21 nt, Human
ugguugcagaguugacuggga

SEQ ID NO: 613750 - RNA, 19 nt, Human
ugguuggucagugccagag

SEQ ID NO: 613751 - RNA, 18 nt, Human
uguggagggcaagaacug

SEQ ID NO: 613752 - RNA, 21 nt, Human
uguuagagaacugauacacaa

SEQ ID NO: 613753 - RNA, 23 nt, Human
uuacauccaauagacuuaggucu

SEQ ID NO: 613754 - RNA, 21 nt, Human
uuagugcuucagcuugguccc

SEQ ID NO: 613755 - RNA, 33 nt, Human
uucaaccuguguuaaaaaaaaaaaaaaaaaaaa

SEQ ID NO: 613756 - RNA, 21 nt, Human
uucacaguaccucagucuuug

SEQ ID NO: 613757 - RNA, 20 nt, Human
uucugcuccaggcucgccag

SEQ ID NO: 613758 - RNA, 22 nt, Human
uugccaagcuugaucucugcac

SEQ ID NO: 613759 - RNA, 22 nt, Human
aaaaacucaguaggaaacauca

SEQ ID NO: 613760 - RNA, 21 nt, Human
aaacaucaggaucaccuagcc

SEQ ID NO: 613761 - RNA, 19 nt, Human
aaagaggagugcugugaca

SEQ ID NO: 613762 - RNA, 19 nt, Human
aagcagaugaaccacccaa

SEQ ID NO: 613763 - RNA, 24 nt, Human
aagcagaugaaccacccaaucaaa

SEQ ID NO: 613764 - RNA, 18 nt, Human
acagugggauuaaugggc

SEQ ID NO: 613765 - RNA, 19 nt, Human
accuucccgaggccaggcu

SEQ ID NO: 613766 - RNA, 23 nt, Human
acgaaguugaaguacugaguguu

SEQ ID NO: 613767 - RNA, 20 nt, Human
acgcagccgcacaugcuucc

SEQ ID NO: 613768 - RNA, 21 nt, Human
acucgguuuccagaaaucugg

SEQ ID NO: 613769 - RNA, 20 nt, Human
agaaaaacucaguaggaaac

SEQ ID NO: 613770 - RNA, 18 nt, Human
agcagggcuggcuggaag

SEQ ID NO: 613771 - RNA, 22 nt, Human
agcgcagggcagcagcaggcag

SEQ ID NO: 613772 - RNA, 21 nt, Human
augggagaaggggaagucagg

SEQ ID NO: 613773 - RNA, 20 nt, Human
caccccagagacaacaagau

SEQ ID NO: 613774 - RNA, 22 nt, Human
cagaugaaccacccaaucaaac

SEQ ID NO: 613775 - RNA, 23 nt, Human
cagcagcaggcagcuccacgaag

SEQ ID NO: 613776 - RNA, 19 nt, Human
caucaggaucaccuagcca

SEQ ID NO: 613777 - RNA, 23 nt, Human
cauuuaaugaauguuccaaacac

SEQ ID NO: 613778 - RNA, 22 nt, Human
ccacaccccagagacaacaaga

SEQ ID NO: 613779 - RNA, 18 nt, Human
ccacaggaccgcugccag

SEQ ID NO: 613780 - RNA, 21 nt, Human
ccacgaaguugaaguacugag

SEQ ID NO: 613781 - RNA, 23 nt, Human
ccagaaaaacucaguaggaaaca

SEQ ID NO: 613782 - RNA, 20 nt, Human
ccaugugugugccgcccucc

SEQ ID NO: 613783 - RNA, 21 nt, Human
ccaugugugugccgcccuccu

SEQ ID NO: 613784 - RNA, 25 nt, Human
cccaaucaaacaguacaugauuacu

SEQ ID NO: 613785 - RNA, 24 nt, Human
cccgugcacaccaugugugugccg

SEQ ID NO: 613786 - RNA, 19 nt, Human
ccuccucuccucuuccucc

SEQ ID NO: 613787 - RNA, 19 nt, Human
ccucuccucuuccuccucc

SEQ ID NO: 613788 - RNA, 20 nt, Human
ccugcuaaggaacuucucca

SEQ ID NO: 613789 - RNA, 24 nt, Human
cucuccucuuccuccucccugcua

SEQ ID NO: 613790 - RNA, 22 nt, Human
cugcaggagccaccuucccgag

SEQ ID NO: 613791 - RNA, 22 nt, Human
gagacaacaagaugauguggag

SEQ ID NO: 613792 - RNA, 26 nt, Human
gaggagugcugugacaccacaccccc

SEQ ID NO: 613793 - RNA, 22 nt, Human
gccaccuucccgaggccaggcu

SEQ ID NO: 613794 - RNA, 23 nt, Human
gcugaacugcaggagccaccuuc

SEQ ID NO: 613795 - RNA, 19 nt, Human
ggccugucggcugagggcc

SEQ ID NO: 613796 - RNA, 20 nt, Human
ggcuggaagcgccgggagcc

SEQ ID NO: 613797 - RNA, 19 nt, Human
gugauucuuugcuuccucc

SEQ ID NO: 613798 - RNA, 24 nt, Human
uaaugaauguuccaaacacacccu

SEQ ID NO: 613799 - RNA, 25 nt, Human
ucacugggauggaagcagaugaacc

SEQ ID NO: 613800 - RNA, 20 nt, Human
ucaggaucaccuagccagag

SEQ ID NO: 613801 - RNA, 20 nt, Human
ucccagaagucuccacagug

SEQ ID NO: 613802 - RNA, 19 nt, Human
ucccuuaucucuagggcaa

SEQ ID NO: 613803 - RNA, 20 nt, Human
uccuccucuccucuuccucc

SEQ ID NO: 613804 - RNA, 21 nt, Human
uccucuccucuuccuccuccc

SEQ ID NO: 613805 - RNA, 20 nt, Human
ucuggauaccagaaaaacuc

SEQ ID NO: 613806 - RNA, 23 nt, Human
ugacaccacaccccagagacaac

SEQ ID NO: 613807 - RNA, 25 nt, Human
ugacaccacaccccagagacaacaa

SEQ ID NO: 613808 - RNA, 18 nt, Human
ugauguggaggcacaggc

SEQ ID NO: 613809 - RNA, 24 nt, Human
ugcaugcucacgcagccgcacaug

SEQ ID NO: 613810 - RNA, 21 nt, Human
ugcuaaggaacuucuccaggg

SEQ ID NO: 613811 - RNA, 18 nt, Human
ugcuggggcuggcucugg

SEQ ID NO: 613812 - RNA, 22 nt, Human
uggaagcagaugaaccacccaa

SEQ ID NO: 613813 - RNA, 25 nt, Human
uggaagcagaugaaccacccaauca

SEQ ID NO: 613814 - RNA, 20 nt, Human
uggaguagcagagccacuug

SEQ ID NO: 613815 - RNA, 22 nt, Human
ugggauuaaugggcccagggac

SEQ ID NO: 613816 - RNA, 18 nt, Human
ugugugcgugcggcccgu

SEQ ID NO: 613817 - RNA, 23 nt, Human
ugugugcgugcggcccgugcaca

SEQ ID NO: 613818 - RNA, 23 nt, Human
uuugcuuccuccucuccucuucc

SEQ ID NO: 613819 - RNA, 18 nt, Human
uuuuuuuuuuuuuuuuug

SEQ ID NO: 613820 - RNA, 21 nt, Human
uuuuuuuuuuuuuuuuugcuu

SEQ ID NO: 613821 - RNA, 25 nt, Human
uuuuuuuuuuuuuuuuuuugcuuag

SEQ ID NO: 613822 - RNA, 23 nt, Human
aaaaagccagcccggagcugggc

SEQ ID NO: 613823 - RNA, 23 nt, Human
aagaagaggaggaggaggaagag

SEQ ID NO: 613824 - RNA, 22 nt, Human
accuguccccuccaccugcgcc

SEQ ID NO: 613825 - RNA, 19 nt, Human
agaaaggaggaagaagagg

SEQ ID NO: 613826 - RNA, 18 nt, Human
agacaggcucccaccccc

SEQ ID NO: 613827 - RNA, 27 nt, Human
agagaaaaacaagaaacugaguuggaa

SEQ ID NO: 613828 - RNA, 24 nt, Human
agagaagagaaaggaggaagaaga

SEQ ID NO: 613829 - RNA, 24 nt, Human
agagaggccagugaccugcuugag

SEQ ID NO: 613830 - RNA, 22 nt, Human
agaggccagugaccugcuugag

SEQ ID NO: 613831 - RNA, 19 nt, Human
agagggcccuggagcaauc

SEQ ID NO: 613832 - RNA, 18 nt, Human
agauguggagacugaggc

SEQ ID NO: 613833 - RNA, 21 nt, Human
agccagcccggagcugggccc

SEQ ID NO: 613834 - RNA, 20 nt, Human
aggaaauaguuuuuuucucu

SEQ ID NO: 613835 - RNA, 18 nt, Human
aggaagaagaggaggagg

SEQ ID NO: 613836 - RNA, 18 nt, Human
aggaagaagaggaggagg

SEQ ID NO: 613837 - RNA, 18 nt, Human
aggacgucaaaaguuugc

SEQ ID NO: 613838 - RNA, 24 nt, Human
aggagggcagguggugagggcugg

SEQ ID NO: 613839 - RNA, 22 nt, Human
aggcuggggugggccccaccuc

SEQ ID NO: 613840 - RNA, 22 nt, Human
agggcuggcggggggcagcagg

SEQ ID NO: 613841 - RNA, 19 nt, Human
agguccugguagaaggagg

SEQ ID NO: 613842 - RNA, 20 nt, Human
aggugggaaggacuggagag

SEQ ID NO: 613843 - RNA, 21 nt, Human
agguggugagggcuggcgggg

SEQ ID NO: 613844 - RNA, 22 nt, Human
agguggugagggcuggcggggg

SEQ ID NO: 613845 - RNA, 22 nt, Human
agugagcagguggcggccaggc

SEQ ID NO: 613846 - RNA, 18 nt, Human
caaaaagccagcccggag

SEQ ID NO: 613847 - RNA, 20 nt, Human
caagccaggcucccaccccu

SEQ ID NO: 613848 - RNA, 21 nt, Human
caaucaggacgucaaaaguuu

SEQ ID NO: 613849 - RNA, 23 nt, Human
cacacagcaagugagcagcagag

SEQ ID NO: 613850 - RNA, 19 nt, Human
cacacccaagccaggcucc

SEQ ID NO: 613851 - RNA, 21 nt, Human
cacacccaagccaggcuccca

SEQ ID NO: 613852 - RNA, 23 nt, Human
cacacccaagccaggcucccaaa

SEQ ID NO: 613853 - RNA, 20 nt, Human
cacccaagccaggcucccac

SEQ ID NO: 613854 - RNA, 19 nt, Human
cagacaggcucccaccccc

SEQ ID NO: 613855 - RNA, 22 nt, Human
cagacaggcucccacccccauc

SEQ ID NO: 613856 - RNA, 19 nt, Human
cagagcugggaccagaggc

SEQ ID NO: 613857 - RNA, 22 nt, Human
cagcagacaggcucccaccccc

SEQ ID NO: 613858 - RNA, 18 nt, Human
cagccacacccaagccag

SEQ ID NO: 613859 - RNA, 18 nt, Human
caguggugccgccuggca

SEQ ID NO: 613860 - RNA, 19 nt, Human
caucggcagaccugucccc

SEQ ID NO: 613861 - RNA, 19 nt, Human
caucucaucaauuccucac

SEQ ID NO: 613862 - RNA, 19 nt, Human
ccagccccuggcucucucc

SEQ ID NO: 613863 - RNA, 20 nt, Human
ccagccccuggcucucucca

SEQ ID NO: 613864 - RNA, 19 nt, Human
ccaggccccuuccccugcc

SEQ ID NO: 613865 - RNA, 20 nt, Human
cccagccucuguccagaguc

SEQ ID NO: 613866 - RNA, 22 nt, Human
cccaucggcagaccuguccccu

SEQ ID NO: 613867 - RNA, 25 nt, Human
ccccaggaggaccccagccucuguc

SEQ ID NO: 613868 - RNA, 24 nt, Human
ccccaucggcagaccuguccccuc

SEQ ID NO: 613869 - RNA, 19 nt, Human
ccccuuccccugcccggcc

SEQ ID NO: 613870 - RNA, 18 nt, Human
cccggagcugggcccagg

SEQ ID NO: 613871 - RNA, 23 nt, Human
ccuccuuuccuguuuuccugagu

SEQ ID NO: 613872 - RNA, 23 nt, Human
ccugcuccugauggugccugggg

SEQ ID NO: 613873 - RNA, 28 nt, Human
ccuggcagcccagcagacaggcucccac

SEQ ID NO: 613874 - RNA, 18 nt, Human
ccugguagaaggagggca

SEQ ID NO: 613875 - RNA, 26 nt, Human
cgcccgggggucccugccccccgccc

SEQ ID NO: 613876 - RNA, 24 nt, Human
cgcccugcaaaaagccagcccgga

SEQ ID NO: 613877 - RNA, 21 nt, Human
cggcagaccuguccccuccac

SEQ ID NO: 613878 - RNA, 18 nt, Human
cggggugggcaggugggu

SEQ ID NO: 613879 - RNA, 19 nt, Human
cugcccccuagccugcucc

SEQ ID NO: 613880 - RNA, 21 nt, Human
cugggcccaggccugcccccu

SEQ ID NO: 613881 - RNA, 19 nt, Human
cuggggcggggugggcagg

SEQ ID NO: 613882 - RNA, 19 nt, Human
gaaacccaaguuacagaga

SEQ ID NO: 613883 - RNA, 26 nt, Human
gacugugcugucccccaggaggaccc

SEQ ID NO: 613884 - RNA, 22 nt, Human
gagacugaggcccagagaggcc

SEQ ID NO: 613885 - RNA, 22 nt, Human
gagcagcagagcugggaccaga

SEQ ID NO: 613886 - RNA, 27 nt, Human
gcaaaaagccagcccggagcugggccc

SEQ ID NO: 613887 - RNA, 21 nt, Human
gccccuggcucucuccacuga

SEQ ID NO: 613888 - RNA, 18 nt, Human
gcccgggggucccugccc

SEQ ID NO: 613889 - RNA, 21 nt, Human
gcuggcggggggcagcagggg

SEQ ID NO: 613890 - RNA, 27 nt, Human
ggaccccagccucuguccagagucuca

SEQ ID NO: 613891 - RNA, 21 nt, Human
ggaggaccccagccucugucc

SEQ ID NO: 613892 - RNA, 20 nt, Human
ggcagcaggggacggaggcg

SEQ ID NO: 613893 - RNA, 23 nt, Human
ggccacacagcaagugagcagca

SEQ ID NO: 613894 - RNA, 19 nt, Human
ggccaggccccuuccccug

SEQ ID NO: 613895 - RNA, 19 nt, Human
ggccccaccuccagccccu

SEQ ID NO: 613896 - RNA, 18 nt, Human
ggcuucugagguccuggu

SEQ ID NO: 613897 - RNA, 20 nt, Human
gggcagcaggggacggaggc

SEQ ID NO: 613898 - RNA, 24 nt, Human
gggcuggcggggggcagcagggga

SEQ ID NO: 613899 - RNA, 22 nt, Human
ggggcggggugggcaggugggu

SEQ ID NO: 613900 - RNA, 21 nt, Human
ggggggcagcaggggacggag

SEQ ID NO: 613901 - RNA, 19 nt, Human
gggguccccaggucugggc

SEQ ID NO: 613902 - RNA, 24 nt, Human
ggggugggcagguggguggggcug

SEQ ID NO: 613903 - RNA, 20 nt, Human
ggggugggccccaccuccag

SEQ ID NO: 613904 - RNA, 22 nt, Human
gguggugagggcuggcgggggg

SEQ ID NO: 613905 - RNA, 21 nt, Human
guccccaggucugggcuucug

SEQ ID NO: 613906 - RNA, 20 nt, Human
gugggaaggacuggagagug

SEQ ID NO: 613907 - RNA, 22 nt, Human
gugggaaggacuggagagugag

SEQ ID NO: 613908 - RNA, 18 nt, Human
guggggcuggaaccuccu

SEQ ID NO: 613909 - RNA, 20 nt, Human
uacaucaucucaucaauucc

SEQ ID NO: 613910 - RNA, 20 nt, Human
uaggagagguugaggaagcg

SEQ ID NO: 613911 - RNA, 21 nt, Human
ucaauggugcugaugggguuu

SEQ ID NO: 613912 - RNA, 23 nt, Human
ucccccaggaggaccccagccuc

SEQ ID NO: 613913 - RNA, 21 nt, Human
uccccugcccggccgcccggg

SEQ ID NO: 613914 - RNA, 22 nt, Human
ucccugccccccgccccggccc

SEQ ID NO: 613915 - RNA, 18 nt, Human
uccugauggugccugggg

SEQ ID NO: 613916 - RNA, 21 nt, Human
ugaccugcuugaggccacaca

SEQ ID NO: 613917 - RNA, 20 nt, Human
ugagcagguggcggccaggc

SEQ ID NO: 613918 - RNA, 22 nt, Human
ugagcagguggcggccaggccc

SEQ ID NO: 613919 - RNA, 21 nt, Human
ugaggcccagagaggccagug

SEQ ID NO: 613920 - RNA, 24 nt, Human
ugagggcuggcggggggcagcagg

SEQ ID NO: 613921 - RNA, 25 nt, Human
ugagggcuggcgggggggggucguc

SEQ ID NO: 613922 - RNA, 20 nt, Human
ugagguaggcagggcagggg

SEQ ID NO: 613923 - RNA, 21 nt, Human
ugccuggggcggggugggcag

SEQ ID NO: 613924 - RNA, 21 nt, Human
ugcugucccccaggaggaccc

SEQ ID NO: 613925 - RNA, 24 nt, Human
uggaaccuccuuuccuguuuuccu

SEQ ID NO: 613926 - RNA, 20 nt, Human
uggaagagggcccuggagca

SEQ ID NO: 613927 - RNA, 23 nt, Human
ugggaaggacuggagagugagca

SEQ ID NO: 613928 - RNA, 24 nt, Human
uggggaagagaagagaaaggagga

SEQ ID NO: 613929 - RNA, 25 nt, Human
uggggcuggaaccuccuuuccuguu

SEQ ID NO: 613930 - RNA, 24 nt, Human
uggugccuggggcggggugggcag

SEQ ID NO: 613931 - RNA, 20 nt, Human
uguggagacugaggcccaga

SEQ ID NO: 613932 - RNA, 18 nt, Human
aaaagaacaggaugucag

SEQ ID NO: 613933 - RNA, 23 nt, Human
aaacaaacacaaaugaaaaugca

SEQ ID NO: 613934 - RNA, 20 nt, Human
aaccugcuucuuccuccucc

SEQ ID NO: 613935 - RNA, 22 nt, Human
aaggcacucuccccuccuucac

SEQ ID NO: 613936 - RNA, 24 nt, Human
aaguccuggucacuguagcagccc

SEQ ID NO: 613937 - RNA, 19 nt, Human
aauccucugaagucaggcu

SEQ ID NO: 613938 - RNA, 22 nt, Human
acaaaugaaaaugcaaaucaga

SEQ ID NO: 613939 - RNA, 25 nt, Human
acaggcagugcauggauguguaaac

SEQ ID NO: 613940 - RNA, 19 nt, Human
acauacauccucugaccuc

SEQ ID NO: 613941 - RNA, 25 nt, Human
accacagcugucagauaccaaccca

SEQ ID NO: 613942 - RNA, 19 nt, Human
acgcggcuguggggcugga

SEQ ID NO: 613943 - RNA, 23 nt, Human
agagcuuccucaaacagcuccau

SEQ ID NO: 613944 - RNA, 21 nt, Human
agccaguccucugaccuccug

SEQ ID NO: 613945 - RNA, 23 nt, Human
agccuuucucucccacaggcccc

SEQ ID NO: 613946 - RNA, 19 nt, Human
agcugggagaaugcagacu

SEQ ID NO: 613947 - RNA, 22 nt, Human
aggagccuucucucugccaccc

SEQ ID NO: 613948 - RNA, 23 nt, Human
aggccugccgcacacagugcagc

SEQ ID NO: 613949 - RNA, 18 nt, Human
aggcgguugaggugggga

SEQ ID NO: 613950 - RNA, 18 nt, Human
agggcccagccccaccuc

SEQ ID NO: 613951 - RNA, 20 nt, Human
aucccuggucugagccccca

SEQ ID NO: 613952 - RNA, 25 nt, Human
auggggguggggcaaagucaggggc

SEQ ID NO: 613953 - RNA, 21 nt, Human
caaacagcuccaugccuugca

SEQ ID NO: 613954 - RNA, 24 nt, Human
caaaugaaaaugcaaaucagagug

SEQ ID NO: 613955 - RNA, 19 nt, Human
caacccccucucucacagc

SEQ ID NO: 613956 - RNA, 19 nt, Human
caaccuggaaagggcagag

SEQ ID NO: 613957 - RNA, 21 nt, Human
caagugguccccgggcccaca

SEQ ID NO: 613958 - RNA, 24 nt, Human
caagugguccccgggcccacaggu

SEQ ID NO: 613959 - RNA, 22 nt, Human
cacaacaacccccucucucaca

SEQ ID NO: 613960 - RNA, 23 nt, Human
cacaacaacccccucucucacag

SEQ ID NO: 613961 - RNA, 21 nt, Human
cacacagugcagcuuggccag

SEQ ID NO: 613962 - RNA, 26 nt, Human
cacacauaccagagggccccuccaca

SEQ ID NO: 613963 - RNA, 22 nt, Human
cacacucuaccauccaaaaguc

SEQ ID NO: 613964 - RNA, 21 nt, Human
caccccccagcccgugccgcc

SEQ ID NO: 613965 - RNA, 18 nt, Human
caccucugccccaucucu

SEQ ID NO: 613966 - RNA, 20 nt, Human
cacgccccagaaggacaggg

SEQ ID NO: 613967 - RNA, 20 nt, Human
cacugagaagacacugccgg

SEQ ID NO: 613968 - RNA, 20 nt, Human
cacugccgggcugacaggac

SEQ ID NO: 613969 - RNA, 23 nt, Human
cagagccacagcagaacgcguug

SEQ ID NO: 613970 - RNA, 19 nt, Human
cagagccagguacccucug

SEQ ID NO: 613971 - RNA, 23 nt, Human
cagagccagguacccucuggcgc

SEQ ID NO: 613972 - RNA, 24 nt, Human
cagagccagguacccucuggcgcc

SEQ ID NO: 613973 - RNA, 23 nt, Human
cagccuuucucucccacaggccc

SEQ ID NO: 613974 - RNA, 20 nt, Human
cagcuggugggcagccaggg

SEQ ID NO: 613975 - RNA, 18 nt, Human
caggaaccguucuucucc

SEQ ID NO: 613976 - RNA, 18 nt, Human
cagugcacacacucuacc

SEQ ID NO: 613977 - RNA, 19 nt, Human
ccacaacaacccccucucu

SEQ ID NO: 613978 - RNA, 22 nt, Human
ccacacccagcaucaucuccuc

SEQ ID NO: 613979 - RNA, 18 nt, Human
ccaggcaccauccacgcc

SEQ ID NO: 613980 - RNA, 23 nt, Human
ccagguacccucuggcgccgcuc

SEQ ID NO: 613981 - RNA, 23 nt, Human
ccauccaaaagucgaagcuguga

SEQ ID NO: 613982 - RNA, 18 nt, Human
cccagcugcuccccuccc

SEQ ID NO: 613983 - RNA, 25 nt, Human
cccaggaggggaguguguuccgucg

SEQ ID NO: 613984 - RNA, 21 nt, Human
cccauggaacccuccugccca

SEQ ID NO: 613985 - RNA, 24 nt, Human
cccauggaacccuccugcccagga

SEQ ID NO: 613986 - RNA, 24 nt, Human
cccauggaacccuccugcccaggg

SEQ ID NO: 613987 - RNA, 21 nt, Human
ccccaggaaccguucuucucc

SEQ ID NO: 613988 - RNA, 24 nt, Human
ccccauccuucaccuccacccucc

SEQ ID NO: 613989 - RNA, 22 nt, Human
cccccaagugguccccgggccc

SEQ ID NO: 613990 - RNA, 24 nt, Human
cccccaagugguccccgggcccac

SEQ ID NO: 613991 - RNA, 21 nt, Human
cccccaggaaccguucuucuc

SEQ ID NO: 613992 - RNA, 19 nt, Human
ccccgggcccacaggugac

SEQ ID NO: 613993 - RNA, 21 nt, Human
cccgagugcuugcugggcuca

SEQ ID NO: 613994 - RNA, 18 nt, Human
cccgcagccgcagcgagc

SEQ ID NO: 613995 - RNA, 20 nt, Human
cccgcagccgcagcgagccc

SEQ ID NO: 613996 - RNA, 23 nt, Human
cccucugggccuuggggacuccc

SEQ ID NO: 613997 - RNA, 21 nt, Human
ccgcagcgagcccucggucag

SEQ ID NO: 613998 - RNA, 24 nt, Human
ccgucgccucuucagcuggugggc

SEQ ID NO: 613999 - RNA, 19 nt, Human
ccgugcccagcugcucccc

SEQ ID NO: 614000 - RNA, 21 nt, Human
ccuccacagagccagguaccc

SEQ ID NO: 614001 - RNA, 21 nt, Human
ccuccaucccucuggcauccc

SEQ ID NO: 614002 - RNA, 23 nt, Human
ccucccccaagugguccccgggc

SEQ ID NO: 614003 - RNA, 27 nt, Human
ccucucaaccuggaaagggcagagcca

SEQ ID NO: 614004 - RNA, 21 nt, Human
ccucugggccuuggggacucc

SEQ ID NO: 614005 - RNA, 19 nt, Human
ccuggccucugcuuccccc

SEQ ID NO: 614006 - RNA, 22 nt, Human
ccuggggcauccuggcucugcc

SEQ ID NO: 614007 - RNA, 18 nt, Human
cguugcucuugcugcugg

SEQ ID NO: 614008 - RNA, 23 nt, Human
cguugcucuugcugcuggggcuc

SEQ ID NO: 614009 - RNA, 26 nt, Human
cucacagucagugcacacacucuacc

SEQ ID NO: 614010 - RNA, 24 nt, Human
cucacggcccgcacgccugcuuug

SEQ ID NO: 614011 - RNA, 24 nt, Human
cucagggccaagagcuuccaagga

SEQ ID NO: 614012 - RNA, 24 nt, Human
cucccagcacccuugucagcagcc

SEQ ID NO: 614013 - RNA, 19 nt, Human
cuccugcccaggaagcugc

SEQ ID NO: 614014 - RNA, 18 nt, Human
cucuguggugcgcccucc

SEQ ID NO: 614015 - RNA, 22 nt, Human
cucuugucuuccagaagccccu

SEQ ID NO: 614016 - RNA, 22 nt, Human
cugcaaacuccuuccgcuguga

SEQ ID NO: 614017 - RNA, 22 nt, Human
cugccaccccccagcccgugcc

SEQ ID NO: 614018 - RNA, 21 nt, Human
cugccccaucucuggauggcc

SEQ ID NO: 614019 - RNA, 24 nt, Human
cugcccccaugaggccccaggagc

SEQ ID NO: 614020 - RNA, 20 nt, Human
cugccuccgggcaucagccu

SEQ ID NO: 614021 - RNA, 18 nt, Human
cuggcucugccuguccca

SEQ ID NO: 614022 - RNA, 22 nt, Human
cugggucccaggcaccauccac

SEQ ID NO: 614023 - RNA, 21 nt, Human
cuguagcagcccagcagcucc

SEQ ID NO: 614024 - RNA, 18 nt, Human
cuucaccuccacccuccc

SEQ ID NO: 614025 - RNA, 21 nt, Human
cuucugcagagcuuccucaaa

SEQ ID NO: 614026 - RNA, 24 nt, Human
cuuggccagaaaguccuggucacu

SEQ ID NO: 614027 - RNA, 22 nt, Human
gaagaaaagcugguuacucuug

SEQ ID NO: 614028 - RNA, 25 nt, Human
gaagccccucgaaggccugccgcac

SEQ ID NO: 614029 - RNA, 21 nt, Human
gaaggggcccacagaagaugg

SEQ ID NO: 614030 - RNA, 21 nt, Human
gaagguggggaagcugguccg

SEQ ID NO: 614031 - RNA, 18 nt, Human
gaccauauagccacaggu

SEQ ID NO: 614032 - RNA, 18 nt, Human
gaccuuccuggccaagag

SEQ ID NO: 614033 - RNA, 21 nt, Human
gagacuccuccaucccucugg

SEQ ID NO: 614034 - RNA, 18 nt, Human
gagggcaucaggacaggc

SEQ ID NO: 614035 - RNA, 21 nt, Human
gagguuuuggggucccccacc

SEQ ID NO: 614036 - RNA, 23 nt, Human
gcaaagucaggggcaacggcccu

SEQ ID NO: 614037 - RNA, 21 nt, Human
gcacacacucuaccauccaaa

SEQ ID NO: 614038 - RNA, 19 nt, Human
gcagagcuuccucaaacag

SEQ ID NO: 614039 - RNA, 19 nt, Human
gcaucagccugggaggcgg

SEQ ID NO: 614040 - RNA, 19 nt, Human
gcaucagccugggaggugg

SEQ ID NO: 614041 - RNA, 23 nt, Human
gccccaggcaaaguccucagggc

SEQ ID NO: 614042 - RNA, 18 nt, Human
gcccucagccaccacagc

SEQ ID NO: 614043 - RNA, 18 nt, Human
gccugccgcacacagugc

SEQ ID NO: 614044 - RNA, 18 nt, Human
gcugagaccauauagcca

SEQ ID NO: 614045 - RNA, 25 nt, Human
gcugcccacuaagguggccccacuc

SEQ ID NO: 614046 - RNA, 21 nt, Human
ggaaacccaggaggggagugu

SEQ ID NO: 614047 - RNA, 21 nt, Human
ggagccaguccucugaccucc

SEQ ID NO: 614048 - RNA, 22 nt, Human
ggaugggcgggggcaggagggc

SEQ ID NO: 614049 - RNA, 26 nt, Human
ggccaagaggauagggaggggcaccg

SEQ ID NO: 614050 - RNA, 24 nt, Human
ggccacauacauccucugaccucc

SEQ ID NO: 614051 - RNA, 18 nt, Human
ggcccaguuccugcucag

SEQ ID NO: 614052 - RNA, 21 nt, Human
ggcgggggcaggagggcccag

SEQ ID NO: 614053 - RNA, 19 nt, Human
gggaggcggguuagugccc

SEQ ID NO: 614054 - RNA, 20 nt, Human
gggagguuuugggguccccc

SEQ ID NO: 614055 - RNA, 19 nt, Human
gggcagccagggccagggc

SEQ ID NO: 614056 - RNA, 20 nt, Human
gggcaucaggacaggccagc

SEQ ID NO: 614057 - RNA, 23 nt, Human
ggggguggggcaaagucaggggc

SEQ ID NO: 614058 - RNA, 22 nt, Human
gggguggggcaaagucaggggc

SEQ ID NO: 614059 - RNA, 20 nt, Human
ggguuccggaggccgucccu

SEQ ID NO: 614060 - RNA, 20 nt, Human
ggucugggcucauggaaggg

SEQ ID NO: 614061 - RNA, 19 nt, Human
ggugacagaggugggagga

SEQ ID NO: 614062 - RNA, 20 nt, Human
gugcagcuuggccagaaagu

SEQ ID NO: 614063 - RNA, 26 nt, Human
uaaacaaacacaaaugaaaaugcugu

SEQ ID NO: 614064 - RNA, 24 nt, Human
uagcugggagaaugcagacugccc

SEQ ID NO: 614065 - RNA, 22 nt, Human
uauucgacucacagucagugca

SEQ ID NO: 614066 - RNA, 21 nt, Human
ucaaccguagcugggagaaug

SEQ ID NO: 614067 - RNA, 22 nt, Human
ucaauggaagagaugccacuca

SEQ ID NO: 614068 - RNA, 22 nt, Human
ucacagcacaggguaagugcaa

SEQ ID NO: 614069 - RNA, 19 nt, Human
ucacugccaucaucgaggc

SEQ ID NO: 614070 - RNA, 24 nt, Human
ucacugccaucaucgaggccacac

SEQ ID NO: 614071 - RNA, 21 nt, Human
ucagagacuccuccaucccuc

SEQ ID NO: 614072 - RNA, 24 nt, Human
ucagagacuccuccaucccucugg

SEQ ID NO: 614073 - RNA, 23 nt, Human
ucagagugggcggggccaaggcc

SEQ ID NO: 614074 - RNA, 18 nt, Human
ucagcuggugggcagcca

SEQ ID NO: 614075 - RNA, 21 nt, Human
ucaggggcagcaugagggucc

SEQ ID NO: 614076 - RNA, 18 nt, Human
uccacaacaacccccucu

SEQ ID NO: 614077 - RNA, 20 nt, Human
ucccaggcaccauccacgcc

SEQ ID NO: 614078 - RNA, 22 nt, Human
ucccaggcaccauccacgcccc

SEQ ID NO: 614079 - RNA, 25 nt, Human
ucccaggcaccauccacgccccaga

SEQ ID NO: 614080 - RNA, 22 nt, Human
ucccauccccagaccccuuucc

SEQ ID NO: 614081 - RNA, 22 nt, Human
ucccccaggaaccguucuucuc

SEQ ID NO: 614082 - RNA, 18 nt, Human
ucccugggcaugggggug

SEQ ID NO: 614083 - RNA, 22 nt, Human
uccucagggccaagagcuucca

SEQ ID NO: 614084 - RNA, 18 nt, Human
uccuucaccagcugcagg

SEQ ID NO: 614085 - RNA, 20 nt, Human
uccuuccgcugugacucugg

SEQ ID NO: 614086 - RNA, 23 nt, Human
ucggcccacuuucccgaagaaaa

SEQ ID NO: 614087 - RNA, 21 nt, Human
ucuaggccccauccuucaccu

SEQ ID NO: 614088 - RNA, 18 nt, Human
ucuccacaacaacccccu

SEQ ID NO: 614089 - RNA, 23 nt, Human
ucuccauggaaauguccccucug

SEQ ID NO: 614090 - RNA, 19 nt, Human
ucucccacaggccccacug

SEQ ID NO: 614091 - RNA, 18 nt, Human
ucucggccaccgucaugg

SEQ ID NO: 614092 - RNA, 23 nt, Human
ucucucacagccuuucucuccca

SEQ ID NO: 614093 - RNA, 20 nt, Human
ucucuggauggcccaggccu

SEQ ID NO: 614094 - RNA, 19 nt, Human
ucucuggguuccggaggcc

SEQ ID NO: 614095 - RNA, 21 nt, Human
ucugcagagcuuccucaaaca

SEQ ID NO: 614096 - RNA, 21 nt, Human
ucugcaggcccaggggaggcu

SEQ ID NO: 614097 - RNA, 18 nt, Human
ucugccccaucucuggau

SEQ ID NO: 614098 - RNA, 20 nt, Human
ucuuccagaagccccucgaa

SEQ ID NO: 614099 - RNA, 23 nt, Human
ugaagacacugagaagacacugc

SEQ ID NO: 614100 - RNA, 21 nt, Human
ugaagguggggaagcuggucc

SEQ ID NO: 614101 - RNA, 18 nt, Human
ugacaggaccccgcggcg

SEQ ID NO: 614102 - RNA, 19 nt, Human
ugagaccauauagccacag

SEQ ID NO: 614103 - RNA, 21 nt, Human
ugagcccccagcucagagccu

SEQ ID NO: 614104 - RNA, 22 nt, Human
ugagcccccagcucagagccua

SEQ ID NO: 614105 - RNA, 20 nt, Human
ugagguggggagggcaucag

SEQ ID NO: 614106 - RNA, 19 nt, Human
ugaguguggaaacccagga

SEQ ID NO: 614107 - RNA, 19 nt, Human
ugaugcagucucuggguuc

SEQ ID NO: 614108 - RNA, 21 nt, Human
ugaugcagucucuggguuccg

SEQ ID NO: 614109 - RNA, 18 nt, Human
ugcacacacucuaccauc

SEQ ID NO: 614110 - RNA, 22 nt, Human
ugcccaaacgucguguacagga

SEQ ID NO: 614111 - RNA, 19 nt, Human
ugcccagcugcuccccucc

SEQ ID NO: 614112 - RNA, 20 nt, Human
ugccccaggcaaaguccuca

SEQ ID NO: 614113 - RNA, 21 nt, Human
ugcgcccucccauccccagac

SEQ ID NO: 614114 - RNA, 22 nt, Human
uggaaagggcagagccacagca

SEQ ID NO: 614115 - RNA, 18 nt, Human
uggaacccuccugcccag

SEQ ID NO: 614116 - RNA, 22 nt, Human
uggagccgaacuccuccugcag

SEQ ID NO: 614117 - RNA, 18 nt, Human
uggaggcugccuccaggc

SEQ ID NO: 614118 - RNA, 20 nt, Human
uggaucauagacgugcccuc

SEQ ID NO: 614119 - RNA, 19 nt, Human
uggcaaagaggacuuuccg

SEQ ID NO: 614120 - RNA, 22 nt, Human
uggccagaaaguccuggucacu

SEQ ID NO: 614121 - RNA, 24 nt, Human
uggccagggccuggaucauagacg

SEQ ID NO: 614122 - RNA, 21 nt, Human
uggccucugcuucccccagga

SEQ ID NO: 614123 - RNA, 22 nt, Human
uggcucugccugucccaauucu

SEQ ID NO: 614124 - RNA, 21 nt, Human
uggcuucuagcucaggacacu

SEQ ID NO: 614125 - RNA, 22 nt, Human
ugggaaggggcccacagaagau

SEQ ID NO: 614126 - RNA, 24 nt, Human
ugggagaaugcagacugcccaaac

SEQ ID NO: 614127 - RNA, 21 nt, Human
ugggaggagaaaagacgaucu

SEQ ID NO: 614128 - RNA, 23 nt, Human
ugggaggcccaccucugccccau

SEQ ID NO: 614129 - RNA, 22 nt, Human
ugggagguuuugggguccccca

SEQ ID NO: 614130 - RNA, 19 nt, Human
ugggcgggggcaggagggc

SEQ ID NO: 614131 - RNA, 21 nt, Human
uggggguggggcaaagucagg

SEQ ID NO: 614132 - RNA, 21 nt, Human
uggugggcagccagggccagg

SEQ ID NO: 614133 - RNA, 22 nt, Human
ugucugggaaggggcccacaga

SEQ ID NO: 614134 - RNA, 22 nt, Human
uguguaaacaaacacaaaugaa

SEQ ID NO: 614135 - RNA, 19 nt, Human
uguuacauucacagcacag

SEQ ID NO: 614136 - RNA, 20 nt, Human
uucucugcaaacuccuuccg

SEQ ID NO: 614137 - RNA, 22 nt, Human
uugccagcugggucccaggcac

SEQ ID NO: 614138 - RNA, 19 nt, Human
uugcugggcucaauggaag

SEQ ID NO: 614139 - RNA, 22 nt, Human
uuucuccugcaggccucucaac

SEQ ID NO: 614140 - RNA, 19 nt, Human
uuugugcguugaacugaag

SEQ ID NO: 614141 - RNA, 20 nt, Human
aaacacaagcacccacguuc

SEQ ID NO: 614142 - RNA, 24 nt, Human
aaacauaguuacaacagacauguu

SEQ ID NO: 614143 - RNA, 24 nt, Human
aaccacauccccguuucucacuaa

SEQ ID NO: 614144 - RNA, 22 nt, Human
aacugauaagaggacacaccaa

SEQ ID NO: 614145 - RNA, 25 nt, Human
acacauacauacacgcacacacaca

SEQ ID NO: 614146 - RNA, 23 nt, Human
acaccaaacuagaucacugaacu

SEQ ID NO: 614147 - RNA, 20 nt, Human
acacuuuuuuucauuuuugg

SEQ ID NO: 614148 - RNA, 21 nt, Human
acauuaaaugaaaaaaaggaa

SEQ ID NO: 614149 - RNA, 22 nt, Human
accagcaccuaaccacaucccc

SEQ ID NO: 614150 - RNA, 23 nt, Human
acccaaugaaucauuuaugacuu

SEQ ID NO: 614151 - RNA, 21 nt, Human
acgcacacacacaaacgcaua

SEQ ID NO: 614152 - RNA, 24 nt, Human
acugagcucccucauuguuuaaag

SEQ ID NO: 614153 - RNA, 22 nt, Human
agagaagaacaccuuuuggagg

SEQ ID NO: 614154 - RNA, 30 nt, Human
auacauacacgcacacacacaaacgcauag

SEQ ID NO: 614155 - RNA, 25 nt, Human
aucuuccauaacuugcuuuuuguua

SEQ ID NO: 614156 - RNA, 21 nt, Human
auggcugaaaaggucaaacac

SEQ ID NO: 614157 - RNA, 24 nt, Human
auguuacauuaaaugaaaaaaagg

SEQ ID NO: 614158 - RNA, 31 nt, Human
auuuaauauacacauacauacacgcacacag

SEQ ID NO: 614159 - RNA, 22 nt, Human
caacuaauaacugcagaaauaa

SEQ ID NO: 614160 - RNA, 24 nt, Human
caagggagaagacagcagcagcca

SEQ ID NO: 614161 - RNA, 20 nt, Human
caauauauggcugaaaaggu

SEQ ID NO: 614162 - RNA, 18 nt, Human
caaugcugaucacugaac

SEQ ID NO: 614163 - RNA, 26 nt, Human
cacauacauacacgcacacacacaaa

SEQ ID NO: 614164 - RNA, 29 nt, Human
cacgcacacacacaaacgcauacucacau

SEQ ID NO: 614165 - RNA, 22 nt, Human
cagcagccaauuucugagauuc

SEQ ID NO: 614166 - RNA, 19 nt, Human
cagccugcuucuuuggcug

SEQ ID NO: 614167 - RNA, 22 nt, Human
cagccugcuucuuuggcugugg

SEQ ID NO: 614168 - RNA, 22 nt, Human
caguguugagcacauggcugcc

SEQ ID NO: 614169 - RNA, 20 nt, Human
cauggucagaacuugaacgg

SEQ ID NO: 614170 - RNA, 25 nt, Human
cauuaaacgacuacagauagauaca

SEQ ID NO: 614171 - RNA, 20 nt, Human
ccaccauucaaaguacaacu

SEQ ID NO: 614172 - RNA, 24 nt, Human
ccauucaaaguacaacugaagaau

SEQ ID NO: 614173 - RNA, 19 nt, Human
ccugaaacuuccaccccac

SEQ ID NO: 614174 - RNA, 24 nt, Human
cgcauacucacaugucuaggaacc

SEQ ID NO: 614175 - RNA, 19 nt, Human
cguagaaaggagucuauuu

SEQ ID NO: 614176 - RNA, 18 nt, Human
cuaggaaccagcaccuaa

SEQ ID NO: 614177 - RNA, 22 nt, Human
cuaguauuuucauuugauuauc

SEQ ID NO: 614178 - RNA, 19 nt, Human
cugaacuguacaaaugauc

SEQ ID NO: 614179 - RNA, 24 nt, Human
cuucauggucagaacuugaacggg

SEQ ID NO: 614180 - RNA, 18 nt, Human
gaaaaggucaaacacaag

SEQ ID NO: 614181 - RNA, 24 nt, Human
gacagcagcagccaauuucugaga

SEQ ID NO: 614182 - RNA, 21 nt, Human
gagcucccucauuguuuaaag

SEQ ID NO: 614183 - RNA, 22 nt, Human
gagcucccucauuguuuaaaga

SEQ ID NO: 614184 - RNA, 24 nt, Human
gauauauacauuuaauauacacaa

SEQ ID NO: 614185 - RNA, 22 nt, Human
gauucaacuguuccuccucaug

SEQ ID NO: 614186 - RNA, 18 nt, Human
gcugccuaacaaccauuc

SEQ ID NO: 614187 - RNA, 20 nt, Human
ggcauuuugauguguacauu

SEQ ID NO: 614188 - RNA, 20 nt, Human
guguugagcacauggcugcc

SEQ ID NO: 614189 - RNA, 25 nt, Human
uaaaaacacucaacuuaaaaaaggu

SEQ ID NO: 614190 - RNA, 20 nt, Human
uaaagaaauacaguaaaagc

SEQ ID NO: 614191 - RNA, 20 nt, Human
uaaagaacacauaaccuuaa

SEQ ID NO: 614192 - RNA, 23 nt, Human
uaaauuuaaaaaguuuauacuca

SEQ ID NO: 614193 - RNA, 18 nt, Human
uaaccacauccccguuuc

SEQ ID NO: 614194 - RNA, 18 nt, Human
uaggaaccagcaccuaac

SEQ ID NO: 614195 - RNA, 18 nt, Human
uagggcacaauuuauaau

SEQ ID NO: 614196 - RNA, 23 nt, Human
uauaaggcuguacaauauauggc

SEQ ID NO: 614197 - RNA, 28 nt, Human
uauacacauacauacacgcacacacaca

SEQ ID NO: 614198 - RNA, 21 nt, Human
uauacucaagaggugaaauca

SEQ ID NO: 614199 - RNA, 27 nt, Human
uauauacauuuaauauacacauacaua

SEQ ID NO: 614200 - RNA, 20 nt, Human
uauggcaagggagaagacag

SEQ ID NO: 614201 - RNA, 21 nt, Human
uaugggcauuuugauguguac

SEQ ID NO: 614202 - RNA, 23 nt, Human
uauuuaagaaacauaguuacaac

SEQ ID NO: 614203 - RNA, 18 nt, Human
ucaacuguuccuccucau

SEQ ID NO: 614204 - RNA, 22 nt, Human
ucagaguauaaaaccauaaaca

SEQ ID NO: 614205 - RNA, 22 nt, Human
uccaccccaccauucaaaguac

SEQ ID NO: 614206 - RNA, 23 nt, Human
uccaccccaccauucaaaguaca

SEQ ID NO: 614207 - RNA, 25 nt, Human
uccauaacuugcuuuuuguuaucca

SEQ ID NO: 614208 - RNA, 20 nt, Human
uccauuguucaccugaaacu

SEQ ID NO: 614209 - RNA, 19 nt, Human
ucuaggaaccagcaccuaa

SEQ ID NO: 614210 - RNA, 22 nt, Human
ucuccauaccacuuaucgguca

SEQ ID NO: 614211 - RNA, 18 nt, Human
ugaaaaaaauucacauau

SEQ ID NO: 614212 - RNA, 27 nt, Human
ugaaaggccuuuuaaucccccaauugg

SEQ ID NO: 614213 - RNA, 22 nt, Human
ugagcacauggcugccuaacaa

SEQ ID NO: 614214 - RNA, 24 nt, Human
ugauucagaaggcaccucaagauu

SEQ ID NO: 614215 - RNA, 19 nt, Human
ugcugcgugguuaggugcc

SEQ ID NO: 614216 - RNA, 22 nt, Human
uggaugguuguagcuuuauggc

SEQ ID NO: 614217 - RNA, 20 nt, Human
uggcaaucaacguuuuacca

SEQ ID NO: 614218 - RNA, 21 nt, Human
uggcugccuaacaaccauuca

SEQ ID NO: 614219 - RNA, 24 nt, Human
ugugagacacauuaucagauaaau

SEQ ID NO: 614220 - RNA, 25 nt, Human
uguggauauauacauuuaauauaca

SEQ ID NO: 614221 - RNA, 19 nt, Human
uguguggauauauacauuu

SEQ ID NO: 614222 - RNA, 22 nt, Human
uuaaaugaaaaaaaggaaagaa

SEQ ID NO: 614223 - RNA, 20 nt, Human
uuaagaaacauaguuacaac

SEQ ID NO: 614224 - RNA, 21 nt, Human
uuaccacagccuggaggccca

SEQ ID NO: 614225 - RNA, 18 nt, Human
uuaguaaaauuuugaaaa

SEQ ID NO: 614226 - RNA, 21 nt, Human
uucaaugcugaucacugaacu

SEQ ID NO: 614227 - RNA, 19 nt, Human
aaaauaccaguuaacuuag

SEQ ID NO: 614228 - RNA, 23 nt, Human
aaagcacauuaucugaggugcaa

SEQ ID NO: 614229 - RNA, 24 nt, Human
aaagugcugggauuacaggcguga

SEQ ID NO: 614230 - RNA, 23 nt, Human
aagaugaacaguguaccuuggac

SEQ ID NO: 614231 - RNA, 19 nt, Human
aagcagcagccuggguugc

SEQ ID NO: 614232 - RNA, 19 nt, Human
aagugcugggauuacaggc

SEQ ID NO: 614233 - RNA, 19 nt, Human
aagugcugggauuacaggc

SEQ ID NO: 614234 - RNA, 26 nt, Human
aagugcugggauuacaggcgugagcc

SEQ ID NO: 614235 - RNA, 19 nt, Human
aaugugaagaaaaagauga

SEQ ID NO: 614236 - RNA, 23 nt, Human
acaacuuauaaaaagacuauacu

SEQ ID NO: 614237 - RNA, 21 nt, Human
acaguggccaguguggugugc

SEQ ID NO: 614238 - RNA, 25 nt, Human
acccgccucagccucccaaagugcu

SEQ ID NO: 614239 - RNA, 22 nt, Human
accgacuuagccaggauggucu

SEQ ID NO: 614240 - RNA, 23 nt, Human
accgacuuagccaggauggucuc

SEQ ID NO: 614241 - RNA, 19 nt, Human
acuacaggcgcgugccacc

SEQ ID NO: 614242 - RNA, 21 nt, Human
acuggaacugugggaaggagc

SEQ ID NO: 614243 - RNA, 21 nt, Human
acuucuggguccuuuuguccc

SEQ ID NO: 614244 - RNA, 19 nt, Human
agaguaugggacuaacccc

SEQ ID NO: 614245 - RNA, 18 nt, Human
agcagccugcagcucucu

SEQ ID NO: 614246 - RNA, 22 nt, Human
agcaggcucaugguccagcccc

SEQ ID NO: 614247 - RNA, 22 nt, Human
agccugaagcuggaggagcuuc

SEQ ID NO: 614248 - RNA, 26 nt, Human
agccuggguugcaggggcugggacuu

SEQ ID NO: 614249 - RNA, 21 nt, Human
agcgauucuuccugccucagc

SEQ ID NO: 614250 - RNA, 22 nt, Human
aggaagacagcugucuaagaac

SEQ ID NO: 614251 - RNA, 20 nt, Human
aggaagugggcccucaccag

SEQ ID NO: 614252 - RNA, 22 nt, Human
aggcagagcuaagcaaaaaaga

SEQ ID NO: 614253 - RNA, 18 nt, Human
aggcuggagugcaguggc

SEQ ID NO: 614254 - RNA, 19 nt, Human
aggugauuaggucaugaga

SEQ ID NO: 614255 - RNA, 24 nt, Human
aguaaacagaauugacaagagaaa

SEQ ID NO: 614256 - RNA, 19 nt, Human
aguagcugggacuacaggc

SEQ ID NO: 614257 - RNA, 23 nt, Human
aguagcugggacuacaggcgcgu

SEQ ID NO: 614258 - RNA, 20 nt, Human
agugcaguggcgcggucucg

SEQ ID NO: 614259 - RNA, 23 nt, Human
agugcaguggcgcggucucggcu

SEQ ID NO: 614260 - RNA, 24 nt, Human
agugcaguggcgcggucucggcuc

SEQ ID NO: 614261 - RNA, 18 nt, Human
agugcugggauuacaggc

SEQ ID NO: 614262 - RNA, 24 nt, Human
aguuagagccugaagcuggaggag

SEQ ID NO: 614263 - RNA, 21 nt, Human
auagaguaugggacuaacccc

SEQ ID NO: 614264 - RNA, 22 nt, Human
aucuuauaaaagggaccccgga

SEQ ID NO: 614265 - RNA, 21 nt, Human
auggcuaaugaaaagacagga

SEQ ID NO: 614266 - RNA, 24 nt, Human
caaagugcugggauuacaggcgug

SEQ ID NO: 614267 - RNA, 26 nt, Human
caccacuccauccccauucuucuacu

SEQ ID NO: 614268 - RNA, 19 nt, Human
cacccgcaaccgaacgggc

SEQ ID NO: 614269 - RNA, 21 nt, Human
cacccgcaaccgaacgggcuc

SEQ ID NO: 614270 - RNA, 23 nt, Human
cacccgccucagccucccaaagu

SEQ ID NO: 614271 - RNA, 27 nt, Human
cacuauaguuguauaugcauuauagcu

SEQ ID NO: 614272 - RNA, 21 nt, Human
cacugcaaccucugccucccg

SEQ ID NO: 614273 - RNA, 23 nt, Human
cacugcaaccucugccucccggg

SEQ ID NO: 614274 - RNA, 22 nt, Human
cagaacugugagaaauaaauuc

SEQ ID NO: 614275 - RNA, 21 nt, Human
cagaaucucccuaucucccuc

SEQ ID NO: 614276 - RNA, 25 nt, Human
cagcagccuggguugcaggggcugg

SEQ ID NO: 614277 - RNA, 20 nt, Human
cagcaggcucaugguccagc

SEQ ID NO: 614278 - RNA, 21 nt, Human
cagcauccagaacugugagaa

SEQ ID NO: 614279 - RNA, 22 nt, Human
cagccuggguugcaggggcugg

SEQ ID NO: 614280 - RNA, 19 nt, Human
cagggccagagacacccgc

SEQ ID NO: 614281 - RNA, 22 nt, Human
cagggcugaccgcagggccaga

SEQ ID NO: 614282 - RNA, 20 nt, Human
cauccagaacugugagaaau

SEQ ID NO: 614283 - RNA, 22 nt, Human
cauucuggcucuucuucgggag

SEQ ID NO: 614284 - RNA, 22 nt, Human
ccaaaaauccaguugcauggaa

SEQ ID NO: 614285 - RNA, 22 nt, Human
ccaaagugcugggauuacaggc

SEQ ID NO: 614286 - RNA, 22 nt, Human
ccaaagugcugggauuacaggc

SEQ ID NO: 614287 - RNA, 24 nt, Human
ccaaagugcugggauuacaggcgu

SEQ ID NO: 614288 - RNA, 20 nt, Human
ccaccacgccuggcuaauuu

SEQ ID NO: 614289 - RNA, 26 nt, Human
ccacccgccucagccucccaaagugc

SEQ ID NO: 614290 - RNA, 20 nt, Human
ccagacauugaaucugcgcu

SEQ ID NO: 614291 - RNA, 19 nt, Human
ccagagacacccgcaaccg

SEQ ID NO: 614292 - RNA, 21 nt, Human
cccagggaaaaccaucaccac

SEQ ID NO: 614293 - RNA, 28 nt, Human
ccccggagagcugccuuccucuucuacc

SEQ ID NO: 614294 - RNA, 23 nt, Human
cccgaguagcugggacuacaggc

SEQ ID NO: 614295 - RNA, 24 nt, Human
cccgaguagcugggacuacaggcg

SEQ ID NO: 614296 - RNA, 22 nt, Human
cccgcaaccgaacgggcucccg

SEQ ID NO: 614297 - RNA, 21 nt, Human
cccgcggcgaggaagcgaggc

SEQ ID NO: 614298 - RNA, 24 nt, Human
cccggguucaagcgauucuuccug

SEQ ID NO: 614299 - RNA, 18 nt, Human
cccucccuuuccagacag

SEQ ID NO: 614300 - RNA, 24 nt, Human
ccgccucagccucccaaagugcug

SEQ ID NO: 614301 - RNA, 24 nt, Human
ccucccggguucaagcgauucuuc

SEQ ID NO: 614302 - RNA, 20 nt, Human
ccugaccucuugauccaccc

SEQ ID NO: 614303 - RNA, 23 nt, Human
ccugccucagccucccgaguagc

SEQ ID NO: 614304 - RNA, 24 nt, Human
ccugccucagccucccgaguagcu

SEQ ID NO: 614305 - RNA, 21 nt, Human
ccuucuuucuucuuuugcuuu

SEQ ID NO: 614306 - RNA, 25 nt, Human
cgcaaccgaacgggcucccggcgcc

SEQ ID NO: 614307 - RNA, 24 nt, Human
cgccucagccucccaaagugcugg

SEQ ID NO: 614308 - RNA, 27 nt, Human
cgggagcuuuuucauccuggccuugcu

SEQ ID NO: 614309 - RNA, 24 nt, Human
cucacugcaaccucugccucccgg

SEQ ID NO: 614310 - RNA, 24 nt, Human
cucagccucccgaguagcugggac

SEQ ID NO: 614311 - RNA, 18 nt, Human
cucccuuuccagacagcc

SEQ ID NO: 614312 - RNA, 24 nt, Human
cuccugaccucuugauccacccgc

SEQ ID NO: 614313 - RNA, 23 nt, Human
cucuaaacacugcugccugaucc

SEQ ID NO: 614314 - RNA, 21 nt, Human
cucuaccuuaaugcuauuaac

SEQ ID NO: 614315 - RNA, 18 nt, Human
cucuguugcccaggcugg

SEQ ID NO: 614316 - RNA, 20 nt, Human
cucuguugcccaggcuggag

SEQ ID NO: 614317 - RNA, 23 nt, Human
cucuguugcccaggcuggagugc

SEQ ID NO: 614318 - RNA, 19 nt, Human
cugaggugcaauacaaagg

SEQ ID NO: 614319 - RNA, 19 nt, Human
cugcaaccucugccucccg

SEQ ID NO: 614320 - RNA, 23 nt, Human
cugcaaccucugccucccggguu

SEQ ID NO: 614321 - RNA, 24 nt, Human
cugcaaccucugccucccggguuc

SEQ ID NO: 614322 - RNA, 26 nt, Human
cuucuacuucuggguccuuuuguccc

SEQ ID NO: 614323 - RNA, 20 nt, Human
cuucuggguccuuuuguccc

SEQ ID NO: 614324 - RNA, 24 nt, Human
cuugauccacccgccucagccucc

SEQ ID NO: 614325 - RNA, 22 nt, Human
cuuggacuggacuuuccaucuc

SEQ ID NO: 614326 - RNA, 19 nt, Human
gaccgcagggccagagaca

SEQ ID NO: 614327 - RNA, 22 nt, Human
gaccucuugauccacccgccuc

SEQ ID NO: 614328 - RNA, 25 nt, Human
gagaaaaaaagaaaaacacugcauu

SEQ ID NO: 614329 - RNA, 26 nt, Human
gaguagcugggacuacaggcgcgugc

SEQ ID NO: 614330 - RNA, 18 nt, Human
gauuacaggcgugagcca

SEQ ID NO: 614331 - RNA, 21 nt, Human
gauuacaggcgugagccaccg

SEQ ID NO: 614332 - RNA, 24 nt, Human
gauuacaggcgugagccaccgugc

SEQ ID NO: 614333 - RNA, 19 nt, Human
gcccaggcuggagugcagu

SEQ ID NO: 614334 - RNA, 23 nt, Human
gccuggcuaauuuuuuguauuuu

SEQ ID NO: 614335 - RNA, 20 nt, Human
gcucuguugcccaggcugga

SEQ ID NO: 614336 - RNA, 25 nt, Human
ggaaaaccaucaccacaggaccuuc

SEQ ID NO: 614337 - RNA, 23 nt, Human
ggaguuuugcucuguugcccagg

SEQ ID NO: 614338 - RNA, 20 nt, Human
ggcuuugucuguuccgggcu

SEQ ID NO: 614339 - RNA, 19 nt, Human
gggccucuaggaaucuagc

SEQ ID NO: 614340 - RNA, 22 nt, Human
ggguaacuaaggcaucccacag

SEQ ID NO: 614341 - RNA, 20 nt, Human
ggucucgaucuccugaccuc

SEQ ID NO: 614342 - RNA, 29 nt, Human
guaccuucuuucuucuuuugcuuuaagaa

SEQ ID NO: 614343 - RNA, 20 nt, Human
gugagaaauaaauucauguu

SEQ ID NO: 614344 - RNA, 21 nt, Human
gugcucuaaacacugcugccu

SEQ ID NO: 614345 - RNA, 21 nt, Human
gugggaaaauauuuguuauau

SEQ ID NO: 614346 - RNA, 24 nt, Human
guuuugcucuguugcccaggcugg

SEQ ID NO: 614347 - RNA, 21 nt, Human
uaaaaagcacauuaucugagg

SEQ ID NO: 614348 - RNA, 23 nt, Human
uaaaagcagcauauaucauuucu

SEQ ID NO: 614349 - RNA, 22 nt, Human
uaaaugucuuucuaaaaugagg

SEQ ID NO: 614350 - RNA, 19 nt, Human
uaacuaaggcaucccacag

SEQ ID NO: 614351 - RNA, 18 nt, Human
uaagcagcagccuggguu

SEQ ID NO: 614352 - RNA, 24 nt, Human
uaauuuuuuguauuuuuauuagag

SEQ ID NO: 614353 - RNA, 22 nt, Human
uacaggcgcgugccaccacgcc

SEQ ID NO: 614354 - RNA, 24 nt, Human
uacaggcgugagccaccgugccca

SEQ ID NO: 614355 - RNA, 19 nt, Human
uacgggggccccaggacgc

SEQ ID NO: 614356 - RNA, 20 nt, Human
uacgggggccccaggacgcu

SEQ ID NO: 614357 - RNA, 27 nt, Human
uacguacacacuauaguuguauaugca

SEQ ID NO: 614358 - RNA, 18 nt, Human
uagcaaguaccuucuuuc

SEQ ID NO: 614359 - RNA, 21 nt, Human
uagcaaguaccuucuuucuuu

SEQ ID NO: 614360 - RNA, 27 nt, Human
uauacguacacacuauaguuguauaug

SEQ ID NO: 614361 - RNA, 19 nt, Human
uauauguauaugugguaua

SEQ ID NO: 614362 - RNA, 26 nt, Human
uaugcagagaaaaaaagaaaaacacu

SEQ ID NO: 614363 - RNA, 24 nt, Human
ucacugcaaccucugccucccggg

SEQ ID NO: 614364 - RNA, 25 nt, Human
ucacugcaaccucugccucccgggu

SEQ ID NO: 614365 - RNA, 25 nt, Human
ucagaaucucccuaucucccucguu

SEQ ID NO: 614366 - RNA, 23 nt, Human
ucagccucccgaguagcugggac

SEQ ID NO: 614367 - RNA, 22 nt, Human
uccaaaaauccaguugcaugga

SEQ ID NO: 614368 - RNA, 21 nt, Human
uccacccgccucagccuccca

SEQ ID NO: 614369 - RNA, 24 nt, Human
ucccaaagugcugggauuacaggc

SEQ ID NO: 614370 - RNA, 21 nt, Human
uccccuucccgauuugcuauu

SEQ ID NO: 614371 - RNA, 24 nt, Human
ucccgaguagcugggacuacaggc

SEQ ID NO: 614372 - RNA, 19 nt, Human
ucccggcgccucccagcac

SEQ ID NO: 614373 - RNA, 20 nt, Human
ucccggguucaagcgauucu

SEQ ID NO: 614374 - RNA, 25 nt, Human
ucccggguucaagcgauucuuccug

SEQ ID NO: 614375 - RNA, 21 nt, Human
uccugccucagccucccgagu

SEQ ID NO: 614376 - RNA, 24 nt, Human
ucuguugcccaggcuggagugcag

SEQ ID NO: 614377 - RNA, 23 nt, Human
ugaaauacguuaguaucuucuuu

SEQ ID NO: 614378 - RNA, 18 nt, Human
ugacaugaaaauuaagca

SEQ ID NO: 614379 - RNA, 19 nt, Human
ugaccgcagggccagagac

SEQ ID NO: 614380 - RNA, 18 nt, Human
ugaccucuugauccaccc

SEQ ID NO: 614381 - RNA, 25 nt, Human
ugaggacacugcaggaagacagcug

SEQ ID NO: 614382 - RNA, 23 nt, Human
ugauccacccgccucagccuccc

SEQ ID NO: 614383 - RNA, 22 nt, Human
ugcaguggcgcggucucggcuc

SEQ ID NO: 614384 - RNA, 18 nt, Human
ugcccaggcuggagugca

SEQ ID NO: 614385 - RNA, 21 nt, Human
ugcccaggcuggagugcagug

SEQ ID NO: 614386 - RNA, 22 nt, Human
ugcccaggcuggagugcagugg

SEQ ID NO: 614387 - RNA, 24 nt, Human
ugcccaggcuggagugcaguggcg

SEQ ID NO: 614388 - RNA, 24 nt, Human
ugccucagccucccgaguagcugg

SEQ ID NO: 614389 - RNA, 19 nt, Human
ugcucuaaacacugcugcc

SEQ ID NO: 614390 - RNA, 24 nt, Human
ugcugggauuacaggcgugagcca

SEQ ID NO: 614391 - RNA, 20 nt, Human
uggagugcaguggcgcgguc

SEQ ID NO: 614392 - RNA, 23 nt, Human
uggagugcaguggcgcggucucg

SEQ ID NO: 614393 - RNA, 24 nt, Human
uggagugcaguggcgcggucucgg

SEQ ID NO: 614394 - RNA, 24 nt, Human
uggaguuuugcucuguugcccagg

SEQ ID NO: 614395 - RNA, 24 nt, Human
uggccaguguggugugcuucacag

SEQ ID NO: 614396 - RNA, 20 nt, Human
uggcgcggucucggcucacu

SEQ ID NO: 614397 - RNA, 19 nt, Human
ugggaaggagcugcagccu

SEQ ID NO: 614398 - RNA, 21 nt, Human
ugggacuacaggcgcgugcca

SEQ ID NO: 614399 - RNA, 22 nt, Human
ugggacuacaggcgcgugccac

SEQ ID NO: 614400 - RNA, 24 nt, Human
ugggacuacaggcgcgugccacca

SEQ ID NO: 614401 - RNA, 22 nt, Human
ugggagguggggccuuugggag

SEQ ID NO: 614402 - RNA, 18 nt, Human
ugggauuacaggcgugag

SEQ ID NO: 614403 - RNA, 21 nt, Human
ugggauuacaggcgugagcca

SEQ ID NO: 614404 - RNA, 22 nt, Human
ugggauuacaggcgugagccac

SEQ ID NO: 614405 - RNA, 23 nt, Human
ugggauuacaggcgugagccacc

SEQ ID NO: 614406 - RNA, 23 nt, Human
ugggauuacaggcgugagccacc

SEQ ID NO: 614407 - RNA, 24 nt, Human
ugggauuacaggcgugagccaccg

SEQ ID NO: 614408 - RNA, 19 nt, Human
uggguccuuuugucccucc

SEQ ID NO: 614409 - RNA, 21 nt, Human
ugguauugggagguggggccu

SEQ ID NO: 614410 - RNA, 21 nt, Human
ugugaauuuguguuaucauau

SEQ ID NO: 614411 - RNA, 18 nt, Human
ugugggaaggagcugcag

SEQ ID NO: 614412 - RNA, 23 nt, Human
uuacucaggcuguaauaguggga

SEQ ID NO: 614413 - RNA, 20 nt, Human
uuacuucugaauugcugccu

SEQ ID NO: 614414 - RNA, 24 nt, Human
uuacuucugaauugcugccuucuu

SEQ ID NO: 614415 - RNA, 22 nt, Human
uucaagcgauucuuccugccuc

SEQ ID NO: 614416 - RNA, 24 nt, Human
uucaagcgauucuuccugccucag

SEQ ID NO: 614417 - RNA, 25 nt, Human
uuccagacagcccuugguaaccugc

SEQ ID NO: 614418 - RNA, 21 nt, Human
uucuuccugccucagccuccc

SEQ ID NO: 614419 - RNA, 24 nt, Human
uugcccaggcuggagugcaguggc

SEQ ID NO: 614420 - RNA, 20 nt, Human
uugcucuguugcccaggcug

SEQ ID NO: 614421 - RNA, 22 nt, Human
uugcucuguugcccaggcugga

SEQ ID NO: 614422 - RNA, 24 nt, Human
uugcucuguugcccaggcuggagu

SEQ ID NO: 614423 - RNA, 19 nt, Human
uugcugccuucuuucauau

SEQ ID NO: 614424 - RNA, 23 nt, Human
uuuaagaaauuuuuccucaagac

SEQ ID NO: 614425 - RNA, 20 nt, Human
uuucccagggaaaaccaucu

SEQ ID NO: 614426 - RNA, 24 nt, Human
uuuugcucuguugcccaggcugga

SEQ ID NO: 614427 - RNA, 21 nt, Human
uuuuuguauuuuuauuagaga

SEQ ID NO: 614428 - RNA, 19 nt, Human
aaaaaacagcaggaacaac

SEQ ID NO: 614429 - RNA, 27 nt, Human
aaaaaacagcaggaacaaccgguaccc

SEQ ID NO: 614430 - RNA, 21 nt, Human
aaaaagcagcuuacacagaug

SEQ ID NO: 614431 - RNA, 18 nt, Human
aagaguauauugcuggug

SEQ ID NO: 614432 - RNA, 22 nt, Human
aagcaaaauggaaaacggccuu

SEQ ID NO: 614433 - RNA, 21 nt, Human
aagcagcuuacacagaugugu

SEQ ID NO: 614434 - RNA, 18 nt, Human
acaagucagagcauccaa

SEQ ID NO: 614435 - RNA, 20 nt, Human
acagagaagaacaaaacaaa

SEQ ID NO: 614436 - RNA, 23 nt, Human
acggccuucagauaaacacacua

SEQ ID NO: 614437 - RNA, 25 nt, Human
agaugucaaauaccgcauuuaaacc

SEQ ID NO: 614438 - RNA, 18 nt, Human
aggucaacagcauacaga

SEQ ID NO: 614439 - RNA, 18 nt, Human
auuacauuugaguugucu

SEQ ID NO: 614440 - RNA, 24 nt, Human
auuuuuucucuuuuucuguuuaau

SEQ ID NO: 614441 - RNA, 25 nt, Human
caaaauggaaaacggccuucagaua

SEQ ID NO: 614442 - RNA, 22 nt, Human
cacacuaaaaagcagcuuacac

SEQ ID NO: 614443 - RNA, 20 nt, Human
cacuaaaaagcagcuuacac

SEQ ID NO: 614444 - RNA, 19 nt, Human
cagagaagaacaaaacaaa

SEQ ID NO: 614445 - RNA, 22 nt, Human
cagcaggaacaacucaauucuu

SEQ ID NO: 614446 - RNA, 19 nt, Human
ccaaauguaagcucaauuc

SEQ ID NO: 614447 - RNA, 23 nt, Human
ccucauucgauuauuugcccuau

SEQ ID NO: 614448 - RNA, 18 nt, Human
ccuuacaaaguucacagu

SEQ ID NO: 614449 - RNA, 21 nt, Human
cgacaaggcucagaucccaaa

SEQ ID NO: 614450 - RNA, 23 nt, Human
cucaaacucaaaacaugaaggaa

SEQ ID NO: 614451 - RNA, 21 nt, Human
gagcauccaaaaacugcaaga

SEQ ID NO: 614452 - RNA, 25 nt, Human
gaggcugccugcucuugccuaaagc

SEQ ID NO: 614453 - RNA, 24 nt, Human
gcucaagauaauuuuuucucuuuu

SEQ ID NO: 614454 - RNA, 22 nt, Human
gcugccugcucuugccuaaagc

SEQ ID NO: 614455 - RNA, 21 nt, Human
guuguuuuaaaaaaaagagau

SEQ ID NO: 614456 - RNA, 23 nt, Human
uaaaaaacagcaggaacaacuca

SEQ ID NO: 614457 - RNA, 18 nt, Human
uaaaaagcagcuuacaca

SEQ ID NO: 614458 - RNA, 20 nt, Human
uaaaauaacaugucuaagac

SEQ ID NO: 614459 - RNA, 22 nt, Human
uaaaauaacaugucuaagacuu

SEQ ID NO: 614460 - RNA, 23 nt, Human
uaaacccagcacagugaucccuu

SEQ ID NO: 614461 - RNA, 18 nt, Human
uaacaaaaauaaagaugu

SEQ ID NO: 614462 - RNA, 25 nt, Human
uaacaaaaauaaagaugugaggcug

SEQ ID NO: 614463 - RNA, 25 nt, Human
uacauuaagcaaaauggaaaacggc

SEQ ID NO: 614464 - RNA, 29 nt, Human
uacauuaagcaaaauggaaaacggccaac

SEQ ID NO: 614465 - RNA, 21 nt, Human
uagaaaauuuugcauuuucug

SEQ ID NO: 614466 - RNA, 21 nt, Human
uaugccucaugcacacacaca

SEQ ID NO: 614467 - RNA, 22 nt, Human
ucaaaacaugaaggaaacagga

SEQ ID NO: 614468 - RNA, 28 nt, Human
ucaccuuggauguaacaaaaauaaagau

SEQ ID NO: 614469 - RNA, 19 nt, Human
ucagauaaacacacuaaaa

SEQ ID NO: 614470 - RNA, 18 nt, Human
uccccgaauguggcucca

SEQ ID NO: 614471 - RNA, 24 nt, Human
ugaaaaaauacaauuucaaugaaa

SEQ ID NO: 614472 - RNA, 26 nt, Human
ugcccuauucaaaacauaaaaauaca

SEQ ID NO: 614473 - RNA, 23 nt, Human
ugccuaucaccaagaugucaaau

SEQ ID NO: 614474 - RNA, 24 nt, Human
ugcucuugccuaaagcauggcuug

SEQ ID NO: 614475 - RNA, 22 nt, Human
uggaucaaauaaaaaacagcag

SEQ ID NO: 614476 - RNA, 20 nt, Human
uggugcuauaaucuuuuugc

SEQ ID NO: 614477 - RNA, 19 nt, Human
ugugaggcugccugcucuu

SEQ ID NO: 614478 - RNA, 21 nt, Human
uuggaucaaauaaaaaacagc

SEQ ID NO: 614479 - RNA, 22 nt, Human
uuucaauugauaguaaccgcuu

SEQ ID NO: 614480 - RNA, 18 nt, Human
uuuuugcaugucuuuguu

SEQ ID NO: 614481 - RNA, 22 nt, Human
acacuggguuccgucacccugg

SEQ ID NO: 614482 - RNA, 24 nt, Human
agaauuccaggucugacucccagc

SEQ ID NO: 614483 - RNA, 18 nt, Human
agauggcuacggggaggc

SEQ ID NO: 614484 - RNA, 22 nt, Human
agccgaggagcccagcaccagg

SEQ ID NO: 614485 - RNA, 20 nt, Human
agccuuggucacagcuuuca

SEQ ID NO: 614486 - RNA, 19 nt, Human
agcuugccagagacuccaa

SEQ ID NO: 614487 - RNA, 20 nt, Human
aggcauucgggaauccucag

SEQ ID NO: 614488 - RNA, 20 nt, Human
auccguguugcugcuguggc

SEQ ID NO: 614489 - RNA, 25 nt, Human
aucuuccuuaacaccugauucacug

SEQ ID NO: 614490 - RNA, 19 nt, Human
auggcccccaguuccccag

SEQ ID NO: 614491 - RNA, 18 nt, Human
cacccuggagauggcuac

SEQ ID NO: 614492 - RNA, 19 nt, Human
cagguaauacacuggguuc

SEQ ID NO: 614493 - RNA, 25 nt, Human
caguuccccagaggggccagccuug

SEQ ID NO: 614494 - RNA, 22 nt, Human
ccaaaguaauaaagaguuugga

SEQ ID NO: 614495 - RNA, 21 nt, Human
cccagacaauucagcaaucac

SEQ ID NO: 614496 - RNA, 21 nt, Human
cccccaguuccccagaggggc

SEQ ID NO: 614497 - RNA, 21 nt, Human
ccccgccgccagccgaggagc

SEQ ID NO: 614498 - RNA, 18 nt, Human
cgagaagagcgcuggugg

SEQ ID NO: 614499 - RNA, 18 nt, Human
cucccccuccucuucguc

SEQ ID NO: 614500 - RNA, 19 nt, Human
cugagcgccuggcugcggu

SEQ ID NO: 614501 - RNA, 19 nt, Human
gagguaggcauucgggaau

SEQ ID NO: 614502 - RNA, 20 nt, Human
gcaucuuccuuaacaccuga

SEQ ID NO: 614503 - RNA, 25 nt, Human
gcccagcaccaggcuggaggggaac

SEQ ID NO: 614504 - RNA, 24 nt, Human
gcuggaggggaacgagcugguggg

SEQ ID NO: 614505 - RNA, 21 nt, Human
ggcuggaggggaacgagcucc

SEQ ID NO: 614506 - RNA, 20 nt, Human
gggaggcugccugauaagcc

SEQ ID NO: 614507 - RNA, 25 nt, Human
gguuccagcagguaauacacugggu

SEQ ID NO: 614508 - RNA, 22 nt, Human
uaauuggagaaaccauuggggu

SEQ ID NO: 614509 - RNA, 18 nt, Human
ucagaacuccauguugac

SEQ ID NO: 614510 - RNA, 20 nt, Human
ucagacucucaaagacgcca

SEQ ID NO: 614511 - RNA, 18 nt, Human
ucauccacacucgccucg

SEQ ID NO: 614512 - RNA, 23 nt, Human
uccaaaccugcccagacaauuca

SEQ ID NO: 614513 - RNA, 24 nt, Human
ucccaaggaccgcuggcucugcag

SEQ ID NO: 614514 - RNA, 19 nt, Human
uccccagaggggccagccu

SEQ ID NO: 614515 - RNA, 19 nt, Human
uccuuaacaccugauucac

SEQ ID NO: 614516 - RNA, 18 nt, Human
ugcacagucaggggagcu

SEQ ID NO: 614517 - RNA, 25 nt, Human
ugccagagacuccaaaccugcccag

SEQ ID NO: 614518 - RNA, 19 nt, Human
uggggaggcugccucugcc

SEQ ID NO: 614519 - RNA, 24 nt, Human
ugguggggaggcugccugauaagc

SEQ ID NO: 614520 - RNA, 22 nt, Human
uguugcugcuguggcgucucug

SEQ ID NO: 614521 - RNA, 20 nt, Human
uguuuuauuguuuugguggc

SEQ ID NO: 614522 - RNA, 21 nt, Human
uucaauggcccccaguucccc

SEQ ID NO: 614523 - RNA, 20 nt, Human
aaaggcacacuggcaccaca

SEQ ID NO: 614524 - RNA, 19 nt, Human
aagaacucaggcaaaggca

SEQ ID NO: 614525 - RNA, 22 nt, Human
aagcgacaccccaaagaucuug

SEQ ID NO: 614526 - RNA, 18 nt, Human
aauggcaccugauuucug

SEQ ID NO: 614527 - RNA, 22 nt, Human
accagaaaagcgacaccccaaa

SEQ ID NO: 614528 - RNA, 24 nt, Human
aggacaagaacucaggcaaaggca

SEQ ID NO: 614529 - RNA, 18 nt, Human
aggcuacaccacgggcuc

SEQ ID NO: 614530 - RNA, 24 nt, Human
auaguccaguguuucaaaggaugg

SEQ ID NO: 614531 - RNA, 18 nt, Human
caaugugggaccugggga

SEQ ID NO: 614532 - RNA, 22 nt, Human
caccacagacauuuccgaccag

SEQ ID NO: 614533 - RNA, 21 nt, Human
caccccauguaacaauggcac

SEQ ID NO: 614534 - RNA, 21 nt, Human
cacuggcaccacagacauuuc

SEQ ID NO: 614535 - RNA, 24 nt, Human
cacuguggccuccucuguccuccc

SEQ ID NO: 614536 - RNA, 21 nt, Human
ccagaaaagcgacaccccaaa

SEQ ID NO: 614537 - RNA, 19 nt, Human
ccuccucuguccucccggg

SEQ ID NO: 614538 - RNA, 19 nt, Human
ccugcagcguucagugggc

SEQ ID NO: 614539 - RNA, 22 nt, Human
cgaccagaaaagcgacacccca

SEQ ID NO: 614540 - RNA, 23 nt, Human
cgaccagaaaagcgacaccccaa

SEQ ID NO: 614541 - RNA, 22 nt, Human
cguucagugggcuuacgcaccu

SEQ ID NO: 614542 - RNA, 24 nt, Human
cucccgggcacugacaucccccaa

SEQ ID NO: 614543 - RNA, 18 nt, Human
cugcagcguucagugggc

SEQ ID NO: 614544 - RNA, 23 nt, Human
cuuguaacaaugugggaccuggg

SEQ ID NO: 614545 - RNA, 21 nt, Human
gggagccuggaaacccaucuu

SEQ ID NO: 614546 - RNA, 23 nt, Human
uaacaauggcaccugauuucugu

SEQ ID NO: 614547 - RNA, 22 nt, Human
uaucucauucuuucuggacgca

SEQ ID NO: 614548 - RNA, 19 nt, Human
ucaccccauguaacaaugg

SEQ ID NO: 614549 - RNA, 27 nt, Human
ucacuguggccuccucuguccucccgg

SEQ ID NO: 614550 - RNA, 21 nt, Human
ucaucacuguggccuccucug

SEQ ID NO: 614551 - RNA, 21 nt, Human
uccgaccagaaaagcgacacc

SEQ ID NO: 614552 - RNA, 29 nt, Human
ucucugguuauuucuguauaucuuugacu

SEQ ID NO: 614553 - RNA, 21 nt, Human
ucuuguaacaaugugggaccu

SEQ ID NO: 614554 - RNA, 21 nt, Human
ugagaccauuuauuucuuccc

SEQ ID NO: 614555 - RNA, 19 nt, Human
ugccucaaacuuuucucug

SEQ ID NO: 614556 - RNA, 23 nt, Human
ugccucaaacuuuucucugguua

SEQ ID NO: 614557 - RNA, 24 nt, Human
uggcaccacagacauuuccgacca

SEQ ID NO: 614558 - RNA, 21 nt, Human
uuaaauguccucuucgucccc

SEQ ID NO: 614559 - RNA, 22 nt, Human
uucaaaggauggcaaagaagau

SEQ ID NO: 614560 - RNA, 23 nt, Human
uucaaaggauggcaaagaagauc

SEQ ID NO: 614561 - RNA, 21 nt, Human
uucucugguuauuucuguaua

SEQ ID NO: 614562 - RNA, 22 nt, Human
uuguguccgcuguggugcagga

SEQ ID NO: 614563 - RNA, 18 nt, Human
uuuggucgaggccucagc

SEQ ID NO: 614564 - RNA, 20 nt, Human
aaaagaucuacacguaagga

SEQ ID NO: 614565 - RNA, 24 nt, Human
aaaauguugggauuacagguguga

SEQ ID NO: 614566 - RNA, 19 nt, Human
aaauguugaauguuacucc

SEQ ID NO: 614567 - RNA, 26 nt, Human
aaauguugggauuacaggugugagcc

SEQ ID NO: 614568 - RNA, 21 nt, Human
aagaauuuucuuaacucagcu

SEQ ID NO: 614569 - RNA, 18 nt, Human
aagauuuucuggacaaca

SEQ ID NO: 614570 - RNA, 22 nt, Human
accacagucuuucuuucucugc

SEQ ID NO: 614571 - RNA, 24 nt, Human
acuccagcuggagugcaguggcgu

SEQ ID NO: 614572 - RNA, 21 nt, Human
acuuggccaacucuucgucac

SEQ ID NO: 614573 - RNA, 27 nt, Human
agacauauacacucaauccaaggcaug

SEQ ID NO: 614574 - RNA, 19 nt, Human
agacggugcaccuagcaug

SEQ ID NO: 614575 - RNA, 18 nt, Human
agccccguggaagaagcc

SEQ ID NO: 614576 - RNA, 24 nt, Human
agcgauucuccugccucagccucc

SEQ ID NO: 614577 - RNA, 19 nt, Human
aggaagacggugcaccuag

SEQ ID NO: 614578 - RNA, 20 nt, Human
aggcacgcaccaccacgccc

SEQ ID NO: 614579 - RNA, 24 nt, Human
agguagcuggaacuacaggcacgc

SEQ ID NO: 614580 - RNA, 23 nt, Human
agugcaguggcgugaucuuggcu

SEQ ID NO: 614581 - RNA, 24 nt, Human
agugcaguggcgugaucuuggcuc

SEQ ID NO: 614582 - RNA, 21 nt, Human
auccaccuaucaggauacacg

SEQ ID NO: 614583 - RNA, 18 nt, Human
augagguuucaccauguu

SEQ ID NO: 614584 - RNA, 20 nt, Human
augagguuucaccauguugg

SEQ ID NO: 614585 - RNA, 24 nt, Human
augagguuucaccauguuggccag

SEQ ID NO: 614586 - RNA, 24 nt, Human
augauccacccuucucggccuccc

SEQ ID NO: 614587 - RNA, 19 nt, Human
caaaaaccacuccacggca

SEQ ID NO: 614588 - RNA, 24 nt, Human
caaaauguugggauuacaggugug

SEQ ID NO: 614589 - RNA, 18 nt, Human
caaaggcuggagagcucc

SEQ ID NO: 614590 - RNA, 22 nt, Human
caagcgauucuccugccucagc

SEQ ID NO: 614591 - RNA, 27 nt, Human
caagcgauucuccugccucagccuccc

SEQ ID NO: 614592 - RNA, 19 nt, Human
cacauuaacuauugugaua

SEQ ID NO: 614593 - RNA, 22 nt, Human
caccaccacgcccagcuaauuu

SEQ ID NO: 614594 - RNA, 24 nt, Human
caccacgcccagcuaauuuuugua

SEQ ID NO: 614595 - RNA, 18 nt, Human
caccauguuggccaggau

SEQ ID NO: 614596 - RNA, 22 nt, Human
caccauguuggccaggaugguc

SEQ ID NO: 614597 - RNA, 24 nt, Human
caccauguuggccaggauggucuc

SEQ ID NO: 614598 - RNA, 22 nt, Human
caccuagcauggggccgugggg

SEQ ID NO: 614599 - RNA, 24 nt, Human
cacuccagcuggagugcaguggcg

SEQ ID NO: 614600 - RNA, 23 nt, Human
cacuuggccaacucuucgucacc

SEQ ID NO: 614601 - RNA, 22 nt, Human
caggauggucuccaucuccuga

SEQ ID NO: 614602 - RNA, 21 nt, Human
caggcacgcaccaccacgccc

SEQ ID NO: 614603 - RNA, 18 nt, Human
cagugucgagacuuacac

SEQ ID NO: 614604 - RNA, 21 nt, Human
cauccccucccuuuagccuga

SEQ ID NO: 614605 - RNA, 21 nt, Human
ccaaaauguugggauuacagg

SEQ ID NO: 614606 - RNA, 21 nt, Human
ccaaaauguugggauuacagg

SEQ ID NO: 614607 - RNA, 24 nt, Human
ccaaaauguugggauuacaggugu

SEQ ID NO: 614608 - RNA, 21 nt, Human
ccaaagccccuguccacgagc

SEQ ID NO: 614609 - RNA, 23 nt, Human
ccacccuucucggccucccaaaa

SEQ ID NO: 614610 - RNA, 22 nt, Human
ccagccccagagccuugaacuc

SEQ ID NO: 614611 - RNA, 21 nt, Human
ccagggaaggcaaacaugaua

SEQ ID NO: 614612 - RNA, 24 nt, Human
ccauuugaaaaaaaaaaaaagauc

SEQ ID NO: 614613 - RNA, 23 nt, Human
cccaacauccccucccuuuagcc

SEQ ID NO: 614614 - RNA, 20 nt, Human
cccagauggugaaacagggu

SEQ ID NO: 614615 - RNA, 22 nt, Human
cccaguccccggccuccucagc

SEQ ID NO: 614616 - RNA, 21 nt, Human
cccagugcuaagcgugccuuc

SEQ ID NO: 614617 - RNA, 23 nt, Human
cccuagagaaacacagaggugcc

SEQ ID NO: 614618 - RNA, 19 nt, Human
ccuagcacugugcacaugu

SEQ ID NO: 614619 - RNA, 21 nt, Human
ccucaugauccacccuucucg

SEQ ID NO: 614620 - RNA, 24 nt, Human
ccucccagguagcuggaacuacag

SEQ ID NO: 614621 - RNA, 21 nt, Human
ccucccguccuagcacugugc

SEQ ID NO: 614622 - RNA, 27 nt, Human
ccucuaauuaugacauauuucuucauc

SEQ ID NO: 614623 - RNA, 20 nt, Human
ccucucaucuuaaccuuuuc

SEQ ID NO: 614624 - RNA, 19 nt, Human
ccugguucaagcgauucuc

SEQ ID NO: 614625 - RNA, 18 nt, Human
ccuguuccuaauccaccu

SEQ ID NO: 614626 - RNA, 21 nt, Human
ccuucucauuucacgcggggg

SEQ ID NO: 614627 - RNA, 19 nt, Human
cgggggcugcucugguguc

SEQ ID NO: 614628 - RNA, 22 nt, Human
cucacuacaaguuccgacugcc

SEQ ID NO: 614629 - RNA, 20 nt, Human
cuccucagcacagcuguggc

SEQ ID NO: 614630 - RNA, 18 nt, Human
cuccugaccucaugaucc

SEQ ID NO: 614631 - RNA, 20 nt, Human
cuccugccucagccucccag

SEQ ID NO: 614632 - RNA, 23 nt, Human
cugccucagccucccagguagcu

SEQ ID NO: 614633 - RNA, 23 nt, Human
cugccugguucaagcgauucucc

SEQ ID NO: 614634 - RNA, 21 nt, Human
cugcucuggugucaagccccg

SEQ ID NO: 614635 - RNA, 21 nt, Human
cuggaagcccccucucaucuu

SEQ ID NO: 614636 - RNA, 22 nt, Human
cuggagagcuccaaguaaaaga

SEQ ID NO: 614637 - RNA, 27 nt, Human
cugguuuccugacuuuuuuucuaucug

SEQ ID NO: 614638 - RNA, 20 nt, Human
cuuccaaaggucccaauucc

SEQ ID NO: 614639 - RNA, 21 nt, Human
gaagacauauacacucaaucc

SEQ ID NO: 614640 - RNA, 18 nt, Human
gaagaggaagaaaaaagg

SEQ ID NO: 614641 - RNA, 23 nt, Human
gaagcccccucucaucuuaaccu

SEQ ID NO: 614642 - RNA, 22 nt, Human
gaccucaugauccacccuucuc

SEQ ID NO: 614643 - RNA, 24 nt, Human
gagccuugaacucuggccugcauc

SEQ ID NO: 614644 - RNA, 21 nt, Human
gaggaagacggugcaccuagc

SEQ ID NO: 614645 - RNA, 22 nt, Human
gagguuucaccauguuggccag

SEQ ID NO: 614646 - RNA, 18 nt, Human
gauuacaggugugagcca

SEQ ID NO: 614647 - RNA, 22 nt, Human
gauuacaggugugagccacugc

SEQ ID NO: 614648 - RNA, 23 nt, Human
gauuacaggugugagccacugca

SEQ ID NO: 614649 - RNA, 20 nt, Human
gauucccaguccccggccuc

SEQ ID NO: 614650 - RNA, 20 nt, Human
gcaccaccacgcccagcuaa

SEQ ID NO: 614651 - RNA, 22 nt, Human
gcccagcuaauuuuuguauuuu

SEQ ID NO: 614652 - RNA, 22 nt, Human
gcccccucucaucuuaaccuuu

SEQ ID NO: 614653 - RNA, 18 nt, Human
gccguggggggucagggg

SEQ ID NO: 614654 - RNA, 24 nt, Human
gcgauucuccugccucagccuccc

SEQ ID NO: 614655 - RNA, 20 nt, Human
gcucugucacuccagcugga

SEQ ID NO: 614656 - RNA, 19 nt, Human
gcuggagugcaguggcgug

SEQ ID NO: 614657 - RNA, 19 nt, Human
ggaaggcaaacaugauaaa

SEQ ID NO: 614658 - RNA, 24 nt, Human
ggauggucuccaucuccugaccuc

SEQ ID NO: 614659 - RNA, 23 nt, Human
gggcugguggaccugcucugagc

SEQ ID NO: 614660 - RNA, 22 nt, Human
guuucuccucccaacauccccu

SEQ ID NO: 614661 - RNA, 18 nt, Human
uaaaaagucaaauggagg

SEQ ID NO: 614662 - RNA, 23 nt, Human
uaaaaagucaaauggaggaagac

SEQ ID NO: 614663 - RNA, 25 nt, Human
uaaaaagucaaauggaggaagacgg

SEQ ID NO: 614664 - RNA, 28 nt, Human
uaaaguagcagcacaggcaguaggaacc

SEQ ID NO: 614665 - RNA, 24 nt, Human
uaauuuuuguauuuuuaguagaga

SEQ ID NO: 614666 - RNA, 22 nt, Human
uacaggugugagccacugcacc

SEQ ID NO: 614667 - RNA, 22 nt, Human
uacaggugugagccacugcacc

SEQ ID NO: 614668 - RNA, 23 nt, Human
uacaggugugagccacugcaccu

SEQ ID NO: 614669 - RNA, 22 nt, Human
uagagaugagguuucaccaugu

SEQ ID NO: 614670 - RNA, 24 nt, Human
uaguagagaugagguuucaccaug

SEQ ID NO: 614671 - RNA, 25 nt, Human
uaguagagaugagguuucaccaugu

SEQ ID NO: 614672 - RNA, 23 nt, Human
ucaagaccuaauaaccuuccaaa

SEQ ID NO: 614673 - RNA, 19 nt, Human
ucaagcgauucuccugccu

SEQ ID NO: 614674 - RNA, 22 nt, Human
ucaaggaaaauaaaugauugcc

SEQ ID NO: 614675 - RNA, 24 nt, Human
ucaccauguuggccaggauggucu

SEQ ID NO: 614676 - RNA, 25 nt, Human
ucacuacaaguuccgacugccuggu

SEQ ID NO: 614677 - RNA, 20 nt, Human
ucacuuggccaacucuucgu

SEQ ID NO: 614678 - RNA, 19 nt, Human
ucaggauacacgauucaau

SEQ ID NO: 614679 - RNA, 18 nt, Human
ucagugaucaugacacau

SEQ ID NO: 614680 - RNA, 22 nt, Human
ucauuuugaaaggcagagauug

SEQ ID NO: 614681 - RNA, 22 nt, Human
uccaaguuuuggaaccaaagcc

SEQ ID NO: 614682 - RNA, 21 nt, Human
uccacccuucucggccuccca

SEQ ID NO: 614683 - RNA, 22 nt, Human
uccacccuucucggccucccaa

SEQ ID NO: 614684 - RNA, 23 nt, Human
ucccaaaauguugggauuacagg

SEQ ID NO: 614685 - RNA, 21 nt, Human
ucccaacauccccucccuuua

SEQ ID NO: 614686 - RNA, 24 nt, Human
ucccagguagcuggaacuacaggc

SEQ ID NO: 614687 - RNA, 27 nt, Human
ucccuagagaaacacagaggugcccac

SEQ ID NO: 614688 - RNA, 19 nt, Human
uccugcuauaggugggcug

SEQ ID NO: 614689 - RNA, 20 nt, Human
uccugcuauaggugggcugg

SEQ ID NO: 614690 - RNA, 18 nt, Human
ucgucaccaagacaugcu

SEQ ID NO: 614691 - RNA, 26 nt, Human
ucuacacguaaggaagaggaagaaaa

SEQ ID NO: 614692 - RNA, 21 nt, Human
ucuccaucuccugaccucaug

SEQ ID NO: 614693 - RNA, 25 nt, Human
ucuccucccaacauccccucccuuu

SEQ ID NO: 614694 - RNA, 25 nt, Human
ucuccugccucagccucccagguag

SEQ ID NO: 614695 - RNA, 24 nt, Human
ucucugccucaguuucccuaucug

SEQ ID NO: 614696 - RNA, 24 nt, Human
ucugcagugucgagacuuacaccu

SEQ ID NO: 614697 - RNA, 27 nt, Human
ucuggaagcccccucucaucuuaaccu

SEQ ID NO: 614698 - RNA, 24 nt, Human
ucugucacuccagcuggagugcag

SEQ ID NO: 614699 - RNA, 19 nt, Human
ucuuucucugcuguuuugc

SEQ ID NO: 614700 - RNA, 21 nt, Human
ucuuucuuucucugcuguuuu

SEQ ID NO: 614701 - RNA, 23 nt, Human
ugaaaggcagagaugcugacuug

SEQ ID NO: 614702 - RNA, 24 nt, Human
ugagguuucaccauguuggccagg

SEQ ID NO: 614703 - RNA, 24 nt, Human
ugauaaagaauuuucuuaacucag

SEQ ID NO: 614704 - RNA, 22 nt, Human
ugcaguggcgugaucuuggcuc

SEQ ID NO: 614705 - RNA, 24 nt, Human
ugccucagccucccagguagcugg

SEQ ID NO: 614706 - RNA, 21 nt, Human
ugccucaguuucccuaucugg

SEQ ID NO: 614707 - RNA, 24 nt, Human
ugccugguucaagcgauucuccug

SEQ ID NO: 614708 - RNA, 25 nt, Human
uggaacaacccucgcccugguuuau

SEQ ID NO: 614709 - RNA, 21 nt, Human
uggaacuacaggcacgcacca

SEQ ID NO: 614710 - RNA, 24 nt, Human
uggaacuacaggcacgcaccacca

SEQ ID NO: 614711 - RNA, 25 nt, Human
uggaagaagccucuugugaggccag

SEQ ID NO: 614712 - RNA, 24 nt, Human
uggaggaagacggugcaccuagca

SEQ ID NO: 614713 - RNA, 19 nt, Human
uggagugcaguggcgugau

SEQ ID NO: 614714 - RNA, 23 nt, Human
uggagugcaguggcgugaucuug

SEQ ID NO: 614715 - RNA, 24 nt, Human
uggagugcaguggcgugaucuugg

SEQ ID NO: 614716 - RNA, 19 nt, Human
uggaugaccacaaggaaaa

SEQ ID NO: 614717 - RNA, 22 nt, Human
uggcaaaaaccacuccacggca

SEQ ID NO: 614718 - RNA, 24 nt, Human
uggccaggauggucuccaucuccu

SEQ ID NO: 614719 - RNA, 24 nt, Human
uggcgugaucuuggcucacuacaa

SEQ ID NO: 614720 - RNA, 19 nt, Human
uggcucacuacaaguuccg

SEQ ID NO: 614721 - RNA, 18 nt, Human
ugggauuacaggugugag

SEQ ID NO: 614722 - RNA, 19 nt, Human
ugggauuacaggugugagc

SEQ ID NO: 614723 - RNA, 21 nt, Human
ugggauuacaggugugagcca

SEQ ID NO: 614724 - RNA, 22 nt, Human
ugggauuacaggugugagccac

SEQ ID NO: 614725 - RNA, 22 nt, Human
ugggauuacaggugugagccac

SEQ ID NO: 614726 - RNA, 24 nt, Human
ugggauuacaggugugagccacug

SEQ ID NO: 614727 - RNA, 22 nt, Human
ugggcugguggaccugcucuga

SEQ ID NO: 614728 - RNA, 19 nt, Human
ugguaugggguuucgggcu

SEQ ID NO: 614729 - RNA, 23 nt, Human
ugguucaagcgauucuccugccu

SEQ ID NO: 614730 - RNA, 19 nt, Human
uguaauugaucaccuccug

SEQ ID NO: 614731 - RNA, 24 nt, Human
ugucguuuagccaaaaguuaaagu

SEQ ID NO: 614732 - RNA, 18 nt, Human
uuaguagagaugagguuu

SEQ ID NO: 614733 - RNA, 22 nt, Human
uuaguagagaugagguuucacc

SEQ ID NO: 614734 - RNA, 24 nt, Human
uuaguagagaugagguuucaccau

SEQ ID NO: 614735 - RNA, 21 nt, Human
uucaagcgauucuccugccuc

SEQ ID NO: 614736 - RNA, 23 nt, Human
uucaagcgauucuccugccucag

SEQ ID NO: 614737 - RNA, 24 nt, Human
uucaagcgauucuccugccucagc

SEQ ID NO: 614738 - RNA, 22 nt, Human
uucccaguccccggccuccuca

SEQ ID NO: 614739 - RNA, 19 nt, Human
uuccugcuauaggugggcu

SEQ ID NO: 614740 - RNA, 20 nt, Human
uucgugagggcucugcccuc

SEQ ID NO: 614741 - RNA, 22 nt, Human
uucuccugccucagccucccag

SEQ ID NO: 614742 - RNA, 21 nt, Human
uucucggccucccaaaauguu

SEQ ID NO: 614743 - RNA, 22 nt, Human
uucucugcuguuuugcccaagc

SEQ ID NO: 614744 - RNA, 23 nt, Human
uuggcucugucacuccagcugga

SEQ ID NO: 614745 - RNA, 21 nt, Human
uugggauuacaggugugagcc

SEQ ID NO: 614746 - RNA, 19 nt, Human
uuucaccauguuggccagg

SEQ ID NO: 614747 - RNA, 20 nt, Human
uuucaccauguuggccagga

SEQ ID NO: 614748 - RNA, 24 nt, Human
uuuggcucugucacuccagcugga

SEQ ID NO: 614749 - RNA, 20 nt, Human
uuuuguauuuuuaguagaga

SEQ ID NO: 614750 - RNA, 24 nt, Human
uuuuuaguagagaugagguuucac

SEQ ID NO: 614751 - RNA, 20 nt, Human
uuuuuguauuuuuaguagag

SEQ ID NO: 614752 - RNA, 22 nt, Human
aaaaaaagaaaaaaaaacuuua

SEQ ID NO: 614753 - RNA, 18 nt, Human
aaaacaaagucuguuuuc

SEQ ID NO: 614754 - RNA, 23 nt, Human
aaaacugagacagaagggucuuu

SEQ ID NO: 614755 - RNA, 26 nt, Human
aaaagaaaaaaaaacuuuacucaaag

SEQ ID NO: 614756 - RNA, 20 nt, Human
aaaggaggacgaggaggagg

SEQ ID NO: 614757 - RNA, 24 nt, Human
aaagugcugggauuacaggcauga

SEQ ID NO: 614758 - RNA, 20 nt, Human
aagcuauggaccauccacga

SEQ ID NO: 614759 - RNA, 18 nt, Human
aagugcugggauuacagg

SEQ ID NO: 614760 - RNA, 19 nt, Human
aagugcugggauuacaggc

SEQ ID NO: 614761 - RNA, 21 nt, Human
aagugcugggauuacaggcau

SEQ ID NO: 614762 - RNA, 26 nt, Human
aagugcugggauuacaggcaugagcc

SEQ ID NO: 614763 - RNA, 19 nt, Human
aagugcugggauuacaggu

SEQ ID NO: 614764 - RNA, 22 nt, Human
aagugcugggauuacaggugug

SEQ ID NO: 614765 - RNA, 23 nt, Human
aagugcugggauuacagguguga

SEQ ID NO: 614766 - RNA, 26 nt, Human
aagugcugggauuacaggugugagcc

SEQ ID NO: 614767 - RNA, 23 nt, Human
aauaaaugauagaaacuauacac

SEQ ID NO: 614768 - RNA, 21 nt, Human
acaaagucucugaaacuggaa

SEQ ID NO: 614769 - RNA, 18 nt, Human
acacccauacuaggugcc

SEQ ID NO: 614770 - RNA, 26 nt, Human
acuggagcacagagacauggaaccua

SEQ ID NO: 614771 - RNA, 24 nt, Human
acuguguugcccaggcuggucuug

SEQ ID NO: 614772 - RNA, 25 nt, Human
acuguguugcccaggcuggucuuga

SEQ ID NO: 614773 - RNA, 21 nt, Human
acuucugcccccuuuuuuccc

SEQ ID NO: 614774 - RNA, 23 nt, Human
agacagaagggucuuucccaaaa

SEQ ID NO: 614775 - RNA, 20 nt, Human
agacagagcagcaccugaac

SEQ ID NO: 614776 - RNA, 18 nt, Human
agacauggaaccuagcua

SEQ ID NO: 614777 - RNA, 24 nt, Human
agcaaaacugagacagaagggucu

SEQ ID NO: 614778 - RNA, 24 nt, Human
agccacauuuacaaagcugcagcc

SEQ ID NO: 614779 - RNA, 23 nt, Human
aggcaugagccacugugccuggc

SEQ ID NO: 614780 - RNA, 22 nt, Human
aggcuguggcaaagggccccag

SEQ ID NO: 614781 - RNA, 18 nt, Human
aggcuucagaaccaggug

SEQ ID NO: 614782 - RNA, 18 nt, Human
aguucucccacaauccag

SEQ ID NO: 614783 - RNA, 24 nt, Human
auuacaggugugagccacagcacu

SEQ ID NO: 614784 - RNA, 24 nt, Human
caaagugcugggauuacaggcaug

SEQ ID NO: 614785 - RNA, 18 nt, Human
caacauaaaaauagccac

SEQ ID NO: 614786 - RNA, 24 nt, Human
cacaacagcuggcccagacagagc

SEQ ID NO: 614787 - RNA, 20 nt, Human
cacauuuaguucucccacaa

SEQ ID NO: 614788 - RNA, 24 nt, Human
cacccauacuaggugccuaaggac

SEQ ID NO: 614789 - RNA, 24 nt, Human
caccucugcuucccaaagugcugg

SEQ ID NO: 614790 - RNA, 22 nt, Human
caccugaacaaccugauggccc

SEQ ID NO: 614791 - RNA, 19 nt, Human
cacuguguugcccaggcug

SEQ ID NO: 614792 - RNA, 21 nt, Human
cacuguguugcccaggcuggu

SEQ ID NO: 614793 - RNA, 24 nt, Human
cacuguguugcccaggcuggucuu

SEQ ID NO: 614794 - RNA, 20 nt, Human
cagagcuuuuuucaaaccgg

SEQ ID NO: 614795 - RNA, 18 nt, Human
cagcagccacugcaguca

SEQ ID NO: 614796 - RNA, 18 nt, Human
cagcuccuccuggucugg

SEQ ID NO: 614797 - RNA, 22 nt, Human
caggagcuucugaacaugaagc

SEQ ID NO: 614798 - RNA, 24 nt, Human
caggcuguggcaaagggccccagu

SEQ ID NO: 614799 - RNA, 20 nt, Human
cauaaccacuucugcccccu

SEQ ID NO: 614800 - RNA, 24 nt, Human
caugcccgcguucagggcccaaaa

SEQ ID NO: 614801 - RNA, 23 nt, Human
ccaaagugcugggauuacaggca

SEQ ID NO: 614802 - RNA, 24 nt, Human
ccaaagugcugggauuacaggcau

SEQ ID NO: 614803 - RNA, 22 nt, Human
ccacaacaggggaaagaugaaa

SEQ ID NO: 614804 - RNA, 24 nt, Human
ccaggcuggucuugaacuccuggg

SEQ ID NO: 614805 - RNA, 18 nt, Human
ccaggugaaggcucggga

SEQ ID NO: 614806 - RNA, 22 nt, Human
ccauccacgagcugcugcaaga

SEQ ID NO: 614807 - RNA, 19 nt, Human
cccaaaaaucccuuuucuc

SEQ ID NO: 614808 - RNA, 24 nt, Human
cccaaagugcugggauuacaggca

SEQ ID NO: 614809 - RNA, 21 nt, Human
cccauacuaggugccuaagga

SEQ ID NO: 614810 - RNA, 24 nt, Human
cccgaagugcugggauuacaggug

SEQ ID NO: 614811 - RNA, 23 nt, Human
ccgaagugcugggauuacaggug

SEQ ID NO: 614812 - RNA, 24 nt, Human
ccgaagugcugggauuacaggugu

SEQ ID NO: 614813 - RNA, 24 nt, Human
ccuagcuacuuccugggagguggg

SEQ ID NO: 614814 - RNA, 19 nt, Human
ccugaacaaccugauggcc

SEQ ID NO: 614815 - RNA, 20 nt, Human
ccugaacaaccugauggccc

SEQ ID NO: 614816 - RNA, 25 nt, Human
ccugggagguggggcggggacuccu

SEQ ID NO: 614817 - RNA, 21 nt, Human
ccuuggcugggaaggagggac

SEQ ID NO: 614818 - RNA, 21 nt, Human
cgaggaggagguuggugacag

SEQ ID NO: 614819 - RNA, 20 nt, Human
cguucagggcccaaaaaucc

SEQ ID NO: 614820 - RNA, 20 nt, Human
cugcaagauagcaagccgga

SEQ ID NO: 614821 - RNA, 28 nt, Human
cugcuggagcugggauuugaacccagcu

SEQ ID NO: 614822 - RNA, 19 nt, Human
cuggucuugaacuccuggg

SEQ ID NO: 614823 - RNA, 22 nt, Human
cuucaguacugcccuuuccuuc

SEQ ID NO: 614824 - RNA, 20 nt, Human
gacgaggaggagguugguga

SEQ ID NO: 614825 - RNA, 19 nt, Human
gaggaggcccuuggcuucc

SEQ ID NO: 614826 - RNA, 21 nt, Human
gagguggagacaaagucucug

SEQ ID NO: 614827 - RNA, 21 nt, Human
gaguagucacuuacucgaggu

SEQ ID NO: 614828 - RNA, 18 nt, Human
gauuacaggcaugagcca

SEQ ID NO: 614829 - RNA, 21 nt, Human
gauuacaggcaugagccacug

SEQ ID NO: 614830 - RNA, 24 nt, Human
gauuacaggcaugagccacugugc

SEQ ID NO: 614831 - RNA, 18 nt, Human
gauuacaggugugagcca

SEQ ID NO: 614832 - RNA, 23 nt, Human
gauuacaggugugagccacagca

SEQ ID NO: 614833 - RNA, 20 nt, Human
gcaaugauucugugaauuuu

SEQ ID NO: 614834 - RNA, 23 nt, Human
gcacaggagguugauugcugcag

SEQ ID NO: 614835 - RNA, 20 nt, Human
gccacauuuacaaagcugcg

SEQ ID NO: 614836 - RNA, 20 nt, Human
gcuggcucuggagacugagg

SEQ ID NO: 614837 - RNA, 24 nt, Human
ggaacauuccugaucucuccccac

SEQ ID NO: 614838 - RNA, 23 nt, Human
ggaauggggacauagguugggag

SEQ ID NO: 614839 - RNA, 20 nt, Human
ggacgaggaggagguuggug

SEQ ID NO: 614840 - RNA, 21 nt, Human
ggaggacgaggaggagguugg

SEQ ID NO: 614841 - RNA, 24 nt, Human
ggauuacaggcaugagccacugug

SEQ ID NO: 614842 - RNA, 20 nt, Human
ggccauggacacagcacaga

SEQ ID NO: 614843 - RNA, 23 nt, Human
ggccauggacacagcacagagcu

SEQ ID NO: 614844 - RNA, 19 nt, Human
ggcggggacuacggagaag

SEQ ID NO: 614845 - RNA, 18 nt, Human
ggcuggucuugaacuccu

SEQ ID NO: 614846 - RNA, 20 nt, Human
gggagguaacggaugugaag

SEQ ID NO: 614847 - RNA, 18 nt, Human
gggcggggacuacggaga

SEQ ID NO: 614848 - RNA, 24 nt, Human
gucucacucacuguguugcccagg

SEQ ID NO: 614849 - RNA, 21 nt, Human
uaaaggaggacgaggaggagg

SEQ ID NO: 614850 - RNA, 24 nt, Human
uaaauagagacagggucucacuca

SEQ ID NO: 614851 - RNA, 22 nt, Human
uacaggcaugagccacugugcc

SEQ ID NO: 614852 - RNA, 21 nt, Human
uacaggugugagccacagcac

SEQ ID NO: 614853 - RNA, 22 nt, Human
uacaggugugagccacagcacu

SEQ ID NO: 614854 - RNA, 24 nt, Human
uacaggugugagccacagcacuca

SEQ ID NO: 614855 - RNA, 22 nt, Human
uacauaaccacuucugcccccu

SEQ ID NO: 614856 - RNA, 23 nt, Human
uacuaggugccuaaggacaacug

SEQ ID NO: 614857 - RNA, 22 nt, Human
uacucuggcuggagcccagcag

SEQ ID NO: 614858 - RNA, 22 nt, Human
uacugcccuuuccuucuuccac

SEQ ID NO: 614859 - RNA, 18 nt, Human
uagagacagggucucacu

SEQ ID NO: 614860 - RNA, 20 nt, Human
uagagggagcuccagcucuu

SEQ ID NO: 614861 - RNA, 21 nt, Human
uagcaaaacugagacagaagg

SEQ ID NO: 614862 - RNA, 22 nt, Human
uaggauugugauucucugaggu

SEQ ID NO: 614863 - RNA, 22 nt, Human
uauggaggcuucagaaccaggu

SEQ ID NO: 614864 - RNA, 24 nt, Human
ucacugucuccaucucaaauugca

SEQ ID NO: 614865 - RNA, 22 nt, Human
ucaggccugggaggagcccaca

SEQ ID NO: 614866 - RNA, 20 nt, Human
uccaugcuacaagagugggg

SEQ ID NO: 614867 - RNA, 24 nt, Human
ucccaaagugcugggauuacaggc

SEQ ID NO: 614868 - RNA, 22 nt, Human
uccccagagcaacagcuggccc

SEQ ID NO: 614869 - RNA, 23 nt, Human
uccccagagcaacagcuggccca

SEQ ID NO: 614870 - RNA, 19 nt, Human
ucccgaagugcugggauua

SEQ ID NO: 614871 - RNA, 23 nt, Human
ucccgaagugcugggauuacagg

SEQ ID NO: 614872 - RNA, 24 nt, Human
ucccgaagugcugggauuacaggu

SEQ ID NO: 614873 - RNA, 18 nt, Human
ucccuuuucucauagcaa

SEQ ID NO: 614874 - RNA, 21 nt, Human
uccucuaguuuuucuggcugc

SEQ ID NO: 614875 - RNA, 27 nt, Human
ucucacucacuguguugcccaggcugg

SEQ ID NO: 614876 - RNA, 18 nt, Human
ucucuuggcuggcucugg

SEQ ID NO: 614877 - RNA, 21 nt, Human
ucugcuucccaaagugcuggg

SEQ ID NO: 614878 - RNA, 19 nt, Human
ucuugaacuccugggcugg

SEQ ID NO: 614879 - RNA, 20 nt, Human
ugaacaugaagcuauggacc

SEQ ID NO: 614880 - RNA, 23 nt, Human
ugagccacagcacucagccacca

SEQ ID NO: 614881 - RNA, 24 nt, Human
ugagguaaaaacccaaucacuguc

SEQ ID NO: 614882 - RNA, 19 nt, Human
ugagguauccugaguucug

SEQ ID NO: 614883 - RNA, 23 nt, Human
ugaguggacauuucuucagugug

SEQ ID NO: 614884 - RNA, 24 nt, Human
ugcaagauagcaagccggacaagg

SEQ ID NO: 614885 - RNA, 24 nt, Human
ugcccaggcuggucuugaacuccu

SEQ ID NO: 614886 - RNA, 28 nt, Human
ugcccaggcuggucuugaacuccugggc

SEQ ID NO: 614887 - RNA, 25 nt, Human
ugcugggauuacaggugugagccac

SEQ ID NO: 614888 - RNA, 21 nt, Human
uggaacauuccugaucucucc

SEQ ID NO: 614889 - RNA, 21 nt, Human
uggaccauccacgagcugcug

SEQ ID NO: 614890 - RNA, 21 nt, Human
uggagguggagacaaagucuc

SEQ ID NO: 614891 - RNA, 23 nt, Human
uggcaacugcuggagcugggauu

SEQ ID NO: 614892 - RNA, 20 nt, Human
uggcccaguugacacaacag

SEQ ID NO: 614893 - RNA, 21 nt, Human
uggcccaguugacacaacagc

SEQ ID NO: 614894 - RNA, 23 nt, Human
ugggagguggggcggggacuacg

SEQ ID NO: 614895 - RNA, 18 nt, Human
ugggauuacaggcaugag

SEQ ID NO: 614896 - RNA, 21 nt, Human
ugggauuacaggcaugagcca

SEQ ID NO: 614897 - RNA, 22 nt, Human
ugggauuacaggcaugagccac

SEQ ID NO: 614898 - RNA, 22 nt, Human
ugggauuacaggcaugagccac

SEQ ID NO: 614899 - RNA, 22 nt, Human
ugggauuacaggcaugagccac

SEQ ID NO: 614900 - RNA, 23 nt, Human
ugggauuacaggcaugagccacu

SEQ ID NO: 614901 - RNA, 24 nt, Human
ugggauuacaggcaugagccacug

SEQ ID NO: 614902 - RNA, 18 nt, Human
ugggauuacaggugugag

SEQ ID NO: 614903 - RNA, 19 nt, Human
ugggauuacaggugugagc

SEQ ID NO: 614904 - RNA, 21 nt, Human
ugggauuacaggugugagcca

SEQ ID NO: 614905 - RNA, 22 nt, Human
ugggauuacaggugugagccac

SEQ ID NO: 614906 - RNA, 22 nt, Human
ugggauuacaggugugagccac

SEQ ID NO: 614907 - RNA, 24 nt, Human
ugggauuacaggugugagccacag

SEQ ID NO: 614908 - RNA, 25 nt, Human
ugggauuacaggugugagccacagc

SEQ ID NO: 614909 - RNA, 22 nt, Human
uggggcggggacuacggagaag

SEQ ID NO: 614910 - RNA, 20 nt, Human
uggucuguggacauaagcag

SEQ ID NO: 614911 - RNA, 21 nt, Human
uguacacacccauacuaggug

SEQ ID NO: 614912 - RNA, 24 nt, Human
uguguugcccaggcuggucuugaa

SEQ ID NO: 614913 - RNA, 18 nt, Human
uguguuuuuucgauccua

SEQ ID NO: 614914 - RNA, 21 nt, Human
uguuaggggcugguucauuug

SEQ ID NO: 614915 - RNA, 22 nt, Human
uguugcccaggcuggucuugaa

SEQ ID NO: 614916 - RNA, 22 nt, Human
uuaaaggaggacgaggaggagg

SEQ ID NO: 614917 - RNA, 20 nt, Human
uuaggacaaaaagaggcugc

SEQ ID NO: 614918 - RNA, 21 nt, Human
uuaguucucccacaauccagu

SEQ ID NO: 614919 - RNA, 24 nt, Human
uucccgaagugcugggauuacagg

SEQ ID NO: 614920 - RNA, 21 nt, Human
uugauugcugcagccaguguu

SEQ ID NO: 614921 - RNA, 21 nt, Human
uugguccaggcaaacagaaag

SEQ ID NO: 614922 - RNA, 22 nt, Human
uuggugacagucaggccuggga

SEQ ID NO: 614923 - RNA, 25 nt, Human
uuuaaaggaggacgaggaggagguu

SEQ ID NO: 614924 - RNA, 23 nt, Human
uuucccaaaaaaaagaaaaaaaa

SEQ ID NO: 614925 - RNA, 20 nt, Human
uuucuggcugcugauagccc

SEQ ID NO: 614926 - RNA, 24 nt, Human
aaaugucaaaguuucacuuaagcc

SEQ ID NO: 614927 - RNA, 20 nt, Human
aauacaacuccuggccaccu

SEQ ID NO: 614928 - RNA, 28 nt, Human
acagggcagaggugaggcgccaacggaa

SEQ ID NO: 614929 - RNA, 19 nt, Human
agaaauacaacuccuggcc

SEQ ID NO: 614930 - RNA, 21 nt, Human
agaaauacaacuccuggccac

SEQ ID NO: 614931 - RNA, 23 nt, Human
agauucuuuacacgaucuagcuc

SEQ ID NO: 614932 - RNA, 21 nt, Human
agcaaagcguucaucauagaa

SEQ ID NO: 614933 - RNA, 18 nt, Human
aggcagaggagggcggcc

SEQ ID NO: 614934 - RNA, 21 nt, Human
aggcagaggagggcggcugca

SEQ ID NO: 614935 - RNA, 24 nt, Human
aggcagauucuuuacacgaucuag

SEQ ID NO: 614936 - RNA, 21 nt, Human
agggguacagugugaugggag

SEQ ID NO: 614937 - RNA, 19 nt, Human
caaagcagaaauacaacuc

SEQ ID NO: 614938 - RNA, 23 nt, Human
caacggaauagcaaaugucaaag

SEQ ID NO: 614939 - RNA, 19 nt, Human
caccugcugucagcaaagc

SEQ ID NO: 614940 - RNA, 21 nt, Human
ccaccuuacagggcagagguu

SEQ ID NO: 614941 - RNA, 20 nt, Human
ccacucgcgucccaguuccc

SEQ ID NO: 614942 - RNA, 21 nt, Human
ccagccagccacucgcguccc

SEQ ID NO: 614943 - RNA, 22 nt, Human
cccccugugggucaaaucucac

SEQ ID NO: 614944 - RNA, 22 nt, Human
ccuugccuucuugcuccuuuuu

SEQ ID NO: 614945 - RNA, 24 nt, Human
cgccaacggaauagcaaaugucaa

SEQ ID NO: 614946 - RNA, 20 nt, Human
cggcugcagcauuccgagca

SEQ ID NO: 614947 - RNA, 22 nt, Human
cuucauggcugcguaauccugg

SEQ ID NO: 614948 - RNA, 25 nt, Human
cuucauggcugcguaauccugggcc

SEQ ID NO: 614949 - RNA, 19 nt, Human
cuuuuuggcuuucuccugg

SEQ ID NO: 614950 - RNA, 20 nt, Human
ggaaagguaggaggccuugc

SEQ ID NO: 614951 - RNA, 23 nt, Human
gggaagcaggaaugcaccugcug

SEQ ID NO: 614952 - RNA, 19 nt, Human
gggguacagugugauggga

SEQ ID NO: 614953 - RNA, 22 nt, Human
gugaggcgccaacggaauagca

SEQ ID NO: 614954 - RNA, 18 nt, Human
ucccggcugccaauggcc

SEQ ID NO: 614955 - RNA, 19 nt, Human
ucccggcugccaauggccu

SEQ ID NO: 614956 - RNA, 22 nt, Human
ucccuccuagcaaagcagaaau

SEQ ID NO: 614957 - RNA, 23 nt, Human
uccgagcaaagagagugucgagg

SEQ ID NO: 614958 - RNA, 18 nt, Human
ucuccugggccuucaugg

SEQ ID NO: 614959 - RNA, 20 nt, Human
ugaaggacacgcuugucugc

SEQ ID NO: 614960 - RNA, 21 nt, Human
ugaggcgccaacggaauagca

SEQ ID NO: 614961 - RNA, 18 nt, Human
ugcagaaaggauggaggg

SEQ ID NO: 614962 - RNA, 22 nt, Human
ugcucccggcugccaauggccu

SEQ ID NO: 614963 - RNA, 23 nt, Human
uggaauggucaccuuggcuugga

SEQ ID NO: 614964 - RNA, 28 nt, Human
uguaauugcagaaaggauggagggguac

SEQ ID NO: 614965 - RNA, 18 nt, Human
uucaaauauuuccguuuc

SEQ ID NO: 614966 - RNA, 21 nt, Human
uugcagaaaggauggaggggu

SEQ ID NO: 614967 - RNA, 24 nt, Human
uuggcccccugugggucaaaucuc

SEQ ID NO: 614968 - RNA, 18 nt, Human
aaaacucuccuguaauau

SEQ ID NO: 614969 - RNA, 19 nt, Human
aaaagacuaaaauucccaa

SEQ ID NO: 614970 - RNA, 25 nt, Human
aaccugccagccuguuaguaccugu

SEQ ID NO: 614971 - RNA, 18 nt, Human
aagaaaacaaagacccag

SEQ ID NO: 614972 - RNA, 20 nt, Human
aagaaaacaaagacccaggg

SEQ ID NO: 614973 - RNA, 26 nt, Human
aagaugguggggugacacuuuuggua

SEQ ID NO: 614974 - RNA, 24 nt, Human
aauaucucuccucagacuccacca

SEQ ID NO: 614975 - RNA, 24 nt, Human
acacagccucaggggccaucagcc

SEQ ID NO: 614976 - RNA, 20 nt, Human
acagccuggaaacagcaaac

SEQ ID NO: 614977 - RNA, 22 nt, Human
acaggaaauaauaagcucuaaa

SEQ ID NO: 614978 - RNA, 18 nt, Human
agaugguggggugacacu

SEQ ID NO: 614979 - RNA, 26 nt, Human
agcugcacaagccccaggcaaaaaug

SEQ ID NO: 614980 - RNA, 19 nt, Human
auuaccccaaaucaagaaa

SEQ ID NO: 614981 - RNA, 20 nt, Human
caagccccaggcaaaaaugg

SEQ ID NO: 614982 - RNA, 18 nt, Human
cacaagccccaggcaaaa

SEQ ID NO: 614983 - RNA, 22 nt, Human
cacuaggaaaauauaucacagc

SEQ ID NO: 614984 - RNA, 21 nt, Human
caggcugaaagaugcagcaug

SEQ ID NO: 614985 - RNA, 22 nt, Human
ccaaaucaagaaaacaaagacc

SEQ ID NO: 614986 - RNA, 21 nt, Human
ccagguuuucccaaauccagu

SEQ ID NO: 614987 - RNA, 21 nt, Human
cccaaaucaagaaaacaaaga

SEQ ID NO: 614988 - RNA, 24 nt, Human
cccagaaaacuuucuuucccuucu

SEQ ID NO: 614989 - RNA, 21 nt, Human
ccccgcggcgcuccgcgccgg

SEQ ID NO: 614990 - RNA, 22 nt, Human
ccuuauuuauuuuuaaagucaa

SEQ ID NO: 614991 - RNA, 18 nt, Human
cuccgcgccggcgcccau

SEQ ID NO: 614992 - RNA, 24 nt, Human
cuccucagacuccaccaacucuaa

SEQ ID NO: 614993 - RNA, 25 nt, Human
cuccucagacuccaccaacucuaac

SEQ ID NO: 614994 - RNA, 20 nt, Human
cugaaagaugcagcauguaa

SEQ ID NO: 614995 - RNA, 21 nt, Human
cugccagccuguuaguaccug

SEQ ID NO: 614996 - RNA, 24 nt, Human
cuucauuuacucuguuguaaucaa

SEQ ID NO: 614997 - RNA, 21 nt, Human
cuugcccucagccugauggcc

SEQ ID NO: 614998 - RNA, 27 nt, Human
gaagaugguggggugacacuuuuggua

SEQ ID NO: 614999 - RNA, 20 nt, Human
gcaggaacacugccagcugc

SEQ ID NO: 615000 - RNA, 21 nt, Human
ggaaacagcaaacggacaggc

SEQ ID NO: 615001 - RNA, 20 nt, Human
gggaaaguguuacugcaaga

SEQ ID NO: 615002 - RNA, 23 nt, Human
gggagucagcucauccuagcccc

SEQ ID NO: 615003 - RNA, 19 nt, Human
gggcucuggcuuguuacag

SEQ ID NO: 615004 - RNA, 19 nt, Human
gucagcucauccuagccca

SEQ ID NO: 615005 - RNA, 23 nt, Human
gucucaauugggcucuguuaauu

SEQ ID NO: 615006 - RNA, 23 nt, Human
uaaaaaauauauucuugcccuca

SEQ ID NO: 615007 - RNA, 23 nt, Human
uaaaauaaccaguguccagaggc

SEQ ID NO: 615008 - RNA, 19 nt, Human
uaccccaaaucaagaaaac

SEQ ID NO: 615009 - RNA, 23 nt, Human
uauaaauuaccccaaaucaagaa

SEQ ID NO: 615010 - RNA, 19 nt, Human
ucaaaacccccuucucuuc

SEQ ID NO: 615011 - RNA, 21 nt, Human
ucaagaaaacaaagacccaga

SEQ ID NO: 615012 - RNA, 22 nt, Human
ucauuuacucuguuguaaucaa

SEQ ID NO: 615013 - RNA, 24 nt, Human
ucccaaauccaguacuucauuuac

SEQ ID NO: 615014 - RNA, 24 nt, Human
ucccauaauuagugugucaucacc

SEQ ID NO: 615015 - RNA, 21 nt, Human
ucucccuugaauuuccuguug

SEQ ID NO: 615016 - RNA, 18 nt, Human
uggaaacagcaaacggac

SEQ ID NO: 615017 - RNA, 21 nt, Human
uggaagaugguggggugacac

SEQ ID NO: 615018 - RNA, 20 nt, Human
uggccauccuucauuucuuc

SEQ ID NO: 615019 - RNA, 23 nt, Human
uguaguaagaagagucugguacc

SEQ ID NO: 615020 - RNA, 31 nt, Human
uguccugucauuuuguuacacacagccucaa

SEQ ID NO: 615021 - RNA, 23 nt, Human
uguuucacagcuuauggaagaug

SEQ ID NO: 615022 - RNA, 22 nt, Human
uuccuguugccagggguuuguc

SEQ ID NO: 615023 - RNA, 24 nt, Human
uugguaaacaggauguuggcaaca

SEQ ID NO: 615024 - RNA, 19 nt, Human
uugucucaauugggcucug

SEQ ID NO: 615025 - RNA, 26 nt, Human
uuucaaguaauaaguuggugaaaauu

SEQ ID NO: 615026 - RNA, 21 nt, Human
aaaaucucagagcagcuccac

SEQ ID NO: 615027 - RNA, 19 nt, Human
aagcuccaagugucagugu

SEQ ID NO: 615028 - RNA, 21 nt, Human
aggaggagacgaaugaaagaa

SEQ ID NO: 615029 - RNA, 26 nt, Human
agggcugugggccgauggcuuuagca

SEQ ID NO: 615030 - RNA, 21 nt, Human
aucaucucugcagaagaacuc

SEQ ID NO: 615031 - RNA, 25 nt, Human
caaaaaaaaaauccauuacauuuau

SEQ ID NO: 615032 - RNA, 18 nt, Human
cacaguauaaacacaugg

SEQ ID NO: 615033 - RNA, 19 nt, Human
cagccucugggaaagagaa

SEQ ID NO: 615034 - RNA, 18 nt, Human
caggaggcagccuccagg

SEQ ID NO: 615035 - RNA, 18 nt, Human
caguagcugucugagccc

SEQ ID NO: 615036 - RNA, 19 nt, Human
ccacuccagauccagggca

SEQ ID NO: 615037 - RNA, 23 nt, Human
ccugccacucuggucugaggucc

SEQ ID NO: 615038 - RNA, 21 nt, Human
ccuggcauggaaaaagggccc

SEQ ID NO: 615039 - RNA, 22 nt, Human
cgagccuggucccccaggcuag

SEQ ID NO: 615040 - RNA, 24 nt, Human
cgaucgcccuucagguuuaguuuu

SEQ ID NO: 615041 - RNA, 22 nt, Human
cgugaacagggcugugggccga

SEQ ID NO: 615042 - RNA, 27 nt, Human
cucaaaaucucagagcagcuccacucc

SEQ ID NO: 615043 - RNA, 25 nt, Human
cuccacuccagauccagggcaggag

SEQ ID NO: 615044 - RNA, 22 nt, Human
cuggcugggaccagccucuggg

SEQ ID NO: 615045 - RNA, 21 nt, Human
gcagcuccacuccagauccag

SEQ ID NO: 615046 - RNA, 20 nt, Human
gcgcccacuggucucauaca

SEQ ID NO: 615047 - RNA, 21 nt, Human
ggcaggaggcagccuccaggg

SEQ ID NO: 615048 - RNA, 23 nt, Human
gggaaagagaagcaccaagacgu

SEQ ID NO: 615049 - RNA, 22 nt, Human
gggcaggaggcagccuccaggg

SEQ ID NO: 615050 - RNA, 21 nt, Human
uacaaaaaaaaaauccauuac

SEQ ID NO: 615051 - RNA, 18 nt, Human
uauccugauagcaugagg

SEQ ID NO: 615052 - RNA, 27 nt, Human
ucauccuguucuuuuaaauggcgccca

SEQ ID NO: 615053 - RNA, 21 nt, Human
uccagauccagggcaggaggc

SEQ ID NO: 615054 - RNA, 22 nt, Human
uccagggcaggaggcagccucc

SEQ ID NO: 615055 - RNA, 24 nt, Human
ucucauacagaggagcugugugac

SEQ ID NO: 615056 - RNA, 22 nt, Human
ugcagaagaacucaaaaucuca

SEQ ID NO: 615057 - RNA, 23 nt, Human
uggaaaaagggcccuguuguuua

SEQ ID NO: 615058 - RNA, 20 nt, Human
uguaaccgaucgcccuucag

SEQ ID NO: 615059 - RNA, 24 nt, Human
ugucuuccuuaucugcaagcucca

SEQ ID NO: 615060 - RNA, 22 nt, Human
uucgagccuggucccccaggcu

SEQ ID NO: 615061 - RNA, 24 nt, Human
uuuuuuuuuuuuuuuuuuacaaaa

SEQ ID NO: 615062 - RNA, 19 nt, Human
aaaaaaccuauaaauaugc

SEQ ID NO: 615063 - RNA, 20 nt, Human
aagugcucugggggagccac

SEQ ID NO: 615064 - RNA, 21 nt, Human
aauaucuaccucaaaggugac

SEQ ID NO: 615065 - RNA, 24 nt, Human
acccgcaccuggugcagcaccgcc

SEQ ID NO: 615066 - RNA, 25 nt, Human
accucaaaggugacuagaagaaaga

SEQ ID NO: 615067 - RNA, 18 nt, Human
acggauauacuauacucc

SEQ ID NO: 615068 - RNA, 23 nt, Human
acuccagaaaaucacaauaucua

SEQ ID NO: 615069 - RNA, 18 nt, Human
agacuuccaagauaacac

SEQ ID NO: 615070 - RNA, 24 nt, Human
agccacguggccaccacccacccc

SEQ ID NO: 615071 - RNA, 23 nt, Human
aggcaauaucaaaucaaagcuca

SEQ ID NO: 615072 - RNA, 18 nt, Human
aggcagagauaggagcca

SEQ ID NO: 615073 - RNA, 21 nt, Human
aggcagagauaggagccagga

SEQ ID NO: 615074 - RNA, 22 nt, Human
aggcaggcggguccgaauccgg

SEQ ID NO: 615075 - RNA, 20 nt, Human
aggcggguccgaauccggga

SEQ ID NO: 615076 - RNA, 22 nt, Human
aguuaggaagugcucuggggga

SEQ ID NO: 615077 - RNA, 20 nt, Human
auaauacuuuccucagguua

SEQ ID NO: 615078 - RNA, 19 nt, Human
augaaauguaauaugccaa

SEQ ID NO: 615079 - RNA, 19 nt, Human
auuuccacaaaguucacca

SEQ ID NO: 615080 - RNA, 20 nt, Human
cacccaccccagcacacucg

SEQ ID NO: 615081 - RNA, 19 nt, Human
cagagaaaagagggagaac

SEQ ID NO: 615082 - RNA, 25 nt, Human
cagcagcaucgcauguacacauggc

SEQ ID NO: 615083 - RNA, 21 nt, Human
cagcugggagaugccuggaag

SEQ ID NO: 615084 - RNA, 22 nt, Human
ccagaaaaucacaauaucuacc

SEQ ID NO: 615085 - RNA, 24 nt, Human
cccgaacccacaggccugccaccu

SEQ ID NO: 615086 - RNA, 22 nt, Human
ccgaacccacaggccugccacc

SEQ ID NO: 615087 - RNA, 19 nt, Human
ccucaagacaucucucucu

SEQ ID NO: 615088 - RNA, 21 nt, Human
ccugccaccuaucagcuaaga

SEQ ID NO: 615089 - RNA, 20 nt, Human
ccuggaaggcagagauagga

SEQ ID NO: 615090 - RNA, 19 nt, Human
cggguguggaggaggggcu

SEQ ID NO: 615091 - RNA, 21 nt, Human
cgugcagcugggagaugccug

SEQ ID NO: 615092 - RNA, 22 nt, Human
cgugcagcugggagaugccugg

SEQ ID NO: 615093 - RNA, 28 nt, Human
cugccaccuaucagcuaagaggcaucug

SEQ ID NO: 615094 - RNA, 21 nt, Human
gaaacccggccaggaccggga

SEQ ID NO: 615095 - RNA, 20 nt, Human
gaagauagaggaggagccgg

SEQ ID NO: 615096 - RNA, 24 nt, Human
gaggcagggcuuagggcucugagc

SEQ ID NO: 615097 - RNA, 19 nt, Human
gcagcaucgcauguacaca

SEQ ID NO: 615098 - RNA, 19 nt, Human
gccuagcgugggcgugaag

SEQ ID NO: 615099 - RNA, 21 nt, Human
ggagccggaacgugcaaggga

SEQ ID NO: 615100 - RNA, 25 nt, Human
ggaggaggggcucgcgcuugggaag

SEQ ID NO: 615101 - RNA, 21 nt, Human
gggagaacccgaacccacagg

SEQ ID NO: 615102 - RNA, 19 nt, Human
gggcggagaggcgccgugc

SEQ ID NO: 615103 - RNA, 19 nt, Human
gggcgugaagauagaggag

SEQ ID NO: 615104 - RNA, 21 nt, Human
gugcagcaccgccccaggcag

SEQ ID NO: 615105 - RNA, 22 nt, Human
guggaggaggggcucgcgcuug

SEQ ID NO: 615106 - RNA, 21 nt, Human
guggccaccacccaccccagc

SEQ ID NO: 615107 - RNA, 18 nt, Human
uaaugggucucccagcuu

SEQ ID NO: 615108 - RNA, 26 nt, Human
ucaaaucacuucaguacaaaugucaa

SEQ ID NO: 615109 - RNA, 29 nt, Human
ucacaauaucuaccucaaaggugacuagg

SEQ ID NO: 615110 - RNA, 22 nt, Human
ucaguacaaaugucaaagagaa

SEQ ID NO: 615111 - RNA, 21 nt, Human
uccaacuuaauggauauucaa

SEQ ID NO: 615112 - RNA, 20 nt, Human
uccagagaaaagagggagaa

SEQ ID NO: 615113 - RNA, 21 nt, Human
uccgggacgcggggcugggac

SEQ ID NO: 615114 - RNA, 18 nt, Human
ugaagauagaggaggagc

SEQ ID NO: 615115 - RNA, 18 nt, Human
ugacuagaagaaagacca

SEQ ID NO: 615116 - RNA, 20 nt, Human
ugagccgggcccgagcgugc

SEQ ID NO: 615117 - RNA, 20 nt, Human
ugcagcugggagaugccugg

SEQ ID NO: 615118 - RNA, 23 nt, Human
ugcaucuaguaaaccuaagacac

SEQ ID NO: 615119 - RNA, 24 nt, Human
ugccuggaaggcagagauaggagc

SEQ ID NO: 615120 - RNA, 18 nt, Human
uggaggaggggcucgcgc

SEQ ID NO: 615121 - RNA, 20 nt, Human
ugggagaugccuggaaggca

SEQ ID NO: 615122 - RNA, 20 nt, Human
uguguuccccugagcucaga

SEQ ID NO: 615123 - RNA, 22 nt, Human
uuccccugagcucagagaagac

SEQ ID NO: 615124 - RNA, 21 nt, Human
uuguguuccccugagcucaga

SEQ ID NO: 615125 - RNA, 24 nt, Human
aaaaaaaaaguuuggacuucuuaa

SEQ ID NO: 615126 - RNA, 22 nt, Human
aaaaagaaacaguccaagccuc

SEQ ID NO: 615127 - RNA, 23 nt, Human
aaacaguccaagccucacccccg

SEQ ID NO: 615128 - RNA, 20 nt, Human
aacaccuugacagaggaagu

SEQ ID NO: 615129 - RNA, 20 nt, Human
aagcaugauuuauuaugacc

SEQ ID NO: 615130 - RNA, 19 nt, Human
agcuaguaauaaaaaaaaa

SEQ ID NO: 615131 - RNA, 28 nt, Human
auaauauuugugugugugugugugugug

SEQ ID NO: 615132 - RNA, 21 nt, Human
cacuguguaguccauggacug

SEQ ID NO: 615133 - RNA, 22 nt, Human
cuggcaaacaguagguuaccau

SEQ ID NO: 615134 - RNA, 26 nt, Human
ggaaaaagaaacaguccaagccucac

SEQ ID NO: 615135 - RNA, 21 nt, Human
gugugugugugugugugugug

SEQ ID NO: 615136 - RNA, 21 nt, Human
uaaagaaccucuacucacugu

SEQ ID NO: 615137 - RNA, 26 nt, Human
uaauaauauuuguguguguguguguu

SEQ ID NO: 615138 - RNA, 21 nt, Human
uagaagucagaaucaugguca

SEQ ID NO: 615139 - RNA, 25 nt, Human
uagaugaacuuucucuuuugagcuc

SEQ ID NO: 615140 - RNA, 19 nt, Human
uauuugugugugugugugu

SEQ ID NO: 615141 - RNA, 19 nt, Human
uauuugugugugugugugu

SEQ ID NO: 615142 - RNA, 19 nt, Human
uauuugugugugugugugu

SEQ ID NO: 615143 - RNA, 23 nt, Human
uccaucaacagcagaauggauaa

SEQ ID NO: 615144 - RNA, 19 nt, Human
ucuacaggguuuacuauga

SEQ ID NO: 615145 - RNA, 22 nt, Human
uggaaaaagaaacaguccaagc

SEQ ID NO: 615146 - RNA, 26 nt, Human
uggaaaaagaaacaguccaagccuca

SEQ ID NO: 615147 - RNA, 18 nt, Human
ugugugugugugugugug

SEQ ID NO: 615148 - RNA, 18 nt, Human
ugugugugugugugugug

SEQ ID NO: 615149 - RNA, 18 nt, Human
ugugugugugugugugug

SEQ ID NO: 615150 - RNA, 18 nt, Human
ugugugugugugugugug

SEQ ID NO: 615151 - RNA, 18 nt, Human
ugugugugugugugugug

SEQ ID NO: 615152 - RNA, 18 nt, Human
ugugugugugugugugug

SEQ ID NO: 615153 - RNA, 22 nt, Human
ugugugugugugugugugugag

SEQ ID NO: 615154 - RNA, 21 nt, Human
ugugugugugugugugugugu

SEQ ID NO: 615155 - RNA, 21 nt, Human
ugugugugugugugugugugu

SEQ ID NO: 615156 - RNA, 21 nt, Human
ugugugugugugugugugugu

SEQ ID NO: 615157 - RNA, 21 nt, Human
ugugugugugugugugugugu

SEQ ID NO: 615158 - RNA, 21 nt, Human
ugugugugugugugugugugu

SEQ ID NO: 615159 - RNA, 21 nt, Human
ugugugugugugugugugugu

SEQ ID NO: 615160 - RNA, 21 nt, Human
ugugugugugugugugugugu

SEQ ID NO: 615161 - RNA, 21 nt, Human
ugugugugugugugugugugu

SEQ ID NO: 615162 - RNA, 21 nt, Human
ugugugugugugugugugugu

SEQ ID NO: 615163 - RNA, 21 nt, Human
ugugugugugugugugugugu

SEQ ID NO: 615164 - RNA, 22 nt, Human
ugugugugugugugugugugug

SEQ ID NO: 615165 - RNA, 22 nt, Human
ugugugugugugugugugugug

SEQ ID NO: 615166 - RNA, 24 nt, Human
uucauaccuccuucuuuuaaagaa

SEQ ID NO: 615167 - RNA, 25 nt, Human
uucauaccuccuucuuuuaaagaac

SEQ ID NO: 615168 - RNA, 24 nt, Human
uuugugugugugugugugugugug

SEQ ID NO: 615169 - RNA, 23 nt, Human
aagcagccucggauuggcugggu

SEQ ID NO: 615170 - RNA, 22 nt, Human
aaggagccuggacccaagggac

SEQ ID NO: 615171 - RNA, 27 nt, Human
aaugcccauccauuccaugaguuccua

SEQ ID NO: 615172 - RNA, 24 nt, Human
accccagccucccucucacagccc

SEQ ID NO: 615173 - RNA, 24 nt, Human
agaacuggggccaguggccugggc

SEQ ID NO: 615174 - RNA, 20 nt, Human
agacgugaacagcuuuggcc

SEQ ID NO: 615175 - RNA, 23 nt, Human
agcagaugguugagcacagacgu

SEQ ID NO: 615176 - RNA, 21 nt, Human
agggcggaggggagagggagg

SEQ ID NO: 615177 - RNA, 26 nt, Human
aggucccacucccagccccgcccagg

SEQ ID NO: 615178 - RNA, 24 nt, Human
aucuuuggcaacgaauuucugcag

SEQ ID NO: 615179 - RNA, 27 nt, Human
caaaugcccauccauuccaugaguucc

SEQ ID NO: 615180 - RNA, 18 nt, Human
caacaggaggagcaaaag

SEQ ID NO: 615181 - RNA, 18 nt, Human
cacagugguggccuuggu

SEQ ID NO: 615182 - RNA, 20 nt, Human
caccaggcagagggcaaagu

SEQ ID NO: 615183 - RNA, 21 nt, Human
cagccccgcccaggcacccca

SEQ ID NO: 615184 - RNA, 20 nt, Human
cagccucccucucacagccc

SEQ ID NO: 615185 - RNA, 24 nt, Human
cagggccugcccauggugcuggcu

SEQ ID NO: 615186 - RNA, 24 nt, Human
cagugguggccuuggucuugccug

SEQ ID NO: 615187 - RNA, 22 nt, Human
ccaacccagccucuacuccuuc

SEQ ID NO: 615188 - RNA, 23 nt, Human
ccacucccagccccgcccaggca

SEQ ID NO: 615189 - RNA, 22 nt, Human
ccagccucuacuccuuccucag

SEQ ID NO: 615190 - RNA, 20 nt, Human
ccauagguagcugcccuggg

SEQ ID NO: 615191 - RNA, 25 nt, Human
cccagccccgcccaggcaccccagc

SEQ ID NO: 615192 - RNA, 22 nt, Human
cccaguggagagagagcaccag

SEQ ID NO: 615193 - RNA, 23 nt, Human
cccauagguagcugcccuggggc

SEQ ID NO: 615194 - RNA, 18 nt, Human
cccauggcagggccugcc

SEQ ID NO: 615195 - RNA, 23 nt, Human
ccccauuuccuucggugucucug

SEQ ID NO: 615196 - RNA, 24 nt, Human
ccccugcacacccuguaacagacc

SEQ ID NO: 615197 - RNA, 28 nt, Human
cccgcccucccccucccucucucccuuu

SEQ ID NO: 615198 - RNA, 23 nt, Human
cccgcuucgcccgcccucccccu

SEQ ID NO: 615199 - RNA, 19 nt, Human
cccugguguaggggaggga

SEQ ID NO: 615200 - RNA, 21 nt, Human
cccuguaacagaccaccgccc

SEQ ID NO: 615201 - RNA, 24 nt, Human
cccuguaacagaccaccgcccucc

SEQ ID NO: 615202 - RNA, 20 nt, Human
ccgcgcucagcgccgaggag

SEQ ID NO: 615203 - RNA, 22 nt, Human
ccuccacauacuggcccagucc

SEQ ID NO: 615204 - RNA, 20 nt, Human
ccucccucucucccuuucuc

SEQ ID NO: 615205 - RNA, 20 nt, Human
ccucucucccuuucuccccc

SEQ ID NO: 615206 - RNA, 20 nt, Human
cgggcagcugcgccgccggc

SEQ ID NO: 615207 - RNA, 18 nt, Human
cucacagccccuaaggcu

SEQ ID NO: 615208 - RNA, 19 nt, Human
cuccagccaacccagccuc

SEQ ID NO: 615209 - RNA, 24 nt, Human
cucccagccccgcccaggcacccc

SEQ ID NO: 615210 - RNA, 21 nt, Human
cucccgcuucgcccgcccucc

SEQ ID NO: 615211 - RNA, 22 nt, Human
cucccuucuggugaugcuuagg

SEQ ID NO: 615212 - RNA, 21 nt, Human
cucccuuucucccccucgccc

SEQ ID NO: 615213 - RNA, 19 nt, Human
cuggacccaagggacacug

SEQ ID NO: 615214 - RNA, 18 nt, Human
cugggcagccaaugaagg

SEQ ID NO: 615215 - RNA, 20 nt, Human
gacuggaaggagggcccaca

SEQ ID NO: 615216 - RNA, 18 nt, Human
gcagcuggacagugggcc

SEQ ID NO: 615217 - RNA, 22 nt, Human
gcccaugggggugggucacagu

SEQ ID NO: 615218 - RNA, 21 nt, Human
gccccgcccaggcaccccagc

SEQ ID NO: 615219 - RNA, 21 nt, Human
gccugacuggaaggagggccc

SEQ ID NO: 615220 - RNA, 19 nt, Human
gcgcgaggcaggggcgugg

SEQ ID NO: 615221 - RNA, 18 nt, Human
gcgcucagcgccgaggag

SEQ ID NO: 615222 - RNA, 18 nt, Human
gcugagcucuccccuccc

SEQ ID NO: 615223 - RNA, 24 nt, Human
gcugcccuggggcaagucccuggu

SEQ ID NO: 615224 - RNA, 20 nt, Human
gcuggggaagcaaagaccca

SEQ ID NO: 615225 - RNA, 22 nt, Human
gcuucgcccgcccucccccucc

SEQ ID NO: 615226 - RNA, 21 nt, Human
ggagagggaggcaggcgugcu

SEQ ID NO: 615227 - RNA, 25 nt, Human
ggccugggcagccaaugaaggggag

SEQ ID NO: 615228 - RNA, 19 nt, Human
ggcuggcuggggaagcaaa

SEQ ID NO: 615229 - RNA, 23 nt, Human
ggcugggugagggcggaggggag

SEQ ID NO: 615230 - RNA, 19 nt, Human
gggagggaguaauauugcu

SEQ ID NO: 615231 - RNA, 21 nt, Human
gggaucucaggucccacuccc

SEQ ID NO: 615232 - RNA, 19 nt, Human
ggucugagugagucggggg

SEQ ID NO: 615233 - RNA, 23 nt, Human
gucacagagcaacgguguggcuu

SEQ ID NO: 615234 - RNA, 24 nt, Human
guggagagagagcaccaggucaga

SEQ ID NO: 615235 - RNA, 18 nt, Human
uagcagaaccacugacuc

SEQ ID NO: 615236 - RNA, 18 nt, Human
uaggacggcuccagccaa

SEQ ID NO: 615237 - RNA, 20 nt, Human
ucagagggccaagaugaccc

SEQ ID NO: 615238 - RNA, 23 nt, Human
ucagagggccaagaugaccccca

SEQ ID NO: 615239 - RNA, 22 nt, Human
ucaggccacgugcaggcugaac

SEQ ID NO: 615240 - RNA, 18 nt, Human
ucccagccccgcccaggc

SEQ ID NO: 615241 - RNA, 23 nt, Human
ucccagccccgcccaggcacccc

SEQ ID NO: 615242 - RNA, 20 nt, Human
uccucaggccacgugcaggc

SEQ ID NO: 615243 - RNA, 18 nt, Human
uccuccacauacuggccc

SEQ ID NO: 615244 - RNA, 22 nt, Human
ucgcugugggguuucaccaccc

SEQ ID NO: 615245 - RNA, 20 nt, Human
ucucacagccccuaaggcuu

SEQ ID NO: 615246 - RNA, 22 nt, Human
ucucaggucccacucccagccc

SEQ ID NO: 615247 - RNA, 19 nt, Human
ucugcagcuggacaguggg

SEQ ID NO: 615248 - RNA, 20 nt, Human
ucugcagcuggacagugggc

SEQ ID NO: 615249 - RNA, 21 nt, Human
ucugcagcuggacagugggcc

SEQ ID NO: 615250 - RNA, 24 nt, Human
ucugccccugcacacccuguaaca

SEQ ID NO: 615251 - RNA, 21 nt, Human
ugagaggcuguaggcugggca

SEQ ID NO: 615252 - RNA, 21 nt, Human
ugagcacaaggaaggggcggg

SEQ ID NO: 615253 - RNA, 23 nt, Human
ugccccugcacacccuguaacag

SEQ ID NO: 615254 - RNA, 18 nt, Human
ugcccuggggcaaguccc

SEQ ID NO: 615255 - RNA, 23 nt, Human
ugcccuggggcaagucccuggug

SEQ ID NO: 615256 - RNA, 21 nt, Human
uggcagggccugcccauggug

SEQ ID NO: 615257 - RNA, 20 nt, Human
ugggggugggucacagugag

SEQ ID NO: 615258 - RNA, 22 nt, Human
uggggucugagugagucggggg

SEQ ID NO: 615259 - RNA, 24 nt, Human
uggugcuggcugccugggacgggg

SEQ ID NO: 615260 - RNA, 22 nt, Human
uuggccauuugagcacaaggaa

SEQ ID NO: 615261 - RNA, 21 nt, Human
uuucuugacauuuuggggcuu

SEQ ID NO: 615262 - RNA, 22 nt, Human
uuuggcaacgaauuucugcagc

SEQ ID NO: 615263 - RNA, 24 nt, Human
uuuggcaacgaauuucugcagcug

SEQ ID NO: 615264 - RNA, 21 nt, Human
uuuuuuucuugacauuuuggg

SEQ ID NO: 615265 - RNA, 18 nt, Human
uuuuuuuuuuuuuucuug

SEQ ID NO: 615266 - RNA, 22 nt, Human
aaugguggggguaggggaagga

SEQ ID NO: 615267 - RNA, 23 nt, Human
acucuggugcgccuguuuccucc

SEQ ID NO: 615268 - RNA, 23 nt, Human
agaguggucuucaccuggcuggu

SEQ ID NO: 615269 - RNA, 19 nt, Human
agccaguguggggagacac

SEQ ID NO: 615270 - RNA, 20 nt, Human
aggaggcccagaaagaacca

SEQ ID NO: 615271 - RNA, 18 nt, Human
aggcggcagccagccugg

SEQ ID NO: 615272 - RNA, 20 nt, Human
agggaagggggaauauggua

SEQ ID NO: 615273 - RNA, 24 nt, Human
caacuguacccagcagcccuauaa

SEQ ID NO: 615274 - RNA, 18 nt, Human
cacccuccauccggccac

SEQ ID NO: 615275 - RNA, 21 nt, Human
cacccugacucuggugcgccu

SEQ ID NO: 615276 - RNA, 22 nt, Human
cacccugacucuggugcgccug

SEQ ID NO: 615277 - RNA, 23 nt, Human
cagaauacuggggagccagugug

SEQ ID NO: 615278 - RNA, 19 nt, Human
cagcugccugaccccuggg

SEQ ID NO: 615279 - RNA, 24 nt, Human
caggaaaaugacgccccuuccuca

SEQ ID NO: 615280 - RNA, 24 nt, Human
ccagugacuuccuaucggccuccu

SEQ ID NO: 615281 - RNA, 21 nt, Human
cccccaggcccucacuguguc

SEQ ID NO: 615282 - RNA, 19 nt, Human
ccccugugggcaucagcag

SEQ ID NO: 615283 - RNA, 21 nt, Human
cccugacucuggugcgccugu

SEQ ID NO: 615284 - RNA, 19 nt, Human
cccugccacccuccauccg

SEQ ID NO: 615285 - RNA, 20 nt, Human
cccuugugcagugcacagcc

SEQ ID NO: 615286 - RNA, 20 nt, Human
ccguauguccgcagggcagg

SEQ ID NO: 615287 - RNA, 18 nt, Human
ccucacuguguccugggg

SEQ ID NO: 615288 - RNA, 22 nt, Human
ccucgaagaaggcaaggauggg

SEQ ID NO: 615289 - RNA, 19 nt, Human
ccucugcugugagugaggg

SEQ ID NO: 615290 - RNA, 21 nt, Human
ccugccuaucuuucccugccu

SEQ ID NO: 615291 - RNA, 21 nt, Human
ccugggccccugucccaggag

SEQ ID NO: 615292 - RNA, 21 nt, Human
cucacuguguccuggggcaac

SEQ ID NO: 615293 - RNA, 19 nt, Human
cuccagcuuuccaccucug

SEQ ID NO: 615294 - RNA, 22 nt, Human
cucccuccaugucauccggcca

SEQ ID NO: 615295 - RNA, 21 nt, Human
cuccuauggucagggagcucc

SEQ ID NO: 615296 - RNA, 18 nt, Human
cucuguguuaggaaggaa

SEQ ID NO: 615297 - RNA, 20 nt, Human
cugcaccccaccuuggccug

SEQ ID NO: 615298 - RNA, 21 nt, Human
cuggggcaaccgauggugggg

SEQ ID NO: 615299 - RNA, 23 nt, Human
gaauggggaugggggugcaacuc

SEQ ID NO: 615300 - RNA, 26 nt, Human
gacucuggugcgccuguuuccuccug

SEQ ID NO: 615301 - RNA, 19 nt, Human
gagcgccccugcgagccgc

SEQ ID NO: 615302 - RNA, 19 nt, Human
gcaccccaccuuggccugg

SEQ ID NO: 615303 - RNA, 21 nt, Human
gccuguuuccuccugcacccc

SEQ ID NO: 615304 - RNA, 22 nt, Human
gcgacugggucagucuccagcu

SEQ ID NO: 615305 - RNA, 22 nt, Human
ggagacacuuugggcccaguga

SEQ ID NO: 615306 - RNA, 20 nt, Human
ggagcucccuccaugucauc

SEQ ID NO: 615307 - RNA, 21 nt, Human
ggccacagcgaggcggcagcc

SEQ ID NO: 615308 - RNA, 23 nt, Human
ggccugggccccugucccaggag

SEQ ID NO: 615309 - RNA, 24 nt, Human
gggagccaguguggggagacacag

SEQ ID NO: 615310 - RNA, 24 nt, Human
gggcaucagcaggcacaggguggg

SEQ ID NO: 615311 - RNA, 19 nt, Human
ggggaauaugguaguccag

SEQ ID NO: 615312 - RNA, 23 nt, Human
ggggguaggggaaggaggaacag

SEQ ID NO: 615313 - RNA, 23 nt, Human
ggguagaggggcgucgugucucu

SEQ ID NO: 615314 - RNA, 24 nt, Human
ggucugggccucccaguuaaaacc

SEQ ID NO: 615315 - RNA, 22 nt, Human
gugacuuccuaucggccuccug

SEQ ID NO: 615316 - RNA, 23 nt, Human
guggggaggggccuugguaugug

SEQ ID NO: 615317 - RNA, 18 nt, Human
guggggcugagcgccccu

SEQ ID NO: 615318 - RNA, 18 nt, Human
guuugggugaaaguggug

SEQ ID NO: 615319 - RNA, 21 nt, Human
uaaaaaaaacauucucagaga

SEQ ID NO: 615320 - RNA, 26 nt, Human
uaaaaaaaacauucucagagauuugu

SEQ ID NO: 615321 - RNA, 19 nt, Human
uaagauguauuggagggaa

SEQ ID NO: 615322 - RNA, 19 nt, Human
uaggaaggaaugguggggg

SEQ ID NO: 615323 - RNA, 21 nt, Human
uaggggaaggaggaacagggg

SEQ ID NO: 615324 - RNA, 19 nt, Human
ucagcaggcacaggguggg

SEQ ID NO: 615325 - RNA, 21 nt, Human
uccagcuuuccaccucugcug

SEQ ID NO: 615326 - RNA, 23 nt, Human
uccccugugggcaucagcaggca

SEQ ID NO: 615327 - RNA, 21 nt, Human
ucccucgaagaaggcaaggau

SEQ ID NO: 615328 - RNA, 18 nt, Human
uccugccuaucuuucccu

SEQ ID NO: 615329 - RNA, 18 nt, Human
uccuuuuucuucuuucuc

SEQ ID NO: 615330 - RNA, 19 nt, Human
ucuaaccccuccuaugguc

SEQ ID NO: 615331 - RNA, 18 nt, Human
ucuccuuggacaaggugc

SEQ ID NO: 615332 - RNA, 23 nt, Human
ucucucccugccucugccagcuu

SEQ ID NO: 615333 - RNA, 24 nt, Human
ucugcgacugggucagucuccagc

SEQ ID NO: 615334 - RNA, 24 nt, Human
ucuggugcgccuguuuccuccugc

SEQ ID NO: 615335 - RNA, 23 nt, Human
ugagcgccccugcgagccgccca

SEQ ID NO: 615336 - RNA, 19 nt, Human
ugagcuggggguccccagu

SEQ ID NO: 615337 - RNA, 21 nt, Human
ugcaggaaaggaguuggucug

SEQ ID NO: 615338 - RNA, 24 nt, Human
ugcccugccacccuccauccggcc

SEQ ID NO: 615339 - RNA, 21 nt, Human
ugcgaacaggaaaaugacgcc

SEQ ID NO: 615340 - RNA, 20 nt, Human
uggagagagauacaguaccg

SEQ ID NO: 615341 - RNA, 19 nt, Human
uggagggaagggggaauau

SEQ ID NO: 615342 - RNA, 25 nt, Human
uggcugguggggagacacuuugggc

SEQ ID NO: 615343 - RNA, 25 nt, Human
ugggccccugucccaggaggcccag

SEQ ID NO: 615344 - RNA, 21 nt, Human
uggggaugggggugcaacucu

SEQ ID NO: 615345 - RNA, 18 nt, Human
uggggcaaccgauggugg

SEQ ID NO: 615346 - RNA, 23 nt, Human
uguaccccuuuuccagaauacug

SEQ ID NO: 615347 - RNA, 19 nt, Human
ugucuccuuggacaaggug

SEQ ID NO: 615348 - RNA, 23 nt, Human
ugugggcaucagcaggcacaggg

SEQ ID NO: 615349 - RNA, 18 nt, Human
uguguuaggaaggaaugg

SEQ ID NO: 615350 - RNA, 22 nt, Human
uguguuaggaaggaaugguggg

SEQ ID NO: 615351 - RNA, 18 nt, Human
uguuuccuccugcacccc

SEQ ID NO: 615352 - RNA, 18 nt, Human
uuaaaaccaggagggucc

SEQ ID NO: 615353 - RNA, 22 nt, Human
uugaucgugugggacaggccuu

SEQ ID NO: 615354 - RNA, 21 nt, Human
uuuccuuuuucuucuuucucu

SEQ ID NO: 615355 - RNA, 22 nt, Human
auuaccaugauuugugaaaagc

SEQ ID NO: 615356 - RNA, 20 nt, Human
caaggaaggacacagacagu

SEQ ID NO: 615357 - RNA, 21 nt, Human
uccagcggccccacgcucccc

SEQ ID NO: 615358 - RNA, 18 nt, Human
ucccggugcucgccucuc

SEQ ID NO: 615359 - RNA, 22 nt, Human
uguuuuauuaccaugauuugug

SEQ ID NO: 615360 - RNA, 19 nt, Human
uucaaggaaggacacagac

SEQ ID NO: 615361 - RNA, 20 nt, Human
uucaaggaaggacacagaca

SEQ ID NO: 615362 - RNA, 26 nt, Human
aaaaaaaacgugaauaagaauaucau

SEQ ID NO: 615363 - RNA, 24 nt, Human
aaaagcuguacccaggaauccacu

SEQ ID NO: 615364 - RNA, 26 nt, Human
aaacaaaacaugucccugccccaagg

SEQ ID NO: 615365 - RNA, 21 nt, Human
aaacaaacugcacagcaucac

SEQ ID NO: 615366 - RNA, 19 nt, Human
aaagaugaauuugugaaaa

SEQ ID NO: 615367 - RNA, 23 nt, Human
aacugcccuucaaaaauuuacau

SEQ ID NO: 615368 - RNA, 21 nt, Human
aagaaaaagaauacugggagc

SEQ ID NO: 615369 - RNA, 19 nt, Human
aagcuguacccaggaaucc

SEQ ID NO: 615370 - RNA, 18 nt, Human
aauaaauaauaaagaaaa

SEQ ID NO: 615371 - RNA, 22 nt, Human
aauaauaaagaaagauuuggga

SEQ ID NO: 615372 - RNA, 24 nt, Human
aauacugggagcuucaaggaggaa

SEQ ID NO: 615373 - RNA, 23 nt, Human
acaaaagcuguacccaggaaucc

SEQ ID NO: 615374 - RNA, 18 nt, Human
acagaacaaggggaagcu

SEQ ID NO: 615375 - RNA, 18 nt, Human
acccacccuaaguaacau

SEQ ID NO: 615376 - RNA, 23 nt, Human
acugcccuucaaaaauuuacauc

SEQ ID NO: 615377 - RNA, 19 nt, Human
aggaagaaaagggccacag

SEQ ID NO: 615378 - RNA, 18 nt, Human
aggaaucuuuaaucauga

SEQ ID NO: 615379 - RNA, 23 nt, Human
aggaggaagaaaagggccacaga

SEQ ID NO: 615380 - RNA, 18 nt, Human
aucaacaaagccuauaua

SEQ ID NO: 615381 - RNA, 21 nt, Human
augaaguauuaaacguucucc

SEQ ID NO: 615382 - RNA, 23 nt, Human
augauuugccuuuaaaagccuac

SEQ ID NO: 615383 - RNA, 21 nt, Human
augugcugaaagcugcaugcc

SEQ ID NO: 615384 - RNA, 19 nt, Human
caacaaaauuagcuuccca

SEQ ID NO: 615385 - RNA, 18 nt, Human
caacaaagccuauauaua

SEQ ID NO: 615386 - RNA, 20 nt, Human
caccauacuauacacuccuc

SEQ ID NO: 615387 - RNA, 22 nt, Human
cacugcaugaccaucuuagagc

SEQ ID NO: 615388 - RNA, 22 nt, Human
cauacuauacacuccucucaga

SEQ ID NO: 615389 - RNA, 19 nt, Human
cauuccauuggaugaaagc

SEQ ID NO: 615390 - RNA, 24 nt, Human
ccaagaaacaaaaaugauacccaa

SEQ ID NO: 615391 - RNA, 27 nt, Human
ccaauuaaaaacaaaagaagcuguaaa

SEQ ID NO: 615392 - RNA, 24 nt, Human
ccaggaauccacucaacguccucu

SEQ ID NO: 615393 - RNA, 21 nt, Human
ccauacuauacacuccucuca

SEQ ID NO: 615394 - RNA, 23 nt, Human
ccauacuauacacuccucucaga

SEQ ID NO: 615395 - RNA, 19 nt, Human
cccaagaaacaaaaauggu

SEQ ID NO: 615396 - RNA, 21 nt, Human
cccaauuaaaaacaaaagaaa

SEQ ID NO: 615397 - RNA, 18 nt, Human
ccuaauaccaccuccuga

SEQ ID NO: 615398 - RNA, 18 nt, Human
cuccuugcucucuuugcc

SEQ ID NO: 615399 - RNA, 21 nt, Human
cuggcauuagcugauggcaca

SEQ ID NO: 615400 - RNA, 19 nt, Human
gaaguauuaaacguucucc

SEQ ID NO: 615401 - RNA, 23 nt, Human
gacgucagagggauuaggaagga

SEQ ID NO: 615402 - RNA, 20 nt, Human
gaggcagccaccuauaugac

SEQ ID NO: 615403 - RNA, 19 nt, Human
gcaugccucaucaguuuuu

SEQ ID NO: 615404 - RNA, 19 nt, Human
gccuauauauauauauaua

SEQ ID NO: 615405 - RNA, 20 nt, Human
ggguuuuuuucucccaaagg

SEQ ID NO: 615406 - RNA, 23 nt, Human
gugaaaaacugcuuuauggucua

SEQ ID NO: 615407 - RNA, 20 nt, Human
guugcugugcucucaccaug

SEQ ID NO: 615408 - RNA, 22 nt, Human
uaaaaacaaaagaagcuguaaa

SEQ ID NO: 615409 - RNA, 18 nt, Human
uaagccuggcauuagcug

SEQ ID NO: 615410 - RNA, 27 nt, Human
uaauaaagaaagauuugggauuuggua

SEQ ID NO: 615411 - RNA, 21 nt, Human
uaauggguuaacacagucauc

SEQ ID NO: 615412 - RNA, 19 nt, Human
uacccaggaauccacucaa

SEQ ID NO: 615413 - RNA, 19 nt, Human
uagaggggaaaagaaaaag

SEQ ID NO: 615414 - RNA, 22 nt, Human
uagaggggaaaagaaaaagaau

SEQ ID NO: 615415 - RNA, 24 nt, Human
uagcauuaaaaaacaucgacucau

SEQ ID NO: 615416 - RNA, 19 nt, Human
uauaaaaacaaacugcaca

SEQ ID NO: 615417 - RNA, 21 nt, Human
ucaacaaaauuagcuuccccc

SEQ ID NO: 615418 - RNA, 18 nt, Human
ucuaaggaggcagccacc

SEQ ID NO: 615419 - RNA, 22 nt, Human
ugaaagccauggugacauuuuu

SEQ ID NO: 615420 - RNA, 20 nt, Human
ugacuucuaaggaaacuuuu

SEQ ID NO: 615421 - RNA, 19 nt, Human
ugaguguagauaggcacca

SEQ ID NO: 615422 - RNA, 20 nt, Human
ugcaugccucaucaguuuuu

SEQ ID NO: 615423 - RNA, 21 nt, Human
ugcucucaccauggagcagug

SEQ ID NO: 615424 - RNA, 24 nt, Human
uggcauuagcugauggcacauucu

SEQ ID NO: 615425 - RNA, 19 nt, Human
ugggaaugauuugccuuua

SEQ ID NO: 615426 - RNA, 24 nt, Human
uuaugguuaaaaaaaacgugaaua

SEQ ID NO: 615427 - RNA, 23 nt, Human
uucaaagucugggguuuuuuucu

SEQ ID NO: 615428 - RNA, 21 nt, Human
uuccccacccgaauuaaaccc

SEQ ID NO: 615429 - RNA, 20 nt, Human
uuuagaggggaaaagaaaaa

SEQ ID NO: 615430 - RNA, 23 nt, Human
uuuccauauaaaaacaaacugca

SEQ ID NO: 615431 - RNA, 21 nt, Human
uuugcagaaucuucuggccca

SEQ ID NO: 615432 - RNA, 18 nt, Human
uuugcagaaucuucuggg

SEQ ID NO: 615433 - RNA, 24 nt, Human
uuuuucaucaacaaagccuauaua

SEQ ID NO: 615434 - RNA, 25 nt, Human
aaacaccccacccccaccccagagc

SEQ ID NO: 615435 - RNA, 20 nt, Human
aaaggaaaaauggccccucu

SEQ ID NO: 615436 - RNA, 22 nt, Human
aacaccccacccccaccccaga

SEQ ID NO: 615437 - RNA, 19 nt, Human
aaccaagauaccgacuuuc

SEQ ID NO: 615438 - RNA, 20 nt, Human
aagcccaggacagacugcgg

SEQ ID NO: 615439 - RNA, 22 nt, Human
aauacacacagaauuauauaua

SEQ ID NO: 615440 - RNA, 18 nt, Human
acaccccacccccacccc

SEQ ID NO: 615441 - RNA, 20 nt, Human
acaucagaaacaccccaccc

SEQ ID NO: 615442 - RNA, 23 nt, Human
acauuaaaaaccccaacaugaca

SEQ ID NO: 615443 - RNA, 18 nt, Human
accaaggggaggucaagc

SEQ ID NO: 615444 - RNA, 18 nt, Human
accccacccccaccccag

SEQ ID NO: 615445 - RNA, 25 nt, Human
accccagagcacaaccaagauaccg

SEQ ID NO: 615446 - RNA, 22 nt, Human
agaaacaccccacccccacccc

SEQ ID NO: 615447 - RNA, 20 nt, Human
agagcacaaccaagauaccg

SEQ ID NO: 615448 - RNA, 22 nt, Human
agcccacuugucugugucagca

SEQ ID NO: 615449 - RNA, 21 nt, Human
aggagggugggggaaguaaag

SEQ ID NO: 615450 - RNA, 23 nt, Human
aggcagcugaaggagccuccgca

SEQ ID NO: 615451 - RNA, 18 nt, Human
agguggcgggggcugggg

SEQ ID NO: 615452 - RNA, 21 nt, Human
agguggcgggggcuggggcuc

SEQ ID NO: 615453 - RNA, 23 nt, Human
augacacagaauacacacagaau

SEQ ID NO: 615454 - RNA, 26 nt, Human
caaaaucaaagugcugaggcagcuga

SEQ ID NO: 615455 - RNA, 22 nt, Human
caagcccaggacagacugcggg

SEQ ID NO: 615456 - RNA, 22 nt, Human
caagcugggcucacccaagccc

SEQ ID NO: 615457 - RNA, 21 nt, Human
caaucacauuaaaaaccccaa

SEQ ID NO: 615458 - RNA, 24 nt, Human
caccccacccccaccccagagcac

SEQ ID NO: 615459 - RNA, 22 nt, Human
caccccagagcacaaccaagau

SEQ ID NO: 615460 - RNA, 22 nt, Human
cagaaacaccccacccccaccc

SEQ ID NO: 615461 - RNA, 21 nt, Human
caggacccugggaaccaaggg

SEQ ID NO: 615462 - RNA, 19 nt, Human
caugaccccugaaauucag

SEQ ID NO: 615463 - RNA, 18 nt, Human
ccaaaaccaaccauaucc

SEQ ID NO: 615464 - RNA, 22 nt, Human
ccaccuggugggggaugggagc

SEQ ID NO: 615465 - RNA, 22 nt, Human
cccacccccaccccagagcaca

SEQ ID NO: 615466 - RNA, 26 nt, Human
cccacccccaccccagagcacaacca

SEQ ID NO: 615467 - RNA, 19 nt, Human
ccccaccccagagcacaac

SEQ ID NO: 615468 - RNA, 18 nt, Human
ccccacccccaccccaga

SEQ ID NO: 615469 - RNA, 19 nt, Human
cccccaccccagagcacaa

SEQ ID NO: 615470 - RNA, 19 nt, Human
cccccaggcaggaggcccg

SEQ ID NO: 615471 - RNA, 26 nt, Human
ccccugaaauucagaugcacggcgga

SEQ ID NO: 615472 - RNA, 24 nt, Human
ccggcggcggagguggcgggggcu

SEQ ID NO: 615473 - RNA, 18 nt, Human
ccucgaaagccaaaagga

SEQ ID NO: 615474 - RNA, 19 nt, Human
ccucugguuaagggaagcc

SEQ ID NO: 615475 - RNA, 19 nt, Human
cggcggcccgcggugcccc

SEQ ID NO: 615476 - RNA, 24 nt, Human
cucaaacuccaggucuggugacuc

SEQ ID NO: 615477 - RNA, 20 nt, Human
cucaggcagagaugacugcu

SEQ ID NO: 615478 - RNA, 28 nt, Human
cugccggcggcggagguggcgggggcug

SEQ ID NO: 615479 - RNA, 24 nt, Human
cuguccaaaaucaaagugcugagg

SEQ ID NO: 615480 - RNA, 20 nt, Human
cuuucuggcccuggcccuaa

SEQ ID NO: 615481 - RNA, 19 nt, Human
gaacuaggacagucccaca

SEQ ID NO: 615482 - RNA, 23 nt, Human
gaacucgcgggcuuugcccccag

SEQ ID NO: 615483 - RNA, 18 nt, Human
gaagacacaguggggcug

SEQ ID NO: 615484 - RNA, 18 nt, Human
gaauggaucucaggcaga

SEQ ID NO: 615485 - RNA, 27 nt, Human
gagccaaaaccaaccauauccaagaga

SEQ ID NO: 615486 - RNA, 18 nt, Human
gcccaggacagacugcgg

SEQ ID NO: 615487 - RNA, 18 nt, Human
gggugguggcugugcggc

SEQ ID NO: 615488 - RNA, 20 nt, Human
gggugguggcugugcggcug

SEQ ID NO: 615489 - RNA, 19 nt, Human
gguggcgggggcuggggcu

SEQ ID NO: 615490 - RNA, 23 nt, Human
gguggcugugcggcugccggcgg

SEQ ID NO: 615491 - RNA, 18 nt, Human
gugaaaugagccaaaacc

SEQ ID NO: 615492 - RNA, 21 nt, Human
gugcugccaccugguggggga

SEQ ID NO: 615493 - RNA, 20 nt, Human
uaauguagcaggaggcugga

SEQ ID NO: 615494 - RNA, 21 nt, Human
uaccuugucccuguccaaaau

SEQ ID NO: 615495 - RNA, 25 nt, Human
ucagaaacaccccacccccacccca

SEQ ID NO: 615496 - RNA, 22 nt, Human
uccaaaaucaaagugcugaggc

SEQ ID NO: 615497 - RNA, 24 nt, Human
ucccaucccauuccagcuuuccca

SEQ ID NO: 615498 - RNA, 19 nt, Human
ucccauuccagcuuuccca

SEQ ID NO: 615499 - RNA, 23 nt, Human
ucccuguccaaaaucaaagugcu

SEQ ID NO: 615500 - RNA, 27 nt, Human
uccuuugcaagcugacaaagcaaggau

SEQ ID NO: 615501 - RNA, 25 nt, Human
ucuggcccuggcccuaauccuaaac

SEQ ID NO: 615502 - RNA, 22 nt, Human
ugaaaugagccaaaaccaacca

SEQ ID NO: 615503 - RNA, 23 nt, Human
ugagccaaaaccaaccauaucca

SEQ ID NO: 615504 - RNA, 22 nt, Human
ugcggaagacacaguggggcug

SEQ ID NO: 615505 - RNA, 19 nt, Human
uggcccuggcccuaauccu

SEQ ID NO: 615506 - RNA, 22 nt, Human
ugucccuguccaaaaucaaagu

SEQ ID NO: 615507 - RNA, 21 nt, Human
ugugaaaugagccaaaaccaa

SEQ ID NO: 615508 - RNA, 19 nt, Human
aaaaguaucccacgaagag

SEQ ID NO: 615509 - RNA, 18 nt, Human
aaccaacucugcugacac

SEQ ID NO: 615510 - RNA, 20 nt, Human
aaccacaauuacuuuugcac

SEQ ID NO: 615511 - RNA, 19 nt, Human
aagagacaaugucuacuca

SEQ ID NO: 615512 - RNA, 21 nt, Human
aagcuuuuuaaggggccaaca

SEQ ID NO: 615513 - RNA, 24 nt, Human
aauggucuaauuauuaaguccauu

SEQ ID NO: 615514 - RNA, 24 nt, Human
acaaaacauucccaagcuuuuuaa

SEQ ID NO: 615515 - RNA, 26 nt, Human
agccacaagauauuaggaaacagaca

SEQ ID NO: 615516 - RNA, 22 nt, Human
agccuccagaaggaaccaacuc

SEQ ID NO: 615517 - RNA, 19 nt, Human
agggaaaggccgugugaac

SEQ ID NO: 615518 - RNA, 23 nt, Human
caaaacauucccaagcuuuuuaa

SEQ ID NO: 615519 - RNA, 24 nt, Human
cacuuuguuucucauaaguauaua

SEQ ID NO: 615520 - RNA, 20 nt, Human
cauacaaaacauucccaagc

SEQ ID NO: 615521 - RNA, 20 nt, Human
ccuccagaaggaaccaacuc

SEQ ID NO: 615522 - RNA, 23 nt, Human
cugucugcaauacuuggacaaga

SEQ ID NO: 615523 - RNA, 21 nt, Human
cuuggacaagauuuguccaga

SEQ ID NO: 615524 - RNA, 21 nt, Human
gaauacaaacuuacuuggaac

SEQ ID NO: 615525 - RNA, 23 nt, Human
gagaagacagagggaaaggccgu

SEQ ID NO: 615526 - RNA, 22 nt, Human
gcugucugcaauacuuggacaa

SEQ ID NO: 615527 - RNA, 20 nt, Human
ggaauuagugaaagagcuuc

SEQ ID NO: 615528 - RNA, 24 nt, Human
gguaaugaagagaagacagaggga

SEQ ID NO: 615529 - RNA, 20 nt, Human
uaaaaaaaacuaauguaauu

SEQ ID NO: 615530 - RNA, 22 nt, Human
uaagcaacuuuucaaucaagaa

SEQ ID NO: 615531 - RNA, 24 nt, Human
uagaaugucuguuuauggauucuu

SEQ ID NO: 615532 - RNA, 21 nt, Human
uagauuguaaacaauaaccaa

SEQ ID NO: 615533 - RNA, 23 nt, Human
uagcuuuauuuaaucccacauua

SEQ ID NO: 615534 - RNA, 18 nt, Human
uauaauaaaaaaaaucua

SEQ ID NO: 615535 - RNA, 23 nt, Human
uaucccacgaagagacaaugucu

SEQ ID NO: 615536 - RNA, 21 nt, Human
uauggaagcccugggaagcua

SEQ ID NO: 615537 - RNA, 23 nt, Human
ucuccagacacaaucacccuaga

SEQ ID NO: 615538 - RNA, 23 nt, Human
ucuuuguaaacauaauuaagggu

SEQ ID NO: 615539 - RNA, 20 nt, Human
ugaaaaguaucccacgaaga

SEQ ID NO: 615540 - RNA, 20 nt, Human
ugaaagagcuucaucauuuc

SEQ ID NO: 615541 - RNA, 18 nt, Human
ugaacacagaggcagaga

SEQ ID NO: 615542 - RNA, 22 nt, Human
ugaacacagaggcagagacugg

SEQ ID NO: 615543 - RNA, 23 nt, Human
ugaagagaagacagagggaaagg

SEQ ID NO: 615544 - RNA, 23 nt, Human
ugaagcauacccaguuuuaauaa

SEQ ID NO: 615545 - RNA, 20 nt, Human
ugcaauacuuggacaagauu

SEQ ID NO: 615546 - RNA, 19 nt, Human
uggaacaugggucuuugua

SEQ ID NO: 615547 - RNA, 18 nt, Human
ugggaagcuaauacaaua

SEQ ID NO: 615548 - RNA, 21 nt, Human
uguccagaagccaaagaacuc

SEQ ID NO: 615549 - RNA, 19 nt, Human
uguuuauggauucuuccuu

SEQ ID NO: 615550 - RNA, 21 nt, Human
uuagcuuuauuuaaucccaca

SEQ ID NO: 615551 - RNA, 21 nt, Human
uuauaaucaauacaauuuguc

SEQ ID NO: 615552 - RNA, 20 nt, Human
uucucaguucuuugccacuu

SEQ ID NO: 615553 - RNA, 23 nt, Human
uuggacaagauuuguccagaagc

SEQ ID NO: 615554 - RNA, 22 nt, Human
uuucacaguucgaaauaucacu

SEQ ID NO: 615555 - RNA, 24 nt, Human
aaaaaaaaaaagaauguaagagaa

SEQ ID NO: 615556 - RNA, 23 nt, Human
aaaaaaaaaagaauguaagagaa

SEQ ID NO: 615557 - RNA, 23 nt, Human
aaaaaaaacaggaggaggaugag

SEQ ID NO: 615558 - RNA, 21 nt, Human
aaaaaaaagaauguaagagaa

SEQ ID NO: 615559 - RNA, 21 nt, Human
aaaaaaaagaauguaagagaa

SEQ ID NO: 615560 - RNA, 22 nt, Human
aaaaaaaagaauguaagagaaa

SEQ ID NO: 615561 - RNA, 20 nt, Human
aaaacaggaggaggaugagc

SEQ ID NO: 615562 - RNA, 25 nt, Human
aaacaggaaaaaaaaaaaggggacc

SEQ ID NO: 615563 - RNA, 23 nt, Human
aaacaggaggaggaugagcagaa

SEQ ID NO: 615564 - RNA, 22 nt, Human
aagagccaccacuguggccacc

SEQ ID NO: 615565 - RNA, 22 nt, Human
aagaugaagcagauguccagaa

SEQ ID NO: 615566 - RNA, 19 nt, Human
aagcaaaucauaauaaugc

SEQ ID NO: 615567 - RNA, 18 nt, Human
acaagacuagccgcaaag

SEQ ID NO: 615568 - RNA, 19 nt, Human
acaguagaucccugauacu

SEQ ID NO: 615569 - RNA, 21 nt, Human
accccaucaaaaaaaaaauua

SEQ ID NO: 615570 - RNA, 22 nt, Human
accccaucaaaaaaaaaauuaa

SEQ ID NO: 615571 - RNA, 19 nt, Human
accuugggaguugcacauu

SEQ ID NO: 615572 - RNA, 21 nt, Human
agaagagauucuuuaccugaa

SEQ ID NO: 615573 - RNA, 23 nt, Human
agagaaaaaaaaaaacaggagga

SEQ ID NO: 615574 - RNA, 19 nt, Human
aggaagguagaaauuaaga

SEQ ID NO: 615575 - RNA, 19 nt, Human
auggaagacaugggaagaa

SEQ ID NO: 615576 - RNA, 22 nt, Human
augggaagaagcaaaucauaau

SEQ ID NO: 615577 - RNA, 24 nt, Human
auuuauaaauacaagauuuacaca

SEQ ID NO: 615578 - RNA, 23 nt, Human
caaauaucuacauauauuucaua

SEQ ID NO: 615579 - RNA, 21 nt, Human
caacgaggcugucuccguaac

SEQ ID NO: 615580 - RNA, 24 nt, Human
cagagauggcguaugcagaauccc

SEQ ID NO: 615581 - RNA, 18 nt, Human
cagcaccccaucaaaaaa

SEQ ID NO: 615582 - RNA, 21 nt, Human
cagcaccccaucaaaaaaaaa

SEQ ID NO: 615583 - RNA, 20 nt, Human
caugaagucaccaggggugu

SEQ ID NO: 615584 - RNA, 18 nt, Human
ccaccagcacaacgaggc

SEQ ID NO: 615585 - RNA, 18 nt, Human
ccagaagagccaccacug

SEQ ID NO: 615586 - RNA, 25 nt, Human
cccauccagcaccaugaagucacca

SEQ ID NO: 615587 - RNA, 20 nt, Human
ccuacaaucucuauguugcc

SEQ ID NO: 615588 - RNA, 20 nt, Human
cucaaaaaauagcaagacac

SEQ ID NO: 615589 - RNA, 19 nt, Human
cuguucugugccuucugcu

SEQ ID NO: 615590 - RNA, 24 nt, Human
gaagagccaccacuguggccacca

SEQ ID NO: 615591 - RNA, 20 nt, Human
gacaccagguccaggaaucu

SEQ ID NO: 615592 - RNA, 20 nt, Human
gagaagcaggacauggaaga

SEQ ID NO: 615593 - RNA, 20 nt, Human
gaggcugucuccguaacugg

SEQ ID NO: 615594 - RNA, 23 nt, Human
gcccuaguuaaugguccauuuac

SEQ ID NO: 615595 - RNA, 18 nt, Human
gggaguugcacauuauuu

SEQ ID NO: 615596 - RNA, 23 nt, Human
gugcagcaaaauacauauaaauc

SEQ ID NO: 615597 - RNA, 18 nt, Human
uaaaaggagacuagguuu

SEQ ID NO: 615598 - RNA, 24 nt, Human
uaaauguauucagucaguacacaa

SEQ ID NO: 615599 - RNA, 24 nt, Human
uaacagaaaacgugaccgagaaga

SEQ ID NO: 615600 - RNA, 23 nt, Human
uaacuggcagaaagauaugcucc

SEQ ID NO: 615601 - RNA, 22 nt, Human
uaaguuuguaaugaaaauuucu

SEQ ID NO: 615602 - RNA, 20 nt, Human
uacucagagcaguuaaggca

SEQ ID NO: 615603 - RNA, 21 nt, Human
uacucagagcaguuaaggcag

SEQ ID NO: 615604 - RNA, 19 nt, Human
uaggaagcuuaaccuaaaa

SEQ ID NO: 615605 - RNA, 23 nt, Human
uaggaagcuuaaccuaaaaacca

SEQ ID NO: 615606 - RNA, 24 nt, Human
uauguuaucucuguucauagcaga

SEQ ID NO: 615607 - RNA, 28 nt, Human
ucaaaaaauagcaagacacuuaucguga

SEQ ID NO: 615608 - RNA, 26 nt, Human
ucaccagggguguggcucccuccaug

SEQ ID NO: 615609 - RNA, 21 nt, Human
ucagagcaguuaaggcaggag

SEQ ID NO: 615610 - RNA, 20 nt, Human
ucaggcagagauucuggaac

SEQ ID NO: 615611 - RNA, 25 nt, Human
uccauaaaacaucucaaaaaauagc

SEQ ID NO: 615612 - RNA, 20 nt, Human
ugaagcagauguccagaaga

SEQ ID NO: 615613 - RNA, 26 nt, Human
ugaagcagauguccagaagagccacc

SEQ ID NO: 615614 - RNA, 20 nt, Human
ugaagucaccaggggugugg

SEQ ID NO: 615615 - RNA, 24 nt, Human
ugaauugaaaacaaaugcauacuc

SEQ ID NO: 615616 - RNA, 22 nt, Human
ugacaagacuagccgcaaaggu

SEQ ID NO: 615617 - RNA, 19 nt, Human
ugcugaaaagggcauggaa

SEQ ID NO: 615618 - RNA, 20 nt, Human
uggacccaaccaggacacca

SEQ ID NO: 615619 - RNA, 22 nt, Human
ugggaagaagcaaaucauaaua

SEQ ID NO: 615620 - RNA, 25 nt, Human
uuaaacagauugaaauaaagaugaa

SEQ ID NO: 615621 - RNA, 23 nt, Human
uuaaccuaaaaaccaauagcaua

SEQ ID NO: 615622 - RNA, 18 nt, Human
uuacacagcaccccauca

SEQ ID NO: 615623 - RNA, 25 nt, Human
uucaaaauauauuuucuuuuaaaug

SEQ ID NO: 615624 - RNA, 20 nt, Human
uucucaggcagagauucugg

SEQ ID NO: 615625 - RNA, 20 nt, Human
aaaccaacagagauggagag

SEQ ID NO: 615626 - RNA, 21 nt, Human
aaaguccccaugucuugggga

SEQ ID NO: 615627 - RNA, 19 nt, Human
acagagacagacaaaccaa

SEQ ID NO: 615628 - RNA, 24 nt, Human
acagagacagacaaaccaacagag

SEQ ID NO: 615629 - RNA, 21 nt, Human
acgagggggcaaggucgaggc

SEQ ID NO: 615630 - RNA, 22 nt, Human
agacagacaaaccaacagagag

SEQ ID NO: 615631 - RNA, 22 nt, Human
agccaaaugcccccuuccccua

SEQ ID NO: 615632 - RNA, 19 nt, Human
aggccacagccuagaccag

SEQ ID NO: 615633 - RNA, 22 nt, Human
aggccacagccuagaccagccc

SEQ ID NO: 615634 - RNA, 19 nt, Human
agggaccucaggcucagga

SEQ ID NO: 615635 - RNA, 19 nt, Human
aggggggauucgagggcag

SEQ ID NO: 615636 - RNA, 21 nt, Human
agucuauucuaguguuugggg

SEQ ID NO: 615637 - RNA, 20 nt, Human
auuucggcuauauccauuuu

SEQ ID NO: 615638 - RNA, 18 nt, Human
cacagccuagaccagccc

SEQ ID NO: 615639 - RNA, 21 nt, Human
caggagucucucccuagauuu

SEQ ID NO: 615640 - RNA, 22 nt, Human
cagggggcaucuacccuggucc

SEQ ID NO: 615641 - RNA, 25 nt, Human
caguguccaccaccucccacucaga

SEQ ID NO: 615642 - RNA, 21 nt, Human
caugugaugggggugugugca

SEQ ID NO: 615643 - RNA, 18 nt, Human
cauuccagggaccucagg

SEQ ID NO: 615644 - RNA, 21 nt, Human
cccaguguccaccaccuccca

SEQ ID NO: 615645 - RNA, 22 nt, Human
ccccaccucuccagucaggguc

SEQ ID NO: 615646 - RNA, 19 nt, Human
cccccuagccaaaugcccc

SEQ ID NO: 615647 - RNA, 20 nt, Human
ccuggucccucuuucagcac

SEQ ID NO: 615648 - RNA, 18 nt, Human
cgagggggcaaggucgag

SEQ ID NO: 615649 - RNA, 24 nt, Human
cuacccacacucauuccagggacc

SEQ ID NO: 615650 - RNA, 18 nt, Human
cucacugcaaagucccca

SEQ ID NO: 615651 - RNA, 22 nt, Human
cuuacggcuacccacacucauu

SEQ ID NO: 615652 - RNA, 18 nt, Human
gaaaaaggggaaaggcag

SEQ ID NO: 615653 - RNA, 21 nt, Human
gacagagacagacaaaccaac

SEQ ID NO: 615654 - RNA, 20 nt, Human
gagacagacaaaccaacaga

SEQ ID NO: 615655 - RNA, 19 nt, Human
gagggggcaaggucgaggc

SEQ ID NO: 615656 - RNA, 23 nt, Human
gauugggaggaagacagagacag

SEQ ID NO: 615657 - RNA, 21 nt, Human
gcagcgggggcagcgucacuu

SEQ ID NO: 615658 - RNA, 21 nt, Human
gcucacaggggcacccccuag

SEQ ID NO: 615659 - RNA, 24 nt, Human
ggaggcuggguggagggcagggcg

SEQ ID NO: 615660 - RNA, 23 nt, Human
ggauugggaggaagacagagaca

SEQ ID NO: 615661 - RNA, 20 nt, Human
ggcggggaagaucguuaggg

SEQ ID NO: 615662 - RNA, 22 nt, Human
gggcacccccuagccaaaugcc

SEQ ID NO: 615663 - RNA, 23 nt, Human
gggcggggaagaucguuaggguc

SEQ ID NO: 615664 - RNA, 20 nt, Human
ggggaggggggauucgaggg

SEQ ID NO: 615665 - RNA, 24 nt, Human
ggggaggggggauucgagggcagg

SEQ ID NO: 615666 - RNA, 22 nt, Human
ggucccucuuucagcacaggga

SEQ ID NO: 615667 - RNA, 20 nt, Human
gguccuggaaacacugggga

SEQ ID NO: 615668 - RNA, 22 nt, Human
gguuuauuggggguccuggaaa

SEQ ID NO: 615669 - RNA, 21 nt, Human
guccaccaccucccacucaga

SEQ ID NO: 615670 - RNA, 19 nt, Human
guggcccccaccucuccag

SEQ ID NO: 615671 - RNA, 23 nt, Human
uacccacacucauuccagggacc

SEQ ID NO: 615672 - RNA, 21 nt, Human
uacccuggucccucuuucagc

SEQ ID NO: 615673 - RNA, 18 nt, Human
uaccucccucugggcgcc

SEQ ID NO: 615674 - RNA, 18 nt, Human
uagauuugggcuccccug

SEQ ID NO: 615675 - RNA, 21 nt, Human
uccaccaccucccacucagau

SEQ ID NO: 615676 - RNA, 18 nt, Human
uccaggccgaguccagga

SEQ ID NO: 615677 - RNA, 21 nt, Human
uccccugccccagcuaaggac

SEQ ID NO: 615678 - RNA, 19 nt, Human
ucggcuauauccauuuucu

SEQ ID NO: 615679 - RNA, 23 nt, Human
ugcaaaguccccaugucuugggg

SEQ ID NO: 615680 - RNA, 23 nt, Human
uggaaacacuggggagagggacg

SEQ ID NO: 615681 - RNA, 18 nt, Human
uggggagagggacgaggg

SEQ ID NO: 615682 - RNA, 19 nt, Human
uggggagagggacgagggg

SEQ ID NO: 615683 - RNA, 22 nt, Human
uggggguccuggaaacacuggg

SEQ ID NO: 615684 - RNA, 20 nt, Human
ugggggugugugcacauaga

SEQ ID NO: 615685 - RNA, 25 nt, Human
uggggucaccagugacucugguggg

SEQ ID NO: 615686 - RNA, 24 nt, Human
uggguggagggcagggcgcacgca

SEQ ID NO: 615687 - RNA, 18 nt, Human
uggguggcauuuggaggg

SEQ ID NO: 615688 - RNA, 22 nt, Human
uggguuuuugguggcccccacc

SEQ ID NO: 615689 - RNA, 23 nt, Human
ugguggcccccaccucuccaguc

SEQ ID NO: 615690 - RNA, 19 nt, Human
uggugggggugggugccca

SEQ ID NO: 615691 - RNA, 24 nt, Human
uggugggggugggugcccaucuuu

SEQ ID NO: 615692 - RNA, 25 nt, Human
uuccccuagggauugggaggaagac

SEQ ID NO: 615693 - RNA, 20 nt, Human
uugguggcccccaccucucc

SEQ ID NO: 615694 - RNA, 18 nt, Human
uuucagggccugcgucug

SEQ ID NO: 615695 - RNA, 20 nt, Human
uuuucuggggucaccaguga

SEQ ID NO: 615696 - RNA, 23 nt, Human
aaaaaaaaaagcucuugcaaaaa

SEQ ID NO: 615697 - RNA, 22 nt, Human
aaaaaagcucuugcaaaaacca

SEQ ID NO: 615698 - RNA, 21 nt, Human
aaaaccacaaguaaacaacug

SEQ ID NO: 615699 - RNA, 21 nt, Human
aaaaccauccagucccuaagc

SEQ ID NO: 615700 - RNA, 21 nt, Human
aaaguccucugacuagagcca

SEQ ID NO: 615701 - RNA, 24 nt, Human
aacagaaaauuuguuuccccaaaa

SEQ ID NO: 615702 - RNA, 19 nt, Human
aaccacuaccuugacauag

SEQ ID NO: 615703 - RNA, 19 nt, Human
aagaagacaacacgucugc

SEQ ID NO: 615704 - RNA, 24 nt, Human
aaggugccucugcucaucugauuc

SEQ ID NO: 615705 - RNA, 20 nt, Human
aaguagccucuuaauagaaa

SEQ ID NO: 615706 - RNA, 20 nt, Human
acaacaccuuaauuguugac

SEQ ID NO: 615707 - RNA, 21 nt, Human
acugcagugaucuuucaguuc

SEQ ID NO: 615708 - RNA, 18 nt, Human
agaacaucuacauacuga

SEQ ID NO: 615709 - RNA, 18 nt, Human
agaagacaacacgucugc

SEQ ID NO: 615710 - RNA, 23 nt, Human
agacagcuugucagugaagaaga

SEQ ID NO: 615711 - RNA, 22 nt, Human
agacugaaaagccaacaggcau

SEQ ID NO: 615712 - RNA, 25 nt, Human
agagacuauuauuagggagugugcu

SEQ ID NO: 615713 - RNA, 19 nt, Human
agagagggaacagaggggg

SEQ ID NO: 615714 - RNA, 24 nt, Human
agcuggugacccgacaguuccugg

SEQ ID NO: 615715 - RNA, 21 nt, Human
agggagugugcuucacugaca

SEQ ID NO: 615716 - RNA, 20 nt, Human
agggcgagugggcaggaggg

SEQ ID NO: 615717 - RNA, 19 nt, Human
augaguuuuccucaaacca

SEQ ID NO: 615718 - RNA, 21 nt, Human
auucuaguuuugucacaaagg

SEQ ID NO: 615719 - RNA, 21 nt, Human
caacaacaccuuaauuguuga

SEQ ID NO: 615720 - RNA, 23 nt, Human
caagacaguccucauuuccaaau

SEQ ID NO: 615721 - RNA, 23 nt, Human
caauauuagcaguguauccuuuc

SEQ ID NO: 615722 - RNA, 20 nt, Human
cacagaaggcaagaaacugc

SEQ ID NO: 615723 - RNA, 23 nt, Human
cacagaaugaguuuuccucaaac

SEQ ID NO: 615724 - RNA, 19 nt, Human
cacgcuccacagcugguga

SEQ ID NO: 615725 - RNA, 22 nt, Human
cacgcuccacagcuggugaccc

SEQ ID NO: 615726 - RNA, 22 nt, Human
cacuaccaaguagccucuuaau

SEQ ID NO: 615727 - RNA, 25 nt, Human
cagcaaaaccacaaguaaacaacug

SEQ ID NO: 615728 - RNA, 22 nt, Human
cauggcaacacaucugucucuc

SEQ ID NO: 615729 - RNA, 25 nt, Human
cauuuuaucagcguucaacaacacc

SEQ ID NO: 615730 - RNA, 21 nt, Human
ccaauggcagguugucccccc

SEQ ID NO: 615731 - RNA, 21 nt, Human
ccacaaguaaacaacugccug

SEQ ID NO: 615732 - RNA, 21 nt, Human
cccacccccucgggccuuggc

SEQ ID NO: 615733 - RNA, 24 nt, Human
ccccccggcacgcuccacagcugg

SEQ ID NO: 615734 - RNA, 18 nt, Human
cccuaaauaaauacuacc

SEQ ID NO: 615735 - RNA, 19 nt, Human
ccgguggcgaguaccccuc

SEQ ID NO: 615736 - RNA, 19 nt, Human
ccuauauuuuggaaaaaaa

SEQ ID NO: 615737 - RNA, 20 nt, Human
ccucauuuccaaauucuagu

SEQ ID NO: 615738 - RNA, 19 nt, Human
cgcagccgguggcgaguac

SEQ ID NO: 615739 - RNA, 25 nt, Human
cgcccacccccucgggccuuggcuc

SEQ ID NO: 615740 - RNA, 18 nt, Human
cggccgccacgcccaccc

SEQ ID NO: 615741 - RNA, 20 nt, Human
cggccgccacgcccaccccc

SEQ ID NO: 615742 - RNA, 24 nt, Human
cuaaaggugccucugcucaucuga

SEQ ID NO: 615743 - RNA, 21 nt, Human
cucaggccaacucuaaggcac

SEQ ID NO: 615744 - RNA, 19 nt, Human
cucugcucaucugauucuc

SEQ ID NO: 615745 - RNA, 22 nt, Human
cuugcaaaaaccauccaguccc

SEQ ID NO: 615746 - RNA, 19 nt, Human
cuuuaaaaguugggagaug

SEQ ID NO: 615747 - RNA, 23 nt, Human
gaaggcaagaaacugccggcaca

SEQ ID NO: 615748 - RNA, 24 nt, Human
gaagugccugugucuacccuuuuc

SEQ ID NO: 615749 - RNA, 22 nt, Human
gagggcgagugggcaggagggc

SEQ ID NO: 615750 - RNA, 19 nt, Human
gcaaaaaccauccaguccc

SEQ ID NO: 615751 - RNA, 26 nt, Human
gcaaaaccacaaguaaacaacugccu

SEQ ID NO: 615752 - RNA, 19 nt, Human
gcggagggcgagugggcag

SEQ ID NO: 615753 - RNA, 23 nt, Human
gcggccgccacgcccacccccuc

SEQ ID NO: 615754 - RNA, 18 nt, Human
ggagggcgagugggcagg

SEQ ID NO: 615755 - RNA, 24 nt, Human
ggagggcgagugggcaggagggcu

SEQ ID NO: 615756 - RNA, 19 nt, Human
ggauggaagcuacgcggcg

SEQ ID NO: 615757 - RNA, 21 nt, Human
gguaguuuaaaaaaaaaaaaa

SEQ ID NO: 615758 - RNA, 18 nt, Human
ggugaaagaguuaacugc

SEQ ID NO: 615759 - RNA, 18 nt, Human
guagaguuucuaguugac

SEQ ID NO: 615760 - RNA, 22 nt, Human
guaguuuaaaaaaaaaaaaagc

SEQ ID NO: 615761 - RNA, 21 nt, Human
gucugaauuggaucugauugu

SEQ ID NO: 615762 - RNA, 19 nt, Human
gugcagacucugguggaau

SEQ ID NO: 615763 - RNA, 18 nt, Human
guucuggugaugaugguu

SEQ ID NO: 615764 - RNA, 23 nt, Human
uaaauacuaccacauuauuucuu

SEQ ID NO: 615765 - RNA, 25 nt, Human
uaacauggcaacacaucugucucuc

SEQ ID NO: 615766 - RNA, 20 nt, Human
uaccacauuauuucuucuaa

SEQ ID NO: 615767 - RNA, 24 nt, Human
uacuaccacauuauuucuucuaaa

SEQ ID NO: 615768 - RNA, 18 nt, Human
uacuagcuugagcuacua

SEQ ID NO: 615769 - RNA, 21 nt, Human
uacuauggauucaacacacag

SEQ ID NO: 615770 - RNA, 19 nt, Human
uagagccaucgugcuucuc

SEQ ID NO: 615771 - RNA, 22 nt, Human
uaucagcguucaacaacaccuu

SEQ ID NO: 615772 - RNA, 23 nt, Human
uauggauucaacacacagaauga

SEQ ID NO: 615773 - RNA, 21 nt, Human
ucagcguucaacaacaccuua

SEQ ID NO: 615774 - RNA, 21 nt, Human
ucagugcaagacugaaucaag

SEQ ID NO: 615775 - RNA, 23 nt, Human
ucccaaaauuucacaauacuugu

SEQ ID NO: 615776 - RNA, 21 nt, Human
ucccgcauuuuuaaaaggccc

SEQ ID NO: 615777 - RNA, 22 nt, Human
ucugaggugcagacucuggugg

SEQ ID NO: 615778 - RNA, 24 nt, Human
ucugauuguucuccuguuacacag

SEQ ID NO: 615779 - RNA, 22 nt, Human
ugaagaagacaacacgucugca

SEQ ID NO: 615780 - RNA, 18 nt, Human
ugacuaaguaacauggca

SEQ ID NO: 615781 - RNA, 22 nt, Human
ugacuaaguaacauggcaacac

SEQ ID NO: 615782 - RNA, 20 nt, Human
ugagaucauguaagcugcug

SEQ ID NO: 615783 - RNA, 27 nt, Human
ugccauguuuccuacuaaagucugagg

SEQ ID NO: 615784 - RNA, 18 nt, Human
uggaauagugacacagaa

SEQ ID NO: 615785 - RNA, 19 nt, Human
ugucccaaaauuucacaau

SEQ ID NO: 615786 - RNA, 21 nt, Human
ugugcugugugcauguguguu

SEQ ID NO: 615787 - RNA, 22 nt, Human
uucaaagccccuuugaaauugc

SEQ ID NO: 615788 - RNA, 19 nt, Human
uucacagaaggcaagaaac

SEQ ID NO: 615789 - RNA, 22 nt, Human
uucucagccacaccaaucuuuc

SEQ ID NO: 615790 - RNA, 22 nt, Human
uugaaauugcaauagugcagca

SEQ ID NO: 615791 - RNA, 19 nt, Human
uugcagccucuuccagaac

SEQ ID NO: 615792 - RNA, 26 nt, Human
uugcagccucuuccagaacaguuucc

SEQ ID NO: 615793 - RNA, 19 nt, Human
uuucacugauggaaugugg

SEQ ID NO: 615794 - RNA, 22 nt, Human
aaacaggcaacuggcacaagca

SEQ ID NO: 615795 - RNA, 18 nt, Human
aaaccaaggccaacagcu

SEQ ID NO: 615796 - RNA, 18 nt, Human
aacuggcacaagcagcaa

SEQ ID NO: 615797 - RNA, 19 nt, Human
aacugggugccuggcccag

SEQ ID NO: 615798 - RNA, 24 nt, Human
aagaaaacaagaaagaggaauuca

SEQ ID NO: 615799 - RNA, 24 nt, Human
aagaaagaggaauucaaggagaaa

SEQ ID NO: 615800 - RNA, 18 nt, Human
aagcagcaagcugaggca

SEQ ID NO: 615801 - RNA, 20 nt, Human
aaggauggaaggggagaaag

SEQ ID NO: 615802 - RNA, 20 nt, Human
aagugcuagaaucaaacacu

SEQ ID NO: 615803 - RNA, 20 nt, Human
acaaccaggaaagaaaacaa

SEQ ID NO: 615804 - RNA, 24 nt, Human
acacaccuccaggggccugcuggg

SEQ ID NO: 615805 - RNA, 23 nt, Human
agaaggagcaggucuggagggga

SEQ ID NO: 615806 - RNA, 19 nt, Human
agacaggccccagagccuc

SEQ ID NO: 615807 - RNA, 24 nt, Human
agagaagcgugacaggggccugag

SEQ ID NO: 615808 - RNA, 19 nt, Human
agagagguccccuggcccu

SEQ ID NO: 615809 - RNA, 20 nt, Human
agcagggagaaggagcaggu

SEQ ID NO: 615810 - RNA, 18 nt, Human
agcagguuggggugggga

SEQ ID NO: 615811 - RNA, 18 nt, Human
agcaucaugcccgaauag

SEQ ID NO: 615812 - RNA, 23 nt, Human
aggaaagaaaacaagaaagagga

SEQ ID NO: 615813 - RNA, 22 nt, Human
aggcccagcagcacaacagcuc

SEQ ID NO: 615814 - RNA, 18 nt, Human
agggagaaggagcagguc

SEQ ID NO: 615815 - RNA, 21 nt, Human
aggggagggaggggccacgcu

SEQ ID NO: 615816 - RNA, 21 nt, Human
aggggccugagccaguggggg

SEQ ID NO: 615817 - RNA, 19 nt, Human
auggggagccagagaccua

SEQ ID NO: 615818 - RNA, 25 nt, Human
auucaaggagaaauaccauggugag

SEQ ID NO: 615819 - RNA, 25 nt, Human
caaagagagguccccuggcccugcc

SEQ ID NO: 615820 - RNA, 27 nt, Human
caaagcgagugggaccacccacauacc

SEQ ID NO: 615821 - RNA, 22 nt, Human
caaagggaggcccagcagcaca

SEQ ID NO: 615822 - RNA, 23 nt, Human
caaagggaggcccagcagcacaa

SEQ ID NO: 615823 - RNA, 20 nt, Human
caaccagggacucaggccca

SEQ ID NO: 615824 - RNA, 19 nt, Human
caaggccaacagcuccugc

SEQ ID NO: 615825 - RNA, 21 nt, Human
cacccgcuuucccuacagccc

SEQ ID NO: 615826 - RNA, 25 nt, Human
cacgcugccccucugggcuugcuca

SEQ ID NO: 615827 - RNA, 27 nt, Human
cagcacaacagcucacccgcuuucccu

SEQ ID NO: 615828 - RNA, 18 nt, Human
cagcuaaggcucuggggu

SEQ ID NO: 615829 - RNA, 22 nt, Human
cagcugagauagggugcucacg

SEQ ID NO: 615830 - RNA, 22 nt, Human
caggcccagggacugacaacag

SEQ ID NO: 615831 - RNA, 21 nt, Human
ccaaagcgagugggaccaccc

SEQ ID NO: 615832 - RNA, 21 nt, Human
ccaggucagaaacgugggcac

SEQ ID NO: 615833 - RNA, 21 nt, Human
ccauuccuguccaaccaggga

SEQ ID NO: 615834 - RNA, 23 nt, Human
ccauuccuguccaaccagggacu

SEQ ID NO: 615835 - RNA, 23 nt, Human
cccacacagggccggugagggaa

SEQ ID NO: 615836 - RNA, 21 nt, Human
ccucuacaaagcaucaugccc

SEQ ID NO: 615837 - RNA, 26 nt, Human
ccugccagggguaugacagcagcaac

SEQ ID NO: 615838 - RNA, 18 nt, Human
cggggcaggaaaagggga

SEQ ID NO: 615839 - RNA, 22 nt, Human
cuacccucuacaaagcaucaug

SEQ ID NO: 615840 - RNA, 24 nt, Human
cucaagggaaagauggagagccua

SEQ ID NO: 615841 - RNA, 22 nt, Human
cucuuccucccuggaaaaguca

SEQ ID NO: 615842 - RNA, 18 nt, Human
cugugcaaaccaaggcca

SEQ ID NO: 615843 - RNA, 21 nt, Human
cuguggugccugagcagguug

SEQ ID NO: 615844 - RNA, 21 nt, Human
cuuccucccuggaaaagucac

SEQ ID NO: 615845 - RNA, 22 nt, Human
cuuccucccuggaaaagucacu

SEQ ID NO: 615846 - RNA, 21 nt, Human
gaaaggacagagaugaccaaa

SEQ ID NO: 615847 - RNA, 19 nt, Human
gacaacaguggcagcacca

SEQ ID NO: 615848 - RNA, 23 nt, Human
gacaggccccagagccucagccc

SEQ ID NO: 615849 - RNA, 20 nt, Human
gagauagagggcuugguggg

SEQ ID NO: 615850 - RNA, 18 nt, Human
gagggaaagggggaccca

SEQ ID NO: 615851 - RNA, 24 nt, Human
gcagcagccagugaaaagggcgcc

SEQ ID NO: 615852 - RNA, 21 nt, Human
gcucacccgcuuucccuacag

SEQ ID NO: 615853 - RNA, 23 nt, Human
ggacggggcaggaaaaggggagg

SEQ ID NO: 615854 - RNA, 24 nt, Human
ggacucaggcccagggacugacag

SEQ ID NO: 615855 - RNA, 23 nt, Human
ggagaaggagcaggucuggaggg

SEQ ID NO: 615856 - RNA, 21 nt, Human
ggagggaggggccacgcugcc

SEQ ID NO: 615857 - RNA, 21 nt, Human
ggcaggaaaaggggagggagg

SEQ ID NO: 615858 - RNA, 20 nt, Human
gggagggggccagggguuga

SEQ ID NO: 615859 - RNA, 22 nt, Human
gggcacagagaagcgugacagg

SEQ ID NO: 615860 - RNA, 21 nt, Human
ggggagggggccagggguuga

SEQ ID NO: 615861 - RNA, 23 nt, Human
ggggcaggaaaaggggagggagg

SEQ ID NO: 615862 - RNA, 18 nt, Human
gggguggggagccagcuc

SEQ ID NO: 615863 - RNA, 19 nt, Human
gguggcacugguaaagaaa

SEQ ID NO: 615864 - RNA, 18 nt, Human
gucuuccuggggcagcag

SEQ ID NO: 615865 - RNA, 22 nt, Human
gugccugagcagguuggggugg

SEQ ID NO: 615866 - RNA, 22 nt, Human
uaaacaugcaacaggcacccac

SEQ ID NO: 615867 - RNA, 26 nt, Human
uaaacgaagccucugggaagucagga

SEQ ID NO: 615868 - RNA, 18 nt, Human
uacggggagggggccagg

SEQ ID NO: 615869 - RNA, 18 nt, Human
uagaaggagauagagggc

SEQ ID NO: 615870 - RNA, 19 nt, Human
uagcagcugagauagggug

SEQ ID NO: 615871 - RNA, 18 nt, Human
ucccuacagcccuacccg

SEQ ID NO: 615872 - RNA, 22 nt, Human
ucuguggugccugagcagguug

SEQ ID NO: 615873 - RNA, 24 nt, Human
ucuguggugccugagcagguuggg

SEQ ID NO: 615874 - RNA, 22 nt, Human
ugacaacaguggcagcaccagg

SEQ ID NO: 615875 - RNA, 25 nt, Human
ugacaacaguggcagcaccagguca

SEQ ID NO: 615876 - RNA, 21 nt, Human
ugagcagggagaaggagcagg

SEQ ID NO: 615877 - RNA, 20 nt, Human
uggaaggggagaaaggagug

SEQ ID NO: 615878 - RNA, 18 nt, Human
uggcacaagcagcaagcu

SEQ ID NO: 615879 - RNA, 19 nt, Human
ugggaccacccacauacca

SEQ ID NO: 615880 - RNA, 18 nt, Human
uggggcagcagccaguga

SEQ ID NO: 615881 - RNA, 21 nt, Human
uggugaguaggggagggggcu

SEQ ID NO: 615882 - RNA, 19 nt, Human
uguggguccagguaugggg

SEQ ID NO: 615883 - RNA, 20 nt, Human
uuccucccuggaaaagucac

SEQ ID NO: 615884 - RNA, 18 nt, Human
aaagacugaaaaaaauuu

SEQ ID NO: 615885 - RNA, 19 nt, Human
aaagauggugagucaaaca

SEQ ID NO: 615886 - RNA, 21 nt, Human
aacugagcugcuaaaaccaaa

SEQ ID NO: 615887 - RNA, 20 nt, Human
aagagucaguggcucagaga

SEQ ID NO: 615888 - RNA, 23 nt, Human
aagaucgugccacugcacuccag

SEQ ID NO: 615889 - RNA, 22 nt, Human
aaucucauuucuuugaaugugg

SEQ ID NO: 615890 - RNA, 23 nt, Human
aaugaaaaaaagacucaaaaucu

SEQ ID NO: 615891 - RNA, 18 nt, Human
aauugcuugagccuggga

SEQ ID NO: 615892 - RNA, 24 nt, Human
aauugcuugagccugggaggcaga

SEQ ID NO: 615893 - RNA, 20 nt, Human
acaaaacgggaugcacaucu

SEQ ID NO: 615894 - RNA, 24 nt, Human
acaccaaaaguacuuaaaagaagc

SEQ ID NO: 615895 - RNA, 22 nt, Human
accauacugcagauaacaaaaa

SEQ ID NO: 615896 - RNA, 24 nt, Human
acugcacuccagucugcguugaca

SEQ ID NO: 615897 - RNA, 25 nt, Human
acugcacuccagucugcguugacag

SEQ ID NO: 615898 - RNA, 20 nt, Human
agaaguuguagugagcuaag

SEQ ID NO: 615899 - RNA, 24 nt, Human
aggcagaaguuguagugagcuaag

SEQ ID NO: 615900 - RNA, 22 nt, Human
aggcaggagaauugcuugagcc

SEQ ID NO: 615901 - RNA, 24 nt, Human
aggcaggagaauugcuugagccug

SEQ ID NO: 615902 - RNA, 21 nt, Human
aggcugaggcaggagaauugc

SEQ ID NO: 615903 - RNA, 24 nt, Human
aggcugaggcaggagaauugcuug

SEQ ID NO: 615904 - RNA, 24 nt, Human
aguggcucgcaccuauaaucccag

SEQ ID NO: 615905 - RNA, 24 nt, Human
aucgugccacugcacuccagucug

SEQ ID NO: 615906 - RNA, 20 nt, Human
auggugcuuuuaaugaagua

SEQ ID NO: 615907 - RNA, 28 nt, Human
caacauacaccaaaaguacuuaaaagaa

SEQ ID NO: 615908 - RNA, 20 nt, Human
cacacucuuaacuaaaaccc

SEQ ID NO: 615909 - RNA, 18 nt, Human
caccuauaaucccagcua

SEQ ID NO: 615910 - RNA, 24 nt, Human
caccuauaaucccagcuacucagg

SEQ ID NO: 615911 - RNA, 18 nt, Human
cacugcacuccagucugc

SEQ ID NO: 615912 - RNA, 20 nt, Human
cacugcacuccagucugcgu

SEQ ID NO: 615913 - RNA, 25 nt, Human
cacugcacuccagucugcguugaca

SEQ ID NO: 615914 - RNA, 25 nt, Human
cacugcacuccagucugcguugaca

SEQ ID NO: 615915 - RNA, 19 nt, Human
cagaaguuguagugagcua

SEQ ID NO: 615916 - RNA, 24 nt, Human
cagcuacucaggaggcugaggcag

SEQ ID NO: 615917 - RNA, 18 nt, Human
cagcuguuuccagguuua

SEQ ID NO: 615918 - RNA, 18 nt, Human
ccaaauuaaaacuaccag

SEQ ID NO: 615919 - RNA, 18 nt, Human
ccacugcacuccagucug

SEQ ID NO: 615920 - RNA, 18 nt, Human
ccacugcacuccagucug

SEQ ID NO: 615921 - RNA, 19 nt, Human
ccacugcacuccagucugc

SEQ ID NO: 615922 - RNA, 26 nt, Human
ccacugcacuccagucugcguugacc

SEQ ID NO: 615923 - RNA, 20 nt, Human
cccaaauuaaaacuaccagc

SEQ ID NO: 615924 - RNA, 21 nt, Human
ccuauaaucccagcuacucag

SEQ ID NO: 615925 - RNA, 19 nt, Human
ccucucuaaaaaaaaaaaa

SEQ ID NO: 615926 - RNA, 21 nt, Human
gacagaauuuacaaauacaga

SEQ ID NO: 615927 - RNA, 19 nt, Human
gacauccucaguaacuuuu

SEQ ID NO: 615928 - RNA, 23 nt, Human
gagaauugcuugagccugggagg

SEQ ID NO: 615929 - RNA, 21 nt, Human
gagucaaacaaaacauacaaa

SEQ ID NO: 615930 - RNA, 20 nt, Human
gcuaagaucgugccacugca

SEQ ID NO: 615931 - RNA, 19 nt, Human
gcuugagccugggaggcag

SEQ ID NO: 615932 - RNA, 27 nt, Human
ggaaacauuaaaaaaaaaaaaaaaaaa

SEQ ID NO: 615933 - RNA, 24 nt, Human
gggcgcaguggcucgcaccuauaa

SEQ ID NO: 615934 - RNA, 18 nt, Human
gguuacaaugaaaaaaag

SEQ ID NO: 615935 - RNA, 18 nt, Human
gguugcaguuuuguaguc

SEQ ID NO: 615936 - RNA, 18 nt, Human
uaaaaagagaacuuuaaa

SEQ ID NO: 615937 - RNA, 20 nt, Human
uaaaauaacugaggcugggc

SEQ ID NO: 615938 - RNA, 24 nt, Human
uaggauaucacugugaucuuaaaa

SEQ ID NO: 615939 - RNA, 21 nt, Human
uagugagucugcauaugugua

SEQ ID NO: 615940 - RNA, 19 nt, Human
uauaaucccagcuacucag

SEQ ID NO: 615941 - RNA, 18 nt, Human
uauggaauaguaaaacug

SEQ ID NO: 615942 - RNA, 23 nt, Human
ucaagaaaauauaugcaauugcc

SEQ ID NO: 615943 - RNA, 21 nt, Human
ucaauaaaaauccgaaggguu

SEQ ID NO: 615944 - RNA, 23 nt, Human
ucaauacuuucaaaccuccuuua

SEQ ID NO: 615945 - RNA, 24 nt, Human
ucacacucuuaacuaaaacccaaa

SEQ ID NO: 615946 - RNA, 20 nt, Human
ucagaagagucaguggcuca

SEQ ID NO: 615947 - RNA, 20 nt, Human
uccagguuuacauaagauga

SEQ ID NO: 615948 - RNA, 23 nt, Human
ucgugccacugcacuccagucug

SEQ ID NO: 615949 - RNA, 18 nt, Human
ucucuaaaaaaaaaaaag

SEQ ID NO: 615950 - RNA, 24 nt, Human
ucucuaaaaaaaaaaaagacugaa

SEQ ID NO: 615951 - RNA, 26 nt, Human
ucucuaaaaaaaaaaaagacugaaaa

SEQ ID NO: 615952 - RNA, 24 nt, Human
ugaaaaaaagacucaaaaucuauu

SEQ ID NO: 615953 - RNA, 18 nt, Human
ugaaagacagaauuuaca

SEQ ID NO: 615954 - RNA, 19 nt, Human
ugaaauuucugaaaagcga

SEQ ID NO: 615955 - RNA, 30 nt, Human
ugacagagacccucucuaaaaaaaaaaaaa

SEQ ID NO: 615956 - RNA, 24 nt, Human
ugagccugggaggcagaaguugua

SEQ ID NO: 615957 - RNA, 22 nt, Human
ugagcuaagaucgugccacugc

SEQ ID NO: 615958 - RNA, 24 nt, Human
ugaggcaggagaauugcuugagcc

SEQ ID NO: 615959 - RNA, 25 nt, Human
ugaggcaggagaauugcuugagccu

SEQ ID NO: 615960 - RNA, 23 nt, Human
ugagggaaugacaaaacgggaag

SEQ ID NO: 615961 - RNA, 24 nt, Human
ugccacugcacuccagucugcguu

SEQ ID NO: 615962 - RNA, 23 nt, Human
ugcuaaaaccaaaguaguaaaca

SEQ ID NO: 615963 - RNA, 25 nt, Human
uggccggaaaacgcaggcucgcgcc

SEQ ID NO: 615964 - RNA, 22 nt, Human
uggcucagagauguuuaguuuc

SEQ ID NO: 615965 - RNA, 22 nt, Human
uggcucgcaccuauaaucccag

SEQ ID NO: 615966 - RNA, 24 nt, Human
ugggaggcagaaguuguagugagc

SEQ ID NO: 615967 - RNA, 25 nt, Human
uggggaaacauuaaaaaaaaaaaaa

SEQ ID NO: 615968 - RNA, 18 nt, Human
ugguaacuucucacccuc

SEQ ID NO: 615969 - RNA, 22 nt, Human
ugguacaagaaucagguagaug

SEQ ID NO: 615970 - RNA, 21 nt, Human
uguaacauacacccaugugua

SEQ ID NO: 615971 - RNA, 24 nt, Human
uguuaaaucuaaagagucuguaac

SEQ ID NO: 615972 - RNA, 20 nt, Human
uuaaaaaaaaaaaaaaaaaa

SEQ ID NO: 615973 - RNA, 20 nt, Human
uugaaagacagaauuuacaa

SEQ ID NO: 615974 - RNA, 24 nt, Human
uugagccugggaggcagaaguugu

SEQ ID NO: 615975 - RNA, 18 nt, Human
uugcuugagccugggagg

SEQ ID NO: 615976 - RNA, 25 nt, Human
uugcuugagccugggaggcagaagu

SEQ ID NO: 615977 - RNA, 21 nt, Human
uuguagugagcuaagaucgug

SEQ ID NO: 615978 - RNA, 22 nt, Human
uuuaaaaaauuugaagauagga

SEQ ID NO: 615979 - RNA, 25 nt, Human
uuuaaaauauacauaaacuuaauac

SEQ ID NO: 615980 - RNA, 18 nt, Human
uuucagaagagucagugg

SEQ ID NO: 615981 - RNA, 21 nt, Human
uuuucuguuaaaucuaaagag

SEQ ID NO: 615982 - RNA, 23 nt, Human
acaagccucaucccagcccugcc

SEQ ID NO: 615983 - RNA, 20 nt, Human
acagagagcaggugggcaca

SEQ ID NO: 615984 - RNA, 26 nt, Human
accagggaaacgggguggggguuggc

SEQ ID NO: 615985 - RNA, 21 nt, Human
acccuggagucccugggaaau

SEQ ID NO: 615986 - RNA, 19 nt, Human
agacagccaccucagggaa

SEQ ID NO: 615987 - RNA, 21 nt, Human
agaccugaccucagagagacc

SEQ ID NO: 615988 - RNA, 19 nt, Human
agaggacugcagaccccag

SEQ ID NO: 615989 - RNA, 20 nt, Human
agcaccggagucacgguggg

SEQ ID NO: 615990 - RNA, 22 nt, Human
agcagcuccccauccugaccuc

SEQ ID NO: 615991 - RNA, 19 nt, Human
agcccugcccuuguggcug

SEQ ID NO: 615992 - RNA, 22 nt, Human
agcguguccagcagcuccugcu

SEQ ID NO: 615993 - RNA, 22 nt, Human
agcugggugggggauggguugg

SEQ ID NO: 615994 - RNA, 21 nt, Human
aggaagagcacggcaccggug

SEQ ID NO: 615995 - RNA, 18 nt, Human
aggagaggcugcuaggca

SEQ ID NO: 615996 - RNA, 24 nt, Human
aggagaggcugcuaggcagcuccc

SEQ ID NO: 615997 - RNA, 19 nt, Human
aggaggccuuggaaaagcc

SEQ ID NO: 615998 - RNA, 22 nt, Human
aggcaggaguuggggucgucaa

SEQ ID NO: 615999 - RNA, 22 nt, Human
aggccccagcccagaaaaccaa

SEQ ID NO: 616000 - RNA, 24 nt, Human
aggccccagcccagaaaaccaaga

SEQ ID NO: 616001 - RNA, 19 nt, Human
agggccccacccaccuucc

SEQ ID NO: 616002 - RNA, 19 nt, Human
agggcgcuguuggcgcugg

SEQ ID NO: 616003 - RNA, 23 nt, Human
agugggaggggaagggagaacgg

SEQ ID NO: 616004 - RNA, 18 nt, Human
auccugaccucagggccu

SEQ ID NO: 616005 - RNA, 20 nt, Human
caagccucaucccagcccug

SEQ ID NO: 616006 - RNA, 23 nt, Human
cagcagaggcaagagaucaguga

SEQ ID NO: 616007 - RNA, 18 nt, Human
cagcagccggggcagcug

SEQ ID NO: 616008 - RNA, 18 nt, Human
cagcagcuccccauccug

SEQ ID NO: 616009 - RNA, 19 nt, Human
cagccaggcugaggcccuu

SEQ ID NO: 616010 - RNA, 22 nt, Human
cagcccagaaaaccaagagcuu

SEQ ID NO: 616011 - RNA, 21 nt, Human
cagcccuuucggaggcccccc

SEQ ID NO: 616012 - RNA, 20 nt, Human
cagcucugaggcucgggcca

SEQ ID NO: 616013 - RNA, 19 nt, Human
cagugagcugccaaaugga

SEQ ID NO: 616014 - RNA, 24 nt, Human
ccaccaacccccaguggugccaag

SEQ ID NO: 616015 - RNA, 19 nt, Human
cccacagccaggcugaggc

SEQ ID NO: 616016 - RNA, 20 nt, Human
cccacggugcagggccccac

SEQ ID NO: 616017 - RNA, 23 nt, Human
cccagcccugccuaggccccagc

SEQ ID NO: 616018 - RNA, 21 nt, Human
ccccaaaggcagcagcucccc

SEQ ID NO: 616019 - RNA, 20 nt, Human
ccccacacccccuaggcacc

SEQ ID NO: 616020 - RNA, 22 nt, Human
ccccacacccccuaggcaccug

SEQ ID NO: 616021 - RNA, 22 nt, Human
ccccacggugcagggccccacc

SEQ ID NO: 616022 - RNA, 18 nt, Human
ccccagcccagaaaacca

SEQ ID NO: 616023 - RNA, 22 nt, Human
ccccaguggugccaagucaaau

SEQ ID NO: 616024 - RNA, 24 nt, Human
cccccaaggcccuccugggaggcc

SEQ ID NO: 616025 - RNA, 23 nt, Human
ccccuaggcaccugccaucgguu

SEQ ID NO: 616026 - RNA, 26 nt, Human
cccggcuccagcccugcccuuguggc

SEQ ID NO: 616027 - RNA, 20 nt, Human
cccugccuaggccccagccc

SEQ ID NO: 616028 - RNA, 19 nt, Human
cccuugggggagagguggg

SEQ ID NO: 616029 - RNA, 20 nt, Human
cccuugggggagaggugggu

SEQ ID NO: 616030 - RNA, 19 nt, Human
ccuaggccccagcccagaa

SEQ ID NO: 616031 - RNA, 23 nt, Human
ccugccaucgguuguccuuugga

SEQ ID NO: 616032 - RNA, 22 nt, Human
ccuuuggaggaagccaccuccc

SEQ ID NO: 616033 - RNA, 19 nt, Human
cgaggagaggcugcuaggc

SEQ ID NO: 616034 - RNA, 22 nt, Human
cgaggccugggcgcucuccagg

SEQ ID NO: 616035 - RNA, 21 nt, Human
cgguuguccuuuggaggaagc

SEQ ID NO: 616036 - RNA, 23 nt, Human
cucagaccugaccucagagagac

SEQ ID NO: 616037 - RNA, 24 nt, Human
cuccaggggugcugucugcccccu

SEQ ID NO: 616038 - RNA, 21 nt, Human
cuccccuccugcccgaggaga

SEQ ID NO: 616039 - RNA, 21 nt, Human
cugacuccagcccuuucggag

SEQ ID NO: 616040 - RNA, 21 nt, Human
cugcaugugugcacacaagga

SEQ ID NO: 616041 - RNA, 20 nt, Human
cugcccccugcucucugucc

SEQ ID NO: 616042 - RNA, 21 nt, Human
cugcccccugcucucuguccc

SEQ ID NO: 616043 - RNA, 20 nt, Human
cuggccuggguccagguggg

SEQ ID NO: 616044 - RNA, 18 nt, Human
cugggaggccucaggacc

SEQ ID NO: 616045 - RNA, 19 nt, Human
cugggaggccucaggaccc

SEQ ID NO: 616046 - RNA, 21 nt, Human
cuguccgcccuuuccacagug

SEQ ID NO: 616047 - RNA, 22 nt, Human
gaagccaccuccccuccugccc

SEQ ID NO: 616048 - RNA, 23 nt, Human
gagcugccaaauggagggggugg

SEQ ID NO: 616049 - RNA, 19 nt, Human
gagcugggugggggauggg

SEQ ID NO: 616050 - RNA, 19 nt, Human
gagcugggugggggauggg

SEQ ID NO: 616051 - RNA, 20 nt, Human
gcagccggggcagcuggucg

SEQ ID NO: 616052 - RNA, 22 nt, Human
gcagccggggcagcuggucggc

SEQ ID NO: 616053 - RNA, 19 nt, Human
gcccugccuaggccccagc

SEQ ID NO: 616054 - RNA, 24 nt, Human
gcuccagcccugcccuuguggcug

SEQ ID NO: 616055 - RNA, 19 nt, Human
gcugcuaggcagcucccca

SEQ ID NO: 616056 - RNA, 24 nt, Human
ggacggccgggagcuggguggggg

SEQ ID NO: 616057 - RNA, 20 nt, Human
ggagcugggugggggauggg

SEQ ID NO: 616058 - RNA, 20 nt, Human
ggcaaacagcaccggaguca

SEQ ID NO: 616059 - RNA, 19 nt, Human
ggccaggggacggcaaaca

SEQ ID NO: 616060 - RNA, 24 nt, Human
ggccgggcagggcagagggugccu

SEQ ID NO: 616061 - RNA, 21 nt, Human
ggcgcgugggcgugguucagg

SEQ ID NO: 616062 - RNA, 23 nt, Human
ggcugaggcccuugggggagagg

SEQ ID NO: 616063 - RNA, 20 nt, Human
ggcugggccuggugcucugu

SEQ ID NO: 616064 - RNA, 20 nt, Human
gggaaacgggguggggguug

SEQ ID NO: 616065 - RNA, 18 nt, Human
gggacggcaaacagcacc

SEQ ID NO: 616066 - RNA, 23 nt, Human
gggcagacuccaccauccuggcc

SEQ ID NO: 616067 - RNA, 20 nt, Human
gggcagagggugccuggggc

SEQ ID NO: 616068 - RNA, 23 nt, Human
gggcagcuggucggccagcgugu

SEQ ID NO: 616069 - RNA, 21 nt, Human
ggggguggggacggcgagaag

SEQ ID NO: 616070 - RNA, 20 nt, Human
gggguggggguuggcauugg

SEQ ID NO: 616071 - RNA, 21 nt, Human
ggucaaugaggaugcugaggu

SEQ ID NO: 616072 - RNA, 19 nt, Human
gguggggguuguacaagcc

SEQ ID NO: 616073 - RNA, 22 nt, Human
gguggguggccuccagggaacu

SEQ ID NO: 616074 - RNA, 19 nt, Human
gguggucccugucccuuga

SEQ ID NO: 616075 - RNA, 23 nt, Human
gucagggauggcccggccccucc

SEQ ID NO: 616076 - RNA, 19 nt, Human
gugcugucugcccccugcu

SEQ ID NO: 616077 - RNA, 20 nt, Human
gugcugucugcccccugcuc

SEQ ID NO: 616078 - RNA, 25 nt, Human
guggcugcugguccugggagccugc

SEQ ID NO: 616079 - RNA, 21 nt, Human
guggguggccuccagggaacu

SEQ ID NO: 616080 - RNA, 20 nt, Human
uagcgcaguccagccccacg

SEQ ID NO: 616081 - RNA, 24 nt, Human
uaggcaccugccaucgguuguccu

SEQ ID NO: 616082 - RNA, 26 nt, Human
uaggccccagcccagaaaaccaagag

SEQ ID NO: 616083 - RNA, 23 nt, Human
ucacacggccucucccaccaacc

SEQ ID NO: 616084 - RNA, 19 nt, Human
ucagcgccugcagcaccga

SEQ ID NO: 616085 - RNA, 24 nt, Human
ucaggacccuggagucccugggaa

SEQ ID NO: 616086 - RNA, 22 nt, Human
ucagugagcugccaaauggagg

SEQ ID NO: 616087 - RNA, 22 nt, Human
uccaccauccuggccaggggac

SEQ ID NO: 616088 - RNA, 19 nt, Human
uccagguggugccuggucu

SEQ ID NO: 616089 - RNA, 18 nt, Human
ucccagcccugccuaggc

SEQ ID NO: 616090 - RNA, 21 nt, Human
uccccccgaccccauuugccc

SEQ ID NO: 616091 - RNA, 23 nt, Human
ucccugggaaauugguggugggg

SEQ ID NO: 616092 - RNA, 21 nt, Human
ucgccgggccgggccuggccu

SEQ ID NO: 616093 - RNA, 23 nt, Human
ucggaggccccccaucaggaggc

SEQ ID NO: 616094 - RNA, 18 nt, Human
ucgggccagcagccgggg

SEQ ID NO: 616095 - RNA, 23 nt, Human
ucggggcagcgcgggucaaugag

SEQ ID NO: 616096 - RNA, 24 nt, Human
ucucugggcaccagggaaacgggg

SEQ ID NO: 616097 - RNA, 18 nt, Human
ucugaggcucgggccagc

SEQ ID NO: 616098 - RNA, 23 nt, Human
ucugaggcucgggccagcagccg

SEQ ID NO: 616099 - RNA, 18 nt, Human
ucugcuaggaggacucca

SEQ ID NO: 616100 - RNA, 21 nt, Human
ugacagcgugcuggguguugg

SEQ ID NO: 616101 - RNA, 21 nt, Human
ugaccagggcgcuguuggcgc

SEQ ID NO: 616102 - RNA, 22 nt, Human
ugaccagggcgcuguuggcgcu

SEQ ID NO: 616103 - RNA, 20 nt, Human
ugagcagacagcugaggacc

SEQ ID NO: 616104 - RNA, 20 nt, Human
ugaggcccuugggggagagg

SEQ ID NO: 616105 - RNA, 21 nt, Human
ugagguggucccugucccuug

SEQ ID NO: 616106 - RNA, 20 nt, Human
ugcagcaccgaggccugggc

SEQ ID NO: 616107 - RNA, 19 nt, Human
ugccccaguccccccgagg

SEQ ID NO: 616108 - RNA, 18 nt, Human
ugcccgaggagaggcugc

SEQ ID NO: 616109 - RNA, 22 nt, Human
ugcccgaggagaggcugcuagg

SEQ ID NO: 616110 - RNA, 21 nt, Human
ugccggggcacagggugggug

SEQ ID NO: 616111 - RNA, 23 nt, Human
ugcugucugcccccugcucucuu

SEQ ID NO: 616112 - RNA, 23 nt, Human
uggaggauacuggccucagaccu

SEQ ID NO: 616113 - RNA, 20 nt, Human
uggcagccccagcugcccca

SEQ ID NO: 616114 - RNA, 21 nt, Human
uggcagccccagugcugacga

SEQ ID NO: 616115 - RNA, 20 nt, Human
uggccgggcagggcagaggg

SEQ ID NO: 616116 - RNA, 19 nt, Human
uggcugcugguccugggag

SEQ ID NO: 616117 - RNA, 25 nt, Human
ugggagggcuggaggauacuggccu

SEQ ID NO: 616118 - RNA, 18 nt, Human
uggggacggcgagaaggc

SEQ ID NO: 616119 - RNA, 19 nt, Human
uggggacggcgagaaggcg

SEQ ID NO: 616120 - RNA, 21 nt, Human
uggggccacccagcccacagc

SEQ ID NO: 616121 - RNA, 19 nt, Human
uggggguuggcauugggag

SEQ ID NO: 616122 - RNA, 22 nt, Human
uggggguuguacaagccucauc

SEQ ID NO: 616123 - RNA, 23 nt, Human
uggguccccaaaggcagcagcuc

SEQ ID NO: 616124 - RNA, 22 nt, Human
uggguggccuccagggaacugg

SEQ ID NO: 616125 - RNA, 18 nt, Human
ugggugggggauggguug

SEQ ID NO: 616126 - RNA, 23 nt, Human
uggucccugucccuugaccacuc

SEQ ID NO: 616127 - RNA, 22 nt, Human
uggugguggggguuguacaagc

SEQ ID NO: 616128 - RNA, 25 nt, Human
ugugugcacacaaggaguggggaug

SEQ ID NO: 616129 - RNA, 19 nt, Human
uuagcgcaguccagcccca

SEQ ID NO: 616130 - RNA, 22 nt, Human
uuggcgcuggcagccccagugc

SEQ ID NO: 616131 - RNA, 19 nt, Human
aacugaacagugaacugaa

SEQ ID NO: 616132 - RNA, 22 nt, Human
aggagaaagaaaaucaagcuag

SEQ ID NO: 616133 - RNA, 24 nt, Human
auugaacuagguuaaauaaugauc

SEQ ID NO: 616134 - RNA, 21 nt, Human
caauaaacaaaauaaauagau

SEQ ID NO: 616135 - RNA, 19 nt, Human
cauucuauaacacgaggcu

SEQ ID NO: 616136 - RNA, 20 nt, Human
ccccgcguacacugccccuc

SEQ ID NO: 616137 - RNA, 21 nt, Human
cccgcguacacugccccuccg

SEQ ID NO: 616138 - RNA, 23 nt, Human
cccgcguacacugccccuccgcg

SEQ ID NO: 616139 - RNA, 24 nt, Human
cgcguacacugccccuccgcgagc

SEQ ID NO: 616140 - RNA, 24 nt, Human
cuagguuaaauaaugaucuuuccc

SEQ ID NO: 616141 - RNA, 23 nt, Human
gcguacacugccccuccgcgagc

SEQ ID NO: 616142 - RNA, 22 nt, Human
ggagaaagaaaaucaagcuagu

SEQ ID NO: 616143 - RNA, 23 nt, Human
guaugauuauuuuauuauuuuaa

SEQ ID NO: 616144 - RNA, 19 nt, Human
uaaacugaacagugaacug

SEQ ID NO: 616145 - RNA, 18 nt, Human
uaagauaaauuacugacu

SEQ ID NO: 616146 - RNA, 26 nt, Human
uaaugaucuuucccccuuagaucaau

SEQ ID NO: 616147 - RNA, 19 nt, Human
uauaacacgaggcuagacu

SEQ ID NO: 616148 - RNA, 22 nt, Human
ucagccuuuuaacucugugaaa

SEQ ID NO: 616149 - RNA, 28 nt, Human
ucuauaacacgaggcuagaccggggucc

SEQ ID NO: 616150 - RNA, 24 nt, Human
ugcaaguucauucuauaacacgag

SEQ ID NO: 616151 - RNA, 26 nt, Human
aacacaggaguccugacucccagaca

SEQ ID NO: 616152 - RNA, 18 nt, Human
aauuggaccggucagggu

SEQ ID NO: 616153 - RNA, 23 nt, Human
acaggaguccugacucccagaca

SEQ ID NO: 616154 - RNA, 22 nt, Human
acccugucucccuccaggucac

SEQ ID NO: 616155 - RNA, 20 nt, Human
acuggagucagggccaccca

SEQ ID NO: 616156 - RNA, 18 nt, Human
agccuucuuugagcccuc

SEQ ID NO: 616157 - RNA, 20 nt, Human
aggaaaggcugagcuuggug

SEQ ID NO: 616158 - RNA, 19 nt, Human
aggcaaguaacucacccag

SEQ ID NO: 616159 - RNA, 21 nt, Human
aggcaaguaacucacccaggg

SEQ ID NO: 616160 - RNA, 24 nt, Human
aggcugaggaggccucaugggggc

SEQ ID NO: 616161 - RNA, 18 nt, Human
agggagagggaggcuaga

SEQ ID NO: 616162 - RNA, 19 nt, Human
agggagagggaggcuagag

SEQ ID NO: 616163 - RNA, 20 nt, Human
agggagagggaggcuagagg

SEQ ID NO: 616164 - RNA, 18 nt, Human
aguccugacucccagaca

SEQ ID NO: 616165 - RNA, 18 nt, Human
auccuguccucauggaug

SEQ ID NO: 616166 - RNA, 20 nt, Human
caaguaacucacccagggcc

SEQ ID NO: 616167 - RNA, 18 nt, Human
cacaagcugaacagugac

SEQ ID NO: 616168 - RNA, 20 nt, Human
cacagcucagucagggcccc

SEQ ID NO: 616169 - RNA, 23 nt, Human
cacaguguggcuggggcucuugg

SEQ ID NO: 616170 - RNA, 26 nt, Human
cacccugucucccuccaggucaccuc

SEQ ID NO: 616171 - RNA, 18 nt, Human
caccuccaggucacaguu

SEQ ID NO: 616172 - RNA, 18 nt, Human
cagcacccugccuagagg

SEQ ID NO: 616173 - RNA, 20 nt, Human
cagggaaggcaaguaacuca

SEQ ID NO: 616174 - RNA, 22 nt, Human
cagggccccaggaaggagggag

SEQ ID NO: 616175 - RNA, 19 nt, Human
caggucacaguguggcugg

SEQ ID NO: 616176 - RNA, 20 nt, Human
caguuuucuuccugccgagu

SEQ ID NO: 616177 - RNA, 25 nt, Human
caugcuuccggcucuguugcccaca

SEQ ID NO: 616178 - RNA, 25 nt, Human
cauuucgcacaccaagaggcugagu

SEQ ID NO: 616179 - RNA, 21 nt, Human
ccacagugcucucuucccacg

SEQ ID NO: 616180 - RNA, 24 nt, Human
ccaccagccuucuuugagcccucc

SEQ ID NO: 616181 - RNA, 21 nt, Human
ccacggcagcacccugccuag

SEQ ID NO: 616182 - RNA, 20 nt, Human
ccaggucaccuccaggucac

SEQ ID NO: 616183 - RNA, 18 nt, Human
ccauugcugcccuccagg

SEQ ID NO: 616184 - RNA, 23 nt, Human
cccacggcagcacccugccuaga

SEQ ID NO: 616185 - RNA, 21 nt, Human
cccagggccacacagcccguc

SEQ ID NO: 616186 - RNA, 20 nt, Human
ccccacugccucacaggccu

SEQ ID NO: 616187 - RNA, 19 nt, Human
ccccccaggcugaggaggc

SEQ ID NO: 616188 - RNA, 24 nt, Human
ccuagaggaugguggcugggccag

SEQ ID NO: 616189 - RNA, 21 nt, Human
ccucaccacagugcucucuuc

SEQ ID NO: 616190 - RNA, 21 nt, Human
ccucccagcagcggcaagaac

SEQ ID NO: 616191 - RNA, 20 nt, Human
ccucuugggggucagagauu

SEQ ID NO: 616192 - RNA, 23 nt, Human
ccugccuucuuggaacccuucug

SEQ ID NO: 616193 - RNA, 27 nt, Human
ccuggcuucugucaaggcggcucugug

SEQ ID NO: 616194 - RNA, 23 nt, Human
cgaagccucggaggaaaggcuga

SEQ ID NO: 616195 - RNA, 21 nt, Human
cuccaggucaccuccaggucc

SEQ ID NO: 616196 - RNA, 19 nt, Human
cucucuucccacggcagca

SEQ ID NO: 616197 - RNA, 24 nt, Human
cuugggccuucaguuuucuuccug

SEQ ID NO: 616198 - RNA, 22 nt, Human
gagcagcaugagauuuuuccau

SEQ ID NO: 616199 - RNA, 21 nt, Human
gcccagagagggugaguggcu

SEQ ID NO: 616200 - RNA, 21 nt, Human
gcccuggcuucugucaaggcg

SEQ ID NO: 616201 - RNA, 21 nt, Human
gcgaagccucggaggaaaggc

SEQ ID NO: 616202 - RNA, 18 nt, Human
gcuggggcucuugggccu

SEQ ID NO: 616203 - RNA, 20 nt, Human
ggcagcacccugccuagagg

SEQ ID NO: 616204 - RNA, 20 nt, Human
ggcaguggugggggaucagg

SEQ ID NO: 616205 - RNA, 22 nt, Human
ggcucugagucacugggucccc

SEQ ID NO: 616206 - RNA, 21 nt, Human
gggaaguuugccuucauucag

SEQ ID NO: 616207 - RNA, 19 nt, Human
gggaaugggcagugguggg

SEQ ID NO: 616208 - RNA, 22 nt, Human
gggaaugggcagugguggggga

SEQ ID NO: 616209 - RNA, 20 nt, Human
guucggggccuacucugucc

SEQ ID NO: 616210 - RNA, 21 nt, Human
uagguagucccuccuccaucc

SEQ ID NO: 616211 - RNA, 23 nt, Human
uaggugccuuacugggaaugggc

SEQ ID NO: 616212 - RNA, 18 nt, Human
ucacccagggccacacag

SEQ ID NO: 616213 - RNA, 18 nt, Human
ucaccuccaggucacagu

SEQ ID NO: 616214 - RNA, 23 nt, Human
ucagggccacccaaacacaggag

SEQ ID NO: 616215 - RNA, 21 nt, Human
uccauugcugcccuccaggga

SEQ ID NO: 616216 - RNA, 23 nt, Human
ucccaaaacccaugcaaagggca

SEQ ID NO: 616217 - RNA, 21 nt, Human
ucccacggcagcacccugccu

SEQ ID NO: 616218 - RNA, 21 nt, Human
ucccauggcuugggguguugg

SEQ ID NO: 616219 - RNA, 26 nt, Human
uccggcucuguugcccacaagcugaa

SEQ ID NO: 616220 - RNA, 19 nt, Human
ucugccauggagcccccca

SEQ ID NO: 616221 - RNA, 26 nt, Human
ucuuccugccgaguggguucaggaag

SEQ ID NO: 616222 - RNA, 22 nt, Human
ucuuugagcccucccuuggcuu

SEQ ID NO: 616223 - RNA, 21 nt, Human
ugacccggggcacgcggucuc

SEQ ID NO: 616224 - RNA, 22 nt, Human
ugaggaggccucaugggggcca

SEQ ID NO: 616225 - RNA, 23 nt, Human
ugauggauggcccagagagggug

SEQ ID NO: 616226 - RNA, 19 nt, Human
ugccauggagccccccagg

SEQ ID NO: 616227 - RNA, 25 nt, Human
ugccauggagccccccaggcugagg

SEQ ID NO: 616228 - RNA, 23 nt, Human
ugcccaagauugggccucuggug

SEQ ID NO: 616229 - RNA, 18 nt, Human
ugcccacaagcugaacag

SEQ ID NO: 616230 - RNA, 23 nt, Human
ugccucacaggccucuugggggu

SEQ ID NO: 616231 - RNA, 24 nt, Human
ugccuggggccacagagcaaacug

SEQ ID NO: 616232 - RNA, 22 nt, Human
ugcgaagccucggaggaaaggc

SEQ ID NO: 616233 - RNA, 22 nt, Human
ugggaaugggcagugguggggg

SEQ ID NO: 616234 - RNA, 21 nt, Human
ugggccucuggugagugacag

SEQ ID NO: 616235 - RNA, 20 nt, Human
ugggguguugggaaguuugc

SEQ ID NO: 616236 - RNA, 22 nt, Human
uggugggggaucagggagaggg

SEQ ID NO: 616237 - RNA, 18 nt, Human
ugucaaggcggcucugug

SEQ ID NO: 616238 - RNA, 18 nt, Human
uguggcuggggcucuugg

SEQ ID NO: 616239 - RNA, 20 nt, Human
uugagcccucccuuggcuuu

SEQ ID NO: 616240 - RNA, 24 nt, Human
uuggugucaggguggcaaagagaa

SEQ ID NO: 616241 - RNA, 23 nt, Human
aaaaagaaaguagaaaaagggac

SEQ ID NO: 616242 - RNA, 22 nt, Human
aaaaagauauauauagcaacca

SEQ ID NO: 616243 - RNA, 18 nt, Human
aaaaagccagggaaaggu

SEQ ID NO: 616244 - RNA, 21 nt, Human
aaacaacugcaaaccauauuu

SEQ ID NO: 616245 - RNA, 19 nt, Human
aaacaauucaucaacagca

SEQ ID NO: 616246 - RNA, 22 nt, Human
aaaccauauuuacauaguaaca

SEQ ID NO: 616247 - RNA, 24 nt, Human
aaagacaagauuccacacaaaaac

SEQ ID NO: 616248 - RNA, 22 nt, Human
aacaauucaucaacagcaaaaa

SEQ ID NO: 616249 - RNA, 22 nt, Human
aaccaaaggccaacuagaucua

SEQ ID NO: 616250 - RNA, 19 nt, Human
aacugccuucuacaagaau

SEQ ID NO: 616251 - RNA, 19 nt, Human
aagaaaaaaacucaaugaa

SEQ ID NO: 616252 - RNA, 24 nt, Human
aagaaaaaaacucaaugaaauucu

SEQ ID NO: 616253 - RNA, 25 nt, Human
aagaaaaaaacucaaugaaauucug

SEQ ID NO: 616254 - RNA, 19 nt, Human
aagauuccacacaaaaaca

SEQ ID NO: 616255 - RNA, 22 nt, Human
aagcaaaggcaaguuuggcuaa

SEQ ID NO: 616256 - RNA, 19 nt, Human
aagcagacacccaaaggca

SEQ ID NO: 616257 - RNA, 21 nt, Human
aagccagggaaaggugggagg

SEQ ID NO: 616258 - RNA, 20 nt, Human
aaggaaaaaagauauauauu

SEQ ID NO: 616259 - RNA, 23 nt, Human
aaugaacacauaaugagcagcac

SEQ ID NO: 616260 - RNA, 24 nt, Human
accaacauaugaaaacuaaggaau

SEQ ID NO: 616261 - RNA, 21 nt, Human
agcaagaaagaccucuuucau

SEQ ID NO: 616262 - RNA, 19 nt, Human
agccacuuaccuccgaccu

SEQ ID NO: 616263 - RNA, 23 nt, Human
aggaaggacaaaaaaaguucaag

SEQ ID NO: 616264 - RNA, 21 nt, Human
aggaaguggcaagcagacacc

SEQ ID NO: 616265 - RNA, 18 nt, Human
aggauaguagagaaguac

SEQ ID NO: 616266 - RNA, 19 nt, Human
aggauaguagagaaguacu

SEQ ID NO: 616267 - RNA, 18 nt, Human
aggcaaggaagaaaaaaa

SEQ ID NO: 616268 - RNA, 24 nt, Human
aggcacgguggcucacgccuguaa

SEQ ID NO: 616269 - RNA, 21 nt, Human
aggcacuguaaaggaaugaua

SEQ ID NO: 616270 - RNA, 20 nt, Human
augaguggggcagaauuaca

SEQ ID NO: 616271 - RNA, 21 nt, Human
auggaauggaggcaaaaagcc

SEQ ID NO: 616272 - RNA, 24 nt, Human
augggacaucaaggaaaaaagaua

SEQ ID NO: 616273 - RNA, 22 nt, Human
caaaacaucacacuuuaaaaag

SEQ ID NO: 616274 - RNA, 24 nt, Human
caacauaugaaaacuaaggaauau

SEQ ID NO: 616275 - RNA, 19 nt, Human
caagcagacacccaaaggc

SEQ ID NO: 616276 - RNA, 24 nt, Human
caagcagacacccaaaggcaagga

SEQ ID NO: 616277 - RNA, 26 nt, Human
cacccaaaggcaaggaagaaaaaaac

SEQ ID NO: 616278 - RNA, 23 nt, Human
cacuguaaaggaaugauaggggg

SEQ ID NO: 616279 - RNA, 19 nt, Human
cagacacccaaaggcaagg

SEQ ID NO: 616280 - RNA, 25 nt, Human
cagcaaaaagaaaguagaaaaauuc

SEQ ID NO: 616281 - RNA, 26 nt, Human
cauaaaaauaaauauacauauaaaua

SEQ ID NO: 616282 - RNA, 20 nt, Human
caucaaggaaaaaagauaua

SEQ ID NO: 616283 - RNA, 23 nt, Human
ccaacauaugaaaacuaaggaau

SEQ ID NO: 616284 - RNA, 18 nt, Human
ccacacaaaaacaacugc

SEQ ID NO: 616285 - RNA, 23 nt, Human
ccacacaaaaacaacugcaaacc

SEQ ID NO: 616286 - RNA, 18 nt, Human
ccccuaaaauaaaaugaa

SEQ ID NO: 616287 - RNA, 24 nt, Human
ccuugaaagucuaaaauaaaccuu

SEQ ID NO: 616288 - RNA, 22 nt, Human
cgacuucuauagccacuuaccu

SEQ ID NO: 616289 - RNA, 21 nt, Human
cgccuguaauccagcacuuug

SEQ ID NO: 616290 - RNA, 19 nt, Human
cggaaagacaagauuccac

SEQ ID NO: 616291 - RNA, 21 nt, Human
cguccucuggguuccgggucc

SEQ ID NO: 616292 - RNA, 21 nt, Human
cuaaagaaaaaauuuuuggac

SEQ ID NO: 616293 - RNA, 24 nt, Human
cuagcaggcagccuuacuguaugc

SEQ ID NO: 616294 - RNA, 23 nt, Human
cucacgccuguaauccagcacuu

SEQ ID NO: 616295 - RNA, 18 nt, Human
cuccuggucuuuaggugg

SEQ ID NO: 616296 - RNA, 20 nt, Human
gaaacaauucaucaacagca

SEQ ID NO: 616297 - RNA, 24 nt, Human
gaagagaaauguauaaaacccagg

SEQ ID NO: 616298 - RNA, 23 nt, Human
gagaaugggacaucaaggaaaaa

SEQ ID NO: 616299 - RNA, 23 nt, Human
gcaaaaagaaaguagaaaaauuc

SEQ ID NO: 616300 - RNA, 18 nt, Human
gccaaagcaagaaagacc

SEQ ID NO: 616301 - RNA, 19 nt, Human
ggaaagacaagauuccaca

SEQ ID NO: 616302 - RNA, 21 nt, Human
ggaaagacaagauuccacaca

SEQ ID NO: 616303 - RNA, 20 nt, Human
ggaguagaaagucuaggucu

SEQ ID NO: 616304 - RNA, 21 nt, Human
ggaguuugaugaaacaguaga

SEQ ID NO: 616305 - RNA, 20 nt, Human
gguaaacaaaugaguggggc

SEQ ID NO: 616306 - RNA, 23 nt, Human
gguggcucacgccuguaauccag

SEQ ID NO: 616307 - RNA, 22 nt, Human
guagaggaaacugccuucuaca

SEQ ID NO: 616308 - RNA, 18 nt, Human
guggggcagaauuacaga

SEQ ID NO: 616309 - RNA, 22 nt, Human
uaaauagacauaugaauaacca

SEQ ID NO: 616310 - RNA, 21 nt, Human
uaacauacauaaaaauaaaua

SEQ ID NO: 616311 - RNA, 24 nt, Human
uaagaaauuuguauaggaggauaa

SEQ ID NO: 616312 - RNA, 23 nt, Human
uaagaagaacccuaaucuauagg

SEQ ID NO: 616313 - RNA, 18 nt, Human
uaaguuuuuaacuauguc

SEQ ID NO: 616314 - RNA, 24 nt, Human
uaaguuuuuaacuaugucagucaa

SEQ ID NO: 616315 - RNA, 20 nt, Human
uacuguaugccucauggaau

SEQ ID NO: 616316 - RNA, 21 nt, Human
uagaagucuaucuggugaaag

SEQ ID NO: 616317 - RNA, 21 nt, Human
uagagaaguacucagugcucu

SEQ ID NO: 616318 - RNA, 18 nt, Human
uagggaaugcucaugucc

SEQ ID NO: 616319 - RNA, 23 nt, Human
uaguagagaaguacucagugcuc

SEQ ID NO: 616320 - RNA, 23 nt, Human
uauagcaaccaacccagaaggcu

SEQ ID NO: 616321 - RNA, 18 nt, Human
uauagggaaugcucaugu

SEQ ID NO: 616322 - RNA, 21 nt, Human
uaugucagucaaauucaauga

SEQ ID NO: 616323 - RNA, 23 nt, Human
uauuccaggaaggacaaaaaaag

SEQ ID NO: 616324 - RNA, 24 nt, Human
uauuccaggaaggacaaaaaaagu

SEQ ID NO: 616325 - RNA, 25 nt, Human
uauuuaggccaggcacgguggcuca

SEQ ID NO: 616326 - RNA, 24 nt, Human
ucacgccuguaauccagcacuuug

SEQ ID NO: 616327 - RNA, 23 nt, Human
ucagccaaagcaagaaagaccuc

SEQ ID NO: 616328 - RNA, 27 nt, Human
ucaucaacagcaaaaagaaaguagaaa

SEQ ID NO: 616329 - RNA, 20 nt, Human
ucccugaaggaggacagguc

SEQ ID NO: 616330 - RNA, 19 nt, Human
ucuagguaacugcaagugu

SEQ ID NO: 616331 - RNA, 22 nt, Human
ucuauagccacuuaccuccgac

SEQ ID NO: 616332 - RNA, 22 nt, Human
ucucagccaaagcaagaaagac

SEQ ID NO: 616333 - RNA, 21 nt, Human
ucugaagcuauuccaggaagg

SEQ ID NO: 616334 - RNA, 22 nt, Human
ucuuaggaaguggcaagcagac

SEQ ID NO: 616335 - RNA, 24 nt, Human
ugaaacaauucaucaacagcaaaa

SEQ ID NO: 616336 - RNA, 23 nt, Human
ugaaagacacuacaauguuagau

SEQ ID NO: 616337 - RNA, 21 nt, Human
ugaaauucugaggcagaggau

SEQ ID NO: 616338 - RNA, 21 nt, Human
ugaagcaaaggcaaguuuggc

SEQ ID NO: 616339 - RNA, 20 nt, Human
ugaauaaccaacauaugaaa

SEQ ID NO: 616340 - RNA, 23 nt, Human
ugaggcagaggaucuaucaacca

SEQ ID NO: 616341 - RNA, 21 nt, Human
ugauagggggaauaauuuaua

SEQ ID NO: 616342 - RNA, 21 nt, Human
ugcaaaccauauuuacauagu

SEQ ID NO: 616343 - RNA, 19 nt, Human
uggaagagaaugggacauc

SEQ ID NO: 616344 - RNA, 18 nt, Human
uggcaagcagacacccaa

SEQ ID NO: 616345 - RNA, 23 nt, Human
uggcucacgccuguaauccagca

SEQ ID NO: 616346 - RNA, 21 nt, Human
ugggaaguggauuguauaugc

SEQ ID NO: 616347 - RNA, 18 nt, Human
uggguuccggguccgccc

SEQ ID NO: 616348 - RNA, 23 nt, Human
uguaaaggaaugauagggggaau

SEQ ID NO: 616349 - RNA, 18 nt, Human
ugugacugcuuacuagca

SEQ ID NO: 616350 - RNA, 24 nt, Human
uuaggccaggcacgguggcucacg

SEQ ID NO: 616351 - RNA, 20 nt, Human
uuccaggaaggacaaaaaaa

SEQ ID NO: 616352 - RNA, 19 nt, Human
uucucuccuggucuuuagg

SEQ ID NO: 616353 - RNA, 21 nt, Human
uugguccuaacaauuuaagaa

SEQ ID NO: 616354 - RNA, 20 nt, Human
uuuaagaaauuuguauagga

SEQ ID NO: 616355 - RNA, 18 nt, Human
uuuuuuuuuuuuuuuuug

SEQ ID NO: 616356 - RNA, 28 nt, Human
uuuuuuuuuuuuuuuuuuuuuuuggggg

SEQ ID NO: 616357 - RNA, 19 nt, Human
aucauuuauacuccaugau

SEQ ID NO: 616358 - RNA, 25 nt, Human
cccgcggcgggggcaacgaggaagc

SEQ ID NO: 616359 - RNA, 20 nt, Human
uaauacaguacaagauauuu

SEQ ID NO: 616360 - RNA, 19 nt, Human
uacaguacaagauauuugu

SEQ ID NO: 616361 - RNA, 19 nt, Human
ucgcgcccgcggcgggggc

SEQ ID NO: 616362 - RNA, 25 nt, Human
ugauuagcaauggauccugucugaa

SEQ ID NO: 616363 - RNA, 19 nt, Human
aagcugagcaucuuggcuc

SEQ ID NO: 616364 - RNA, 18 nt, Human
aauguccuccuacccugg

SEQ ID NO: 616365 - RNA, 21 nt, Human
acagacagccuggaaaaacuc

SEQ ID NO: 616366 - RNA, 23 nt, Human
acagcacugugaaguagcuucga

SEQ ID NO: 616367 - RNA, 24 nt, Human
acccagaacccagcacuuugcccu

SEQ ID NO: 616368 - RNA, 22 nt, Human
auccagaaacccagaacccagc

SEQ ID NO: 616369 - RNA, 22 nt, Human
augaauguccuccuacccuggc

SEQ ID NO: 616370 - RNA, 20 nt, Human
caggauaaagggaggcacug

SEQ ID NO: 616371 - RNA, 20 nt, Human
caggccccuggguuggcacu

SEQ ID NO: 616372 - RNA, 18 nt, Human
caguugccguuguguucc

SEQ ID NO: 616373 - RNA, 21 nt, Human
cauaccugucgccguggcccc

SEQ ID NO: 616374 - RNA, 21 nt, Human
cauuuaauccucucaacagca

SEQ ID NO: 616375 - RNA, 18 nt, Human
cccccaaauccgcaaucg

SEQ ID NO: 616376 - RNA, 19 nt, Human
ccccggacccccggcagcc

SEQ ID NO: 616377 - RNA, 21 nt, Human
cccgucggugagggcgcgggg

SEQ ID NO: 616378 - RNA, 22 nt, Human
cccugcuuccgaggcucccucc

SEQ ID NO: 616379 - RNA, 18 nt, Human
ccucagggacccgucccc

SEQ ID NO: 616380 - RNA, 21 nt, Human
ccuccuacccuggcaaggggc

SEQ ID NO: 616381 - RNA, 21 nt, Human
ccugagcaggaagcuuggcuu

SEQ ID NO: 616382 - RNA, 25 nt, Human
ccuucuucccaccaggucuggaccc

SEQ ID NO: 616383 - RNA, 20 nt, Human
cgcgaauccagaaacccaga

SEQ ID NO: 616384 - RNA, 24 nt, Human
cgcgaauccagaaacccagaaccc

SEQ ID NO: 616385 - RNA, 25 nt, Human
cggcagccuaggccgucccggggca

SEQ ID NO: 616386 - RNA, 22 nt, Human
cgucccggggcaccgcgcgcgg

SEQ ID NO: 616387 - RNA, 19 nt, Human
cgucggugagggcgcgggg

SEQ ID NO: 616388 - RNA, 23 nt, Human
cucccuccugcaaagagcuuuac

SEQ ID NO: 616389 - RNA, 20 nt, Human
cugccuguggucccugguga

SEQ ID NO: 616390 - RNA, 22 nt, Human
cuggugacagcaggugugcucu

SEQ ID NO: 616391 - RNA, 19 nt, Human
cuucuuuaauaccuggggu

SEQ ID NO: 616392 - RNA, 19 nt, Human
gccccggacccccggcagc

SEQ ID NO: 616393 - RNA, 22 nt, Human
gccccggacccccggcagccua

SEQ ID NO: 616394 - RNA, 24 nt, Human
gcgaauccagaaacccagaaccca

SEQ ID NO: 616395 - RNA, 22 nt, Human
gcgcggacggacucacccgagg

SEQ ID NO: 616396 - RNA, 26 nt, Human
ggaaaaacuccucuagggcuugcaga

SEQ ID NO: 616397 - RNA, 18 nt, Human
ggcuugcagacuuagcug

SEQ ID NO: 616398 - RNA, 21 nt, Human
gggaggugccaggccccuggg

SEQ ID NO: 616399 - RNA, 19 nt, Human
ggugaagucacauguguag

SEQ ID NO: 616400 - RNA, 20 nt, Human
gucuggacccgucggugagg

SEQ ID NO: 616401 - RNA, 23 nt, Human
uaggcaucgggauccucagggac

SEQ ID NO: 616402 - RNA, 22 nt, Human
uccagaaacccagaacccagca

SEQ ID NO: 616403 - RNA, 23 nt, Human
uccagaaacccagaacccagcac

SEQ ID NO: 616404 - RNA, 21 nt, Human
ucccaguugccguuguguucc

SEQ ID NO: 616405 - RNA, 22 nt, Human
uccgcaaucgggagaaaaaggc

SEQ ID NO: 616406 - RNA, 19 nt, Human
uccugcaaagagcuuuaca

SEQ ID NO: 616407 - RNA, 24 nt, Human
ucugcagcccggaaugccuggggc

SEQ ID NO: 616408 - RNA, 18 nt, Human
ucugcccccacaggggcu

SEQ ID NO: 616409 - RNA, 19 nt, Human
ugaaacaguguucacucac

SEQ ID NO: 616410 - RNA, 18 nt, Human
ugaagucacauguguagg

SEQ ID NO: 616411 - RNA, 23 nt, Human
ugcuaugucugucugcccccaca

SEQ ID NO: 616412 - RNA, 24 nt, Human
uggcagcaagacaauggaugaugu

SEQ ID NO: 616413 - RNA, 25 nt, Human
ugggguucccugggugaugaauguc

SEQ ID NO: 616414 - RNA, 21 nt, Human
uguguuccccaggcuucacag

SEQ ID NO: 616415 - RNA, 19 nt, Human
uguuucauuuaauccucuc

SEQ ID NO: 616416 - RNA, 22 nt, Human
uuccccaggcuucacagacagc

SEQ ID NO: 616417 - RNA, 22 nt, Human
uucccugggugaugaauguccu

SEQ ID NO: 616418 - RNA, 18 nt, Human
uugagacagggcuggaga

SEQ ID NO: 616419 - RNA, 23 nt, Human
uugagacagggcuggagagaggc

SEQ ID NO: 616420 - RNA, 22 nt, Human
aacucuguggcccuucugccuc

SEQ ID NO: 616421 - RNA, 20 nt, Human
aagcauauguagugauucau

SEQ ID NO: 616422 - RNA, 22 nt, Human
aagcugccacucgcugggagcc

SEQ ID NO: 616423 - RNA, 20 nt, Human
aaguguucaaaguagagaau

SEQ ID NO: 616424 - RNA, 20 nt, Human
aaugugguacauaacauuuc

SEQ ID NO: 616425 - RNA, 18 nt, Human
acccuccccccagccuau

SEQ ID NO: 616426 - RNA, 22 nt, Human
acucaggacccauaacucuucc

SEQ ID NO: 616427 - RNA, 23 nt, Human
aggauuuuuuuuccuuuucaaga

SEQ ID NO: 616428 - RNA, 22 nt, Human
aggcugccacaaaaacucccag

SEQ ID NO: 616429 - RNA, 19 nt, Human
agggaguuccgauuucagg

SEQ ID NO: 616430 - RNA, 23 nt, Human
aggggaaucagcugcccugggcc

SEQ ID NO: 616431 - RNA, 19 nt, Human
aggugaggagggggucggu

SEQ ID NO: 616432 - RNA, 20 nt, Human
agguuugaguucaagggguu

SEQ ID NO: 616433 - RNA, 18 nt, Human
aucacauccacagaagca

SEQ ID NO: 616434 - RNA, 18 nt, Human
aucagcugcccugggccu

SEQ ID NO: 616435 - RNA, 26 nt, Human
caaaggcugccacaaaaacucccagg

SEQ ID NO: 616436 - RNA, 18 nt, Human
caaaguagagaauauccc

SEQ ID NO: 616437 - RNA, 22 nt, Human
caaaguagagaauaucccccag

SEQ ID NO: 616438 - RNA, 19 nt, Human
caacugcuacaauguucag

SEQ ID NO: 616439 - RNA, 19 nt, Human
caccgccugcuuccguccg

SEQ ID NO: 616440 - RNA, 21 nt, Human
cacgcagguggaaguaucugc

SEQ ID NO: 616441 - RNA, 19 nt, Human
cagcugcccugggccugcc

SEQ ID NO: 616442 - RNA, 18 nt, Human
caggcaguguguggcagg

SEQ ID NO: 616443 - RNA, 19 nt, Human
caggcuuuugcccagccag

SEQ ID NO: 616444 - RNA, 22 nt, Human
cagguggaaguaucugccuccc

SEQ ID NO: 616445 - RNA, 21 nt, Human
cagugaaagauggcacaggcu

SEQ ID NO: 616446 - RNA, 25 nt, Human
cagugccaugggaccaaggccuuuc

SEQ ID NO: 616447 - RNA, 21 nt, Human
cauuguagccaugagaugaaa

SEQ ID NO: 616448 - RNA, 25 nt, Human
ccacaaaggcugccacaaaaacucc

SEQ ID NO: 616449 - RNA, 21 nt, Human
ccagucagaccacucccacaa

SEQ ID NO: 616450 - RNA, 22 nt, Human
cccaccuccuacccucccccca

SEQ ID NO: 616451 - RNA, 22 nt, Human
ccccacccagugccaugggacc

SEQ ID NO: 616452 - RNA, 19 nt, Human
ccccagccccacccagugc

SEQ ID NO: 616453 - RNA, 20 nt, Human
cccccagccccacccagugc

SEQ ID NO: 616454 - RNA, 23 nt, Human
cccccagccccacccagugccau

SEQ ID NO: 616455 - RNA, 28 nt, Human
ccccccagccuauagucuaguccgagga

SEQ ID NO: 616456 - RNA, 20 nt, Human
ccccugccggcccacggcca

SEQ ID NO: 616457 - RNA, 22 nt, Human
ccccugccggcccacggccacg

SEQ ID NO: 616458 - RNA, 19 nt, Human
cccgggcggccccucccaa

SEQ ID NO: 616459 - RNA, 22 nt, Human
cccucccaagcugccacucgcu

SEQ ID NO: 616460 - RNA, 19 nt, Human
cccugggccugccagggca

SEQ ID NO: 616461 - RNA, 22 nt, Human
ccgcgucgucgguccucacacc

SEQ ID NO: 616462 - RNA, 22 nt, Human
ccggcaccugaugguccccagg

SEQ ID NO: 616463 - RNA, 22 nt, Human
ccggcgcagcgcggccccuuuu

SEQ ID NO: 616464 - RNA, 19 nt, Human
ccucacaccgccugcuucc

SEQ ID NO: 616465 - RNA, 18 nt, Human
ccucccaccuccuacccu

SEQ ID NO: 616466 - RNA, 20 nt, Human
ccucccaccuccuacccucc

SEQ ID NO: 616467 - RNA, 23 nt, Human
ccuccuacccuccccccagccua

SEQ ID NO: 616468 - RNA, 21 nt, Human
cgccucgccccugccggccca

SEQ ID NO: 616469 - RNA, 25 nt, Human
cgcucaggugccagucugaccgccc

SEQ ID NO: 616470 - RNA, 22 nt, Human
cggccccuuuuauccgcccucc

SEQ ID NO: 616471 - RNA, 20 nt, Human
cuagcacaggccuggagugc

SEQ ID NO: 616472 - RNA, 20 nt, Human
cucaggacccauaacucuuc

SEQ ID NO: 616473 - RNA, 20 nt, Human
cuccuggcuuccuucuacau

SEQ ID NO: 616474 - RNA, 18 nt, Human
cucgcugggagcccugca

SEQ ID NO: 616475 - RNA, 24 nt, Human
cugaccgcccgggcggccccuccc

SEQ ID NO: 616476 - RNA, 22 nt, Human
cuuaaccccuugcucgacaggu

SEQ ID NO: 616477 - RNA, 18 nt, Human
gacccauaacucuuccuc

SEQ ID NO: 616478 - RNA, 19 nt, Human
gaggggccgggcgcccugc

SEQ ID NO: 616479 - RNA, 21 nt, Human
gaugguccccaggaggggccg

SEQ ID NO: 616480 - RNA, 18 nt, Human
gcaagagaacagaacucu

SEQ ID NO: 616481 - RNA, 18 nt, Human
gcccacggccacgacccc

SEQ ID NO: 616482 - RNA, 19 nt, Human
gcccacggccacgacccca

SEQ ID NO: 616483 - RNA, 20 nt, Human
gcccacggccacgaccccag

SEQ ID NO: 616484 - RNA, 23 nt, Human
gcuuucuucuauuuugcuuuuag

SEQ ID NO: 616485 - RNA, 20 nt, Human
ggagaaguguucaaaguaga

SEQ ID NO: 616486 - RNA, 20 nt, Human
ggcacaggcuuuugcccagc

SEQ ID NO: 616487 - RNA, 21 nt, Human
gggaaucagcugcccugggcc

SEQ ID NO: 616488 - RNA, 18 nt, Human
uaaaauucccaacugaca

SEQ ID NO: 616489 - RNA, 18 nt, Human
uaaaauucccaacugaca

SEQ ID NO: 616490 - RNA, 22 nt, Human
uaacauuucaaauauaagugga

SEQ ID NO: 616491 - RNA, 24 nt, Human
uacuguccuagcaaccuggcuacu

SEQ ID NO: 616492 - RNA, 19 nt, Human
uaggggaaucagcugcccu

SEQ ID NO: 616493 - RNA, 21 nt, Human
uauaaguggaaggaucaucag

SEQ ID NO: 616494 - RNA, 22 nt, Human
ucagccgcgcgcgaggugagga

SEQ ID NO: 616495 - RNA, 23 nt, Human
ucccacaaaggcugccacaaaaa

SEQ ID NO: 616496 - RNA, 25 nt, Human
ucccacaaaggcugccacaaaaacc

SEQ ID NO: 616497 - RNA, 22 nt, Human
ucccaccuccuacccucccccc

SEQ ID NO: 616498 - RNA, 23 nt, Human
ucccaccuccuacccucccccca

SEQ ID NO: 616499 - RNA, 24 nt, Human
ucccaccuccuacccuccccccag

SEQ ID NO: 616500 - RNA, 21 nt, Human
ucccagugaaagauggcacag

SEQ ID NO: 616501 - RNA, 20 nt, Human
uccccaggaggggccgggcg

SEQ ID NO: 616502 - RNA, 19 nt, Human
ucuguggcccuucugccuc

SEQ ID NO: 616503 - RNA, 23 nt, Human
ugaacgcuaagaaaaguuuuaau

SEQ ID NO: 616504 - RNA, 18 nt, Human
ugagaaaaauguucaggg

SEQ ID NO: 616505 - RNA, 23 nt, Human
ugccacaaaaacucccagggaac

SEQ ID NO: 616506 - RNA, 21 nt, Human
uggaugcuccaagcagagggc

SEQ ID NO: 616507 - RNA, 19 nt, Human
uggcaggaugaaaaacaua

SEQ ID NO: 616508 - RNA, 19 nt, Human
uggcccuucugccucuuug

SEQ ID NO: 616509 - RNA, 20 nt, Human
ugggagcccugcaggcaccg

SEQ ID NO: 616510 - RNA, 21 nt, Human
uguagauaggauuuuuuuucc

SEQ ID NO: 616511 - RNA, 22 nt, Human
uguggcccuucugccucuuugg

SEQ ID NO: 616512 - RNA, 21 nt, Human
aagaggaagcgggguacagag

SEQ ID NO: 616513 - RNA, 22 nt, Human
aaggagcucuuacagauggacc

SEQ ID NO: 616514 - RNA, 18 nt, Human
aaggcucaggaaggggcc

SEQ ID NO: 616515 - RNA, 24 nt, Human
aauccggacgcucuccugcagcca

SEQ ID NO: 616516 - RNA, 18 nt, Human
acaaagaggugagaacgg

SEQ ID NO: 616517 - RNA, 22 nt, Human
accauggcagugaccaaggagc

SEQ ID NO: 616518 - RNA, 20 nt, Human
agaacacaauucccagaggg

SEQ ID NO: 616519 - RNA, 18 nt, Human
aggaagcgggguacagag

SEQ ID NO: 616520 - RNA, 21 nt, Human
aggagaaggcagcggacaaag

SEQ ID NO: 616521 - RNA, 25 nt, Human
aggcagcggacaaagaggugagaac

SEQ ID NO: 616522 - RNA, 28 nt, Human
aggccggaaccauggcagugaccaagga

SEQ ID NO: 616523 - RNA, 24 nt, Human
agggcuaggcgccgcucggagccu

SEQ ID NO: 616524 - RNA, 24 nt, Human
agucagucaagccugacccagaac

SEQ ID NO: 616525 - RNA, 23 nt, Human
auucacgacugccggccucccuc

SEQ ID NO: 616526 - RNA, 23 nt, Human
caagcucucccaucggacguccu

SEQ ID NO: 616527 - RNA, 24 nt, Human
cacugucccgccgcgaccuagagc

SEQ ID NO: 616528 - RNA, 21 nt, Human
cagcaccgcagggucugcaga

SEQ ID NO: 616529 - RNA, 24 nt, Human
cagcggcggcaacgggggcugcug

SEQ ID NO: 616530 - RNA, 18 nt, Human
caguagagccagacaagc

SEQ ID NO: 616531 - RNA, 24 nt, Human
cagugaccaaggagcucuuacaga

SEQ ID NO: 616532 - RNA, 22 nt, Human
ccagcuccgcccuucccuuccc

SEQ ID NO: 616533 - RNA, 22 nt, Human
ccccgccccacacgcccacugg

SEQ ID NO: 616534 - RNA, 23 nt, Human
ccccgccccgccccacacgccca

SEQ ID NO: 616535 - RNA, 18 nt, Human
cccgccccgccccacacg

SEQ ID NO: 616536 - RNA, 21 nt, Human
cccuccgcaggcgggcuccca

SEQ ID NO: 616537 - RNA, 21 nt, Human
ccuagagccagguuacagggc

SEQ ID NO: 616538 - RNA, 23 nt, Human
ccuauccaucaucaguagagcca

SEQ ID NO: 616539 - RNA, 19 nt, Human
ccucaagaggaagcggggu

SEQ ID NO: 616540 - RNA, 22 nt, Human
ccucaccccagcuccgcccuuc

SEQ ID NO: 616541 - RNA, 18 nt, Human
ccucccagucauucucuc

SEQ ID NO: 616542 - RNA, 21 nt, Human
ccugcaguccucacgcgcgcu

SEQ ID NO: 616543 - RNA, 21 nt, Human
ccugcaguccucacgcgcgcu

SEQ ID NO: 616544 - RNA, 19 nt, Human
ccugccccgccccgccccc

SEQ ID NO: 616545 - RNA, 20 nt, Human
ccugcccugccccgccccgc

SEQ ID NO: 616546 - RNA, 19 nt, Human
ccuguacgcgcugcuaggc

SEQ ID NO: 616547 - RNA, 20 nt, Human
ccuguacgcgcugcuaggca

SEQ ID NO: 616548 - RNA, 18 nt, Human
ccuguggcugggcccaga

SEQ ID NO: 616549 - RNA, 19 nt, Human
ccugugggacugcccuucc

SEQ ID NO: 616550 - RNA, 21 nt, Human
cgaggaaggcugaucuugaga

SEQ ID NO: 616551 - RNA, 21 nt, Human
cgguggcgaggaaggcugauc

SEQ ID NO: 616552 - RNA, 24 nt, Human
cgucaggccggaaccauggcagug

SEQ ID NO: 616553 - RNA, 22 nt, Human
cucccagcaccgcagggucugc

SEQ ID NO: 616554 - RNA, 23 nt, Human
cugccccgccccgccccacacgc

SEQ ID NO: 616555 - RNA, 22 nt, Human
cugccugugggacugcccuucc

SEQ ID NO: 616556 - RNA, 21 nt, Human
cugugcucuccccguggcccc

SEQ ID NO: 616557 - RNA, 26 nt, Human
cuucgcgccgaguggcugugcucucc

SEQ ID NO: 616558 - RNA, 19 nt, Human
gcagggucugcagagcuga

SEQ ID NO: 616559 - RNA, 18 nt, Human
gccccgacuucuucccuc

SEQ ID NO: 616560 - RNA, 19 nt, Human
gccugugggacugcccuuc

SEQ ID NO: 616561 - RNA, 20 nt, Human
ggcaacgggggcugcuggga

SEQ ID NO: 616562 - RNA, 21 nt, Human
ggcagcggcggcaacgggggc

SEQ ID NO: 616563 - RNA, 23 nt, Human
ggccccuuggacccucaccccag

SEQ ID NO: 616564 - RNA, 24 nt, Human
ggcucacccguagauucagucugg

SEQ ID NO: 616565 - RNA, 20 nt, Human
guccugggccccuuggaccc

SEQ ID NO: 616566 - RNA, 18 nt, Human
guggccccugucuccuag

SEQ ID NO: 616567 - RNA, 18 nt, Human
guuacagggcucacccgu

SEQ ID NO: 616568 - RNA, 19 nt, Human
uagagccagguuacagggc

SEQ ID NO: 616569 - RNA, 22 nt, Human
uccaucaucaguagagccagac

SEQ ID NO: 616570 - RNA, 21 nt, Human
ucccagagggcuaggcgccuc

SEQ ID NO: 616571 - RNA, 22 nt, Human
uccccaucaugccucucacuuc

SEQ ID NO: 616572 - RNA, 22 nt, Human
uccggacgcucuccugcagcca

SEQ ID NO: 616573 - RNA, 19 nt, Human
uccugggccccuuggaccc

SEQ ID NO: 616574 - RNA, 19 nt, Human
ucgcgccgaguggcugugc

SEQ ID NO: 616575 - RNA, 21 nt, Human
ucgcgccgaguggcugugcuc

SEQ ID NO: 616576 - RNA, 19 nt, Human
ucggguccugggcggggag

SEQ ID NO: 616577 - RNA, 20 nt, Human
ucucuccccaucaugccucu

SEQ ID NO: 616578 - RNA, 19 nt, Human
ucugcagagcugagaucac

SEQ ID NO: 616579 - RNA, 28 nt, Human
ucuuacagauggaccuguacgcgcugcu

SEQ ID NO: 616580 - RNA, 22 nt, Human
ucuuuccucauuccagggacac

SEQ ID NO: 616581 - RNA, 20 nt, Human
ugaccaaggagcucuuacag

SEQ ID NO: 616582 - RNA, 24 nt, Human
ugagaucacgccggccaaguccug

SEQ ID NO: 616583 - RNA, 22 nt, Human
ugcccugccccgccccgcccca

SEQ ID NO: 616584 - RNA, 22 nt, Human
uguggcugggcccagaaauggg

SEQ ID NO: 616585 - RNA, 19 nt, Human
uuagacccacuaagugccg

SEQ ID NO: 616586 - RNA, 20 nt, Human
uuccagggacaccaaggcuc

SEQ ID NO: 616587 - RNA, 22 nt, Human
uucgcgccgaguggcugugcuc

SEQ ID NO: 616588 - RNA, 19 nt, Human
uuuauuagacccacuaagu

SEQ ID NO: 616589 - RNA, 24 nt, Human
aaagaccaacaaacuaaguaccau

SEQ ID NO: 616590 - RNA, 27 nt, Human
aaagggaaaacuaugucauuucucuca

SEQ ID NO: 616591 - RNA, 22 nt, Human
aaaugcuauaagcuucacagcu

SEQ ID NO: 616592 - RNA, 20 nt, Human
aaccugccagccaacgaaaa

SEQ ID NO: 616593 - RNA, 18 nt, Human
aacucuaccugccccucu

SEQ ID NO: 616594 - RNA, 24 nt, Human
aaggcuccuucauccuucccucca

SEQ ID NO: 616595 - RNA, 22 nt, Human
aaucauggaucaucugagcugu

SEQ ID NO: 616596 - RNA, 22 nt, Human
aaugucaacuuucuuaagcagc

SEQ ID NO: 616597 - RNA, 18 nt, Human
agaguacaguagccaagg

SEQ ID NO: 616598 - RNA, 20 nt, Human
agcagaccauuucuuuccug

SEQ ID NO: 616599 - RNA, 22 nt, Human
agcagccccaauguccaaccaa

SEQ ID NO: 616600 - RNA, 18 nt, Human
aucaugaauucuaacuug

SEQ ID NO: 616601 - RNA, 21 nt, Human
augaccacauccuuccaauca

SEQ ID NO: 616602 - RNA, 24 nt, Human
auuuuuuuuuuuuuuuuuuuuggc

SEQ ID NO: 616603 - RNA, 25 nt, Human
auuuuuuuuuuuuuuuuuuuugggg

SEQ ID NO: 616604 - RNA, 21 nt, Human
caaccugccagccaacgaaaa

SEQ ID NO: 616605 - RNA, 24 nt, Human
caagugaaaauucuuucuucuuuc

SEQ ID NO: 616606 - RNA, 22 nt, Human
caaucaaaggcuauccucaauc

SEQ ID NO: 616607 - RNA, 18 nt, Human
cacuuccacagguuggga

SEQ ID NO: 616608 - RNA, 22 nt, Human
cauccuucccuccaggaacucu

SEQ ID NO: 616609 - RNA, 20 nt, Human
ccaauguccaaccaagugaa

SEQ ID NO: 616610 - RNA, 23 nt, Human
ccacauccuuccaaucauggauc

SEQ ID NO: 616611 - RNA, 23 nt, Human
ccagccuuaacuucugaaaccgg

SEQ ID NO: 616612 - RNA, 19 nt, Human
ccggagaaagaaagacauc

SEQ ID NO: 616613 - RNA, 26 nt, Human
ccuaaagaccaacaaacuaaguacca

SEQ ID NO: 616614 - RNA, 19 nt, Human
ccuccucaagcuguaagag

SEQ ID NO: 616615 - RNA, 24 nt, Human
ccucugagauagauauugagucuu

SEQ ID NO: 616616 - RNA, 22 nt, Human
ccugccagccaacgaaaauggg

SEQ ID NO: 616617 - RNA, 25 nt, Human
cgcuagagaaacugucauaaccuaa

SEQ ID NO: 616618 - RNA, 25 nt, Human
cuccaggaacucuaccugccccucu

SEQ ID NO: 616619 - RNA, 18 nt, Human
cucuucgcuuugauugga

SEQ ID NO: 616620 - RNA, 20 nt, Human
cugugccacuucacacugac

SEQ ID NO: 616621 - RNA, 22 nt, Human
cuuggugaugaccacauccuuc

SEQ ID NO: 616622 - RNA, 25 nt, Human
cuuuccaaagucauuccacgacaaa

SEQ ID NO: 616623 - RNA, 19 nt, Human
gaaaaagauucuuuuagaa

SEQ ID NO: 616624 - RNA, 22 nt, Human
gaacagguaugacugccucccc

SEQ ID NO: 616625 - RNA, 18 nt, Human
gaacucuaccugccccuc

SEQ ID NO: 616626 - RNA, 24 nt, Human
gaagucuuuccaaagucauuccac

SEQ ID NO: 616627 - RNA, 24 nt, Human
gacugccuccccauaaaccaguau

SEQ ID NO: 616628 - RNA, 21 nt, Human
gagaaagaaagacaucuuggu

SEQ ID NO: 616629 - RNA, 19 nt, Human
ggaaaacacuucaggucug

SEQ ID NO: 616630 - RNA, 22 nt, Human
ggaaaacuaugucauuucucuc

SEQ ID NO: 616631 - RNA, 24 nt, Human
ggaacucuaccugccccucuacuc

SEQ ID NO: 616632 - RNA, 22 nt, Human
ggucucuguacaccaacagccu

SEQ ID NO: 616633 - RNA, 18 nt, Human
gugacuugcucagucaca

SEQ ID NO: 616634 - RNA, 21 nt, Human
uaaaacacugucacagucagu

SEQ ID NO: 616635 - RNA, 22 nt, Human
uaaagaccaacaaacuaaguac

SEQ ID NO: 616636 - RNA, 20 nt, Human
uaaagggaaaacuaugucau

SEQ ID NO: 616637 - RNA, 21 nt, Human
uaacuucugaaaccggaagaa

SEQ ID NO: 616638 - RNA, 22 nt, Human
uaagagucacauggggagacag

SEQ ID NO: 616639 - RNA, 24 nt, Human
uaagcagccccaauguccaaccaa

SEQ ID NO: 616640 - RNA, 23 nt, Human
uaagcuucacagcuuagaaauua

SEQ ID NO: 616641 - RNA, 20 nt, Human
uaccugccccucuacuccca

SEQ ID NO: 616642 - RNA, 23 nt, Human
uaguaaagugaacagaagugcua

SEQ ID NO: 616643 - RNA, 20 nt, Human
uaugacugccuccccauaaa

SEQ ID NO: 616644 - RNA, 23 nt, Human
ucaacuuucuuaagcagccccaa

SEQ ID NO: 616645 - RNA, 21 nt, Human
ucacauggggagacaguggca

SEQ ID NO: 616646 - RNA, 25 nt, Human
uccacagguugggagccucccccau

SEQ ID NO: 616647 - RNA, 19 nt, Human
uccacggacucuccgcgga

SEQ ID NO: 616648 - RNA, 21 nt, Human
ucccagaugcccaccucaagu

SEQ ID NO: 616649 - RNA, 21 nt, Human
ucuacccuguauucccagaug

SEQ ID NO: 616650 - RNA, 22 nt, Human
ucuaccugccccucuacuccca

SEQ ID NO: 616651 - RNA, 19 nt, Human
ucucugaacagguaugacu

SEQ ID NO: 616652 - RNA, 22 nt, Human
ucugcauucccuaagcucccac

SEQ ID NO: 616653 - RNA, 18 nt, Human
ucuggaaaacugggaacc

SEQ ID NO: 616654 - RNA, 19 nt, Human
ucuggaaaacugggaaccg

SEQ ID NO: 616655 - RNA, 20 nt, Human
ucuuccugguucucugaaca

SEQ ID NO: 616656 - RNA, 19 nt, Human
ugaaaccggaagaauccgc

SEQ ID NO: 616657 - RNA, 22 nt, Human
ugaauggauauggauuuuuuuu

SEQ ID NO: 616658 - RNA, 18 nt, Human
ugacaagucagaaugugg

SEQ ID NO: 616659 - RNA, 22 nt, Human
ugacaggcaguguuuaagaaaa

SEQ ID NO: 616660 - RNA, 24 nt, Human
ugaccacauccuuccaaucaugga

SEQ ID NO: 616661 - RNA, 18 nt, Human
ugcuauaagcuucacagc

SEQ ID NO: 616662 - RNA, 26 nt, Human
uggaaaacacuucaggucuggaaaac

SEQ ID NO: 616663 - RNA, 20 nt, Human
ugggaaauaaagggaaaacu

SEQ ID NO: 616664 - RNA, 18 nt, Human
uggucuccuauuucauuc

SEQ ID NO: 616665 - RNA, 24 nt, Human
uguaagagucacauggggagacag

SEQ ID NO: 616666 - RNA, 18 nt, Human
ugugccacuucacacuga

SEQ ID NO: 616667 - RNA, 22 nt, Human
uuaaaaaugcuauaagcuucac

SEQ ID NO: 616668 - RNA, 25 nt, Human
uuagaagucuuuccaaagucauucc

SEQ ID NO: 616669 - RNA, 19 nt, Human
uucacaggaccacuuccac

SEQ ID NO: 616670 - RNA, 21 nt, Human
uucaggucuggaaaacuggga

SEQ ID NO: 616671 - RNA, 23 nt, Human
uuccacagguugggagccucccc

SEQ ID NO: 616672 - RNA, 26 nt, Human
uuccucugagauagauauugagucuu

SEQ ID NO: 616673 - RNA, 22 nt, Human
uuccuggguaaccauauuuccu

SEQ ID NO: 616674 - RNA, 20 nt, Human
uuccugguucucugaacagg

SEQ ID NO: 616675 - RNA, 19 nt, Human
uucuuagcucugagucacc

SEQ ID NO: 616676 - RNA, 22 nt, Human
uuggaaaacacuucaggucugg

SEQ ID NO: 616677 - RNA, 18 nt, Human
uuuauaucucauuuuuuu

SEQ ID NO: 616678 - RNA, 24 nt, Human
uuucuggguagcaguuaagaacau

SEQ ID NO: 616679 - RNA, 22 nt, Human
uuugucaaugucaagggucagc

SEQ ID NO: 616680 - RNA, 21 nt, Human
uuuuagaagucuuuccaaagu

SEQ ID NO: 616681 - RNA, 20 nt, Human
uuuuuuuuuuuuuuuuccag

SEQ ID NO: 616682 - RNA, 21 nt, Human
uuuuuuuuuuuuuuuuccaga

SEQ ID NO: 616683 - RNA, 18 nt, Human
uuuuuuuuuuuuuuuuug

SEQ ID NO: 616684 - RNA, 19 nt, Human
aacggcagaggguuggggg

SEQ ID NO: 616685 - RNA, 25 nt, Human
aacggcagaggguugggggcagugu

SEQ ID NO: 616686 - RNA, 20 nt, Human
accccaggccucccuaggcc

SEQ ID NO: 616687 - RNA, 21 nt, Human
agccuggggguacccaucaaa

SEQ ID NO: 616688 - RNA, 24 nt, Human
aggcaacggcagaggguugggggc

SEQ ID NO: 616689 - RNA, 21 nt, Human
aucacgcuaauacuaagcacu

SEQ ID NO: 616690 - RNA, 18 nt, Human
caaaccacccccagggac

SEQ ID NO: 616691 - RNA, 21 nt, Human
caagcaucacgcuaauacuaa

SEQ ID NO: 616692 - RNA, 19 nt, Human
cacagcaaaccacccccag

SEQ ID NO: 616693 - RNA, 22 nt, Human
cacagcaaaccacccccaggga

SEQ ID NO: 616694 - RNA, 20 nt, Human
cagcaccauugcugagcccc

SEQ ID NO: 616695 - RNA, 23 nt, Human
cagccgagucccagacgaggcuc

SEQ ID NO: 616696 - RNA, 21 nt, Human
cagccuucaguccuguccagg

SEQ ID NO: 616697 - RNA, 22 nt, Human
caugcagucacagcaaaccacc

SEQ ID NO: 616698 - RNA, 20 nt, Human
ccacagaccgcugugggugu

SEQ ID NO: 616699 - RNA, 20 nt, Human
ccacuggguccggcucugca

SEQ ID NO: 616700 - RNA, 18 nt, Human
ccccaggccucccuaggc

SEQ ID NO: 616701 - RNA, 23 nt, Human
ccccagggacucggcaucaccag

SEQ ID NO: 616702 - RNA, 21 nt, Human
ccccagguuaccccaggccuc

SEQ ID NO: 616703 - RNA, 21 nt, Human
cccccagguuaccccaggccu

SEQ ID NO: 616704 - RNA, 22 nt, Human
ccccuaagcuccaagaguucug

SEQ ID NO: 616705 - RNA, 24 nt, Human
cccgcccccgggcccagcccaaga

SEQ ID NO: 616706 - RNA, 20 nt, Human
cccgcugcgcgccgcaugca

SEQ ID NO: 616707 - RNA, 18 nt, Human
cccgggcccagcccaaga

SEQ ID NO: 616708 - RNA, 18 nt, Human
cccuaagcuccaagaguu

SEQ ID NO: 616709 - RNA, 19 nt, Human
ccgcccccgggcccagccc

SEQ ID NO: 616710 - RNA, 18 nt, Human
ccgccccgcuccgccugc

SEQ ID NO: 616711 - RNA, 19 nt, Human
ccgcuccgccugccuggcg

SEQ ID NO: 616712 - RNA, 20 nt, Human
ccucccuaggccagcuccag

SEQ ID NO: 616713 - RNA, 23 nt, Human
cgacgcagcaaaacugggcagag

SEQ ID NO: 616714 - RNA, 20 nt, Human
cggcagaggguugggggcag

SEQ ID NO: 616715 - RNA, 24 nt, Human
cggggcggggccgagcuugugcgc

SEQ ID NO: 616716 - RNA, 20 nt, Human
cgugggucuccccuaagcuc

SEQ ID NO: 616717 - RNA, 18 nt, Human
cugcagcaaacggguugu

SEQ ID NO: 616718 - RNA, 21 nt, Human
cugcccugggcggaggacaaa

SEQ ID NO: 616719 - RNA, 21 nt, Human
cugggcagaggggugggugug

SEQ ID NO: 616720 - RNA, 21 nt, Human
cugggcggaggacaaaggggg

SEQ ID NO: 616721 - RNA, 19 nt, Human
gagccccccagguuacccc

SEQ ID NO: 616722 - RNA, 18 nt, Human
gcagaggguugggggcag

SEQ ID NO: 616723 - RNA, 21 nt, Human
gcaguguguguguauuuguga

SEQ ID NO: 616724 - RNA, 18 nt, Human
gccgagcuugugcgcccc

SEQ ID NO: 616725 - RNA, 24 nt, Human
gcgacgcagcaaaacugggcagag

SEQ ID NO: 616726 - RNA, 18 nt, Human
ggacuaaaagccggggcg

SEQ ID NO: 616727 - RNA, 21 nt, Human
gggcagaggggugggugugag

SEQ ID NO: 616728 - RNA, 19 nt, Human
uaaccccaagcaucacgcu

SEQ ID NO: 616729 - RNA, 23 nt, Human
uaccccaggccucccuaggccag

SEQ ID NO: 616730 - RNA, 24 nt, Human
uaccccaggccucccuaggccagc

SEQ ID NO: 616731 - RNA, 22 nt, Human
uacuaagcacuuucccugcccu

SEQ ID NO: 616732 - RNA, 18 nt, Human
uaguaaaauauuucauuc

SEQ ID NO: 616733 - RNA, 19 nt, Human
uauuucauucaguacgucu

SEQ ID NO: 616734 - RNA, 18 nt, Human
uccuguccaggugggcau

SEQ ID NO: 616735 - RNA, 18 nt, Human
ucucuaccacagaccgcu

SEQ ID NO: 616736 - RNA, 24 nt, Human
ugagagaggcaacggcagaggguu

SEQ ID NO: 616737 - RNA, 21 nt, Human
ugagccccccagguuacccca

SEQ ID NO: 616738 - RNA, 18 nt, Human
ugcccugggcggaggaca

SEQ ID NO: 616739 - RNA, 21 nt, Human
ugcgcgccgcaugcagucaca

SEQ ID NO: 616740 - RNA, 21 nt, Human
uggggugacgcccaucugguu

SEQ ID NO: 616741 - RNA, 20 nt, Human
uggguguagccacugggucc

SEQ ID NO: 616742 - RNA, 20 nt, Human
ugguuuaccgcucaggguga

SEQ ID NO: 616743 - RNA, 18 nt, Human
uguagccacuggguccgg

SEQ ID NO: 616744 - RNA, 23 nt, Human
ugugucugcagaacuggggugac

SEQ ID NO: 616745 - RNA, 23 nt, Human
uugcugagccccccagguuaccc

SEQ ID NO: 616746 - RNA, 22 nt, Human
uuuccccagccuggggguaccc

SEQ ID NO: 616747 - RNA, 24 nt, Human
aaagugcugggauuacaggcauga

SEQ ID NO: 616748 - RNA, 24 nt, Human
aaaugucucuugaaccuagucacc

SEQ ID NO: 616749 - RNA, 22 nt, Human
aacuccucagcucaagcaaucu

SEQ ID NO: 616750 - RNA, 22 nt, Human
aagcaaaugucucuugaaccua

SEQ ID NO: 616751 - RNA, 19 nt, Human
aagugcugggauuacaggc

SEQ ID NO: 616752 - RNA, 21 nt, Human
aagugcugggauuacaggcau

SEQ ID NO: 616753 - RNA, 26 nt, Human
aagugcugggauuacaggcaugagcc

SEQ ID NO: 616754 - RNA, 23 nt, Human
agcaaucugcccaccccagccuc

SEQ ID NO: 616755 - RNA, 21 nt, Human
agggaagggaucuugcuaugu

SEQ ID NO: 616756 - RNA, 24 nt, Human
agggaucuugcuauguugcccagg

SEQ ID NO: 616757 - RNA, 18 nt, Human
agugcugggauuacaggc

SEQ ID NO: 616758 - RNA, 19 nt, Human
agugcugggauuacaggca

SEQ ID NO: 616759 - RNA, 22 nt, Human
auccucauuuuacagauaagga

SEQ ID NO: 616760 - RNA, 23 nt, Human
caaaacgcuaccauuucacacuc

SEQ ID NO: 616761 - RNA, 24 nt, Human
caccccagccucugaaagugcugg

SEQ ID NO: 616762 - RNA, 20 nt, Human
cacuaugggcccucaaaagg

SEQ ID NO: 616763 - RNA, 19 nt, Human
cagcacacuuuaauauuca

SEQ ID NO: 616764 - RNA, 28 nt, Human
cagcagcuccuccccuuucuagaggccu

SEQ ID NO: 616765 - RNA, 22 nt, Human
cccacucaagaggagcagaaau

SEQ ID NO: 616766 - RNA, 21 nt, Human
cccagccucugaaagugcugg

SEQ ID NO: 616767 - RNA, 19 nt, Human
cccaugagacccacucaag

SEQ ID NO: 616768 - RNA, 20 nt, Human
cccaugagacccacucaagg

SEQ ID NO: 616769 - RNA, 24 nt, Human
cccucuacauuuuuuucuuuaaaa

SEQ ID NO: 616770 - RNA, 22 nt, Human
cuaccaaguaauuaugccaugc

SEQ ID NO: 616771 - RNA, 24 nt, Human
cucaagcaaucugcccaccccagc

SEQ ID NO: 616772 - RNA, 21 nt, Human
cucagcucaagcaaucugccc

SEQ ID NO: 616773 - RNA, 19 nt, Human
cugcccaccccagccucug

SEQ ID NO: 616774 - RNA, 24 nt, Human
gaaagugcugggauuacaggcaug

SEQ ID NO: 616775 - RNA, 20 nt, Human
gaguccuacaugagcacccu

SEQ ID NO: 616776 - RNA, 18 nt, Human
gauuacaggcaugagcca

SEQ ID NO: 616777 - RNA, 21 nt, Human
gauuacaggcaugagccacca

SEQ ID NO: 616778 - RNA, 24 nt, Human
gauuacaggcaugagccaccaugu

SEQ ID NO: 616779 - RNA, 22 nt, Human
gccaugcguuucuucuaaccuu

SEQ ID NO: 616780 - RNA, 21 nt, Human
ggaaacugaggcuaagugacg

SEQ ID NO: 616781 - RNA, 21 nt, Human
ggaaagugcaccuguguuccc

SEQ ID NO: 616782 - RNA, 23 nt, Human
ggaagggaucuugcuauguugcc

SEQ ID NO: 616783 - RNA, 22 nt, Human
ggaucuugcuauguugcccagg

SEQ ID NO: 616784 - RNA, 24 nt, Human
ggauuacaggcaugagccaccaug

SEQ ID NO: 616785 - RNA, 19 nt, Human
gugcugggauuacaggcau

SEQ ID NO: 616786 - RNA, 24 nt, Human
uacaggcaugagccaccaugucca

SEQ ID NO: 616787 - RNA, 24 nt, Human
uaccauuucacacucccagaucua

SEQ ID NO: 616788 - RNA, 23 nt, Human
uagcuaccaaguaauuaugccuu

SEQ ID NO: 616789 - RNA, 23 nt, Human
uauguugcccaggcuggucucaa

SEQ ID NO: 616790 - RNA, 24 nt, Human
uauguugcccaggcuggucucaaa

SEQ ID NO: 616791 - RNA, 24 nt, Human
ucaccuggggggacaaguguggga

SEQ ID NO: 616792 - RNA, 20 nt, Human
ucccaugagacccacucaag

SEQ ID NO: 616793 - RNA, 23 nt, Human
ucucccuaugauagugugaagac

SEQ ID NO: 616794 - RNA, 24 nt, Human
ucugaaagugcugggauuacaggc

SEQ ID NO: 616795 - RNA, 18 nt, Human
ucuugaaccuagucaccu

SEQ ID NO: 616796 - RNA, 18 nt, Human
ucuugcuauguugcccag

SEQ ID NO: 616797 - RNA, 19 nt, Human
ucuugcuauguugcccagg

SEQ ID NO: 616798 - RNA, 23 nt, Human
ucuugcuauguugcccaggcugg

SEQ ID NO: 616799 - RNA, 24 nt, Human
ucuugcuauguugcccaggcuggu

SEQ ID NO: 616800 - RNA, 24 nt, Human
ugaaagugcugggauuacaggcau

SEQ ID NO: 616801 - RNA, 19 nt, Human
ugagacccacucaagagga

SEQ ID NO: 616802 - RNA, 27 nt, Human
ugagcacccuugcuacuacagcagcuc

SEQ ID NO: 616803 - RNA, 24 nt, Human
ugcccaggcuggucucaaacuccu

SEQ ID NO: 616804 - RNA, 24 nt, Human
ugcuauguugcccaggcuggucuc

SEQ ID NO: 616805 - RNA, 27 nt, Human
ugcuauguugcccaggcuggucucaaa

SEQ ID NO: 616806 - RNA, 22 nt, Human
uggccccucuacauuuuuuucu

SEQ ID NO: 616807 - RNA, 18 nt, Human
ugggauuacaggcaugag

SEQ ID NO: 616808 - RNA, 22 nt, Human
ugggauuacaggcaugagccac

SEQ ID NO: 616809 - RNA, 23 nt, Human
ugggauuacaggcaugagccacc

SEQ ID NO: 616810 - RNA, 24 nt, Human
ugggauuacaggcaugagccacca

SEQ ID NO: 616811 - RNA, 25 nt, Human
ugggauuacaggcaugagccaccau

SEQ ID NO: 616812 - RNA, 25 nt, Human
uucauguuuauuggccccucuacca

SEQ ID NO: 616813 - RNA, 18 nt, Human
uugcccaaggccacacag

SEQ ID NO: 616814 - RNA, 19 nt, Human
uuuguggggccaccaaaag

SEQ ID NO: 616815 - RNA, 25 nt, Human
aagaaaaaaagcacaaaugccaaga

SEQ ID NO: 616816 - RNA, 27 nt, Human
aagcagaacaaucccucaagaaaaaaa

SEQ ID NO: 616817 - RNA, 21 nt, Human
aaucuaugaaacaauuuccuu

SEQ ID NO: 616818 - RNA, 22 nt, Human
acccaucauacagccaggaagc

SEQ ID NO: 616819 - RNA, 22 nt, Human
agaaaaaaagcacaaaugccaa

SEQ ID NO: 616820 - RNA, 21 nt, Human
agaaauugaaaagaguaccau

SEQ ID NO: 616821 - RNA, 18 nt, Human
aggaagcagaacaauccc

SEQ ID NO: 616822 - RNA, 22 nt, Human
auacagccaggaagcagaacaa

SEQ ID NO: 616823 - RNA, 22 nt, Human
augugaucuguuuaauaugacu

SEQ ID NO: 616824 - RNA, 23 nt, Human
caaaugccaagaugcucuccaac

SEQ ID NO: 616825 - RNA, 21 nt, Human
caagaaaaaaagcacaaaugc

SEQ ID NO: 616826 - RNA, 24 nt, Human
caagaaaaaaagcacaaaugccaa

SEQ ID NO: 616827 - RNA, 18 nt, Human
cacaaaugccaagaugcu

SEQ ID NO: 616828 - RNA, 23 nt, Human
caccggcgcccucgccgggcucc

SEQ ID NO: 616829 - RNA, 23 nt, Human
cagaacaaagcaccggcgcccuc

SEQ ID NO: 616830 - RNA, 24 nt, Human
caucauacagccaggaagcagaac

SEQ ID NO: 616831 - RNA, 20 nt, Human
cgcggucaaacuuccuggcc

SEQ ID NO: 616832 - RNA, 20 nt, Human
cuggccucagacagaacaaa

SEQ ID NO: 616833 - RNA, 18 nt, Human
gcagaacaaucccucaag

SEQ ID NO: 616834 - RNA, 18 nt, Human
gcggucaaacuuccuggc

SEQ ID NO: 616835 - RNA, 28 nt, Human
uaccuuuauuaucaggagaaagaaugau

SEQ ID NO: 616836 - RNA, 25 nt, Human
ucaaacuuccuggccucagacagaa

SEQ ID NO: 616837 - RNA, 21 nt, Human
ucccucaagaaaaaaagcaca

SEQ ID NO: 616838 - RNA, 23 nt, Human
ucccucaagaaaaaaagcacaaa

SEQ ID NO: 616839 - RNA, 24 nt, Human
uucaauaccuuuauuaucaggaga

SEQ ID NO: 616840 - RNA, 20 nt, Human
uucauaacagauauucaaua

SEQ ID NO: 616841 - RNA, 19 nt, Human
aaacaauacccaaagguuu

SEQ ID NO: 616842 - RNA, 18 nt, Human
aacauuguuuuguuguug

SEQ ID NO: 616843 - RNA, 18 nt, Human
aagaaaaagcuggaucuc

SEQ ID NO: 616844 - RNA, 18 nt, Human
aauuaguaauuuauagaa

SEQ ID NO: 616845 - RNA, 18 nt, Human
acuguaccuaacaaaaac

SEQ ID NO: 616846 - RNA, 18 nt, Human
agaaaaacauucuuagaa

SEQ ID NO: 616847 - RNA, 23 nt, Human
agaaagccacuaaauauagcuaa

SEQ ID NO: 616848 - RNA, 21 nt, Human
agaauuccuucauucccacac

SEQ ID NO: 616849 - RNA, 23 nt, Human
agaauuccuucauucccacacuc

SEQ ID NO: 616850 - RNA, 26 nt, Human
agccacuaaauauagcuaaaauauuc

SEQ ID NO: 616851 - RNA, 28 nt, Human
auaauauuacacaaagcucaauuacauc

SEQ ID NO: 616852 - RNA, 23 nt, Human
aucaauaaauaagacuuccuaaa

SEQ ID NO: 616853 - RNA, 21 nt, Human
augaaagaaucccaagaauua

SEQ ID NO: 616854 - RNA, 24 nt, Human
augauaucuugccuuugauagguu

SEQ ID NO: 616855 - RNA, 27 nt, Human
caaaauaagauucagacguauuccauc

SEQ ID NO: 616856 - RNA, 23 nt, Human
caacuggaacauuaaaaccaaga

SEQ ID NO: 616857 - RNA, 25 nt, Human
caauggcaaccugcacauaagucuc

SEQ ID NO: 616858 - RNA, 19 nt, Human
cacaaagcucaauuacauc

SEQ ID NO: 616859 - RNA, 23 nt, Human
ccaacuuguuuuaaaaagcaaga

SEQ ID NO: 616860 - RNA, 30 nt, Human
ccaauauuuacuuaagaaacaauacccaaa

SEQ ID NO: 616861 - RNA, 22 nt, Human
ccaugauccagacuguaccuaa

SEQ ID NO: 616862 - RNA, 18 nt, Human
cugacauauuaaacugaa

SEQ ID NO: 616863 - RNA, 20 nt, Human
cuugccaaaaacaaaauaga

SEQ ID NO: 616864 - RNA, 21 nt, Human
gaacaauaucuauuauacuga

SEQ ID NO: 616865 - RNA, 25 nt, Human
gcuaaaauucucuuugccaccaaag

SEQ ID NO: 616866 - RNA, 21 nt, Human
ggaacauuaaaaccaagaaca

SEQ ID NO: 616867 - RNA, 23 nt, Human
guaaaaaacuauuuggaauaucg

SEQ ID NO: 616868 - RNA, 22 nt, Human
guccaauaaaugauaucuugcc

SEQ ID NO: 616869 - RNA, 21 nt, Human
guuugcuuaccaugauugucc

SEQ ID NO: 616870 - RNA, 23 nt, Human
uaaaaauagauauaacccagaua

SEQ ID NO: 616871 - RNA, 21 nt, Human
uaaaauaccaucaugcauuuc

SEQ ID NO: 616872 - RNA, 21 nt, Human
uaaauaccggcauaaagugaa

SEQ ID NO: 616873 - RNA, 20 nt, Human
uaaauccugcaaguuucaag

SEQ ID NO: 616874 - RNA, 23 nt, Human
uaagaaaaagcuggaucucagca

SEQ ID NO: 616875 - RNA, 21 nt, Human
uaagaaacaauacccaaaggu

SEQ ID NO: 616876 - RNA, 24 nt, Human
uaaggugaaaaaugcaguuacaga

SEQ ID NO: 616877 - RNA, 19 nt, Human
uacaugccaugauccagac

SEQ ID NO: 616878 - RNA, 18 nt, Human
uagauauaacccagauaa

SEQ ID NO: 616879 - RNA, 23 nt, Human
uauacaucuaaauccuacuuccc

SEQ ID NO: 616880 - RNA, 22 nt, Human
ucagcugaagacuuacaaaauc

SEQ ID NO: 616881 - RNA, 26 nt, Human
uccaauguaaaaaacuauuuggaauu

SEQ ID NO: 616882 - RNA, 25 nt, Human
uccacaucuagcuauucaucucccg

SEQ ID NO: 616883 - RNA, 18 nt, Human
ucccaugaaaauaaauua

SEQ ID NO: 616884 - RNA, 19 nt, Human
ucuacaugccaugauccag

SEQ ID NO: 616885 - RNA, 24 nt, Human
ucuauuauacugacauauuaaacu

SEQ ID NO: 616886 - RNA, 24 nt, Human
ucuguguaacagauuacaccacuu

SEQ ID NO: 616887 - RNA, 20 nt, Human
ucuucagacagguacagaca

SEQ ID NO: 616888 - RNA, 24 nt, Human
ugaaaaaugcaguuacagaacuaa

SEQ ID NO: 616889 - RNA, 22 nt, Human
ugacauaauauuacacaaagcu

SEQ ID NO: 616890 - RNA, 20 nt, Human
uggcaaccugugaccuaugu

SEQ ID NO: 616891 - RNA, 21 nt, Human
uggcaaccugugaccuauguu

SEQ ID NO: 616892 - RNA, 20 nt, Human
ugggauuuaaaaucaaaggu

SEQ ID NO: 616893 - RNA, 22 nt, Human
ugucaaaaagcuccagaauucc

SEQ ID NO: 616894 - RNA, 26 nt, Human
uguuaaaaaguucaaauaugcacauc

SEQ ID NO: 616895 - RNA, 21 nt, Human
uucaagaaguccaauaaauga

SEQ ID NO: 616896 - RNA, 20 nt, Human
uucaaggaauaaaauaccau

SEQ ID NO: 616897 - RNA, 21 nt, Human
uucaaggaauaaaauaccauc

SEQ ID NO: 616898 - RNA, 19 nt, Human
uucacuucuugccaaaaac

SEQ ID NO: 616899 - RNA, 22 nt, Human
uucccacacuccuacauguaaa

SEQ ID NO: 616900 - RNA, 20 nt, Human
uucccaugaaaauaaauuau

SEQ ID NO: 616901 - RNA, 21 nt, Human
uugccugcauucccaugaaaa

SEQ ID NO: 616902 - RNA, 20 nt, Human
uuguuuacauaucucuuucc

SEQ ID NO: 616903 - RNA, 23 nt, Human
uuuacauaucucuuuccacaucu

SEQ ID NO: 616904 - RNA, 21 nt, Human
uuuggaauaucguaaaggagc

SEQ ID NO: 616905 - RNA, 18 nt, Human
aaagugccuugcccugua

SEQ ID NO: 616906 - RNA, 23 nt, Human
acaguuuugucuuucugaaguuu

SEQ ID NO: 616907 - RNA, 24 nt, Human
acccccaacaggggcggcgaugac

SEQ ID NO: 616908 - RNA, 18 nt, Human
ccagcugaaggccgcuuc

SEQ ID NO: 616909 - RNA, 22 nt, Human
ccaguaaaaauggcaaacaguu

SEQ ID NO: 616910 - RNA, 21 nt, Human
gagcaaauguaagcuuauaau

SEQ ID NO: 616911 - RNA, 19 nt, Human
ggcgaugacacccucgaag

SEQ ID NO: 616912 - RNA, 21 nt, Human
ucagagcaaauguaagcuuau

SEQ ID NO: 616913 - RNA, 20 nt, Human
ugaagucauuuacuucagag

SEQ ID NO: 616914 - RNA, 21 nt, Human
ugccuugcccuguaugcucca

SEQ ID NO: 616915 - RNA, 21 nt, Human
uuggcaggggacacuuacuag

SEQ ID NO: 616916 - RNA, 18 nt, Human
aaccauaaagcagcacac

SEQ ID NO: 616917 - RNA, 22 nt, Human
aaccauaaagcagcacacaggg

SEQ ID NO: 616918 - RNA, 22 nt, Human
aaggaacugacccagacaugac

SEQ ID NO: 616919 - RNA, 25 nt, Human
aaggacacucucucacagcagcuuu

SEQ ID NO: 616920 - RNA, 20 nt, Human
aagggagaacaauguucugu

SEQ ID NO: 616921 - RNA, 19 nt, Human
acaaggaacugacccagac

SEQ ID NO: 616922 - RNA, 22 nt, Human
acagggacuucuuuacaccaaa

SEQ ID NO: 616923 - RNA, 19 nt, Human
agaaccugccgugccccuc

SEQ ID NO: 616924 - RNA, 20 nt, Human
agaacugagcuaaaaacuca

SEQ ID NO: 616925 - RNA, 27 nt, Human
agauaaaagguagaacugaggggaccc

SEQ ID NO: 616926 - RNA, 23 nt, Human
caacacacuccagaccauguuga

SEQ ID NO: 616927 - RNA, 18 nt, Human
caaggaacugacccagac

SEQ ID NO: 616928 - RNA, 20 nt, Human
cagaaccugccgugccccuc

SEQ ID NO: 616929 - RNA, 22 nt, Human
cagaugggaaaggacacucucu

SEQ ID NO: 616930 - RNA, 19 nt, Human
cagcccuuccuucugugcc

SEQ ID NO: 616931 - RNA, 21 nt, Human
ccagcccuuccuucugugccu

SEQ ID NO: 616932 - RNA, 20 nt, Human
ccgggacccuccacccggcg

SEQ ID NO: 616933 - RNA, 19 nt, Human
ccucagaaccugccgugcc

SEQ ID NO: 616934 - RNA, 24 nt, Human
ccucagaaccugccgugccccucc

SEQ ID NO: 616935 - RNA, 19 nt, Human
ccugccgugccccuccugg

SEQ ID NO: 616936 - RNA, 24 nt, Human
cgggacccuccacccggcggcugg

SEQ ID NO: 616937 - RNA, 24 nt, Human
cuaguaauaaugugucagauaaaa

SEQ ID NO: 616938 - RNA, 19 nt, Human
cuaguucauucuucucucc

SEQ ID NO: 616939 - RNA, 20 nt, Human
cuaguucauucuucucucca

SEQ ID NO: 616940 - RNA, 25 nt, Human
cucaaacuuuaaaaauguacagcaa

SEQ ID NO: 616941 - RNA, 24 nt, Human
cuccuggaugcaccaggaaaguca

SEQ ID NO: 616942 - RNA, 18 nt, Human
gaaacagaacaccaaguu

SEQ ID NO: 616943 - RNA, 22 nt, Human
gaagaaagguuuauuuagccaa

SEQ ID NO: 616944 - RNA, 21 nt, Human
gcacacagggacuucuuuaca

SEQ ID NO: 616945 - RNA, 21 nt, Human
gccaaagagaaucugagaauc

SEQ ID NO: 616946 - RNA, 22 nt, Human
gcccuuccuucugugccugcca

SEQ ID NO: 616947 - RNA, 23 nt, Human
ggcaggcggacucagcccgugcc

SEQ ID NO: 616948 - RNA, 21 nt, Human
ggccgggacccuccacccggc

SEQ ID NO: 616949 - RNA, 19 nt, Human
gggacccuccacccggcgg

SEQ ID NO: 616950 - RNA, 19 nt, Human
uaaagcagcacacagggac

SEQ ID NO: 616951 - RNA, 23 nt, Human
uaaagcagcacacagggacuucu

SEQ ID NO: 616952 - RNA, 21 nt, Human
uaacaaaguuaacacuaguaa

SEQ ID NO: 616953 - RNA, 27 nt, Human
uacaaggaacugacccagacaugacag

SEQ ID NO: 616954 - RNA, 18 nt, Human
uagaacugagcuaaaaac

SEQ ID NO: 616955 - RNA, 23 nt, Human
uagauacaaggaacugacccaga

SEQ ID NO: 616956 - RNA, 18 nt, Human
ucacagcagcuuugcucc

SEQ ID NO: 616957 - RNA, 22 nt, Human
ucacagcagcuuugcuccaguc

SEQ ID NO: 616958 - RNA, 19 nt, Human
uccagucaccaagcccaac

SEQ ID NO: 616959 - RNA, 18 nt, Human
uccgcaacacacuccaga

SEQ ID NO: 616960 - RNA, 21 nt, Human
ucuaguucauucuucucucca

SEQ ID NO: 616961 - RNA, 24 nt, Human
ucuaguucauucuucucuccauuu

SEQ ID NO: 616962 - RNA, 19 nt, Human
ucucacagcagcuuugcuc

SEQ ID NO: 616963 - RNA, 21 nt, Human
ugcuccagucaccaagcccaa

SEQ ID NO: 616964 - RNA, 24 nt, Human
uggcggcucgugaccccgcccccu

SEQ ID NO: 616965 - RNA, 19 nt, Human
ugggaaaggacacucucuc

SEQ ID NO: 616966 - RNA, 20 nt, Human
uguaguccgcaacacacucc

SEQ ID NO: 616967 - RNA, 23 nt, Human
uucacauaugaaaacuggaagag

SEQ ID NO: 616968 - RNA, 19 nt, Human
uugaguuaccucagaaccu

SEQ ID NO: 616969 - RNA, 19 nt, Human
aacagaaaggaaacuauaa

SEQ ID NO: 616970 - RNA, 23 nt, Human
aaccgcacaacuccaucauagga

SEQ ID NO: 616971 - RNA, 21 nt, Human
cacucauagauggccuggcua

SEQ ID NO: 616972 - RNA, 20 nt, Human
caugacgccgagcccugcuc

SEQ ID NO: 616973 - RNA, 25 nt, Human
cugaccucaccccggucacauauac

SEQ ID NO: 616974 - RNA, 22 nt, Human
cugguuacaaaauagaggcuga

SEQ ID NO: 616975 - RNA, 20 nt, Human
gagcagcucccggcaggaga

SEQ ID NO: 616976 - RNA, 32 nt, Human
ggagacacacauuccucacagcauugccccuu

SEQ ID NO: 616977 - RNA, 19 nt, Human
gugggaacagaaaggaaac

SEQ ID NO: 616978 - RNA, 25 nt, Human
uaaugauuuuuuuuucacguagcuu

SEQ ID NO: 616979 - RNA, 23 nt, Human
uacaaaauagaggcugacacuga

SEQ ID NO: 616980 - RNA, 21 nt, Human
uacacguggugcaggcauuuu

SEQ ID NO: 616981 - RNA, 20 nt, Human
uacuugugggaacagaaagg

SEQ ID NO: 616982 - RNA, 19 nt, Human
uaggagcagcucccggcag

SEQ ID NO: 616983 - RNA, 21 nt, Human
ucaaacuauucacccaacagc

SEQ ID NO: 616984 - RNA, 22 nt, Human
ucaaacuauucacccaacagca

SEQ ID NO: 616985 - RNA, 24 nt, Human
ucauccugguuacaaaauagaggc

SEQ ID NO: 616986 - RNA, 19 nt, Human
ucccuuucaucuccucaac

SEQ ID NO: 616987 - RNA, 20 nt, Human
ucucaggggcaggcaggccu

SEQ ID NO: 616988 - RNA, 24 nt, Human
ugcucugacccuuuccgcaucuca

SEQ ID NO: 616989 - RNA, 19 nt, Human
ugggaacagaaaggaaacu

SEQ ID NO: 616990 - RNA, 19 nt, Human
uggguguauuauaaaauuu

SEQ ID NO: 616991 - RNA, 28 nt, Human
ugugggaacagaaaggaaacuauaauac

SEQ ID NO: 616992 - RNA, 24 nt, Human
uugcccaugacgccgagcccugcu

SEQ ID NO: 616993 - RNA, 21 nt, Human
aaaaagcaccuagaggaaugg

SEQ ID NO: 616994 - RNA, 23 nt, Human
aaaaagcaccuagaggaauggag

SEQ ID NO: 616995 - RNA, 20 nt, Human
aaacagguguguccgguuua

SEQ ID NO: 616996 - RNA, 20 nt, Human
aaacagguguguccgguuua

SEQ ID NO: 616997 - RNA, 20 nt, Human
aaccaaaaacuaaacuacag

SEQ ID NO: 616998 - RNA, 23 nt, Human
aaccacaacaaaccaaaaacuaa

SEQ ID NO: 616999 - RNA, 22 nt, Human
aagaaaaaaacuaaaauauucu

SEQ ID NO: 617000 - RNA, 22 nt, Human
aagaaaaaaacuaaaauauucu

SEQ ID NO: 617001 - RNA, 19 nt, Human
aagcagccuuacauuugaa

SEQ ID NO: 617002 - RNA, 19 nt, Human
aagcugucucuuccugcug

SEQ ID NO: 617003 - RNA, 20 nt, Human
aauaacagcagcagcacaaa

SEQ ID NO: 617004 - RNA, 22 nt, Human
acugacuaggccuggauaaugu

SEQ ID NO: 617005 - RNA, 19 nt, Human
acugaguccauuacucauu

SEQ ID NO: 617006 - RNA, 22 nt, Human
acugaguccauuacucauuccc

SEQ ID NO: 617007 - RNA, 21 nt, Human
acuucuauuucuuccuguguu

SEQ ID NO: 617008 - RNA, 21 nt, Human
agaaaaacuggauccugcagg

SEQ ID NO: 617009 - RNA, 21 nt, Human
agcagcacaaaucccaggauu

SEQ ID NO: 617010 - RNA, 24 nt, Human
auaacagcagcagcacaaauccca

SEQ ID NO: 617011 - RNA, 23 nt, Human
auccuccucuucuuccucuucac

SEQ ID NO: 617012 - RNA, 25 nt, Human
auccuccucuucuuccucuucacug

SEQ ID NO: 617013 - RNA, 23 nt, Human
augaaacuaugaaaaaaugggcu

SEQ ID NO: 617014 - RNA, 21 nt, Human
caaaaccaugacuaauauuag

SEQ ID NO: 617015 - RNA, 18 nt, Human
caaaacucagcaccuccu

SEQ ID NO: 617016 - RNA, 18 nt, Human
caaaacucagcaccuccu

SEQ ID NO: 617017 - RNA, 20 nt, Human
caaaacucagcaccuccuuc

SEQ ID NO: 617018 - RNA, 20 nt, Human
caaaacucagcaccuccuuc

SEQ ID NO: 617019 - RNA, 20 nt, Human
caaaucccaggauucucaaa

SEQ ID NO: 617020 - RNA, 22 nt, Human
caaaugaaacuaugaaaaaaug

SEQ ID NO: 617021 - RNA, 21 nt, Human
caagucucgguagcuucuccg

SEQ ID NO: 617022 - RNA, 19 nt, Human
cacaaaucccaggauucuc

SEQ ID NO: 617023 - RNA, 18 nt, Human
cagauacaaccucccaag

SEQ ID NO: 617024 - RNA, 25 nt, Human
caggaggccauguggacuaaaacca

SEQ ID NO: 617025 - RNA, 25 nt, Human
caggaggccauguggacuaaaacca

SEQ ID NO: 617026 - RNA, 22 nt, Human
caggauucucaaagcaguucca

SEQ ID NO: 617027 - RNA, 22 nt, Human
ccaagaaaaacuggauccugca

SEQ ID NO: 617028 - RNA, 23 nt, Human
ccagguucagaaaaagcaccuag

SEQ ID NO: 617029 - RNA, 22 nt, Human
cccuuggcuucuuucacucacu

SEQ ID NO: 617030 - RNA, 18 nt, Human
ccgguuuaauaaaaaggg

SEQ ID NO: 617031 - RNA, 18 nt, Human
ccgguuuaauaaaaaggg

SEQ ID NO: 617032 - RNA, 25 nt, Human
ccuccuguagcgcagugugggagag

SEQ ID NO: 617033 - RNA, 23 nt, Human
ccuccuucauuaaaaauaaaggu

SEQ ID NO: 617034 - RNA, 23 nt, Human
ccuccuucauuaaaaauaaaggu

SEQ ID NO: 617035 - RNA, 18 nt, Human
ccuuaugaccagauacaa

SEQ ID NO: 617036 - RNA, 18 nt, Human
ccuuuauacucucauaag

SEQ ID NO: 617037 - RNA, 18 nt, Human
ccuuuauacucucauaag

SEQ ID NO: 617038 - RNA, 26 nt, Human
cgaaaugggaaacagguguguccccu

SEQ ID NO: 617039 - RNA, 19 nt, Human
cgggagacuuugaguggcu

SEQ ID NO: 617040 - RNA, 19 nt, Human
cuaaaaccaaacugagucc

SEQ ID NO: 617041 - RNA, 19 nt, Human
cuaaaaccaaacugagucc

SEQ ID NO: 617042 - RNA, 19 nt, Human
cuagcaauuuaggucaaaa

SEQ ID NO: 617043 - RNA, 19 nt, Human
cucuaauucucugccccuc

SEQ ID NO: 617044 - RNA, 22 nt, Human
cuucacaguuccugcugggacu

SEQ ID NO: 617045 - RNA, 21 nt, Human
cuugcuccgaugccuuucucg

SEQ ID NO: 617046 - RNA, 23 nt, Human
cuuucaaaacugcuacaaaccag

SEQ ID NO: 617047 - RNA, 21 nt, Human
gagcacuaacucgaggcucca

SEQ ID NO: 617048 - RNA, 23 nt, Human
gaggggcuucuccuuuugggaga

SEQ ID NO: 617049 - RNA, 19 nt, Human
gaucugugccgccgaucuc

SEQ ID NO: 617050 - RNA, 24 nt, Human
gaucuuaauccuuccacauacaga

SEQ ID NO: 617051 - RNA, 24 nt, Human
gaucuuaauccuuccacauacaga

SEQ ID NO: 617052 - RNA, 19 nt, Human
ggacuuggaacgggaucug

SEQ ID NO: 617053 - RNA, 23 nt, Human
ggauccugcagggcagcuggucu

SEQ ID NO: 617054 - RNA, 22 nt, Human
ggccauuccaguuuucaauagg

SEQ ID NO: 617055 - RNA, 21 nt, Human
uaaaaaaugcuuuaauacugc

SEQ ID NO: 617056 - RNA, 19 nt, Human
uaaaaagauacaaaacuca

SEQ ID NO: 617057 - RNA, 19 nt, Human
uaaaaagauacaaaacuca

SEQ ID NO: 617058 - RNA, 21 nt, Human
uaaacagcuuaggcgaccacc

SEQ ID NO: 617059 - RNA, 23 nt, Human
uaaacucuggucccuaucuccaa

SEQ ID NO: 617060 - RNA, 24 nt, Human
uaacagcagcagcacaaaucccag

SEQ ID NO: 617061 - RNA, 24 nt, Human
uaagaaaaaaacuaaaauauucuu

SEQ ID NO: 617062 - RNA, 24 nt, Human
uaagaaaaaaacuaaaauauucuu

SEQ ID NO: 617063 - RNA, 25 nt, Human
uaagaaaaaaacuaaaauauucuua

SEQ ID NO: 617064 - RNA, 25 nt, Human
uaagaaaaaaacuaaaauauucuua

SEQ ID NO: 617065 - RNA, 24 nt, Human
uaaguuugaauacagucaagguuc

SEQ ID NO: 617066 - RNA, 24 nt, Human
uaaguuugaauacagucaagguuc

SEQ ID NO: 617067 - RNA, 20 nt, Human
uaauauuagauacuuuccuc

SEQ ID NO: 617068 - RNA, 23 nt, Human
uaccaccauccucuaauucucug

SEQ ID NO: 617069 - RNA, 19 nt, Human
uaccacuugcugcugcugg

SEQ ID NO: 617070 - RNA, 22 nt, Human
uaccuuaugaccagauacaacc

SEQ ID NO: 617071 - RNA, 22 nt, Human
uaggucaaaaccaugacuaaua

SEQ ID NO: 617072 - RNA, 22 nt, Human
ucaaucccguuacccuacugcu

SEQ ID NO: 617073 - RNA, 25 nt, Human
ucaauucuggccuagaucgcuaugu

SEQ ID NO: 617074 - RNA, 22 nt, Human
ucacucucuccuaauucuccug

SEQ ID NO: 617075 - RNA, 20 nt, Human
ucauauccccaaccuccaga

SEQ ID NO: 617076 - RNA, 20 nt, Human
ucauauccccaaccuccaga

SEQ ID NO: 617077 - RNA, 19 nt, Human
ucauccauguccucuucca

SEQ ID NO: 617078 - RNA, 18 nt, Human
uccacaucauccaugucc

SEQ ID NO: 617079 - RNA, 21 nt, Human
uccccaaccuccagauccuuu

SEQ ID NO: 617080 - RNA, 21 nt, Human
uccccaaccuccagauccuuu

SEQ ID NO: 617081 - RNA, 18 nt, Human
ucggcgaggggaggggcu

SEQ ID NO: 617082 - RNA, 20 nt, Human
ucgggaccugcugcggugac

SEQ ID NO: 617083 - RNA, 21 nt, Human
ucuaaaagcugucucuuccug

SEQ ID NO: 617084 - RNA, 18 nt, Human
ucuagagcaggcauagaa

SEQ ID NO: 617085 - RNA, 24 nt, Human
ucucuguugaacuguuugaugaaa

SEQ ID NO: 617086 - RNA, 24 nt, Human
ucuuauugacagauuccaccauua

SEQ ID NO: 617087 - RNA, 19 nt, Human
ucuucuagcaaagaucuua

SEQ ID NO: 617088 - RNA, 21 nt, Human
ugaccagauacaaccucccaa

SEQ ID NO: 617089 - RNA, 18 nt, Human
ugaguggcuccugugucu

SEQ ID NO: 617090 - RNA, 19 nt, Human
ugcugcugcuggaaaaaag

SEQ ID NO: 617091 - RNA, 19 nt, Human
ugcugggacuacaguugca

SEQ ID NO: 617092 - RNA, 20 nt, Human
ugcugggacuacaguugcag

SEQ ID NO: 617093 - RNA, 22 nt, Human
uggaggcuuuuuaguccuuccu

SEQ ID NO: 617094 - RNA, 21 nt, Human
uggauccugcagggcagcugg

SEQ ID NO: 617095 - RNA, 26 nt, Human
uggauccugcagggcagcuggucuuc

SEQ ID NO: 617096 - RNA, 23 nt, Human
uggccacagccuuuccuugucag

SEQ ID NO: 617097 - RNA, 23 nt, Human
uggccacagccuuuccuugucag

SEQ ID NO: 617098 - RNA, 23 nt, Human
ugggacuacaguugcagaaguca

SEQ ID NO: 617099 - RNA, 21 nt, Human
ugggagaccggcuccuacucc

SEQ ID NO: 617100 - RNA, 19 nt, Human
uggucccuaucuccaacuu

SEQ ID NO: 617101 - RNA, 20 nt, Human
uguccucuuccagagcacua

SEQ ID NO: 617102 - RNA, 19 nt, Human
uguggacuaaaaccaaacu

SEQ ID NO: 617103 - RNA, 21 nt, Human
uguggacuaaaaccaaacuga

SEQ ID NO: 617104 - RNA, 25 nt, Human
uguuuuacuccuuugaucuuugaau

SEQ ID NO: 617105 - RNA, 24 nt, Human
uuaugaccagauacaaccucccaa

SEQ ID NO: 617106 - RNA, 19 nt, Human
uucauuacuaccaccaucc

SEQ ID NO: 617107 - RNA, 23 nt, Human
uuccaaccacaacaaaccaaaaa

SEQ ID NO: 617108 - RNA, 24 nt, Human
uuccuugucagucauauccccaac

SEQ ID NO: 617109 - RNA, 20 nt, Human
uugaauaacagcagcagcac

SEQ ID NO: 617110 - RNA, 21 nt, Human
uuuccaacuucucauccuccu

SEQ ID NO: 617111 - RNA, 23 nt, Human
uuuucauuacuaccaccauccuc

SEQ ID NO: 617112 - RNA, 27 nt, Human
uuuuuuuuuuuuuuuuuuuuuuauggg

SEQ ID NO: 617113 - RNA, 23 nt, Human
aaaaaacaaguggaaagaaaaga

SEQ ID NO: 617114 - RNA, 19 nt, Human
aaagccacccagaaagugg

SEQ ID NO: 617115 - RNA, 20 nt, Human
aacagaggaacagauaugga

SEQ ID NO: 617116 - RNA, 20 nt, Human
aacauggugaaacccugucu

SEQ ID NO: 617117 - RNA, 21 nt, Human
aacauggugaaacccugucuc

SEQ ID NO: 617118 - RNA, 26 nt, Human
aagcagguggauuaccugcggucagg

SEQ ID NO: 617119 - RNA, 24 nt, Human
aaguggaaagaaaagaugggguga

SEQ ID NO: 617120 - RNA, 24 nt, Human
aauugcuugaaccugggaggugga

SEQ ID NO: 617121 - RNA, 22 nt, Human
acagugagacucugucucaaaa

SEQ ID NO: 617122 - RNA, 21 nt, Human
accacacccagcuuggccugc

SEQ ID NO: 617123 - RNA, 23 nt, Human
accacacccagcuuggccugcag

SEQ ID NO: 617124 - RNA, 22 nt, Human
accagcugcaagccaggagccc

SEQ ID NO: 617125 - RNA, 23 nt, Human
acccaaaaagccacccagaaagu

SEQ ID NO: 617126 - RNA, 23 nt, Human
acccagaaagugggaaaaggaac

SEQ ID NO: 617127 - RNA, 24 nt, Human
acccugucucuacuaaaaauacaa

SEQ ID NO: 617128 - RNA, 24 nt, Human
accugcggucaggaguucaagacc

SEQ ID NO: 617129 - RNA, 18 nt, Human
acugcaguucagccuggg

SEQ ID NO: 617130 - RNA, 24 nt, Human
acugcaguucagccugggugacag

SEQ ID NO: 617131 - RNA, 18 nt, Human
agacaggagcugaggcag

SEQ ID NO: 617132 - RNA, 27 nt, Human
agacaggagcugaggcagaagggaccc

SEQ ID NO: 617133 - RNA, 21 nt, Human
agagcaagaguggguuucuuc

SEQ ID NO: 617134 - RNA, 19 nt, Human
agagucuauccauuccugu

SEQ ID NO: 617135 - RNA, 21 nt, Human
agaugcugggggaauuugggg

SEQ ID NO: 617136 - RNA, 20 nt, Human
agcacuuugggaggccgaag

SEQ ID NO: 617137 - RNA, 24 nt, Human
agccugaggcaggauaauugcuug

SEQ ID NO: 617138 - RNA, 22 nt, Human
agccuggccaacauggugaaac

SEQ ID NO: 617139 - RNA, 24 nt, Human
agccuggccaacauggugaaaccc

SEQ ID NO: 617140 - RNA, 22 nt, Human
agccugggugacagugagacuc

SEQ ID NO: 617141 - RNA, 22 nt, Human
aggaaacugaggcccggggggu

SEQ ID NO: 617142 - RNA, 22 nt, Human
aggcaggauaauugcuugaacc

SEQ ID NO: 617143 - RNA, 24 nt, Human
aggcaggauaauugcuugaaccug

SEQ ID NO: 617144 - RNA, 19 nt, Human
agggcucagcaagacagga

SEQ ID NO: 617145 - RNA, 22 nt, Human
aggggguggaggggggcuccuu

SEQ ID NO: 617146 - RNA, 24 nt, Human
agguggagguugcagugagccuag

SEQ ID NO: 617147 - RNA, 27 nt, Human
agugagccuagaucacaccacugcagu

SEQ ID NO: 617148 - RNA, 24 nt, Human
aguugcacaugccuguaaucccag

SEQ ID NO: 617149 - RNA, 22 nt, Human
auagagcccagcuccuccaagc

SEQ ID NO: 617150 - RNA, 20 nt, Human
aucaaggaauggaaagaagc

SEQ ID NO: 617151 - RNA, 24 nt, Human
aucacaccacugcaguucagccug

SEQ ID NO: 617152 - RNA, 19 nt, Human
augguuccagcuucuggag

SEQ ID NO: 617153 - RNA, 22 nt, Human
auguucaaaugcccaccagcau

SEQ ID NO: 617154 - RNA, 24 nt, Human
auuaccugcggucaggaguucaag

SEQ ID NO: 617155 - RNA, 19 nt, Human
caaaaagccacccagaaag

SEQ ID NO: 617156 - RNA, 21 nt, Human
caaaaagccacccagaaagug

SEQ ID NO: 617157 - RNA, 24 nt, Human
caacauggugaaacccugucucua

SEQ ID NO: 617158 - RNA, 24 nt, Human
caagaccagccuggccaacauggu

SEQ ID NO: 617159 - RNA, 21 nt, Human
caagccaggagccccgugggu

SEQ ID NO: 617160 - RNA, 24 nt, Human
caccacugcgaagggagccgaagg

SEQ ID NO: 617161 - RNA, 21 nt, Human
cacugcaguucagccugggug

SEQ ID NO: 617162 - RNA, 23 nt, Human
cagcaagacaggagcugaggcag

SEQ ID NO: 617163 - RNA, 24 nt, Human
cagcacuuugggaggccgaagcag

SEQ ID NO: 617164 - RNA, 26 nt, Human
cagcacuuugggaggccgaagcaggu

SEQ ID NO: 617165 - RNA, 18 nt, Human
cagcuccuccaagccucu

SEQ ID NO: 617166 - RNA, 19 nt, Human
cagcugcaagccaggagcc

SEQ ID NO: 617167 - RNA, 19 nt, Human
caggagccccgugggucac

SEQ ID NO: 617168 - RNA, 19 nt, Human
caggcccagccuuggccaa

SEQ ID NO: 617169 - RNA, 18 nt, Human
cagggcccaggucgaugg

SEQ ID NO: 617170 - RNA, 21 nt, Human
caguagaggggcgugugugug

SEQ ID NO: 617171 - RNA, 20 nt, Human
cagugcugggggccaucgug

SEQ ID NO: 617172 - RNA, 23 nt, Human
cagugcugggggccaucguggca

SEQ ID NO: 617173 - RNA, 20 nt, Human
ccacugcaguucagccuggg

SEQ ID NO: 617174 - RNA, 21 nt, Human
ccacugcaguucagccugggu

SEQ ID NO: 617175 - RNA, 23 nt, Human
ccacugcaguucagccuggguga

SEQ ID NO: 617176 - RNA, 24 nt, Human
ccacugcaguucagccugggugac

SEQ ID NO: 617177 - RNA, 18 nt, Human
cccagcuuggccugcagc

SEQ ID NO: 617178 - RNA, 18 nt, Human
ccccgccgccuaauaugc

SEQ ID NO: 617179 - RNA, 22 nt, Human
cccuaaauaccacacccagcuu

SEQ ID NO: 617180 - RNA, 23 nt, Human
cccucugaggggggcagagggcg

SEQ ID NO: 617181 - RNA, 22 nt, Human
ccuagaucacaccacugcaguu

SEQ ID NO: 617182 - RNA, 18 nt, Human
ccucugccagcccccagg

SEQ ID NO: 617183 - RNA, 23 nt, Human
ccugcagcauccuggcugggugg

SEQ ID NO: 617184 - RNA, 18 nt, Human
ccugcugagcugcccuaa

SEQ ID NO: 617185 - RNA, 22 nt, Human
ccuggccaacauggugaaaccc

SEQ ID NO: 617186 - RNA, 24 nt, Human
ccuggccaacauggugaaacccug

SEQ ID NO: 617187 - RNA, 21 nt, Human
ccugggagguggagguugcag

SEQ ID NO: 617188 - RNA, 20 nt, Human
ccugggugacagugagacuc

SEQ ID NO: 617189 - RNA, 22 nt, Human
ccuguaaucccagcacuuuggg

SEQ ID NO: 617190 - RNA, 19 nt, Human
ccuguaaucccagcuacuu

SEQ ID NO: 617191 - RNA, 21 nt, Human
ccuguaaucccagcuacuugg

SEQ ID NO: 617192 - RNA, 21 nt, Human
ccugugaccuugagaaccuca

SEQ ID NO: 617193 - RNA, 24 nt, Human
ccuuccaccccgguagggugguuu

SEQ ID NO: 617194 - RNA, 26 nt, Human
cgaagcagguggauuaccugcgguca

SEQ ID NO: 617195 - RNA, 19 nt, Human
cgaagggagccgaagggcg

SEQ ID NO: 617196 - RNA, 20 nt, Human
cgccuguaaucccagcacuu

SEQ ID NO: 617197 - RNA, 23 nt, Human
cgccuguaaucccagcacuuugg

SEQ ID NO: 617198 - RNA, 22 nt, Human
cggggggucuggaugaugguga

SEQ ID NO: 617199 - RNA, 21 nt, Human
cgugugugugugugugugugu

SEQ ID NO: 617200 - RNA, 20 nt, Human
cucacauucugcagacuuug

SEQ ID NO: 617201 - RNA, 26 nt, Human
cucagcaagacaggagcugaggcaga

SEQ ID NO: 617202 - RNA, 24 nt, Human
cugaaaucauaaccgucaggccca

SEQ ID NO: 617203 - RNA, 18 nt, Human
cugaccauggggacaagu

SEQ ID NO: 617204 - RNA, 21 nt, Human
cugcugagcugcccuaaauac

SEQ ID NO: 617205 - RNA, 23 nt, Human
cugcugagcugcccuaaauacca

SEQ ID NO: 617206 - RNA, 18 nt, Human
cuggagcagugcuggggg

SEQ ID NO: 617207 - RNA, 21 nt, Human
cuggagcagugcugggggcca

SEQ ID NO: 617208 - RNA, 18 nt, Human
cuggaggcuggguggggg

SEQ ID NO: 617209 - RNA, 21 nt, Human
cuggaggcugggugggggugg

SEQ ID NO: 617210 - RNA, 24 nt, Human
cuggccaacauggugaaacccugu

SEQ ID NO: 617211 - RNA, 19 nt, Human
cuggguggggguggggugg

SEQ ID NO: 617212 - RNA, 24 nt, Human
cuggguggggguggggugggggug

SEQ ID NO: 617213 - RNA, 21 nt, Human
cuuggccugcagcauccuggc

SEQ ID NO: 617214 - RNA, 19 nt, Human
gaaacccugucucuacuaa

SEQ ID NO: 617215 - RNA, 19 nt, Human
gacgucucuggaaaggagg

SEQ ID NO: 617216 - RNA, 26 nt, Human
gaggcugggugggggugggguggggg

SEQ ID NO: 617217 - RNA, 19 nt, Human
gagguugcagugagccuag

SEQ ID NO: 617218 - RNA, 23 nt, Human
gauuaccugcggucaggaguuca

SEQ ID NO: 617219 - RNA, 24 nt, Human
gauuaccugcggucaggaguucaa

SEQ ID NO: 617220 - RNA, 19 nt, Human
gcacaugccuguaauccca

SEQ ID NO: 617221 - RNA, 19 nt, Human
gcaggacagcugggucucc

SEQ ID NO: 617222 - RNA, 22 nt, Human
gcagggcuggcugcugggaggg

SEQ ID NO: 617223 - RNA, 24 nt, Human
gcagugcugggggccaucguggca

SEQ ID NO: 617224 - RNA, 24 nt, Human
gccaacauggugaaacccugucuc

SEQ ID NO: 617225 - RNA, 21 nt, Human
gccaggcaccugcugucugcc

SEQ ID NO: 617226 - RNA, 20 nt, Human
gccuagaucacaccacugca

SEQ ID NO: 617227 - RNA, 20 nt, Human
gccuguaaucccagcuacuu

SEQ ID NO: 617228 - RNA, 22 nt, Human
gcuggcugcugggagggggcag

SEQ ID NO: 617229 - RNA, 19 nt, Human
ggaaagaagcugggcuggg

SEQ ID NO: 617230 - RNA, 19 nt, Human
ggaggagcauguucaaaug

SEQ ID NO: 617231 - RNA, 20 nt, Human
ggagguugcagugagccuag

SEQ ID NO: 617232 - RNA, 24 nt, Human
ggagguugcagugagccuagauca

SEQ ID NO: 617233 - RNA, 19 nt, Human
ggcgcuggugcccccugcc

SEQ ID NO: 617234 - RNA, 19 nt, Human
ggcgugugugugugugugu

SEQ ID NO: 617235 - RNA, 23 nt, Human
ggcuggguggcuugcgccuguaa

SEQ ID NO: 617236 - RNA, 24 nt, Human
gggacgucucuggaaaggaggagg

SEQ ID NO: 617237 - RNA, 19 nt, Human
gggcggggugacagagggg

SEQ ID NO: 617238 - RNA, 23 nt, Human
gggcgugugugugugugugugug

SEQ ID NO: 617239 - RNA, 24 nt, Human
gggcuggcugcugggagggggcag

SEQ ID NO: 617240 - RNA, 20 nt, Human
ggggccucugccagccccca

SEQ ID NO: 617241 - RNA, 19 nt, Human
ggggugggguggggguggg

SEQ ID NO: 617242 - RNA, 23 nt, Human
gggugaguugcacaugccuguaa

SEQ ID NO: 617243 - RNA, 18 nt, Human
gggugggguggggguggg

SEQ ID NO: 617244 - RNA, 23 nt, Human
gguggcuugcgccuguaauccca

SEQ ID NO: 617245 - RNA, 24 nt, Human
gguggcuugcgccuguaaucccag

SEQ ID NO: 617246 - RNA, 23 nt, Human
ggugggggugggguggggguggg

SEQ ID NO: 617247 - RNA, 24 nt, Human
guagagcaagaguggguuucuucc

SEQ ID NO: 617248 - RNA, 23 nt, Human
gugacagaggggcuggagcagug

SEQ ID NO: 617249 - RNA, 22 nt, Human
gugacagugagacucugucuca

SEQ ID NO: 617250 - RNA, 24 nt, Human
gugacagugagacucugucucaaa

SEQ ID NO: 617251 - RNA, 19 nt, Human
guggacccaaaaagccacc

SEQ ID NO: 617252 - RNA, 21 nt, Human
gugugugugugugugugugug

SEQ ID NO: 617253 - RNA, 21 nt, Human
gugugugugugugugugugug

SEQ ID NO: 617254 - RNA, 21 nt, Human
gugugugugugugugugugug

SEQ ID NO: 617255 - RNA, 21 nt, Human
gugugugugugugugugugug

SEQ ID NO: 617256 - RNA, 21 nt, Human
gugugugugugugugugugug

SEQ ID NO: 617257 - RNA, 18 nt, Human
uaaaaauacaaaauuagc

SEQ ID NO: 617258 - RNA, 19 nt, Human
uaaaaauacaaaauuagcu

SEQ ID NO: 617259 - RNA, 21 nt, Human
uaauaugcaacauuagggcag

SEQ ID NO: 617260 - RNA, 21 nt, Human
uaccacacccagcuuggccug

SEQ ID NO: 617261 - RNA, 21 nt, Human
uaucaaggaauggaaagaagc

SEQ ID NO: 617262 - RNA, 24 nt, Human
uaucaaggaauggaaagaagcugg

SEQ ID NO: 617263 - RNA, 23 nt, Human
ucacaccacugcaguucagccug

SEQ ID NO: 617264 - RNA, 21 nt, Human
ucaggcccagccuuggccaaa

SEQ ID NO: 617265 - RNA, 25 nt, Human
ucccagcuacuugggagccugaggc

SEQ ID NO: 617266 - RNA, 23 nt, Human
ucuaugauugaggaaacugaggc

SEQ ID NO: 617267 - RNA, 22 nt, Human
ucucuacuaaaaauacaaaauu

SEQ ID NO: 617268 - RNA, 20 nt, Human
ucucucgggggacgucucug

SEQ ID NO: 617269 - RNA, 18 nt, Human
ucucugcccccgccgccu

SEQ ID NO: 617270 - RNA, 20 nt, Human
ucugcagacuuuggcggcgg

SEQ ID NO: 617271 - RNA, 18 nt, Human
ucuggaggcugggugggg

SEQ ID NO: 617272 - RNA, 22 nt, Human
ucuggaugauggugacugcuga

SEQ ID NO: 617273 - RNA, 24 nt, Human
ugaaccugggagguggagguugca

SEQ ID NO: 617274 - RNA, 19 nt, Human
ugacccucccuuccacccc

SEQ ID NO: 617275 - RNA, 18 nt, Human
ugacucucugcuuccccc

SEQ ID NO: 617276 - RNA, 25 nt, Human
ugacugcugaaggccauagcagguu

SEQ ID NO: 617277 - RNA, 18 nt, Human
ugaggaaacugaggcccg

SEQ ID NO: 617278 - RNA, 22 nt, Human
ugaggaaacugaggcccggggg

SEQ ID NO: 617279 - RNA, 26 nt, Human
ugaggcagaaucacagagagauggcc

SEQ ID NO: 617280 - RNA, 24 nt, Human
ugaggcaggauaauugcuugaacc

SEQ ID NO: 617281 - RNA, 25 nt, Human
ugaggcaggauaauugcuugaaccu

SEQ ID NO: 617282 - RNA, 18 nt, Human
ugaggcccggggggucug

SEQ ID NO: 617283 - RNA, 19 nt, Human
ugaucuggcggaggucacc

SEQ ID NO: 617284 - RNA, 19 nt, Human
ugcaagggggugcaggaca

SEQ ID NO: 617285 - RNA, 21 nt, Human
ugcaagggggugcaggacagc

SEQ ID NO: 617286 - RNA, 20 nt, Human
ugcccccugcccugguuccc

SEQ ID NO: 617287 - RNA, 22 nt, Human
ugcccuaaauaccacacccagc

SEQ ID NO: 617288 - RNA, 23 nt, Human
ugccuguaaucccagcuacuugg

SEQ ID NO: 617289 - RNA, 24 nt, Human
ugccuguaaucccagcuacuuggg

SEQ ID NO: 617290 - RNA, 18 nt, Human
ugcgaagggagccgaagg

SEQ ID NO: 617291 - RNA, 20 nt, Human
ugcgccuguaaucccagcac

SEQ ID NO: 617292 - RNA, 24 nt, Human
ugcgccuguaaucccagcacuuug

SEQ ID NO: 617293 - RNA, 23 nt, Human
ugcgggagaaaugguuccagcuu

SEQ ID NO: 617294 - RNA, 18 nt, Human
ugcugggggccaucgugg

SEQ ID NO: 617295 - RNA, 20 nt, Human
ugcugucugccacgaaacag

SEQ ID NO: 617296 - RNA, 21 nt, Human
ugcuugaaccugggaggugga

SEQ ID NO: 617297 - RNA, 22 nt, Human
uggaaagaagcugggcugggug

SEQ ID NO: 617298 - RNA, 18 nt, Human
uggaggggggcuccuuag

SEQ ID NO: 617299 - RNA, 24 nt, Human
uggauuaccugcggucaggaguuc

SEQ ID NO: 617300 - RNA, 19 nt, Human
uggcagggcuggcugcugg

SEQ ID NO: 617301 - RNA, 24 nt, Human
uggccaacauggugaaacccuguc

SEQ ID NO: 617302 - RNA, 20 nt, Human
uggcccuuaucucugccccc

SEQ ID NO: 617303 - RNA, 22 nt, Human
uggcuggguggacccaaaaagc

SEQ ID NO: 617304 - RNA, 19 nt, Human
uggcugggugggcuggucu

SEQ ID NO: 617305 - RNA, 24 nt, Human
uggcuugcgccuguaaucccagca

SEQ ID NO: 617306 - RNA, 24 nt, Human
ugggaggccgaagcagguggauua

SEQ ID NO: 617307 - RNA, 18 nt, Human
ugggagguggagguugca

SEQ ID NO: 617308 - RNA, 29 nt, Human
ugggagguggagguugcagugacaacggu

SEQ ID NO: 617309 - RNA, 24 nt, Human
ugggagguggagguugcagugagc

SEQ ID NO: 617310 - RNA, 18 nt, Human
ugggauagagcccagcuc

SEQ ID NO: 617311 - RNA, 18 nt, Human
ugggauagagcccagcuu

SEQ ID NO: 617312 - RNA, 19 nt, Human
ugggcuggguggcuugcgc

SEQ ID NO: 617313 - RNA, 20 nt, Human
ugggggccaucguggcaccu

SEQ ID NO: 617314 - RNA, 20 nt, Human
uggggguggggugggggugg

SEQ ID NO: 617315 - RNA, 23 nt, Human
ugggggugggugugggauagagc

SEQ ID NO: 617316 - RNA, 21 nt, Human
ugggucuccucugaccauggg

SEQ ID NO: 617317 - RNA, 18 nt, Human
uggguggacccaaaaagc

SEQ ID NO: 617318 - RNA, 21 nt, Human
ugggugggcuggucucagccu

SEQ ID NO: 617319 - RNA, 21 nt, Human
ugggugggggugggguggggg

SEQ ID NO: 617320 - RNA, 22 nt, Human
uggguggggguggggugggggu

SEQ ID NO: 617321 - RNA, 25 nt, Human
ugggugggggugggguggggguggg

SEQ ID NO: 617322 - RNA, 23 nt, Human
uggguuucuucccugacccuccc

SEQ ID NO: 617323 - RNA, 24 nt, Human
ugugaccuugagaaccucaucuca

SEQ ID NO: 617324 - RNA, 22 nt, Human
uguggcugugaggcugguugaa

SEQ ID NO: 617325 - RNA, 25 nt, Human
ugugggauagagcccagcuccucca

SEQ ID NO: 617326 - RNA, 20 nt, Human
ugugugggcagggcccaggu

SEQ ID NO: 617327 - RNA, 18 nt, Human
ugugugugugugugugug

SEQ ID NO: 617328 - RNA, 18 nt, Human
ugugugugugugugugug

SEQ ID NO: 617329 - RNA, 18 nt, Human
ugugugugugugugugug

SEQ ID NO: 617330 - RNA, 18 nt, Human
ugugugugugugugugug

SEQ ID NO: 617331 - RNA, 18 nt, Human
ugugugugugugugugug

SEQ ID NO: 617332 - RNA, 18 nt, Human
ugugugugugugugugug

SEQ ID NO: 617333 - RNA, 18 nt, Human
ugugugugugugugugug

SEQ ID NO: 617334 - RNA, 18 nt, Human
ugugugugugugugugug

SEQ ID NO: 617335 - RNA, 18 nt, Human
ugugugugugugugugug

SEQ ID NO: 617336 - RNA, 18 nt, Human
ugugugugugugugugug

SEQ ID NO: 617337 - RNA, 18 nt, Human
ugugugugugugugugug

SEQ ID NO: 617338 - RNA, 18 nt, Human
ugugugugugugugugug

SEQ ID NO: 617339 - RNA, 18 nt, Human
ugugugugugugugugug

SEQ ID NO: 617340 - RNA, 18 nt, Human
ugugugugugugugugug

SEQ ID NO: 617341 - RNA, 18 nt, Human
ugugugugugugugugug

SEQ ID NO: 617342 - RNA, 21 nt, Human
ugugugugugugugugugugu

SEQ ID NO: 617343 - RNA, 21 nt, Human
ugugugugugugugugugugu

SEQ ID NO: 617344 - RNA, 21 nt, Human
ugugugugugugugugugugu

SEQ ID NO: 617345 - RNA, 21 nt, Human
ugugugugugugugugugugu

SEQ ID NO: 617346 - RNA, 21 nt, Human
ugugugugugugugugugugu

SEQ ID NO: 617347 - RNA, 21 nt, Human
ugugugugugugugugugugu

SEQ ID NO: 617348 - RNA, 21 nt, Human
ugugugugugugugugugugu

SEQ ID NO: 617349 - RNA, 21 nt, Human
ugugugugugugugugugugu

SEQ ID NO: 617350 - RNA, 21 nt, Human
ugugugugugugugugugugu

SEQ ID NO: 617351 - RNA, 21 nt, Human
ugugugugugugugugugugu

SEQ ID NO: 617352 - RNA, 21 nt, Human
ugugugugugugugugugugu

SEQ ID NO: 617353 - RNA, 21 nt, Human
ugugugugugugugugugugu

SEQ ID NO: 617354 - RNA, 21 nt, Human
ugugugugugugugugugugu

SEQ ID NO: 617355 - RNA, 21 nt, Human
ugugugugugugugugugugu

SEQ ID NO: 617356 - RNA, 21 nt, Human
ugugugugugugugugugugu

SEQ ID NO: 617357 - RNA, 21 nt, Human
ugugugugugugugugugugu

SEQ ID NO: 617358 - RNA, 21 nt, Human
ugugugugugugugugugugu

SEQ ID NO: 617359 - RNA, 21 nt, Human
ugugugugugugugugugugu

SEQ ID NO: 617360 - RNA, 21 nt, Human
ugugugugugugugugugugu

SEQ ID NO: 617361 - RNA, 21 nt, Human
ugugugugugugugugugugu

SEQ ID NO: 617362 - RNA, 21 nt, Human
ugugugugugugugugugugu

SEQ ID NO: 617363 - RNA, 21 nt, Human
ugugugugugugugugugugu

SEQ ID NO: 617364 - RNA, 21 nt, Human
ugugugugugugugugugugu

SEQ ID NO: 617365 - RNA, 21 nt, Human
ugugugugugugugugugugu

SEQ ID NO: 617366 - RNA, 21 nt, Human
ugugugugugugugugugugu

SEQ ID NO: 617367 - RNA, 21 nt, Human
ugugugugugugugugugugu

SEQ ID NO: 617368 - RNA, 21 nt, Human
ugugugugugugugugugugu

SEQ ID NO: 617369 - RNA, 21 nt, Human
ugugugugugugugugugugu

SEQ ID NO: 617370 - RNA, 22 nt, Human
ugugugugugugugugugugug

SEQ ID NO: 617371 - RNA, 22 nt, Human
ugugugugugugugugugugug

SEQ ID NO: 617372 - RNA, 22 nt, Human
ugugugugugugugugugugug

SEQ ID NO: 617373 - RNA, 22 nt, Human
ugugugugugugugugugugug

SEQ ID NO: 617374 - RNA, 22 nt, Human
ugugugugugugugugugugug

SEQ ID NO: 617375 - RNA, 22 nt, Human
ugugugugugugugugugugug

SEQ ID NO: 617376 - RNA, 22 nt, Human
ugugugugugugugugugugug

SEQ ID NO: 617377 - RNA, 22 nt, Human
ugugugugugugugugugugug

SEQ ID NO: 617378 - RNA, 19 nt, Human
uguguguguguguguguug

SEQ ID NO: 617379 - RNA, 23 nt, Human
uguguguguguguguuggagcgu

SEQ ID NO: 617380 - RNA, 24 nt, Human
uguguguguguguguuggagcgug

SEQ ID NO: 617381 - RNA, 22 nt, Human
uucagccugggugacagugaga

SEQ ID NO: 617382 - RNA, 20 nt, Human
uucccugacccucccuucca

SEQ ID NO: 617383 - RNA, 19 nt, Human
uucuucccugacccucccu

SEQ ID NO: 617384 - RNA, 21 nt, Human
uucuugaccaucaccagcugc

SEQ ID NO: 617385 - RNA, 24 nt, Human
uugaaccugggagguggagguugc

SEQ ID NO: 617386 - RNA, 19 nt, Human
uugaugccaaucccccuag

SEQ ID NO: 617387 - RNA, 20 nt, Human
uugcagugagccuagaucac

SEQ ID NO: 617388 - RNA, 24 nt, Human
uugcuugaaccugggagguggagg

SEQ ID NO: 617389 - RNA, 19 nt, Human
uugggggagggcucagcaa

SEQ ID NO: 617390 - RNA, 24 nt, Human
uuuuuuuuuuuuuuuuuuuuuggg

SEQ ID NO: 617391 - RNA, 27 nt, Human
aaaaaaaaagaauacucaauauagaug

SEQ ID NO: 617392 - RNA, 18 nt, Human
aaacagacacacacuccc

SEQ ID NO: 617393 - RNA, 21 nt, Human
aaacagacacacacucccaaa

SEQ ID NO: 617394 - RNA, 19 nt, Human
aaaccauacccuaaagcag

SEQ ID NO: 617395 - RNA, 20 nt, Human
aaaccauacccuaaagcaga

SEQ ID NO: 617396 - RNA, 21 nt, Human
aaacuggucuuugacuuuaau

SEQ ID NO: 617397 - RNA, 28 nt, Human
aaagcaaaaaacagaagaaaagggaccc

SEQ ID NO: 617398 - RNA, 19 nt, Human
aacauggugaaaccccguc

SEQ ID NO: 617399 - RNA, 20 nt, Human
aacauggugaaaccccgucu

SEQ ID NO: 617400 - RNA, 21 nt, Human
aacauggugaaaccccgucuc

SEQ ID NO: 617401 - RNA, 23 nt, Human
aaccaaaacagacacacacuccc

SEQ ID NO: 617402 - RNA, 26 nt, Human
aacuuuacaaaccagccacccuacca

SEQ ID NO: 617403 - RNA, 28 nt, Human
aagcaaaaaacagaagaaaaggggaccc

SEQ ID NO: 617404 - RNA, 23 nt, Human
aagguugcgccauugcacuccag

SEQ ID NO: 617405 - RNA, 24 nt, Human
aaucacuugaaccagggaggcaga

SEQ ID NO: 617406 - RNA, 22 nt, Human
aauggcugggcgugguggcuca

SEQ ID NO: 617407 - RNA, 19 nt, Human
acaagaaugaaacuccauc

SEQ ID NO: 617408 - RNA, 20 nt, Human
acaagaaugaaacuccaucu

SEQ ID NO: 617409 - RNA, 21 nt, Human
acaagaaugaaacuccaucuc

SEQ ID NO: 617410 - RNA, 23 nt, Human
acacgccucugccugacuucugu

SEQ ID NO: 617411 - RNA, 21 nt, Human
acaggcccccacccuauuggg

SEQ ID NO: 617412 - RNA, 24 nt, Human
accaacauggugaaaccccgucuc

SEQ ID NO: 617413 - RNA, 24 nt, Human
accugaggucaggaguucaagacc

SEQ ID NO: 617414 - RNA, 25 nt, Human
acugcuguauucugugugccaagga

SEQ ID NO: 617415 - RNA, 21 nt, Human
acugggccuggccugugggca

SEQ ID NO: 617416 - RNA, 18 nt, Human
agaaggacagacagaggg

SEQ ID NO: 617417 - RNA, 21 nt, Human
agaauuccagauaaacuaagc

SEQ ID NO: 617418 - RNA, 20 nt, Human
agagguugcagugagccaag

SEQ ID NO: 617419 - RNA, 20 nt, Human
agagguugcagugagccaag

SEQ ID NO: 617420 - RNA, 24 nt, Human
agagguugcagugagccaagguug

SEQ ID NO: 617421 - RNA, 18 nt, Human
agauaaacuaagcaaaca

SEQ ID NO: 617422 - RNA, 24 nt, Human
agcacuuugggaggcugaggcagg

SEQ ID NO: 617423 - RNA, 21 nt, Human
agcagcugagcacuaccaucu

SEQ ID NO: 617424 - RNA, 18 nt, Human
agccaggagugguggugg

SEQ ID NO: 617425 - RNA, 18 nt, Human
agccauguggccuggccc

SEQ ID NO: 617426 - RNA, 24 nt, Human
agccugaccaacauggugaaaccc

SEQ ID NO: 617427 - RNA, 19 nt, Human
agcuacuuucucacaaacc

SEQ ID NO: 617428 - RNA, 24 nt, Human
aggaugaggcaggagaaucacuug

SEQ ID NO: 617429 - RNA, 24 nt, Human
aggcagagguugcagugagccaag

SEQ ID NO: 617430 - RNA, 18 nt, Human
aggcaggagaaucacuug

SEQ ID NO: 617431 - RNA, 22 nt, Human
aggcaggagaaucacuugaacc

SEQ ID NO: 617432 - RNA, 18 nt, Human
aggcagguggaucaccug

SEQ ID NO: 617433 - RNA, 22 nt, Human
aggcagguggaucaccugaggu

SEQ ID NO: 617434 - RNA, 26 nt, Human
aggcagguggaucaccugaggucagg

SEQ ID NO: 617435 - RNA, 21 nt, Human
aggcugaggcagguggaucac

SEQ ID NO: 617436 - RNA, 24 nt, Human
aggcugaggcagguggaucaccug

SEQ ID NO: 617437 - RNA, 18 nt, Human
agggcugaguacagaggu

SEQ ID NO: 617438 - RNA, 19 nt, Human
agguacuuccacagcccgg

SEQ ID NO: 617439 - RNA, 22 nt, Human
agguggaucaccugaggucagg

SEQ ID NO: 617440 - RNA, 21 nt, Human
auaccgcaugcguugccaacu

SEQ ID NO: 617441 - RNA, 24 nt, Human
aucaccugaggucaggaguucaag

SEQ ID NO: 617442 - RNA, 21 nt, Human
aucucaaaaaaaaaaaaaaag

SEQ ID NO: 617443 - RNA, 19 nt, Human
augccuguaaucucagcac

SEQ ID NO: 617444 - RNA, 31 nt, Human
auggcugggcgugguggcucaugccuguaaa

SEQ ID NO: 617445 - RNA, 18 nt, Human
auugcacuccagccucgg

SEQ ID NO: 617446 - RNA, 20 nt, Human
auugucauuuaucacccccu

SEQ ID NO: 617447 - RNA, 23 nt, Human
caaaacagacacacacucccaaa

SEQ ID NO: 617448 - RNA, 24 nt, Human
caaaccaaaacagacacacacucc

SEQ ID NO: 617449 - RNA, 20 nt, Human
caaaccagccacccuaccaa

SEQ ID NO: 617450 - RNA, 22 nt, Human
caaagcgaccaaaccauacccu

SEQ ID NO: 617451 - RNA, 19 nt, Human
caacagcagcaguucguga

SEQ ID NO: 617452 - RNA, 24 nt, Human
caacauggugaaaccccgucucua

SEQ ID NO: 617453 - RNA, 21 nt, Human
caagcaaccuucuggcuuucc

SEQ ID NO: 617454 - RNA, 18 nt, Human
caaggccauagcugcagu

SEQ ID NO: 617455 - RNA, 19 nt, Human
caauucuucuuuuccaacu

SEQ ID NO: 617456 - RNA, 18 nt, Human
cacauuccaaacccaaca

SEQ ID NO: 617457 - RNA, 23 nt, Human
caccugaggucaggaguucaaga

SEQ ID NO: 617458 - RNA, 18 nt, Human
cacuaaucugcacuuugu

SEQ ID NO: 617459 - RNA, 22 nt, Human
cagaaggacagacagagggcug

SEQ ID NO: 617460 - RNA, 28 nt, Human
cagacacacacucccaaaguucuugggu

SEQ ID NO: 617461 - RNA, 19 nt, Human
cagagggcugaguacagag

SEQ ID NO: 617462 - RNA, 18 nt, Human
cagaggugcucaaccucc

SEQ ID NO: 617463 - RNA, 24 nt, Human
cagaugcuccccucccugccuccc

SEQ ID NO: 617464 - RNA, 24 nt, Human
cagcacuuugggaggcugaggcag

SEQ ID NO: 617465 - RNA, 24 nt, Human
cagcacuuugggaggcugaggcag

SEQ ID NO: 617466 - RNA, 21 nt, Human
caggguccucucccugaccau

SEQ ID NO: 617467 - RNA, 24 nt, Human
cagguggaucaccugaggucagga

SEQ ID NO: 617468 - RNA, 18 nt, Human
cagugggugguggcuccu

SEQ ID NO: 617469 - RNA, 23 nt, Human
cauccguaaucucagcuucuugg

SEQ ID NO: 617470 - RNA, 19 nt, Human
caugaccuuaccagacacc

SEQ ID NO: 617471 - RNA, 24 nt, Human
caugccuguaaucucagcacuuug

SEQ ID NO: 617472 - RNA, 21 nt, Human
caugggcaguuuugcuucuug

SEQ ID NO: 617473 - RNA, 19 nt, Human
cauugcacuccagccucgg

SEQ ID NO: 617474 - RNA, 21 nt, Human
cauugcacuccagccucggca

SEQ ID NO: 617475 - RNA, 22 nt, Human
cauugcacuccagccucggcaa

SEQ ID NO: 617476 - RNA, 23 nt, Human
cauugcacuccagccucggcaac

SEQ ID NO: 617477 - RNA, 24 nt, Human
cauugcacuccagccucggcaaca

SEQ ID NO: 617478 - RNA, 25 nt, Human
ccaaaacagacacacacucccaaag

SEQ ID NO: 617479 - RNA, 23 nt, Human
ccaaaccauacccuaaagcagag

SEQ ID NO: 617480 - RNA, 25 nt, Human
ccaaaccauacccuaaagcagagac

SEQ ID NO: 617481 - RNA, 19 nt, Human
ccaaacccaacagcagcag

SEQ ID NO: 617482 - RNA, 23 nt, Human
ccacacagcccuauccuuccaga

SEQ ID NO: 617483 - RNA, 22 nt, Human
ccacaccccacauaagcaggca

SEQ ID NO: 617484 - RNA, 18 nt, Human
ccacuccacuauaccgca

SEQ ID NO: 617485 - RNA, 19 nt, Human
ccaggagugguggugguca

SEQ ID NO: 617486 - RNA, 25 nt, Human
ccaucucaaaaaaaaaaaaaaagaa

SEQ ID NO: 617487 - RNA, 20 nt, Human
ccauugcacuccagccucgg

SEQ ID NO: 617488 - RNA, 21 nt, Human
ccauugcacuccagccucggc

SEQ ID NO: 617489 - RNA, 24 nt, Human
ccauugcacuccagccucggcaac

SEQ ID NO: 617490 - RNA, 23 nt, Human
cccacuccacuauaccgcaugcg

SEQ ID NO: 617491 - RNA, 19 nt, Human
cccauacccacaucugccu

SEQ ID NO: 617492 - RNA, 20 nt, Human
cccauacccacaucugccua

SEQ ID NO: 617493 - RNA, 24 nt, Human
cccauacccacaucugccuaucuc

SEQ ID NO: 617494 - RNA, 18 nt, Human
ccccaugaccuuaccaga

SEQ ID NO: 617495 - RNA, 23 nt, Human
cccccauacccucuuauuccccc

SEQ ID NO: 617496 - RNA, 24 nt, Human
cccccaugaccuuaccagacaccu

SEQ ID NO: 617497 - RNA, 21 nt, Human
cccugagauccugcucaaucc

SEQ ID NO: 617498 - RNA, 21 nt, Human
ccgaucccaaaagcuugcugu

SEQ ID NO: 617499 - RNA, 21 nt, Human
ccguaaucucagcuucuuggg

SEQ ID NO: 617500 - RNA, 18 nt, Human
ccuacaacucucccuacc

SEQ ID NO: 617501 - RNA, 19 nt, Human
ccucaaccacucccugcca

SEQ ID NO: 617502 - RNA, 22 nt, Human
ccucagaaggacagacagaggg

SEQ ID NO: 617503 - RNA, 23 nt, Human
ccugaccaacauggugaaacccc

SEQ ID NO: 617504 - RNA, 24 nt, Human
ccugaccaacauggugaaaccccg

SEQ ID NO: 617505 - RNA, 21 nt, Human
ccuggccugugggcaugccug

SEQ ID NO: 617506 - RNA, 24 nt, Human
ccuggccugugggcaugccugggg

SEQ ID NO: 617507 - RNA, 24 nt, Human
cgccauugcacuccagccucggca

SEQ ID NO: 617508 - RNA, 23 nt, Human
cggccacaccccacauaagcagg

SEQ ID NO: 617509 - RNA, 19 nt, Human
cuagcuaaagaaaauacuc

SEQ ID NO: 617510 - RNA, 27 nt, Human
cucacaaaccaaaacagacacacacuc

SEQ ID NO: 617511 - RNA, 25 nt, Human
cucacaacaccccaguggguggugg

SEQ ID NO: 617512 - RNA, 23 nt, Human
cucacacugggccccauacccac

SEQ ID NO: 617513 - RNA, 24 nt, Human
cucaugacaaccaaagcgaccaaa

SEQ ID NO: 617514 - RNA, 24 nt, Human
cucaugccuguaaucucagcacuu

SEQ ID NO: 617515 - RNA, 22 nt, Human
cuccagacucccacccuuaaac

SEQ ID NO: 617516 - RNA, 19 nt, Human
cuccaucucaaaaaaaaaa

SEQ ID NO: 617517 - RNA, 20 nt, Human
cucccugaaauuccucucca

SEQ ID NO: 617518 - RNA, 21 nt, Human
cucuccagccauguggccugg

SEQ ID NO: 617519 - RNA, 18 nt, Human
cucucucuucucaccucu

SEQ ID NO: 617520 - RNA, 21 nt, Human
cugagcacuaccaucucugcc

SEQ ID NO: 617521 - RNA, 18 nt, Human
cugcagcuccugcaggaa

SEQ ID NO: 617522 - RNA, 23 nt, Human
cuggcacaggugggacuccaugg

SEQ ID NO: 617523 - RNA, 20 nt, Human
cuggcccacaggcccccacc

SEQ ID NO: 617524 - RNA, 20 nt, Human
cuggcccccagaccucaacc

SEQ ID NO: 617525 - RNA, 20 nt, Human
cuguuucuuucuucccuucc

SEQ ID NO: 617526 - RNA, 22 nt, Human
cuuaccagacaccucccaccuc

SEQ ID NO: 617527 - RNA, 21 nt, Human
cuuaccuacaacucucccuac

SEQ ID NO: 617528 - RNA, 20 nt, Human
cuuccuucucacacugggcc

SEQ ID NO: 617529 - RNA, 19 nt, Human
cuucucacacugggcccca

SEQ ID NO: 617530 - RNA, 19 nt, Human
cuucucaccucugcuccuc

SEQ ID NO: 617531 - RNA, 18 nt, Human
gaaaacccuucucuuaac

SEQ ID NO: 617532 - RNA, 19 nt, Human
gaccgugggcacuaaucug

SEQ ID NO: 617533 - RNA, 19 nt, Human
gacugggccuggccugugg

SEQ ID NO: 617534 - RNA, 22 nt, Human
gagaaucacuugaaccagggag

SEQ ID NO: 617535 - RNA, 21 nt, Human
gagaugagccgggacuugaaa

SEQ ID NO: 617536 - RNA, 18 nt, Human
gagcuccccuucacuuuc

SEQ ID NO: 617537 - RNA, 21 nt, Human
gaggcagagguugcagugagc

SEQ ID NO: 617538 - RNA, 18 nt, Human
gagguugcagugagccaa

SEQ ID NO: 617539 - RNA, 23 nt, Human
gaucaccugaggucaggaguuca

SEQ ID NO: 617540 - RNA, 24 nt, Human
gaucaccugaggucaggaguucaa

SEQ ID NO: 617541 - RNA, 22 nt, Human
gcaggagaaucacuugaaccag

SEQ ID NO: 617542 - RNA, 19 nt, Human
gccacaccccacauaagca

SEQ ID NO: 617543 - RNA, 24 nt, Human
gccacccuaccaagccuccaucac

SEQ ID NO: 617544 - RNA, 23 nt, Human
gccagaaugaggggcagcuacuu

SEQ ID NO: 617545 - RNA, 21 nt, Human
gcccuauccuuccagaaacgg

SEQ ID NO: 617546 - RNA, 21 nt, Human
gccuggcccccagaccucaac

SEQ ID NO: 617547 - RNA, 21 nt, Human
gcugggcgugguggcucaugc

SEQ ID NO: 617548 - RNA, 22 nt, Human
ggaucaccugaggucaggaguu

SEQ ID NO: 617549 - RNA, 21 nt, Human
ggcugggcgugguggcucaug

SEQ ID NO: 617550 - RNA, 23 nt, Human
gggcugaggcuucucucagcagg

SEQ ID NO: 617551 - RNA, 24 nt, Human
gguggcucaugccuguaaucucag

SEQ ID NO: 617552 - RNA, 18 nt, Human
gguggcugcagcuccugc

SEQ ID NO: 617553 - RNA, 24 nt, Human
gucucuagguaugagugggcugag

SEQ ID NO: 617554 - RNA, 23 nt, Human
guggcucaugccuguaaucucag

SEQ ID NO: 617555 - RNA, 20 nt, Human
guggucauccguaaucucag

SEQ ID NO: 617556 - RNA, 19 nt, Human
gugguggcuccugguccuc

SEQ ID NO: 617557 - RNA, 19 nt, Human
gugugcugaccuuccccag

SEQ ID NO: 617558 - RNA, 23 nt, Human
guugcgccauugcacuccagccu

SEQ ID NO: 617559 - RNA, 21 nt, Human
uaaacuaagcaaacaaggcca

SEQ ID NO: 617560 - RNA, 22 nt, Human
uaaacugcaaaagcucucuguc

SEQ ID NO: 617561 - RNA, 23 nt, Human
uaaacugggcugaccacucugaa

SEQ ID NO: 617562 - RNA, 18 nt, Human
uaaagaaaauacucuuga

SEQ ID NO: 617563 - RNA, 21 nt, Human
uaaagcaaaaaacagaagaaa

SEQ ID NO: 617564 - RNA, 19 nt, Human
uacaaaccagccacccuac

SEQ ID NO: 617565 - RNA, 21 nt, Human
uacagaggugcucaaccucca

SEQ ID NO: 617566 - RNA, 22 nt, Human
uaccaagccuccaucacauucc

SEQ ID NO: 617567 - RNA, 18 nt, Human
uacccagaccaugugaac

SEQ ID NO: 617568 - RNA, 24 nt, Human
uaccuggaaaggaccgugggcacu

SEQ ID NO: 617569 - RNA, 21 nt, Human
uagauguggaaggggcuuggc

SEQ ID NO: 617570 - RNA, 25 nt, Human
uauaugucaccaacucacagggucc

SEQ ID NO: 617571 - RNA, 23 nt, Human
uauucugugugccaaggacugug

SEQ ID NO: 617572 - RNA, 21 nt, Human
ucaaaaaaaaaaaaaaagaau

SEQ ID NO: 617573 - RNA, 24 nt, Human
ucaauccaccucuugcccacacau

SEQ ID NO: 617574 - RNA, 20 nt, Human
uccaaacccaacagcagcag

SEQ ID NO: 617575 - RNA, 19 nt, Human
uccacagcccgggagagca

SEQ ID NO: 617576 - RNA, 19 nt, Human
uccagacucccacccuuaa

SEQ ID NO: 617577 - RNA, 24 nt, Human
uccaggaggggaggaauuuuugcc

SEQ ID NO: 617578 - RNA, 23 nt, Human
uccaucucaaaaaaaaaaaaaaa

SEQ ID NO: 617579 - RNA, 22 nt, Human
uccaugaccacuacaauucuuc

SEQ ID NO: 617580 - RNA, 24 nt, Human
ucccaacauuuuaaacugcaaaag

SEQ ID NO: 617581 - RNA, 20 nt, Human
ucccccagcuuucaagaacu

SEQ ID NO: 617582 - RNA, 23 nt, Human
ucccugccagccugcugcuggcg

SEQ ID NO: 617583 - RNA, 23 nt, Human
uccucagaaggacagacagaggg

SEQ ID NO: 617584 - RNA, 18 nt, Human
uccucaggcaucccaaca

SEQ ID NO: 617585 - RNA, 22 nt, Human
ucucacacugggccccauaccc

SEQ ID NO: 617586 - RNA, 23 nt, Human
ucuccagccauguggccuggccc

SEQ ID NO: 617587 - RNA, 21 nt, Human
ucucuacuaaauacaaaaaau

SEQ ID NO: 617588 - RNA, 23 nt, Human
ucucuagguaugagugggcugag

SEQ ID NO: 617589 - RNA, 25 nt, Human
ucucuagguaugagugggcugaggc

SEQ ID NO: 617590 - RNA, 18 nt, Human
ucucucagcaggcuuacu

SEQ ID NO: 617591 - RNA, 19 nt, Human
ucucucagcaggcuuacug

SEQ ID NO: 617592 - RNA, 18 nt, Human
ucucucaucucccuuccc

SEQ ID NO: 617593 - RNA, 20 nt, Human
ucucucaucucccuuccccc

SEQ ID NO: 617594 - RNA, 18 nt, Human
ucucucucuucucaccuc

SEQ ID NO: 617595 - RNA, 19 nt, Human
ucucucucuucucaccucu

SEQ ID NO: 617596 - RNA, 26 nt, Human
ucugccuaucuccucucucaucuccc

SEQ ID NO: 617597 - RNA, 22 nt, Human
ucuuauucccccgaucccaaaa

SEQ ID NO: 617598 - RNA, 19 nt, Human
ucuugcccacacauccccc

SEQ ID NO: 617599 - RNA, 20 nt, Human
ugaaccagggaggcagaggu

SEQ ID NO: 617600 - RNA, 21 nt, Human
ugaagcagcugagcacuacca

SEQ ID NO: 617601 - RNA, 18 nt, Human
ugaaugacuaaagggagg

SEQ ID NO: 617602 - RNA, 19 nt, Human
ugacacaggaaggccagga

SEQ ID NO: 617603 - RNA, 24 nt, Human
ugaccaacauggugaaaccccguc

SEQ ID NO: 617604 - RNA, 20 nt, Human
ugaccuguggaagcccagcu

SEQ ID NO: 617605 - RNA, 21 nt, Human
ugagauccugcucaauccacc

SEQ ID NO: 617606 - RNA, 22 nt, Human
ugagccaagguugcgccauugc

SEQ ID NO: 617607 - RNA, 23 nt, Human
ugagccaagguugcgccauugca

SEQ ID NO: 617608 - RNA, 20 nt, Human
ugaggcaggagaaucacuug

SEQ ID NO: 617609 - RNA, 24 nt, Human
ugaggcaggagaaucacuugaacc

SEQ ID NO: 617610 - RNA, 20 nt, Human
ugaggcagguggaucaccug

SEQ ID NO: 617611 - RNA, 24 nt, Human
ugaggcagguggaucaccugaggu

SEQ ID NO: 617612 - RNA, 26 nt, Human
ugaggcagguggaucaccugagguca

SEQ ID NO: 617613 - RNA, 19 nt, Human
ugagggucaaagugagcuc

SEQ ID NO: 617614 - RNA, 21 nt, Human
ugaguacagaggugcucaacc

SEQ ID NO: 617615 - RNA, 20 nt, Human
ugauuggucucaguggcaga

SEQ ID NO: 617616 - RNA, 19 nt, Human
ugcacuccagccucggcaa

SEQ ID NO: 617617 - RNA, 23 nt, Human
ugccagccugcugcuggcgaugu

SEQ ID NO: 617618 - RNA, 21 nt, Human
ugccuggggacugucacauug

SEQ ID NO: 617619 - RNA, 23 nt, Human
ugccuguaaucucagcacuuugg

SEQ ID NO: 617620 - RNA, 23 nt, Human
ugccuguaaucucagcacuuugg

SEQ ID NO: 617621 - RNA, 24 nt, Human
ugccuguaaucucagcacuuuggg

SEQ ID NO: 617622 - RNA, 21 nt, Human
ugcucaauccaccucuugccc

SEQ ID NO: 617623 - RNA, 18 nt, Human
ugcuccccucccugccuc

SEQ ID NO: 617624 - RNA, 24 nt, Human
uggaucaccugaggucaggaguuc

SEQ ID NO: 617625 - RNA, 27 nt, Human
uggaucaccugaggucaggaguucaag

SEQ ID NO: 617626 - RNA, 21 nt, Human
uggcccacaggcccccacccu

SEQ ID NO: 617627 - RNA, 25 nt, Human
uggcccccagaccucaaccacuccc

SEQ ID NO: 617628 - RNA, 22 nt, Human
uggcucaugccuguaaucucag

SEQ ID NO: 617629 - RNA, 24 nt, Human
uggcucaugccuguaaucucagca

SEQ ID NO: 617630 - RNA, 20 nt, Human
uggcuccagacucccacccu

SEQ ID NO: 617631 - RNA, 23 nt, Human
uggcugggcgugguggcucaugc

SEQ ID NO: 617632 - RNA, 24 nt, Human
uggcugggcgugguggcucaugcc

SEQ ID NO: 617633 - RNA, 22 nt, Human
ugggagaagcagcagggaaauu

SEQ ID NO: 617634 - RNA, 24 nt, Human
ugggaggcugaggcagguggauca

SEQ ID NO: 617635 - RNA, 20 nt, Human
ugggcucugaccuggcacag

SEQ ID NO: 617636 - RNA, 19 nt, Human
uggucauccguaaucucag

SEQ ID NO: 617637 - RNA, 25 nt, Human
ugguggcucaugccuguaaucucaa

SEQ ID NO: 617638 - RNA, 21 nt, Human
ugguggucauccguaaucuca

SEQ ID NO: 617639 - RNA, 19 nt, Human
ugguuuaaaauauguacaa

SEQ ID NO: 617640 - RNA, 22 nt, Human
uguggaacaggggccucagccu

SEQ ID NO: 617641 - RNA, 24 nt, Human
uguggccuggcccccagaccucaa

SEQ ID NO: 617642 - RNA, 26 nt, Human
uuaccagacaccucccaccucauucu

SEQ ID NO: 617643 - RNA, 21 nt, Human
uuaguucuuaaagcaaaaaac

SEQ ID NO: 617644 - RNA, 24 nt, Human
uuaguucuuaaagcaaaaaacaga

SEQ ID NO: 617645 - RNA, 20 nt, Human
uucccuuccucgacauaacc

SEQ ID NO: 617646 - RNA, 19 nt, Human
uuccucgacauaacccuga

SEQ ID NO: 617647 - RNA, 19 nt, Human
uucuguuucuuucuucccu

SEQ ID NO: 617648 - RNA, 18 nt, Human
uugcagugagccaagguu

SEQ ID NO: 617649 - RNA, 22 nt, Human
uugcagugagccaagguugcgc

SEQ ID NO: 617650 - RNA, 25 nt, Human
uugggaggcugaggcagguggauca

SEQ ID NO: 617651 - RNA, 21 nt, Human
uuuccugacacugagcuccag

SEQ ID NO: 617652 - RNA, 23 nt, Human
uuugucuuggcagggggagugau

SEQ ID NO: 617653 - RNA, 26 nt, Human
aaaaaaaggcaaauauggauauauua

SEQ ID NO: 617654 - RNA, 20 nt, Human
aacaccuccagucugagagc

SEQ ID NO: 617655 - RNA, 24 nt, Human
aaguagcaggaaagucaagucuuu

SEQ ID NO: 617656 - RNA, 20 nt, Human
aaugauaaaaguagcaggaa

SEQ ID NO: 617657 - RNA, 19 nt, Human
acuaacuucuucaggccca

SEQ ID NO: 617658 - RNA, 19 nt, Human
agaaagacccaugagggug

SEQ ID NO: 617659 - RNA, 19 nt, Human
agccagggagagggacuac

SEQ ID NO: 617660 - RNA, 21 nt, Human
agcucuuggccuguccagcuc

SEQ ID NO: 617661 - RNA, 19 nt, Human
agggagauagcucuuggcc

SEQ ID NO: 617662 - RNA, 19 nt, Human
auaaauccugcagaaagac

SEQ ID NO: 617663 - RNA, 22 nt, Human
caaaaaaaggcaaauauggaua

SEQ ID NO: 617664 - RNA, 19 nt, Human
caacaacaccuccagucug

SEQ ID NO: 617665 - RNA, 19 nt, Human
caacaacaccuccagucug

SEQ ID NO: 617666 - RNA, 24 nt, Human
caacgugcagccagggagagggac

SEQ ID NO: 617667 - RNA, 25 nt, Human
caccuccagucugagagccuggcug

SEQ ID NO: 617668 - RNA, 22 nt, Human
cacuggcccucccucuucuucc

SEQ ID NO: 617669 - RNA, 25 nt, Human
cauacaaaaaaaggcaaauauggau

SEQ ID NO: 617670 - RNA, 26 nt, Human
cauacaaaaaaaggcaaauauggaua

SEQ ID NO: 617671 - RNA, 27 nt, Human
cauuuggaaacuggucauccauacaaa

SEQ ID NO: 617672 - RNA, 27 nt, Human
ccaguacucccuuuuucccggucuucu

SEQ ID NO: 617673 - RNA, 22 nt, Human
cccggucuucuccagccaaggg

SEQ ID NO: 617674 - RNA, 20 nt, Human
cccucccucuucuuccuucc

SEQ ID NO: 617675 - RNA, 20 nt, Human
cccucccucuucuuccuucc

SEQ ID NO: 617676 - RNA, 24 nt, Human
ccggucccaacgugcagccaggga

SEQ ID NO: 617677 - RNA, 24 nt, Human
ccggucuucuccagccaagggaga

SEQ ID NO: 617678 - RNA, 18 nt, Human
cgugcagccagggagagg

SEQ ID NO: 617679 - RNA, 20 nt, Human
cucaaauguucuauuaagcu

SEQ ID NO: 617680 - RNA, 19 nt, Human
cuccaguacucccuuuuuc

SEQ ID NO: 617681 - RNA, 20 nt, Human
cuccaguacucccuuuuucc

SEQ ID NO: 617682 - RNA, 19 nt, Human
cugacauuuggaaacuggu

SEQ ID NO: 617683 - RNA, 20 nt, Human
cugccaacaacaccuccagg

SEQ ID NO: 617684 - RNA, 20 nt, Human
cugccaacaacaccuccagu

SEQ ID NO: 617685 - RNA, 21 nt, Human
cuuaaaauaaaauuaaggcuc

SEQ ID NO: 617686 - RNA, 22 nt, Human
cuuucugacauuuggaaacugg

SEQ ID NO: 617687 - RNA, 26 nt, Human
ggaaagucaagucuuugugucacuuu

SEQ ID NO: 617688 - RNA, 18 nt, Human
uagcucuuggccugucca

SEQ ID NO: 617689 - RNA, 20 nt, Human
uauguaaucaguaaucucaa

SEQ ID NO: 617690 - RNA, 24 nt, Human
ucaggcccaacuucuccuuuacca

SEQ ID NO: 617691 - RNA, 22 nt, Human
ucaguaaucucaagguuucucc

SEQ ID NO: 617692 - RNA, 19 nt, Human
ucaucugccaacaacaccu

SEQ ID NO: 617693 - RNA, 22 nt, Human
ucccggucuucuccagccaagg

SEQ ID NO: 617694 - RNA, 21 nt, Human
ucugccaacaacaccuccagu

SEQ ID NO: 617695 - RNA, 20 nt, Human
ucuggaagaaccuugggaag

SEQ ID NO: 617696 - RNA, 19 nt, Human
ucuucaggcccaacuucuc

SEQ ID NO: 617697 - RNA, 27 nt, Human
ugaaaaggcagcuucucaaaaaucuua

SEQ ID NO: 617698 - RNA, 23 nt, Human
ugagagccuggcugaaguugacu

SEQ ID NO: 617699 - RNA, 18 nt, Human
ugcagaaagacccaugag

SEQ ID NO: 617700 - RNA, 21 nt, Human
ugcagaaagacccaugagggu

SEQ ID NO: 617701 - RNA, 24 nt, Human
ugcuuuauguaaucaguaaucuca

SEQ ID NO: 617702 - RNA, 20 nt, Human
uggaagaaccuugggaagaa

SEQ ID NO: 617703 - RNA, 23 nt, Human
uuaaaaaaugcaguaagguauaa

SEQ ID NO: 617704 - RNA, 21 nt, Human
uuaaaauaaaauuaaggcuca

SEQ ID NO: 617705 - RNA, 21 nt, Human
uuaccagcacuggcccucccu

SEQ ID NO: 617706 - RNA, 19 nt, Human
uuuaaaaaaugcaguaagg

SEQ ID NO: 617707 - RNA, 19 nt, Human
cauccggacccucaagaca

SEQ ID NO: 617708 - RNA, 20 nt, Human
cccgcgcccggagcucuaga

SEQ ID NO: 617709 - RNA, 18 nt, Human
cccucaagacaacuggag

SEQ ID NO: 617710 - RNA, 19 nt, Human
ccugagcccauccggaccc

SEQ ID NO: 617711 - RNA, 25 nt, Human
cggacccucaagacaacuggagccc

SEQ ID NO: 617712 - RNA, 18 nt, Human
cuggagcccacccugccc

SEQ ID NO: 617713 - RNA, 24 nt, Human
aacuaucaaaagcuacauuuuacu

SEQ ID NO: 617714 - RNA, 19 nt, Human
gaguuuccuuuaaucaaag

SEQ ID NO: 617715 - RNA, 21 nt, Human
gugaguuuccuuuaaucaaag

SEQ ID NO: 617716 - RNA, 18 nt, Human
uaaucaaagacaaccaug

SEQ ID NO: 617717 - RNA, 19 nt, Human
uauggcggugaguuuccuu

SEQ ID NO: 617718 - RNA, 23 nt, Human
uuaaaaauguugaaucauacaau

SEQ ID NO: 617719 - RNA, 18 nt, Human
uuuuuuauuugugaauau

SEQ ID NO: 617720 - RNA, 21 nt, Human
uuuuuuuuuuuuuuuuuauuu

SEQ ID NO: 617721 - RNA, 22 nt, Human
aaaaacaacaaaucucuguccu

SEQ ID NO: 617722 - RNA, 21 nt, Human
aaacacgucagacacaccccu

SEQ ID NO: 617723 - RNA, 22 nt, Human
aaagacagggucuugcucuguu

SEQ ID NO: 617724 - RNA, 18 nt, Human
aaagaggccccccccccc

SEQ ID NO: 617725 - RNA, 19 nt, Human
aaagugcugggauuacagg

SEQ ID NO: 617726 - RNA, 21 nt, Human
aaagugcugggauuacaggca

SEQ ID NO: 617727 - RNA, 23 nt, Human
aaagugcugggauuacaggcaug

SEQ ID NO: 617728 - RNA, 24 nt, Human
aaagugcugggauuacaggcaugc

SEQ ID NO: 617729 - RNA, 24 nt, Human
aaagugcugggauuacaggcguga

SEQ ID NO: 617730 - RNA, 24 nt, Human
aaaguguugagauuacaggcguga

SEQ ID NO: 617731 - RNA, 21 nt, Human
aacaacaaaucucuguccuuu

SEQ ID NO: 617732 - RNA, 25 nt, Human
aagcaauccuccugccuuagccucc

SEQ ID NO: 617733 - RNA, 24 nt, Human
aagugaucugcccgccucggccuc

SEQ ID NO: 617734 - RNA, 19 nt, Human
aagugcugggauuacaggc

SEQ ID NO: 617735 - RNA, 19 nt, Human
aagugcugggauuacaggc

SEQ ID NO: 617736 - RNA, 19 nt, Human
aagugcugggauuacaggc

SEQ ID NO: 617737 - RNA, 21 nt, Human
aagugcugggauuacaggcau

SEQ ID NO: 617738 - RNA, 26 nt, Human
aagugcugggauuacaggcgugaacc

SEQ ID NO: 617739 - RNA, 26 nt, Human
aaguguugagauuacaggcgugagcc

SEQ ID NO: 617740 - RNA, 24 nt, Human
aauuuugcguuuuuaguagagaug

SEQ ID NO: 617741 - RNA, 24 nt, Human
acagagugagacucugccucaaaa

SEQ ID NO: 617742 - RNA, 24 nt, Human
acagggcuucaccauguuggccag

SEQ ID NO: 617743 - RNA, 18 nt, Human
accauguuggccaggcug

SEQ ID NO: 617744 - RNA, 24 nt, Human
accauguuggccaggcuggucucg

SEQ ID NO: 617745 - RNA, 19 nt, Human
acccaggcuggagugcagu

SEQ ID NO: 617746 - RNA, 23 nt, Human
accccugccucagggccuuugca

SEQ ID NO: 617747 - RNA, 24 nt, Human
acccugggcgacagagugagacuc

SEQ ID NO: 617748 - RNA, 24 nt, Human
accgcacuccacccugggcgacag

SEQ ID NO: 617749 - RNA, 21 nt, Human
accgggcuguccggcgguggc

SEQ ID NO: 617750 - RNA, 21 nt, Human
accgggcuguccggcgguggc

SEQ ID NO: 617751 - RNA, 22 nt, Human
accucccguggcccuucuacca

SEQ ID NO: 617752 - RNA, 22 nt, Human
accucccguggcccuucuacca

SEQ ID NO: 617753 - RNA, 26 nt, Human
acguccuuguuuuuuuuuuuuuuuuu

SEQ ID NO: 617754 - RNA, 18 nt, Human
acucugucacccaggcug

SEQ ID NO: 617755 - RNA, 24 nt, Human
acucugucacccaggcuggagugc

SEQ ID NO: 617756 - RNA, 20 nt, Human
agaauagcugagauuaaagg

SEQ ID NO: 617757 - RNA, 19 nt, Human
agacagagucucccucugu

SEQ ID NO: 617758 - RNA, 22 nt, Human
agauuacaggcgugagccaccg

SEQ ID NO: 617759 - RNA, 18 nt, Human
agccauucuccccugccu

SEQ ID NO: 617760 - RNA, 19 nt, Human
agccuccagaauagcugag

SEQ ID NO: 617761 - RNA, 21 nt, Human
agccucccgaguagcugggac

SEQ ID NO: 617762 - RNA, 21 nt, Human
agcgaccuuggcggcgagggc

SEQ ID NO: 617763 - RNA, 24 nt, Human
agcgauucuccugccucagccucc

SEQ ID NO: 617764 - RNA, 19 nt, Human
aggcagagcucgcugcgac

SEQ ID NO: 617765 - RNA, 20 nt, Human
aggcaggcgccaccacgccc

SEQ ID NO: 617766 - RNA, 20 nt, Human
aggcaugcaccaccaggccc

SEQ ID NO: 617767 - RNA, 19 nt, Human
aggcaugcgccaccacacc

SEQ ID NO: 617768 - RNA, 28 nt, Human
aggcccccccccccccaagccauucucc

SEQ ID NO: 617769 - RNA, 19 nt, Human
aggccuggggcuggggguc

SEQ ID NO: 617770 - RNA, 19 nt, Human
aggccuggggcuggggguc

SEQ ID NO: 617771 - RNA, 19 nt, Human
aggcggagguugcaaugag

SEQ ID NO: 617772 - RNA, 23 nt, Human
aggcgugagccaccgugcccggc

SEQ ID NO: 617773 - RNA, 24 nt, Human
aggcugaggcagcagaauggcuug

SEQ ID NO: 617774 - RNA, 25 nt, Human
aggcuggagugcaguggcgcgaucu

SEQ ID NO: 617775 - RNA, 25 nt, Human
aggcuggagugcagugguguaaucu

SEQ ID NO: 617776 - RNA, 24 nt, Human
aggugauccgcccaucuuggccuc

SEQ ID NO: 617777 - RNA, 22 nt, Human
aguagagaugggguuucuccau

SEQ ID NO: 617778 - RNA, 21 nt, Human
aguagagauggguuucaccau

SEQ ID NO: 617779 - RNA, 21 nt, Human
aguagcugggacuauaggcau

SEQ ID NO: 617780 - RNA, 18 nt, Human
aguagcugggauuacagg

SEQ ID NO: 617781 - RNA, 20 nt, Human
aguagcugggauuacaggca

SEQ ID NO: 617782 - RNA, 18 nt, Human
aguaucugggauuacagg

SEQ ID NO: 617783 - RNA, 20 nt, Human
aguaucugggauuacaggug

SEQ ID NO: 617784 - RNA, 25 nt, Human
agucuggucucaaacuccugaccuc

SEQ ID NO: 617785 - RNA, 24 nt, Human
agugauucuccugccucagccucc

SEQ ID NO: 617786 - RNA, 21 nt, Human
agugcaguggcgcgaucucag

SEQ ID NO: 617787 - RNA, 23 nt, Human
agugcaguggcgcgaucucagcu

SEQ ID NO: 617788 - RNA, 24 nt, Human
agugcaguggcgcgaucucagcuc

SEQ ID NO: 617789 - RNA, 19 nt, Human
agugcagugguguaaucuc

SEQ ID NO: 617790 - RNA, 21 nt, Human
agugcagugguguaaucucag

SEQ ID NO: 617791 - RNA, 23 nt, Human
agugcagugguguaaucucagcu

SEQ ID NO: 617792 - RNA, 18 nt, Human
agugcugggauuacaggc

SEQ ID NO: 617793 - RNA, 18 nt, Human
agugcugggauuacaggc

SEQ ID NO: 617794 - RNA, 24 nt, Human
agugguguaaucucagcucacugc

SEQ ID NO: 617795 - RNA, 21 nt, Human
auccuccugccuuagccuccc

SEQ ID NO: 617796 - RNA, 24 nt, Human
aucgugccaccgcacuccacccug

SEQ ID NO: 617797 - RNA, 18 nt, Human
aucucacucugucaccca

SEQ ID NO: 617798 - RNA, 23 nt, Human
aucucuucucugagggacuccaa

SEQ ID NO: 617799 - RNA, 24 nt, Human
augggguuucuccauguuggucag

SEQ ID NO: 617800 - RNA, 23 nt, Human
auggguuucaccauguuggccag

SEQ ID NO: 617801 - RNA, 24 nt, Human
auggguuucaccauguuggccagg

SEQ ID NO: 617802 - RNA, 18 nt, Human
auucuccugccucagccu

SEQ ID NO: 617803 - RNA, 18 nt, Human
auugucuccaccaccucc

SEQ ID NO: 617804 - RNA, 24 nt, Human
auuuuuaguagagauggguuucac

SEQ ID NO: 617805 - RNA, 24 nt, Human
auuuuuguauuuuuaguagagaug

SEQ ID NO: 617806 - RNA, 23 nt, Human
caaaaacaacaaaucucuguccu

SEQ ID NO: 617807 - RNA, 24 nt, Human
caaagugcugggauuacaggcaug

SEQ ID NO: 617808 - RNA, 24 nt, Human
caaagugcugggauuacaggcgug

SEQ ID NO: 617809 - RNA, 24 nt, Human
caaaguguugagauuacaggcgug

SEQ ID NO: 617810 - RNA, 23 nt, Human
caaccuccaccuccuggguucaa

SEQ ID NO: 617811 - RNA, 22 nt, Human
caagcaauccuccugccuuagc

SEQ ID NO: 617812 - RNA, 27 nt, Human
caagcaauccuccugccuuagccuccc

SEQ ID NO: 617813 - RNA, 28 nt, Human
caagcaauucucaugccucagccucccg

SEQ ID NO: 617814 - RNA, 20 nt, Human
caagcgauucuccugccuca

SEQ ID NO: 617815 - RNA, 22 nt, Human
caagcgauucuccugccucagc

SEQ ID NO: 617816 - RNA, 27 nt, Human
caagugauucucccgccuaagccucca

SEQ ID NO: 617817 - RNA, 22 nt, Human
caagugauucuccugccucagc

SEQ ID NO: 617818 - RNA, 19 nt, Human
cacaccuguuaucccagcu

SEQ ID NO: 617819 - RNA, 19 nt, Human
cacauugucuccaccaccu

SEQ ID NO: 617820 - RNA, 24 nt, Human
caccacacccagcuaauuuuugua

SEQ ID NO: 617821 - RNA, 24 nt, Human
caccacaccuggcuaauuuuugua

SEQ ID NO: 617822 - RNA, 21 nt, Human
caccacaccuguuaucccagc

SEQ ID NO: 617823 - RNA, 19 nt, Human
caccaggcccagcuaauuu

SEQ ID NO: 617824 - RNA, 21 nt, Human
caccauguuggccaggcuggu

SEQ ID NO: 617825 - RNA, 21 nt, Human
caccauguuggccaggcuggu

SEQ ID NO: 617826 - RNA, 24 nt, Human
caccauguuggccaggcuggucuc

SEQ ID NO: 617827 - RNA, 24 nt, Human
caccauguuggccaggcuggucuc

SEQ ID NO: 617828 - RNA, 27 nt, Human
caccauguuggccaggcuggucuccaa

SEQ ID NO: 617829 - RNA, 27 nt, Human
caccauguuggccaggcuggucucgaa

SEQ ID NO: 617830 - RNA, 24 nt, Human
cacccaggcuggagugcaguggcg

SEQ ID NO: 617831 - RNA, 24 nt, Human
caccgcacuccacccugggcgaca

SEQ ID NO: 617832 - RNA, 21 nt, Human
caccuccaccucccguggccc

SEQ ID NO: 617833 - RNA, 21 nt, Human
caccuccaccucccguggccc

SEQ ID NO: 617834 - RNA, 18 nt, Human
caccuguuaucccagcua

SEQ ID NO: 617835 - RNA, 24 nt, Human
caccuguuaucccagcuacucagg

SEQ ID NO: 617836 - RNA, 22 nt, Human
cacuccacccugggcgacagag

SEQ ID NO: 617837 - RNA, 23 nt, Human
cacucugucacccaggcuggagu

SEQ ID NO: 617838 - RNA, 24 nt, Human
cacucugucacccaggcuggagug

SEQ ID NO: 617839 - RNA, 21 nt, Human
cacugcaaccuccaccuccug

SEQ ID NO: 617840 - RNA, 23 nt, Human
cacugcaaccuccaccuccuggg

SEQ ID NO: 617841 - RNA, 18 nt, Human
cacugcaaccucugccuc

SEQ ID NO: 617842 - RNA, 21 nt, Human
cacugcaaccucugccuccca

SEQ ID NO: 617843 - RNA, 21 nt, Human
cacugcaaccucugccuccug

SEQ ID NO: 617844 - RNA, 23 nt, Human
cacugcaaccucugccuccuggg

SEQ ID NO: 617845 - RNA, 19 nt, Human
cacuggguccucuggggga

SEQ ID NO: 617846 - RNA, 22 nt, Human
cagaauagcugagauuaaaggc

SEQ ID NO: 617847 - RNA, 22 nt, Human
cagagcucgcugcgaccccggc

SEQ ID NO: 617848 - RNA, 24 nt, Human
cagagucucccucuguugcccagg

SEQ ID NO: 617849 - RNA, 20 nt, Human
cagcacagcgaccuuggcgg

SEQ ID NO: 617850 - RNA, 20 nt, Human
cagccucccgaguaucuggg

SEQ ID NO: 617851 - RNA, 20 nt, Human
cagccuccuggguagcugag

SEQ ID NO: 617852 - RNA, 24 nt, Human
cagcuacucaggaggcugaggcag

SEQ ID NO: 617853 - RNA, 20 nt, Human
caggaggcugaggcagcaga

SEQ ID NO: 617854 - RNA, 24 nt, Human
cagggcuucaccauguuggccagg

SEQ ID NO: 617855 - RNA, 21 nt, Human
caggugcccaccaccacaccc

SEQ ID NO: 617856 - RNA, 23 nt, Human
caggugcccaccaccacacccag

SEQ ID NO: 617857 - RNA, 24 nt, Human
caggugggcucucaggccuaccag

SEQ ID NO: 617858 - RNA, 24 nt, Human
caggugggcucucaggccuaccag

SEQ ID NO: 617859 - RNA, 24 nt, Human
cauguuggccaggcuggucuccaa

SEQ ID NO: 617860 - RNA, 24 nt, Human
cauguuggccaggcuggucucgaa

SEQ ID NO: 617861 - RNA, 18 nt, Human
cauugccagggcccucag

SEQ ID NO: 617862 - RNA, 18 nt, Human
cauugccagggcccucag

SEQ ID NO: 617863 - RNA, 22 nt, Human
ccaaagugcugggauuacaggc

SEQ ID NO: 617864 - RNA, 22 nt, Human
ccaaagugcugggauuacaggc

SEQ ID NO: 617865 - RNA, 23 nt, Human
ccaaagugcugggauuacaggca

SEQ ID NO: 617866 - RNA, 24 nt, Human
ccaaagugcugggauuacaggcau

SEQ ID NO: 617867 - RNA, 24 nt, Human
ccaaagugcugggauuacaggcgu

SEQ ID NO: 617868 - RNA, 22 nt, Human
ccaaaguguugagauuacaggc

SEQ ID NO: 617869 - RNA, 22 nt, Human
ccaaaguguugagauuacaggc

SEQ ID NO: 617870 - RNA, 24 nt, Human
ccaaaguguugagauuacaggcgu

SEQ ID NO: 617871 - RNA, 23 nt, Human
ccaagccauucuccccugccugc

SEQ ID NO: 617872 - RNA, 25 nt, Human
ccaccacgcccggcuaauuuugcgu

SEQ ID NO: 617873 - RNA, 24 nt, Human
ccaccgcacuccacccugggcgac

SEQ ID NO: 617874 - RNA, 24 nt, Human
ccaccuccuggguucaagugauuc

SEQ ID NO: 617875 - RNA, 20 nt, Human
ccaggcuggucuccaacucc

SEQ ID NO: 617876 - RNA, 24 nt, Human
cccaaagugcugggauuacaggca

SEQ ID NO: 617877 - RNA, 18 nt, Human
cccacacuccgggucucc

SEQ ID NO: 617878 - RNA, 21 nt, Human
cccacacuccgggucuccagu

SEQ ID NO: 617879 - RNA, 21 nt, Human
cccaccaccacacccagcuaa

SEQ ID NO: 617880 - RNA, 23 nt, Human
cccagguucaagcaauucucaug

SEQ ID NO: 617881 - RNA, 22 nt, Human
cccaucuuggccucccaaagug

SEQ ID NO: 617882 - RNA, 19 nt, Human
ccccaagccauucuccccu

SEQ ID NO: 617883 - RNA, 25 nt, Human
ccccaagccauucuccccugccugc

SEQ ID NO: 617884 - RNA, 20 nt, Human
ccccccaagccauucucccc

SEQ ID NO: 617885 - RNA, 21 nt, Human
cccccccaagccauucucccc

SEQ ID NO: 617886 - RNA, 21 nt, Human
cccccccccccccaagccauu

SEQ ID NO: 617887 - RNA, 20 nt, Human
ccccugccugccugcgaccg

SEQ ID NO: 617888 - RNA, 19 nt, Human
cccgaguagcugggacuau

SEQ ID NO: 617889 - RNA, 24 nt, Human
cccgaguagcugggacuauaggca

SEQ ID NO: 617890 - RNA, 19 nt, Human
cccgaguaucugggauuac

SEQ ID NO: 617891 - RNA, 20 nt, Human
cccgccuaagccuccagaau

SEQ ID NO: 617892 - RNA, 24 nt, Human
cccucuguugcccaggcuggagug

SEQ ID NO: 617893 - RNA, 22 nt, Human
cccugccuggacccuggcguuc

SEQ ID NO: 617894 - RNA, 19 nt, Human
cccugugccguaaggcucc

SEQ ID NO: 617895 - RNA, 19 nt, Human
cccugugccguaaggcucc

SEQ ID NO: 617896 - RNA, 21 nt, Human
ccgaguaucugggauuacagg

SEQ ID NO: 617897 - RNA, 24 nt, Human
ccgcacccugccuggacccuggcg

SEQ ID NO: 617898 - RNA, 22 nt, Human
ccuccaccuccuggguucaagu

SEQ ID NO: 617899 - RNA, 18 nt, Human
ccuccagaauagcugaga

SEQ ID NO: 617900 - RNA, 22 nt, Human
ccucccagguucaagcaauucu

SEQ ID NO: 617901 - RNA, 21 nt, Human
ccuccuggguucaagugauuc

SEQ ID NO: 617902 - RNA, 24 nt, Human
ccuccuggguucaagugauucucc

SEQ ID NO: 617903 - RNA, 24 nt, Human
ccuccuggguucaagugauucucc

SEQ ID NO: 617904 - RNA, 22 nt, Human
ccucugccuccuggguucaagu

SEQ ID NO: 617905 - RNA, 23 nt, Human
ccucugggggaucggggaggucc

SEQ ID NO: 617906 - RNA, 19 nt, Human
ccugaccucaagugaucug

SEQ ID NO: 617907 - RNA, 22 nt, Human
ccugaccucaagugaucugccc

SEQ ID NO: 617908 - RNA, 18 nt, Human
ccugaccucaggugaucc

SEQ ID NO: 617909 - RNA, 23 nt, Human
ccugaccucaggugauccgccca

SEQ ID NO: 617910 - RNA, 22 nt, Human
ccugaccucaggugaucugccc

SEQ ID NO: 617911 - RNA, 19 nt, Human
ccugcagcuccugcagcgc

SEQ ID NO: 617912 - RNA, 23 nt, Human
ccugccuuagccucccgaguagc

SEQ ID NO: 617913 - RNA, 24 nt, Human
ccugcgaccgcuuaccugcugcuc

SEQ ID NO: 617914 - RNA, 22 nt, Human
ccuggguucaagugauucuccc

SEQ ID NO: 617915 - RNA, 23 nt, Human
ccuggguucaagugauucuccuc

SEQ ID NO: 617916 - RNA, 23 nt, Human
ccuggguucaagugauucuccug

SEQ ID NO: 617917 - RNA, 23 nt, Human
ccuuaguagcugggauuacaggc

SEQ ID NO: 617918 - RNA, 22 nt, Human
ccuuccuuccucccuaaguccc

SEQ ID NO: 617919 - RNA, 21 nt, Human
cgaacccaggugcccacacuc

SEQ ID NO: 617920 - RNA, 22 nt, Human
cgccaccgcacccugccuggac

SEQ ID NO: 617921 - RNA, 20 nt, Human
cgccuaagccuccagaauag

SEQ ID NO: 617922 - RNA, 24 nt, Human
cgccuaagccuccagaauagcuga

SEQ ID NO: 617923 - RNA, 24 nt, Human
cgccucggccucccaaagugcugg

SEQ ID NO: 617924 - RNA, 22 nt, Human
cgcugugcgggggcgccagcgg

SEQ ID NO: 617925 - RNA, 22 nt, Human
cgcugugcgggggcgccagcgg

SEQ ID NO: 617926 - RNA, 24 nt, Human
cuaauuuugcguuuuuaguagaga

SEQ ID NO: 617927 - RNA, 23 nt, Human
cuaauuuuuguauuuuuaguaga

SEQ ID NO: 617928 - RNA, 23 nt, Human
cuaauuuuuguauuuuuaguaga

SEQ ID NO: 617929 - RNA, 24 nt, Human
cucaagcaauccuccugccuuagc

SEQ ID NO: 617930 - RNA, 24 nt, Human
cucacucugucacccaggcuggag

SEQ ID NO: 617931 - RNA, 24 nt, Human
cucacugcaaccuccaccuccugg

SEQ ID NO: 617932 - RNA, 27 nt, Human
cucacugcaaccuccaccuccuggguu

SEQ ID NO: 617933 - RNA, 24 nt, Human
cucacugcaaccucugccucccag

SEQ ID NO: 617934 - RNA, 24 nt, Human
cucacugcaaccucugccucccag

SEQ ID NO: 617935 - RNA, 24 nt, Human
cucacugcaaccucugccuccugg

SEQ ID NO: 617936 - RNA, 24 nt, Human
cucagccuccuuaguagcugggau

SEQ ID NO: 617937 - RNA, 20 nt, Human
cucagggccuuugcacugcu

SEQ ID NO: 617938 - RNA, 24 nt, Human
cuccauguuggucagucuggucuc

SEQ ID NO: 617939 - RNA, 18 nt, Human
cucccgccuaagccucca

SEQ ID NO: 617940 - RNA, 23 nt, Human
cucccgccuaagccuccagaaua

SEQ ID NO: 617941 - RNA, 21 nt, Human
cucccuaacuucuccaggugu

SEQ ID NO: 617942 - RNA, 20 nt, Human
cucccuaaguccccgaggca

SEQ ID NO: 617943 - RNA, 24 nt, Human
cucccucuguugcccaggcuggag

SEQ ID NO: 617944 - RNA, 26 nt, Human
cuccugaccucaagugaucugcccgc

SEQ ID NO: 617945 - RNA, 26 nt, Human
cuccugaccucaggugaucugcccgc

SEQ ID NO: 617946 - RNA, 23 nt, Human
cuccuggguagcugagguuuaca

SEQ ID NO: 617947 - RNA, 20 nt, Human
cuccuggguucaagugauuc

SEQ ID NO: 617948 - RNA, 21 nt, Human
cuccuggguucaagugauucu

SEQ ID NO: 617949 - RNA, 21 nt, Human
cuccuggguucaagugauucu

SEQ ID NO: 617950 - RNA, 23 nt, Human
cucucaggccuaccaggcauugc

SEQ ID NO: 617951 - RNA, 23 nt, Human
cucucaggccuaccaggcauugc

SEQ ID NO: 617952 - RNA, 23 nt, Human
cucuguugcccaggcuggagugc

SEQ ID NO: 617953 - RNA, 18 nt, Human
cucuuguugccuaggcug

SEQ ID NO: 617954 - RNA, 22 nt, Human
cucuuguugccuaggcuggagu

SEQ ID NO: 617955 - RNA, 24 nt, Human
cugaggcagcagaauggcuugaag

SEQ ID NO: 617956 - RNA, 18 nt, Human
cugcaaccuccaccuccu

SEQ ID NO: 617957 - RNA, 23 nt, Human
cugcaaccuccaccuccuggguu

SEQ ID NO: 617958 - RNA, 24 nt, Human
cugcaaccuccaccuccuggguuc

SEQ ID NO: 617959 - RNA, 24 nt, Human
cugcaaccuccgcuucccuaguuc

SEQ ID NO: 617960 - RNA, 23 nt, Human
cugcaaccucugccucccagguu

SEQ ID NO: 617961 - RNA, 24 nt, Human
cugcaaccucugccucccagguuc

SEQ ID NO: 617962 - RNA, 23 nt, Human
cugcaaccucugccuccuggguu

SEQ ID NO: 617963 - RNA, 24 nt, Human
cugcaaccucugccuccuggguuc

SEQ ID NO: 617964 - RNA, 18 nt, Human
cugcagcuccugcagcgc

SEQ ID NO: 617965 - RNA, 23 nt, Human
cugccucagccuccuggguagcu

SEQ ID NO: 617966 - RNA, 23 nt, Human
cugccucagccuccuuaguagcu

SEQ ID NO: 617967 - RNA, 23 nt, Human
cugccuccuggguucaagugauu

SEQ ID NO: 617968 - RNA, 23 nt, Human
cugccuuagccucccgaguagcu

SEQ ID NO: 617969 - RNA, 20 nt, Human
cugcgaccgcuuaccugcug

SEQ ID NO: 617970 - RNA, 24 nt, Human
cuggagugcaauggcaugaucuca

SEQ ID NO: 617971 - RNA, 19 nt, Human
cugggcccgcugugcgggg

SEQ ID NO: 617972 - RNA, 19 nt, Human
cugggcccgcugugcgggg

SEQ ID NO: 617973 - RNA, 20 nt, Human
cugggcucaagcaauccucc

SEQ ID NO: 617974 - RNA, 21 nt, Human
cuggggcugggggucagccug

SEQ ID NO: 617975 - RNA, 21 nt, Human
cuggggcugggggucagccug

SEQ ID NO: 617976 - RNA, 18 nt, Human
cuggguagcugagguuua

SEQ ID NO: 617977 - RNA, 21 nt, Human
cuguuaucccagcuacucagg

SEQ ID NO: 617978 - RNA, 24 nt, Human
cuuagccucccgaguagcugggac

SEQ ID NO: 617979 - RNA, 21 nt, Human
cuucaccauguuggccaggcu

SEQ ID NO: 617980 - RNA, 20 nt, Human
cuugcucuguugccaggcug

SEQ ID NO: 617981 - RNA, 24 nt, Human
cuuguugccuaggcuggagugcaa

SEQ ID NO: 617982 - RNA, 24 nt, Human
gaagaaagaggccccccccccccc

SEQ ID NO: 617983 - RNA, 24 nt, Human
gaauagcugagauuaaaggcaugc

SEQ ID NO: 617984 - RNA, 24 nt, Human
gacagagugagacucugccucaaa

SEQ ID NO: 617985 - RNA, 24 nt, Human
gaccucaagugaucugcccgccuc

SEQ ID NO: 617986 - RNA, 24 nt, Human
gaccucaggugauccgcccaucuu

SEQ ID NO: 617987 - RNA, 22 nt, Human
gaccucaggugaucugcccgcc

SEQ ID NO: 617988 - RNA, 22 nt, Human
gaccuuggcggcgagggcagcc

SEQ ID NO: 617989 - RNA, 22 nt, Human
gagacagaguuucacucuuguu

SEQ ID NO: 617990 - RNA, 24 nt, Human
gagaugggguuucuccauguuggu

SEQ ID NO: 617991 - RNA, 24 nt, Human
gagauggguuucaccauguuggcc

SEQ ID NO: 617992 - RNA, 19 nt, Human
gagguugcaaugagcccag

SEQ ID NO: 617993 - RNA, 24 nt, Human
gaguagcugggacuauaggcaugc

SEQ ID NO: 617994 - RNA, 22 nt, Human
gaucucuggcucacugcaaccu

SEQ ID NO: 617995 - RNA, 18 nt, Human
gauuacaggcaugcgcca

SEQ ID NO: 617996 - RNA, 21 nt, Human
gauuacaggcgugaaccagug

SEQ ID NO: 617997 - RNA, 18 nt, Human
gauuacaggcgugagcca

SEQ ID NO: 617998 - RNA, 24 nt, Human
gauuacaggcgugagccaccgugc

SEQ ID NO: 617999 - RNA, 22 nt, Human
gcaaccucugccucccagguuc

SEQ ID NO: 618000 - RNA, 20 nt, Human
gcaccaccaggcccagcuaa

SEQ ID NO: 618001 - RNA, 20 nt, Human
gcacugcuuguuccugcugc

SEQ ID NO: 618002 - RNA, 21 nt, Human
gccaccacaccuguuauccca

SEQ ID NO: 618003 - RNA, 19 nt, Human
gccaccgcacuccacccug

SEQ ID NO: 618004 - RNA, 23 nt, Human
gcccaagucccguucucgaaccc

SEQ ID NO: 618005 - RNA, 20 nt, Human
gcccagaucgugccaccgca

SEQ ID NO: 618006 - RNA, 20 nt, Human
gcccaggcuggagugcagug

SEQ ID NO: 618007 - RNA, 24 nt, Human
gcccaggcuggagugcaguggugu

SEQ ID NO: 618008 - RNA, 24 nt, Human
gccuaggcuggagugcaauggcau

SEQ ID NO: 618009 - RNA, 21 nt, Human
gccuggggcugggggucagcc

SEQ ID NO: 618010 - RNA, 21 nt, Human
gccuggggcugggggucagcc

SEQ ID NO: 618011 - RNA, 23 nt, Human
gcgauucuccugccucagccucc

SEQ ID NO: 618012 - RNA, 19 nt, Human
gcuggagugcaauggcaug

SEQ ID NO: 618013 - RNA, 23 nt, Human
gcuggucuccaacuccugaccuc

SEQ ID NO: 618014 - RNA, 23 nt, Human
gcuggucucgaacuccugaccuc

SEQ ID NO: 618015 - RNA, 19 nt, Human
gcugugggguggcccagga

SEQ ID NO: 618016 - RNA, 24 nt, Human
ggagguugcaaugagcccagaucg

SEQ ID NO: 618017 - RNA, 22 nt, Human
ggauuacaggcaugcgccaccg

SEQ ID NO: 618018 - RNA, 21 nt, Human
ggccaggccuggggcuggggg

SEQ ID NO: 618019 - RNA, 21 nt, Human
ggccaggccuggggcuggggg

SEQ ID NO: 618020 - RNA, 24 nt, Human
ggccucguccuuccuuccucccua

SEQ ID NO: 618021 - RNA, 24 nt, Human
ggcuggucuccaacuccugaccuc

SEQ ID NO: 618022 - RNA, 24 nt, Human
ggcuggucucgaacuccugaccuc

SEQ ID NO: 618023 - RNA, 20 nt, Human
gggagguccaggcagagcuc

SEQ ID NO: 618024 - RNA, 22 nt, Human
gggcucaagcaauccuccugcc

SEQ ID NO: 618025 - RNA, 22 nt, Human
gggcuucaccauguuggccagg

SEQ ID NO: 618026 - RNA, 20 nt, Human
gggggaucggggagguccag

SEQ ID NO: 618027 - RNA, 18 nt, Human
gggguuucuccauguugg

SEQ ID NO: 618028 - RNA, 22 nt, Human
gggguuucuccauguuggucag

SEQ ID NO: 618029 - RNA, 21 nt, Human
ggguuucaccauguuggccag

SEQ ID NO: 618030 - RNA, 19 nt, Human
ggucucgaacuccugaccu

SEQ ID NO: 618031 - RNA, 18 nt, Human
guagcugggauuacaggc

SEQ ID NO: 618032 - RNA, 23 nt, Human
gucaucucuucucugagggacuc

SEQ ID NO: 618033 - RNA, 24 nt, Human
gucuugcucuguugccaggcugga

SEQ ID NO: 618034 - RNA, 24 nt, Human
gugaucugcccgccucggccuccc

SEQ ID NO: 618035 - RNA, 23 nt, Human
gugauucuccugccucagccucc

SEQ ID NO: 618036 - RNA, 22 nt, Human
uaaacacgucagacacaccccu

SEQ ID NO: 618037 - RNA, 22 nt, Human
uaaagacagggucuugcucugu

SEQ ID NO: 618038 - RNA, 24 nt, Human
uaauuuuuguauuuuuaguagaga

SEQ ID NO: 618039 - RNA, 24 nt, Human
uaauuuuuguauuuuuaguagaga

SEQ ID NO: 618040 - RNA, 22 nt, Human
uacaggcgcacgccaccacacc

SEQ ID NO: 618041 - RNA, 23 nt, Human
uacaggcgugagccaccgugccc

SEQ ID NO: 618042 - RNA, 24 nt, Human
uacaggugcccaccaccacaccca

SEQ ID NO: 618043 - RNA, 22 nt, Human
uagagacagggcuucaccaugu

SEQ ID NO: 618044 - RNA, 21 nt, Human
uagagauggguuucaccaugu

SEQ ID NO: 618045 - RNA, 24 nt, Human
uaguagagacagggcuucaccaug

SEQ ID NO: 618046 - RNA, 25 nt, Human
uaguagagacagggcuucaccaugu

SEQ ID NO: 618047 - RNA, 24 nt, Human
uaguagagaugggguuucuccaug

SEQ ID NO: 618048 - RNA, 23 nt, Human
uaguagagauggguuucaccaug

SEQ ID NO: 618049 - RNA, 21 nt, Human
uaguagcugggauuacaggca

SEQ ID NO: 618050 - RNA, 25 nt, Human
uaguagcugggauuacaggcaggcg

SEQ ID NO: 618051 - RNA, 25 nt, Human
uaucugggcucaagcaauccuccug

SEQ ID NO: 618052 - RNA, 22 nt, Human
ucaaaaacaaaaacaacaaauc

SEQ ID NO: 618053 - RNA, 19 nt, Human
ucaagugauucucccgccu

SEQ ID NO: 618054 - RNA, 19 nt, Human
ucaagugauucuccugccu

SEQ ID NO: 618055 - RNA, 24 nt, Human
ucacaguagccuugacuaucuggg

SEQ ID NO: 618056 - RNA, 24 nt, Human
ucacccaggcuggagugcaguggc

SEQ ID NO: 618057 - RNA, 20 nt, Human
ucacucccuaacuucuccag

SEQ ID NO: 618058 - RNA, 24 nt, Human
ucacucugucacccaggcuggagu

SEQ ID NO: 618059 - RNA, 21 nt, Human
ucacucuuguugccuaggcug

SEQ ID NO: 618060 - RNA, 23 nt, Human
ucacucuuguugccuaggcugga

SEQ ID NO: 618061 - RNA, 23 nt, Human
ucacugcaaccuccaccuccugg

SEQ ID NO: 618062 - RNA, 24 nt, Human
ucacugcaaccuccaccuccuggg

SEQ ID NO: 618063 - RNA, 25 nt, Human
ucacugcaaccuccaccuccugggu

SEQ ID NO: 618064 - RNA, 27 nt, Human
ucacugcaaccuccaccuccuggguuc

SEQ ID NO: 618065 - RNA, 18 nt, Human
ucacugcaaccuccgcuu

SEQ ID NO: 618066 - RNA, 19 nt, Human
ucacugcaaccuccgcuuc

SEQ ID NO: 618067 - RNA, 21 nt, Human
ucacugcaaccuccgcuuccc

SEQ ID NO: 618068 - RNA, 24 nt, Human
ucacugcaaccuccgcuucccuag

SEQ ID NO: 618069 - RNA, 27 nt, Human
ucacugcaaccuccgcuucccuaguuc

SEQ ID NO: 618070 - RNA, 28 nt, Human
ucacugcaaccuccgcuucggguccucc

SEQ ID NO: 618071 - RNA, 19 nt, Human
ucacugcaaccucugccuc

SEQ ID NO: 618072 - RNA, 24 nt, Human
ucacugcaaccucugccucccagg

SEQ ID NO: 618073 - RNA, 25 nt, Human
ucacugcaaccucugccucccaggu

SEQ ID NO: 618074 - RNA, 24 nt, Human
ucacugcaaccucugccuccuggg

SEQ ID NO: 618075 - RNA, 25 nt, Human
ucacugcaaccucugccuccugggu

SEQ ID NO: 618076 - RNA, 27 nt, Human
ucacugcaaccucugccuccuggguuc

SEQ ID NO: 618077 - RNA, 18 nt, Human
ucacuugagggacugcga

SEQ ID NO: 618078 - RNA, 20 nt, Human
ucagccuccuggguagcuga

SEQ ID NO: 618079 - RNA, 22 nt, Human
ucagccugccgggccugagcug

SEQ ID NO: 618080 - RNA, 22 nt, Human
ucagccugccgggccugagcug

SEQ ID NO: 618081 - RNA, 28 nt, Human
ucagcucacugcaaccuccgcuucccua

SEQ ID NO: 618082 - RNA, 27 nt, Human
ucagcucacugcaaccucugccuccca

SEQ ID NO: 618083 - RNA, 24 nt, Human
uccacccugggcgacagagugaga

SEQ ID NO: 618084 - RNA, 24 nt, Human
ucccaaagugcugggauuacaggc

SEQ ID NO: 618085 - RNA, 24 nt, Human
ucccaaagugcugggauuacaggc

SEQ ID NO: 618086 - RNA, 24 nt, Human
ucccaaaguguugagauuacaggc

SEQ ID NO: 618087 - RNA, 21 nt, Human
ucccagguucaagcaauucuc

SEQ ID NO: 618088 - RNA, 24 nt, Human
ucccagguucaagcaauucucaug

SEQ ID NO: 618089 - RNA, 23 nt, Human
uccccaucacucgccaucccacg

SEQ ID NO: 618090 - RNA, 22 nt, Human
uccccgaggcaggguccuccca

SEQ ID NO: 618091 - RNA, 24 nt, Human
ucccgaguagcugggacuauaggc

SEQ ID NO: 618092 - RNA, 23 nt, Human
ucccgaguaucugggauuacagg

SEQ ID NO: 618093 - RNA, 24 nt, Human
ucccgaguaucugggauuacaggu

SEQ ID NO: 618094 - RNA, 22 nt, Human
ucccguggcccuucuaccaccc

SEQ ID NO: 618095 - RNA, 22 nt, Human
ucccguggcccuucuaccaccc

SEQ ID NO: 618096 - RNA, 21 nt, Human
ucccuaguucaagcgauucuc

SEQ ID NO: 618097 - RNA, 22 nt, Human
ucccuaguucaagcgauucucc

SEQ ID NO: 618098 - RNA, 24 nt, Human
ucccuaguucaagcgauucuccug

SEQ ID NO: 618099 - RNA, 20 nt, Human
ucccucuguugcccaggcug

SEQ ID NO: 618100 - RNA, 24 nt, Human
ucccucuguugcccaggcuggagu

SEQ ID NO: 618101 - RNA, 26 nt, Human
uccuccugccuuagccucccgaguag

SEQ ID NO: 618102 - RNA, 21 nt, Human
uccugcugcccggaagaccau

SEQ ID NO: 618103 - RNA, 25 nt, Human
uccuggguagcugagguuuacaggc

SEQ ID NO: 618104 - RNA, 21 nt, Human
uccuggguucaagugauucuc

SEQ ID NO: 618105 - RNA, 21 nt, Human
uccuggguucaagugauucuc

SEQ ID NO: 618106 - RNA, 24 nt, Human
uccuggguucaagugauucucccg

SEQ ID NO: 618107 - RNA, 24 nt, Human
uccuggguucaagugauucuccug

SEQ ID NO: 618108 - RNA, 24 nt, Human
uccuuaguagcugggauuacaggc

SEQ ID NO: 618109 - RNA, 18 nt, Human
ucggccucccaaagugcu

SEQ ID NO: 618110 - RNA, 23 nt, Human
ucucacucugucacccaggcugg

SEQ ID NO: 618111 - RNA, 24 nt, Human
ucucacucugucacccaggcugga

SEQ ID NO: 618112 - RNA, 26 nt, Human
ucucacucugucacccaggcuggagu

SEQ ID NO: 618113 - RNA, 27 nt, Human
ucucacucugucacccaggcuggagug

SEQ ID NO: 618114 - RNA, 22 nt, Human
ucucccucuguugcccaggcug

SEQ ID NO: 618115 - RNA, 23 nt, Human
ucucccucuguugcccaggcugg

SEQ ID NO: 618116 - RNA, 24 nt, Human
ucucccucuguugcccaggcugga

SEQ ID NO: 618117 - RNA, 24 nt, Human
ucuccugccucagccuccugggua

SEQ ID NO: 618118 - RNA, 25 nt, Human
ucuccugccucagccuccuuaguag

SEQ ID NO: 618119 - RNA, 23 nt, Human
ucucgaacuccugaccucaggug

SEQ ID NO: 618120 - RNA, 24 nt, Human
ucucugagggacuccaauagcuuu

SEQ ID NO: 618121 - RNA, 22 nt, Human
ucucuguccuuucagagaccca

SEQ ID NO: 618122 - RNA, 20 nt, Human
ucugccucaaaaacaaaaac

SEQ ID NO: 618123 - RNA, 23 nt, Human
ucugggggaucggggagguccag

SEQ ID NO: 618124 - RNA, 24 nt, Human
ucugucacccaggcuggagugcag

SEQ ID NO: 618125 - RNA, 18 nt, Human
ucuguugccaggcuggag

SEQ ID NO: 618126 - RNA, 18 nt, Human
ucuguugcccaggcugga

SEQ ID NO: 618127 - RNA, 24 nt, Human
ucuguugcccaggcuggagugcag

SEQ ID NO: 618128 - RNA, 21 nt, Human
ucuugcucuguugccaggcug

SEQ ID NO: 618129 - RNA, 21 nt, Human
ucuugcucuguugccaggcug

SEQ ID NO: 618130 - RNA, 22 nt, Human
ucuugcucuguugccaggcugg

SEQ ID NO: 618131 - RNA, 23 nt, Human
ucuugcucuguugccaggcugga

SEQ ID NO: 618132 - RNA, 19 nt, Human
ucuuguugccuaggcugga

SEQ ID NO: 618133 - RNA, 19 nt, Human
ugaagccgggaggcggagg

SEQ ID NO: 618134 - RNA, 18 nt, Human
ugaccucaagugaucugc

SEQ ID NO: 618135 - RNA, 24 nt, Human
ugaccucaagugaucugcccgccu

SEQ ID NO: 618136 - RNA, 18 nt, Human
ugaccucaggugauccgc

SEQ ID NO: 618137 - RNA, 21 nt, Human
ugaccucaggugauccgccca

SEQ ID NO: 618138 - RNA, 24 nt, Human
ugaccucaggugauccgcccaucu

SEQ ID NO: 618139 - RNA, 18 nt, Human
ugaccucaggugaucugc

SEQ ID NO: 618140 - RNA, 20 nt, Human
ugaccucaggugaucugccc

SEQ ID NO: 618141 - RNA, 23 nt, Human
ugaccucaggugaucugcccgcc

SEQ ID NO: 618142 - RNA, 22 nt, Human
ugagacagagucucccucuguu

SEQ ID NO: 618143 - RNA, 24 nt, Human
ugagacagagucucccucuguugc

SEQ ID NO: 618144 - RNA, 23 nt, Human
ugagacagaguuuugcucuuguu

SEQ ID NO: 618145 - RNA, 21 nt, Human
ugagauuaaaggcaugcgcca

SEQ ID NO: 618146 - RNA, 24 nt, Human
ugagauuaaaggcaugcgccacca

SEQ ID NO: 618147 - RNA, 21 nt, Human
ugagauuacaggcgugagcca

SEQ ID NO: 618148 - RNA, 22 nt, Human
ugagauuacaggcgugagccac

SEQ ID NO: 618149 - RNA, 23 nt, Human
ugagauuacaggcgugagccacc

SEQ ID NO: 618150 - RNA, 23 nt, Human
ugagauuacaggcgugagccacc

SEQ ID NO: 618151 - RNA, 24 nt, Human
ugagauuacaggcgugagccaccg

SEQ ID NO: 618152 - RNA, 22 nt, Human
ugagcccagaucgugccaccgc

SEQ ID NO: 618153 - RNA, 20 nt, Human
ugaggcagcagaauggcuuc

SEQ ID NO: 618154 - RNA, 22 nt, Human
ugaggcggaaucucacucuguc

SEQ ID NO: 618155 - RNA, 24 nt, Human
ugauccgcccaucuuggccuccca

SEQ ID NO: 618156 - RNA, 22 nt, Human
ugcaguggcgcgaucucagcuc

SEQ ID NO: 618157 - RNA, 22 nt, Human
ugcagugguguaaucucagcuc

SEQ ID NO: 618158 - RNA, 20 nt, Human
ugccaggcuggaguauagug

SEQ ID NO: 618159 - RNA, 22 nt, Human
ugccaggcuggaguauaguggu

SEQ ID NO: 618160 - RNA, 18 nt, Human
ugccagggcccucagccc

SEQ ID NO: 618161 - RNA, 18 nt, Human
ugccagggcccucagccc

SEQ ID NO: 618162 - RNA, 21 nt, Human
ugcccaccaccacacccagcu

SEQ ID NO: 618163 - RNA, 18 nt, Human
ugcccaggcuggagugca

SEQ ID NO: 618164 - RNA, 21 nt, Human
ugcccaggcuggagugcagug

SEQ ID NO: 618165 - RNA, 24 nt, Human
ugcccaggcuggagugcaguggug

SEQ ID NO: 618166 - RNA, 18 nt, Human
ugccgggccugagcugcc

SEQ ID NO: 618167 - RNA, 18 nt, Human
ugccgggccugagcugcc

SEQ ID NO: 618168 - RNA, 20 nt, Human
ugccuaggcuggagugcaau

SEQ ID NO: 618169 - RNA, 21 nt, Human
ugccuaggcuggagugcaaug

SEQ ID NO: 618170 - RNA, 24 nt, Human
ugccuaggcuggagugcaauggca

SEQ ID NO: 618171 - RNA, 18 nt, Human
ugccucaaaaacaaaaac

SEQ ID NO: 618172 - RNA, 18 nt, Human
ugccucagccucccgagu

SEQ ID NO: 618173 - RNA, 24 nt, Human
ugccucagccucccgaguaucugg

SEQ ID NO: 618174 - RNA, 23 nt, Human
ugccucagccuccuggguagcug

SEQ ID NO: 618175 - RNA, 24 nt, Human
ugccucagccuccuggguagcuga

SEQ ID NO: 618176 - RNA, 24 nt, Human
ugccucagccuccuuaguagcugg

SEQ ID NO: 618177 - RNA, 18 nt, Human
ugccucagggccuuugca

SEQ ID NO: 618178 - RNA, 19 nt, Human
ugccucagggccuuugcac

SEQ ID NO: 618179 - RNA, 21 nt, Human
ugccucagggccuuugcacug

SEQ ID NO: 618180 - RNA, 22 nt, Human
ugccucagggccuuugcacugc

SEQ ID NO: 618181 - RNA, 22 nt, Human
ugccuccuggguucaagugauu

SEQ ID NO: 618182 - RNA, 23 nt, Human
ugccugcgaccgcuuaccugcug

SEQ ID NO: 618183 - RNA, 24 nt, Human
ugccuuagccucccgaguagcugg

SEQ ID NO: 618184 - RNA, 23 nt, Human
ugcugggauuacaggcgugaacc

SEQ ID NO: 618185 - RNA, 22 nt, Human
ugcugguagcugcagcgggcac

SEQ ID NO: 618186 - RNA, 19 nt, Human
uggagugcaauggcaugau

SEQ ID NO: 618187 - RNA, 24 nt, Human
uggagugcaauggcaugaucucag

SEQ ID NO: 618188 - RNA, 23 nt, Human
uggagugcaguggcgcgaucuca

SEQ ID NO: 618189 - RNA, 24 nt, Human
uggagugcaguggcgcgaucucag

SEQ ID NO: 618190 - RNA, 26 nt, Human
uggagugcagugguguaaggcucuag

SEQ ID NO: 618191 - RNA, 23 nt, Human
uggagugcagugguguaaucuca

SEQ ID NO: 618192 - RNA, 24 nt, Human
uggagugcagugguguaaucucag

SEQ ID NO: 618193 - RNA, 24 nt, Human
uggcaugaucucagcucacugcaa

SEQ ID NO: 618194 - RNA, 21 nt, Human
uggccaggccuggggcugggg

SEQ ID NO: 618195 - RNA, 21 nt, Human
uggccaggccuggggcugggg

SEQ ID NO: 618196 - RNA, 24 nt, Human
uggccaggcuggucuccaacuccu

SEQ ID NO: 618197 - RNA, 24 nt, Human
uggccaggcuggucucgaacuccu

SEQ ID NO: 618198 - RNA, 20 nt, Human
uggcccaggaacuucuggcu

SEQ ID NO: 618199 - RNA, 23 nt, Human
uggccugaaugcuccuuaaacac

SEQ ID NO: 618200 - RNA, 24 nt, Human
uggcgcgaucucagcucacugcaa

SEQ ID NO: 618201 - RNA, 24 nt, Human
uggcuugaagccgggaggcggagg

SEQ ID NO: 618202 - RNA, 29 nt, Human
ugggaagaaagaggcccccccccccccaa

SEQ ID NO: 618203 - RNA, 21 nt, Human
ugggacuauaggcaugcacca

SEQ ID NO: 618204 - RNA, 24 nt, Human
ugggacuauaggcaugcaccacca

SEQ ID NO: 618205 - RNA, 18 nt, Human
ugggauuacaggcaggcg

SEQ ID NO: 618206 - RNA, 21 nt, Human
ugggauuacaggcaggcgcca

SEQ ID NO: 618207 - RNA, 22 nt, Human
ugggauuacaggcaggcgccac

SEQ ID NO: 618208 - RNA, 24 nt, Human
ugggauuacaggcaggcgccacca

SEQ ID NO: 618209 - RNA, 18 nt, Human
ugggauuacaggcaugcg

SEQ ID NO: 618210 - RNA, 21 nt, Human
ugggauuacaggcaugcgcca

SEQ ID NO: 618211 - RNA, 22 nt, Human
ugggauuacaggcaugcgccac

SEQ ID NO: 618212 - RNA, 23 nt, Human
ugggauuacaggcaugcgccacc

SEQ ID NO: 618213 - RNA, 24 nt, Human
ugggauuacaggcaugcgccaccg

SEQ ID NO: 618214 - RNA, 19 nt, Human
ugggauuacaggcgugaac

SEQ ID NO: 618215 - RNA, 21 nt, Human
ugggauuacaggcgugaacca

SEQ ID NO: 618216 - RNA, 21 nt, Human
ugggauuacaggcgugaacca

SEQ ID NO: 618217 - RNA, 21 nt, Human
ugggauuacaggcgugaacca

SEQ ID NO: 618218 - RNA, 24 nt, Human
ugggauuacaggcgugaaccagug

SEQ ID NO: 618219 - RNA, 27 nt, Human
ugggauuacaggcgugaaccagugagu

SEQ ID NO: 618220 - RNA, 21 nt, Human
ugggauuacaggugcccacca

SEQ ID NO: 618221 - RNA, 24 nt, Human
ugggauuacaggugcccaccacca

SEQ ID NO: 618222 - RNA, 21 nt, Human
ugggcgacagagugagacucu

SEQ ID NO: 618223 - RNA, 24 nt, Human
ugggcucaagcaauccuccugccu

SEQ ID NO: 618224 - RNA, 20 nt, Human
ugggggaucggggaggucca

SEQ ID NO: 618225 - RNA, 19 nt, Human
ugggguuucuccauguugg

SEQ ID NO: 618226 - RNA, 23 nt, Human
uggguucaagugauucucccgcc

SEQ ID NO: 618227 - RNA, 23 nt, Human
uggguucaagugauucuccugcc

SEQ ID NO: 618228 - RNA, 23 nt, Human
uggguuucaccauguuggccagg

SEQ ID NO: 618229 - RNA, 24 nt, Human
uggucagucuggucucaaacuccu

SEQ ID NO: 618230 - RNA, 24 nt, Human
ugguguaaucucagcucacugcaa

SEQ ID NO: 618231 - RNA, 18 nt, Human
ugugggguggcccaggaa

SEQ ID NO: 618232 - RNA, 19 nt, Human
ugugggguggcccaggaac

SEQ ID NO: 618233 - RNA, 20 nt, Human
uguugccuaggcuggagugc

SEQ ID NO: 618234 - RNA, 24 nt, Human
uuaguagagacagggcuucaccau

SEQ ID NO: 618235 - RNA, 18 nt, Human
uuaguagagaugggguuu

SEQ ID NO: 618236 - RNA, 24 nt, Human
uuaguagagaugggguuucuccau

SEQ ID NO: 618237 - RNA, 21 nt, Human
uuaguagagauggguuucacc

SEQ ID NO: 618238 - RNA, 23 nt, Human
uuaguagagauggguuucaccau

SEQ ID NO: 618239 - RNA, 24 nt, Human
uuaguagagauggguuucaccaug

SEQ ID NO: 618240 - RNA, 21 nt, Human
uucaagcgauucuccugccuc

SEQ ID NO: 618241 - RNA, 23 nt, Human
uucaagcgauucuccugccucag

SEQ ID NO: 618242 - RNA, 24 nt, Human
uucaagcgauucuccugccucagc

SEQ ID NO: 618243 - RNA, 24 nt, Human
uucaagugauucucccgccuaagc

SEQ ID NO: 618244 - RNA, 21 nt, Human
uucaagugauucuccugccuc

SEQ ID NO: 618245 - RNA, 23 nt, Human
uucaagugauucuccugccucag

SEQ ID NO: 618246 - RNA, 24 nt, Human
uucaagugauucuccugccucagc

SEQ ID NO: 618247 - RNA, 24 nt, Human
uucacucuuguugccuaggcugga

SEQ ID NO: 618248 - RNA, 18 nt, Human
uucagagacccacccauc

SEQ ID NO: 618249 - RNA, 24 nt, Human
uugaagccgggaggcggagguugc

SEQ ID NO: 618250 - RNA, 22 nt, Human
uugcaaugagcccagaucgugc

SEQ ID NO: 618251 - RNA, 19 nt, Human
uugcacugcuuguuccugc

SEQ ID NO: 618252 - RNA, 22 nt, Human
uugcacugcuuguuccugcugc

SEQ ID NO: 618253 - RNA, 18 nt, Human
uugccuaggcuggagugc

SEQ ID NO: 618254 - RNA, 23 nt, Human
uugcguuuuuaguagagaugggg

SEQ ID NO: 618255 - RNA, 21 nt, Human
uuggaagucacuugagggacu

SEQ ID NO: 618256 - RNA, 25 nt, Human
uuggcggcgagggcagccuccccau

SEQ ID NO: 618257 - RNA, 24 nt, Human
uuuaguagagauggguuucaccau

SEQ ID NO: 618258 - RNA, 24 nt, Human
uuucaccauguuggccaggcuggu

SEQ ID NO: 618259 - RNA, 24 nt, Human
uuucacucuuguugccuaggcugg

SEQ ID NO: 618260 - RNA, 18 nt, Human
uuucuccauguuggucag

SEQ ID NO: 618261 - RNA, 19 nt, Human
uuuugcguuuuuaguagag

SEQ ID NO: 618262 - RNA, 20 nt, Human
uuuugcguuuuuaguagaga

SEQ ID NO: 618263 - RNA, 18 nt, Human
uuuugcucuuguugccca

SEQ ID NO: 618264 - RNA, 22 nt, Human
uuuuguauuuuuaguagagaca

SEQ ID NO: 618265 - RNA, 22 nt, Human
uuuuuaguagagaugggguuuc

SEQ ID NO: 618266 - RNA, 20 nt, Human
uuuuuguauuuuuaguagag

SEQ ID NO: 618267 - RNA, 20 nt, Human
uuuuuguauuuuuaguagag

SEQ ID NO: 618268 - RNA, 20 nt, Human
uuuuuuucuuugagacagag

SEQ ID NO: 618269 - RNA, 24 nt, Human
uuuuuuugcuuaaagacagggucu

SEQ ID NO: 618270 - RNA, 20 nt, Human
uuuuuuuuuuugagacagag

SEQ ID NO: 618271 - RNA, 18 nt, Human
uuuuuuuuuuugaggcgg

SEQ ID NO: 618272 - RNA, 26 nt, Human
uuuuuuuuuuuugaggcggaaucuca

SEQ ID NO: 618273 - RNA, 18 nt, Human
uuuuuuuuuuuuucuuug

SEQ ID NO: 618274 - RNA, 22 nt, Human
uuuuuuuuuuuuuugaggcgga

SEQ ID NO: 618275 - RNA, 26 nt, Human
uuuuuuuuuuuuuuuuuuuuuugggg

SEQ ID NO: 618276 - RNA, 22 nt, Human
aacacagcaaaaaucaacaucu

SEQ ID NO: 618277 - RNA, 29 nt, Human
aaccaucuaaaacacauggcaacaucuaa

SEQ ID NO: 618278 - RNA, 19 nt, Human
aggcuccccgagcugagcc

SEQ ID NO: 618279 - RNA, 20 nt, Human
auaaaacacagcaaaaauca

SEQ ID NO: 618280 - RNA, 19 nt, Human
auccuacguaggaaaaccc

SEQ ID NO: 618281 - RNA, 23 nt, Human
auccuacguaggaaaacccuggc

SEQ ID NO: 618282 - RNA, 23 nt, Human
augaaaaaaauacaucaucuaca

SEQ ID NO: 618283 - RNA, 22 nt, Human
auguagaucacuuuuaaagucu

SEQ ID NO: 618284 - RNA, 23 nt, Human
auugguaccaugggugcacucuu

SEQ ID NO: 618285 - RNA, 22 nt, Human
caccacgcggcccccguagagc

SEQ ID NO: 618286 - RNA, 22 nt, Human
cagaauagauaaaaguuucuac

SEQ ID NO: 618287 - RNA, 19 nt, Human
ccccgagcugagccaaguc

SEQ ID NO: 618288 - RNA, 23 nt, Human
ccccuggggauggcaccacgcgg

SEQ ID NO: 618289 - RNA, 22 nt, Human
cgaacaacuacauaauacugaa

SEQ ID NO: 618290 - RNA, 21 nt, Human
cggcccccguagagccggggg

SEQ ID NO: 618291 - RNA, 19 nt, Human
cggccgggcuggcuugggg

SEQ ID NO: 618292 - RNA, 21 nt, Human
cggccuggacgccccaggagc

SEQ ID NO: 618293 - RNA, 26 nt, Human
cgggggaggcugcccugaggagugca

SEQ ID NO: 618294 - RNA, 23 nt, Human
cuaaaacacauggcaacaucuaa

SEQ ID NO: 618295 - RNA, 21 nt, Human
cucuuggcauacacacuccga

SEQ ID NO: 618296 - RNA, 20 nt, Human
cuggagggaccaagaacuug

SEQ ID NO: 618297 - RNA, 22 nt, Human
cuggaugcagcuucuccuaaca

SEQ ID NO: 618298 - RNA, 22 nt, Human
cuuguauaaccaacgaacaacu

SEQ ID NO: 618299 - RNA, 21 nt, Human
gcauacacacuccgagaacac

SEQ ID NO: 618300 - RNA, 18 nt, Human
ggcagggggccggggugg

SEQ ID NO: 618301 - RNA, 29 nt, Human
ggcagggggccggggugguucuggagggg

SEQ ID NO: 618302 - RNA, 18 nt, Human
ggcuggcuugggguuggg

SEQ ID NO: 618303 - RNA, 19 nt, Human
gggauggcaccacgcggcc

SEQ ID NO: 618304 - RNA, 24 nt, Human
ggggaggcugcccugaggagugca

SEQ ID NO: 618305 - RNA, 21 nt, Human
gggguugggugggcgucgggg

SEQ ID NO: 618306 - RNA, 18 nt, Human
gguugggugggcgucggg

SEQ ID NO: 618307 - RNA, 19 nt, Human
uaaaacacagcaaaaauca

SEQ ID NO: 618308 - RNA, 28 nt, Human
uaaaacaguacauauaaauaaaaaggca

SEQ ID NO: 618309 - RNA, 18 nt, Human
uaacaaaaaagaugaaaa

SEQ ID NO: 618310 - RNA, 20 nt, Human
uaacaaaaaagaugaaaaaa

SEQ ID NO: 618311 - RNA, 25 nt, Human
uaaccaacgaacaacuacauaauac

SEQ ID NO: 618312 - RNA, 21 nt, Human
uaccaugggugcacucuuggc

SEQ ID NO: 618313 - RNA, 23 nt, Human
uauaaaacacagcaaaaaucaac

SEQ ID NO: 618314 - RNA, 22 nt, Human
ucacuuguuuccuauuucagau

SEQ ID NO: 618315 - RNA, 25 nt, Human
ucaguuaacaaaaaagaugaaaaaa

SEQ ID NO: 618316 - RNA, 18 nt, Human
uccccgagcugagccaag

SEQ ID NO: 618317 - RNA, 22 nt, Human
uccccgagcugagccaagucug

SEQ ID NO: 618318 - RNA, 21 nt, Human
ugaaaaaaggaaucaauaaau

SEQ ID NO: 618319 - RNA, 22 nt, Human
ugcacucuuggcauacacacuc

SEQ ID NO: 618320 - RNA, 21 nt, Human
uggagggaccaagaacuugua

SEQ ID NO: 618321 - RNA, 20 nt, Human
uggcuugggguugggugggc

SEQ ID NO: 618322 - RNA, 24 nt, Human
uggggauggcaccacgcggccccc

SEQ ID NO: 618323 - RNA, 19 nt, Human
ugguaccaugggugcacuc

SEQ ID NO: 618324 - RNA, 23 nt, Human
ugguucuggagggaccaagaacu

SEQ ID NO: 618325 - RNA, 23 nt, Human
uucaacuucccuucuccaacauc

SEQ ID NO: 618326 - RNA, 23 nt, Human
uucucagaauagauaaaaguuuc

SEQ ID NO: 618327 - RNA, 18 nt, Human
uucuccaacaucauuucu

SEQ ID NO: 618328 - RNA, 21 nt, Human
uuuuuuuuuuuuuuuuucacc

SEQ ID NO: 618329 - RNA, 20 nt, Human
aaagugcugggauuacaggc

SEQ ID NO: 618330 - RNA, 24 nt, Human
aaagugcugggauuacaggcccga

SEQ ID NO: 618331 - RNA, 24 nt, Human
aaagugcugggauuacaggcguga

SEQ ID NO: 618332 - RNA, 23 nt, Human
aacaccugggucccaggcccaaa

SEQ ID NO: 618333 - RNA, 20 nt, Human
aaccuccgccucccagacuc

SEQ ID NO: 618334 - RNA, 27 nt, Human
aacucaugaccucaagugaucuaccuu

SEQ ID NO: 618335 - RNA, 26 nt, Human
aagcgauucucgugccugagccuccu

SEQ ID NO: 618336 - RNA, 18 nt, Human
aagugcugggauuacagg

SEQ ID NO: 618337 - RNA, 19 nt, Human
aagugcugggauuacaggc

SEQ ID NO: 618338 - RNA, 19 nt, Human
aagugcugggauuacaggc

SEQ ID NO: 618339 - RNA, 19 nt, Human
aagugcugggauuacaggc

SEQ ID NO: 618340 - RNA, 26 nt, Human
aagugcugggauuacaggcccgagcc

SEQ ID NO: 618341 - RNA, 26 nt, Human
aagugcugggauuacaggcgugagcc

SEQ ID NO: 618342 - RNA, 18 nt, Human
accacgcccggcuaauuu

SEQ ID NO: 618343 - RNA, 23 nt, Human
accacgcccggcuaauuuuugua

SEQ ID NO: 618344 - RNA, 18 nt, Human
accuugggggcgaugggg

SEQ ID NO: 618345 - RNA, 24 nt, Human
acucuaucgcccaggcuggauugc

SEQ ID NO: 618346 - RNA, 24 nt, Human
acugcaaucucugccuccagguuc

SEQ ID NO: 618347 - RNA, 19 nt, Human
agagacgccucagaaccac

SEQ ID NO: 618348 - RNA, 24 nt, Human
agcgauuuuccugccucagccucu

SEQ ID NO: 618349 - RNA, 23 nt, Human
aggcgugagccaccgugccuggc

SEQ ID NO: 618350 - RNA, 24 nt, Human
aggugaucugccuuccuuggccuc

SEQ ID NO: 618351 - RNA, 18 nt, Human
aguagcugggaauacggg

SEQ ID NO: 618352 - RNA, 19 nt, Human
aguagcugggauuacaggc

SEQ ID NO: 618353 - RNA, 21 nt, Human
aguagcugggauuacaggcgu

SEQ ID NO: 618354 - RNA, 24 nt, Human
agugcaaugcaaugaucucggcuc

SEQ ID NO: 618355 - RNA, 18 nt, Human
agugcugggauuacaggc

SEQ ID NO: 618356 - RNA, 18 nt, Human
agugcugggauuacaggc

SEQ ID NO: 618357 - RNA, 20 nt, Human
augggguuucgccauguugg

SEQ ID NO: 618358 - RNA, 23 nt, Human
augggguuucgccauguuggcca

SEQ ID NO: 618359 - RNA, 25 nt, Human
augggguuucgccauguuggccaag

SEQ ID NO: 618360 - RNA, 25 nt, Human
auugcaguggccacgaucucagcuc

SEQ ID NO: 618361 - RNA, 24 nt, Human
auuuuuguauuuuuaguagagaca

SEQ ID NO: 618362 - RNA, 19 nt, Human
auuuuuuuuuuggcggggg

SEQ ID NO: 618363 - RNA, 24 nt, Human
caaagugcugggauuacaggcgug

SEQ ID NO: 618364 - RNA, 23 nt, Human
caaccuccgccucccagacucaa

SEQ ID NO: 618365 - RNA, 22 nt, Human
caagcgauuuuccugccucagc

SEQ ID NO: 618366 - RNA, 23 nt, Human
cacacccagcuaauuuuugcauu

SEQ ID NO: 618367 - RNA, 19 nt, Human
caccugggucccaggccca

SEQ ID NO: 618368 - RNA, 18 nt, Human
cacucuaucgcccaggcu

SEQ ID NO: 618369 - RNA, 21 nt, Human
cacucuuccccgugcaccgcg

SEQ ID NO: 618370 - RNA, 21 nt, Human
cacugcaaccuccgccuccca

SEQ ID NO: 618371 - RNA, 18 nt, Human
cacugcaaucucugccuc

SEQ ID NO: 618372 - RNA, 23 nt, Human
cacugcaaucucugccuccaggu

SEQ ID NO: 618373 - RNA, 19 nt, Human
caguggccacgaucucagc

SEQ ID NO: 618374 - RNA, 20 nt, Human
caucaugagugugugccagg

SEQ ID NO: 618375 - RNA, 24 nt, Human
caugaccucaagugaucuaccuuc

SEQ ID NO: 618376 - RNA, 24 nt, Human
cauguuggucaggcuggucuugaa

SEQ ID NO: 618377 - RNA, 22 nt, Human
ccaaaaccacguccgccgccca

SEQ ID NO: 618378 - RNA, 22 nt, Human
ccaaagugcugggauuacaggc

SEQ ID NO: 618379 - RNA, 22 nt, Human
ccaaagugcugggauuacaggc

SEQ ID NO: 618380 - RNA, 24 nt, Human
ccaaagugcugggauuacaggcgu

SEQ ID NO: 618381 - RNA, 22 nt, Human
ccacguccgccgcccacucuuc

SEQ ID NO: 618382 - RNA, 22 nt, Human
ccagguucaagcgauuuuccug

SEQ ID NO: 618383 - RNA, 24 nt, Human
ccauguuggccaaggcuggucucg

SEQ ID NO: 618384 - RNA, 19 nt, Human
ccauguuggucaggcuggu

SEQ ID NO: 618385 - RNA, 21 nt, Human
ccccccaccacacccagcuaa

SEQ ID NO: 618386 - RNA, 19 nt, Human
ccccggcgcucuccugccc

SEQ ID NO: 618387 - RNA, 21 nt, Human
cccggcgcucuccugcccucc

SEQ ID NO: 618388 - RNA, 24 nt, Human
cccggcgcucuccugcccucccug

SEQ ID NO: 618389 - RNA, 21 nt, Human
cccucuguugcucaagcugga

SEQ ID NO: 618390 - RNA, 22 nt, Human
cccugggaguggggacccacac

SEQ ID NO: 618391 - RNA, 23 nt, Human
ccgaaagugcugggauuacaggc

SEQ ID NO: 618392 - RNA, 20 nt, Human
ccgccgcccacucuuccccg

SEQ ID NO: 618393 - RNA, 24 nt, Human
ccgccucccagacucaagcgauuc

SEQ ID NO: 618394 - RNA, 22 nt, Human
ccgcgcccagccgcuucugauc

SEQ ID NO: 618395 - RNA, 20 nt, Human
ccuaauucucugaggacaag

SEQ ID NO: 618396 - RNA, 22 nt, Human
ccuccagguucaagcgauuuuc

SEQ ID NO: 618397 - RNA, 23 nt, Human
ccuccagguucaagcgauuuucc

SEQ ID NO: 618398 - RNA, 23 nt, Human
ccugaguagcugggauuacaggc

SEQ ID NO: 618399 - RNA, 24 nt, Human
ccugaguagcugggauuacaggcg

SEQ ID NO: 618400 - RNA, 21 nt, Human
ccugggucccaggcccaaaac

SEQ ID NO: 618401 - RNA, 23 nt, Human
cgaaagugcugggauuacaggcc

SEQ ID NO: 618402 - RNA, 23 nt, Human
cgccauguuggccaaggcugguc

SEQ ID NO: 618403 - RNA, 25 nt, Human
cgccauguuggccaaggcuggucuc

SEQ ID NO: 618404 - RNA, 20 nt, Human
cucacucuaucgcccaggcc

SEQ ID NO: 618405 - RNA, 24 nt, Human
cucacugcaaccuccgccucccag

SEQ ID NO: 618406 - RNA, 24 nt, Human
cucacugcaaucucugccuccagg

SEQ ID NO: 618407 - RNA, 24 nt, Human
cuccagguucaagcgauuuuccug

SEQ ID NO: 618408 - RNA, 21 nt, Human
cucggccuccgaaagugcugg

SEQ ID NO: 618409 - RNA, 21 nt, Human
cucuccugcccucccugggag

SEQ ID NO: 618410 - RNA, 24 nt, Human
cugagccuccugaguagcugggau

SEQ ID NO: 618411 - RNA, 22 nt, Human
cugaguagcugggauuacaggc

SEQ ID NO: 618412 - RNA, 24 nt, Human
cugaguagcugggauuacaggcgu

SEQ ID NO: 618413 - RNA, 23 nt, Human
cugcaaccuccgccucccagacu

SEQ ID NO: 618414 - RNA, 23 nt, Human
cugcaaucucugccuccagguuc

SEQ ID NO: 618415 - RNA, 22 nt, Human
cugccucagccucugaguagcu

SEQ ID NO: 618416 - RNA, 24 nt, Human
cuggagugcaaugcaaugaucucg

SEQ ID NO: 618417 - RNA, 20 nt, Human
cuggccucaggugaucugcc

SEQ ID NO: 618418 - RNA, 18 nt, Human
gaaagugcugggauuaca

SEQ ID NO: 618419 - RNA, 19 nt, Human
gaacaaguuaccuaauucu

SEQ ID NO: 618420 - RNA, 18 nt, Human
gaccucaagugaucuacc

SEQ ID NO: 618421 - RNA, 20 nt, Human
gaguagcugggauuacaggc

SEQ ID NO: 618422 - RNA, 24 nt, Human
gaguagcugggauuacaggcgugc

SEQ ID NO: 618423 - RNA, 21 nt, Human
gaucuaccuuccucggccucc

SEQ ID NO: 618424 - RNA, 18 nt, Human
gauuacaggcccgagcca

SEQ ID NO: 618425 - RNA, 18 nt, Human
gauuacaggcgugagcca

SEQ ID NO: 618426 - RNA, 21 nt, Human
gauuacaggcgugagccaccg

SEQ ID NO: 618427 - RNA, 24 nt, Human
gauuacaggcgugagccaccgugc

SEQ ID NO: 618428 - RNA, 19 nt, Human
gauuacaggcgugcgcuac

SEQ ID NO: 618429 - RNA, 21 nt, Human
gauucucgugccugagccucc

SEQ ID NO: 618430 - RNA, 23 nt, Human
gauucugcucacacucuggugcc

SEQ ID NO: 618431 - RNA, 22 nt, Human
gcaaccuccgccucccagacuc

SEQ ID NO: 618432 - RNA, 24 nt, Human
gccauguuggucaggcuggucuug

SEQ ID NO: 618433 - RNA, 22 nt, Human
gcccggcuaauuuuuguauuuu

SEQ ID NO: 618434 - RNA, 22 nt, Human
ggagaaugggagagacaguuau

SEQ ID NO: 618435 - RNA, 20 nt, Human
ggaggaauaagugacaucau

SEQ ID NO: 618436 - RNA, 24 nt, Human
ggccacgaucucagcucacugcaa

SEQ ID NO: 618437 - RNA, 24 nt, Human
ggccauguuggucaggcuggucuu

SEQ ID NO: 618438 - RNA, 24 nt, Human
ggccucaggugaucugccuuccuu

SEQ ID NO: 618439 - RNA, 18 nt, Human
ggcuggauugcaguggcc

SEQ ID NO: 618440 - RNA, 21 nt, Human
ggggcgauggggacugggagc

SEQ ID NO: 618441 - RNA, 22 nt, Human
gggguuucgccauguuggccaa

SEQ ID NO: 618442 - RNA, 24 nt, Human
ggugaucugccuuccuuggccucc

SEQ ID NO: 618443 - RNA, 18 nt, Human
ggugccagcgugggggag

SEQ ID NO: 618444 - RNA, 18 nt, Human
guagcugggauuacaggc

SEQ ID NO: 618445 - RNA, 22 nt, Human
gugccugagccuccugaguagc

SEQ ID NO: 618446 - RNA, 22 nt, Human
guuauaucuguugcuucugacc

SEQ ID NO: 618447 - RNA, 21 nt, Human
uaagccgauucugcucacacu

SEQ ID NO: 618448 - RNA, 24 nt, Human
uaauuuuugcauuuuuaguagcga

SEQ ID NO: 618449 - RNA, 24 nt, Human
uaauuuuuguauuuuuaguagaga

SEQ ID NO: 618450 - RNA, 24 nt, Human
uacaggcccgagccaccgcgccca

SEQ ID NO: 618451 - RNA, 22 nt, Human
uacaggcgugagccaccgugcc

SEQ ID NO: 618452 - RNA, 23 nt, Human
uacaggcgugagccaccgugccu

SEQ ID NO: 618453 - RNA, 24 nt, Human
uacgggugccccccaccacaccca

SEQ ID NO: 618454 - RNA, 22 nt, Human
uagcgaugggguuucgccaugu

SEQ ID NO: 618455 - RNA, 24 nt, Human
uaguagcgaugggguuucgccaug

SEQ ID NO: 618456 - RNA, 24 nt, Human
uagucucacucuaucgcccaggcu

SEQ ID NO: 618457 - RNA, 18 nt, Human
ucacugcaaccuccgccu

SEQ ID NO: 618458 - RNA, 19 nt, Human
ucacugcaaccuccgccuc

SEQ ID NO: 618459 - RNA, 23 nt, Human
ucacugcaaccuccgccucccag

SEQ ID NO: 618460 - RNA, 27 nt, Human
ucacugcaaccuccgccucccagacuc

SEQ ID NO: 618461 - RNA, 19 nt, Human
ucacugcaaucucugccuc

SEQ ID NO: 618462 - RNA, 23 nt, Human
ucacugcaaucucugccuccagg

SEQ ID NO: 618463 - RNA, 27 nt, Human
ucagcucacugcaaccuccgccuccca

SEQ ID NO: 618464 - RNA, 24 nt, Human
ucccaaagugcugggauuacaggc

SEQ ID NO: 618465 - RNA, 21 nt, Human
ucccagacucaagcgauucuc

SEQ ID NO: 618466 - RNA, 24 nt, Human
uccccgugcaccgcgaguggaggc

SEQ ID NO: 618467 - RNA, 20 nt, Human
ucccucuguugcucaagcug

SEQ ID NO: 618468 - RNA, 24 nt, Human
uccgaaagugcugggauuacaggc

SEQ ID NO: 618469 - RNA, 24 nt, Human
uccugaguagcugggauuacaggc

SEQ ID NO: 618470 - RNA, 18 nt, Human
uccugcccucccugggag

SEQ ID NO: 618471 - RNA, 23 nt, Human
ucgccauguuggccaaggcuggu

SEQ ID NO: 618472 - RNA, 25 nt, Human
ucgccauguuggccaaggcuggucu

SEQ ID NO: 618473 - RNA, 24 nt, Human
ucgcccaggcuggauugcaguggc

SEQ ID NO: 618474 - RNA, 19 nt, Human
ucuaccuuccucggccucc

SEQ ID NO: 618475 - RNA, 22 nt, Human
ucucacucuaucgcccaggcug

SEQ ID NO: 618476 - RNA, 23 nt, Human
ucucacucuaucgcccaggcugg

SEQ ID NO: 618477 - RNA, 24 nt, Human
ucucacucuaucgcccaggcugga

SEQ ID NO: 618478 - RNA, 26 nt, Human
ucucacucuaucgcccaggcuggauu

SEQ ID NO: 618479 - RNA, 27 nt, Human
ucucacucuaucgcccaggcuggauug

SEQ ID NO: 618480 - RNA, 20 nt, Human
ucucgaacuucuggccucag

SEQ ID NO: 618481 - RNA, 18 nt, Human
ucucgugccugagccucc

SEQ ID NO: 618482 - RNA, 23 nt, Human
ucugaguagcugggaauacgggu

SEQ ID NO: 618483 - RNA, 24 nt, Human
ucugaguagcugggaauacgggug

SEQ ID NO: 618484 - RNA, 23 nt, Human
ucugccuuccuuggccucccaaa

SEQ ID NO: 618485 - RNA, 24 nt, Human
ucuguugcucaagcuggagugcaa

SEQ ID NO: 618486 - RNA, 21 nt, Human
ugacaucaugagugugugcca

SEQ ID NO: 618487 - RNA, 19 nt, Human
ugaccucaagugaucuacc

SEQ ID NO: 618488 - RNA, 21 nt, Human
ugaccucaagugaucuaccuu

SEQ ID NO: 618489 - RNA, 20 nt, Human
ugagaaggggggaaagagua

SEQ ID NO: 618490 - RNA, 21 nt, Human
ugcaguagugagaagggggga

SEQ ID NO: 618491 - RNA, 20 nt, Human
ugccucagccucugaguagc

SEQ ID NO: 618492 - RNA, 23 nt, Human
ugccucagccucugaguagcugg

SEQ ID NO: 618493 - RNA, 22 nt, Human
ugccuccagguucaagcgauuu

SEQ ID NO: 618494 - RNA, 21 nt, Human
ugccugagccuccugaguagc

SEQ ID NO: 618495 - RNA, 22 nt, Human
ugccugagccuccugaguagcu

SEQ ID NO: 618496 - RNA, 24 nt, Human
ugccugagccuccugaguagcugg

SEQ ID NO: 618497 - RNA, 24 nt, Human
ugcugggauuacaggcgugagcca

SEQ ID NO: 618498 - RNA, 21 nt, Human
uggagugcaaugcaaugaucc

SEQ ID NO: 618499 - RNA, 24 nt, Human
uggagugcaaugcaaugaucucgg

SEQ ID NO: 618500 - RNA, 25 nt, Human
uggccaaggcuggucucgaacuucu

SEQ ID NO: 618501 - RNA, 19 nt, Human
uggccucaggugaucugcc

SEQ ID NO: 618502 - RNA, 20 nt, Human
uggccucaggugaucugccu

SEQ ID NO: 618503 - RNA, 21 nt, Human
ugggagagacaguuaucuauu

SEQ ID NO: 618504 - RNA, 18 nt, Human
ugggaggaauaagugaca

SEQ ID NO: 618505 - RNA, 21 nt, Human
ugggauuacaggcccgagcca

SEQ ID NO: 618506 - RNA, 22 nt, Human
ugggauuacaggcccgagccac

SEQ ID NO: 618507 - RNA, 23 nt, Human
ugggauuacaggcccgagccacc

SEQ ID NO: 618508 - RNA, 24 nt, Human
ugggauuacaggcccgagccaccg

SEQ ID NO: 618509 - RNA, 18 nt, Human
ugggauuacaggcgugag

SEQ ID NO: 618510 - RNA, 21 nt, Human
ugggauuacaggcgugagcca

SEQ ID NO: 618511 - RNA, 22 nt, Human
ugggauuacaggcgugagccac

SEQ ID NO: 618512 - RNA, 23 nt, Human
ugggauuacaggcgugagccacc

SEQ ID NO: 618513 - RNA, 23 nt, Human
ugggauuacaggcgugagccacc

SEQ ID NO: 618514 - RNA, 24 nt, Human
ugggauuacaggcgugagccaccg

SEQ ID NO: 618515 - RNA, 18 nt, Human
ugggauuacaggcgugcg

SEQ ID NO: 618516 - RNA, 19 nt, Human
ugggauuacaggcgugcgc

SEQ ID NO: 618517 - RNA, 22 nt, Human
ugggauuacaggcgugcgcuac

SEQ ID NO: 618518 - RNA, 24 nt, Human
ugggauuacaggcgugcgcuacca

SEQ ID NO: 618519 - RNA, 24 nt, Human
ugggcagcgaugcccgcccugggc

SEQ ID NO: 618520 - RNA, 24 nt, Human
ugggguuucgccauguuggccaag

SEQ ID NO: 618521 - RNA, 25 nt, Human
ugggguuucgccauguuggccaagg

SEQ ID NO: 618522 - RNA, 24 nt, Human
uggucaggcuggucuugaacucau

SEQ ID NO: 618523 - RNA, 24 nt, Human
ugucccgauucuuucgaccuuggg

SEQ ID NO: 618524 - RNA, 18 nt, Human
uguccgccauauggcugu

SEQ ID NO: 618525 - RNA, 18 nt, Human
uuaguagcgaugggguuu

SEQ ID NO: 618526 - RNA, 24 nt, Human
uuaguagcgaugggguuucgccau

SEQ ID NO: 618527 - RNA, 19 nt, Human
uuauaucuguugcuucuga

SEQ ID NO: 618528 - RNA, 21 nt, Human
uucaagcgauuuuccugccuc

SEQ ID NO: 618529 - RNA, 23 nt, Human
uucaagcgauuuuccugccucag

SEQ ID NO: 618530 - RNA, 24 nt, Human
uucaagcgauuuuccugccucagc

SEQ ID NO: 618531 - RNA, 21 nt, Human
uuccuuggccucccaaagugc

SEQ ID NO: 618532 - RNA, 23 nt, Human
uuccuuggccucccaaagugcug

SEQ ID NO: 618533 - RNA, 19 nt, Human
uucugccuuuccacuugcu

SEQ ID NO: 618534 - RNA, 22 nt, Human
uuucgccauguuggccaaggcu

SEQ ID NO: 618535 - RNA, 20 nt, Human
uuugcauuuuuaguagcgau

SEQ ID NO: 618536 - RNA, 23 nt, Human
uuuuuaguagcgaugggguuucg

SEQ ID NO: 618537 - RNA, 24 nt, Human
uuuuuaguagcgaugggguuucgc

SEQ ID NO: 618538 - RNA, 20 nt, Human
uuuuuguauuuuuaguagag

SEQ ID NO: 618539 - RNA, 27 nt, Human
uuuuuuuuuuuuugagacguagucuca

SEQ ID NO: 618540 - RNA, 18 nt, Human
uuuuuuuuuuuuuuuuug

SEQ ID NO: 618541 - RNA, 21 nt, Human
aacaaacacacauuucaagga

SEQ ID NO: 618542 - RNA, 22 nt, Human
aagagccagaagccgccuugcc

SEQ ID NO: 618543 - RNA, 21 nt, Human
aagcacacaggaacccacaac

SEQ ID NO: 618544 - RNA, 22 nt, Human
aagugucugaguuaacgaaugg

SEQ ID NO: 618545 - RNA, 22 nt, Human
aaugaaaauacauccaucuaaa

SEQ ID NO: 618546 - RNA, 23 nt, Human
aaugcaaauaguaaaauuacaaa

SEQ ID NO: 618547 - RNA, 23 nt, Human
acaggaacccacaacugagccug

SEQ ID NO: 618548 - RNA, 19 nt, Human
aggaaaagauggaaggagg

SEQ ID NO: 618549 - RNA, 18 nt, Human
aggaacccacaacugagc

SEQ ID NO: 618550 - RNA, 19 nt, Human
agugaagggggagauggaa

SEQ ID NO: 618551 - RNA, 22 nt, Human
aucuuucuugauggccagacug

SEQ ID NO: 618552 - RNA, 21 nt, Human
augcaaauaguaaaauuacaa

SEQ ID NO: 618553 - RNA, 20 nt, Human
cacuuaguagccuccccauc

SEQ ID NO: 618554 - RNA, 19 nt, Human
caggaacccacaacugagc

SEQ ID NO: 618555 - RNA, 22 nt, Human
ccacaccuuuccuguuccaauc

SEQ ID NO: 618556 - RNA, 19 nt, Human
ccagaucaguccagccugu

SEQ ID NO: 618557 - RNA, 23 nt, Human
ccaucagcucagcuuugugacga

SEQ ID NO: 618558 - RNA, 18 nt, Human
ccaucuagaauauacucc

SEQ ID NO: 618559 - RNA, 22 nt, Human
cccacaacugagccugcggaag

SEQ ID NO: 618560 - RNA, 18 nt, Human
cccuuccacaccuuuccu

SEQ ID NO: 618561 - RNA, 19 nt, Human
cccuuugugaaggcaggcc

SEQ ID NO: 618562 - RNA, 18 nt, Human
cuccagaucaguccagcc

SEQ ID NO: 618563 - RNA, 21 nt, Human
cuguucacaagcuaagugagg

SEQ ID NO: 618564 - RNA, 21 nt, Human
cuuccacaccuuuccuguucc

SEQ ID NO: 618565 - RNA, 21 nt, Human
gaacaaacacacauuucaagg

SEQ ID NO: 618566 - RNA, 22 nt, Human
gaacccacaacugagccugcgg

SEQ ID NO: 618567 - RNA, 26 nt, Human
gaaccuuugccaaagaaaggaauaau

SEQ ID NO: 618568 - RNA, 22 nt, Human
gaauauacuccgugaucuuucu

SEQ ID NO: 618569 - RNA, 24 nt, Human
gagggugcucccaucagcucagcu

SEQ ID NO: 618570 - RNA, 20 nt, Human
guaaaauuacaaauauaaag

SEQ ID NO: 618571 - RNA, 23 nt, Human
gugaagggggagauggaagaugg

SEQ ID NO: 618572 - RNA, 24 nt, Human
uaaaacaacacgauugcugcuaca

SEQ ID NO: 618573 - RNA, 18 nt, Human
uaaaauuacaaauauaaa

SEQ ID NO: 618574 - RNA, 24 nt, Human
uaguaaaauuacaaauauaaagua

SEQ ID NO: 618575 - RNA, 18 nt, Human
uaucugaaaaaagugaag

SEQ ID NO: 618576 - RNA, 25 nt, Human
ucaguccagccugugucggacccga

SEQ ID NO: 618577 - RNA, 20 nt, Human
ucuccagaucaguccagccu

SEQ ID NO: 618578 - RNA, 26 nt, Human
ucuuuuucgccaacagaaguaaaggu

SEQ ID NO: 618579 - RNA, 18 nt, Human
ugaaagaacuguaagguu

SEQ ID NO: 618580 - RNA, 26 nt, Human
ugaaggcaggcccuucgcggcucucc

SEQ ID NO: 618581 - RNA, 23 nt, Human
ugaagggggagauggaagauggu

SEQ ID NO: 618582 - RNA, 23 nt, Human
ugaccucuggggagggugcuccc

SEQ ID NO: 618583 - RNA, 18 nt, Human
ugagccugcggaagagcc

SEQ ID NO: 618584 - RNA, 19 nt, Human
ugccaaagaaaggaauaau

SEQ ID NO: 618585 - RNA, 24 nt, Human
uggccagacuguguaaaauucaua

SEQ ID NO: 618586 - RNA, 19 nt, Human
ugguaaaugccaaggaaaa

SEQ ID NO: 618587 - RNA, 18 nt, Human
uuaguagccuccccaucu

SEQ ID NO: 618588 - RNA, 19 nt, Human
uucaaggagggcacuacag

SEQ ID NO: 618589 - RNA, 24 nt, Human
uucgccaacagaaguaaagguaaa

SEQ ID NO: 618590 - RNA, 20 nt, Human
uuuuuuuuuuuuuuuuucac

SEQ ID NO: 618591 - RNA, 18 nt, Human
aaagccauccucccgccu

SEQ ID NO: 618592 - RNA, 24 nt, Human
aaaguacucggauuacagguguga

SEQ ID NO: 618593 - RNA, 24 nt, Human
aaaguguuaggauuacagguguga

SEQ ID NO: 618594 - RNA, 19 nt, Human
aaaugaucccaugucccca

SEQ ID NO: 618595 - RNA, 25 nt, Human
aacacauuccccaaaugaagggacu

SEQ ID NO: 618596 - RNA, 25 nt, Human
aaccaaaaaaguguggccacggucc

SEQ ID NO: 618597 - RNA, 25 nt, Human
aagcaauucucccaccuuagccucc

SEQ ID NO: 618598 - RNA, 23 nt, Human
aagcaugagucaggcugagccug

SEQ ID NO: 618599 - RNA, 26 nt, Human
aaguguuaggauuacaggugugagcc

SEQ ID NO: 618600 - RNA, 23 nt, Human
acccuguucccuaauccaacaca

SEQ ID NO: 618601 - RNA, 24 nt, Human
accgaggcuggagugcaguggcgu

SEQ ID NO: 618602 - RNA, 24 nt, Human
accguguuggccaggcuggucucg

SEQ ID NO: 618603 - RNA, 20 nt, Human
accuuagccucccgaguagc

SEQ ID NO: 618604 - RNA, 20 nt, Human
acggguuuucaccguguugg

SEQ ID NO: 618605 - RNA, 24 nt, Human
acggguuuucaccguguuggccag

SEQ ID NO: 618606 - RNA, 21 nt, Human
acuacaggugugugccaccau

SEQ ID NO: 618607 - RNA, 25 nt, Human
acuauguugcccaggcuggccucaa

SEQ ID NO: 618608 - RNA, 18 nt, Human
agccauccucccgccuca

SEQ ID NO: 618609 - RNA, 18 nt, Human
agccucccgaguagcugg

SEQ ID NO: 618610 - RNA, 22 nt, Human
aggaggcccuguucugugcucc

SEQ ID NO: 618611 - RNA, 18 nt, Human
aggaggcucucagauuuc

SEQ ID NO: 618612 - RNA, 25 nt, Human
aggcuggagugcaguggcgugaucu

SEQ ID NO: 618613 - RNA, 22 nt, Human
agggacagggucuugcucuguu

SEQ ID NO: 618614 - RNA, 23 nt, Human
aggugugagccacugugcccggc

SEQ ID NO: 618615 - RNA, 23 nt, Human
aggugugagucaccgcgccuggc

SEQ ID NO: 618616 - RNA, 18 nt, Human
aguagcugggacuacagg

SEQ ID NO: 618617 - RNA, 23 nt, Human
aguagcugggacuacaggugugu

SEQ ID NO: 618618 - RNA, 23 nt, Human
agugcaguggcgugaucuuggcu

SEQ ID NO: 618619 - RNA, 24 nt, Human
agugcaguggcgugaucuuggcuc

SEQ ID NO: 618620 - RNA, 20 nt, Human
agugcagugguaugaucaug

SEQ ID NO: 618621 - RNA, 24 nt, Human
agugcagugguaugaucaugagcu

SEQ ID NO: 618622 - RNA, 25 nt, Human
agugcagugguaugaucaugagcuc

SEQ ID NO: 618623 - RNA, 21 nt, Human
aucagucaagucuggagccaa

SEQ ID NO: 618624 - RNA, 18 nt, Human
auccucccgccucagccu

SEQ ID NO: 618625 - RNA, 18 nt, Human
auggggcuggaaggaggc

SEQ ID NO: 618626 - RNA, 23 nt, Human
caaaguacucggauuacaggugu

SEQ ID NO: 618627 - RNA, 24 nt, Human
caaaguacucggauuacaggugug

SEQ ID NO: 618628 - RNA, 24 nt, Human
caaaguguuaggauuacaggugug

SEQ ID NO: 618629 - RNA, 23 nt, Human
caaaucuucaacccuguucccua

SEQ ID NO: 618630 - RNA, 18 nt, Human
cacagcaucaggggucag

SEQ ID NO: 618631 - RNA, 24 nt, Human
cacagcaucaggggucagccaucu

SEQ ID NO: 618632 - RNA, 19 nt, Human
cacaucccccaacccuccc

SEQ ID NO: 618633 - RNA, 24 nt, Human
caccacacccggcuaauuuuugua

SEQ ID NO: 618634 - RNA, 24 nt, Human
caccgaggcuggagugcaguggcg

SEQ ID NO: 618635 - RNA, 21 nt, Human
caccguguuggccaggcuggu

SEQ ID NO: 618636 - RNA, 24 nt, Human
caccguguuggccaggcuggucuc

SEQ ID NO: 618637 - RNA, 24 nt, Human
caccuuagccucccgaguagcugg

SEQ ID NO: 618638 - RNA, 27 nt, Human
cacgguccagguggaagggggcugccu

SEQ ID NO: 618639 - RNA, 19 nt, Human
cacuauguugcccaggcug

SEQ ID NO: 618640 - RNA, 24 nt, Human
cacuauguugcccaggcuggccuc

SEQ ID NO: 618641 - RNA, 21 nt, Human
cacugcaaccuccgccuccca

SEQ ID NO: 618642 - RNA, 23 nt, Human
cauguccccaagacugugacaaa

SEQ ID NO: 618643 - RNA, 18 nt, Human
cauuccccaaaugaaggg

SEQ ID NO: 618644 - RNA, 22 nt, Human
ccaaaaaaguguggccacgguc

SEQ ID NO: 618645 - RNA, 21 nt, Human
ccaaaguguuaggauuacagg

SEQ ID NO: 618646 - RNA, 24 nt, Human
ccaaaguguuaggauuacaggugu

SEQ ID NO: 618647 - RNA, 23 nt, Human
ccaccuuagccucccgaguagcu

SEQ ID NO: 618648 - RNA, 23 nt, Human
ccccaagacugugacaaacuaaa

SEQ ID NO: 618649 - RNA, 23 nt, Human
cccgaguagcugggauuacggcu

SEQ ID NO: 618650 - RNA, 24 nt, Human
cccuaauccaacacauuccccaaa

SEQ ID NO: 618651 - RNA, 19 nt, Human
ccgcccaccucagccuccc

SEQ ID NO: 618652 - RNA, 23 nt, Human
ccgccucagccuuucgaguagcu

SEQ ID NO: 618653 - RNA, 27 nt, Human
ccgccucccagguucaagcaauucuuu

SEQ ID NO: 618654 - RNA, 27 nt, Human
ccucacaucccccaacccucccugggc

SEQ ID NO: 618655 - RNA, 24 nt, Human
ccucccagguucaagcaauucucc

SEQ ID NO: 618656 - RNA, 24 nt, Human
ccucccgccucagccuuucgagua

SEQ ID NO: 618657 - RNA, 24 nt, Human
ccuggcaucaagugauccgcccac

SEQ ID NO: 618658 - RNA, 22 nt, Human
cgugggggugucaagcaugagu

SEQ ID NO: 618659 - RNA, 19 nt, Human
cuaaacuucaaaucuucaa

SEQ ID NO: 618660 - RNA, 30 nt, Human
cucaagcaauccucccaccugagccccgcc

SEQ ID NO: 618661 - RNA, 24 nt, Human
cucacugcaaccuccgccucccag

SEQ ID NO: 618662 - RNA, 20 nt, Human
cucagauuucccugcccucc

SEQ ID NO: 618663 - RNA, 24 nt, Human
cucagccuuucgaguagcugggac

SEQ ID NO: 618664 - RNA, 21 nt, Human
cuccucauuucaaucccggga

SEQ ID NO: 618665 - RNA, 23 nt, Human
cugacucugaagcuguucccagc

SEQ ID NO: 618666 - RNA, 23 nt, Human
cugcaaccuccgccucccagguu

SEQ ID NO: 618667 - RNA, 24 nt, Human
cugcaaccuccgccucccagguuc

SEQ ID NO: 618668 - RNA, 28 nt, Human
cugcccuccucacaucccccaacccucc

SEQ ID NO: 618669 - RNA, 19 nt, Human
cuggcaucaagugauccgc

SEQ ID NO: 618670 - RNA, 21 nt, Human
cuggccucaagcaauccuccc

SEQ ID NO: 618671 - RNA, 22 nt, Human
cuggccucaagcaauccuccca

SEQ ID NO: 618672 - RNA, 18 nt, Human
cugucaccgaggcuggag

SEQ ID NO: 618673 - RNA, 24 nt, Human
cuuagccucccgaguagcugggau

SEQ ID NO: 618674 - RNA, 21 nt, Human
cuugcucugucaccgaggcug

SEQ ID NO: 618675 - RNA, 23 nt, Human
gaacuccuggcaucaagugaucc

SEQ ID NO: 618676 - RNA, 26 nt, Human
gacauggugguaaagccauccucccg

SEQ ID NO: 618677 - RNA, 22 nt, Human
gacuacaggugugugccaccau

SEQ ID NO: 618678 - RNA, 26 nt, Human
gaguagcugggacuacaggugugugc

SEQ ID NO: 618679 - RNA, 18 nt, Human
gaguugcaggaggcccug

SEQ ID NO: 618680 - RNA, 18 nt, Human
gauuacaggugugagcca

SEQ ID NO: 618681 - RNA, 21 nt, Human
gauuacaggugugagccacug

SEQ ID NO: 618682 - RNA, 24 nt, Human
gauuacaggugugagccacugugc

SEQ ID NO: 618683 - RNA, 18 nt, Human
gauuacaggugugaguca

SEQ ID NO: 618684 - RNA, 22 nt, Human
gauuacaggugugagucaccgc

SEQ ID NO: 618685 - RNA, 22 nt, Human
gauuacaggugugagucaccgc

SEQ ID NO: 618686 - RNA, 18 nt, Human
gauuacggcugugaguca

SEQ ID NO: 618687 - RNA, 19 nt, Human
gauuacggcugugagucac

SEQ ID NO: 618688 - RNA, 24 nt, Human
gcaaaguacucggauuacaggugu

SEQ ID NO: 618689 - RNA, 19 nt, Human
gcuggagugcaguggcgug

SEQ ID NO: 618690 - RNA, 24 nt, Human
ggacuacaggugugugccaccaug

SEQ ID NO: 618691 - RNA, 22 nt, Human
ggauuacaggugugagccacug

SEQ ID NO: 618692 - RNA, 19 nt, Human
ggauuacaggugugaguca

SEQ ID NO: 618693 - RNA, 21 nt, Human
ggauuacaggugugagucacc

SEQ ID NO: 618694 - RNA, 22 nt, Human
ggauuacaggugugagucaccg

SEQ ID NO: 618695 - RNA, 24 nt, Human
ggcaucaagugauccgcccaccuc

SEQ ID NO: 618696 - RNA, 22 nt, Human
ggcuggagugcaguggcgugau

SEQ ID NO: 618697 - RNA, 24 nt, Human
gggggucucacuauguugcccagg

SEQ ID NO: 618698 - RNA, 22 nt, Human
gggucucacuauguugcccagg

SEQ ID NO: 618699 - RNA, 23 nt, Human
ggguuuucaccguguuggccagg

SEQ ID NO: 618700 - RNA, 23 nt, Human
gguaugaucaugagcucacugca

SEQ ID NO: 618701 - RNA, 19 nt, Human
guagagacggguuuucacc

SEQ ID NO: 618702 - RNA, 19 nt, Human
guagagaugggggucucac

SEQ ID NO: 618703 - RNA, 24 nt, Human
guagcugggauuacggcugugagu

SEQ ID NO: 618704 - RNA, 19 nt, Human
guauuuuuuguagagaugg

SEQ ID NO: 618705 - RNA, 23 nt, Human
gugaguugcaggaggcccuguuc

SEQ ID NO: 618706 - RNA, 24 nt, Human
gugauccgcccaccucagccuccc

SEQ ID NO: 618707 - RNA, 18 nt, Human
guggccacgguccaggug

SEQ ID NO: 618708 - RNA, 21 nt, Human
uaauccaacacauuccccaaa

SEQ ID NO: 618709 - RNA, 24 nt, Human
uaauguuuguauuuuuuguagaga

SEQ ID NO: 618710 - RNA, 24 nt, Human
uaauuuuuguaguuuuuguagaga

SEQ ID NO: 618711 - RNA, 23 nt, Human
uacaggugugagccacugugccc

SEQ ID NO: 618712 - RNA, 23 nt, Human
uacaggugugagccacugugccc

SEQ ID NO: 618713 - RNA, 22 nt, Human
uacaggugugagucaccgcgcc

SEQ ID NO: 618714 - RNA, 23 nt, Human
uacaggugugagucaccgcgccu

SEQ ID NO: 618715 - RNA, 24 nt, Human
uacggcugugagucaccacacccg

SEQ ID NO: 618716 - RNA, 21 nt, Human
uaggauuacaggugugagcca

SEQ ID NO: 618717 - RNA, 22 nt, Human
uaggauuacaggugugagccac

SEQ ID NO: 618718 - RNA, 22 nt, Human
uaggauuacaggugugagccac

SEQ ID NO: 618719 - RNA, 22 nt, Human
uaggauuacaggugugagccac

SEQ ID NO: 618720 - RNA, 24 nt, Human
uaggauuacaggugugagccacug

SEQ ID NO: 618721 - RNA, 23 nt, Human
uauguugcccaggcuggccucaa

SEQ ID NO: 618722 - RNA, 23 nt, Human
uauguugcccaggcuggccucaa

SEQ ID NO: 618723 - RNA, 24 nt, Human
uauguugcccaggcuggccucaag

SEQ ID NO: 618724 - RNA, 24 nt, Human
uauguugcccaggcuggccucaag

SEQ ID NO: 618725 - RNA, 22 nt, Human
uauuuuuuguagagaugggggu

SEQ ID NO: 618726 - RNA, 20 nt, Human
ucaagcaauucucccaccuu

SEQ ID NO: 618727 - RNA, 24 nt, Human
ucaccguguuggccaggcuggucu

SEQ ID NO: 618728 - RNA, 19 nt, Human
ucacugcaaccuccgccuc

SEQ ID NO: 618729 - RNA, 24 nt, Human
ucacugcaaccuccgccucccagg

SEQ ID NO: 618730 - RNA, 25 nt, Human
ucacugcaaccuccgccucccaggu

SEQ ID NO: 618731 - RNA, 26 nt, Human
ucacugcaaccuccgccucccagguu

SEQ ID NO: 618732 - RNA, 20 nt, Human
ucacugcagccuugacaugg

SEQ ID NO: 618733 - RNA, 26 nt, Human
ucacugcagccuugacaugggggccu

SEQ ID NO: 618734 - RNA, 21 nt, Human
ucacugcagccuugacauggu

SEQ ID NO: 618735 - RNA, 23 nt, Human
ucagccuuucgaguagcugggac

SEQ ID NO: 618736 - RNA, 18 nt, Human
ucagucaagucuggagcc

SEQ ID NO: 618737 - RNA, 23 nt, Human
ucagucaagucuggagccaagga

SEQ ID NO: 618738 - RNA, 22 nt, Human
uccaacacauuccccaaaugaa

SEQ ID NO: 618739 - RNA, 23 nt, Human
ucccaaaguguuaggauuacagg

SEQ ID NO: 618740 - RNA, 21 nt, Human
ucccagguucaagcaauucuc

SEQ ID NO: 618741 - RNA, 23 nt, Human
ucccagguucaagcaauucuccc

SEQ ID NO: 618742 - RNA, 24 nt, Human
ucccauguccccaagacugugaca

SEQ ID NO: 618743 - RNA, 20 nt, Human
uccccaagacugugacaaac

SEQ ID NO: 618744 - RNA, 23 nt, Human
ucccgaguagcugggauuacggc

SEQ ID NO: 618745 - RNA, 21 nt, Human
ucccugcccuccucacauccc

SEQ ID NO: 618746 - RNA, 18 nt, Human
ucccugggcgugggggug

SEQ ID NO: 618747 - RNA, 21 nt, Human
uccgcccaccucagccuccca

SEQ ID NO: 618748 - RNA, 22 nt, Human
uccugggcagggcucacacugc

SEQ ID NO: 618749 - RNA, 21 nt, Human
ucgaguagcugggacuacagg

SEQ ID NO: 618750 - RNA, 22 nt, Human
ucggauuacaggugugagucac

SEQ ID NO: 618751 - RNA, 24 nt, Human
ucggauuacaggugugagucaccg

SEQ ID NO: 618752 - RNA, 18 nt, Human
ucucacuauguugcccag

SEQ ID NO: 618753 - RNA, 19 nt, Human
ucucacuauguugcccagg

SEQ ID NO: 618754 - RNA, 23 nt, Human
ucucacuauguugcccaggcugg

SEQ ID NO: 618755 - RNA, 26 nt, Human
ucucacuauguugcccaggcuggccu

SEQ ID NO: 618756 - RNA, 27 nt, Human
ucucacuauguugcccaggcuggccuc

SEQ ID NO: 618757 - RNA, 24 nt, Human
ucucccaccuuagccucccgagua

SEQ ID NO: 618758 - RNA, 21 nt, Human
ucucgaacuccuggcaucaag

SEQ ID NO: 618759 - RNA, 24 nt, Human
ucugucaccgaggcuggagugcag

SEQ ID NO: 618760 - RNA, 18 nt, Human
ucuugcucugucaccgaa

SEQ ID NO: 618761 - RNA, 23 nt, Human
ucuugcucugucaccgaggcugg

SEQ ID NO: 618762 - RNA, 24 nt, Human
ucuugcucugucaccgaggcugga

SEQ ID NO: 618763 - RNA, 18 nt, Human
ucuugcucuguugccaag

SEQ ID NO: 618764 - RNA, 18 nt, Human
ugaucccauguccccaag

SEQ ID NO: 618765 - RNA, 24 nt, Human
ugauccgcccaccucagccuccca

SEQ ID NO: 618766 - RNA, 22 nt, Human
ugcaguggcgugaucuuggcuc

SEQ ID NO: 618767 - RNA, 19 nt, Human
ugcccuccucacauccccc

SEQ ID NO: 618768 - RNA, 22 nt, Human
ugcccuccucacaucccccaac

SEQ ID NO: 618769 - RNA, 24 nt, Human
ugcucugucaccgaggcuggagug

SEQ ID NO: 618770 - RNA, 21 nt, Human
uggaaggaggcucucagauuu

SEQ ID NO: 618771 - RNA, 19 nt, Human
uggagugcaguggcgugau

SEQ ID NO: 618772 - RNA, 23 nt, Human
uggagugcaguggcgugaucuug

SEQ ID NO: 618773 - RNA, 24 nt, Human
uggagugcaguggcgugaucuugg

SEQ ID NO: 618774 - RNA, 24 nt, Human
uggccaggcuggucucgaacuccu

SEQ ID NO: 618775 - RNA, 20 nt, Human
uggccucaagcaauccuccc

SEQ ID NO: 618776 - RNA, 21 nt, Human
uggccucaagcaauccuccca

SEQ ID NO: 618777 - RNA, 18 nt, Human
ugggacuacaggugugug

SEQ ID NO: 618778 - RNA, 21 nt, Human
ugggacuacaggugugugcca

SEQ ID NO: 618779 - RNA, 22 nt, Human
ugggacuacaggugugugccac

SEQ ID NO: 618780 - RNA, 24 nt, Human
ugggacuacaggugugugccacca

SEQ ID NO: 618781 - RNA, 25 nt, Human
ugggacuacaggugugugccaccau

SEQ ID NO: 618782 - RNA, 18 nt, Human
ugggauuacggcugugag

SEQ ID NO: 618783 - RNA, 18 nt, Human
ugggauuacggcugugag

SEQ ID NO: 618784 - RNA, 22 nt, Human
ugggauuacggcugugagucac

SEQ ID NO: 618785 - RNA, 24 nt, Human
ugggauuacggcugugagucacca

SEQ ID NO: 618786 - RNA, 24 nt, Human
uguagagacggguuuucaccgugu

SEQ ID NO: 618787 - RNA, 24 nt, Human
uguagagaugggggucucacuaug

SEQ ID NO: 618788 - RNA, 25 nt, Human
uguagagaugggggucucacuaugu

SEQ ID NO: 618789 - RNA, 21 nt, Human
uguucugugcuccucauuuca

SEQ ID NO: 618790 - RNA, 24 nt, Human
uucaagcaauucucccaccuuagc

SEQ ID NO: 618791 - RNA, 24 nt, Human
uucgaguagcugggacuacaggug

SEQ ID NO: 618792 - RNA, 22 nt, Human
uucucuugaaaccccgugaguu

SEQ ID NO: 618793 - RNA, 23 nt, Human
uuguagagacggguuuucaccgu

SEQ ID NO: 618794 - RNA, 24 nt, Human
uuguagagacggguuuucaccgug

SEQ ID NO: 618795 - RNA, 24 nt, Human
uuguagagaugggggucucacuau

SEQ ID NO: 618796 - RNA, 25 nt, Human
uuguagagaugggggucucacuaug

SEQ ID NO: 618797 - RNA, 24 nt, Human
uuucaccguguuggccaggcuggu

SEQ ID NO: 618798 - RNA, 24 nt, Human
uuucgaguagcugggacuacaggu

SEQ ID NO: 618799 - RNA, 24 nt, Human
uuuguagagacggguuuucaccgu

SEQ ID NO: 618800 - RNA, 25 nt, Human
uuuguagagaugggggucucacuau

SEQ ID NO: 618801 - RNA, 25 nt, Human
uuuguaguuuuuguagagacggguu

SEQ ID NO: 618802 - RNA, 19 nt, Human
uuuguauuuuuuguagaga

SEQ ID NO: 618803 - RNA, 23 nt, Human
uuuucaccguguuggccaggcug

SEQ ID NO: 618804 - RNA, 25 nt, Human
uuuucaccguguuggccaggcuggu

SEQ ID NO: 618805 - RNA, 20 nt, Human
uuuuuuguagagaugggggu

SEQ ID NO: 618806 - RNA, 22 nt, Human
uuuuuuuuuuucaaaacagucu

SEQ ID NO: 618807 - RNA, 18 nt, Human
uuuuuuuuuuuuguuuuc

SEQ ID NO: 618808 - RNA, 20 nt, Human
uuuuuuuuuuuuuuuuuugg

SEQ ID NO: 618809 - RNA, 23 nt, Human
uuuuuuuuuuuuuuuuuuguuuu

SEQ ID NO: 618810 - RNA, 19 nt, Human
aaaccccaggcucccccaa

SEQ ID NO: 618811 - RNA, 27 nt, Human
aaauagguuucuuuacgacggaagucu

SEQ ID NO: 618812 - RNA, 18 nt, Human
aagcaaucgacagagucc

SEQ ID NO: 618813 - RNA, 23 nt, Human
aagcaaucgacagaguccacgac

SEQ ID NO: 618814 - RNA, 21 nt, Human
aagcaggcagggagcacaaug

SEQ ID NO: 618815 - RNA, 22 nt, Human
aagcaggcagggagcacaaugu

SEQ ID NO: 618816 - RNA, 19 nt, Human
agaaaaaaaggucuguaaa

SEQ ID NO: 618817 - RNA, 18 nt, Human
agagauuagguauuuuuc

SEQ ID NO: 618818 - RNA, 20 nt, Human
aguuuuuuuuuuuuuuuuuu

SEQ ID NO: 618819 - RNA, 18 nt, Human
auaaagcacucuucaaac

SEQ ID NO: 618820 - RNA, 19 nt, Human
auaaagcacucuucaaaca

SEQ ID NO: 618821 - RNA, 23 nt, Human
auaaagcacucuucaaacaucua

SEQ ID NO: 618822 - RNA, 20 nt, Human
caaaccccaggcucccccaa

SEQ ID NO: 618823 - RNA, 23 nt, Human
caaaccccaggcucccccaaaag

SEQ ID NO: 618824 - RNA, 28 nt, Human
caacaacaguuuuuuuuuuuuuuuuuuu

SEQ ID NO: 618825 - RNA, 21 nt, Human
cacaacccacgcccaagugcu

SEQ ID NO: 618826 - RNA, 22 nt, Human
cacaacccacgcccaagugcuu

SEQ ID NO: 618827 - RNA, 21 nt, Human
caucugcauucugaaaauagg

SEQ ID NO: 618828 - RNA, 23 nt, Human
ccaaaccccaggcucccccaaaa

SEQ ID NO: 618829 - RNA, 21 nt, Human
ccaagugcuuguuucuguucc

SEQ ID NO: 618830 - RNA, 21 nt, Human
cccaaaagcagucacaaccca

SEQ ID NO: 618831 - RNA, 23 nt, Human
cccaaaccccaggcucccccaaa

SEQ ID NO: 618832 - RNA, 24 nt, Human
cccaaaccccaggcucccccaaaa

SEQ ID NO: 618833 - RNA, 24 nt, Human
cccucgggagcccuggcuuuccug

SEQ ID NO: 618834 - RNA, 23 nt, Human
cuuuuuuuuuuuuuaauuccuuu

SEQ ID NO: 618835 - RNA, 18 nt, Human
gccacaacgccugucacc

SEQ ID NO: 618836 - RNA, 18 nt, Human
gccacaguucaacaacag

SEQ ID NO: 618837 - RNA, 19 nt, Human
gcccuggcuuuccugaaag

SEQ ID NO: 618838 - RNA, 20 nt, Human
uaaaaauacaugaaauggug

SEQ ID NO: 618839 - RNA, 22 nt, Human
uaaaacauaaagcaauuuuuaa

SEQ ID NO: 618840 - RNA, 24 nt, Human
uaaaaccauuaaaaagcuaauuaa

SEQ ID NO: 618841 - RNA, 18 nt, Human
uacaaguaucuauggcca

SEQ ID NO: 618842 - RNA, 20 nt, Human
uauaaagcacucuucaaaca

SEQ ID NO: 618843 - RNA, 24 nt, Human
ucaccuugacgaaggggcgaaagc

SEQ ID NO: 618844 - RNA, 22 nt, Human
uccugaucaagcaggcagggag

SEQ ID NO: 618845 - RNA, 27 nt, Human
ucuuuugaguccauuauuugguaaaua

SEQ ID NO: 618846 - RNA, 23 nt, Human
ugauaaaaccauuaaaaagcuaa

SEQ ID NO: 618847 - RNA, 21 nt, Human
ugcacaaguuuccugaucaag

SEQ ID NO: 618848 - RNA, 20 nt, Human
uggccacaguucaacaacag

SEQ ID NO: 618849 - RNA, 25 nt, Human
ugggagcccaaaccccaggcucccc

SEQ ID NO: 618850 - RNA, 18 nt, Human
ugguaaauauguaacugc

SEQ ID NO: 618851 - RNA, 18 nt, Human
ugguguggagcugcccuc

SEQ ID NO: 618852 - RNA, 22 nt, Human
uguaaacaggugggagcccaaa

SEQ ID NO: 618853 - RNA, 28 nt, Human
uguucauauauauauuuuuuaaaacaua

SEQ ID NO: 618854 - RNA, 26 nt, Human
uguuuuguuuuguuuuuuuuuuuuuu

SEQ ID NO: 618855 - RNA, 23 nt, Human
uuccauugucuuucuuccuugca

SEQ ID NO: 618856 - RNA, 22 nt, Human
uuguuuuguuuuguuuuuuuuu

SEQ ID NO: 618857 - RNA, 21 nt, Human
uuuuucuuuuuuuucauuuuu

SEQ ID NO: 618858 - RNA, 20 nt, Human
uuuuuuuuuuuuuuuucucu

SEQ ID NO: 618859 - RNA, 22 nt, Human
uuuuuuuuuuuuuuuuguauuu

SEQ ID NO: 618860 - RNA, 23 nt, Human
uuuuuuuuuuuuuuuuucucuuu

SEQ ID NO: 618861 - RNA, 24 nt, Human
aaagugcuaagauaauaggcguga

SEQ ID NO: 618862 - RNA, 21 nt, Human
acagguacuugccaccaugcc

SEQ ID NO: 618863 - RNA, 20 nt, Human
acuccuggccucaagugauu

SEQ ID NO: 618864 - RNA, 23 nt, Human
agaggcagguuuagcuggggucu

SEQ ID NO: 618865 - RNA, 19 nt, Human
agauaauaggcgugagcca

SEQ ID NO: 618866 - RNA, 18 nt, Human
aggcagguuuagcugggg

SEQ ID NO: 618867 - RNA, 22 nt, Human
aggccugcaggccagagugcug

SEQ ID NO: 618868 - RNA, 20 nt, Human
aggcgugagccaccauaccc

SEQ ID NO: 618869 - RNA, 23 nt, Human
agggucucagcguguugcccagg

SEQ ID NO: 618870 - RNA, 24 nt, Human
agugauuuuccauccucagccucc

SEQ ID NO: 618871 - RNA, 21 nt, Human
agugcagugguacgaucauug

SEQ ID NO: 618872 - RNA, 22 nt, Human
agugcagugguacgaucauugg

SEQ ID NO: 618873 - RNA, 24 nt, Human
caaagugcuaagauaauaggcgug

SEQ ID NO: 618874 - RNA, 22 nt, Human
caagugauuuuccauccucagc

SEQ ID NO: 618875 - RNA, 26 nt, Human
caauagcugagacuacagguacuugc

SEQ ID NO: 618876 - RNA, 22 nt, Human
cacucaguuuucuugccucagc

SEQ ID NO: 618877 - RNA, 20 nt, Human
cagaggcagguuuagcuggg

SEQ ID NO: 618878 - RNA, 25 nt, Human
cagagugaacagcauagucucuucc

SEQ ID NO: 618879 - RNA, 25 nt, Human
cagcauagucucuuccugggggccu

SEQ ID NO: 618880 - RNA, 25 nt, Human
cagccucgaacucccaggcucacuc

SEQ ID NO: 618881 - RNA, 18 nt, Human
caucagagugaacagcau

SEQ ID NO: 618882 - RNA, 18 nt, Human
ccaccauacccgucccca

SEQ ID NO: 618883 - RNA, 27 nt, Human
ccauacccguccccagauccuucuuuu

SEQ ID NO: 618884 - RNA, 23 nt, Human
ccccuguauccccauccaggccu

SEQ ID NO: 618885 - RNA, 22 nt, Human
ccucagccucccaaagugcuaa

SEQ ID NO: 618886 - RNA, 19 nt, Human
ccucgaacucccaggcuca

SEQ ID NO: 618887 - RNA, 22 nt, Human
ccuggccucaagugauuuucca

SEQ ID NO: 618888 - RNA, 22 nt, Human
cguguugcccaggcuagccuua

SEQ ID NO: 618889 - RNA, 24 nt, Human
cguguugcccaggcuagccuuaaa

SEQ ID NO: 618890 - RNA, 23 nt, Human
cucaagugauuuuccauccucag

SEQ ID NO: 618891 - RNA, 21 nt, Human
cucacugcagccucgaacucc

SEQ ID NO: 618892 - RNA, 20 nt, Human
cucccaauagcugagacuac

SEQ ID NO: 618893 - RNA, 22 nt, Human
cucccaauagcugagacuacag

SEQ ID NO: 618894 - RNA, 18 nt, Human
cucccaggcucacucagu

SEQ ID NO: 618895 - RNA, 22 nt, Human
cucccaggcucacucaguuuuc

SEQ ID NO: 618896 - RNA, 19 nt, Human
cugcagccucgaacuccca

SEQ ID NO: 618897 - RNA, 23 nt, Human
cugcagccucgaacucccaggcu

SEQ ID NO: 618898 - RNA, 19 nt, Human
cuguauccccauccaggcc

SEQ ID NO: 618899 - RNA, 21 nt, Human
cuugcccugucaccuaggcug

SEQ ID NO: 618900 - RNA, 24 nt, Human
cuugcccugucaccuaggcuggag

SEQ ID NO: 618901 - RNA, 22 nt, Human
cuugccucagccucccaauagc

SEQ ID NO: 618902 - RNA, 23 nt, Human
cuugccucagccucccaauagcu

SEQ ID NO: 618903 - RNA, 23 nt, Human
gaacucccaggcucacucaguuu

SEQ ID NO: 618904 - RNA, 24 nt, Human
gacuacagguacuugccaccaugc

SEQ ID NO: 618905 - RNA, 22 nt, Human
gagaacacuccuggguccuggg

SEQ ID NO: 618906 - RNA, 21 nt, Human
gagccaccauacccgucccca

SEQ ID NO: 618907 - RNA, 24 nt, Human
gauaauaggcgugagccaccauac

SEQ ID NO: 618908 - RNA, 19 nt, Human
gcuagccuuaaacuccugg

SEQ ID NO: 618909 - RNA, 23 nt, Human
gcuagccuuaaacuccuggccuc

SEQ ID NO: 618910 - RNA, 24 nt, Human
ggcacagaggcagguuuagcuggg

SEQ ID NO: 618911 - RNA, 24 nt, Human
gugauuuuccauccucagccuccc

SEQ ID NO: 618912 - RNA, 22 nt, Human
uaacuuuccccccuguaucccc

SEQ ID NO: 618913 - RNA, 22 nt, Human
uacagguacuugccaccaugcc

SEQ ID NO: 618914 - RNA, 20 nt, Human
uagccuuaaacuccuggccu

SEQ ID NO: 618915 - RNA, 24 nt, Human
uagggucucagcguguugcccagg

SEQ ID NO: 618916 - RNA, 24 nt, Human
ucaccuaggcuggagugcaguggu

SEQ ID NO: 618917 - RNA, 19 nt, Human
ucacugcagccucgaacuc

SEQ ID NO: 618918 - RNA, 24 nt, Human
ucacugcagccucgaacucccagg

SEQ ID NO: 618919 - RNA, 21 nt, Human
ucagcguguugcccaggcuag

SEQ ID NO: 618920 - RNA, 22 nt, Human
ucagugaaggggggugucaggg

SEQ ID NO: 618921 - RNA, 20 nt, Human
ucccaaagugcuaagauaau

SEQ ID NO: 618922 - RNA, 22 nt, Human
ucccaggcucacucaguuuucu

SEQ ID NO: 618923 - RNA, 22 nt, Human
uccucagccucccaaagugcua

SEQ ID NO: 618924 - RNA, 20 nt, Human
uccuggguccuggggucauc

SEQ ID NO: 618925 - RNA, 22 nt, Human
ucuugcccugucaccuaggcug

SEQ ID NO: 618926 - RNA, 23 nt, Human
ucuugcccugucaccuaggcugg

SEQ ID NO: 618927 - RNA, 24 nt, Human
ucuugcccugucaccuaggcugga

SEQ ID NO: 618928 - RNA, 25 nt, Human
ucuugccucagccucccaauagcug

SEQ ID NO: 618929 - RNA, 21 nt, Human
ugagacuacagguacuugcca

SEQ ID NO: 618930 - RNA, 24 nt, Human
ugagacuacagguacuugccacca

SEQ ID NO: 618931 - RNA, 22 nt, Human
ugcaggccagagugcugauacc

SEQ ID NO: 618932 - RNA, 25 nt, Human
ugcaucagugaaggggggugucagg

SEQ ID NO: 618933 - RNA, 24 nt, Human
ugcccugucaccuaggcuggagug

SEQ ID NO: 618934 - RNA, 20 nt, Human
ugccucagccucccaauagc

SEQ ID NO: 618935 - RNA, 25 nt, Human
ugccucagccucccaauagcugaga

SEQ ID NO: 618936 - RNA, 19 nt, Human
uggagugcagugguacgau

SEQ ID NO: 618937 - RNA, 21 nt, Human
uggagugcagugguacgauca

SEQ ID NO: 618938 - RNA, 18 nt, Human
uggcacagaggcagguuu

SEQ ID NO: 618939 - RNA, 21 nt, Human
uggccucaagugauuuuccau

SEQ ID NO: 618940 - RNA, 24 nt, Human
uggccucaagugauuuuccauccu

SEQ ID NO: 618941 - RNA, 20 nt, Human
ugucaccuaggcuggagugc

SEQ ID NO: 618942 - RNA, 21 nt, Human
ugucaccuaggcuggagugca

SEQ ID NO: 618943 - RNA, 22 nt, Human
uguugcccaggcuagccuuaaa

SEQ ID NO: 618944 - RNA, 24 nt, Human
uugcccugucaccuaggcuggagu

SEQ ID NO: 618945 - RNA, 19 nt, Human
uuuuguaacuuuccccccu

SEQ ID NO: 618946 - RNA, 20 nt, Human
aaaaacaaugccuccacucc

SEQ ID NO: 618947 - RNA, 19 nt, Human
aaacaaugccuccacucca

SEQ ID NO: 618948 - RNA, 18 nt, Human
acaugacauguuuuucuu

SEQ ID NO: 618949 - RNA, 20 nt, Human
agauccaaaauaauugccac

SEQ ID NO: 618950 - RNA, 24 nt, Human
caaauaaaucacagucaaaauaaa

SEQ ID NO: 618951 - RNA, 21 nt, Human
caagaugacaucagucccguu

SEQ ID NO: 618952 - RNA, 22 nt, Human
cucaagaugacaucagucccgu

SEQ ID NO: 618953 - RNA, 24 nt, Human
gucccguuugucuuaaguccuggu

SEQ ID NO: 618954 - RNA, 21 nt, Human
uaaaaacaaugccuccacucc

SEQ ID NO: 618955 - RNA, 25 nt, Human
uaaaucacagucaaaauaaaugaag

SEQ ID NO: 618956 - RNA, 24 nt, Human
uaaaugcauuuuauuuuuagacaa

SEQ ID NO: 618957 - RNA, 20 nt, Human
uacaugacauguuuuucuua

SEQ ID NO: 618958 - RNA, 18 nt, Human
ucaaaauaaaugaagagc

SEQ ID NO: 618959 - RNA, 19 nt, Human
uuuagacaaccuacaugac

SEQ ID NO: 618960 - RNA, 18 nt, Human
uuuuuuuuuuuuuuuuug

SEQ ID NO: 618961 - RNA, 24 nt, Human
uuuuuuuuuuuuuuuuuugaguuu

SEQ ID NO: 618962 - RNA, 24 nt, Human
aauucuuuuggaaaaacugcaugu

SEQ ID NO: 618963 - RNA, 20 nt, Human
ugcauguaagugaaguucuc

SEQ ID NO: 618964 - RNA, 23 nt, Human
uggaaaaacugcauguaagugaa

SEQ ID NO: 618965 - RNA, 18 nt, Human
uucacaagacacaagcau

SEQ ID NO: 618966 - RNA, 22 nt, Human
uuggaaaaacugcauguaagug

SEQ ID NO: 618967 - RNA, 19 nt, Human
aaaacaagcaacugcccaa

SEQ ID NO: 618968 - RNA, 21 nt, Human
aaaauauuccauagaaacccu

SEQ ID NO: 618969 - RNA, 19 nt, Human
aaacaagcaacugcccaaa

SEQ ID NO: 618970 - RNA, 23 nt, Human
aaacuuggaaaaauacuaaaagc

SEQ ID NO: 618971 - RNA, 24 nt, Human
aaagccuuuccaauaaggaagcau

SEQ ID NO: 618972 - RNA, 20 nt, Human
aacucuguaaaacuuucaaa

SEQ ID NO: 618973 - RNA, 24 nt, Human
aacugaugcucgcuuuagagcaac

SEQ ID NO: 618974 - RNA, 24 nt, Human
aagaccaccugaagucaacguggc

SEQ ID NO: 618975 - RNA, 18 nt, Human
aagcaaacacccuucacc

SEQ ID NO: 618976 - RNA, 24 nt, Human
aaggaagaggagagaccuuaaaaa

SEQ ID NO: 618977 - RNA, 24 nt, Human
aauccagaaucuauuaagaaaaau

SEQ ID NO: 618978 - RNA, 22 nt, Human
aauuaaauaguuacacugaacu

SEQ ID NO: 618979 - RNA, 21 nt, Human
acaagaaaggaaucccaucuc

SEQ ID NO: 618980 - RNA, 23 nt, Human
accacagcuagcaaaauauucca

SEQ ID NO: 618981 - RNA, 25 nt, Human
aggaaaagaaauuuuaaaugcuggu

SEQ ID NO: 618982 - RNA, 19 nt, Human
aggacaccaacugugaaua

SEQ ID NO: 618983 - RNA, 26 nt, Human
aguaucuauuacuuuaaaaaaauggc

SEQ ID NO: 618984 - RNA, 24 nt, Human
auccagaaucuauuaagaaaaauc

SEQ ID NO: 618985 - RNA, 19 nt, Human
augaguucaagcaaacacc

SEQ ID NO: 618986 - RNA, 23 nt, Human
caaacacccuucaccaucauuuc

SEQ ID NO: 618987 - RNA, 22 nt, Human
caagaaaggaaucccaucuccc

SEQ ID NO: 618988 - RNA, 19 nt, Human
cacaauuaaauaguuacac

SEQ ID NO: 618989 - RNA, 18 nt, Human
cacagcagcauaaaaugg

SEQ ID NO: 618990 - RNA, 21 nt, Human
caccaacugugaauauaaaac

SEQ ID NO: 618991 - RNA, 22 nt, Human
caccagcacaagucugcagaga

SEQ ID NO: 618992 - RNA, 20 nt, Human
caggggcggcaaaauuguuu

SEQ ID NO: 618993 - RNA, 20 nt, Human
caguuuccaggcaggggcgg

SEQ ID NO: 618994 - RNA, 21 nt, Human
ccacacagcagcauaaaaugg

SEQ ID NO: 618995 - RNA, 24 nt, Human
cccacacaauuaaauaguuacaau

SEQ ID NO: 618996 - RNA, 25 nt, Human
cccaucucccugugaguggaaucca

SEQ ID NO: 618997 - RNA, 19 nt, Human
cgaccaaauaagagaacug

SEQ ID NO: 618998 - RNA, 22 nt, Human
cucacuccugauguccuggaua

SEQ ID NO: 618999 - RNA, 21 nt, Human
cugaagaaaaacagugcuuua

SEQ ID NO: 619000 - RNA, 18 nt, Human
cugacugguuucagaaau

SEQ ID NO: 619001 - RNA, 21 nt, Human
cuguuuaugucacacauucac

SEQ ID NO: 619002 - RNA, 24 nt, Human
cuuuagaaaguucaggcugaucag

SEQ ID NO: 619003 - RNA, 26 nt, Human
gaccaccugaagucaacguggcucga

SEQ ID NO: 619004 - RNA, 21 nt, Human
gaguucaagcaaacacccuuc

SEQ ID NO: 619005 - RNA, 20 nt, Human
gauucccaggaaaagaaauu

SEQ ID NO: 619006 - RNA, 21 nt, Human
guagaagaccaccugaaguca

SEQ ID NO: 619007 - RNA, 21 nt, Human
guauuaucuacacuacauaca

SEQ ID NO: 619008 - RNA, 24 nt, Human
gucagaaaucuucauuaaaaaguc

SEQ ID NO: 619009 - RNA, 23 nt, Human
guuacacugaacugaaguagauu

SEQ ID NO: 619010 - RNA, 24 nt, Human
uaaaacuaauaaaacucuguaaaa

SEQ ID NO: 619011 - RNA, 22 nt, Human
uaaauaguuacacugaacugaa

SEQ ID NO: 619012 - RNA, 21 nt, Human
uaacaaaccacacagcagcau

SEQ ID NO: 619013 - RNA, 22 nt, Human
uacaagucaguaaacucugggc

SEQ ID NO: 619014 - RNA, 18 nt, Human
uaccccacucaaugacua

SEQ ID NO: 619015 - RNA, 24 nt, Human
uagaaacccuucuuauaaaguccu

SEQ ID NO: 619016 - RNA, 24 nt, Human
uagagaauuacaagucaguaaacu

SEQ ID NO: 619017 - RNA, 18 nt, Human
uauauaagaaauagcuga

SEQ ID NO: 619018 - RNA, 19 nt, Human
ucaacguggcucgaucuag

SEQ ID NO: 619019 - RNA, 19 nt, Human
ucagaaaagauaaucuauu

SEQ ID NO: 619020 - RNA, 21 nt, Human
ucaucuagaaaacuacauugu

SEQ ID NO: 619021 - RNA, 19 nt, Human
ucauuaaaaagucuaugga

SEQ ID NO: 619022 - RNA, 20 nt, Human
ucccacuuaugcauauaccc

SEQ ID NO: 619023 - RNA, 18 nt, Human
uccccaccagcaguuucc

SEQ ID NO: 619024 - RNA, 18 nt, Human
ugaaaacuuggaaaaaua

SEQ ID NO: 619025 - RNA, 19 nt, Human
ugaacaccacagcuagcaa

SEQ ID NO: 619026 - RNA, 19 nt, Human
ugacaugcauuacaucugu

SEQ ID NO: 619027 - RNA, 21 nt, Human
ugagaaggcuaguuuaugaga

SEQ ID NO: 619028 - RNA, 22 nt, Human
ugaguucaagcaaacacccuuc

SEQ ID NO: 619029 - RNA, 21 nt, Human
ugcaaaacaagcaacugccca

SEQ ID NO: 619030 - RNA, 23 nt, Human
ugcaaaacaagcaacugcccaaa

SEQ ID NO: 619031 - RNA, 22 nt, Human
ugcaacuauuccgagcugcugg

SEQ ID NO: 619032 - RNA, 21 nt, Human
uggacaagaaaggaaucccau

SEQ ID NO: 619033 - RNA, 23 nt, Human
uggcuccaggccuuuuauccccu

SEQ ID NO: 619034 - RNA, 18 nt, Human
uggggaaggaagaggaga

SEQ ID NO: 619035 - RNA, 25 nt, Human
ugugaguuaccuugauucccaggaa

SEQ ID NO: 619036 - RNA, 19 nt, Human
uguuugguuuuucucuccc

SEQ ID NO: 619037 - RNA, 19 nt, Human
uuacacugaacugaaguag

SEQ ID NO: 619038 - RNA, 21 nt, Human
uuagagauuuuacgcagcugg

SEQ ID NO: 619039 - RNA, 24 nt, Human
uuggggaaggaagaggagagaccu

SEQ ID NO: 619040 - RNA, 23 nt, Human
uuuaacaaaccacacagcagcau

SEQ ID NO: 619041 - RNA, 19 nt, Human
uuuccccaccagcaguuuc

SEQ ID NO: 619042 - RNA, 20 nt, Human
uuuuacgcagcuggucagug

SEQ ID NO: 619043 - RNA, 18 nt, Human
uuuuuuuuuuuuuuuuug

SEQ ID NO: 619044 - RNA, 18 nt, Human
aaaacaaacaaacaagcc

SEQ ID NO: 619045 - RNA, 24 nt, Human
aaaacaaacaaacaagccccuccc

SEQ ID NO: 619046 - RNA, 27 nt, Human
aaaaggccagguacaguggugggcacc

SEQ ID NO: 619047 - RNA, 19 nt, Human
aaacaaacaaacaagcccc

SEQ ID NO: 619048 - RNA, 23 nt, Human
aaacaaacaaacaagccccuccc

SEQ ID NO: 619049 - RNA, 22 nt, Human
aaacaaacaagccccuccccgc

SEQ ID NO: 619050 - RNA, 20 nt, Human
aaacaagccccuccccgcag

SEQ ID NO: 619051 - RNA, 23 nt, Human
aaacagcucucacugauaagagc

SEQ ID NO: 619052 - RNA, 24 nt, Human
aaagaguccaauaacaacuucucc

SEQ ID NO: 619053 - RNA, 24 nt, Human
aaagugcugggauuacaggcguga

SEQ ID NO: 619054 - RNA, 19 nt, Human
aacauggagagaccccauc

SEQ ID NO: 619055 - RNA, 20 nt, Human
aacauggagagaccccaucu

SEQ ID NO: 619056 - RNA, 21 nt, Human
aacauggagagaccccaucuc

SEQ ID NO: 619057 - RNA, 23 nt, Human
aacccuccuggagccuccuccau

SEQ ID NO: 619058 - RNA, 21 nt, Human
aaccugccuuucacuguccca

SEQ ID NO: 619059 - RNA, 21 nt, Human
aacuggaaucaagaaagacaa

SEQ ID NO: 619060 - RNA, 24 nt, Human
aagaaagacaaaauucuuacaaaa

SEQ ID NO: 619061 - RNA, 21 nt, Human
aagcacccggggccccagcuc

SEQ ID NO: 619062 - RNA, 21 nt, Human
aagcuccccugcuggcuuccc

SEQ ID NO: 619063 - RNA, 19 nt, Human
aagugcugggauuacaggc

SEQ ID NO: 619064 - RNA, 19 nt, Human
aagugcugggauuacaggc

SEQ ID NO: 619065 - RNA, 24 nt, Human
aaucacuugaacccgggaggcaga

SEQ ID NO: 619066 - RNA, 19 nt, Human
aauccgucaaaacccuccu

SEQ ID NO: 619067 - RNA, 23 nt, Human
acagcccuccugucuaagagcug

SEQ ID NO: 619068 - RNA, 22 nt, Human
accacagaagcacccggggccc

SEQ ID NO: 619069 - RNA, 22 nt, Human
accauggagggagucucccccu

SEQ ID NO: 619070 - RNA, 24 nt, Human
accauguuggcuagguuggucucg

SEQ ID NO: 619071 - RNA, 21 nt, Human
accccaaaccucccccaucac

SEQ ID NO: 619072 - RNA, 25 nt, Human
accccaucucuacuaaaaaauacaa

SEQ ID NO: 619073 - RNA, 20 nt, Human
acccuccuggagccuccucc

SEQ ID NO: 619074 - RNA, 22 nt, Human
accugggugcaggucaggugag

SEQ ID NO: 619075 - RNA, 21 nt, Human
acgggguuucaccauguuggc

SEQ ID NO: 619076 - RNA, 22 nt, Human
acgggguuucaccauguuggcu

SEQ ID NO: 619077 - RNA, 23 nt, Human
acgggguuucaccauguuggcua

SEQ ID NO: 619078 - RNA, 24 nt, Human
acgggguuucaccauguuggcuag

SEQ ID NO: 619079 - RNA, 25 nt, Human
acuccagccugggcaacaagaguga

SEQ ID NO: 619080 - RNA, 22 nt, Human
acuucaugaggggccauggccu

SEQ ID NO: 619081 - RNA, 22 nt, Human
agaaagacaaaauucuuacaaa

SEQ ID NO: 619082 - RNA, 22 nt, Human
agaaaugcacacucauaccuuc

SEQ ID NO: 619083 - RNA, 21 nt, Human
agacaggaaacaccuccaggg

SEQ ID NO: 619084 - RNA, 22 nt, Human
agagaccuuuuaugcaggggag

SEQ ID NO: 619085 - RNA, 21 nt, Human
agagacgggguuucaccaugu

SEQ ID NO: 619086 - RNA, 18 nt, Human
agagguugcagugagcug

SEQ ID NO: 619087 - RNA, 22 nt, Human
agagguugcagugagcugagau

SEQ ID NO: 619088 - RNA, 23 nt, Human
agagguugcagugagcugagauc

SEQ ID NO: 619089 - RNA, 24 nt, Human
agagguugcagugagcugagauca

SEQ ID NO: 619090 - RNA, 20 nt, Human
agagguugcagugagcuggc

SEQ ID NO: 619091 - RNA, 24 nt, Human
agcaagcgaggggacaguccccuu

SEQ ID NO: 619092 - RNA, 20 nt, Human
agcaccucuggcuuuuucuu

SEQ ID NO: 619093 - RNA, 23 nt, Human
agcagcucugauucacggccaag

SEQ ID NO: 619094 - RNA, 20 nt, Human
agccaccccacaaacaacag

SEQ ID NO: 619095 - RNA, 23 nt, Human
agccgggcauggugacacaugcc

SEQ ID NO: 619096 - RNA, 24 nt, Human
aggaaggcacgaggacagaaccau

SEQ ID NO: 619097 - RNA, 21 nt, Human
aggacacugccaggcgggccu

SEQ ID NO: 619098 - RNA, 18 nt, Human
aggaccccauggugcuuc

SEQ ID NO: 619099 - RNA, 21 nt, Human
aggaccucggcaggaggggca

SEQ ID NO: 619100 - RNA, 18 nt, Human
aggaggucaaugccgggg

SEQ ID NO: 619101 - RNA, 27 nt, Human
aggaggucaaugccgggggcugcaucc

SEQ ID NO: 619102 - RNA, 20 nt, Human
aggcagagguugcagugagc

SEQ ID NO: 619103 - RNA, 24 nt, Human
aggcagagguugcagugagcugag

SEQ ID NO: 619104 - RNA, 18 nt, Human
aggcaggagaaucacuug

SEQ ID NO: 619105 - RNA, 24 nt, Human
aggcaggagaaucacuugaacccg

SEQ ID NO: 619106 - RNA, 24 nt, Human
aggccaaggcggaucaccugaggu

SEQ ID NO: 619107 - RNA, 24 nt, Human
aggcugaggcaggagaaucacuug

SEQ ID NO: 619108 - RNA, 18 nt, Human
agggcagaauccagccgu

SEQ ID NO: 619109 - RNA, 18 nt, Human
agggcuggggacacccag

SEQ ID NO: 619110 - RNA, 24 nt, Human
agguacaguggcucacuucuguaa

SEQ ID NO: 619111 - RNA, 24 nt, Human
aggugcagacacuaacgcaggacc

SEQ ID NO: 619112 - RNA, 26 nt, Human
agugcccacccaccuugggaugaggc

SEQ ID NO: 619113 - RNA, 18 nt, Human
agugcugggauuacaggc

SEQ ID NO: 619114 - RNA, 24 nt, Human
aguggcucacuucuguaaucccag

SEQ ID NO: 619115 - RNA, 20 nt, Human
aucaccugaggucgggaguu

SEQ ID NO: 619116 - RNA, 24 nt, Human
aucaugccauuguacuccagccug

SEQ ID NO: 619117 - RNA, 20 nt, Human
auccagcugagauccgugcc

SEQ ID NO: 619118 - RNA, 22 nt, Human
aucccagcacuucgggaggcca

SEQ ID NO: 619119 - RNA, 26 nt, Human
aucuaaaaaauuaguccaaaaggcca

SEQ ID NO: 619120 - RNA, 24 nt, Human
augauccaccugccucagcaucuc

SEQ ID NO: 619121 - RNA, 25 nt, Human
augcacacacacccaugcacauaca

SEQ ID NO: 619122 - RNA, 24 nt, Human
auuguacuccagccugggcaacaa

SEQ ID NO: 619123 - RNA, 21 nt, Human
caaaacccuccuggagccucc

SEQ ID NO: 619124 - RNA, 23 nt, Human
caaaacccuccuggagccuccuc

SEQ ID NO: 619125 - RNA, 21 nt, Human
caaacaugcacacacacccau

SEQ ID NO: 619126 - RNA, 22 nt, Human
caaacaugcacacacacccaug

SEQ ID NO: 619127 - RNA, 22 nt, Human
caaaccucccccaucaccgcua

SEQ ID NO: 619128 - RNA, 21 nt, Human
caaagugcugggauuacaggc

SEQ ID NO: 619129 - RNA, 24 nt, Human
caaagugcugggauuacaggcgug

SEQ ID NO: 619130 - RNA, 22 nt, Human
caacuagagagccagaaaugcc

SEQ ID NO: 619131 - RNA, 21 nt, Human
caaggcggaucaccugagguc

SEQ ID NO: 619132 - RNA, 21 nt, Human
caccauguuggcuagguuggu

SEQ ID NO: 619133 - RNA, 24 nt, Human
caccauguuggcuagguuggucuc

SEQ ID NO: 619134 - RNA, 21 nt, Human
caccccaaaccucccccauca

SEQ ID NO: 619135 - RNA, 22 nt, Human
caccccaaaccucccccaucac

SEQ ID NO: 619136 - RNA, 23 nt, Human
caccgcaccccaaaccuccccca

SEQ ID NO: 619137 - RNA, 23 nt, Human
caccgcugucuccgcacaugaca

SEQ ID NO: 619138 - RNA, 24 nt, Human
cacuucuguaaucccagcacuucg

SEQ ID NO: 619139 - RNA, 18 nt, Human
cagagcagggacugggag

SEQ ID NO: 619140 - RNA, 24 nt, Human
cagcacuucgggaggccaaggcgg

SEQ ID NO: 619141 - RNA, 22 nt, Human
cagcagcucaaaccugccuuuc

SEQ ID NO: 619142 - RNA, 22 nt, Human
cagcaugaagaacccaggagau

SEQ ID NO: 619143 - RNA, 23 nt, Human
cagcaugaagaacccaggagaug

SEQ ID NO: 619144 - RNA, 24 nt, Human
cagcccuccugucuaagagcugac

SEQ ID NO: 619145 - RNA, 24 nt, Human
cagccugaccaacauggagagacc

SEQ ID NO: 619146 - RNA, 21 nt, Human
cagccugaccacagaagcacc

SEQ ID NO: 619147 - RNA, 24 nt, Human
cagcuacucgggaggcugaggcag

SEQ ID NO: 619148 - RNA, 19 nt, Human
caggcgggccuuugccucu

SEQ ID NO: 619149 - RNA, 20 nt, Human
cagggguccgcguggccccu

SEQ ID NO: 619150 - RNA, 20 nt, Human
caguucuccccauggccagc

SEQ ID NO: 619151 - RNA, 20 nt, Human
caucugcggcgggcagagcu

SEQ ID NO: 619152 - RNA, 19 nt, Human
caugacacagccuuccaug

SEQ ID NO: 619153 - RNA, 25 nt, Human
caugcaggguccagccaccccacaa

SEQ ID NO: 619154 - RNA, 20 nt, Human
cauggugcuucugugguucc

SEQ ID NO: 619155 - RNA, 19 nt, Human
cauuguacuccagccuggg

SEQ ID NO: 619156 - RNA, 21 nt, Human
cauuguacuccagccugggca

SEQ ID NO: 619157 - RNA, 22 nt, Human
cauuguacuccagccugggcaa

SEQ ID NO: 619158 - RNA, 24 nt, Human
cauuguacuccagccugggcaaca

SEQ ID NO: 619159 - RNA, 23 nt, Human
ccaacagcugagaaagccaaaac

SEQ ID NO: 619160 - RNA, 21 nt, Human
ccacaaacaacagcgccccau

SEQ ID NO: 619161 - RNA, 18 nt, Human
ccaccccacaaacaacag

SEQ ID NO: 619162 - RNA, 23 nt, Human
ccaccccacaaacaacagcgccc

SEQ ID NO: 619163 - RNA, 18 nt, Human
ccagaaaugccagauaaa

SEQ ID NO: 619164 - RNA, 22 nt, Human
ccagccaccccacaaacaacag

SEQ ID NO: 619165 - RNA, 21 nt, Human
ccagccaucuggcaacuccaa

SEQ ID NO: 619166 - RNA, 19 nt, Human
ccaggaaggcacgaggaca

SEQ ID NO: 619167 - RNA, 27 nt, Human
ccaugcacauacaugcaaaccugcaca

SEQ ID NO: 619168 - RNA, 19 nt, Human
ccauggccagcuucuagag

SEQ ID NO: 619169 - RNA, 20 nt, Human
ccauuguacuccagccuggg

SEQ ID NO: 619170 - RNA, 21 nt, Human
ccauuguacuccagccugggc

SEQ ID NO: 619171 - RNA, 23 nt, Human
ccauuguacuccagccugggcaa

SEQ ID NO: 619172 - RNA, 24 nt, Human
ccauuguacuccagccugggcaac

SEQ ID NO: 619173 - RNA, 19 nt, Human
cccacaaacaacagcgccc

SEQ ID NO: 619174 - RNA, 22 nt, Human
cccacaaacaacagcgccccau

SEQ ID NO: 619175 - RNA, 24 nt, Human
cccaccccgaggccaggccucgac

SEQ ID NO: 619176 - RNA, 18 nt, Human
cccaugcacauacaugca

SEQ ID NO: 619177 - RNA, 22 nt, Human
ccccacaaacaacagcgcccca

SEQ ID NO: 619178 - RNA, 26 nt, Human
ccccaccuaccccucaguucucccca

SEQ ID NO: 619179 - RNA, 20 nt, Human
ccccuccccaccuaccccuc

SEQ ID NO: 619180 - RNA, 20 nt, Human
cccucaccgcaccccaaacc

SEQ ID NO: 619181 - RNA, 20 nt, Human
cccuggaaugaaaaugaggc

SEQ ID NO: 619182 - RNA, 18 nt, Human
cccuggaugcaagggcuc

SEQ ID NO: 619183 - RNA, 26 nt, Human
ccgcaccccaaaccucccccaucacc

SEQ ID NO: 619184 - RNA, 21 nt, Human
ccuaccccucaguucucccca

SEQ ID NO: 619185 - RNA, 22 nt, Human
ccuagagaccaaucccaccccc

SEQ ID NO: 619186 - RNA, 18 nt, Human
ccucaagcuuacaggaag

SEQ ID NO: 619187 - RNA, 21 nt, Human
ccucuggauccacgaaagcuc

SEQ ID NO: 619188 - RNA, 24 nt, Human
ccugaccaacauggagagacccca

SEQ ID NO: 619189 - RNA, 20 nt, Human
ccugaccucaaaugauccac

SEQ ID NO: 619190 - RNA, 21 nt, Human
ccugaccucaaaugauccacc

SEQ ID NO: 619191 - RNA, 23 nt, Human
ccugaccucaaaugauccaccug

SEQ ID NO: 619192 - RNA, 23 nt, Human
ccugaccucaaaugauccaccug

SEQ ID NO: 619193 - RNA, 22 nt, Human
ccugaggucgggaguuugagac

SEQ ID NO: 619194 - RNA, 19 nt, Human
ccugcacacacaccaacaa

SEQ ID NO: 619195 - RNA, 21 nt, Human
ccugucuaagagcugaccggg

SEQ ID NO: 619196 - RNA, 19 nt, Human
cgagcagcucugauucauc

SEQ ID NO: 619197 - RNA, 22 nt, Human
cgcugauggugauagaugcagc

SEQ ID NO: 619198 - RNA, 18 nt, Human
cggaagaacauggcaccc

SEQ ID NO: 619199 - RNA, 24 nt, Human
cggaucaccugaggucgggaguuu

SEQ ID NO: 619200 - RNA, 24 nt, Human
cgggaggcagagguugcagugagc

SEQ ID NO: 619201 - RNA, 21 nt, Human
cgggauuaaaaacaaacaaac

SEQ ID NO: 619202 - RNA, 27 nt, Human
cgggauuaaaaacaaacaaacaagcca

SEQ ID NO: 619203 - RNA, 23 nt, Human
cggggccccagcucauccugaug

SEQ ID NO: 619204 - RNA, 24 nt, Human
cgggguuucaccauguuggcuagg

SEQ ID NO: 619205 - RNA, 22 nt, Human
cuaaccugaaccuagagaccaa

SEQ ID NO: 619206 - RNA, 18 nt, Human
cucaccgcaccccaaacc

SEQ ID NO: 619207 - RNA, 24 nt, Human
cucacuucuguaaucccagcacuu

SEQ ID NO: 619208 - RNA, 20 nt, Human
cuccaguucagggaggaccc

SEQ ID NO: 619209 - RNA, 23 nt, Human
cucccccucaccgcaccccaaac

SEQ ID NO: 619210 - RNA, 23 nt, Human
cucuggauccacgaaagcuccau

SEQ ID NO: 619211 - RNA, 21 nt, Human
cugcacgagcagcucugauuc

SEQ ID NO: 619212 - RNA, 24 nt, Human
cugcaggcugcuggguauguggag

SEQ ID NO: 619213 - RNA, 18 nt, Human
cugcgggcugacaaugug

SEQ ID NO: 619214 - RNA, 21 nt, Human
cugggccccuggccgcgcuga

SEQ ID NO: 619215 - RNA, 19 nt, Human
cuguaaucccagcacuucg

SEQ ID NO: 619216 - RNA, 23 nt, Human
cugucaggaaugucaaaaccuaa

SEQ ID NO: 619217 - RNA, 23 nt, Human
cuucuccaucuacuucauaaaaa

SEQ ID NO: 619218 - RNA, 20 nt, Human
gaaaaaacagcucucacuga

SEQ ID NO: 619219 - RNA, 24 nt, Human
gaccucaaaugauccaccugccuc

SEQ ID NO: 619220 - RNA, 22 nt, Human
gagaaagccaaaacugaauuca

SEQ ID NO: 619221 - RNA, 23 nt, Human
gagaaucacuugaacccgggagg

SEQ ID NO: 619222 - RNA, 24 nt, Human
gagacgggguuucaccauguuggc

SEQ ID NO: 619223 - RNA, 20 nt, Human
gaggaccucggcaggaggag

SEQ ID NO: 619224 - RNA, 24 nt, Human
gaucaccugaggucgggaguuuga

SEQ ID NO: 619225 - RNA, 19 nt, Human
gauggcuccggggcuucgg

SEQ ID NO: 619226 - RNA, 18 nt, Human
gauuacaggcgugagcca

SEQ ID NO: 619227 - RNA, 21 nt, Human
gauuacaggcgugagccacca

SEQ ID NO: 619228 - RNA, 24 nt, Human
gauuacaggcgugagccaccaugc

SEQ ID NO: 619229 - RNA, 19 nt, Human
gcaccccaaaccuccccca

SEQ ID NO: 619230 - RNA, 18 nt, Human
gcaccccagcauccaccc

SEQ ID NO: 619231 - RNA, 23 nt, Human
gcaggagaaucacuugaacccgg

SEQ ID NO: 619232 - RNA, 22 nt, Human
gccauuguacuccagccugggc

SEQ ID NO: 619233 - RNA, 23 nt, Human
gccauuguacuccagccugggca

SEQ ID NO: 619234 - RNA, 24 nt, Human
gccauuguacuccagccugggcaa

SEQ ID NO: 619235 - RNA, 21 nt, Human
gcccuaaggauggcuccgggg

SEQ ID NO: 619236 - RNA, 22 nt, Human
gcuccggggcuucggcaagcuc

SEQ ID NO: 619237 - RNA, 18 nt, Human
gcuuagccuuggcccuag

SEQ ID NO: 619238 - RNA, 22 nt, Human
ggagcagaugaggucagagaca

SEQ ID NO: 619239 - RNA, 21 nt, Human
ggaggcugggaccaccaagga

SEQ ID NO: 619240 - RNA, 19 nt, Human
ggaguuugagaccagccug

SEQ ID NO: 619241 - RNA, 20 nt, Human
ggaucaccugaggucgggaa

SEQ ID NO: 619242 - RNA, 22 nt, Human
ggaucaccugaggucgggaguu

SEQ ID NO: 619243 - RNA, 24 nt, Human
ggauuacaggcgugagccaccaug

SEQ ID NO: 619244 - RNA, 20 nt, Human
ggcacuaaccugaaccuaga

SEQ ID NO: 619245 - RNA, 23 nt, Human
ggcauggugacacaugccuguaa

SEQ ID NO: 619246 - RNA, 18 nt, Human
ggccccuggccgcgcuga

SEQ ID NO: 619247 - RNA, 23 nt, Human
gggaagcagcgggggugaggaug

SEQ ID NO: 619248 - RNA, 18 nt, Human
gggaggccaaggcggauc

SEQ ID NO: 619249 - RNA, 23 nt, Human
gggaggcugaggcaggagaauca

SEQ ID NO: 619250 - RNA, 22 nt, Human
gggagucucccccucaccgcac

SEQ ID NO: 619251 - RNA, 23 nt, Human
gggguuucaccauguuggcuagg

SEQ ID NO: 619252 - RNA, 19 nt, Human
ggucgggaguuugagacca

SEQ ID NO: 619253 - RNA, 19 nt, Human
ggucucgaacuccugaccu

SEQ ID NO: 619254 - RNA, 24 nt, Human
gguuggucucgaacuccugaccuc

SEQ ID NO: 619255 - RNA, 22 nt, Human
guacaaacaugcacacacaccc

SEQ ID NO: 619256 - RNA, 25 nt, Human
guacuccagccugggcaacaagagu

SEQ ID NO: 619257 - RNA, 18 nt, Human
gugccauugcucuccucu

SEQ ID NO: 619258 - RNA, 20 nt, Human
gugcuggcacccggagaagu

SEQ ID NO: 619259 - RNA, 24 nt, Human
guugcagugagcugagaucaugcc

SEQ ID NO: 619260 - RNA, 27 nt, Human
uaaaaaauuaguccaaaaggccaggua

SEQ ID NO: 619261 - RNA, 21 nt, Human
uaacagacagaggcuggaugc

SEQ ID NO: 619262 - RNA, 23 nt, Human
uacaaaacaugggcccugcuuga

SEQ ID NO: 619263 - RNA, 24 nt, Human
uacaggcgugagccaccaugccca

SEQ ID NO: 619264 - RNA, 23 nt, Human
uacuccagccugggcaacaagag

SEQ ID NO: 619265 - RNA, 24 nt, Human
uacuccagccugggcaacaagagu

SEQ ID NO: 619266 - RNA, 25 nt, Human
uacuccagccugggcaacaagagug

SEQ ID NO: 619267 - RNA, 19 nt, Human
uagaaaaaacagcucucac

SEQ ID NO: 619268 - RNA, 24 nt, Human
uagaagagacgggguuucaccaug

SEQ ID NO: 619269 - RNA, 22 nt, Human
uagcagguggucacagaggcuc

SEQ ID NO: 619270 - RNA, 21 nt, Human
uaggggcacuaaccugaaccu

SEQ ID NO: 619271 - RNA, 20 nt, Human
uaucacagagcuuauuuccc

SEQ ID NO: 619272 - RNA, 22 nt, Human
ucaaaagccuauuuuaaaguuc

SEQ ID NO: 619273 - RNA, 22 nt, Human
ucaaagugcugggauuacaggc

SEQ ID NO: 619274 - RNA, 24 nt, Human
ucaaagugcugggauuacaggcgu

SEQ ID NO: 619275 - RNA, 18 nt, Human
ucaaugccgggggcugca

SEQ ID NO: 619276 - RNA, 24 nt, Human
ucacagggcagaauccagccgugc

SEQ ID NO: 619277 - RNA, 24 nt, Human
ucagagcagggacugggaggcugg

SEQ ID NO: 619278 - RNA, 24 nt, Human
ucaggaguaacagacagaggcugg

SEQ ID NO: 619279 - RNA, 23 nt, Human
ucauaccuucugaauacaagauc

SEQ ID NO: 619280 - RNA, 19 nt, Human
ucaucaagcuuucagagca

SEQ ID NO: 619281 - RNA, 23 nt, Human
ucaugccauuguacuccagccug

SEQ ID NO: 619282 - RNA, 18 nt, Human
uccacgaaagcuccaucc

SEQ ID NO: 619283 - RNA, 23 nt, Human
uccauagaaucugguggaugcua

SEQ ID NO: 619284 - RNA, 19 nt, Human
uccaugcaggguccagcca

SEQ ID NO: 619285 - RNA, 19 nt, Human
ucccagccugaccacagaa

SEQ ID NO: 619286 - RNA, 24 nt, Human
uccccaccuaccccucaguucucc

SEQ ID NO: 619287 - RNA, 20 nt, Human
uccccugcuggcuuccccuu

SEQ ID NO: 619288 - RNA, 24 nt, Human
ucccugugagugagaacaaagucc

SEQ ID NO: 619289 - RNA, 19 nt, Human
uccgcguggccccucccca

SEQ ID NO: 619290 - RNA, 23 nt, Human
uccgucaaaacccuccuggagcc

SEQ ID NO: 619291 - RNA, 19 nt, Human
uccguccccaucaacccua

SEQ ID NO: 619292 - RNA, 19 nt, Human
uccgugccaggcauaacag

SEQ ID NO: 619293 - RNA, 18 nt, Human
uccugaccucaaaugauc

SEQ ID NO: 619294 - RNA, 25 nt, Human
ucgggaggcugaggcaggagaauca

SEQ ID NO: 619295 - RNA, 24 nt, Human
ucucaaagugcugggauuacaggc

SEQ ID NO: 619296 - RNA, 20 nt, Human
ucucccccucaccgcacccc

SEQ ID NO: 619297 - RNA, 19 nt, Human
ucucgaacuccugaccuca

SEQ ID NO: 619298 - RNA, 23 nt, Human
ucucuacuaaaaaauacaaaauu

SEQ ID NO: 619299 - RNA, 20 nt, Human
ucugcaggcugcuggguaug

SEQ ID NO: 619300 - RNA, 23 nt, Human
ucugcaggcugcuggguaugugg

SEQ ID NO: 619301 - RNA, 22 nt, Human
ucuggggcuggagggcugggga

SEQ ID NO: 619302 - RNA, 19 nt, Human
ucugguggaugcuauagcu

SEQ ID NO: 619303 - RNA, 24 nt, Human
ugagaccagccugaccaacaugga

SEQ ID NO: 619304 - RNA, 26 nt, Human
ugaggagcuuaggauugagugguugg

SEQ ID NO: 619305 - RNA, 20 nt, Human
ugaggcaggagaaucacuug

SEQ ID NO: 619306 - RNA, 24 nt, Human
ugaggcaggagaaucacuugaacc

SEQ ID NO: 619307 - RNA, 25 nt, Human
ugaggcaggagaaucacuugaaccc

SEQ ID NO: 619308 - RNA, 21 nt, Human
ugaggggccauggccuucagc

SEQ ID NO: 619309 - RNA, 23 nt, Human
ugauggugauagaugcagccggg

SEQ ID NO: 619310 - RNA, 20 nt, Human
ugcacacacaccaacaacuu

SEQ ID NO: 619311 - RNA, 21 nt, Human
ugcacacacaccaacaacuuu

SEQ ID NO: 619312 - RNA, 21 nt, Human
ugccagacagacgcgccuucu

SEQ ID NO: 619313 - RNA, 24 nt, Human
ugccaggcgggccuuugccucuuc

SEQ ID NO: 619314 - RNA, 21 nt, Human
ugccauugcucuccucugggc

SEQ ID NO: 619315 - RNA, 23 nt, Human
ugccccaggacacugccaggcgg

SEQ ID NO: 619316 - RNA, 21 nt, Human
ugccccgcucaggagccucuc

SEQ ID NO: 619317 - RNA, 19 nt, Human
ugcccugaggccacacagc

SEQ ID NO: 619318 - RNA, 23 nt, Human
ugccuguaaugccagcuacucgg

SEQ ID NO: 619319 - RNA, 24 nt, Human
ugccuguaaugccagcuacucggg

SEQ ID NO: 619320 - RNA, 18 nt, Human
ugcuauagcuccucgccc

SEQ ID NO: 619321 - RNA, 19 nt, Human
ugcucacucagcaccccag

SEQ ID NO: 619322 - RNA, 20 nt, Human
ugcucagagaggaccucggc

SEQ ID NO: 619323 - RNA, 21 nt, Human
ugcucagagaggaccucggca

SEQ ID NO: 619324 - RNA, 24 nt, Human
ugcucuccucugggcuuagccuug

SEQ ID NO: 619325 - RNA, 24 nt, Human
ugcugggauuacaggcgugagcca

SEQ ID NO: 619326 - RNA, 18 nt, Human
ugcuugaaucugaaagug

SEQ ID NO: 619327 - RNA, 19 nt, Human
uggcaagcaguggcaaugg

SEQ ID NO: 619328 - RNA, 22 nt, Human
uggcaagcaguggcaaugggcu

SEQ ID NO: 619329 - RNA, 21 nt, Human
uggccccuccccaccuacccc

SEQ ID NO: 619330 - RNA, 24 nt, Human
uggcuagguuggucucgaacuccu

SEQ ID NO: 619331 - RNA, 21 nt, Human
uggcucacuucuguaauccca

SEQ ID NO: 619332 - RNA, 22 nt, Human
uggcucacuucuguaaucccag

SEQ ID NO: 619333 - RNA, 24 nt, Human
uggcucacuucuguaaucccagca

SEQ ID NO: 619334 - RNA, 24 nt, Human
ugggaagcagcagugccuggccug

SEQ ID NO: 619335 - RNA, 18 nt, Human
ugggauuacaggcgugag

SEQ ID NO: 619336 - RNA, 22 nt, Human
ugggauuacaggcgugagccac

SEQ ID NO: 619337 - RNA, 23 nt, Human
ugggauuacaggcgugagccacc

SEQ ID NO: 619338 - RNA, 24 nt, Human
ugggauuacaggcgugagccacca

SEQ ID NO: 619339 - RNA, 25 nt, Human
ugggauuacaggcgugagccaccau

SEQ ID NO: 619340 - RNA, 19 nt, Human
uguacuccagccugggcaa

SEQ ID NO: 619341 - RNA, 22 nt, Human
uguacuccagccugggcaacaa

SEQ ID NO: 619342 - RNA, 20 nt, Human
ugugauggggagcaggugcu

SEQ ID NO: 619343 - RNA, 20 nt, Human
ugugccauugcucuccucug

SEQ ID NO: 619344 - RNA, 24 nt, Human
uuagaagagacgggguuucaccau

SEQ ID NO: 619345 - RNA, 20 nt, Human
uuagacccagcaauuacacc

SEQ ID NO: 619346 - RNA, 24 nt, Human
uuagccgggcauggugacacaugc

SEQ ID NO: 619347 - RNA, 20 nt, Human
uucagggaggaccccauggu

SEQ ID NO: 619348 - RNA, 18 nt, Human
uucaugaggggccauggc

SEQ ID NO: 619349 - RNA, 18 nt, Human
uucccaagcgccagagcc

SEQ ID NO: 619350 - RNA, 21 nt, Human
uuccguccccaucaacccuag

SEQ ID NO: 619351 - RNA, 24 nt, Human
uucuccaugcaggguccagccacc

SEQ ID NO: 619352 - RNA, 18 nt, Human
uugcagugagcugagauc

SEQ ID NO: 619353 - RNA, 20 nt, Human
uugcagugagcugagaucau

SEQ ID NO: 619354 - RNA, 21 nt, Human
uugcagugagcugagaucaug

SEQ ID NO: 619355 - RNA, 19 nt, Human
uuucaccauguuggcuagg

SEQ ID NO: 619356 - RNA, 20 nt, Human
uuucaccauguuggcuaggu

SEQ ID NO: 619357 - RNA, 18 nt, Human
uuucuacugggccgcugg

SEQ ID NO: 619358 - RNA, 21 nt, Human
uuucuaguucugcuuaucaca

SEQ ID NO: 619359 - RNA, 24 nt, Human
uuuuuagaagagacgggguuucac

SEQ ID NO: 619360 - RNA, 19 nt, Human
aagaaaccaagauucaggu

SEQ ID NO: 619361 - RNA, 18 nt, Human
aagaaucaaaaacgugac

SEQ ID NO: 619362 - RNA, 22 nt, Human
agaagcauaagaaucaaaaacg

SEQ ID NO: 619363 - RNA, 21 nt, Human
auauacaauuacaauaaagca

SEQ ID NO: 619364 - RNA, 20 nt, Human
cucuuuccacuucaucguaa

SEQ ID NO: 619365 - RNA, 18 nt, Human
uaaaaagaaaccaagauu

SEQ ID NO: 619366 - RNA, 25 nt, Human
uacuauggaauuauuuuugaguggu

SEQ ID NO: 619367 - RNA, 19 nt, Human
uacucaguuauaaaaagaa

SEQ ID NO: 619368 - RNA, 21 nt, Human
ucaguuauaaaaagaaaccaa

SEQ ID NO: 619369 - RNA, 22 nt, Human
ucaguuauaaaaagaaaccaag

SEQ ID NO: 619370 - RNA, 19 nt, Human
ucuauaauucaacgcaucc

SEQ ID NO: 619371 - RNA, 18 nt, Human
ugcucuuuccacuucauc

SEQ ID NO: 619372 - RNA, 18 nt, Human
uggcaagaagcauaagaa

SEQ ID NO: 619373 - RNA, 21 nt, Human
uucaacgcauccagauagacu

SEQ ID NO: 619374 - RNA, 25 nt, Human
uuuccacuucaucguaauguauuuc

SEQ ID NO: 619375 - RNA, 23 nt, Human
uuuuuuuuuuugguaaacagauc

SEQ ID NO: 619376 - RNA, 20 nt, Human
uuuuuuuuuuuuuuuuuggu

SEQ ID NO: 619377 - RNA, 28 nt, Human
uuuuuuuuuuuuuuuuuuuuuuuggggg

SEQ ID NO: 619378 - RNA, 19 nt, Human
aaaagaaaacaugguagaa

SEQ ID NO: 619379 - RNA, 23 nt, Human
aaauaaaacagcauacuaauaug

SEQ ID NO: 619380 - RNA, 22 nt, Human
aacugcuacugugugaagagaa

SEQ ID NO: 619381 - RNA, 19 nt, Human
aauacaaaauuugugaaag

SEQ ID NO: 619382 - RNA, 24 nt, Human
acacagcugcaccgggagacaggc

SEQ ID NO: 619383 - RNA, 22 nt, Human
accaaacaacagcgcccagagc

SEQ ID NO: 619384 - RNA, 20 nt, Human
agaaaagaaaacaugguaga

SEQ ID NO: 619385 - RNA, 20 nt, Human
augguagacaacuuaauaca

SEQ ID NO: 619386 - RNA, 21 nt, Human
caaacaacagcgcccagagcc

SEQ ID NO: 619387 - RNA, 22 nt, Human
caacagcgcccagagccgccga

SEQ ID NO: 619388 - RNA, 21 nt, Human
caggacuagcggggcgagcgg

SEQ ID NO: 619389 - RNA, 21 nt, Human
ccagagccgccgaaccgccca

SEQ ID NO: 619390 - RNA, 20 nt, Human
ccuccagauaacgccccucc

SEQ ID NO: 619391 - RNA, 23 nt, Human
cgcccagagccgccgaaccgccc

SEQ ID NO: 619392 - RNA, 24 nt, Human
cggcccuccagauaacgccccucc

SEQ ID NO: 619393 - RNA, 22 nt, Human
cuaacagacacguucaacauua

SEQ ID NO: 619394 - RNA, 20 nt, Human
cuagcggggcgagcggcccu

SEQ ID NO: 619395 - RNA, 18 nt, Human
cuccagauaacgccccuc

SEQ ID NO: 619396 - RNA, 26 nt, Human
cugcacccgcggcccuccagauaacg

SEQ ID NO: 619397 - RNA, 20 nt, Human
cuuaauacauuuucaccaaa

SEQ ID NO: 619398 - RNA, 19 nt, Human
gaaaagaaaacaugguaga

SEQ ID NO: 619399 - RNA, 22 nt, Human
gcaaaacuggaaaaaaagcaau

SEQ ID NO: 619400 - RNA, 18 nt, Human
gcuacugugugaagagaa

SEQ ID NO: 619401 - RNA, 21 nt, Human
uaaaacagcauacuaauaugc

SEQ ID NO: 619402 - RNA, 18 nt, Human
uaaagaccaaacaacagc

SEQ ID NO: 619403 - RNA, 22 nt, Human
uagcggggcgagcggcccuguc

SEQ ID NO: 619404 - RNA, 18 nt, Human
ucaaacauucaaauacug

SEQ ID NO: 619405 - RNA, 19 nt, Human
ucaaauacuguggucccuu

SEQ ID NO: 619406 - RNA, 19 nt, Human
ucagcuagaaaagaaaaca

SEQ ID NO: 619407 - RNA, 22 nt, Human
uccgcaggccuaaagaccaaac

SEQ ID NO: 619408 - RNA, 23 nt, Human
uccgcaggccuaaagaccaaaca

SEQ ID NO: 619409 - RNA, 19 nt, Human
uccgcaggccuaaagaccu

SEQ ID NO: 619410 - RNA, 20 nt, Human
ucugcaaaacuggaaaaaaa

SEQ ID NO: 619411 - RNA, 20 nt, Human
ugcaaaacuggaaaaaaagc

SEQ ID NO: 619412 - RNA, 18 nt, Human
ugugaagagaacuagaau

SEQ ID NO: 619413 - RNA, 20 nt, Human
ugugaagagaacuagaaugu

SEQ ID NO: 619414 - RNA, 21 nt, Human
uucagcuagaaaagaaaacau

SEQ ID NO: 619415 - RNA, 19 nt, Human
uuguaugcagugauauuuu

SEQ ID NO: 619416 - RNA, 23 nt, Human
uuuuuuuuuuuuuuuucuaacag

SEQ ID NO: 619417 - RNA, 21 nt, Human
aaaaaaaaaaaccacaaaaaa

SEQ ID NO: 619418 - RNA, 19 nt, Human
aaaaaaaaccacaaaaaaa

SEQ ID NO: 619419 - RNA, 19 nt, Human
aaaaaaauaaguaaaagaa

SEQ ID NO: 619420 - RNA, 22 nt, Human
aaaaauaauaaagcaaagaaaa

SEQ ID NO: 619421 - RNA, 18 nt, Human
aaagauaugucauucucc

SEQ ID NO: 619422 - RNA, 23 nt, Human
aaagauaugucauucucccaaag

SEQ ID NO: 619423 - RNA, 22 nt, Human
aaccccccuaccccauucaaaa

SEQ ID NO: 619424 - RNA, 22 nt, Human
aagcaaauauaauagauacuau

SEQ ID NO: 619425 - RNA, 24 nt, Human
aagcuuugauugcaguagcucugg

SEQ ID NO: 619426 - RNA, 20 nt, Human
aaucuugcuucuucuaacac

SEQ ID NO: 619427 - RNA, 22 nt, Human
aaugaugucuuucuuuccacuc

SEQ ID NO: 619428 - RNA, 26 nt, Human
aauugcuugaucugguguugagugga

SEQ ID NO: 619429 - RNA, 21 nt, Human
accccccuaccccauucaaaa

SEQ ID NO: 619430 - RNA, 19 nt, Human
agaaaauaauucauuucug

SEQ ID NO: 619431 - RNA, 20 nt, Human
agaaucacaggugcugacug

SEQ ID NO: 619432 - RNA, 20 nt, Human
agaauucuuuauugccacuu

SEQ ID NO: 619433 - RNA, 24 nt, Human
agauagaauugcuugaucuggugu

SEQ ID NO: 619434 - RNA, 18 nt, Human
aggaaagcuuugcauaug

SEQ ID NO: 619435 - RNA, 24 nt, Human
aggcccuuccucugcugcugcaga

SEQ ID NO: 619436 - RNA, 24 nt, Human
agggagucugaucucaccauauuc

SEQ ID NO: 619437 - RNA, 21 nt, Human
agguacaggcccuuccucugc

SEQ ID NO: 619438 - RNA, 21 nt, Human
aguaucuauuucuaagcuggc

SEQ ID NO: 619439 - RNA, 22 nt, Human
aguguuauuucuucuagacaac

SEQ ID NO: 619440 - RNA, 21 nt, Human
auaaaaccagguaaacccccc

SEQ ID NO: 619441 - RNA, 18 nt, Human
aucuuuuacaucuuccuc

SEQ ID NO: 619442 - RNA, 23 nt, Human
auuaaaauccucaaaugcaucuc

SEQ ID NO: 619443 - RNA, 18 nt, Human
caaaggagacacaggugg

SEQ ID NO: 619444 - RNA, 21 nt, Human
caaaugcaucucaaaccaaga

SEQ ID NO: 619445 - RNA, 20 nt, Human
cacagcuaauaucccugcuc

SEQ ID NO: 619446 - RNA, 21 nt, Human
cagguaaaccccccuacccca

SEQ ID NO: 619447 - RNA, 18 nt, Human
cauauaagcuuugauugc

SEQ ID NO: 619448 - RNA, 21 nt, Human
cauuauaaaaaugaaccugaa

SEQ ID NO: 619449 - RNA, 21 nt, Human
cauugccuuuuagcaggcaac

SEQ ID NO: 619450 - RNA, 20 nt, Human
cauugguagggagguacagg

SEQ ID NO: 619451 - RNA, 21 nt, Human
ccccccuaccccauucaaaag

SEQ ID NO: 619452 - RNA, 19 nt, Human
cuaugccuggucauaaaac

SEQ ID NO: 619453 - RNA, 21 nt, Human
cuauuuauaaaccugaacaac

SEQ ID NO: 619454 - RNA, 20 nt, Human
cucaaaugcaucucaaacca

SEQ ID NO: 619455 - RNA, 27 nt, Human
cucaaucaguaagaacuggauauuacu

SEQ ID NO: 619456 - RNA, 18 nt, Human
cucccaaaggagacacag

SEQ ID NO: 619457 - RNA, 21 nt, Human
cuugccuagaaugaaauucug

SEQ ID NO: 619458 - RNA, 19 nt, Human
gacaccaagucauugguag

SEQ ID NO: 619459 - RNA, 23 nt, Human
gaucagcaccacugaaguucaaa

SEQ ID NO: 619460 - RNA, 19 nt, Human
ggagucugaucucaccaua

SEQ ID NO: 619461 - RNA, 21 nt, Human
guaaaaauaauaaagcaaaga

SEQ ID NO: 619462 - RNA, 20 nt, Human
gucaauaccaaaaaaucuug

SEQ ID NO: 619463 - RNA, 19 nt, Human
guggagaaagaaaagugau

SEQ ID NO: 619464 - RNA, 21 nt, Human
uaaaauccucaaaugcaucuc

SEQ ID NO: 619465 - RNA, 26 nt, Human
uaaaauccucaaaugcaucucaaacc

SEQ ID NO: 619466 - RNA, 27 nt, Human
uaaaccccccuaccccauucaaaaggc

SEQ ID NO: 619467 - RNA, 23 nt, Human
uaaaccugaacaaccuuuuccaa

SEQ ID NO: 619468 - RNA, 25 nt, Human
uaaaugaauauuaaugaugcaccuu

SEQ ID NO: 619469 - RNA, 24 nt, Human
uaacacacccaauaaauuaaugcc

SEQ ID NO: 619470 - RNA, 20 nt, Human
uaaugcaguauacauuagau

SEQ ID NO: 619471 - RNA, 19 nt, Human
uacacuguaccuuuggaau

SEQ ID NO: 619472 - RNA, 21 nt, Human
uacaguguuauuucuucuaga

SEQ ID NO: 619473 - RNA, 23 nt, Human
uagaagaauaagcuacguaaaua

SEQ ID NO: 619474 - RNA, 23 nt, Human
uagcaggcaacucuaccauauuc

SEQ ID NO: 619475 - RNA, 22 nt, Human
ucaaaacaagcauaauccucua

SEQ ID NO: 619476 - RNA, 23 nt, Human
ucaaaccaagaugguauuuccac

SEQ ID NO: 619477 - RNA, 19 nt, Human
ucagaacccauuuggacac

SEQ ID NO: 619478 - RNA, 21 nt, Human
ucagaacccauuuggacacag

SEQ ID NO: 619479 - RNA, 18 nt, Human
uccauacugcaucuagga

SEQ ID NO: 619480 - RNA, 23 nt, Human
uccauacugcaucuaggaauuca

SEQ ID NO: 619481 - RNA, 24 nt, Human
ucccuuaugcaccacucaaaacaa

SEQ ID NO: 619482 - RNA, 21 nt, Human
uccuccauccagaguuacacu

SEQ ID NO: 619483 - RNA, 20 nt, Human
ucucaauacaauacuucucu

SEQ ID NO: 619484 - RNA, 22 nt, Human
ucuuggaccagccaaaugccuu

SEQ ID NO: 619485 - RNA, 19 nt, Human
ugaaaauagauuaucucuc

SEQ ID NO: 619486 - RNA, 19 nt, Human
ugaauaccacauucuguaa

SEQ ID NO: 619487 - RNA, 20 nt, Human
ugaaugaauaccacauucug

SEQ ID NO: 619488 - RNA, 25 nt, Human
ugacuugguuggaguugcuagcaag

SEQ ID NO: 619489 - RNA, 24 nt, Human
ugagaauucuuuauugccacuucu

SEQ ID NO: 619490 - RNA, 19 nt, Human
ugaguggguggagaaagaa

SEQ ID NO: 619491 - RNA, 21 nt, Human
ugauaaggaaaacauuuucau

SEQ ID NO: 619492 - RNA, 24 nt, Human
ugcaccacucaaaacaagcauaau

SEQ ID NO: 619493 - RNA, 19 nt, Human
ugccuagaaugaaauucug

SEQ ID NO: 619494 - RNA, 20 nt, Human
uggcaucgcaguucugacuu

SEQ ID NO: 619495 - RNA, 22 nt, Human
uggcugcaaucaaauguguguu

SEQ ID NO: 619496 - RNA, 24 nt, Human
ugguggcugcaaucaaaugugugu

SEQ ID NO: 619497 - RNA, 20 nt, Human
uguaccuuuggaaugacagu

SEQ ID NO: 619498 - RNA, 21 nt, Human
uguugugcuuuccauaaauua

SEQ ID NO: 619499 - RNA, 19 nt, Human
uugguuggaguugcuagca

SEQ ID NO: 619500 - RNA, 20 nt, Human
uuuguaaguguuguagugau

SEQ ID NO: 619501 - RNA, 25 nt, Human
uuuuugguggcugcaaucaaaugug

SEQ ID NO: 619502 - RNA, 21 nt, Human
uuuuugguuuugaaguaucuu

SEQ ID NO: 619503 - RNA, 19 nt, Human
aaaaagccaaagaucauug

SEQ ID NO: 619504 - RNA, 22 nt, Human
aaacagugugaaacugacaaaa

SEQ ID NO: 619505 - RNA, 24 nt, Human
aaaguaaaggcuuugcaggcuucu

SEQ ID NO: 619506 - RNA, 21 nt, Human
aaggcuuugcaggcuucuuca

SEQ ID NO: 619507 - RNA, 26 nt, Human
acaaaacuccaagggggagggaacgc

SEQ ID NO: 619508 - RNA, 23 nt, Human
acaacagggcuuuaccucuaacu

SEQ ID NO: 619509 - RNA, 23 nt, Human
acaauagaagugcugccacuaaa

SEQ ID NO: 619510 - RNA, 19 nt, Human
acaguuaaaaaaacugugu

SEQ ID NO: 619511 - RNA, 20 nt, Human
acuguguagccacauuacug

SEQ ID NO: 619512 - RNA, 23 nt, Human
agcaaacagugugaaacugacaa

SEQ ID NO: 619513 - RNA, 23 nt, Human
aguaugcugauaagugaagggac

SEQ ID NO: 619514 - RNA, 26 nt, Human
agugugaaacugacaaaacuccaagg

SEQ ID NO: 619515 - RNA, 19 nt, Human
auacuagaaacccuuaaua

SEQ ID NO: 619516 - RNA, 22 nt, Human
caaaacuccaagggggaaacau

SEQ ID NO: 619517 - RNA, 25 nt, Human
caaacaguacaccugggccagcaaa

SEQ ID NO: 619518 - RNA, 22 nt, Human
cagcaaacagugugaaacugac

SEQ ID NO: 619519 - RNA, 20 nt, Human
gaaaccaaucugacucccaa

SEQ ID NO: 619520 - RNA, 22 nt, Human
gaagcauucuuuugcuccagcc

SEQ ID NO: 619521 - RNA, 27 nt, Human
uaaaaaguacgauaaaaauuugcacaa

SEQ ID NO: 619522 - RNA, 21 nt, Human
uaacaaaggccacaaacagua

SEQ ID NO: 619523 - RNA, 18 nt, Human
uaccucuaacucagaauu

SEQ ID NO: 619524 - RNA, 23 nt, Human
uagcaaauaaaucaaaaagccaa

SEQ ID NO: 619525 - RNA, 24 nt, Human
uagcaaauaaaucaaaaagccaaa

SEQ ID NO: 619526 - RNA, 18 nt, Human
ugaaacugacaaaacucc

SEQ ID NO: 619527 - RNA, 19 nt, Human
ugaagcauucuuuugcucc

SEQ ID NO: 619528 - RNA, 23 nt, Human
ugccacuaaacuuucaguugagg

SEQ ID NO: 619529 - RNA, 23 nt, Human
uuaaaaaaacuguguagccacau

SEQ ID NO: 619530 - RNA, 21 nt, Human
uuuuuuuuuuuuuuuuuuaag

SEQ ID NO: 619531 - RNA, 24 nt, Human
aaaaaacagagcgaggcccccccc

SEQ ID NO: 619532 - RNA, 23 nt, Human
aaaaagaaggagguaaguccuaa

SEQ ID NO: 619533 - RNA, 22 nt, Human
aaagaggaggaugaggccuagg

SEQ ID NO: 619534 - RNA, 22 nt, Human
aacagcucccuuccaccggaag

SEQ ID NO: 619535 - RNA, 23 nt, Human
aacauacaagagaccuuacaaaa

SEQ ID NO: 619536 - RNA, 21 nt, Human
aacuuggggacgucuggccuu

SEQ ID NO: 619537 - RNA, 21 nt, Human
aagcaaagcgcuuggagcccg

SEQ ID NO: 619538 - RNA, 21 nt, Human
aagcauuggaaaccagacagu

SEQ ID NO: 619539 - RNA, 21 nt, Human
aagccggaguuccggaagcaa

SEQ ID NO: 619540 - RNA, 22 nt, Human
aaugagagagcggcgagagaga

SEQ ID NO: 619541 - RNA, 21 nt, Human
acaaaguucucuugccuggaa

SEQ ID NO: 619542 - RNA, 18 nt, Human
acaacgcuaagcggccag

SEQ ID NO: 619543 - RNA, 23 nt, Human
acagaucagucuccacgcggcaa

SEQ ID NO: 619544 - RNA, 18 nt, Human
acagugucagagccucug

SEQ ID NO: 619545 - RNA, 18 nt, Human
acgccagcuccccgugag

SEQ ID NO: 619546 - RNA, 23 nt, Human
acgccgaguccccagacucugac

SEQ ID NO: 619547 - RNA, 25 nt, Human
agagaaaccagcgaucccgccuggg

SEQ ID NO: 619548 - RNA, 22 nt, Human
agcuuccuggacauggcaguuc

SEQ ID NO: 619549 - RNA, 19 nt, Human
aggaugcccaggagcccca

SEQ ID NO: 619550 - RNA, 24 nt, Human
aggcaaaaaaggauucacacccag

SEQ ID NO: 619551 - RNA, 22 nt, Human
aggcugcuuuuccagacugugu

SEQ ID NO: 619552 - RNA, 20 nt, Human
aguccccagacucugacagg

SEQ ID NO: 619553 - RNA, 28 nt, Human
aucauuucuucagcugucaauacugugu

SEQ ID NO: 619554 - RNA, 19 nt, Human
aucccagcaagccccgcaa

SEQ ID NO: 619555 - RNA, 21 nt, Human
caaaaaaggauucacacccag

SEQ ID NO: 619556 - RNA, 19 nt, Human
caaaguucucuugccugga

SEQ ID NO: 619557 - RNA, 28 nt, Human
caacauacaagagaccuuacaaaaagaa

SEQ ID NO: 619558 - RNA, 19 nt, Human
caacgcuaagcggccagca

SEQ ID NO: 619559 - RNA, 22 nt, Human
caccacccaccucagaggcaaa

SEQ ID NO: 619560 - RNA, 20 nt, Human
cacccagaucucuagaaaaa

SEQ ID NO: 619561 - RNA, 26 nt, Human
cacccagaucucuagaaaaaugaucu

SEQ ID NO: 619562 - RNA, 20 nt, Human
cacggcaugucgggcagagc

SEQ ID NO: 619563 - RNA, 18 nt, Human
cacugacgcggcugcggc

SEQ ID NO: 619564 - RNA, 22 nt, Human
cacuuggaaaaaacagagcgag

SEQ ID NO: 619565 - RNA, 18 nt, Human
cagaagccaguggacagg

SEQ ID NO: 619566 - RNA, 18 nt, Human
cagcuccccagagaggau

SEQ ID NO: 619567 - RNA, 22 nt, Human
cagcugggcccgucucucacca

SEQ ID NO: 619568 - RNA, 20 nt, Human
caguggacaggccuccagcc

SEQ ID NO: 619569 - RNA, 24 nt, Human
cauaguuauacaaagaaaaugaga

SEQ ID NO: 619570 - RNA, 22 nt, Human
ccacacagagaagggguacaaa

SEQ ID NO: 619571 - RNA, 24 nt, Human
ccacccaccucagaggcaaaaaag

SEQ ID NO: 619572 - RNA, 23 nt, Human
ccagaaagagagggaaggcugca

SEQ ID NO: 619573 - RNA, 18 nt, Human
ccagcccaaccucuaugc

SEQ ID NO: 619574 - RNA, 22 nt, Human
ccagcggccgccuuccucccag

SEQ ID NO: 619575 - RNA, 24 nt, Human
cccaaccucuaugccaggcgugac

SEQ ID NO: 619576 - RNA, 23 nt, Human
cccagcaagccccgcaacagcuc

SEQ ID NO: 619577 - RNA, 21 nt, Human
ccccagcggccgccuuccucc

SEQ ID NO: 619578 - RNA, 21 nt, Human
cccccaacuuggggacgucug

SEQ ID NO: 619579 - RNA, 23 nt, Human
ccccccaagaggcagcgcccacc

SEQ ID NO: 619580 - RNA, 22 nt, Human
ccccgcaacagcucccuuccac

SEQ ID NO: 619581 - RNA, 23 nt, Human
ccccgcaacagcucccuuccacc

SEQ ID NO: 619582 - RNA, 21 nt, Human
cccgaauuuucaccgugacgc

SEQ ID NO: 619583 - RNA, 20 nt, Human
cccgugucagaagaaggccc

SEQ ID NO: 619584 - RNA, 22 nt, Human
ccuuccucccaggcucugcugg

SEQ ID NO: 619585 - RNA, 24 nt, Human
cgcaacagcucccuuccaccggaa

SEQ ID NO: 619586 - RNA, 18 nt, Human
cgccgaguccccagacuc

SEQ ID NO: 619587 - RNA, 19 nt, Human
cgccgggaagcagugacga

SEQ ID NO: 619588 - RNA, 24 nt, Human
cgugacaaggcacugacagacgcc

SEQ ID NO: 619589 - RNA, 26 nt, Human
cuccagaagccaguggacaggccucc

SEQ ID NO: 619590 - RNA, 22 nt, Human
cucugaccugcaggcgggaggc

SEQ ID NO: 619591 - RNA, 18 nt, Human
cuuggaaaaaacagagcg

SEQ ID NO: 619592 - RNA, 24 nt, Human
cuuggacagcugggcccgucucuc

SEQ ID NO: 619593 - RNA, 19 nt, Human
gaaaaaacagagcgagggg

SEQ ID NO: 619594 - RNA, 19 nt, Human
gacgugcuggacacugacg

SEQ ID NO: 619595 - RNA, 23 nt, Human
gacugucccgggcuuggucaggu

SEQ ID NO: 619596 - RNA, 20 nt, Human
gagagagaggcauuugugau

SEQ ID NO: 619597 - RNA, 23 nt, Human
gcaaaaaaggauucacacccaga

SEQ ID NO: 619598 - RNA, 22 nt, Human
gccccgcaacagcucccuucca

SEQ ID NO: 619599 - RNA, 23 nt, Human
gcgagagagaggcauuugugaug

SEQ ID NO: 619600 - RNA, 19 nt, Human
ggagcucugcgaggucgag

SEQ ID NO: 619601 - RNA, 21 nt, Human
ggcaguucauuacaucucggg

SEQ ID NO: 619602 - RNA, 24 nt, Human
ggcaugucgggcagagcccgugca

SEQ ID NO: 619603 - RNA, 28 nt, Human
ggcauuugugaugcucuguaaacauccc

SEQ ID NO: 619604 - RNA, 21 nt, Human
ggcccgucucucaccacccac

SEQ ID NO: 619605 - RNA, 18 nt, Human
gucccgggcuuggucagg

SEQ ID NO: 619606 - RNA, 21 nt, Human
gucuggccuuggacagcuggg

SEQ ID NO: 619607 - RNA, 22 nt, Human
uaaauuaaaaaaaccacaagcc

SEQ ID NO: 619608 - RNA, 21 nt, Human
uaacaacauacaagagaccuu

SEQ ID NO: 619609 - RNA, 23 nt, Human
uaagcugauaaaauacgauaccu

SEQ ID NO: 619610 - RNA, 22 nt, Human
uagcaccaagaacgcuuccuuc

SEQ ID NO: 619611 - RNA, 22 nt, Human
ucagagccucugaccugcaggc

SEQ ID NO: 619612 - RNA, 22 nt, Human
uccacacagagaagggguacaa

SEQ ID NO: 619613 - RNA, 20 nt, Human
uccagcccaaccucuaugcc

SEQ ID NO: 619614 - RNA, 20 nt, Human
uccucccaggcucugcuggg

SEQ ID NO: 619615 - RNA, 22 nt, Human
ucuagaaaaaugaucaaaagca

SEQ ID NO: 619616 - RNA, 21 nt, Human
ucuaugccaggcgugacaagg

SEQ ID NO: 619617 - RNA, 24 nt, Human
ucuguaaacaucccgaauuuucac

SEQ ID NO: 619618 - RNA, 22 nt, Human
ucuucucacagccaagcuuccu

SEQ ID NO: 619619 - RNA, 24 nt, Human
ugaagcccaggcugcuuuuccaga

SEQ ID NO: 619620 - RNA, 23 nt, Human
ugaagucccaaacaucccagaaa

SEQ ID NO: 619621 - RNA, 24 nt, Human
ugagagagcggcgagagagaggca

SEQ ID NO: 619622 - RNA, 23 nt, Human
ugcacgccgaguccccagacucc

SEQ ID NO: 619623 - RNA, 19 nt, Human
ugcccaggagccccagcgg

SEQ ID NO: 619624 - RNA, 22 nt, Human
ugcucuguaaacaucccgaauu

SEQ ID NO: 619625 - RNA, 19 nt, Human
uggaaaguacaaauugaga

SEQ ID NO: 619626 - RNA, 18 nt, Human
uggcaaagaggaggauga

SEQ ID NO: 619627 - RNA, 22 nt, Human
ugucagaagaaggcccggccuc

SEQ ID NO: 619628 - RNA, 18 nt, Human
ugucaggagcucugcgag

SEQ ID NO: 619629 - RNA, 22 nt, Human
uuccagaggaaaaacgcugggg

SEQ ID NO: 619630 - RNA, 21 nt, Human
uugugaugcucuguaaacauc

SEQ ID NO: 619631 - RNA, 25 nt, Human
uuuaagccaaacauuuaacaacaua

SEQ ID NO: 619632 - RNA, 22 nt, Human
uuuauaauuguuuaagccaaac

SEQ ID NO: 619633 - RNA, 21 nt, Human
aaaaaaauucaaaagcaccua

SEQ ID NO: 619634 - RNA, 20 nt, Human
aaaucaaagaucccacuccu

SEQ ID NO: 619635 - RNA, 19 nt, Human
aagaccaagaauuauucug

SEQ ID NO: 619636 - RNA, 23 nt, Human
acacacacacacacacacacaca

SEQ ID NO: 619637 - RNA, 23 nt, Human
acacacacacacacacacacaca

SEQ ID NO: 619638 - RNA, 23 nt, Human
acacacacacacacacacacaca

SEQ ID NO: 619639 - RNA, 23 nt, Human
acacacacacacacacacacaca

SEQ ID NO: 619640 - RNA, 23 nt, Human
acacacacacacacacacacaca

SEQ ID NO: 619641 - RNA, 26 nt, Human
acacacacacacacacacacacccca

SEQ ID NO: 619642 - RNA, 19 nt, Human
acauaagcgcacacugacu

SEQ ID NO: 619643 - RNA, 23 nt, Human
acuauaaagggaagugaaaaaaa

SEQ ID NO: 619644 - RNA, 22 nt, Human
aucaaagaucccacuccuuucc

SEQ ID NO: 619645 - RNA, 23 nt, Human
augugcguguguguguguguguu

SEQ ID NO: 619646 - RNA, 18 nt, Human
cacacacacacacacaca

SEQ ID NO: 619647 - RNA, 20 nt, Human
cacacacacacacacacaca

SEQ ID NO: 619648 - RNA, 20 nt, Human
cacacacacacacacacaca

SEQ ID NO: 619649 - RNA, 20 nt, Human
cacacacacacacacacaca

SEQ ID NO: 619650 - RNA, 20 nt, Human
cacacacacacacacacaca

SEQ ID NO: 619651 - RNA, 20 nt, Human
cacacacacacacacacaca

SEQ ID NO: 619652 - RNA, 20 nt, Human
cacacacacacacacacaca

SEQ ID NO: 619653 - RNA, 20 nt, Human
cacacacacacacacacaca

SEQ ID NO: 619654 - RNA, 20 nt, Human
cacacacacacacacacaca

SEQ ID NO: 619655 - RNA, 20 nt, Human
cacacacacacacacacaca

SEQ ID NO: 619656 - RNA, 20 nt, Human
cacacacacacacacacaca

SEQ ID NO: 619657 - RNA, 22 nt, Human
cacacacacacacacacacaca

SEQ ID NO: 619658 - RNA, 22 nt, Human
cacacacacacacacacacaca

SEQ ID NO: 619659 - RNA, 22 nt, Human
cacacacacacacacacacaca

SEQ ID NO: 619660 - RNA, 22 nt, Human
cacacacacacacacacacaca

SEQ ID NO: 619661 - RNA, 26 nt, Human
cacacacacacacacacacacacaca

SEQ ID NO: 619662 - RNA, 26 nt, Human
cacacacacacacacacacacacaca

SEQ ID NO: 619663 - RNA, 26 nt, Human
cacacacacacacacacacacacaca

SEQ ID NO: 619664 - RNA, 26 nt, Human
cacacacacacacacacacacacaca

SEQ ID NO: 619665 - RNA, 26 nt, Human
cacacacacacacacacacacacaca

SEQ ID NO: 619666 - RNA, 26 nt, Human
cacacacacacacacacacacacaca

SEQ ID NO: 619667 - RNA, 30 nt, Human; identical to SEQ ID NO: 326474

SEQ ID NO: 619668 - RNA, 29 nt, Human
cacacacacacacacacacacacacccca

SEQ ID NO: 619669 - RNA, 23 nt, Human
cacacacacacacaccccaagua

SEQ ID NO: 619670 - RNA, 22 nt, Human
caccccaaguacauaagcgcac

SEQ ID NO: 619671 - RNA, 26 nt, Human
cacccugaaaucaaagaucccacucc

SEQ ID NO: 619672 - RNA, 25 nt, Human
cggcccuccuuauuucaguccuuga

SEQ ID NO: 619673 - RNA, 23 nt, Human
gaucccacuccuuucccaaaacu

SEQ ID NO: 619674 - RNA, 20 nt, Human
gaucccacuccuuucccaag

SEQ ID NO: 619675 - RNA, 21 nt, Human
gcacacugugugugugugugu

SEQ ID NO: 619676 - RNA, 21 nt, Human
gugugugugcgugugugugug

SEQ ID NO: 619677 - RNA, 21 nt, Human
gugugugugugugugugcgug

SEQ ID NO: 619678 - RNA, 20 nt, Human
uacguguguguauauguagc

SEQ ID NO: 619679 - RNA, 25 nt, Human
uaugcacacacacacacacacacac

SEQ ID NO: 619680 - RNA, 25 nt, Human
uaugcacacacacacacacacacag

SEQ ID NO: 619681 - RNA, 20 nt, Human
uaugcacacacacacacagu

SEQ ID NO: 619682 - RNA, 19 nt, Human
uaugugcgugugugugugu

SEQ ID NO: 619683 - RNA, 24 nt, Human
uaugugcgugugugugugugugag

SEQ ID NO: 619684 - RNA, 20 nt, Human
ucuguuuucacccugaaauc

SEQ ID NO: 619685 - RNA, 21 nt, Human
ugaaaaaaauucaaaagcacc

SEQ ID NO: 619686 - RNA, 20 nt, Human
ugacuauggcaguucaaaca

SEQ ID NO: 619687 - RNA, 21 nt, Human
ugacuauggcaguucaaacac

SEQ ID NO: 619688 - RNA, 25 nt, Human
ugcacacacacacacacacacacac

SEQ ID NO: 619689 - RNA, 18 nt, Human
ugcacacugugugugugu

SEQ ID NO: 619690 - RNA, 22 nt, Human
ugcaggcaacagucauggguac

SEQ ID NO: 619691 - RNA, 23 nt, Human
ugcguguguguguguguguguaa

SEQ ID NO: 619692 - RNA, 19 nt, Human
uggcauuuguaguguccau

SEQ ID NO: 619693 - RNA, 21 nt, Human
uguaugugcgugugugugugu

SEQ ID NO: 619694 - RNA, 21 nt, Human
ugugcgugugugugugugugu

SEQ ID NO: 619695 - RNA, 21 nt, Human
ugugcgugugugugugugugu

SEQ ID NO: 619696 - RNA, 21 nt, Human
uguguaugugcgugugugugu

SEQ ID NO: 619697 - RNA, 19 nt, Human
ugugugcgugugugugugu

SEQ ID NO: 619698 - RNA, 21 nt, Human
ugugugcgugugugugugugu

SEQ ID NO: 619699 - RNA, 20 nt, Human
uguguguaugugcgugugug

SEQ ID NO: 619700 - RNA, 22 nt, Human
uguguguaugugcgugugugug

SEQ ID NO: 619701 - RNA, 21 nt, Human
ugugugugcgugugugugugu

SEQ ID NO: 619702 - RNA, 21 nt, Human
ugugugugcgugugugugugu

SEQ ID NO: 619703 - RNA, 21 nt, Human
ugugugugcgugugugugugu

SEQ ID NO: 619704 - RNA, 25 nt, Human
ugugugugcgugugugugugugugu

SEQ ID NO: 619705 - RNA, 19 nt, Human
uguguguguaugugcgugu

SEQ ID NO: 619706 - RNA, 31 nt, Human
uguguguguaugugcgugugugugugugugg

SEQ ID NO: 619707 - RNA, 21 nt, Human
ugugugugugcgugugugugu

SEQ ID NO: 619708 - RNA, 25 nt, Human
ugugugugugcgugugugugugugu

SEQ ID NO: 619709 - RNA, 21 nt, Human
uguguguguguaugugcgugu

SEQ ID NO: 619710 - RNA, 21 nt, Human
uguguguguguaugugcgugu

SEQ ID NO: 619711 - RNA, 20 nt, Human
ugugugugugugcgugugug

SEQ ID NO: 619712 - RNA, 22 nt, Human
ugugugugugugcgugugugug

SEQ ID NO: 619713 - RNA, 21 nt, Human
ugugugugugugugcgugugu

SEQ ID NO: 619714 - RNA, 21 nt, Human
ugugugugugugugcgugugu

SEQ ID NO: 619715 - RNA, 20 nt, Human
uguguguguguguguaugug

SEQ ID NO: 619716 - RNA, 21 nt, Human
uguguguguguguguaugugc

SEQ ID NO: 619717 - RNA, 26 nt, Human
uguguguguguguguguaugugcgug

SEQ ID NO: 619718 - RNA, 22 nt, Human
uguguguguguguguguauguu

SEQ ID NO: 619719 - RNA, 18 nt, Human
ugugugugugugugugug

SEQ ID NO: 619720 - RNA, 19 nt, Human
ugugugugugugugugugu

SEQ ID NO: 619721 - RNA, 20 nt, Human
ugugugugugugugugugug

SEQ ID NO: 619722 - RNA, 21 nt, Human
ugugugugugugugugugugc

SEQ ID NO: 619723 - RNA, 21 nt, Human
uucccaaaacuauaaagggaa

SEQ ID NO: 619724 - RNA, 28 nt, Human
uugcacacugugugugugugugugugug

SEQ ID NO: 619725 - RNA, 21 nt, Human
uuuguaguguccauucugaga

SEQ ID NO: 619726 - RNA, 24 nt, Human
uuuuuuuuuuuuuuuuucccuuuu

SEQ ID NO: 619727 - RNA, 24 nt, Human
aaaaacaaaacaaaacaaaaaaga

SEQ ID NO: 619728 - RNA, 22 nt, Human
aaaacaaaaaccaaaaaaagca

SEQ ID NO: 619729 - RNA, 21 nt, Human
aaaacaaaacaaaacaaaaac

SEQ ID NO: 619730 - RNA, 27 nt, Human
aaacaaaacaaaaaccaaaaaaagcaa

SEQ ID NO: 619731 - RNA, 23 nt, Human
aaacaaaacaaaacaaaaaccaa

SEQ ID NO: 619732 - RNA, 24 nt, Human
aaacaaaacaaaacaaaaaccaaa

SEQ ID NO: 619733 - RNA, 25 nt, Human
aaacaaaacaaaacaaaaaccaaaa

SEQ ID NO: 619734 - RNA, 23 nt, Human
aaacaagaaauuguccuuuccaa

SEQ ID NO: 619735 - RNA, 25 nt, Human
aaacaagaaauuguccuuuccaaaa

SEQ ID NO: 619736 - RNA, 23 nt, Human
aaagaaccaauuaauucucacca

SEQ ID NO: 619737 - RNA, 24 nt, Human
aaagugcugggauuagagguguga

SEQ ID NO: 619738 - RNA, 26 nt, Human
aacaaaacaaaaaccaaaaaaagcaa

SEQ ID NO: 619739 - RNA, 22 nt, Human
aacaaaacaaaacaaaaaccaa

SEQ ID NO: 619740 - RNA, 21 nt, Human
aacaaagcgagacuccgucuc

SEQ ID NO: 619741 - RNA, 21 nt, Human
aacauggugaauccccauuuc

SEQ ID NO: 619742 - RNA, 25 nt, Human
aagcgauucuccagccucagccucc

SEQ ID NO: 619743 - RNA, 23 nt, Human
aagguggguggaucacgagguca

SEQ ID NO: 619744 - RNA, 20 nt, Human
aaguaaggauaggccccaaa

SEQ ID NO: 619745 - RNA, 20 nt, Human
aaguagcugggauuacaagc

SEQ ID NO: 619746 - RNA, 26 nt, Human
aaguagcugggauuacaagcgccugc

SEQ ID NO: 619747 - RNA, 18 nt, Human
aagugcugggauuagagg

SEQ ID NO: 619748 - RNA, 19 nt, Human
aagugcugggauuagaggu

SEQ ID NO: 619749 - RNA, 26 nt, Human
aagugcugggauuagaggugugagcc

SEQ ID NO: 619750 - RNA, 24 nt, Human
aauugccugaacccaggaggcaga

SEQ ID NO: 619751 - RNA, 24 nt, Human
aauuuuguauuuuucguagagaug

SEQ ID NO: 619752 - RNA, 19 nt, Human
acaaaacaaaacaaaaacc

SEQ ID NO: 619753 - RNA, 24 nt, Human
acaaaacaaaacaaaaaccaaaaa

SEQ ID NO: 619754 - RNA, 23 nt, Human
acaaagcgagacuccgucucaaa

SEQ ID NO: 619755 - RNA, 24 nt, Human
acaaagcgagacuccgucucaaaa

SEQ ID NO: 619756 - RNA, 24 nt, Human
acagccucuaauguuaccaaccuu

SEQ ID NO: 619757 - RNA, 24 nt, Human
acccaggaggcagagguugcagug

SEQ ID NO: 619758 - RNA, 22 nt, Human
acggaguuucgcucuucucacc

SEQ ID NO: 619759 - RNA, 18 nt, Human
acugcacuccagccuggg

SEQ ID NO: 619760 - RNA, 23 nt, Human
agagaugggguuucaccauuugg

SEQ ID NO: 619761 - RNA, 24 nt, Human
agagguugcagugagccgagaucg

SEQ ID NO: 619762 - RNA, 24 nt, Human
agcacuuugggaggccaagguggg

SEQ ID NO: 619763 - RNA, 23 nt, Human
agccucagccucccaaguagcug

SEQ ID NO: 619764 - RNA, 24 nt, Human
agccugggaaacaaagcgagacuc

SEQ ID NO: 619765 - RNA, 24 nt, Human
agcuacucaggaggcugagguggg

SEQ ID NO: 619766 - RNA, 23 nt, Human
agcugagcaugguggcaugugcc

SEQ ID NO: 619767 - RNA, 24 nt, Human
agcugggauuacaagcgccugcua

SEQ ID NO: 619768 - RNA, 21 nt, Human
aggcagagguugcagugagcc

SEQ ID NO: 619769 - RNA, 24 nt, Human
aggcagagguugcagugagccgag

SEQ ID NO: 619770 - RNA, 21 nt, Human
aggccaagguggguggaucac

SEQ ID NO: 619771 - RNA, 24 nt, Human
aggcgugguggcucaugccuguaa

SEQ ID NO: 619772 - RNA, 20 nt, Human
aggcugaggugggagaauug

SEQ ID NO: 619773 - RNA, 18 nt, Human
aggugggagaauugccug

SEQ ID NO: 619774 - RNA, 24 nt, Human
agguggguggaucacgaggucagg

SEQ ID NO: 619775 - RNA, 18 nt, Human
auacagugggauuagaua

SEQ ID NO: 619776 - RNA, 20 nt, Human
aucacgaggucaggaguucc

SEQ ID NO: 619777 - RNA, 24 nt, Human
aucgugccacugcacuccagccug

SEQ ID NO: 619778 - RNA, 19 nt, Human
augccuguaaucccagcac

SEQ ID NO: 619779 - RNA, 24 nt, Human
augggguuucaccauuuggccagg

SEQ ID NO: 619780 - RNA, 25 nt, Human
caaaaaaagcaaacauauuuuuuca

SEQ ID NO: 619781 - RNA, 23 nt, Human
caaaaacaaaacaaaacaaaaac

SEQ ID NO: 619782 - RNA, 24 nt, Human
caaaaacaaaacaaaacaaaaacc

SEQ ID NO: 619783 - RNA, 22 nt, Human
caaaacaaaaaccaaaaaaagc

SEQ ID NO: 619784 - RNA, 24 nt, Human
caaaacaaaaaccaaaaaaagcaa

SEQ ID NO: 619785 - RNA, 20 nt, Human
caaaacaaaacaaaaaccaa

SEQ ID NO: 619786 - RNA, 26 nt, Human
caaacuccugaccuugggugauccaa

SEQ ID NO: 619787 - RNA, 24 nt, Human
caaagugcugggauuagaggugug

SEQ ID NO: 619788 - RNA, 19 nt, Human
cacaaauggccaaacaaga

SEQ ID NO: 619789 - RNA, 23 nt, Human
cacaacuggacucagagccccca

SEQ ID NO: 619790 - RNA, 20 nt, Human
caccauuuggccaggcuggu

SEQ ID NO: 619791 - RNA, 23 nt, Human
caccauuuggccaggcuggucuc

SEQ ID NO: 619792 - RNA, 18 nt, Human
cacccgcgcaccuaggag

SEQ ID NO: 619793 - RNA, 23 nt, Human
caccuaccucagccucccaaagu

SEQ ID NO: 619794 - RNA, 21 nt, Human
cacugcaaccuucaccuccug

SEQ ID NO: 619795 - RNA, 23 nt, Human
cacugcaaccuucaccuccuggg

SEQ ID NO: 619796 - RNA, 24 nt, Human
cacugcaaccuucaccuccugggu

SEQ ID NO: 619797 - RNA, 18 nt, Human
cacugcacuccagccugg

SEQ ID NO: 619798 - RNA, 19 nt, Human
cacugcacuccagccuggg

SEQ ID NO: 619799 - RNA, 19 nt, Human
cacugcacuccagccuggg

SEQ ID NO: 619800 - RNA, 24 nt, Human
cacugcacuccagccugggaaaca

SEQ ID NO: 619801 - RNA, 21 nt, Human
cagcacuuugggaggccaagg

SEQ ID NO: 619802 - RNA, 24 nt, Human
cagcacuuugggaggccaaggugg

SEQ ID NO: 619803 - RNA, 25 nt, Human
cagccucagccucccaaguagcugg

SEQ ID NO: 619804 - RNA, 22 nt, Human
cagccucuaauguuaccaaccu

SEQ ID NO: 619805 - RNA, 24 nt, Human
cagcuacucaggaggcugaggugg

SEQ ID NO: 619806 - RNA, 20 nt, Human
caugccuguaaucccagcac

SEQ ID NO: 619807 - RNA, 24 nt, Human
caugccuguaaucccagcacuuug

SEQ ID NO: 619808 - RNA, 20 nt, Human
ccaaagugcugggauuagag

SEQ ID NO: 619809 - RNA, 20 nt, Human
ccaaagugcugggauuagag

SEQ ID NO: 619810 - RNA, 21 nt, Human
ccaaagugcugggauuagagg

SEQ ID NO: 619811 - RNA, 24 nt, Human
ccaaagugcugggauuagaggugu

SEQ ID NO: 619812 - RNA, 26 nt, Human
ccaccuaccucagccucccaaagugc

SEQ ID NO: 619813 - RNA, 19 nt, Human
ccacugcacuccagccugg

SEQ ID NO: 619814 - RNA, 20 nt, Human
ccacugcacuccagccuggg

SEQ ID NO: 619815 - RNA, 24 nt, Human
ccacugcacuccagccugggaaac

SEQ ID NO: 619816 - RNA, 23 nt, Human
ccagccucagccucccaaguagc

SEQ ID NO: 619817 - RNA, 19 nt, Human
cccaaguagcugggauuac

SEQ ID NO: 619818 - RNA, 21 nt, Human
cccaggcuggagugcaauggc

SEQ ID NO: 619819 - RNA, 22 nt, Human
cccccagaucggugcaaccagc

SEQ ID NO: 619820 - RNA, 18 nt, Human
cccgagcccgggaagccc

SEQ ID NO: 619821 - RNA, 19 nt, Human
cccgggaagcccccagauc

SEQ ID NO: 619822 - RNA, 22 nt, Human
ccgucucaaaaacaaaacaaaa

SEQ ID NO: 619823 - RNA, 24 nt, Human
ccuccuggguucaagcgauucucc

SEQ ID NO: 619824 - RNA, 24 nt, Human
ccugaccaacauggugaaucccca

SEQ ID NO: 619825 - RNA, 24 nt, Human
ccugaccuugggugauccaccuac

SEQ ID NO: 619826 - RNA, 22 nt, Human
ccuguaaucccagcacuuuggg

SEQ ID NO: 619827 - RNA, 21 nt, Human
ccuguaaucccagcuacucag

SEQ ID NO: 619828 - RNA, 19 nt, Human
ccuucaccuccuggguuca

SEQ ID NO: 619829 - RNA, 24 nt, Human
cgagaucgugccacugcacuccag

SEQ ID NO: 619830 - RNA, 24 nt, Human
cucagccucccaaguagcugggau

SEQ ID NO: 619831 - RNA, 18 nt, Human
cucaggaggcugaggugg

SEQ ID NO: 619832 - RNA, 24 nt, Human
cucaugccuguaaucccagcacuu

SEQ ID NO: 619833 - RNA, 24 nt, Human
cuccagccucagccucccaaguag

SEQ ID NO: 619834 - RNA, 21 nt, Human
cuccuggguucaagcgauucu

SEQ ID NO: 619835 - RNA, 19 nt, Human
cucuucucacccaggcugg

SEQ ID NO: 619836 - RNA, 22 nt, Human
cucuucucacccaggcuggagu

SEQ ID NO: 619837 - RNA, 23 nt, Human
cugcaaccuucaccuccuggguu

SEQ ID NO: 619838 - RNA, 21 nt, Human
cuucucgagaagccgggaauu

SEQ ID NO: 619839 - RNA, 22 nt, Human
gaaggaagaaugccugccuggc

SEQ ID NO: 619840 - RNA, 24 nt, Human
gaccuugggugauccaccuaccuc

SEQ ID NO: 619841 - RNA, 19 nt, Human
gagaacagugcaaagaacc

SEQ ID NO: 619842 - RNA, 25 nt, Human
gagaacagugcaaagaaccaauuaa

SEQ ID NO: 619843 - RNA, 18 nt, Human
gagaugggguuucaccau

SEQ ID NO: 619844 - RNA, 23 nt, Human
gagaugggguuucaccauuuggc

SEQ ID NO: 619845 - RNA, 24 nt, Human
gagcaugguggcaugugccuguaa

SEQ ID NO: 619846 - RNA, 21 nt, Human
gaucacgaggucaggaguucg

SEQ ID NO: 619847 - RNA, 22 nt, Human
gaucacgaggucaggaguucga

SEQ ID NO: 619848 - RNA, 24 nt, Human
gaucacgaggucaggaguucgaga

SEQ ID NO: 619849 - RNA, 20 nt, Human
gaugggguuucaccauuugg

SEQ ID NO: 619850 - RNA, 24 nt, Human
gauuacaagcgccugcuaccaugc

SEQ ID NO: 619851 - RNA, 18 nt, Human
gauuagaggugugagcca

SEQ ID NO: 619852 - RNA, 22 nt, Human
gauuagaggugugagccacugc

SEQ ID NO: 619853 - RNA, 22 nt, Human
gauuagaggugugagccacugc

SEQ ID NO: 619854 - RNA, 22 nt, Human
gcaaagaaccaauuaauucuca

SEQ ID NO: 619855 - RNA, 20 nt, Human
gccgagaucgugccacugca

SEQ ID NO: 619856 - RNA, 18 nt, Human
gccugggaaacaaagcga

SEQ ID NO: 619857 - RNA, 24 nt, Human
gcgauucuccagccucagccuccc

SEQ ID NO: 619858 - RNA, 22 nt, Human
gcucacagccucuaauguuacc

SEQ ID NO: 619859 - RNA, 24 nt, Human
gcucuucucacccaggcuggagug

SEQ ID NO: 619860 - RNA, 26 nt, Human
gcuggagugcaauggcgucaucuccg

SEQ ID NO: 619861 - RNA, 22 nt, Human
ggaggcagagguugcagugagc

SEQ ID NO: 619862 - RNA, 18 nt, Human
ggccccaaauguggacag

SEQ ID NO: 619863 - RNA, 23 nt, Human
ggcuggucucaaacuccugaccu

SEQ ID NO: 619864 - RNA, 20 nt, Human
gggauauaccuccuugaggc

SEQ ID NO: 619865 - RNA, 21 nt, Human
gggguuucaccauuuggccag

SEQ ID NO: 619866 - RNA, 22 nt, Human
ggguucaagcgauucuccagcc

SEQ ID NO: 619867 - RNA, 23 nt, Human
ggugauccaccuaccucagccuc

SEQ ID NO: 619868 - RNA, 23 nt, Human
gguggaucacgaggucaggaguu

SEQ ID NO: 619869 - RNA, 24 nt, Human
gguggcaugugccuguaaucccag

SEQ ID NO: 619870 - RNA, 24 nt, Human
gguggcucaugccuguaaucccag

SEQ ID NO: 619871 - RNA, 21 nt, Human
guaacacaagcucacagccuc

SEQ ID NO: 619872 - RNA, 19 nt, Human
guagagaugggguuucacc

SEQ ID NO: 619873 - RNA, 21 nt, Human
guagagaugggguuucaccau

SEQ ID NO: 619874 - RNA, 22 nt, Human
gucucaaaaacaaaacaaaaca

SEQ ID NO: 619875 - RNA, 24 nt, Human
gugauccaccuaccucagccuccc

SEQ ID NO: 619876 - RNA, 23 nt, Human
guggaucacgaggucaggaguuc

SEQ ID NO: 619877 - RNA, 23 nt, Human
guggcucaugccuguaaucccag

SEQ ID NO: 619878 - RNA, 24 nt, Human
guugcagugagccgagaucgugcc

SEQ ID NO: 619879 - RNA, 24 nt, Human
uaaaacauauuuuuuuggccaggc

SEQ ID NO: 619880 - RNA, 21 nt, Human
uaaagaaaggcugucaugaaa

SEQ ID NO: 619881 - RNA, 24 nt, Human
uaaauuuuguauuuuucguagaga

SEQ ID NO: 619882 - RNA, 21 nt, Human
uaauuuauucugguuuccccu

SEQ ID NO: 619883 - RNA, 18 nt, Human
uacccgagcccgggaagc

SEQ ID NO: 619884 - RNA, 23 nt, Human
uacccgagcccgggaagccccca

SEQ ID NO: 619885 - RNA, 24 nt, Human
uaccucagccucccaaagugcugg

SEQ ID NO: 619886 - RNA, 21 nt, Human
uaggccccaaauguggacaga

SEQ ID NO: 619887 - RNA, 24 nt, Human
uauuuuuuuuuugagacggaguuu

SEQ ID NO: 619888 - RNA, 22 nt, Human
ucaccauuuggccaggcugguc

SEQ ID NO: 619889 - RNA, 18 nt, Human
ucacccaggcuggagugc

SEQ ID NO: 619890 - RNA, 20 nt, Human
ucacccaggcuggagugcaa

SEQ ID NO: 619891 - RNA, 18 nt, Human
ucacgaggucaggaguuc

SEQ ID NO: 619892 - RNA, 24 nt, Human
ucacgaggucaggaguucgagaau

SEQ ID NO: 619893 - RNA, 24 nt, Human
ucacugcaaccuucaccuccuggg

SEQ ID NO: 619894 - RNA, 25 nt, Human
ucacugcaaccuucaccuccugggu

SEQ ID NO: 619895 - RNA, 27 nt, Human
ucacugcaaccuucaccuccuggguuc

SEQ ID NO: 619896 - RNA, 18 nt, Human
ucagccucccaaagugcu

SEQ ID NO: 619897 - RNA, 18 nt, Human
ucagccucccaaguagcu

SEQ ID NO: 619898 - RNA, 20 nt, Human
ucagccucccaaguagcugg

SEQ ID NO: 619899 - RNA, 22 nt, Human
ucaugccuguaaucccagcacu

SEQ ID NO: 619900 - RNA, 20 nt, Human
uccagccugggaaacaaagc

SEQ ID NO: 619901 - RNA, 23 nt, Human
ucccaaagugcugggauuagagg

SEQ ID NO: 619902 - RNA, 22 nt, Human
uccgguuacccgagcccgggaa

SEQ ID NO: 619903 - RNA, 21 nt, Human
uccuggguucaagcgauucuc

SEQ ID NO: 619904 - RNA, 24 nt, Human
uccuggguucaagcgauucuccag

SEQ ID NO: 619905 - RNA, 23 nt, Human
ucgcucuucucacccaggcugga

SEQ ID NO: 619906 - RNA, 21 nt, Human
ucguagagaugggguuucacc

SEQ ID NO: 619907 - RNA, 23 nt, Human
ucguagagaugggguuucaccau

SEQ ID NO: 619908 - RNA, 25 nt, Human
ucguagagaugggguuucaccauuu

SEQ ID NO: 619909 - RNA, 23 nt, Human
ucgugccacugcacuccagccug

SEQ ID NO: 619910 - RNA, 19 nt, Human
ugaccuugggugauccacc

SEQ ID NO: 619911 - RNA, 20 nt, Human
ugaccuugggugauccaccu

SEQ ID NO: 619912 - RNA, 22 nt, Human
ugagccgagaucgugccacugc

SEQ ID NO: 619913 - RNA, 18 nt, Human
ugaggugggagaauugcc

SEQ ID NO: 619914 - RNA, 24 nt, Human
ugauccaccuaccucagccuccca

SEQ ID NO: 619915 - RNA, 25 nt, Human
ugcccggcuaaauuuuguauuuuuc

SEQ ID NO: 619916 - RNA, 23 nt, Human
ugccuguaaucccagcacuuugg

SEQ ID NO: 619917 - RNA, 23 nt, Human
ugccuguaaucccagcacuuugg

SEQ ID NO: 619918 - RNA, 24 nt, Human
ugccuguaaucccagcuacucagg

SEQ ID NO: 619919 - RNA, 22 nt, Human
uggaucacgaggucaggaguuc

SEQ ID NO: 619920 - RNA, 21 nt, Human
uggcaugugccuguaauccca

SEQ ID NO: 619921 - RNA, 22 nt, Human
uggcaugugccuguaaucccag

SEQ ID NO: 619922 - RNA, 24 nt, Human
uggcaugugccuguaaucccagcu

SEQ ID NO: 619923 - RNA, 24 nt, Human
uggccaggcgugguggcucaugcc

SEQ ID NO: 619924 - RNA, 24 nt, Human
uggccaggcuggucucaaacuccu

SEQ ID NO: 619925 - RNA, 24 nt, Human
uggcucaugccuguaaucccagca

SEQ ID NO: 619926 - RNA, 23 nt, Human
ugggaggccaagguggguggauc

SEQ ID NO: 619927 - RNA, 24 nt, Human
ugggaggccaagguggguggauca

SEQ ID NO: 619928 - RNA, 22 nt, Human
ugggauuacaagcgccugcuac

SEQ ID NO: 619929 - RNA, 24 nt, Human
ugggauuacaagcgccugcuacca

SEQ ID NO: 619930 - RNA, 25 nt, Human
ugggauuacaagcgccugcuaccau

SEQ ID NO: 619931 - RNA, 19 nt, Human
ugggauuagaggugugagc

SEQ ID NO: 619932 - RNA, 22 nt, Human
ugggauuagaggugugagccac

SEQ ID NO: 619933 - RNA, 22 nt, Human
ugggauuagaggugugagccac

SEQ ID NO: 619934 - RNA, 24 nt, Human
ugggauuagaggugugagccacug

SEQ ID NO: 619935 - RNA, 23 nt, Human
ugggguuucaccauuuggccagg

SEQ ID NO: 619936 - RNA, 24 nt, Human
ugguggcaugugccuguaauccca

SEQ ID NO: 619937 - RNA, 24 nt, Human
ugguggcucaugccuguaauccca

SEQ ID NO: 619938 - RNA, 21 nt, Human
uguuaccaaccuuguacacaa

SEQ ID NO: 619939 - RNA, 24 nt, Human
uuagauaccagcacuccgguuacc

SEQ ID NO: 619940 - RNA, 24 nt, Human
uuagcugagcaugguggcaugugc

SEQ ID NO: 619941 - RNA, 23 nt, Human
uucaagcgauucuccagccucag

SEQ ID NO: 619942 - RNA, 24 nt, Human
uucgcucuucucacccaggcugga

SEQ ID NO: 619943 - RNA, 24 nt, Human
uucguagagaugggguuucaccau

SEQ ID NO: 619944 - RNA, 18 nt, Human
uugcagugagccgagauc

SEQ ID NO: 619945 - RNA, 21 nt, Human
uugcagugagccgagaucgug

SEQ ID NO: 619946 - RNA, 22 nt, Human
uugcagugagccgagaucgugc

SEQ ID NO: 619947 - RNA, 26 nt, Human
uuuaaaacauauuuuuuuggccaggc

SEQ ID NO: 619948 - RNA, 23 nt, Human
uuucaccauuuggccaggcuggu

SEQ ID NO: 619949 - RNA, 24 nt, Human
uuucgcucuucucacccaggcugg

SEQ ID NO: 619950 - RNA, 23 nt, Human
uuucuacuaaaaauacaaaaauu

SEQ ID NO: 619951 - RNA, 18 nt, Human
uuuggccaggcguggugg

SEQ ID NO: 619952 - RNA, 24 nt, Human
uuuggccaggcgugguggcucaug

SEQ ID NO: 619953 - RNA, 24 nt, Human
uuuuucguagagaugggguuucac

SEQ ID NO: 619954 - RNA, 23 nt, Human
uuuuuuuuuugagacggaguuuc

SEQ ID NO: 619955 - RNA, 20 nt, Human
uuuuuuuuuuuuuuuucucu

SEQ ID NO: 619956 - RNA, 20 nt, Human
acaugagucacaauuacacc

SEQ ID NO: 619957 - RNA, 26 nt, Human
accaacaccaccacuccaguguucug

SEQ ID NO: 619958 - RNA, 20 nt, Human
auccaauguuuucaccaaca

SEQ ID NO: 619959 - RNA, 22 nt, Human
auuggagaaacuuuaaugggga

SEQ ID NO: 619960 - RNA, 22 nt, Human
caaaacugaauaugaaagcuga

SEQ ID NO: 619961 - RNA, 20 nt, Human
cccaaucucgaguugccggc

SEQ ID NO: 619962 - RNA, 18 nt, Human
cgaguugccggcuugaaa

SEQ ID NO: 619963 - RNA, 18 nt, Human
gggaaguuuuaaaaacuc

SEQ ID NO: 619964 - RNA, 21 nt, Human
uaaaaaugagcccaaucucga

SEQ ID NO: 619965 - RNA, 18 nt, Human
ucacaauuacaccaggca

SEQ ID NO: 619966 - RNA, 23 nt, Human
uggcaaaacugaauaugaaagcu

SEQ ID NO: 619967 - RNA, 25 nt, Human
uggcaaaacugaauaugaaagcuga

SEQ ID NO: 619968 - RNA, 18 nt, Human
uggugagcagguacuugg

SEQ ID NO: 619969 - RNA, 20 nt, Human
uguuuucaccaacaccacca

SEQ ID NO: 619970 - RNA, 18 nt, Human
uuuggcaaaacugaauau

SEQ ID NO: 619971 - RNA, 23 nt, Human
uuuuuuuuuuuuuugaaauugga

SEQ ID NO: 619972 - RNA, 18 nt, Human
uuuuuuuuuuuuuuuuug

SEQ ID NO: 619973 - RNA, 19 nt, Human
aaaaaaaaaaaaaaaggca

SEQ ID NO: 619974 - RNA, 25 nt, Human
aaaaagaagagaauaaagcacccag

SEQ ID NO: 619975 - RNA, 21 nt, Human
aaauaaagaaaaagaagagaa

SEQ ID NO: 619976 - RNA, 19 nt, Human
aagaagagaauaaagcacc

SEQ ID NO: 619977 - RNA, 20 nt, Human
aagaagagaauaaagcaccc

SEQ ID NO: 619978 - RNA, 19 nt, Human
aagcacccugcacaggaag

SEQ ID NO: 619979 - RNA, 19 nt, Human
acaggaagacuucugcgug

SEQ ID NO: 619980 - RNA, 18 nt, Human
acuccgaggucugcugug

SEQ ID NO: 619981 - RNA, 18 nt, Human
agaaaaagaagagaauaa

SEQ ID NO: 619982 - RNA, 21 nt, Human
agaagaacgccugggaagaaa

SEQ ID NO: 619983 - RNA, 18 nt, Human
aggcaggggaugggggug

SEQ ID NO: 619984 - RNA, 18 nt, Human
aggcaggggaugggggug

SEQ ID NO: 619985 - RNA, 19 nt, Human
aggcaggggaugggggugg

SEQ ID NO: 619986 - RNA, 21 nt, Human
aggcaggggaugggggugggg

SEQ ID NO: 619987 - RNA, 22 nt, Human
aggcaggggauggggguggggg

SEQ ID NO: 619988 - RNA, 23 nt, Human
aggcaggggaugggggugggggc

SEQ ID NO: 619989 - RNA, 24 nt, Human
aggcaggggaugggggugggggcg

SEQ ID NO: 619990 - RNA, 29 nt, Human
aggcaggggaugggggugggggggacccc

SEQ ID NO: 619991 - RNA, 19 nt, Human
agggcaaucuguagcugcc

SEQ ID NO: 619992 - RNA, 18 nt, Human
aucaagaauaaauugcua

SEQ ID NO: 619993 - RNA, 22 nt, Human
augaauauucauaaaaccucau

SEQ ID NO: 619994 - RNA, 20 nt, Human
caauuccacaucaggaagga

SEQ ID NO: 619995 - RNA, 18 nt, Human
cacccugcacaggaagac

SEQ ID NO: 619996 - RNA, 22 nt, Human
cacucuguucuuagcugugcuc

SEQ ID NO: 619997 - RNA, 20 nt, Human
ccaugggccucucucacucu

SEQ ID NO: 619998 - RNA, 23 nt, Human
ccuucaaaaacaugaauauucau

SEQ ID NO: 619999 - RNA, 26 nt, Human
cuauacaaaaaaaaaaaaaaaaaaaa

SEQ ID NO: 620000 - RNA, 21 nt, Human
cuccgaggucugcuguggugu

SEQ ID NO: 620001 - RNA, 21 nt, Human
gauuaccaagaaauggaucug

SEQ ID NO: 620002 - RNA, 25 nt, Human
uaaagcacccagagaagagggaguc

SEQ ID NO: 620003 - RNA, 19 nt, Human
uaagugaauauuugugaaa

SEQ ID NO: 620004 - RNA, 28 nt, Human
uacaaaaaaaaaaaaaaaaaaaaggcag

SEQ ID NO: 620005 - RNA, 22 nt, Human
uaccaagaaauggaucuguuuc

SEQ ID NO: 620006 - RNA, 25 nt, Human
uauacaaaaaaaaaaaaaaaaaaaa

SEQ ID NO: 620007 - RNA, 26 nt, Human
uauacaaaaaaaaaaaaaaaaaaaag

SEQ ID NO: 620008 - RNA, 20 nt, Human
uaugcaaaggucaccgacca

SEQ ID NO: 620009 - RNA, 25 nt, Human
uauucauaaaaccucauuccaauca

SEQ ID NO: 620010 - RNA, 25 nt, Human
uauuucauuuaucuccaaaaacuca

SEQ ID NO: 620011 - RNA, 19 nt, Human
ucaaaaacaugaauauuca

SEQ ID NO: 620012 - RNA, 21 nt, Human
ucaaaguauucucucuuaaaa

SEQ ID NO: 620013 - RNA, 22 nt, Human
ucacucuguucuuagcugugcu

SEQ ID NO: 620014 - RNA, 19 nt, Human
ucagccaugggccucucuc

SEQ ID NO: 620015 - RNA, 22 nt, Human
ucuauacaaaaaaaaaaaaaaa

SEQ ID NO: 620016 - RNA, 25 nt, Human
ucuauacaaaaaaaaaaaaaaaaaa

SEQ ID NO: 620017 - RNA, 26 nt, Human
ucucacucuguucuuagaggucagac

SEQ ID NO: 620018 - RNA, 21 nt, Human
ucugcugugguguuacuugug

SEQ ID NO: 620019 - RNA, 19 nt, Human
ugaauauucauaaaaccuc

SEQ ID NO: 620020 - RNA, 24 nt, Human
ugcaaaggguuggaggaagaccaa

SEQ ID NO: 620021 - RNA, 19 nt, Human
ugggaagaaaagauguugc

SEQ ID NO: 620022 - RNA, 21 nt, Human
ugggagaagguaaaaaccaua

SEQ ID NO: 620023 - RNA, 22 nt, Human
ugggccucucucacucuguucu

SEQ ID NO: 620024 - RNA, 21 nt, Human
ugguaaaaucagccaugggcc

SEQ ID NO: 620025 - RNA, 20 nt, Human
ugguauaaauauacauauga

SEQ ID NO: 620026 - RNA, 23 nt, Human
uguguguccaguuauuucauuua

SEQ ID NO: 620027 - RNA, 24 nt, Human
uuccccaugggagaagguaaaaac

SEQ ID NO: 620028 - RNA, 20 nt, Human
uuuuuuuuuuuuuuuuccac

SEQ ID NO: 620029 - RNA, 22 nt, Human
uuuuuuuuuuuuuuuuccacuu

SEQ ID NO: 620030 - RNA, 27 nt, Human
uuuuuuuuuuuuuuuuuccacuugauu

SEQ ID NO: 620031 - RNA, 21 nt, Human
aaaaaaaaaaagcuuaaagaa

SEQ ID NO: 620032 - RNA, 20 nt, Human
aaaauaaaacaaaaccccca

SEQ ID NO: 620033 - RNA, 22 nt, Human
aaauggaaaaaaaacuaguucc

SEQ ID NO: 620034 - RNA, 18 nt, Human
aacaggacaaaauaaaaa

SEQ ID NO: 620035 - RNA, 22 nt, Human
aacccagagaaaaugaucaagg

SEQ ID NO: 620036 - RNA, 22 nt, Human
aagcauccggaacggcuccgaa

SEQ ID NO: 620037 - RNA, 25 nt, Human
aagcauccggaacggcuccgaaccc

SEQ ID NO: 620038 - RNA, 27 nt, Human
aagccaauauagucuugauaccaaaau

SEQ ID NO: 620039 - RNA, 23 nt, Human
aaggaagagacaugcggggaaga

SEQ ID NO: 620040 - RNA, 22 nt, Human
acaacaggacaaaauaaaaaca

SEQ ID NO: 620041 - RNA, 22 nt, Human
acagagaauaaauucucucuca

SEQ ID NO: 620042 - RNA, 28 nt, Human
acuccacucccaaacccagagaaaauga

SEQ ID NO: 620043 - RNA, 21 nt, Human
agaaacugaaacaaugucuuu

SEQ ID NO: 620044 - RNA, 20 nt, Human
agaggaaggcauuaacagau

SEQ ID NO: 620045 - RNA, 23 nt, Human
agauguaaucaagaaaacauugu

SEQ ID NO: 620046 - RNA, 19 nt, Human
agauuccaauaaacuacag

SEQ ID NO: 620047 - RNA, 22 nt, Human
aggaagagacaugcggggaaga

SEQ ID NO: 620048 - RNA, 25 nt, Human
aggcauuaacagauuccaauaaacu

SEQ ID NO: 620049 - RNA, 20 nt, Human
auaaaauaaaacaaaacccc

SEQ ID NO: 620050 - RNA, 24 nt, Human
auaaaauuaaaaugagaaacuaac

SEQ ID NO: 620051 - RNA, 21 nt, Human
augacauuaaaaaaaaaaagc

SEQ ID NO: 620052 - RNA, 19 nt, Human
augagaaacuaacaugaua

SEQ ID NO: 620053 - RNA, 18 nt, Human
cagcacaauuuuaagggc

SEQ ID NO: 620054 - RNA, 22 nt, Human
cauuguaccuaaauuuccucua

SEQ ID NO: 620055 - RNA, 26 nt, Human
ccaauauuauuuauuugcugcagccc

SEQ ID NO: 620056 - RNA, 22 nt, Human
cccaaacccagagaaaaugauc

SEQ ID NO: 620057 - RNA, 23 nt, Human
cgagcagcuccugaaaaagccag

SEQ ID NO: 620058 - RNA, 18 nt, Human
cucaucauuccauuaaac

SEQ ID NO: 620059 - RNA, 19 nt, Human
cucaugugcagggagcagu

SEQ ID NO: 620060 - RNA, 22 nt, Human
cugcagacaaaauuguauacga

SEQ ID NO: 620061 - RNA, 21 nt, Human
cuucagauguaaucaagaaaa

SEQ ID NO: 620062 - RNA, 26 nt, Human
gagcacaacaggacaaaauaaaaaca

SEQ ID NO: 620063 - RNA, 22 nt, Human
gagcagcuccugaaaaagccag

SEQ ID NO: 620064 - RNA, 21 nt, Human
gagccuguuuucuuugccaga

SEQ ID NO: 620065 - RNA, 24 nt, Human
gauaaaauaaaacaaaacccccaa

SEQ ID NO: 620066 - RNA, 18 nt, Human
gauaauucaucugaucua

SEQ ID NO: 620067 - RNA, 28 nt, Human
guaauauagugugagucugagggccccc

SEQ ID NO: 620068 - RNA, 26 nt, Human
gucaaauccaugccaucuuaaacccu

SEQ ID NO: 620069 - RNA, 22 nt, Human
uaaaacaaaacccccaauaggu

SEQ ID NO: 620070 - RNA, 22 nt, Human
uaaaacuguacauuuaucccua

SEQ ID NO: 620071 - RNA, 25 nt, Human
uaaaagagaagagacuucagaugua

SEQ ID NO: 620072 - RNA, 21 nt, Human
uacacaguguuaaaaauauuc

SEQ ID NO: 620073 - RNA, 19 nt, Human
uacaguaacacguaaugaa

SEQ ID NO: 620074 - RNA, 18 nt, Human
uaccagguauuacaucau

SEQ ID NO: 620075 - RNA, 21 nt, Human
uaccagguauuacaucauucu

SEQ ID NO: 620076 - RNA, 18 nt, Human
uagguucaaggccuuuug

SEQ ID NO: 620077 - RNA, 23 nt, Human
uagugugagucugugguauuugg

SEQ ID NO: 620078 - RNA, 22 nt, Human
uauaccaaaaaaaaaaaaaaau

SEQ ID NO: 620079 - RNA, 21 nt, Human
ucaaagucuacaaaguaugcc

SEQ ID NO: 620080 - RNA, 21 nt, Human
ucacauaauacuccacuccca

SEQ ID NO: 620081 - RNA, 23 nt, Human
ucacauaauacuccacucccaaa

SEQ ID NO: 620082 - RNA, 25 nt, Human
ucaguauaccaaaaaaaaaaaaaaa

SEQ ID NO: 620083 - RNA, 26 nt, Human
ucaguauaccaaaaaaaaaaaaaaau

SEQ ID NO: 620084 - RNA, 19 nt, Human
uccauaagccaugaauucc

SEQ ID NO: 620085 - RNA, 22 nt, Human
ucccaaacccagagaaaaugau

SEQ ID NO: 620086 - RNA, 21 nt, Human
uccgaacccggaaaaaaaaag

SEQ ID NO: 620087 - RNA, 23 nt, Human
ucucagaaacugaaacaaugucu

SEQ ID NO: 620088 - RNA, 21 nt, Human
ucuuucugaguccuucaaaag

SEQ ID NO: 620089 - RNA, 20 nt, Human
ugaaguuuuuagaaaaagau

SEQ ID NO: 620090 - RNA, 19 nt, Human
ugauuuccauaagccauga

SEQ ID NO: 620091 - RNA, 21 nt, Human
ugcauagauuuuuuuccugau

SEQ ID NO: 620092 - RNA, 24 nt, Human
uggaaaaaaaacuaguuccaaaga

SEQ ID NO: 620093 - RNA, 26 nt, Human
uggaaaaaaaacuaguuccaaagacu

SEQ ID NO: 620094 - RNA, 20 nt, Human
uggcugcgagcgagcagcuu

SEQ ID NO: 620095 - RNA, 30 nt, Human
ugguaaacagagaauaaauucucucucagg

SEQ ID NO: 620096 - RNA, 26 nt, Human
uguaaucaagaaaacauuguguaacu

SEQ ID NO: 620097 - RNA, 24 nt, Human
uuaagggucugaagucuaucuucu

SEQ ID NO: 620098 - RNA, 18 nt, Human
uuaauagagagaugagag

SEQ ID NO: 620099 - RNA, 18 nt, Human
uucacuuuaugcaggcuc

SEQ ID NO: 620100 - RNA, 19 nt, Human
uuguggagucccagucaca

SEQ ID NO: 620101 - RNA, 25 nt, Human
uuuacuuaaaauuacaaacauguuu

SEQ ID NO: 620102 - RNA, 20 nt, Human
uuugggagccuguuuucuuu

SEQ ID NO: 620103 - RNA, 18 nt, Human
uuuuacacucaugugcag

SEQ ID NO: 620104 - RNA, 21 nt, Human
uuuuuuuuuuuuuuugccuaa

SEQ ID NO: 620105 - RNA, 24 nt, Human
aaacauacauacaaacuaguaccu

SEQ ID NO: 620106 - RNA, 19 nt, Human
aaacauggcuauagugcuu

SEQ ID NO: 620107 - RNA, 23 nt, Human
aaauagcaaaggcauacagagag

SEQ ID NO: 620108 - RNA, 23 nt, Human
aacaagugagaaaaauguugcaa

SEQ ID NO: 620109 - RNA, 20 nt, Human
aacuuauccuucaaacuuua

SEQ ID NO: 620110 - RNA, 21 nt, Human
aagcaaauuaaauauuuccau

SEQ ID NO: 620111 - RNA, 23 nt, Human
aauagcaaaggcauacagagaga

SEQ ID NO: 620112 - RNA, 19 nt, Human
acaaaagccaccugaagug

SEQ ID NO: 620113 - RNA, 23 nt, Human
accucggguucccuccacaaaag

SEQ ID NO: 620114 - RNA, 27 nt, Human
agaaaaauguugcaaaugcaaaaaaaa

SEQ ID NO: 620115 - RNA, 20 nt, Human
agagagcuuuuuaaucuuga

SEQ ID NO: 620116 - RNA, 22 nt, Human
aggcauuauugcucugcagaac

SEQ ID NO: 620117 - RNA, 21 nt, Human
auacagagagacugaaaacuc

SEQ ID NO: 620118 - RNA, 22 nt, Human
caaaggcauacagagagacuga

SEQ ID NO: 620119 - RNA, 23 nt, Human
cacccauuguugauaugaccucg

SEQ ID NO: 620120 - RNA, 22 nt, Human
cagugcaccuccuuucuugacu

SEQ ID NO: 620121 - RNA, 22 nt, Human
cauacagagagacugaaaacuc

SEQ ID NO: 620122 - RNA, 24 nt, Human
ccucggguucccuccacaaaagcc

SEQ ID NO: 620123 - RNA, 23 nt, Human
gaaaugaacaagugagaaaaaug

SEQ ID NO: 620124 - RNA, 24 nt, Human
guagaauucgcuuuauauuuaaaa

SEQ ID NO: 620125 - RNA, 27 nt, Human
uaacuuauccuucaaacuuuauacaua

SEQ ID NO: 620126 - RNA, 18 nt, Human
uaauucagcacuuccuau

SEQ ID NO: 620127 - RNA, 19 nt, Human
uaguauaguagcuacuggu

SEQ ID NO: 620128 - RNA, 21 nt, Human
uauaguagcuacugguuaugu

SEQ ID NO: 620129 - RNA, 23 nt, Human
uaugugcauggguuacauaugca

SEQ ID NO: 620130 - RNA, 20 nt, Human
ucaaccagauuaguauagua

SEQ ID NO: 620131 - RNA, 21 nt, Human
ucacauuguaauucagcacuu

SEQ ID NO: 620132 - RNA, 26 nt, Human
uccauuaagagagcuuuccucguggg

SEQ ID NO: 620133 - RNA, 22 nt, Human
ucucauggucaauacauacuuu

SEQ ID NO: 620134 - RNA, 18 nt, Human
ugcaaaugcaaaaaaaaa

SEQ ID NO: 620135 - RNA, 20 nt, Human
uggaaaacauggcuauagug

SEQ ID NO: 620136 - RNA, 23 nt, Human
uguaugcacccauuguugauaug

SEQ ID NO: 620137 - RNA, 24 nt, Human
ugucucauuuguaaacagaaguug

SEQ ID NO: 620138 - RNA, 20 nt, Human
uguugcaaaugcaaaaaaaa

SEQ ID NO: 620139 - RNA, 18 nt, Human
uuaaauauuuccauuaag

SEQ ID NO: 620140 - RNA, 26 nt, Human
uuguaaacagaagucauuaacuucac

SEQ ID NO: 620141 - RNA, 20 nt, Human
uuuguaaacagaagucauua

SEQ ID NO: 620142 - RNA, 21 nt, Human
uuuuuuuuuuuuuugucagga

SEQ ID NO: 620143 - RNA, 22 nt, Human
uuuuuuuuuuuuuuuugucagg

SEQ ID NO: 620144 - RNA, 18 nt, Human
uuuuuuuuuuuuuuuuug

SEQ ID NO: 620145 - RNA, 19 nt, Human
uuuuuuuuuuuuuuuuugu

SEQ ID NO: 620146 - RNA, 20 nt, Human
aaagugcugggauuacaggc

SEQ ID NO: 620147 - RNA, 24 nt, Human
aaagugcugggauuacaggcguga

SEQ ID NO: 620148 - RNA, 20 nt, Human
aagcauaauacauaaugcac

SEQ ID NO: 620149 - RNA, 19 nt, Human
aagugcugggauuacaggc

SEQ ID NO: 620150 - RNA, 19 nt, Human
aagugcugggauuacaggc

SEQ ID NO: 620151 - RNA, 26 nt, Human
aagugcugggauuacaggcgugagcc

SEQ ID NO: 620152 - RNA, 19 nt, Human
aauguaguggcgugaucuu

SEQ ID NO: 620153 - RNA, 20 nt, Human
aauguaguggcgugaucuug

SEQ ID NO: 620154 - RNA, 24 nt, Human
acaauuuagacgauacaguugucu

SEQ ID NO: 620155 - RNA, 18 nt, Human
acaggguuucaccguguu

SEQ ID NO: 620156 - RNA, 19 nt, Human
acaggguuucaccguguua

SEQ ID NO: 620157 - RNA, 20 nt, Human
acaggguuucaccguguuag

SEQ ID NO: 620158 - RNA, 24 nt, Human
acaggguuucaccguguuagccag

SEQ ID NO: 620159 - RNA, 18 nt, Human
agacagagucuugcugug

SEQ ID NO: 620160 - RNA, 18 nt, Human
agacaggguuucaccgug

SEQ ID NO: 620161 - RNA, 22 nt, Human
agagucuugcuguguugcccag

SEQ ID NO: 620162 - RNA, 19 nt, Human
aggcuccucccaaacaagg

SEQ ID NO: 620163 - RNA, 19 nt, Human
aguagcugggacuucaggc

SEQ ID NO: 620164 - RNA, 23 nt, Human
aguagcugggacuucaggcgugu

SEQ ID NO: 620165 - RNA, 24 nt, Human
agugauucucuugccucagccucc

SEQ ID NO: 620166 - RNA, 18 nt, Human
agugcugggauuacaggc

SEQ ID NO: 620167 - RNA, 22 nt, Human
auuuuuuguauuuuugguggag

SEQ ID NO: 620168 - RNA, 21 nt, Human
caagaauacugugacuccaau

SEQ ID NO: 620169 - RNA, 20 nt, Human
caagaauacugugacuccag

SEQ ID NO: 620170 - RNA, 22 nt, Human
caagugauucucuugccucagc

SEQ ID NO: 620171 - RNA, 18 nt, Human
caccguguuagccaggau

SEQ ID NO: 620172 - RNA, 24 nt, Human
caccguguuagccaggauggucuc

SEQ ID NO: 620173 - RNA, 22 nt, Human
cacucccugcuccagggccacu

SEQ ID NO: 620174 - RNA, 21 nt, Human
cacugcaaccucugccuccug

SEQ ID NO: 620175 - RNA, 23 nt, Human
cacugcaaccucugccuccuggg

SEQ ID NO: 620176 - RNA, 18 nt, Human
cagagucuugcuguguug

SEQ ID NO: 620177 - RNA, 20 nt, Human
cagccuccugaguagcuggg

SEQ ID NO: 620178 - RNA, 18 nt, Human
cagccucggccuccuaaa

SEQ ID NO: 620179 - RNA, 21 nt, Human
caggcgugugccaccacgccc

SEQ ID NO: 620180 - RNA, 24 nt, Human
caggcuccucccaaacaaggaaga

SEQ ID NO: 620181 - RNA, 24 nt, Human
caggguuucaccguguuagccagg

SEQ ID NO: 620182 - RNA, 20 nt, Human
ccaccacgcccggcagauuu

SEQ ID NO: 620183 - RNA, 23 nt, Human
ccacguggugacccacuuuucuu

SEQ ID NO: 620184 - RNA, 24 nt, Human
ccacugcaaccucugccuccuggg

SEQ ID NO: 620185 - RNA, 25 nt, Human
ccacugcaaccucugccuccugggu

SEQ ID NO: 620186 - RNA, 27 nt, Human
ccacugcaaccucugccuccuggguuc

SEQ ID NO: 620187 - RNA, 24 nt, Human
cccacugcaaccucugccuccugg

SEQ ID NO: 620188 - RNA, 23 nt, Human
ccuaaagugcugggauuacaggc

SEQ ID NO: 620189 - RNA, 21 nt, Human
ccuccuggguucaagugauuc

SEQ ID NO: 620190 - RNA, 22 nt, Human
ccucugccuccuggguucaagu

SEQ ID NO: 620191 - RNA, 21 nt, Human
ccucuggagaauugcugauuu

SEQ ID NO: 620192 - RNA, 21 nt, Human
ccugcuccagggccacucgug

SEQ ID NO: 620193 - RNA, 21 nt, Human
ccuggguucaagugauucucu

SEQ ID NO: 620194 - RNA, 25 nt, Human
cgcccggcagauuuuuuguauuuuu

SEQ ID NO: 620195 - RNA, 22 nt, Human
cuaaagugcugggauuacaggc

SEQ ID NO: 620196 - RNA, 24 nt, Human
cuaaagugcugggauuacaggcgu

SEQ ID NO: 620197 - RNA, 24 nt, Human
cucagccuccugaguagcugggac

SEQ ID NO: 620198 - RNA, 24 nt, Human
cuccugaccuugugaucugccagc

SEQ ID NO: 620199 - RNA, 21 nt, Human
cuccuggguucaagugauucu

SEQ ID NO: 620200 - RNA, 21 nt, Human
cugcaaccucugccuccuggg

SEQ ID NO: 620201 - RNA, 23 nt, Human
cugcaaccucugccuccuggguu

SEQ ID NO: 620202 - RNA, 24 nt, Human
cugcaaccucugccuccuggguuc

SEQ ID NO: 620203 - RNA, 23 nt, Human
cugccuccuggguucaagugauu

SEQ ID NO: 620204 - RNA, 23 nt, Human
cuugccucagccuccugaguagc

SEQ ID NO: 620205 - RNA, 20 nt, Human
cuugcuguguugcccagcug

SEQ ID NO: 620206 - RNA, 18 nt, Human
gacacauggucugauucu

SEQ ID NO: 620207 - RNA, 22 nt, Human
gaccuugugaucugccagccuc

SEQ ID NO: 620208 - RNA, 24 nt, Human
gaccuugugaucugccagccucgg

SEQ ID NO: 620209 - RNA, 18 nt, Human
gagacaggguuucaccgu

SEQ ID NO: 620210 - RNA, 23 nt, Human
gaucugcuccaccacucccugcu

SEQ ID NO: 620211 - RNA, 22 nt, Human
gaugcugaaaaauaaaaaggga

SEQ ID NO: 620212 - RNA, 18 nt, Human
gauuacaggcgugagcca

SEQ ID NO: 620213 - RNA, 22 nt, Human
gauuacaggcgugagccacugc

SEQ ID NO: 620214 - RNA, 23 nt, Human
gauuacaggcgugagccacugca

SEQ ID NO: 620215 - RNA, 24 nt, Human
gauuuuuuguauuuuugguggaga

SEQ ID NO: 620216 - RNA, 22 nt, Human
gcaaccucugccuccuggguuc

SEQ ID NO: 620217 - RNA, 19 nt, Human
gccaugggacacauggucu

SEQ ID NO: 620218 - RNA, 18 nt, Human
ggacacauggucugauuc

SEQ ID NO: 620219 - RNA, 24 nt, Human
ggauggucucgaucuccugaccuu

SEQ ID NO: 620220 - RNA, 20 nt, Human
ggucucgaucuccugaccuu

SEQ ID NO: 620221 - RNA, 23 nt, Human
gugaucugccagccucggccucc

SEQ ID NO: 620222 - RNA, 24 nt, Human
gugauucucuugccucagccuccu

SEQ ID NO: 620223 - RNA, 19 nt, Human
guggagacaggguuucacc

SEQ ID NO: 620224 - RNA, 19 nt, Human
guggagacaggguuucacc

SEQ ID NO: 620225 - RNA, 19 nt, Human
uaaaacagguaaccggagc

SEQ ID NO: 620226 - RNA, 24 nt, Human
uaaagugcugggauuacaggcgug

SEQ ID NO: 620227 - RNA, 26 nt, Human
uaaggguacuuguuccuacaaaacca

SEQ ID NO: 620228 - RNA, 22 nt, Human
uacaggcgugagccacugcacc

SEQ ID NO: 620229 - RNA, 23 nt, Human
uacaggcgugagccacugcaccu

SEQ ID NO: 620230 - RNA, 22 nt, Human
uacaguugucuagauacaacuu

SEQ ID NO: 620231 - RNA, 22 nt, Human
uaccuaccaauaaacuuuuagu

SEQ ID NO: 620232 - RNA, 23 nt, Human
uagaaaauguaugugaacaccac

SEQ ID NO: 620233 - RNA, 24 nt, Human
uauaugaacuaucuuuaccaagac

SEQ ID NO: 620234 - RNA, 21 nt, Human
uauggcauacugcaccuuuaa

SEQ ID NO: 620235 - RNA, 20 nt, Human
uauugcaaggguuugccuuu

SEQ ID NO: 620236 - RNA, 19 nt, Human
ucaagugauucucuugccu

SEQ ID NO: 620237 - RNA, 24 nt, Human
ucaccguguuagccaggauggucu

SEQ ID NO: 620238 - RNA, 23 nt, Human
ucagccuccugaguagcugggac

SEQ ID NO: 620239 - RNA, 19 nt, Human
ucaggcuccucccaaacaa

SEQ ID NO: 620240 - RNA, 20 nt, Human
uccaccucaggcuccuccca

SEQ ID NO: 620241 - RNA, 27 nt, Human
uccauguuuaaaacagguaaccggagc

SEQ ID NO: 620242 - RNA, 21 nt, Human
ucccaaacaaggaagaucugc

SEQ ID NO: 620243 - RNA, 24 nt, Human
uccuaaagugcugggauuacaggc

SEQ ID NO: 620244 - RNA, 24 nt, Human
uccugaguagcugggacuucaggc

SEQ ID NO: 620245 - RNA, 21 nt, Human
uccuggguucaagugauucuc

SEQ ID NO: 620246 - RNA, 24 nt, Human
uccuggguucaagugauucucuug

SEQ ID NO: 620247 - RNA, 18 nt, Human
ucggccuccuaaagugcu

SEQ ID NO: 620248 - RNA, 19 nt, Human
ucgugagggcuaucuggga

SEQ ID NO: 620249 - RNA, 23 nt, Human
ucuugcuguguugcccagcugga

SEQ ID NO: 620250 - RNA, 22 nt, Human
ugacuuaugugagauaguccuc

SEQ ID NO: 620251 - RNA, 22 nt, Human
ugagacagagucuugcuguguu

SEQ ID NO: 620252 - RNA, 23 nt, Human
ugagacagagucuugcuguguug

SEQ ID NO: 620253 - RNA, 20 nt, Human
ugcccagcuggaauguagug

SEQ ID NO: 620254 - RNA, 22 nt, Human
ugccucagccuccugaguagcu

SEQ ID NO: 620255 - RNA, 24 nt, Human
ugccucagccuccugaguagcugg

SEQ ID NO: 620256 - RNA, 22 nt, Human
ugccuccuggguucaagugauu

SEQ ID NO: 620257 - RNA, 24 nt, Human
ugcugggauuacaggcgugagcca

SEQ ID NO: 620258 - RNA, 21 nt, Human
uggauucacauugccauggga

SEQ ID NO: 620259 - RNA, 18 nt, Human
ugggauuacaggcgugag

SEQ ID NO: 620260 - RNA, 19 nt, Human
ugggauuacaggcgugagc

SEQ ID NO: 620261 - RNA, 21 nt, Human
ugggauuacaggcgugagcca

SEQ ID NO: 620262 - RNA, 22 nt, Human
ugggauuacaggcgugagccac

SEQ ID NO: 620263 - RNA, 22 nt, Human
ugggauuacaggcgugagccac

SEQ ID NO: 620264 - RNA, 24 nt, Human
ugggauuacaggcgugagccacug

SEQ ID NO: 620265 - RNA, 24 nt, Human
ugggauuacaggcgugagccacug

SEQ ID NO: 620266 - RNA, 20 nt, Human
uggguucaagugauucucuu

SEQ ID NO: 620267 - RNA, 23 nt, Human
uggguucaagugauucucuugcc

SEQ ID NO: 620268 - RNA, 24 nt, Human
uggguucaagugauucucuugccu

SEQ ID NO: 620269 - RNA, 24 nt, Human
ugguggagacaggguuucaccgug

SEQ ID NO: 620270 - RNA, 25 nt, Human
uguaugugaacaccacguggugacc

SEQ ID NO: 620271 - RNA, 20 nt, Human
uguccugugagcucauaaga

SEQ ID NO: 620272 - RNA, 18 nt, Human
uguugcccagcuggaaug

SEQ ID NO: 620273 - RNA, 18 nt, Human
uucaagaaucauucacag

SEQ ID NO: 620274 - RNA, 23 nt, Human
uucaagugauucucuugccucag

SEQ ID NO: 620275 - RNA, 25 nt, Human
uucuauagucauuauguaauugacu

SEQ ID NO: 620276 - RNA, 22 nt, Human
uugagacagagucuugcugugu

SEQ ID NO: 620277 - RNA, 24 nt, Human
uugguggagacaggguuucaccgu

SEQ ID NO: 620278 - RNA, 19 nt, Human
uuucaccguguuagccagg

SEQ ID NO: 620279 - RNA, 22 nt, Human
uuuuugguggagacaggguuuc

SEQ ID NO: 620280 - RNA, 24 nt, Human
uuuuugguggagacaggguuucac

SEQ ID NO: 620281 - RNA, 21 nt, Human
uuuuuguauuuuugguggaga

SEQ ID NO: 620282 - RNA, 24 nt, Human
uuuuuuguauuuuugguggagaca

SEQ ID NO: 620283 - RNA, 20 nt, Human
uuuuuuuuuuugagacagag

SEQ ID NO: 620284 - RNA, 24 nt, Human
uuuuuuuuuuuugagacagagucu

SEQ ID NO: 620285 - RNA, 18 nt, Human
uuuuuuuuuuuuuuuuug

SEQ ID NO: 620286 - RNA, 24 nt, Human
aaagugcugggaccacaggcguga

SEQ ID NO: 620287 - RNA, 24 nt, Human
aaagugcugggauuacaggcauga

SEQ ID NO: 620288 - RNA, 26 nt, Human
aagugcugggaccacaggcgugagcc

SEQ ID NO: 620289 - RNA, 19 nt, Human
aagugcugggauuacaggc

SEQ ID NO: 620290 - RNA, 21 nt, Human
aagugcugggauuacaggcau

SEQ ID NO: 620291 - RNA, 26 nt, Human
aagugcugggauuacaggcaugaacc

SEQ ID NO: 620292 - RNA, 24 nt, Human
aauuuuguauuuuuagcagagacg

SEQ ID NO: 620293 - RNA, 24 nt, Human
accauauuagccaggcuggucuug

SEQ ID NO: 620294 - RNA, 18 nt, Human
acgggguuucaccauauu

SEQ ID NO: 620295 - RNA, 20 nt, Human
acgggguuucaccauauuag

SEQ ID NO: 620296 - RNA, 20 nt, Human
acgggguuucuccauguugg

SEQ ID NO: 620297 - RNA, 21 nt, Human
acgggguuucuccauguuggu

SEQ ID NO: 620298 - RNA, 24 nt, Human
acgggguuucuccauguuggucag

SEQ ID NO: 620299 - RNA, 19 nt, Human
aggcaugaaccaccacgcc

SEQ ID NO: 620300 - RNA, 20 nt, Human
aguagcugggauuacaggca

SEQ ID NO: 620301 - RNA, 19 nt, Human
agugaucuauccaccucgg

SEQ ID NO: 620302 - RNA, 24 nt, Human
agugcaauggcucgaucucggcuc

SEQ ID NO: 620303 - RNA, 23 nt, Human
auauuagccaggcuggucuugaa

SEQ ID NO: 620304 - RNA, 24 nt, Human
caaagugcugggaccacaggcgug

SEQ ID NO: 620305 - RNA, 24 nt, Human
caaagugcugggauuacaggcaug

SEQ ID NO: 620306 - RNA, 19 nt, Human
caagugaucuauccaccuc

SEQ ID NO: 620307 - RNA, 24 nt, Human
cacaggcgugagccaccacgccca

SEQ ID NO: 620308 - RNA, 21 nt, Human
caccauauuagccaggcuggu

SEQ ID NO: 620309 - RNA, 23 nt, Human
caccauauuagccaggcuggucu

SEQ ID NO: 620310 - RNA, 27 nt, Human
caccauauuagccaggcuggucuugaa

SEQ ID NO: 620311 - RNA, 21 nt, Human
caccgcgaccuccaccucccg

SEQ ID NO: 620312 - RNA, 23 nt, Human
caccgcgaccuccaccucccggg

SEQ ID NO: 620313 - RNA, 24 nt, Human
caccucggccucccaaagugcugg

SEQ ID NO: 620314 - RNA, 22 nt, Human
caggcaaugcgccaccacgccc

SEQ ID NO: 620315 - RNA, 22 nt, Human
caggugauuggccugccucagc

SEQ ID NO: 620316 - RNA, 23 nt, Human
cauauuagccaggcuggucuuga

SEQ ID NO: 620317 - RNA, 24 nt, Human
cauauuagccaggcuggucuugaa

SEQ ID NO: 620318 - RNA, 22 nt, Human
ccaaagugcugggaccacaggc

SEQ ID NO: 620319 - RNA, 24 nt, Human
ccaaagugcugggaccacaggcgu

SEQ ID NO: 620320 - RNA, 23 nt, Human
ccaaagugcugggauuacaggca

SEQ ID NO: 620321 - RNA, 24 nt, Human
ccaaagugcugggauuacaggcau

SEQ ID NO: 620322 - RNA, 20 nt, Human
ccaccacgcccagcuaauuu

SEQ ID NO: 620323 - RNA, 27 nt, Human
ccaccucccggguucaagcaauucuuu

SEQ ID NO: 620324 - RNA, 19 nt, Human
ccauguuggucaggcuggu

SEQ ID NO: 620325 - RNA, 22 nt, Human
ccauguuggucaggcuggucuc

SEQ ID NO: 620326 - RNA, 23 nt, Human
ccauguuggucaggcuggucucg

SEQ ID NO: 620327 - RNA, 24 nt, Human
cccaaagugcugggauuacaggca

SEQ ID NO: 620328 - RNA, 23 nt, Human
cccgaccucaggugauuggccug

SEQ ID NO: 620329 - RNA, 23 nt, Human
cccggguucaagcaauucuccug

SEQ ID NO: 620330 - RNA, 23 nt, Human
cccuaguagcugggauuacaggc

SEQ ID NO: 620331 - RNA, 18 nt, Human
ccgcgaccuccaccuccc

SEQ ID NO: 620332 - RNA, 24 nt, Human
ccgcgaccuccaccucccggguuc

SEQ ID NO: 620333 - RNA, 23 nt, Human
ccuaguagcugggauuacaggca

SEQ ID NO: 620334 - RNA, 24 nt, Human
ccucccggguucaagcaauucucc

SEQ ID NO: 620335 - RNA, 24 nt, Human
ccugaccucaagugaucuauccac

SEQ ID NO: 620336 - RNA, 24 nt, Human
ccugcuguccaggcuggagugcaa

SEQ ID NO: 620337 - RNA, 24 nt, Human
cgggguuucuccauguuggucagg

SEQ ID NO: 620338 - RNA, 22 nt, Human
cuaguagcugggauuacaggca

SEQ ID NO: 620339 - RNA, 24 nt, Human
cucaagugaucuauccaccucggc

SEQ ID NO: 620340 - RNA, 24 nt, Human
cucaccgcgaccuccaccucccgg

SEQ ID NO: 620341 - RNA, 23 nt, Human
cucaggugauuggccugccucag

SEQ ID NO: 620342 - RNA, 23 nt, Human
cugccucagccucccaaagugcu

SEQ ID NO: 620343 - RNA, 24 nt, Human
cugccucagccucccaaagugcug

SEQ ID NO: 620344 - RNA, 24 nt, Human
gaccucaagugaucuauccaccuc

SEQ ID NO: 620345 - RNA, 23 nt, Human
gaccucaggugauuggccugccu

SEQ ID NO: 620346 - RNA, 24 nt, Human
gaccucaggugauuggccugccuc

SEQ ID NO: 620347 - RNA, 18 nt, Human
gagacgggguuucaccau

SEQ ID NO: 620348 - RNA, 23 nt, Human
gagacgggguuucuccauguugg

SEQ ID NO: 620349 - RNA, 24 nt, Human
gagacgggguuucuccauguuggu

SEQ ID NO: 620350 - RNA, 19 nt, Human
gauuacaggcaaugcgcca

SEQ ID NO: 620351 - RNA, 21 nt, Human
gauuacaggcaugaaccacca

SEQ ID NO: 620352 - RNA, 23 nt, Human
gcuccugcuguccaggcuggagu

SEQ ID NO: 620353 - RNA, 25 nt, Human
gcuggagugcaauggcucgaucucg

SEQ ID NO: 620354 - RNA, 23 nt, Human
gcuggucucgaacucccgaccuc

SEQ ID NO: 620355 - RNA, 23 nt, Human
gcuggucuugaacuccugaccuc

SEQ ID NO: 620356 - RNA, 19 nt, Human
ggaccacaggcgugagcca

SEQ ID NO: 620357 - RNA, 19 nt, Human
ggauuacaggcaugaacca

SEQ ID NO: 620358 - RNA, 24 nt, Human
ggcuggucuugaacuccugaccuc

SEQ ID NO: 620359 - RNA, 23 nt, Human
gggguuucaccauauuagccagg

SEQ ID NO: 620360 - RNA, 23 nt, Human
gggguuucuccauguuggucagg

SEQ ID NO: 620361 - RNA, 22 nt, Human
ggguuucaccauauuagccagg

SEQ ID NO: 620362 - RNA, 19 nt, Human
ggucuugaacuccugaccu

SEQ ID NO: 620363 - RNA, 24 nt, Human
ggugauuggccugccucagccucc

SEQ ID NO: 620364 - RNA, 18 nt, Human
guagcugggauuacaggc

SEQ ID NO: 620365 - RNA, 19 nt, Human
guccaggcuggagugcaau

SEQ ID NO: 620366 - RNA, 24 nt, Human
gugauuggccugccucagccuccc

SEQ ID NO: 620367 - RNA, 24 nt, Human
guuucgcuccugcuguccaggcug

SEQ ID NO: 620368 - RNA, 22 nt, Human
uacaggcaugaaccaccacgcc

SEQ ID NO: 620369 - RNA, 24 nt, Human
uagcagagacgggguuucuccaug

SEQ ID NO: 620370 - RNA, 24 nt, Human
uagccaggcuggucuugaacuccu

SEQ ID NO: 620371 - RNA, 23 nt, Human
uaguagagacgggguuucaccau

SEQ ID NO: 620372 - RNA, 26 nt, Human
uaguagagacgggguuucaccauauu

SEQ ID NO: 620373 - RNA, 25 nt, Human
uaguagcugggauuacaggcaaugc

SEQ ID NO: 620374 - RNA, 22 nt, Human
uauccaccucggccucccaaag

SEQ ID NO: 620375 - RNA, 23 nt, Human
uauuuauuuuugagacggaguuu

SEQ ID NO: 620376 - RNA, 24 nt, Human
ucaccgcgaccuccaccucccggg

SEQ ID NO: 620377 - RNA, 18 nt, Human
ucccaaagugcugggacc

SEQ ID NO: 620378 - RNA, 24 nt, Human
ucccaaagugcugggaccacaggc

SEQ ID NO: 620379 - RNA, 24 nt, Human
ucccaaagugcugggauuacaggc

SEQ ID NO: 620380 - RNA, 21 nt, Human
ucccggguucaagcaauucuc

SEQ ID NO: 620381 - RNA, 24 nt, Human
ucccggguucaagcaauucuccug

SEQ ID NO: 620382 - RNA, 24 nt, Human
ucccuaguagcugggauuacaggc

SEQ ID NO: 620383 - RNA, 18 nt, Human
uccugcuguccaggcugg

SEQ ID NO: 620384 - RNA, 22 nt, Human
ucgcuccugcuguccaggcugg

SEQ ID NO: 620385 - RNA, 23 nt, Human
ucgcuccugcuguccaggcugga

SEQ ID NO: 620386 - RNA, 18 nt, Human
ucggccucccaaagugcu

SEQ ID NO: 620387 - RNA, 21 nt, Human
ucuugaacuccugaccucaag

SEQ ID NO: 620388 - RNA, 19 nt, Human
ugaccucaagugaucuauc

SEQ ID NO: 620389 - RNA, 24 nt, Human
ugaucuauccaccucggccuccca

SEQ ID NO: 620390 - RNA, 24 nt, Human
ugccgcagccucccuaguagcugg

SEQ ID NO: 620391 - RNA, 24 nt, Human
ugccucagccucccaaagugcugg

SEQ ID NO: 620392 - RNA, 24 nt, Human
ugcugggaccacaggcgugagcca

SEQ ID NO: 620393 - RNA, 23 nt, Human
ugcugggauuacaggcaugaacc

SEQ ID NO: 620394 - RNA, 19 nt, Human
ugcuguccaggcuggagug

SEQ ID NO: 620395 - RNA, 19 nt, Human
uggagugcaauggcucgau

SEQ ID NO: 620396 - RNA, 23 nt, Human
uggagugcaauggcucgaucucg

SEQ ID NO: 620397 - RNA, 24 nt, Human
uggagugcaauggcucgaucucgg

SEQ ID NO: 620398 - RNA, 24 nt, Human
ugggaccacaggcgugagccacca

SEQ ID NO: 620399 - RNA, 19 nt, Human
ugggauuacaggcaaugcg

SEQ ID NO: 620400 - RNA, 22 nt, Human
ugggauuacaggcaaugcgcca

SEQ ID NO: 620401 - RNA, 23 nt, Human
ugggauuacaggcaaugcgccac

SEQ ID NO: 620402 - RNA, 25 nt, Human
ugggauuacaggcaaugcgccacca

SEQ ID NO: 620403 - RNA, 23 nt, Human
ugggauuacaggcaugaaccacc

SEQ ID NO: 620404 - RNA, 24 nt, Human
ugggauuacaggcaugaaccacca

SEQ ID NO: 620405 - RNA, 24 nt, Human
ugggauuacaggcaugaaccacca

SEQ ID NO: 620406 - RNA, 23 nt, Human
uggucaggcuggucucgaacucc

SEQ ID NO: 620407 - RNA, 19 nt, Human
uggucucgaacucccgacc

SEQ ID NO: 620408 - RNA, 21 nt, Human
uguauuuuuagcagagacggg

SEQ ID NO: 620409 - RNA, 21 nt, Human
uguccaggcuggagugcaaug

SEQ ID NO: 620410 - RNA, 25 nt, Human
uguccaggcuggagugcaauggcuc

SEQ ID NO: 620411 - RNA, 31 nt, Human
uuaauaaugauuauguacuuggucccucuuu

SEQ ID NO: 620412 - RNA, 18 nt, Human
uuacaggcaaugcgccac

SEQ ID NO: 620413 - RNA, 22 nt, Human
uuagcagagacgggguuucucc

SEQ ID NO: 620414 - RNA, 24 nt, Human
uuagcagagacgggguuucuccau

SEQ ID NO: 620415 - RNA, 18 nt, Human
uuaguagagacgggguuu

SEQ ID NO: 620416 - RNA, 22 nt, Human
uuaguagagacgggguuucacc

SEQ ID NO: 620417 - RNA, 24 nt, Human
uuaguagagacgggguuucaccau

SEQ ID NO: 620418 - RNA, 19 nt, Human
uucaagcaauucuccugcc

SEQ ID NO: 620419 - RNA, 22 nt, Human
uucgcuccugcuguccaggcug

SEQ ID NO: 620420 - RNA, 24 nt, Human
uucgcuccugcuguccaggcugga

SEQ ID NO: 620421 - RNA, 23 nt, Human
uuguauuuuuagcagagacgggg

SEQ ID NO: 620422 - RNA, 18 nt, Human
uuuaaaauugaaauucca

SEQ ID NO: 620423 - RNA, 24 nt, Human
uuucgcuccugcuguccaggcugg

SEQ ID NO: 620424 - RNA, 21 nt, Human
uuucuccauguuggucaggcu

SEQ ID NO: 620425 - RNA, 20 nt, Human
uuuuguauuuuuagcagaga

SEQ ID NO: 620426 - RNA, 24 nt, Human
uuuuuaguagagacgggguuucac

SEQ ID NO: 620427 - RNA, 23 nt, Human
uuuuuuaguagagacgggguuuc

SEQ ID NO: 620428 - RNA, 21 nt, Human
uuuuuuuuuuuuuuuuuauuu

SEQ ID NO: 620429 - RNA, 19 nt, Human
aaaaauauuaaagaaggcc

SEQ ID NO: 620430 - RNA, 26 nt, Human
aacaaaaacuauccuuauauuaauug

SEQ ID NO: 620431 - RNA, 22 nt, Human
aagaggaaaaaauccaaacaua

SEQ ID NO: 620432 - RNA, 24 nt, Human
aaucaaaauggcuucccauugcuu

SEQ ID NO: 620433 - RNA, 21 nt, Human
acaaagaggaaaaaauccaaa

SEQ ID NO: 620434 - RNA, 20 nt, Human
acccagagagucaauuaguu

SEQ ID NO: 620435 - RNA, 24 nt, Human
aggcauuaggaauuuuuuuaaacc

SEQ ID NO: 620436 - RNA, 21 nt, Human
auaguuauauuaaauggguac

SEQ ID NO: 620437 - RNA, 23 nt, Human
caaaauggcuucccauugcuuga

SEQ ID NO: 620438 - RNA, 23 nt, Human
caauagcuuuucuccaugagcuc

SEQ ID NO: 620439 - RNA, 23 nt, Human
cacuuuauuccaucaaacaucac

SEQ ID NO: 620440 - RNA, 22 nt, Human
cagagagcuguggugaaucaga

SEQ ID NO: 620441 - RNA, 21 nt, Human
cccaagguacuacuuuucuca

SEQ ID NO: 620442 - RNA, 21 nt, Human
gcauagcuucaauuuaagugc

SEQ ID NO: 620443 - RNA, 21 nt, Human
uaaaaauauuaaagaaggcua

SEQ ID NO: 620444 - RNA, 23 nt, Human
uaaaaguuguauaguucucuaag

SEQ ID NO: 620445 - RNA, 19 nt, Human
uaaagaaggcuaaaaggca

SEQ ID NO: 620446 - RNA, 22 nt, Human
uaagaagggguuagaacccaga

SEQ ID NO: 620447 - RNA, 24 nt, Human
uacaaagaggaaaaaauccaaaca

SEQ ID NO: 620448 - RNA, 22 nt, Human
uacacaucccaagguacuacuu

SEQ ID NO: 620449 - RNA, 23 nt, Human
uacucaagaaaucaaaauggcuu

SEQ ID NO: 620450 - RNA, 24 nt, Human
ugaaaaacaguguuacacuuccaa

SEQ ID NO: 620451 - RNA, 21 nt, Human
uggugaaucagauaaaacugc

SEQ ID NO: 620452 - RNA, 23 nt, Human
uguuaagaagggguuagaaccca

SEQ ID NO: 620453 - RNA, 22 nt, Human
uuaaugcuuacaagauuacuca

SEQ ID NO: 620454 - RNA, 23 nt, Human
uucaguuaucaaguuuucuggag

SEQ ID NO: 620455 - RNA, 18 nt, Human
uucauuuucuauccugug

SEQ ID NO: 620456 - RNA, 22 nt, Human
uuucugguuagccagaauguuc

SEQ ID NO: 620457 - RNA, 25 nt, Human
uuuucuauccuguggcauagcuuca

SEQ ID NO: 620458 - RNA, 18 nt, Human
aaaagaacaaaaaaugaa

SEQ ID NO: 620459 - RNA, 23 nt, Human
aaaugccuuuuuuuuaaaguucu

SEQ ID NO: 620460 - RNA, 19 nt, Human
aaccucugccuccuggguc

SEQ ID NO: 620461 - RNA, 27 nt, Human
aagaaguaguggauccuuucuuccucc

SEQ ID NO: 620462 - RNA, 24 nt, Human
aaggugcuaggauuacaggcauga

SEQ ID NO: 620463 - RNA, 20 nt, Human
accauguuggucaggcuggu

SEQ ID NO: 620464 - RNA, 24 nt, Human
acccggcugauuuuuguauuuuua

SEQ ID NO: 620465 - RNA, 18 nt, Human
accucaaugcccaacauu

SEQ ID NO: 620466 - RNA, 24 nt, Human
agaaaaaaacaagcuuguacaaga

SEQ ID NO: 620467 - RNA, 21 nt, Human
agaaaggagucaagaaaagaa

SEQ ID NO: 620468 - RNA, 19 nt, Human
agaagauauuucacacugg

SEQ ID NO: 620469 - RNA, 20 nt, Human
agacccggcugauuuuugua

SEQ ID NO: 620470 - RNA, 24 nt, Human
agcugcuuaucuuuuuuguuuuuu

SEQ ID NO: 620471 - RNA, 20 nt, Human
aggcuucaccaguuaucagu

SEQ ID NO: 620472 - RNA, 24 nt, Human
aggugauccaccugccucagccuc

SEQ ID NO: 620473 - RNA, 22 nt, Human
aguagagaugggguuucaccau

SEQ ID NO: 620474 - RNA, 23 nt, Human
agugcaauggcgugaucuuggcu

SEQ ID NO: 620475 - RNA, 24 nt, Human
agugcaauggcgugaucuuggcuc

SEQ ID NO: 620476 - RNA, 21 nt, Human
auacauccagaacaaugaaaa

SEQ ID NO: 620477 - RNA, 24 nt, Human
augggguuucaccauguuggucag

SEQ ID NO: 620478 - RNA, 23 nt, Human
auucacaagacagaaaaaaacaa

SEQ ID NO: 620479 - RNA, 22 nt, Human
auuuuuguauuuuuaguagaga

SEQ ID NO: 620480 - RNA, 24 nt, Human
auuuuuguauuuuuaguagagaug

SEQ ID NO: 620481 - RNA, 19 nt, Human
caacugaacucaaaggcca

SEQ ID NO: 620482 - RNA, 21 nt, Human
caagcaauucuccugccucag

SEQ ID NO: 620483 - RNA, 24 nt, Human
caaggugcuaggauuacaggcaug

SEQ ID NO: 620484 - RNA, 21 nt, Human
caauauaaguaccaauacuuu

SEQ ID NO: 620485 - RNA, 18 nt, Human
cacaagacagaaaaaaac

SEQ ID NO: 620486 - RNA, 19 nt, Human
cacaagacagaaaaaaaca

SEQ ID NO: 620487 - RNA, 18 nt, Human
cacacacuugagaaagga

SEQ ID NO: 620488 - RNA, 18 nt, Human
caccauguuggucaggcu

SEQ ID NO: 620489 - RNA, 21 nt, Human
caccauguuggucaggcuggu

SEQ ID NO: 620490 - RNA, 24 nt, Human
caccauguuggucaggcugguguu

SEQ ID NO: 620491 - RNA, 21 nt, Human
cacugcaaccucugccuccug

SEQ ID NO: 620492 - RNA, 23 nt, Human
cacugcaaccucugccuccuggg

SEQ ID NO: 620493 - RNA, 23 nt, Human
cagaaaaaaacaagcuuguacaa

SEQ ID NO: 620494 - RNA, 20 nt, Human
cagcugcuuaucuuuuaaau

SEQ ID NO: 620495 - RNA, 23 nt, Human
caggugccugccaugagacccgg

SEQ ID NO: 620496 - RNA, 18 nt, Human
caguagaugggauuacag

SEQ ID NO: 620497 - RNA, 19 nt, Human
caguagaugggauuacagg

SEQ ID NO: 620498 - RNA, 23 nt, Human
cauuauaauaucaaacuucaaaa

SEQ ID NO: 620499 - RNA, 19 nt, Human
ccaaggugcuaggauuaca

SEQ ID NO: 620500 - RNA, 24 nt, Human
ccaaggugcuaggauuacaggcau

SEQ ID NO: 620501 - RNA, 25 nt, Human
ccaccugccucagccucccaaggug

SEQ ID NO: 620502 - RNA, 24 nt, Human
ccccaggcuggagugcaauggcgu

SEQ ID NO: 620503 - RNA, 22 nt, Human
ccucaguagaugggauuacagg

SEQ ID NO: 620504 - RNA, 23 nt, Human
ccuccugggucaagcaauucucc

SEQ ID NO: 620505 - RNA, 21 nt, Human
ccugaccuuaggugauccacc

SEQ ID NO: 620506 - RNA, 23 nt, Human
ccugaccuuaggugauccaccug

SEQ ID NO: 620507 - RNA, 24 nt, Human
ccugccucagccucccaaggugcu

SEQ ID NO: 620508 - RNA, 22 nt, Human
ccugggucaagcaauucuccug

SEQ ID NO: 620509 - RNA, 21 nt, Human
ccuuucuuccuccuuaguauc

SEQ ID NO: 620510 - RNA, 24 nt, Human
cucacugcaaccucugccuccugg

SEQ ID NO: 620511 - RNA, 22 nt, Human
cuccugccucaguagaugggau

SEQ ID NO: 620512 - RNA, 20 nt, Human
cucugucccccaggcuggag

SEQ ID NO: 620513 - RNA, 19 nt, Human
cugcaaccucugccuccug

SEQ ID NO: 620514 - RNA, 23 nt, Human
cugcaaccucugccuccuggguc

SEQ ID NO: 620515 - RNA, 24 nt, Human
cugccucagccucccaaggugcua

SEQ ID NO: 620516 - RNA, 18 nt, Human
cuggcugggcccagcugu

SEQ ID NO: 620517 - RNA, 19 nt, Human
cugggcccagcuguaccug

SEQ ID NO: 620518 - RNA, 23 nt, Human
cuuaggugauccaccugccucag

SEQ ID NO: 620519 - RNA, 23 nt, Human
cuucaccaguuaucagugccacu

SEQ ID NO: 620520 - RNA, 21 nt, Human
cuugcucugucccccaggcug

SEQ ID NO: 620521 - RNA, 22 nt, Human
gaaaaaaacaagcuuguacaag

SEQ ID NO: 620522 - RNA, 22 nt, Human
gacacacagacuuauacaucca

SEQ ID NO: 620523 - RNA, 24 nt, Human
gaccuuaggugauccaccugccuc

SEQ ID NO: 620524 - RNA, 24 nt, Human
gagaugggguuucaccauguuggu

SEQ ID NO: 620525 - RNA, 18 nt, Human
gauuacaggcaugaggca

SEQ ID NO: 620526 - RNA, 24 nt, Human
gauuacaggcaugaggcaccgugc

SEQ ID NO: 620527 - RNA, 18 nt, Human
gauuacaggugccugcca

SEQ ID NO: 620528 - RNA, 20 nt, Human
gccacguugauuuuuccacc

SEQ ID NO: 620529 - RNA, 21 nt, Human
gcucacugcaaccucugccuc

SEQ ID NO: 620530 - RNA, 19 nt, Human
gcuggagugcaauggcgug

SEQ ID NO: 620531 - RNA, 20 nt, Human
gcuucaccaguuaucagugc

SEQ ID NO: 620532 - RNA, 22 nt, Human
ggagauagagucuugcucuguc

SEQ ID NO: 620533 - RNA, 22 nt, Human
ggauuacaggcaugaggcaccg

SEQ ID NO: 620534 - RNA, 24 nt, Human
ggauuacaggcaugaggcaccgug

SEQ ID NO: 620535 - RNA, 22 nt, Human
ggcuggagugcaauggcgugau

SEQ ID NO: 620536 - RNA, 22 nt, Human
gggguuucaccauguuggucag

SEQ ID NO: 620537 - RNA, 24 nt, Human
ggugauccaccugccucagccucc

SEQ ID NO: 620538 - RNA, 23 nt, Human
guagagaugggguuucaccaugu

SEQ ID NO: 620539 - RNA, 18 nt, Human
gugauccaccugccucag

SEQ ID NO: 620540 - RNA, 19 nt, Human
gugauccaccugccucagc

SEQ ID NO: 620541 - RNA, 24 nt, Human
gugauccaccugccucagccuccc

SEQ ID NO: 620542 - RNA, 21 nt, Human
gugcuaggauuacaggcauga

SEQ ID NO: 620543 - RNA, 24 nt, Human
uaaaugauuacuuaacagacaucc

SEQ ID NO: 620544 - RNA, 19 nt, Human
uaaugcaauauaauaaugu

SEQ ID NO: 620545 - RNA, 22 nt, Human
uaaugcaauauaauaauguaaa

SEQ ID NO: 620546 - RNA, 24 nt, Human
uacaggcaugaggcaccgugccca

SEQ ID NO: 620547 - RNA, 21 nt, Human
uagaagauauuucacacuggg

SEQ ID NO: 620548 - RNA, 22 nt, Human
uagagaugggguuucaccaugu

SEQ ID NO: 620549 - RNA, 26 nt, Human
uagcaucacacauacaaccauuacca

SEQ ID NO: 620550 - RNA, 18 nt, Human
uaggauuacaggcaugag

SEQ ID NO: 620551 - RNA, 21 nt, Human
uaggauuacaggcaugaggca

SEQ ID NO: 620552 - RNA, 23 nt, Human
uaggauuacaggcaugaggcacc

SEQ ID NO: 620553 - RNA, 24 nt, Human
uaggauuacaggcaugaggcaccg

SEQ ID NO: 620554 - RNA, 24 nt, Human
uaguagagaugggguuucaccaug

SEQ ID NO: 620555 - RNA, 26 nt, Human
uaguagagaugggguuucaccauguu

SEQ ID NO: 620556 - RNA, 22 nt, Human
uauaacaacugaacucaaaggc

SEQ ID NO: 620557 - RNA, 18 nt, Human
ucacaagacagaaaaaaa

SEQ ID NO: 620558 - RNA, 24 nt, Human
ucacugcaaccucugccuccuggg

SEQ ID NO: 620559 - RNA, 25 nt, Human
ucacugcaaccucugccuccugggu

SEQ ID NO: 620560 - RNA, 27 nt, Human
ucacugcaaccucugccuccuggguca

SEQ ID NO: 620561 - RNA, 21 nt, Human
ucagcugcuuaucuuuuaaau

SEQ ID NO: 620562 - RNA, 18 nt, Human
ucauuaguuuuccaacac

SEQ ID NO: 620563 - RNA, 24 nt, Human
ucccaaggugcuaggauuacaggc

SEQ ID NO: 620564 - RNA, 18 nt, Human
ucccccaggcuggagugc

SEQ ID NO: 620565 - RNA, 20 nt, Human
uccugggucaagcaauucuc

SEQ ID NO: 620566 - RNA, 23 nt, Human
uccugggucaagcaauucuccug

SEQ ID NO: 620567 - RNA, 23 nt, Human
uccuuucuuccuccuuaguaucu

SEQ ID NO: 620568 - RNA, 23 nt, Human
ucugccuccugggucaagcaauu

SEQ ID NO: 620569 - RNA, 19 nt, Human
ucugucccccaggcuggag

SEQ ID NO: 620570 - RNA, 18 nt, Human
ucuuccuccuuaguaucu

SEQ ID NO: 620571 - RNA, 19 nt, Human
ucuugcucugucccccagg

SEQ ID NO: 620572 - RNA, 23 nt, Human
ucuugcucugucccccaggcugg

SEQ ID NO: 620573 - RNA, 24 nt, Human
ucuugcucugucccccaggcugga

SEQ ID NO: 620574 - RNA, 20 nt, Human
ugaagagaaauuccauuugg

SEQ ID NO: 620575 - RNA, 24 nt, Human
ugaccuuaggugauccaccugccu

SEQ ID NO: 620576 - RNA, 19 nt, Human
ugacucaagcuggcugggc

SEQ ID NO: 620577 - RNA, 24 nt, Human
ugauuuuuguauuuuuaguagaga

SEQ ID NO: 620578 - RNA, 19 nt, Human
ugccacucaacacuuucaa

SEQ ID NO: 620579 - RNA, 24 nt, Human
ugccucagccucccaaggugcuag

SEQ ID NO: 620580 - RNA, 24 nt, Human
ugcuaggauuacaggcaugaggca

SEQ ID NO: 620581 - RNA, 19 nt, Human
uggagugcaauggcgugau

SEQ ID NO: 620582 - RNA, 23 nt, Human
uggagugcaauggcgugaucuug

SEQ ID NO: 620583 - RNA, 24 nt, Human
uggagugcaauggcgugaucuugg

SEQ ID NO: 620584 - RNA, 22 nt, Human
ugggaacauuguugccagucca

SEQ ID NO: 620585 - RNA, 19 nt, Human
ugggauuacaggugccugc

SEQ ID NO: 620586 - RNA, 21 nt, Human
ugggauuacaggugccugcca

SEQ ID NO: 620587 - RNA, 21 nt, Human
ugggauuacaggugccugcca

SEQ ID NO: 620588 - RNA, 22 nt, Human
ugggauuacaggugccugccau

SEQ ID NO: 620589 - RNA, 24 nt, Human
ugggcaaaauuuacaccucaaugc

SEQ ID NO: 620590 - RNA, 25 nt, Human
ugggcauagcaucacacauacaacc

SEQ ID NO: 620591 - RNA, 24 nt, Human
ugggguuucaccauguuggucagg

SEQ ID NO: 620592 - RNA, 27 nt, Human
uggucaggcugguguuguugaacuccu

SEQ ID NO: 620593 - RNA, 24 nt, Human
ugguguuguugaacuccugaccuu

SEQ ID NO: 620594 - RNA, 22 nt, Human
ugucccccaggcuggagugcaa

SEQ ID NO: 620595 - RNA, 18 nt, Human
uuacaggcaugaggcacc

SEQ ID NO: 620596 - RNA, 22 nt, Human
uuagaaaguaaauuguuuucuu

SEQ ID NO: 620597 - RNA, 22 nt, Human
uuaggugauccaccugccucag

SEQ ID NO: 620598 - RNA, 18 nt, Human
uuaguagagaugggguuu

SEQ ID NO: 620599 - RNA, 22 nt, Human
uuaguagagaugggguuucacc

SEQ ID NO: 620600 - RNA, 24 nt, Human
uuaguagagaugggguuucaccau

SEQ ID NO: 620601 - RNA, 24 nt, Human
uuauuuuaauggaauugacugucu

SEQ ID NO: 620602 - RNA, 20 nt, Human
uucacaagacagaaaaaaac

SEQ ID NO: 620603 - RNA, 22 nt, Human
uucacaagacagaaaaaaacaa

SEQ ID NO: 620604 - RNA, 20 nt, Human
uucugauuuuucuagaguca

SEQ ID NO: 620605 - RNA, 18 nt, Human
uugaucuuaagaaacaca

SEQ ID NO: 620606 - RNA, 24 nt, Human
uugcucugucccccaggcuggagu

SEQ ID NO: 620607 - RNA, 23 nt, Human
uuguauuuuuaguagagaugggg

SEQ ID NO: 620608 - RNA, 18 nt, Human
uuuacaccucaaugccca

SEQ ID NO: 620609 - RNA, 24 nt, Human
uuucaccauguuggucaggcuggu

SEQ ID NO: 620610 - RNA, 25 nt, Human
uuucucacuucuuauuuuaauggaa

SEQ ID NO: 620611 - RNA, 23 nt, Human
uuuucuagagucauucauaagaa

SEQ ID NO: 620612 - RNA, 24 nt, Human
uuuuguuuuuuggagauagagucu

SEQ ID NO: 620613 - RNA, 24 nt, Human
uuuuuaguagagaugggguuucac

SEQ ID NO: 620614 - RNA, 20 nt, Human
uuuuuguauuuuuaguagag

SEQ ID NO: 620615 - RNA, 20 nt, Human
aaaaagccugggcaagagaa

SEQ ID NO: 620616 - RNA, 23 nt, Human
aaauuugcuucacuuauaaggcc

SEQ ID NO: 620617 - RNA, 24 nt, Human
aagagaccugggcaggucgaaaaa

SEQ ID NO: 620618 - RNA, 23 nt, Human
aauauuaccuccacaucuguggu

SEQ ID NO: 620619 - RNA, 26 nt, Human
acaaaaucaaaguuacuucuggauca

SEQ ID NO: 620620 - RNA, 21 nt, Human
acucauaaggccuuucuccag

SEQ ID NO: 620621 - RNA, 19 nt, Human
acucgcugauggugaauga

SEQ ID NO: 620622 - RNA, 24 nt, Human
acugugggcaccugccaaguggua

SEQ ID NO: 620623 - RNA, 19 nt, Human
agaccugggcaggucgaaa

SEQ ID NO: 620624 - RNA, 22 nt, Human
aggagcaaaaagccugggcaag

SEQ ID NO: 620625 - RNA, 23 nt, Human
aggcuggaguuuucagcaaagga

SEQ ID NO: 620626 - RNA, 18 nt, Human
aucugugguauuuuccuc

SEQ ID NO: 620627 - RNA, 18 nt, Human
augcaguucccacauacc

SEQ ID NO: 620628 - RNA, 22 nt, Human
auugaagaaaaaauaauauuac

SEQ ID NO: 620629 - RNA, 26 nt, Human
caaaggauuucccacagucacugcac

SEQ ID NO: 620630 - RNA, 20 nt, Human
caaccacuccucccgagcuc

SEQ ID NO: 620631 - RNA, 24 nt, Human
cacaaucaaugcauucauauggcc

SEQ ID NO: 620632 - RNA, 21 nt, Human
cacauaccuggaauguaugca

SEQ ID NO: 620633 - RNA, 24 nt, Human
cacucauaacaccuugaucuggug

SEQ ID NO: 620634 - RNA, 26 nt, Human
caguguuauauugaagaaaaaauaau

SEQ ID NO: 620635 - RNA, 22 nt, Human
ccacaaccacuccucccgagcu

SEQ ID NO: 620636 - RNA, 19 nt, Human
ccacacugcccgcacucau

SEQ ID NO: 620637 - RNA, 23 nt, Human
ccauuugucacacucauaacacc

SEQ ID NO: 620638 - RNA, 23 nt, Human
cccacauaccuggaauguaugca

SEQ ID NO: 620639 - RNA, 19 nt, Human
ccucugugccaaaaaugag

SEQ ID NO: 620640 - RNA, 22 nt, Human
ccugccaagugguaaaggugaa

SEQ ID NO: 620641 - RNA, 23 nt, Human
cggauggaccugacaggccaaaa

SEQ ID NO: 620642 - RNA, 20 nt, Human
cuggccuugaaggagcaaaa

SEQ ID NO: 620643 - RNA, 23 nt, Human
gagcaaaaagccugggcaagaga

SEQ ID NO: 620644 - RNA, 19 nt, Human
gcgacggaacgaagaacug

SEQ ID NO: 620645 - RNA, 21 nt, Human
gcggggggggaacgcgggcuc

SEQ ID NO: 620646 - RNA, 21 nt, Human
gcuaaagaauauuccccauuu

SEQ ID NO: 620647 - RNA, 19 nt, Human
ggaucaugaugaguuaggc

SEQ ID NO: 620648 - RNA, 19 nt, Human
ggcaagagaauuuccaaaa

SEQ ID NO: 620649 - RNA, 19 nt, Human
ggcuaaaggauuucccaca

SEQ ID NO: 620650 - RNA, 24 nt, Human
gggcaagagaauuuccaaaauuug

SEQ ID NO: 620651 - RNA, 20 nt, Human
gguaaccaaugagagagggc

SEQ ID NO: 620652 - RNA, 23 nt, Human
guuaggcgaaugauguacugugg

SEQ ID NO: 620653 - RNA, 24 nt, Human
uaaccaaugagagagggcugaagg

SEQ ID NO: 620654 - RNA, 22 nt, Human
uaacucauuggagagaaaggaa

SEQ ID NO: 620655 - RNA, 25 nt, Human
uaagcuaaaggauuucccacauuca

SEQ ID NO: 620656 - RNA, 18 nt, Human
uaaggccuuucuccugug

SEQ ID NO: 620657 - RNA, 18 nt, Human
uaagggguuuccuccagu

SEQ ID NO: 620658 - RNA, 22 nt, Human
uacuaugcaguucccacauacc

SEQ ID NO: 620659 - RNA, 27 nt, Human
uacuaugcaguucccacauaccuggaa

SEQ ID NO: 620660 - RNA, 21 nt, Human
uagaagagaacuguaagucac

SEQ ID NO: 620661 - RNA, 19 nt, Human
uauugugguaaccaaugag

SEQ ID NO: 620662 - RNA, 24 nt, Human
uccacacucaacgcauucauaagg

SEQ ID NO: 620663 - RNA, 25 nt, Human
uccacacucaacgcauucauaaggc

SEQ ID NO: 620664 - RNA, 20 nt, Human
ucccgagcucguccagaccc

SEQ ID NO: 620665 - RNA, 20 nt, Human
ugaaggagcaaaaagccugg

SEQ ID NO: 620666 - RNA, 24 nt, Human
ugagauccaaaagaucccugaaaa

SEQ ID NO: 620667 - RNA, 19 nt, Human
ugcaauggccacaaccacu

SEQ ID NO: 620668 - RNA, 21 nt, Human
ugcauucauauggccuuccuc

SEQ ID NO: 620669 - RNA, 22 nt, Human
ugcuuuuuagaagagaacugua

SEQ ID NO: 620670 - RNA, 21 nt, Human
uggagagaaaggaaugagaau

SEQ ID NO: 620671 - RNA, 20 nt, Human
uggaguuuucagcaaaggau

SEQ ID NO: 620672 - RNA, 21 nt, Human
uguaaagaagcuagcauucua

SEQ ID NO: 620673 - RNA, 23 nt, Human
uguaugcagcuauuugauguaug

SEQ ID NO: 620674 - RNA, 24 nt, Human
uucaaguuaucagaagaguccucu

SEQ ID NO: 620675 - RNA, 21 nt, Human
uuuccacacucaacgcauuca

SEQ ID NO: 620676 - RNA, 24 nt, Human
uuucccacauucacuacauucaua

SEQ ID NO: 620677 - RNA, 21 nt, Human
uuuuuuuuuuuuuuuuuuaag

SEQ ID NO: 620678 - RNA, 24 nt, Human
aaaaacuaguaaaauuccagcuuu

SEQ ID NO: 620679 - RNA, 20 nt, Human
aaacaugggcuagauagaaa

SEQ ID NO: 620680 - RNA, 24 nt, Human
aaagucagaauaaaaaacuguaug

SEQ ID NO: 620681 - RNA, 26 nt, Human
aacacacacacagauuaccacaacua

SEQ ID NO: 620682 - RNA, 22 nt, Human
aaguagcugggauuauaggcau

SEQ ID NO: 620683 - RNA, 24 nt, Human
aauggugugaucucggcucacugc

SEQ ID NO: 620684 - RNA, 18 nt, Human
acuuucagcaaacagcaa

SEQ ID NO: 620685 - RNA, 22 nt, Human
agauagaaauuaaaaugugaga

SEQ ID NO: 620686 - RNA, 23 nt, Human
agcaaacagcaaauaauaaacaa

SEQ ID NO: 620687 - RNA, 23 nt, Human
agcacagcaauucuuccaaaaga

SEQ ID NO: 620688 - RNA, 20 nt, Human
aggcaucagccaccacaccc

SEQ ID NO: 620689 - RNA, 24 nt, Human
aguacaauggugugaucucggcuc

SEQ ID NO: 620690 - RNA, 22 nt, Human
auacaguuaauguugaaagaag

SEQ ID NO: 620691 - RNA, 21 nt, Human
auaggcaucagccaccacacc

SEQ ID NO: 620692 - RNA, 21 nt, Human
auauguauguguguguauaua

SEQ ID NO: 620693 - RNA, 24 nt, Human
caaacagcacagcaauucuuccaa

SEQ ID NO: 620694 - RNA, 22 nt, Human
caagcgauucuccugccucagc

SEQ ID NO: 620695 - RNA, 22 nt, Human
caaguagcugggauuauaggca

SEQ ID NO: 620696 - RNA, 23 nt, Human
caaguagcugggauuauaggcau

SEQ ID NO: 620697 - RNA, 21 nt, Human
caccacacccggcccacaggc

SEQ ID NO: 620698 - RNA, 23 nt, Human
cacugcaaccucuauuuccuggg

SEQ ID NO: 620699 - RNA, 23 nt, Human
cagaauaaaaaacuguaugaagu

SEQ ID NO: 620700 - RNA, 23 nt, Human
cagaguacaauggugugaucucg

SEQ ID NO: 620701 - RNA, 18 nt, Human
cagcaaacagcaaauaau

SEQ ID NO: 620702 - RNA, 23 nt, Human
cagcaauucuuccaaaagaucuu

SEQ ID NO: 620703 - RNA, 24 nt, Human
cagcacagcaauucuuccaaaaga

SEQ ID NO: 620704 - RNA, 21 nt, Human
cagccaccacacccggcccac

SEQ ID NO: 620705 - RNA, 23 nt, Human
ccuggguucaagcgauucuccug

SEQ ID NO: 620706 - RNA, 23 nt, Human
cucaaguagcugggauuauaggc

SEQ ID NO: 620707 - RNA, 24 nt, Human
cucacugcaaccucuauuuccugg

SEQ ID NO: 620708 - RNA, 24 nt, Human
cucagccucucaaguagcugggau

SEQ ID NO: 620709 - RNA, 23 nt, Human
cugcaaccucuauuuccuggguu

SEQ ID NO: 620710 - RNA, 23 nt, Human
cugccucagccucucaaguagcu

SEQ ID NO: 620711 - RNA, 21 nt, Human
gauuauaggcaucagccacca

SEQ ID NO: 620712 - RNA, 20 nt, Human
gauucuccugccucagccuc

SEQ ID NO: 620713 - RNA, 22 nt, Human
gcaaccucuauuuccuggguuc

SEQ ID NO: 620714 - RNA, 23 nt, Human
gccaccacacccggcccacaggc

SEQ ID NO: 620715 - RNA, 24 nt, Human
gcgauucuccugccucagccucuc

SEQ ID NO: 620716 - RNA, 24 nt, Human
gcucaggccagaguacaauggugu

SEQ ID NO: 620717 - RNA, 19 nt, Human
ggauuauaggcaucagcca

SEQ ID NO: 620718 - RNA, 21 nt, Human
ggcuagauagaaauuaaaaug

SEQ ID NO: 620719 - RNA, 21 nt, Human
guaaaaacuaguaaaauucca

SEQ ID NO: 620720 - RNA, 18 nt, Human
uaaaugagcaaaaauggg

SEQ ID NO: 620721 - RNA, 22 nt, Human
uacaauggugugaucucggcuc

SEQ ID NO: 620722 - RNA, 20 nt, Human
uaccacagaaaaaugcucau

SEQ ID NO: 620723 - RNA, 24 nt, Human
uauacaacacacacacagauuacc

SEQ ID NO: 620724 - RNA, 24 nt, Human
uauaguaaaauagacugcaaauac

SEQ ID NO: 620725 - RNA, 26 nt, Human
uauauacaacacacacacagauuacc

SEQ ID NO: 620726 - RNA, 19 nt, Human
ucaagcgauucuccugccu

SEQ ID NO: 620727 - RNA, 24 nt, Human
ucaaguagcugggauuauaggcau

SEQ ID NO: 620728 - RNA, 24 nt, Human
ucacugcaaccucuauuuccuggg

SEQ ID NO: 620729 - RNA, 19 nt, Human
ucaggccagaguacaaugg

SEQ ID NO: 620730 - RNA, 25 nt, Human
uccucugacaucugacagaugaaca

SEQ ID NO: 620731 - RNA, 20 nt, Human
uccuggguucaagcgauucu

SEQ ID NO: 620732 - RNA, 21 nt, Human
uccuggguucaagcgauucuc

SEQ ID NO: 620733 - RNA, 24 nt, Human
uccuggguucaagcgauucuccug

SEQ ID NO: 620734 - RNA, 24 nt, Human
ucucaaguagcugggauuauaggc

SEQ ID NO: 620735 - RNA, 26 nt, Human
ucuccugccucagccucucaaguagc

SEQ ID NO: 620736 - RNA, 23 nt, Human
ucuuccaaaagaucuucugaguc

SEQ ID NO: 620737 - RNA, 21 nt, Human
ucuuuugacaguaaaaacuag

SEQ ID NO: 620738 - RNA, 19 nt, Human
ugaaguuguaauuccuccu

SEQ ID NO: 620739 - RNA, 23 nt, Human
ugaucaacugcaucaaacagcac

SEQ ID NO: 620740 - RNA, 24 nt, Human
ugccucagccucucaaguagcugg

SEQ ID NO: 620741 - RNA, 18 nt, Human
uggaauaucagugaucaa

SEQ ID NO: 620742 - RNA, 18 nt, Human
ugggauuauaggcaucag

SEQ ID NO: 620743 - RNA, 21 nt, Human
ugggauuauaggcaucagcca

SEQ ID NO: 620744 - RNA, 22 nt, Human
ugggauuauaggcaucagccac

SEQ ID NO: 620745 - RNA, 24 nt, Human
ugggauuauaggcaucagccacca

SEQ ID NO: 620746 - RNA, 23 nt, Human
uggguucaagcgauucuccugcc

SEQ ID NO: 620747 - RNA, 24 nt, Human
uggguucaagcgauucuccugccu

SEQ ID NO: 620748 - RNA, 27 nt, Human
uguauuaaauauguauguguguguaua

SEQ ID NO: 620749 - RNA, 20 nt, Human
uucaaagaauugauaauacc

SEQ ID NO: 620750 - RNA, 25 nt, Human
uucaaagaauugauaauaccacaga

SEQ ID NO: 620751 - RNA, 21 nt, Human
uucaagcgauucuccugccuc

SEQ ID NO: 620752 - RNA, 23 nt, Human
uucaagcgauucuccugccucag

SEQ ID NO: 620753 - RNA, 24 nt, Human
uucaagcgauucuccugccucagc

SEQ ID NO: 620754 - RNA, 21 nt, Human
uucaugauaacuaagagugga

SEQ ID NO: 620755 - RNA, 22 nt, Human
uucuacugauauuucaugauaa

SEQ ID NO: 620756 - RNA, 25 nt, Human
uuguauuaaauauguaugugugugu

SEQ ID NO: 620757 - RNA, 24 nt, Human
uuuccuggguucaagcgauucucc

SEQ ID NO: 620758 - RNA, 18 nt, Human
uuuuacucucguugcuca

SEQ ID NO: 620759 - RNA, 19 nt, Human
uuuuuuuuuuuguguguga

SEQ ID NO: 620760 - RNA, 23 nt, Human
uuuuuuuuuuugugugugagacg

SEQ ID NO: 620761 - RNA, 18 nt, Human
uuuuuuuuuuuuuuuuug

SEQ ID NO: 620762 - RNA, 19 nt, Human
uuuuuuuuuuuuuuuuugu

SEQ ID NO: 620763 - RNA, 21 nt, Human
aaacauaaccauggaaucuuc

SEQ ID NO: 620764 - RNA, 24 nt, Human
aaacauaaccauggaaucuucaau

SEQ ID NO: 620765 - RNA, 22 nt, Human
aaagaaaaccagguuuuugucc

SEQ ID NO: 620766 - RNA, 20 nt, Human
aaauaagauccagagaccug

SEQ ID NO: 620767 - RNA, 20 nt, Human
aaccauggaaucuucaauaa

SEQ ID NO: 620768 - RNA, 21 nt, Human
aagaggaaauuaaauacugca

SEQ ID NO: 620769 - RNA, 19 nt, Human
aauacugcauguacagauc

SEQ ID NO: 620770 - RNA, 23 nt, Human
aauuagcuauagagacaaauuuc

SEQ ID NO: 620771 - RNA, 18 nt, Human
accagguuuuuguccugu

SEQ ID NO: 620772 - RNA, 22 nt, Human
agaaaccaaaaaagaaaaccag

SEQ ID NO: 620773 - RNA, 22 nt, Human
aucuaaagucuauauguugccc

SEQ ID NO: 620774 - RNA, 21 nt, Human
aucucacuccuuccuuuuuca

SEQ ID NO: 620775 - RNA, 19 nt, Human
caaauaagauccagagacc

SEQ ID NO: 620776 - RNA, 23 nt, Human
caucaaugauguuaaccaaacca

SEQ ID NO: 620777 - RNA, 20 nt, Human
caugucacgggugaugugug

SEQ ID NO: 620778 - RNA, 20 nt, Human
ccagacauucuaaugucuaa

SEQ ID NO: 620779 - RNA, 18 nt, Human
ccaggcccauaaugucug

SEQ ID NO: 620780 - RNA, 23 nt, Human
ccaguacauuggcaucuucugga

SEQ ID NO: 620781 - RNA, 22 nt, Human
ccuuccuuuuucacuauugucc

SEQ ID NO: 620782 - RNA, 22 nt, Human
cucacugcaugaaaaggcaauc

SEQ ID NO: 620783 - RNA, 21 nt, Human
cuucagaagacugguuggucc

SEQ ID NO: 620784 - RNA, 18 nt, Human
guacuuccaggcccauaa

SEQ ID NO: 620785 - RNA, 19 nt, Human
guuuguuuggaggggaguu

SEQ ID NO: 620786 - RNA, 22 nt, Human
uaaagucuauauguugcccuuu

SEQ ID NO: 620787 - RNA, 18 nt, Human
uacacuaacuucuccuga

SEQ ID NO: 620788 - RNA, 21 nt, Human
uagaggcuguaucuauaaccu

SEQ ID NO: 620789 - RNA, 28 nt, Human
uaguaggauuuuuuuaaaauuucuuuug

SEQ ID NO: 620790 - RNA, 28 nt, Human
uauccucaaauaucuagucuguguucaa

SEQ ID NO: 620791 - RNA, 18 nt, Human
uauuuugucaucaaugau

SEQ ID NO: 620792 - RNA, 20 nt, Human
ucaaauaucuagucuguguu

SEQ ID NO: 620793 - RNA, 23 nt, Human
ucaaugauguuaaccaaaccaag

SEQ ID NO: 620794 - RNA, 18 nt, Human
uccccaacauuuuuuugg

SEQ ID NO: 620795 - RNA, 19 nt, Human
uccccaacauuuuuuuggu

SEQ ID NO: 620796 - RNA, 19 nt, Human
uccgaugacuucugugggc

SEQ ID NO: 620797 - RNA, 23 nt, Human
uccucuguuuuggaagauccuug

SEQ ID NO: 620798 - RNA, 28 nt, Human
uccuuugcaauuucuuucuuuuuugguu

SEQ ID NO: 620799 - RNA, 23 nt, Human
ucgcugguuguuuuuguucaaaa

SEQ ID NO: 620800 - RNA, 20 nt, Human
ucucacugcaugaaaaggca

SEQ ID NO: 620801 - RNA, 22 nt, Human
ucugauugccuaauaauugauu

SEQ ID NO: 620802 - RNA, 25 nt, Human
ugaagaaaccaaaaaagaaaaccag

SEQ ID NO: 620803 - RNA, 21 nt, Human
ugauacauugaugaucugcuu

SEQ ID NO: 620804 - RNA, 19 nt, Human
ugccaguacauuggcaucu

SEQ ID NO: 620805 - RNA, 21 nt, Human
ugccauuugaguagacaaucu

SEQ ID NO: 620806 - RNA, 18 nt, Human
uggauauugcugauugca

SEQ ID NO: 620807 - RNA, 21 nt, Human
uggcaagaccaugucacgggu

SEQ ID NO: 620808 - RNA, 21 nt, Human
ugguaaguagugggguucugu

SEQ ID NO: 620809 - RNA, 20 nt, Human
uguccugugaauuuccccuu

SEQ ID NO: 620810 - RNA, 22 nt, Human
uguguagccagcuuauuacacu

SEQ ID NO: 620811 - RNA, 20 nt, Human
uguuuggaggggaguugaua

SEQ ID NO: 620812 - RNA, 24 nt, Human
uucuagaucaugucauuuauuuac

SEQ ID NO: 620813 - RNA, 24 nt, Human
uuugcaauuucuuucuuuuuuggu

SEQ ID NO: 620814 - RNA, 23 nt, Human
aaaaaagaacaggauaacagcaa

SEQ ID NO: 620815 - RNA, 27 nt, Human
aaaagaacaggauaacagcagugggca

SEQ ID NO: 620816 - RNA, 26 nt, Human
aaacaaaaaaacuaaaaaugugaagc

SEQ ID NO: 620817 - RNA, 22 nt, Human
aaacaagagagauaaccuuaaa

SEQ ID NO: 620818 - RNA, 18 nt, Human
aaacuauaggcaugcauc

SEQ ID NO: 620819 - RNA, 22 nt, Human
aaagcaagaaaauauuuagaga

SEQ ID NO: 620820 - RNA, 18 nt, Human
aaauaaaagccuacagcc

SEQ ID NO: 620821 - RNA, 18 nt, Human
aaauuagaaaacuuguac

SEQ ID NO: 620822 - RNA, 22 nt, Human
aaccagaacuuggagauuugga

SEQ ID NO: 620823 - RNA, 22 nt, Human
aagccuacagccaaaccaacaa

SEQ ID NO: 620824 - RNA, 25 nt, Human
aaggcagguggaucaccaaagguca

SEQ ID NO: 620825 - RNA, 24 nt, Human
aaguagcuaaaacuauaggcaugc

SEQ ID NO: 620826 - RNA, 22 nt, Human
aauaauugcauuaacugcacaa

SEQ ID NO: 620827 - RNA, 23 nt, Human
acaaaaaaacuaaaaaugugaag

SEQ ID NO: 620828 - RNA, 24 nt, Human
acaaacaaaaaaacuaaaaaugug

SEQ ID NO: 620829 - RNA, 26 nt, Human
acaaacaauagcaugagugauuugug

SEQ ID NO: 620830 - RNA, 23 nt, Human
acacacacacacacacacacaca

SEQ ID NO: 620831 - RNA, 21 nt, Human
acacauacacacacacacaca

SEQ ID NO: 620832 - RNA, 18 nt, Human
acagaacagaacagucaa

SEQ ID NO: 620833 - RNA, 24 nt, Human
accaacauggagaaacccugucuc

SEQ ID NO: 620834 - RNA, 25 nt, Human
accacaauaaagguuaaacggcacu

SEQ ID NO: 620835 - RNA, 22 nt, Human
accauugcacuccagccugggc

SEQ ID NO: 620836 - RNA, 24 nt, Human
acccugucucuacuaaaaauacaa

SEQ ID NO: 620837 - RNA, 23 nt, Human
acuaaaaauacaaacuuagcuaa

SEQ ID NO: 620838 - RNA, 24 nt, Human
acucaggagguggagguugcggug

SEQ ID NO: 620839 - RNA, 23 nt, Human
acugcaaucucuaaacauaaauu

SEQ ID NO: 620840 - RNA, 22 nt, Human
acuuguacugaagagaauccuc

SEQ ID NO: 620841 - RNA, 20 nt, Human
acuuuuccugcaggacauug

SEQ ID NO: 620842 - RNA, 21 nt, Human
agaacaggauaacagcaaugu

SEQ ID NO: 620843 - RNA, 18 nt, Human
agaagggggcggggaggg

SEQ ID NO: 620844 - RNA, 21 nt, Human
agaaugcacaccugggagugg

SEQ ID NO: 620845 - RNA, 20 nt, Human
agacagaacagaacagucaa

SEQ ID NO: 620846 - RNA, 21 nt, Human
agacagaacagaacagucaag

SEQ ID NO: 620847 - RNA, 18 nt, Human
agagaagggggcggggag

SEQ ID NO: 620848 - RNA, 18 nt, Human
agauaacaagccagagcc

SEQ ID NO: 620849 - RNA, 24 nt, Human
agauacgguggcucaggccuguaa

SEQ ID NO: 620850 - RNA, 24 nt, Human
agcuggucuagaaccccugggcuc

SEQ ID NO: 620851 - RNA, 22 nt, Human
agcuugagacagauaaaauggu

SEQ ID NO: 620852 - RNA, 18 nt, Human
aggaagaggaaauuccca

SEQ ID NO: 620853 - RNA, 18 nt, Human
aggaagugggcacuuaca

SEQ ID NO: 620854 - RNA, 21 nt, Human
aggcaggagaaucacuggaac

SEQ ID NO: 620855 - RNA, 26 nt, Human
aggcagguggaucaccaaaggucaga

SEQ ID NO: 620856 - RNA, 19 nt, Human
aggcaugaggaaagagcaa

SEQ ID NO: 620857 - RNA, 19 nt, Human
agggggcggggagggggga

SEQ ID NO: 620858 - RNA, 22 nt, Human
agggggcggggaggggggagac

SEQ ID NO: 620859 - RNA, 23 nt, Human
agggggcggggaggggggagacc

SEQ ID NO: 620860 - RNA, 24 nt, Human
agguggagguugcggugagccaag

SEQ ID NO: 620861 - RNA, 20 nt, Human
aguacugaccucaccauccu

SEQ ID NO: 620862 - RNA, 19 nt, Human
agucagggaccccaaacgg

SEQ ID NO: 620863 - RNA, 24 nt, Human
auacauauguguauauauauguau

SEQ ID NO: 620864 - RNA, 20 nt, Human
auauguguauauauauguau

SEQ ID NO: 620865 - RNA, 24 nt, Human
aucauaccauugcacuccagccug

SEQ ID NO: 620866 - RNA, 19 nt, Human
augcccagacucagguaac

SEQ ID NO: 620867 - RNA, 27 nt, Human
auggacagagaagacagaacagaacag

SEQ ID NO: 620868 - RNA, 23 nt, Human
auggcagaaaaacauggauugug

SEQ ID NO: 620869 - RNA, 23 nt, Human
auguguauauauauguauauaua

SEQ ID NO: 620870 - RNA, 23 nt, Human
auguuguauucagaaccuguagg

SEQ ID NO: 620871 - RNA, 24 nt, Human
auugcacuccagccugggcaacaa

SEQ ID NO: 620872 - RNA, 24 nt, Human
auugcagaagaaguuguuaaggaa

SEQ ID NO: 620873 - RNA, 21 nt, Human
auuuagagagagcuucaucgu

SEQ ID NO: 620874 - RNA, 22 nt, Human
auuucaccuugguccugugauc

SEQ ID NO: 620875 - RNA, 19 nt, Human
auuugcacacucccucccc

SEQ ID NO: 620876 - RNA, 19 nt, Human
auuuguuggucuccaucgu

SEQ ID NO: 620877 - RNA, 25 nt, Human
caaaaucucugcagcacugugacau

SEQ ID NO: 620878 - RNA, 24 nt, Human
caacauggagaaacccugucucua

SEQ ID NO: 620879 - RNA, 26 nt, Human
caacauggagaucagccuaaccaaca

SEQ ID NO: 620880 - RNA, 24 nt, Human
caaggcagguggaucaccaaaggu

SEQ ID NO: 620881 - RNA, 22 nt, Human
caaucugugagccauuacaacc

SEQ ID NO: 620882 - RNA, 18 nt, Human
cacacacacacacacaca

SEQ ID NO: 620883 - RNA, 20 nt, Human
cacacacacacacacacaca

SEQ ID NO: 620884 - RNA, 20 nt, Human
cacacacacacacacacaca

SEQ ID NO: 620885 - RNA, 20 nt, Human
cacacacacacacacacaca

SEQ ID NO: 620886 - RNA, 22 nt, Human
cacacacacacacacacacaca

SEQ ID NO: 620887 - RNA, 26 nt, Human
cacacacagugaccccccaaauuuca

SEQ ID NO: 620888 - RNA, 22 nt, Human
cacagguggggugaggaauaca

SEQ ID NO: 620889 - RNA, 20 nt, Human
caccuugaaaaaagaacagg

SEQ ID NO: 620890 - RNA, 24 nt, Human
cacuccagccugggcaacaagagc

SEQ ID NO: 620891 - RNA, 19 nt, Human
cagaaaacuggaaaacugc

SEQ ID NO: 620892 - RNA, 18 nt, Human
cagacucagguaaccaug

SEQ ID NO: 620893 - RNA, 18 nt, Human
cagaucugaccaacaugg

SEQ ID NO: 620894 - RNA, 24 nt, Human
cagcacuuugggaggccaaggcag

SEQ ID NO: 620895 - RNA, 25 nt, Human
cagcacuuugggaggccaaggcagg

SEQ ID NO: 620896 - RNA, 24 nt, Human
cagccuaaccaacauggagaaacc

SEQ ID NO: 620897 - RNA, 23 nt, Human
caggacauaaccucuucaaaaaa

SEQ ID NO: 620898 - RNA, 21 nt, Human
caggagguggagguugcggug

SEQ ID NO: 620899 - RNA, 20 nt, Human
caggccccccaaaucuggcc

SEQ ID NO: 620900 - RNA, 23 nt, Human
caggccccccaaaucuggccaua

SEQ ID NO: 620901 - RNA, 24 nt, Human
caggccuguaaucccagcacuuug

SEQ ID NO: 620902 - RNA, 20 nt, Human
cagucucccauagcacuccc

SEQ ID NO: 620903 - RNA, 18 nt, Human
cauugcacuccagccugg

SEQ ID NO: 620904 - RNA, 19 nt, Human
cauugcacuccagccuggg

SEQ ID NO: 620905 - RNA, 21 nt, Human
cauugcacuccagccugggca

SEQ ID NO: 620906 - RNA, 24 nt, Human
cauugcacuccagccugggcaaca

SEQ ID NO: 620907 - RNA, 21 nt, Human
ccacgacccagcuggucucgg

SEQ ID NO: 620908 - RNA, 19 nt, Human
ccauggcagaaaaacaugg

SEQ ID NO: 620909 - RNA, 24 nt, Human
ccauuacaaccuccaaaagggccc

SEQ ID NO: 620910 - RNA, 20 nt, Human
ccauugcacuccagccuggg

SEQ ID NO: 620911 - RNA, 21 nt, Human
ccauugcacuccagccugggc

SEQ ID NO: 620912 - RNA, 23 nt, Human
ccauugcacuccagccugggcaa

SEQ ID NO: 620913 - RNA, 24 nt, Human
ccauugcacuccagccugggcaac

SEQ ID NO: 620914 - RNA, 24 nt, Human
cccaaguagcuaaaacuauaggca

SEQ ID NO: 620915 - RNA, 19 nt, Human
cccauagcacucccaggcu

SEQ ID NO: 620916 - RNA, 23 nt, Human
cccccuggguguagccaucucuu

SEQ ID NO: 620917 - RNA, 18 nt, Human
cccuccccuuuugaaaau

SEQ ID NO: 620918 - RNA, 22 nt, Human
cccugggcucaggccacccucc

SEQ ID NO: 620919 - RNA, 24 nt, Human
cccugggcucaggccacccuccca

SEQ ID NO: 620920 - RNA, 20 nt, Human
cccuugugauuuccuaugcc

SEQ ID NO: 620921 - RNA, 21 nt, Human
ccuaaaccacaaacaauagca

SEQ ID NO: 620922 - RNA, 22 nt, Human
ccuaaaccacaaacaauagcau

SEQ ID NO: 620923 - RNA, 20 nt, Human
ccucugaagcugauggugag

SEQ ID NO: 620924 - RNA, 18 nt, Human
ccucuggggccuacauca

SEQ ID NO: 620925 - RNA, 21 nt, Human
ccugcaguacugaccucacca

SEQ ID NO: 620926 - RNA, 21 nt, Human
ccugugaucucgcccugccuc

SEQ ID NO: 620927 - RNA, 22 nt, Human
cgauucccacucugcacuauau

SEQ ID NO: 620928 - RNA, 22 nt, Human
cucaaaguguggcugaacaauc

SEQ ID NO: 620929 - RNA, 24 nt, Human
cucaggccuguaaucccagcacuu

SEQ ID NO: 620930 - RNA, 24 nt, Human
cuccauuucaaaaaaaaaaaaaaa

SEQ ID NO: 620931 - RNA, 20 nt, Human
cucugcagcacugugacaug

SEQ ID NO: 620932 - RNA, 20 nt, Human
cugauggugagaugugccuc

SEQ ID NO: 620933 - RNA, 23 nt, Human
cugcaauuaaaaacaaacaaaaa

SEQ ID NO: 620934 - RNA, 21 nt, Human
cuggaacucaggagguggagg

SEQ ID NO: 620935 - RNA, 24 nt, Human
cugggcaacaagagcaaaacucca

SEQ ID NO: 620936 - RNA, 24 nt, Human
gaaaauauuuagagagagcuucau

SEQ ID NO: 620937 - RNA, 21 nt, Human
gaacaugcuauugggaaauga

SEQ ID NO: 620938 - RNA, 22 nt, Human
gaacucaggagguggagguugc

SEQ ID NO: 620939 - RNA, 19 nt, Human
gaaucacuggaacucagga

SEQ ID NO: 620940 - RNA, 20 nt, Human
gaauucagccucauaaacua

SEQ ID NO: 620941 - RNA, 21 nt, Human
gaccucaccauccaugacccc

SEQ ID NO: 620942 - RNA, 21 nt, Human
gagaaacccugucucuacuaa

SEQ ID NO: 620943 - RNA, 23 nt, Human
gagaagggggcggggagggggga

SEQ ID NO: 620944 - RNA, 23 nt, Human
gagaaucacuggaacucaggagg

SEQ ID NO: 620945 - RNA, 23 nt, Human
gagaucagccuaaccaacaugga

SEQ ID NO: 620946 - RNA, 21 nt, Human
gagccugucccuuucuuucuc

SEQ ID NO: 620947 - RNA, 21 nt, Human
gaggauguauauuaccucagg

SEQ ID NO: 620948 - RNA, 21 nt, Human
gagguggagguugcggugagc

SEQ ID NO: 620949 - RNA, 22 nt, Human
gagguugcggugagccaagauc

SEQ ID NO: 620950 - RNA, 22 nt, Human
gaugcaucuaaggccaaucugu

SEQ ID NO: 620951 - RNA, 23 nt, Human
gcaaaaaugcaaaaggagaccug

SEQ ID NO: 620952 - RNA, 23 nt, Human
gccacacuggcagccacuaacca

SEQ ID NO: 620953 - RNA, 26 nt, Human
gccacacuggcagccacuaaccaaca

SEQ ID NO: 620954 - RNA, 26 nt, Human
gccuugugauauucuauuaccuugua

SEQ ID NO: 620955 - RNA, 24 nt, Human
ggaaauucccaccuaauaaauuuu

SEQ ID NO: 620956 - RNA, 20 nt, Human
ggagguugcggugagccaag

SEQ ID NO: 620957 - RNA, 24 nt, Human
ggagguugcggugagccaagauca

SEQ ID NO: 620958 - RNA, 20 nt, Human
ggcaaaaaugcaaaaggaga

SEQ ID NO: 620959 - RNA, 23 nt, Human
ggccuguaaucccagcacuuugg

SEQ ID NO: 620960 - RNA, 24 nt, Human
ggccuguaaucccagcacuuuggg

SEQ ID NO: 620961 - RNA, 19 nt, Human
ggcggggaggggggagacc

SEQ ID NO: 620962 - RNA, 21 nt, Human
ggcucaggccuguaaucccag

SEQ ID NO: 620963 - RNA, 29 nt, Human
gguauacauacauauguguauauauuaca

SEQ ID NO: 620964 - RNA, 23 nt, Human
gguggcucaggccuguaauccca

SEQ ID NO: 620965 - RNA, 24 nt, Human
gguggcucaggccuguaaucccag

SEQ ID NO: 620966 - RNA, 23 nt, Human
guaaagcaagaaaauauuuagag

SEQ ID NO: 620967 - RNA, 24 nt, Human
guaaagcaagaaaauauuuagaga

SEQ ID NO: 620968 - RNA, 18 nt, Human
gucccuuuauuucucaag

SEQ ID NO: 620969 - RNA, 20 nt, Human
gucuuucuugaugccaagau

SEQ ID NO: 620970 - RNA, 22 nt, Human
gugacccacaccuauuugcaca

SEQ ID NO: 620971 - RNA, 21 nt, Human
guguauauauauguauauaaa

SEQ ID NO: 620972 - RNA, 19 nt, Human
guuguauucagaaccugua

SEQ ID NO: 620973 - RNA, 24 nt, Human
guugugcagcggguuaaaaucagu

SEQ ID NO: 620974 - RNA, 24 nt, Human
uaaaacuauaggcaugcaucacca

SEQ ID NO: 620975 - RNA, 25 nt, Human
uaaaauggacagagaagacagaaca

SEQ ID NO: 620976 - RNA, 22 nt, Human
uaaacaugaucaucacagagga

SEQ ID NO: 620977 - RNA, 22 nt, Human
uaaaguggugaagaacuuggca

SEQ ID NO: 620978 - RNA, 20 nt, Human
uaacaacacucauauccuua

SEQ ID NO: 620979 - RNA, 19 nt, Human
uaacagaagugagaagaga

SEQ ID NO: 620980 - RNA, 19 nt, Human
uaacagaagugagaagaga

SEQ ID NO: 620981 - RNA, 24 nt, Human
uaacagcaauguuuaggaaacaag

SEQ ID NO: 620982 - RNA, 21 nt, Human
uaagcuggucuagaaccccug

SEQ ID NO: 620983 - RNA, 20 nt, Human
uacagcauguguguuugagc

SEQ ID NO: 620984 - RNA, 21 nt, Human
uacaggcaaucuccauucccu

SEQ ID NO: 620985 - RNA, 24 nt, Human
uacaggcaaucuccauucccuuuu

SEQ ID NO: 620986 - RNA, 26 nt, Human
uacauacauauguguauauauaugua

SEQ ID NO: 620987 - RNA, 19 nt, Human
uacauauguguauauauau

SEQ ID NO: 620988 - RNA, 18 nt, Human
uacaucaucuuggcuucu

SEQ ID NO: 620989 - RNA, 21 nt, Human
uaccagaaugagggcaagcaa

SEQ ID NO: 620990 - RNA, 24 nt, Human
uaccauugcacuccagccugggca

SEQ ID NO: 620991 - RNA, 23 nt, Human
uagaaccccugggcucaggccac

SEQ ID NO: 620992 - RNA, 23 nt, Human
uaggcaugaggaaagagcaaaug

SEQ ID NO: 620993 - RNA, 22 nt, Human
uauaaaguggugaagaacuugg

SEQ ID NO: 620994 - RNA, 19 nt, Human
uauauauauacacauacac

SEQ ID NO: 620995 - RNA, 23 nt, Human
uauauauauguauauauauauac

SEQ ID NO: 620996 - RNA, 24 nt, Human
uauauauauguauauauauauaca

SEQ ID NO: 620997 - RNA, 19 nt, Human
uauauauguauauauauau

SEQ ID NO: 620998 - RNA, 18 nt, Human
uauauguauauauauaua

SEQ ID NO: 620999 - RNA, 21 nt, Human
uauggaugguuucacuccuga

SEQ ID NO: 621000 - RNA, 22 nt, Human
uauguauauauauauacacaua

SEQ ID NO: 621001 - RNA, 22 nt, Human
uauguguauauauauguauaua

SEQ ID NO: 621002 - RNA, 20 nt, Human
uauguugccuaagcuggucu

SEQ ID NO: 621003 - RNA, 23 nt, Human
uauguugccuaagcuggucuaga

SEQ ID NO: 621004 - RNA, 24 nt, Human
uauguugccuaagcuggucuagaa

SEQ ID NO: 621005 - RNA, 19 nt, Human
ucaccuugguccugugauc

SEQ ID NO: 621006 - RNA, 18 nt, Human
ucaggagguggagguugc

SEQ ID NO: 621007 - RNA, 23 nt, Human
ucaggccacccucccaaguagcu

SEQ ID NO: 621008 - RNA, 23 nt, Human
ucauaccauugcacuccagccug

SEQ ID NO: 621009 - RNA, 18 nt, Human
uccaguaaagcaagaaaa

SEQ ID NO: 621010 - RNA, 22 nt, Human
uccauacugcaaaaauuagaaa

SEQ ID NO: 621011 - RNA, 24 nt, Human
ucccaaguagcuaaaacuauaggc

SEQ ID NO: 621012 - RNA, 23 nt, Human
ucccaggcuuauuaggaagagga

SEQ ID NO: 621013 - RNA, 18 nt, Human
ucccauagcacucccagg

SEQ ID NO: 621014 - RNA, 23 nt, Human
ucccuuucuuucucauaaggaau

SEQ ID NO: 621015 - RNA, 18 nt, Human
ucgugugaaaacaugagg

SEQ ID NO: 621016 - RNA, 22 nt, Human
ucuccacgacccagcuggucuc

SEQ ID NO: 621017 - RNA, 19 nt, Human
ucucuacuaaaaauacaaa

SEQ ID NO: 621018 - RNA, 23 nt, Human
ucugccccggacacccagcuuua

SEQ ID NO: 621019 - RNA, 23 nt, Human
ucuugcuauguugccuaagcugg

SEQ ID NO: 621020 - RNA, 24 nt, Human
ucuugcuauguugccuaagcuggu

SEQ ID NO: 621021 - RNA, 20 nt, Human
ugaaauagaccccagucucc

SEQ ID NO: 621022 - RNA, 19 nt, Human
ugaagcagcuuugaaacug

SEQ ID NO: 621023 - RNA, 19 nt, Human
ugacaauggugcccaaaac

SEQ ID NO: 621024 - RNA, 22 nt, Human
ugaccaugcuggcacucugauc

SEQ ID NO: 621025 - RNA, 19 nt, Human
ugagaagugagguacugca

SEQ ID NO: 621026 - RNA, 19 nt, Human
ugaggcaggagaaucacug

SEQ ID NO: 621027 - RNA, 21 nt, Human
ugaggcaggagaaucacugga

SEQ ID NO: 621028 - RNA, 23 nt, Human
ugaggcaggagaaucacuggaac

SEQ ID NO: 621029 - RNA, 23 nt, Human
ugaggcaggagaaucacuggaac

SEQ ID NO: 621030 - RNA, 25 nt, Human
ugaggcaggagaaucacuggaacuc

SEQ ID NO: 621031 - RNA, 18 nt, Human
ugaggugucauuggggaa

SEQ ID NO: 621032 - RNA, 25 nt, Human
ugagugcuuacaggaaaaugugcug

SEQ ID NO: 621033 - RNA, 27 nt, Human
ugagugcuuacaggaaaaugugcuggg

SEQ ID NO: 621034 - RNA, 22 nt, Human
ugaucucgcccugccuccacuu

SEQ ID NO: 621035 - RNA, 20 nt, Human
ugaugaucuuugcacugcca

SEQ ID NO: 621036 - RNA, 23 nt, Human
ugaugccaagaucgccucagggc

SEQ ID NO: 621037 - RNA, 21 nt, Human
ugaugucugccccggacaccc

SEQ ID NO: 621038 - RNA, 19 nt, Human
ugcacuccagccugggcaa

SEQ ID NO: 621039 - RNA, 22 nt, Human
ugcacuccagccugggcaacaa

SEQ ID NO: 621040 - RNA, 22 nt, Human
ugccaauaauuaaagauggcaa

SEQ ID NO: 621041 - RNA, 19 nt, Human
ugcgguauucucuuauggu

SEQ ID NO: 621042 - RNA, 22 nt, Human
uggaucaccaaaggucagaucu

SEQ ID NO: 621043 - RNA, 20 nt, Human
uggcagccacuaaccaacag

SEQ ID NO: 621044 - RNA, 22 nt, Human
uggcucaggccuguaaucccag

SEQ ID NO: 621045 - RNA, 24 nt, Human
uggcucaggccuguaaucccagca

SEQ ID NO: 621046 - RNA, 24 nt, Human
uggcugaagccauggcagaaaaac

SEQ ID NO: 621047 - RNA, 21 nt, Human
ugggacaaacucuguucaagc

SEQ ID NO: 621048 - RNA, 24 nt, Human
ugggaggccaaggcagguggauca

SEQ ID NO: 621049 - RNA, 24 nt, Human
uggggucuugcuauguugccuaag

SEQ ID NO: 621050 - RNA, 21 nt, Human
uggguuagggucuccacgacc

SEQ ID NO: 621051 - RNA, 23 nt, Human
ugguaaggguuauucuggugagg

SEQ ID NO: 621052 - RNA, 23 nt, Human
uguaaaaacuggauauaaagaaa

SEQ ID NO: 621053 - RNA, 18 nt, Human
uguauauauauguauaua

SEQ ID NO: 621054 - RNA, 22 nt, Human
uguauauauauguauauauaua

SEQ ID NO: 621055 - RNA, 20 nt, Human
uguauauauauguauauauu

SEQ ID NO: 621056 - RNA, 20 nt, Human
uguauauuaccucaggaccc

SEQ ID NO: 621057 - RNA, 20 nt, Human
ugucugugacccacaccuau

SEQ ID NO: 621058 - RNA, 20 nt, Human
ugugcagcggguuaaaauca

SEQ ID NO: 621059 - RNA, 22 nt, Human
ugugcugggaacaggcccccca

SEQ ID NO: 621060 - RNA, 20 nt, Human
uguguauauauauguauaua

SEQ ID NO: 621061 - RNA, 19 nt, Human
uguugcaggaagucaggga

SEQ ID NO: 621062 - RNA, 21 nt, Human
uguuuaucacaggcuuacugu

SEQ ID NO: 621063 - RNA, 26 nt, Human
uuaauacuuuuauaauuucuuaugcc

SEQ ID NO: 621064 - RNA, 27 nt, Human
uuaaugcuaugaucuuaggaaucuaau

SEQ ID NO: 621065 - RNA, 19 nt, Human
uuagguaccaucaugagcu

SEQ ID NO: 621066 - RNA, 22 nt, Human
uuagucagaccaguugaucuca

SEQ ID NO: 621067 - RNA, 20 nt, Human
uucacuccugacaugcucug

SEQ ID NO: 621068 - RNA, 24 nt, Human
uucauggacacuuaucacuucccc

SEQ ID NO: 621069 - RNA, 24 nt, Human
uucauggacauuuauuaguucccc

SEQ ID NO: 621070 - RNA, 26 nt, Human
uuccuaaaccacaaacaauagcauga

SEQ ID NO: 621071 - RNA, 22 nt, Human
uuccugagugcuuacaggaaaa

SEQ ID NO: 621072 - RNA, 19 nt, Human
uucuaagccauuuggucug

SEQ ID NO: 621073 - RNA, 21 nt, Human
uucucagccuauccauacugc

SEQ ID NO: 621074 - RNA, 22 nt, Human
uugagauggggucuugcuaugu

SEQ ID NO: 621075 - RNA, 20 nt, Human
uugcggugagccaagaucau

SEQ ID NO: 621076 - RNA, 19 nt, Human
uuuaggaaacaagagagaa

SEQ ID NO: 621077 - RNA, 24 nt, Human
uuuaucaguaaauaaacaugauca

SEQ ID NO: 621078 - RNA, 22 nt, Human
uuuuguacucugucccuuuauu

SEQ ID NO: 621079 - RNA, 24 nt, Human
uuuuuuuuuugagauggggucuug

SEQ ID NO: 621080 - RNA, 19 nt, Human
aagcaauagaaacugucca

SEQ ID NO: 621081 - RNA, 18 nt, Human
aagggauggaaaaaagga

SEQ ID NO: 621082 - RNA, 21 nt, Human
acccuccgcccucuuccgccg

SEQ ID NO: 621083 - RNA, 18 nt, Human
agggauggaaaaaaggaa

SEQ ID NO: 621084 - RNA, 22 nt, Human
caccauggacgcccacccggag

SEQ ID NO: 621085 - RNA, 18 nt, Human
cacccggaguuucaccgc

SEQ ID NO: 621086 - RNA, 21 nt, Human
caccgcugccgcgggaccccc

SEQ ID NO: 621087 - RNA, 19 nt, Human
caccuccuccgcggagacc

SEQ ID NO: 621088 - RNA, 21 nt, Human
cagcaccauggacgcccaccc

SEQ ID NO: 621089 - RNA, 24 nt, Human
cagcaccauggacgcccacccgga

SEQ ID NO: 621090 - RNA, 23 nt, Human
cagcagcaccauggacgcccacc

SEQ ID NO: 621091 - RNA, 18 nt, Human
caucccacuacccuccgc

SEQ ID NO: 621092 - RNA, 19 nt, Human
caucccacuacccuccgcc

SEQ ID NO: 621093 - RNA, 19 nt, Human
ccauggacgcccacccgga

SEQ ID NO: 621094 - RNA, 20 nt, Human
cccacuacccuccgcccucu

SEQ ID NO: 621095 - RNA, 19 nt, Human
ccccaucccacuacccucc

SEQ ID NO: 621096 - RNA, 20 nt, Human
ccccccgcccacuccacaca

SEQ ID NO: 621097 - RNA, 22 nt, Human
cccucuuccgccgccgccgcua

SEQ ID NO: 621098 - RNA, 23 nt, Human
cgcccacuccacacacucuccca

SEQ ID NO: 621099 - RNA, 21 nt, Human
cgccgccuccuccaccuccuc

SEQ ID NO: 621100 - RNA, 19 nt, Human
cggcugcgaugggcauggc

SEQ ID NO: 621101 - RNA, 22 nt, Human
cuacccuccgcccucuuccgcc

SEQ ID NO: 621102 - RNA, 21 nt, Human
cucuuccgccgccgccgccgc

SEQ ID NO: 621103 - RNA, 20 nt, Human
cugccgcgggacccccaucc

SEQ ID NO: 621104 - RNA, 21 nt, Human
gacccccaucccacuacccuc

SEQ ID NO: 621105 - RNA, 21 nt, Human
gggcauggcucaggggcccgg

SEQ ID NO: 621106 - RNA, 22 nt, Human
gggcauggcucaggggcccggg

SEQ ID NO: 621107 - RNA, 18 nt, Human
ucaggggcccggggagga

SEQ ID NO: 621108 - RNA, 22 nt, Human
ucccacuacccuccgcccucuu

SEQ ID NO: 621109 - RNA, 20 nt, Human
uccgcggagaccccccgccc

SEQ ID NO: 621110 - RNA, 27 nt, Human
uccgcggagaccccccgcccacuccaa

SEQ ID NO: 621111 - RNA, 27 nt, Human
ucuuccgccgccgccgccgccuccucc

SEQ ID NO: 621112 - RNA, 22 nt, Human
ugccgcgggacccccaucccac

SEQ ID NO: 621113 - RNA, 24 nt, Human
ugcgaugggcauggcucaggggcc

SEQ ID NO: 621114 - RNA, 21 nt, Human
uggacgcccacccggaguuuc

SEQ ID NO: 621115 - RNA, 23 nt, Human
ugggcauggcucaggggcccggg

SEQ ID NO: 621116 - RNA, 19 nt, Human
uguucaguugcuuucaaau

SEQ ID NO: 621117 - RNA, 24 nt, Human
uuuuuuuuuuuuuuuuuuaauuag

SEQ ID NO: 621118 - RNA, 28 nt, Human
aaaaagaagcaaagaaaaguaaaaagga

SEQ ID NO: 621119 - RNA, 21 nt, Human
aaaacuaaaaagaagcaaaga

SEQ ID NO: 621120 - RNA, 24 nt, Human
aaacuaaaaagaagcaaagaaaag

SEQ ID NO: 621121 - RNA, 19 nt, Human
aaagaaaaaaagaaagaaa

SEQ ID NO: 621122 - RNA, 22 nt, Human
aaagaaaaaaagaaagaaagag

SEQ ID NO: 621123 - RNA, 21 nt, Human
aaagaugcagaauuuaucagu

SEQ ID NO: 621124 - RNA, 19 nt, Human
aaagugcugggauuacagg

SEQ ID NO: 621125 - RNA, 19 nt, Human
aaagugcugggauuacagg

SEQ ID NO: 621126 - RNA, 23 nt, Human
aaagugcugggauuacagguauu

SEQ ID NO: 621127 - RNA, 18 nt, Human
aacccauuccugucccca

SEQ ID NO: 621128 - RNA, 22 nt, Human
aacucccgggcccaagcaaucc

SEQ ID NO: 621129 - RNA, 31 nt, Human
aagaaaaaaacuaaaaagaagcaaagaaaaa

SEQ ID NO: 621130 - RNA, 21 nt, Human
aagaagaaaaaaacuaaaaag

SEQ ID NO: 621131 - RNA, 25 nt, Human
aagaagcaaagaaaaguaaaaagga

SEQ ID NO: 621132 - RNA, 23 nt, Human
aagcaaaaauaacuucaagcuau

SEQ ID NO: 621133 - RNA, 25 nt, Human
aagcaauccucuugccucagccucc

SEQ ID NO: 621134 - RNA, 24 nt, Human
aagcauaaaaucaauuagcaucau

SEQ ID NO: 621135 - RNA, 18 nt, Human
aagugcugggauuacagg

SEQ ID NO: 621136 - RNA, 19 nt, Human
aagugcugggauuacaggu

SEQ ID NO: 621137 - RNA, 20 nt, Human
aaguuuucaugaagcaaucc

SEQ ID NO: 621138 - RNA, 24 nt, Human
acccauuccuguccccaguucccu

SEQ ID NO: 621139 - RNA, 24 nt, Human
agaaaaagcaaaaauaacuucaag

SEQ ID NO: 621140 - RNA, 26 nt, Human
agaaaaagucugacaauuccgacgac

SEQ ID NO: 621141 - RNA, 20 nt, Human
agaaagaaaaaaagaaagaa

SEQ ID NO: 621142 - RNA, 27 nt, Human
agagagaaaauggaauaaaagggaccc

SEQ ID NO: 621143 - RNA, 22 nt, Human
agagagaaaauggaauaaaagu

SEQ ID NO: 621144 - RNA, 19 nt, Human
agcaauccucuugccucag

SEQ ID NO: 621145 - RNA, 25 nt, Human
agcaauccucuugccucagccuccu

SEQ ID NO: 621146 - RNA, 18 nt, Human
aggaagaagaaaaaaacu

SEQ ID NO: 621147 - RNA, 19 nt, Human
aggaagaagaaaaaaacua

SEQ ID NO: 621148 - RNA, 24 nt, Human
aggaagaagaaaaaaacuaaaaag

SEQ ID NO: 621149 - RNA, 25 nt, Human
aggaagaagaaaaaaacuaaaaaga

SEQ ID NO: 621150 - RNA, 26 nt, Human
aggaagaagaaaaaaacuaaaaagaa

SEQ ID NO: 621151 - RNA, 23 nt, Human
aguuacuaguauaaugcaccaaa

SEQ ID NO: 621152 - RNA, 18 nt, Human
auagcucacugcaacuuc

SEQ ID NO: 621153 - RNA, 20 nt, Human
auccucuugccucagccucc

SEQ ID NO: 621154 - RNA, 19 nt, Human
auggcugcucucacacuac

SEQ ID NO: 621155 - RNA, 19 nt, Human
auuccuguccccaguuccc

SEQ ID NO: 621156 - RNA, 22 nt, Human
caaaacagggucucauucuguc

SEQ ID NO: 621157 - RNA, 25 nt, Human
caaacucccgggcccaagcaauccu

SEQ ID NO: 621158 - RNA, 26 nt, Human
caaagugcugggauuacagguauuuu

SEQ ID NO: 621159 - RNA, 24 nt, Human
caacuucaaacucccgggcccaag

SEQ ID NO: 621160 - RNA, 27 nt, Human
caagugauccuccuguguuggccuccc

SEQ ID NO: 621161 - RNA, 24 nt, Human
cacaaagauuacauggcucacaaa

SEQ ID NO: 621162 - RNA, 21 nt, Human
cacugcaacuucaaacucccg

SEQ ID NO: 621163 - RNA, 23 nt, Human
cacugcaacuucaaacucccggg

SEQ ID NO: 621164 - RNA, 21 nt, Human
cagaaagaaaaaaagaaagaa

SEQ ID NO: 621165 - RNA, 24 nt, Human
caggaucucguuauaaugcccagg

SEQ ID NO: 621166 - RNA, 18 nt, Human
cauggcucacaaagucua

SEQ ID NO: 621167 - RNA, 18 nt, Human
cauucaaacccauuccug

SEQ ID NO: 621168 - RNA, 21 nt, Human
cauucaaacccauuccugucc

SEQ ID NO: 621169 - RNA, 22 nt, Human
cauucugucacccagguuagug

SEQ ID NO: 621170 - RNA, 21 nt, Human
ccaaagugcugggauuacagg

SEQ ID NO: 621171 - RNA, 21 nt, Human
ccaaagugcugggauuacagg

SEQ ID NO: 621172 - RNA, 22 nt, Human
ccaaagugcugggauuacaggu

SEQ ID NO: 621173 - RNA, 24 nt, Human
ccaaagugcugggauuacagguau

SEQ ID NO: 621174 - RNA, 18 nt, Human
cccgggcccaagcaaucc

SEQ ID NO: 621175 - RNA, 24 nt, Human
ccucuugccucagccuccugauua

SEQ ID NO: 621176 - RNA, 21 nt, Human
cucacugcaacuucaaacucc

SEQ ID NO: 621177 - RNA, 24 nt, Human
cucacugcaacuucaaacucccgg

SEQ ID NO: 621178 - RNA, 25 nt, Human
cucucacacuacaauggcagaguua

SEQ ID NO: 621179 - RNA, 19 nt, Human
cugauuagcugggacuaca

SEQ ID NO: 621180 - RNA, 20 nt, Human
cuucuagugaacuguuuuca

SEQ ID NO: 621181 - RNA, 24 nt, Human
cuugccucagccuccugauuagcu

SEQ ID NO: 621182 - RNA, 27 nt, Human
gaaaaaaacuaaaaagaagcaaagaaa

SEQ ID NO: 621183 - RNA, 23 nt, Human
gaagaaaaaaacuaaaaagaagc

SEQ ID NO: 621184 - RNA, 19 nt, Human
ggaagaagaaaaaaacuaa

SEQ ID NO: 621185 - RNA, 22 nt, Human
guuccagaaagaaaaaaagaaa

SEQ ID NO: 621186 - RNA, 24 nt, Human
uaaaaagaagcaaagaaaaguaaa

SEQ ID NO: 621187 - RNA, 19 nt, Human
uaagaaaaagcaaaaauaa

SEQ ID NO: 621188 - RNA, 20 nt, Human
uaaguagaugccacaaagaa

SEQ ID NO: 621189 - RNA, 19 nt, Human
uaauaaaaacaaucacgua

SEQ ID NO: 621190 - RNA, 24 nt, Human
uagaaaaagucugacaauuccuaa

SEQ ID NO: 621191 - RNA, 20 nt, Human
uagcccacuagcuauuuuua

SEQ ID NO: 621192 - RNA, 24 nt, Human
uauaaugcccaggcuugucucaaa

SEQ ID NO: 621193 - RNA, 21 nt, Human
uaucagcauccuauuuuuucu

SEQ ID NO: 621194 - RNA, 22 nt, Human
uaucuaagaaaaagcaaaaaua

SEQ ID NO: 621195 - RNA, 21 nt, Human
ucaaacccauuccugucccca

SEQ ID NO: 621196 - RNA, 23 nt, Human
ucaaaguacauaauuuauaucag

SEQ ID NO: 621197 - RNA, 24 nt, Human
ucacugcaacuucaaacucccggg

SEQ ID NO: 621198 - RNA, 18 nt, Human
ucagcauccuauuuuuuc

SEQ ID NO: 621199 - RNA, 23 nt, Human
uccagaaagaaaaaaagaaagaa

SEQ ID NO: 621200 - RNA, 24 nt, Human
uccagaaagaaaaaaagaaagaaa

SEQ ID NO: 621201 - RNA, 25 nt, Human
uccagaaagaaaaaaagaaagaaag

SEQ ID NO: 621202 - RNA, 23 nt, Human
ucccaaagugcugggauuacagg

SEQ ID NO: 621203 - RNA, 21 nt, Human
ucccgggcccaagcaauccuc

SEQ ID NO: 621204 - RNA, 23 nt, Human
ucccgggcccaagcaauccucuu

SEQ ID NO: 621205 - RNA, 22 nt, Human
uccuguccccaguucccucacc

SEQ ID NO: 621206 - RNA, 21 nt, Human
ucuaaaauauuuacuguuugg

SEQ ID NO: 621207 - RNA, 19 nt, Human
ucucauucugucacccagg

SEQ ID NO: 621208 - RNA, 19 nt, Human
ucucauucugucacccagg

SEQ ID NO: 621209 - RNA, 22 nt, Human
ucucauucugucacccagguua

SEQ ID NO: 621210 - RNA, 23 nt, Human
ucucauucugucacccagguuag

SEQ ID NO: 621211 - RNA, 24 nt, Human
ucugucacccagguuagugugcaa

SEQ ID NO: 621212 - RNA, 20 nt, Human
ugacaauauaauaaaaacaa

SEQ ID NO: 621213 - RNA, 20 nt, Human
ugccauugaugaaacgucaa

SEQ ID NO: 621214 - RNA, 24 nt, Human
ugccucagccuccugauuagcugg

SEQ ID NO: 621215 - RNA, 23 nt, Human
ugcugggauuacagguauuuuga

SEQ ID NO: 621216 - RNA, 24 nt, Human
ugcugggauuacagguauuuugag

SEQ ID NO: 621217 - RNA, 21 nt, Human
uggaauaaaaguuugugagua

SEQ ID NO: 621218 - RNA, 19 nt, Human
uggcaagcuaucaccaugg

SEQ ID NO: 621219 - RNA, 24 nt, Human
ugggacuacaggagugcaacacca

SEQ ID NO: 621220 - RNA, 24 nt, Human
uggugcauucauagcucacugcaa

SEQ ID NO: 621221 - RNA, 21 nt, Human
ugucucaaacuccagucucaa

SEQ ID NO: 621222 - RNA, 23 nt, Human
uguguuggccucccaaagugcug

SEQ ID NO: 621223 - RNA, 18 nt, Human
uuagcaucauucauuuag

SEQ ID NO: 621224 - RNA, 21 nt, Human
uucccucaccacagguuccua

SEQ ID NO: 621225 - RNA, 26 nt, Human
uuuaggaagaagaaaaaaacuaaaaa

SEQ ID NO: 621226 - RNA, 22 nt, Human
uuugagacuuuuuuaaagaugc

SEQ ID NO: 621227 - RNA, 18 nt, Human
uuuuuuuucaaaacaggg

SEQ ID NO: 621228 - RNA, 23 nt, Human
uuuuuuuuuuucaaaacaggguc

SEQ ID NO: 621229 - RNA, 26 nt, Human
uuuuuuuuuuucaaaacagggucuca

SEQ ID NO: 621230 - RNA, 24 nt, Human
uuuuuuuuuuuuuucaaaacaggg

SEQ ID NO: 621231 - RNA, 21 nt, Human
aaaagaaagaaggucuuccaa

SEQ ID NO: 621232 - RNA, 22 nt, Human
acaguggucucuucccuguccu

SEQ ID NO: 621233 - RNA, 20 nt, Human
accagcacacccuaggcaga

SEQ ID NO: 621234 - RNA, 21 nt, Human
accucuggggagggagcaagu

SEQ ID NO: 621235 - RNA, 20 nt, Human
caguggucucuucccugucc

SEQ ID NO: 621236 - RNA, 21 nt, Human
ccccgcugggaccuucucucu

SEQ ID NO: 621237 - RNA, 23 nt, Human
ccccgcugggaccuucucucuca

SEQ ID NO: 621238 - RNA, 19 nt, Human
ccucuggggagggagcaag

SEQ ID NO: 621239 - RNA, 24 nt, Human
cgcucuguugcccaggcuggagug

SEQ ID NO: 621240 - RNA, 21 nt, Human
cgcuuugcccugaaaccugua

SEQ ID NO: 621241 - RNA, 21 nt, Human
cucacaguccucuccacaguc

SEQ ID NO: 621242 - RNA, 21 nt, Human
cuccacagucauuggccaagc

SEQ ID NO: 621243 - RNA, 21 nt, Human
cucgcucuguugcccaggcug

SEQ ID NO: 621244 - RNA, 24 nt, Human
cucgcucuguugcccaggcuggag

SEQ ID NO: 621245 - RNA, 19 nt, Human
gcccaggcuggagugcagu

SEQ ID NO: 621246 - RNA, 25 nt, Human
gcucuguugcccaggcuggagugca

SEQ ID NO: 621247 - RNA, 21 nt, Human
gcuggagugcaguggucucug

SEQ ID NO: 621248 - RNA, 24 nt, Human
uauuuauuuauugagauggagucu

SEQ ID NO: 621249 - RNA, 25 nt, Human
uauuuauuuauuuauuuauuuauug

SEQ ID NO: 621250 - RNA, 24 nt, Human
ucgcucuguugcccaggcuggagu

SEQ ID NO: 621251 - RNA, 19 nt, Human
ucucgcucuguugcccagg

SEQ ID NO: 621252 - RNA, 23 nt, Human
ucucgcucuguugcccaggcugg

SEQ ID NO: 621253 - RNA, 24 nt, Human
ucucgcucuguugcccaggcugga

SEQ ID NO: 621254 - RNA, 26 nt, Human
ucucgcucuguugcccaggcuggagu

SEQ ID NO: 621255 - RNA, 18 nt, Human
ucuguugcccaggcugga

SEQ ID NO: 621256 - RNA, 24 nt, Human
ucuguugcccaggcuggagugcag

SEQ ID NO: 621257 - RNA, 22 nt, Human
ucuuauuccucuggcugucauc

SEQ ID NO: 621258 - RNA, 20 nt, Human
ugaaaaggacaaaccagcaa

SEQ ID NO: 621259 - RNA, 22 nt, Human
ugagauggagucucgcucuguu

SEQ ID NO: 621260 - RNA, 18 nt, Human
ugcccaggcuggagugca

SEQ ID NO: 621261 - RNA, 21 nt, Human
ugcccaggcuggagugcagug

SEQ ID NO: 621262 - RNA, 22 nt, Human
ugcccaggcuggagugcagugg

SEQ ID NO: 621263 - RNA, 22 nt, Human
ugcccugaaaccuguaccagac

SEQ ID NO: 621264 - RNA, 20 nt, Human
ugccugagcuucacuggccc

SEQ ID NO: 621265 - RNA, 19 nt, Human
uggaccaaguguuuaccuc

SEQ ID NO: 621266 - RNA, 20 nt, Human
uggaccaaguguuuaccucu

SEQ ID NO: 621267 - RNA, 24 nt, Human
uggagucucgcucuguugcccagg

SEQ ID NO: 621268 - RNA, 21 nt, Human
uggagugcaguggucucugca

SEQ ID NO: 621269 - RNA, 25 nt, Human
uugcccaggcuggagugcagugguc

SEQ ID NO: 621270 - RNA, 22 nt, Human
uuuauuuauuuauuuauuuauu

SEQ ID NO: 621271 - RNA, 24 nt, Human
uuuuuucuuuuuaaaaaauauuua

SEQ ID NO: 621272 - RNA, 26 nt, Human
uuuuuuuuuucuuuuuuuuucuuuuu

SEQ ID NO: 621273 - RNA, 25 nt, Human
uuuuuuuuuuuuuuuuuuucuuuuu

SEQ ID NO: 621274 - RNA, 25 nt, Human
aaaaaaaaaucuuucaacuuauaga

SEQ ID NO: 621275 - RNA, 21 nt, Human
aaaaaccccgcgacagucccc

SEQ ID NO: 621276 - RNA, 21 nt, Human
aaaagcaaaaaaaugaaacac

SEQ ID NO: 621277 - RNA, 30 nt, Human
aaacaaaaaugaaacuaaaagcagaccugg

SEQ ID NO: 621278 - RNA, 20 nt, Human
aaaccacaacagaaaaaccc

SEQ ID NO: 621279 - RNA, 20 nt, Human
aaagcccacgggaaaggucc

SEQ ID NO: 621280 - RNA, 19 nt, Human
aaccacaacagaaaaaccc

SEQ ID NO: 621281 - RNA, 20 nt, Human
aagcaaaaaaaugaaacacc

SEQ ID NO: 621282 - RNA, 22 nt, Human
aauaaaccacaacagaaaaacc

SEQ ID NO: 621283 - RNA, 20 nt, Human
acaacagaaaaaccccgcga

SEQ ID NO: 621284 - RNA, 18 nt, Human
acaguccccccuccagcu

SEQ ID NO: 621285 - RNA, 24 nt, Human
accccgcgacaguccccccuccag

SEQ ID NO: 621286 - RNA, 20 nt, Human
accugcacacaccugugcac

SEQ ID NO: 621287 - RNA, 22 nt, Human
acucaccagagcccuggcaaca

SEQ ID NO: 621288 - RNA, 20 nt, Human
agaaaaaccccgcgacaguc

SEQ ID NO: 621289 - RNA, 22 nt, Human
agaccaggggccagguggggga

SEQ ID NO: 621290 - RNA, 19 nt, Human
agcaguuguguuugaaggc

SEQ ID NO: 621291 - RNA, 20 nt, Human
agcgagggcugccucggcca

SEQ ID NO: 621292 - RNA, 19 nt, Human
agcuucuggaaucccugcu

SEQ ID NO: 621293 - RNA, 21 nt, Human
aggcagucaaagacugggagc

SEQ ID NO: 621294 - RNA, 23 nt, Human
aggcguucagcuggagcgagggc

SEQ ID NO: 621295 - RNA, 19 nt, Human
agggcugccucggccaucc

SEQ ID NO: 621296 - RNA, 21 nt, Human
aggggcuguggcaccaugagc

SEQ ID NO: 621297 - RNA, 23 nt, Human
agucaaagacugggagccuaaga

SEQ ID NO: 621298 - RNA, 18 nt, Human
aguuguguuugaaggcgg

SEQ ID NO: 621299 - RNA, 23 nt, Human
caaaaaaaaaaagucugaaagca

SEQ ID NO: 621300 - RNA, 24 nt, Human
caaaaaugaaacuaaaagcagacc

SEQ ID NO: 621301 - RNA, 20 nt, Human
caacagaaaaaccccgcgac

SEQ ID NO: 621302 - RNA, 22 nt, Human
caagguccacuuuucugcuggu

SEQ ID NO: 621303 - RNA, 20 nt, Human
caccagagcccuggcaacaa

SEQ ID NO: 621304 - RNA, 22 nt, Human
caccaugagccgcccacccucc

SEQ ID NO: 621305 - RNA, 24 nt, Human
cagcaaccccuagguuuaaggaca

SEQ ID NO: 621306 - RNA, 20 nt, Human
cagcaauggaggcguucagc

SEQ ID NO: 621307 - RNA, 19 nt, Human
cagcccuucgccucugccc

SEQ ID NO: 621308 - RNA, 22 nt, Human
caggagcagaaccagcccccaa

SEQ ID NO: 621309 - RNA, 22 nt, Human
caggggcuguggcaccaugagc

SEQ ID NO: 621310 - RNA, 23 nt, Human
caucgaaaugaauagaaaaaagg

SEQ ID NO: 621311 - RNA, 23 nt, Human
caugagccgcccacccuccaggg

SEQ ID NO: 621312 - RNA, 25 nt, Human
ccacaucguccucuguugggucccg

SEQ ID NO: 621313 - RNA, 19 nt, Human
ccacccuccagggcacagg

SEQ ID NO: 621314 - RNA, 18 nt, Human
ccagcccccuagcccuga

SEQ ID NO: 621315 - RNA, 18 nt, Human
ccauggccguggccucug

SEQ ID NO: 621316 - RNA, 18 nt, Human
ccauggccguggccucug

SEQ ID NO: 621317 - RNA, 24 nt, Human
cccaccagcccuucgccucugccc

SEQ ID NO: 621318 - RNA, 19 nt, Human
cccacgggaaagguccccc

SEQ ID NO: 621319 - RNA, 22 nt, Human
cccaugcgcaucacagugucca

SEQ ID NO: 621320 - RNA, 27 nt, Human
cccauggccauggccguggccucuguu

SEQ ID NO: 621321 - RNA, 20 nt, Human
ccccgcgacaguccccccuc

SEQ ID NO: 621322 - RNA, 21 nt, Human
cccgcgacaguccccccucca

SEQ ID NO: 621323 - RNA, 22 nt, Human
ccgcccgugugccggcaggggc

SEQ ID NO: 621324 - RNA, 18 nt, Human
ccggccgucccugccagg

SEQ ID NO: 621325 - RNA, 24 nt, Human
ccuagcccugaugaaacuuugcag

SEQ ID NO: 621326 - RNA, 20 nt, Human
ccuagguuuaaggacagguu

SEQ ID NO: 621327 - RNA, 23 nt, Human
ccucccaggagcaaggccagggu

SEQ ID NO: 621328 - RNA, 19 nt, Human
cgcuggccuugcccaugcg

SEQ ID NO: 621329 - RNA, 22 nt, Human
cgggaaaggucccccagcgaug

SEQ ID NO: 621330 - RNA, 20 nt, Human
cgggccggccgucccugccg

SEQ ID NO: 621331 - RNA, 20 nt, Human
cguggucagcccauucacuc

SEQ ID NO: 621332 - RNA, 24 nt, Human
cucauggagacauacguauguacg

SEQ ID NO: 621333 - RNA, 21 nt, Human
cucucuccauuuuuauuuucu

SEQ ID NO: 621334 - RNA, 24 nt, Human
cucugcccauggccauggccgugg

SEQ ID NO: 621335 - RNA, 19 nt, Human
cugucagucagucacgggg

SEQ ID NO: 621336 - RNA, 22 nt, Human
cuucggucauucugaacucacc

SEQ ID NO: 621337 - RNA, 24 nt, Human
gaaaagcaaaaaaaugaaacaccc

SEQ ID NO: 621338 - RNA, 22 nt, Human
gacagguucuaaacuagaccca

SEQ ID NO: 621339 - RNA, 20 nt, Human
gagccgcccacccuccaggg

SEQ ID NO: 621340 - RNA, 22 nt, Human
gcaauggaggcguucagcugga

SEQ ID NO: 621341 - RNA, 20 nt, Human
gcagcuucuggaaucccugc

SEQ ID NO: 621342 - RNA, 20 nt, Human
gcauggguaggaaaaccagg

SEQ ID NO: 621343 - RNA, 19 nt, Human
gccaacaauccucucucca

SEQ ID NO: 621344 - RNA, 22 nt, Human
gccaacaauccucucuccauuu

SEQ ID NO: 621345 - RNA, 22 nt, Human
gcccacgggaaaggucccccag

SEQ ID NO: 621346 - RNA, 21 nt, Human
gcccuggcaacaaucuccccu

SEQ ID NO: 621347 - RNA, 19 nt, Human
gccugcaagagacacggaa

SEQ ID NO: 621348 - RNA, 23 nt, Human
ggcaaacuaaaggcaaagagaga

SEQ ID NO: 621349 - RNA, 18 nt, Human
ggcccuacaaaaaaaaaa

SEQ ID NO: 621350 - RNA, 20 nt, Human
ggucccguucaagcgcucgu

SEQ ID NO: 621351 - RNA, 20 nt, Human
gguuggaccugcucccggcu

SEQ ID NO: 621352 - RNA, 20 nt, Human
gucuccagaacaagcagcaa

SEQ ID NO: 621353 - RNA, 18 nt, Human
gucuccuucaaggccacc

SEQ ID NO: 621354 - RNA, 22 nt, Human
gucuggaaggugcgggggcggg

SEQ ID NO: 621355 - RNA, 22 nt, Human
guucaagcgcucguuucugacu

SEQ ID NO: 621356 - RNA, 19 nt, Human
guucagcuggagcgagggc

SEQ ID NO: 621357 - RNA, 23 nt, Human
uaaacuagacccaaacggaaauc

SEQ ID NO: 621358 - RNA, 23 nt, Human
uaaagggaauuacaaaaaaaaaa

SEQ ID NO: 621359 - RNA, 26 nt, Human
uacaaaaaaaaaaagucugaaagcaa

SEQ ID NO: 621360 - RNA, 18 nt, Human
uagaccaggggccaggug

SEQ ID NO: 621361 - RNA, 22 nt, Human
uccagaacaagcagcaauggag

SEQ ID NO: 621362 - RNA, 21 nt, Human
ucccugcuucucuggcugggu

SEQ ID NO: 621363 - RNA, 21 nt, Human
ucccuuaaugggcagcuucug

SEQ ID NO: 621364 - RNA, 20 nt, Human
uccuucaaggccaccguggu

SEQ ID NO: 621365 - RNA, 23 nt, Human
uccuuggguuggaccugcucccg

SEQ ID NO: 621366 - RNA, 24 nt, Human
uccuuggguuggaccugcucccgg

SEQ ID NO: 621367 - RNA, 24 nt, Human
ucgggcaaacuaaaggcaaagaga

SEQ ID NO: 621368 - RNA, 22 nt, Human
ucuaaagggaauuacaaaaaaa

SEQ ID NO: 621369 - RNA, 18 nt, Human
ucugccuaugaggcggca

SEQ ID NO: 621370 - RNA, 21 nt, Human
ucuugcucuccacaucguccu

SEQ ID NO: 621371 - RNA, 23 nt, Human
ugaaacuaaaagcagaccugauc

SEQ ID NO: 621372 - RNA, 23 nt, Human
ugaggucuugccucugcagcaug

SEQ ID NO: 621373 - RNA, 23 nt, Human
ugaggugauuaaaaaaaaaaaaa

SEQ ID NO: 621374 - RNA, 18 nt, Human
ugcgcauguccacgggcc

SEQ ID NO: 621375 - RNA, 19 nt, Human
ugcgcauguccacgggccc

SEQ ID NO: 621376 - RNA, 22 nt, Human
uggcaacaaucuccccucgugc

SEQ ID NO: 621377 - RNA, 19 nt, Human
uggccguggccucuguugc

SEQ ID NO: 621378 - RNA, 20 nt, Human
ugggaaggcagucaaagacu

SEQ ID NO: 621379 - RNA, 19 nt, Human
ugggacgggaaagaaacaa

SEQ ID NO: 621380 - RNA, 21 nt, Human
ugggcagcuucuggaaucccu

SEQ ID NO: 621381 - RNA, 18 nt, Human
ugucagucagucacgggg

SEQ ID NO: 621382 - RNA, 24 nt, Human
uuaacuccaucaucaugaggugau

SEQ ID NO: 621383 - RNA, 20 nt, Human
uuaaugggcagcuucuggaa

SEQ ID NO: 621384 - RNA, 20 nt, Human
uucaaggccaccguggucag

SEQ ID NO: 621385 - RNA, 24 nt, Human
uuccucacggaaccaguuuuuaaa

SEQ ID NO: 621386 - RNA, 22 nt, Human
uucuggggguuaaaugagccuu

SEQ ID NO: 621387 - RNA, 22 nt, Human
uucuucaguuuguucuucugcu

SEQ ID NO: 621388 - RNA, 18 nt, Human
uugcccucagcaauccuu

SEQ ID NO: 621389 - RNA, 23 nt, Human
uugcccucagcaauccuuggguu

SEQ ID NO: 621390 - RNA, 20 nt, Human
uuggguuggaccugcucccg

SEQ ID NO: 621391 - RNA, 18 nt, Human
uuuuuuuuuuucuggggg

SEQ ID NO: 621392 - RNA, 19 nt, Human
uuuuuuuuuuucugggggu

SEQ ID NO: 621393 - RNA, 18 nt, Human
uuuuuuuuuuuuuuucug

SEQ ID NO: 621394 - RNA, 24 nt, Human
aaacaaaauuuaagaauccaaagc

SEQ ID NO: 621395 - RNA, 20 nt, Human
aaaugaauacugccuugcuc

SEQ ID NO: 621396 - RNA, 21 nt, Human
aacagcaccacugagcucacc

SEQ ID NO: 621397 - RNA, 25 nt, Human
aacagcaccacugagcucaccugau

SEQ ID NO: 621398 - RNA, 22 nt, Human
aaccuacaacagcaccacugag

SEQ ID NO: 621399 - RNA, 21 nt, Human
aagcacauuuuaagaaguaaa

SEQ ID NO: 621400 - RNA, 20 nt, Human
aagcauuuuaaauaaaaguu

SEQ ID NO: 621401 - RNA, 24 nt, Human
aagccagaaacaucacuuaggaaa

SEQ ID NO: 621402 - RNA, 22 nt, Human
accagcaucauccucacaaaua

SEQ ID NO: 621403 - RNA, 22 nt, Human
acugagcucaccugauagcacu

SEQ ID NO: 621404 - RNA, 20 nt, Human
agcacaaauauaaauuuaua

SEQ ID NO: 621405 - RNA, 21 nt, Human
agguaauaaagauuuuuagcu

SEQ ID NO: 621406 - RNA, 22 nt, Human
auccaaauucucauuagaucaa

SEQ ID NO: 621407 - RNA, 21 nt, Human
augccaggacauguuuucagu

SEQ ID NO: 621408 - RNA, 22 nt, Human
auggagucagagguuccaaaug

SEQ ID NO: 621409 - RNA, 24 nt, Human
caaaaagcacaaauauaaauuuau

SEQ ID NO: 621410 - RNA, 21 nt, Human
caaaaccaguucuuuuacauc

SEQ ID NO: 621411 - RNA, 23 nt, Human
caaaaccaguucuuuuacaucac

SEQ ID NO: 621412 - RNA, 23 nt, Human
caaaauuuaagaauccaaagcac

SEQ ID NO: 621413 - RNA, 22 nt, Human
caaacuacuguucuucauauua

SEQ ID NO: 621414 - RNA, 19 nt, Human
caacagcaccacugagcuc

SEQ ID NO: 621415 - RNA, 22 nt, Human
caaucagccauuguuuuuaauc

SEQ ID NO: 621416 - RNA, 18 nt, Human
caauuacagaaaagucac

SEQ ID NO: 621417 - RNA, 18 nt, Human
caauuacagaaaagucac

SEQ ID NO: 621418 - RNA, 22 nt, Human
cacaucuucaacuccauuuccu

SEQ ID NO: 621419 - RNA, 22 nt, Human
ccaguuuccuggucugcaagac

SEQ ID NO: 621420 - RNA, 21 nt, Human
ccauuuaccagcaucauccuc

SEQ ID NO: 621421 - RNA, 18 nt, Human
cugaaacuuaaaaugacu

SEQ ID NO: 621422 - RNA, 18 nt, Human
cugaaucaauaguugugu

SEQ ID NO: 621423 - RNA, 21 nt, Human
cuggcaggcuaacacuuguau

SEQ ID NO: 621424 - RNA, 21 nt, Human
cuuacagccuggcaggcuaac

SEQ ID NO: 621425 - RNA, 24 nt, Human
cuuucuucacuuuuuguuguugau

SEQ ID NO: 621426 - RNA, 20 nt, Human
gacagguuucauuuuccuua

SEQ ID NO: 621427 - RNA, 22 nt, Human
gaugauaaaaagaacugaaaaa

SEQ ID NO: 621428 - RNA, 18 nt, Human
gccauauuaucuaagcca

SEQ ID NO: 621429 - RNA, 19 nt, Human
gguacacugaaacuuaaaa

SEQ ID NO: 621430 - RNA, 19 nt, Human
guaaaguguaugugugacc

SEQ ID NO: 621431 - RNA, 23 nt, Human
guugaugagccuucaaaugaauu

SEQ ID NO: 621432 - RNA, 20 nt, Human
uaagaaguaaaaaugaagca

SEQ ID NO: 621433 - RNA, 19 nt, Human
uaagccagaaacaucacuu

SEQ ID NO: 621434 - RNA, 25 nt, Human
uaagcuuacagccuggcaggcuaac

SEQ ID NO: 621435 - RNA, 21 nt, Human
uacaaacagaaacuuucugca

SEQ ID NO: 621436 - RNA, 23 nt, Human
uacagcagaguauuuuaaucgcc

SEQ ID NO: 621437 - RNA, 20 nt, Human
uacuucaucagucuuggcug

SEQ ID NO: 621438 - RNA, 18 nt, Human
uacuuugguuuggcuucc

SEQ ID NO: 621439 - RNA, 20 nt, Human
uaucugaaacuguuaugcuu

SEQ ID NO: 621440 - RNA, 19 nt, Human
uauucauuucuauaucuau

SEQ ID NO: 621441 - RNA, 23 nt, Human
ucagaacuaacagauucagguuc

SEQ ID NO: 621442 - RNA, 18 nt, Human
ucccauuuccuugaaaac

SEQ ID NO: 621443 - RNA, 19 nt, Human
ucccauuuccuugaaaacc

SEQ ID NO: 621444 - RNA, 23 nt, Human
uccccaaaaguacaugguuucca

SEQ ID NO: 621445 - RNA, 19 nt, Human
ucuacuuuacauuaauaca

SEQ ID NO: 621446 - RNA, 18 nt, Human
ucugaaccuacaacagca

SEQ ID NO: 621447 - RNA, 20 nt, Human
ucugaaccuacaacagcacc

SEQ ID NO: 621448 - RNA, 21 nt, Human
ucuuucuuuuucaucuucccc

SEQ ID NO: 621449 - RNA, 24 nt, Human
ugaaacaaaauuuaagaauccaaa

SEQ ID NO: 621450 - RNA, 26 nt, Human
ugaaacaaaauuuaagaauccaaagc

SEQ ID NO: 621451 - RNA, 23 nt, Human
ugaaccuacaacagcaccacuga

SEQ ID NO: 621452 - RNA, 18 nt, Human
ugauguuucuguuucucu

SEQ ID NO: 621453 - RNA, 20 nt, Human
ugguuuccaaaucccuuccu

SEQ ID NO: 621454 - RNA, 19 nt, Human
uguuguauuuguuuuuucu

SEQ ID NO: 621455 - RNA, 18 nt, Human
uguuucuguuucucuuuc

SEQ ID NO: 621456 - RNA, 22 nt, Human
uuacaauuacagaaaagucacu

SEQ ID NO: 621457 - RNA, 22 nt, Human
uucaacuucuuucuuuuucauc

SEQ ID NO: 621458 - RNA, 27 nt, Human
uuccaaaucccuuccucucaguuaacu

SEQ ID NO: 621459 - RNA, 23 nt, Human
uuuauuuuacaauuacagaaaag

SEQ ID NO: 621460 - RNA, 21 nt, Human
uuucgggggcagauuuuuauu

SEQ ID NO: 621461 - RNA, 20 nt, Human
uuuuugagccaguuuccugg

SEQ ID NO: 621462 - RNA, 20 nt, Human
uuuuuuucuuuugaagaagc

SEQ ID NO: 621463 - RNA, 24 nt, Human
uuuuuuucuuuugaagaagcagcu

SEQ ID NO: 621464 - RNA, 21 nt, Human
uuuuuuuuuuucgggggcaga

SEQ ID NO: 621465 - RNA, 19 nt, Human
uuuuuuuuuuuucgggggc

SEQ ID NO: 621466 - RNA, 20 nt, Human
uuuuuuuuuuuuuucggggg

SEQ ID NO: 621467 - RNA, 29 nt, Human
uuuuuuuuuuuuuuuuuuuuuuuucgggg

SEQ ID NO: 621468 - RNA, 19 nt, Human
aaaaaacaaaacaaggaaa

SEQ ID NO: 621469 - RNA, 22 nt, Human
aaaaaggacaccucacuguaga

SEQ ID NO: 621470 - RNA, 20 nt, Human
aaaaccccaaaaaacaaaac

SEQ ID NO: 621471 - RNA, 21 nt, Human
aaaaccccaaaaaacaaaaca

SEQ ID NO: 621472 - RNA, 22 nt, Human
aaaaccccaaaaaacaaaacaa

SEQ ID NO: 621473 - RNA, 18 nt, Human
aaaaccuccagagaccaa

SEQ ID NO: 621474 - RNA, 18 nt, Human
aaaaccuucaaccacaug

SEQ ID NO: 621475 - RNA, 20 nt, Human
aaaauguuaguaacacucuu

SEQ ID NO: 621476 - RNA, 21 nt, Human
aaaauucucucaguuaacugg

SEQ ID NO: 621477 - RNA, 22 nt, Human
aaagacaaacauucucuucuuc

SEQ ID NO: 621478 - RNA, 18 nt, Human
aaagcagaaaaccccaaa

SEQ ID NO: 621479 - RNA, 25 nt, Human
aaauagcuguguuccgucaaauucu

SEQ ID NO: 621480 - RNA, 23 nt, Human
aacaaaacaaggaaaaaagaaaa

SEQ ID NO: 621481 - RNA, 25 nt, Human
aacaauaaauccaaacgcagcccca

SEQ ID NO: 621482 - RNA, 21 nt, Human
aacacugguuuguucauuuga

SEQ ID NO: 621483 - RNA, 23 nt, Human
aaccacauggugaucugcaaagc

SEQ ID NO: 621484 - RNA, 18 nt, Human
aagagauaaauuaccagg

SEQ ID NO: 621485 - RNA, 23 nt, Human
aagcagaaaaccccaaaaaacaa

SEQ ID NO: 621486 - RNA, 21 nt, Human
aaggacuccugcguuuccgag

SEQ ID NO: 621487 - RNA, 24 nt, Human
aagugcaccuuauaaaaaggacac

SEQ ID NO: 621488 - RNA, 18 nt, Human
accccaaaaaacaaaaca

SEQ ID NO: 621489 - RNA, 21 nt, Human
acgcagccccaggcugggccu

SEQ ID NO: 621490 - RNA, 21 nt, Human
acuccugcguuuccgagagcc

SEQ ID NO: 621491 - RNA, 24 nt, Human
agaaaaccccaaaaaacaaaacaa

SEQ ID NO: 621492 - RNA, 19 nt, Human
agcagaaaaccccaaaaaa

SEQ ID NO: 621493 - RNA, 24 nt, Human
agcagaaaaccccaaaaaacaaaa

SEQ ID NO: 621494 - RNA, 24 nt, Human
aggaaaaaagaaaauacaugucaa

SEQ ID NO: 621495 - RNA, 20 nt, Human
auacaugucaacagucaguu

SEQ ID NO: 621496 - RNA, 18 nt, Human
auccaaacgcagccccag

SEQ ID NO: 621497 - RNA, 22 nt, Human
augcaguuuuauuaagagaguc

SEQ ID NO: 621498 - RNA, 24 nt, Human
caaaaaucaaaaaaguaaaaauuc

SEQ ID NO: 621499 - RNA, 19 nt, Human
caacuaaaaccuucaacca

SEQ ID NO: 621500 - RNA, 21 nt, Human
cacaacuaaaaccuucaaccc

SEQ ID NO: 621501 - RNA, 26 nt, Human
cagaaaaccccaaaaaacaaaacaag

SEQ ID NO: 621502 - RNA, 18 nt, Human
ccaaacgcagccccaggc

SEQ ID NO: 621503 - RNA, 21 nt, Human
ccacaacuaaaaccuucaacc

SEQ ID NO: 621504 - RNA, 27 nt, Human
ccccaaaaaacaaaacaaggaaaaaag

SEQ ID NO: 621505 - RNA, 18 nt, Human
cuacucaugcacaaacaa

SEQ ID NO: 621506 - RNA, 21 nt, Human
cucaugcacaaacaagcaguu

SEQ ID NO: 621507 - RNA, 18 nt, Human
cugagcuggcuaccagga

SEQ ID NO: 621508 - RNA, 18 nt, Human
cuggugacaguauuaaaa

SEQ ID NO: 621509 - RNA, 19 nt, Human
cuguguccacaacuaaaac

SEQ ID NO: 621510 - RNA, 26 nt, Human
gaaaaccccaaaaaacaaaacaagga

SEQ ID NO: 621511 - RNA, 21 nt, Human
gaccaaguaggaaguguggaa

SEQ ID NO: 621512 - RNA, 18 nt, Human
ggaaucuguuacaugugg

SEQ ID NO: 621513 - RNA, 20 nt, Human
ggcucgcuggccuagaggac

SEQ ID NO: 621514 - RNA, 21 nt, Human
gugaaggacaguuuuagaaca

SEQ ID NO: 621515 - RNA, 24 nt, Human
gugacaguauuaaaaagacaaugu

SEQ ID NO: 621516 - RNA, 19 nt, Human
uaaagcagaaaaccccaaa

SEQ ID NO: 621517 - RNA, 25 nt, Human
uaaagcagaaaaccccaaaaaacaa

SEQ ID NO: 621518 - RNA, 18 nt, Human
uacaaaaaucaaaaaagu

SEQ ID NO: 621519 - RNA, 25 nt, Human
uaccaggcaccugauuuaccacccc

SEQ ID NO: 621520 - RNA, 24 nt, Human
uaguaacacucuuagaacacuggu

SEQ ID NO: 621521 - RNA, 21 nt, Human
ucacacaaaucacugcagaaa

SEQ ID NO: 621522 - RNA, 22 nt, Human
ucagaaaaacuccaaaagugca

SEQ ID NO: 621523 - RNA, 20 nt, Human
uccacaacuaaaaccuucaa

SEQ ID NO: 621524 - RNA, 18 nt, Human
uccgagagccaggucagc

SEQ ID NO: 621525 - RNA, 19 nt, Human
ugcacaaacaagcaguugc

SEQ ID NO: 621526 - RNA, 22 nt, Human
ugcagaaaucuuuguaaggcug

SEQ ID NO: 621527 - RNA, 24 nt, Human
ugccuagacaaaagcuaauuucua

SEQ ID NO: 621528 - RNA, 24 nt, Human
uggauauacauagugguauauauc

SEQ ID NO: 621529 - RNA, 20 nt, Human
uggcaauaucuggugacagu

SEQ ID NO: 621530 - RNA, 18 nt, Human
uggcaucagaaaaacucc

SEQ ID NO: 621531 - RNA, 18 nt, Human
ugugcaaagagauaaauu

SEQ ID NO: 621532 - RNA, 21 nt, Human
ugugcaaagagauaaauuacc

SEQ ID NO: 621533 - RNA, 18 nt, Human
uguggaauaaaaacaaua

SEQ ID NO: 621534 - RNA, 25 nt, Human
uguggaauaaaaacaauaaauccaa

SEQ ID NO: 621535 - RNA, 23 nt, Human
uucagaaaguugaaguauauaaa

SEQ ID NO: 621536 - RNA, 24 nt, Human
uuugcagaguauaaccacuaggac

SEQ ID NO: 621537 - RNA, 23 nt, Human
aaaaaaacaagauucacccuuca

SEQ ID NO: 621538 - RNA, 22 nt, Human
aaaaaaagcuuuuaauaaaagg

SEQ ID NO: 621539 - RNA, 28 nt, Human
aaaaauagcaaaaagcaauccgguaccc

SEQ ID NO: 621540 - RNA, 21 nt, Human
aaaagucucucucuauaagcc

SEQ ID NO: 621541 - RNA, 21 nt, Human
aaacaagauucacccuucaaa

SEQ ID NO: 621542 - RNA, 21 nt, Human
aaacugacaauuacaggcucc

SEQ ID NO: 621543 - RNA, 20 nt, Human
aaauguaaaaauagagcaca

SEQ ID NO: 621544 - RNA, 19 nt, Human
aacauuauaaaaugugccu

SEQ ID NO: 621545 - RNA, 21 nt, Human
aagcauuagaaauccacugcc

SEQ ID NO: 621546 - RNA, 18 nt, Human
acaaacuauaauaccaua

SEQ ID NO: 621547 - RNA, 26 nt, Human
acaccagauuaauccuagucauucau

SEQ ID NO: 621548 - RNA, 21 nt, Human
acauggcugcuuucuuuucug

SEQ ID NO: 621549 - RNA, 21 nt, Human
agaauacugugauguuaaacc

SEQ ID NO: 621550 - RNA, 23 nt, Human
agacaaacauuauaaaaugugcc

SEQ ID NO: 621551 - RNA, 22 nt, Human
auaaaaauauaaaaaagacaac

SEQ ID NO: 621552 - RNA, 23 nt, Human
auauuuucaaaaauagcaaaaag

SEQ ID NO: 621553 - RNA, 24 nt, Human
auuaccuuuacagagacaaacauu

SEQ ID NO: 621554 - RNA, 19 nt, Human
cacauucuuuucucauccg

SEQ ID NO: 621555 - RNA, 22 nt, Human
cacugccagauauccugacgca

SEQ ID NO: 621556 - RNA, 23 nt, Human
cagaagaaaaugaaugacguaac

SEQ ID NO: 621557 - RNA, 23 nt, Human
cagcauucaaaaacuauaaauau

SEQ ID NO: 621558 - RNA, 18 nt, Human
caguccaauaugaaugga

SEQ ID NO: 621559 - RNA, 20 nt, Human
cauaaauguaaaaauagagc

SEQ ID NO: 621560 - RNA, 21 nt, Human
caugcuagauuucaacuaugu

SEQ ID NO: 621561 - RNA, 22 nt, Human
ccuauauuuaacccaaaucaaa

SEQ ID NO: 621562 - RNA, 24 nt, Human
cuacugcuuuuucauaaaaauaua

SEQ ID NO: 621563 - RNA, 18 nt, Human
cuccuaagcuuacaguaa

SEQ ID NO: 621564 - RNA, 21 nt, Human
cuucuuccuaccuuucccccu

SEQ ID NO: 621565 - RNA, 20 nt, Human
cuuucccccugcuuugaaug

SEQ ID NO: 621566 - RNA, 19 nt, Human
cuuuuuagguuccucuaga

SEQ ID NO: 621567 - RNA, 24 nt, Human
gaaccagaagaaaaugaaugacgu

SEQ ID NO: 621568 - RNA, 21 nt, Human
gagacaaacauuauaaaaugu

SEQ ID NO: 621569 - RNA, 24 nt, Human
gauuucaacuauguauauccuauu

SEQ ID NO: 621570 - RNA, 20 nt, Human
gcaaaaagcaaucuuuauga

SEQ ID NO: 621571 - RNA, 21 nt, Human
guuaaccuacuuggccuuaac

SEQ ID NO: 621572 - RNA, 24 nt, Human
uaacacagcaauuugaaacuuaca

SEQ ID NO: 621573 - RNA, 21 nt, Human
uaacucuaucugucaagugau

SEQ ID NO: 621574 - RNA, 24 nt, Human
uaauuuuccucagaaaaggauaac

SEQ ID NO: 621575 - RNA, 28 nt, Human
uacauaccacuaacauauauaacaaagu

SEQ ID NO: 621576 - RNA, 22 nt, Human
uaccauacaaacuauaauacca

SEQ ID NO: 621577 - RNA, 25 nt, Human
uaggaaaacuccuaagcuuacagua

SEQ ID NO: 621578 - RNA, 19 nt, Human
uaugaccaguuaccauaca

SEQ ID NO: 621579 - RNA, 19 nt, Human
uauugugcaguaucuccuu

SEQ ID NO: 621580 - RNA, 21 nt, Human
ucauccguguucuuuaacugc

SEQ ID NO: 621581 - RNA, 27 nt, Human
uccaaaaaguuaaaaagacaucacaga

SEQ ID NO: 621582 - RNA, 23 nt, Human
ucccccugcuuugaaugguaccu

SEQ ID NO: 621583 - RNA, 19 nt, Human
ucuaaauucccuuucaaga

SEQ ID NO: 621584 - RNA, 19 nt, Human
ucugaacauaaauguaaaa

SEQ ID NO: 621585 - RNA, 23 nt, Human
ucuuuaacugcuaauauuaccuu

SEQ ID NO: 621586 - RNA, 22 nt, Human
ugaaaauaugucugauacauac

SEQ ID NO: 621587 - RNA, 18 nt, Human
ugacgcaccauccugaaa

SEQ ID NO: 621588 - RNA, 22 nt, Human
ugacuuuuaacagaaggcacca

SEQ ID NO: 621589 - RNA, 24 nt, Human
ugauacauaccacuaacauauaua

SEQ ID NO: 621590 - RNA, 26 nt, Human
ugccagauauccugacgcaccauccu

SEQ ID NO: 621591 - RNA, 19 nt, Human
ugucaagugauaauauucu

SEQ ID NO: 621592 - RNA, 22 nt, Human
ugucugauacauaccacuaaca

SEQ ID NO: 621593 - RNA, 18 nt, Human
uuaaauagccuguuuucu

SEQ ID NO: 621594 - RNA, 19 nt, Human
uucaguaaaaauuaccucu

SEQ ID NO: 621595 - RNA, 25 nt, Human
uuuaaagauaaaaaaaacaagauuc

SEQ ID NO: 621596 - RNA, 20 nt, Human
uuuuuuuuuuuuuuuuuaag

SEQ ID NO: 621597 - RNA, 23 nt, Human
aaaaacaagcagccagcagcuca

SEQ ID NO: 621598 - RNA, 23 nt, Human
aaacaagcagccagcagcucaaa

SEQ ID NO: 621599 - RNA, 22 nt, Human
aaacauuugacaucucaaaacg

SEQ ID NO: 621600 - RNA, 22 nt, Human
aacuacuuaaaaucaagcugga

SEQ ID NO: 621601 - RNA, 20 nt, Human
aagcagccagcagcucaaaa

SEQ ID NO: 621602 - RNA, 21 nt, Human
aagcagccagcagcucaaaac

SEQ ID NO: 621603 - RNA, 25 nt, Human
accaccauuccccucuccucuccag

SEQ ID NO: 621604 - RNA, 23 nt, Human
accauaagagggccaaaaaggag

SEQ ID NO: 621605 - RNA, 24 nt, Human
agcacuuugggaggccgaggcggg

SEQ ID NO: 621606 - RNA, 19 nt, Human
agcuggaacugcaggaguc

SEQ ID NO: 621607 - RNA, 21 nt, Human
aggccgaggcgggcggaucac

SEQ ID NO: 621608 - RNA, 23 nt, Human
aggccgaggcgggcggaucacga

SEQ ID NO: 621609 - RNA, 24 nt, Human
aggcgggcggaucacgaggucagg

SEQ ID NO: 621610 - RNA, 21 nt, Human
auaaaacaaaauagaaacccu

SEQ ID NO: 621611 - RNA, 19 nt, Human
auaagagggccaaaaagga

SEQ ID NO: 621612 - RNA, 19 nt, Human
augccuguaaucccagcac

SEQ ID NO: 621613 - RNA, 25 nt, Human
caccaccauuccccucuccucucca

SEQ ID NO: 621614 - RNA, 24 nt, Human
cagcacuuugggaggccgaggcgg

SEQ ID NO: 621615 - RNA, 20 nt, Human
caugccuguaaucccagcac

SEQ ID NO: 621616 - RNA, 24 nt, Human
caugccuguaaucccagcacuuug

SEQ ID NO: 621617 - RNA, 22 nt, Human
cauuccccaccaccaccauucc

SEQ ID NO: 621618 - RNA, 19 nt, Human
ccauaaaacaaaauagaaa

SEQ ID NO: 621619 - RNA, 22 nt, Human
cccauaaaacaaaauagaaacc

SEQ ID NO: 621620 - RNA, 24 nt, Human
ccccaccaccaccauuccccucuc

SEQ ID NO: 621621 - RNA, 22 nt, Human
ccuguaaucccagcacuuuggg

SEQ ID NO: 621622 - RNA, 21 nt, Human
cucuccucuccagcaguuaga

SEQ ID NO: 621623 - RNA, 24 nt, Human
cugcuagaauuuacccauaaaaca

SEQ ID NO: 621624 - RNA, 21 nt, Human
cuugcagauuuuggaaagagc

SEQ ID NO: 621625 - RNA, 19 nt, Human
gaaaaacgaucaagcuaca

SEQ ID NO: 621626 - RNA, 23 nt, Human
gaggcgggcggaucacgagguca

SEQ ID NO: 621627 - RNA, 19 nt, Human
gauggaaaaacauaagcca

SEQ ID NO: 621628 - RNA, 23 nt, Human
gcuguuccucaaucuguuccaaa

SEQ ID NO: 621629 - RNA, 24 nt, Human
gggagcggugguucaugccuguaa

SEQ ID NO: 621630 - RNA, 24 nt, Human
gggcggaucacgaggucaggagau

SEQ ID NO: 621631 - RNA, 23 nt, Human
ggugguucaugccuguaauccca

SEQ ID NO: 621632 - RNA, 24 nt, Human
ggugguucaugccuguaaucccag

SEQ ID NO: 621633 - RNA, 22 nt, Human
uaagagggccaaaaaggaggug

SEQ ID NO: 621634 - RNA, 22 nt, Human
uaggacaguaacuacuuaaaau

SEQ ID NO: 621635 - RNA, 19 nt, Human
ucaaaacauuugacaucuc

SEQ ID NO: 621636 - RNA, 24 nt, Human
ucacgaggucaggagauagagacc

SEQ ID NO: 621637 - RNA, 22 nt, Human
ucaugccuguaaucccagcacu

SEQ ID NO: 621638 - RNA, 23 nt, Human
ucaugccuguaaucccagcacuu

SEQ ID NO: 621639 - RNA, 26 nt, Human
uccaagaagucgauaagcuuguugaa

SEQ ID NO: 621640 - RNA, 21 nt, Human
ucucuaaaagaaaugauaagc

SEQ ID NO: 621641 - RNA, 23 nt, Human
ugccuguaaucccagcacuuugg

SEQ ID NO: 621642 - RNA, 23 nt, Human
ugccuguaaucccagcacuuugg

SEQ ID NO: 621643 - RNA, 21 nt, Human
ugcugucuguguuuuuccaag

SEQ ID NO: 621644 - RNA, 21 nt, Human
uggaaagagcuacguccagcu

SEQ ID NO: 621645 - RNA, 19 nt, Human
ugggaggccgaggcgggcg

SEQ ID NO: 621646 - RNA, 24 nt, Human
ugggaggccgaggcgggcggauca

SEQ ID NO: 621647 - RNA, 22 nt, Human
ugguucaugccuguaaucccag

SEQ ID NO: 621648 - RNA, 24 nt, Human
ugguucaugccuguaaucccagca

SEQ ID NO: 621649 - RNA, 19 nt, Human
uuccccaccaccaccauuc

SEQ ID NO: 621650 - RNA, 28 nt, Human
uugaaccuugguauaaugguuaauguca

SEQ ID NO: 621651 - RNA, 25 nt, Human
uugggaggccgaggcgggcggauca

SEQ ID NO: 621652 - RNA, 18 nt, Human
uuuuuuuuuuuuaugggu

SEQ ID NO: 621653 - RNA, 24 nt, Human
uuuuuuuuuuuuuuuuuuuauggg

SEQ ID NO: 621654 - RNA, 22 nt, Human
aaaguaacuuuaauuuucuuau

SEQ ID NO: 621655 - RNA, 21 nt, Human
aagaauauucaagugaagaaa

SEQ ID NO: 621656 - RNA, 18 nt, Human
aaucauggucugagauuc

SEQ ID NO: 621657 - RNA, 18 nt, Human
agaaaaguaacuuuaauu

SEQ ID NO: 621658 - RNA, 21 nt, Human
agacucgaauucaacgaggaa

SEQ ID NO: 621659 - RNA, 22 nt, Human
aggcccccucauuucuaguucu

SEQ ID NO: 621660 - RNA, 24 nt, Human
agucagcacuaccuguaccuuacc

SEQ ID NO: 621661 - RNA, 19 nt, Human
auguucccaaagaauccaa

SEQ ID NO: 621662 - RNA, 23 nt, Human
caaaacuuuccaagaaacaacac

SEQ ID NO: 621663 - RNA, 21 nt, Human
caagcucuucuuuaacagaca

SEQ ID NO: 621664 - RNA, 20 nt, Human
ccccaaagacugcagguagg

SEQ ID NO: 621665 - RNA, 21 nt, Human
cugaagauccucgauuguaaa

SEQ ID NO: 621666 - RNA, 18 nt, Human
cugaagcugcagcugggu

SEQ ID NO: 621667 - RNA, 19 nt, Human
cugagcagcaugcaaagac

SEQ ID NO: 621668 - RNA, 20 nt, Human
cuuacccaucuugcaaggug

SEQ ID NO: 621669 - RNA, 19 nt, Human
cuucuuuguugaagaagga

SEQ ID NO: 621670 - RNA, 21 nt, Human
gaagauccucgauuguaaaga

SEQ ID NO: 621671 - RNA, 20 nt, Human
gcugcagcuggguuacagag

SEQ ID NO: 621672 - RNA, 20 nt, Human
ggcagaaguugcuuuuugag

SEQ ID NO: 621673 - RNA, 23 nt, Human
uacagguucucuuagccaggccc

SEQ ID NO: 621674 - RNA, 24 nt, Human
uacuuagaagaggugaaggcuucg

SEQ ID NO: 621675 - RNA, 22 nt, Human
uagaagaggugaaggcugaggc

SEQ ID NO: 621676 - RNA, 26 nt, Human
uagccaggcccccucauuucuaguuu

SEQ ID NO: 621677 - RNA, 18 nt, Human
uagggcauuucuucuuug

SEQ ID NO: 621678 - RNA, 24 nt, Human
uaguacaaaguucuucuacacuuc

SEQ ID NO: 621679 - RNA, 23 nt, Human
uaucugaacuguuauauacaaag

SEQ ID NO: 621680 - RNA, 22 nt, Human
uccaagaaacaacacaguuaaa

SEQ ID NO: 621681 - RNA, 19 nt, Human
uccagcuauccccaaagac

SEQ ID NO: 621682 - RNA, 26 nt, Human
ucccaaagaauccaauuaugggaaca

SEQ ID NO: 621683 - RNA, 20 nt, Human
uccucgauuguaaagagcuc

SEQ ID NO: 621684 - RNA, 22 nt, Human
ucugaacccuuuguugaauaua

SEQ ID NO: 621685 - RNA, 19 nt, Human
ugcuuuuugagaucuuucu

SEQ ID NO: 621686 - RNA, 19 nt, Human
uggucugagauuccagcua

SEQ ID NO: 621687 - RNA, 18 nt, Human
uguaaagagcucucuuaa

SEQ ID NO: 621688 - RNA, 19 nt, Human
uuccucugagcagcaugca

SEQ ID NO: 621689 - RNA, 26 nt, Human
uucuucuaccacaucaagcucuucuu

SEQ ID NO: 621690 - RNA, 19 nt, Human
uucuugccuuaagccugaa

SEQ ID NO: 621691 - RNA, 22 nt, Human
uuuguugaagaaggaaauacag

SEQ ID NO: 621692 - RNA, 25 nt, Human
uuuuuuuuuuugagaaaaguaacuu

SEQ ID NO: 621693 - RNA, 20 nt, Human
uuuuuuuuuuuuuuuuuugg

SEQ ID NO: 621694 - RNA, 24 nt, Human
aaaaaggcaggcaaugcagagaca

SEQ ID NO: 621695 - RNA, 23 nt, Human
aaaaggcaggcaaugcagagaca

SEQ ID NO: 621696 - RNA, 21 nt, Human
aagaagggggugaaauaggac

SEQ ID NO: 621697 - RNA, 21 nt, Human
aagaggccuggccccucaaac

SEQ ID NO: 621698 - RNA, 19 nt, Human
aagcagaacccaacgaagc

SEQ ID NO: 621699 - RNA, 21 nt, Human
aagcaggaggggccuccaaga

SEQ ID NO: 621700 - RNA, 30 nt, Human
aaggccccuccacccaggacucccaaccag

SEQ ID NO: 621701 - RNA, 22 nt, Human
acacguuugaaggcugcccucc

SEQ ID NO: 621702 - RNA, 23 nt, Human
acccaacgaagcaggaggggccu

SEQ ID NO: 621703 - RNA, 21 nt, Human
agaaaaaccucuguacauguc

SEQ ID NO: 621704 - RNA, 29 nt, Human
agaaaagaggugaaggcaaaagggacccc

SEQ ID NO: 621705 - RNA, 21 nt, Human
agagacaccguggcccaagca

SEQ ID NO: 621706 - RNA, 23 nt, Human
agcuggggucuggggcccagccg

SEQ ID NO: 621707 - RNA, 21 nt, Human
aggaagaagggggugaaauag

SEQ ID NO: 621708 - RNA, 22 nt, Human
aggaagaagggggugaaauagg

SEQ ID NO: 621709 - RNA, 23 nt, Human
aggaagcuggggucuggggccca

SEQ ID NO: 621710 - RNA, 20 nt, Human
aggcaggcacaggcaggggg

SEQ ID NO: 621711 - RNA, 22 nt, Human
aggccccuccacccaggacucc

SEQ ID NO: 621712 - RNA, 21 nt, Human
aggccuggccccucaaaccug

SEQ ID NO: 621713 - RNA, 20 nt, Human
agggagcagaugaagugugg

SEQ ID NO: 621714 - RNA, 19 nt, Human
agggggcggggaagaaaag

SEQ ID NO: 621715 - RNA, 22 nt, Human
cacacacggcucaccaccagca

SEQ ID NO: 621716 - RNA, 22 nt, Human
cacacggcucaccaccagcacc

SEQ ID NO: 621717 - RNA, 20 nt, Human
cacaggcagggggccuggga

SEQ ID NO: 621718 - RNA, 18 nt, Human
cagcagacagagcagcca

SEQ ID NO: 621719 - RNA, 18 nt, Human
cagcagagcagggacacg

SEQ ID NO: 621720 - RNA, 20 nt, Human
caggaguagauaggugaaaa

SEQ ID NO: 621721 - RNA, 21 nt, Human
cagggcagcagcgggcuggag

SEQ ID NO: 621722 - RNA, 18 nt, Human
ccaaccaugcagacuccc

SEQ ID NO: 621723 - RNA, 19 nt, Human
ccacccaggacucccaacc

SEQ ID NO: 621724 - RNA, 22 nt, Human
ccagcacccccuuuaauaaaac

SEQ ID NO: 621725 - RNA, 19 nt, Human
ccauagaagccccugagcc

SEQ ID NO: 621726 - RNA, 22 nt, Human
cccccaaggagcucacagccuu

SEQ ID NO: 621727 - RNA, 18 nt, Human
cccuccacccaggacucc

SEQ ID NO: 621728 - RNA, 20 nt, Human
cccugccuagaccugaggac

SEQ ID NO: 621729 - RNA, 18 nt, Human
ccugggacccugggcaag

SEQ ID NO: 621730 - RNA, 21 nt, Human
ccuguuggggaagcucaggag

SEQ ID NO: 621731 - RNA, 22 nt, Human
cggcagcagcaguucacauuua

SEQ ID NO: 621732 - RNA, 19 nt, Human
cucacaaaggccccuccac

SEQ ID NO: 621733 - RNA, 21 nt, Human
cucacaaaggccccuccaccc

SEQ ID NO: 621734 - RNA, 26 nt, Human
cucaccaccagcacccccuuuaauaa

SEQ ID NO: 621735 - RNA, 20 nt, Human
cugagaccccgaaugugcag

SEQ ID NO: 621736 - RNA, 26 nt, Human
gaaaagcagggggacccaccuggggg

SEQ ID NO: 621737 - RNA, 20 nt, Human
gaagaagggggugaaauagg

SEQ ID NO: 621738 - RNA, 22 nt, Human
gacaggaagaagggggugaagu

SEQ ID NO: 621739 - RNA, 19 nt, Human
gauggggagguggagaacc

SEQ ID NO: 621740 - RNA, 22 nt, Human
gcagaggggggcagcagggcag

SEQ ID NO: 621741 - RNA, 21 nt, Human
gcagcagacagagcagccagg

SEQ ID NO: 621742 - RNA, 19 nt, Human
gcccagccgggacguggag

SEQ ID NO: 621743 - RNA, 22 nt, Human
gcccugagccggguccagccuc

SEQ ID NO: 621744 - RNA, 20 nt, Human
gccuggggcggauggggagg

SEQ ID NO: 621745 - RNA, 22 nt, Human
gcugagaccccgaaugugcagg

SEQ ID NO: 621746 - RNA, 19 nt, Human
gcugcccucccccaccagg

SEQ ID NO: 621747 - RNA, 19 nt, Human
ggacguggagguggggccu

SEQ ID NO: 621748 - RNA, 18 nt, Human
ggagggggcagcagacag

SEQ ID NO: 621749 - RNA, 21 nt, Human
ggcagaggggggcagcagggc

SEQ ID NO: 621750 - RNA, 18 nt, Human
gggcagcagcgggcugga

SEQ ID NO: 621751 - RNA, 20 nt, Human
gggcagcagcgggcuggagc

SEQ ID NO: 621752 - RNA, 24 nt, Human
ggggggcagcagggcagcagcggg

SEQ ID NO: 621753 - RNA, 21 nt, Human
guggagggcaggaagcugggg

SEQ ID NO: 621754 - RNA, 25 nt, Human
guggcccugggacccugggcaaguc

SEQ ID NO: 621755 - RNA, 20 nt, Human
guggguggcccugggacccu

SEQ ID NO: 621756 - RNA, 25 nt, Human
uaauaaaacaugggggggggucaug

SEQ ID NO: 621757 - RNA, 24 nt, Human
uagauaggugaaaagcagggggac

SEQ ID NO: 621758 - RNA, 18 nt, Human
ucacaaaggccccuccac

SEQ ID NO: 621759 - RNA, 21 nt, Human
uccaggaucccauagaagccc

SEQ ID NO: 621760 - RNA, 18 nt, Human
ucccauagaagccccuga

SEQ ID NO: 621761 - RNA, 24 nt, Human
ugaaggcaaaaaggcaggcaaugc

SEQ ID NO: 621762 - RNA, 21 nt, Human
ugaaguguggguggcccuggg

SEQ ID NO: 621763 - RNA, 21 nt, Human
ugagccggguccagccucaca

SEQ ID NO: 621764 - RNA, 18 nt, Human
ugaggacuguagacccca

SEQ ID NO: 621765 - RNA, 24 nt, Human
ugcccucccccaccaggauggcac

SEQ ID NO: 621766 - RNA, 26 nt, Human
ugcccucccccaccaggauggcacug

SEQ ID NO: 621767 - RNA, 20 nt, Human
ugcccugagccggguccagc

SEQ ID NO: 621768 - RNA, 25 nt, Human
uggagggcaggaagcuggggucugg

SEQ ID NO: 621769 - RNA, 21 nt, Human
uggagguggggccuaugaggg

SEQ ID NO: 621770 - RNA, 19 nt, Human
uggcagaggggggcagcag

SEQ ID NO: 621771 - RNA, 21 nt, Human
uggccccucaaaccugcuccu

SEQ ID NO: 621772 - RNA, 22 nt, Human
uggccccucaaaccugcuccug

SEQ ID NO: 621773 - RNA, 20 nt, Human
uggcccugggacccugggca

SEQ ID NO: 621774 - RNA, 18 nt, Human
uggcggcagcagcaguuc

SEQ ID NO: 621775 - RNA, 21 nt, Human
uggggcccagccgggacgugg

SEQ ID NO: 621776 - RNA, 18 nt, Human
uggggccuaugagggagc

SEQ ID NO: 621777 - RNA, 19 nt, Human
uggggggagggggcagcag

SEQ ID NO: 621778 - RNA, 24 nt, Human
uguggguggcccugggacccuggg

SEQ ID NO: 621779 - RNA, 22 nt, Human
uuuuuuuuuuuuuuuuuggcgg

SEQ ID NO: 621780 - RNA, 20 nt, Human
uuuuuuuuuuuuuuuuuugg

SEQ ID NO: 621781 - RNA, 22 nt, Human
aaagcacucccaggagacaggc

SEQ ID NO: 621782 - RNA, 22 nt, Human
aaggaggaggacacagcagcug

SEQ ID NO: 621783 - RNA, 19 nt, Human
aaggugcuggauguguacc

SEQ ID NO: 621784 - RNA, 23 nt, Human
acauuuuccccuacauucuacca

SEQ ID NO: 621785 - RNA, 22 nt, Human
agaaaagccaguuccccaaggg

SEQ ID NO: 621786 - RNA, 21 nt, Human
agaacagucucagagaagaca

SEQ ID NO: 621787 - RNA, 24 nt, Human
agagggcaaaggagaaggagcggg

SEQ ID NO: 621788 - RNA, 21 nt, Human
agcaggaggccaaccugggca

SEQ ID NO: 621789 - RNA, 23 nt, Human
agcaggccaccgcugaaggcacu

SEQ ID NO: 621790 - RNA, 21 nt, Human
agcugcuagagaaccuggagc

SEQ ID NO: 621791 - RNA, 18 nt, Human
agcuggagcucaaagccc

SEQ ID NO: 621792 - RNA, 19 nt, Human
aggaggacacagcagcuga

SEQ ID NO: 621793 - RNA, 20 nt, Human
aucacagucaaguggggggu

SEQ ID NO: 621794 - RNA, 23 nt, Human
caagaaaagccaguuccccaagu

SEQ ID NO: 621795 - RNA, 21 nt, Human
caaggaggaggacacagcagc

SEQ ID NO: 621796 - RNA, 18 nt, Human
caccacaaugaugauguc

SEQ ID NO: 621797 - RNA, 19 nt, Human
cacccucaaagcacuccca

SEQ ID NO: 621798 - RNA, 18 nt, Human
cacugugugccaagcggu

SEQ ID NO: 621799 - RNA, 23 nt, Human
cacugugugccaagcgguggccc

SEQ ID NO: 621800 - RNA, 22 nt, Human
cagcugaagcagugggucacca

SEQ ID NO: 621801 - RNA, 19 nt, Human
cagcugguaggggcaaagc

SEQ ID NO: 621802 - RNA, 21 nt, Human
caggagacaggccccuccugc

SEQ ID NO: 621803 - RNA, 24 nt, Human
caggagacaggccccuccugcucu

SEQ ID NO: 621804 - RNA, 19 nt, Human
caggccgagagggcaaagg

SEQ ID NO: 621805 - RNA, 24 nt, Human
caucaggugagcucuaggcucucc

SEQ ID NO: 621806 - RNA, 21 nt, Human
caugucuuggggggaucuaga

SEQ ID NO: 621807 - RNA, 24 nt, Human
caugucuuggggggaucuagaggg

SEQ ID NO: 621808 - RNA, 22 nt, Human
cauucuaccagcauuucugacc

SEQ ID NO: 621809 - RNA, 24 nt, Human
ccacccugggaggucagcaggcca

SEQ ID NO: 621810 - RNA, 19 nt, Human
ccaggagacaggccccucc

SEQ ID NO: 621811 - RNA, 21 nt, Human
cccugccgguuuuccccucuu

SEQ ID NO: 621812 - RNA, 18 nt, Human
cccuggaggaggggacug

SEQ ID NO: 621813 - RNA, 22 nt, Human
ccgcugaaggcacuggcauggg

SEQ ID NO: 621814 - RNA, 21 nt, Human
ccugcugcuccucucuccuca

SEQ ID NO: 621815 - RNA, 23 nt, Human
ccugcuggaagccaccuccucca

SEQ ID NO: 621816 - RNA, 22 nt, Human
ccuggagcacgugccccagguu

SEQ ID NO: 621817 - RNA, 24 nt, Human
cucaaagcccgagucuuccacuuc

SEQ ID NO: 621818 - RNA, 20 nt, Human
cucccugccagcugcugugu

SEQ ID NO: 621819 - RNA, 23 nt, Human
cugaugcccugccgguuuucccc

SEQ ID NO: 621820 - RNA, 22 nt, Human
cuggcccugagggcagagggca

SEQ ID NO: 621821 - RNA, 20 nt, Human
cugugcccaggcugggcuga

SEQ ID NO: 621822 - RNA, 23 nt, Human
cugugugccaagcgguggccccc

SEQ ID NO: 621823 - RNA, 18 nt, Human
gagcugccugccugcugc

SEQ ID NO: 621824 - RNA, 24 nt, Human
gcaccggcacccagcaggaggcca

SEQ ID NO: 621825 - RNA, 21 nt, Human
gcagcugggagaggggcugga

SEQ ID NO: 621826 - RNA, 18 nt, Human
gccugccugcugcuccuc

SEQ ID NO: 621827 - RNA, 19 nt, Human
gcugccugccugcugcucc

SEQ ID NO: 621828 - RNA, 18 nt, Human
gcuggagcucaaagcccg

SEQ ID NO: 621829 - RNA, 18 nt, Human
ggaaccagggaucuggcu

SEQ ID NO: 621830 - RNA, 22 nt, Human
ggacagcugguaggggcaaagc

SEQ ID NO: 621831 - RNA, 18 nt, Human
ggcagcugggagaggggc

SEQ ID NO: 621832 - RNA, 19 nt, Human
ggcagcugggagaggggcu

SEQ ID NO: 621833 - RNA, 20 nt, Human
ggccaagaaaagccaguucc

SEQ ID NO: 621834 - RNA, 21 nt, Human
ggcccgggggauaggcugcuc

SEQ ID NO: 621835 - RNA, 24 nt, Human
gguggguuucugccugccagcacc

SEQ ID NO: 621836 - RNA, 21 nt, Human
uaagugucagaacagucucag

SEQ ID NO: 621837 - RNA, 18 nt, Human
uacaggccccacccucaa

SEQ ID NO: 621838 - RNA, 18 nt, Human
uaugagagacaaaagccc

SEQ ID NO: 621839 - RNA, 26 nt, Human
ucaaagcacucccaggagacaggccc

SEQ ID NO: 621840 - RNA, 20 nt, Human
ucaaagcccgagucuuccac

SEQ ID NO: 621841 - RNA, 22 nt, Human
uccuccacaggauaagcugcua

SEQ ID NO: 621842 - RNA, 18 nt, Human
ucucagagcucccacugu

SEQ ID NO: 621843 - RNA, 19 nt, Human
ucugacccccugggcaugc

SEQ ID NO: 621844 - RNA, 22 nt, Human
ucuggcugacuccagggggccc

SEQ ID NO: 621845 - RNA, 22 nt, Human
ucugugcuaugagagacaaaag

SEQ ID NO: 621846 - RNA, 24 nt, Human
ucuuggggggaucuagaggggcau

SEQ ID NO: 621847 - RNA, 19 nt, Human
ugaaggcacuggcaugggg

SEQ ID NO: 621848 - RNA, 22 nt, Human
ugaaggcacuggcaugggggug

SEQ ID NO: 621849 - RNA, 21 nt, Human
ugacuccagggggcccggggg

SEQ ID NO: 621850 - RNA, 19 nt, Human
ugagcucuaggcucucccu

SEQ ID NO: 621851 - RNA, 21 nt, Human
ugccagcacccugcuggaagc

SEQ ID NO: 621852 - RNA, 19 nt, Human
ugcccaggcugggcugagc

SEQ ID NO: 621853 - RNA, 20 nt, Human
ugcccaggcugggcugagcu

SEQ ID NO: 621854 - RNA, 19 nt, Human
ugcccagggcugugcugag

SEQ ID NO: 621855 - RNA, 20 nt, Human
ugcccagggcugugcugagu

SEQ ID NO: 621856 - RNA, 26 nt, Human
ugcccugccgguuuuccccucuucca

SEQ ID NO: 621857 - RNA, 21 nt, Human
ugccucaaugaagcuguuuau

SEQ ID NO: 621858 - RNA, 22 nt, Human
ugcugagugacugaugcccugc

SEQ ID NO: 621859 - RNA, 20 nt, Human
uggcccugagggcagagggc

SEQ ID NO: 621860 - RNA, 19 nt, Human
uggcugugcccaggcuggg

SEQ ID NO: 621861 - RNA, 19 nt, Human
uggcugugcccaggcuggg

SEQ ID NO: 621862 - RNA, 20 nt, Human
uggcugugcccaggcugggc

SEQ ID NO: 621863 - RNA, 21 nt, Human
ugucagaacagucucagagaa

SEQ ID NO: 621864 - RNA, 26 nt, Human
uguccaucaccaaggaggaggacaca

SEQ ID NO: 621865 - RNA, 20 nt, Human
ugugaauuaugccucaauga

SEQ ID NO: 621866 - RNA, 25 nt, Human
uguguaccggcacugcaccggcacc

SEQ ID NO: 621867 - RNA, 19 nt, Human
uguguccuggcuggcccug

SEQ ID NO: 621868 - RNA, 22 nt, Human
uuuuuuuuuuuuuuuaugaugg

SEQ ID NO: 621869 - RNA, 24 nt, Human
aagacuuucuuguucacuggauuc

SEQ ID NO: 621870 - RNA, 26 nt, Human
aggacagcacauccacuuucuguaau

SEQ ID NO: 621871 - RNA, 25 nt, Human
cacuggauucucuuauguagggcuu

SEQ ID NO: 621872 - RNA, 19 nt, Human
cucaggacagcacauccac

SEQ ID NO: 621873 - RNA, 21 nt, Human
cucucaggacagcacauccac

SEQ ID NO: 621874 - RNA, 24 nt, Human
gacuauaccaauaguugcaucuuc

SEQ ID NO: 621875 - RNA, 22 nt, Human
uaaagacuuucuuguucacugg

SEQ ID NO: 621876 - RNA, 23 nt, Human
uaaauucaaacgacagauuuaag

SEQ ID NO: 621877 - RNA, 22 nt, Human
uaagauaucauuaagaauuuau

SEQ ID NO: 621878 - RNA, 19 nt, Human
ucacuggauucucuuaugu

SEQ ID NO: 621879 - RNA, 20 nt, Human
uccaacagacugaaagucug

SEQ ID NO: 621880 - RNA, 21 nt, Human
uccaccagaauauuugcuuga

SEQ ID NO: 621881 - RNA, 24 nt, Human
ucucgugauuuaucucgcgcugcc

SEQ ID NO: 621882 - RNA, 23 nt, Human
ucugccacuacugaaccuugcaa

SEQ ID NO: 621883 - RNA, 23 nt, Human
ugaaccgaggugguccuaaauuc

SEQ ID NO: 621884 - RNA, 22 nt, Human
ugcaucuuccaccagaauauuu

SEQ ID NO: 621885 - RNA, 20 nt, Human
uuauauucuaaacaagcacu

SEQ ID NO: 621886 - RNA, 24 nt, Human
acccucaaaagggucauuauugac

SEQ ID NO: 621887 - RNA, 20 nt, Human
cacuuucacauuacugcagu

SEQ ID NO: 621888 - RNA, 18 nt, Human
ccucucugggacaagaau

SEQ ID NO: 621889 - RNA, 20 nt, Human
cuccagaugccgccgccacc

SEQ ID NO: 621890 - RNA, 24 nt, Human
cuguauaccaucucuccauacccu

SEQ ID NO: 621891 - RNA, 24 nt, Human
cuuaaaccaauuggaaaagcagca

SEQ ID NO: 621892 - RNA, 19 nt, Human
gcaguucccgccaccggaa

SEQ ID NO: 621893 - RNA, 26 nt, Human
ggaaaacagacaguagaaccagcuua

SEQ ID NO: 621894 - RNA, 20 nt, Human
ggacaagaaucauuguagcu

SEQ ID NO: 621895 - RNA, 22 nt, Human
uaaaccaauuggaaaagcagca

SEQ ID NO: 621896 - RNA, 26 nt, Human
ucuauaguuaaaucccauuuuagaac

SEQ ID NO: 621897 - RNA, 20 nt, Human
ugcaguucccgccaccggaa

SEQ ID NO: 621898 - RNA, 21 nt, Human
ugggacaagaaucauuguagc

SEQ ID NO: 621899 - RNA, 20 nt, Human
uggggagaggggugcccugg

SEQ ID NO: 621900 - RNA, 24 nt, Human
ugucucagcugagaggcaacauuu

SEQ ID NO: 621901 - RNA, 23 nt, Human
uucuauaguuaaaucccauuuua

SEQ ID NO: 621902 - RNA, 22 nt, Human
uuuuuuuuuuuuaaaauuuucu

SEQ ID NO: 621903 - RNA, 18 nt, Human
aacagugccaauagugac

SEQ ID NO: 621904 - RNA, 21 nt, Human
aaguuuagagcagaccaaacc

SEQ ID NO: 621905 - RNA, 22 nt, Human
acuuuguggaguuguuccagua

SEQ ID NO: 621906 - RNA, 18 nt, Human
agaccaaaccuuugugga

SEQ ID NO: 621907 - RNA, 20 nt, Human
agaugcugaauggcuuugug

SEQ ID NO: 621908 - RNA, 23 nt, Human
auaaguugcaguuuguuuaccuu

SEQ ID NO: 621909 - RNA, 21 nt, Human
auuagaaacaucucauuuagc

SEQ ID NO: 621910 - RNA, 18 nt, Human
auugcagauauaaguugc

SEQ ID NO: 621911 - RNA, 23 nt, Human
caaugauacucacacugagaucc

SEQ ID NO: 621912 - RNA, 24 nt, Human
cacagcaucuggccugcuaguaga

SEQ ID NO: 621913 - RNA, 22 nt, Human
cagauuagaaacaucucauuua

SEQ ID NO: 621914 - RNA, 20 nt, Human
cauaccucuugucuauacca

SEQ ID NO: 621915 - RNA, 20 nt, Human
ccauaauguagauucucugc

SEQ ID NO: 621916 - RNA, 23 nt, Human
ccuccaguaggaugugcagcugg

SEQ ID NO: 621917 - RNA, 21 nt, Human
cuccaguaggaugugcagcug

SEQ ID NO: 621918 - RNA, 22 nt, Human
gauuagaaacaucucauuuagc

SEQ ID NO: 621919 - RNA, 21 nt, Human
gcucugaucaagaaggguagg

SEQ ID NO: 621920 - RNA, 18 nt, Human
ggagauggauaaguuuag

SEQ ID NO: 621921 - RNA, 19 nt, Human
gugcuauguguggcgcugg

SEQ ID NO: 621922 - RNA, 23 nt, Human
uacacccacauuugaccuccagu

SEQ ID NO: 621923 - RNA, 19 nt, Human
uacuggcauaccucuuguc

SEQ ID NO: 621924 - RNA, 23 nt, Human
uagcugaauugguggcuuaugga

SEQ ID NO: 621925 - RNA, 21 nt, Human
uauggcucugaucaagaaggg

SEQ ID NO: 621926 - RNA, 25 nt, Human
uauguguggcgcugguggugguguu

SEQ ID NO: 621927 - RNA, 21 nt, Human
uauucugaguucagucucugu

SEQ ID NO: 621928 - RNA, 20 nt, Human
uccaguaggaugugcagcug

SEQ ID NO: 621929 - RNA, 26 nt, Human
uccccugcaguacguaucucgagggu

SEQ ID NO: 621930 - RNA, 18 nt, Human
ucccugauguuuucuguu

SEQ ID NO: 621931 - RNA, 19 nt, Human
ucuacacccacauuugacc

SEQ ID NO: 621932 - RNA, 24 nt, Human
ucuucugaagccaccagugugcua

SEQ ID NO: 621933 - RNA, 22 nt, Human
ugagguggguguacauuauuug

SEQ ID NO: 621934 - RNA, 18 nt, Human
ugaucaagaaggguaggc

SEQ ID NO: 621935 - RNA, 21 nt, Human
ugcagcuggucuccccugcag

SEQ ID NO: 621936 - RNA, 23 nt, Human
ugcagcuggucuccccugcagua

SEQ ID NO: 621937 - RNA, 21 nt, Human
ugcaguacguaucucgagggu

SEQ ID NO: 621938 - RNA, 18 nt, Human
ugcuauguguggcgcugg

SEQ ID NO: 621939 - RNA, 18 nt, Human
ugggaucugcugaucuag

SEQ ID NO: 621940 - RNA, 22 nt, Human
uuaaugauaucagugguguuuu

SEQ ID NO: 621941 - RNA, 23 nt, Human
uuagagcagaccaaaccuuugug

SEQ ID NO: 621942 - RNA, 22 nt, Human
uuccaguaauggagggagaugg

SEQ ID NO: 621943 - RNA, 18 nt, Human
uugagguggguguacauu

SEQ ID NO: 621944 - RNA, 18 nt, Human
uuuacagauuguucaauc

SEQ ID NO: 621945 - RNA, 19 nt, Human
uuuuuuuuuuuuuuuugcu

SEQ ID NO: 621946 - RNA, 18 nt, Human
uuuuuuuuuuuuuuuuug

SEQ ID NO: 621947 - RNA, 22 nt, Human
uuuuuuuuuuuuuuuuugcuuu

SEQ ID NO: 621948 - RNA, 24 nt, Human
aagaggagagagccgaggguugcc

SEQ ID NO: 621949 - RNA, 20 nt, Human
acagauggggaaagaaagga

SEQ ID NO: 621950 - RNA, 19 nt, Human
acucuguccccacucaggc

SEQ ID NO: 621951 - RNA, 19 nt, Human
agaucuggucacuguucca

SEQ ID NO: 621952 - RNA, 18 nt, Human
agcaggggagggggcugg

SEQ ID NO: 621953 - RNA, 24 nt, Human
agcggggcuucuccccuccuccag

SEQ ID NO: 621954 - RNA, 19 nt, Human
agcugggggcagugugugu

SEQ ID NO: 621955 - RNA, 21 nt, Human
aggaagagcagagacugaagg

SEQ ID NO: 621956 - RNA, 23 nt, Human
aggcuccccccacccgccccacc

SEQ ID NO: 621957 - RNA, 22 nt, Human
aggugguugaugaaggaagagc

SEQ ID NO: 621958 - RNA, 19 nt, Human
caaacauacacagggaccg

SEQ ID NO: 621959 - RNA, 21 nt, Human
caggaacagauggggaaagaa

SEQ ID NO: 621960 - RNA, 21 nt, Human
cagguguggcagagggcaagu

SEQ ID NO: 621961 - RNA, 19 nt, Human
ccagaagggcugcuugaua

SEQ ID NO: 621962 - RNA, 19 nt, Human
ccagacaugagcugaggcu

SEQ ID NO: 621963 - RNA, 22 nt, Human
ccaggguaaaggggcuuaaaga

SEQ ID NO: 621964 - RNA, 18 nt, Human
ccauccagguaggauggg

SEQ ID NO: 621965 - RNA, 24 nt, Human
ccccuccuccagcaggggaggggg

SEQ ID NO: 621966 - RNA, 18 nt, Human
ccucccuuccuccuuccc

SEQ ID NO: 621967 - RNA, 21 nt, Human
cuccccuccuccagcagggga

SEQ ID NO: 621968 - RNA, 22 nt, Human
cuccuggccacagccuccaccu

SEQ ID NO: 621969 - RNA, 18 nt, Human
cugaggcugugacugucc

SEQ ID NO: 621970 - RNA, 25 nt, Human
gaacagggcuacagcgaagcgucac

SEQ ID NO: 621971 - RNA, 21 nt, Human
ggaaagaaaggaggaagaaga

SEQ ID NO: 621972 - RNA, 22 nt, Human
gggaaagaaaggaggaagaaga

SEQ ID NO: 621973 - RNA, 18 nt, Human
ggucaaaauggccaggug

SEQ ID NO: 621974 - RNA, 23 nt, Human
guucaccccgugcuggagugggg

SEQ ID NO: 621975 - RNA, 21 nt, Human
ucagggucaaaauggccaggu

SEQ ID NO: 621976 - RNA, 25 nt, Human
ucaguacaggaccaggguaaagggg

SEQ ID NO: 621977 - RNA, 23 nt, Human
uccaggcuccccccacccgcccc

SEQ ID NO: 621978 - RNA, 21 nt, Human
ucccaggaacagauggggaaa

SEQ ID NO: 621979 - RNA, 28 nt, Human
ugaaggaagagcagagacugaaggguag

SEQ ID NO: 621980 - RNA, 21 nt, Human
ugaugaaggaagagcagagac

SEQ ID NO: 621981 - RNA, 21 nt, Human
uggaacagggcuacagcgaag

SEQ ID NO: 621982 - RNA, 21 nt, Human
ugggccuccguucaccccgug

SEQ ID NO: 621983 - RNA, 22 nt, Human
uggggaaggugguugaugaagg

SEQ ID NO: 621984 - RNA, 23 nt, Human
uggggcugaccaagggaagcugg

SEQ ID NO: 621985 - RNA, 23 nt, Human
ugugacuguccacucagggucaa

SEQ ID NO: 621986 - RNA, 23 nt, Human
uguuccaggcuccccccacccgc

SEQ ID NO: 621987 - RNA, 24 nt, Human
uuccaggcuccccccacccgcccc

SEQ ID NO: 621988 - RNA, 23 nt, Human
uucccuaguacucugggccuccg

SEQ ID NO: 621989 - RNA, 21 nt, Human
uuggcuguucaguuucccaug

SEQ ID NO: 621990 - RNA, 19 nt, Human
uuuuuuuuuuuuuuuuugg

SEQ ID NO: 621991 - RNA, 22 nt, Human
aaaaaaaaagaaaaacaaacaa

SEQ ID NO: 621992 - RNA, 23 nt, Human
aaaaaaaaagaaaaacaaacaaa

SEQ ID NO: 621993 - RNA, 24 nt, Human
aaaaaagaaaaacaaacaaauaua

SEQ ID NO: 621994 - RNA, 20 nt, Human
aaaacaaacaaacaaaaaaa

SEQ ID NO: 621995 - RNA, 19 nt, Human
aaaaccaaauaaaaugcca

SEQ ID NO: 621996 - RNA, 21 nt, Human
aaacaaaacaaaacaaacaaa

SEQ ID NO: 621997 - RNA, 30 nt, Human
aaacaaaacaaacaaacaaaaaaaaagaaa

SEQ ID NO: 621998 - RNA, 21 nt, Human
aaaccugcugaugacuccaaa

SEQ ID NO: 621999 - RNA, 23 nt, Human
aaaguuccuccaaaauuaaaccu

SEQ ID NO: 622000 - RNA, 25 nt, Human
acaaaacaaaacaaacaaacaaaaa

SEQ ID NO: 622001 - RNA, 23 nt, Human
acaaacaaaaaaaaagaaaaaca

SEQ ID NO: 622002 - RNA, 23 nt, Human
acuggagugaggaggaugaugug

SEQ ID NO: 622003 - RNA, 23 nt, Human
agaaaaacaaacaaauauacgga

SEQ ID NO: 622004 - RNA, 27 nt, Human
auaugcuaaaaccaaauaaaaugccaa

SEQ ID NO: 622005 - RNA, 20 nt, Human
augaaacacaggagaccaga

SEQ ID NO: 622006 - RNA, 18 nt, Human
augauguguacugaugcc

SEQ ID NO: 622007 - RNA, 20 nt, Human
auugugugcaugcuccucgu

SEQ ID NO: 622008 - RNA, 19 nt, Human
caaaacaaaacaaacaaac

SEQ ID NO: 622009 - RNA, 27 nt, Human
caaaacaaaacaaacaaacaaaaaaaa

SEQ ID NO: 622010 - RNA, 24 nt, Human
caaacaaacaaaaaaaaagaaaaa

SEQ ID NO: 622011 - RNA, 22 nt, Human
caagucgccgccgcucgcuguc

SEQ ID NO: 622012 - RNA, 19 nt, Human
cacaauucauuaugaucaa

SEQ ID NO: 622013 - RNA, 19 nt, Human
cagaaacgacaugcugaag

SEQ ID NO: 622014 - RNA, 18 nt, Human
cagcaugccugaauuccg

SEQ ID NO: 622015 - RNA, 23 nt, Human
caucacccuaugauucaacugga

SEQ ID NO: 622016 - RNA, 22 nt, Human
cuaaaaccaaauaaaaugccag

SEQ ID NO: 622017 - RNA, 23 nt, Human
cuaaaaccaaauaaaaugccagu

SEQ ID NO: 622018 - RNA, 19 nt, Human
gaacuaguggugguggcaa

SEQ ID NO: 622019 - RNA, 19 nt, Human
ggaaaucaccaacuauaaa

SEQ ID NO: 622020 - RNA, 22 nt, Human
guaaaguuccuccaaaauuaaa

SEQ ID NO: 622021 - RNA, 19 nt, Human
uaaaaagcaguguugacau

SEQ ID NO: 622022 - RNA, 22 nt, Human
uaaaacaaaacaaaacaaacaa

SEQ ID NO: 622023 - RNA, 26 nt, Human
uaaaacaaaacaaaacaaacaaacaa

SEQ ID NO: 622024 - RNA, 24 nt, Human
uaagaacaaggcuuauuuaaaaca

SEQ ID NO: 622025 - RNA, 22 nt, Human
uaauaauccagaaacgacaugc

SEQ ID NO: 622026 - RNA, 19 nt, Human
uacuuaaaugaaaaaaagg

SEQ ID NO: 622027 - RNA, 21 nt, Human
uaggugaaacaugaaacacag

SEQ ID NO: 622028 - RNA, 21 nt, Human
ucacccuaugauucaacugga

SEQ ID NO: 622029 - RNA, 26 nt, Human
uccaaaauuaaaccugcugaugacuc

SEQ ID NO: 622030 - RNA, 18 nt, Human
ucccugcucugaaucucu

SEQ ID NO: 622031 - RNA, 23 nt, Human
uccuccaaaauuaaaccugcuga

SEQ ID NO: 622032 - RNA, 24 nt, Human
ucgaaaacccguguuaccacuucu

SEQ ID NO: 622033 - RNA, 20 nt, Human
ucuaagagguugcugucugg

SEQ ID NO: 622034 - RNA, 23 nt, Human
ugagaagaagagacuuuacagua

SEQ ID NO: 622035 - RNA, 23 nt, Human
ugccugaauuccgaucaauccac

SEQ ID NO: 622036 - RNA, 21 nt, Human
uggcaacagcagcugcuggag

SEQ ID NO: 622037 - RNA, 24 nt, Human
uuccgaucaauccacugcagggag

SEQ ID NO: 622038 - RNA, 21 nt, Human
uugaacuaguggugguggcaa

SEQ ID NO: 622039 - RNA, 22 nt, Human
uuuuuaggacauuaccuuuauu

SEQ ID NO: 622040 - RNA, 23 nt, Human
uuuuuuuuuuuuuuuuuuuuagg

SEQ ID NO: 622041 - RNA, 20 nt, Human
aagaacucccgccccuagca

SEQ ID NO: 622042 - RNA, 20 nt, Human
aggcaguggggguugggaag

SEQ ID NO: 622043 - RNA, 23 nt, Human
cagagcagcucucgccacaggag

SEQ ID NO: 622044 - RNA, 20 nt, Human
caggaguuuguagaugcucc

SEQ ID NO: 622045 - RNA, 20 nt, Human
ccuagcacagcgccaaacac

SEQ ID NO: 622046 - RNA, 18 nt, Human
gacacugauagagaccuc

SEQ ID NO: 622047 - RNA, 23 nt, Human
gcaggacacugauagagaccucu

SEQ ID NO: 622048 - RNA, 20 nt, Human
gccacaggaguuuguagaug

SEQ ID NO: 622049 - RNA, 20 nt, Human
gggcgggcugguccaagagu

SEQ ID NO: 622050 - RNA, 24 nt, Human
uaccaaaugcuuuaaugccauucu

SEQ ID NO: 622051 - RNA, 19 nt, Human
uagaacccaaggaagcaga

SEQ ID NO: 622052 - RNA, 21 nt, Human
uagaacccaaggaagcagagc

SEQ ID NO: 622053 - RNA, 21 nt, Human
uagagcugguggucagggcgg

SEQ ID NO: 622054 - RNA, 20 nt, Human
uauaccaaaugcuuuaaugc

SEQ ID NO: 622055 - RNA, 18 nt, Human
uaugcagaccgggacacc

SEQ ID NO: 622056 - RNA, 21 nt, Human
ucauccucaugacaacucgag

SEQ ID NO: 622057 - RNA, 21 nt, Human
uccaagagucuggaagaacuc

SEQ ID NO: 622058 - RNA, 18 nt, Human
ugcgugggugccgugcag

SEQ ID NO: 622059 - RNA, 21 nt, Human
uggaagaacucccgccccuaa

SEQ ID NO: 622060 - RNA, 26 nt, Human
uugaguaaaaaucacuagcaauuuau

SEQ ID NO: 622061 - RNA, 20 nt, Human
uuuuuuuuuuuuuuuuuugg

SEQ ID NO: 622062 - RNA, 24 nt, Human
aaaaaaaaaaaaaaaaccccaaaa

SEQ ID NO: 622063 - RNA, 24 nt, Human
aaaaaaaaaaaaaaccccaaaaaa

SEQ ID NO: 622064 - RNA, 22 nt, Human
aaaaaaaaaaaaaauuacccag

SEQ ID NO: 622065 - RNA, 23 nt, Human
aaaaaaaaaaaaaccccaaaaaa

SEQ ID NO: 622066 - RNA, 25 nt, Human
aaaaaaaaccccaaaaaaacaaaaa

SEQ ID NO: 622067 - RNA, 22 nt, Human
aaaaaaaccuuucaaagaacac

SEQ ID NO: 622068 - RNA, 19 nt, Human
aaaaaccccaaaaaaacaa

SEQ ID NO: 622069 - RNA, 26 nt, Human
aaaacaaaaauaaaaaaaccuuucaa

SEQ ID NO: 622070 - RNA, 21 nt, Human
aaaaccccaaaaaaacaaaaa

SEQ ID NO: 622071 - RNA, 23 nt, Human
aaaagacuuucaaccuguaagaa

SEQ ID NO: 622072 - RNA, 22 nt, Human
aaacaaaaauagagcaaaccaa

SEQ ID NO: 622073 - RNA, 22 nt, Human
aaacaaaaugucaggauccaac

SEQ ID NO: 622074 - RNA, 18 nt, Human
aaacauuaugagcaaauc

SEQ ID NO: 622075 - RNA, 21 nt, Human
aaaccuuucaaagaacacuag

SEQ ID NO: 622076 - RNA, 25 nt, Human
aaacuaaaaggugaaaaaacuagaa

SEQ ID NO: 622077 - RNA, 18 nt, Human
aacauggugaaacucauc

SEQ ID NO: 622078 - RNA, 19 nt, Human
aacauggugaaacucaucu

SEQ ID NO: 622079 - RNA, 20 nt, Human
aacauggugaaacucaucuc

SEQ ID NO: 622080 - RNA, 23 nt, Human
aaccccaaaaaaacaaaaauaaa

SEQ ID NO: 622081 - RNA, 24 nt, Human
aaccgcuugaacccgagaggcaga

SEQ ID NO: 622082 - RNA, 21 nt, Human
aaccuguaagaaacaauuucu

SEQ ID NO: 622083 - RNA, 21 nt, Human
aacuaaaacuaaaggauugcu

SEQ ID NO: 622084 - RNA, 25 nt, Human
aauacaaaaaaaaaaaaaauuaccc

SEQ ID NO: 622085 - RNA, 27 nt, Human
acaaaaauagagcaaaccaagcguguc

SEQ ID NO: 622086 - RNA, 20 nt, Human
acagaaaaaaauaauuuuga

SEQ ID NO: 622087 - RNA, 24 nt, Human
acagagcaagacucggucucaaaa

SEQ ID NO: 622088 - RNA, 23 nt, Human
accaacauggugaaacucaucuc

SEQ ID NO: 622089 - RNA, 19 nt, Human
accacuaucacacauaaac

SEQ ID NO: 622090 - RNA, 22 nt, Human
accacugcauuccagccugggc

SEQ ID NO: 622091 - RNA, 24 nt, Human
accacugcauuccagccugggcga

SEQ ID NO: 622092 - RNA, 19 nt, Human
accccaaaaaaacaaaaau

SEQ ID NO: 622093 - RNA, 24 nt, Human
acugcauuccagccugggcgacag

SEQ ID NO: 622094 - RNA, 26 nt, Human
acugcauuccagccugggcgacagag

SEQ ID NO: 622095 - RNA, 20 nt, Human
agaaccgcuugaacccgaga

SEQ ID NO: 622096 - RNA, 22 nt, Human
agaaguggacugcuagcauaua

SEQ ID NO: 622097 - RNA, 24 nt, Human
agacugaccaacauggugaaacuc

SEQ ID NO: 622098 - RNA, 19 nt, Human
agagauugcagugagccaa

SEQ ID NO: 622099 - RNA, 24 nt, Human
agagauugcagugagccaagaucg

SEQ ID NO: 622100 - RNA, 21 nt, Human
agaguaaaaacuaaaagguga

SEQ ID NO: 622101 - RNA, 20 nt, Human
agcacuuugggaggcugagg

SEQ ID NO: 622102 - RNA, 24 nt, Human
agccugggcgacagagcaagacuc

SEQ ID NO: 622103 - RNA, 19 nt, Human
aggaaaaauaagcaccaaa

SEQ ID NO: 622104 - RNA, 23 nt, Human
aggaguucgagacuagacugacc

SEQ ID NO: 622105 - RNA, 24 nt, Human
aggauggagaaaggacaaaaaaaa

SEQ ID NO: 622106 - RNA, 24 nt, Human
aggcagagauugcagugagccaag

SEQ ID NO: 622107 - RNA, 24 nt, Human
aggcaguagaaccgcuugaacccg

SEQ ID NO: 622108 - RNA, 24 nt, Human
aggcaugcggaucacaaggucagg

SEQ ID NO: 622109 - RNA, 24 nt, Human
aggcgugguggcacacaccuguaa

SEQ ID NO: 622110 - RNA, 24 nt, Human
aggcugaggcaguagaaccgcuug

SEQ ID NO: 622111 - RNA, 22 nt, Human
auaaugaucccuuuaauaaacu

SEQ ID NO: 622112 - RNA, 20 nt, Human
auauauaaaacaaccaaaga

SEQ ID NO: 622113 - RNA, 21 nt, Human
aucacaaggucaggaguucga

SEQ ID NO: 622114 - RNA, 18 nt, Human
aucacacauaaacaaaaa

SEQ ID NO: 622115 - RNA, 24 nt, Human
aucgcaccacugcauuccagccug

SEQ ID NO: 622116 - RNA, 19 nt, Human
augccuguaaucccagcac

SEQ ID NO: 622117 - RNA, 24 nt, Human
augcggaucacaaggucaggaguu

SEQ ID NO: 622118 - RNA, 20 nt, Human
augguuacaaaauuagagua

SEQ ID NO: 622119 - RNA, 24 nt, Human
caaaacacuagaacaguugcuaug

SEQ ID NO: 622120 - RNA, 21 nt, Human
caaaauguuacaaauaguauc

SEQ ID NO: 622121 - RNA, 23 nt, Human
caacauggugaaacucaucucua

SEQ ID NO: 622122 - RNA, 23 nt, Human
caaccuguaagaaacaauuucug

SEQ ID NO: 622123 - RNA, 22 nt, Human
caagauaaagcagagugacuua

SEQ ID NO: 622124 - RNA, 22 nt, Human
caauuaccugguuuaccaagaa

SEQ ID NO: 622125 - RNA, 21 nt, Human
cacaccuguaaacaaugugcc

SEQ ID NO: 622126 - RNA, 22 nt, Human
cacaccuguaaacaaugugcca

SEQ ID NO: 622127 - RNA, 18 nt, Human
cacaccuguaauccuagc

SEQ ID NO: 622128 - RNA, 30 nt, Human
cacauaaacaaaaauagagcaaaccaagcc

SEQ ID NO: 622129 - RNA, 24 nt, Human
caccuguaauccuagcuacucagg

SEQ ID NO: 622130 - RNA, 19 nt, Human
cacugcauuccagccuggg

SEQ ID NO: 622131 - RNA, 22 nt, Human
cacugcauuccagccugggcga

SEQ ID NO: 622132 - RNA, 23 nt, Human
cacugcauuccagccugggcgac

SEQ ID NO: 622133 - RNA, 24 nt, Human
cacugcauuccagccugggcgaca

SEQ ID NO: 622134 - RNA, 22 nt, Human
cagagucuugagaaacuuaaag

SEQ ID NO: 622135 - RNA, 23 nt, Human
cagcacuuugggaggcugaggca

SEQ ID NO: 622136 - RNA, 19 nt, Human
caggaguucgagacuagac

SEQ ID NO: 622137 - RNA, 20 nt, Human
caugccuguaaucccagcac

SEQ ID NO: 622138 - RNA, 24 nt, Human
caugccuguaaucccagcacuuug

SEQ ID NO: 622139 - RNA, 20 nt, Human
ccacugcauuccagccuggg

SEQ ID NO: 622140 - RNA, 21 nt, Human
ccacugcauuccagccugggc

SEQ ID NO: 622141 - RNA, 21 nt, Human
ccacugcauuccagccugggc

SEQ ID NO: 622142 - RNA, 21 nt, Human
ccacugcauuccagccugggc

SEQ ID NO: 622143 - RNA, 24 nt, Human
ccacugcauuccagccugggcgac

SEQ ID NO: 622144 - RNA, 23 nt, Human
ccccaaaaaaacaaaaauaaaaa

SEQ ID NO: 622145 - RNA, 20 nt, Human
ccucucaaagcauuuuuaaa

SEQ ID NO: 622146 - RNA, 22 nt, Human
ccugggcgacagagcaagacuc

SEQ ID NO: 622147 - RNA, 20 nt, Human
ccuguuggagccccugaggu

SEQ ID NO: 622148 - RNA, 20 nt, Human
ccuuuagugaccuuucuuca

SEQ ID NO: 622149 - RNA, 21 nt, Human
cgcaccacugcauuccagccu

SEQ ID NO: 622150 - RNA, 22 nt, Human
cggaucacaaggucaggaguuc

SEQ ID NO: 622151 - RNA, 18 nt, Human
cucaaaaaaaaaaaaaaa

SEQ ID NO: 622152 - RNA, 18 nt, Human
cucaaaaaaaaaaaaaaa

SEQ ID NO: 622153 - RNA, 25 nt, Human
cucaaaaaaaaaaaaaaaaacccca

SEQ ID NO: 622154 - RNA, 20 nt, Human
cucacagaacacagugucau

SEQ ID NO: 622155 - RNA, 23 nt, Human
cucaugccuguaaucccagcacu

SEQ ID NO: 622156 - RNA, 24 nt, Human
cucaugccuguaaucccagcacuu

SEQ ID NO: 622157 - RNA, 20 nt, Human
cuccaugaauucagugauuu

SEQ ID NO: 622158 - RNA, 24 nt, Human
cucggucucaaaaaaaaaaaaaaa

SEQ ID NO: 622159 - RNA, 19 nt, Human
cugaucaaggauggagaaa

SEQ ID NO: 622160 - RNA, 21 nt, Human
cuguaauccuagcuacucagg

SEQ ID NO: 622161 - RNA, 18 nt, Human
gagauugcagugagccaa

SEQ ID NO: 622162 - RNA, 20 nt, Human
gagcaagacucggucucaaa

SEQ ID NO: 622163 - RNA, 21 nt, Human
gaucacaaggucaggaguucg

SEQ ID NO: 622164 - RNA, 22 nt, Human
gaucacaaggucaggaguucga

SEQ ID NO: 622165 - RNA, 24 nt, Human
gaucacaaggucaggaguucgaga

SEQ ID NO: 622166 - RNA, 20 nt, Human
gcaaaccaagcguguccaca

SEQ ID NO: 622167 - RNA, 20 nt, Human
gcaccacugcauuccagccu

SEQ ID NO: 622168 - RNA, 24 nt, Human
gcauuccagccugggcgacagagc

SEQ ID NO: 622169 - RNA, 20 nt, Human
gccaagaucgcaccacugca

SEQ ID NO: 622170 - RNA, 20 nt, Human
gcuauuuuaagguuugauug

SEQ ID NO: 622171 - RNA, 21 nt, Human
ggaaaaacaguguuuucauga

SEQ ID NO: 622172 - RNA, 23 nt, Human
ggagaaaggacaaaaaaaaauac

SEQ ID NO: 622173 - RNA, 24 nt, Human
ggccgugguggcucaugccuguaa

SEQ ID NO: 622174 - RNA, 21 nt, Human
ggcucaugccuguaaucccag

SEQ ID NO: 622175 - RNA, 24 nt, Human
gguggcucaugccuguaaucccag

SEQ ID NO: 622176 - RNA, 24 nt, Human
guuuuauuucucucauaugcaagu

SEQ ID NO: 622177 - RNA, 24 nt, Human
uaaaaaacgcauuauuacacuuua

SEQ ID NO: 622178 - RNA, 25 nt, Human
uaaaaaacgcauuauuacacuuuac

SEQ ID NO: 622179 - RNA, 23 nt, Human
uaaaaacacaaaacacuagaaca

SEQ ID NO: 622180 - RNA, 20 nt, Human
uaaauauaagccuauugacc

SEQ ID NO: 622181 - RNA, 22 nt, Human
uaacucaguucaauuauugaac

SEQ ID NO: 622182 - RNA, 19 nt, Human
uaagcaccaaaguaaaaua

SEQ ID NO: 622183 - RNA, 18 nt, Human
uaccaagaauguuaacuc

SEQ ID NO: 622184 - RNA, 21 nt, Human
uagaaaacccaauacuagcua

SEQ ID NO: 622185 - RNA, 22 nt, Human
uagaaccgcuugaacccgagag

SEQ ID NO: 622186 - RNA, 19 nt, Human
uagagcaaaccaagcgugu

SEQ ID NO: 622187 - RNA, 24 nt, Human
uagcuacucaggaggcugaggcag

SEQ ID NO: 622188 - RNA, 23 nt, Human
uauaaucagauaucucaaauucc

SEQ ID NO: 622189 - RNA, 23 nt, Human
uaugcaaguaauuaccucucaaa

SEQ ID NO: 622190 - RNA, 21 nt, Human
uaugcuuuauuagggggaaaa

SEQ ID NO: 622191 - RNA, 26 nt, Human
ucaaaaaaaaaaaaaaaaaccccaaa

SEQ ID NO: 622192 - RNA, 23 nt, Human
ucacaaggucaggaguucgagac

SEQ ID NO: 622193 - RNA, 24 nt, Human
ucacaaggucaggaguucgagacu

SEQ ID NO: 622194 - RNA, 23 nt, Human
ucacacauaaacaaaaauagagc

SEQ ID NO: 622195 - RNA, 23 nt, Human
ucagagucuugagaaacuuaaag

SEQ ID NO: 622196 - RNA, 19 nt, Human
uccacaucuccaugaauuc

SEQ ID NO: 622197 - RNA, 24 nt, Human
uccagccugggcgacagagcaaga

SEQ ID NO: 622198 - RNA, 21 nt, Human
ucccuggagauuaaaucaaau

SEQ ID NO: 622199 - RNA, 23 nt, Human
ucgcaccacugcauuccagccug

SEQ ID NO: 622200 - RNA, 21 nt, Human
ucggucucaaaaaaaaaaaaa

SEQ ID NO: 622201 - RNA, 25 nt, Human
ucggucucaaaaaaaaaaaaaaaaa

SEQ ID NO: 622202 - RNA, 22 nt, Human
ucucuacuaaaaauacaaaaaa

SEQ ID NO: 622203 - RNA, 21 nt, Human
ugaaaaaacuagaaaacccaa

SEQ ID NO: 622204 - RNA, 20 nt, Human
ugaacaaaucacucuuaaac

SEQ ID NO: 622205 - RNA, 24 nt, Human
ugacagaaccacuaucacacauag

SEQ ID NO: 622206 - RNA, 18 nt, Human
ugaccaacauggugaaac

SEQ ID NO: 622207 - RNA, 18 nt, Human
ugacuuauagacaagacc

SEQ ID NO: 622208 - RNA, 19 nt, Human
ugacuuauagacaagacca

SEQ ID NO: 622209 - RNA, 19 nt, Human
ugagaaacuuaaagugcag

SEQ ID NO: 622210 - RNA, 24 nt, Human
ugaggcaguagaaccgcuugaacc

SEQ ID NO: 622211 - RNA, 25 nt, Human
ugaggcaguagaaccgcuugaaccc

SEQ ID NO: 622212 - RNA, 24 nt, Human
ugaggcaugcggaucacaagguca

SEQ ID NO: 622213 - RNA, 20 nt, Human
ugcaaguaauuaccucucaa

SEQ ID NO: 622214 - RNA, 23 nt, Human
ugccuguaaucccagcacuuugg

SEQ ID NO: 622215 - RNA, 23 nt, Human
ugccuguaaucccagcacuuugg

SEQ ID NO: 622216 - RNA, 24 nt, Human
ugccuguaaucccagcacuuuggg

SEQ ID NO: 622217 - RNA, 19 nt, Human
uggcacacaccuguaaucc

SEQ ID NO: 622218 - RNA, 24 nt, Human
uggcgggccgugguggcucaugcc

SEQ ID NO: 622219 - RNA, 22 nt, Human
uggcucaugccuguaaucccag

SEQ ID NO: 622220 - RNA, 24 nt, Human
uggcucaugccuguaaucccagca

SEQ ID NO: 622221 - RNA, 24 nt, Human
ugggaggcugaggcaugcggauca

SEQ ID NO: 622222 - RNA, 22 nt, Human
ugguggcacacaccuguaaucc

SEQ ID NO: 622223 - RNA, 24 nt, Human
ugguggcucaugccuguaauccca

SEQ ID NO: 622224 - RNA, 26 nt, Human
uguaagaaacaauuucugggaauaua

SEQ ID NO: 622225 - RNA, 19 nt, Human
ugucaacagcugugauuca

SEQ ID NO: 622226 - RNA, 19 nt, Human
ugugauucauaugaaaaau

SEQ ID NO: 622227 - RNA, 19 nt, Human
uguuggagccccugagguc

SEQ ID NO: 622228 - RNA, 21 nt, Human
uuaaaguuuuaauaguuuauc

SEQ ID NO: 622229 - RNA, 22 nt, Human
uugcagugagccaagaucgcac

SEQ ID NO: 622230 - RNA, 25 nt, Human
uugggaggcugaggcaugcggauca

SEQ ID NO: 622231 - RNA, 22 nt, Human
uuuucucccuguuggagccccu

SEQ ID NO: 622232 - RNA, 19 nt, Human
aaaaugcugggauuacagg

SEQ ID NO: 622233 - RNA, 24 nt, Human
aaaaugcugggauuacaggugcga

SEQ ID NO: 622234 - RNA, 25 nt, Human
aaacugaaguuuaucacacagcuaa

SEQ ID NO: 622235 - RNA, 24 nt, Human
aaaguguugggauuacagguguga

SEQ ID NO: 622236 - RNA, 19 nt, Human
aaaugcugggauuacaggu

SEQ ID NO: 622237 - RNA, 20 nt, Human
aaccucugccucccgggcuc

SEQ ID NO: 622238 - RNA, 20 nt, Human
aagaccccuuucccaacuaa

SEQ ID NO: 622239 - RNA, 25 nt, Human
aagcaauccucccaccucagccucc

SEQ ID NO: 622240 - RNA, 24 nt, Human
aagcgauccgccugccucagccuc

SEQ ID NO: 622241 - RNA, 25 nt, Human
aaguccuaaaagcuuaguguaagcc

SEQ ID NO: 622242 - RNA, 21 nt, Human
aaguguugggauuacaggugu

SEQ ID NO: 622243 - RNA, 26 nt, Human
aaguguugggauuacaggugugaacc

SEQ ID NO: 622244 - RNA, 18 nt, Human
acaggguuucaccauguu

SEQ ID NO: 622245 - RNA, 19 nt, Human
acaggguuucaccauguug

SEQ ID NO: 622246 - RNA, 24 nt, Human
acaggguuucaccauguugcccag

SEQ ID NO: 622247 - RNA, 20 nt, Human
accaccacgccuggcccacu

SEQ ID NO: 622248 - RNA, 25 nt, Human
accauguugcccaggcuuuucucga

SEQ ID NO: 622249 - RNA, 24 nt, Human
acccagcuaauuuuuuuguauuuu

SEQ ID NO: 622250 - RNA, 20 nt, Human
accuuagccacuugaguagc

SEQ ID NO: 622251 - RNA, 21 nt, Human
acuacaagugcaugccaccau

SEQ ID NO: 622252 - RNA, 19 nt, Human
acuacaggugcaugccacc

SEQ ID NO: 622253 - RNA, 24 nt, Human
acuugaguagcugggacuacaggu

SEQ ID NO: 622254 - RNA, 23 nt, Human
agacaggguuucaccauguugcc

SEQ ID NO: 622255 - RNA, 24 nt, Human
agcgauccgccugccucagccucc

SEQ ID NO: 622256 - RNA, 24 nt, Human
agcuggucucaaacuccugagcuc

SEQ ID NO: 622257 - RNA, 19 nt, Human
aggugugaaccaccacgcc

SEQ ID NO: 622258 - RNA, 18 nt, Human
aguagcugggacuacagg

SEQ ID NO: 622259 - RNA, 18 nt, Human
aguagcugggacuacagg

SEQ ID NO: 622260 - RNA, 20 nt, Human
agugcaguggugcaaucaug

SEQ ID NO: 622261 - RNA, 23 nt, Human
agugcaguggugcaaucauggcu

SEQ ID NO: 622262 - RNA, 22 nt, Human
auagugagcuuucaugagaucu

SEQ ID NO: 622263 - RNA, 18 nt, Human
aucauggcucacugcaac

SEQ ID NO: 622264 - RNA, 18 nt, Human
augggguuucaccauguu

SEQ ID NO: 622265 - RNA, 19 nt, Human
augggguuucaccauguug

SEQ ID NO: 622266 - RNA, 26 nt, Human
auguucuauauccauaacuuuguaca

SEQ ID NO: 622267 - RNA, 24 nt, Human
caaaaugcugggauuacaggugcg

SEQ ID NO: 622268 - RNA, 24 nt, Human
caaaguguugggauuacaggugug

SEQ ID NO: 622269 - RNA, 23 nt, Human
caaccucugccucccgggcucaa

SEQ ID NO: 622270 - RNA, 22 nt, Human
caagcaaguuauuaaaaaccug

SEQ ID NO: 622271 - RNA, 27 nt, Human
caagcaauccucccaccucagccuccc

SEQ ID NO: 622272 - RNA, 27 nt, Human
caagcaauccucccaccucagccuccc

SEQ ID NO: 622273 - RNA, 21 nt, Human
caaucaagaccccuuucccaa

SEQ ID NO: 622274 - RNA, 23 nt, Human
caccauguugcccagcuggucuc

SEQ ID NO: 622275 - RNA, 26 nt, Human
caccauguugcccagcuggucucaaa

SEQ ID NO: 622276 - RNA, 22 nt, Human
caccauguugcccaggcuuuuc

SEQ ID NO: 622277 - RNA, 24 nt, Human
caccauguugcccaggcuuuucuc

SEQ ID NO: 622278 - RNA, 18 nt, Human
cacccaagucucaucuug

SEQ ID NO: 622279 - RNA, 20 nt, Human
cacccagucaagagauucuu

SEQ ID NO: 622280 - RNA, 20 nt, Human
cacccucucaccuuagccac

SEQ ID NO: 622281 - RNA, 23 nt, Human
caccucagccucccaaagccucc

SEQ ID NO: 622282 - RNA, 21 nt, Human
cacugcaaccucugccucccg

SEQ ID NO: 622283 - RNA, 23 nt, Human
cacugcaaccucugccucccggg

SEQ ID NO: 622284 - RNA, 22 nt, Human
cagaaaauagcucagaaucuca

SEQ ID NO: 622285 - RNA, 20 nt, Human
cagaaucucaaagcaucaau

SEQ ID NO: 622286 - RNA, 19 nt, Human
cagccuccaccuccugggc

SEQ ID NO: 622287 - RNA, 23 nt, Human
cagccuccaccuccugggcucaa

SEQ ID NO: 622288 - RNA, 24 nt, Human
cagccuccaccuccugggcucaag

SEQ ID NO: 622289 - RNA, 24 nt, Human
caggguuucaccauguugcccagg

SEQ ID NO: 622290 - RNA, 24 nt, Human
caugccaccacacccagcuaauuu

SEQ ID NO: 622291 - RNA, 21 nt, Human
cauggcucacugcaaccucug

SEQ ID NO: 622292 - RNA, 23 nt, Human
cauguugcccagcuggucucaaa

SEQ ID NO: 622293 - RNA, 21 nt, Human
cauguugcccaggcuuuucuc

SEQ ID NO: 622294 - RNA, 24 nt, Human
cauguugcccaggcuuuucucgaa

SEQ ID NO: 622295 - RNA, 21 nt, Human
ccaaaaugcugggauuacagg

SEQ ID NO: 622296 - RNA, 22 nt, Human
ccaaaaugcugggauuacaggu

SEQ ID NO: 622297 - RNA, 21 nt, Human
ccaaaguguugggauuacagg

SEQ ID NO: 622298 - RNA, 21 nt, Human
ccaaaguguugggauuacagg

SEQ ID NO: 622299 - RNA, 24 nt, Human
ccaaaguguugggauuacaggugu

SEQ ID NO: 622300 - RNA, 24 nt, Human
ccaccuccugggcucaagugaucc

SEQ ID NO: 622301 - RNA, 24 nt, Human
ccacuugaguagcugggacuacag

SEQ ID NO: 622302 - RNA, 18 nt, Human
cccgggcucaagccaccc

SEQ ID NO: 622303 - RNA, 26 nt, Human
ccgccugccucagccucccaaaaugc

SEQ ID NO: 622304 - RNA, 22 nt, Human
ccuccaccuccugggcucaagu

SEQ ID NO: 622305 - RNA, 21 nt, Human
ccugagcucaagcgauccgcc

SEQ ID NO: 622306 - RNA, 22 nt, Human
ccugggcucaagugauccuccc

SEQ ID NO: 622307 - RNA, 23 nt, Human
ccuuggcucaagcaauccuccca

SEQ ID NO: 622308 - RNA, 20 nt, Human
cgggcucaagccacccucuc

SEQ ID NO: 622309 - RNA, 24 nt, Human
cucaagcaauccucccaccucagc

SEQ ID NO: 622310 - RNA, 24 nt, Human
cucaagugauccucccaccuuagc

SEQ ID NO: 622311 - RNA, 24 nt, Human
cucacugcaaccucugccucccgg

SEQ ID NO: 622312 - RNA, 24 nt, Human
cucacuuugucacgcaggcuggag

SEQ ID NO: 622313 - RNA, 19 nt, Human
cucaugauagugagcuuuc

SEQ ID NO: 622314 - RNA, 24 nt, Human
cucauugcagccuccaccuccugg

SEQ ID NO: 622315 - RNA, 23 nt, Human
cucccaccuuagcugaacuacaa

SEQ ID NO: 622316 - RNA, 25 nt, Human
cucccgggcucaagccacccucuca

SEQ ID NO: 622317 - RNA, 21 nt, Human
cuccugggcucaagugauccu

SEQ ID NO: 622318 - RNA, 25 nt, Human
cuccugggcucaagugauccuccca

SEQ ID NO: 622319 - RNA, 19 nt, Human
cugcaaccucugccucccg

SEQ ID NO: 622320 - RNA, 23 nt, Human
cugcaaccucugccucccgggcu

SEQ ID NO: 622321 - RNA, 23 nt, Human
cugccucagccucccaaaaugcu

SEQ ID NO: 622322 - RNA, 24 nt, Human
cugccucagccucccaaaaugcug

SEQ ID NO: 622323 - RNA, 24 nt, Human
cuuagccacuugaguagcugggac

SEQ ID NO: 622324 - RNA, 23 nt, Human
cuugaguagcugggacuacaggu

SEQ ID NO: 622325 - RNA, 19 nt, Human
cuuuagcuguagcaccaga

SEQ ID NO: 622326 - RNA, 24 nt, Human
cuuuguguguuuuugguagagaca

SEQ ID NO: 622327 - RNA, 19 nt, Human
gaaaggguaaaguuuggaa

SEQ ID NO: 622328 - RNA, 22 nt, Human
gaacuacaagugcaugccacca

SEQ ID NO: 622329 - RNA, 23 nt, Human
gaauuccuuggcucaagcaaucc

SEQ ID NO: 622330 - RNA, 20 nt, Human
gacuuuuuuuuuuuuuugaa

SEQ ID NO: 622331 - RNA, 18 nt, Human
gagaugggguuucaccau

SEQ ID NO: 622332 - RNA, 23 nt, Human
gagaugggguuucaccauguugc

SEQ ID NO: 622333 - RNA, 24 nt, Human
gagcucaagcgauccgccugccuc

SEQ ID NO: 622334 - RNA, 19 nt, Human
gaguagcugggacuacagg

SEQ ID NO: 622335 - RNA, 26 nt, Human
gaguagcugggacuacaggugcaugc

SEQ ID NO: 622336 - RNA, 22 nt, Human
gagugaauaauacuaaagcuaa

SEQ ID NO: 622337 - RNA, 22 nt, Human
gaugggguuucaccauguugcc

SEQ ID NO: 622338 - RNA, 18 nt, Human
gauuacaggugcgaguca

SEQ ID NO: 622339 - RNA, 22 nt, Human
gauuacaggugcgagucaccgc

SEQ ID NO: 622340 - RNA, 21 nt, Human
gauuacaggugugaaccacca

SEQ ID NO: 622341 - RNA, 22 nt, Human
gcaaccucugccucccgggcuc

SEQ ID NO: 622342 - RNA, 20 nt, Human
gcagccuccaccuccugggc

SEQ ID NO: 622343 - RNA, 18 nt, Human
gcgauccgccugccucag

SEQ ID NO: 622344 - RNA, 24 nt, Human
gcgauccgccugccucagccuccc

SEQ ID NO: 622345 - RNA, 24 nt, Human
gcucaagcgauccgccugccucag

SEQ ID NO: 622346 - RNA, 21 nt, Human
gcucacugcaaccucugccuc

SEQ ID NO: 622347 - RNA, 20 nt, Human
gcuggagugcagaggcacua

SEQ ID NO: 622348 - RNA, 20 nt, Human
ggcuggagugcagaggcacu

SEQ ID NO: 622349 - RNA, 21 nt, Human
gggcucaagugauccucccac

SEQ ID NO: 622350 - RNA, 22 nt, Human
gggcucaagugauccucccacc

SEQ ID NO: 622351 - RNA, 22 nt, Human
gggguuucaccauguugcccag

SEQ ID NO: 622352 - RNA, 22 nt, Human
gggucuugcuuuguugcccaag

SEQ ID NO: 622353 - RNA, 21 nt, Human
gguagagacaggguuucacca

SEQ ID NO: 622354 - RNA, 21 nt, Human
gguggagaugggguuucacca

SEQ ID NO: 622355 - RNA, 21 nt, Human
guagagacaggguuucaccau

SEQ ID NO: 622356 - RNA, 22 nt, Human
guagagacaggguuucaccaug

SEQ ID NO: 622357 - RNA, 19 nt, Human
guggagaugggguuucacc

SEQ ID NO: 622358 - RNA, 21 nt, Human
guggagaugggguuucaccau

SEQ ID NO: 622359 - RNA, 22 nt, Human
guggagaugggguuucaccaug

SEQ ID NO: 622360 - RNA, 23 nt, Human
guggagaugggguuucaccaugu

SEQ ID NO: 622361 - RNA, 28 nt, Human
uaauuucuuuguguguuuuugguagaga

SEQ ID NO: 622362 - RNA, 23 nt, Human
uaauuuuuuuguauuuuuggugg

SEQ ID NO: 622363 - RNA, 26 nt, Human
uaauuuuuuuguauuuuugguggaga

SEQ ID NO: 622364 - RNA, 24 nt, Human
uacaggugcaugccaccacaccca

SEQ ID NO: 622365 - RNA, 22 nt, Human
uacaggugugaaccaccacgcc

SEQ ID NO: 622366 - RNA, 22 nt, Human
uagagacaggguuucaccaugu

SEQ ID NO: 622367 - RNA, 21 nt, Human
uagagugcaguggugcaauca

SEQ ID NO: 622368 - RNA, 24 nt, Human
uagagugcaguggugcaaucaugg

SEQ ID NO: 622369 - RNA, 20 nt, Human
uagcaccagagugaauaaua

SEQ ID NO: 622370 - RNA, 24 nt, Human
uaucacacagcuaauuggauggca

SEQ ID NO: 622371 - RNA, 24 nt, Human
uauuuuauucucauuaguaggcca

SEQ ID NO: 622372 - RNA, 21 nt, Human
ucaaagcaucaauggacuuug

SEQ ID NO: 622373 - RNA, 24 nt, Human
ucacugcaaccucugccucccggg

SEQ ID NO: 622374 - RNA, 25 nt, Human
ucacugcaaccucugccucccgggc

SEQ ID NO: 622375 - RNA, 20 nt, Human
ucagccucccaaagccuccc

SEQ ID NO: 622376 - RNA, 24 nt, Human
ucauugcagccuccaccuccuggg

SEQ ID NO: 622377 - RNA, 25 nt, Human
ucauugcagccuccaccuccugggc

SEQ ID NO: 622378 - RNA, 19 nt, Human
ucauuguucaaucaagacc

SEQ ID NO: 622379 - RNA, 23 nt, Human
ucccaaaaugcugggauuacagg

SEQ ID NO: 622380 - RNA, 23 nt, Human
ucccaaagccucccaaaguguug

SEQ ID NO: 622381 - RNA, 23 nt, Human
ucccaaaguguugggauuacagg

SEQ ID NO: 622382 - RNA, 25 nt, Human
uccccacccaagucucaucuugaau

SEQ ID NO: 622383 - RNA, 21 nt, Human
ucccgggcucaagccacccuc

SEQ ID NO: 622384 - RNA, 23 nt, Human
ucccgggcucaagccacccucuc

SEQ ID NO: 622385 - RNA, 24 nt, Human
uccgccugccucagccucccaaaa

SEQ ID NO: 622386 - RNA, 25 nt, Human
uccucccaccucagccucccaaagc

SEQ ID NO: 622387 - RNA, 21 nt, Human
uccugggcucaagugauccuc

SEQ ID NO: 622388 - RNA, 22 nt, Human
uccugggcucaagugauccucc

SEQ ID NO: 622389 - RNA, 24 nt, Human
uccuuggcucaagcaauccuccca

SEQ ID NO: 622390 - RNA, 23 nt, Human
ucucaaacuccugagcucaagcg

SEQ ID NO: 622391 - RNA, 24 nt, Human
ucucacuuugucacgcaggcugga

SEQ ID NO: 622392 - RNA, 21 nt, Human
ucucaugauagugagcuuuca

SEQ ID NO: 622393 - RNA, 22 nt, Human
ucucaugguuucuucaguauau

SEQ ID NO: 622394 - RNA, 23 nt, Human
ucucgaauuccuuggcucaagca

SEQ ID NO: 622395 - RNA, 18 nt, Human
ucuugcuuuguugcccaa

SEQ ID NO: 622396 - RNA, 19 nt, Human
ucuugcuuuguugcccaag

SEQ ID NO: 622397 - RNA, 23 nt, Human
ucuuuguguguuuuugguagaga

SEQ ID NO: 622398 - RNA, 24 nt, Human
ugaaacaaauagucugcaaggaug

SEQ ID NO: 622399 - RNA, 20 nt, Human
ugaaaggguaaaguuuggaa

SEQ ID NO: 622400 - RNA, 19 nt, Human
ugaacuacaagugcaugcc

SEQ ID NO: 622401 - RNA, 21 nt, Human
ugaaguuuaucacacagcuaa

SEQ ID NO: 622402 - RNA, 21 nt, Human
ugagaucugaugguuuuauaa

SEQ ID NO: 622403 - RNA, 26 nt, Human
ugauguaaauuucagccauauaugga

SEQ ID NO: 622404 - RNA, 19 nt, Human
ugauuuaaaagagggagua

SEQ ID NO: 622405 - RNA, 20 nt, Human
ugcagccuccaccuccuggg

SEQ ID NO: 622406 - RNA, 22 nt, Human
ugcaguggugcaaucauggcuc

SEQ ID NO: 622407 - RNA, 23 nt, Human
ugcaguggugcaaucauggcuca

SEQ ID NO: 622408 - RNA, 20 nt, Human
ugcaugccaccacacccagc

SEQ ID NO: 622409 - RNA, 21 nt, Human
ugcccaaguuagagugcagug

SEQ ID NO: 622410 - RNA, 24 nt, Human
ugccucagccucccaaaaugcugg

SEQ ID NO: 622411 - RNA, 24 nt, Human
ugcugggauuacaggugcgaguca

SEQ ID NO: 622412 - RNA, 23 nt, Human
uggagugcagaggcacuaucuca

SEQ ID NO: 622413 - RNA, 20 nt, Human
uggcaaggcagaaacucaaa

SEQ ID NO: 622414 - RNA, 20 nt, Human
uggcucaagcaauccuccca

SEQ ID NO: 622415 - RNA, 21 nt, Human
ugggacuacaggugcaugcca

SEQ ID NO: 622416 - RNA, 22 nt, Human
ugggacuacaggugcaugccac

SEQ ID NO: 622417 - RNA, 24 nt, Human
ugggacuacaggugcaugccacca

SEQ ID NO: 622418 - RNA, 18 nt, Human
ugggauuacaggugcgag

SEQ ID NO: 622419 - RNA, 21 nt, Human
ugggauuacaggugcgaguca

SEQ ID NO: 622420 - RNA, 22 nt, Human
ugggauuacaggugcgagucac

SEQ ID NO: 622421 - RNA, 23 nt, Human
ugggauuacaggugcgagucacc

SEQ ID NO: 622422 - RNA, 24 nt, Human
ugggauuacaggugcgagucaccg

SEQ ID NO: 622423 - RNA, 22 nt, Human
ugggauuacaggugugaaccac

SEQ ID NO: 622424 - RNA, 23 nt, Human
ugggauuacaggugugaaccacc

SEQ ID NO: 622425 - RNA, 24 nt, Human
ugggauuacaggugugaaccacca

SEQ ID NO: 622426 - RNA, 24 nt, Human
ugggauuacaggugugaaccacca

SEQ ID NO: 622427 - RNA, 24 nt, Human
ugggcucaagugauccucccaccu

SEQ ID NO: 622428 - RNA, 24 nt, Human
uggggucuugcuuuguugcccaag

SEQ ID NO: 622429 - RNA, 18 nt, Human
ugggguuucaccauguug

SEQ ID NO: 622430 - RNA, 24 nt, Human
ugguagagacaggguuucaccaug

SEQ ID NO: 622431 - RNA, 24 nt, Human
ugguggagaugggguuucaccaug

SEQ ID NO: 622432 - RNA, 18 nt, Human
uguugcuuauuuuauucu

SEQ ID NO: 622433 - RNA, 23 nt, Human
uuaucucaagcaaguuauuaaaa

SEQ ID NO: 622434 - RNA, 19 nt, Human
uuccugcauuccuguuugu

SEQ ID NO: 622435 - RNA, 22 nt, Human
uuccuuggcucaagcaauccuc

SEQ ID NO: 622436 - RNA, 23 nt, Human
uucuuuguguguuuuugguagag

SEQ ID NO: 622437 - RNA, 23 nt, Human
uugcagccuccaccuccugggcu

SEQ ID NO: 622438 - RNA, 24 nt, Human
uugcagccuccaccuccugggcuc

SEQ ID NO: 622439 - RNA, 24 nt, Human
uugcuuuguugcccaaguuagagu

SEQ ID NO: 622440 - RNA, 21 nt, Human
uugggauuacaggugugaacc

SEQ ID NO: 622441 - RNA, 24 nt, Human
uugguagagacaggguuucaccau

SEQ ID NO: 622442 - RNA, 24 nt, Human
uugguggagaugggguuucaccau

SEQ ID NO: 622443 - RNA, 18 nt, Human
uuucaccauguugcccag

SEQ ID NO: 622444 - RNA, 21 nt, Human
uuucaccauguugcccaggcu

SEQ ID NO: 622445 - RNA, 24 nt, Human
uuugucacgcaggcuggagugcag

SEQ ID NO: 622446 - RNA, 23 nt, Human
uuuguugcccaaguuagagugca

SEQ ID NO: 622447 - RNA, 24 nt, Human
uuuuugagauggggucuugcuuug

SEQ ID NO: 622448 - RNA, 22 nt, Human
uuuuugguagagacaggguuuc

SEQ ID NO: 622449 - RNA, 24 nt, Human
uuuuugguagagacaggguuucac

SEQ ID NO: 622450 - RNA, 22 nt, Human
uuuuugguggagaugggguuuc

SEQ ID NO: 622451 - RNA, 24 nt, Human
uuuuugguggagaugggguuucac

SEQ ID NO: 622452 - RNA, 21 nt, Human
uuuuuguauuuuugguggaga

SEQ ID NO: 622453 - RNA, 21 nt, Human
uuuuuuguauuuuugguggag

SEQ ID NO: 622454 - RNA, 24 nt, Human
uuuuuuguauuuuugguggagaug

SEQ ID NO: 622455 - RNA, 24 nt, Human
uuuuuuuuuugagauggggucuug

SEQ ID NO: 622456 - RNA, 23 nt, Human
uuuuuuuuuuuugagagaggguc

SEQ ID NO: 622457 - RNA, 26 nt, Human
uuuuuuuuuuuugagagagggucuca

SEQ ID NO: 622458 - RNA, 24 nt, Human
uuuuuuuuuuuugagauggggucu

SEQ ID NO: 622459 - RNA, 22 nt, Human
uuuuuuuuuuuuuugagauggg

SEQ ID NO: 622460 - RNA, 22 nt, Human
uuuuuuuuuuuuuugagauggg

SEQ ID NO: 622461 - RNA, 25 nt, Human
uuuuuuuuuuuuuuuugagagaggg

SEQ ID NO: 622462 - RNA, 18 nt, Human
uuuuuuuuuuuuuuuuug

SEQ ID NO: 622463 - RNA, 24 nt, Human
aaaaaaaacuauuuuaauugggga

SEQ ID NO: 622464 - RNA, 19 nt, Human
aacacagcaagacccuauc

SEQ ID NO: 622465 - RNA, 20 nt, Human
aacacagcaagacccuaucu

SEQ ID NO: 622466 - RNA, 21 nt, Human
aacacagcaagacccuaucuc

SEQ ID NO: 622467 - RNA, 20 nt, Human
aacauagcaaguccccaucu

SEQ ID NO: 622468 - RNA, 24 nt, Human
aagaaggaauaacaggccaggugu

SEQ ID NO: 622469 - RNA, 20 nt, Human
aagcaaaagguaguaaacua

SEQ ID NO: 622470 - RNA, 22 nt, Human
aagcagaaggauccugagccca

SEQ ID NO: 622471 - RNA, 18 nt, Human
aaucacacagcaaacuuu

SEQ ID NO: 622472 - RNA, 27 nt, Human
acaauacauuccaacucuauacaaaca

SEQ ID NO: 622473 - RNA, 21 nt, Human
acaggcaugcacgaacaauac

SEQ ID NO: 622474 - RNA, 26 nt, Human
acuacaacaaaauuguucugccauau

SEQ ID NO: 622475 - RNA, 18 nt, Human
acugcugcacucuagccu

SEQ ID NO: 622476 - RNA, 24 nt, Human
acugcugcacucuagccugggcaa

SEQ ID NO: 622477 - RNA, 18 nt, Human
agaaaaaaauauaaucaa

SEQ ID NO: 622478 - RNA, 22 nt, Human
agaaacaugaaguuagcacagc

SEQ ID NO: 622479 - RNA, 26 nt, Human
agccacuggacucucguuccaaacaa

SEQ ID NO: 622480 - RNA, 24 nt, Human
agccugggcaacacagcaagaccc

SEQ ID NO: 622481 - RNA, 18 nt, Human
agccuuuggaauaagaaa

SEQ ID NO: 622482 - RNA, 19 nt, Human
aggaagguauaccucaaag

SEQ ID NO: 622483 - RNA, 18 nt, Human
aggaggccgaagcagaag

SEQ ID NO: 622484 - RNA, 24 nt, Human
aggccaggugugguggcucaugcu

SEQ ID NO: 622485 - RNA, 24 nt, Human
aggugugguggcacacaccugugg

SEQ ID NO: 622486 - RNA, 24 nt, Human
aggugugguggcucaugcuuguaa

SEQ ID NO: 622487 - RNA, 22 nt, Human
agucugggcaacauagcaaguc

SEQ ID NO: 622488 - RNA, 23 nt, Human
agucugggcaacauagcaagucc

SEQ ID NO: 622489 - RNA, 28 nt, Human
auaacugaccauuugcuuaaugcuauau

SEQ ID NO: 622490 - RNA, 24 nt, Human
aucucuacaaaaaauuuuaaaaaa

SEQ ID NO: 622491 - RNA, 19 nt, Human
augggaagggaaaaaaaaa

SEQ ID NO: 622492 - RNA, 21 nt, Human
caaaauuguucugccauaucu

SEQ ID NO: 622493 - RNA, 22 nt, Human
caaagacaugggaaaaaagcaa

SEQ ID NO: 622494 - RNA, 24 nt, Human
caacacagcaagacccuaucucuu

SEQ ID NO: 622495 - RNA, 22 nt, Human
caccaaguacauucuuuuagaa

SEQ ID NO: 622496 - RNA, 21 nt, Human
caccuguggucuuagcuacuc

SEQ ID NO: 622497 - RNA, 24 nt, Human
caccuguggucuuagcuacucagg

SEQ ID NO: 622498 - RNA, 18 nt, Human
cacucuagccugggcaac

SEQ ID NO: 622499 - RNA, 21 nt, Human
caggccaggugugguggcuca

SEQ ID NO: 622500 - RNA, 23 nt, Human
caggccaggugugguggcucaug

SEQ ID NO: 622501 - RNA, 22 nt, Human
cauagcaaguccccaucucuac

SEQ ID NO: 622502 - RNA, 23 nt, Human
cauagcaaguccccaucucuaca

SEQ ID NO: 622503 - RNA, 22 nt, Human
ccaggaguuccaggcugcagug

SEQ ID NO: 622504 - RNA, 25 nt, Human
ccaggaguucgagaccagucugggc

SEQ ID NO: 622505 - RNA, 18 nt, Human
ccuccuuuaaaaacugag

SEQ ID NO: 622506 - RNA, 22 nt, Human
ccugggcaacacagcaagaccc

SEQ ID NO: 622507 - RNA, 19 nt, Human
cgaaaaaaauguacaaagc

SEQ ID NO: 622508 - RNA, 26 nt, Human
cucaaugcaacuuaacagugagaauu

SEQ ID NO: 622509 - RNA, 23 nt, Human
cugaaaaguacagucuugaaaua

SEQ ID NO: 622510 - RNA, 18 nt, Human
cugcacucuagccugggc

SEQ ID NO: 622511 - RNA, 19 nt, Human
cugcacucuagccugggca

SEQ ID NO: 622512 - RNA, 20 nt, Human
cugcacucuagccugggcaa

SEQ ID NO: 622513 - RNA, 21 nt, Human
cugcacucuagccugggcaac

SEQ ID NO: 622514 - RNA, 22 nt, Human
cugcacucuagccugggcaaca

SEQ ID NO: 622515 - RNA, 20 nt, Human
cugcugcacucuagccuggg

SEQ ID NO: 622516 - RNA, 21 nt, Human
cugcugcacucuagccugggc

SEQ ID NO: 622517 - RNA, 24 nt, Human
cugcugcacucuagccugggcaac

SEQ ID NO: 622518 - RNA, 21 nt, Human
gacaugggaaaaaagcaaacu

SEQ ID NO: 622519 - RNA, 18 nt, Human
gauccugagcccaggagu

SEQ ID NO: 622520 - RNA, 20 nt, Human
gcaacauagcaaguccccau

SEQ ID NO: 622521 - RNA, 22 nt, Human
gcacacaccuguggucuuagcu

SEQ ID NO: 622522 - RNA, 20 nt, Human
gccgaagcagaaggauccug

SEQ ID NO: 622523 - RNA, 24 nt, Human
gcuauauuacuuaaagccaccaag

SEQ ID NO: 622524 - RNA, 23 nt, Human
gggagcccacccuguacaugcuc

SEQ ID NO: 622525 - RNA, 24 nt, Human
gguggcacacaccuguggucuuag

SEQ ID NO: 622526 - RNA, 24 nt, Human
gguggcucaugcuuguaauucuag

SEQ ID NO: 622527 - RNA, 24 nt, Human
gguggcuugaggccaggaguucga

SEQ ID NO: 622528 - RNA, 27 nt, Human
uaaaaaaaacagccuauguaaaauaua

SEQ ID NO: 622529 - RNA, 18 nt, Human
uaaacuuaaaaaaaacag

SEQ ID NO: 622530 - RNA, 21 nt, Human
uaagaaaugcuacggaaaaaa

SEQ ID NO: 622531 - RNA, 28 nt, Human
uaagaaaugcuacggaaaaaaauacuac

SEQ ID NO: 622532 - RNA, 21 nt, Human
uaauaaauacaacagggagcc

SEQ ID NO: 622533 - RNA, 18 nt, Human
uacaguauaaacacauuc

SEQ ID NO: 622534 - RNA, 22 nt, Human
uacaugaaacacuuaaaaaugc

SEQ ID NO: 622535 - RNA, 24 nt, Human
uagagagaaaauauuuaaucuauu

SEQ ID NO: 622536 - RNA, 23 nt, Human
uagcauaauuuaucaacuaaugu

SEQ ID NO: 622537 - RNA, 21 nt, Human
uauacaguauaaacacauucu

SEQ ID NO: 622538 - RNA, 24 nt, Human
uauccuauugcaaagacaugggaa

SEQ ID NO: 622539 - RNA, 27 nt, Human
uaucucuuaaaaacaaaaaaaugggaa

SEQ ID NO: 622540 - RNA, 28 nt, Human
uauuauuaagaaaugcuacggaaaaaaa

SEQ ID NO: 622541 - RNA, 21 nt, Human
uauucaggacaaaauagugac

SEQ ID NO: 622542 - RNA, 22 nt, Human
uauugcaaagacaugggaaaaa

SEQ ID NO: 622543 - RNA, 24 nt, Human
uauugcaaagacaugggaaaaaag

SEQ ID NO: 622544 - RNA, 21 nt, Human
ucacugcugcacucuagccug

SEQ ID NO: 622545 - RNA, 20 nt, Human
uccacauguaaagauaugac

SEQ ID NO: 622546 - RNA, 18 nt, Human
uccauauacaguauaaac

SEQ ID NO: 622547 - RNA, 18 nt, Human
uccugagcccaggaguuc

SEQ ID NO: 622548 - RNA, 18 nt, Human
uccuuuaaaaacugagcu

SEQ ID NO: 622549 - RNA, 22 nt, Human
ugcaaagacaugggaaaaaagc

SEQ ID NO: 622550 - RNA, 18 nt, Human
ugcccuauuuaccucaac

SEQ ID NO: 622551 - RNA, 22 nt, Human
ugcuacggaaaaaaauacuaca

SEQ ID NO: 622552 - RNA, 24 nt, Human
ugcuacggaaaaaaauacuacaag

SEQ ID NO: 622553 - RNA, 23 nt, Human
ugcugcacucuagccugggcaac

SEQ ID NO: 622554 - RNA, 24 nt, Human
ugcugcacucuagccugggcaaca

SEQ ID NO: 622555 - RNA, 21 nt, Human
ugggaaaaaagcaaacucuua

SEQ ID NO: 622556 - RNA, 21 nt, Human
ugguggcacacaccugugguc

SEQ ID NO: 622557 - RNA, 20 nt, Human
ugguggcucaugcuuguaau

SEQ ID NO: 622558 - RNA, 18 nt, Human
ugguggcuugaggccagg

SEQ ID NO: 622559 - RNA, 19 nt, Human
ugguggcuugaggccagga

SEQ ID NO: 622560 - RNA, 19 nt, Human
ugucuagaaauaccaauau

SEQ ID NO: 622561 - RNA, 23 nt, Human
ugugguggcacacaccugugguc

SEQ ID NO: 622562 - RNA, 23 nt, Human
uuaaaaaaaacagccuauguaaa

SEQ ID NO: 622563 - RNA, 18 nt, Human
uuauauuauccuauugca

SEQ ID NO: 622564 - RNA, 21 nt, Human
uuccccuccuuuaaaaacuga

SEQ ID NO: 622565 - RNA, 22 nt, Human
uugaggccaggaguucgagacc

SEQ ID NO: 622566 - RNA, 24 nt, Human
uugguggcuugaggccaggaguuc

SEQ ID NO: 622567 - RNA, 19 nt, Human
uuuggaauaagaaacauga

SEQ ID NO: 622568 - RNA, 19 nt, Human
aaacagauccccaucccuc

SEQ ID NO: 622569 - RNA, 19 nt, Human
aaugcccacgugcccuaag

SEQ ID NO: 622570 - RNA, 21 nt, Human
acagguacccagcacucaaag

SEQ ID NO: 622571 - RNA, 19 nt, Human
acaugauccccugguccuc

SEQ ID NO: 622572 - RNA, 19 nt, Human
acccagcacucaaagcagc

SEQ ID NO: 622573 - RNA, 19 nt, Human
agacaaaagcacugaguua

SEQ ID NO: 622574 - RNA, 21 nt, Human
agaccacaacauccacccagu

SEQ ID NO: 622575 - RNA, 21 nt, Human
agcacucaaagcagcaaucuc

SEQ ID NO: 622576 - RNA, 25 nt, Human
aggggcuacagucggguuaccugga

SEQ ID NO: 622577 - RNA, 29 nt, Human
agguacccagcacucaaagcagcaaucuu

SEQ ID NO: 622578 - RNA, 22 nt, Human
agguuaugccuagaucugaaac

SEQ ID NO: 622579 - RNA, 26 nt, Human
auacacagacuuuuuuuuuuuuuuuu

SEQ ID NO: 622580 - RNA, 27 nt, Human
auccccaucccuccuaaagcugcccac

SEQ ID NO: 622581 - RNA, 21 nt, Human
caaagcagcaaucuccaaccc

SEQ ID NO: 622582 - RNA, 22 nt, Human
caaggacuuuuuugcuuaucug

SEQ ID NO: 622583 - RNA, 21 nt, Human
cagcaaucuccaacccuuuga

SEQ ID NO: 622584 - RNA, 20 nt, Human
cagccagcaggggcuacagg

SEQ ID NO: 622585 - RNA, 19 nt, Human
cagcugcucuaagagaaag

SEQ ID NO: 622586 - RNA, 22 nt, Human
caggcuucucugccugugaaga

SEQ ID NO: 622587 - RNA, 24 nt, Human
caugcucacuaugcaccaggcacc

SEQ ID NO: 622588 - RNA, 24 nt, Human
cauuugggaaaagcacacugagua

SEQ ID NO: 622589 - RNA, 19 nt, Human
ccacaggcuucucugccug

SEQ ID NO: 622590 - RNA, 21 nt, Human
ccaggcaccaugcuagaugcc

SEQ ID NO: 622591 - RNA, 24 nt, Human
cccuguuucucuuagaaacaccac

SEQ ID NO: 622592 - RNA, 26 nt, Human
ccuacauucaccuauccaucuaucca

SEQ ID NO: 622593 - RNA, 23 nt, Human
ccuauccaucuauccauccacuc

SEQ ID NO: 622594 - RNA, 21 nt, Human
cggcaggacguccgccacaua

SEQ ID NO: 622595 - RNA, 21 nt, Human
cgggacagaguccccuagccg

SEQ ID NO: 622596 - RNA, 23 nt, Human
cuagaucugaaacagauccccau

SEQ ID NO: 622597 - RNA, 20 nt, Human
cuccagagaccacaacaucc

SEQ ID NO: 622598 - RNA, 22 nt, Human
cucccucagcucuuucuggcuu

SEQ ID NO: 622599 - RNA, 21 nt, Human
cuggagcucagccagcagggg

SEQ ID NO: 622600 - RNA, 21 nt, Human
cuguccaccuacauucaccua

SEQ ID NO: 622601 - RNA, 22 nt, Human
gaugccagagacaaagugaaga

SEQ ID NO: 622602 - RNA, 19 nt, Human
gcccucuuaacucccucag

SEQ ID NO: 622603 - RNA, 19 nt, Human
gccuaggcaggacaugggg

SEQ ID NO: 622604 - RNA, 24 nt, Human
gcuacagucggguuaccuggagac

SEQ ID NO: 622605 - RNA, 22 nt, Human
ggaagccaaaaguuuggacacc

SEQ ID NO: 622606 - RNA, 23 nt, Human
ggacagaguccccuagccaggag

SEQ ID NO: 622607 - RNA, 23 nt, Human
ggagacaugauccccugguccuc

SEQ ID NO: 622608 - RNA, 22 nt, Human
uacagucggguuaccuggagac

SEQ ID NO: 622609 - RNA, 20 nt, Human
uagccacaggcuucucugcc

SEQ ID NO: 622610 - RNA, 18 nt, Human
uagccaggagcagccuuu

SEQ ID NO: 622611 - RNA, 18 nt, Human
uaggcaggacauggggga

SEQ ID NO: 622612 - RNA, 20 nt, Human
uaguagguuccccacaggua

SEQ ID NO: 622613 - RNA, 24 nt, Human
uauacacagacuuuuuuuuuuuuu

SEQ ID NO: 622614 - RNA, 22 nt, Human
ucagaggggcagaugcauggug

SEQ ID NO: 622615 - RNA, 19 nt, Human
ucagccagcaggggcuaca

SEQ ID NO: 622616 - RNA, 19 nt, Human
uccagagaccacaacaucc

SEQ ID NO: 622617 - RNA, 21 nt, Human
ucuccaacccuuugaaugcaa

SEQ ID NO: 622618 - RNA, 21 nt, Human
ucugcucuuugauucuucccc

SEQ ID NO: 622619 - RNA, 24 nt, Human
ugaaacagauccccaucccuccua

SEQ ID NO: 622620 - RNA, 22 nt, Human
ugaacagcuggagcaggaggcu

SEQ ID NO: 622621 - RNA, 25 nt, Human
ugcaccaggcaccaugcuagaugcc

SEQ ID NO: 622622 - RNA, 18 nt, Human
ugcaugugaacagcugga

SEQ ID NO: 622623 - RNA, 23 nt, Human
ugccuagaucugaaacagauccc

SEQ ID NO: 622624 - RNA, 22 nt, Human
ugccugugaagagagcauuucu

SEQ ID NO: 622625 - RNA, 23 nt, Human
uggcagcacucuguaacugcagc

SEQ ID NO: 622626 - RNA, 21 nt, Human
uggcagugcuucuccagagac

SEQ ID NO: 622627 - RNA, 23 nt, Human
uggcccagggaagccaaaaguuu

SEQ ID NO: 622628 - RNA, 18 nt, Human
uggcuuuaagccaucacc

SEQ ID NO: 622629 - RNA, 19 nt, Human
ugggaaaagcacacugagu

SEQ ID NO: 622630 - RNA, 20 nt, Human
ugggaaaagcacacugagua

SEQ ID NO: 622631 - RNA, 21 nt, Human
ugggagacuaaggcccaggga

SEQ ID NO: 622632 - RNA, 21 nt, Human
ugggggaggacacgguccccc

SEQ ID NO: 622633 - RNA, 25 nt, Human
ugguggauuugggagacuaaggccc

SEQ ID NO: 622634 - RNA, 20 nt, Human
ugugguggcagauaucacaa

SEQ ID NO: 622635 - RNA, 19 nt, Human
uugcucuugugugcuagaa

SEQ ID NO: 622636 - RNA, 22 nt, Human
uuggcccucuuaacucccucag

SEQ ID NO: 622637 - RNA, 19 nt, Human
uuggugauggcagcacucu

SEQ ID NO: 622638 - RNA, 25 nt, Human
uuggugauggcagcacucuguaacu

SEQ ID NO: 622639 - RNA, 19 nt, Human
uuucuggcuuuaagccauc

SEQ ID NO: 622640 - RNA, 22 nt, Human
uuucuggcuuuaagccaucacc

SEQ ID NO: 622641 - RNA, 20 nt, Human
uuuugcuuaucugugguggc

SEQ ID NO: 622642 - RNA, 22 nt, Human
uuuuuuuuuuuaaugcuuuuaa

SEQ ID NO: 622643 - RNA, 19 nt, Human
uuuuuuuuuuuuuuuuuaa

SEQ ID NO: 622644 - RNA, 26 nt, Human
uuuuuuuuuuuuuuuuuaaugcuuuu

SEQ ID NO: 622645 - RNA, 22 nt, Human
aacacacagagagacacacaca

SEQ ID NO: 622646 - RNA, 21 nt, Human
aacagaacaaagaaagagauu

SEQ ID NO: 622647 - RNA, 24 nt, Human
aacagaacaaagaaagagauucaa

SEQ ID NO: 622648 - RNA, 19 nt, Human
aacagaccauuaucacagu

SEQ ID NO: 622649 - RNA, 22 nt, Human
aagcagcuucgcgaccugcagc

SEQ ID NO: 622650 - RNA, 21 nt, Human
acacacacacacaaacacaca

SEQ ID NO: 622651 - RNA, 23 nt, Human
agacacacacacauuugagcucc

SEQ ID NO: 622652 - RNA, 24 nt, Human
agacacacacacauuugagcuccc

SEQ ID NO: 622653 - RNA, 19 nt, Human
agagaggcuagugaagagg

SEQ ID NO: 622654 - RNA, 21 nt, Human
agcagaagcauccuguguucu

SEQ ID NO: 622655 - RNA, 21 nt, Human
agcuccgaucccaccuccucc

SEQ ID NO: 622656 - RNA, 19 nt, Human
aucagcuuauuuuccuuug

SEQ ID NO: 622657 - RNA, 21 nt, Human
auccuaaaggagggccugagu

SEQ ID NO: 622658 - RNA, 19 nt, Human
auggccauccuaaaggagg

SEQ ID NO: 622659 - RNA, 21 nt, Human
caaaaaaaaaaaaagaacagc

SEQ ID NO: 622660 - RNA, 25 nt, Human
caaagaaagagauucaagaucucac

SEQ ID NO: 622661 - RNA, 21 nt, Human
caaagcugggccagguacugu

SEQ ID NO: 622662 - RNA, 18 nt, Human
caaggccgggaugccacc

SEQ ID NO: 622663 - RNA, 22 nt, Human
cacacagagagacacacacaca

SEQ ID NO: 622664 - RNA, 22 nt, Human
cagaagcauccuguguucuagc

SEQ ID NO: 622665 - RNA, 20 nt, Human
cauaacagggagcuacagag

SEQ ID NO: 622666 - RNA, 21 nt, Human
ccaaagcugggccagguacug

SEQ ID NO: 622667 - RNA, 22 nt, Human
ccacacaugccauaggccucca

SEQ ID NO: 622668 - RNA, 24 nt, Human
ccccucuggcccuggccccagccu

SEQ ID NO: 622669 - RNA, 18 nt, Human
cccuggccccagccuggg

SEQ ID NO: 622670 - RNA, 21 nt, Human
ccuccaaaaaaaaaaaaagaa

SEQ ID NO: 622671 - RNA, 19 nt, Human
ccucccugaucauucagcc

SEQ ID NO: 622672 - RNA, 23 nt, Human
ccucgccuccaaaaaaaaaaaaa

SEQ ID NO: 622673 - RNA, 23 nt, Human
ccucuaggcuucccagcaccauu

SEQ ID NO: 622674 - RNA, 20 nt, Human
ccugaguucccucugccgac

SEQ ID NO: 622675 - RNA, 19 nt, Human
ccugcagccacacaugcca

SEQ ID NO: 622676 - RNA, 26 nt, Human
ccuggccccagccugggccuuguuuu

SEQ ID NO: 622677 - RNA, 27 nt, Human
ccuggccccagccugggccuuguuuuu

SEQ ID NO: 622678 - RNA, 26 nt, Human
ccuuccccucuggcccuggccccagc

SEQ ID NO: 622679 - RNA, 18 nt, Human
ccuuuacuggacugccuc

SEQ ID NO: 622680 - RNA, 22 nt, Human
cuccaaaaaaaaaaaaagaaca

SEQ ID NO: 622681 - RNA, 19 nt, Human
cuccaggagugcucucccc

SEQ ID NO: 622682 - RNA, 20 nt, Human
cucuggcccuggccccagcc

SEQ ID NO: 622683 - RNA, 25 nt, Human
cucuggcccuggccccagccugggc

SEQ ID NO: 622684 - RNA, 20 nt, Human
cugcuaugccucccugauca

SEQ ID NO: 622685 - RNA, 21 nt, Human
cuggccccagccugggccuug

SEQ ID NO: 622686 - RNA, 22 nt, Human
cuggccccagccugggccuugu

SEQ ID NO: 622687 - RNA, 19 nt, Human
cugugggcugaggcacagg

SEQ ID NO: 622688 - RNA, 25 nt, Human
cuuccccucuggcccuggccccagc

SEQ ID NO: 622689 - RNA, 21 nt, Human
gaagucuggauuuagacaaaa

SEQ ID NO: 622690 - RNA, 19 nt, Human
gauaguauguuuugcaaaa

SEQ ID NO: 622691 - RNA, 22 nt, Human
gcccuggccccagccugggccu

SEQ ID NO: 622692 - RNA, 22 nt, Human
gccuccaaaaaaaaaaaaagaa

SEQ ID NO: 622693 - RNA, 19 nt, Human
gcucauuuccugcuccagg

SEQ ID NO: 622694 - RNA, 22 nt, Human
gcugcugagacucacacaccac

SEQ ID NO: 622695 - RNA, 26 nt, Human
ggcuucccagcaccauuaagcagcuu

SEQ ID NO: 622696 - RNA, 18 nt, Human
gggaacucuggcuucccg

SEQ ID NO: 622697 - RNA, 21 nt, Human
gguuguccuugucaucugaug

SEQ ID NO: 622698 - RNA, 26 nt, Human
guggccaugacaccuggcaggaugcc

SEQ ID NO: 622699 - RNA, 25 nt, Human
uaacaggcaaccaagaggggcugcc

SEQ ID NO: 622700 - RNA, 20 nt, Human
uaacagggagcuacagagug

SEQ ID NO: 622701 - RNA, 24 nt, Human
uaaggcaaacaaugaugguacccc

SEQ ID NO: 622702 - RNA, 20 nt, Human
uacagaguuuuuuguuguuu

SEQ ID NO: 622703 - RNA, 18 nt, Human
uaucacaguggccugugg

SEQ ID NO: 622704 - RNA, 19 nt, Human
ucaaaauaagguaacaggc

SEQ ID NO: 622705 - RNA, 21 nt, Human
ucaaugcagcacaugcuagaa

SEQ ID NO: 622706 - RNA, 19 nt, Human
ucaucugaugaugcaugag

SEQ ID NO: 622707 - RNA, 19 nt, Human
ucauucagccaguggaugu

SEQ ID NO: 622708 - RNA, 21 nt, Human
uccaaaaaaaaaaaaagaaca

SEQ ID NO: 622709 - RNA, 24 nt, Human
uccagggcuggccaggacaccuuc

SEQ ID NO: 622710 - RNA, 24 nt, Human
ucccucugccgaccuauggcucuc

SEQ ID NO: 622711 - RNA, 18 nt, Human
ucccuguaucaugucccc

SEQ ID NO: 622712 - RNA, 19 nt, Human
uccucuaggcuucccagca

SEQ ID NO: 622713 - RNA, 20 nt, Human
ucuagaugguugauuuggcu

SEQ ID NO: 622714 - RNA, 21 nt, Human
ucuagaugguugauuuggcug

SEQ ID NO: 622715 - RNA, 19 nt, Human
ugagugagaauccagggcc

SEQ ID NO: 622716 - RNA, 20 nt, Human
ugagugcacacacacacaca

SEQ ID NO: 622717 - RNA, 21 nt, Human
ugagugcacacacacacacaa

SEQ ID NO: 622718 - RNA, 22 nt, Human
ugagugcacacacacacacaaa

SEQ ID NO: 622719 - RNA, 26 nt, Human
ugagugcacacacacacacaaacaca

SEQ ID NO: 622720 - RNA, 23 nt, Human
ugagugcuucgugggaacucugg

SEQ ID NO: 622721 - RNA, 23 nt, Human
ugcagcuccgaucccaccuccuc

SEQ ID NO: 622722 - RNA, 18 nt, Human
ugccauaggccuccaucc

SEQ ID NO: 622723 - RNA, 24 nt, Human
ugccauaggccuccauccucagga

SEQ ID NO: 622724 - RNA, 19 nt, Human
uggauguggaauucaggga

SEQ ID NO: 622725 - RNA, 18 nt, Human
uggccaugacaccuggca

SEQ ID NO: 622726 - RNA, 19 nt, Human
uggcccuggccccagccug

SEQ ID NO: 622727 - RNA, 24 nt, Human
uggcccuggccccagccugggccu

SEQ ID NO: 622728 - RNA, 20 nt, Human
ugggaacucuggcuucccgg

SEQ ID NO: 622729 - RNA, 18 nt, Human
ugggccagguacugucac

SEQ ID NO: 622730 - RNA, 22 nt, Human
ugucacccacuggagccaaagu

SEQ ID NO: 622731 - RNA, 20 nt, Human
ugugaagucuggauuuagac

SEQ ID NO: 622732 - RNA, 22 nt, Human
uuacuggacugccucuuuuugc

SEQ ID NO: 622733 - RNA, 27 nt, Human
uuaggagcgugugggcggcugcugaga

SEQ ID NO: 622734 - RNA, 23 nt, Human
uuuccaccuaggcaucugccaug

SEQ ID NO: 622735 - RNA, 18 nt, Human
aaaaagugcuccucccuu

SEQ ID NO: 622736 - RNA, 18 nt, Human
aaaaauaauaacaguggc

SEQ ID NO: 622737 - RNA, 20 nt, Human
aaagaaaaagaauauuuauu

SEQ ID NO: 622738 - RNA, 23 nt, Human
aacccaguagagacguuccccga

SEQ ID NO: 622739 - RNA, 22 nt, Human
aaugaacaacaaaacaacugaa

SEQ ID NO: 622740 - RNA, 21 nt, Human
aaugcugaauaucaggaggaa

SEQ ID NO: 622741 - RNA, 21 nt, Human
acaacaaaacaacugaaucug

SEQ ID NO: 622742 - RNA, 21 nt, Human
acaguucaauuuuuuucuuuu

SEQ ID NO: 622743 - RNA, 24 nt, Human
acgaaugaacaacaaaacaacuga

SEQ ID NO: 622744 - RNA, 18 nt, Human
acuguauuuuucuuccug

SEQ ID NO: 622745 - RNA, 21 nt, Human
agaaagaaaaaauaaauaaga

SEQ ID NO: 622746 - RNA, 21 nt, Human
aggaaaaaaacccaguagaga

SEQ ID NO: 622747 - RNA, 27 nt, Human
aggaagcugguaacagcauuacaacgg

SEQ ID NO: 622748 - RNA, 22 nt, Human
aggcugcagcaccugcuaacca

SEQ ID NO: 622749 - RNA, 22 nt, Human
agguauuaggaauaaggaagcu

SEQ ID NO: 622750 - RNA, 20 nt, Human
auaaaacaaaucuaaaguaa

SEQ ID NO: 622751 - RNA, 27 nt, Human
auaauaacaguggcaaaggcugcagca

SEQ ID NO: 622752 - RNA, 19 nt, Human
augcaucugccaaaaugcc

SEQ ID NO: 622753 - RNA, 18 nt, Human
caacaaaacaacugaauc

SEQ ID NO: 622754 - RNA, 22 nt, Human
cagaauagagcugugcucccaa

SEQ ID NO: 622755 - RNA, 19 nt, Human
caggaggaaaaaaacccag

SEQ ID NO: 622756 - RNA, 18 nt, Human
ccaagcaaguuccucucc

SEQ ID NO: 622757 - RNA, 27 nt, Human
cccacacaguucagagauuuucaaaca

SEQ ID NO: 622758 - RNA, 18 nt, Human
cuacaacugcagaaauaa

SEQ ID NO: 622759 - RNA, 23 nt, Human
cucagaaaguugguguuuacaaa

SEQ ID NO: 622760 - RNA, 21 nt, Human
cucuauacaggcuaagaaaac

SEQ ID NO: 622761 - RNA, 23 nt, Human
cucuauacaggcuaagaaaacag

SEQ ID NO: 622762 - RNA, 19 nt, Human
cugccaaaaugccagcugu

SEQ ID NO: 622763 - RNA, 22 nt, Human
cuuccaaagcgccugccucccu

SEQ ID NO: 622764 - RNA, 24 nt, Human
cuuguuugaaauuuuuuugguguu

SEQ ID NO: 622765 - RNA, 19 nt, Human
gaaaaaauaaauaagagua

SEQ ID NO: 622766 - RNA, 25 nt, Human
gagcaugcuucuuuacaaauaagcc

SEQ ID NO: 622767 - RNA, 22 nt, Human
gccaaaaugccagcuguaccug

SEQ ID NO: 622768 - RNA, 21 nt, Human
gcucccaacaucccuaucaca

SEQ ID NO: 622769 - RNA, 20 nt, Human
gcucuguugcaagcugauuc

SEQ ID NO: 622770 - RNA, 19 nt, Human
gcugcagcaccugcuaacc

SEQ ID NO: 622771 - RNA, 24 nt, Human
ggcagaauagagcugugcucccaa

SEQ ID NO: 622772 - RNA, 22 nt, Human
gggcaagauaaugaaggcacag

SEQ ID NO: 622773 - RNA, 24 nt, Human
guuacaauaaacuguuuugcaugc

SEQ ID NO: 622774 - RNA, 21 nt, Human
guuuuuuucuuuuugcuuuaa

SEQ ID NO: 622775 - RNA, 20 nt, Human
uaaaagugaccuuaaaaagu

SEQ ID NO: 622776 - RNA, 21 nt, Human
uaaaauucagguauauuccuc

SEQ ID NO: 622777 - RNA, 24 nt, Human
uaacaguggcaaaggcugcagcac

SEQ ID NO: 622778 - RNA, 22 nt, Human
uaagagauuuuugguaguugcu

SEQ ID NO: 622779 - RNA, 19 nt, Human
uaauucacugcaggaggga

SEQ ID NO: 622780 - RNA, 24 nt, Human
uacaucauaaccauugucuaugug

SEQ ID NO: 622781 - RNA, 24 nt, Human
uaguuugguuuuuguuuuuuucuu

SEQ ID NO: 622782 - RNA, 18 nt, Human
uaucaauaaaggacauca

SEQ ID NO: 622783 - RNA, 22 nt, Human
uaucaauaaaggacaucaaacu

SEQ ID NO: 622784 - RNA, 20 nt, Human
uaucacaaaaacaaaacuag

SEQ ID NO: 622785 - RNA, 19 nt, Human
uauugaauaaaauucaggu

SEQ ID NO: 622786 - RNA, 24 nt, Human
ucaaacacagucaugaggcacuaa

SEQ ID NO: 622787 - RNA, 21 nt, Human
ucagucuauccagaguacuua

SEQ ID NO: 622788 - RNA, 22 nt, Human
ucccuaucacaaacauaugacg

SEQ ID NO: 622789 - RNA, 18 nt, Human
uccuuuuuuuuuuuuuuu

SEQ ID NO: 622790 - RNA, 22 nt, Human
ugaaaaacuguaaagaaaaaga

SEQ ID NO: 622791 - RNA, 18 nt, Human
ugaaucuguuuacaucau

SEQ ID NO: 622792 - RNA, 26 nt, Human
ugcucccaacaucccuaucacaaaca

SEQ ID NO: 622793 - RNA, 26 nt, Human
uggcauggucccucgacacuuaaagu

SEQ ID NO: 622794 - RNA, 19 nt, Human
uggguuaauaccacccacu

SEQ ID NO: 622795 - RNA, 23 nt, Human
uggucccucgacacuuaaaguuu

SEQ ID NO: 622796 - RNA, 20 nt, Human
ugguguuuuuugugcucugu

SEQ ID NO: 622797 - RNA, 20 nt, Human
uguaacuguauuuuucuucc

SEQ ID NO: 622798 - RNA, 24 nt, Human
uguggccaaacaauaguuucuuuu

SEQ ID NO: 622799 - RNA, 24 nt, Human
uucccaauaagaaacagauuccau

SEQ ID NO: 622800 - RNA, 24 nt, Human
uuccuccaaaacccacacaguuca

SEQ ID NO: 622801 - RNA, 24 nt, Human
uuuacaaacuuccaaagcgccugc

SEQ ID NO: 622802 - RNA, 18 nt, Human
uuuccagguauuaggaau

SEQ ID NO: 622803 - RNA, 21 nt, Human
uuuggcaaaacucaguccaga

SEQ ID NO: 622804 - RNA, 24 nt, Human
uuuuaauaguuugguuuuuguuuu

SEQ ID NO: 622805 - RNA, 18 nt, Human
uuuuuuuuuuuuuucuug

SEQ ID NO: 622806 - RNA, 23 nt, Human
aaaaaaaaaaaaaaaaccccaca

SEQ ID NO: 622807 - RNA, 27 nt, Human
aaaaaaaaaaaaaaccccacaaaaaag

SEQ ID NO: 622808 - RNA, 23 nt, Human
aaaaaaaaaaccccacaaaaaau

SEQ ID NO: 622809 - RNA, 21 nt, Human
aaaaaugagucacccgacuca

SEQ ID NO: 622810 - RNA, 21 nt, Human
aaaacaaacaacugccaccaa

SEQ ID NO: 622811 - RNA, 19 nt, Human
aaaaccccacaaaaaauau

SEQ ID NO: 622812 - RNA, 22 nt, Human
aaaaggaaaggcauccugcaag

SEQ ID NO: 622813 - RNA, 21 nt, Human
aaacaaaaaggaaccaagugg

SEQ ID NO: 622814 - RNA, 19 nt, Human
aaacaaacaaaaaggaacc

SEQ ID NO: 622815 - RNA, 23 nt, Human
aaacaaagaaaaggcaguauaag

SEQ ID NO: 622816 - RNA, 20 nt, Human
aaagucacuuaaugcuucuc

SEQ ID NO: 622817 - RNA, 23 nt, Human
aacaaacaaacaaagaaaaggca

SEQ ID NO: 622818 - RNA, 21 nt, Human
aacaacugccaccaaaaaaaa

SEQ ID NO: 622819 - RNA, 20 nt, Human
aaccaacuuagcccuccaca

SEQ ID NO: 622820 - RNA, 25 nt, Human
aaccacagauaaccaagguguuucu

SEQ ID NO: 622821 - RNA, 22 nt, Human
aaggcaugaaaaccacagauaa

SEQ ID NO: 622822 - RNA, 19 nt, Human
aaugcaggagaggagaagg

SEQ ID NO: 622823 - RNA, 20 nt, Human
acaaaccuauuccaucacca

SEQ ID NO: 622824 - RNA, 24 nt, Human
acaaagaaaaggcaguauaaccuu

SEQ ID NO: 622825 - RNA, 28 nt, Human
acaacugccaccaaaaaaaaaaaaaaaa

SEQ ID NO: 622826 - RNA, 28 nt, Human
accaaaaaaaaaaaaaaaaccccacaaa

SEQ ID NO: 622827 - RNA, 23 nt, Human
acuagaaucagagcacaaaccua

SEQ ID NO: 622828 - RNA, 26 nt, Human
agaaaaaaacaaacaaacaaagaaaa

SEQ ID NO: 622829 - RNA, 21 nt, Human
agaaaggagauggaguuaggg

SEQ ID NO: 622830 - RNA, 22 nt, Human
agaaaggagauggaguuagggu

SEQ ID NO: 622831 - RNA, 21 nt, Human
agaaggaaaacaaacaaaaag

SEQ ID NO: 622832 - RNA, 23 nt, Human
agaaggaaaacaaacaaaaagga

SEQ ID NO: 622833 - RNA, 20 nt, Human
agaaucaugucagggcacag

SEQ ID NO: 622834 - RNA, 19 nt, Human
agacaaggggcugcucugu

SEQ ID NO: 622835 - RNA, 26 nt, Human
agacacuggcagcccaaugacaagcc

SEQ ID NO: 622836 - RNA, 22 nt, Human
agacuugaaggcccgcagggug

SEQ ID NO: 622837 - RNA, 22 nt, Human
agagaaaaaaacaaacaaacaa

SEQ ID NO: 622838 - RNA, 26 nt, Human
agagaaaaaaacaaacaaacaaagaa

SEQ ID NO: 622839 - RNA, 20 nt, Human
agaucaacaagccccuacca

SEQ ID NO: 622840 - RNA, 22 nt, Human
aggagaaggaaaacaaacaaaa

SEQ ID NO: 622841 - RNA, 23 nt, Human
aggaguuggaggucgguucaccu

SEQ ID NO: 622842 - RNA, 19 nt, Human
aggcacaaggguccccagg

SEQ ID NO: 622843 - RNA, 23 nt, Human
aggcaugaaaaccacagauaacc

SEQ ID NO: 622844 - RNA, 21 nt, Human
aggcggugcuuggcucggcgg

SEQ ID NO: 622845 - RNA, 19 nt, Human
agggguggggguagaggca

SEQ ID NO: 622846 - RNA, 19 nt, Human
aguagcucucauccuccca

SEQ ID NO: 622847 - RNA, 22 nt, Human
aucaccaagaaucaugucaggg

SEQ ID NO: 622848 - RNA, 24 nt, Human
auugccccuggugggccugugugu

SEQ ID NO: 622849 - RNA, 20 nt, Human
caaaaaaaaaaaaaaaaccc

SEQ ID NO: 622850 - RNA, 25 nt, Human
caaaaaaaaaaaaaaaaccccacaa

SEQ ID NO: 622851 - RNA, 24 nt, Human
caaaaaggaaccaaguggcugguu

SEQ ID NO: 622852 - RNA, 20 nt, Human
caaacaaacaaagaaaaggc

SEQ ID NO: 622853 - RNA, 25 nt, Human
caaacaaacaaagaaaaggcaguau

SEQ ID NO: 622854 - RNA, 20 nt, Human
caacugccaccaaaaaaaaa

SEQ ID NO: 622855 - RNA, 25 nt, Human
caaggcaugaaaaccacagauaacc

SEQ ID NO: 622856 - RNA, 20 nt, Human
caaguugcugggugcuggca

SEQ ID NO: 622857 - RNA, 20 nt, Human
cacaccagccagaaccacca

SEQ ID NO: 622858 - RNA, 20 nt, Human
cacagaaccaacuuagcccu

SEQ ID NO: 622859 - RNA, 18 nt, Human
cacagcagcagcucagga

SEQ ID NO: 622860 - RNA, 30 nt, Human
cacaggcuuccuuauccugucuaagacccu

SEQ ID NO: 622861 - RNA, 23 nt, Human
caccagaaccagccugcggccag

SEQ ID NO: 622862 - RNA, 19 nt, Human
caccagccagaaccaccag

SEQ ID NO: 622863 - RNA, 19 nt, Human
cagcagcagcucaggauga

SEQ ID NO: 622864 - RNA, 23 nt, Human
cagcaguguccugugucggcguc

SEQ ID NO: 622865 - RNA, 19 nt, Human
cagccagagccugcgggga

SEQ ID NO: 622866 - RNA, 19 nt, Human
cagcccaaugacaagcccu

SEQ ID NO: 622867 - RNA, 18 nt, Human
caggcuacaggggcccuu

SEQ ID NO: 622868 - RNA, 20 nt, Human
cagggacaaggcaugaaaac

SEQ ID NO: 622869 - RNA, 18 nt, Human
cagggccacacuguggag

SEQ ID NO: 622870 - RNA, 23 nt, Human
caguagcucucauccucccacag

SEQ ID NO: 622871 - RNA, 23 nt, Human
caucaucguucaagaguuggggg

SEQ ID NO: 622872 - RNA, 19 nt, Human
caugaaaaccacagauaac

SEQ ID NO: 622873 - RNA, 21 nt, Human
caugaaaaccacagauaacca

SEQ ID NO: 622874 - RNA, 22 nt, Human
caugaaaaccacagauaaccaa

SEQ ID NO: 622875 - RNA, 25 nt, Human
ccaaaaaaaaaaaaaaaaccccaca

SEQ ID NO: 622876 - RNA, 23 nt, Human
ccacagcaguguccugugucaca

SEQ ID NO: 622877 - RNA, 25 nt, Human
ccaccaaaaaaaaaaaaaaaacccc

SEQ ID NO: 622878 - RNA, 21 nt, Human
ccaccagaguucauaguagua

SEQ ID NO: 622879 - RNA, 21 nt, Human
ccccugggauccccugguggg

SEQ ID NO: 622880 - RNA, 21 nt, Human
ccgagucucuacacagaaaaa

SEQ ID NO: 622881 - RNA, 22 nt, Human
ccgcugcugggccugaaggcgg

SEQ ID NO: 622882 - RNA, 23 nt, Human
ccgcugcugggccugaaggcggu

SEQ ID NO: 622883 - RNA, 19 nt, Human
ccuccacaacacugugccc

SEQ ID NO: 622884 - RNA, 18 nt, Human
ccuggacugagauacagc

SEQ ID NO: 622885 - RNA, 23 nt, Human
cggauggcugcuuucaccuccug

SEQ ID NO: 622886 - RNA, 22 nt, Human
cgucugaauaucaucaucguuc

SEQ ID NO: 622887 - RNA, 21 nt, Human
cugccaccaaaaaaaaaaaaa

SEQ ID NO: 622888 - RNA, 23 nt, Human
cugccaccaaaaaaaaaaaaaaa

SEQ ID NO: 622889 - RNA, 26 nt, Human
cugccaccaaaaaaaaaaaaaaaacc

SEQ ID NO: 622890 - RNA, 18 nt, Human
cugggccucuguggguuu

SEQ ID NO: 622891 - RNA, 22 nt, Human
cugucuguuuccucauacggaa

SEQ ID NO: 622892 - RNA, 20 nt, Human
cuuaaacuagaaucagagca

SEQ ID NO: 622893 - RNA, 18 nt, Human
cuugggggucuugugcug

SEQ ID NO: 622894 - RNA, 25 nt, Human
gaaaaaaacaaacaaacaaagaaaa

SEQ ID NO: 622895 - RNA, 24 nt, Human
gaacuguaccuggagauggaggaa

SEQ ID NO: 622896 - RNA, 20 nt, Human
gaaggcacuguauggugggg

SEQ ID NO: 622897 - RNA, 19 nt, Human
gaaggcgagcaacaggcac

SEQ ID NO: 622898 - RNA, 27 nt, Human
gagaaaaaaacaaacaaacaaagaaaa

SEQ ID NO: 622899 - RNA, 24 nt, Human
gagaaggaaaacaaacaaaaagga

SEQ ID NO: 622900 - RNA, 18 nt, Human
gagccugcggggaagagg

SEQ ID NO: 622901 - RNA, 19 nt, Human
gagcugcaccucuauccac

SEQ ID NO: 622902 - RNA, 19 nt, Human
gaggaaaaugcaggagagg

SEQ ID NO: 622903 - RNA, 19 nt, Human
gaggcagcagcugcugcug

SEQ ID NO: 622904 - RNA, 18 nt, Human
gagucacccgacucaaaa

SEQ ID NO: 622905 - RNA, 20 nt, Human
gcagcagcugcugcugcugu

SEQ ID NO: 622906 - RNA, 18 nt, Human
gcagggccacacugugga

SEQ ID NO: 622907 - RNA, 18 nt, Human
gccuccuuccuugggggc

SEQ ID NO: 622908 - RNA, 19 nt, Human
gcggcuuagggccuccugc

SEQ ID NO: 622909 - RNA, 18 nt, Human
gcugcucggucaacuggu

SEQ ID NO: 622910 - RNA, 20 nt, Human
gcuguagcuggaaggcacug

SEQ ID NO: 622911 - RNA, 24 nt, Human
gcuuucaccuccugccugggccac

SEQ ID NO: 622912 - RNA, 19 nt, Human
ggaggcagcagcugcugcu

SEQ ID NO: 622913 - RNA, 23 nt, Human
ggccagccagagccugcggggaa

SEQ ID NO: 622914 - RNA, 22 nt, Human
gggcucuuaaaaguuaaggucu

SEQ ID NO: 622915 - RNA, 22 nt, Human
gggugugugcuugcgaugcagg

SEQ ID NO: 622916 - RNA, 19 nt, Human
ggugcuggcaggaccugcu

SEQ ID NO: 622917 - RNA, 21 nt, Human
guggaggaagaggcauccaca

SEQ ID NO: 622918 - RNA, 22 nt, Human
uaaaacaaacaacugccaccaa

SEQ ID NO: 622919 - RNA, 23 nt, Human
uaaaacaaacaacugccaccaaa

SEQ ID NO: 622920 - RNA, 22 nt, Human
uaaaacacaucucucugaccca

SEQ ID NO: 622921 - RNA, 19 nt, Human
uaaaauggcagcgcugagu

SEQ ID NO: 622922 - RNA, 20 nt, Human
uaaccuuucacaccagaacc

SEQ ID NO: 622923 - RNA, 19 nt, Human
uacacagaaaaaugaguca

SEQ ID NO: 622924 - RNA, 23 nt, Human
uagaaucagagcacaaaccuauu

SEQ ID NO: 622925 - RNA, 21 nt, Human
uagcaaagcagacaaaguaaa

SEQ ID NO: 622926 - RNA, 20 nt, Human
uagcaaagcagacaaaguag

SEQ ID NO: 622927 - RNA, 22 nt, Human
uagcucaaugcuggcuuggcag

SEQ ID NO: 622928 - RNA, 25 nt, Human
ucaaugcuucgucugaauaucauca

SEQ ID NO: 622929 - RNA, 21 nt, Human
ucacaccagaaccagccugcg

SEQ ID NO: 622930 - RNA, 19 nt, Human
ucaccggccuucuuuagca

SEQ ID NO: 622931 - RNA, 23 nt, Human
uccaagacagccgccaccccagc

SEQ ID NO: 622932 - RNA, 21 nt, Human
uccaucaccaagaaucauguc

SEQ ID NO: 622933 - RNA, 27 nt, Human
uccaucaccaagaaucaugucagggca

SEQ ID NO: 622934 - RNA, 24 nt, Human
ucccacaggauuagcucaaugcug

SEQ ID NO: 622935 - RNA, 23 nt, Human
uccuugggggcuuuuaaaacaca

SEQ ID NO: 622936 - RNA, 18 nt, Human
ucuauccacugcugcggc

SEQ ID NO: 622937 - RNA, 21 nt, Human
ucugacccaaacagguaggug

SEQ ID NO: 622938 - RNA, 21 nt, Human
ugaccugaaggcgagcaacag

SEQ ID NO: 622939 - RNA, 24 nt, Human
ugagacuugaaggcccgcagggug

SEQ ID NO: 622940 - RNA, 23 nt, Human
ugaguaauugugggcuucucggu

SEQ ID NO: 622941 - RNA, 18 nt, Human
ugcaccucuauccacugc

SEQ ID NO: 622942 - RNA, 23 nt, Human
ugccaccaaaaaaaaaaaaaaaa

SEQ ID NO: 622943 - RNA, 18 nt, Human
ugcccccugggauccccu

SEQ ID NO: 622944 - RNA, 23 nt, Human
ugccgcugcugggccugaaggcg

SEQ ID NO: 622945 - RNA, 22 nt, Human
ugccugggccaccgagucucua

SEQ ID NO: 622946 - RNA, 24 nt, Human
ugcuugggggucuugugcugcuuc

SEQ ID NO: 622947 - RNA, 18 nt, Human
uggcucaacagcaggcag

SEQ ID NO: 622948 - RNA, 20 nt, Human
uggcucggcggugguggcaa

SEQ ID NO: 622949 - RNA, 18 nt, Human
uggcugcucggucaacug

SEQ ID NO: 622950 - RNA, 20 nt, Human
ugggaaagagccacaaacgg

SEQ ID NO: 622951 - RNA, 22 nt, Human
ugggccugugugugcggugguc

SEQ ID NO: 622952 - RNA, 22 nt, Human
uggggcuuugguggcugcucgg

SEQ ID NO: 622953 - RNA, 19 nt, Human
uggguuuccuucuucaucc

SEQ ID NO: 622954 - RNA, 18 nt, Human
uggugggggaggaguugg

SEQ ID NO: 622955 - RNA, 19 nt, Human
uggugggggaggaguugga

SEQ ID NO: 622956 - RNA, 23 nt, Human
uggugggggaggaguuggagguc

SEQ ID NO: 622957 - RNA, 22 nt, Human
ugguugcuuugccaaguugcug

SEQ ID NO: 622958 - RNA, 22 nt, Human
ugucacagauguagcuuugauu

SEQ ID NO: 622959 - RNA, 20 nt, Human
uuaaaacacaucucucugac

SEQ ID NO: 622960 - RNA, 21 nt, Human
uucaccacuuccucauaagga

SEQ ID NO: 622961 - RNA, 19 nt, Human
uucaccuccugccugggcc

SEQ ID NO: 622962 - RNA, 21 nt, Human
uucaccuccugccugggccac

SEQ ID NO: 622963 - RNA, 19 nt, Human
uucagaaucaaagauaaaa

SEQ ID NO: 622964 - RNA, 18 nt, Human
uuccaagacagccgccac

SEQ ID NO: 622965 - RNA, 22 nt, Human
uugcuuugccaaguugcugggu

SEQ ID NO: 622966 - RNA, 23 nt, Human
uugguacccacacaggcuuccuu

SEQ ID NO: 622967 - RNA, 32 nt, Human
uuuagagaaaaaaacaaacaaacaaagaaaaa

SEQ ID NO: 622968 - RNA, 22 nt, Human
uuucauguugccgcugcugggc

SEQ ID NO: 622969 - RNA, 23 nt, Human
uuuggcaaaaaccugaaauaaaa

SEQ ID NO: 622970 - RNA, 22 nt, Human
aaauaaaaagggaaauaacuga

SEQ ID NO: 622971 - RNA, 20 nt, Human
agagcccagugcgucaccac

SEQ ID NO: 622972 - RNA, 19 nt, Human
agagcccagugcgucaccc

SEQ ID NO: 622973 - RNA, 22 nt, Human
agaggucaucucccaggcaacc

SEQ ID NO: 622974 - RNA, 21 nt, Human
caaaaaauaaaacugccaaaa

SEQ ID NO: 622975 - RNA, 23 nt, Human
caaaaucaacuguaacuaaaggc

SEQ ID NO: 622976 - RNA, 23 nt, Human
caaagcaagaaccaaggaugcag

SEQ ID NO: 622977 - RNA, 22 nt, Human
caggugacgcuacagcggagau

SEQ ID NO: 622978 - RNA, 24 nt, Human
caugcugaaucaucagcaaauacu

SEQ ID NO: 622979 - RNA, 19 nt, Human
cccagugcgucaccacuuc

SEQ ID NO: 622980 - RNA, 24 nt, Human
ccugcauauuuucaaccuucaaaa

SEQ ID NO: 622981 - RNA, 27 nt, Human
ccugcuuuccuucuuuccuucuuaacu

SEQ ID NO: 622982 - RNA, 23 nt, Human
cucccgaaucgauagagccacac

SEQ ID NO: 622983 - RNA, 20 nt, Human
cuucaaaaaauaaaacugcc

SEQ ID NO: 622984 - RNA, 22 nt, Human
cuucaaaaaauaaaacugccaa

SEQ ID NO: 622985 - RNA, 18 nt, Human
cuucuuuccuucuuaacu

SEQ ID NO: 622986 - RNA, 19 nt, Human
gacauaaaauaaaaaggga

SEQ ID NO: 622987 - RNA, 19 nt, Human
guucuauuuucccagccuc

SEQ ID NO: 622988 - RNA, 21 nt, Human
uaacuuuuagcuaugagaaca

SEQ ID NO: 622989 - RNA, 18 nt, Human
uacuacgugcuuugggcu

SEQ ID NO: 622990 - RNA, 21 nt, Human
uaguaaguuuauucuucacuc

SEQ ID NO: 622991 - RNA, 18 nt, Human
ucaaagcaagaaccaagg

SEQ ID NO: 622992 - RNA, 19 nt, Human
ucguugcagcuucuaguug

SEQ ID NO: 622993 - RNA, 18 nt, Human
ucucccaggcaaccugcu

SEQ ID NO: 622994 - RNA, 21 nt, Human
ucucugaaaacuguuuaguuc

SEQ ID NO: 622995 - RNA, 21 nt, Human
ucuuuccuucuuaacuuuuag

SEQ ID NO: 622996 - RNA, 18 nt, Human
ugacuaauuuguuaguaa

SEQ ID NO: 622997 - RNA, 19 nt, Human
uucaaaaaauaaaacugcc

SEQ ID NO: 622998 - RNA, 21 nt, Human
uucaaagagacccgaaagagg

SEQ ID NO: 622999 - RNA, 24 nt, Human
uuccuucuuuccuucuuaacuuuu

SEQ ID NO: 623000 - RNA, 22 nt, Human
uuuuuggcuuugaaaucaugac

SEQ ID NO: 623001 - RNA, 21 nt, Human
aaaaaagaaaguauagaugaa

SEQ ID NO: 623002 - RNA, 22 nt, Human
aaaaaagaaaguauagaugaaa

SEQ ID NO: 623003 - RNA, 24 nt, Human
aaaguccucauugaacuccauuuc

SEQ ID NO: 623004 - RNA, 23 nt, Human
aagaaaaaagaaaguauagauga

SEQ ID NO: 623005 - RNA, 25 nt, Human
aagaacugaaaguccucauugaacu

SEQ ID NO: 623006 - RNA, 18 nt, Human
aagcucggcuuagcuugc

SEQ ID NO: 623007 - RNA, 20 nt, Human
acaaaagcacaugugcuacu

SEQ ID NO: 623008 - RNA, 21 nt, Human
accaagcaaagaacugaaagu

SEQ ID NO: 623009 - RNA, 23 nt, Human
acccuguguccuggcugaggagc

SEQ ID NO: 623010 - RNA, 22 nt, Human
agaaauucuaucauccuuaacc

SEQ ID NO: 623011 - RNA, 20 nt, Human
agcaaagaacugaaaguccu

SEQ ID NO: 623012 - RNA, 22 nt, Human
agcaaagaacugaaaguccuca

SEQ ID NO: 623013 - RNA, 19 nt, Human
caacccauagcgaucucug

SEQ ID NO: 623014 - RNA, 24 nt, Human
caagaaaaaagaaaguauagauga

SEQ ID NO: 623015 - RNA, 22 nt, Human
cacccuguguccuggcugagga

SEQ ID NO: 623016 - RNA, 22 nt, Human
cauagcgaucucuguguuuucc

SEQ ID NO: 623017 - RNA, 18 nt, Human
ccagauacuggaguguga

SEQ ID NO: 623018 - RNA, 24 nt, Human
cuaaccaagcaaagaacugaaagu

SEQ ID NO: 623019 - RNA, 24 nt, Human
gaaacacuuucauucccuccacuu

SEQ ID NO: 623020 - RNA, 21 nt, Human
gaggcauauccuggcuggggg

SEQ ID NO: 623021 - RNA, 24 nt, Human
uaaccaagcaaagaacugaaaguc

SEQ ID NO: 623022 - RNA, 19 nt, Human
uaacugccgguuucaacuc

SEQ ID NO: 623023 - RNA, 19 nt, Human
uauaugccauacacauaua

SEQ ID NO: 623024 - RNA, 22 nt, Human
uauguacuguagcuccugugug

SEQ ID NO: 623025 - RNA, 27 nt, Human
ucaccucgaaacacuuucauucccucc

SEQ ID NO: 623026 - RNA, 25 nt, Human
ucagaagagggaaauuauauccaca

SEQ ID NO: 623027 - RNA, 23 nt, Human
ucuacgauugugacagaagaggc

SEQ ID NO: 623028 - RNA, 19 nt, Human
ugagaugagcaggaugccc

SEQ ID NO: 623029 - RNA, 19 nt, Human
ugcagggugugagaugagc

SEQ ID NO: 623030 - RNA, 21 nt, Human
uguacuguagcuccugugugu

SEQ ID NO: 623031 - RNA, 19 nt, Human
uguccuggcugaggagccu

SEQ ID NO: 623032 - RNA, 20 nt, Human
uguguguguguuuccauguu

SEQ ID NO: 623033 - RNA, 18 nt, Human
uuaaacgguucucuccaa

SEQ ID NO: 623034 - RNA, 21 nt, Human
uuucccuguuguaauuccaau

SEQ ID NO: 623035 - RNA, 25 nt, Human
uuuuaacaaaagcacaugugcuacu

SEQ ID NO: 623036 - RNA, 21 nt, Human
uuuuuuuuuucucaaagccca

SEQ ID NO: 623037 - RNA, 23 nt, Human
uuuuuuuuuuuuuuuucucaaag

SEQ ID NO: 623038 - RNA, 25 nt, Human
aaaaaaaaaaaaaguagaaaagagg

SEQ ID NO: 623039 - RNA, 23 nt, Human
aaaaaacagaaacagcuucagga

SEQ ID NO: 623040 - RNA, 23 nt, Human
aaaaacagaaacagcuucaggaa

SEQ ID NO: 623041 - RNA, 28 nt, Human
aaaacaaaaaacagaaacagcuucagga

SEQ ID NO: 623042 - RNA, 21 nt, Human
aaaacaaaacaaaacaaaaaa

SEQ ID NO: 623043 - RNA, 26 nt, Human
aaaacaaaacaaaacaaaaaacagaa

SEQ ID NO: 623044 - RNA, 27 nt, Human
aaacaaaaaacagaaacagcuucagga

SEQ ID NO: 623045 - RNA, 19 nt, Human
aaacaaaacaaaacaaaaa

SEQ ID NO: 623046 - RNA, 21 nt, Human
aacaaaacaaaaaacagaaac

SEQ ID NO: 623047 - RNA, 23 nt, Human
aacaaaacaaaaaacagaaacag

SEQ ID NO: 623048 - RNA, 22 nt, Human
aacaaaacaaaacaaaaaacag

SEQ ID NO: 623049 - RNA, 21 nt, Human
aagaaagaaaggacaacucag

SEQ ID NO: 623050 - RNA, 22 nt, Human
aagacaagugaaucacaacuua

SEQ ID NO: 623051 - RNA, 21 nt, Human
aagcacauagaaagacaaagc

SEQ ID NO: 623052 - RNA, 24 nt, Human
aagucaugaagauuaaccugaaau

SEQ ID NO: 623053 - RNA, 27 nt, Human
acaaaaaaaaaaaaaaaaaaguagaaa

SEQ ID NO: 623054 - RNA, 27 nt, Human
acaaaacaaaaaacagaaacagcuuca

SEQ ID NO: 623055 - RNA, 24 nt, Human
acaaaacaaaacaaaaaacagaaa

SEQ ID NO: 623056 - RNA, 25 nt, Human
acaaaacaaaacaaaaaacagaaac

SEQ ID NO: 623057 - RNA, 21 nt, Human
acagaaacagcuucaggaaca

SEQ ID NO: 623058 - RNA, 20 nt, Human
accacagcucacuguaaccc

SEQ ID NO: 623059 - RNA, 26 nt, Human
accacagcucacuguaaccccgaacu

SEQ ID NO: 623060 - RNA, 20 nt, Human
acuagaaaaauagucugauu

SEQ ID NO: 623061 - RNA, 18 nt, Human
acucugucacccaggcug

SEQ ID NO: 623062 - RNA, 25 nt, Human
acucugucacccaggcuggaauaca

SEQ ID NO: 623063 - RNA, 21 nt, Human
agaaagaaaagcauuagucac

SEQ ID NO: 623064 - RNA, 22 nt, Human
agaaagaaaggacaacucagaa

SEQ ID NO: 623065 - RNA, 19 nt, Human
agaaagccuuaagggggag

SEQ ID NO: 623066 - RNA, 26 nt, Human
agacaagugaaucacaacuuaguagg

SEQ ID NO: 623067 - RNA, 18 nt, Human
aggaauacaaguacucca

SEQ ID NO: 623068 - RNA, 21 nt, Human
aucauccugccucagccuccc

SEQ ID NO: 623069 - RNA, 18 nt, Human
aucucacucugucaccca

SEQ ID NO: 623070 - RNA, 20 nt, Human
caaaaaacagaaacagcuuc

SEQ ID NO: 623071 - RNA, 19 nt, Human
caaaacaaaaaacagaaac

SEQ ID NO: 623072 - RNA, 27 nt, Human
caaaagucccucugacaauuaaacaau

SEQ ID NO: 623073 - RNA, 22 nt, Human
caaaggaguggaucaguuuuga

SEQ ID NO: 623074 - RNA, 23 nt, Human
caccuucucucuugguccguguu

SEQ ID NO: 623075 - RNA, 19 nt, Human
cacucugucacccaggcug

SEQ ID NO: 623076 - RNA, 23 nt, Human
cacucugucacccaggcuggaau

SEQ ID NO: 623077 - RNA, 21 nt, Human
cacuguaaccccgaacuccug

SEQ ID NO: 623078 - RNA, 19 nt, Human
caggagugagucacugugc

SEQ ID NO: 623079 - RNA, 24 nt, Human
caggagugagucacugugccuggc

SEQ ID NO: 623080 - RNA, 23 nt, Human
ccaaaaacaguacauaauuuccu

SEQ ID NO: 623081 - RNA, 18 nt, Human
ccaagagaaaaaagaauc

SEQ ID NO: 623082 - RNA, 19 nt, Human
cccaagagaaaaaagaauc

SEQ ID NO: 623083 - RNA, 20 nt, Human
cccaggcuggaauacagugg

SEQ ID NO: 623084 - RNA, 25 nt, Human
ccccuuaaaaacaaaacaaaacaaa

SEQ ID NO: 623085 - RNA, 22 nt, Human
ccggcaaggcugcgucucuucu

SEQ ID NO: 623086 - RNA, 18 nt, Human
ccguguuucucugguggc

SEQ ID NO: 623087 - RNA, 21 nt, Human
ccucucccccuuaaaaacaaa

SEQ ID NO: 623088 - RNA, 19 nt, Human
ccugaagguccucugugga

SEQ ID NO: 623089 - RNA, 23 nt, Human
ccugggcuuaagcaaucauccug

SEQ ID NO: 623090 - RNA, 21 nt, Human
cggcaaggcugcgucucuucu

SEQ ID NO: 623091 - RNA, 23 nt, Human
cucaaagaaagaaaagcauuagu

SEQ ID NO: 623092 - RNA, 22 nt, Human
cucaagaaagaaaggacaacuc

SEQ ID NO: 623093 - RNA, 21 nt, Human
cucacuguaaccccgaacucc

SEQ ID NO: 623094 - RNA, 24 nt, Human
cucacuguaaccccgaacuccugg

SEQ ID NO: 623095 - RNA, 24 nt, Human
cugccucagccuccccgaguagcu

SEQ ID NO: 623096 - RNA, 19 nt, Human
cugcugguaucacacugac

SEQ ID NO: 623097 - RNA, 23 nt, Human
cuggagaucugguuuccuggggu

SEQ ID NO: 623098 - RNA, 25 nt, Human
cugguggcugcugcgacaccuccuu

SEQ ID NO: 623099 - RNA, 21 nt, Human
cuucuuguucuacgcugggaa

SEQ ID NO: 623100 - RNA, 18 nt, Human
gaaguacaaaauguuggc

SEQ ID NO: 623101 - RNA, 18 nt, Human
gacuacaggagugaguca

SEQ ID NO: 623102 - RNA, 21 nt, Human
gacuacaggagugagucacug

SEQ ID NO: 623103 - RNA, 24 nt, Human
gacuacaggagugagucacugugc

SEQ ID NO: 623104 - RNA, 19 nt, Human
gaggaugggaagggacugu

SEQ ID NO: 623105 - RNA, 20 nt, Human
gaguagcuaggacuacagga

SEQ ID NO: 623106 - RNA, 22 nt, Human
gcccccaagagaaaaaagaauc

SEQ ID NO: 623107 - RNA, 21 nt, Human
gcucaagaaagaaaggacaac

SEQ ID NO: 623108 - RNA, 19 nt, Human
ggaagaaccucucccccuu

SEQ ID NO: 623109 - RNA, 20 nt, Human
ggacuacaggagugagucac

SEQ ID NO: 623110 - RNA, 23 nt, Human
ggacuacaggagugagucacugu

SEQ ID NO: 623111 - RNA, 24 nt, Human
ggacuacaggagugagucacugug

SEQ ID NO: 623112 - RNA, 22 nt, Human
gggagccaguauucagagugau

SEQ ID NO: 623113 - RNA, 21 nt, Human
guccguguuucucugguggcu

SEQ ID NO: 623114 - RNA, 22 nt, Human
uaagcacaacauaauuaauuca

SEQ ID NO: 623115 - RNA, 21 nt, Human
uacaggagugagucacugugc

SEQ ID NO: 623116 - RNA, 22 nt, Human
uacaggagugagucacugugcc

SEQ ID NO: 623117 - RNA, 23 nt, Human
uacaggagugagucacugugccu

SEQ ID NO: 623118 - RNA, 18 nt, Human
uaccauauugauauccug

SEQ ID NO: 623119 - RNA, 19 nt, Human
uagaaaagaguucaucugc

SEQ ID NO: 623120 - RNA, 22 nt, Human
uagagacaggaucucacucugu

SEQ ID NO: 623121 - RNA, 18 nt, Human
uauuuuaguugcaccagg

SEQ ID NO: 623122 - RNA, 19 nt, Human
ucacccaggcuggaauaca

SEQ ID NO: 623123 - RNA, 24 nt, Human
ucacuguaaccccgaacuccuggg

SEQ ID NO: 623124 - RNA, 21 nt, Human
ucagagugauccucaauaugg

SEQ ID NO: 623125 - RNA, 19 nt, Human
ucaggaacaggaauacaag

SEQ ID NO: 623126 - RNA, 22 nt, Human
uccaggugaaaauacaaaaaaa

SEQ ID NO: 623127 - RNA, 21 nt, Human
ucccccuuaaaaacaaaacaa

SEQ ID NO: 623128 - RNA, 22 nt, Human
ucccccuuaaaaacaaaacaaa

SEQ ID NO: 623129 - RNA, 24 nt, Human
uccccgaguagcuaggacuacagg

SEQ ID NO: 623130 - RNA, 23 nt, Human
uccugccucagccuccccgagua

SEQ ID NO: 623131 - RNA, 18 nt, Human
uccugggcuuaagcaauc

SEQ ID NO: 623132 - RNA, 24 nt, Human
uccugggcuuaagcaaucauccug

SEQ ID NO: 623133 - RNA, 19 nt, Human
uccuugguuuuaaagacaa

SEQ ID NO: 623134 - RNA, 22 nt, Human
ucucacccuguggcugacugga

SEQ ID NO: 623135 - RNA, 23 nt, Human
ucucacucugucacccaggcugg

SEQ ID NO: 623136 - RNA, 24 nt, Human
ucucacucugucacccaggcugga

SEQ ID NO: 623137 - RNA, 18 nt, Human
ucugucacccaggcugga

SEQ ID NO: 623138 - RNA, 24 nt, Human
ucugucacccaggcuggaauacag

SEQ ID NO: 623139 - RNA, 19 nt, Human
ucuguggaguugaagaagg

SEQ ID NO: 623140 - RNA, 23 nt, Human
ugaaagaagaaauuaaucuaggg

SEQ ID NO: 623141 - RNA, 21 nt, Human
ugaccacagcucacuguaacc

SEQ ID NO: 623142 - RNA, 23 nt, Human
ugaccucaacugauuauacaacu

SEQ ID NO: 623143 - RNA, 24 nt, Human
ugaccucaacugauuauacaacuu

SEQ ID NO: 623144 - RNA, 25 nt, Human
ugccucagccuccccgaguagcuag

SEQ ID NO: 623145 - RNA, 21 nt, Human
ugcugguaucacacugaccuc

SEQ ID NO: 623146 - RNA, 21 nt, Human
uggaauacaguggugugacca

SEQ ID NO: 623147 - RNA, 28 nt, Human
uggaauacaguggugugacggcucuagc

SEQ ID NO: 623148 - RNA, 22 nt, Human
uggcucaagaaagaaaggacaa

SEQ ID NO: 623149 - RNA, 22 nt, Human
ugggaaauuuuaggacuaugaa

SEQ ID NO: 623150 - RNA, 20 nt, Human
uggguagaugagacaugaug

SEQ ID NO: 623151 - RNA, 23 nt, Human
uggugugaccacagcucacugua

SEQ ID NO: 623152 - RNA, 24 nt, Human
uggugugaccacagcucacuguaa

SEQ ID NO: 623153 - RNA, 18 nt, Human
ugucugggcuauguacag

SEQ ID NO: 623154 - RNA, 18 nt, Human
ugugaccacagcucacug

SEQ ID NO: 623155 - RNA, 18 nt, Human
uguggaguugaagaaggu

SEQ ID NO: 623156 - RNA, 19 nt, Human
uguggaguugaagaaggug

SEQ ID NO: 623157 - RNA, 18 nt, Human
uucacuguacuuagccca

SEQ ID NO: 623158 - RNA, 25 nt, Human
uuccaggugaaaauacaaaaaaaaa

SEQ ID NO: 623159 - RNA, 18 nt, Human
uucucugguggcugcugc

SEQ ID NO: 623160 - RNA, 24 nt, Human
uuuuuuuuuuuuuuuuaaauuuuu

SEQ ID NO: 623161 - RNA, 22 nt, Human
aaguagccaagacuauuaggcg

SEQ ID NO: 623162 - RNA, 19 nt, Human
acaaaguucaucuccucag

SEQ ID NO: 623163 - RNA, 21 nt, Human
acagagggcugguaaauggca

SEQ ID NO: 623164 - RNA, 24 nt, Human
agaaaagagcgggaauauacaaaa

SEQ ID NO: 623165 - RNA, 19 nt, Human
agacagggaaaugaagaga

SEQ ID NO: 623166 - RNA, 27 nt, Human
agacagggaaaugaagagaagggaccc

SEQ ID NO: 623167 - RNA, 21 nt, Human
agcaaagagccagguaugcug

SEQ ID NO: 623168 - RNA, 21 nt, Human
agggaggagacaggcauggua

SEQ ID NO: 623169 - RNA, 20 nt, Human
agggcugguaaauggcagcu

SEQ ID NO: 623170 - RNA, 19 nt, Human
aucuccucagcugaacacu

SEQ ID NO: 623171 - RNA, 18 nt, Human
auggcgguggggauaagc

SEQ ID NO: 623172 - RNA, 20 nt, Human
augguggagaugguagacac

SEQ ID NO: 623173 - RNA, 18 nt, Human
caccuaugaugccacuuu

SEQ ID NO: 623174 - RNA, 20 nt, Human
cacuagcucaaacuuuuuca

SEQ ID NO: 623175 - RNA, 23 nt, Human
ccaagacuuaaaacuuaggaaac

SEQ ID NO: 623176 - RNA, 19 nt, Human
ccccugaauuugcuagaag

SEQ ID NO: 623177 - RNA, 22 nt, Human
ccuuggaagaaguuaagaauuu

SEQ ID NO: 623178 - RNA, 22 nt, Human
cuagaaguuuucuugugucugg

SEQ ID NO: 623179 - RNA, 22 nt, Human
cuagcucaaacuuuuucacucc

SEQ ID NO: 623180 - RNA, 19 nt, Human
cuuuuucacuccaccaaaa

SEQ ID NO: 623181 - RNA, 21 nt, Human
gaagacagggaaaugaagaga

SEQ ID NO: 623182 - RNA, 22 nt, Human
gcagugcucguggauucaaaau

SEQ ID NO: 623183 - RNA, 22 nt, Human
ggagguuucaagaucaccauac

SEQ ID NO: 623184 - RNA, 23 nt, Human
ggaguuuuuauccaagacuuaaa

SEQ ID NO: 623185 - RNA, 18 nt, Human
guaaauggcagcuucugu

SEQ ID NO: 623186 - RNA, 24 nt, Human
guaggagggaggagacaggcaugg

SEQ ID NO: 623187 - RNA, 18 nt, Human
gugccccccauuaacaca

SEQ ID NO: 623188 - RNA, 18 nt, Human
uaacacaaaguucaucuc

SEQ ID NO: 623189 - RNA, 20 nt, Human
uaacacaaaguucaucuccu

SEQ ID NO: 623190 - RNA, 25 nt, Human
uaaccuuggaagaaguuaagaauuu

SEQ ID NO: 623191 - RNA, 20 nt, Human
uaagauaucaucauggccaa

SEQ ID NO: 623192 - RNA, 23 nt, Human
uacaaaaaugaagcuuccuuaac

SEQ ID NO: 623193 - RNA, 22 nt, Human
uaggaaacaccuaugaugccac

SEQ ID NO: 623194 - RNA, 20 nt, Human
ucaugguggagaugguagac

SEQ ID NO: 623195 - RNA, 18 nt, Human
ugaaaauacugcagccug

SEQ ID NO: 623196 - RNA, 20 nt, Human
ugaaccagggcaacauuucu

SEQ ID NO: 623197 - RNA, 23 nt, Human
ugaagagcugagugccugcuggg

SEQ ID NO: 623198 - RNA, 19 nt, Human
ugcaaucagcaaagagcca

SEQ ID NO: 623199 - RNA, 21 nt, Human
uggagguuucaagaucaccau

SEQ ID NO: 623200 - RNA, 18 nt, Human
uggauucaaaaucacaga

SEQ ID NO: 623201 - RNA, 24 nt, Human
uggcuucacuagcucaaacuuuuu

SEQ ID NO: 623202 - RNA, 22 nt, Human
ugggauaguacgcuguguaguu

SEQ ID NO: 623203 - RNA, 18 nt, Human
ugucuggagguuucaaga

SEQ ID NO: 623204 - RNA, 22 nt, Human
uuuaaagugccccccauuaaca

SEQ ID NO: 623205 - RNA, 26 nt, Human
uuuuuuuuuuuuuuuucagguguuuu

SEQ ID NO: 623206 - RNA, 21 nt, Human
uuuuuuuuuuuuuuuuucagg

SEQ ID NO: 623207 - RNA, 24 nt, Human
aaaacauggcuccccuucugccuc

SEQ ID NO: 623208 - RNA, 20 nt, Human
aaaaugccugauccauuucu

SEQ ID NO: 623209 - RNA, 23 nt, Human
aaagaauaaggaauaacagaagg

SEQ ID NO: 623210 - RNA, 23 nt, Human
aacacaaugcaaauaguuuagag

SEQ ID NO: 623211 - RNA, 21 nt, Human
aaccccacuccugagcccuuc

SEQ ID NO: 623212 - RNA, 23 nt, Human
aaccccacuccugagcccuucug

SEQ ID NO: 623213 - RNA, 21 nt, Human
aagcaaauacauacgcaugug

SEQ ID NO: 623214 - RNA, 26 nt, Human
aagcacccaggacucggucccaguga

SEQ ID NO: 623215 - RNA, 24 nt, Human
aaggaauauguaagcacccaggac

SEQ ID NO: 623216 - RNA, 18 nt, Human
aagucuccgugagggugg

SEQ ID NO: 623217 - RNA, 20 nt, Human
aaguggagauguggggcugc

SEQ ID NO: 623218 - RNA, 23 nt, Human
acaagcaaauacauacgcaugug

SEQ ID NO: 623219 - RNA, 19 nt, Human
accuguaaauuccagcacu

SEQ ID NO: 623220 - RNA, 22 nt, Human
accuguaaauuccagcacuuug

SEQ ID NO: 623221 - RNA, 24 nt, Human
accuguaaauuccagcacuuuggg

SEQ ID NO: 623222 - RNA, 19 nt, Human
agaacuucucagacacaga

SEQ ID NO: 623223 - RNA, 21 nt, Human
agaccgaucucuucucccuca

SEQ ID NO: 623224 - RNA, 24 nt, Human
agcacuuugggauuacaggcguga

SEQ ID NO: 623225 - RNA, 18 nt, Human
aggaaagcagaggcaaga

SEQ ID NO: 623226 - RNA, 24 nt, Human
agggaagugugcagcagcauucug

SEQ ID NO: 623227 - RNA, 18 nt, Human
agggugggagggacccca

SEQ ID NO: 623228 - RNA, 18 nt, Human
aggugaugugggcacaga

SEQ ID NO: 623229 - RNA, 20 nt, Human
caaaggugaugugggcacag

SEQ ID NO: 623230 - RNA, 26 nt, Human
caagauugaucgcucccuccccucuc

SEQ ID NO: 623231 - RNA, 19 nt, Human
caauggaagccaacacugc

SEQ ID NO: 623232 - RNA, 19 nt, Human
cagacacagagcugccaga

SEQ ID NO: 623233 - RNA, 23 nt, Human
cagagaggguccuuccaaagccc

SEQ ID NO: 623234 - RNA, 21 nt, Human
cagagccgagcgggugaugcc

SEQ ID NO: 623235 - RNA, 22 nt, Human
cagcagcauucugccauugcuu

SEQ ID NO: 623236 - RNA, 26 nt, Human
cagggccaggcguccgcuucagagcc

SEQ ID NO: 623237 - RNA, 18 nt, Human
cagugagaugaagacacg

SEQ ID NO: 623238 - RNA, 24 nt, Human
cauacgcaugugcacauuuauacg

SEQ ID NO: 623239 - RNA, 20 nt, Human
caucgccgagaaucccccca

SEQ ID NO: 623240 - RNA, 22 nt, Human
cauggcuccccuucugccuccu

SEQ ID NO: 623241 - RNA, 21 nt, Human
cauuuggggacuuuaaaaaaa

SEQ ID NO: 623242 - RNA, 19 nt, Human
ccagacaucuguggaguga

SEQ ID NO: 623243 - RNA, 22 nt, Human
ccagaugcugagcuugccaaca

SEQ ID NO: 623244 - RNA, 22 nt, Human
ccagcacuuugggauuacaggc

SEQ ID NO: 623245 - RNA, 24 nt, Human
ccagcacuuugggauuacaggcgu

SEQ ID NO: 623246 - RNA, 22 nt, Human
ccagccggccagggcuggcagc

SEQ ID NO: 623247 - RNA, 23 nt, Human
cccacuccugagcccuucugaug

SEQ ID NO: 623248 - RNA, 23 nt, Human
cccagaugcugagcuugccaaca

SEQ ID NO: 623249 - RNA, 18 nt, Human
ccccacuuacccagccag

SEQ ID NO: 623250 - RNA, 21 nt, Human
ccccucucuuaauguuggagg

SEQ ID NO: 623251 - RNA, 21 nt, Human
cccgccauauucuaaagaauc

SEQ ID NO: 623252 - RNA, 20 nt, Human
cccgggcucgaaagcggagc

SEQ ID NO: 623253 - RNA, 19 nt, Human
ccgcagccccucuccuucc

SEQ ID NO: 623254 - RNA, 20 nt, Human
ccggugcagggccaggcguc

SEQ ID NO: 623255 - RNA, 18 nt, Human
ccuguaaauuccagcacu

SEQ ID NO: 623256 - RNA, 18 nt, Human
ccugugugaaugcagagu

SEQ ID NO: 623257 - RNA, 18 nt, Human
ccuucugccuccuuucuu

SEQ ID NO: 623258 - RNA, 23 nt, Human
cgaacccagccggccagggcugg

SEQ ID NO: 623259 - RNA, 22 nt, Human
cgagcgcagagaggguccuucc

SEQ ID NO: 623260 - RNA, 24 nt, Human
cgccgagaauccccccacuuaccc

SEQ ID NO: 623261 - RNA, 21 nt, Human
cggcuucuaagucccccguuu

SEQ ID NO: 623262 - RNA, 24 nt, Human
cuagaacccugaucuacauaaagu

SEQ ID NO: 623263 - RNA, 21 nt, Human
cucagguuugcgucuguccuc

SEQ ID NO: 623264 - RNA, 24 nt, Human
cucaucgccgagaauccccccacu

SEQ ID NO: 623265 - RNA, 28 nt, Human
cucccgcagccccucuccuuccugugug

SEQ ID NO: 623266 - RNA, 21 nt, Human
cuccuuccugugugaaugcag

SEQ ID NO: 623267 - RNA, 19 nt, Human
cucuucucccucaaccuca

SEQ ID NO: 623268 - RNA, 20 nt, Human
cuggagcagcagguguugca

SEQ ID NO: 623269 - RNA, 23 nt, Human
cuggggagagaaugucaggugca

SEQ ID NO: 623270 - RNA, 20 nt, Human
gacucgcuguggaggacucc

SEQ ID NO: 623271 - RNA, 28 nt, Human
gagaaagaauaauaauuuaaaaaaaugc

SEQ ID NO: 623272 - RNA, 21 nt, Human
gagaauccccccacuuaccca

SEQ ID NO: 623273 - RNA, 25 nt, Human
gagaauccccccacuuacccagccc

SEQ ID NO: 623274 - RNA, 18 nt, Human
gagagacaacauuagauu

SEQ ID NO: 623275 - RNA, 19 nt, Human
gagaugaagacacgaagga

SEQ ID NO: 623276 - RNA, 22 nt, Human
gagcagcagguguugcagaggu

SEQ ID NO: 623277 - RNA, 21 nt, Human
gaggaaugugugacaaacccc

SEQ ID NO: 623278 - RNA, 19 nt, Human
gagugaugagguccacaca

SEQ ID NO: 623279 - RNA, 18 nt, Human
gauuacaggcgugagcca

SEQ ID NO: 623280 - RNA, 21 nt, Human
gauuacaggcgugagccacug

SEQ ID NO: 623281 - RNA, 24 nt, Human
gauuacaggcgugagccacugugc

SEQ ID NO: 623282 - RNA, 27 nt, Human
gcacucccaaagcugcaggauacaaua

SEQ ID NO: 623283 - RNA, 20 nt, Human
gcagagaggguccuuccaaa

SEQ ID NO: 623284 - RNA, 21 nt, Human
gcagcagcauucugccauugc

SEQ ID NO: 623285 - RNA, 21 nt, Human
gcagugccuaucccuguugca

SEQ ID NO: 623286 - RNA, 18 nt, Human
gccuggucaauguagaac

SEQ ID NO: 623287 - RNA, 23 nt, Human
gccugucuggcugcugcugcugu

SEQ ID NO: 623288 - RNA, 18 nt, Human
gcugcuggccuuucuggg

SEQ ID NO: 623289 - RNA, 18 nt, Human
gcuguggaggacuccuga

SEQ ID NO: 623290 - RNA, 18 nt, Human
ggaaauguacagaguuuc

SEQ ID NO: 623291 - RNA, 23 nt, Human
ggaaauguacagaguuucuucug

SEQ ID NO: 623292 - RNA, 20 nt, Human
ggaagccaacacugcuuaaa

SEQ ID NO: 623293 - RNA, 19 nt, Human
ggcaagaggugacuuuaau

SEQ ID NO: 623294 - RNA, 19 nt, Human
ggcagagucagagugauga

SEQ ID NO: 623295 - RNA, 18 nt, Human
ggcaggaaguccaagcug

SEQ ID NO: 623296 - RNA, 21 nt, Human
ggcagggugacaacuggaggg

SEQ ID NO: 623297 - RNA, 23 nt, Human
ggccaggcguccgcuucagagcc

SEQ ID NO: 623298 - RNA, 20 nt, Human
ggccuggucaauguagaacu

SEQ ID NO: 623299 - RNA, 19 nt, Human
gggaaauguacagaguuuc

SEQ ID NO: 623300 - RNA, 18 nt, Human
gggcaggaaguccaagcu

SEQ ID NO: 623301 - RNA, 20 nt, Human
gggcuggcagcgugcugacg

SEQ ID NO: 623302 - RNA, 27 nt, Human
uaaaaaaaucacaaaauauuucauuga

SEQ ID NO: 623303 - RNA, 24 nt, Human
uaaagaaucacauccucuugcugg

SEQ ID NO: 623304 - RNA, 25 nt, Human
uaaagaaucacauccucuugcugga

SEQ ID NO: 623305 - RNA, 20 nt, Human
uaaguacacauuuggggacu

SEQ ID NO: 623306 - RNA, 23 nt, Human
uacaggcgugagccacugugccc

SEQ ID NO: 623307 - RNA, 24 nt, Human
uacaggcgugagccacugugcccu

SEQ ID NO: 623308 - RNA, 18 nt, Human
uacuccaggcaacaaggg

SEQ ID NO: 623309 - RNA, 19 nt, Human
uagaacuucucagacacag

SEQ ID NO: 623310 - RNA, 21 nt, Human
uagaaugcugauuucuucccc

SEQ ID NO: 623311 - RNA, 23 nt, Human
ucaccuccccgccauauucuaaa

SEQ ID NO: 623312 - RNA, 20 nt, Human
uccacacaggucagugagau

SEQ ID NO: 623313 - RNA, 23 nt, Human
uccagcacuuugggauuacaggc

SEQ ID NO: 623314 - RNA, 21 nt, Human
ucccaaagcugcagauggaag

SEQ ID NO: 623315 - RNA, 22 nt, Human
ucccaaagcugcagauggaagg

SEQ ID NO: 623316 - RNA, 19 nt, Human
ucccagugacaguuacuuu

SEQ ID NO: 623317 - RNA, 23 nt, Human
ucucaucgccgagaaucccccca

SEQ ID NO: 623318 - RNA, 22 nt, Human
ucuccuuccugugugaaugcag

SEQ ID NO: 623319 - RNA, 27 nt, Human
ugaaguagugucccugauuagaaugcu

SEQ ID NO: 623320 - RNA, 23 nt, Human
ugagcugugugaaugggaggcca

SEQ ID NO: 623321 - RNA, 18 nt, Human
ugaguggagcaucuggca

SEQ ID NO: 623322 - RNA, 19 nt, Human
ugcaagaagaggggaagag

SEQ ID NO: 623323 - RNA, 20 nt, Human
ugcaagaagaggggaagagg

SEQ ID NO: 623324 - RNA, 25 nt, Human
ugcaagaagaggggaagaggacaau

SEQ ID NO: 623325 - RNA, 22 nt, Human
ugcagaggugugaagggggcca

SEQ ID NO: 623326 - RNA, 19 nt, Human
ugcugcuguuaaaagagcu

SEQ ID NO: 623327 - RNA, 18 nt, Human
uggagauguggggcugcu

SEQ ID NO: 623328 - RNA, 22 nt, Human
uggagcagcagguguugcagag

SEQ ID NO: 623329 - RNA, 24 nt, Human
uggcagcccaaguccuuaagguga

SEQ ID NO: 623330 - RNA, 22 nt, Human
uggccagacaucuguggaguga

SEQ ID NO: 623331 - RNA, 19 nt, Human
uggcuccccuucugccucc

SEQ ID NO: 623332 - RNA, 18 nt, Human
ugggauuacaggcgugag

SEQ ID NO: 623333 - RNA, 21 nt, Human
ugggauuacaggcgugagcca

SEQ ID NO: 623334 - RNA, 22 nt, Human
ugggauuacaggcgugagccac

SEQ ID NO: 623335 - RNA, 22 nt, Human
ugggauuacaggcgugagccac

SEQ ID NO: 623336 - RNA, 22 nt, Human
ugggauuacaggcgugagccac

SEQ ID NO: 623337 - RNA, 23 nt, Human
ugggauuacaggcgugagccacu

SEQ ID NO: 623338 - RNA, 24 nt, Human
ugggauuacaggcgugagccacug

SEQ ID NO: 623339 - RNA, 21 nt, Human
ugggcaggaaguccaagcugc

SEQ ID NO: 623340 - RNA, 21 nt, Human
ugggcagggugacaacuggag

SEQ ID NO: 623341 - RNA, 26 nt, Human
uggggagggggcgagcgcagagaggg

SEQ ID NO: 623342 - RNA, 20 nt, Human
uggugaguugacuuggaugc

SEQ ID NO: 623343 - RNA, 18 nt, Human
ugguuagucauuucucuu

SEQ ID NO: 623344 - RNA, 21 nt, Human
uguacagaguuucuucuggga

SEQ ID NO: 623345 - RNA, 22 nt, Human
ugugaaacagcaccaagauuga

SEQ ID NO: 623346 - RNA, 18 nt, Human
ugugugaaugggaggcca

SEQ ID NO: 623347 - RNA, 18 nt, Human
ugugugaaugggaggcca

SEQ ID NO: 623348 - RNA, 20 nt, Human
uguuaagaggaaugugugac

SEQ ID NO: 623349 - RNA, 18 nt, Human
uguugcagaggugugaag

SEQ ID NO: 623350 - RNA, 20 nt, Human
uuaaaaaaaugccugaucca

SEQ ID NO: 623351 - RNA, 28 nt, Human
uuaaaaaaaugccugauccauuucucua

SEQ ID NO: 623352 - RNA, 23 nt, Human
uuaaaucucccgcagccccucuc

SEQ ID NO: 623353 - RNA, 28 nt, Human
uucacaagcaaauacauacgcaugugca

SEQ ID NO: 623354 - RNA, 23 nt, Human
uuugcuguggucacuguaauuuu

SEQ ID NO: 623355 - RNA, 24 nt, Human
uuuuuuuuuuuuuuuuuuuuaacg

SEQ ID NO: 623356 - RNA, 20 nt, Human
aagaagaggcuuuucuucca

SEQ ID NO: 623357 - RNA, 19 nt, Human
aaggccugacuugucuuca

SEQ ID NO: 623358 - RNA, 20 nt, Human
aaggugccucagggugaggg

SEQ ID NO: 623359 - RNA, 21 nt, Human
acccaugugcuccagugguca

SEQ ID NO: 623360 - RNA, 21 nt, Human
acgaguuuaucugcucccuuc

SEQ ID NO: 623361 - RNA, 20 nt, Human
agcucccagcaagucucaua

SEQ ID NO: 623362 - RNA, 22 nt, Human
aggcaugaguaauuguucugaa

SEQ ID NO: 623363 - RNA, 19 nt, Human
agggaaugcaaagcagagc

SEQ ID NO: 623364 - RNA, 21 nt, Human
augugagaccuuucaucuaca

SEQ ID NO: 623365 - RNA, 23 nt, Human
cacagugaauagauacuuccucu

SEQ ID NO: 623366 - RNA, 21 nt, Human
cacuccaggguuaccuggcug

SEQ ID NO: 623367 - RNA, 20 nt, Human
cagagcucccagcaagucuc

SEQ ID NO: 623368 - RNA, 24 nt, Human
ccacguguuaucucacauaauccu

SEQ ID NO: 623369 - RNA, 23 nt, Human
cccacagugaguuuggggaaaga

SEQ ID NO: 623370 - RNA, 21 nt, Human
cuacguggggccaggcaaguu

SEQ ID NO: 623371 - RNA, 19 nt, Human
gaaaggaaggcaugaguaa

SEQ ID NO: 623372 - RNA, 18 nt, Human
gagcucccagcaagucuc

SEQ ID NO: 623373 - RNA, 18 nt, Human
ggaaucaucauuugaaaa

SEQ ID NO: 623374 - RNA, 23 nt, Human
uaagaagaggcuuuucuuccaca

SEQ ID NO: 623375 - RNA, 22 nt, Human
ucccagcaagucucauaaaaca

SEQ ID NO: 623376 - RNA, 23 nt, Human
ucccccaccaauguuuuagggau

SEQ ID NO: 623377 - RNA, 20 nt, Human
uccccuaacuccauuaaccc

SEQ ID NO: 623378 - RNA, 18 nt, Human
ugagaaaggaaggcauga

SEQ ID NO: 623379 - RNA, 19 nt, Human
ugagaaaggaaggcaugag

SEQ ID NO: 623380 - RNA, 23 nt, Human
ugaggguuaaagcuacuagagug

SEQ ID NO: 623381 - RNA, 22 nt, Human
uggggccaggcaaguuacaauu

SEQ ID NO: 623382 - RNA, 19 nt, Human
uguagcucccccaccaaug

SEQ ID NO: 623383 - RNA, 19 nt, Human
ugugagaccuuucaucuac

SEQ ID NO: 623384 - RNA, 28 nt, Human
uguuauuuuuagucauucucgcaggggg

SEQ ID NO: 623385 - RNA, 23 nt, Human
uuaagaagaggcuuuucuuccac

SEQ ID NO: 623386 - RNA, 21 nt, Human
uuccccuaacuccauuaaccc

SEQ ID NO: 623387 - RNA, 21 nt, Human
uugaaauagcaagggguuuuu

SEQ ID NO: 623388 - RNA, 20 nt, Human
uuggaggcuugcaggcaaug

SEQ ID NO: 623389 - RNA, 24 nt, Human
uuuuucagauuuucacagugaaua

SEQ ID NO: 623390 - RNA, 25 nt, Human
uuuuuuuuuuugaaauagcaagggg

SEQ ID NO: 623391 - RNA, 18 nt, Human
uuuuuuuuuuuuuuuuug

SEQ ID NO: 623392 - RNA, 21 nt, Human
agacaguacaacgaggaaaug

SEQ ID NO: 623393 - RNA, 22 nt, Human
aguggccaccacacuggauagc

SEQ ID NO: 623394 - RNA, 22 nt, Human
auccagaacagcccuguccaau

SEQ ID NO: 623395 - RNA, 18 nt, Human
cagaacagcccuguccaa

SEQ ID NO: 623396 - RNA, 20 nt, Human
cggcaccugcugaccgccgc

SEQ ID NO: 623397 - RNA, 23 nt, Human
ggccguggguucggcaccugcug

SEQ ID NO: 623398 - RNA, 27 nt, Human
uagacaguacaacgaggaaaugcauau

SEQ ID NO: 623399 - RNA, 19 nt, Human
ucgccugccagggcccagg

SEQ ID NO: 623400 - RNA, 19 nt, Human
ugccagggcccaggggcuc

SEQ ID NO: 623401 - RNA, 19 nt, Human
uucggcaccugcugaccgc

SEQ ID NO: 623402 - RNA, 21 nt, Human
uucucauccagaacagcccug

SEQ ID NO: 623403 - RNA, 20 nt, Human
uuuuuuuuuuuuuuuuuugg

SEQ ID NO: 623404 - RNA, 24 nt, Human
uuuuuuuuuuuuuuuuuuguaauu

SEQ ID NO: 623405 - RNA, 23 nt, Human
aaggugcugcucagagggucugg

SEQ ID NO: 623406 - RNA, 19 nt, Human
agagacccgagggguccug

SEQ ID NO: 623407 - RNA, 19 nt, Human
agagccucuggaggcuggg

SEQ ID NO: 623408 - RNA, 21 nt, Human
agccucuggaggcugggagcu

SEQ ID NO: 623409 - RNA, 20 nt, Human
aggcggcugacagggcggcg

SEQ ID NO: 623410 - RNA, 20 nt, Human
aguaaaauaauauacgucuu

SEQ ID NO: 623411 - RNA, 18 nt, Human
augauaugaccaaggcca

SEQ ID NO: 623412 - RNA, 22 nt, Human
augaucauccuuauuuccagau

SEQ ID NO: 623413 - RNA, 23 nt, Human
auuuccagaugugggaacuaggc

SEQ ID NO: 623414 - RNA, 20 nt, Human
caauguaaccgugagguagc

SEQ ID NO: 623415 - RNA, 21 nt, Human
cacacagcuggcaaacaguga

SEQ ID NO: 623416 - RNA, 22 nt, Human
cacuuccgcuuccgguuaaaga

SEQ ID NO: 623417 - RNA, 18 nt, Human
cagaaaauauaauugagc

SEQ ID NO: 623418 - RNA, 24 nt, Human
cauccuuauuuccagaugugggaa

SEQ ID NO: 623419 - RNA, 22 nt, Human
cccugagucuuaaccccacccc

SEQ ID NO: 623420 - RNA, 25 nt, Human
cccuucuucauccguccuguuccug

SEQ ID NO: 623421 - RNA, 21 nt, Human
ccucuggaggcugggagcuuu

SEQ ID NO: 623422 - RNA, 21 nt, Human
ccucuguucucucaaccuggg

SEQ ID NO: 623423 - RNA, 18 nt, Human
ccuucuucauccguccug

SEQ ID NO: 623424 - RNA, 25 nt, Human
cgcgagucugcaucgccuaucucuc

SEQ ID NO: 623425 - RNA, 21 nt, Human
cgcgucucuugcgugcgugua

SEQ ID NO: 623426 - RNA, 23 nt, Human
cuucauugagagccucuggaggc

SEQ ID NO: 623427 - RNA, 21 nt, Human
cuucccguagccggucgagaa

SEQ ID NO: 623428 - RNA, 21 nt, Human
gacccgagggguccugggggc

SEQ ID NO: 623429 - RNA, 19 nt, Human
gaccuuccucucgcuggga

SEQ ID NO: 623430 - RNA, 19 nt, Human
gaggcggcugacagggcgg

SEQ ID NO: 623431 - RNA, 21 nt, Human
gccucuguucucucaaccugg

SEQ ID NO: 623432 - RNA, 21 nt, Human
gccuggaaagcguggcugagg

SEQ ID NO: 623433 - RNA, 26 nt, Human
gcgccgaggcggcugacagggcggcg

SEQ ID NO: 623434 - RNA, 22 nt, Human
ggaaagcguggcugaggcagug

SEQ ID NO: 623435 - RNA, 22 nt, Human
ggaccagaaaccagccuggaaa

SEQ ID NO: 623436 - RNA, 21 nt, Human
ggcggcggccgcgaccuuccc

SEQ ID NO: 623437 - RNA, 21 nt, Human
ggguccugggggcgccgaggc

SEQ ID NO: 623438 - RNA, 20 nt, Human
uaugaccaaggccacacagc

SEQ ID NO: 623439 - RNA, 26 nt, Human
ucaaccuggggcuuucaguuuccuca

SEQ ID NO: 623440 - RNA, 19 nt, Human
ugaagacgaccaugaaggu

SEQ ID NO: 623441 - RNA, 19 nt, Human
ugaccaaggccacacagcu

SEQ ID NO: 623442 - RNA, 19 nt, Human
ugagagccucuggaggcug

SEQ ID NO: 623443 - RNA, 21 nt, Human
ugagagccucuggaggcuggg

SEQ ID NO: 623444 - RNA, 22 nt, Human
ugaugaaaacugggaugggucc

SEQ ID NO: 623445 - RNA, 19 nt, Human
ugauuaucugcccucuuca

SEQ ID NO: 623446 - RNA, 19 nt, Human
ugcaucgccuaucucuccg

SEQ ID NO: 623447 - RNA, 27 nt, Human
ugccccugagucuuaaccccaccccuu

SEQ ID NO: 623448 - RNA, 21 nt, Human
uggaaagcguggcugaggcag

SEQ ID NO: 623449 - RNA, 19 nt, Human
uggcugaggcagugagagg

SEQ ID NO: 623450 - RNA, 24 nt, Human
uggggcuuucaguuuccucaaguc

SEQ ID NO: 623451 - RNA, 20 nt, Human
uugcgggagguggcugaggc

SEQ ID NO: 623452 - RNA, 21 nt, Human
uugcgggagguggcugaggcg

SEQ ID NO: 623453 - RNA, 24 nt, Human
uuuuuuuuuuuuuuuuuucucggg

SEQ ID NO: 623454 - RNA, 24 nt, Human
aaaacuuguacuuuauuuuucuca

SEQ ID NO: 623455 - RNA, 22 nt, Human
aaaagcauuucaaaugccagga

SEQ ID NO: 623456 - RNA, 23 nt, Human
aaacuuguacuuuauuuuucuca

SEQ ID NO: 623457 - RNA, 21 nt, Human
aaauacccaacaaagauccag

SEQ ID NO: 623458 - RNA, 19 nt, Human
acccaacaaagauccagga

SEQ ID NO: 623459 - RNA, 19 nt, Human
acgucaacuuugauuaugg

SEQ ID NO: 623460 - RNA, 20 nt, Human
acuuuauuuuucucaaauau

SEQ ID NO: 623461 - RNA, 24 nt, Human
aggaugugggauauuuaaaaauac

SEQ ID NO: 623462 - RNA, 18 nt, Human
aggcacugguauuuagaa

SEQ ID NO: 623463 - RNA, 25 nt, Human
aucacaaacuccacagaaauaauua

SEQ ID NO: 623464 - RNA, 18 nt, Human
augcaaauuacuuucaaa

SEQ ID NO: 623465 - RNA, 19 nt, Human
caggcaauucacuuggaag

SEQ ID NO: 623466 - RNA, 18 nt, Human
gagguaggacuauccaca

SEQ ID NO: 623467 - RNA, 19 nt, Human
gcucugguuuaaaaugaaa

SEQ ID NO: 623468 - RNA, 23 nt, Human
gugguuuuagccucaauauaaua

SEQ ID NO: 623469 - RNA, 28 nt, Human
uaaaaaaaucacaaacuccacagaaaua

SEQ ID NO: 623470 - RNA, 21 nt, Human
uaaaaugaaagcaacuggcua

SEQ ID NO: 623471 - RNA, 23 nt, Human
uaaauacccaacaaagauccagg

SEQ ID NO: 623472 - RNA, 24 nt, Human
uaacugcuuuccugaaaauggucu

SEQ ID NO: 623473 - RNA, 26 nt, Human
uaauaaucauccccuuacucuuagac

SEQ ID NO: 623474 - RNA, 20 nt, Human
uacaauauucaugaauuaaa

SEQ ID NO: 623475 - RNA, 21 nt, Human
uacuuaugcuuuuugucauua

SEQ ID NO: 623476 - RNA, 24 nt, Human
uccaggaugugggauauuuaaaaa

SEQ ID NO: 623477 - RNA, 24 nt, Human
ugacgucaacuuugauuaugggaa

SEQ ID NO: 623478 - RNA, 20 nt, Human
ugaggaccuuagaaaaucaa

SEQ ID NO: 623479 - RNA, 20 nt, Human
ugaggaccuuagaaaaucaa

SEQ ID NO: 623480 - RNA, 25 nt, Human
ugcaaauuacuuucaaauacauuuu

SEQ ID NO: 623481 - RNA, 18 nt, Human
ugugcaugucuacaaggu

SEQ ID NO: 623482 - RNA, 20 nt, Human
uuagaaaaucaacauuuccu

SEQ ID NO: 623483 - RNA, 24 nt, Human
uuggaagaauguuauaaugaaugu

SEQ ID NO: 623484 - RNA, 25 nt, Human
uuguacuuuauuuuucucaaauauu

SEQ ID NO: 623485 - RNA, 21 nt, Human
uuuccugugaacuugagagac

SEQ ID NO: 623486 - RNA, 21 nt, Human
uuuuuuuuuuuuuuguucaaa

SEQ ID NO: 623487 - RNA, 20 nt, Human
uuuuuuuuuuuuuuuuuguu

SEQ ID NO: 623488 - RNA, 27 nt, Human
uuuuuuuuuuuuuuuuuuuuuuugggg

SEQ ID NO: 623489 - RNA, 22 nt, Human
aagacaccaaccauuaugaaua

SEQ ID NO: 623490 - RNA, 19 nt, Human
aagagcacggcuggaauuc

SEQ ID NO: 623491 - RNA, 23 nt, Human
aagcuguaaccaccuccggcuua

SEQ ID NO: 623492 - RNA, 26 nt, Human
aauucaccuccucagacuccuccucu

SEQ ID NO: 623493 - RNA, 23 nt, Human
agcacggcuggaauucaccuccu

SEQ ID NO: 623494 - RNA, 23 nt, Human
agcuuaauguugacaucuggcau

SEQ ID NO: 623495 - RNA, 22 nt, Human
aggaggcccagccagaggcucc

SEQ ID NO: 623496 - RNA, 19 nt, Human
aggcaaaaaugaugcaucc

SEQ ID NO: 623497 - RNA, 21 nt, Human
aggcaaaaaugaugcauccag

SEQ ID NO: 623498 - RNA, 22 nt, Human
aggcaaaaaugaugcauccaga

SEQ ID NO: 623499 - RNA, 23 nt, Human
aggcaaaaaugaugcauccagaa

SEQ ID NO: 623500 - RNA, 22 nt, Human
agguggagaagggaagaagggc

SEQ ID NO: 623501 - RNA, 24 nt, Human
auccaugggggggaaugguccaga

SEQ ID NO: 623502 - RNA, 21 nt, Human
cacacacacagaaucagugua

SEQ ID NO: 623503 - RNA, 22 nt, Human
cacacugcccagccagccugca

SEQ ID NO: 623504 - RNA, 26 nt, Human
cacugcccagccagccugcaagagcu

SEQ ID NO: 623505 - RNA, 19 nt, Human
cagaggcucccucuccucc

SEQ ID NO: 623506 - RNA, 19 nt, Human
caggagagcuguuuucccu

SEQ ID NO: 623507 - RNA, 26 nt, Human
ccaacuuucuuucacagguccuccca

SEQ ID NO: 623508 - RNA, 23 nt, Human
ccacauuuuaaguaaauuuaaaa

SEQ ID NO: 623509 - RNA, 21 nt, Human
ccagaggcucccucuccuccc

SEQ ID NO: 623510 - RNA, 23 nt, Human
ccaguaggugacagcgccucccu

SEQ ID NO: 623511 - RNA, 23 nt, Human
ccauuccagucaaauccuuggug

SEQ ID NO: 623512 - RNA, 20 nt, Human
ccccaaggcacucagugacc

SEQ ID NO: 623513 - RNA, 22 nt, Human
ccccaaggcacucagugaccaa

SEQ ID NO: 623514 - RNA, 23 nt, Human
ccucccagugacugaccuggcuc

SEQ ID NO: 623515 - RNA, 19 nt, Human
ccuccccagcacacugccc

SEQ ID NO: 623516 - RNA, 21 nt, Human
ccucuguucuuuucaggccuu

SEQ ID NO: 623517 - RNA, 23 nt, Human
ccuucuguucucccuucacuagg

SEQ ID NO: 623518 - RNA, 21 nt, Human
ccuuggugaaaugcccaguuu

SEQ ID NO: 623519 - RNA, 26 nt, Human
cgggguguucccagcacaccaggccc

SEQ ID NO: 623520 - RNA, 23 nt, Human
cuccagaguaauaugcuuaaucc

SEQ ID NO: 623521 - RNA, 21 nt, Human
cucccuguuaccaggccucac

SEQ ID NO: 623522 - RNA, 21 nt, Human
cuccuccccagcacacugccc

SEQ ID NO: 623523 - RNA, 23 nt, Human
cucuccccagacagcucucuuca

SEQ ID NO: 623524 - RNA, 23 nt, Human
cugaauaacauuuuugacaugaa

SEQ ID NO: 623525 - RNA, 19 nt, Human
cugccuagcuggugcugug

SEQ ID NO: 623526 - RNA, 21 nt, Human
cugcucaggaccacacagcga

SEQ ID NO: 623527 - RNA, 23 nt, Human
gaaaaaaacugacaaacuccaaa

SEQ ID NO: 623528 - RNA, 23 nt, Human
gcacggcuggaauucaccuccuc

SEQ ID NO: 623529 - RNA, 23 nt, Human
ggagagcuguuuucccuuugaaa

SEQ ID NO: 623530 - RNA, 18 nt, Human
ggauuggcaaggccagua

SEQ ID NO: 623531 - RNA, 21 nt, Human
ggccucacucaaagcucuaac

SEQ ID NO: 623532 - RNA, 23 nt, Human
gguggagaagggaagaagggccg

SEQ ID NO: 623533 - RNA, 22 nt, Human
uaaaaucacacacacagaauca

SEQ ID NO: 623534 - RNA, 20 nt, Human
uaagaaaaaaacugacaaac

SEQ ID NO: 623535 - RNA, 23 nt, Human
uaaguaaauuuaaaauuaaugaa

SEQ ID NO: 623536 - RNA, 22 nt, Human
uaccaggccucacucaaagcuc

SEQ ID NO: 623537 - RNA, 23 nt, Human
uagcuggugcugugccgcuuccc

SEQ ID NO: 623538 - RNA, 20 nt, Human
ucaaaagacaccaaccauua

SEQ ID NO: 623539 - RNA, 21 nt, Human
ucaaagcucuaacauggccug

SEQ ID NO: 623540 - RNA, 23 nt, Human
ucacagguccucccagugacuga

SEQ ID NO: 623541 - RNA, 24 nt, Human
ucacuagguggagaagggaagaag

SEQ ID NO: 623542 - RNA, 20 nt, Human
uccaaauguuuaaauagaau

SEQ ID NO: 623543 - RNA, 19 nt, Human
uccagaagaaaggccaggu

SEQ ID NO: 623544 - RNA, 21 nt, Human
ucccagugacugaccuggcuc

SEQ ID NO: 623545 - RNA, 24 nt, Human
uccccaaagggcuuuaauuggcuc

SEQ ID NO: 623546 - RNA, 22 nt, Human
uccuccucuguucuuuucaggc

SEQ ID NO: 623547 - RNA, 22 nt, Human
uccucuguucuuuucaggccuu

SEQ ID NO: 623548 - RNA, 24 nt, Human
uccucuguucuuuucaggccuuua

SEQ ID NO: 623549 - RNA, 20 nt, Human
ugaaauaucaauaguuugcc

SEQ ID NO: 623550 - RNA, 24 nt, Human
ugaagcaaagacuuuaucauccau

SEQ ID NO: 623551 - RNA, 19 nt, Human
ugaaggcagaauggacuug

SEQ ID NO: 623552 - RNA, 26 nt, Human
ugacaaacuccaaauccauaaugaca

SEQ ID NO: 623553 - RNA, 24 nt, Human
ugacaugaaauucaucaaaugaag

SEQ ID NO: 623554 - RNA, 18 nt, Human
ugacaugagaacuuacac

SEQ ID NO: 623555 - RNA, 28 nt, Human
ugaccuggcucauucuccgaaagugggg

SEQ ID NO: 623556 - RNA, 18 nt, Human
ugagagaagcuuugugaa

SEQ ID NO: 623557 - RNA, 21 nt, Human
uggaauguuuugccagucccc

SEQ ID NO: 623558 - RNA, 21 nt, Human
uggaggaggcccagccagagg

SEQ ID NO: 623559 - RNA, 19 nt, Human
ugggaagagaggacucccc

SEQ ID NO: 623560 - RNA, 23 nt, Human
ugggaagagaggacuccccuucu

SEQ ID NO: 623561 - RNA, 18 nt, Human
uggggcgucucugccuag

SEQ ID NO: 623562 - RNA, 23 nt, Human
uggugcugugccgcuucccacag

SEQ ID NO: 623563 - RNA, 21 nt, Human
ugugggaagagaggacucccc

SEQ ID NO: 623564 - RNA, 20 nt, Human
uguguggacaagguaugagg

SEQ ID NO: 623565 - RNA, 19 nt, Human
uugcuugaaccauguucuc

SEQ ID NO: 623566 - RNA, 21 nt, Human
uuuuuuuuuuuuuuccccgcu

SEQ ID NO: 623567 - RNA, 21 nt, Human
aaccauccgcugcggccgucc

SEQ ID NO: 623568 - RNA, 24 nt, Human
aagaugccaaggcagccauccccg

SEQ ID NO: 623569 - RNA, 19 nt, Human
aagcggcuggcgacuuggg

SEQ ID NO: 623570 - RNA, 21 nt, Human
aauguagggauggaaaaggga

SEQ ID NO: 623571 - RNA, 24 nt, Human
acccugagguucuugucuccagcg

SEQ ID NO: 623572 - RNA, 22 nt, Human
accugcuggcuggcaccgcuuc

SEQ ID NO: 623573 - RNA, 22 nt, Human
acgagcaccagcuuaucccgcu

SEQ ID NO: 623574 - RNA, 21 nt, Human
acucugugccagcccccuugu

SEQ ID NO: 623575 - RNA, 23 nt, Human
agagccaaugagagcuugcgggg

SEQ ID NO: 623576 - RNA, 19 nt, Human
agagguguucaucgggcgg

SEQ ID NO: 623577 - RNA, 20 nt, Human
agcuccuugguuucucccuc

SEQ ID NO: 623578 - RNA, 22 nt, Human
aggaaguauggcgggccacccc

SEQ ID NO: 623579 - RNA, 24 nt, Human
aggagaggugggggcgcgcuuggc

SEQ ID NO: 623580 - RNA, 21 nt, Human
aggcccaggaggcuuagucca

SEQ ID NO: 623581 - RNA, 23 nt, Human
aggcggcgcuggaggcguggguc

SEQ ID NO: 623582 - RNA, 23 nt, Human
aggcuggggcgggggugcugguu

SEQ ID NO: 623583 - RNA, 19 nt, Human
agggguagggaagcuucca

SEQ ID NO: 623584 - RNA, 22 nt, Human
agguggugauuccugggcaucc

SEQ ID NO: 623585 - RNA, 23 nt, Human
agugaugccuagccccgccuucc

SEQ ID NO: 623586 - RNA, 20 nt, Human
aguggauaccuccacccccc

SEQ ID NO: 623587 - RNA, 20 nt, Human
auaccccccagcaaaggagg

SEQ ID NO: 623588 - RNA, 18 nt, Human
auggugaccugaugacca

SEQ ID NO: 623589 - RNA, 24 nt, Human
auuccaaccuuccuuucccucuca

SEQ ID NO: 623590 - RNA, 23 nt, Human
caaaaaggcccugguggaaggua

SEQ ID NO: 623591 - RNA, 20 nt, Human
caaccuuccuuucccucuca

SEQ ID NO: 623592 - RNA, 18 nt, Human
cagcagcagcuuuuuggc

SEQ ID NO: 623593 - RNA, 22 nt, Human
cagcccccuuguuagcgcaguc

SEQ ID NO: 623594 - RNA, 18 nt, Human
cagcggccucaucugggu

SEQ ID NO: 623595 - RNA, 24 nt, Human
cagcucaaaccgacgccucuuaaa

SEQ ID NO: 623596 - RNA, 19 nt, Human
cagcucgaggcgcggcgcg

SEQ ID NO: 623597 - RNA, 23 nt, Human
caggguacggguguaaacccauu

SEQ ID NO: 623598 - RNA, 20 nt, Human
caguggauaccuccaccccc

SEQ ID NO: 623599 - RNA, 22 nt, Human
ccagagcuccuugguuucuccc

SEQ ID NO: 623600 - RNA, 18 nt, Human
ccagcagaagacuauuga

SEQ ID NO: 623601 - RNA, 19 nt, Human
ccagcuggagagccaugca

SEQ ID NO: 623602 - RNA, 18 nt, Human
ccauggccaaaaaggccc

SEQ ID NO: 623603 - RNA, 22 nt, Human
cccacaggcugggugagcagcc

SEQ ID NO: 623604 - RNA, 22 nt, Human
cccagacugagguucugagagc

SEQ ID NO: 623605 - RNA, 20 nt, Human
cccagccugagaugguccca

SEQ ID NO: 623606 - RNA, 23 nt, Human
cccaguaccacaggagagguggg

SEQ ID NO: 623607 - RNA, 18 nt, Human
ccccagacugagguucug

SEQ ID NO: 623608 - RNA, 25 nt, Human
cccccagguacgguagucccagccc

SEQ ID NO: 623609 - RNA, 19 nt, Human
cccccgcgcgcuggguccg

SEQ ID NO: 623610 - RNA, 19 nt, Human
cccccgcgcgcuggguccg

SEQ ID NO: 623611 - RNA, 21 nt, Human
cccccgcgcgcuggguccgug

SEQ ID NO: 623612 - RNA, 19 nt, Human
cccgccccgucgagggagg

SEQ ID NO: 623613 - RNA, 23 nt, Human
cccgccccgucgagggagggggc

SEQ ID NO: 623614 - RNA, 19 nt, Human
cccgggcggcgcacgugca

SEQ ID NO: 623615 - RNA, 18 nt, Human
cccuccuuccgcuggucc

SEQ ID NO: 623616 - RNA, 22 nt, Human
cccugagguucuugucuccagc

SEQ ID NO: 623617 - RNA, 20 nt, Human
ccgagccuucacugucagaa

SEQ ID NO: 623618 - RNA, 25 nt, Human
ccgccgaaucugacccgcagcgcgc

SEQ ID NO: 623619 - RNA, 19 nt, Human
ccgggaugggcaugaggug

SEQ ID NO: 623620 - RNA, 18 nt, Human
ccuagccccgccuucccc

SEQ ID NO: 623621 - RNA, 21 nt, Human
ccuagccccgccuuccccagc

SEQ ID NO: 623622 - RNA, 23 nt, Human
ccuccaccccccugggaggcggg

SEQ ID NO: 623623 - RNA, 21 nt, Human
ccuccccaccaccaauugcca

SEQ ID NO: 623624 - RNA, 22 nt, Human
ccugaugaccagagcuccuugg

SEQ ID NO: 623625 - RNA, 19 nt, Human
ccugccgccgaaucugacc

SEQ ID NO: 623626 - RNA, 19 nt, Human
ccuucagcggccugaaccg

SEQ ID NO: 623627 - RNA, 19 nt, Human
ccuugcauacccucuuccc

SEQ ID NO: 623628 - RNA, 20 nt, Human
cgcugcagccgcuggguccc

SEQ ID NO: 623629 - RNA, 23 nt, Human
cgggcagaggaaguauggcgggc

SEQ ID NO: 623630 - RNA, 18 nt, Human
cgggcggcugccucagga

SEQ ID NO: 623631 - RNA, 24 nt, Human
cgugggccgccucuacgaguuccg

SEQ ID NO: 623632 - RNA, 22 nt, Human
cgugugccgcagcaccgagaag

SEQ ID NO: 623633 - RNA, 23 nt, Human
cuacucugugccagcccccuugu

SEQ ID NO: 623634 - RNA, 24 nt, Human
cucauccaccagcagaagacuauu

SEQ ID NO: 623635 - RNA, 19 nt, Human
cuccucgggaggcagcccc

SEQ ID NO: 623636 - RNA, 20 nt, Human
cuccugggcuacaaggaccc

SEQ ID NO: 623637 - RNA, 18 nt, Human
cugaaccgcggcuucgcc

SEQ ID NO: 623638 - RNA, 21 nt, Human
cugaugaugaccuucagcggc

SEQ ID NO: 623639 - RNA, 21 nt, Human
cugcagccgcugggucccggc

SEQ ID NO: 623640 - RNA, 18 nt, Human
cugcugcucgcgcugcag

SEQ ID NO: 623641 - RNA, 18 nt, Human
cuggguccgugggcucag

SEQ ID NO: 623642 - RNA, 22 nt, Human
cuguggucugcuggggcuggug

SEQ ID NO: 623643 - RNA, 19 nt, Human
cuugggagcuccuccucgg

SEQ ID NO: 623644 - RNA, 18 nt, Human
cuuuauacugagcauagc

SEQ ID NO: 623645 - RNA, 19 nt, Human
cuuuuuggcuggauccaga

SEQ ID NO: 623646 - RNA, 19 nt, Human
gaaaagacgaacacguccc

SEQ ID NO: 623647 - RNA, 22 nt, Human
gcacaaccauccgcugcggccg

SEQ ID NO: 623648 - RNA, 18 nt, Human
gcagccgcugggucccgg

SEQ ID NO: 623649 - RNA, 20 nt, Human
gcccccuuugggggaggggc

SEQ ID NO: 623650 - RNA, 21 nt, Human
gcccgcugcucgugugccgca

SEQ ID NO: 623651 - RNA, 20 nt, Human
gccuugagauggugaccuga

SEQ ID NO: 623652 - RNA, 20 nt, Human
gcgacuuugcagcuuucacc

SEQ ID NO: 623653 - RNA, 18 nt, Human
gcgcccgggcagaucgcu

SEQ ID NO: 623654 - RNA, 21 nt, Human
gcgcgcugcugcucgcgcugc

SEQ ID NO: 623655 - RNA, 19 nt, Human
gcggcgcuggaggcguggg

SEQ ID NO: 623656 - RNA, 25 nt, Human
gcugcacaaccauccgcugcggccg

SEQ ID NO: 623657 - RNA, 24 nt, Human
gcugcagccgcugggucccggcuu

SEQ ID NO: 623658 - RNA, 20 nt, Human
gcuggcuggcaccgcuucug

SEQ ID NO: 623659 - RNA, 27 nt, Human
gcuggggcgggggugcugguugacggc

SEQ ID NO: 623660 - RNA, 21 nt, Human
gcuggugaggacccgucucaa

SEQ ID NO: 623661 - RNA, 24 nt, Human
gcuuuuuggcuggauccagagcca

SEQ ID NO: 623662 - RNA, 21 nt, Human
ggaaaagacgaacacgucccu

SEQ ID NO: 623663 - RNA, 19 nt, Human
ggagaggugggggcgcgcu

SEQ ID NO: 623664 - RNA, 20 nt, Human
ggcaccgcuucugguaccag

SEQ ID NO: 623665 - RNA, 18 nt, Human
ggcauaggaccugcuggc

SEQ ID NO: 623666 - RNA, 22 nt, Human
ggccgggaugggcaugaggugg

SEQ ID NO: 623667 - RNA, 21 nt, Human
ggccuugagauggugaccuga

SEQ ID NO: 623668 - RNA, 19 nt, Human
ggcuugggagcuccuccuc

SEQ ID NO: 623669 - RNA, 20 nt, Human
gggaggaaguuauaaagagg

SEQ ID NO: 623670 - RNA, 22 nt, Human
gggaugggcaugagguggccaa

SEQ ID NO: 623671 - RNA, 23 nt, Human
gggcaccaugagccuuggaaaca

SEQ ID NO: 623672 - RNA, 21 nt, Human
gggcaugagguggccaaggaa

SEQ ID NO: 623673 - RNA, 18 nt, Human
gggccggcgagccccgcc

SEQ ID NO: 623674 - RNA, 22 nt, Human
gggcgggggugcugguuggggc

SEQ ID NO: 623675 - RNA, 21 nt, Human
ggggaggaaguuauaaagagg

SEQ ID NO: 623676 - RNA, 22 nt, Human
ggggaggaaguuauaaagaggg

SEQ ID NO: 623677 - RNA, 23 nt, Human
ggggaggaaguuauaaagagggu

SEQ ID NO: 623678 - RNA, 24 nt, Human
ggggcuggugaggacccgucucaa

SEQ ID NO: 623679 - RNA, 19 nt, Human
ggguagggaagcuuccaga

SEQ ID NO: 623680 - RNA, 21 nt, Human
gggucccggcuugcaggaggc

SEQ ID NO: 623681 - RNA, 21 nt, Human
gguacggguguaaacccauuu

SEQ ID NO: 623682 - RNA, 22 nt, Human
gguagucccagccccuccgccu

SEQ ID NO: 623683 - RNA, 18 nt, Human
guaaacuugugacccuga

SEQ ID NO: 623684 - RNA, 19 nt, Human
guacgguagucccagcccc

SEQ ID NO: 623685 - RNA, 24 nt, Human
gucagcagcagcuuuuuggcugga

SEQ ID NO: 623686 - RNA, 20 nt, Human
guccagucugugcuccuggg

SEQ ID NO: 623687 - RNA, 24 nt, Human
gucccggcuugcaggaggcgcggc

SEQ ID NO: 623688 - RNA, 26 nt, Human
gucccggcuugcaggaggcgcggcug

SEQ ID NO: 623689 - RNA, 18 nt, Human
guggcuccacguccaccc

SEQ ID NO: 623690 - RNA, 19 nt, Human
uaaaaugccucaaccacgg

SEQ ID NO: 623691 - RNA, 25 nt, Human
uaaggggcccuccuuccgcuggucc

SEQ ID NO: 623692 - RNA, 22 nt, Human
uacaacaccuuuuucauacaag

SEQ ID NO: 623693 - RNA, 19 nt, Human
uacucugugccagcccccu

SEQ ID NO: 623694 - RNA, 22 nt, Human
uaggaccugcuggcuggcaccg

SEQ ID NO: 623695 - RNA, 19 nt, Human
uauggcgggccacccccag

SEQ ID NO: 623696 - RNA, 21 nt, Human
uauggcgggccacccccaggu

SEQ ID NO: 623697 - RNA, 25 nt, Human
ucagugaugccuagccccgccuucc

SEQ ID NO: 623698 - RNA, 23 nt, Human
uccacaucuagaacauggauggc

SEQ ID NO: 623699 - RNA, 20 nt, Human
uccagucugugcuccugggc

SEQ ID NO: 623700 - RNA, 20 nt, Human
ucccagagacggauaccacc

SEQ ID NO: 623701 - RNA, 24 nt, Human
uccccagacugagguucugagagc

SEQ ID NO: 623702 - RNA, 23 nt, Human
ucccggcuugcaggaggcgcggc

SEQ ID NO: 623703 - RNA, 23 nt, Human
uccggcuacaccagcccccuuug

SEQ ID NO: 623704 - RNA, 19 nt, Human
uccugggcuacaaggaccc

SEQ ID NO: 623705 - RNA, 23 nt, Human
uccuugguuucucccucuugggg

SEQ ID NO: 623706 - RNA, 23 nt, Human
ucgccacgcugcacaaccauccg

SEQ ID NO: 623707 - RNA, 24 nt, Human
ucugcccaucuucagagaaggcca

SEQ ID NO: 623708 - RNA, 19 nt, Human
ucugugcuccugggcuaca

SEQ ID NO: 623709 - RNA, 18 nt, Human
ugaccagagcuccuuggu

SEQ ID NO: 623710 - RNA, 25 nt, Human
ugacgguggccuugcauacccucuu

SEQ ID NO: 623711 - RNA, 18 nt, Human
ugagauggugaccugauu

SEQ ID NO: 623712 - RNA, 23 nt, Human
ugagcauagcaaguguuugggca

SEQ ID NO: 623713 - RNA, 18 nt, Human
ugaugccuagccccgccu

SEQ ID NO: 623714 - RNA, 22 nt, Human
ugauuccugggcauccggugcc

SEQ ID NO: 623715 - RNA, 19 nt, Human
ugcauacccucuucccaca

SEQ ID NO: 623716 - RNA, 18 nt, Human
ugccaaagguccaauaaa

SEQ ID NO: 623717 - RNA, 18 nt, Human
ugccaaggcagccauccc

SEQ ID NO: 623718 - RNA, 19 nt, Human
ugccauggccaaaaaggcc

SEQ ID NO: 623719 - RNA, 21 nt, Human
ugccucaaccacggagucugc

SEQ ID NO: 623720 - RNA, 19 nt, Human
ugccucaggacguguacga

SEQ ID NO: 623721 - RNA, 22 nt, Human
ugcugacccuagauggccggga

SEQ ID NO: 623722 - RNA, 23 nt, Human
ugcugcccagccccggaccggcg

SEQ ID NO: 623723 - RNA, 23 nt, Human
ugcugguuggggccaaacgcguu

SEQ ID NO: 623724 - RNA, 19 nt, Human
uggauaccuccaccccccu

SEQ ID NO: 623725 - RNA, 19 nt, Human
uggcaaaaacggccaggua

SEQ ID NO: 623726 - RNA, 26 nt, Human
uggcaagaguaggaaaagacgaacac

SEQ ID NO: 623727 - RNA, 19 nt, Human
uggccaaggaugcuguguc

SEQ ID NO: 623728 - RNA, 23 nt, Human
uggccgggaugggcaugaggugg

SEQ ID NO: 623729 - RNA, 24 nt, Human
uggcugucagcagcagcuuuuugg

SEQ ID NO: 623730 - RNA, 20 nt, Human
uggggaggaaguuauaaaga

SEQ ID NO: 623731 - RNA, 23 nt, Human
uggggaggaaguuauaaagaggg

SEQ ID NO: 623732 - RNA, 23 nt, Human
ugugcugacccuagauggccggg

SEQ ID NO: 623733 - RNA, 21 nt, Human
uguggucugcuggggcuggug

SEQ ID NO: 623734 - RNA, 20 nt, Human
uucacugucagaaacugcga

SEQ ID NO: 623735 - RNA, 21 nt, Human
uuccugggcauccggugcccu

SEQ ID NO: 623736 - RNA, 19 nt, Human
uugcauacccucuucccac

SEQ ID NO: 623737 - RNA, 22 nt, Human
uuggagacaguaaugagcuucu

SEQ ID NO: 623738 - RNA, 19 nt, Human
uuucucccucuuggcaaga

SEQ ID NO: 623739 - RNA, 24 nt, Human
aaagugcagggauuacaggcauga

SEQ ID NO: 623740 - RNA, 25 nt, Human
aacuccucgccuuaagcaacccucc

SEQ ID NO: 623741 - RNA, 22 nt, Human
accuuagccucccaaagugcag

SEQ ID NO: 623742 - RNA, 25 nt, Human
acuauguugcccaggcuggucucca

SEQ ID NO: 623743 - RNA, 19 nt, Human
agacgccgaggccagaagc

SEQ ID NO: 623744 - RNA, 21 nt, Human
agacgccgaggccagaagccu

SEQ ID NO: 623745 - RNA, 22 nt, Human
agccuuguccaaggcagggcau

SEQ ID NO: 623746 - RNA, 23 nt, Human
agggauuacaggcaugagccacc

SEQ ID NO: 623747 - RNA, 24 nt, Human
agggauuacaggcaugagccacca

SEQ ID NO: 623748 - RNA, 19 nt, Human
auggggucucacuauguug

SEQ ID NO: 623749 - RNA, 22 nt, Human
auguugcccaggcuggucucca

SEQ ID NO: 623750 - RNA, 24 nt, Human
caaagugcagggauuacaggcaug

SEQ ID NO: 623751 - RNA, 19 nt, Human
caaauggcucccugcagca

SEQ ID NO: 623752 - RNA, 22 nt, Human
caacccucccaccuuagccucc

SEQ ID NO: 623753 - RNA, 19 nt, Human
cacuauguugcccaggcug

SEQ ID NO: 623754 - RNA, 24 nt, Human
cacuauguugcccaggcuggucuc

SEQ ID NO: 623755 - RNA, 24 nt, Human
cagcagccccugcaacacuguucu

SEQ ID NO: 623756 - RNA, 20 nt, Human
cagcccaaguugcagaacaa

SEQ ID NO: 623757 - RNA, 18 nt, Human
cagggcauugaggcagag

SEQ ID NO: 623758 - RNA, 19 nt, Human
caugagccaccacucccag

SEQ ID NO: 623759 - RNA, 24 nt, Human
ccaaagugcagggauuacaggcau

SEQ ID NO: 623760 - RNA, 20 nt, Human
ccaggcuggucuccaacucc

SEQ ID NO: 623761 - RNA, 21 nt, Human
cccuacguggccauccgaggc

SEQ ID NO: 623762 - RNA, 19 nt, Human
ccucccaaagugcagggau

SEQ ID NO: 623763 - RNA, 20 nt, Human
ccucccaaagugcagggauu

SEQ ID NO: 623764 - RNA, 26 nt, Human
ccucccaccuuagccucccaaagugc

SEQ ID NO: 623765 - RNA, 23 nt, Human
ccugcagcagccccugcaacacc

SEQ ID NO: 623766 - RNA, 24 nt, Human
cuuaagcaacccucccaccuuagc

SEQ ID NO: 623767 - RNA, 20 nt, Human
gacgccgaggccagaagccu

SEQ ID NO: 623768 - RNA, 18 nt, Human
gauuacaggcaugagcca

SEQ ID NO: 623769 - RNA, 21 nt, Human
gauuacaggcaugagccacca

SEQ ID NO: 623770 - RNA, 22 nt, Human
gauuacaggcaugagccaccac

SEQ ID NO: 623771 - RNA, 23 nt, Human
gcaacccucccaccuuagccucc

SEQ ID NO: 623772 - RNA, 19 nt, Human
ggauuacaggcaugagcca

SEQ ID NO: 623773 - RNA, 21 nt, Human
gggauuacaggcaugagccac

SEQ ID NO: 623774 - RNA, 23 nt, Human
gggauuacaggcaugagccacca

SEQ ID NO: 623775 - RNA, 21 nt, Human
gggcauugaggcagagggcuc

SEQ ID NO: 623776 - RNA, 20 nt, Human
ggggacugugaucaucuggg

SEQ ID NO: 623777 - RNA, 18 nt, Human
gggggucuggcugucucu

SEQ ID NO: 623778 - RNA, 22 nt, Human
ggggucucacuauguugcccag

SEQ ID NO: 623779 - RNA, 18 nt, Human
ggggucuggcugucucug

SEQ ID NO: 623780 - RNA, 18 nt, Human
gggugggaggacugacug

SEQ ID NO: 623781 - RNA, 27 nt, Human
uaagcaacccucccaccuuagccuccc

SEQ ID NO: 623782 - RNA, 27 nt, Human
uaagcaacccucccaccuuagccuccc

SEQ ID NO: 623783 - RNA, 24 nt, Human
uacaggcaugagccaccacuccca

SEQ ID NO: 623784 - RNA, 22 nt, Human
uagagauggggucucacuaugu

SEQ ID NO: 623785 - RNA, 19 nt, Human
uauguugcccaggcugguc

SEQ ID NO: 623786 - RNA, 24 nt, Human
uauguugcccaggcuggucuccaa

SEQ ID NO: 623787 - RNA, 18 nt, Human
ucacucgggugggaggac

SEQ ID NO: 623788 - RNA, 19 nt, Human
uccaaggcagggcauugag

SEQ ID NO: 623789 - RNA, 24 nt, Human
ucccaaagugcagggauuacaggc

SEQ ID NO: 623790 - RNA, 23 nt, Human
uccccgggggucuggcugucucu

SEQ ID NO: 623791 - RNA, 21 nt, Human
ucccugcagcagccccugcaa

SEQ ID NO: 623792 - RNA, 24 nt, Human
ucccugcagcagccccugcaacac

SEQ ID NO: 623793 - RNA, 18 nt, Human
uccgaggccuccgggggg

SEQ ID NO: 623794 - RNA, 21 nt, Human
ucgggugggaggacugacugu

SEQ ID NO: 623795 - RNA, 19 nt, Human
ucucacuauguugcccagg

SEQ ID NO: 623796 - RNA, 23 nt, Human
ucucacuauguugcccaggcugg

SEQ ID NO: 623797 - RNA, 24 nt, Human
ucucacuauguugcccaggcuggu

SEQ ID NO: 623798 - RNA, 26 nt, Human
ucucacuauguugcccaggcuggucu

SEQ ID NO: 623799 - RNA, 27 nt, Human
ucucacuauguugcccaggcuggucuc

SEQ ID NO: 623800 - RNA, 21 nt, Human
ugacagacgccgaggccagaa

SEQ ID NO: 623801 - RNA, 20 nt, Human
ugagaggcuggguccccggg

SEQ ID NO: 623802 - RNA, 21 nt, Human
ugagccaccacucccagccca

SEQ ID NO: 623803 - RNA, 19 nt, Human
ugagccgacaguuguccgg

SEQ ID NO: 623804 - RNA, 24 nt, Human
ugagccgacaguuguccggcacug

SEQ ID NO: 623805 - RNA, 21 nt, Human
ugaggcagagggcucugagcc

SEQ ID NO: 623806 - RNA, 24 nt, Human
ugcccaggcuggucuccaacuccu

SEQ ID NO: 623807 - RNA, 24 nt, Human
uggggucucacuauguugcccagg

SEQ ID NO: 623808 - RNA, 19 nt, Human
uggguccccgggggucugg

SEQ ID NO: 623809 - RNA, 24 nt, Human
uguagagauggggucucacuaugu

SEQ ID NO: 623810 - RNA, 25 nt, Human
uuaagcaacccucccaccuuagccu

SEQ ID NO: 623811 - RNA, 23 nt, Human
uuguagagauggggucucacuau

SEQ ID NO: 623812 - RNA, 24 nt, Human
uuguagagauggggucucacuaug

SEQ ID NO: 623813 - RNA, 28 nt, Human
aaaaaaaaaaaaaaaagcagaaucagag

SEQ ID NO: 623814 - RNA, 23 nt, Human
aaaaaaaaaaagcagaaucagag

SEQ ID NO: 623815 - RNA, 24 nt, Human
aaaaaaaagcagaaucagagcuga

SEQ ID NO: 623816 - RNA, 22 nt, Human
aaaaaagcagaaucagagcuga

SEQ ID NO: 623817 - RNA, 22 nt, Human
aaaccacuuucaaccagaucuc

SEQ ID NO: 623818 - RNA, 21 nt, Human
aaagccaaaugccuacaucua

SEQ ID NO: 623819 - RNA, 22 nt, Human
aagagcacccucauguuuacca

SEQ ID NO: 623820 - RNA, 19 nt, Human
acagggaauaaacauaagc

SEQ ID NO: 623821 - RNA, 19 nt, Human
acuccgcugacagggaaua

SEQ ID NO: 623822 - RNA, 20 nt, Human
acuguggaaacccucagguc

SEQ ID NO: 623823 - RNA, 23 nt, Human
agcggcgcgaccucuacagcccc

SEQ ID NO: 623824 - RNA, 23 nt, Human
aggcagcggcaccgagugagaga

SEQ ID NO: 623825 - RNA, 21 nt, Human
agguccuuggcgugggcaggc

SEQ ID NO: 623826 - RNA, 21 nt, Human
caaaggaaaaaaaaaaaaaaa

SEQ ID NO: 623827 - RNA, 20 nt, Human
cacagagcucaacccccacg

SEQ ID NO: 623828 - RNA, 19 nt, Human
cacuguggaaacccucagg

SEQ ID NO: 623829 - RNA, 22 nt, Human
cagaucucaauucuccagcuau

SEQ ID NO: 623830 - RNA, 27 nt, Human
cagcaauaucucgcaauuccucaggau

SEQ ID NO: 623831 - RNA, 22 nt, Human
cauguuuaccauuuucugccug

SEQ ID NO: 623832 - RNA, 26 nt, Human
ccccucagcaauaucucgcaauuccu

SEQ ID NO: 623833 - RNA, 24 nt, Human
cccucagcaauaucucgcaauucc

SEQ ID NO: 623834 - RNA, 20 nt, Human
cgugggcaggccccagcagg

SEQ ID NO: 623835 - RNA, 20 nt, Human
cuacagccccuaggcagcgg

SEQ ID NO: 623836 - RNA, 24 nt, Human
cucaugauacacuguagacccauu

SEQ ID NO: 623837 - RNA, 22 nt, Human
cuccacuccgcugacagggaau

SEQ ID NO: 623838 - RNA, 22 nt, Human
cuccccuaccugagagcccuag

SEQ ID NO: 623839 - RNA, 18 nt, Human
gauguucuggcuggggaa

SEQ ID NO: 623840 - RNA, 19 nt, Human
gcccaaauucucccaaucu

SEQ ID NO: 623841 - RNA, 22 nt, Human
gcgcgaccucuacagccccuag

SEQ ID NO: 623842 - RNA, 24 nt, Human
gcuccccuaccugagagcccuagc

SEQ ID NO: 623843 - RNA, 22 nt, Human
ggcaggccccagcaggagcggc

SEQ ID NO: 623844 - RNA, 19 nt, Human
gguacacaaaggaaaaaaa

SEQ ID NO: 623845 - RNA, 24 nt, Human
guccuuggcgugggcaggccccag

SEQ ID NO: 623846 - RNA, 21 nt, Human
uaaacauaagcaauuuagucc

SEQ ID NO: 623847 - RNA, 21 nt, Human
uaacugcugagaaucccaagu

SEQ ID NO: 623848 - RNA, 23 nt, Human
uacccgggcucaagugagaaaac

SEQ ID NO: 623849 - RNA, 18 nt, Human
uacugcacagagcucaac

SEQ ID NO: 623850 - RNA, 24 nt, Human
ucacgcgcugcccaaauucuccca

SEQ ID NO: 623851 - RNA, 25 nt, Human
ucacgcgcugcccaaauucucccuc

SEQ ID NO: 623852 - RNA, 18 nt, Human
ucccaagugagggccaac

SEQ ID NO: 623853 - RNA, 19 nt, Human
ucccacuguggaaacccuc

SEQ ID NO: 623854 - RNA, 21 nt, Human
uccccuaccugagagcccuag

SEQ ID NO: 623855 - RNA, 22 nt, Human
ugagaaucccaagugagggcca

SEQ ID NO: 623856 - RNA, 21 nt, Human
ugaguuccccuuuaaaagcca

SEQ ID NO: 623857 - RNA, 18 nt, Human
uggguacacaaaggaaaa

SEQ ID NO: 623858 - RNA, 18 nt, Human
uuccaacguggcacugua

SEQ ID NO: 623859 - RNA, 18 nt, Human
uuccuguagcguuuucca

SEQ ID NO: 623860 - RNA, 24 nt, Human
aaaaaaaguagagaaaggagccgg

SEQ ID NO: 623861 - RNA, 22 nt, Human
aaaaacagcuggaugcaggagc

SEQ ID NO: 623862 - RNA, 19 nt, Human
aaggacuguacaagcagag

SEQ ID NO: 623863 - RNA, 18 nt, Human
aaguagagaaaggagcug

SEQ ID NO: 623864 - RNA, 20 nt, Human
accuugaaugaugccuagga

SEQ ID NO: 623865 - RNA, 22 nt, Human
agaaacacugugauuagaccac

SEQ ID NO: 623866 - RNA, 18 nt, Human
agaggagcucaaugucgc

SEQ ID NO: 623867 - RNA, 18 nt, Human
agccuuuguccuuguccu

SEQ ID NO: 623868 - RNA, 18 nt, Human
agcuggaugcaggagccc

SEQ ID NO: 623869 - RNA, 21 nt, Human
agugugggagaaaggagcuag

SEQ ID NO: 623870 - RNA, 20 nt, Human
augacguagcagagcugcug

SEQ ID NO: 623871 - RNA, 22 nt, Human
caacuacccccuccccggugcc

SEQ ID NO: 623872 - RNA, 19 nt, Human
cacgaugacguagcagagc

SEQ ID NO: 623873 - RNA, 22 nt, Human
cagggcagaauaaucauccauc

SEQ ID NO: 623874 - RNA, 21 nt, Human
caguguuuggggcacuguguu

SEQ ID NO: 623875 - RNA, 18 nt, Human
cauccaucuacaggucuc

SEQ ID NO: 623876 - RNA, 19 nt, Human
ccccuggguccuacuccau

SEQ ID NO: 623877 - RNA, 23 nt, Human
ccuggcccagugcuaccagggug

SEQ ID NO: 623878 - RNA, 18 nt, Human
cgaugacguagcagagcu

SEQ ID NO: 623879 - RNA, 19 nt, Human
cuaccaggguggugacagc

SEQ ID NO: 623880 - RNA, 19 nt, Human
cuggcccagugcuaccagg

SEQ ID NO: 623881 - RNA, 23 nt, Human
cuuuauucacccuauggcuccca

SEQ ID NO: 623882 - RNA, 21 nt, Human
gaaaagcauucuuccucugga

SEQ ID NO: 623883 - RNA, 19 nt, Human
gaagccuuggccagagacc

SEQ ID NO: 623884 - RNA, 18 nt, Human
gacccuggaagccuuggc

SEQ ID NO: 623885 - RNA, 22 nt, Human
gacuguacaagcagaguacaac

SEQ ID NO: 623886 - RNA, 18 nt, Human
gacuugcggcgcugggcc

SEQ ID NO: 623887 - RNA, 18 nt, Human
gagccccuggguccuacu

SEQ ID NO: 623888 - RNA, 18 nt, Human
gcaauaaaaacagcugga

SEQ ID NO: 623889 - RNA, 21 nt, Human
gcuggaugcaggagcccagug

SEQ ID NO: 623890 - RNA, 29 nt, Human
ggcgcugggccagcuucauggaugcuggg

SEQ ID NO: 623891 - RNA, 23 nt, Human
uaaggggacaauacaccaaauuu

SEQ ID NO: 623892 - RNA, 21 nt, Human
uaccaggguggugacagccuc

SEQ ID NO: 623893 - RNA, 18 nt, Human
ucaccaaacucgacuugc

SEQ ID NO: 623894 - RNA, 23 nt, Human
ucccugcaccagacccuggaagc

SEQ ID NO: 623895 - RNA, 18 nt, Human
ucuguuuccucucccucc

SEQ ID NO: 623896 - RNA, 21 nt, Human
ugaaugaugccuaggauggca

SEQ ID NO: 623897 - RNA, 18 nt, Human
ugacagccucguggacua

SEQ ID NO: 623898 - RNA, 18 nt, Human
ugcaccagacccuggaag

SEQ ID NO: 623899 - RNA, 20 nt, Human
ugcuauuuacagaggacauc

SEQ ID NO: 623900 - RNA, 19 nt, Human
uggcccagugcuaccaggg

SEQ ID NO: 623901 - RNA, 24 nt, Human
uggcucccaagaaaagcauucuuu

SEQ ID NO: 623902 - RNA, 23 nt, Human
uguacaagcagaguacaacuacc

SEQ ID NO: 623903 - RNA, 19 nt, Human
uguccuuguccuggccucc

SEQ ID NO: 623904 - RNA, 20 nt, Human
ugugggagaaaggagcuagu

SEQ ID NO: 623905 - RNA, 20 nt, Human
uucacccuauggcucccaaa

SEQ ID NO: 623906 - RNA, 19 nt, Human
uuuguccuuguccuggccu

SEQ ID NO: 623907 - RNA, 22 nt, Human
uuuuuuuuuuuccacaguuaaa

SEQ ID NO: 623908 - RNA, 24 nt, Human
uuuuuuuuuuuuuuccacaguuaa

SEQ ID NO: 623909 - RNA, 20 nt, Human
uuuuuuuuuuuuuuuuccac

SEQ ID NO: 623910 - RNA, 24 nt, Human
uuuuuuuuuuuuuuuuuuccacag

SEQ ID NO: 623911 - RNA, 25 nt, Human
aagcuccccccacuugcaacccacc

SEQ ID NO: 623912 - RNA, 22 nt, Human
acuuaagccacucuccaacccu

SEQ ID NO: 623913 - RNA, 21 nt, Human
caaaaccccaaagggagcaga

SEQ ID NO: 623914 - RNA, 20 nt, Human
caaacagguggcacuguugc

SEQ ID NO: 623915 - RNA, 19 nt, Human
caaacaucucaggucaaaa

SEQ ID NO: 623916 - RNA, 20 nt, Human
cagagggcccucaugguuca

SEQ ID NO: 623917 - RNA, 18 nt, Human
cagcugcucuguggccug

SEQ ID NO: 623918 - RNA, 24 nt, Human
cagcuuagggaaugcccaucaccu

SEQ ID NO: 623919 - RNA, 23 nt, Human
caggucaaaaccccaaagggagc

SEQ ID NO: 623920 - RNA, 24 nt, Human
ccacuuaagccacucuccaacccu

SEQ ID NO: 623921 - RNA, 23 nt, Human
cccccacuugcaacccaccaccc

SEQ ID NO: 623922 - RNA, 24 nt, Human
cccccacuugcaacccaccacccc

SEQ ID NO: 623923 - RNA, 19 nt, Human
ccccccacuugcaacccac

SEQ ID NO: 623924 - RNA, 19 nt, Human
ccugcagcugcucuguggc

SEQ ID NO: 623925 - RNA, 20 nt, Human
ccugcagcugcucuguggcc

SEQ ID NO: 623926 - RNA, 24 nt, Human
cgagcaaucucccuuuuacuuccu

SEQ ID NO: 623927 - RNA, 21 nt, Human
cgcuccgcucuccucucugca

SEQ ID NO: 623928 - RNA, 21 nt, Human
cuguuggcaaagcucccccca

SEQ ID NO: 623929 - RNA, 20 nt, Human
gaagaugggagggaggaagc

SEQ ID NO: 623930 - RNA, 22 nt, Human
gcaaucucccuuuuacuuccuc

SEQ ID NO: 623931 - RNA, 18 nt, Human
gcacagcccgggugggaa

SEQ ID NO: 623932 - RNA, 18 nt, Human
gccugggcacagcccggg

SEQ ID NO: 623933 - RNA, 21 nt, Human
gggagggaggaagcgggaggg

SEQ ID NO: 623934 - RNA, 22 nt, Human
gggcaauguagacuggcuuggg

SEQ ID NO: 623935 - RNA, 21 nt, Human
guggguccucucccaaggccu

SEQ ID NO: 623936 - RNA, 18 nt, Human
uacaggaggcuguguggg

SEQ ID NO: 623937 - RNA, 19 nt, Human
ucugccuccucccuuuuuc

SEQ ID NO: 623938 - RNA, 21 nt, Human
ucuguggccugggcacagccc

SEQ ID NO: 623939 - RNA, 27 nt, Human
ucuguggccugggcacagccggggucc

SEQ ID NO: 623940 - RNA, 21 nt, Human
ugcucuguggccugggcacag

SEQ ID NO: 623941 - RNA, 18 nt, Human
uggcacuguugccaccua

SEQ ID NO: 623942 - RNA, 24 nt, Human
uguuugggcaauguagacuggcuu

SEQ ID NO: 623943 - RNA, 18 nt, Human
uugcucagcggcagcucc

SEQ ID NO: 623944 - RNA, 18 nt, Human
uuuuuuuuuuuuuuuccg

SEQ ID NO: 623945 - RNA, 21 nt, Human
uuuuuuuuuuuuuuuuuccga

SEQ ID NO: 623946 - RNA, 20 nt, Human
aaacacuuuuguuguuggcu

SEQ ID NO: 623947 - RNA, 23 nt, Human
aaagcaggugaacauauggcccc

SEQ ID NO: 623948 - RNA, 21 nt, Human
aagaaagaaagaaagaaagaa

SEQ ID NO: 623949 - RNA, 21 nt, Human
aagaaagaaagaaagaaagaa

SEQ ID NO: 623950 - RNA, 21 nt, Human
aagaaagaaagaaagaaagaa

SEQ ID NO: 623951 - RNA, 21 nt, Human
aagaaagaaagaaagaaagaa

SEQ ID NO: 623952 - RNA, 21 nt, Human
aagaaagaaagaaagaaagaa

SEQ ID NO: 623953 - RNA, 21 nt, Human
aagaaagaaagaaagaaagaa

SEQ ID NO: 623954 - RNA, 21 nt, Human
aagaaagaaagaaagaaagaa

SEQ ID NO: 623955 - RNA, 21 nt, Human
aagaaagaaagaaagaaagaa

SEQ ID NO: 623956 - RNA, 21 nt, Human
aagaaagaaagaaagaaagaa

SEQ ID NO: 623957 - RNA, 21 nt, Human
aagaaagaaagaaagaaagaa

SEQ ID NO: 623958 - RNA, 23 nt, Human
aagaaagaaagaaagcaagaaag

SEQ ID NO: 623959 - RNA, 20 nt, Human
aagaaagaaagcaagaaaga

SEQ ID NO: 623960 - RNA, 20 nt, Human
aagaaagaaagcaagaaaga

SEQ ID NO: 623961 - RNA, 20 nt, Human
aagaaagaaagcaagaaaga

SEQ ID NO: 623962 - RNA, 20 nt, Human
aagaaagaaagcaagaaaga

SEQ ID NO: 623963 - RNA, 20 nt, Human
aagaaggaagaggagguggg

SEQ ID NO: 623964 - RNA, 23 nt, Human
aagaggaggugggcagaucagaa

SEQ ID NO: 623965 - RNA, 22 nt, Human
aagcaagaaagaaagaaagaaa

SEQ ID NO: 623966 - RNA, 24 nt, Human
aagcaagaaagaaagaaagcaaga

SEQ ID NO: 623967 - RNA, 26 nt, Human
aagcaagaaagaaagaaaggggaccc

SEQ ID NO: 623968 - RNA, 19 nt, Human
aagcaagaaagaaagcaag

SEQ ID NO: 623969 - RNA, 19 nt, Human
aagcaagaaagaaagcaag

SEQ ID NO: 623970 - RNA, 19 nt, Human
acacuuuuguuguuggcua

SEQ ID NO: 623971 - RNA, 21 nt, Human
accagaccucugggugacccc

SEQ ID NO: 623972 - RNA, 22 nt, Human
accccguucccaaacuaucuag

SEQ ID NO: 623973 - RNA, 20 nt, Human
acucugugcccaaacuagca

SEQ ID NO: 623974 - RNA, 20 nt, Human
acucugugcccaaacuagca

SEQ ID NO: 623975 - RNA, 26 nt, Human
agaaagcaagaaagaaagaaagcaag

SEQ ID NO: 623976 - RNA, 22 nt, Human
agaaagcaagaaagaaagcaag

SEQ ID NO: 623977 - RNA, 22 nt, Human
agaaagcaagaaagaaagcaag

SEQ ID NO: 623978 - RNA, 19 nt, Human
agaagaaagaaagcaagaa

SEQ ID NO: 623979 - RNA, 19 nt, Human
agaccucugggugaccccu

SEQ ID NO: 623980 - RNA, 21 nt, Human
agagaaagcccaagacuugga

SEQ ID NO: 623981 - RNA, 20 nt, Human
agagagaagaaagaaagcaa

SEQ ID NO: 623982 - RNA, 19 nt, Human
agagcaagaugaaaccuga

SEQ ID NO: 623983 - RNA, 20 nt, Human
agaucagaaucucucuuccg

SEQ ID NO: 623984 - RNA, 23 nt, Human
agcaagaaagaaagcaagaaaga

SEQ ID NO: 623985 - RNA, 23 nt, Human
agcaagaaagaaagcaagaaaga

SEQ ID NO: 623986 - RNA, 23 nt, Human
agcacuauuuaaaaaaaaaaaaa

SEQ ID NO: 623987 - RNA, 18 nt, Human
agcuaugucacacagugc

SEQ ID NO: 623988 - RNA, 23 nt, Human
agcuguguccccagaugcaggga

SEQ ID NO: 623989 - RNA, 23 nt, Human
aggaaggugaacgcugaagaaaa

SEQ ID NO: 623990 - RNA, 20 nt, Human
aggacacagagcuaccaggg

SEQ ID NO: 623991 - RNA, 18 nt, Human
aggaggugggcagaucag

SEQ ID NO: 623992 - RNA, 23 nt, Human
aguggcucaugccuguaauccca

SEQ ID NO: 623993 - RNA, 24 nt, Human
aguggcucaugccuguaaucccag

SEQ ID NO: 623994 - RNA, 19 nt, Human
augccuguaaucccagcca

SEQ ID NO: 623995 - RNA, 20 nt, Human
caaaagaggccacagcuucc

SEQ ID NO: 623996 - RNA, 23 nt, Human
caagaaagaaagaaagaaagaaa

SEQ ID NO: 623997 - RNA, 22 nt, Human
caaggaaggugaacgcugaaga

SEQ ID NO: 623998 - RNA, 20 nt, Human
cacagaaacccaucaacccc

SEQ ID NO: 623999 - RNA, 23 nt, Human
caccagaccaagauucucccugg

SEQ ID NO: 624000 - RNA, 28 nt, Human
cacugccaggcgcccacugcaagucacc

SEQ ID NO: 624001 - RNA, 18 nt, Human
cagagaaagcccaagacu

SEQ ID NO: 624002 - RNA, 23 nt, Human
cagaucggauccccaagcugaag

SEQ ID NO: 624003 - RNA, 24 nt, Human
cagcaaaaaaaaagcuggcaugga

SEQ ID NO: 624004 - RNA, 18 nt, Human
cagcaggaugaggucuua

SEQ ID NO: 624005 - RNA, 22 nt, Human
cagcuguguccccagaugcagg

SEQ ID NO: 624006 - RNA, 24 nt, Human
cagcuguuuuaagaaagaacuggg

SEQ ID NO: 624007 - RNA, 23 nt, Human
caggcgcccacugcaagucaccc

SEQ ID NO: 624008 - RNA, 20 nt, Human
cagugcuuuaaacacagagg

SEQ ID NO: 624009 - RNA, 21 nt, Human
caguucaggccuggcacaccc

SEQ ID NO: 624010 - RNA, 21 nt, Human
caugccuguaaucccagccaa

SEQ ID NO: 624011 - RNA, 18 nt, Human
ccacacccacugccaggc

SEQ ID NO: 624012 - RNA, 18 nt, Human
ccagggguguggaggggg

SEQ ID NO: 624013 - RNA, 23 nt, Human
cccacagaccagaccuuugagga

SEQ ID NO: 624014 - RNA, 23 nt, Human
cccacauucaaaagaggccacaa

SEQ ID NO: 624015 - RNA, 19 nt, Human
ccccagaaagggccaggcu

SEQ ID NO: 624016 - RNA, 21 nt, Human
cccccuuccccauuuuguccc

SEQ ID NO: 624017 - RNA, 18 nt, Human
ccccugagucuucaguug

SEQ ID NO: 624018 - RNA, 27 nt, Human
cccgccagcauccaccuuccccuccaa

SEQ ID NO: 624019 - RNA, 23 nt, Human
cccguucccaaacuaucuagaaa

SEQ ID NO: 624020 - RNA, 18 nt, Human
cccuccagagaaagccca

SEQ ID NO: 624021 - RNA, 18 nt, Human
cccugggcaucuggaccu

SEQ ID NO: 624022 - RNA, 19 nt, Human
cccuucacagaagcugggg

SEQ ID NO: 624023 - RNA, 21 nt, Human
ccucagaggcccacagaccag

SEQ ID NO: 624024 - RNA, 19 nt, Human
ccucccaggcuggccuccc

SEQ ID NO: 624025 - RNA, 22 nt, Human
ccucugggugaccccugagucu

SEQ ID NO: 624026 - RNA, 22 nt, Human
ccugcauuuuaaccaaagggaa

SEQ ID NO: 624027 - RNA, 18 nt, Human
ccuggccacaccccagag

SEQ ID NO: 624028 - RNA, 19 nt, Human
ccuggccacaccccagagg

SEQ ID NO: 624029 - RNA, 19 nt, Human
ccugucuuggcuagaccug

SEQ ID NO: 624030 - RNA, 23 nt, Human
cggauccccaagcugaagagcuu

SEQ ID NO: 624031 - RNA, 22 nt, Human
cggcagcuguguccccagaugc

SEQ ID NO: 624032 - RNA, 19 nt, Human
cucaugccuguaaucccag

SEQ ID NO: 624033 - RNA, 27 nt, Human
cucauuuccaccugucaguuacagucc

SEQ ID NO: 624034 - RNA, 23 nt, Human
cucucuuccagaucggaucccca

SEQ ID NO: 624035 - RNA, 19 nt, Human
cugccaggcgcccacugca

SEQ ID NO: 624036 - RNA, 24 nt, Human
cugggugaccccugagucuucagu

SEQ ID NO: 624037 - RNA, 24 nt, Human
gaccuguuuucuccucagaggccc

SEQ ID NO: 624038 - RNA, 22 nt, Human
gagaagaaggaagaggaggugg

SEQ ID NO: 624039 - RNA, 24 nt, Human
gaguggggguggggggaaaacacu

SEQ ID NO: 624040 - RNA, 22 nt, Human
gcaaaaaaaaagcuggcaugga

SEQ ID NO: 624041 - RNA, 19 nt, Human
gcaagucacccgccagcau

SEQ ID NO: 624042 - RNA, 20 nt, Human
gccccagaaagggccaggcu

SEQ ID NO: 624043 - RNA, 18 nt, Human
gcuggccucccuggucac

SEQ ID NO: 624044 - RNA, 19 nt, Human
gcugggugcaguggcucau

SEQ ID NO: 624045 - RNA, 19 nt, Human
ggaaccacugccagcaucg

SEQ ID NO: 624046 - RNA, 19 nt, Human
ggccccagaaagggccagg

SEQ ID NO: 624047 - RNA, 21 nt, Human
ggcgcccacugcaagucaccc

SEQ ID NO: 624048 - RNA, 19 nt, Human
ggcuaaaaagccugcauuu

SEQ ID NO: 624049 - RNA, 19 nt, Human
ggcugggugcaguggcuca

SEQ ID NO: 624050 - RNA, 23 nt, Human
ggcugggugcaguggcucaugcc

SEQ ID NO: 624051 - RNA, 21 nt, Human
gggggcauuuccagcaaaaaa

SEQ ID NO: 624052 - RNA, 24 nt, Human
gggugcaguggcucaugccuguaa

SEQ ID NO: 624053 - RNA, 23 nt, Human
ggguguggagggggcauuuccag

SEQ ID NO: 624054 - RNA, 18 nt, Human
guaaaagccagucuugga

SEQ ID NO: 624055 - RNA, 22 nt, Human
uaagaaagaacugggcugggug

SEQ ID NO: 624056 - RNA, 21 nt, Human
uaccagggguguggagggggc

SEQ ID NO: 624057 - RNA, 21 nt, Human
uaggaaccacugccagcaucg

SEQ ID NO: 624058 - RNA, 22 nt, Human
ucaaccccguucccaaacuauc

SEQ ID NO: 624059 - RNA, 18 nt, Human
ucacggcagcuguguccc

SEQ ID NO: 624060 - RNA, 20 nt, Human
ucagcuguuuuaagaaagaa

SEQ ID NO: 624061 - RNA, 19 nt, Human
ucaguuacaguccacaccc

SEQ ID NO: 624062 - RNA, 20 nt, Human
uccacacccacugccaggcg

SEQ ID NO: 624063 - RNA, 24 nt, Human
uccacacccacugccaggcgccca

SEQ ID NO: 624064 - RNA, 22 nt, Human
uccagcaaaaaaaaagcuggca

SEQ ID NO: 624065 - RNA, 25 nt, Human
ucccagccaagacauggccgggguc

SEQ ID NO: 624066 - RNA, 18 nt, Human
ucccucgaaucaaccgga

SEQ ID NO: 624067 - RNA, 22 nt, Human
ucccuggucacggcagcugugu

SEQ ID NO: 624068 - RNA, 19 nt, Human
ucuagaaacccaacagagg

SEQ ID NO: 624069 - RNA, 19 nt, Human
ucuucaguuguuccccaca

SEQ ID NO: 624070 - RNA, 23 nt, Human
ugagucuucaguuguuccccaca

SEQ ID NO: 624071 - RNA, 23 nt, Human
ugcagugaugucucccacacucu

SEQ ID NO: 624072 - RNA, 21 nt, Human
uggcaucacccuggugggcga

SEQ ID NO: 624073 - RNA, 21 nt, Human
uggcucaugccuguaauccca

SEQ ID NO: 624074 - RNA, 22 nt, Human
uggcucaugccuguaaucccag

SEQ ID NO: 624075 - RNA, 21 nt, Human
ugggcgagugggggugggggg

SEQ ID NO: 624076 - RNA, 20 nt, Human
ugggcugggugcaguggcuc

SEQ ID NO: 624077 - RNA, 19 nt, Human
uggggggacagaugcagug

SEQ ID NO: 624078 - RNA, 19 nt, Human
uggggguggggggaaaaca

SEQ ID NO: 624079 - RNA, 24 nt, Human
uggggguggggggaaaacacuuuu

SEQ ID NO: 624080 - RNA, 22 nt, Human
ugucccugucuuggcuagaccu

SEQ ID NO: 624081 - RNA, 22 nt, Human
uucacagaaacccaucaacccc

SEQ ID NO: 624082 - RNA, 21 nt, Human
uuggcuaaaaagccugcauuu

SEQ ID NO: 624083 - RNA, 21 nt, Human
uuuaaaaaaaaaaaaaagaga

SEQ ID NO: 624084 - RNA, 23 nt, Human
uuuaaacacagaggugaaaugaa

SEQ ID NO: 624085 - RNA, 19 nt, Human
uuucacagaaacccaucaa

SEQ ID NO: 624086 - RNA, 22 nt, Human
uuuccuggccacaccccagagg

SEQ ID NO: 624087 - RNA, 19 nt, Human
uuuuaagaaagaacugggc

SEQ ID NO: 624088 - RNA, 18 nt, Human
uuuuuuuuuuuuuuuuug

SEQ ID NO: 624089 - RNA, 24 nt, Human
uuuuuuuuuuuuuuuuugacaaug

SEQ ID NO: 624090 - RNA, 24 nt, Human
aaagaugcuguccaagaaccagga

SEQ ID NO: 624091 - RNA, 24 nt, Human
aaagcugauaaggaccaagaaagu

SEQ ID NO: 624092 - RNA, 25 nt, Human
aaccaggaugcugcuuggcucuuuu

SEQ ID NO: 624093 - RNA, 24 nt, Human
aacugcugcccccuaggagacucc

SEQ ID NO: 624094 - RNA, 23 nt, Human
aaucucucucccuguaagaucuc

SEQ ID NO: 624095 - RNA, 24 nt, Human
acacugcuguccucaggccugaac

SEQ ID NO: 624096 - RNA, 18 nt, Human
accaggaugcugcuuggc

SEQ ID NO: 624097 - RNA, 21 nt, Human
accauccuggcagcccagagc

SEQ ID NO: 624098 - RNA, 21 nt, Human
acccaaucucucucccuguaa

SEQ ID NO: 624099 - RNA, 23 nt, Human
agaaagaggcaaauugcacccaa

SEQ ID NO: 624100 - RNA, 18 nt, Human
agaaucccaccaucaccc

SEQ ID NO: 624101 - RNA, 20 nt, Human
agacccuggccaucacccau

SEQ ID NO: 624102 - RNA, 23 nt, Human
agagcaaccaaucugaaaacaga

SEQ ID NO: 624103 - RNA, 21 nt, Human
agcagacccuggccaucaccc

SEQ ID NO: 624104 - RNA, 21 nt, Human
agccacaggccccuuggggcc

SEQ ID NO: 624105 - RNA, 20 nt, Human
aggcagggucagccucugug

SEQ ID NO: 624106 - RNA, 23 nt, Human
agugaagaggggaggcaggguca

SEQ ID NO: 624107 - RNA, 25 nt, Human
aucguugcccuucacagagugucca

SEQ ID NO: 624108 - RNA, 24 nt, Human
caaguaaaaugcccccucacccca

SEQ ID NO: 624109 - RNA, 22 nt, Human
caccauccuggcagcccagagc

SEQ ID NO: 624110 - RNA, 22 nt, Human
cacccaaucucucucccuguaa

SEQ ID NO: 624111 - RNA, 21 nt, Human
caccccagccuuccuuuccag

SEQ ID NO: 624112 - RNA, 19 nt, Human
cagaacagggacugacaug

SEQ ID NO: 624113 - RNA, 19 nt, Human
cauaguuggagagcucugg

SEQ ID NO: 624114 - RNA, 21 nt, Human
caucugguuuugacaucaguu

SEQ ID NO: 624115 - RNA, 18 nt, Human
ccaagaaccaggaugcug

SEQ ID NO: 624116 - RNA, 18 nt, Human
ccaaucugaaaacagaau

SEQ ID NO: 624117 - RNA, 18 nt, Human
ccaauuugggagaacugg

SEQ ID NO: 624118 - RNA, 19 nt, Human
ccacuguguugcuggugug

SEQ ID NO: 624119 - RNA, 18 nt, Human
ccccuaggagacuccagg

SEQ ID NO: 624120 - RNA, 30 nt, Human
ccccucaccccagccuuccuuuccagagcc

SEQ ID NO: 624121 - RNA, 22 nt, Human
cccuuugagcaauuaaccccag

SEQ ID NO: 624122 - RNA, 23 nt, Human
ccuacagucagagcagcucuuac

SEQ ID NO: 624123 - RNA, 21 nt, Human
ccucccagaacagggacugac

SEQ ID NO: 624124 - RNA, 19 nt, Human
ccuggagcuggaagggggg

SEQ ID NO: 624125 - RNA, 25 nt, Human
cuccagggggcaggcauugcuuccu

SEQ ID NO: 624126 - RNA, 24 nt, Human
cucugaacugcagccacaggcccc

SEQ ID NO: 624127 - RNA, 24 nt, Human
cugcagccacaggccccuuggggc

SEQ ID NO: 624128 - RNA, 22 nt, Human
cugguguggggaggcgaggcuc

SEQ ID NO: 624129 - RNA, 19 nt, Human
cuuggcucuuuucuuucuc

SEQ ID NO: 624130 - RNA, 20 nt, Human
cuuuugccuggagcuggaag

SEQ ID NO: 624131 - RNA, 24 nt, Human
gaacugcagccacaggccccuugg

SEQ ID NO: 624132 - RNA, 25 nt, Human
gaaucccaccaucaccccucucgug

SEQ ID NO: 624133 - RNA, 21 nt, Human
gaccacuguguugcuggugug

SEQ ID NO: 624134 - RNA, 24 nt, Human
gacuccagggggcaggcauugcuu

SEQ ID NO: 624135 - RNA, 19 nt, Human
gagcaaccaaucugaaaac

SEQ ID NO: 624136 - RNA, 20 nt, Human
gcccccucaccccagccuuc

SEQ ID NO: 624137 - RNA, 20 nt, Human
gcccuacagucagagcagcu

SEQ ID NO: 624138 - RNA, 19 nt, Human
gcugcaccuccaaacacug

SEQ ID NO: 624139 - RNA, 24 nt, Human
ggcagcccagagcugcuucugggu

SEQ ID NO: 624140 - RNA, 23 nt, Human
ggcagggucagccucugugcaag

SEQ ID NO: 624141 - RNA, 22 nt, Human
ggccaucacccaucuuuucaga

SEQ ID NO: 624142 - RNA, 19 nt, Human
ggccugaacucaccaugga

SEQ ID NO: 624143 - RNA, 25 nt, Human
ggccugaacucaccauggaaaccca

SEQ ID NO: 624144 - RNA, 21 nt, Human
gggccaggacucaugcccuuu

SEQ ID NO: 624145 - RNA, 20 nt, Human
guaaaaugcccccucacccc

SEQ ID NO: 624146 - RNA, 21 nt, Human
gucauuaauaaauauuaaagc

SEQ ID NO: 624147 - RNA, 18 nt, Human
uaaaaugcccccucaccc

SEQ ID NO: 624148 - RNA, 21 nt, Human
uaaaaugcccccucaccccag

SEQ ID NO: 624149 - RNA, 21 nt, Human
uacccaaaguggugagcguca

SEQ ID NO: 624150 - RNA, 19 nt, Human
uaccuacauaacccuggcu

SEQ ID NO: 624151 - RNA, 22 nt, Human
uagaaucccaccaucaccccuc

SEQ ID NO: 624152 - RNA, 24 nt, Human
uccaccauccuggcagcccagagc

SEQ ID NO: 624153 - RNA, 21 nt, Human
ucccuagaagaggaguuugaa

SEQ ID NO: 624154 - RNA, 19 nt, Human
ucgccaguuuccuuucuca

SEQ ID NO: 624155 - RNA, 25 nt, Human
ucucaagggccaugugguuuugcag

SEQ ID NO: 624156 - RNA, 18 nt, Human
ucucucccuguaagaucu

SEQ ID NO: 624157 - RNA, 21 nt, Human
ucucuggcaggaucguugccc

SEQ ID NO: 624158 - RNA, 19 nt, Human
ucucugguauuccauccac

SEQ ID NO: 624159 - RNA, 27 nt, Human
ucuggguuaggacaacaaauagggggc

SEQ ID NO: 624160 - RNA, 21 nt, Human
ucuguugauguuagaauccca

SEQ ID NO: 624161 - RNA, 22 nt, Human
ugagggugagcaaagagcuuuu

SEQ ID NO: 624162 - RNA, 23 nt, Human
ugagugugggaggcccaaugucu

SEQ ID NO: 624163 - RNA, 20 nt, Human
ugauaaggaccaagaaagug

SEQ ID NO: 624164 - RNA, 22 nt, Human
ugccuggagcuggaaggggggc

SEQ ID NO: 624165 - RNA, 19 nt, Human
uggagauggggucagugaa

SEQ ID NO: 624166 - RNA, 18 nt, Human
uggcagcccagagcugcu

SEQ ID NO: 624167 - RNA, 20 nt, Human
ugggucauaguuggagagcu

SEQ ID NO: 624168 - RNA, 21 nt, Human
uggucaguucuaccuacaugu

SEQ ID NO: 624169 - RNA, 18 nt, Human
uuggagauggggucagug

SEQ ID NO: 624170 - RNA, 23 nt, Human
uuggggcugguguuguaccucug

SEQ ID NO: 624171 - RNA, 21 nt, Human
uuucucaagggccaugugguu

SEQ ID NO: 624172 - RNA, 21 nt, Human
uuugugaacacugggcccuuu

SEQ ID NO: 624173 - RNA, 24 nt, Human
aaagugcugggauuacaggcguga

SEQ ID NO: 624174 - RNA, 18 nt, Human
aaguagcuggauuauggg

SEQ ID NO: 624175 - RNA, 19 nt, Human
aagugcugggauuacaggc

SEQ ID NO: 624176 - RNA, 19 nt, Human
aagugcugggauuacaggc

SEQ ID NO: 624177 - RNA, 26 nt, Human
aagugcugggauuacaggcgugagcc

SEQ ID NO: 624178 - RNA, 19 nt, Human
aauuuccaguguuucccuu

SEQ ID NO: 624179 - RNA, 20 nt, Human
acgccugcugcaguacugcg

SEQ ID NO: 624180 - RNA, 18 nt, Human
acuauguuggccaggcug

SEQ ID NO: 624181 - RNA, 24 nt, Human
acucugucgcccaggcuggagugc

SEQ ID NO: 624182 - RNA, 25 nt, Human
acucuguugcccaggcuggagugca

SEQ ID NO: 624183 - RNA, 21 nt, Human
acugcaaccucugccucccag

SEQ ID NO: 624184 - RNA, 21 nt, Human
acugcaaccucugccucccag

SEQ ID NO: 624185 - RNA, 22 nt, Human
acugcaaccucugccucccagg

SEQ ID NO: 624186 - RNA, 20 nt, Human
agcuccugggacuagcgcuc

SEQ ID NO: 624187 - RNA, 22 nt, Human
aggaagcugugguggaggcuug

SEQ ID NO: 624188 - RNA, 22 nt, Human
aggcgugagccacugugcccgg

SEQ ID NO: 624189 - RNA, 25 nt, Human
aggcuggagugcaguggcgcaaucu

SEQ ID NO: 624190 - RNA, 24 nt, Human
aggugauccgcccaccucggccuc

SEQ ID NO: 624191 - RNA, 23 nt, Human
agugcaguggcgcaaucuuggcu

SEQ ID NO: 624192 - RNA, 24 nt, Human
agugcaguggcgcaaucuuggcuu

SEQ ID NO: 624193 - RNA, 18 nt, Human
agugcugggauuacaggc

SEQ ID NO: 624194 - RNA, 19 nt, Human
aguggcagcaguuggggca

SEQ ID NO: 624195 - RNA, 24 nt, Human
auuuuuguauuuuuaguagaggcg

SEQ ID NO: 624196 - RNA, 24 nt, Human
caaagugcugggauuacaggcgug

SEQ ID NO: 624197 - RNA, 23 nt, Human
caauuuuuguauuuuuaguagag

SEQ ID NO: 624198 - RNA, 24 nt, Human
caauuuuuguauuuuuaguagagg

SEQ ID NO: 624199 - RNA, 24 nt, Human
cacacccgacagcccggcucgcgc

SEQ ID NO: 624200 - RNA, 24 nt, Human
caccucggccucccaaagugcugg

SEQ ID NO: 624201 - RNA, 21 nt, Human
cacuauguuggccaggcuggu

SEQ ID NO: 624202 - RNA, 22 nt, Human
cacuauguuggccaggcugguc

SEQ ID NO: 624203 - RNA, 24 nt, Human
cacucugucgcccaggcuggagug

SEQ ID NO: 624204 - RNA, 24 nt, Human
cacucuguugcccaggcuggagug

SEQ ID NO: 624205 - RNA, 20 nt, Human
cacucuuauugggucaggag

SEQ ID NO: 624206 - RNA, 18 nt, Human
cagaacacacccgacagc

SEQ ID NO: 624207 - RNA, 24 nt, Human
cagagucucacucuguugcccagg

SEQ ID NO: 624208 - RNA, 24 nt, Human
cagcagcaccuucuccucaggccc

SEQ ID NO: 624209 - RNA, 25 nt, Human
cagcaguuggggcagcaacccuggu

SEQ ID NO: 624210 - RNA, 22 nt, Human
caggcaauucuccugcuucagc

SEQ ID NO: 624211 - RNA, 22 nt, Human
ccaaagugcugggauuacaggc

SEQ ID NO: 624212 - RNA, 22 nt, Human
ccaaagugcugggauuacaggc

SEQ ID NO: 624213 - RNA, 24 nt, Human
ccaaagugcugggauuacaggcgu

SEQ ID NO: 624214 - RNA, 21 nt, Human
ccacauggcagcccauuuaga

SEQ ID NO: 624215 - RNA, 18 nt, Human
ccaccugaagucaugucc

SEQ ID NO: 624216 - RNA, 22 nt, Human
ccacggguacggccuccccaag

SEQ ID NO: 624217 - RNA, 21 nt, Human
cccaaguacuccaauuguucu

SEQ ID NO: 624218 - RNA, 18 nt, Human
cccaaguagcuggauuau

SEQ ID NO: 624219 - RNA, 23 nt, Human
cccaaguagcuggauuaugggug

SEQ ID NO: 624220 - RNA, 19 nt, Human
cccaggcuggagugcagug

SEQ ID NO: 624221 - RNA, 23 nt, Human
cccagguucaggcaauucuccug

SEQ ID NO: 624222 - RNA, 22 nt, Human
ccccugcauuccacucuagaca

SEQ ID NO: 624223 - RNA, 23 nt, Human
ccucccagggcaggacucucagu

SEQ ID NO: 624224 - RNA, 24 nt, Human
ccucccagguucaggcaauucucc

SEQ ID NO: 624225 - RNA, 19 nt, Human
ccugggacuagcgcucugg

SEQ ID NO: 624226 - RNA, 23 nt, Human
cgggguuucacuauguuggccag

SEQ ID NO: 624227 - RNA, 24 nt, Human
cgggguuucacuauguuggccagg

SEQ ID NO: 624228 - RNA, 24 nt, Human
cucacucugucgcccaggcuggag

SEQ ID NO: 624229 - RNA, 24 nt, Human
cucacucuguugcccaggcuggag

SEQ ID NO: 624230 - RNA, 23 nt, Human
cugaccucaggugauccgcccac

SEQ ID NO: 624231 - RNA, 23 nt, Human
cugcaaccucugccucccagguu

SEQ ID NO: 624232 - RNA, 24 nt, Human
cugcaaccucugccucccagguuc

SEQ ID NO: 624233 - RNA, 18 nt, Human
cugcugcaguacugcgga

SEQ ID NO: 624234 - RNA, 23 nt, Human
cugcuucagccucccaaguagcu

SEQ ID NO: 624235 - RNA, 19 nt, Human
cuggagcaggucuauuacc

SEQ ID NO: 624236 - RNA, 21 nt, Human
cuggagcaggucuauuaccug

SEQ ID NO: 624237 - RNA, 19 nt, Human
cuguugcccaggcuggagu

SEQ ID NO: 624238 - RNA, 21 nt, Human
gaaaacgugggcugguccaug

SEQ ID NO: 624239 - RNA, 18 nt, Human
gaagucaugucccaaccg

SEQ ID NO: 624240 - RNA, 24 nt, Human
gaccucaggugauccgcccaccuc

SEQ ID NO: 624241 - RNA, 18 nt, Human
gacucugggccaagacuc

SEQ ID NO: 624242 - RNA, 24 nt, Human
gagcaggucuauuaccugaagucu

SEQ ID NO: 624243 - RNA, 21 nt, Human
gagcuccugggacuagcgcuc

SEQ ID NO: 624244 - RNA, 24 nt, Human
gaggcgggguuucacuauguuggc

SEQ ID NO: 624245 - RNA, 22 nt, Human
gaggcuugggagugguuccaga

SEQ ID NO: 624246 - RNA, 21 nt, Human
gaguggcagcaguuggggcag

SEQ ID NO: 624247 - RNA, 18 nt, Human
gauuacaggcgugagcca

SEQ ID NO: 624248 - RNA, 21 nt, Human
gauuacaggcgugagccacug

SEQ ID NO: 624249 - RNA, 24 nt, Human
gauuacaggcgugagccacugugc

SEQ ID NO: 624250 - RNA, 24 nt, Human
gauuaugggugcgcaucaccaugc

SEQ ID NO: 624251 - RNA, 19 nt, Human
gcccaggcuggagugcagu

SEQ ID NO: 624252 - RNA, 19 nt, Human
gcccggucccuuuguucuu

SEQ ID NO: 624253 - RNA, 18 nt, Human
gcgggguuucacuauguu

SEQ ID NO: 624254 - RNA, 23 nt, Human
gcgggguuucacuauguuggcca

SEQ ID NO: 624255 - RNA, 19 nt, Human
gcuggagugcaguggcgca

SEQ ID NO: 624256 - RNA, 22 nt, Human
gcuggagugcaguguugaccug

SEQ ID NO: 624257 - RNA, 19 nt, Human
gcugggcuugguccucugu

SEQ ID NO: 624258 - RNA, 21 nt, Human
gcuuacugcaaccucugccuc

SEQ ID NO: 624259 - RNA, 23 nt, Human
gggcagcaacccugguccacggg

SEQ ID NO: 624260 - RNA, 23 nt, Human
gggguuucacuauguuggccagg

SEQ ID NO: 624261 - RNA, 24 nt, Human
gugauccgcccaccucggccuccc

SEQ ID NO: 624262 - RNA, 18 nt, Human
gugguggaggcuugggag

SEQ ID NO: 624263 - RNA, 19 nt, Human
gugguggaggcuugggagu

SEQ ID NO: 624264 - RNA, 26 nt, Human
guuuuucuuuuuucuuuuuuugaaau

SEQ ID NO: 624265 - RNA, 18 nt, Human
uacaaugcucuggggguc

SEQ ID NO: 624266 - RNA, 23 nt, Human
uacaggcgugagccacugugccc

SEQ ID NO: 624267 - RNA, 23 nt, Human
uacaggcgugagccacugugccc

SEQ ID NO: 624268 - RNA, 21 nt, Human
uacugcaaccucugccuccca

SEQ ID NO: 624269 - RNA, 23 nt, Human
uacugcaaccucugccucccagg

SEQ ID NO: 624270 - RNA, 24 nt, Human
uaguagaggcgggguuucacuaug

SEQ ID NO: 624271 - RNA, 22 nt, Human
uauguuggccaggcuggucugg

SEQ ID NO: 624272 - RNA, 23 nt, Human
uauguuggccaggcuggucugga

SEQ ID NO: 624273 - RNA, 24 nt, Human
uauguuggccaggcuggucuggaa

SEQ ID NO: 624274 - RNA, 22 nt, Human
ucacuauguuggccaggcuggu

SEQ ID NO: 624275 - RNA, 24 nt, Human
ucacucugucgcccaggcuggagu

SEQ ID NO: 624276 - RNA, 20 nt, Human
ucagccucccaaguagcugg

SEQ ID NO: 624277 - RNA, 21 nt, Human
uccacggguacggccucccca

SEQ ID NO: 624278 - RNA, 21 nt, Human
uccagaagagaaguuugagaa

SEQ ID NO: 624279 - RNA, 24 nt, Human
ucccaaagugcugggauuacaggc

SEQ ID NO: 624280 - RNA, 22 nt, Human
ucccaaguagcuggauuauggg

SEQ ID NO: 624281 - RNA, 21 nt, Human
ucccagguucaggcaauucuc

SEQ ID NO: 624282 - RNA, 24 nt, Human
ucccagguucaggcaauucuccug

SEQ ID NO: 624283 - RNA, 24 nt, Human
ucgcccaggcuggagugcaguguu

SEQ ID NO: 624284 - RNA, 18 nt, Human
ucggccucccaaagugcu

SEQ ID NO: 624285 - RNA, 23 nt, Human
ucucacucugucgcccaggcugg

SEQ ID NO: 624286 - RNA, 24 nt, Human
ucucacucugucgcccaggcugga

SEQ ID NO: 624287 - RNA, 26 nt, Human
ucucacucugucgcccaggcuggagu

SEQ ID NO: 624288 - RNA, 27 nt, Human
ucucacucugucgcccaggcuggagug

SEQ ID NO: 624289 - RNA, 23 nt, Human
ucucacucuguugcccaggcugg

SEQ ID NO: 624290 - RNA, 24 nt, Human
ucucacucuguugcccaggcugga

SEQ ID NO: 624291 - RNA, 26 nt, Human
ucucacucuguugcccaggcuggagu

SEQ ID NO: 624292 - RNA, 27 nt, Human
ucucacucuguugcccaggcuggagug

SEQ ID NO: 624293 - RNA, 24 nt, Human
ucugucgcccaggcuggagugcag

SEQ ID NO: 624294 - RNA, 18 nt, Human
ucuguugcccaggcugga

SEQ ID NO: 624295 - RNA, 24 nt, Human
ucuguugcccaggcuggagugcag

SEQ ID NO: 624296 - RNA, 22 nt, Human
ugaagcagagucucacucuguu

SEQ ID NO: 624297 - RNA, 18 nt, Human
ugaccucaggugauccgc

SEQ ID NO: 624298 - RNA, 21 nt, Human
ugaccucaggugauccgccca

SEQ ID NO: 624299 - RNA, 24 nt, Human
ugaccucaggugauccgcccaccu

SEQ ID NO: 624300 - RNA, 18 nt, Human
ugaccugaauagacgacg

SEQ ID NO: 624301 - RNA, 25 nt, Human
ugagaaggcacagagccacauggca

SEQ ID NO: 624302 - RNA, 18 nt, Human
ugagacagagucucacuc

SEQ ID NO: 624303 - RNA, 22 nt, Human
ugagacagagucucacucuguc

SEQ ID NO: 624304 - RNA, 18 nt, Human
ugaguggcagcaguuggg

SEQ ID NO: 624305 - RNA, 24 nt, Human
ugauccgcccaccucggccuccca

SEQ ID NO: 624306 - RNA, 18 nt, Human
ugcagcacuacacacaua

SEQ ID NO: 624307 - RNA, 18 nt, Human
ugcccaggcuggagugca

SEQ ID NO: 624308 - RNA, 21 nt, Human
ugcccaggcuggagugcagug

SEQ ID NO: 624309 - RNA, 22 nt, Human
ugcccaggcuggagugcagugg

SEQ ID NO: 624310 - RNA, 24 nt, Human
ugcccaggcuggagugcaguggcg

SEQ ID NO: 624311 - RNA, 24 nt, Human
ugccugggcaauuuuuguauuuuu

SEQ ID NO: 624312 - RNA, 22 nt, Human
ugcucaacuugaaguuaaccag

SEQ ID NO: 624313 - RNA, 18 nt, Human
ugcucugggggucuggcu

SEQ ID NO: 624314 - RNA, 25 nt, Human
ugcucugggggucuggcuggccggg

SEQ ID NO: 624315 - RNA, 24 nt, Human
ugcugggauuacaggcgugagcca

SEQ ID NO: 624316 - RNA, 24 nt, Human
ugcuucagccucccaaguagcugg

SEQ ID NO: 624317 - RNA, 23 nt, Human
uggagugcaguggcgcaaucuug

SEQ ID NO: 624318 - RNA, 24 nt, Human
uggagugcaguggcgcaaucuugg

SEQ ID NO: 624319 - RNA, 19 nt, Human
uggagugcaguguugaccu

SEQ ID NO: 624320 - RNA, 20 nt, Human
uggagugcaguguugaccug

SEQ ID NO: 624321 - RNA, 21 nt, Human
uggccaggcuggucuggaacu

SEQ ID NO: 624322 - RNA, 23 nt, Human
uggcugaagagaggccacagcug

SEQ ID NO: 624323 - RNA, 24 nt, Human
uggcugaagagaggccacagcugc

SEQ ID NO: 624324 - RNA, 18 nt, Human
ugggauuacaggcgugag

SEQ ID NO: 624325 - RNA, 21 nt, Human
ugggauuacaggcgugagcca

SEQ ID NO: 624326 - RNA, 22 nt, Human
ugggauuacaggcgugagccac

SEQ ID NO: 624327 - RNA, 22 nt, Human
ugggauuacaggcgugagccac

SEQ ID NO: 624328 - RNA, 22 nt, Human
ugggauuacaggcgugagccac

SEQ ID NO: 624329 - RNA, 24 nt, Human
ugggauuacaggcgugagccacug

SEQ ID NO: 624330 - RNA, 26 nt, Human
ugggauuacaggcgugagccacugug

SEQ ID NO: 624331 - RNA, 18 nt, Human
ugggcuugguccucugug

SEQ ID NO: 624332 - RNA, 21 nt, Human
uggggcagcaacccuggucca

SEQ ID NO: 624333 - RNA, 19 nt, Human
uuacugcaaccucugccuc

SEQ ID NO: 624334 - RNA, 24 nt, Human
uuacugcaaccucugccucccagg

SEQ ID NO: 624335 - RNA, 18 nt, Human
uuaguagaggcgggguuu

SEQ ID NO: 624336 - RNA, 21 nt, Human
uuaguagaggcgggguuucac

SEQ ID NO: 624337 - RNA, 21 nt, Human
uuaguagaggcgggguuucac

SEQ ID NO: 624338 - RNA, 24 nt, Human
uuaguagaggcgggguuucacuau

SEQ ID NO: 624339 - RNA, 20 nt, Human
uugauggcaugccccugcau

SEQ ID NO: 624340 - RNA, 22 nt, Human
uugauggcaugccccugcauuc

SEQ ID NO: 624341 - RNA, 24 nt, Human
uugcccaggcuggagugcaguggc

SEQ ID NO: 624342 - RNA, 23 nt, Human
uuguauuuuuaguagaggcgggg

SEQ ID NO: 624343 - RNA, 23 nt, Human
uuucacuauguuggccaggcugu

SEQ ID NO: 624344 - RNA, 20 nt, Human
uuucuuuuuuugagacagag

SEQ ID NO: 624345 - RNA, 26 nt, Human
uuuguucuuucuucuaagcaugguuu

SEQ ID NO: 624346 - RNA, 26 nt, Human
uuuucuuuuuuugagacagagucuca

SEQ ID NO: 624347 - RNA, 24 nt, Human
uuuuuaguagaggcgggguuucac

SEQ ID NO: 624348 - RNA, 20 nt, Human
uuuuuguauuuuuaguagag

SEQ ID NO: 624349 - RNA, 18 nt, Human
uuuuuuuuugaagcagag

SEQ ID NO: 624350 - RNA, 20 nt, Human
uuuuuuuuuuugaagcagag

SEQ ID NO: 624351 - RNA, 26 nt, Human
uuuuuuuuuuuugaagcagagucuca

SEQ ID NO: 624352 - RNA, 23 nt, Human
aaaaaggaucuuuuaaauuuggu

SEQ ID NO: 624353 - RNA, 24 nt, Human
aaagaaaaaaaaaauuauacaaaa

SEQ ID NO: 624354 - RNA, 18 nt, Human
aaccuaucuuucucuucc

SEQ ID NO: 624355 - RNA, 20 nt, Human
aaccuaucuuucucuucccc

SEQ ID NO: 624356 - RNA, 21 nt, Human
agauggagaccguggguaggg

SEQ ID NO: 624357 - RNA, 23 nt, Human
caaaaugugcaaauucagagguu

SEQ ID NO: 624358 - RNA, 19 nt, Human
caacacugcucaaagaaaa

SEQ ID NO: 624359 - RNA, 22 nt, Human
cagcaaacuuaugguuugcauu

SEQ ID NO: 624360 - RNA, 19 nt, Human
caucccauugcuuuuaaga

SEQ ID NO: 624361 - RNA, 24 nt, Human
ccaaucccagcaucggcuauuaac

SEQ ID NO: 624362 - RNA, 19 nt, Human
ccccgagauuagcugcaaa

SEQ ID NO: 624363 - RNA, 19 nt, Human
gaccggacaauugacuucu

SEQ ID NO: 624364 - RNA, 21 nt, Human
gagcacauauauuacaaauaa

SEQ ID NO: 624365 - RNA, 22 nt, Human
gcugcaaauucagaaaguucuc

SEQ ID NO: 624366 - RNA, 23 nt, Human
guauuaacuaaaaaggaucuuuu

SEQ ID NO: 624367 - RNA, 23 nt, Human
guugaaaccgagagccuccaauc

SEQ ID NO: 624368 - RNA, 20 nt, Human
uaaaaaggaucuuuuaaauu

SEQ ID NO: 624369 - RNA, 23 nt, Human
uaaacaaaaauauuaacaccaug

SEQ ID NO: 624370 - RNA, 23 nt, Human
uaacaccaugaaaacuucaaaua

SEQ ID NO: 624371 - RNA, 22 nt, Human
uacaucugaaauaugcuuaaau

SEQ ID NO: 624372 - RNA, 22 nt, Human
ucugaugcugcagagcccucag

SEQ ID NO: 624373 - RNA, 20 nt, Human
ugaucaacacugcucaaaga

SEQ ID NO: 624374 - RNA, 21 nt, Human
ugcuuaaauguuacaaaaaca

SEQ ID NO: 624375 - RNA, 24 nt, Human
uggagaccguggguagggccggag

SEQ ID NO: 624376 - RNA, 18 nt, Human
uggcaaaauucugaagcu

SEQ ID NO: 624377 - RNA, 23 nt, Human
uggcaaaauucugaagcuagcga

SEQ ID NO: 624378 - RNA, 26 nt, Human
uguacacauacacaaauauuuuaaua

SEQ ID NO: 624379 - RNA, 24 nt, Human
uguuacaaaaacauucacuuuaac

SEQ ID NO: 624380 - RNA, 22 nt, Human
uuaaauguuacaaaaacauuca

SEQ ID NO: 624381 - RNA, 18 nt, Human
uuggcaaaauucugaagc

SEQ ID NO: 624382 - RNA, 18 nt, Human
uuggcgaaauuauuggua

SEQ ID NO: 624383 - RNA, 22 nt, Human
uuuuuuuuuuuuuugcaaagua

SEQ ID NO: 624384 - RNA, 19 nt, Human
uuuuuuuuuuuuuuuuugc

SEQ ID NO: 624385 - RNA, 21 nt, Human
uuuuuuuuuuuuuuuuugcaa

SEQ ID NO: 624386 - RNA, 27 nt, Human
uuuuuuuuuuuuuuuuuuuuuuugggg

SEQ ID NO: 624387 - RNA, 21 nt, Human
aaccaagaacauuggaauaag

SEQ ID NO: 624388 - RNA, 20 nt, Human
aguuauauaaagaaaaacca

SEQ ID NO: 624389 - RNA, 18 nt, Human
auaaagaaaaaccaagaa

SEQ ID NO: 624390 - RNA, 22 nt, Human
caaaggagccagucuuaguccg

SEQ ID NO: 624391 - RNA, 19 nt, Human
cccccaucuugucauguuc

SEQ ID NO: 624392 - RNA, 23 nt, Human
cucagcaccugggcauuggcaga

SEQ ID NO: 624393 - RNA, 22 nt, Human
cuccccuagccaccaacaguuu

SEQ ID NO: 624394 - RNA, 21 nt, Human
cuuggauggaaucugccccuc

SEQ ID NO: 624395 - RNA, 19 nt, Human
gcaagugcaagccugucau

SEQ ID NO: 624396 - RNA, 18 nt, Human
ggcuugcaagucccgcug

SEQ ID NO: 624397 - RNA, 20 nt, Human
uaaagaaaaaccaagaacau

SEQ ID NO: 624398 - RNA, 21 nt, Human
uaaauugcaaaaagaauggaa

SEQ ID NO: 624399 - RNA, 19 nt, Human
uagccucaucagagggcac

SEQ ID NO: 624400 - RNA, 20 nt, Human
ucgcucagcaccugggcauu

SEQ ID NO: 624401 - RNA, 21 nt, Human
ucucccagagcugcccagcuu

SEQ ID NO: 624402 - RNA, 20 nt, Human
ucugccccuccuuuucacuc

SEQ ID NO: 624403 - RNA, 18 nt, Human
ugacccaggcuggccauc

SEQ ID NO: 624404 - RNA, 20 nt, Human
uggcagagagugucagcugg

SEQ ID NO: 624405 - RNA, 18 nt, Human
uggcuugcaagucccgcu

SEQ ID NO: 624406 - RNA, 22 nt, Human
ugucugacacuccucucuccca

SEQ ID NO: 624407 - RNA, 21 nt, Human
ugucugcuccccuagccacca

SEQ ID NO: 624408 - RNA, 20 nt, Human
aaaaggugugaaaaccagca

SEQ ID NO: 624409 - RNA, 21 nt, Human
aaacaccccucucacauuccu

SEQ ID NO: 624410 - RNA, 22 nt, Human
aaacagaaggcaugaacgagag

SEQ ID NO: 624411 - RNA, 24 nt, Human
aaacagggaaaaacacaaaccaag

SEQ ID NO: 624412 - RNA, 20 nt, Human
aaacauggccaccaaacccc

SEQ ID NO: 624413 - RNA, 21 nt, Human
aaacugaaaccaccauaagaa

SEQ ID NO: 624414 - RNA, 21 nt, Human
aacaccccucucacauuccua

SEQ ID NO: 624415 - RNA, 24 nt, Human
aagugaccagggugaugaucagca

SEQ ID NO: 624416 - RNA, 20 nt, Human
acagggaaaaacacaaacca

SEQ ID NO: 624417 - RNA, 29 nt, Human
acagggaaaaacacaaaccaagaugacac

SEQ ID NO: 624418 - RNA, 22 nt, Human
accagccucacucccagaaacc

SEQ ID NO: 624419 - RNA, 24 nt, Human
accaggcagcaggaacccugugag

SEQ ID NO: 624420 - RNA, 20 nt, Human
acccgcuuuggccuucaccu

SEQ ID NO: 624421 - RNA, 25 nt, Human
agcaagacaccaggcagcaggaacc

SEQ ID NO: 624422 - RNA, 18 nt, Human
aggaaaaaauagaaaaga

SEQ ID NO: 624423 - RNA, 23 nt, Human
aggaaaaaauagaaaagagggac

SEQ ID NO: 624424 - RNA, 21 nt, Human
aggcaaacgggcaaggcagac

SEQ ID NO: 624425 - RNA, 21 nt, Human
aggcagcaaacaugggccaaa

SEQ ID NO: 624426 - RNA, 22 nt, Human
aggcagcaaacaugggccaaaa

SEQ ID NO: 624427 - RNA, 24 nt, Human
aggcagcaaacaugggccaaaacg

SEQ ID NO: 624428 - RNA, 22 nt, Human
aggcgcuggaggaugaagggcu

SEQ ID NO: 624429 - RNA, 21 nt, Human
agggacaagagcaaaacagaa

SEQ ID NO: 624430 - RNA, 20 nt, Human
aucugugugcucucuuccuu

SEQ ID NO: 624431 - RNA, 21 nt, Human
augcccaccuccuccccucug

SEQ ID NO: 624432 - RNA, 19 nt, Human
caaaacagaaggcaugaac

SEQ ID NO: 624433 - RNA, 22 nt, Human
caacucuucuaccagccucacu

SEQ ID NO: 624434 - RNA, 19 nt, Human
caccagaaccucaaugaug

SEQ ID NO: 624435 - RNA, 18 nt, Human
cagaccagauagaggcag

SEQ ID NO: 624436 - RNA, 19 nt, Human
cagcaaacaugggccaaaa

SEQ ID NO: 624437 - RNA, 20 nt, Human
cagcagcggcaaacaaggag

SEQ ID NO: 624438 - RNA, 24 nt, Human
cagcaugaagugaccagggugaug

SEQ ID NO: 624439 - RNA, 22 nt, Human
caggccagcacgccaccuucuc

SEQ ID NO: 624440 - RNA, 20 nt, Human
cauccuagaaaagcagggcc

SEQ ID NO: 624441 - RNA, 18 nt, Human
cauggccaccaaacccca

SEQ ID NO: 624442 - RNA, 23 nt, Human
cauuccagaaaaauuagccugga

SEQ ID NO: 624443 - RNA, 22 nt, Human
ccagccucacucccagaaaccc

SEQ ID NO: 624444 - RNA, 19 nt, Human
ccagggccugaccaccaac

SEQ ID NO: 624445 - RNA, 20 nt, Human
ccagggugaugaucagcaag

SEQ ID NO: 624446 - RNA, 21 nt, Human
ccaguuggguucuucccagcu

SEQ ID NO: 624447 - RNA, 21 nt, Human
ccggagcgcucagcaaacacc

SEQ ID NO: 624448 - RNA, 26 nt, Human
ccgguaguaaguaagaaguuucuccu

SEQ ID NO: 624449 - RNA, 19 nt, Human
ccuaaauacugucucagca

SEQ ID NO: 624450 - RNA, 26 nt, Human
ccuccaucauccucaccugaugucua

SEQ ID NO: 624451 - RNA, 19 nt, Human
ccucuggccgugcccggag

SEQ ID NO: 624452 - RNA, 21 nt, Human
cgagagaggaaaaaauagaaa

SEQ ID NO: 624453 - RNA, 21 nt, Human
cgagcagacacugggcacaca

SEQ ID NO: 624454 - RNA, 19 nt, Human
cgaucuccccaggugcugg

SEQ ID NO: 624455 - RNA, 21 nt, Human
cgcaaaacaccaaguggucca

SEQ ID NO: 624456 - RNA, 19 nt, Human
cggcacauauguccacagc

SEQ ID NO: 624457 - RNA, 24 nt, Human
cuaaauauagucaagguuaacccu

SEQ ID NO: 624458 - RNA, 19 nt, Human
cuccugugucgaaggugga

SEQ ID NO: 624459 - RNA, 24 nt, Human
cugaaugggcagaugagaaacaga

SEQ ID NO: 624460 - RNA, 19 nt, Human
cugaccaccaacacccgcu

SEQ ID NO: 624461 - RNA, 18 nt, Human
cugcguuccuucaaggcc

SEQ ID NO: 624462 - RNA, 19 nt, Human
cugcuaauagccaccaaga

SEQ ID NO: 624463 - RNA, 21 nt, Human
cuuggcccgagccugcucucc

SEQ ID NO: 624464 - RNA, 24 nt, Human
cuuggcccgagccugcucuccagc

SEQ ID NO: 624465 - RNA, 22 nt, Human
gaagugaccagggugaugauca

SEQ ID NO: 624466 - RNA, 24 nt, Human
gagcagacacugggcacacaaacc

SEQ ID NO: 624467 - RNA, 22 nt, Human
gagcgcucagcaaacaccccuc

SEQ ID NO: 624468 - RNA, 20 nt, Human
gcaaaacagaaggcaugaac

SEQ ID NO: 624469 - RNA, 20 nt, Human
gcugcguuccuucaaggccu

SEQ ID NO: 624470 - RNA, 21 nt, Human
gcuggcuguugggucuguucu

SEQ ID NO: 624471 - RNA, 19 nt, Human
ggaaaugcccaccuccucc

SEQ ID NO: 624472 - RNA, 22 nt, Human
ggccaaaacgcaaaacaccaag

SEQ ID NO: 624473 - RNA, 24 nt, Human
ggccaaaacgcaaaacaccaagug

SEQ ID NO: 624474 - RNA, 21 nt, Human
gggaaaagaggcaaaaagacc

SEQ ID NO: 624475 - RNA, 19 nt, Human
gguaacaaaaauaggaaga

SEQ ID NO: 624476 - RNA, 26 nt, Human
gguaacaaaauaggagacgaaagaga

SEQ ID NO: 624477 - RNA, 20 nt, Human
gguaguaaguaagaaguuuc

SEQ ID NO: 624478 - RNA, 22 nt, Human
ggugagaaacaggacaggggga

SEQ ID NO: 624479 - RNA, 21 nt, Human
gucgaagguggaggagucugu

SEQ ID NO: 624480 - RNA, 25 nt, Human
gucguggggagcccauccaguuggg

SEQ ID NO: 624481 - RNA, 24 nt, Human
gucuggguagaaaacauggccacc

SEQ ID NO: 624482 - RNA, 21 nt, Human
gucugucugaccccugcagcc

SEQ ID NO: 624483 - RNA, 19 nt, Human
gugaaaaccagcauucaug

SEQ ID NO: 624484 - RNA, 23 nt, Human
gugucgaagguggaggagucugu

SEQ ID NO: 624485 - RNA, 22 nt, Human
uaaauacugcaaucucagcagc

SEQ ID NO: 624486 - RNA, 20 nt, Human
uaacaaaauaggagacgaaa

SEQ ID NO: 624487 - RNA, 21 nt, Human
uaccuccaucauccucaccug

SEQ ID NO: 624488 - RNA, 24 nt, Human
uagaaaagacacugaauaggaaca

SEQ ID NO: 624489 - RNA, 22 nt, Human
uagcaccgaucuccccaggugc

SEQ ID NO: 624490 - RNA, 25 nt, Human
uaggagacgaaagagaugucauucu

SEQ ID NO: 624491 - RNA, 24 nt, Human
uauccugugugggucauuaacagu

SEQ ID NO: 624492 - RNA, 25 nt, Human
uaugaaugggucaggagguuggggg

SEQ ID NO: 624493 - RNA, 20 nt, Human
ucacucccagaaacccuaaa

SEQ ID NO: 624494 - RNA, 18 nt, Human
ucagcagcggcaaacaag

SEQ ID NO: 624495 - RNA, 19 nt, Human
uccacagcagcuugcuugg

SEQ ID NO: 624496 - RNA, 27 nt, Human
ucccagaaacccuaaauacugucucag

SEQ ID NO: 624497 - RNA, 22 nt, Human
ucugucuuaucugugugcucuc

SEQ ID NO: 624498 - RNA, 18 nt, Human
ucugugacaaaggagggg

SEQ ID NO: 624499 - RNA, 18 nt, Human
ugaagggcuggcuguugg

SEQ ID NO: 624500 - RNA, 23 nt, Human
ugaagugaccagggugaugauca

SEQ ID NO: 624501 - RNA, 21 nt, Human
ugaaugggcagaugagaaaca

SEQ ID NO: 624502 - RNA, 20 nt, Human
ugaccagggugaugaucagc

SEQ ID NO: 624503 - RNA, 20 nt, Human
ugagguaucgaugcuaaaga

SEQ ID NO: 624504 - RNA, 19 nt, Human
ugcccggagcgcucagcaa

SEQ ID NO: 624505 - RNA, 19 nt, Human
ugcccgguuccgguaguaa

SEQ ID NO: 624506 - RNA, 24 nt, Human
ugcccuggcaguccccauccuugu

SEQ ID NO: 624507 - RNA, 24 nt, Human
uggcaggcgcuggaggaugaaggg

SEQ ID NO: 624508 - RNA, 26 nt, Human
ugggaaggaaugagacagccgaccuc

SEQ ID NO: 624509 - RNA, 20 nt, Human
ugggaaggaaugagacagcu

SEQ ID NO: 624510 - RNA, 21 nt, Human
uggggagcccauccaguuggg

SEQ ID NO: 624511 - RNA, 26 nt, Human
ugggucaggagguuggggggaggaug

SEQ ID NO: 624512 - RNA, 18 nt, Human
uggguucuucccagcucc

SEQ ID NO: 624513 - RNA, 20 nt, Human
ugguagauuaaacauuccuc

SEQ ID NO: 624514 - RNA, 19 nt, Human
ugucucagcacucgcucug

SEQ ID NO: 624515 - RNA, 26 nt, Human
uguuacuaucguugggaaggaaugag

SEQ ID NO: 624516 - RNA, 21 nt, Human
uuaucugugugcucucuuccu

SEQ ID NO: 624517 - RNA, 20 nt, Human
uucccagcuccuuuuccccg

SEQ ID NO: 624518 - RNA, 20 nt, Human
uuguucccucucaauaccuu

SEQ ID NO: 624519 - RNA, 21 nt, Human
uuugcauucagcuuauccugu

SEQ ID NO: 624520 - RNA, 21 nt, Human
uuuguucccucucaauaccuu

SEQ ID NO: 624521 - RNA, 21 nt, Human
agcccgcuggucccuggugug

SEQ ID NO: 624522 - RNA, 21 nt, Human
ccagugggugccccagcuggg

SEQ ID NO: 624523 - RNA, 18 nt, Human
cccugggacuagcccgcu

SEQ ID NO: 624524 - RNA, 21 nt, Human
ccuuccagugggugccccagc

SEQ ID NO: 624525 - RNA, 25 nt, Human
cuggccgcugggccaugcccuggga

SEQ ID NO: 624526 - RNA, 20 nt, Human
gcugggccaugcccugggac

SEQ ID NO: 624527 - RNA, 18 nt, Human
ucagaguuuuaauccugg

SEQ ID NO: 624528 - RNA, 23 nt, Human
uccagugggugccccagcugggc

SEQ ID NO: 624529 - RNA, 18 nt, Human
uccugggaaaaagaaucu

SEQ ID NO: 624530 - RNA, 21 nt, Human
uccuuccagugggugccccag

SEQ ID NO: 624531 - RNA, 26 nt, Human
ucuggccgcugggccaugcccuggga

SEQ ID NO: 624532 - RNA, 22 nt, Human
ugggacuagcccgcuggucccc

SEQ ID NO: 624533 - RNA, 22 nt, Human
ugggugccccagcugggcuggg

SEQ ID NO: 624534 - RNA, 24 nt, Human
uuuuuuuuuuuuuuuuuuuuuccu

SEQ ID NO: 624535 - RNA, 19 nt, Human
aacuuggugguuucaguga

SEQ ID NO: 624536 - RNA, 19 nt, Human
aagguggucuccagccccg

SEQ ID NO: 624537 - RNA, 18 nt, Human
acugcaagcuccgccucc

SEQ ID NO: 624538 - RNA, 18 nt, Human
agcuccgccuccuggguu

SEQ ID NO: 624539 - RNA, 25 nt, Human
aggcuggagugcaguggugcaaucu

SEQ ID NO: 624540 - RNA, 18 nt, Human
aguagcugggacuacagg

SEQ ID NO: 624541 - RNA, 19 nt, Human
aguagcugggacuacaggc

SEQ ID NO: 624542 - RNA, 19 nt, Human
agugcaguggugcaaucug

SEQ ID NO: 624543 - RNA, 24 nt, Human
agugcaguggugcaaucugggcuc

SEQ ID NO: 624544 - RNA, 22 nt, Human
aucuucucaauggccuccaucg

SEQ ID NO: 624545 - RNA, 24 nt, Human
aucuuggcgcugucuccagcuugu

SEQ ID NO: 624546 - RNA, 19 nt, Human
caucaucagccuccaaguc

SEQ ID NO: 624547 - RNA, 18 nt, Human
ccaggcuggagugcagug

SEQ ID NO: 624548 - RNA, 19 nt, Human
ccccuccuccucauccuca

SEQ ID NO: 624549 - RNA, 23 nt, Human
cccgaguagcugggacuacaggc

SEQ ID NO: 624550 - RNA, 24 nt, Human
cccgaguagcugggacuacaggcg

SEQ ID NO: 624551 - RNA, 18 nt, Human
cccuccuccucauccuca

SEQ ID NO: 624552 - RNA, 19 nt, Human
ccuauggccacuggcggcg

SEQ ID NO: 624553 - RNA, 23 nt, Human
ccugccucagccucccgaguagc

SEQ ID NO: 624554 - RNA, 21 nt, Human
ccuucugcuccucuccaagga

SEQ ID NO: 624555 - RNA, 24 nt, Human
cucagccucccgaguagcugggac

SEQ ID NO: 624556 - RNA, 22 nt, Human
cucauccguccccuccuccuca

SEQ ID NO: 624557 - RNA, 19 nt, Human
cuccuggguuuacuuacgc

SEQ ID NO: 624558 - RNA, 24 nt, Human
cucgcucuguuguccaggcuggag

SEQ ID NO: 624559 - RNA, 24 nt, Human
cucucaugcacaggcuggccaucu

SEQ ID NO: 624560 - RNA, 21 nt, Human
cucugaagccuucugcuccuc

SEQ ID NO: 624561 - RNA, 23 nt, Human
cugauagagcgccagccucuccu

SEQ ID NO: 624562 - RNA, 23 nt, Human
cugccucagccucccgaguagcu

SEQ ID NO: 624563 - RNA, 24 nt, Human
gacuacaggcgcccgccaccaugc

SEQ ID NO: 624564 - RNA, 25 nt, Human
gaguagcugggacuacaggcgcccg

SEQ ID NO: 624565 - RNA, 19 nt, Human
gccauucuccugccucagc

SEQ ID NO: 624566 - RNA, 24 nt, Human
gcuggagugcaguggugcaaucug

SEQ ID NO: 624567 - RNA, 24 nt, Human
gucucgcucuguuguccaggcugg

SEQ ID NO: 624568 - RNA, 24 nt, Human
gucucugaagccuucugcuccucu

SEQ ID NO: 624569 - RNA, 18 nt, Human
guggggucucugaagccu

SEQ ID NO: 624570 - RNA, 22 nt, Human
uacaguccuccgccaacuuuuc

SEQ ID NO: 624571 - RNA, 18 nt, Human
ucacugcaagcuccgccu

SEQ ID NO: 624572 - RNA, 23 nt, Human
ucacugcaagcuccgccuccugg

SEQ ID NO: 624573 - RNA, 24 nt, Human
ucacugcaagcuccgccuccuggg

SEQ ID NO: 624574 - RNA, 23 nt, Human
ucagccucccgaguagcugggac

SEQ ID NO: 624575 - RNA, 18 nt, Human
ucagugauguugcccagc

SEQ ID NO: 624576 - RNA, 19 nt, Human
ucauccguccccuccuccu

SEQ ID NO: 624577 - RNA, 22 nt, Human
ucauccucauccgggucucuca

SEQ ID NO: 624578 - RNA, 24 nt, Human
ucccgaguagcugggacuacaggc

SEQ ID NO: 624579 - RNA, 22 nt, Human
uccucauccucauccgggucuc

SEQ ID NO: 624580 - RNA, 23 nt, Human
uccuccucauccucauccggguc

SEQ ID NO: 624581 - RNA, 24 nt, Human
ucgcucuguuguccaggcuggagu

SEQ ID NO: 624582 - RNA, 23 nt, Human
ucuccaaggaccucauuuagcuc

SEQ ID NO: 624583 - RNA, 24 nt, Human
ucuccugccucagccucccgagua

SEQ ID NO: 624584 - RNA, 19 nt, Human
ucucgcucuguuguccagg

SEQ ID NO: 624585 - RNA, 22 nt, Human
ucucgcucuguuguccaggcug

SEQ ID NO: 624586 - RNA, 23 nt, Human
ucucgcucuguuguccaggcugg

SEQ ID NO: 624587 - RNA, 24 nt, Human
ucucgcucuguuguccaggcugga

SEQ ID NO: 624588 - RNA, 19 nt, Human
ucucucaugcacaggcugg

SEQ ID NO: 624589 - RNA, 24 nt, Human
ucuguuguccaggcuggagugcag

SEQ ID NO: 624590 - RNA, 24 nt, Human
ugaagccuucugcuccucuccaag

SEQ ID NO: 624591 - RNA, 18 nt, Human
ugagauagagucucgcuc

SEQ ID NO: 624592 - RNA, 22 nt, Human
ugagauagagucucgcucuguu

SEQ ID NO: 624593 - RNA, 22 nt, Human
ugcaaucugggcucacugcaag

SEQ ID NO: 624594 - RNA, 22 nt, Human
ugcacaggcuggccaucuucuc

SEQ ID NO: 624595 - RNA, 24 nt, Human
ugccucagccucccgaguagcugg

SEQ ID NO: 624596 - RNA, 23 nt, Human
uggagugcaguggugcaaucugg

SEQ ID NO: 624597 - RNA, 21 nt, Human
ugggacuacaggcgcccgcca

SEQ ID NO: 624598 - RNA, 22 nt, Human
ugggacuacaggcgcccgccac

SEQ ID NO: 624599 - RNA, 24 nt, Human
ugggacuacaggcgcccgccacca

SEQ ID NO: 624600 - RNA, 25 nt, Human
ugggacuacaggcgcccgccaccau

SEQ ID NO: 624601 - RNA, 23 nt, Human
uggguuuacuuacgccauucucc

SEQ ID NO: 624602 - RNA, 20 nt, Human
uguccaggcuggagugcagu

SEQ ID NO: 624603 - RNA, 24 nt, Human
uguccaggcuggagugcaguggug

SEQ ID NO: 624604 - RNA, 19 nt, Human
uguuguccaggcuggagug

SEQ ID NO: 624605 - RNA, 22 nt, Human
uucagugauguugcccagcugg

SEQ ID NO: 624606 - RNA, 22 nt, Human
uucggcugggccacaggaggug

SEQ ID NO: 624607 - RNA, 21 nt, Human
uugucuggcgcuuucaauugc

SEQ ID NO: 624608 - RNA, 25 nt, Human
uuuuuuuuuuuugagauagagucuc

SEQ ID NO: 624609 - RNA, 27 nt, Human
uuuuuuuuuuuuuuuuuuuuuuugggg

SEQ ID NO: 624610 - RNA, 24 nt, Human
uccgcuggcgccuccgcccgccaa

SEQ ID NO: 624611 - RNA, 21 nt, Human
ugaaggugacgugacaucucu

SEQ ID NO: 624612 - RNA, 21 nt, Human
uuuuuuuuuuuuuuuugaagg

SEQ ID NO: 624613 - RNA, 18 nt, Human
uuuuuuuuuuuuuuuuug

SEQ ID NO: 624614 - RNA, 22 nt, Human
aagacuacaaagagguuaaccg

SEQ ID NO: 624615 - RNA, 25 nt, Human
agaaaggacugugcugacucccuca

SEQ ID NO: 624616 - RNA, 18 nt, Human
agagaagaagaggugaua

SEQ ID NO: 624617 - RNA, 22 nt, Human
agcaagacuacaaagagguuaa

SEQ ID NO: 624618 - RNA, 24 nt, Human
augguccuggguuagaagcugcag

SEQ ID NO: 624619 - RNA, 19 nt, Human
cacaauauuuagaaaucag

SEQ ID NO: 624620 - RNA, 18 nt, Human
cacagcccccagcauucc

SEQ ID NO: 624621 - RNA, 18 nt, Human
cagaagaccugcagaccu

SEQ ID NO: 624622 - RNA, 23 nt, Human
cagcccccagcauuccuuguccu

SEQ ID NO: 624623 - RNA, 19 nt, Human
cagcucuuuccuucuuggg

SEQ ID NO: 624624 - RNA, 18 nt, Human
cauccgucauugcugggu

SEQ ID NO: 624625 - RNA, 22 nt, Human
ccucuugaugcugcugucuuuu

SEQ ID NO: 624626 - RNA, 22 nt, Human
ccuuuaccagaccuuuagucuc

SEQ ID NO: 624627 - RNA, 20 nt, Human
ccuuuagucucucuucuucu

SEQ ID NO: 624628 - RNA, 18 nt, Human
cgcuugcuccucucagca

SEQ ID NO: 624629 - RNA, 23 nt, Human
cucagacucucaccagagaagaa

SEQ ID NO: 624630 - RNA, 23 nt, Human
cuccucuugaugcugcugucuuu

SEQ ID NO: 624631 - RNA, 21 nt, Human
cuguucccacagcccccagca

SEQ ID NO: 624632 - RNA, 18 nt, Human
cuuuagucucucuucuuc

SEQ ID NO: 624633 - RNA, 18 nt, Human
gacucccucaacuaaggg

SEQ ID NO: 624634 - RNA, 21 nt, Human
gacuccucauugaggggggug

SEQ ID NO: 624635 - RNA, 19 nt, Human
gcagaccugcaucaacccu

SEQ ID NO: 624636 - RNA, 21 nt, Human
gcucucugcuucccuagcccc

SEQ ID NO: 624637 - RNA, 22 nt, Human
gugcucugcucucugcuucccu

SEQ ID NO: 624638 - RNA, 18 nt, Human
uaccagaccuuuagucuc

SEQ ID NO: 624639 - RNA, 27 nt, Human
uaccagaccuuuagucucucuucuucu

SEQ ID NO: 624640 - RNA, 27 nt, Human
uagcaagacuacaaagagguuaaccga

SEQ ID NO: 624641 - RNA, 18 nt, Human
uagcaggaaugcuccuuc

SEQ ID NO: 624642 - RNA, 22 nt, Human
ucaccagagaagaagaggugau

SEQ ID NO: 624643 - RNA, 26 nt, Human
ucccuagccccgccauccuucucauc

SEQ ID NO: 624644 - RNA, 20 nt, Human
uccuggguuagaagcugcag

SEQ ID NO: 624645 - RNA, 21 nt, Human
uccuucuugggaugcugcugc

SEQ ID NO: 624646 - RNA, 18 nt, Human
ucucuaggcaccugaguu

SEQ ID NO: 624647 - RNA, 21 nt, Human
ucucuaggcaccugaguucau

SEQ ID NO: 624648 - RNA, 18 nt, Human
ucugggagggacuccuca

SEQ ID NO: 624649 - RNA, 18 nt, Human
ucuguuucuuuuuggcuu

SEQ ID NO: 624650 - RNA, 20 nt, Human
ucuuccucuuaccucugcug

SEQ ID NO: 624651 - RNA, 24 nt, Human
ucuucuugcuuuuccugcuucuuc

SEQ ID NO: 624652 - RNA, 22 nt, Human
ucuuuucuucuugcuuuuccug

SEQ ID NO: 624653 - RNA, 22 nt, Human
ugagaaaaaagucucuauccuc

SEQ ID NO: 624654 - RNA, 28 nt, Human
ugcagaaaggacugugcugaucagugga

SEQ ID NO: 624655 - RNA, 18 nt, Human
ugcucugcucucugcuuc

SEQ ID NO: 624656 - RNA, 22 nt, Human
ugcugcuugagccagugugugc

SEQ ID NO: 624657 - RNA, 21 nt, Human
ugcuggguccgcuccgcggaa

SEQ ID NO: 624658 - RNA, 22 nt, Human
ugcuugagccagugugugcucc

SEQ ID NO: 624659 - RNA, 20 nt, Human
ugcuuuuccugcuucuucca

SEQ ID NO: 624660 - RNA, 20 nt, Human
uggacagugcugacuccagc

SEQ ID NO: 624661 - RNA, 21 nt, Human
uggcaacugugggcuaaaucu

SEQ ID NO: 624662 - RNA, 21 nt, Human
uguucccacagcccccagcau

SEQ ID NO: 624663 - RNA, 18 nt, Human
uguuucuuuuuggcuuuc

SEQ ID NO: 624664 - RNA, 21 nt, Human
uuccuucuugggaugcugcug

SEQ ID NO: 624665 - RNA, 24 nt, Human
uugaggggggugcagaagaccugc

SEQ ID NO: 624666 - RNA, 19 nt, Human
uuuagcugccuggcuucuc

SEQ ID NO: 624667 - RNA, 23 nt, Human
uuucuggacagugcugacuccag

SEQ ID NO: 624668 - RNA, 25 nt, Human
aaagccccgcucauaaagggugcuu

SEQ ID NO: 624669 - RNA, 23 nt, Human
acagacaguggucaaaaaagagc

SEQ ID NO: 624670 - RNA, 20 nt, Human
accaagacccccagcaugaa

SEQ ID NO: 624671 - RNA, 22 nt, Human
accaagacccccagcaugaugg

SEQ ID NO: 624672 - RNA, 23 nt, Human
accugguagggcauacccaagaa

SEQ ID NO: 624673 - RNA, 26 nt, Human
acucuggcucuuguccaguuccuucu

SEQ ID NO: 624674 - RNA, 18 nt, Human
agaaaugagauggaagga

SEQ ID NO: 624675 - RNA, 19 nt, Human
agagaacacacucuggcuc

SEQ ID NO: 624676 - RNA, 19 nt, Human
agcugugaccaagaauggg

SEQ ID NO: 624677 - RNA, 19 nt, Human
aggagagaacucaggcacc

SEQ ID NO: 624678 - RNA, 23 nt, Human
agggaggggcuuagaggcauuug

SEQ ID NO: 624679 - RNA, 21 nt, Human
aguguucaguggaauuguggg

SEQ ID NO: 624680 - RNA, 21 nt, Human
augauauucucaaagccccgc

SEQ ID NO: 624681 - RNA, 24 nt, Human
augcugcugggcccugucccgucc

SEQ ID NO: 624682 - RNA, 21 nt, Human
caagggaggggacagggaggg

SEQ ID NO: 624683 - RNA, 22 nt, Human
caaguuaaaaagacucccauga

SEQ ID NO: 624684 - RNA, 20 nt, Human
cacguagcucccggcucacc

SEQ ID NO: 624685 - RNA, 24 nt, Human
cacuccguuugcuuccccgagcgc

SEQ ID NO: 624686 - RNA, 22 nt, Human
cacucuggcucuuguccaguuc

SEQ ID NO: 624687 - RNA, 20 nt, Human
cagaagaacacagaagccac

SEQ ID NO: 624688 - RNA, 19 nt, Human
cagaagccaccugcuggga

SEQ ID NO: 624689 - RNA, 20 nt, Human
cagaagccaccugcugggag

SEQ ID NO: 624690 - RNA, 26 nt, Human
cagcguggguucacuuagaggagcuu

SEQ ID NO: 624691 - RNA, 23 nt, Human
caggaggcugcuaaagucuggag

SEQ ID NO: 624692 - RNA, 18 nt, Human
cagguggaggugaggcug

SEQ ID NO: 624693 - RNA, 20 nt, Human
cagguggaggugaggcugcu

SEQ ID NO: 624694 - RNA, 18 nt, Human
caguagggccagaaaagu

SEQ ID NO: 624695 - RNA, 22 nt, Human
cauggugaacagacagugguca

SEQ ID NO: 624696 - RNA, 18 nt, Human
ccaagacccccagcauga

SEQ ID NO: 624697 - RNA, 19 nt, Human
ccacacccaggcuucaggu

SEQ ID NO: 624698 - RNA, 25 nt, Human
ccagagacccugcugccuucgccag

SEQ ID NO: 624699 - RNA, 20 nt, Human
cccugcgguuccugccgccu

SEQ ID NO: 624700 - RNA, 19 nt, Human
ccgaccccaggccgccgac

SEQ ID NO: 624701 - RNA, 23 nt, Human
ccuccaggcugcggaagcggccc

SEQ ID NO: 624702 - RNA, 26 nt, Human
ccuucugcuguggcuagagcugugac

SEQ ID NO: 624703 - RNA, 22 nt, Human
cgaccccaggccgccgaccccu

SEQ ID NO: 624704 - RNA, 28 nt, Human
cggcucuggugggaccucagcaguucca

SEQ ID NO: 624705 - RNA, 20 nt, Human
cuccagagacccugcugccu

SEQ ID NO: 624706 - RNA, 24 nt, Human
cuccuuauucugccgcuucaugau

SEQ ID NO: 624707 - RNA, 22 nt, Human
cucggccgccggcgccggcgcc

SEQ ID NO: 624708 - RNA, 20 nt, Human
cugcugccuucgccagcagc

SEQ ID NO: 624709 - RNA, 24 nt, Human
cuggcucuuguccaguuccuucug

SEQ ID NO: 624710 - RNA, 28 nt, Human
cuggcucuuguccaguuccuucugcagg

SEQ ID NO: 624711 - RNA, 18 nt, Human
cugugaccaagaauggga

SEQ ID NO: 624712 - RNA, 23 nt, Human
cuucagguggaggugaggcugcu

SEQ ID NO: 624713 - RNA, 19 nt, Human
gaagaacugagguggaggc

SEQ ID NO: 624714 - RNA, 20 nt, Human
gcauuuugaagugagaggca

SEQ ID NO: 624715 - RNA, 20 nt, Human
gccagguccuucaaccauau

SEQ ID NO: 624716 - RNA, 18 nt, Human
gccuggauacagaugcgg

SEQ ID NO: 624717 - RNA, 21 nt, Human
gcggaagcggcccugcuucug

SEQ ID NO: 624718 - RNA, 18 nt, Human
gggaauggaaaguuggaa

SEQ ID NO: 624719 - RNA, 20 nt, Human
gggacagggaggggcuuaga

SEQ ID NO: 624720 - RNA, 21 nt, Human
guaggaggcugagaugcugcu

SEQ ID NO: 624721 - RNA, 22 nt, Human
gucaggucguauuuccacacuc

SEQ ID NO: 624722 - RNA, 23 nt, Human
uacaagggaggggacagggaggg

SEQ ID NO: 624723 - RNA, 20 nt, Human
uagggccagaaaaguguuca

SEQ ID NO: 624724 - RNA, 19 nt, Human
uagugacuccccugguguc

SEQ ID NO: 624725 - RNA, 21 nt, Human
uauucucaaagccccgcucau

SEQ ID NO: 624726 - RNA, 26 nt, Human
uauucugccgcuucaugauauucuca

SEQ ID NO: 624727 - RNA, 21 nt, Human
ucaaaaaagagcuccagagac

SEQ ID NO: 624728 - RNA, 22 nt, Human
ucaguggccaggaaggcagggc

SEQ ID NO: 624729 - RNA, 19 nt, Human
uccacagcaggggguggga

SEQ ID NO: 624730 - RNA, 24 nt, Human
uccacugacagccacacccaggcu

SEQ ID NO: 624731 - RNA, 21 nt, Human
ucccaugaagaacugccaccu

SEQ ID NO: 624732 - RNA, 21 nt, Human
uccccgagcgcccugcgguuc

SEQ ID NO: 624733 - RNA, 24 nt, Human
uccccgagcgcccugcgguuccug

SEQ ID NO: 624734 - RNA, 22 nt, Human
ucugcuguggcuagagcugugg

SEQ ID NO: 624735 - RNA, 23 nt, Human
ucuggaagccccuuuccuucugc

SEQ ID NO: 624736 - RNA, 25 nt, Human
ucuggcucuuguccaguuccuucug

SEQ ID NO: 624737 - RNA, 24 nt, Human
ucuggugggaccucagcaguucca

SEQ ID NO: 624738 - RNA, 28 nt, Human
ucuugcaggauggccuggauacagaugc

SEQ ID NO: 624739 - RNA, 19 nt, Human
ugaccaagaaugggaacag

SEQ ID NO: 624740 - RNA, 24 nt, Human
ugaccaagacccccagcaugaugg

SEQ ID NO: 624741 - RNA, 20 nt, Human
ugauggggaauggaaaguug

SEQ ID NO: 624742 - RNA, 21 nt, Human
ugccuaggagagaacucaggc

SEQ ID NO: 624743 - RNA, 22 nt, Human
ugcggaagcggcccugcuucug

SEQ ID NO: 624744 - RNA, 20 nt, Human
uggaagaacugagguggagg

SEQ ID NO: 624745 - RNA, 27 nt, Human
uggaagaaguaggacuacaagggagga

SEQ ID NO: 624746 - RNA, 22 nt, Human
uggaagccccuuuccuucugcu

SEQ ID NO: 624747 - RNA, 19 nt, Human
uggaaggaaguggaaggca

SEQ ID NO: 624748 - RNA, 21 nt, Human
uggaaggaaguggaaggcaga

SEQ ID NO: 624749 - RNA, 23 nt, Human
uggaaggcagagggcaagggcgg

SEQ ID NO: 624750 - RNA, 19 nt, Human
uggagagaagcugagccuu

SEQ ID NO: 624751 - RNA, 18 nt, Human
uggaggcugggggccaug

SEQ ID NO: 624752 - RNA, 21 nt, Human
uggaggcugggggccaugugc

SEQ ID NO: 624753 - RNA, 20 nt, Human
uggauacagaugcgguaacc

SEQ ID NO: 624754 - RNA, 19 nt, Human
uggcucagcguggguucac

SEQ ID NO: 624755 - RNA, 24 nt, Human
ugggaacaggaggcugccgggauc

SEQ ID NO: 624756 - RNA, 20 nt, Human
ugggaacaggaggcugcuaa

SEQ ID NO: 624757 - RNA, 24 nt, Human
uggggcaggcugggcauuuugaag

SEQ ID NO: 624758 - RNA, 18 nt, Human
ugggguuuagaaaugaga

SEQ ID NO: 624759 - RNA, 19 nt, Human
uguccaguuccuucugcag

SEQ ID NO: 624760 - RNA, 22 nt, Human
uuucagugcuuccuccaggcug

SEQ ID NO: 624761 - RNA, 19 nt, Human
uuugcuuccccgagcgccc

SEQ ID NO: 624762 - RNA, 20 nt, Human
uuugcuuccccgagcgcccu

SEQ ID NO: 624763 - RNA, 26 nt, Human
uuugucagaagaacacagaagccacc

SEQ ID NO: 624764 - RNA, 20 nt, Human
aacagccaggagcugcuggc

SEQ ID NO: 624765 - RNA, 19 nt, Human
aagcucucuccagcuuucc

SEQ ID NO: 624766 - RNA, 20 nt, Human
acaggacgcuuccacuuccc

SEQ ID NO: 624767 - RNA, 21 nt, Human
acugcccaccuccaccaccca

SEQ ID NO: 624768 - RNA, 23 nt, Human
aggaacagccaggagcugcuggc

SEQ ID NO: 624769 - RNA, 19 nt, Human
caccacucugacucuggcc

SEQ ID NO: 624770 - RNA, 23 nt, Human
cacucugacucuggccuuugccu

SEQ ID NO: 624771 - RNA, 25 nt, Human
cacucugacucuggccuuugccugu

SEQ ID NO: 624772 - RNA, 18 nt, Human
cagcagccccuguccucc

SEQ ID NO: 624773 - RNA, 25 nt, Human
cagcgcagccagcucgaccccuugg

SEQ ID NO: 624774 - RNA, 18 nt, Human
caggagcugcuggcauga

SEQ ID NO: 624775 - RNA, 18 nt, Human
ccacucugacucuggccu

SEQ ID NO: 624776 - RNA, 21 nt, Human
ccacugcccaccuccaccacc

SEQ ID NO: 624777 - RNA, 23 nt, Human
ccacugcccaccuccaccaccca

SEQ ID NO: 624778 - RNA, 21 nt, Human
cccccagacaggacgcuucca

SEQ ID NO: 624779 - RNA, 25 nt, Human
cccguagugaggacagcuguguggc

SEQ ID NO: 624780 - RNA, 22 nt, Human
cccuguccuccccaccacucug

SEQ ID NO: 624781 - RNA, 19 nt, Human
ccuccagucugcaaucaac

SEQ ID NO: 624782 - RNA, 27 nt, Human
ccuccagucugcaaucaacaccauuuu

SEQ ID NO: 624783 - RNA, 22 nt, Human
cucgcaagccgccgucucccgc

SEQ ID NO: 624784 - RNA, 22 nt, Human
cugaauagcuuuauugagcauu

SEQ ID NO: 624785 - RNA, 21 nt, Human
cugcaguggcuuuccaggagc

SEQ ID NO: 624786 - RNA, 20 nt, Human
gaacagccaggagcugcugg

SEQ ID NO: 624787 - RNA, 22 nt, Human
gccgguccgcugcugccggcgc

SEQ ID NO: 624788 - RNA, 19 nt, Human
ggaggacaggucacggagg

SEQ ID NO: 624789 - RNA, 22 nt, Human
ggaggacaggucacggaggcuc

SEQ ID NO: 624790 - RNA, 20 nt, Human
gggaggacaggucacggagg

SEQ ID NO: 624791 - RNA, 22 nt, Human
ucaacaccauuggccccaggug

SEQ ID NO: 624792 - RNA, 22 nt, Human
ucacccuugcuugggaaucugc

SEQ ID NO: 624793 - RNA, 21 nt, Human
ucacggaggcucgcugccuca

SEQ ID NO: 624794 - RNA, 23 nt, Human
ucacggaggcucgcugccucaaa

SEQ ID NO: 624795 - RNA, 21 nt, Human
ucacugaauagcuuuauugag

SEQ ID NO: 624796 - RNA, 19 nt, Human
ucaggugaggaacagccag

SEQ ID NO: 624797 - RNA, 19 nt, Human
uccaccacccagcagugcu

SEQ ID NO: 624798 - RNA, 23 nt, Human
uccgccccaucuauaagcuggca

SEQ ID NO: 624799 - RNA, 19 nt, Human
uccuccccaccacucugac

SEQ ID NO: 624800 - RNA, 23 nt, Human
ugacccucagcggagguuacccc

SEQ ID NO: 624801 - RNA, 23 nt, Human
ugagggaggacaggucacggagg

SEQ ID NO: 624802 - RNA, 22 nt, Human
ugcaaggacggcggcugccgcg

SEQ ID NO: 624803 - RNA, 21 nt, Human
ugcagaaaguacccaaugcca

SEQ ID NO: 624804 - RNA, 18 nt, Human
uggcaggcccggcugccu

SEQ ID NO: 624805 - RNA, 19 nt, Human
uggcaggcccggcugccug

SEQ ID NO: 624806 - RNA, 18 nt, Human
uggcaugaggcucugggg

SEQ ID NO: 624807 - RNA, 23 nt, Human
ugggcugggcacuaagcucagca

SEQ ID NO: 624808 - RNA, 22 nt, Human
uggugccacugcccaccuccac

SEQ ID NO: 624809 - RNA, 19 nt, Human
uguugccgaggcugcuccc

SEQ ID NO: 624810 - RNA, 19 nt, Human
uuuccaggagcggggcagc

SEQ ID NO: 624811 - RNA, 22 nt, Human
uuuuuuuuuuuuucacugaaua

SEQ ID NO: 624812 - RNA, 24 nt, Human
uuuuuuuuuuuuuuuuuucacuga

SEQ ID NO: 624813 - RNA, 24 nt, Human
uuuuuuuuuuuuuuuuuuucacug

SEQ ID NO: 624814 - RNA, 20 nt, Human
aaaacccaacccccucuccc

SEQ ID NO: 624815 - RNA, 22 nt, Human
aaaacccaacccccucucccac

SEQ ID NO: 624816 - RNA, 21 nt, Human
aaacccaacccccucucccac

SEQ ID NO: 624817 - RNA, 24 nt, Human
aaccacucaggcuucaacacccga

SEQ ID NO: 624818 - RNA, 27 nt, Human
accaaaacaagaggcccgcgagacccg

SEQ ID NO: 624819 - RNA, 24 nt, Human
accacucaggcuucaacacccgaa

SEQ ID NO: 624820 - RNA, 20 nt, Human
acccaacccccucucccacu

SEQ ID NO: 624821 - RNA, 20 nt, Human
accccuuucuccuccgccac

SEQ ID NO: 624822 - RNA, 19 nt, Human
agcagggggacccagcucu

SEQ ID NO: 624823 - RNA, 18 nt, Human
agcccgcgagaccaaaac

SEQ ID NO: 624824 - RNA, 25 nt, Human
agcuagggacaagagcuagguacaa

SEQ ID NO: 624825 - RNA, 19 nt, Human
aggaagaugauggugacuc

SEQ ID NO: 624826 - RNA, 23 nt, Human
aggaagaugauggugacuccagc

SEQ ID NO: 624827 - RNA, 20 nt, Human
aggaggaaagggcuagagaa

SEQ ID NO: 624828 - RNA, 21 nt, Human
aggaggaagaugggggugcag

SEQ ID NO: 624829 - RNA, 21 nt, Human
aggagguggccgcggccccgg

SEQ ID NO: 624830 - RNA, 22 nt, Human
aggcugaggcagcgacggaaga

SEQ ID NO: 624831 - RNA, 24 nt, Human
agggcagccucuucacacuuucug

SEQ ID NO: 624832 - RNA, 24 nt, Human
aggggcugugggcggcacggggug

SEQ ID NO: 624833 - RNA, 24 nt, Human
aggguuggggggcaucccgguucu

SEQ ID NO: 624834 - RNA, 23 nt, Human
agguggccgguggggcugauagc

SEQ ID NO: 624835 - RNA, 19 nt, Human
auaucuuuggggaugagga

SEQ ID NO: 624836 - RNA, 20 nt, Human
aucuuugagcggcggcggcg

SEQ ID NO: 624837 - RNA, 21 nt, Human
auggcccacauugcagcccag

SEQ ID NO: 624838 - RNA, 22 nt, Human
augggggugcagagauaacuga

SEQ ID NO: 624839 - RNA, 25 nt, Human
caaaacaagaggcccgcgagacccg

SEQ ID NO: 624840 - RNA, 21 nt, Human
caacucccucggcccuuuucc

SEQ ID NO: 624841 - RNA, 20 nt, Human
caccacuucaucccugcagu

SEQ ID NO: 624842 - RNA, 21 nt, Human
cacccgaaggcgcccauccuc

SEQ ID NO: 624843 - RNA, 18 nt, Human
caccguggggccgccccc

SEQ ID NO: 624844 - RNA, 18 nt, Human
cagccugggaggcugggg

SEQ ID NO: 624845 - RNA, 21 nt, Human
cagcgacggaagaaaagcuuu

SEQ ID NO: 624846 - RNA, 20 nt, Human
cagggggccuaacccccccu

SEQ ID NO: 624847 - RNA, 22 nt, Human
caguaccugcgugccucccugc

SEQ ID NO: 624848 - RNA, 24 nt, Human
ccacuugcaggcaaugcucagggu

SEQ ID NO: 624849 - RNA, 23 nt, Human
ccagucuucuccgucuaacccuc

SEQ ID NO: 624850 - RNA, 21 nt, Human
ccaugccauccagccugggag

SEQ ID NO: 624851 - RNA, 18 nt, Human
cccaacccccucucccac

SEQ ID NO: 624852 - RNA, 22 nt, Human
cccaccucccaugcccuaagag

SEQ ID NO: 624853 - RNA, 18 nt, Human
cccccagguggccggugg

SEQ ID NO: 624854 - RNA, 22 nt, Human
cccccccugccuggacccugcu

SEQ ID NO: 624855 - RNA, 22 nt, Human
cccccgccucccccuacauuac

SEQ ID NO: 624856 - RNA, 23 nt, Human
ccccgccccccccagguggccgg

SEQ ID NO: 624857 - RNA, 21 nt, Human
ccccuacauuacagcuauuuc

SEQ ID NO: 624858 - RNA, 24 nt, Human
cccgcagauggcgcgcaacgaccc

SEQ ID NO: 624859 - RNA, 25 nt, Human
cccgcccccuccccggcgcuccucc

SEQ ID NO: 624860 - RNA, 19 nt, Human
cccuagccccugccuccga

SEQ ID NO: 624861 - RNA, 19 nt, Human
cccuccgcccgacucaucu

SEQ ID NO: 624862 - RNA, 23 nt, Human
cccucggugcugcugcgccuggg

SEQ ID NO: 624863 - RNA, 23 nt, Human
cccugccuggacccugcucccuu

SEQ ID NO: 624864 - RNA, 19 nt, Human
cccugugccgcggcugcug

SEQ ID NO: 624865 - RNA, 20 nt, Human
ccgcagauggcgcgcaacga

SEQ ID NO: 624866 - RNA, 23 nt, Human
ccgcagauggcgcgcaacgaccc

SEQ ID NO: 624867 - RNA, 18 nt, Human
ccgcccccucggugcugc

SEQ ID NO: 624868 - RNA, 24 nt, Human
ccgccugcgccucuugaaggccgg

SEQ ID NO: 624869 - RNA, 19 nt, Human
ccgcgcgugcgccgacccc

SEQ ID NO: 624870 - RNA, 23 nt, Human
ccgucccgccgcggagcuccccc

SEQ ID NO: 624871 - RNA, 22 nt, Human
ccguggggccgcccccuccgcc

SEQ ID NO: 624872 - RNA, 20 nt, Human
ccuagccccugccuccgacc

SEQ ID NO: 624873 - RNA, 20 nt, Human
ccucccccacguccggggga

SEQ ID NO: 624874 - RNA, 19 nt, Human
ccuccccggcgcuccuccc

SEQ ID NO: 624875 - RNA, 26 nt, Human
ccuccggcugccugcugcugcuggug

SEQ ID NO: 624876 - RNA, 21 nt, Human
ccugcaguugauggcuguguu

SEQ ID NO: 624877 - RNA, 19 nt, Human
ccugcugcaggcagugggu

SEQ ID NO: 624878 - RNA, 20 nt, Human
ccuggccuccaccccuagcc

SEQ ID NO: 624879 - RNA, 24 nt, Human
ccugggggccgcccccucggugcu

SEQ ID NO: 624880 - RNA, 23 nt, Human
ccugugccgcggcugcugugagg

SEQ ID NO: 624881 - RNA, 26 nt, Human
cgacaggcgggccuccccaugcgacu

SEQ ID NO: 624882 - RNA, 18 nt, Human
cgacccggaccacgcucc

SEQ ID NO: 624883 - RNA, 20 nt, Human
cgagaccaaaacaagaggcu

SEQ ID NO: 624884 - RNA, 25 nt, Human
cgcaugcgcacuccgccaccacccu

SEQ ID NO: 624885 - RNA, 19 nt, Human
cgcccaagcgccuccccgc

SEQ ID NO: 624886 - RNA, 22 nt, Human
cgcccgacucaucuuugagcgg

SEQ ID NO: 624887 - RNA, 22 nt, Human
cgccgcggagcuccccagaggc

SEQ ID NO: 624888 - RNA, 24 nt, Human
cgccuagucucgcgcccaagcgcc

SEQ ID NO: 624889 - RNA, 19 nt, Human
cgccugcgccucuugaagg

SEQ ID NO: 624890 - RNA, 22 nt, Human
cgcgcccaagcgccuccccgcc

SEQ ID NO: 624891 - RNA, 21 nt, Human
cggcgcuccucccccacgucc

SEQ ID NO: 624892 - RNA, 23 nt, Human
cuagacaucaaguuuauugugcu

SEQ ID NO: 624893 - RNA, 18 nt, Human
cucccccgccucccccua

SEQ ID NO: 624894 - RNA, 18 nt, Human
cucccuuccccccuuucc

SEQ ID NO: 624895 - RNA, 19 nt, Human
cucccuuccccccuuuccc

SEQ ID NO: 624896 - RNA, 22 nt, Human
cucugcucuucacgccuagucu

SEQ ID NO: 624897 - RNA, 18 nt, Human
cugcagagcagauggaag

SEQ ID NO: 624898 - RNA, 22 nt, Human
cugcagagcagauggaagggga

SEQ ID NO: 624899 - RNA, 23 nt, Human
cugcaggcagugggugguggugg

SEQ ID NO: 624900 - RNA, 21 nt, Human
cugcugcugcugguggugcug

SEQ ID NO: 624901 - RNA, 24 nt, Human
cugcugcugcugguggugcugucc

SEQ ID NO: 624902 - RNA, 18 nt, Human
cuggccccugugccgcgg

SEQ ID NO: 624903 - RNA, 19 nt, Human
cuugcccccgcccccccca

SEQ ID NO: 624904 - RNA, 19 nt, Human
cuuggaacccuggccucca

SEQ ID NO: 624905 - RNA, 18 nt, Human
cuuugagcggcggcggcg

SEQ ID NO: 624906 - RNA, 20 nt, Human
gaacccuggccuccaccccu

SEQ ID NO: 624907 - RNA, 18 nt, Human
gaagccucccccgccucc

SEQ ID NO: 624908 - RNA, 19 nt, Human
gaaggauuuucacaguacc

SEQ ID NO: 624909 - RNA, 20 nt, Human
gaauaggaggaaagggcuag

SEQ ID NO: 624910 - RNA, 21 nt, Human
gaccccuuucuccuccgccac

SEQ ID NO: 624911 - RNA, 21 nt, Human
gaccgcagcggcuggggaccc

SEQ ID NO: 624912 - RNA, 20 nt, Human
gaccuugggacacuuuccuc

SEQ ID NO: 624913 - RNA, 20 nt, Human
gacucaucuuugagcggcgg

SEQ ID NO: 624914 - RNA, 24 nt, Human
gacuugcuggaaguccugcgacgu

SEQ ID NO: 624915 - RNA, 21 nt, Human
gagaauaggaggaaagggccg

SEQ ID NO: 624916 - RNA, 24 nt, Human
gaggaagaugauggugacuccagc

SEQ ID NO: 624917 - RNA, 20 nt, Human
gaggaggcugaggcagcgac

SEQ ID NO: 624918 - RNA, 18 nt, Human
gagggcagccucuucaca

SEQ ID NO: 624919 - RNA, 22 nt, Human
gaguucauaggguuggggggca

SEQ ID NO: 624920 - RNA, 19 nt, Human
gauaacugaggcagcugga

SEQ ID NO: 624921 - RNA, 26 nt, Human
gcccccuccccggcgcuccuccccca

SEQ ID NO: 624922 - RNA, 21 nt, Human
gccccgaaaccacucaggcuu

SEQ ID NO: 624923 - RNA, 23 nt, Human
gccccggaaccacgcaugcgcac

SEQ ID NO: 624924 - RNA, 18 nt, Human
gccuccaccccuagcccc

SEQ ID NO: 624925 - RNA, 26 nt, Human
gccucuuggugcgguggcaccguggg

SEQ ID NO: 624926 - RNA, 24 nt, Human
gcgaagcaagaacuacauggcccu

SEQ ID NO: 624927 - RNA, 18 nt, Human
gcggccuccccaacuccc

SEQ ID NO: 624928 - RNA, 21 nt, Human
gcggcggcggcggggccggca

SEQ ID NO: 624929 - RNA, 18 nt, Human
gcugugggcggcacgggg

SEQ ID NO: 624930 - RNA, 24 nt, Human
ggacacuuuccucuucccccaggu

SEQ ID NO: 624931 - RNA, 19 nt, Human
ggaggaaguuggaagguaa

SEQ ID NO: 624932 - RNA, 20 nt, Human
ggaggcugggggagaggaag

SEQ ID NO: 624933 - RNA, 20 nt, Human
ggaguaagggggugagaggg

SEQ ID NO: 624934 - RNA, 19 nt, Human
ggcuauucagguucagggg

SEQ ID NO: 624935 - RNA, 21 nt, Human
gggaggcugggggagaggaag

SEQ ID NO: 624936 - RNA, 21 nt, Human
gggccgcccccucggugcugc

SEQ ID NO: 624937 - RNA, 24 nt, Human
ggggacccagcucugucccgcccc

SEQ ID NO: 624938 - RNA, 18 nt, Human
ggggagaggaagaugaug

SEQ ID NO: 624939 - RNA, 21 nt, Human
ggggagcggcucgccccgggg

SEQ ID NO: 624940 - RNA, 19 nt, Human
ggggagggcaaagggaagg

SEQ ID NO: 624941 - RNA, 19 nt, Human
gggggacccagcucugucc

SEQ ID NO: 624942 - RNA, 18 nt, Human
gggugguggugguggugg

SEQ ID NO: 624943 - RNA, 25 nt, Human
ggucgaggaggagcagggggaccca

SEQ ID NO: 624944 - RNA, 19 nt, Human
ggugccagaggcauaggga

SEQ ID NO: 624945 - RNA, 19 nt, Human
ggugcgguggcaccguggg

SEQ ID NO: 624946 - RNA, 21 nt, Human
gguggugcuguccccgguguc

SEQ ID NO: 624947 - RNA, 20 nt, Human
gucccggccccgaaaccacu

SEQ ID NO: 624948 - RNA, 23 nt, Human
guggugguggugguggcggccuc

SEQ ID NO: 624949 - RNA, 19 nt, Human
guugauggcuguguugagu

SEQ ID NO: 624950 - RNA, 21 nt, Human
uaccacccggccgcgagcgcg

SEQ ID NO: 624951 - RNA, 21 nt, Human
uaggacgucccggccccgaaa

SEQ ID NO: 624952 - RNA, 22 nt, Human
ucagacuacgaaccaacuuaac

SEQ ID NO: 624953 - RNA, 22 nt, Human
ucccacugggggagggcaaagg

SEQ ID NO: 624954 - RNA, 29 nt, Human
ucccaugcccuaagagaacagagguuggg

SEQ ID NO: 624955 - RNA, 24 nt, Human
ucccgccgcggagcuccccagagg

SEQ ID NO: 624956 - RNA, 20 nt, Human
ucccggccccgaaaccacuc

SEQ ID NO: 624957 - RNA, 20 nt, Human
ucccugcaguugauggcugu

SEQ ID NO: 624958 - RNA, 19 nt, Human
uccggcugccugcugcugc

SEQ ID NO: 624959 - RNA, 20 nt, Human
uccucuugcccccgcccccc

SEQ ID NO: 624960 - RNA, 18 nt, Human
ucgggaggaggaagaugg

SEQ ID NO: 624961 - RNA, 23 nt, Human
ucucacauugaaaacccaacccc

SEQ ID NO: 624962 - RNA, 18 nt, Human
ucuugcccccgccccccc

SEQ ID NO: 624963 - RNA, 20 nt, Human
ucuugcccccgcccccccca

SEQ ID NO: 624964 - RNA, 22 nt, Human
ugaaaacccaacccccucuccc

SEQ ID NO: 624965 - RNA, 19 nt, Human
ugaagccucccccgccucc

SEQ ID NO: 624966 - RNA, 21 nt, Human
ugagaggggcugugggcggca

SEQ ID NO: 624967 - RNA, 18 nt, Human
ugagcggcggcggcgggc

SEQ ID NO: 624968 - RNA, 22 nt, Human
ugaggcagcuggaggggcugau

SEQ ID NO: 624969 - RNA, 19 nt, Human
ugcagagauaacugaggca

SEQ ID NO: 624970 - RNA, 19 nt, Human
ugcaggcaguggguggugg

SEQ ID NO: 624971 - RNA, 24 nt, Human
ugcaggcaguggguggugguggug

SEQ ID NO: 624972 - RNA, 25 nt, Human
ugccugcugcugcugguggugcugu

SEQ ID NO: 624973 - RNA, 20 nt, Human
ugcgcaggugccagaggcau

SEQ ID NO: 624974 - RNA, 20 nt, Human
ugcgcuguugcuuuuugaag

SEQ ID NO: 624975 - RNA, 22 nt, Human
ugcgugccucccugccagucuu

SEQ ID NO: 624976 - RNA, 24 nt, Human
ugcugcgccuggggaccacuggag

SEQ ID NO: 624977 - RNA, 19 nt, Human
uggaacccuggccuccacc

SEQ ID NO: 624978 - RNA, 21 nt, Human
uggaggggcugauagggagcc

SEQ ID NO: 624979 - RNA, 22 nt, Human
uggcaccguggggccgcccccu

SEQ ID NO: 624980 - RNA, 18 nt, Human
ugggaggcugggggagag

SEQ ID NO: 624981 - RNA, 21 nt, Human
uggggaccacuggaggaggug

SEQ ID NO: 624982 - RNA, 23 nt, Human
uggggaccacuggaggagguggc

SEQ ID NO: 624983 - RNA, 22 nt, Human
ugggggagaggaagaugauggu

SEQ ID NO: 624984 - RNA, 24 nt, Human
ugggggagaggaagaugaugguga

SEQ ID NO: 624985 - RNA, 18 nt, Human
ugggugguggugguggug

SEQ ID NO: 624986 - RNA, 23 nt, Human
uggugcgguggcaccguggggcc

SEQ ID NO: 624987 - RNA, 20 nt, Human
uggugguggugguggcggcc

SEQ ID NO: 624988 - RNA, 21 nt, Human
ugucgggaggaggaagauggg

SEQ ID NO: 624989 - RNA, 22 nt, Human
uuacagcuauuucuccucuugc

SEQ ID NO: 624990 - RNA, 21 nt, Human
uuccucauccaggaggcuauu

SEQ ID NO: 624991 - RNA, 22 nt, Human
uuccuccccuuauuccgugcca

SEQ ID NO: 624992 - RNA, 19 nt, Human
uuugaagccucccccgccu

SEQ ID NO: 624993 - RNA, 19 nt, Human
uuuuccuuggaacccuggc

SEQ ID NO: 624994 - RNA, 22 nt, Human
uuuuccuuggaacccuggccuc

SEQ ID NO: 624995 - RNA, 20 nt, Human
uuuuuuuuuuuuugggggcc

SEQ ID NO: 624996 - RNA, 20 nt, Human
uuuuuuuuuuuuuuuggggg

SEQ ID NO: 624997 - RNA, 22 nt, Human
uuuuuuuuuuuuuuuuuggggg

SEQ ID NO: 624998 - RNA, 24 nt, Human
aaaguaaauuuauugaagcauaga

SEQ ID NO: 624999 - RNA, 22 nt, Human
cagaaagaugccuagauugaug

SEQ ID NO: 625000 - RNA, 19 nt, Human
guccuucuugauuuuuuuu

SEQ ID NO: 625001 - RNA, 19 nt, Human
uaagaagaugcagaaaagu

SEQ ID NO: 625002 - RNA, 23 nt, Human
uccuucuugauuuuuuuuuucuu

SEQ ID NO: 625003 - RNA, 25 nt, Human
ugaagcauagaaacaauuaaagcaa

SEQ ID NO: 625004 - RNA, 22 nt, Human
uuaaagcaaaguuguuaauuca

SEQ ID NO: 625005 - RNA, 24 nt, Human
uucuucgcuuguguccuucuugau

SEQ ID NO: 625006 - RNA, 21 nt, Human
uucuugauuuuuuuuuucuuu

SEQ ID NO: 625007 - RNA, 22 nt, Human
uuuauugaagcauagaaacaau

SEQ ID NO: 625008 - RNA, 21 nt, Human
uuuuuuuucuuugaaagacac

SEQ ID NO: 625009 - RNA, 24 nt, Human
uuuuuuuuuuuuuuuuuuaacuug

SEQ ID NO: 625010 - RNA, 22 nt, Human
uagaauaacagcagacuuuaag

SEQ ID NO: 625011 - RNA, 21 nt, Human
ucagguagagcagucaaagaa

SEQ ID NO: 625012 - RNA, 21 nt, Human
uucagguagagcagucaaaga

SEQ ID NO: 625013 - RNA, 21 nt, Human
acaccgcugcagccaaaacag

SEQ ID NO: 625014 - RNA, 23 nt, Human
acaccgcugcagccaaaacaggc

SEQ ID NO: 625015 - RNA, 19 nt, Human
accagcaggugaaagcacc

SEQ ID NO: 625016 - RNA, 19 nt, Human
caccugcggcccuagaauu

SEQ ID NO: 625017 - RNA, 20 nt, Human
caccugcggcccuagaauuc

SEQ ID NO: 625018 - RNA, 21 nt, Human
cagccaaaacaggcucccacg

SEQ ID NO: 625019 - RNA, 24 nt, Human
ccagcaggugaaagcaccuuuucc

SEQ ID NO: 625020 - RNA, 20 nt, Human
cccagacaccgcugcagcca

SEQ ID NO: 625021 - RNA, 19 nt, Human
ccccagacaccgcugcagc

SEQ ID NO: 625022 - RNA, 19 nt, Human
ccccagacaccgcugcagc

SEQ ID NO: 625023 - RNA, 20 nt, Human
ccccagacaccgcugcagcc

SEQ ID NO: 625024 - RNA, 25 nt, Human
gcucccacgagggccacacgggagu

SEQ ID NO: 625025 - RNA, 23 nt, Human
guggcgacaguuaccguaaauac

SEQ ID NO: 625026 - RNA, 20 nt, Human
uacaccugcggcccuagaau

SEQ ID NO: 625027 - RNA, 22 nt, Human
ucuuuuaccagcaggugaaagc

SEQ ID NO: 625028 - RNA, 19 nt, Human
aaaaaacaacgaaacaaca

SEQ ID NO: 625029 - RNA, 19 nt, Human
aaaaacaagcauuagaaga

SEQ ID NO: 625030 - RNA, 26 nt, Human
aaaaacuagugaaaacuucauguaua

SEQ ID NO: 625031 - RNA, 22 nt, Human
aaaacaacgaaacaacaaaccc

SEQ ID NO: 625032 - RNA, 24 nt, Human
aaacaaaaaaaaaacaaaaaacaa

SEQ ID NO: 625033 - RNA, 21 nt, Human
aaacaaaaaacaacgaaacaa

SEQ ID NO: 625034 - RNA, 24 nt, Human
aaacaaaacaaaaguacuugcuaa

SEQ ID NO: 625035 - RNA, 18 nt, Human
aaacaaaagccuuuaaac

SEQ ID NO: 625036 - RNA, 24 nt, Human
aaacaacaacaaaaaccucuauac

SEQ ID NO: 625037 - RNA, 26 nt, Human
aaacaacaacaaaaaccucuauacaa

SEQ ID NO: 625038 - RNA, 18 nt, Human
aaacaggcacaaaacacu

SEQ ID NO: 625039 - RNA, 21 nt, Human
aaacaggcacaaaacacugca

SEQ ID NO: 625040 - RNA, 25 nt, Human
aaacaggcacaaaacacugcaacaa

SEQ ID NO: 625041 - RNA, 24 nt, Human
aaacaggcacaaaacacugcaacu

SEQ ID NO: 625042 - RNA, 20 nt, Human
aaacucaucucauuucaaga

SEQ ID NO: 625043 - RNA, 21 nt, Human
aacaaaaacccaggaagaagu

SEQ ID NO: 625044 - RNA, 22 nt, Human
aacaaaaacccaggaagaagua

SEQ ID NO: 625045 - RNA, 22 nt, Human
aacaaaccccaacaaaaaccca

SEQ ID NO: 625046 - RNA, 25 nt, Human
aacaacaaaaaccucuauacaaaug

SEQ ID NO: 625047 - RNA, 19 nt, Human
aacgaaacaacaaacccca

SEQ ID NO: 625048 - RNA, 25 nt, Human
aacgaaacaacaaaccccaacaaaa

SEQ ID NO: 625049 - RNA, 18 nt, Human
aacuucuccaacauaaaa

SEQ ID NO: 625050 - RNA, 18 nt, Human
aagcauuagaaauggcau

SEQ ID NO: 625051 - RNA, 20 nt, Human
aauaacauugaaauaaaaug

SEQ ID NO: 625052 - RNA, 24 nt, Human
aauucagaaauaaaucugcuaaca

SEQ ID NO: 625053 - RNA, 19 nt, Human
acaaaaacccaggaagaag

SEQ ID NO: 625054 - RNA, 25 nt, Human
acaacaacaaaaaccucuauacaaa

SEQ ID NO: 625055 - RNA, 20 nt, Human
acaccaucaacccuuaaugc

SEQ ID NO: 625056 - RNA, 19 nt, Human
acaccccaauccaguucac

SEQ ID NO: 625057 - RNA, 27 nt, Human
acaggcacaaaacacugcaacaauaca

SEQ ID NO: 625058 - RNA, 23 nt, Human
acauaccaugaacuucuccaaca

SEQ ID NO: 625059 - RNA, 21 nt, Human
accucacuuccuugauugagc

SEQ ID NO: 625060 - RNA, 21 nt, Human
agaagauauuuacaaacuauc

SEQ ID NO: 625061 - RNA, 24 nt, Human
agccaucaacaaaaaucccgugag

SEQ ID NO: 625062 - RNA, 21 nt, Human
aggcaugcuaaguugaaaaua

SEQ ID NO: 625063 - RNA, 19 nt, Human
auggagaaugagccccggc

SEQ ID NO: 625064 - RNA, 19 nt, Human
auggaucucuaacaugaca

SEQ ID NO: 625065 - RNA, 22 nt, Human
caaaaaacaacgaaacaacaaa

SEQ ID NO: 625066 - RNA, 22 nt, Human
caaaauagaaaucucuggagug

SEQ ID NO: 625067 - RNA, 24 nt, Human
caaaauaguucccuagcuccucaa

SEQ ID NO: 625068 - RNA, 22 nt, Human
caacauaaaaggacuaaaaaca

SEQ ID NO: 625069 - RNA, 26 nt, Human
caacgaaacaacaaaccccaacaaaa

SEQ ID NO: 625070 - RNA, 30 nt, Human
caacgaaacaacaaaccccaacaaaaaccc

SEQ ID NO: 625071 - RNA, 20 nt, Human
caagaaacaugguaaggcaa

SEQ ID NO: 625072 - RNA, 21 nt, Human
cacaaaacacugcaacaauac

SEQ ID NO: 625073 - RNA, 23 nt, Human
cacaaaacacugcaacaauacau

SEQ ID NO: 625074 - RNA, 21 nt, Human
cacccuugaggaccauggaca

SEQ ID NO: 625075 - RNA, 19 nt, Human
caggaagaaguauaaaagc

SEQ ID NO: 625076 - RNA, 22 nt, Human
caggcacaaaacacugcaacaa

SEQ ID NO: 625077 - RNA, 20 nt, Human
caucaagugcacagcaaagg

SEQ ID NO: 625078 - RNA, 20 nt, Human
caugcuaaguugaaaauagu

SEQ ID NO: 625079 - RNA, 22 nt, Human
cauggagaaugagccccggcua

SEQ ID NO: 625080 - RNA, 18 nt, Human
cauucacucugcuaaaca

SEQ ID NO: 625081 - RNA, 24 nt, Human
ccaaacaaaaaaaaaacaaaaaac

SEQ ID NO: 625082 - RNA, 18 nt, Human
ccagcagaaauacagagg

SEQ ID NO: 625083 - RNA, 23 nt, Human
cccaacaaaaacccaggaagaag

SEQ ID NO: 625084 - RNA, 23 nt, Human
cccaggaagaaguauaaaagcca

SEQ ID NO: 625085 - RNA, 21 nt, Human
ccccaauccaguucacccauc

SEQ ID NO: 625086 - RNA, 22 nt, Human
ccucacuuccuugauugagccu

SEQ ID NO: 625087 - RNA, 18 nt, Human
ccuggaugugcacacccc

SEQ ID NO: 625088 - RNA, 22 nt, Human
cuuaaaaaaacaacaacaaaaa

SEQ ID NO: 625089 - RNA, 22 nt, Human
cuuccccaaccaaacaaaaaaa

SEQ ID NO: 625090 - RNA, 23 nt, Human
cuuucugcugaaaagagucucug

SEQ ID NO: 625091 - RNA, 19 nt, Human
cuuucuuccucuucuucuu

SEQ ID NO: 625092 - RNA, 22 nt, Human
gacagggugagagaugugggag

SEQ ID NO: 625093 - RNA, 20 nt, Human
gaguuugaaugcagcugugg

SEQ ID NO: 625094 - RNA, 21 nt, Human
gauaacauacauucuuugucc

SEQ ID NO: 625095 - RNA, 21 nt, Human
gcaaauccuuauguggauggg

SEQ ID NO: 625096 - RNA, 20 nt, Human
gccuuuaaacaggcacaaaa

SEQ ID NO: 625097 - RNA, 18 nt, Human
ggacucagaagugcggca

SEQ ID NO: 625098 - RNA, 19 nt, Human
ggacucagaagugcggcaa

SEQ ID NO: 625099 - RNA, 19 nt, Human
ggacucagaagugcggcaa

SEQ ID NO: 625100 - RNA, 21 nt, Human
gggaaaaaggcauuugggaau

SEQ ID NO: 625101 - RNA, 20 nt, Human
gggaaucuggggaggagggg

SEQ ID NO: 625102 - RNA, 21 nt, Human
guaaggcaacuagaagcauaa

SEQ ID NO: 625103 - RNA, 20 nt, Human
guggcaaggagagcuuucca

SEQ ID NO: 625104 - RNA, 20 nt, Human
guucaauuuuugcagugccc

SEQ ID NO: 625105 - RNA, 20 nt, Human
guucacccaucaagugcaca

SEQ ID NO: 625106 - RNA, 22 nt, Human
uaaaaaacuagugaaaacuuca

SEQ ID NO: 625107 - RNA, 23 nt, Human
uaaaaaguagaugacaaucuuaa

SEQ ID NO: 625108 - RNA, 22 nt, Human
uaaacaggcacaaaacacugca

SEQ ID NO: 625109 - RNA, 29 nt, Human
uaaacaggcacaaaacacugcaacaauac

SEQ ID NO: 625110 - RNA, 19 nt, Human
uaaguugaaaauagucuua

SEQ ID NO: 625111 - RNA, 22 nt, Human
uacauaccaugaacuucuccaa

SEQ ID NO: 625112 - RNA, 25 nt, Human
uaccaugaacuucuccaacauaaaa

SEQ ID NO: 625113 - RNA, 22 nt, Human
uacuuuuuucacacagucaggg

SEQ ID NO: 625114 - RNA, 20 nt, Human
uagaagauauuuacaaacua

SEQ ID NO: 625115 - RNA, 19 nt, Human
uaguacagcauacaaauuu

SEQ ID NO: 625116 - RNA, 23 nt, Human
uauuuuacauucacucugcuaaa

SEQ ID NO: 625117 - RNA, 23 nt, Human
ucaagaugagggggaaaaaggca

SEQ ID NO: 625118 - RNA, 21 nt, Human
ucacacagucaggggaugagg

SEQ ID NO: 625119 - RNA, 21 nt, Human
ucacuagaaggagaguacuuu

SEQ ID NO: 625120 - RNA, 24 nt, Human
uccacagcuggcggaaaccaaaac

SEQ ID NO: 625121 - RNA, 24 nt, Human
uccaucuuauuuucaauguccucc

SEQ ID NO: 625122 - RNA, 31 nt, Human
uccccaaccaaacaaaaaaaaaacaaaaaaa

SEQ ID NO: 625123 - RNA, 19 nt, Human
ucccgugaguggaaaauug

SEQ ID NO: 625124 - RNA, 22 nt, Human
uccuuauguggauggguuccau

SEQ ID NO: 625125 - RNA, 25 nt, Human
uccuuuauaagucgcagaacgagag

SEQ ID NO: 625126 - RNA, 19 nt, Human
ucuuucuuccucuucuucu

SEQ ID NO: 625127 - RNA, 21 nt, Human
ugaaaagagucucuggggguc

SEQ ID NO: 625128 - RNA, 24 nt, Human
ugaaaauagcacacguagaagaca

SEQ ID NO: 625129 - RNA, 24 nt, Human
ugaaggcacgaaccauugcaaguc

SEQ ID NO: 625130 - RNA, 20 nt, Human
ugagggggaaaaaggcauuu

SEQ ID NO: 625131 - RNA, 19 nt, Human
ugaguggaaaauuguaugg

SEQ ID NO: 625132 - RNA, 18 nt, Human
uggcggaaaccaaaacca

SEQ ID NO: 625133 - RNA, 24 nt, Human
ugggagugggggcauguuuaaggc

SEQ ID NO: 625134 - RNA, 25 nt, Human
ugggagugggggcauguuuaaggcu

SEQ ID NO: 625135 - RNA, 18 nt, Human
uggggaggaggggacagg

SEQ ID NO: 625136 - RNA, 24 nt, Human
uggggaggaggggacagggugaag

SEQ ID NO: 625137 - RNA, 18 nt, Human
uuaaaaaauaguaccgcc

SEQ ID NO: 625138 - RNA, 23 nt, Human
uuaaaacaaaacaaaaguacuug

SEQ ID NO: 625139 - RNA, 25 nt, Human
uuauuuuuuuuuucuacuguucuuu

SEQ ID NO: 625140 - RNA, 21 nt, Human
uucaaaauaguucccuagcuc

SEQ ID NO: 625141 - RNA, 18 nt, Human
uucaagaugagggggaaa

SEQ ID NO: 625142 - RNA, 21 nt, Human
uuccccaaccaaacaaaaaaa

SEQ ID NO: 625143 - RNA, 23 nt, Human
uucuucauaaauagucaagcguu

SEQ ID NO: 625144 - RNA, 22 nt, Human
uugucccuacaaacucauacuu

SEQ ID NO: 625145 - RNA, 21 nt, Human
uuucaauguccuccuguugca

SEQ ID NO: 625146 - RNA, 19 nt, Human
uuuggucgagucacucauu

SEQ ID NO: 625147 - RNA, 23 nt, Human
uuugucccuacaaacucauacuu

SEQ ID NO: 625148 - RNA, 24 nt, Human
aaaaaaaaaaaaaacagacauaaa

SEQ ID NO: 625149 - RNA, 27 nt, Human
aaaaaaaaaaaaaacagacauaaacaa

SEQ ID NO: 625150 - RNA, 25 nt, Human
aaaaaaaaacagacauaaacaagaa

SEQ ID NO: 625151 - RNA, 18 nt, Human
aaaaaaacagacauaaac

SEQ ID NO: 625152 - RNA, 25 nt, Human
aaaaaaacagacauaaacaagaaaa

SEQ ID NO: 625153 - RNA, 24 nt, Human
aaaaaacagacauaaacaagaaaa

SEQ ID NO: 625154 - RNA, 26 nt, Human
aaacaagaaaaucacaaaaguacaaa

SEQ ID NO: 625155 - RNA, 21 nt, Human
aaacccaccuccaacaccaaa

SEQ ID NO: 625156 - RNA, 20 nt, Human
aagaaaaucacaaaaguaca

SEQ ID NO: 625157 - RNA, 23 nt, Human
aauauccuuucuugucaaguggc

SEQ ID NO: 625158 - RNA, 26 nt, Human
aauguuauuagauucucaccaaccaa

SEQ ID NO: 625159 - RNA, 23 nt, Human
acaaaaguacaaaaacuucacua

SEQ ID NO: 625160 - RNA, 21 nt, Human
acacuggacugucagcuauau

SEQ ID NO: 625161 - RNA, 21 nt, Human
acagacaaugcacaaugggac

SEQ ID NO: 625162 - RNA, 21 nt, Human
agaaacccaccuccaacacca

SEQ ID NO: 625163 - RNA, 23 nt, Human
agaagaggagccugggagaggcc

SEQ ID NO: 625164 - RNA, 22 nt, Human
agccccaggugagaaacccacc

SEQ ID NO: 625165 - RNA, 25 nt, Human
aggcuccuagcaauagaaaaaguuu

SEQ ID NO: 625166 - RNA, 19 nt, Human
augcacaaugggacaggag

SEQ ID NO: 625167 - RNA, 24 nt, Human
caaaaguacaaaaacuucacuaaa

SEQ ID NO: 625168 - RNA, 20 nt, Human
caaccacugauggggcacca

SEQ ID NO: 625169 - RNA, 22 nt, Human
caacuuauugagaauaaagucu

SEQ ID NO: 625170 - RNA, 24 nt, Human
caacuuuguacugcaucuugcccc

SEQ ID NO: 625171 - RNA, 22 nt, Human
cacaauuuaagguggagcccca

SEQ ID NO: 625172 - RNA, 31 nt, Human
cacacaaauguuaaaaaaaaaaaaaaaaaaa

SEQ ID NO: 625173 - RNA, 23 nt, Human
cagcaacaucucguagagcccca

SEQ ID NO: 625174 - RNA, 24 nt, Human
caggcagacagcugagcuguggca

SEQ ID NO: 625175 - RNA, 24 nt, Human
caugacaaauauuagugaaaccug

SEQ ID NO: 625176 - RNA, 23 nt, Human
ccaacaucccccuccuauccucc

SEQ ID NO: 625177 - RNA, 26 nt, Human
ccagaccucugguuaucagauaugau

SEQ ID NO: 625178 - RNA, 21 nt, Human
ccaugcauauuuuccuuuccu

SEQ ID NO: 625179 - RNA, 24 nt, Human
ccuccuauccuccccucuuugcaa

SEQ ID NO: 625180 - RNA, 22 nt, Human
ccucgucuaucgccggcgcgaa

SEQ ID NO: 625181 - RNA, 19 nt, Human
cuagcaauagaaaaaguuu

SEQ ID NO: 625182 - RNA, 19 nt, Human
cucgucucucucacaucuu

SEQ ID NO: 625183 - RNA, 18 nt, Human
cuugccuuccaaaauugc

SEQ ID NO: 625184 - RNA, 18 nt, Human
gacaaugcacaaugggac

SEQ ID NO: 625185 - RNA, 21 nt, Human
gagaggccaacaucccccucc

SEQ ID NO: 625186 - RNA, 20 nt, Human
gauccacauuuuugcaaugu

SEQ ID NO: 625187 - RNA, 18 nt, Human
gccccagcauuuuaaugu

SEQ ID NO: 625188 - RNA, 19 nt, Human
gugucccuuguugcacuag

SEQ ID NO: 625189 - RNA, 20 nt, Human
guucucgucucucucacauc

SEQ ID NO: 625190 - RNA, 19 nt, Human
uaaaaugguucucgucucu

SEQ ID NO: 625191 - RNA, 21 nt, Human
uaagacagaauuucuuugugu

SEQ ID NO: 625192 - RNA, 23 nt, Human
uaagguggagccccagcaacauc

SEQ ID NO: 625193 - RNA, 24 nt, Human
uacagcaugacaaauauuagugaa

SEQ ID NO: 625194 - RNA, 26 nt, Human
uacuucacagguaguucacucccuua

SEQ ID NO: 625195 - RNA, 20 nt, Human
ucacaucuugccuuccaaaa

SEQ ID NO: 625196 - RNA, 22 nt, Human
ucagaagacugaaguucuucau

SEQ ID NO: 625197 - RNA, 21 nt, Human
ucucacaucuugccuuccaaa

SEQ ID NO: 625198 - RNA, 22 nt, Human
ucucacaucuugccuuccaaaa

SEQ ID NO: 625199 - RNA, 24 nt, Human
ucuuugugucccuuguugcacuag

SEQ ID NO: 625200 - RNA, 21 nt, Human
ugacacaaaaccuuuuuugca

SEQ ID NO: 625201 - RNA, 21 nt, Human
ugacuuauggagacaaccacu

SEQ ID NO: 625202 - RNA, 21 nt, Human
ugagaacagcauaaugcagca

SEQ ID NO: 625203 - RNA, 21 nt, Human
ugagaauaaagucucuucaac

SEQ ID NO: 625204 - RNA, 22 nt, Human
ugcaauguuuacaacaaagugg

SEQ ID NO: 625205 - RNA, 20 nt, Human
ugccccagcauuuuaauguu

SEQ ID NO: 625206 - RNA, 25 nt, Human
ugcgcaaacugagaggaaagagaaa

SEQ ID NO: 625207 - RNA, 23 nt, Human
ugggacaggagagcuuggacucc

SEQ ID NO: 625208 - RNA, 23 nt, Human
uguuuacaacaaaguggcaggca

SEQ ID NO: 625209 - RNA, 21 nt, Human
uuccugagauaaguucugcua

SEQ ID NO: 625210 - RNA, 20 nt, Human
uucuccgcugcuguuggcgu

SEQ ID NO: 625211 - RNA, 22 nt, Human
uugcuaguuuuguaaguugcau

SEQ ID NO: 625212 - RNA, 19 nt, Human
uuguacugcaucuugcccc

SEQ ID NO: 625213 - RNA, 22 nt, Human
uuucuugucaaguggcugugaa

SEQ ID NO: 625214 - RNA, 21 nt, Human
aaaagccaauuaaaacagagc

SEQ ID NO: 625215 - RNA, 26 nt, Human
aaacaaacaguagcuugaaaagaaca

SEQ ID NO: 625216 - RNA, 21 nt, Human
aaagcagcugcauguaaccuc

SEQ ID NO: 625217 - RNA, 20 nt, Human
aaauaaccccccaccugccc

SEQ ID NO: 625218 - RNA, 19 nt, Human
aaauaacccuguaacgaga

SEQ ID NO: 625219 - RNA, 22 nt, Human
aaccccccaccugccccaucuc

SEQ ID NO: 625220 - RNA, 18 nt, Human
aacugggcuguaggcuac

SEQ ID NO: 625221 - RNA, 22 nt, Human
aagaaaucaacaugugcacaaa

SEQ ID NO: 625222 - RNA, 24 nt, Human
aagcagcugcauguaaccuccuuc

SEQ ID NO: 625223 - RNA, 19 nt, Human
acuagauucuucccagacu

SEQ ID NO: 625224 - RNA, 24 nt, Human
agaaaaacaaacaguagcuugaaa

SEQ ID NO: 625225 - RNA, 20 nt, Human
agaagacaaacacagccaga

SEQ ID NO: 625226 - RNA, 25 nt, Human
agaaucacaaaugcgaggcaggaca

SEQ ID NO: 625227 - RNA, 18 nt, Human
agacacugacagauggca

SEQ ID NO: 625228 - RNA, 23 nt, Human
agugcuggagauguuugacaaag

SEQ ID NO: 625229 - RNA, 24 nt, Human
aguuaaagcaggucgcacugagcu

SEQ ID NO: 625230 - RNA, 21 nt, Human
aguuaguccuuacaagaaagu

SEQ ID NO: 625231 - RNA, 18 nt, Human
aguugcuuguaaaucuga

SEQ ID NO: 625232 - RNA, 21 nt, Human
auaauacacaaaccauuucac

SEQ ID NO: 625233 - RNA, 22 nt, Human
aucgucauaacccaaaauaaaa

SEQ ID NO: 625234 - RNA, 23 nt, Human
augaagauucagugguacaaaua

SEQ ID NO: 625235 - RNA, 18 nt, Human
auggcaaggaucugacag

SEQ ID NO: 625236 - RNA, 19 nt, Human
auggcaaggaucugacaga

SEQ ID NO: 625237 - RNA, 18 nt, Human
auuguuggcuuuuucuuu

SEQ ID NO: 625238 - RNA, 19 nt, Human
caaaacaaggcuuugacaa

SEQ ID NO: 625239 - RNA, 23 nt, Human
caaacaaaagcaucacguggaaa

SEQ ID NO: 625240 - RNA, 20 nt, Human
caaacaugaucgucauaacc

SEQ ID NO: 625241 - RNA, 20 nt, Human
cacauuuuuugacagcucug

SEQ ID NO: 625242 - RNA, 23 nt, Human
caccacuaagaaauuaguuaaga

SEQ ID NO: 625243 - RNA, 18 nt, Human
caccaugagcaacaggag

SEQ ID NO: 625244 - RNA, 18 nt, Human
cacuguauaugguagagc

SEQ ID NO: 625245 - RNA, 20 nt, Human
cagaagacaaacacagccag

SEQ ID NO: 625246 - RNA, 21 nt, Human
cagaagacaaacacagccaga

SEQ ID NO: 625247 - RNA, 21 nt, Human
cagaaucacaaaugcgaggca

SEQ ID NO: 625248 - RNA, 23 nt, Human
caggcagacacugacagauggca

SEQ ID NO: 625249 - RNA, 20 nt, Human
cauaaauacuucagguucac

SEQ ID NO: 625250 - RNA, 23 nt, Human
cauaacccaaaauaaaaagacaa

SEQ ID NO: 625251 - RNA, 20 nt, Human
cccaucucccuauuacaaca

SEQ ID NO: 625252 - RNA, 27 nt, Human
ccccaaaagcagcugcauguaaccucc

SEQ ID NO: 625253 - RNA, 21 nt, Human
ccccaccugccccaucucccu

SEQ ID NO: 625254 - RNA, 20 nt, Human
cccccaccugccccaucucc

SEQ ID NO: 625255 - RNA, 22 nt, Human
ccccccaccugccccaucuccc

SEQ ID NO: 625256 - RNA, 24 nt, Human
ccccucaaaacaguaaagaaccaa

SEQ ID NO: 625257 - RNA, 21 nt, Human
ccuaccgaggcuacaucggca

SEQ ID NO: 625258 - RNA, 18 nt, Human
ccuauuauaauaacccau

SEQ ID NO: 625259 - RNA, 21 nt, Human
cuacuucuucguaaugccaaa

SEQ ID NO: 625260 - RNA, 21 nt, Human
cuuguaaaucugaggaaucac

SEQ ID NO: 625261 - RNA, 24 nt, Human
cuuguaaaucugaggaaucacuac

SEQ ID NO: 625262 - RNA, 20 nt, Human
gaaaaacaaacaguagcuug

SEQ ID NO: 625263 - RNA, 19 nt, Human
gaagcaaauccugcuuuua

SEQ ID NO: 625264 - RNA, 20 nt, Human
gacaagaacaagggaaucua

SEQ ID NO: 625265 - RNA, 18 nt, Human
gagggaagacaauccugu

SEQ ID NO: 625266 - RNA, 23 nt, Human
gauggaaacauuagugcuggaga

SEQ ID NO: 625267 - RNA, 19 nt, Human
gauggcaaggaucugacag

SEQ ID NO: 625268 - RNA, 21 nt, Human
gauggcaaggaucugacagau

SEQ ID NO: 625269 - RNA, 19 nt, Human
gauucagugguacaaauaa

SEQ ID NO: 625270 - RNA, 20 nt, Human
gcagacacugacagauggca

SEQ ID NO: 625271 - RNA, 23 nt, Human
gucauaacccaaaauaaaaagac

SEQ ID NO: 625272 - RNA, 20 nt, Human
gugguacaaauaaccccccc

SEQ ID NO: 625273 - RNA, 22 nt, Human
uaaaaacaauguauggaaaugc

SEQ ID NO: 625274 - RNA, 23 nt, Human
uaaaacuucucauaaaaccacug

SEQ ID NO: 625275 - RNA, 19 nt, Human
uaacagaaucacaaaugcg

SEQ ID NO: 625276 - RNA, 24 nt, Human
uaacagaaucacaaaugcgaggca

SEQ ID NO: 625277 - RNA, 23 nt, Human
uaaccccccaccugccccaucuc

SEQ ID NO: 625278 - RNA, 24 nt, Human
uaauaacccauauacagguugcac

SEQ ID NO: 625279 - RNA, 21 nt, Human
uacaaauaaccccccaccugc

SEQ ID NO: 625280 - RNA, 25 nt, Human
uacaaauaaccccccaccugcccca

SEQ ID NO: 625281 - RNA, 19 nt, Human
uacccucccccaaaagcag

SEQ ID NO: 625282 - RNA, 21 nt, Human
uagccaaaaaaccauaagcac

SEQ ID NO: 625283 - RNA, 22 nt, Human
uagccaaaaaaccauaagcacu

SEQ ID NO: 625284 - RNA, 21 nt, Human
uauagcagugugcacaaauac

SEQ ID NO: 625285 - RNA, 24 nt, Human
uaucagguucaaacaaaagcauca

SEQ ID NO: 625286 - RNA, 19 nt, Human
uauuguuggcuuuuucuuu

SEQ ID NO: 625287 - RNA, 19 nt, Human
ucaaaacaguaaagaacca

SEQ ID NO: 625288 - RNA, 18 nt, Human
ugaaaagaacaguuaguc

SEQ ID NO: 625289 - RNA, 23 nt, Human
ugaagaugcaccacuguauaugg

SEQ ID NO: 625290 - RNA, 23 nt, Human
ugaauaaugucacauuauauaaa

SEQ ID NO: 625291 - RNA, 22 nt, Human
ugacaagaacaagggaaucuaa

SEQ ID NO: 625292 - RNA, 18 nt, Human
ugacaauaguccuuuguc

SEQ ID NO: 625293 - RNA, 21 nt, Human
ugagguggugaauaucuucug

SEQ ID NO: 625294 - RNA, 19 nt, Human
ugaucgucauaacccaaaa

SEQ ID NO: 625295 - RNA, 21 nt, Human
ugcaugcacucaugcaacuug

SEQ ID NO: 625296 - RNA, 21 nt, Human
ugccugaaaaaucuagcucaa

SEQ ID NO: 625297 - RNA, 23 nt, Human
uggcaaggaucugacagauagug

SEQ ID NO: 625298 - RNA, 22 nt, Human
ugggaaaaaguuauuaaagcag

SEQ ID NO: 625299 - RNA, 23 nt, Human
uguaaaacaaaacaaggcuuuga

SEQ ID NO: 625300 - RNA, 21 nt, Human
uguaguugcuuguaaaucuga

SEQ ID NO: 625301 - RNA, 20 nt, Human
ugucugcaugcacucaugca

SEQ ID NO: 625302 - RNA, 24 nt, Human
uguugggacagcuaauguaagaca

SEQ ID NO: 625303 - RNA, 18 nt, Human
uuaaaauaaaaauagcac

SEQ ID NO: 625304 - RNA, 23 nt, Human
uuacaaguaaaagugcacauagg

SEQ ID NO: 625305 - RNA, 21 nt, Human
uucaaagaguucuuucaacug

SEQ ID NO: 625306 - RNA, 21 nt, Human
uucuguguuuauuaugccagg

SEQ ID NO: 625307 - RNA, 21 nt, Human
uugcacuacaaauguaaaaca

SEQ ID NO: 625308 - RNA, 22 nt, Human
uugggggaggcccauaaaacuu

SEQ ID NO: 625309 - RNA, 24 nt, Human
uuucaacugggcuguaggcuacag

SEQ ID NO: 625310 - RNA, 19 nt, Human
uuucacacaauugucauuc

SEQ ID NO: 625311 - RNA, 18 nt, Human
uuugacaagaacaaggga

SEQ ID NO: 625312 - RNA, 24 nt, Human
uuugacagcucugcauucuuuauu

SEQ ID NO: 625313 - RNA, 19 nt, Human
uuugcacuacaaauguaaa

SEQ ID NO: 625314 - RNA, 26 nt, Human
uuuuuuuuuuuuuuuuuuuuaacagg

SEQ ID NO: 625315 - RNA, 21 nt, Human
aaaacuuuauuaacagacacc

SEQ ID NO: 625316 - RNA, 19 nt, Human
aaaagaagaaaauaaacaa

SEQ ID NO: 625317 - RNA, 22 nt, Human
aaaagaagaaaauaaacaagaa

SEQ ID NO: 625318 - RNA, 23 nt, Human
aaagaagaaaauaaacaagaaaa

SEQ ID NO: 625319 - RNA, 21 nt, Human
aaauauccuucaacuaguuuc

SEQ ID NO: 625320 - RNA, 22 nt, Human
aagaagaaaauaaacaagaaaa

SEQ ID NO: 625321 - RNA, 18 nt, Human
aagagggaaaagaagaaa

SEQ ID NO: 625322 - RNA, 19 nt, Human
aagggcaaaugugggaggc

SEQ ID NO: 625323 - RNA, 20 nt, Human
agaagaccaagggcaaaugu

SEQ ID NO: 625324 - RNA, 18 nt, Human
agagaagaagaaaauguu

SEQ ID NO: 625325 - RNA, 24 nt, Human
agagagaagaagaaaauguuuuug

SEQ ID NO: 625326 - RNA, 18 nt, Human
aggcaggcaccaguaugg

SEQ ID NO: 625327 - RNA, 22 nt, Human
auucuagaaagagagaagacca

SEQ ID NO: 625328 - RNA, 23 nt, Human
auugcaaugcauguauuccaauc

SEQ ID NO: 625329 - RNA, 21 nt, Human
caaaaggaagcuguaguccca

SEQ ID NO: 625330 - RNA, 22 nt, Human
caagaaaacaaauacaugaaca

SEQ ID NO: 625331 - RNA, 20 nt, Human
caccaguauggugaauuaga

SEQ ID NO: 625332 - RNA, 22 nt, Human
caguaucuccuacauaaaccag

SEQ ID NO: 625333 - RNA, 21 nt, Human
cauaaaccagcacaucaauga

SEQ ID NO: 625334 - RNA, 24 nt, Human
caugaacagauagauaauuuugug

SEQ ID NO: 625335 - RNA, 23 nt, Human
ccaaaaaggguauggcaggaaca

SEQ ID NO: 625336 - RNA, 22 nt, Human
ccagcacaucaaugagagcaga

SEQ ID NO: 625337 - RNA, 23 nt, Human
cccugcaggcuauaaucugccaa

SEQ ID NO: 625338 - RNA, 24 nt, Human
ccugacuauugauaguuggagcag

SEQ ID NO: 625339 - RNA, 21 nt, Human
cuagaaagagagaagaccaag

SEQ ID NO: 625340 - RNA, 24 nt, Human
cuaguaaauaugaggcaaaaggaa

SEQ ID NO: 625341 - RNA, 20 nt, Human
cucauacuacaaaucuguug

SEQ ID NO: 625342 - RNA, 20 nt, Human
cuccuacauaaaccagcaca

SEQ ID NO: 625343 - RNA, 20 nt, Human
cugagggaccggggaaggug

SEQ ID NO: 625344 - RNA, 20 nt, Human
gaaccaaaaaggguauggca

SEQ ID NO: 625345 - RNA, 19 nt, Human
gaagguggagcugaaugau

SEQ ID NO: 625346 - RNA, 20 nt, Human
gaggugggaauguucaggaa

SEQ ID NO: 625347 - RNA, 26 nt, Human
gcuucaauuaaauugucuucaaaggu

SEQ ID NO: 625348 - RNA, 20 nt, Human
gugaaauauccuucaacuag

SEQ ID NO: 625349 - RNA, 18 nt, Human
gugucucugagggaccgg

SEQ ID NO: 625350 - RNA, 21 nt, Human
uaaagagggaaaagaagaaaa

SEQ ID NO: 625351 - RNA, 21 nt, Human
uaacagacaccaaaauuugaa

SEQ ID NO: 625352 - RNA, 18 nt, Human
uaagagagagaagaagaa

SEQ ID NO: 625353 - RNA, 23 nt, Human
uacauacuaaagagggaaaagaa

SEQ ID NO: 625354 - RNA, 24 nt, Human
uacuuuuucuucuuaugcucaggc

SEQ ID NO: 625355 - RNA, 24 nt, Human
uagaaauacacaguaucuccuaca

SEQ ID NO: 625356 - RNA, 27 nt, Human
uauauaauuuucacaugcuauaaaaua

SEQ ID NO: 625357 - RNA, 22 nt, Human
uaugcucaggccaauuugugug

SEQ ID NO: 625358 - RNA, 26 nt, Human
uauuacucaacuguaaugauagagca

SEQ ID NO: 625359 - RNA, 23 nt, Human
ucaugguuaagaauguaacuuua

SEQ ID NO: 625360 - RNA, 20 nt, Human
ucccuggaccacuuauggcc

SEQ ID NO: 625361 - RNA, 23 nt, Human
ucuccuacauaaaccagcacauc

SEQ ID NO: 625362 - RNA, 22 nt, Human
ucucugagggaccggggaaggu

SEQ ID NO: 625363 - RNA, 25 nt, Human
ucucugagggaccggggaaggugga

SEQ ID NO: 625364 - RNA, 24 nt, Human
ugcauguauuccaaucacaccaca

SEQ ID NO: 625365 - RNA, 20 nt, Human
uggaccacuuauggccaucu

SEQ ID NO: 625366 - RNA, 18 nt, Human
uggcaauauuuguauucg

SEQ ID NO: 625367 - RNA, 24 nt, Human
uguaaaaagucuaguuucuucaug

SEQ ID NO: 625368 - RNA, 27 nt, Human
uuagaggaaccaaaaaggguauggcag

SEQ ID NO: 625369 - RNA, 25 nt, Human
uucaacuucuuuccuugcuucaauu

SEQ ID NO: 625370 - RNA, 23 nt, Human
uucuagaaagagagaagaccaag

SEQ ID NO: 625371 - RNA, 18 nt, Human
uugcucccuggaccacuu

SEQ ID NO: 625372 - RNA, 22 nt, Human
uuggguuugugguucccugcaa

SEQ ID NO: 625373 - RNA, 22 nt, Human
uuuauuucaauaaaugcucaag

SEQ ID NO: 625374 - RNA, 18 nt, Human
uuugcucauacuacaaau

SEQ ID NO: 625375 - RNA, 23 nt, Human
aaaaagaaauccaggcccuccag

SEQ ID NO: 625376 - RNA, 22 nt, Human
aaacaagguagccccagccccu

SEQ ID NO: 625377 - RNA, 18 nt, Human
aaagaaauccaggcccuc

SEQ ID NO: 625378 - RNA, 22 nt, Human
aacaagguagccccagccccua

SEQ ID NO: 625379 - RNA, 20 nt, Human
aagagccagccccacccuca

SEQ ID NO: 625380 - RNA, 18 nt, Human
aagggucucugagugagu

SEQ ID NO: 625381 - RNA, 18 nt, Human
aggaggccugguccagug

SEQ ID NO: 625382 - RNA, 23 nt, Human
auccagcuuuggaaaucuggaca

SEQ ID NO: 625383 - RNA, 21 nt, Human
cacaguacccagccccgcagg

SEQ ID NO: 625384 - RNA, 22 nt, Human
cacccucaggggcagcauucca

SEQ ID NO: 625385 - RNA, 23 nt, Human
cacugcucggcccggcucgccgc

SEQ ID NO: 625386 - RNA, 26 nt, Human
cacugcucggcccggcucgccgcggc

SEQ ID NO: 625387 - RNA, 23 nt, Human
cagcauuccagcccaaaaagaaa

SEQ ID NO: 625388 - RNA, 20 nt, Human
cagccccgcaggguccugga

SEQ ID NO: 625389 - RNA, 25 nt, Human
caggggaacccuccccuuggaguua

SEQ ID NO: 625390 - RNA, 25 nt, Human
ccagcccaaaaagaaauccaggccc

SEQ ID NO: 625391 - RNA, 20 nt, Human
ccaggcccuccagguucggc

SEQ ID NO: 625392 - RNA, 19 nt, Human
ccagguacucuccugcccu

SEQ ID NO: 625393 - RNA, 18 nt, Human
ccccgggccccgcucggg

SEQ ID NO: 625394 - RNA, 21 nt, Human
ccuccgccuccuccaugccgc

SEQ ID NO: 625395 - RNA, 20 nt, Human
cgcuagggcccucacugcuc

SEQ ID NO: 625396 - RNA, 24 nt, Human
cuagccagccuggggguacacagu

SEQ ID NO: 625397 - RNA, 20 nt, Human
gaaaucuggacaaagagaag

SEQ ID NO: 625398 - RNA, 22 nt, Human
gccccgggccccgcucgggccc

SEQ ID NO: 625399 - RNA, 24 nt, Human
gccccgggccccgcucgggcccca

SEQ ID NO: 625400 - RNA, 20 nt, Human
ggauggagggaagggcuagc

SEQ ID NO: 625401 - RNA, 19 nt, Human
ggccuggaaagugagggua

SEQ ID NO: 625402 - RNA, 22 nt, Human
ggcugagaggaggccuggucca

SEQ ID NO: 625403 - RNA, 23 nt, Human
gggcagcauuccagcccaaaaag

SEQ ID NO: 625404 - RNA, 21 nt, Human
uaaucaaugaccaacuuaucc

SEQ ID NO: 625405 - RNA, 23 nt, Human
uacacaguacccagccccgcagg

SEQ ID NO: 625406 - RNA, 19 nt, Human
uagauucugagccaggccu

SEQ ID NO: 625407 - RNA, 24 nt, Human
ucaccaauguccuggccagcccau

SEQ ID NO: 625408 - RNA, 18 nt, Human
uccauggguugggcacag

SEQ ID NO: 625409 - RNA, 25 nt, Human
ucccagagggcuucuccuuuuuuaa

SEQ ID NO: 625410 - RNA, 20 nt, Human
uccugaguaagagccagccc

SEQ ID NO: 625411 - RNA, 19 nt, Human
ucgccgcggccuccgccuc

SEQ ID NO: 625412 - RNA, 22 nt, Human
ucgccgcggccuccgccuccuc

SEQ ID NO: 625413 - RNA, 26 nt, Human
ucgggccccgcuagggcccucacugc

SEQ ID NO: 625414 - RNA, 18 nt, Human
ucuccugcccuucuccaa

SEQ ID NO: 625415 - RNA, 25 nt, Human
ugaguaagagccagccccacccuca

SEQ ID NO: 625416 - RNA, 22 nt, Human
uggcgggucaccaauguccugg

SEQ ID NO: 625417 - RNA, 22 nt, Human
ugugggccccagcugggccuga

SEQ ID NO: 625418 - RNA, 24 nt, Human
ugugucagcaugugggccccagcu

SEQ ID NO: 625419 - RNA, 21 nt, Human
uuuuuuuuuuuuuuucccaga

SEQ ID NO: 625420 - RNA, 28 nt, Human
uuuuuuuuuuuuuuuuuuucccagaggg

SEQ ID NO: 625421 - RNA, 21 nt, Human
aaacuucugacuucagcagau

SEQ ID NO: 625422 - RNA, 24 nt, Human
aaagugcugggauuacagguguga

SEQ ID NO: 625423 - RNA, 24 nt, Human
aaccagaaaaagguaauaaucuaa

SEQ ID NO: 625424 - RNA, 19 nt, Human
aaguaugcuuguggcccau

SEQ ID NO: 625425 - RNA, 18 nt, Human
aagugcugggauuacagg

SEQ ID NO: 625426 - RNA, 19 nt, Human
aagugcugggauuacaggu

SEQ ID NO: 625427 - RNA, 26 nt, Human
aagugcugggauuacaggugugagcc

SEQ ID NO: 625428 - RNA, 24 nt, Human
aauaagagaugaaaaauccuuuca

SEQ ID NO: 625429 - RNA, 22 nt, Human
acaggguuucacuguguuggca

SEQ ID NO: 625430 - RNA, 23 nt, Human
acaggguuucacuguguuggcaa

SEQ ID NO: 625431 - RNA, 24 nt, Human
acaggguuucacuguguuggcaag

SEQ ID NO: 625432 - RNA, 24 nt, Human
acccaggcuggaguacaguggcau

SEQ ID NO: 625433 - RNA, 25 nt, Human
acccgccucagccucccaaagugcu

SEQ ID NO: 625434 - RNA, 19 nt, Human
agaacacugacuaacacug

SEQ ID NO: 625435 - RNA, 18 nt, Human
agacaggguuucacugug

SEQ ID NO: 625436 - RNA, 19 nt, Human
agagacaggguuucacugu

SEQ ID NO: 625437 - RNA, 19 nt, Human
aguagcagggauuacaggc

SEQ ID NO: 625438 - RNA, 21 nt, Human
auaaaacacaguaaggaacca

SEQ ID NO: 625439 - RNA, 20 nt, Human
auaaaguaugcuuguggccc

SEQ ID NO: 625440 - RNA, 18 nt, Human
auucuccuguuucagccu

SEQ ID NO: 625441 - RNA, 24 nt, Human
auuuuuuuauuuuuaguagagaca

SEQ ID NO: 625442 - RNA, 26 nt, Human
caaacuucugacuucagcagauccaa

SEQ ID NO: 625443 - RNA, 24 nt, Human
caaagugcugggauuacaggugug

SEQ ID NO: 625444 - RNA, 22 nt, Human
caaauagaaauaagagaugaaa

SEQ ID NO: 625445 - RNA, 22 nt, Human
caagugauucuccuguuucagc

SEQ ID NO: 625446 - RNA, 21 nt, Human
cacaguaaggaaccagaaaaa

SEQ ID NO: 625447 - RNA, 23 nt, Human
cacccgccucagccucccaaagu

SEQ ID NO: 625448 - RNA, 21 nt, Human
cacugugccguucuucaagau

SEQ ID NO: 625449 - RNA, 19 nt, Human
cacuguguuggcaaggcug

SEQ ID NO: 625450 - RNA, 21 nt, Human
cacuguguuggcaaggcuggu

SEQ ID NO: 625451 - RNA, 24 nt, Human
cacuguguuggcaaggcuggucuc

SEQ ID NO: 625452 - RNA, 21 nt, Human
cagaacacugacuaacacugg

SEQ ID NO: 625453 - RNA, 19 nt, Human
cagcagaacacugacuaac

SEQ ID NO: 625454 - RNA, 22 nt, Human
cagcagaacacugacuaacacu

SEQ ID NO: 625455 - RNA, 24 nt, Human
caggguuucacuguguuggcaagg

SEQ ID NO: 625456 - RNA, 21 nt, Human
ccaaagugcugggauuacagg

SEQ ID NO: 625457 - RNA, 21 nt, Human
ccaaagugcugggauuacagg

SEQ ID NO: 625458 - RNA, 24 nt, Human
ccaaagugcugggauuacaggugu

SEQ ID NO: 625459 - RNA, 26 nt, Human
ccacccgccucagccucccaaagugc

SEQ ID NO: 625460 - RNA, 19 nt, Human
cccgaguagcagggauuac

SEQ ID NO: 625461 - RNA, 24 nt, Human
ccgaguagcagggauuacaggcgu

SEQ ID NO: 625462 - RNA, 23 nt, Human
ccgcaaccuccgucuccuggguu

SEQ ID NO: 625463 - RNA, 24 nt, Human
ccgcaaccuccgucuccuggguuc

SEQ ID NO: 625464 - RNA, 24 nt, Human
ccgccucagccucccaaagugcug

SEQ ID NO: 625465 - RNA, 20 nt, Human
ccucccgaguagcagggauu

SEQ ID NO: 625466 - RNA, 22 nt, Human
ccuccgucuccuggguucaagu

SEQ ID NO: 625467 - RNA, 23 nt, Human
ccuggguucaagugauucuccuc

SEQ ID NO: 625468 - RNA, 23 nt, Human
ccuggguucaagugauucuccug

SEQ ID NO: 625469 - RNA, 22 nt, Human
cgcucugucacccaggcuggag

SEQ ID NO: 625470 - RNA, 20 nt, Human
cguuacacacauaaaguaug

SEQ ID NO: 625471 - RNA, 22 nt, Human
cucaaacuucugacuucagcag

SEQ ID NO: 625472 - RNA, 20 nt, Human
cuccuggguucaagugauuc

SEQ ID NO: 625473 - RNA, 21 nt, Human
cuccuggguucaagugauucu

SEQ ID NO: 625474 - RNA, 24 nt, Human
cucgcucugucacccaggcuggag

SEQ ID NO: 625475 - RNA, 21 nt, Human
cugacuucagcagauccaccc

SEQ ID NO: 625476 - RNA, 22 nt, Human
cuguuucagccucccgaguagc

SEQ ID NO: 625477 - RNA, 24 nt, Human
gacuucagcagauccacccgccuc

SEQ ID NO: 625478 - RNA, 21 nt, Human
gagccaccaugccugaccuug

SEQ ID NO: 625479 - RNA, 22 nt, Human
gauccacccgccucagccuccc

SEQ ID NO: 625480 - RNA, 19 nt, Human
gauuacaggcgugcacugc

SEQ ID NO: 625481 - RNA, 18 nt, Human
gauuacaggugugagcca

SEQ ID NO: 625482 - RNA, 21 nt, Human
gauuacaggugugagccacca

SEQ ID NO: 625483 - RNA, 24 nt, Human
gauuacaggugugagccaccaugc

SEQ ID NO: 625484 - RNA, 21 nt, Human
gauucuccuguuucagccucc

SEQ ID NO: 625485 - RNA, 23 nt, Human
gccucagccucccaaagugcugg

SEQ ID NO: 625486 - RNA, 23 nt, Human
gccugaccuugauauuaucauuu

SEQ ID NO: 625487 - RNA, 25 nt, Human
gcucugucacccaggcuggaguaca

SEQ ID NO: 625488 - RNA, 19 nt, Human
gcuggaguacaguggcaua

SEQ ID NO: 625489 - RNA, 24 nt, Human
ggauuacaggugugagccaccaug

SEQ ID NO: 625490 - RNA, 18 nt, Human
gggauuacaggcgugcac

SEQ ID NO: 625491 - RNA, 20 nt, Human
gggauuacaggcgugcacug

SEQ ID NO: 625492 - RNA, 18 nt, Human
guagcagggauuacaggc

SEQ ID NO: 625493 - RNA, 24 nt, Human
gucucgcucugucacccaggcugg

SEQ ID NO: 625494 - RNA, 24 nt, Human
gugauucuccuguuucagccuccc

SEQ ID NO: 625495 - RNA, 20 nt, Human
uaaaacacaguaaggaacca

SEQ ID NO: 625496 - RNA, 25 nt, Human
uaagccagcagaacacugacuaaca

SEQ ID NO: 625497 - RNA, 23 nt, Human
uaauuuuuuuauuuuuaguagag

SEQ ID NO: 625498 - RNA, 24 nt, Human
uaauuuuuuuauuuuuaguagaga

SEQ ID NO: 625499 - RNA, 22 nt, Human
uacaggugugagccaccaugcc

SEQ ID NO: 625500 - RNA, 22 nt, Human
uacaggugugagccaccaugcc

SEQ ID NO: 625501 - RNA, 23 nt, Human
uacaggugugagccaccaugccu

SEQ ID NO: 625502 - RNA, 23 nt, Human
uacaguggcauaaucucaacuca

SEQ ID NO: 625503 - RNA, 22 nt, Human
uagagacaggguuucacugugu

SEQ ID NO: 625504 - RNA, 19 nt, Human
uagcaacaucagagauauc

SEQ ID NO: 625505 - RNA, 20 nt, Human
uaguagagacaggguuucac

SEQ ID NO: 625506 - RNA, 24 nt, Human
uaguagagacaggguuucacugug

SEQ ID NO: 625507 - RNA, 24 nt, Human
ucaccgcaaccuccgucuccuggg

SEQ ID NO: 625508 - RNA, 25 nt, Human
ucaccgcaaccuccgucuccugggu

SEQ ID NO: 625509 - RNA, 27 nt, Human
ucaccgcaaccuccgucuccuggguuc

SEQ ID NO: 625510 - RNA, 22 nt, Human
ucacuguguuggcaaggcuggu

SEQ ID NO: 625511 - RNA, 21 nt, Human
uccacccgccucagccuccca

SEQ ID NO: 625512 - RNA, 23 nt, Human
ucccaaagugcugggauuacagg

SEQ ID NO: 625513 - RNA, 24 nt, Human
ucccgaguagcagggauuacaggc

SEQ ID NO: 625514 - RNA, 21 nt, Human
uccuggguucaagugauucuc

SEQ ID NO: 625515 - RNA, 24 nt, Human
uccuggguucaagugauucuccug

SEQ ID NO: 625516 - RNA, 24 nt, Human
ucgcucugucacccaggcuggagu

SEQ ID NO: 625517 - RNA, 24 nt, Human
ucuccuggguucaagugauucucc

SEQ ID NO: 625518 - RNA, 19 nt, Human
ucucgcucugucacccagg

SEQ ID NO: 625519 - RNA, 23 nt, Human
ucucgcucugucacccaggcugg

SEQ ID NO: 625520 - RNA, 24 nt, Human
ucucgcucugucacccaggcugga

SEQ ID NO: 625521 - RNA, 25 nt, Human
ucucgcucugucacccaggcuggag

SEQ ID NO: 625522 - RNA, 26 nt, Human
ucucgcucugucacccaggcuggagu

SEQ ID NO: 625523 - RNA, 18 nt, Human
ucugucacccaggcugga

SEQ ID NO: 625524 - RNA, 24 nt, Human
ucugucacccaggcuggaguacag

SEQ ID NO: 625525 - RNA, 21 nt, Human
ugaaaaauccuuucaccaaga

SEQ ID NO: 625526 - RNA, 24 nt, Human
ugacugagaaggcauuagugggcu

SEQ ID NO: 625527 - RNA, 23 nt, Human
ugagucucgcucugucacccagg

SEQ ID NO: 625528 - RNA, 24 nt, Human
ugcugggauuacaggugugagcca

SEQ ID NO: 625529 - RNA, 24 nt, Human
uggcaaggcuggucucaaacuucu

SEQ ID NO: 625530 - RNA, 24 nt, Human
uggcauaaucucaacucaccgcaa

SEQ ID NO: 625531 - RNA, 18 nt, Human
ugggauuacaggugugag

SEQ ID NO: 625532 - RNA, 22 nt, Human
ugggauuacaggugugagccac

SEQ ID NO: 625533 - RNA, 23 nt, Human
ugggauuacaggugugagccacc

SEQ ID NO: 625534 - RNA, 24 nt, Human
ugggauuacaggugugagccacca

SEQ ID NO: 625535 - RNA, 25 nt, Human
ugggauuacaggugugagccaccau

SEQ ID NO: 625536 - RNA, 20 nt, Human
uggguucaagugauucuccu

SEQ ID NO: 625537 - RNA, 24 nt, Human
uggguucaagugauucuccuguuu

SEQ ID NO: 625538 - RNA, 21 nt, Human
uuaguagagacaggguuucac

SEQ ID NO: 625539 - RNA, 24 nt, Human
uuaguagagacaggguuucacugu

SEQ ID NO: 625540 - RNA, 23 nt, Human
uucaagugauucuccuguuucag

SEQ ID NO: 625541 - RNA, 22 nt, Human
uucacuguguuggcaaggcugg

SEQ ID NO: 625542 - RNA, 23 nt, Human
uuuuauuuuuaguagagacaggg

SEQ ID NO: 625543 - RNA, 24 nt, Human
uuuuuaguagagacaggguuucac

SEQ ID NO: 625544 - RNA, 26 nt, Human
uuuuuuuauuuuuaguagagacaggg

SEQ ID NO: 625545 - RNA, 25 nt, Human
uuuuuuuuuuuugagacugagucuc

SEQ ID NO: 625546 - RNA, 18 nt, Human
uuuuuuuuuuuuuuuuug

SEQ ID NO: 625547 - RNA, 26 nt, Human
aaaaaaaaaaaaaaaagcacgcacca

SEQ ID NO: 625548 - RNA, 19 nt, Human
aaaaaggucaaauacacag

SEQ ID NO: 625549 - RNA, 18 nt, Human
aaaaugaaacccccaccc

SEQ ID NO: 625550 - RNA, 20 nt, Human
aaagcugggaagaagcaaaa

SEQ ID NO: 625551 - RNA, 18 nt, Human
aaauaugcugauacuugg

SEQ ID NO: 625552 - RNA, 20 nt, Human
aaauaugcugauacuugggu

SEQ ID NO: 625553 - RNA, 26 nt, Human
aacaggacuaggaacaagcauccccu

SEQ ID NO: 625554 - RNA, 18 nt, Human
aacgcggcccauaagugg

SEQ ID NO: 625555 - RNA, 22 nt, Human
aacuuucuuucuaaauuaaagc

SEQ ID NO: 625556 - RNA, 20 nt, Human
aacuuuuuuuuuuuuuuaaa

SEQ ID NO: 625557 - RNA, 25 nt, Human
aagaaaucuucacucaaguaguguc

SEQ ID NO: 625558 - RNA, 22 nt, Human
aagcccauccaauggagaacaa

SEQ ID NO: 625559 - RNA, 26 nt, Human
aagcgggaguacuacuguguggaagg

SEQ ID NO: 625560 - RNA, 25 nt, Human
aagcuccauaaaguacaacuggcaa

SEQ ID NO: 625561 - RNA, 29 nt, Human
aaugggacuuuucccaguaugguaacgac

SEQ ID NO: 625562 - RNA, 18 nt, Human
acacccaccccuucccca

SEQ ID NO: 625563 - RNA, 22 nt, Human
acagugcucuggguguugaaug

SEQ ID NO: 625564 - RNA, 25 nt, Human
acagugcucuggguguugaauggug

SEQ ID NO: 625565 - RNA, 26 nt, Human
acccaccccuuccccauaacucccac

SEQ ID NO: 625566 - RNA, 19 nt, Human
accccuucacacccacccc

SEQ ID NO: 625567 - RNA, 22 nt, Human
accuuuccuuuccuccccucca

SEQ ID NO: 625568 - RNA, 18 nt, Human
acugcuggcugcuccugc

SEQ ID NO: 625569 - RNA, 19 nt, Human
agaaaagcugggaagaagc

SEQ ID NO: 625570 - RNA, 22 nt, Human
agaaauagcaacaggacuagga

SEQ ID NO: 625571 - RNA, 20 nt, Human
agcaacaggagagccuggga

SEQ ID NO: 625572 - RNA, 19 nt, Human
agcaacaggcuaaaaaagg

SEQ ID NO: 625573 - RNA, 19 nt, Human
agccgaggucacacagugc

SEQ ID NO: 625574 - RNA, 19 nt, Human
agcugguacagggaaagaa

SEQ ID NO: 625575 - RNA, 25 nt, Human
aggcaguguuuggugaugcgaugcu

SEQ ID NO: 625576 - RNA, 20 nt, Human
aggcuaaaaaaggaugaugg

SEQ ID NO: 625577 - RNA, 19 nt, Human
aggcuucugaaccaagacc

SEQ ID NO: 625578 - RNA, 21 nt, Human
agggagucugaugauauggac

SEQ ID NO: 625579 - RNA, 22 nt, Human
aggggaagccaguaacucaagg

SEQ ID NO: 625580 - RNA, 27 nt, Human
agguauuggagcuugcucuauuaagcu

SEQ ID NO: 625581 - RNA, 20 nt, Human
aguaacucaaggugcuuuuc

SEQ ID NO: 625582 - RNA, 24 nt, Human
agugaagcaauuugaacagguggc

SEQ ID NO: 625583 - RNA, 21 nt, Human
agugagaaaagcugggaagaa

SEQ ID NO: 625584 - RNA, 22 nt, Human
aucagaccaauuuacuuugaaa

SEQ ID NO: 625585 - RNA, 22 nt, Human
auggacugaaagaagcugugua

SEQ ID NO: 625586 - RNA, 20 nt, Human
auggagaacaacuuguacca

SEQ ID NO: 625587 - RNA, 23 nt, Human
caaaaaauacacccaaucuucca

SEQ ID NO: 625588 - RNA, 22 nt, Human
caacaagcacugcauauaugua

SEQ ID NO: 625589 - RNA, 18 nt, Human
caacaggcuaaaaaagga

SEQ ID NO: 625590 - RNA, 22 nt, Human
caagaccaaauguuuacguucc

SEQ ID NO: 625591 - RNA, 21 nt, Human
caagugauucacaacgcggcc

SEQ ID NO: 625592 - RNA, 20 nt, Human
cacaucuuucacaguaccac

SEQ ID NO: 625593 - RNA, 24 nt, Human
caccccaugacuccccacacuuga

SEQ ID NO: 625594 - RNA, 22 nt, Human
caccccuuccccauaacuccca

SEQ ID NO: 625595 - RNA, 23 nt, Human
cacuuucaaaacuuucucuucca

SEQ ID NO: 625596 - RNA, 20 nt, Human
cacuuugugucucucugaag

SEQ ID NO: 625597 - RNA, 18 nt, Human
cagaauccucagaauugc

SEQ ID NO: 625598 - RNA, 20 nt, Human
cagaauuccgccuuucacau

SEQ ID NO: 625599 - RNA, 21 nt, Human
cagagugaggcuggcugggga

SEQ ID NO: 625600 - RNA, 21 nt, Human
caugaaauuaagcuucuuuuu

SEQ ID NO: 625601 - RNA, 23 nt, Human
ccaaaaaauacacccaaucuucc

SEQ ID NO: 625602 - RNA, 21 nt, Human
ccaaaaauacccagaucaaau

SEQ ID NO: 625603 - RNA, 24 nt, Human
ccaaaaauacccagaucaaauaaa

SEQ ID NO: 625604 - RNA, 23 nt, Human
ccacaccccaugacuccccacac

SEQ ID NO: 625605 - RNA, 24 nt, Human
ccagagccaauguccaaauucaca

SEQ ID NO: 625606 - RNA, 21 nt, Human
cccacccccugaccccuagga

SEQ ID NO: 625607 - RNA, 22 nt, Human
cccacccccugaccccuaggac

SEQ ID NO: 625608 - RNA, 21 nt, Human
cccauaacucccaccccugaa

SEQ ID NO: 625609 - RNA, 22 nt, Human
cccauaacucccaccccugaaa

SEQ ID NO: 625610 - RNA, 24 nt, Human
cccuaguauuccaacagggguuga

SEQ ID NO: 625611 - RNA, 20 nt, Human
ccgauucuccagugcaagcu

SEQ ID NO: 625612 - RNA, 27 nt, Human
ccugaccccuaggacuauacaguggaa

SEQ ID NO: 625613 - RNA, 24 nt, Human
cuaauaccauuuauucuacuauuc

SEQ ID NO: 625614 - RNA, 21 nt, Human
cuccacaccccaugacucccc

SEQ ID NO: 625615 - RNA, 24 nt, Human
cuccccuccacaccccaugacucc

SEQ ID NO: 625616 - RNA, 23 nt, Human
cuccugcugcgggccggagacag

SEQ ID NO: 625617 - RNA, 19 nt, Human
cucuaggucaggaugucgc

SEQ ID NO: 625618 - RNA, 22 nt, Human
cugcgggccggagacagaguga

SEQ ID NO: 625619 - RNA, 19 nt, Human
cugcuccugcugcgggccg

SEQ ID NO: 625620 - RNA, 21 nt, Human
cuguugucaguuuucuuaauu

SEQ ID NO: 625621 - RNA, 26 nt, Human
cuucacuuucaaaacuuucucuucca

SEQ ID NO: 625622 - RNA, 20 nt, Human
cuuuccuuuccuccccucca

SEQ ID NO: 625623 - RNA, 24 nt, Human
cuuucugacuuuguagaaaagcuu

SEQ ID NO: 625624 - RNA, 24 nt, Human
cuuugcuaugagagacagguuagg

SEQ ID NO: 625625 - RNA, 20 nt, Human
gaaacaaaauaccuuuccuu

SEQ ID NO: 625626 - RNA, 18 nt, Human
gaaagaagaaaucuucac

SEQ ID NO: 625627 - RNA, 18 nt, Human
gaacaacucaacugcagc

SEQ ID NO: 625628 - RNA, 18 nt, Human
gacacaguguaacguugg

SEQ ID NO: 625629 - RNA, 19 nt, Human
gacaguuccuuuggaagcu

SEQ ID NO: 625630 - RNA, 22 nt, Human
gagagucuaauaccauuuauuc

SEQ ID NO: 625631 - RNA, 24 nt, Human
gaugcagauuuugugauggggucc

SEQ ID NO: 625632 - RNA, 21 nt, Human
gcacaacacggugguagacaa

SEQ ID NO: 625633 - RNA, 24 nt, Human
gccaguaacucaaggugcuuuucc

SEQ ID NO: 625634 - RNA, 19 nt, Human
gccguuccucccuuuucaa

SEQ ID NO: 625635 - RNA, 19 nt, Human
gcuucaguagaaauuccug

SEQ ID NO: 625636 - RNA, 18 nt, Human
ggaagaagcaaaauuucu

SEQ ID NO: 625637 - RNA, 19 nt, Human
ggacauugguacaagagaa

SEQ ID NO: 625638 - RNA, 18 nt, Human
ggccggagacagagugag

SEQ ID NO: 625639 - RNA, 20 nt, Human
gggaaagaagaaaucuucac

SEQ ID NO: 625640 - RNA, 18 nt, Human
gggaagccaguaacucaa

SEQ ID NO: 625641 - RNA, 23 nt, Human
ggguccgugguagcaacaggaga

SEQ ID NO: 625642 - RNA, 26 nt, Human
gguaaacauacaaauaaggagaaggu

SEQ ID NO: 625643 - RNA, 24 nt, Human
ggugcuauaaauauaaaugcuacu

SEQ ID NO: 625644 - RNA, 21 nt, Human
guaguucuugguggguuuuug

SEQ ID NO: 625645 - RNA, 21 nt, Human
guccaaaaauacccagaucaa

SEQ ID NO: 625646 - RNA, 21 nt, Human
guguacuuucugacuuuguag

SEQ ID NO: 625647 - RNA, 22 nt, Human
guucacaaugggacuuuuccca

SEQ ID NO: 625648 - RNA, 21 nt, Human
uaaaaaaaaaaaaaaaagcac

SEQ ID NO: 625649 - RNA, 21 nt, Human
uaaaaaaggaugauggaagua

SEQ ID NO: 625650 - RNA, 20 nt, Human
uaaguaggcaagcuuuacuc

SEQ ID NO: 625651 - RNA, 19 nt, Human
uacacccaaucuuccagau

SEQ ID NO: 625652 - RNA, 18 nt, Human
uacagcuuugcuuccucc

SEQ ID NO: 625653 - RNA, 19 nt, Human
uacauguaucauacauaua

SEQ ID NO: 625654 - RNA, 19 nt, Human
uacauuggugcuauaaaua

SEQ ID NO: 625655 - RNA, 21 nt, Human
uaccccuucacacccaccccu

SEQ ID NO: 625656 - RNA, 19 nt, Human
uacuguguggaaggaaggu

SEQ ID NO: 625657 - RNA, 19 nt, Human
uaugaagcaugaaauuaag

SEQ ID NO: 625658 - RNA, 24 nt, Human
ucaaaaauuaccuggaagcaauuu

SEQ ID NO: 625659 - RNA, 22 nt, Human
ucacaccaguguguucacuuug

SEQ ID NO: 625660 - RNA, 23 nt, Human
ucacaccaguguguucacuuugg

SEQ ID NO: 625661 - RNA, 21 nt, Human
ucacaucuuucacaguacccu

SEQ ID NO: 625662 - RNA, 18 nt, Human
ucagcagaaugcugguca

SEQ ID NO: 625663 - RNA, 22 nt, Human
ucaguguaaaaaaaaaaaaaaa

SEQ ID NO: 625664 - RNA, 23 nt, Human
ucaguguaaaaaaaaaaaaaaaa

SEQ ID NO: 625665 - RNA, 27 nt, Human
ucaguguaaaaaaaaaaaaaaaagcac

SEQ ID NO: 625666 - RNA, 25 nt, Human
uccaaaaauacccagaucaaauaaa

SEQ ID NO: 625667 - RNA, 20 nt, Human
uccccauaacucccaccccu

SEQ ID NO: 625668 - RNA, 20 nt, Human
uccguccugagguauuggaa

SEQ ID NO: 625669 - RNA, 20 nt, Human
ucucucugaagcaacaggcu

SEQ ID NO: 625670 - RNA, 22 nt, Human
ucugaagacaguuccuuuggaa

SEQ ID NO: 625671 - RNA, 18 nt, Human
ucugucuuucucuucuuc

SEQ ID NO: 625672 - RNA, 18 nt, Human
ucuucuucacuuucaaaa

SEQ ID NO: 625673 - RNA, 21 nt, Human
ucuuucucuucuucacuuucc

SEQ ID NO: 625674 - RNA, 22 nt, Human
ugaaaaaucccaacugcauaga

SEQ ID NO: 625675 - RNA, 24 nt, Human
ugaaaaaucccaacugcauagaaa

SEQ ID NO: 625676 - RNA, 23 nt, Human
ugaaacccccacccccugacccc

SEQ ID NO: 625677 - RNA, 23 nt, Human
ugaaagaagcuguguacuuucug

SEQ ID NO: 625678 - RNA, 23 nt, Human
ugaagacaguuccuuuggaagcu

SEQ ID NO: 625679 - RNA, 20 nt, Human
ugacacaguguaacguuggc

SEQ ID NO: 625680 - RNA, 19 nt, Human
ugacaugacaccgacauga

SEQ ID NO: 625681 - RNA, 22 nt, Human
ugacaugacaccgacaugauua

SEQ ID NO: 625682 - RNA, 20 nt, Human
ugauauggacugaaagaagc

SEQ ID NO: 625683 - RNA, 24 nt, Human
ugaugcgaugcucaggcuuccggg

SEQ ID NO: 625684 - RNA, 21 nt, Human
ugauggaaguaaaaaguugga

SEQ ID NO: 625685 - RNA, 21 nt, Human
ugauuaauaccaucuuaacac

SEQ ID NO: 625686 - RNA, 19 nt, Human
ugcagcagucaccaaaaaa

SEQ ID NO: 625687 - RNA, 18 nt, Human
ugcgaugcucaggcuucc

SEQ ID NO: 625688 - RNA, 22 nt, Human
ugcuggucagccgaggucacac

SEQ ID NO: 625689 - RNA, 23 nt, Human
ugcuguuaauucaaggaaaaaag

SEQ ID NO: 625690 - RNA, 24 nt, Human
uggaaaaugaaacccccacccccu

SEQ ID NO: 625691 - RNA, 26 nt, Human
uggaaaaugaaacccccacccccuga

SEQ ID NO: 625692 - RNA, 20 nt, Human
uggaagcuucaguagaaauu

SEQ ID NO: 625693 - RNA, 23 nt, Human
uggaauagguaaaggggaagcca

SEQ ID NO: 625694 - RNA, 19 nt, Human
uggcaagugauucacaacg

SEQ ID NO: 625695 - RNA, 20 nt, Human
uggcuggggaggaagugucg

SEQ ID NO: 625696 - RNA, 23 nt, Human
ugguuuugccaucagcggguuug

SEQ ID NO: 625697 - RNA, 26 nt, Human
uguaaaaaaaaaaaaaaaagcacgca

SEQ ID NO: 625698 - RNA, 22 nt, Human
uguauagacaaagaaacaaaau

SEQ ID NO: 625699 - RNA, 25 nt, Human
ugucaccaguguuguaaaaaaaagg

SEQ ID NO: 625700 - RNA, 21 nt, Human
uguguacagcuucucgcugag

SEQ ID NO: 625701 - RNA, 20 nt, Human
uguucagaauauugcauggu

SEQ ID NO: 625702 - RNA, 22 nt, Human
uuaauaccaucuuaacacacuc

SEQ ID NO: 625703 - RNA, 22 nt, Human
uucaaaauguacauuggugcua

SEQ ID NO: 625704 - RNA, 21 nt, Human
uucacacccaccccuucccca

SEQ ID NO: 625705 - RNA, 19 nt, Human
uucagagcugucuucuuuu

SEQ ID NO: 625706 - RNA, 22 nt, Human
uucccagaauccucagaauugc

SEQ ID NO: 625707 - RNA, 18 nt, Human
uuccccauaacucccacc

SEQ ID NO: 625708 - RNA, 26 nt, Human
uuccccauaacucccaccccugaaag

SEQ ID NO: 625709 - RNA, 20 nt, Human
uucucauuuccuagugaagc

SEQ ID NO: 625710 - RNA, 23 nt, Human
uucuucuugacuugaagcuucag

SEQ ID NO: 625711 - RNA, 20 nt, Human
uugauggaauagguaaaggg

SEQ ID NO: 625712 - RNA, 23 nt, Human
uuggugcuauaaauauaaaugcu

SEQ ID NO: 625713 - RNA, 24 nt, Human
uuguggcuuuccuuucuucuuauu

SEQ ID NO: 625714 - RNA, 24 nt, Human
uuucagaaaaagcuuuuuguccau

SEQ ID NO: 625715 - RNA, 22 nt, Human
uuugcagacucccuuauugcag

SEQ ID NO: 625716 - RNA, 27 nt, Human
uuuggaagcuucaguagaaauuccugg

SEQ ID NO: 625717 - RNA, 19 nt, Human
uuugucagcucuuuuucuc

SEQ ID NO: 625718 - RNA, 18 nt, Human
uuugugaugggguccgug

SEQ ID NO: 625719 - RNA, 19 nt, Human
uuuuucagcagaaugcugg

SEQ ID NO: 625720 - RNA, 23 nt, Human
uuuuuucuucaaguuuuuucucu

SEQ ID NO: 625721 - RNA, 20 nt, Human
uuuuuuuucaaaaccauaug

SEQ ID NO: 625722 - RNA, 18 nt, Human
aaacaggagguacuaugg

SEQ ID NO: 625723 - RNA, 21 nt, Human
aacaacuucaaacaggaggua

SEQ ID NO: 625724 - RNA, 21 nt, Human
aagcgagggagcagaagccca

SEQ ID NO: 625725 - RNA, 23 nt, Human
agaagacaagcgagggagcagaa

SEQ ID NO: 625726 - RNA, 24 nt, Human
agcagaagcccacggggcaacagc

SEQ ID NO: 625727 - RNA, 18 nt, Human
cccggccgcggccggggc

SEQ ID NO: 625728 - RNA, 20 nt, Human
ccgcggccggggcgagaagc

SEQ ID NO: 625729 - RNA, 22 nt, Human
cgaccucaggcucuagcucccg

SEQ ID NO: 625730 - RNA, 24 nt, Human
cgagaagacaagcgagggagcaga

SEQ ID NO: 625731 - RNA, 25 nt, Human
cgccgccgaccucaggcucuagcuc

SEQ ID NO: 625732 - RNA, 20 nt, Human
cggggcgagaagcccgagaa

SEQ ID NO: 625733 - RNA, 20 nt, Human
gagaagacaagcgagggagc

SEQ ID NO: 625734 - RNA, 19 nt, Human
gcgagggagcagaagccca

SEQ ID NO: 625735 - RNA, 18 nt, Human
uaagauagaugugaauaa

SEQ ID NO: 625736 - RNA, 18 nt, Human
uacugaggacccggccgc

SEQ ID NO: 625737 - RNA, 22 nt, Human
uuuuuuuuuuuuuaaaaguuca

SEQ ID NO: 625738 - RNA, 23 nt, Human
uuuuuuuuuuuuuuuuuuaaaag

SEQ ID NO: 625739 - RNA, 21 nt, Human
aaccucggacacuucguccuc

SEQ ID NO: 625740 - RNA, 19 nt, Human
accgccgccgcugaucucg

SEQ ID NO: 625741 - RNA, 22 nt, Human
accgcugccgcugccgccgccg

SEQ ID NO: 625742 - RNA, 24 nt, Human
accucaggaucugcaaaagcuuua

SEQ ID NO: 625743 - RNA, 19 nt, Human
accuccacccccgguccuc

SEQ ID NO: 625744 - RNA, 19 nt, Human
accuccacccccgguccuc

SEQ ID NO: 625745 - RNA, 21 nt, Human
agagcagcaagaggaagaagc

SEQ ID NO: 625746 - RNA, 21 nt, Human
agaggcaccaccuccaccccc

SEQ ID NO: 625747 - RNA, 19 nt, Human
agucgugccugugucucug

SEQ ID NO: 625748 - RNA, 20 nt, Human
aucucgggaacgagaagagc

SEQ ID NO: 625749 - RNA, 21 nt, Human
caaaagcuuuaccaucagcag

SEQ ID NO: 625750 - RNA, 24 nt, Human
caccaccuccacccccgguccuca

SEQ ID NO: 625751 - RNA, 19 nt, Human
caccgccgccgcugaucuc

SEQ ID NO: 625752 - RNA, 21 nt, Human
cagaggcaccaccuccacccc

SEQ ID NO: 625753 - RNA, 22 nt, Human
cagcagcagcuucauccagugc

SEQ ID NO: 625754 - RNA, 20 nt, Human
cagucuccggaguaccucag

SEQ ID NO: 625755 - RNA, 22 nt, Human
cagugcacaacuaacugaggau

SEQ ID NO: 625756 - RNA, 19 nt, Human
ccagcgccgcguccccucc

SEQ ID NO: 625757 - RNA, 22 nt, Human
ccagugcacaacuaacugagga

SEQ ID NO: 625758 - RNA, 23 nt, Human
ccccagaccgaccccucccggcg

SEQ ID NO: 625759 - RNA, 18 nt, Human
cccguaccgcugccgcug

SEQ ID NO: 625760 - RNA, 21 nt, Human
cccguaccgcugccgcugccg

SEQ ID NO: 625761 - RNA, 21 nt, Human
ccgccgccgcugcugccgacu

SEQ ID NO: 625762 - RNA, 22 nt, Human
ccgcguccccuccgcccguacc

SEQ ID NO: 625763 - RNA, 20 nt, Human
ccgcugaucucgggaacgag

SEQ ID NO: 625764 - RNA, 19 nt, Human
ccgcugccgccgccgccgc

SEQ ID NO: 625765 - RNA, 25 nt, Human
ccgcugccgccgccgccgcugcugc

SEQ ID NO: 625766 - RNA, 18 nt, Human
ccgcugccgcugccgccg

SEQ ID NO: 625767 - RNA, 21 nt, Human
ccgcugccgcugccgccgccg

SEQ ID NO: 625768 - RNA, 24 nt, Human
ccgcugccgcugccgccgccgccg

SEQ ID NO: 625769 - RNA, 18 nt, Human
ccguaccgcugccgcugc

SEQ ID NO: 625770 - RNA, 21 nt, Human
ccgugucagugcagcagcagc

SEQ ID NO: 625771 - RNA, 21 nt, Human
ccuccccaaagagccucacgg

SEQ ID NO: 625772 - RNA, 24 nt, Human
ccuucugcaguacuugauaagaau

SEQ ID NO: 625773 - RNA, 21 nt, Human
cgagaagagcagcaagaggaa

SEQ ID NO: 625774 - RNA, 26 nt, Human
cgagaagagcagcaagaggaagaagc

SEQ ID NO: 625775 - RNA, 22 nt, Human
cgccgccgcugcugccgacucc

SEQ ID NO: 625776 - RNA, 22 nt, Human
cggcggaggcggcuccgaggcc

SEQ ID NO: 625777 - RNA, 22 nt, Human
cuagcaaugcuucuagucgugc

SEQ ID NO: 625778 - RNA, 27 nt, Human
cucccggcggaggcggcuccgaggccc

SEQ ID NO: 625779 - RNA, 19 nt, Human
cuccgaggccccagcuggg

SEQ ID NO: 625780 - RNA, 21 nt, Human
cugccgcugccgccgccgccg

SEQ ID NO: 625781 - RNA, 19 nt, Human
cuucuagcaaugcuucuag

SEQ ID NO: 625782 - RNA, 18 nt, Human
gagaagagcagcaagagg

SEQ ID NO: 625783 - RNA, 22 nt, Human
gccgccgccgccgcugcugccg

SEQ ID NO: 625784 - RNA, 21 nt, Human
gccgccgcugaucucgggaac

SEQ ID NO: 625785 - RNA, 20 nt, Human
gccgcugccgccgccgccgc

SEQ ID NO: 625786 - RNA, 18 nt, Human
gcugccgacucccgacgc

SEQ ID NO: 625787 - RNA, 22 nt, Human
ggaacgagaagagcagcaagag

SEQ ID NO: 625788 - RNA, 18 nt, Human
ggauccccagaccgaccc

SEQ ID NO: 625789 - RNA, 19 nt, Human
ggcagccgccaacuugaaa

SEQ ID NO: 625790 - RNA, 23 nt, Human
ggcagccgccaacuugaaaucca

SEQ ID NO: 625791 - RNA, 18 nt, Human
ggugccgacccacucgcg

SEQ ID NO: 625792 - RNA, 21 nt, Human
guccaaaauaaaugauucaac

SEQ ID NO: 625793 - RNA, 22 nt, Human
gugcagcagcagcuucauccag

SEQ ID NO: 625794 - RNA, 21 nt, Human
uaccagcaauacaaaucucuu

SEQ ID NO: 625795 - RNA, 24 nt, Human
ucagugcagcagcagcuucaucca

SEQ ID NO: 625796 - RNA, 19 nt, Human
uccacagugcguaagucug

SEQ ID NO: 625797 - RNA, 18 nt, Human
uccagaucuucuuggucc

SEQ ID NO: 625798 - RNA, 19 nt, Human
uccccagaccgaccccucc

SEQ ID NO: 625799 - RNA, 21 nt, Human
uccccagaccgaccccucccg

SEQ ID NO: 625800 - RNA, 21 nt, Human
uccugcugcuucuagcaaugc

SEQ ID NO: 625801 - RNA, 19 nt, Human
uccuuugucacccagcagg

SEQ ID NO: 625802 - RNA, 19 nt, Human
ucgcggucaccgccgccgc

SEQ ID NO: 625803 - RNA, 22 nt, Human
ucgugccugugucucuggaucc

SEQ ID NO: 625804 - RNA, 19 nt, Human
ugcagcagcagcuucaucc

SEQ ID NO: 625805 - RNA, 19 nt, Human
uucuagucgugccuguguc

SEQ ID NO: 625806 - RNA, 24 nt, Human
uuuauugggacuucauaaucuuuu

SEQ ID NO: 625807 - RNA, 22 nt, Human
uuuuuuuuuuuuuuuuuaccag

SEQ ID NO: 625808 - RNA, 22 nt, Human
aaaagcauguaaaaauuguaca

SEQ ID NO: 625809 - RNA, 19 nt, Human
aaacaucacaaccccaggg

SEQ ID NO: 625810 - RNA, 20 nt, Human
aaagcaagucacacuagcuc

SEQ ID NO: 625811 - RNA, 18 nt, Human
aaaggaagugagcuguuu

SEQ ID NO: 625812 - RNA, 19 nt, Human
aagagaaaacguagagaaa

SEQ ID NO: 625813 - RNA, 22 nt, Human
aagcaagucacacuagcucuca

SEQ ID NO: 625814 - RNA, 18 nt, Human
aaucuaucugggugacac

SEQ ID NO: 625815 - RNA, 22 nt, Human
acaaagcaagucacacuagcuc

SEQ ID NO: 625816 - RNA, 20 nt, Human
acaccagagagguuucugaa

SEQ ID NO: 625817 - RNA, 20 nt, Human
accaaacaagguauuuucac

SEQ ID NO: 625818 - RNA, 19 nt, Human
acccaggcuccuccuaaac

SEQ ID NO: 625819 - RNA, 23 nt, Human
acucuuauaaagagaauuaaggg

SEQ ID NO: 625820 - RNA, 21 nt, Human
acugcaagcaguggaaaagaa

SEQ ID NO: 625821 - RNA, 23 nt, Human
agaaaaacgagcuggccugccuu

SEQ ID NO: 625822 - RNA, 19 nt, Human
agagaaaacguagagaaau

SEQ ID NO: 625823 - RNA, 24 nt, Human
agcacaaucuaucugggugacacc

SEQ ID NO: 625824 - RNA, 22 nt, Human
agcaguggaaaagaauagauac

SEQ ID NO: 625825 - RNA, 20 nt, Human
agggucacuuugaacacugg

SEQ ID NO: 625826 - RNA, 23 nt, Human
agguaagaaggaaguggcaugag

SEQ ID NO: 625827 - RNA, 21 nt, Human
aucacaaccccagggaacagc

SEQ ID NO: 625828 - RNA, 19 nt, Human
cacaagcacucccaccgag

SEQ ID NO: 625829 - RNA, 21 nt, Human
cacaaucuaucugggugacac

SEQ ID NO: 625830 - RNA, 21 nt, Human
cacuacgcggaucuggaagau

SEQ ID NO: 625831 - RNA, 19 nt, Human
cacucccaccgagaugguc

SEQ ID NO: 625832 - RNA, 20 nt, Human
caggagccgucaacugccag

SEQ ID NO: 625833 - RNA, 24 nt, Human
cauucugucacauuaucuucuaaa

SEQ ID NO: 625834 - RNA, 20 nt, Human
cauuuuauuuuccuuuagga

SEQ ID NO: 625835 - RNA, 21 nt, Human
ccacccguuaaagagucaaaa

SEQ ID NO: 625836 - RNA, 21 nt, Human
ccaggagccgucaacugccag

SEQ ID NO: 625837 - RNA, 23 nt, Human
ccuccuaaaccagccagauucag

SEQ ID NO: 625838 - RNA, 23 nt, Human
cgguggagacgauuccucacuac

SEQ ID NO: 625839 - RNA, 21 nt, Human
cguuaaagagucaaaacccaa

SEQ ID NO: 625840 - RNA, 22 nt, Human
cuauaccuuuacacugccuaca

SEQ ID NO: 625841 - RNA, 23 nt, Human
cucccuuggcuuugaccuaaccu

SEQ ID NO: 625842 - RNA, 19 nt, Human
cucgcgggaucuaguccca

SEQ ID NO: 625843 - RNA, 18 nt, Human
gagaaaacguagagaaau

SEQ ID NO: 625844 - RNA, 23 nt, Human
gagcuguuucaggacucaaugaa

SEQ ID NO: 625845 - RNA, 24 nt, Human
ggaaaaccaauaagagaggggaca

SEQ ID NO: 625846 - RNA, 19 nt, Human
guuucaccaccgcucuaga

SEQ ID NO: 625847 - RNA, 21 nt, Human
ucaagagaaaacguagagaaa

SEQ ID NO: 625848 - RNA, 19 nt, Human
ucacuuccggccucgugcc

SEQ ID NO: 625849 - RNA, 20 nt, Human
ucagagagaaaaacgagcug

SEQ ID NO: 625850 - RNA, 25 nt, Human
ucccaccgagaugguccagugcccu

SEQ ID NO: 625851 - RNA, 18 nt, Human
ucccuggaaaaugcagga

SEQ ID NO: 625852 - RNA, 21 nt, Human
ucccuggaaaaugcaggaaaa

SEQ ID NO: 625853 - RNA, 22 nt, Human
ucccuuggcuuugaccuaaccu

SEQ ID NO: 625854 - RNA, 21 nt, Human
ugaggcagugaaauaggucug

SEQ ID NO: 625855 - RNA, 21 nt, Human
uggaaaaugcaggaaaaccaa

SEQ ID NO: 625856 - RNA, 24 nt, Human
uggcaugauaaacaucacaacccc

SEQ ID NO: 625857 - RNA, 19 nt, Human
uguacauauacgcauuaca

SEQ ID NO: 625858 - RNA, 21 nt, Human
uuggcacagguaagaaggaag

SEQ ID NO: 625859 - RNA, 23 nt, Human
uuguacauuuguacauauacgca

SEQ ID NO: 625860 - RNA, 24 nt, Human
uuuccagauucugucacucccuug

SEQ ID NO: 625861 - RNA, 21 nt, Human
uuuuccagauucugucacucc

SEQ ID NO: 625862 - RNA, 21 nt, Human
aaaaagaaagaggagacagga

SEQ ID NO: 625863 - RNA, 22 nt, Human
aaaacaaaaugaucagagccuu

SEQ ID NO: 625864 - RNA, 21 nt, Human
aagauuccagcagccucggcc

SEQ ID NO: 625865 - RNA, 21 nt, Human
aagcaggcgcccccuuacccc

SEQ ID NO: 625866 - RNA, 18 nt, Human
aagggccagagucugggu

SEQ ID NO: 625867 - RNA, 20 nt, Human
aaggugcagacauccgggcc

SEQ ID NO: 625868 - RNA, 19 nt, Human
acaacucagcccucgaccc

SEQ ID NO: 625869 - RNA, 22 nt, Human
accuguuccgugguucuccccu

SEQ ID NO: 625870 - RNA, 22 nt, Human
acggagacgguucuguugguag

SEQ ID NO: 625871 - RNA, 26 nt, Human
agacaggaauaaaggaagggggaccc

SEQ ID NO: 625872 - RNA, 25 nt, Human
agacaggaauaaaggaagggguccg

SEQ ID NO: 625873 - RNA, 22 nt, Human
agcccaauggcauucaucagcc

SEQ ID NO: 625874 - RNA, 20 nt, Human
agccuacaccccccacuccu

SEQ ID NO: 625875 - RNA, 20 nt, Human
agcgaaggugcagacauccg

SEQ ID NO: 625876 - RNA, 18 nt, Human
aggaagcuguccgggggc

SEQ ID NO: 625877 - RNA, 19 nt, Human
aggaagcuguccgggggcu

SEQ ID NO: 625878 - RNA, 20 nt, Human
aggaccugcccacugucccu

SEQ ID NO: 625879 - RNA, 22 nt, Human
aggagaaaguggggugccuggc

SEQ ID NO: 625880 - RNA, 20 nt, Human
aggaggagguggaagaacgg

SEQ ID NO: 625881 - RNA, 22 nt, Human
aggaggagguggaagaagggac

SEQ ID NO: 625882 - RNA, 20 nt, Human
aggaugccuucaucaggaaa

SEQ ID NO: 625883 - RNA, 21 nt, Human
aggccaagcccaccauuacau

SEQ ID NO: 625884 - RNA, 18 nt, Human
aggggaggaagagggcag

SEQ ID NO: 625885 - RNA, 20 nt, Human
agucuguguuucggcauucu

SEQ ID NO: 625886 - RNA, 21 nt, Human
auggagcgcuggcgaauacug

SEQ ID NO: 625887 - RNA, 26 nt, Human
auggcauucaucagccccaugucucu

SEQ ID NO: 625888 - RNA, 19 nt, Human
augucuccgcuggucggca

SEQ ID NO: 625889 - RNA, 19 nt, Human
auuccagcagccucggcca

SEQ ID NO: 625890 - RNA, 21 nt, Human
caacaccuuaaaucacagacu

SEQ ID NO: 625891 - RNA, 21 nt, Human
caagucgguucccucuacuga

SEQ ID NO: 625892 - RNA, 22 nt, Human
caccucccucucagucuguguu

SEQ ID NO: 625893 - RNA, 23 nt, Human
caccuuaaaucacagacugagac

SEQ ID NO: 625894 - RNA, 24 nt, Human
cacguacaguuaagaguccacaug

SEQ ID NO: 625895 - RNA, 25 nt, Human
cacuggcaccauacucugaacccuc

SEQ ID NO: 625896 - RNA, 22 nt, Human
cagcacauucacggaagcauua

SEQ ID NO: 625897 - RNA, 23 nt, Human
cagccaacgggcagaguugauac

SEQ ID NO: 625898 - RNA, 24 nt, Human
cagccagcagcucuuccacauguc

SEQ ID NO: 625899 - RNA, 19 nt, Human
cagcuaaaaugaggccaua

SEQ ID NO: 625900 - RNA, 18 nt, Human
cagcuccaacacacugaa

SEQ ID NO: 625901 - RNA, 19 nt, Human
caggaugccuucaucagga

SEQ ID NO: 625902 - RNA, 21 nt, Human
caguugcccggccucugggag

SEQ ID NO: 625903 - RNA, 25 nt, Human
caugaaaaaucccagcauaaggcag

SEQ ID NO: 625904 - RNA, 22 nt, Human
cauuaguaaaugccgaaguccc

SEQ ID NO: 625905 - RNA, 18 nt, Human
ccaagccaggcuguccac

SEQ ID NO: 625906 - RNA, 23 nt, Human
ccaccacaauguuucuaugauga

SEQ ID NO: 625907 - RNA, 22 nt, Human
ccagcagcucuuccacaugucc

SEQ ID NO: 625908 - RNA, 21 nt, Human
ccauaggccaagccaagcccu

SEQ ID NO: 625909 - RNA, 18 nt, Human
cccacaguagucccccau

SEQ ID NO: 625910 - RNA, 23 nt, Human
cccagccuugggcuagcuuuggc

SEQ ID NO: 625911 - RNA, 21 nt, Human
ccccagccuugggcuagcuuu

SEQ ID NO: 625912 - RNA, 20 nt, Human
ccccuagggccugcagcguc

SEQ ID NO: 625913 - RNA, 18 nt, Human
ccccucuccucccaccac

SEQ ID NO: 625914 - RNA, 18 nt, Human
ccccucuggcugcugggg

SEQ ID NO: 625915 - RNA, 21 nt, Human
cccucuuccuccuccuguucc

SEQ ID NO: 625916 - RNA, 21 nt, Human
cccugacccucuuccuccucc

SEQ ID NO: 625917 - RNA, 22 nt, Human
cccugaugcagccagcagcucu

SEQ ID NO: 625918 - RNA, 18 nt, Human
ccgaagccgcccauggag

SEQ ID NO: 625919 - RNA, 21 nt, Human
ccggggcugaagcccaauggc

SEQ ID NO: 625920 - RNA, 20 nt, Human
ccuacaccccccacuccuga

SEQ ID NO: 625921 - RNA, 20 nt, Human
ccucaaaguccucaaauucc

SEQ ID NO: 625922 - RNA, 19 nt, Human
ccuccccuuccccagccuu

SEQ ID NO: 625923 - RNA, 26 nt, Human
ccucgcggacaacucagcccucgacc

SEQ ID NO: 625924 - RNA, 18 nt, Human
ccucucagucuguguuuc

SEQ ID NO: 625925 - RNA, 24 nt, Human
ccugcugcugccaccauccagaag

SEQ ID NO: 625926 - RNA, 23 nt, Human
ccuggagucuccuccccuucccc

SEQ ID NO: 625927 - RNA, 22 nt, Human
ccuguccucaagaaucugggag

SEQ ID NO: 625928 - RNA, 20 nt, Human
cgaaggugcagacauccggg

SEQ ID NO: 625929 - RNA, 21 nt, Human
cgagagguggagggcuggggu

SEQ ID NO: 625930 - RNA, 21 nt, Human
cgcggacaacucagcccucga

SEQ ID NO: 625931 - RNA, 19 nt, Human
cgcucaguagccacuguca

SEQ ID NO: 625932 - RNA, 22 nt, Human
cgcucaguagccacugucacac

SEQ ID NO: 625933 - RNA, 21 nt, Human
cgggcuccagauccuggaagg

SEQ ID NO: 625934 - RNA, 24 nt, Human
cggggcugaagcccaauggcauuu

SEQ ID NO: 625935 - RNA, 22 nt, Human
cgguagguaguauuggcaaugu

SEQ ID NO: 625936 - RNA, 18 nt, Human
cuaaaaugaggccauaca

SEQ ID NO: 625937 - RNA, 26 nt, Human
cucaaaguccucaaauuccaagucgg

SEQ ID NO: 625938 - RNA, 21 nt, Human
cuccaacacacugaagcagcu

SEQ ID NO: 625939 - RNA, 21 nt, Human
cucccgggcuccagauccugg

SEQ ID NO: 625940 - RNA, 20 nt, Human
cucuuccuccuccuguuccc

SEQ ID NO: 625941 - RNA, 18 nt, Human
cugaacccucaccuucac

SEQ ID NO: 625942 - RNA, 20 nt, Human
cugaagcagcuaaaaugagg

SEQ ID NO: 625943 - RNA, 18 nt, Human
cugacacccacaggcgcu

SEQ ID NO: 625944 - RNA, 20 nt, Human
cugacugaucuuccucucca

SEQ ID NO: 625945 - RNA, 18 nt, Human
cugagagcugcggugaau

SEQ ID NO: 625946 - RNA, 20 nt, Human
cugaggaagaggaggagguu

SEQ ID NO: 625947 - RNA, 22 nt, Human
cugccaggagcuggccaucugc

SEQ ID NO: 625948 - RNA, 23 nt, Human
cuggcucaggcagccaacgggca

SEQ ID NO: 625949 - RNA, 18 nt, Human
cuguuaacagaagaguga

SEQ ID NO: 625950 - RNA, 19 nt, Human
cuugugcccacugacugau

SEQ ID NO: 625951 - RNA, 22 nt, Human
gaaacaggaauggggacagggg

SEQ ID NO: 625952 - RNA, 18 nt, Human
gaaaguggggugccuggc

SEQ ID NO: 625953 - RNA, 26 nt, Human
gaagcauuacugauuucagggagguc

SEQ ID NO: 625954 - RNA, 20 nt, Human
gaagguucuaguuccccgag

SEQ ID NO: 625955 - RNA, 23 nt, Human
gacccuguuaacagaagagugag

SEQ ID NO: 625956 - RNA, 18 nt, Human
gaccugcccacugucccu

SEQ ID NO: 625957 - RNA, 25 nt, Human
gaggagacaggaauaaaggaagggg

SEQ ID NO: 625958 - RNA, 18 nt, Human
gagggcuggggugaggag

SEQ ID NO: 625959 - RNA, 22 nt, Human
gaguagccaagccaggcugucc

SEQ ID NO: 625960 - RNA, 23 nt, Human
gaucacugccccugccaggaccc

SEQ ID NO: 625961 - RNA, 20 nt, Human
gcagccugaagaccugggcc

SEQ ID NO: 625962 - RNA, 24 nt, Human
gcccaauggcauucaucagcccca

SEQ ID NO: 625963 - RNA, 22 nt, Human
gcucaguagccacugucacacc

SEQ ID NO: 625964 - RNA, 19 nt, Human
gcuccggcaccucccucuc

SEQ ID NO: 625965 - RNA, 19 nt, Human
ggaauggacagugaagacc

SEQ ID NO: 625966 - RNA, 19 nt, Human
ggacagugaagaccgucuc

SEQ ID NO: 625967 - RNA, 23 nt, Human
ggagcaaguaacagcuccaacac

SEQ ID NO: 625968 - RNA, 21 nt, Human
ggagggcuggggugaggaggu

SEQ ID NO: 625969 - RNA, 21 nt, Human
ggaugaaagcugccaggagcu

SEQ ID NO: 625970 - RNA, 21 nt, Human
ggcaccagguucagugcccgu

SEQ ID NO: 625971 - RNA, 23 nt, Human
ggcuggggugaggaggugugggc

SEQ ID NO: 625972 - RNA, 18 nt, Human
gggacaggggaggaagag

SEQ ID NO: 625973 - RNA, 20 nt, Human
gggacaggggaggaagaggg

SEQ ID NO: 625974 - RNA, 21 nt, Human
gggacaggggaggaagagggc

SEQ ID NO: 625975 - RNA, 21 nt, Human
gggccaccaugugcucugugg

SEQ ID NO: 625976 - RNA, 18 nt, Human
gggcuggggugaggaggu

SEQ ID NO: 625977 - RNA, 25 nt, Human
ggggacaggggaggaagagggcagg

SEQ ID NO: 625978 - RNA, 19 nt, Human
ggggugaggaggugugggc

SEQ ID NO: 625979 - RNA, 19 nt, Human
gguagcgcauggagcgcug

SEQ ID NO: 625980 - RNA, 24 nt, Human
gguucuaguuccccgaggcaggcc

SEQ ID NO: 625981 - RNA, 22 nt, Human
guccagggcugaguccccugag

SEQ ID NO: 625982 - RNA, 21 nt, Human
guccccugagcccauguuacu

SEQ ID NO: 625983 - RNA, 19 nt, Human
gucucguucagcugguccc

SEQ ID NO: 625984 - RNA, 22 nt, Human
uaaaggacguugaaaacucucc

SEQ ID NO: 625985 - RNA, 18 nt, Human
uaagacgacgaagagagg

SEQ ID NO: 625986 - RNA, 22 nt, Human
uacaaacagaaaggaaaucaca

SEQ ID NO: 625987 - RNA, 23 nt, Human
uacacguacaguuaagaguccac

SEQ ID NO: 625988 - RNA, 21 nt, Human
uacaguuaagaguccacaugc

SEQ ID NO: 625989 - RNA, 21 nt, Human
uaccauaggccaagccaagcc

SEQ ID NO: 625990 - RNA, 18 nt, Human
uaccccacaguagucccc

SEQ ID NO: 625991 - RNA, 19 nt, Human
uacuggccacagcagacug

SEQ ID NO: 625992 - RNA, 19 nt, Human
uagccaagccaggcugucc

SEQ ID NO: 625993 - RNA, 22 nt, Human
uaggagaaaguggggugccugg

SEQ ID NO: 625994 - RNA, 20 nt, Human
uaguuccccgaggcaggccu

SEQ ID NO: 625995 - RNA, 21 nt, Human
ucaacaccagaguuuaaggcc

SEQ ID NO: 625996 - RNA, 18 nt, Human
ucagcccucgacccggcg

SEQ ID NO: 625997 - RNA, 18 nt, Human
ucaggcagcaagaaacgc

SEQ ID NO: 625998 - RNA, 19 nt, Human
ucaggcagcaagaaacgcc

SEQ ID NO: 625999 - RNA, 22 nt, Human
uccacuggcaccauacucugaa

SEQ ID NO: 626000 - RNA, 20 nt, Human
uccagcagccucggccaggc

SEQ ID NO: 626001 - RNA, 22 nt, Human
ucccaguaguacucaacaccag

SEQ ID NO: 626002 - RNA, 20 nt, Human
uccccgaggcaggccuugcc

SEQ ID NO: 626003 - RNA, 21 nt, Human
ucccuguugguuucagugggg

SEQ ID NO: 626004 - RNA, 24 nt, Human
uccggggcugaagcccaauggcau

SEQ ID NO: 626005 - RNA, 21 nt, Human
uccgggggcuuaggccucgcu

SEQ ID NO: 626006 - RNA, 22 nt, Human
ucuccaccaugggccuguugca

SEQ ID NO: 626007 - RNA, 25 nt, Human
ucuccacuagaaacuacacguacag

SEQ ID NO: 626008 - RNA, 23 nt, Human
ucugccaguugcccggccucugg

SEQ ID NO: 626009 - RNA, 18 nt, Human
ucugcugguuccaggccg

SEQ ID NO: 626010 - RNA, 22 nt, Human
ucuuccuccuccuguucccccc

SEQ ID NO: 626011 - RNA, 20 nt, Human
ucuugcaguucugcaccagc

SEQ ID NO: 626012 - RNA, 22 nt, Human
ugaagcagcuaaaaugaggcca

SEQ ID NO: 626013 - RNA, 18 nt, Human
ugaagggccagagucugg

SEQ ID NO: 626014 - RNA, 20 nt, Human
ugaccuggagucuccucccc

SEQ ID NO: 626015 - RNA, 19 nt, Human
ugacugucuugugcccacu

SEQ ID NO: 626016 - RNA, 18 nt, Human
ugaggaagaggaggaggu

SEQ ID NO: 626017 - RNA, 24 nt, Human
ugagggaagauuccagcagccucg

SEQ ID NO: 626018 - RNA, 22 nt, Human
ugagguggcaggguuccggggc

SEQ ID NO: 626019 - RNA, 22 nt, Human
ugagguggcaggguuccggggc

SEQ ID NO: 626020 - RNA, 20 nt, Human
ugaucuuugguguuucccuc

SEQ ID NO: 626021 - RNA, 19 nt, Human
ugccaggagcuggccaucu

SEQ ID NO: 626022 - RNA, 22 nt, Human
ugccgaagccgcccauggaggc

SEQ ID NO: 626023 - RNA, 20 nt, Human
ugccuucaucaggaaagccc

SEQ ID NO: 626024 - RNA, 20 nt, Human
ugcugagcgcaucuucucca

SEQ ID NO: 626025 - RNA, 22 nt, Human
uggaaaucugcaaggcagacgg

SEQ ID NO: 626026 - RNA, 23 nt, Human
uggaagaacggagacgguucugu

SEQ ID NO: 626027 - RNA, 21 nt, Human
uggaagacuguucacucucug

SEQ ID NO: 626028 - RNA, 20 nt, Human
uggaaggcucagaguuggag

SEQ ID NO: 626029 - RNA, 22 nt, Human
uggagggcuggggugaggaggu

SEQ ID NO: 626030 - RNA, 20 nt, Human
uggcagagauacccacuugu

SEQ ID NO: 626031 - RNA, 19 nt, Human
uggcucaggcagccaacgg

SEQ ID NO: 626032 - RNA, 21 nt, Human
uggcucugcugguuccaggcc

SEQ ID NO: 626033 - RNA, 19 nt, Human
ugggaccaaaucgcuuggu

SEQ ID NO: 626034 - RNA, 23 nt, Human
uggggaugaaagcugccaggagc

SEQ ID NO: 626035 - RNA, 21 nt, Human
uggguuccugguggcucugcc

SEQ ID NO: 626036 - RNA, 21 nt, Human
uguaucaggcaagcaggcgcc

SEQ ID NO: 626037 - RNA, 21 nt, Human
ugucaccauuguccucaaagu

SEQ ID NO: 626038 - RNA, 18 nt, Human
uguccaggaugauuggcc

SEQ ID NO: 626039 - RNA, 24 nt, Human
uguccagggcugaguccccugagc

SEQ ID NO: 626040 - RNA, 21 nt, Human
uguggcucucccgggcuccag

SEQ ID NO: 626041 - RNA, 20 nt, Human
ugugggcggcaccagguuca

SEQ ID NO: 626042 - RNA, 22 nt, Human
uuaaugaugugaucuuuggugu

SEQ ID NO: 626043 - RNA, 22 nt, Human
uuccgugguucuccccuagggc

SEQ ID NO: 626044 - RNA, 21 nt, Human
uuggaauggacagugaagacc

SEQ ID NO: 626045 - RNA, 22 nt, Human
uuggagguggugucuggguucc

SEQ ID NO: 626046 - RNA, 21 nt, Human
uugguagcgcauggagcgcug

SEQ ID NO: 626047 - RNA, 20 nt, Human
uuggucaacucgcaguggag

SEQ ID NO: 626048 - RNA, 26 nt, Human
uuuucauacuaaaaacaaaaugauca

SEQ ID NO: 626049 - RNA, 20 nt, Human
uuuuuuuuuugaggggcaug

SEQ ID NO: 626050 - RNA, 22 nt, Human
uuuuuuuuuuuugaggggcaug

SEQ ID NO: 626051 - RNA, 18 nt, Human
aaaagucauuuuuccaaa

SEQ ID NO: 626052 - RNA, 19 nt, Human
aacaggauggcaugagggg

SEQ ID NO: 626053 - RNA, 19 nt, Human
aaccacacuggccagacac

SEQ ID NO: 626054 - RNA, 24 nt, Human
aagcaauggaaucaauaaauuuau

SEQ ID NO: 626055 - RNA, 23 nt, Human
aauggaaucaauaaauuuauuaa

SEQ ID NO: 626056 - RNA, 21 nt, Human
acaccguaaguggggaagaug

SEQ ID NO: 626057 - RNA, 19 nt, Human
acacgaacuacaaagagac

SEQ ID NO: 626058 - RNA, 22 nt, Human
accccgaugauaaggaagacag

SEQ ID NO: 626059 - RNA, 18 nt, Human
agagcucuccaaaccuau

SEQ ID NO: 626060 - RNA, 20 nt, Human
aggaauggagagaaacgcgu

SEQ ID NO: 626061 - RNA, 22 nt, Human
augagacaucaagcuauccaag

SEQ ID NO: 626062 - RNA, 21 nt, Human
cacaggcauuuccuguccccu

SEQ ID NO: 626063 - RNA, 21 nt, Human
cagcacaaaagagaucuagag

SEQ ID NO: 626064 - RNA, 26 nt, Human
cagcacaaaagagaucuagagcucuc

SEQ ID NO: 626065 - RNA, 23 nt, Human
caggacagaacugaacccaccag

SEQ ID NO: 626066 - RNA, 20 nt, Human
cagguugagcugacaacacu

SEQ ID NO: 626067 - RNA, 19 nt, Human
cauugagaaccagcugcca

SEQ ID NO: 626068 - RNA, 23 nt, Human
ccaaagacauaacugaaaaguca

SEQ ID NO: 626069 - RNA, 23 nt, Human
ccaaagcuccagaaccacacugg

SEQ ID NO: 626070 - RNA, 21 nt, Human
ccagaaccacacuggccagac

SEQ ID NO: 626071 - RNA, 25 nt, Human
ccagaaccacacuggccagacacag

SEQ ID NO: 626072 - RNA, 18 nt, Human
ccauugccccagauucgg

SEQ ID NO: 626073 - RNA, 22 nt, Human
cccagcuggaagcagugauucc

SEQ ID NO: 626074 - RNA, 18 nt, Human
ccccaaagcuccagaacc

SEQ ID NO: 626075 - RNA, 22 nt, Human
ccccugaagagccacugaaccc

SEQ ID NO: 626076 - RNA, 25 nt, Human
ccucccugcacuguccccugcugug

SEQ ID NO: 626077 - RNA, 20 nt, Human
ccugaagagccacugaaccc

SEQ ID NO: 626078 - RNA, 19 nt, Human
ccugcagccugcuucagcc

SEQ ID NO: 626079 - RNA, 19 nt, Human
ccuuaccccacaccucccu

SEQ ID NO: 626080 - RNA, 23 nt, Human
cucuccaaaccuauggaguggca

SEQ ID NO: 626081 - RNA, 19 nt, Human
cugcacuguccccugcugu

SEQ ID NO: 626082 - RNA, 18 nt, Human
cuguccccugcugugccc

SEQ ID NO: 626083 - RNA, 23 nt, Human
gaacccaccagguugagcugaca

SEQ ID NO: 626084 - RNA, 21 nt, Human
gaacugaacccaccagguuga

SEQ ID NO: 626085 - RNA, 24 nt, Human
gaagccucaggacagaacugaacc

SEQ ID NO: 626086 - RNA, 21 nt, Human
gagagcagaagccucaggaca

SEQ ID NO: 626087 - RNA, 22 nt, Human
gauaaggaagacagacccggga

SEQ ID NO: 626088 - RNA, 19 nt, Human
gauaugaucaucugacaug

SEQ ID NO: 626089 - RNA, 20 nt, Human
gaugauaaggaagacagacc

SEQ ID NO: 626090 - RNA, 24 nt, Human
gcccagcaaaguauucaucuuacc

SEQ ID NO: 626091 - RNA, 21 nt, Human
ggccagacacaggcauuuccu

SEQ ID NO: 626092 - RNA, 23 nt, Human
guggggaagauguagcugaguac

SEQ ID NO: 626093 - RNA, 21 nt, Human
uaaaaggcguaaagaucucac

SEQ ID NO: 626094 - RNA, 21 nt, Human
uaaggaagacagacccgggac

SEQ ID NO: 626095 - RNA, 22 nt, Human
uaccaguccaugcccugacucc

SEQ ID NO: 626096 - RNA, 24 nt, Human
uaccccaaagcuccagaaccacac

SEQ ID NO: 626097 - RNA, 18 nt, Human
uaccccacaccucccugc

SEQ ID NO: 626098 - RNA, 22 nt, Human
ucacugaguuaggaggcauggg

SEQ ID NO: 626099 - RNA, 20 nt, Human
uccacagauggaauauucgc

SEQ ID NO: 626100 - RNA, 22 nt, Human
uccagaaccacacuggccagac

SEQ ID NO: 626101 - RNA, 20 nt, Human
uccuguccccugaagagcca

SEQ ID NO: 626102 - RNA, 20 nt, Human
ugaacccagcacaaaagaga

SEQ ID NO: 626103 - RNA, 19 nt, Human
ugacuccugaugucacccu

SEQ ID NO: 626104 - RNA, 28 nt, Human
ugacuucccucccuuaccccacaccucc

SEQ ID NO: 626105 - RNA, 25 nt, Human
ugagaaccagcugccaccccgauga

SEQ ID NO: 626106 - RNA, 19 nt, Human
ugcagaaagacauuauggg

SEQ ID NO: 626107 - RNA, 18 nt, Human
ugccccagcuggaagcag

SEQ ID NO: 626108 - RNA, 18 nt, Human
uggauaugaucaucugac

SEQ ID NO: 626109 - RNA, 23 nt, Human
uggaugcuugaaggaauggagag

SEQ ID NO: 626110 - RNA, 19 nt, Human
uguuauaaaaggcguaaag

SEQ ID NO: 626111 - RNA, 20 nt, Human
uugagcugacaacacugcca

SEQ ID NO: 626112 - RNA, 25 nt, Human
uuuaaagcaauggaaucaauaaauu

SEQ ID NO: 626113 - RNA, 20 nt, Human
uuuuuuuuuuuaaagcaauu

SEQ ID NO: 626114 - RNA, 19 nt, Human
uuuuuuuuuuuuuuuuuaa

SEQ ID NO: 626115 - RNA, 22 nt, Human
aaaaacauuaaagcaaaccccc

SEQ ID NO: 626116 - RNA, 22 nt, Human
aacauuaaagcaaacccccaaa

SEQ ID NO: 626117 - RNA, 19 nt, Human
aacccacucugccaaccuc

SEQ ID NO: 626118 - RNA, 19 nt, Human
aacccacucugccaaccuc

SEQ ID NO: 626119 - RNA, 20 nt, Human
aacccacucugccaaccuca

SEQ ID NO: 626120 - RNA, 20 nt, Human
aacccacucugccaaccuca

SEQ ID NO: 626121 - RNA, 25 nt, Human
aacccccaaaaccccacaccgaaaa

SEQ ID NO: 626122 - RNA, 25 nt, Human
aacccccaaaaccccacaccgaaaa

SEQ ID NO: 626123 - RNA, 20 nt, Human
aagcaaacccccaaaacccc

SEQ ID NO: 626124 - RNA, 20 nt, Human
aagcaaacccccaaaacccc

SEQ ID NO: 626125 - RNA, 23 nt, Human
aagcaaacccccaaaaccccaca

SEQ ID NO: 626126 - RNA, 23 nt, Human
aagcaaacccccaaaaccccaca

SEQ ID NO: 626127 - RNA, 23 nt, Human
acagagagaggaagcgccacaac

SEQ ID NO: 626128 - RNA, 23 nt, Human
acagagagaggaagcgccacaac

SEQ ID NO: 626129 - RNA, 22 nt, Human
acagagcguagcuguugagccc

SEQ ID NO: 626130 - RNA, 22 nt, Human
acagagcguagcuguugagccc

SEQ ID NO: 626131 - RNA, 23 nt, Human
acagagcguagcuguugagcccu

SEQ ID NO: 626132 - RNA, 23 nt, Human
acagagcguagcuguugagcccu

SEQ ID NO: 626133 - RNA, 21 nt, Human
acauuaaagcaaacccccaaa

SEQ ID NO: 626134 - RNA, 23 nt, Human
accaaggcccccaguagggguga

SEQ ID NO: 626135 - RNA, 29 nt, Human
acccccaaaaccccacaccgaaaacaaag

SEQ ID NO: 626136 - RNA, 18 nt, Human
accgaaaacaaaggcuug

SEQ ID NO: 626137 - RNA, 18 nt, Human
accgaaaacaaaggcuug

SEQ ID NO: 626138 - RNA, 22 nt, Human
agaaacuggcagaauccgaccc

SEQ ID NO: 626139 - RNA, 22 nt, Human
agaaacuggcagaauccgaccc

SEQ ID NO: 626140 - RNA, 19 nt, Human
agcaaaccacugugggauc

SEQ ID NO: 626141 - RNA, 20 nt, Human
agcaaacccccaaaacccca

SEQ ID NO: 626142 - RNA, 18 nt, Human
agccaaaugggcagugga

SEQ ID NO: 626143 - RNA, 20 nt, Human
aggccccgagagcuggcuug

SEQ ID NO: 626144 - RNA, 20 nt, Human
aggccccgagagcuggcuug

SEQ ID NO: 626145 - RNA, 21 nt, Human
aggggcugguccccccugggc

SEQ ID NO: 626146 - RNA, 18 nt, Human
auggccuucuuagcaaac

SEQ ID NO: 626147 - RNA, 22 nt, Human
caaaaaccuggagcagaguuuc

SEQ ID NO: 626148 - RNA, 23 nt, Human
caaaauacaaagcccaacauuua

SEQ ID NO: 626149 - RNA, 20 nt, Human
caaaggguauggcugguguc

SEQ ID NO: 626150 - RNA, 26 nt, Human
caacgccugaggaccagcacccaucu

SEQ ID NO: 626151 - RNA, 26 nt, Human
caacgccugaggaccagcacccaucu

SEQ ID NO: 626152 - RNA, 19 nt, Human
caaggcaaagaagaauaug

SEQ ID NO: 626153 - RNA, 21 nt, Human
cacucugccaaccucaaggcc

SEQ ID NO: 626154 - RNA, 21 nt, Human
cacucugccaaccucaaggcc

SEQ ID NO: 626155 - RNA, 25 nt, Human
cacucugccaaccucaaggccagcc

SEQ ID NO: 626156 - RNA, 25 nt, Human
cacucugccaaccucaaggccagcc

SEQ ID NO: 626157 - RNA, 19 nt, Human
cacuggaaaaaaggccccg

SEQ ID NO: 626158 - RNA, 24 nt, Human
cacuggaaaaaaggccccgagagc

SEQ ID NO: 626159 - RNA, 19 nt, Human
cagaguagccaaaugggca

SEQ ID NO: 626160 - RNA, 21 nt, Human
cagcagaguagccaaaugggc

SEQ ID NO: 626161 - RNA, 21 nt, Human
cagcagaguagccaaaugggc

SEQ ID NO: 626162 - RNA, 24 nt, Human
cagcaguguccccaacgccugagg

SEQ ID NO: 626163 - RNA, 23 nt, Human
caggaaguggcuucugagugaug

SEQ ID NO: 626164 - RNA, 24 nt, Human
caggcuggcucccaagcuuggugc

SEQ ID NO: 626165 - RNA, 25 nt, Human
caggcuggcucccaagcuuggugca

SEQ ID NO: 626166 - RNA, 21 nt, Human
caucaaaauaaaaagcccaac

SEQ ID NO: 626167 - RNA, 21 nt, Human
caugacagguaccuguccacc

SEQ ID NO: 626168 - RNA, 21 nt, Human
caugucuuugagcacuugaug

SEQ ID NO: 626169 - RNA, 21 nt, Human
caugucuuugagcacuugaug

SEQ ID NO: 626170 - RNA, 23 nt, Human
cauuaaagcaaacccccaaaacc

SEQ ID NO: 626171 - RNA, 23 nt, Human
cauuaaagcaaacccccaaaacc

SEQ ID NO: 626172 - RNA, 18 nt, Human
ccaaggguggggcugugg

SEQ ID NO: 626173 - RNA, 18 nt, Human
ccaaggguggggcugugu

SEQ ID NO: 626174 - RNA, 21 nt, Human
ccaaggguggggcuguguggc

SEQ ID NO: 626175 - RNA, 26 nt, Human
ccagcaguguccccaacgccugagga

SEQ ID NO: 626176 - RNA, 22 nt, Human
cccaaaaccccacaccgaaaac

SEQ ID NO: 626177 - RNA, 22 nt, Human
cccaaaaccccacaccgaaaac

SEQ ID NO: 626178 - RNA, 20 nt, Human
cccacacagagagaggaagc

SEQ ID NO: 626179 - RNA, 20 nt, Human
cccacacagagagaggaagc

SEQ ID NO: 626180 - RNA, 18 nt, Human
cccacaccgaaaacaaag

SEQ ID NO: 626181 - RNA, 18 nt, Human
cccacaccgaaaacaaag

SEQ ID NO: 626182 - RNA, 20 nt, Human
cccacaccgaaaacaaaggc

SEQ ID NO: 626183 - RNA, 20 nt, Human
cccacaccgaaaacaaaggc

SEQ ID NO: 626184 - RNA, 21 nt, Human
ccccacaccgaaaacaaaggc

SEQ ID NO: 626185 - RNA, 23 nt, Human
ccccacaccgaaaacaaaggcug

SEQ ID NO: 626186 - RNA, 24 nt, Human
ccccaucgacccagcagugucccc

SEQ ID NO: 626187 - RNA, 24 nt, Human
ccccaucgacccagcagugucccc

SEQ ID NO: 626188 - RNA, 23 nt, Human
cccccaaaaccccacaccgaaaa

SEQ ID NO: 626189 - RNA, 23 nt, Human
cccccaaaaccccacaccgaaaa

SEQ ID NO: 626190 - RNA, 24 nt, Human
cccccaaaaccccacaccgaaaac

SEQ ID NO: 626191 - RNA, 24 nt, Human
cccccaaaaccccacaccgaaaac

SEQ ID NO: 626192 - RNA, 28 nt, Human
cccccaaaaccccacaccgaaaacaaag

SEQ ID NO: 626193 - RNA, 22 nt, Human
ccccugggcuggaggagagugg

SEQ ID NO: 626194 - RNA, 20 nt, Human
ccucucagcccaaggguggg

SEQ ID NO: 626195 - RNA, 25 nt, Human
ccucucagcccaaggguggggcugu

SEQ ID NO: 626196 - RNA, 27 nt, Human
ccucucagcccaaggguggggcugugu

SEQ ID NO: 626197 - RNA, 19 nt, Human
ccucugcggcugcaggaac

SEQ ID NO: 626198 - RNA, 20 nt, Human
ccucugcggcugcaggaacu

SEQ ID NO: 626199 - RNA, 20 nt, Human
cggcgcugagcucugcgcug

SEQ ID NO: 626200 - RNA, 22 nt, Human
cggcgcugagcucugcgcuguc

SEQ ID NO: 626201 - RNA, 18 nt, Human
cuaaaaugccauuaugcu

SEQ ID NO: 626202 - RNA, 18 nt, Human
cuaaaaugccauuauucu

SEQ ID NO: 626203 - RNA, 23 nt, Human
cucaaggcaaagaagaauaugua

SEQ ID NO: 626204 - RNA, 24 nt, Human
cucagcccaaggguggggcugugg

SEQ ID NO: 626205 - RNA, 25 nt, Human
cucugcggcugcaggaaccccgcuc

SEQ ID NO: 626206 - RNA, 25 nt, Human
cucugcggcugcaggaaccccgcuc

SEQ ID NO: 626207 - RNA, 20 nt, Human
cuggaggggcuucccagguc

SEQ ID NO: 626208 - RNA, 20 nt, Human
cuggaggggcuucccagguc

SEQ ID NO: 626209 - RNA, 20 nt, Human
cuuggccgugaguccuuggc

SEQ ID NO: 626210 - RNA, 21 nt, Human
cuuggccgugaguccuuggcc

SEQ ID NO: 626211 - RNA, 22 nt, Human
gaacgccccucacagugaagaa

SEQ ID NO: 626212 - RNA, 22 nt, Human
gaacgccccucacagugaagaa

SEQ ID NO: 626213 - RNA, 20 nt, Human
gaagaccccgugcugguuuc

SEQ ID NO: 626214 - RNA, 20 nt, Human
gaagaccccgugcugguuuc

SEQ ID NO: 626215 - RNA, 22 nt, Human
gacacaggaaguggcuucugag

SEQ ID NO: 626216 - RNA, 25 nt, Human
gaccccaucgacccagcaguguccc

SEQ ID NO: 626217 - RNA, 25 nt, Human
gaccccaucgacccagcaguguccc

SEQ ID NO: 626218 - RNA, 18 nt, Human
gagguggugaggggcugg

SEQ ID NO: 626219 - RNA, 18 nt, Human
gcaaacccccaaaacccc

SEQ ID NO: 626220 - RNA, 19 nt, Human
gcaaacccccaaaacccca

SEQ ID NO: 626221 - RNA, 19 nt, Human
gcaaacccccaaaacccca

SEQ ID NO: 626222 - RNA, 21 nt, Human
gcagagcagaaacuggcagaa

SEQ ID NO: 626223 - RNA, 21 nt, Human
gcagagcagaaacuggcagaa

SEQ ID NO: 626224 - RNA, 20 nt, Human
gcagcagaguagccaaaugg

SEQ ID NO: 626225 - RNA, 20 nt, Human
gcagcagaguagccaaaugg

SEQ ID NO: 626226 - RNA, 18 nt, Human
gcaggcuggcucccaagc

SEQ ID NO: 626227 - RNA, 20 nt, Human
gcggagggagggaaaggccg

SEQ ID NO: 626228 - RNA, 20 nt, Human
gcggagggagggaaaggccg

SEQ ID NO: 626229 - RNA, 21 nt, Human
gcugguccccccugggcugga

SEQ ID NO: 626230 - RNA, 24 nt, Human
ggugaagccccugggcucugggag

SEQ ID NO: 626231 - RNA, 24 nt, Human
ggugaagccccugggcucugggag

SEQ ID NO: 626232 - RNA, 21 nt, Human
gucugaaguacggacguggag

SEQ ID NO: 626233 - RNA, 23 nt, Human
gugugguggaggccauaggaagc

SEQ ID NO: 626234 - RNA, 26 nt, Human
uaaaaagcccaacauuuacaauuuca

SEQ ID NO: 626235 - RNA, 23 nt, Human
uaaaaugccauuaugcucaguuu

SEQ ID NO: 626236 - RNA, 22 nt, Human
uaaagcaaacccccaaaacccc

SEQ ID NO: 626237 - RNA, 22 nt, Human
uaaagcaaacccccaaaacccc

SEQ ID NO: 626238 - RNA, 23 nt, Human
uaagccacuguccuggucccaca

SEQ ID NO: 626239 - RNA, 23 nt, Human
uaagccacuguccuggucccaca

SEQ ID NO: 626240 - RNA, 24 nt, Human
ucaaaaacauuaaagcaaaccccc

SEQ ID NO: 626241 - RNA, 19 nt, Human
ucaacaaaaaccuggagca

SEQ ID NO: 626242 - RNA, 21 nt, Human
uccucucagcccaaggguggg

SEQ ID NO: 626243 - RNA, 20 nt, Human
ucgaacggauucagggccaa

SEQ ID NO: 626244 - RNA, 18 nt, Human
ucgacccagcaguguccc

SEQ ID NO: 626245 - RNA, 18 nt, Human
ucgacccagcaguguccc

SEQ ID NO: 626246 - RNA, 23 nt, Human
ucgccuguggggugaaugaaggu

SEQ ID NO: 626247 - RNA, 23 nt, Human
ucgccuguggggugaaugaaggu

SEQ ID NO: 626248 - RNA, 23 nt, Human
ucgcucgccucagagauggaagc

SEQ ID NO: 626249 - RNA, 21 nt, Human
ucuacggcccagucuuggaac

SEQ ID NO: 626250 - RNA, 21 nt, Human
ucuacggcccagucuuggaac

SEQ ID NO: 626251 - RNA, 19 nt, Human
ucugaccuccagaucucgu

SEQ ID NO: 626252 - RNA, 18 nt, Human
ucugugacaaggcacagg

SEQ ID NO: 626253 - RNA, 18 nt, Human
ucugugacaaggcacagg

SEQ ID NO: 626254 - RNA, 22 nt, Human
ucuuuggcugcagagcagaaac

SEQ ID NO: 626255 - RNA, 21 nt, Human
ucuuuggcugcagagcagaac

SEQ ID NO: 626256 - RNA, 22 nt, Human
ugaagaacgccccucacaguga

SEQ ID NO: 626257 - RNA, 22 nt, Human
ugaagaacgccccucacaguga

SEQ ID NO: 626258 - RNA, 19 nt, Human
ugaagccccugggcucugg

SEQ ID NO: 626259 - RNA, 19 nt, Human
ugaagccccugggcucugg

SEQ ID NO: 626260 - RNA, 22 nt, Human
ugaauacuuaaguaccacugaa

SEQ ID NO: 626261 - RNA, 22 nt, Human
ugaauacuuaaguaccacugaa

SEQ ID NO: 626262 - RNA, 18 nt, Human
ugagaugcuguucucccu

SEQ ID NO: 626263 - RNA, 18 nt, Human
ugagaugcuguucucccu

SEQ ID NO: 626264 - RNA, 18 nt, Human
ugaggcucaaggcaaaga

SEQ ID NO: 626265 - RNA, 23 nt, Human
ugauguuacugaagugacaaugc

SEQ ID NO: 626266 - RNA, 23 nt, Human
ugauguuacugaagugacaaugc

SEQ ID NO: 626267 - RNA, 25 nt, Human
ugcagcagaguagccaaaugggcac

SEQ ID NO: 626268 - RNA, 23 nt, Human
ugcauucacagaugucugaugag

SEQ ID NO: 626269 - RNA, 20 nt, Human
ugcguuuccuccagaugccu

SEQ ID NO: 626270 - RNA, 20 nt, Human
ugcguuuccuccagaugccu

SEQ ID NO: 626271 - RNA, 21 nt, Human
ugcucaauggcuuggggucug

SEQ ID NO: 626272 - RNA, 21 nt, Human
ugcucaauggcuuggggucug

SEQ ID NO: 626273 - RNA, 18 nt, Human
ugcuggggcccaccugcc

SEQ ID NO: 626274 - RNA, 18 nt, Human
ugcuggggcccaccugcc

SEQ ID NO: 626275 - RNA, 21 nt, Human
uggaaaaaaggccccgagagc

SEQ ID NO: 626276 - RNA, 21 nt, Human
uggaaaaaaggccccgagagc

SEQ ID NO: 626277 - RNA, 21 nt, Human
uggaggagaguggugggggca

SEQ ID NO: 626278 - RNA, 19 nt, Human
uggcagaauccgaccccau

SEQ ID NO: 626279 - RNA, 19 nt, Human
uggcagaauccgaccccau

SEQ ID NO: 626280 - RNA, 21 nt, Human
uggcaggcuggcucccaagcu

SEQ ID NO: 626281 - RNA, 25 nt, Human
uggcaggcuggcucccaagcuuggu

SEQ ID NO: 626282 - RNA, 25 nt, Human
uggcaggcuggcucccaagcuuggu

SEQ ID NO: 626283 - RNA, 22 nt, Human
uggccacugcuuugggugaugu

SEQ ID NO: 626284 - RNA, 22 nt, Human
uggccacugcuuugggugaugu

SEQ ID NO: 626285 - RNA, 23 nt, Human
uggcggagggagggaaaggccgg

SEQ ID NO: 626286 - RNA, 20 nt, Human
uggcugcagagcagaaacug

SEQ ID NO: 626287 - RNA, 20 nt, Human
uggcugcagagcagaaacug

SEQ ID NO: 626288 - RNA, 19 nt, Human
ugggagguggugaggggcu

SEQ ID NO: 626289 - RNA, 19 nt, Human
ugggcaguggaaaaaaggc

SEQ ID NO: 626290 - RNA, 18 nt, Human
ugggcuggaggagagugg

SEQ ID NO: 626291 - RNA, 25 nt, Human
ugggcuggaggagaguggugggggc

SEQ ID NO: 626292 - RNA, 18 nt, Human
ugugguggaggccauagg

SEQ ID NO: 626293 - RNA, 21 nt, Human
uuaaagcaaacccccaaaacc

SEQ ID NO: 626294 - RNA, 21 nt, Human
uuaaagcaaacccccaaaacc

SEQ ID NO: 626295 - RNA, 25 nt, Human
uuaaagcaaacccccaaaaccccac

SEQ ID NO: 626296 - RNA, 25 nt, Human
uuaaagcaaacccccaaaaccccac

SEQ ID NO: 626297 - RNA, 24 nt, Human
uucaaaaacauuaaagcaaacccc

SEQ ID NO: 626298 - RNA, 24 nt, Human
uucaaaaacauuaaagcaaacccc

SEQ ID NO: 626299 - RNA, 21 nt, Human
uuccuuucuugguugcguuuc

SEQ ID NO: 626300 - RNA, 21 nt, Human
uuccuuucuugguugcguuuc

SEQ ID NO: 626301 - RNA, 19 nt, Human
uugcuggggcccaccugcc

SEQ ID NO: 626302 - RNA, 21 nt, Human
uugcuggggcccaccugccuu

SEQ ID NO: 626303 - RNA, 22 nt, Human
uugggugaugugcucaauggcu

SEQ ID NO: 626304 - RNA, 22 nt, Human
uugggugaugugcucaauggcu

SEQ ID NO: 626305 - RNA, 27 nt, Human
uuuuuuuuucagaagcaaggacauguu

SEQ ID NO: 626306 - RNA, 22 nt, Human
uuuuuuuuuuuuuuuuuuucag

SEQ ID NO: 626307 - RNA, 21 nt, Human
aaacagcagugcccagaauuu

SEQ ID NO: 626308 - RNA, 20 nt, Human
aaagcccauuaucaacaaca

SEQ ID NO: 626309 - RNA, 18 nt, Human
aaauaccacaaacagcag

SEQ ID NO: 626310 - RNA, 22 nt, Human
aagcuagaaccaaaacagucau

SEQ ID NO: 626311 - RNA, 18 nt, Human
aagugauaugcuugugcc

SEQ ID NO: 626312 - RNA, 23 nt, Human
acaaagcccauuaucaacaacaa

SEQ ID NO: 626313 - RNA, 21 nt, Human
accaauaacaagauaaaaaca

SEQ ID NO: 626314 - RNA, 19 nt, Human
acccaagcauaacaccguc

SEQ ID NO: 626315 - RNA, 24 nt, Human
acccagauuaaauccaaauccaau

SEQ ID NO: 626316 - RNA, 19 nt, Human
acugggcaacccaaacacc

SEQ ID NO: 626317 - RNA, 22 nt, Human
agacaaauaccacaaacagcag

SEQ ID NO: 626318 - RNA, 27 nt, Human
agacaaauaccacaaacagcagugccc

SEQ ID NO: 626319 - RNA, 28 nt, Human
agacaaauaccacaaacagcagugcccu

SEQ ID NO: 626320 - RNA, 24 nt, Human
agauaacuugaaaacaagggcccc

SEQ ID NO: 626321 - RNA, 22 nt, Human
agcagugugagucagcagccuc

SEQ ID NO: 626322 - RNA, 20 nt, Human
agcccagaauuuagaguuau

SEQ ID NO: 626323 - RNA, 22 nt, Human
aggaagacuguagaagguacuu

SEQ ID NO: 626324 - RNA, 21 nt, Human
aguuaauugaacuguuucuua

SEQ ID NO: 626325 - RNA, 19 nt, Human
auugauuugcuuuugucag

SEQ ID NO: 626326 - RNA, 23 nt, Human
caaaaucuaaagcuagaaccaaa

SEQ ID NO: 626327 - RNA, 24 nt, Human
caagauaaaaacagcucuuucuua

SEQ ID NO: 626328 - RNA, 18 nt, Human
caagauaaaucccugagc

SEQ ID NO: 626329 - RNA, 19 nt, Human
caagauaaaucccugagcc

SEQ ID NO: 626330 - RNA, 22 nt, Human
caagauaaaucccugagcccua

SEQ ID NO: 626331 - RNA, 21 nt, Human
caccaauaacaagauaaaaac

SEQ ID NO: 626332 - RNA, 21 nt, Human
cagcaauucuguuaccuuggc

SEQ ID NO: 626333 - RNA, 21 nt, Human
ccucugaaccccucagguagg

SEQ ID NO: 626334 - RNA, 23 nt, Human
cuaacacccaagcauaacaccgu

SEQ ID NO: 626335 - RNA, 28 nt, Human
cuagaagacugaaugagauuaacuuaag

SEQ ID NO: 626336 - RNA, 21 nt, Human
gaaaauccaaaaucuaaagcu

SEQ ID NO: 626337 - RNA, 19 nt, Human
gaaugagauuaacuuaaaa

SEQ ID NO: 626338 - RNA, 19 nt, Human
gagcccagggacucaacaa

SEQ ID NO: 626339 - RNA, 20 nt, Human
gaguuuucaucuaacaaucu

SEQ ID NO: 626340 - RNA, 19 nt, Human
gaugcauugugcuucugga

SEQ ID NO: 626341 - RNA, 23 nt, Human
uaaaucccugagcccuacucaca

SEQ ID NO: 626342 - RNA, 24 nt, Human
uaacaaagcccauuaucucuaaau

SEQ ID NO: 626343 - RNA, 27 nt, Human
uaaugacugaaauauaaacagcauaaa

SEQ ID NO: 626344 - RNA, 21 nt, Human
uacaacgcucugaacugcugg

SEQ ID NO: 626345 - RNA, 21 nt, Human
uaccacaaacagcagugccca

SEQ ID NO: 626346 - RNA, 23 nt, Human
uacccagauuaaauccaaaucca

SEQ ID NO: 626347 - RNA, 18 nt, Human
uacucugagacaaauacc

SEQ ID NO: 626348 - RNA, 22 nt, Human
uagaaccaaaacagucauaagc

SEQ ID NO: 626349 - RNA, 23 nt, Human
uagauaauuuggaaaguaggguu

SEQ ID NO: 626350 - RNA, 20 nt, Human
uaggaagacuguagaaggua

SEQ ID NO: 626351 - RNA, 19 nt, Human
uaucuaauguaaauuaaca

SEQ ID NO: 626352 - RNA, 24 nt, Human
uauugugaaauauaaaaaaguaua

SEQ ID NO: 626353 - RNA, 20 nt, Human
uccaaaaucuaaagcuagaa

SEQ ID NO: 626354 - RNA, 21 nt, Human
uccaaauauggcagacugggg

SEQ ID NO: 626355 - RNA, 28 nt, Human
ucuaaagcuagaaccaaaaccggggucc

SEQ ID NO: 626356 - RNA, 21 nt, Human
ucucagaaggcugauuuuacc

SEQ ID NO: 626357 - RNA, 23 nt, Human
ugacagcuacaggaauguuagua

SEQ ID NO: 626358 - RNA, 23 nt, Human
ugagucagcagccucugaacccc

SEQ ID NO: 626359 - RNA, 18 nt, Human
ugauaugcuugugcccuc

SEQ ID NO: 626360 - RNA, 20 nt, Human
ugauaugcuugugcccucug

SEQ ID NO: 626361 - RNA, 24 nt, Human
ugcagaaugagcccagggacucaa

SEQ ID NO: 626362 - RNA, 27 nt, Human
ugcagaaugagcccagggacucaacaa

SEQ ID NO: 626363 - RNA, 22 nt, Human
uguaaauuaacacaugacuggu

SEQ ID NO: 626364 - RNA, 22 nt, Human
uguuuuaaaaagugcuaacaaa

SEQ ID NO: 626365 - RNA, 25 nt, Human
uuaaaaaagcauuuauuacuagaag

SEQ ID NO: 626366 - RNA, 21 nt, Human
uuaacacaugacuggugaaaa

SEQ ID NO: 626367 - RNA, 21 nt, Human
uuggccuucagacacauuggu

SEQ ID NO: 626368 - RNA, 18 nt, Human
uuuguuuguuuguuuuaa

SEQ ID NO: 626369 - RNA, 24 nt, Human
aaaaaaaaaaaaaaucagggcaag

SEQ ID NO: 626370 - RNA, 24 nt, Human
aaaaaaaaaaauauguacaaaaaa

SEQ ID NO: 626371 - RNA, 24 nt, Human
aaaaaacagcuugugacacaucag

SEQ ID NO: 626372 - RNA, 21 nt, Human
aaaaaaucagggcaagcuaca

SEQ ID NO: 626373 - RNA, 21 nt, Human
aaacaacgucaaccauugaau

SEQ ID NO: 626374 - RNA, 21 nt, Human
aaacaacgucaaccauugaau

SEQ ID NO: 626375 - RNA, 22 nt, Human
aaacagcuugugacacaucagu

SEQ ID NO: 626376 - RNA, 20 nt, Human
aacauuguccuuccugcagc

SEQ ID NO: 626377 - RNA, 23 nt, Human
aauauguacaaaaaaagcugaga

SEQ ID NO: 626378 - RNA, 20 nt, Human
acugcccuaaugccaugaaa

SEQ ID NO: 626379 - RNA, 18 nt, Human
acuuguuccuaauccucc

SEQ ID NO: 626380 - RNA, 19 nt, Human
agacugcaccgucaaaaac

SEQ ID NO: 626381 - RNA, 24 nt, Human
agagaucagagugcaacauucuuu

SEQ ID NO: 626382 - RNA, 23 nt, Human
agccacaaagugaaacuguuguu

SEQ ID NO: 626383 - RNA, 18 nt, Human
auaaccccaauacccucc

SEQ ID NO: 626384 - RNA, 19 nt, Human
auacccuccaaauccagaa

SEQ ID NO: 626385 - RNA, 22 nt, Human
auagaauucuaauugccuagua

SEQ ID NO: 626386 - RNA, 18 nt, Human
auauaaccccaauacccu

SEQ ID NO: 626387 - RNA, 25 nt, Human
auauagcaagacugcaccgucaaaa

SEQ ID NO: 626388 - RNA, 22 nt, Human
aucacaaaacaacgucaaccau

SEQ ID NO: 626389 - RNA, 23 nt, Human
caaaaaaagcugagaagagccaa

SEQ ID NO: 626390 - RNA, 25 nt, Human
caaaacaacgucaaccauugaauaa

SEQ ID NO: 626391 - RNA, 21 nt, Human
caccauauagcaagacugcac

SEQ ID NO: 626392 - RNA, 18 nt, Human
caccgucaaaaacugucc

SEQ ID NO: 626393 - RNA, 19 nt, Human
cagagugcaacauucuuuu

SEQ ID NO: 626394 - RNA, 20 nt, Human
cccaauacccuccaaaucca

SEQ ID NO: 626395 - RNA, 25 nt, Human
cccaauacccuccaaauccagaauu

SEQ ID NO: 626396 - RNA, 23 nt, Human
ccccaguagacugcccuaaugcc

SEQ ID NO: 626397 - RNA, 21 nt, Human
cugaccaaaaaaaaaaaaaaa

SEQ ID NO: 626398 - RNA, 21 nt, Human
cugaccaaaaaaaaaaaaaaa

SEQ ID NO: 626399 - RNA, 23 nt, Human
cugaccaaaaaaaaaaaaaaaau

SEQ ID NO: 626400 - RNA, 22 nt, Human
cuuacuuguuccuaauccuccc

SEQ ID NO: 626401 - RNA, 18 nt, Human
cuuugaacguaacaauuu

SEQ ID NO: 626402 - RNA, 19 nt, Human
gaaaagcugacaguggcac

SEQ ID NO: 626403 - RNA, 23 nt, Human
gccauuaucuaagaaagaaucau

SEQ ID NO: 626404 - RNA, 21 nt, Human
ggagaaaagcugacaguggca

SEQ ID NO: 626405 - RNA, 20 nt, Human
ggcaagcuacaucacuuccu

SEQ ID NO: 626406 - RNA, 21 nt, Human
uaaaaaacagcuugugacaca

SEQ ID NO: 626407 - RNA, 23 nt, Human
uaacuaggugacuuuguuaauau

SEQ ID NO: 626408 - RNA, 24 nt, Human
uagcaagacugcaccgucaaaaaa

SEQ ID NO: 626409 - RNA, 24 nt, Human
uauagaauuggaagaugauuuuaa

SEQ ID NO: 626410 - RNA, 20 nt, Human
uauagcaagacugcaccguc

SEQ ID NO: 626411 - RNA, 18 nt, Human
ucaaaaauucuggaggag

SEQ ID NO: 626412 - RNA, 24 nt, Human
ucaaugcacgcuugaacaagaaaa

SEQ ID NO: 626413 - RNA, 21 nt, Human
uccugcagcucaaaaguuugc

SEQ ID NO: 626414 - RNA, 24 nt, Human
ucuagaauaauuaaaagccacaaa

SEQ ID NO: 626415 - RNA, 21 nt, Human
ucuucucuuuaaaaaaaaaaa

SEQ ID NO: 626416 - RNA, 18 nt, Human
ugaauaguuuuacagcca

SEQ ID NO: 626417 - RNA, 26 nt, Human
ugaccaaaaaaaaaaaaaaaaucagg

SEQ ID NO: 626418 - RNA, 20 nt, Human
ugaccaggucaggagccgcu

SEQ ID NO: 626419 - RNA, 18 nt, Human
ugagaagagccaacaugg

SEQ ID NO: 626420 - RNA, 19 nt, Human
ugagaagagccaacaugga

SEQ ID NO: 626421 - RNA, 21 nt, Human
ugagaagagccaacauggaag

SEQ ID NO: 626422 - RNA, 21 nt, Human
ugagaagagccaacauggaag

SEQ ID NO: 626423 - RNA, 22 nt, Human
ugcaguuaaaauucuagaauaa

SEQ ID NO: 626424 - RNA, 21 nt, Human
ugccagaagacauuccagaaa

SEQ ID NO: 626425 - RNA, 21 nt, Human
uggagaaaagcugacaguggc

SEQ ID NO: 626426 - RNA, 23 nt, Human
uggcauaaauauauuaaagcuga

SEQ ID NO: 626427 - RNA, 25 nt, Human
uuaaccaacauuguccuuccugcag

SEQ ID NO: 626428 - RNA, 21 nt, Human
uuaguucucaccaugcuagaa

SEQ ID NO: 626429 - RNA, 23 nt, Human
uugaaguauagaauuggaagaug

SEQ ID NO: 626430 - RNA, 20 nt, Human
uuuaaacuuugaacguaaca

SEQ ID NO: 626431 - RNA, 23 nt, Human
uuuuacagccaaaaugaccaggu

SEQ ID NO: 626432 - RNA, 20 nt, Human
uuuugugauaacuuuuucuu

SEQ ID NO: 626433 - RNA, 24 nt, Human
uuuuuggagaaaagcugacagugg

SEQ ID NO: 626434 - RNA, 23 nt, Human
uuuuuuuuuuuuuuugugauaac

SEQ ID NO: 626435 - RNA, 18 nt, Human
uuuuuuuuuuuuuuuuug

SEQ ID NO: 626436 - RNA, 19 nt, Human
uuuuuuuuuuuuuuuuugu

SEQ ID NO: 626437 - RNA, 25 nt, Human
aaaagaccugaaauuucugcaaggg

SEQ ID NO: 626438 - RNA, 22 nt, Human
aaaaggcacaaagucaucugag

SEQ ID NO: 626439 - RNA, 24 nt, Human
aacacacuuccccaagaauuuaua

SEQ ID NO: 626440 - RNA, 22 nt, Human
aacacuagacccagcuuggcca

SEQ ID NO: 626441 - RNA, 23 nt, Human
aagaaaacaaaauaaaacaagug

SEQ ID NO: 626442 - RNA, 18 nt, Human
acacuagacccagcuugg

SEQ ID NO: 626443 - RNA, 25 nt, Human
acaggcugcucuggauuugacaggg

SEQ ID NO: 626444 - RNA, 18 nt, Human
accccacugcauguuaau

SEQ ID NO: 626445 - RNA, 19 nt, Human
agaagaagccaguuuugcg

SEQ ID NO: 626446 - RNA, 21 nt, Human
agaaggcuccuaugaucccac

SEQ ID NO: 626447 - RNA, 18 nt, Human
agugaccagaagaagcca

SEQ ID NO: 626448 - RNA, 24 nt, Human
cacaucauucgcaauaacaaaucc

SEQ ID NO: 626449 - RNA, 22 nt, Human
cagaaggcuccuaugaucccac

SEQ ID NO: 626450 - RNA, 21 nt, Human
cagcaaaagaaacacuagacc

SEQ ID NO: 626451 - RNA, 22 nt, Human
cagcaaaagaaacacuagaccc

SEQ ID NO: 626452 - RNA, 20 nt, Human
ccagucugcagucacuagaa

SEQ ID NO: 626453 - RNA, 25 nt, Human
cccaaccccauuuaaaaauaaaaau

SEQ ID NO: 626454 - RNA, 18 nt, Human
ccccgcugccuugggccu

SEQ ID NO: 626455 - RNA, 20 nt, Human
ccccgcugccuugggccugc

SEQ ID NO: 626456 - RNA, 19 nt, Human
ccugaaauuucugcaaggg

SEQ ID NO: 626457 - RNA, 18 nt, Human
cgagcagguagcagcgcu

SEQ ID NO: 626458 - RNA, 24 nt, Human
gaaguacaacuuuugaaagucuau

SEQ ID NO: 626459 - RNA, 20 nt, Human
gcaaaagaaacacuagaccc

SEQ ID NO: 626460 - RNA, 21 nt, Human
guaaagcacuccauucaauaa

SEQ ID NO: 626461 - RNA, 23 nt, Human
guaaagcacuccauucaauaaaa

SEQ ID NO: 626462 - RNA, 22 nt, Human
guagcagcgcuuguuguccaca

SEQ ID NO: 626463 - RNA, 18 nt, Human
uaaaaaauacugcaccuu

SEQ ID NO: 626464 - RNA, 22 nt, Human
uaaaaaauacugcaccuuaaga

SEQ ID NO: 626465 - RNA, 20 nt, Human
uaaaacaagugauuucuaac

SEQ ID NO: 626466 - RNA, 26 nt, Human
uaaagcuuauaacacacuuccccaag

SEQ ID NO: 626467 - RNA, 24 nt, Human
uaacaaaagaccugaaauuucugc

SEQ ID NO: 626468 - RNA, 23 nt, Human
uaaccccacugcauguuaaugac

SEQ ID NO: 626469 - RNA, 21 nt, Human
uacugcaccuuaagaccaaua

SEQ ID NO: 626470 - RNA, 24 nt, Human
uauaacacacuuccccaagaauuu

SEQ ID NO: 626471 - RNA, 22 nt, Human
uccaaggaucccaaccccauuu

SEQ ID NO: 626472 - RNA, 21 nt, Human
ucccaccagucugcagucacu

SEQ ID NO: 626473 - RNA, 21 nt, Human
uccuggucauucagaaggcuc

SEQ ID NO: 626474 - RNA, 20 nt, Human
ugaaauauuccaaggauccc

SEQ ID NO: 626475 - RNA, 26 nt, Human
ugaaauauuccaaggaucccaacccc

SEQ ID NO: 626476 - RNA, 19 nt, Human
ugauagaaguacaacuuuu

SEQ ID NO: 626477 - RNA, 24 nt, Human
uuacaggccacaggcugcucugga

SEQ ID NO: 626478 - RNA, 23 nt, Human
uuauaacacacuuccccaagaau

SEQ ID NO: 626479 - RNA, 23 nt, Human
aacuccuaggcucaaaggauccu

SEQ ID NO: 626480 - RNA, 23 nt, Human
aagcaauccuccugccuuagccu

SEQ ID NO: 626481 - RNA, 24 nt, Human
aaggauccuccuguuucggccucu

SEQ ID NO: 626482 - RNA, 18 nt, Human
aagugcugggauuacagg

SEQ ID NO: 626483 - RNA, 18 nt, Human
aagugcugggauuacagg

SEQ ID NO: 626484 - RNA, 18 nt, Human
aagugcugggauuacagg

SEQ ID NO: 626485 - RNA, 26 nt, Human
aagugcugggauuacagggaugagcc

SEQ ID NO: 626486 - RNA, 19 nt, Human
aaucaugguucaccgcagc

SEQ ID NO: 626487 - RNA, 20 nt, Human
acccugcccgugcaagaccg

SEQ ID NO: 626488 - RNA, 22 nt, Human
accucggccaccccacggcucg

SEQ ID NO: 626489 - RNA, 18 nt, Human
acgggguuucaccacguu

SEQ ID NO: 626490 - RNA, 20 nt, Human
acgggguuucaccacguugg

SEQ ID NO: 626491 - RNA, 24 nt, Human
acgggguuucaccacguuggccag

SEQ ID NO: 626492 - RNA, 18 nt, Human
acucagucguccaggcug

SEQ ID NO: 626493 - RNA, 19 nt, Human
acucagucguccaggcugg

SEQ ID NO: 626494 - RNA, 18 nt, Human
acugcaaccuucuccucc

SEQ ID NO: 626495 - RNA, 19 nt, Human
agagacgggggguggagga

SEQ ID NO: 626496 - RNA, 18 nt, Human
agccuuuaaaauagcugg

SEQ ID NO: 626497 - RNA, 21 nt, Human
aggaacucucauuagguugcc

SEQ ID NO: 626498 - RNA, 19 nt, Human
aggacccgccgaccucggc

SEQ ID NO: 626499 - RNA, 22 nt, Human
aggaggaugggcaggaucgugg

SEQ ID NO: 626500 - RNA, 25 nt, Human
aggcuggagugcaguggcaccaucu

SEQ ID NO: 626501 - RNA, 23 nt, Human
aguagcugggauuacaggugcgu

SEQ ID NO: 626502 - RNA, 24 nt, Human
agugcugggauuacagggaugagc

SEQ ID NO: 626503 - RNA, 24 nt, Human
auuagguugcccaggcuggucucg

SEQ ID NO: 626504 - RNA, 24 nt, Human
caaacugcuagaauuucaggcaug

SEQ ID NO: 626505 - RNA, 22 nt, Human
caagcaauccuccugccuuagc

SEQ ID NO: 626506 - RNA, 24 nt, Human
caagcccuuggguccaggaucaca

SEQ ID NO: 626507 - RNA, 24 nt, Human
caccacgcccggcuaauuuuugua

SEQ ID NO: 626508 - RNA, 20 nt, Human
caccacguuggccagcaugc

SEQ ID NO: 626509 - RNA, 19 nt, Human
cacccccucggccggccua

SEQ ID NO: 626510 - RNA, 18 nt, Human
caccuucaauguugaccu

SEQ ID NO: 626511 - RNA, 21 nt, Human
cacugcaaccuucuccuccca

SEQ ID NO: 626512 - RNA, 24 nt, Human
cagccucgauguccugggcucaag

SEQ ID NO: 626513 - RNA, 23 nt, Human
cagcgccggaccccgcucugcag

SEQ ID NO: 626514 - RNA, 21 nt, Human
caggcaugagccaccgcaccc

SEQ ID NO: 626515 - RNA, 18 nt, Human
caggccuggcuaauuuuu

SEQ ID NO: 626516 - RNA, 19 nt, Human
caguagagacgggguuuca

SEQ ID NO: 626517 - RNA, 26 nt, Human
caguagagacgggguuucaccacguu

SEQ ID NO: 626518 - RNA, 23 nt, Human
caucacccaagcccuugggucca

SEQ ID NO: 626519 - RNA, 24 nt, Human
cauuagguugcccaggcuggucuc

SEQ ID NO: 626520 - RNA, 20 nt, Human
ccaccacgcccggcuaauuu

SEQ ID NO: 626521 - RNA, 18 nt, Human
ccaccuucaauguugacc

SEQ ID NO: 626522 - RNA, 18 nt, Human
ccaggcuggaauacagug

SEQ ID NO: 626523 - RNA, 22 nt, Human
cccagccagcucgggagguggg

SEQ ID NO: 626524 - RNA, 20 nt, Human
cccagguucaagcgauucuc

SEQ ID NO: 626525 - RNA, 22 nt, Human
cccagguucaagcgauucuccc

SEQ ID NO: 626526 - RNA, 23 nt, Human
cccgaguagcugggauuacaggu

SEQ ID NO: 626527 - RNA, 24 nt, Human
cccgaguagcugggauuacaggug

SEQ ID NO: 626528 - RNA, 24 nt, Human
cccggccuucucuuacacuuuuuc

SEQ ID NO: 626529 - RNA, 26 nt, Human
cccggucagacguucacuuuucuacc

SEQ ID NO: 626530 - RNA, 24 nt, Human
cccugccucagccucccgaguagc

SEQ ID NO: 626531 - RNA, 21 nt, Human
ccgaguagcugggauuacagg

SEQ ID NO: 626532 - RNA, 22 nt, Human
ccgcacccggccuucucuuaca

SEQ ID NO: 626533 - RNA, 23 nt, Human
ccgcagccucgauguccugggcu

SEQ ID NO: 626534 - RNA, 22 nt, Human
ccgggccgggugucgcagcgcc

SEQ ID NO: 626535 - RNA, 21 nt, Human
ccuaggcucaaaggauccucc

SEQ ID NO: 626536 - RNA, 24 nt, Human
ccucccagguucaagcgauucucc

SEQ ID NO: 626537 - RNA, 26 nt, Human
ccuccugccuuagccuuuaaaauagc

SEQ ID NO: 626538 - RNA, 22 nt, Human
ccuccuguuucggccucucaaa

SEQ ID NO: 626539 - RNA, 19 nt, Human
ccucgauguccugggcuca

SEQ ID NO: 626540 - RNA, 20 nt, Human
ccucgauguccugggcucaa

SEQ ID NO: 626541 - RNA, 24 nt, Human
ccucggccaccccacggcucgcgg

SEQ ID NO: 626542 - RNA, 23 nt, Human
ccucucugggcuugaaugggggc

SEQ ID NO: 626543 - RNA, 23 nt, Human
ccugccuuagccuuuaaaauagc

SEQ ID NO: 626544 - RNA, 19 nt, Human
ccugcugcugaagaucugg

SEQ ID NO: 626545 - RNA, 20 nt, Human
ccugggcucaagcaauccuc

SEQ ID NO: 626546 - RNA, 23 nt, Human
ccugggcucaagcaauccuccug

SEQ ID NO: 626547 - RNA, 21 nt, Human
cgacaggcguggccccucucu

SEQ ID NO: 626548 - RNA, 23 nt, Human
cgaccucggccaccccacggcuc

SEQ ID NO: 626549 - RNA, 21 nt, Human
cggcccgacacacccccucgg

SEQ ID NO: 626550 - RNA, 22 nt, Human
cggcugcgcggggcccugcugu

SEQ ID NO: 626551 - RNA, 19 nt, Human
cgggguuucaccacguugg

SEQ ID NO: 626552 - RNA, 24 nt, Human
cucaagcaauccuccugccuuagc

SEQ ID NO: 626553 - RNA, 23 nt, Human
cucacugcaaccuucuccuccca

SEQ ID NO: 626554 - RNA, 24 nt, Human
cucacugcaaccuucuccucccag

SEQ ID NO: 626555 - RNA, 24 nt, Human
cucagccucccgaguagcugggau

SEQ ID NO: 626556 - RNA, 24 nt, Human
cucccugccucagccucccgagua

SEQ ID NO: 626557 - RNA, 24 nt, Human
cucuugaccucgugauccucccgu

SEQ ID NO: 626558 - RNA, 23 nt, Human
cugcaaccuucuccucccagguu

SEQ ID NO: 626559 - RNA, 24 nt, Human
cugcaaccuucuccucccagguuc

SEQ ID NO: 626560 - RNA, 23 nt, Human
cugccucagccucccgaguagcu

SEQ ID NO: 626561 - RNA, 23 nt, Human
cugccuuagccuuuaaaauagcu

SEQ ID NO: 626562 - RNA, 19 nt, Human
cuuaagugcugggauuaca

SEQ ID NO: 626563 - RNA, 23 nt, Human
gaaagaaaagauccccagggagu

SEQ ID NO: 626564 - RNA, 21 nt, Human
gaaugguaaaaucuucagacc

SEQ ID NO: 626565 - RNA, 23 nt, Human
gacccgccgaccucggccacccc

SEQ ID NO: 626566 - RNA, 22 nt, Human
gaccucgugauccucccgucuc

SEQ ID NO: 626567 - RNA, 24 nt, Human
gagacgggguuucaccacguuggc

SEQ ID NO: 626568 - RNA, 19 nt, Human
gagcgcacccggcugcgcg

SEQ ID NO: 626569 - RNA, 20 nt, Human
gagucuugcucugucgccag

SEQ ID NO: 626570 - RNA, 18 nt, Human
gauuacagggaugagcca

SEQ ID NO: 626571 - RNA, 18 nt, Human
gauuacaggugcgugcca

SEQ ID NO: 626572 - RNA, 22 nt, Human
gcccggcuaauuuuuguauuuu

SEQ ID NO: 626573 - RNA, 18 nt, Human
gcccuuggguccaggauc

SEQ ID NO: 626574 - RNA, 19 nt, Human
gccggugagcggcggggga

SEQ ID NO: 626575 - RNA, 18 nt, Human
gccugcgccggcccgaca

SEQ ID NO: 626576 - RNA, 19 nt, Human
gcggccugcgggcccucgg

SEQ ID NO: 626577 - RNA, 20 nt, Human
gcucacugcaaccuucuccu

SEQ ID NO: 626578 - RNA, 23 nt, Human
gcugcgcggggcccugcuguguc

SEQ ID NO: 626579 - RNA, 20 nt, Human
gcuggagugcaguggcacca

SEQ ID NO: 626580 - RNA, 18 nt, Human
ggacccggggggcagcgg

SEQ ID NO: 626581 - RNA, 18 nt, Human
ggcagcggccugcgggcc

SEQ ID NO: 626582 - RNA, 26 nt, Human
ggcaucacccaagcccuuggguccag

SEQ ID NO: 626583 - RNA, 18 nt, Human
gggaggaggaugggcagg

SEQ ID NO: 626584 - RNA, 19 nt, Human
gggcgggcgccgggagggg

SEQ ID NO: 626585 - RNA, 22 nt, Human
gggcucaagcaauccuccugcc

SEQ ID NO: 626586 - RNA, 18 nt, Human
guagcugggauuacaggu

SEQ ID NO: 626587 - RNA, 25 nt, Human
guccugggcucaagcaauccuccug

SEQ ID NO: 626588 - RNA, 24 nt, Human
gucuugcucugucgccaggcugga

SEQ ID NO: 626589 - RNA, 21 nt, Human
guugcccaggcuggucucgaa

SEQ ID NO: 626590 - RNA, 22 nt, Human
uaaaauagcugguacuacaggc

SEQ ID NO: 626591 - RNA, 19 nt, Human
uaagugcugggauuacagg

SEQ ID NO: 626592 - RNA, 20 nt, Human
uaagugcugggauuacaggg

SEQ ID NO: 626593 - RNA, 24 nt, Human
uaauuuuuguauuuucaguagaga

SEQ ID NO: 626594 - RNA, 23 nt, Human
uacagggaugagccaccgcgccc

SEQ ID NO: 626595 - RNA, 23 nt, Human
uacaggugcgugccaccacgccc

SEQ ID NO: 626596 - RNA, 24 nt, Human
uagaauuucaggcaugagccaccg

SEQ ID NO: 626597 - RNA, 22 nt, Human
uagagacgggguuucaccacgu

SEQ ID NO: 626598 - RNA, 18 nt, Human
uagcugguacuacaggca

SEQ ID NO: 626599 - RNA, 24 nt, Human
uagguugcccaggcuggucucgaa

SEQ ID NO: 626600 - RNA, 22 nt, Human
ucaaugggacgggcgggaggag

SEQ ID NO: 626601 - RNA, 24 nt, Human
ucaccgcagccucgauguccuggg

SEQ ID NO: 626602 - RNA, 24 nt, Human
ucacugcaaccuucuccucccagg

SEQ ID NO: 626603 - RNA, 20 nt, Human
ucagccucccgaguagcugg

SEQ ID NO: 626604 - RNA, 25 nt, Human
ucagcucacugcaaccuucuccucc

SEQ ID NO: 626605 - RNA, 21 nt, Human
ucaggcaugagccaccgcacc

SEQ ID NO: 626606 - RNA, 18 nt, Human
ucaguagagacgggguuu

SEQ ID NO: 626607 - RNA, 18 nt, Human
uccaccuucaauguugac

SEQ ID NO: 626608 - RNA, 19 nt, Human
ucccagguucaagcgauuc

SEQ ID NO: 626609 - RNA, 21 nt, Human
ucccagguucaagcgauucuc

SEQ ID NO: 626610 - RNA, 25 nt, Human
ucccagguucaagcgauucucccug

SEQ ID NO: 626611 - RNA, 21 nt, Human
uccccagaaugguaaaaucuu

SEQ ID NO: 626612 - RNA, 23 nt, Human
ucccgaguagcugggauuacagg

SEQ ID NO: 626613 - RNA, 24 nt, Human
ucccgaguagcugggauuacaggu

SEQ ID NO: 626614 - RNA, 18 nt, Human
uccugggcucaagcaauc

SEQ ID NO: 626615 - RNA, 24 nt, Human
uccugggcucaagcaauccuccug

SEQ ID NO: 626616 - RNA, 18 nt, Human
uccuuaagugcugggauu

SEQ ID NO: 626617 - RNA, 18 nt, Human
ucgcagcgccggaccccg

SEQ ID NO: 626618 - RNA, 19 nt, Human
ucgcagcgccggaccccgc

SEQ ID NO: 626619 - RNA, 21 nt, Human
ucgccgaggacccgccgaccu

SEQ ID NO: 626620 - RNA, 23 nt, Human
ucucacucagucguccaggcugg

SEQ ID NO: 626621 - RNA, 24 nt, Human
ucucacucagucguccaggcugga

SEQ ID NO: 626622 - RNA, 23 nt, Human
ucucauuagguugcccaggcugg

SEQ ID NO: 626623 - RNA, 18 nt, Human
ucuccucccagguucaag

SEQ ID NO: 626624 - RNA, 21 nt, Human
ucucgaacuccuaggcucaaa

SEQ ID NO: 626625 - RNA, 22 nt, Human
ucugcagucgguccccgcguga

SEQ ID NO: 626626 - RNA, 18 nt, Human
ucugucgccaggcuggag

SEQ ID NO: 626627 - RNA, 21 nt, Human
ucugucgccaggcuggagugc

SEQ ID NO: 626628 - RNA, 21 nt, Human
ucuugcucugucgccaggcug

SEQ ID NO: 626629 - RNA, 22 nt, Human
ucuugcucugucgccaggcugg

SEQ ID NO: 626630 - RNA, 23 nt, Human
ucuugcucugucgccaggcugga

SEQ ID NO: 626631 - RNA, 22 nt, Human
ugaccucgugauccucccgucu

SEQ ID NO: 626632 - RNA, 22 nt, Human
ugcaguggcaccaucucagcuc

SEQ ID NO: 626633 - RNA, 24 nt, Human
ugcccaggcuggucucgaacuccu

SEQ ID NO: 626634 - RNA, 24 nt, Human
ugccucagccucccgaguagcugg

SEQ ID NO: 626635 - RNA, 21 nt, Human
ugccuuagccuuuaaaauagc

SEQ ID NO: 626636 - RNA, 24 nt, Human
ugccuuagccuuuaaaauagcugg

SEQ ID NO: 626637 - RNA, 23 nt, Human
ugcucugucgccaggcuggagug

SEQ ID NO: 626638 - RNA, 21 nt, Human
uggaauacagugguacaauca

SEQ ID NO: 626639 - RNA, 24 nt, Human
uggaauacagugguacaaucaugg

SEQ ID NO: 626640 - RNA, 18 nt, Human
uggagucuugcucugucg

SEQ ID NO: 626641 - RNA, 19 nt, Human
uggagugcaguggcaccau

SEQ ID NO: 626642 - RNA, 23 nt, Human
uggagugcaguggcaccaucuca

SEQ ID NO: 626643 - RNA, 19 nt, Human
uggcaccaucucagcucac

SEQ ID NO: 626644 - RNA, 24 nt, Human
uggcaccaucucagcucacugcaa

SEQ ID NO: 626645 - RNA, 19 nt, Human
uggcagcccagccagcucg

SEQ ID NO: 626646 - RNA, 19 nt, Human
ugggacgggcgggaggagg

SEQ ID NO: 626647 - RNA, 25 nt, Human
ugggacgggcgggaggaggaugggc

SEQ ID NO: 626648 - RNA, 19 nt, Human
ugggauggagucuugcucu

SEQ ID NO: 626649 - RNA, 20 nt, Human
ugggauggagucuugcucug

SEQ ID NO: 626650 - RNA, 22 nt, Human
ugggauggagucuugcucuguc

SEQ ID NO: 626651 - RNA, 22 nt, Human
ugggauuacagggaugagccac

SEQ ID NO: 626652 - RNA, 23 nt, Human
ugggauuacagggaugagccacc

SEQ ID NO: 626653 - RNA, 24 nt, Human
ugggauuacagggaugagccaccg

SEQ ID NO: 626654 - RNA, 18 nt, Human
ugggauuacaggugcgug

SEQ ID NO: 626655 - RNA, 21 nt, Human
ugggauuacaggugcgugcca

SEQ ID NO: 626656 - RNA, 22 nt, Human
ugggauuacaggugcgugccac

SEQ ID NO: 626657 - RNA, 24 nt, Human
ugggauuacaggugcgugccacca

SEQ ID NO: 626658 - RNA, 22 nt, Human
ugggcaucacccaagcccuugg

SEQ ID NO: 626659 - RNA, 24 nt, Human
ugggcucaagcaauccuccugccu

SEQ ID NO: 626660 - RNA, 23 nt, Human
uggggaggggcuugccgagaggu

SEQ ID NO: 626661 - RNA, 22 nt, Human
uggggcgggcgccgggaggggu

SEQ ID NO: 626662 - RNA, 21 nt, Human
ugguacuacaggcacccacca

SEQ ID NO: 626663 - RNA, 24 nt, Human
uguccugggcucaagcaauccucc

SEQ ID NO: 626664 - RNA, 20 nt, Human
ugucgccaggcuggagugca

SEQ ID NO: 626665 - RNA, 18 nt, Human
ugucggagcgcacccggc

SEQ ID NO: 626666 - RNA, 19 nt, Human
ugucugaaaaguuggcgug

SEQ ID NO: 626667 - RNA, 22 nt, Human
ugucugaaaaguuggcguggga

SEQ ID NO: 626668 - RNA, 24 nt, Human
ugugugggcaucacccaagcccuu

SEQ ID NO: 626669 - RNA, 23 nt, Human
uguuucggccucucaaacugcua

SEQ ID NO: 626670 - RNA, 21 nt, Human
uguuuuguuuuguuuuguuug

SEQ ID NO: 626671 - RNA, 18 nt, Human
uuaaagacaguccccaga

SEQ ID NO: 626672 - RNA, 23 nt, Human
uuaagugcugggauuacagggau

SEQ ID NO: 626673 - RNA, 22 nt, Human
uucaagcgauucucccugccuc

SEQ ID NO: 626674 - RNA, 24 nt, Human
uucaagcgauucucccugccucag

SEQ ID NO: 626675 - RNA, 18 nt, Human
uuucaccacguuggccag

SEQ ID NO: 626676 - RNA, 24 nt, Human
uuuucaguagagacgggguuucac

SEQ ID NO: 626677 - RNA, 21 nt, Human
uuuuguauuuucaguagagac

SEQ ID NO: 626678 - RNA, 24 nt, Human
uuuuugggauggagucuugcucug

SEQ ID NO: 626679 - RNA, 25 nt, Human
uuuuuguagagacgggggguggagg

SEQ ID NO: 626680 - RNA, 20 nt, Human
uuuuuguauuuucaguagag

SEQ ID NO: 626681 - RNA, 24 nt, Human
uuuuuuuuuuuugggauggagucu

SEQ ID NO: 626682 - RNA, 22 nt, Human
uuuuuuuuuuuuuugggaugga

SEQ ID NO: 626683 - RNA, 22 nt, Human
uuuuuuuuuuuuuuuuugggau

SEQ ID NO: 626684 - RNA, 24 nt, Human
uuuuuuuuuuuuuuuuuuuuuggg

SEQ ID NO: 626685 - RNA, 22 nt, Human
aauaaaucaugguaauguacaa

SEQ ID NO: 626686 - RNA, 22 nt, Human
cuauauggccuucaauccuucc

SEQ ID NO: 626687 - RNA, 23 nt, Human
uaacugcugugaucacaugaaau

SEQ ID NO: 626688 - RNA, 18 nt, Human
ugggaucaaacuggaaug

SEQ ID NO: 626689 - RNA, 21 nt, Human
uuucaggucaacuaugcuuua

SEQ ID NO: 626690 - RNA, 22 nt, Human
uuuuuuuuuuuuuuuucuuuuu

SEQ ID NO: 626691 - RNA, 26 nt, Human
aaaaaacaaaaaacaaaaaacaaaaa

SEQ ID NO: 626692 - RNA, 23 nt, Human
aaaaaccccccaaugaacaaaaa

SEQ ID NO: 626693 - RNA, 22 nt, Human
aaaaagccaggagacuaguggg

SEQ ID NO: 626694 - RNA, 24 nt, Human
aaaacaaaaaacaaaaaacaaaaa

SEQ ID NO: 626695 - RNA, 23 nt, Human
aaaacaaaaaacaaaaacccccc

SEQ ID NO: 626696 - RNA, 22 nt, Human
aaaacaaaaaccccccaaugaa

SEQ ID NO: 626697 - RNA, 22 nt, Human
aaaaccccccaaugaacaaaaa

SEQ ID NO: 626698 - RNA, 22 nt, Human
aaaacccuaccacacaccacaa

SEQ ID NO: 626699 - RNA, 23 nt, Human
aaacaaaaaacaaaaacccccca

SEQ ID NO: 626700 - RNA, 24 nt, Human
aaacaaaaaacaaaaaccccccaa

SEQ ID NO: 626701 - RNA, 26 nt, Human
aaacaaaaaacaaaaaccccccaaug

SEQ ID NO: 626702 - RNA, 23 nt, Human
aaacaaaaacccuaccacacacc

SEQ ID NO: 626703 - RNA, 24 nt, Human
aaaccccccaaugaacaaaaacaa

SEQ ID NO: 626704 - RNA, 19 nt, Human
aaagccccuucaccaacuc

SEQ ID NO: 626705 - RNA, 18 nt, Human
aacaggcaacaaaaccaa

SEQ ID NO: 626706 - RNA, 21 nt, Human
aaccaagugcagacaucagug

SEQ ID NO: 626707 - RNA, 24 nt, Human
aagcaaaauaauuuucuuaaccaa

SEQ ID NO: 626708 - RNA, 19 nt, Human
aagugcagacaucagugag

SEQ ID NO: 626709 - RNA, 20 nt, Human
aauuucuaaaacugacccaa

SEQ ID NO: 626710 - RNA, 22 nt, Human
acaaaaaacaaaaaacaaaaac

SEQ ID NO: 626711 - RNA, 27 nt, Human
acaaaaaacaaaaaacaaaaacccccc

SEQ ID NO: 626712 - RNA, 20 nt, Human
accccccaaugaacaaaaac

SEQ ID NO: 626713 - RNA, 22 nt, Human
acccuaccacacaccacaacaa

SEQ ID NO: 626714 - RNA, 20 nt, Human
agcagagccugugaggcucc

SEQ ID NO: 626715 - RNA, 19 nt, Human
agccccacuuaaaagaugg

SEQ ID NO: 626716 - RNA, 27 nt, Human
aggaaaaauauauagaaucaaaaaaaa

SEQ ID NO: 626717 - RNA, 22 nt, Human
aggcccaagcuggccaguggag

SEQ ID NO: 626718 - RNA, 19 nt, Human
aggcuagugggcgugggug

SEQ ID NO: 626719 - RNA, 24 nt, Human
caaaaacccuaccacacaccacaa

SEQ ID NO: 626720 - RNA, 23 nt, Human
caaaacaaaaggaggggcaacua

SEQ ID NO: 626721 - RNA, 26 nt, Human
caaaacaaaaggaggggcaacuacgu

SEQ ID NO: 626722 - RNA, 22 nt, Human
caaaacccucaaaacaaaagga

SEQ ID NO: 626723 - RNA, 24 nt, Human
caaaacccucaaaacaaaaggagg

SEQ ID NO: 626724 - RNA, 22 nt, Human
caaggaaaaauauauagaauca

SEQ ID NO: 626725 - RNA, 21 nt, Human
caaggaacuguggacauggca

SEQ ID NO: 626726 - RNA, 20 nt, Human
cacugcacuagccccucagc

SEQ ID NO: 626727 - RNA, 19 nt, Human
cagcagagccugugaggcu

SEQ ID NO: 626728 - RNA, 21 nt, Human
cagcaucagccucuguccccu

SEQ ID NO: 626729 - RNA, 23 nt, Human
ccaaaacauuuuguugcuuuuaa

SEQ ID NO: 626730 - RNA, 22 nt, Human
ccagcaucagccucuguccccu

SEQ ID NO: 626731 - RNA, 26 nt, Human
ccagcccagucugcaggccugagcuc

SEQ ID NO: 626732 - RNA, 18 nt, Human
ccagccugauacagcccc

SEQ ID NO: 626733 - RNA, 21 nt, Human
ccauccaggaggaauaccaag

SEQ ID NO: 626734 - RNA, 23 nt, Human
cccccaaugaacaaaaacaaaac

SEQ ID NO: 626735 - RNA, 21 nt, Human
ccccccaaugaacaaaaacaa

SEQ ID NO: 626736 - RNA, 23 nt, Human
ccugaacaacucugccgcaggag

SEQ ID NO: 626737 - RNA, 19 nt, Human
cuagccccucagcagccca

SEQ ID NO: 626738 - RNA, 20 nt, Human
cuagcuagaaacaauuucua

SEQ ID NO: 626739 - RNA, 23 nt, Human
cucaaaaaagaaaacaaaaaccc

SEQ ID NO: 626740 - RNA, 22 nt, Human
cucaaaacaaaaggaggggcaa

SEQ ID NO: 626741 - RNA, 19 nt, Human
cugcacuagccccucagca

SEQ ID NO: 626742 - RNA, 23 nt, Human
cugcucugcuccaccaccucuac

SEQ ID NO: 626743 - RNA, 24 nt, Human
cugugaggcuccaggagaccucaa

SEQ ID NO: 626744 - RNA, 26 nt, Human
gaacaaaaacaaaacccucaaaacaa

SEQ ID NO: 626745 - RNA, 20 nt, Human
gaggaugaggcccaagcugg

SEQ ID NO: 626746 - RNA, 21 nt, Human
ggaaaaaaaacucaaaaaaga

SEQ ID NO: 626747 - RNA, 25 nt, Human
ggaaaaauauauagaaucaaaaaaa

SEQ ID NO: 626748 - RNA, 19 nt, Human
ggaagggaaaggaaaaagc

SEQ ID NO: 626749 - RNA, 21 nt, Human
ggcaacaaaaccaaggaaaaa

SEQ ID NO: 626750 - RNA, 22 nt, Human
gggaaaaaaaacucaaaaaaga

SEQ ID NO: 626751 - RNA, 23 nt, Human
gggaagggaaaggaaaaagccag

SEQ ID NO: 626752 - RNA, 24 nt, Human
gggcguggguggaggacgccuggg

SEQ ID NO: 626753 - RNA, 24 nt, Human
uaaaagauggcugcucugcuccac

SEQ ID NO: 626754 - RNA, 23 nt, Human
uaacaggcaacaaaaccaaggaa

SEQ ID NO: 626755 - RNA, 25 nt, Human
uaacaggcaacaaaaccaaggaaaa

SEQ ID NO: 626756 - RNA, 18 nt, Human
uaagccccugcccaggca

SEQ ID NO: 626757 - RNA, 23 nt, Human
uaaggaugagccagaguucccag

SEQ ID NO: 626758 - RNA, 18 nt, Human
uaccaagaauaugagaac

SEQ ID NO: 626759 - RNA, 20 nt, Human
ucaaaacaaaaggaggggca

SEQ ID NO: 626760 - RNA, 21 nt, Human
ucaaaaggagcaaccagcaaa

SEQ ID NO: 626761 - RNA, 21 nt, Human
ucagcccuaacaggcaacaaa

SEQ ID NO: 626762 - RNA, 19 nt, Human
uccaggaggaauaccaaga

SEQ ID NO: 626763 - RNA, 22 nt, Human
ucccucuagcuagaaacaauuu

SEQ ID NO: 626764 - RNA, 23 nt, Human
ugauacagccccacuuaaaagau

SEQ ID NO: 626765 - RNA, 20 nt, Human
ugcacuagccccucagcagc

SEQ ID NO: 626766 - RNA, 18 nt, Human
ugcagggcguggauggca

SEQ ID NO: 626767 - RNA, 21 nt, Human
ugcgaagauuuacacugaaag

SEQ ID NO: 626768 - RNA, 28 nt, Human
ugcuccaccaccucuacuggccacucca

SEQ ID NO: 626769 - RNA, 21 nt, Human
ugcucugcuccaccaccucua

SEQ ID NO: 626770 - RNA, 24 nt, Human
uggaugcaugcugccggcagacaa

SEQ ID NO: 626771 - RNA, 24 nt, Human
uggcaggcuagugggcgugggugg

SEQ ID NO: 626772 - RNA, 21 nt, Human
ugggauggcaggggcuggcac

SEQ ID NO: 626773 - RNA, 19 nt, Human
uuaaauaaacccagccuga

SEQ ID NO: 626774 - RNA, 23 nt, Human
uuccauaccccaaaugcuagacu

SEQ ID NO: 626775 - RNA, 20 nt, Human
uugaugccaacagccuuucc

SEQ ID NO: 626776 - RNA, 21 nt, Human
aacaccccuauuccucuaucu

SEQ ID NO: 626777 - RNA, 24 nt, Human
agugagacgcuggcaggcaugcug

SEQ ID NO: 626778 - RNA, 23 nt, Human
caaggauuguauuccugaagcuc

SEQ ID NO: 626779 - RNA, 23 nt, Human
ccuauuccucuaucugacaacuc

SEQ ID NO: 626780 - RNA, 19 nt, Human
ccucugggaggcauggcug

SEQ ID NO: 626781 - RNA, 23 nt, Human
cuccaguaccuguggagaacacc

SEQ ID NO: 626782 - RNA, 21 nt, Human
cuccuggacuggcacaccauc

SEQ ID NO: 626783 - RNA, 19 nt, Human
cugccccuggaucugcccu

SEQ ID NO: 626784 - RNA, 20 nt, Human
cuucucuucuucuuguguuu

SEQ ID NO: 626785 - RNA, 20 nt, Human
gaacugccccuggaucugcc

SEQ ID NO: 626786 - RNA, 21 nt, Human
gacgcuggcaggcaugcugag

SEQ ID NO: 626787 - RNA, 25 nt, Human
gacugcagguggaauggguuuuugg

SEQ ID NO: 626788 - RNA, 19 nt, Human
gagagaaguuacagccugc

SEQ ID NO: 626789 - RNA, 22 nt, Human
gagagaaguuacagccugcaag

SEQ ID NO: 626790 - RNA, 21 nt, Human
gauuaggucaucugccuugcu

SEQ ID NO: 626791 - RNA, 23 nt, Human
gcaggacaucugaaaaguccucc

SEQ ID NO: 626792 - RNA, 19 nt, Human
gcaggauguggccucuggg

SEQ ID NO: 626793 - RNA, 23 nt, Human
gcuccucagccucuucgguaguu

SEQ ID NO: 626794 - RNA, 20 nt, Human
guggaugggcuccggaugug

SEQ ID NO: 626795 - RNA, 19 nt, Human
uccucagccucuucgguag

SEQ ID NO: 626796 - RNA, 22 nt, Human
uccucugcugcuggugcugaac

SEQ ID NO: 626797 - RNA, 21 nt, Human
uccuggguuuccucugcugcu

SEQ ID NO: 626798 - RNA, 21 nt, Human
ucgagagaaguuacagccugc

SEQ ID NO: 626799 - RNA, 18 nt, Human
ucuaucugacaacuccug

SEQ ID NO: 626800 - RNA, 18 nt, Human
ucuggcugaucagagugg

SEQ ID NO: 626801 - RNA, 23 nt, Human
ugaaacuguccugggaaggcucu

SEQ ID NO: 626802 - RNA, 20 nt, Human
ugccagggguguaggugggu

SEQ ID NO: 626803 - RNA, 24 nt, Human
ugcugcuggugcugaacuuuacgg

SEQ ID NO: 626804 - RNA, 19 nt, Human
uggaaugucagugaucuca

SEQ ID NO: 626805 - RNA, 20 nt, Human
uggaaugucagugaucucau

SEQ ID NO: 626806 - RNA, 20 nt, Human
uggaucugcccugccagggg

SEQ ID NO: 626807 - RNA, 21 nt, Human
uggaucugcccugccaggggu

SEQ ID NO: 626808 - RNA, 19 nt, Human
uggcaaugucauccggcaa

SEQ ID NO: 626809 - RNA, 21 nt, Human
uggcagaaguaaggccaacgu

SEQ ID NO: 626810 - RNA, 21 nt, Human
uggcagaaguaaggccaacgu

SEQ ID NO: 626811 - RNA, 26 nt, Human
uggcagaaguaaggccaacguuggcu

SEQ ID NO: 626812 - RNA, 25 nt, Human
uggggcagagaacugccccuggauc

SEQ ID NO: 626813 - RNA, 24 nt, Human
ugggggacugcagguggaaugggg

SEQ ID NO: 626814 - RNA, 24 nt, Human
uguguucaccucucggcucaagga

SEQ ID NO: 626815 - RNA, 23 nt, Human
uguuuuuugguuagugcaggagg

SEQ ID NO: 626816 - RNA, 22 nt, Human
uuccaagucauguggaauguca

SEQ ID NO: 626817 - RNA, 20 nt, Human
uuccucuaucugacaacucc

SEQ ID NO: 626818 - RNA, 23 nt, Human
uuuugggggugagguaaaauggc

SEQ ID NO: 626819 - RNA, 19 nt, Human
uuuuuuuuuuuuugggggu

SEQ ID NO: 626820 - RNA, 21 nt, Human
uuuuuuuuuuuuuggggguga

SEQ ID NO: 626821 - RNA, 20 nt, Human
uuuuuuuuuuuuuuuggggg

SEQ ID NO: 626822 - RNA, 18 nt, Human
uuuuuuuuuuuuuuuuug

SEQ ID NO: 626823 - RNA, 22 nt, Human
uuuuuuuuuuuuuuuuuggggg

SEQ ID NO: 626824 - RNA, 20 nt, Human
aaaaacaaccagguuugcua

SEQ ID NO: 626825 - RNA, 25 nt, Human
aaaaacaauaggaaaauacacaggc

SEQ ID NO: 626826 - RNA, 25 nt, Human
aacccccaccuucccacauucccac

SEQ ID NO: 626827 - RNA, 21 nt, Human
aagucauuuuaaaaacaaccg

SEQ ID NO: 626828 - RNA, 21 nt, Human
auaaucaaagcaauauaaagc

SEQ ID NO: 626829 - RNA, 22 nt, Human
aucccacccuuucccuauuaua

SEQ ID NO: 626830 - RNA, 20 nt, Human
aucuccuccauaacccccag

SEQ ID NO: 626831 - RNA, 21 nt, Human
auuuauaccuggaguccuuua

SEQ ID NO: 626832 - RNA, 24 nt, Human
caaaaaaaucccacccuuucccua

SEQ ID NO: 626833 - RNA, 23 nt, Human
ccaaagccgacauacgucugcac

SEQ ID NO: 626834 - RNA, 19 nt, Human
ccauaacccccaccuuccc

SEQ ID NO: 626835 - RNA, 19 nt, Human
cccaccuucccacauuccc

SEQ ID NO: 626836 - RNA, 19 nt, Human
cccccaccuucccacauuc

SEQ ID NO: 626837 - RNA, 19 nt, Human
uaaaaacaauaggaaaaua

SEQ ID NO: 626838 - RNA, 24 nt, Human
uaacauuaaaaacaauaggaaaau

SEQ ID NO: 626839 - RNA, 21 nt, Human
uccauaacccccaccuuccca

SEQ ID NO: 626840 - RNA, 22 nt, Human
ugcuuuauuacucauaguuucc

SEQ ID NO: 626841 - RNA, 24 nt, Human
uuuucuuggaaucauggauuucua

SEQ ID NO: 626842 - RNA, 22 nt, Human
uuuuuuguugucauugcuuuau

SEQ ID NO: 626843 - RNA, 25 nt, Human
uuuuuuguugucauugcuuuauuac

SEQ ID NO: 626844 - RNA, 20 nt, Human
uuuuuuuuuuuuuuguuguc

SEQ ID NO: 626845 - RNA, 23 nt, Human
aaacaaaaacaaaacaucacugg

SEQ ID NO: 626846 - RNA, 21 nt, Human
aagccucccucccuuuccagg

SEQ ID NO: 626847 - RNA, 21 nt, Human
aaguuacucaguugagaacac

SEQ ID NO: 626848 - RNA, 21 nt, Human
aauacaaaaauguauuuugaa

SEQ ID NO: 626849 - RNA, 19 nt, Human
acauggcucuuucuccccu

SEQ ID NO: 626850 - RNA, 18 nt, Human
accccagcuucuacaacc

SEQ ID NO: 626851 - RNA, 24 nt, Human
acuaacgcggcagcggcucccucu

SEQ ID NO: 626852 - RNA, 18 nt, Human
agcaaauucauacuaaaa

SEQ ID NO: 626853 - RNA, 21 nt, Human
agcucggaacuaacgcggcag

SEQ ID NO: 626854 - RNA, 21 nt, Human
aggaaaaaaagauagucccau

SEQ ID NO: 626855 - RNA, 25 nt, Human
auaaaaaacaguccacggucuuaca

SEQ ID NO: 626856 - RNA, 19 nt, Human
auaucacagugcacacaac

SEQ ID NO: 626857 - RNA, 18 nt, Human
auguacauuaaguacuac

SEQ ID NO: 626858 - RNA, 19 nt, Human
auucauacuaaaauacucc

SEQ ID NO: 626859 - RNA, 30 nt, Human
caaaacaucacuggcaccauacucgaaaaa

SEQ ID NO: 626860 - RNA, 23 nt, Human
caaucuacugguccaugaaugau

SEQ ID NO: 626861 - RNA, 24 nt, Human
cacggaccgacaaagcccacgaac

SEQ ID NO: 626862 - RNA, 24 nt, Human
cagcggcucccucucgacgucgaa

SEQ ID NO: 626863 - RNA, 27 nt, Human
cagcuucuacaacccgaccuucuccuu

SEQ ID NO: 626864 - RNA, 19 nt, Human
cauacauacacuggcacuu

SEQ ID NO: 626865 - RNA, 28 nt, Human
cauuucacaucucuuaaaaauaguuuua

SEQ ID NO: 626866 - RNA, 22 nt, Human
ccaagcccaagauaacaagugu

SEQ ID NO: 626867 - RNA, 21 nt, Human
ccacuacauuuaauaaacagg

SEQ ID NO: 626868 - RNA, 18 nt, Human
ccccaaagcaagcuuugc

SEQ ID NO: 626869 - RNA, 20 nt, Human
ccccuugaccaaacaaaaac

SEQ ID NO: 626870 - RNA, 28 nt, Human
ccccuugaccaaacaaaaacaaaacauc

SEQ ID NO: 626871 - RNA, 21 nt, Human
ccggccaccccagcuucuaca

SEQ ID NO: 626872 - RNA, 22 nt, Human
ccuguccucuuccuugcugcca

SEQ ID NO: 626873 - RNA, 22 nt, Human
ccuucagauguuuaccuaauuc

SEQ ID NO: 626874 - RNA, 30 nt, Human
cuaccccuugaccaaacaaaaacaaaacaa

SEQ ID NO: 626875 - RNA, 25 nt, Human
cugccaagcccaagauaacaagugu

SEQ ID NO: 626876 - RNA, 23 nt, Human
cuguacaauucacuaaaaugcaa

SEQ ID NO: 626877 - RNA, 22 nt, Human
cuuuaccacuccccaaaucuaa

SEQ ID NO: 626878 - RNA, 22 nt, Human
gaagccucccucccuuuccagg

SEQ ID NO: 626879 - RNA, 18 nt, Human
gacgucgaagccucccuc

SEQ ID NO: 626880 - RNA, 24 nt, Human
gagaacacuuaauaucaaguacaa

SEQ ID NO: 626881 - RNA, 19 nt, Human
gaguucagccuaggagcug

SEQ ID NO: 626882 - RNA, 20 nt, Human
gccaaauuagaaaauagggc

SEQ ID NO: 626883 - RNA, 24 nt, Human
gcuuauguuuaagcauuuaaaguu

SEQ ID NO: 626884 - RNA, 24 nt, Human
uaaaauacuccauuuuuguaagau

SEQ ID NO: 626885 - RNA, 22 nt, Human
uaacuaaauuuaaacauuuguc

SEQ ID NO: 626886 - RNA, 22 nt, Human
uaagauaaaggccaagaaaacu

SEQ ID NO: 626887 - RNA, 23 nt, Human
uaagcugacccacauacuugcua

SEQ ID NO: 626888 - RNA, 21 nt, Human
uacaacccgaccuucuccuuc

SEQ ID NO: 626889 - RNA, 19 nt, Human
uacugcauuucacaucucu

SEQ ID NO: 626890 - RNA, 24 nt, Human
uacuucaucuugauuuauuuggag

SEQ ID NO: 626891 - RNA, 18 nt, Human
uagcacaagggcaaacuu

SEQ ID NO: 626892 - RNA, 21 nt, Human
uauaacauacauacacuggca

SEQ ID NO: 626893 - RNA, 24 nt, Human
uaucacagugcacacaacacgaga

SEQ ID NO: 626894 - RNA, 23 nt, Human
uaucauguacauuaaguacuaca

SEQ ID NO: 626895 - RNA, 18 nt, Human
ucacagugcacacaacac

SEQ ID NO: 626896 - RNA, 26 nt, Human
uccaaaugcccuuuccacccacugua

SEQ ID NO: 626897 - RNA, 20 nt, Human
uccacggucuuacauucagc

SEQ ID NO: 626898 - RNA, 21 nt, Human
uccccaaagcaagcuuugcag

SEQ ID NO: 626899 - RNA, 22 nt, Human
uccccaaaucuaaacuugguuu

SEQ ID NO: 626900 - RNA, 21 nt, Human
uccuuguguuagcuagaagcu

SEQ ID NO: 626901 - RNA, 23 nt, Human
uccuuguguuagcuagaagcuua

SEQ ID NO: 626902 - RNA, 24 nt, Human
ucugacagaucccuuccuuugucu

SEQ ID NO: 626903 - RNA, 20 nt, Human
ugaaauauaguuuacaacca

SEQ ID NO: 626904 - RNA, 23 nt, Human
ugagagaaguccuagugacuuca

SEQ ID NO: 626905 - RNA, 23 nt, Human
ugcuuaggcaucaagaggugcca

SEQ ID NO: 626906 - RNA, 19 nt, Human
uggguguuucuaauauacu

SEQ ID NO: 626907 - RNA, 22 nt, Human
ugucucauucuaaugagcucca

SEQ ID NO: 626908 - RNA, 18 nt, Human
uguuagcuagaagcuuau

SEQ ID NO: 626909 - RNA, 18 nt, Human
uuacauggcucuuucucc

SEQ ID NO: 626910 - RNA, 19 nt, Human
uuaggcaucaagaggugcc

SEQ ID NO: 626911 - RNA, 23 nt, Human
uucaacaaucuacugguccauga

SEQ ID NO: 626912 - RNA, 23 nt, Human
uucacuaaaaugcaauuauuacg

SEQ ID NO: 626913 - RNA, 18 nt, Human
uucagauugcaggaucuc

SEQ ID NO: 626914 - RNA, 25 nt, Human
uuccuuuaccacuccccaaaucuaa

SEQ ID NO: 626915 - RNA, 20 nt, Human
uuuaaaguuggcaaaacaug

SEQ ID NO: 626916 - RNA, 21 nt, Human
uuuaagcauuuaaaguuggca

SEQ ID NO: 626917 - RNA, 24 nt, Human
uuuuaugcuucacauucauaucau

SEQ ID NO: 626918 - RNA, 19 nt, Human
uuuuuuuuuuuuaaugggg

SEQ ID NO: 626919 - RNA, 24 nt, Human
uuuuuuuuuuuuuuuuuaaugggg

SEQ ID NO: 626920 - RNA, 20 nt, Human
aauccucuuccuagaaaggc

SEQ ID NO: 626921 - RNA, 23 nt, Human
agaaaggcuuccugaagguccac

SEQ ID NO: 626922 - RNA, 19 nt, Human
aggcagccgcgcugcugug

SEQ ID NO: 626923 - RNA, 20 nt, Human
aggugggugaaauggcacuu

SEQ ID NO: 626924 - RNA, 18 nt, Human
auuugcauaaugauucac

SEQ ID NO: 626925 - RNA, 21 nt, Human
caaccuggacucucaggcuga

SEQ ID NO: 626926 - RNA, 23 nt, Human
caaccuggacucucaggcugaag

SEQ ID NO: 626927 - RNA, 18 nt, Human
caccucauacaaugagac

SEQ ID NO: 626928 - RNA, 21 nt, Human
cacugccuagcccagggccuu

SEQ ID NO: 626929 - RNA, 19 nt, Human
cagaacucagguuucccgc

SEQ ID NO: 626930 - RNA, 21 nt, Human
cagccgcgcugcugugggcag

SEQ ID NO: 626931 - RNA, 21 nt, Human
cagccuccugggguccuccag

SEQ ID NO: 626932 - RNA, 23 nt, Human
cauacaaugagacuaaaggcaua

SEQ ID NO: 626933 - RNA, 21 nt, Human
cauaucagcuuuccccacaaa

SEQ ID NO: 626934 - RNA, 22 nt, Human
ccagaacucagguuucccgcuc

SEQ ID NO: 626935 - RNA, 20 nt, Human
ccagggccagaacucagguu

SEQ ID NO: 626936 - RNA, 23 nt, Human
cccuaggucacacugccuagccc

SEQ ID NO: 626937 - RNA, 23 nt, Human
cccugcuuagucauaaauccucu

SEQ ID NO: 626938 - RNA, 19 nt, Human
ccgagccagugggggcucc

SEQ ID NO: 626939 - RNA, 21 nt, Human
ccuaggucacacugccuagcc

SEQ ID NO: 626940 - RNA, 19 nt, Human
ccugggguccuccaguucc

SEQ ID NO: 626941 - RNA, 22 nt, Human
cgagaaggcgcauuucgcggcg

SEQ ID NO: 626942 - RNA, 23 nt, Human
cgcgcagccuccugggguccucc

SEQ ID NO: 626943 - RNA, 19 nt, Human
cucauacaaugagacuaaa

SEQ ID NO: 626944 - RNA, 26 nt, Human
cugaggcugaagaccccggagcucac

SEQ ID NO: 626945 - RNA, 21 nt, Human
cugggguccuccaguucccgg

SEQ ID NO: 626946 - RNA, 21 nt, Human
cuuccugaagguccacaagag

SEQ ID NO: 626947 - RNA, 25 nt, Human
ggaacaugggccuagcacuuuuccc

SEQ ID NO: 626948 - RNA, 23 nt, Human
ggacucucaggcugaagccugag

SEQ ID NO: 626949 - RNA, 19 nt, Human
gggagacgcgcgcagccuc

SEQ ID NO: 626950 - RNA, 21 nt, Human
uacaaaauguuacaccucaua

SEQ ID NO: 626951 - RNA, 18 nt, Human
uacagguuagcaaccugg

SEQ ID NO: 626952 - RNA, 22 nt, Human
uacaucaaugaauugugaccag

SEQ ID NO: 626953 - RNA, 18 nt, Human
uagcccagggccuuacgg

SEQ ID NO: 626954 - RNA, 23 nt, Human
ucacuaugagggcaauccucuuc

SEQ ID NO: 626955 - RNA, 24 nt, Human
ucauuuacgacaauuucuccuggc

SEQ ID NO: 626956 - RNA, 22 nt, Human
ucccgagaaggcgcauuucgcg

SEQ ID NO: 626957 - RNA, 18 nt, Human
ucccuaggucacacugcc

SEQ ID NO: 626958 - RNA, 24 nt, Human
ucccuaggucacacugccuagccc

SEQ ID NO: 626959 - RNA, 20 nt, Human
ucuccuggcaaaaggacugg

SEQ ID NO: 626960 - RNA, 18 nt, Human
ugagacuaaaggcauaag

SEQ ID NO: 626961 - RNA, 21 nt, Human
ugcauaucagcuuuccccaca

SEQ ID NO: 626962 - RNA, 21 nt, Human
ugggugaaauggcacuuuggu

SEQ ID NO: 626963 - RNA, 19 nt, Human
uguuguugguucgaggugg

SEQ ID NO: 626964 - RNA, 19 nt, Human
uuccccacaaaucguacug

SEQ ID NO: 626965 - RNA, 21 nt, Human
uuuuauaccaacaaauccaga

SEQ ID NO: 626966 - RNA, 22 nt, Human
aaacggcacccucucacccucc

SEQ ID NO: 626967 - RNA, 23 nt, Human
aaacggcacccucucacccucca

SEQ ID NO: 626968 - RNA, 24 nt, Human
aaacggcacccucucacccuccac

SEQ ID NO: 626969 - RNA, 23 nt, Human
aacggcacccucucacccuccac

SEQ ID NO: 626970 - RNA, 24 nt, Human
aagaacucuuuguuguccccgcuc

SEQ ID NO: 626971 - RNA, 18 nt, Human
aaggagcagcaccuuugu

SEQ ID NO: 626972 - RNA, 21 nt, Human
acccucucacccuccaccauc

SEQ ID NO: 626973 - RNA, 19 nt, Human
agcaggacucugugccagg

SEQ ID NO: 626974 - RNA, 19 nt, Human
aggaaguacggcaaaaaga

SEQ ID NO: 626975 - RNA, 21 nt, Human
aggaguuuuucccuccccacu

SEQ ID NO: 626976 - RNA, 21 nt, Human
aggcagcagcugguugccugg

SEQ ID NO: 626977 - RNA, 22 nt, Human
aggcagcagcugguugccuggc

SEQ ID NO: 626978 - RNA, 23 nt, Human
aggggccaaagcugguguucaga

SEQ ID NO: 626979 - RNA, 18 nt, Human
agguagggcccaaacaca

SEQ ID NO: 626980 - RNA, 22 nt, Human
aguagggguuggagaaggagca

SEQ ID NO: 626981 - RNA, 21 nt, Human
auuccauccuuccucugccca

SEQ ID NO: 626982 - RNA, 21 nt, Human
cacccuccaccaucaccaguc

SEQ ID NO: 626983 - RNA, 18 nt, Human
cacccucucacccuccac

SEQ ID NO: 626984 - RNA, 20 nt, Human
cacccucucacccuccacca

SEQ ID NO: 626985 - RNA, 27 nt, Human
cacuucaaccauacauacugcuuccac

SEQ ID NO: 626986 - RNA, 20 nt, Human
cagccuuacuguggaggggc

SEQ ID NO: 626987 - RNA, 19 nt, Human
cagcugcagcaaugcacuu

SEQ ID NO: 626988 - RNA, 21 nt, Human
caggaaacggcacccucucac

SEQ ID NO: 626989 - RNA, 25 nt, Human
caggugggguccucugcccacuuug

SEQ ID NO: 626990 - RNA, 21 nt, Human
ccacuuugccaccacauucac

SEQ ID NO: 626991 - RNA, 18 nt, Human
ccagaggaaccaaggcug

SEQ ID NO: 626992 - RNA, 19 nt, Human
ccagcagaaauuccuccuu

SEQ ID NO: 626993 - RNA, 19 nt, Human
ccagcccacacacgccaca

SEQ ID NO: 626994 - RNA, 24 nt, Human
ccaggagcaggacucugugccagg

SEQ ID NO: 626995 - RNA, 22 nt, Human
ccagguagggcccaaacacauc

SEQ ID NO: 626996 - RNA, 23 nt, Human
ccccacuaacugagggaaaaagg

SEQ ID NO: 626997 - RNA, 19 nt, Human
ccccagaggaaccaaggcu

SEQ ID NO: 626998 - RNA, 22 nt, Human
ccccagaggaaccaaggcugcu

SEQ ID NO: 626999 - RNA, 24 nt, Human
cccugauguagcagccuuacugug

SEQ ID NO: 627000 - RNA, 22 nt, Human
ccuaggugcuagucuccccacu

SEQ ID NO: 627001 - RNA, 21 nt, Human
ccucaaaaacucagccuucaa

SEQ ID NO: 627002 - RNA, 22 nt, Human
ccuuuguaacaccuggcuaccc

SEQ ID NO: 627003 - RNA, 24 nt, Human
cuaauccacucuccuguggguccc

SEQ ID NO: 627004 - RNA, 24 nt, Human
cucacccuccaccaucaccagucc

SEQ ID NO: 627005 - RNA, 23 nt, Human
cucagggacagaacuccacacua

SEQ ID NO: 627006 - RNA, 26 nt, Human
cugaacccacuggcugguaugaacaa

SEQ ID NO: 627007 - RNA, 21 nt, Human
cugcugaacccacuggcuggu

SEQ ID NO: 627008 - RNA, 21 nt, Human
cuggagcuggagcaggaaacg

SEQ ID NO: 627009 - RNA, 22 nt, Human
cugguccuuuuggcaaaaaagg

SEQ ID NO: 627010 - RNA, 22 nt, Human
cuugugcucuaauccacucucc

SEQ ID NO: 627011 - RNA, 19 nt, Human
gaaauuccuccuuucuacc

SEQ ID NO: 627012 - RNA, 23 nt, Human
gacaaggucuggagcuggagcag

SEQ ID NO: 627013 - RNA, 18 nt, Human
gagcaggacucugugcca

SEQ ID NO: 627014 - RNA, 20 nt, Human
gaggaaaagaacauuuaugc

SEQ ID NO: 627015 - RNA, 18 nt, Human
gagggaaaccaaguaggg

SEQ ID NO: 627016 - RNA, 23 nt, Human
gcccaaacacaucuggagcacac

SEQ ID NO: 627017 - RNA, 23 nt, Human
gcccacacacgccacaggcagca

SEQ ID NO: 627018 - RNA, 20 nt, Human
gccucugggcuguccaaacc

SEQ ID NO: 627019 - RNA, 21 nt, Human
gcugguaugaacaugaggcuu

SEQ ID NO: 627020 - RNA, 23 nt, Human
ggaaacggcacccucucacccuc

SEQ ID NO: 627021 - RNA, 20 nt, Human
ggagcugggccucugggcug

SEQ ID NO: 627022 - RNA, 21 nt, Human
ggaggggccaaagcugguguu

SEQ ID NO: 627023 - RNA, 19 nt, Human
gggagcugggccucugggc

SEQ ID NO: 627024 - RNA, 20 nt, Human
gggguccucugcccacuuug

SEQ ID NO: 627025 - RNA, 24 nt, Human
gggugagggaaaccaaguaggggu

SEQ ID NO: 627026 - RNA, 24 nt, Human
ggucacacuuugcuuuuccuuugu

SEQ ID NO: 627027 - RNA, 21 nt, Human
gguuggagcuaggccugaaca

SEQ ID NO: 627028 - RNA, 22 nt, Human
guuguccccauuuuccauccuu

SEQ ID NO: 627029 - RNA, 18 nt, Human
ucacacuuugcuuuuccu

SEQ ID NO: 627030 - RNA, 25 nt, Human
ucaccaguccucuuccagugcuucu

SEQ ID NO: 627031 - RNA, 22 nt, Human
ucacccuccaccaucaccaguc

SEQ ID NO: 627032 - RNA, 22 nt, Human
ucauuccauccuuccucugccc

SEQ ID NO: 627033 - RNA, 19 nt, Human
ucguaguuuuggcccuucc

SEQ ID NO: 627034 - RNA, 21 nt, Human
ucuaagacaaaacuuuuccca

SEQ ID NO: 627035 - RNA, 25 nt, Human
ucuaagacaaaacuuuucccagaga

SEQ ID NO: 627036 - RNA, 18 nt, Human
ucucacccuccaccauca

SEQ ID NO: 627037 - RNA, 20 nt, Human
ucuccccacuaacugaggga

SEQ ID NO: 627038 - RNA, 19 nt, Human
ucucugggacucugagaca

SEQ ID NO: 627039 - RNA, 21 nt, Human
ucuggagcuggagcaggaaac

SEQ ID NO: 627040 - RNA, 23 nt, Human
ucugggcuguccaaacccaaggg

SEQ ID NO: 627041 - RNA, 22 nt, Human
ugaggcuuggggugagggaaac

SEQ ID NO: 627042 - RNA, 20 nt, Human
ugaugaggcccaucagcucu

SEQ ID NO: 627043 - RNA, 25 nt, Human
ugcccagauaaaguccagcagaaau

SEQ ID NO: 627044 - RNA, 22 nt, Human
ugccccugauguagcagccuua

SEQ ID NO: 627045 - RNA, 21 nt, Human
ugccuggcuggacauggauuu

SEQ ID NO: 627046 - RNA, 20 nt, Human
uggaggggccaaagcuggug

SEQ ID NO: 627047 - RNA, 23 nt, Human
uggcaaaaaaggaaaaugauaga

SEQ ID NO: 627048 - RNA, 24 nt, Human
uggcccuuccuuucucuaaaguuu

SEQ ID NO: 627049 - RNA, 18 nt, Human
ugggauaaugccugaggg

SEQ ID NO: 627050 - RNA, 18 nt, Human
ugggauaaugccugaggg

SEQ ID NO: 627051 - RNA, 20 nt, Human
ugggccucugggcuguccaa

SEQ ID NO: 627052 - RNA, 18 nt, Human
ugggcuguccaaacccaa

SEQ ID NO: 627053 - RNA, 23 nt, Human
ugggucccuggccuguauggcuu

SEQ ID NO: 627054 - RNA, 22 nt, Human
uguacccaccucagggacagaa

SEQ ID NO: 627055 - RNA, 23 nt, Human
uguacccaccucagggacagaac

SEQ ID NO: 627056 - RNA, 22 nt, Human
ugucaugcguucugcugaaccc

SEQ ID NO: 627057 - RNA, 19 nt, Human
uguggaggggccaaagcug

SEQ ID NO: 627058 - RNA, 20 nt, Human
uguucagagcucacccaagg

SEQ ID NO: 627059 - RNA, 24 nt, Human
uguuuucugcagacaaggucugga

SEQ ID NO: 627060 - RNA, 21 nt, Human
uuggagcuaggccugaacauc

SEQ ID NO: 627061 - RNA, 21 nt, Human
uugguuggagcuaggccugaa

SEQ ID NO: 627062 - RNA, 23 nt, Human
uugugcucuaauccacucuccug

SEQ ID NO: 627063 - RNA, 25 nt, Human
uuuggcaaaaaaggaaaaugauaga

SEQ ID NO: 627064 - RNA, 20 nt, Human
uuuuuuuuuuuuuuugugga

SEQ ID NO: 627065 - RNA, 19 nt, Human
uuuuuuuuuuuuuuuuugu

SEQ ID NO: 627066 - RNA, 22 nt, Human
uuuuuuuuuuuuuuuuuugugg

SEQ ID NO: 627067 - RNA, 23 nt, Human
aagcaaauauagccauuguuuau

SEQ ID NO: 627068 - RNA, 21 nt, Human
aagcagagaauggagaucaag

SEQ ID NO: 627069 - RNA, 21 nt, Human
acacaaagucugugcuccccg

SEQ ID NO: 627070 - RNA, 22 nt, Human
acagggcacuccccagggggag

SEQ ID NO: 627071 - RNA, 18 nt, Human
accaaguucuuccagccc

SEQ ID NO: 627072 - RNA, 19 nt, Human
accacacuuggggcucaug

SEQ ID NO: 627073 - RNA, 20 nt, Human
acugugcccccagaucuuca

SEQ ID NO: 627074 - RNA, 19 nt, Human
acugugugccaggugcugg

SEQ ID NO: 627075 - RNA, 19 nt, Human
agaauggagaucaagccca

SEQ ID NO: 627076 - RNA, 18 nt, Human
agaggagacucagguuug

SEQ ID NO: 627077 - RNA, 23 nt, Human
agaggcccuggggucuccgcucc

SEQ ID NO: 627078 - RNA, 20 nt, Human
agcacuuugagaggcugagg

SEQ ID NO: 627079 - RNA, 21 nt, Human
aggaguucgagaccagcaggc

SEQ ID NO: 627080 - RNA, 21 nt, Human
aggcaagcagaucaccugagg

SEQ ID NO: 627081 - RNA, 22 nt, Human
aggcaagcagaucaccugaggg

SEQ ID NO: 627082 - RNA, 22 nt, Human
aggcaagcagaucaccugaggu

SEQ ID NO: 627083 - RNA, 18 nt, Human
aggcagacaguauuacug

SEQ ID NO: 627084 - RNA, 19 nt, Human
aggcaguguaggcccucgg

SEQ ID NO: 627085 - RNA, 23 nt, Human
aggccagcaaggguuccuaagca

SEQ ID NO: 627086 - RNA, 18 nt, Human
aggcuuugaugaacuggg

SEQ ID NO: 627087 - RNA, 24 nt, Human
agggagccuggguccagcaggguu

SEQ ID NO: 627088 - RNA, 20 nt, Human
agggaggagcgucccagcuc

SEQ ID NO: 627089 - RNA, 19 nt, Human
agggccagaggcucagcaa

SEQ ID NO: 627090 - RNA, 21 nt, Human
aucagauuggaggccuccuga

SEQ ID NO: 627091 - RNA, 27 nt, Human
aucucacucuuccccacccggccccag

SEQ ID NO: 627092 - RNA, 21 nt, Human
caaaagcugguguuucccagg

SEQ ID NO: 627093 - RNA, 21 nt, Human
caaagcagagaauggagauca

SEQ ID NO: 627094 - RNA, 26 nt, Human
caaagcagagaauggagaucaagccc

SEQ ID NO: 627095 - RNA, 24 nt, Human
caagcagaucaccugagguaagga

SEQ ID NO: 627096 - RNA, 23 nt, Human
caagcccaggcccacgcuggccu

SEQ ID NO: 627097 - RNA, 24 nt, Human
caaggguuccuaagcacggcgugg

SEQ ID NO: 627098 - RNA, 22 nt, Human
caauugugcugagacuguucuc

SEQ ID NO: 627099 - RNA, 22 nt, Human
cacaccuguaaucccagcacuu

SEQ ID NO: 627100 - RNA, 24 nt, Human
cacaccuguaaucccagcacuuug

SEQ ID NO: 627101 - RNA, 21 nt, Human
cacauucacccuaacacaucc

SEQ ID NO: 627102 - RNA, 24 nt, Human
caccccaucagagaagggccucca

SEQ ID NO: 627103 - RNA, 21 nt, Human
caccggagggagggcgcuggu

SEQ ID NO: 627104 - RNA, 22 nt, Human
caccugccuccagcaucagaau

SEQ ID NO: 627105 - RNA, 18 nt, Human
caccuguaaucccagcac

SEQ ID NO: 627106 - RNA, 23 nt, Human
caccuguaaucccagcacuuuga

SEQ ID NO: 627107 - RNA, 25 nt, Human
cacuggauggagccacuggggcagc

SEQ ID NO: 627108 - RNA, 24 nt, Human
cagaucaccugagguaaggaguuc

SEQ ID NO: 627109 - RNA, 21 nt, Human
cagcaaagcagagaauggaga

SEQ ID NO: 627110 - RNA, 23 nt, Human
cagcacuuugagaggcugaggca

SEQ ID NO: 627111 - RNA, 25 nt, Human
cagcacuuugagaggcugaggcaag

SEQ ID NO: 627112 - RNA, 19 nt, Human
caggcacuuacugugugcc

SEQ ID NO: 627113 - RNA, 18 nt, Human
caggccagggcaagcugg

SEQ ID NO: 627114 - RNA, 20 nt, Human
cauucacccuaacacauccc

SEQ ID NO: 627115 - RNA, 22 nt, Human
ccacacuuggggcucauguggc

SEQ ID NO: 627116 - RNA, 21 nt, Human
ccacccgcaggcugaugcagg

SEQ ID NO: 627117 - RNA, 23 nt, Human
ccacuggauggagccacuggggc

SEQ ID NO: 627118 - RNA, 22 nt, Human
ccagaggccacccgcaggcuga

SEQ ID NO: 627119 - RNA, 26 nt, Human
ccagcuccuucaacagggcuccaggg

SEQ ID NO: 627120 - RNA, 23 nt, Human
ccaggcacuuacugugugccagg

SEQ ID NO: 627121 - RNA, 21 nt, Human
ccaucucacucuuccccaccc

SEQ ID NO: 627122 - RNA, 18 nt, Human
cccaaaagcugguguuuc

SEQ ID NO: 627123 - RNA, 23 nt, Human
cccagcucggggcuaccacccac

SEQ ID NO: 627124 - RNA, 19 nt, Human
cccaguuucuuccagacca

SEQ ID NO: 627125 - RNA, 25 nt, Human
cccaucuguaaaauggucauaaaaa

SEQ ID NO: 627126 - RNA, 18 nt, Human
cccaucuuggccgggcgc

SEQ ID NO: 627127 - RNA, 20 nt, Human
ccccaaaagcugguguuucc

SEQ ID NO: 627128 - RNA, 24 nt, Human
ccccaacaguuugaauccuccuug

SEQ ID NO: 627129 - RNA, 22 nt, Human
ccgcaggcugaugcagggccgc

SEQ ID NO: 627130 - RNA, 25 nt, Human
ccgcaggcugaugcagggccgccgu

SEQ ID NO: 627131 - RNA, 18 nt, Human
ccuaagcacggcguggga

SEQ ID NO: 627132 - RNA, 19 nt, Human
ccuccuggugacucagccc

SEQ ID NO: 627133 - RNA, 19 nt, Human
ccuccuuggggcgcuggaa

SEQ ID NO: 627134 - RNA, 22 nt, Human
ccucggccacagcucccuccug

SEQ ID NO: 627135 - RNA, 23 nt, Human
ccucggucccugcagaccugggg

SEQ ID NO: 627136 - RNA, 19 nt, Human
ccuggguccagcaggguuc

SEQ ID NO: 627137 - RNA, 22 nt, Human
ccuuggggcgcuggaaugaggc

SEQ ID NO: 627138 - RNA, 18 nt, Human
cggaggauccagaggcca

SEQ ID NO: 627139 - RNA, 23 nt, Human
cgggcgcgguggcacaccuguaa

SEQ ID NO: 627140 - RNA, 23 nt, Human
cgguggcacaccuguaaucccag

SEQ ID NO: 627141 - RNA, 25 nt, Human
cguuggccaggugugggaggcaugc

SEQ ID NO: 627142 - RNA, 18 nt, Human
cuagcuggcaccugaggc

SEQ ID NO: 627143 - RNA, 21 nt, Human
cucaucuugaucacggcuaug

SEQ ID NO: 627144 - RNA, 22 nt, Human
cuccagccccggccuugaggcu

SEQ ID NO: 627145 - RNA, 20 nt, Human
cuccagggacccaggccacc

SEQ ID NO: 627146 - RNA, 23 nt, Human
cuccagggacccaggccaccaag

SEQ ID NO: 627147 - RNA, 19 nt, Human
cugcugcuccuagcugggc

SEQ ID NO: 627148 - RNA, 23 nt, Human
cugugcuccccgucaccugccuc

SEQ ID NO: 627149 - RNA, 18 nt, Human
cugugugccaggugcugg

SEQ ID NO: 627150 - RNA, 24 nt, Human
cuuccagccccaacaguuugaauc

SEQ ID NO: 627151 - RNA, 23 nt, Human
cuucggggucuaccugaaggugu

SEQ ID NO: 627152 - RNA, 22 nt, Human
cuuggccgggcgcgguggcaca

SEQ ID NO: 627153 - RNA, 22 nt, Human
gaggaaggaaccauagcuccug

SEQ ID NO: 627154 - RNA, 19 nt, Human
gaggccagcaaggguuccu

SEQ ID NO: 627155 - RNA, 24 nt, Human
gaucaccugagguaaggaguucga

SEQ ID NO: 627156 - RNA, 18 nt, Human
gaucacggcuauguucug

SEQ ID NO: 627157 - RNA, 18 nt, Human
gcacacuuggagcucagu

SEQ ID NO: 627158 - RNA, 22 nt, Human
gcaccuacuggucccagguaac

SEQ ID NO: 627159 - RNA, 18 nt, Human
gccacaagccaugggccc

SEQ ID NO: 627160 - RNA, 22 nt, Human
gccaccaaguucuuccagcccc

SEQ ID NO: 627161 - RNA, 18 nt, Human
gccugguguggcauccgg

SEQ ID NO: 627162 - RNA, 24 nt, Human
gcgguggcacaccuguaaucccag

SEQ ID NO: 627163 - RNA, 23 nt, Human
gcuggccucgucccagccguccu

SEQ ID NO: 627164 - RNA, 18 nt, Human
ggagacucagguuuggau

SEQ ID NO: 627165 - RNA, 21 nt, Human
ggagggaggagcgucccagcu

SEQ ID NO: 627166 - RNA, 22 nt, Human
ggagggaggagcgucccagcuc

SEQ ID NO: 627167 - RNA, 19 nt, Human
ggccagaggcucagcaaag

SEQ ID NO: 627168 - RNA, 18 nt, Human
ggccucggcguccucggc

SEQ ID NO: 627169 - RNA, 20 nt, Human
ggcguccucggccacagcuc

SEQ ID NO: 627170 - RNA, 23 nt, Human
ggcuguggaggaggggcccccgg

SEQ ID NO: 627171 - RNA, 20 nt, Human
gggcacacuuggagcucagu

SEQ ID NO: 627172 - RNA, 20 nt, Human
ggggcuaccacccacuccag

SEQ ID NO: 627173 - RNA, 22 nt, Human
ggucucguguugcugcugcucc

SEQ ID NO: 627174 - RNA, 21 nt, Human
gguggcacaccuguaauccca

SEQ ID NO: 627175 - RNA, 24 nt, Human
gguggcacaccuguaaucccagca

SEQ ID NO: 627176 - RNA, 20 nt, Human
ggugugggguggcucccaaa

SEQ ID NO: 627177 - RNA, 18 nt, Human
guggcuauacugugcccc

SEQ ID NO: 627178 - RNA, 21 nt, Human
uaccugaagguguguuccugg

SEQ ID NO: 627179 - RNA, 18 nt, Human
uacugugugccaggugcu

SEQ ID NO: 627180 - RNA, 18 nt, Human
uagcuggcaccugaggca

SEQ ID NO: 627181 - RNA, 25 nt, Human
uaggcuuugaugaacugggggaagg

SEQ ID NO: 627182 - RNA, 18 nt, Human
uaggugguaggaggggca

SEQ ID NO: 627183 - RNA, 19 nt, Human
uauacugugcccccagauc

SEQ ID NO: 627184 - RNA, 21 nt, Human
uauccugaaaucucggcaggg

SEQ ID NO: 627185 - RNA, 20 nt, Human
ucaccccaucagagaagggc

SEQ ID NO: 627186 - RNA, 20 nt, Human
ucagcccggcgcgggccgcc

SEQ ID NO: 627187 - RNA, 25 nt, Human
ucaguggcuggggcacacuuggagc

SEQ ID NO: 627188 - RNA, 20 nt, Human
uccacaccuccuccugccug

SEQ ID NO: 627189 - RNA, 22 nt, Human
uccagauccgccgccagggccc

SEQ ID NO: 627190 - RNA, 19 nt, Human
uccagcaggguucgggcca

SEQ ID NO: 627191 - RNA, 20 nt, Human
uccagcaggguucgggccac

SEQ ID NO: 627192 - RNA, 21 nt, Human
ucccaucucacucuuccccac

SEQ ID NO: 627193 - RNA, 18 nt, Human
uccccagggggaggggcc

SEQ ID NO: 627194 - RNA, 23 nt, Human
uccuucaacagggcuccagggac

SEQ ID NO: 627195 - RNA, 22 nt, Human
ucucggcagggccagaggcuca

SEQ ID NO: 627196 - RNA, 20 nt, Human
ucucguguugcugcugcucc

SEQ ID NO: 627197 - RNA, 20 nt, Human
ugaacugccacaagccaugg

SEQ ID NO: 627198 - RNA, 19 nt, Human
ugaagaaacggcuucggac

SEQ ID NO: 627199 - RNA, 18 nt, Human
ugaagguguguuccuggg

SEQ ID NO: 627200 - RNA, 18 nt, Human
ugagaggcccuggggucu

SEQ ID NO: 627201 - RNA, 24 nt, Human
ugagaggcugaggcaagcagauca

SEQ ID NO: 627202 - RNA, 20 nt, Human
ugaggcaagcagaucaccug

SEQ ID NO: 627203 - RNA, 23 nt, Human
ugaggcagacaguauuacugguc

SEQ ID NO: 627204 - RNA, 22 nt, Human
ugagguaaggaguucgagacca

SEQ ID NO: 627205 - RNA, 25 nt, Human
ugccacaagccaugggcccccagca

SEQ ID NO: 627206 - RNA, 30 nt, Human
ugccuccagcaucagaaugucaccagcucu

SEQ ID NO: 627207 - RNA, 20 nt, Human
ugccuguccuccugcgcuca

SEQ ID NO: 627208 - RNA, 20 nt, Human
ugcugcugcuccuagcuggg

SEQ ID NO: 627209 - RNA, 20 nt, Human
ugcugggacacgagccuccg

SEQ ID NO: 627210 - RNA, 21 nt, Human
uggaggaaggggacacgggcc

SEQ ID NO: 627211 - RNA, 22 nt, Human
uggcacaccuguaaucccagca

SEQ ID NO: 627212 - RNA, 19 nt, Human
uggccgggcgcgguggcac

SEQ ID NO: 627213 - RNA, 24 nt, Human
uggcuggggcacacuuggagcuca

SEQ ID NO: 627214 - RNA, 19 nt, Human
uggcuguggaggaggggcc

SEQ ID NO: 627215 - RNA, 19 nt, Human
ugggaggaggcaguguagg

SEQ ID NO: 627216 - RNA, 24 nt, Human
ugggaggaggcaguguaggcccuc

SEQ ID NO: 627217 - RNA, 20 nt, Human
ugggcacauucacccuaacc

SEQ ID NO: 627218 - RNA, 18 nt, Human
ugggggaagguagaugca

SEQ ID NO: 627219 - RNA, 21 nt, Human
uggucucaugggaugaagaaa

SEQ ID NO: 627220 - RNA, 18 nt, Human
uguggaggaggggccccc

SEQ ID NO: 627221 - RNA, 21 nt, Human
uguucugaggccagcaagggu

SEQ ID NO: 627222 - RNA, 25 nt, Human
uugagaggcugaggcaagcagauca

SEQ ID NO: 627223 - RNA, 19 nt, Human
uuggaugagcugcaggcca

SEQ ID NO: 627224 - RNA, 18 nt, Human
uuuuuuuuuuuuuuuuug

SEQ ID NO: 627225 - RNA, 23 nt, Human
uuuuuuuuuuuuuuuuugacaag

SEQ ID NO: 627226 - RNA, 21 nt, Human
acaucacccgauggccaugcc

SEQ ID NO: 627227 - RNA, 23 nt, Human
acgcccaguccaccccaccuggc

SEQ ID NO: 627228 - RNA, 18 nt, Human
acugccgccaccaucggc

SEQ ID NO: 627229 - RNA, 24 nt, Human
aggcagugagguaggagcagcagc

SEQ ID NO: 627230 - RNA, 23 nt, Human
caaggagccaccaccauccagug

SEQ ID NO: 627231 - RNA, 20 nt, Human
cacacaugacaauacaaagu

SEQ ID NO: 627232 - RNA, 21 nt, Human
caccacaugcccugcaggagc

SEQ ID NO: 627233 - RNA, 19 nt, Human
caccuggcccuggcaggau

SEQ ID NO: 627234 - RNA, 21 nt, Human
cagagauucagccaugggugu

SEQ ID NO: 627235 - RNA, 20 nt, Human
caggagcaguagccacugcc

SEQ ID NO: 627236 - RNA, 24 nt, Human
caugacaauacaaagucaccguuu

SEQ ID NO: 627237 - RNA, 22 nt, Human
ccaagagcucagaccacugugc

SEQ ID NO: 627238 - RNA, 23 nt, Human
ccacagaggaggccaauacggag

SEQ ID NO: 627239 - RNA, 18 nt, Human
ccacugccgccaccaucg

SEQ ID NO: 627240 - RNA, 21 nt, Human
ccacugccgccaccaucggcc

SEQ ID NO: 627241 - RNA, 21 nt, Human
ccaguccaccccaccuggccc

SEQ ID NO: 627242 - RNA, 19 nt, Human
cccaagagcucagaccacu

SEQ ID NO: 627243 - RNA, 24 nt, Human
cccaagagcucagaccacugugca

SEQ ID NO: 627244 - RNA, 21 nt, Human
ccuagcgcccuugcuagcacc

SEQ ID NO: 627245 - RNA, 26 nt, Human
ccucugaggaccaccacgcccagucc

SEQ ID NO: 627246 - RNA, 20 nt, Human
ccuggccccuacccgugacc

SEQ ID NO: 627247 - RNA, 25 nt, Human
cgcgggcuggccugcucucccccug

SEQ ID NO: 627248 - RNA, 18 nt, Human
cggccuggaggggccugg

SEQ ID NO: 627249 - RNA, 19 nt, Human
cuggaggggccuggccccu

SEQ ID NO: 627250 - RNA, 20 nt, Human
gacaggcagugagguaggag

SEQ ID NO: 627251 - RNA, 24 nt, Human
gccccagagaggcuggggacagca

SEQ ID NO: 627252 - RNA, 18 nt, Human
gggcuggccugcucuggg

SEQ ID NO: 627253 - RNA, 23 nt, Human
gugcaggccagugacggccugga

SEQ ID NO: 627254 - RNA, 21 nt, Human
uacccgugacuucacgugccc

SEQ ID NO: 627255 - RNA, 19 nt, Human
uagcgcccuugcuagcacc

SEQ ID NO: 627256 - RNA, 22 nt, Human
uccaccccaccuggcccuggca

SEQ ID NO: 627257 - RNA, 18 nt, Human
ugagaacaggaagccgca

SEQ ID NO: 627258 - RNA, 18 nt, Human
ugagccacagaggaggcc

SEQ ID NO: 627259 - RNA, 23 nt, Human
ugaggaccaccacgcccagucca

SEQ ID NO: 627260 - RNA, 18 nt, Human
ugagguaggagcagcagc

SEQ ID NO: 627261 - RNA, 18 nt, Human
uggcaggaucaccacaug

SEQ ID NO: 627262 - RNA, 21 nt, Human
aaauuuccagccucuuucauu

SEQ ID NO: 627263 - RNA, 22 nt, Human
aacccuguaacauacaguaacu

SEQ ID NO: 627264 - RNA, 24 nt, Human
aaggccuguaagcaaaauuccuuc

SEQ ID NO: 627265 - RNA, 21 nt, Human
acaaaaacuugugcuaaaggc

SEQ ID NO: 627266 - RNA, 21 nt, Human
agcuagaaacugguguuccca

SEQ ID NO: 627267 - RNA, 22 nt, Human
agcucguuuaugccaaaaccuc

SEQ ID NO: 627268 - RNA, 24 nt, Human
aggaagugguuuucgacagccagg

SEQ ID NO: 627269 - RNA, 21 nt, Human
caaauacggguuauuuagcug

SEQ ID NO: 627270 - RNA, 26 nt, Human
caacagcacguggcaaauuacgagag

SEQ ID NO: 627271 - RNA, 21 nt, Human
caacucacaaaaacuugugcu

SEQ ID NO: 627272 - RNA, 23 nt, Human
caacucacaaaaacuugugcuaa

SEQ ID NO: 627273 - RNA, 19 nt, Human
cacuuuuucaucugauuug

SEQ ID NO: 627274 - RNA, 22 nt, Human
caggcaucuaauaaauuucuau

SEQ ID NO: 627275 - RNA, 20 nt, Human
ccacagaaauugcaacucac

SEQ ID NO: 627276 - RNA, 25 nt, Human
ccugcaauuaugacaccauguaaac

SEQ ID NO: 627277 - RNA, 20 nt, Human
ccugcaauuaugacaccauu

SEQ ID NO: 627278 - RNA, 19 nt, Human
ccugugaauaucaaauuca

SEQ ID NO: 627279 - RNA, 25 nt, Human
cuaaaaccucugcccugaugaggca

SEQ ID NO: 627280 - RNA, 21 nt, Human
cuaaggaauuuacaagcaaau

SEQ ID NO: 627281 - RNA, 18 nt, Human
cuacuagaaagcuccaca

SEQ ID NO: 627282 - RNA, 19 nt, Human
cuagaaagcuccacacuug

SEQ ID NO: 627283 - RNA, 23 nt, Human
cucacaccauacugacuaaaacc

SEQ ID NO: 627284 - RNA, 24 nt, Human
cucguuuaugccaaaaccuccagg

SEQ ID NO: 627285 - RNA, 21 nt, Human
cucuuucauuucauuggucaa

SEQ ID NO: 627286 - RNA, 24 nt, Human
cugcauggucccugaaccaacuaa

SEQ ID NO: 627287 - RNA, 22 nt, Human
cugcccugaugaggcacagcug

SEQ ID NO: 627288 - RNA, 21 nt, Human
gagauugacuugccacagaaa

SEQ ID NO: 627289 - RNA, 19 nt, Human
gcaaacaugacacacaaau

SEQ ID NO: 627290 - RNA, 19 nt, Human
gguuuucgacagccaggac

SEQ ID NO: 627291 - RNA, 29 nt, Human
uaacaagucucacuucccaucagugauuu

SEQ ID NO: 627292 - RNA, 20 nt, Human
uaacauacaguaacuugcug

SEQ ID NO: 627293 - RNA, 22 nt, Human
uaccagauuccccguuguaucc

SEQ ID NO: 627294 - RNA, 18 nt, Human
uaugaaggacaccuacua

SEQ ID NO: 627295 - RNA, 24 nt, Human
ucagugauuucucagcaaaggaaa

SEQ ID NO: 627296 - RNA, 23 nt, Human
ucccauauuaaugagacaaagcg

SEQ ID NO: 627297 - RNA, 24 nt, Human
ucgacagccaggacaacuugugac

SEQ ID NO: 627298 - RNA, 25 nt, Human
ucguaagauccuguuucacuugucc

SEQ ID NO: 627299 - RNA, 18 nt, Human
ucguuggugagccacuca

SEQ ID NO: 627300 - RNA, 24 nt, Human
ucuuaaggugguaacauuuuaugg

SEQ ID NO: 627301 - RNA, 20 nt, Human
ugaauggcuuguucugaggu

SEQ ID NO: 627302 - RNA, 24 nt, Human
ugcagacacagggcacucugcaug

SEQ ID NO: 627303 - RNA, 24 nt, Human
ugcauacauuuacacgugcaugca

SEQ ID NO: 627304 - RNA, 20 nt, Human
ugccaaaaccuccaggcauu

SEQ ID NO: 627305 - RNA, 19 nt, Human
uucaccagaauauuugcaa

SEQ ID NO: 627306 - RNA, 22 nt, Human
uugugacuuuagauuucguugg

SEQ ID NO: 627307 - RNA, 22 nt, Human
uuuaagaacaucuaaaggugaa

SEQ ID NO: 627308 - RNA, 28 nt, Human
uuuaugccaaaaccuccaggcaucuaau

SEQ ID NO: 627309 - RNA, 18 nt, Human
uuuuuuuuuuuuuuucug

SEQ ID NO: 627310 - RNA, 24 nt, Human
aaccaaguacaaagacacacccuc

SEQ ID NO: 627311 - RNA, 18 nt, Human
aagcccccuggagccccg

SEQ ID NO: 627312 - RNA, 21 nt, Human
aaggccaaggugugugggaug

SEQ ID NO: 627313 - RNA, 21 nt, Human
aauaaaaaguggcuuccugga

SEQ ID NO: 627314 - RNA, 18 nt, Human
acacacccaccucuagcc

SEQ ID NO: 627315 - RNA, 24 nt, Human
acagacaaacgucuacacccugcc

SEQ ID NO: 627316 - RNA, 18 nt, Human
accaaguacaaagacaca

SEQ ID NO: 627317 - RNA, 25 nt, Human
accagcccaucccacccccagcccc

SEQ ID NO: 627318 - RNA, 19 nt, Human
accccuccuugcuugucac

SEQ ID NO: 627319 - RNA, 22 nt, Human
accuccuggcuaggcucacuuu

SEQ ID NO: 627320 - RNA, 18 nt, Human
accucucuuucucuacca

SEQ ID NO: 627321 - RNA, 21 nt, Human
agcagugggaaucccgggcac

SEQ ID NO: 627322 - RNA, 22 nt, Human
agcccaucccacccccagcccc

SEQ ID NO: 627323 - RNA, 18 nt, Human
agccgcggugcgccagcc

SEQ ID NO: 627324 - RNA, 21 nt, Human
agccggcgaaucgcacagaca

SEQ ID NO: 627325 - RNA, 20 nt, Human
agcugcagcgcggcagcggc

SEQ ID NO: 627326 - RNA, 19 nt, Human
aggagcucagcccaccaac

SEQ ID NO: 627327 - RNA, 21 nt, Human
aggcgcccgggugcccagagc

SEQ ID NO: 627328 - RNA, 18 nt, Human
aucccacccccagcccca

SEQ ID NO: 627329 - RNA, 24 nt, Human
aucccacccccagccccagccuaa

SEQ ID NO: 627330 - RNA, 25 nt, Human
caaaccacucucgugcaaauaccca

SEQ ID NO: 627331 - RNA, 24 nt, Human
caagcucggggcgccucagaacgg

SEQ ID NO: 627332 - RNA, 19 nt, Human
caaguacaaagacacaccc

SEQ ID NO: 627333 - RNA, 21 nt, Human
caaguacaaagacacacccuc

SEQ ID NO: 627334 - RNA, 22 nt, Human
caauaaaaaguggcuuccugga

SEQ ID NO: 627335 - RNA, 19 nt, Human
caccgggcaaggcgcccgg

SEQ ID NO: 627336 - RNA, 18 nt, Human
caccuccuggcuaggcuc

SEQ ID NO: 627337 - RNA, 19 nt, Human
cacuuggcuugcagaaggc

SEQ ID NO: 627338 - RNA, 21 nt, Human
cagacaaacgucuacacccug

SEQ ID NO: 627339 - RNA, 22 nt, Human
caguccaacgcgcgcacacacc

SEQ ID NO: 627340 - RNA, 18 nt, Human
cagugcuuccuaugagga

SEQ ID NO: 627341 - RNA, 22 nt, Human
ccacccccagccccagccuaac

SEQ ID NO: 627342 - RNA, 22 nt, Human
ccagcagugggaaucccgggca

SEQ ID NO: 627343 - RNA, 23 nt, Human
ccagcccaucccacccccagccc

SEQ ID NO: 627344 - RNA, 24 nt, Human
ccagcccaucccacccccagcccc

SEQ ID NO: 627345 - RNA, 19 nt, Human
ccaucccacccccagcccc

SEQ ID NO: 627346 - RNA, 21 nt, Human
ccaucccacccccagccccag

SEQ ID NO: 627347 - RNA, 18 nt, Human
cccacccccagccccagc

SEQ ID NO: 627348 - RNA, 23 nt, Human
cccacccccagccccagccuaac

SEQ ID NO: 627349 - RNA, 21 nt, Human
ccccaaacaccuccuggcuag

SEQ ID NO: 627350 - RNA, 23 nt, Human
ccccagccccagccuaacacgcu

SEQ ID NO: 627351 - RNA, 19 nt, Human
ccccauggucacccucucc

SEQ ID NO: 627352 - RNA, 19 nt, Human
cccccagccccagccuaac

SEQ ID NO: 627353 - RNA, 18 nt, Human
ccccuggagccccggcuc

SEQ ID NO: 627354 - RNA, 20 nt, Human
cccgagcugcagcgcggcag

SEQ ID NO: 627355 - RNA, 30 nt, Human
cccgcggccgcgccgccgcagcccgggacc

SEQ ID NO: 627356 - RNA, 21 nt, Human
cccgcgucguuugcgcagccg

SEQ ID NO: 627357 - RNA, 18 nt, Human
cccucagugcuuccuaug

SEQ ID NO: 627358 - RNA, 23 nt, Human
cccuccaccucccugauccccac

SEQ ID NO: 627359 - RNA, 19 nt, Human
cccucucuguggacauccc

SEQ ID NO: 627360 - RNA, 21 nt, Human
cccuggagccccggcucaggc

SEQ ID NO: 627361 - RNA, 18 nt, Human
ccggcuaaggaugcggcc

SEQ ID NO: 627362 - RNA, 21 nt, Human
ccgggcaaggcgcccgggugc

SEQ ID NO: 627363 - RNA, 19 nt, Human
ccucggcccuucccucucu

SEQ ID NO: 627364 - RNA, 22 nt, Human
ccugcagaaggcucaagucccc

SEQ ID NO: 627365 - RNA, 22 nt, Human
ccugcuuuggugcagccugugc

SEQ ID NO: 627366 - RNA, 20 nt, Human
ccuguagccaaucuagccgc

SEQ ID NO: 627367 - RNA, 25 nt, Human
ccuuaacaccgcaguaaucccucug

SEQ ID NO: 627368 - RNA, 21 nt, Human
cgcacagacaaacgucuacac

SEQ ID NO: 627369 - RNA, 19 nt, Human
cgccaguccgcugcgugcg

SEQ ID NO: 627370 - RNA, 20 nt, Human
cgccgugcaccgggcaaggc

SEQ ID NO: 627371 - RNA, 26 nt, Human
cgccucagaacggugacugcggcagg

SEQ ID NO: 627372 - RNA, 22 nt, Human
cgcgauagagccccaaacaccu

SEQ ID NO: 627373 - RNA, 22 nt, Human
cgcgcgcacacacccaccucua

SEQ ID NO: 627374 - RNA, 18 nt, Human
cgcguccuucccggaguc

SEQ ID NO: 627375 - RNA, 20 nt, Human
cggcagcggcggccacgacc

SEQ ID NO: 627376 - RNA, 18 nt, Human
cggcccggagcgcgccgg

SEQ ID NO: 627377 - RNA, 20 nt, Human
cgggcacugagcuugccauc

SEQ ID NO: 627378 - RNA, 18 nt, Human
cgugcaaauacccagcag

SEQ ID NO: 627379 - RNA, 23 nt, Human
cuaaaagcucuugcccagcuugg

SEQ ID NO: 627380 - RNA, 18 nt, Human
cuccaccucccugauccc

SEQ ID NO: 627381 - RNA, 23 nt, Human
cucggcccuucccucucugugga

SEQ ID NO: 627382 - RNA, 23 nt, Human
cucuagccaguccugcaccccgc

SEQ ID NO: 627383 - RNA, 24 nt, Human
cucugauacucaauuccaccuuua

SEQ ID NO: 627384 - RNA, 26 nt, Human
cugcgugcgccccgccaaggccgcuc

SEQ ID NO: 627385 - RNA, 19 nt, Human
cuugcagaaggccaaggug

SEQ ID NO: 627386 - RNA, 20 nt, Human
cuuguggcuccugggagucc

SEQ ID NO: 627387 - RNA, 23 nt, Human
cuuucuaaauccacaaagcugga

SEQ ID NO: 627388 - RNA, 18 nt, Human
gaacuuucucaccagccc

SEQ ID NO: 627389 - RNA, 22 nt, Human
gagcacggaaccgcuccgcggg

SEQ ID NO: 627390 - RNA, 25 nt, Human
gagcacggaaccgcuccgcggggga

SEQ ID NO: 627391 - RNA, 19 nt, Human
gagggaagcaaccccuccu

SEQ ID NO: 627392 - RNA, 21 nt, Human
gauggaugagguagggaggga

SEQ ID NO: 627393 - RNA, 23 nt, Human
gcacagacaaacgucuacacccu

SEQ ID NO: 627394 - RNA, 20 nt, Human
gcaguuuuuuaauuguugac

SEQ ID NO: 627395 - RNA, 22 nt, Human
gccagagcacggaaccgcuccg

SEQ ID NO: 627396 - RNA, 18 nt, Human
gccgcgccgccgcagccc

SEQ ID NO: 627397 - RNA, 24 nt, Human
gcgggggagucuccuuucucccua

SEQ ID NO: 627398 - RNA, 25 nt, Human
gcggugcgccagccgccgugcaccg

SEQ ID NO: 627399 - RNA, 22 nt, Human
gcgugcgccccgccaaggccgc

SEQ ID NO: 627400 - RNA, 21 nt, Human
ggagccccggcucaggcugcg

SEQ ID NO: 627401 - RNA, 19 nt, Human
ggcagcagaggcagcuaaa

SEQ ID NO: 627402 - RNA, 20 nt, Human
ggcccggagcgcgccggacu

SEQ ID NO: 627403 - RNA, 21 nt, Human
ggcgccggaggcuucgaagcc

SEQ ID NO: 627404 - RNA, 18 nt, Human
uaaaagcucuugcccagc

SEQ ID NO: 627405 - RNA, 18 nt, Human
uaaggaugcggcccggag

SEQ ID NO: 627406 - RNA, 22 nt, Human
uagugccuugaccuugcagaac

SEQ ID NO: 627407 - RNA, 19 nt, Human
ucacacugcaacacugagg

SEQ ID NO: 627408 - RNA, 23 nt, Human
ucacacugucccuccaccucccu

SEQ ID NO: 627409 - RNA, 22 nt, Human
ucacaguaaagggcagcagagg

SEQ ID NO: 627410 - RNA, 19 nt, Human
ucaccagcccaucccaccc

SEQ ID NO: 627411 - RNA, 18 nt, Human
ucagcccaccaacagucu

SEQ ID NO: 627412 - RNA, 18 nt, Human
uccaccucccugaucccc

SEQ ID NO: 627413 - RNA, 21 nt, Human
ucccacccccagccccagccu

SEQ ID NO: 627414 - RNA, 20 nt, Human
ucccaggaauggcaggcucu

SEQ ID NO: 627415 - RNA, 21 nt, Human
uccccagucuuugggggcagc

SEQ ID NO: 627416 - RNA, 23 nt, Human
uccccgcggccgcgccgccgcag

SEQ ID NO: 627417 - RNA, 21 nt, Human
uccccugcagaaggcucaagu

SEQ ID NO: 627418 - RNA, 19 nt, Human
ucccgcggcagcgccaguc

SEQ ID NO: 627419 - RNA, 18 nt, Human
ucccugauccccacauuc

SEQ ID NO: 627420 - RNA, 21 nt, Human
ucuaccaggugaagggcaaug

SEQ ID NO: 627421 - RNA, 21 nt, Human
ucuccugccagcagugggaau

SEQ ID NO: 627422 - RNA, 21 nt, Human
ucugcucggaucuccagucca

SEQ ID NO: 627423 - RNA, 18 nt, Human
ugaaaaugggccuucucc

SEQ ID NO: 627424 - RNA, 23 nt, Human
ugaaaaugggccuucuccugcca

SEQ ID NO: 627425 - RNA, 21 nt, Human
ugcagaaggcucaaguccccg

SEQ ID NO: 627426 - RNA, 24 nt, Human
ugccagcagugggaaucccgggca

SEQ ID NO: 627427 - RNA, 22 nt, Human
ugccccugcuuuggugcagccu

SEQ ID NO: 627428 - RNA, 22 nt, Human
ugcgcgauagagccccaaacac

SEQ ID NO: 627429 - RNA, 22 nt, Human
uggcaggcucuccugaaugcuu

SEQ ID NO: 627430 - RNA, 21 nt, Human
ugggauggaugagguagggag

SEQ ID NO: 627431 - RNA, 22 nt, Human
ugguuuggggucggucaccggg

SEQ ID NO: 627432 - RNA, 24 nt, Human
ugguuuggggucggucaccgggau

SEQ ID NO: 627433 - RNA, 21 nt, Human
ugucacaguaaagggcagcag

SEQ ID NO: 627434 - RNA, 23 nt, Human
ugucacaguaaagggcagcagag

SEQ ID NO: 627435 - RNA, 23 nt, Human
ugucccuccaccucccugauccc

SEQ ID NO: 627436 - RNA, 24 nt, Human
ugugcugucuucuuggcccugccu

SEQ ID NO: 627437 - RNA, 21 nt, Human
uguggcuccugggaguccugc

SEQ ID NO: 627438 - RNA, 24 nt, Human
uuccaggcuaggagcucagcccac

SEQ ID NO: 627439 - RNA, 21 nt, Human
uuccccauggucacccucucc

SEQ ID NO: 627440 - RNA, 18 nt, Human
uucgaagcccccuggagc

SEQ ID NO: 627441 - RNA, 20 nt, Human
uucgaagcccccuggagccc

SEQ ID NO: 627442 - RNA, 23 nt, Human
uucgaagcccccuggagccccgg

SEQ ID NO: 627443 - RNA, 21 nt, Human
uucucccuagcucuccguugg

SEQ ID NO: 627444 - RNA, 19 nt, Human
uuggaacugaaggcuuccu

SEQ ID NO: 627445 - RNA, 23 nt, Human
uuggcuugcagaaggccaaggug

SEQ ID NO: 627446 - RNA, 19 nt, Human
uuugcuugcuauuucugac

SEQ ID NO: 627447 - RNA, 20 nt, Human
uuuuuuuuuuuuuaaaggaa

SEQ ID NO: 627448 - RNA, 20 nt, Human
uuuuuuuuuuuuuuaaagga

SEQ ID NO: 627449 - RNA, 22 nt, Human
uuuuuuuuuuuuuuuuuaaagg

SEQ ID NO: 627450 - RNA, 20 nt, Human
aaaaaaaccaguucuacaaa

SEQ ID NO: 627451 - RNA, 24 nt, Human
aaaaacugcuugcuauaagaaaau

SEQ ID NO: 627452 - RNA, 22 nt, Human
aaaaaugcuuuguuauuauaau

SEQ ID NO: 627453 - RNA, 20 nt, Human
aaaacaaauguuacauccuc

SEQ ID NO: 627454 - RNA, 19 nt, Human
aaacaaauguuacauccuc

SEQ ID NO: 627455 - RNA, 25 nt, Human
aaaucauaagcaaaacauuuagaac

SEQ ID NO: 627456 - RNA, 24 nt, Human
aaucauaagcaaaacauuuagaaa

SEQ ID NO: 627457 - RNA, 23 nt, Human
agaaaaaaaaccaguucuacaaa

SEQ ID NO: 627458 - RNA, 24 nt, Human
auauggcccaggcuaauuauacca

SEQ ID NO: 627459 - RNA, 18 nt, Human
caaaaauaaaugagaaaa

SEQ ID NO: 627460 - RNA, 24 nt, Human
cacaacaccuuacaaaaaucuuaa

SEQ ID NO: 627461 - RNA, 20 nt, Human
ccauuacaaauguacacaac

SEQ ID NO: 627462 - RNA, 21 nt, Human
ccuaucaaauucccuuuuaga

SEQ ID NO: 627463 - RNA, 33 nt, Human
cuacugaauugacuucuuaauagaaucauauug

SEQ ID NO: 627464 - RNA, 26 nt, Human
cuauauaaauugauauacaugcuacu

SEQ ID NO: 627465 - RNA, 30 nt, Human
gagaaaaaaaaccaguucuacaaaaaugcu

SEQ ID NO: 627466 - RNA, 18 nt, Human
uaauacaugacaaggguu

SEQ ID NO: 627467 - RNA, 24 nt, Human
uacaugacaaggguuauaaagcaa

SEQ ID NO: 627468 - RNA, 18 nt, Human
uaccuaucuauauaaauu

SEQ ID NO: 627469 - RNA, 20 nt, Human
uagaacaaauguaugaacac

SEQ ID NO: 627470 - RNA, 20 nt, Human
uagcaggauaaaucauaagc

SEQ ID NO: 627471 - RNA, 25 nt, Human
uaucacaaaaguccuaucauggguu

SEQ ID NO: 627472 - RNA, 24 nt, Human
uccuagguccagaagcugcagccc

SEQ ID NO: 627473 - RNA, 21 nt, Human
ucuacaaaaaugcuuuguuau

SEQ ID NO: 627474 - RNA, 23 nt, Human
ugaaccacauuaaauaaaaauuc

SEQ ID NO: 627475 - RNA, 26 nt, Human
ugagaaaaaaaaccaguucuacaaaa

SEQ ID NO: 627476 - RNA, 24 nt, Human
ugccaaagaacaguauucaacaaa

SEQ ID NO: 627477 - RNA, 20 nt, Human
ugccucaaucauccaaaagc

SEQ ID NO: 627478 - RNA, 19 nt, Human
uuaaaucaaguuuaccuau

SEQ ID NO: 627479 - RNA, 24 nt, Human
uuaaaucaaguuuaccuaucaaau

SEQ ID NO: 627480 - RNA, 24 nt, Human
uuagcaauuuuuuucauaauauaa

SEQ ID NO: 627481 - RNA, 22 nt, Human
uugaaaaaacugcuucugugcg

SEQ ID NO: 627482 - RNA, 21 nt, Human
uugaaaaaacugcuucugugg

SEQ ID NO: 627483 - RNA, 21 nt, Human
accauaccuaaauaaaaucca

SEQ ID NO: 627484 - RNA, 18 nt, Human
caaagugaugaugaaaag

SEQ ID NO: 627485 - RNA, 18 nt, Human
cagagccucagugccacu

SEQ ID NO: 627486 - RNA, 20 nt, Human
ccauaccuaaauaaaaucca

SEQ ID NO: 627487 - RNA, 19 nt, Human
ccucagugccacuuuuccc

SEQ ID NO: 627488 - RNA, 20 nt, Human
cuauaucaagaaaaugagaa

SEQ ID NO: 627489 - RNA, 24 nt, Human
gugaugaugaaaagguuagugaaa

SEQ ID NO: 627490 - RNA, 23 nt, Human
uaccuaaauaaaauccauacaac

SEQ ID NO: 627491 - RNA, 24 nt, Human
ucaaagugaugaugaaaagguuuu

SEQ ID NO: 627492 - RNA, 23 nt, Human
uuaggucaagaagcuaacuaguu

SEQ ID NO: 627493 - RNA, 19 nt, Human
uucaaagugaugaugaaaa

SEQ ID NO: 627494 - RNA, 25 nt, Human
uuuguucaaagugaugaugaaaagg

SEQ ID NO: 627495 - RNA, 27 nt, Human
uuuuuuuuuuuuuuuuuuuuuuugggg

SEQ ID NO: 627496 - RNA, 25 nt, Human
aauaaaggagcaagaucuuaaggga

SEQ ID NO: 627497 - RNA, 23 nt, Human
acaggguuaauaaaggagcaaga

SEQ ID NO: 627498 - RNA, 21 nt, Human
agcaaugccagccuaacuuua

SEQ ID NO: 627499 - RNA, 23 nt, Human
aggaagaggguaguuuggggggu

SEQ ID NO: 627500 - RNA, 20 nt, Human
cuccaaguguaaacaggaag

SEQ ID NO: 627501 - RNA, 18 nt, Human
cuggccauuagaggauaa

SEQ ID NO: 627502 - RNA, 22 nt, Human
uaaaaaagaacuuuucccucca

SEQ ID NO: 627503 - RNA, 19 nt, Human
uauuucaauaugcugcugu

SEQ ID NO: 627504 - RNA, 18 nt, Human
ugauugaauauugucauu

SEQ ID NO: 627505 - RNA, 19 nt, Human
uugggggguaggggugagu

SEQ ID NO: 627506 - RNA, 30 nt, Human
uuucccaggaagaggguaguuugggggguu

SEQ ID NO: 627507 - RNA, 21 nt, Human
aaaacguaaaaacaaaagccc

SEQ ID NO: 627508 - RNA, 21 nt, Human
aaaagcccuccccagauuccg

SEQ ID NO: 627509 - RNA, 22 nt, Human
aaaagcuaccccucacuggcuc

SEQ ID NO: 627510 - RNA, 23 nt, Human
aaaaggaagaggguugggaagaa

SEQ ID NO: 627511 - RNA, 22 nt, Human
aaacacauagagagggcuugcc

SEQ ID NO: 627512 - RNA, 18 nt, Human
aaagcccuccccagauuc

SEQ ID NO: 627513 - RNA, 20 nt, Human
aaagcuaccccucacuggcu

SEQ ID NO: 627514 - RNA, 21 nt, Human
aaaggggcgaggaggacucug

SEQ ID NO: 627515 - RNA, 19 nt, Human
aaaguucuccacauccucu

SEQ ID NO: 627516 - RNA, 20 nt, Human
aagaaugccugagaaacagc

SEQ ID NO: 627517 - RNA, 23 nt, Human
aagagccccaaacccgagggaca

SEQ ID NO: 627518 - RNA, 23 nt, Human
acaaaaaaaagaaaagcaacggu

SEQ ID NO: 627519 - RNA, 19 nt, Human
acaaagaggacauauauuu

SEQ ID NO: 627520 - RNA, 22 nt, Human
acaaagaggacauauauuugua

SEQ ID NO: 627521 - RNA, 18 nt, Human
acaagaagccccuuuccu

SEQ ID NO: 627522 - RNA, 20 nt, Human
acagcuccagaugagaaacc

SEQ ID NO: 627523 - RNA, 21 nt, Human
accaaauaccaaaacucaaac

SEQ ID NO: 627524 - RNA, 19 nt, Human
accaccuuuucuguccucu

SEQ ID NO: 627525 - RNA, 22 nt, Human
acccaccagggacacugcucgg

SEQ ID NO: 627526 - RNA, 21 nt, Human
acccugagccuuccccuucuu

SEQ ID NO: 627527 - RNA, 18 nt, Human
accuggaggugcugaagc

SEQ ID NO: 627528 - RNA, 22 nt, Human
accuggaggugcugaagccacc

SEQ ID NO: 627529 - RNA, 18 nt, Human
agaaaggggcgaggagga

SEQ ID NO: 627530 - RNA, 19 nt, Human
agaagagccccaaacccga

SEQ ID NO: 627531 - RNA, 22 nt, Human
agacacugaugcuugggauggc

SEQ ID NO: 627532 - RNA, 26 nt, Human
agacugccaucagagaugaaggcagg

SEQ ID NO: 627533 - RNA, 25 nt, Human
agagccccuucugccuccccugccc

SEQ ID NO: 627534 - RNA, 22 nt, Human
agagggaagaggggccaggagu

SEQ ID NO: 627535 - RNA, 22 nt, Human
agaugcuccaggaaagucuggg

SEQ ID NO: 627536 - RNA, 22 nt, Human
agcuacucacuucagcagccuc

SEQ ID NO: 627537 - RNA, 18 nt, Human
agcuuuguacaacaggag

SEQ ID NO: 627538 - RNA, 19 nt, Human
aggaaagucuggggguugg

SEQ ID NO: 627539 - RNA, 19 nt, Human
aggggcgaggaggacucug

SEQ ID NO: 627540 - RNA, 19 nt, Human
aggggcgaggaggacucug

SEQ ID NO: 627541 - RNA, 22 nt, Human
auggaauacugacaguggucca

SEQ ID NO: 627542 - RNA, 22 nt, Human
caaaguucuccacauccucuuc

SEQ ID NO: 627543 - RNA, 19 nt, Human
caagugacacauccagaga

SEQ ID NO: 627544 - RNA, 24 nt, Human
caagugucuuucuuuaauuagucc

SEQ ID NO: 627545 - RNA, 21 nt, Human
cacacacacaugcagacaccu

SEQ ID NO: 627546 - RNA, 23 nt, Human
cacacacaugcagacaccuggug

SEQ ID NO: 627547 - RNA, 24 nt, Human
cacacccacacacacaugcagaca

SEQ ID NO: 627548 - RNA, 21 nt, Human
cacauuauaaauauaaaauca

SEQ ID NO: 627549 - RNA, 19 nt, Human
cacccuccacuaccaaaua

SEQ ID NO: 627550 - RNA, 21 nt, Human
caccuuuucuguccucuccca

SEQ ID NO: 627551 - RNA, 25 nt, Human
cacuucagcagccucccguucuacc

SEQ ID NO: 627552 - RNA, 24 nt, Human
cagcagccucccguucuaccccuc

SEQ ID NO: 627553 - RNA, 20 nt, Human
cagccucccguucuaccccu

SEQ ID NO: 627554 - RNA, 21 nt, Human
caggacacccagaaccaaccu

SEQ ID NO: 627555 - RNA, 27 nt, Human
cauauacauaauaacacaauuuacaca

SEQ ID NO: 627556 - RNA, 20 nt, Human
caucagugccuccuccaucu

SEQ ID NO: 627557 - RNA, 22 nt, Human
ccauacaaacauaaaaacuaaa

SEQ ID NO: 627558 - RNA, 20 nt, Human
cccacacacacaugcagaca

SEQ ID NO: 627559 - RNA, 23 nt, Human
cccacacacacaugcagacaccu

SEQ ID NO: 627560 - RNA, 18 nt, Human
ccccacccuccacuacca

SEQ ID NO: 627561 - RNA, 19 nt, Human
ccccacccuccacuaccaa

SEQ ID NO: 627562 - RNA, 20 nt, Human
ccccacccuccacuaccaaa

SEQ ID NO: 627563 - RNA, 23 nt, Human
ccccacccuccacuaccaaauac

SEQ ID NO: 627564 - RNA, 19 nt, Human
ccccauccccccacccucc

SEQ ID NO: 627565 - RNA, 21 nt, Human
ccccccacccuccacuaccaa

SEQ ID NO: 627566 - RNA, 22 nt, Human
ccccccacccuccacuaccaaa

SEQ ID NO: 627567 - RNA, 19 nt, Human
ccccuuuccuuggcacuga

SEQ ID NO: 627568 - RNA, 19 nt, Human
cccuccacuaccaaauacc

SEQ ID NO: 627569 - RNA, 20 nt, Human
cccugccccaaucccucuuc

SEQ ID NO: 627570 - RNA, 18 nt, Human
cccuggacauacccacug

SEQ ID NO: 627571 - RNA, 19 nt, Human
ccucacuggcucagacugg

SEQ ID NO: 627572 - RNA, 24 nt, Human
ccugugaucaaaucaaaccggggc

SEQ ID NO: 627573 - RNA, 29 nt, Human
ccuuccccuucuuuguccaguuucuuuuu

SEQ ID NO: 627574 - RNA, 20 nt, Human
cgcacaguggccacagugau

SEQ ID NO: 627575 - RNA, 22 nt, Human
cuaccccucacagcaggacacc

SEQ ID NO: 627576 - RNA, 22 nt, Human
cuccagaugagaaaccuaacuc

SEQ ID NO: 627577 - RNA, 24 nt, Human
cuccagaugagaaaccuaacucac

SEQ ID NO: 627578 - RNA, 19 nt, Human
cucccagaacugggcccau

SEQ ID NO: 627579 - RNA, 22 nt, Human
cugccuccccugccccaauccc

SEQ ID NO: 627580 - RNA, 22 nt, Human
cuggcaggguggcggauggccc

SEQ ID NO: 627581 - RNA, 24 nt, Human
cuuggcacugagucuucagucaca

SEQ ID NO: 627582 - RNA, 23 nt, Human
gacacagaaauucagacauguga

SEQ ID NO: 627583 - RNA, 21 nt, Human
gacagugguccaagugacaca

SEQ ID NO: 627584 - RNA, 21 nt, Human
gagaaaccuaacucacaccga

SEQ ID NO: 627585 - RNA, 19 nt, Human
gauggggcucgucuggaca

SEQ ID NO: 627586 - RNA, 22 nt, Human
gcccccauccccccacccucca

SEQ ID NO: 627587 - RNA, 19 nt, Human
gccuccccugccccaaucc

SEQ ID NO: 627588 - RNA, 24 nt, Human
ggaaagucuggggguuggggggcg

SEQ ID NO: 627589 - RNA, 18 nt, Human
ggaagagggaagaggggc

SEQ ID NO: 627590 - RNA, 20 nt, Human
ggacacccagaaccaaccug

SEQ ID NO: 627591 - RNA, 21 nt, Human
ggacacugcucggcuucccag

SEQ ID NO: 627592 - RNA, 21 nt, Human
ggagauaaaaacacauagaga

SEQ ID NO: 627593 - RNA, 22 nt, Human
ggaggacucugagacacugaug

SEQ ID NO: 627594 - RNA, 25 nt, Human
ggcacugagucuucaggaccacggu

SEQ ID NO: 627595 - RNA, 24 nt, Human
ggcccccauccccccacccuccac

SEQ ID NO: 627596 - RNA, 21 nt, Human
gggaagguggagauaaaaaca

SEQ ID NO: 627597 - RNA, 20 nt, Human
gggaugcuuauacacuuggu

SEQ ID NO: 627598 - RNA, 21 nt, Human
guaaaaacaaaagcccucccc

SEQ ID NO: 627599 - RNA, 21 nt, Human
guacaucuuuacccauauaca

SEQ ID NO: 627600 - RNA, 22 nt, Human
guccuuguagggacaaugugag

SEQ ID NO: 627601 - RNA, 27 nt, Human
uaaaaacaaaagcccuccccagauucc

SEQ ID NO: 627602 - RNA, 21 nt, Human
uaccaaauaccaaaacucaaa

SEQ ID NO: 627603 - RNA, 24 nt, Human
ucagacaugugacuaaaugcugau

SEQ ID NO: 627604 - RNA, 18 nt, Human
ucagacuggggcagaagg

SEQ ID NO: 627605 - RNA, 21 nt, Human
ucagacuggggcagaagggga

SEQ ID NO: 627606 - RNA, 21 nt, Human
uccccccacccuccacuacca

SEQ ID NO: 627607 - RNA, 18 nt, Human
ucccucuucaagggaugc

SEQ ID NO: 627608 - RNA, 21 nt, Human
ucccuuccuggggaggcugcu

SEQ ID NO: 627609 - RNA, 20 nt, Human
uccuggccgggguccacggc

SEQ ID NO: 627610 - RNA, 18 nt, Human
ucgucuggacacagaaau

SEQ ID NO: 627611 - RNA, 26 nt, Human
ucuggggguuggggggcgggguaguc

SEQ ID NO: 627612 - RNA, 20 nt, Human
ugaagaaaggggcgaggagg

SEQ ID NO: 627613 - RNA, 18 nt, Human
ugaagccaccuuccuggc

SEQ ID NO: 627614 - RNA, 23 nt, Human
ugagaagagccccaaacccgagg

SEQ ID NO: 627615 - RNA, 18 nt, Human
ugagacaaguuggucacg

SEQ ID NO: 627616 - RNA, 21 nt, Human
ugaggcacaccgaaggggaaa

SEQ ID NO: 627617 - RNA, 24 nt, Human
ugaugcuugggauggcuccagcug

SEQ ID NO: 627618 - RNA, 27 nt, Human
ugccugagaaacagcuccagaugagaa

SEQ ID NO: 627619 - RNA, 21 nt, Human
ugcuggcccccauccccccac

SEQ ID NO: 627620 - RNA, 19 nt, Human
uggaauacugacagugguc

SEQ ID NO: 627621 - RNA, 23 nt, Human
uggaggaggaaauacaccauuua

SEQ ID NO: 627622 - RNA, 22 nt, Human
uggagugggucaucauggaaaa

SEQ ID NO: 627623 - RNA, 22 nt, Human
uggcaacuuccucugugcuagu

SEQ ID NO: 627624 - RNA, 22 nt, Human
uggcccccauccccccacccuc

SEQ ID NO: 627625 - RNA, 18 nt, Human
uggcucagacuggggcag

SEQ ID NO: 627626 - RNA, 20 nt, Human
uggucacuggggcccuuccc

SEQ ID NO: 627627 - RNA, 22 nt, Human
uguccaguuucuuuuaaagggg

SEQ ID NO: 627628 - RNA, 22 nt, Human
ugucuuucuuuaauuaguccgg

SEQ ID NO: 627629 - RNA, 20 nt, Human
uucaagggaugcuuauacac

SEQ ID NO: 627630 - RNA, 25 nt, Human
uucacaaaaaaaagaaaagcaacgg

SEQ ID NO: 627631 - RNA, 24 nt, Human
uucagcagccucccguucuacccc

SEQ ID NO: 627632 - RNA, 19 nt, Human
uuccagaguuacaagcauc

SEQ ID NO: 627633 - RNA, 18 nt, Human
uucuccacauccucuucc

SEQ ID NO: 627634 - RNA, 19 nt, Human
uuuaaaaagcuaccccuca

SEQ ID NO: 627635 - RNA, 25 nt, Human
uuuacaauucuuuucacuuuaucca

SEQ ID NO: 627636 - RNA, 19 nt, Human
uuugauggggcucgucugg

SEQ ID NO: 627637 - RNA, 18 nt, Human
uuuuuuuuuuuuuuuuug

SEQ ID NO: 627638 - RNA, 24 nt, Human
aaaaugcugggauuacaggcauga

SEQ ID NO: 627639 - RNA, 20 nt, Human
aaaauuacaaauuagagaca

SEQ ID NO: 627640 - RNA, 23 nt, Human
aaagugcugggauuacgggugug

SEQ ID NO: 627641 - RNA, 24 nt, Human
aaagugcugggauuacggguguga

SEQ ID NO: 627642 - RNA, 26 nt, Human
aaaugcugggauuacaggcaugagcc

SEQ ID NO: 627643 - RNA, 19 nt, Human
aagauguuggugaucuggu

SEQ ID NO: 627644 - RNA, 18 nt, Human
aagugcugggauuacggg

SEQ ID NO: 627645 - RNA, 26 nt, Human
aagugcugggauuacgggugugagcc

SEQ ID NO: 627646 - RNA, 20 nt, Human
aauguuagagacaguagaga

SEQ ID NO: 627647 - RNA, 21 nt, Human
aauuccacaagaugcagaaaa

SEQ ID NO: 627648 - RNA, 22 nt, Human
acagcuuauccaaucaccuguu

SEQ ID NO: 627649 - RNA, 19 nt, Human
acaggguuucaccauguug

SEQ ID NO: 627650 - RNA, 20 nt, Human
acaggguuucaccauguugu

SEQ ID NO: 627651 - RNA, 24 nt, Human
acaggguuucaccauguuguccag

SEQ ID NO: 627652 - RNA, 20 nt, Human
acaguggcacaaucucggcu

SEQ ID NO: 627653 - RNA, 24 nt, Human
accaaaaugcugggauuacaggca

SEQ ID NO: 627654 - RNA, 21 nt, Human
accccacuccacuccaacuuc

SEQ ID NO: 627655 - RNA, 19 nt, Human
agagacaguagagacaggg

SEQ ID NO: 627656 - RNA, 20 nt, Human
agaguuccuguucuucuuca

SEQ ID NO: 627657 - RNA, 23 nt, Human
agaugcagaaaaccgcaacgacc

SEQ ID NO: 627658 - RNA, 20 nt, Human
aggaggauggcgaggagucc

SEQ ID NO: 627659 - RNA, 23 nt, Human
aguacaguggcacaaucucggcu

SEQ ID NO: 627660 - RNA, 18 nt, Human
aguagcugggauuacagg

SEQ ID NO: 627661 - RNA, 25 nt, Human
aguagcugggauuacaggggcacac

SEQ ID NO: 627662 - RNA, 19 nt, Human
auacagaacagcuccauca

SEQ ID NO: 627663 - RNA, 18 nt, Human
aucagccuauucccuuug

SEQ ID NO: 627664 - RNA, 26 nt, Human
auguauccaccacacaguaccauaca

SEQ ID NO: 627665 - RNA, 21 nt, Human
auuugguugcccacacuucuu

SEQ ID NO: 627666 - RNA, 18 nt, Human
caaaccugacaacaacug

SEQ ID NO: 627667 - RNA, 20 nt, Human
caaagugcugggauuacggg

SEQ ID NO: 627668 - RNA, 24 nt, Human
caaagugcugggauuacgggugug

SEQ ID NO: 627669 - RNA, 20 nt, Human
caaauuagagacagguuuaa

SEQ ID NO: 627670 - RNA, 20 nt, Human
caaccuccaccucccggguu

SEQ ID NO: 627671 - RNA, 23 nt, Human
caaccuccaccucccggguucaa

SEQ ID NO: 627672 - RNA, 20 nt, Human
caagaugcagaaaaccgcaa

SEQ ID NO: 627673 - RNA, 22 nt, Human
caagaugcagaaaaccgcaacg

SEQ ID NO: 627674 - RNA, 22 nt, Human
caagcgauucuccugcuucagc

SEQ ID NO: 627675 - RNA, 20 nt, Human
caauguggcuuuauggcugg

SEQ ID NO: 627676 - RNA, 23 nt, Human
caauuccacaagaugcagaaaac

SEQ ID NO: 627677 - RNA, 20 nt, Human
cacaagaugcagaaaaccgc

SEQ ID NO: 627678 - RNA, 24 nt, Human
cacacaguaccauacagaacagcu

SEQ ID NO: 627679 - RNA, 24 nt, Human
cacaccaccacgccuggcuaauuu

SEQ ID NO: 627680 - RNA, 18 nt, Human
caccacacaguaccauac

SEQ ID NO: 627681 - RNA, 24 nt, Human
caccacgccuggcuaauuuuugua

SEQ ID NO: 627682 - RNA, 22 nt, Human
caccauguuguccaggacaguc

SEQ ID NO: 627683 - RNA, 23 nt, Human
caccauguuguccaggacagucu

SEQ ID NO: 627684 - RNA, 18 nt, Human
cacgggucugcacuagac

SEQ ID NO: 627685 - RNA, 20 nt, Human
cagccuccugaguagcuggg

SEQ ID NO: 627686 - RNA, 24 nt, Human
caggguuucaccauguuguccagg

SEQ ID NO: 627687 - RNA, 23 nt, Human
caguagagacaggguuucaccau

SEQ ID NO: 627688 - RNA, 24 nt, Human
caguagagacaggguuucaccaug

SEQ ID NO: 627689 - RNA, 25 nt, Human
caguagagacaggguuucaccaugu

SEQ ID NO: 627690 - RNA, 18 nt, Human
cauguuggccaggcuggu

SEQ ID NO: 627691 - RNA, 19 nt, Human
cauguuggccaggcugguc

SEQ ID NO: 627692 - RNA, 24 nt, Human
cauguuggccaggcuggucuagaa

SEQ ID NO: 627693 - RNA, 22 nt, Human
ccaaaaugcugggauuacaggc

SEQ ID NO: 627694 - RNA, 23 nt, Human
ccaaaaugcugggauuacaggca

SEQ ID NO: 627695 - RNA, 24 nt, Human
ccaaaaugcugggauuacaggcau

SEQ ID NO: 627696 - RNA, 25 nt, Human
ccaaaaugcugggauuacaggcaug

SEQ ID NO: 627697 - RNA, 21 nt, Human
ccaacauguagacuuuuaggc

SEQ ID NO: 627698 - RNA, 22 nt, Human
ccaccccacuccacuccaacuu

SEQ ID NO: 627699 - RNA, 24 nt, Human
ccaccucccggguucaagcgauuc

SEQ ID NO: 627700 - RNA, 20 nt, Human
cccaccccacuccacuccaa

SEQ ID NO: 627701 - RNA, 23 nt, Human
cccaccccacuccacuccaacuu

SEQ ID NO: 627702 - RNA, 23 nt, Human
cccggguucaagcgauucuccug

SEQ ID NO: 627703 - RNA, 18 nt, Human
cccugccucggccccgca

SEQ ID NO: 627704 - RNA, 23 nt, Human
ccgcaaagugcugggauuacggg

SEQ ID NO: 627705 - RNA, 28 nt, Human
ccuaccaaaaugcugggauuacaggcau

SEQ ID NO: 627706 - RNA, 24 nt, Human
ccucccggguucaagcgauucucc

SEQ ID NO: 627707 - RNA, 20 nt, Human
ccucggccuaccaaaaugcu

SEQ ID NO: 627708 - RNA, 19 nt, Human
ccugaccuuguguuccccu

SEQ ID NO: 627709 - RNA, 23 nt, Human
ccugaguagcugggauuacaggg

SEQ ID NO: 627710 - RNA, 20 nt, Human
ccuggcaccaagugaucugc

SEQ ID NO: 627711 - RNA, 24 nt, Human
ccuggcaccaagugaucugcccuc

SEQ ID NO: 627712 - RNA, 25 nt, Human
ccuggcaccaagugaucugcccucc

SEQ ID NO: 627713 - RNA, 21 nt, Human
cgcuuugcaaucccaucagcc

SEQ ID NO: 627714 - RNA, 24 nt, Human
cuaaccagugaauccacugaagca

SEQ ID NO: 627715 - RNA, 18 nt, Human
cucaaaccugacaacaac

SEQ ID NO: 627716 - RNA, 21 nt, Human
cucaaaccugacaacaacuga

SEQ ID NO: 627717 - RNA, 25 nt, Human
cuccaacuucuuccuuccuuuugac

SEQ ID NO: 627718 - RNA, 23 nt, Human
cuccugaccuuguguuccccugc

SEQ ID NO: 627719 - RNA, 23 nt, Human
cucgcucugucaccaggcuggag

SEQ ID NO: 627720 - RNA, 25 nt, Human
cucuuaguucacugcucaucucagc

SEQ ID NO: 627721 - RNA, 20 nt, Human
cugcaaccuccaccucccgg

SEQ ID NO: 627722 - RNA, 20 nt, Human
cugcaaccuccaccucccgg

SEQ ID NO: 627723 - RNA, 21 nt, Human
cugcaaccuccaccucccggg

SEQ ID NO: 627724 - RNA, 23 nt, Human
cugcuucagccuccugaguagcu

SEQ ID NO: 627725 - RNA, 24 nt, Human
cuugcugcaaccuccaccucccgg

SEQ ID NO: 627726 - RNA, 23 nt, Human
gacaggguuucaccauguugucc

SEQ ID NO: 627727 - RNA, 19 nt, Human
gaccuuguguuccccugcc

SEQ ID NO: 627728 - RNA, 21 nt, Human
gaccuuguguuccccugccuc

SEQ ID NO: 627729 - RNA, 19 nt, Human
gagaagaauucccuucugg

SEQ ID NO: 627730 - RNA, 21 nt, Human
gagagggagucucgcucuguc

SEQ ID NO: 627731 - RNA, 18 nt, Human
gauuacaggcaugagcca

SEQ ID NO: 627732 - RNA, 22 nt, Human
gauuacaggcaugagccacugc

SEQ ID NO: 627733 - RNA, 23 nt, Human
gauuacaggcaugagccacugca

SEQ ID NO: 627734 - RNA, 18 nt, Human
gauuacaggggcacacca

SEQ ID NO: 627735 - RNA, 18 nt, Human
gauuacgggugugagcca

SEQ ID NO: 627736 - RNA, 22 nt, Human
gauuacgggugugagccaccgc

SEQ ID NO: 627737 - RNA, 22 nt, Human
gauuacgggugugagccaccgc

SEQ ID NO: 627738 - RNA, 21 nt, Human
gauucuccugcuucagccucc

SEQ ID NO: 627739 - RNA, 24 nt, Human
gcaaagugcugggauuacgggugu

SEQ ID NO: 627740 - RNA, 22 nt, Human
gcaaccuccaccucccggguuc

SEQ ID NO: 627741 - RNA, 19 nt, Human
gcaacgaccaggaggaugg

SEQ ID NO: 627742 - RNA, 24 nt, Human
gcgauucuccugcuucagccuccu

SEQ ID NO: 627743 - RNA, 19 nt, Human
gcuggaguacaguggcaca

SEQ ID NO: 627744 - RNA, 23 nt, Human
gcuggucuagaacuccuggcacc

SEQ ID NO: 627745 - RNA, 21 nt, Human
ggaauucccaaaccucugcuu

SEQ ID NO: 627746 - RNA, 22 nt, Human
ggauuacaggcaugagccacug

SEQ ID NO: 627747 - RNA, 18 nt, Human
ggccccgcaaagugcugg

SEQ ID NO: 627748 - RNA, 22 nt, Human
ggucauguuggccaggcugguc

SEQ ID NO: 627749 - RNA, 18 nt, Human
gucauguuggccaggcug

SEQ ID NO: 627750 - RNA, 24 nt, Human
gucucgcucugucaccaggcugga

SEQ ID NO: 627751 - RNA, 22 nt, Human
guucacugcucaucucagccuc

SEQ ID NO: 627752 - RNA, 22 nt, Human
uaaggaacuugucgcuucuucc

SEQ ID NO: 627753 - RNA, 24 nt, Human
uaauuuuuguauuuuuaguaaaga

SEQ ID NO: 627754 - RNA, 19 nt, Human
uacaaaauaugagagacag

SEQ ID NO: 627755 - RNA, 23 nt, Human
uacaaaauuacaaauuagagaca

SEQ ID NO: 627756 - RNA, 22 nt, Human
uacaggcaugagccacugcacc

SEQ ID NO: 627757 - RNA, 22 nt, Human
uacaggggcacaccaccacgcc

SEQ ID NO: 627758 - RNA, 28 nt, Human
uaccaaaaugcugggauuacaggcauga

SEQ ID NO: 627759 - RNA, 23 nt, Human
uacgggugugagccaccgcgccu

SEQ ID NO: 627760 - RNA, 24 nt, Human
uacgggugugagccaccgcgccug

SEQ ID NO: 627761 - RNA, 21 nt, Human
uagagacaggguuucaccaug

SEQ ID NO: 627762 - RNA, 22 nt, Human
uagagacaggguuucaccaugu

SEQ ID NO: 627763 - RNA, 21 nt, Human
uagagacagguuuacaaaugu

SEQ ID NO: 627764 - RNA, 31 nt, Human
uagagacaguagagacaggguuucaccaugg

SEQ ID NO: 627765 - RNA, 25 nt, Human
uaguucuuguguuugcaaauggaua

SEQ ID NO: 627766 - RNA, 20 nt, Human
ucagccuccugaguagcugg

SEQ ID NO: 627767 - RNA, 22 nt, Human
uccacaagaugcagaaaaccgc

SEQ ID NO: 627768 - RNA, 20 nt, Human
uccacuccaacuucuuccuu

SEQ ID NO: 627769 - RNA, 21 nt, Human
uccacugaagcacuaagguga

SEQ ID NO: 627770 - RNA, 21 nt, Human
ucccggguucaagcgauucuc

SEQ ID NO: 627771 - RNA, 24 nt, Human
ucccggguucaagcgauucuccug

SEQ ID NO: 627772 - RNA, 25 nt, Human
ucccuuugcagccccuuuguagcaa

SEQ ID NO: 627773 - RNA, 25 nt, Human
uccugaguagcugggauuacagggg

SEQ ID NO: 627774 - RNA, 22 nt, Human
ucucgcucugucaccaggcugg

SEQ ID NO: 627775 - RNA, 23 nt, Human
ucucgcucugucaccaggcugga

SEQ ID NO: 627776 - RNA, 18 nt, Human
ucugcacuagacucugca

SEQ ID NO: 627777 - RNA, 21 nt, Human
ucugcccuccucggccuacca

SEQ ID NO: 627778 - RNA, 23 nt, Human
ucuggaauucccaaaccucugcu

SEQ ID NO: 627779 - RNA, 19 nt, Human
ugaaauggcugggccauau

SEQ ID NO: 627780 - RNA, 22 nt, Human
ugaagguaauaaucuuagacua

SEQ ID NO: 627781 - RNA, 19 nt, Human
ugagaguuccuguucuucu

SEQ ID NO: 627782 - RNA, 18 nt, Human
ugaucacgggucugcacu

SEQ ID NO: 627783 - RNA, 21 nt, Human
ugcagaaaaccgcaacgacca

SEQ ID NO: 627784 - RNA, 26 nt, Human
ugcccacacuucuuuuuuguuuguuu

SEQ ID NO: 627785 - RNA, 24 nt, Human
ugcuucagccuccugaguagcugg

SEQ ID NO: 627786 - RNA, 19 nt, Human
uggaguacaguggcacaau

SEQ ID NO: 627787 - RNA, 24 nt, Human
uggaguacaguggcacaaucucgg

SEQ ID NO: 627788 - RNA, 24 nt, Human
uggcacaaucucggcuugcugcaa

SEQ ID NO: 627789 - RNA, 24 nt, Human
uggccaggcuggucuagaacuccu

SEQ ID NO: 627790 - RNA, 19 nt, Human
ugggauagacuacucaaug

SEQ ID NO: 627791 - RNA, 18 nt, Human
ugggauuacaggcaugag

SEQ ID NO: 627792 - RNA, 19 nt, Human
ugggauuacaggcaugagc

SEQ ID NO: 627793 - RNA, 21 nt, Human
ugggauuacaggcaugagcca

SEQ ID NO: 627794 - RNA, 22 nt, Human
ugggauuacaggcaugagccac

SEQ ID NO: 627795 - RNA, 22 nt, Human
ugggauuacaggcaugagccac

SEQ ID NO: 627796 - RNA, 24 nt, Human
ugggauuacaggcaugagccacug

SEQ ID NO: 627797 - RNA, 24 nt, Human
ugggauuacaggcaugagccacug

SEQ ID NO: 627798 - RNA, 22 nt, Human
ugggauuacaggggcacaccac

SEQ ID NO: 627799 - RNA, 24 nt, Human
ugggauuacaggggcacaccacca

SEQ ID NO: 627800 - RNA, 18 nt, Human
ugggauuacgggugugag

SEQ ID NO: 627801 - RNA, 19 nt, Human
ugggauuacgggugugagc

SEQ ID NO: 627802 - RNA, 22 nt, Human
ugggauuacgggugugagccac

SEQ ID NO: 627803 - RNA, 23 nt, Human
ugggauuacgggugugagccacc

SEQ ID NO: 627804 - RNA, 24 nt, Human
ugggauuacgggugugagccaccg

SEQ ID NO: 627805 - RNA, 19 nt, Human
uguccaggacagucuugau

SEQ ID NO: 627806 - RNA, 19 nt, Human
uguuuguuuuguuuuuuug

SEQ ID NO: 627807 - RNA, 18 nt, Human
uuacaggggcacaccacc

SEQ ID NO: 627808 - RNA, 18 nt, Human
uuaguaaagaugggucau

SEQ ID NO: 627809 - RNA, 24 nt, Human
uuaguucacugcucaucucagccu

SEQ ID NO: 627810 - RNA, 23 nt, Human
uucaagcgauucuccugcuucag

SEQ ID NO: 627811 - RNA, 24 nt, Human
uucaagcgauucuccugcuucagc

SEQ ID NO: 627812 - RNA, 24 nt, Human
uucagccuccugaguagcugggau

SEQ ID NO: 627813 - RNA, 20 nt, Human
uucaucccuauaguuuugcc

SEQ ID NO: 627814 - RNA, 23 nt, Human
uugcagccccuuuguagcaaacu

SEQ ID NO: 627815 - RNA, 27 nt, Human
uugcagccccuuuguagcaaacuuccc

SEQ ID NO: 627816 - RNA, 24 nt, Human
uugcugcaaccuccaccucccggg

SEQ ID NO: 627817 - RNA, 25 nt, Human
uugcugcaaccuccaccucccgggu

SEQ ID NO: 627818 - RNA, 24 nt, Human
uugggucaauuucuaguagugaaa

SEQ ID NO: 627819 - RNA, 19 nt, Human
uuguuuguuuuguuuuuuu

SEQ ID NO: 627820 - RNA, 18 nt, Human
uuuaaaauggaaauugcc

SEQ ID NO: 627821 - RNA, 22 nt, Human
uuucaccauguuguccaggaca

SEQ ID NO: 627822 - RNA, 23 nt, Human
uuuuaggccuagcuucuuucacu

SEQ ID NO: 627823 - RNA, 18 nt, Human
uuuuguuuguuuuguuuu

SEQ ID NO: 627824 - RNA, 26 nt, Human
uuuuguuuuuuugagagggagucucg

SEQ ID NO: 627825 - RNA, 21 nt, Human
uuuuuaguaaagaugggucau

SEQ ID NO: 627826 - RNA, 20 nt, Human
uuuuuguauuuuuaguaaag

SEQ ID NO: 627827 - RNA, 23 nt, Human
uuuuuguauuuuuaguaaagaug

SEQ ID NO: 627828 - RNA, 20 nt, Human
uuuuuuuuuuuuuuuuccac

SEQ ID NO: 627829 - RNA, 19 nt, Human
aaaaaaaaacaaagaaaaa

SEQ ID NO: 627830 - RNA, 20 nt, Human
aaaaaccaguccaaagugag

SEQ ID NO: 627831 - RNA, 24 nt, Human
aaacaaacagaaaaaaugcaaccg

SEQ ID NO: 627832 - RNA, 21 nt, Human
aaagauuagagauugaaacaa

SEQ ID NO: 627833 - RNA, 19 nt, Human
aaauaaccaaugggcccaa

SEQ ID NO: 627834 - RNA, 19 nt, Human
aacauagugacacucaucu

SEQ ID NO: 627835 - RNA, 25 nt, Human
aagccugggcaacauagugacacuc

SEQ ID NO: 627836 - RNA, 24 nt, Human
aaucguuugaacccaggaggcaga

SEQ ID NO: 627837 - RNA, 19 nt, Human
acaagagcgaaacuccauc

SEQ ID NO: 627838 - RNA, 20 nt, Human
acaagagcgaaacuccaucu

SEQ ID NO: 627839 - RNA, 23 nt, Human
accacuccagccugggggacaag

SEQ ID NO: 627840 - RNA, 24 nt, Human
acccaggaggcagagguugcagug

SEQ ID NO: 627841 - RNA, 18 nt, Human
acucaaugugagacaggg

SEQ ID NO: 627842 - RNA, 21 nt, Human
acuccagccugggggacaaga

SEQ ID NO: 627843 - RNA, 21 nt, Human
acuccaucuggaaaaaaaaaa

SEQ ID NO: 627844 - RNA, 19 nt, Human
acugcaccacuccagccug

SEQ ID NO: 627845 - RNA, 23 nt, Human
agagguugcagugaccugagauc

SEQ ID NO: 627846 - RNA, 24 nt, Human
agagguugcagugaccugagaucg

SEQ ID NO: 627847 - RNA, 20 nt, Human
agcacuuugggaggcugagg

SEQ ID NO: 627848 - RNA, 23 nt, Human
agccugggcaacauagugacacu

SEQ ID NO: 627849 - RNA, 20 nt, Human
aggcagagguugcagugacc

SEQ ID NO: 627850 - RNA, 24 nt, Human
aggcagagguugcagugaccugag

SEQ ID NO: 627851 - RNA, 24 nt, Human
aggcugaggcaagaagacugcuug

SEQ ID NO: 627852 - RNA, 24 nt, Human
aggcugagguaggagaaucguuug

SEQ ID NO: 627853 - RNA, 26 nt, Human
agguagaaauaaaaacauuuaaucug

SEQ ID NO: 627854 - RNA, 23 nt, Human
agguaggagaaucguuugaaccc

SEQ ID NO: 627855 - RNA, 19 nt, Human
aguccagaagucgggaagu

SEQ ID NO: 627856 - RNA, 24 nt, Human
aguggcucacgccuguaaucccag

SEQ ID NO: 627857 - RNA, 27 nt, Human
aucgugccacugcaccacuccagccug

SEQ ID NO: 627858 - RNA, 22 nt, Human
aucucuacaaaaaauuaaaaaa

SEQ ID NO: 627859 - RNA, 19 nt, Human
auuagagauugaaacaaac

SEQ ID NO: 627860 - RNA, 18 nt, Human
auugcccuuggagaaugg

SEQ ID NO: 627861 - RNA, 26 nt, Human
caaacagaaaaaaugcaaccgcuugc

SEQ ID NO: 627862 - RNA, 24 nt, Human
cacgccuguaaucccagcacuuug

SEQ ID NO: 627863 - RNA, 24 nt, Human
cacuccagccugggggacaagagc

SEQ ID NO: 627864 - RNA, 25 nt, Human
cacuccagccugggggacaagagcg

SEQ ID NO: 627865 - RNA, 18 nt, Human
cacugcaccacuccagcc

SEQ ID NO: 627866 - RNA, 23 nt, Human
cagcacuuugggaggcugaggca

SEQ ID NO: 627867 - RNA, 25 nt, Human
cagcacuuugggaggcugaggcaag

SEQ ID NO: 627868 - RNA, 22 nt, Human
caguccaaagugagaaaaucaa

SEQ ID NO: 627869 - RNA, 27 nt, Human
ccacugcaccacuccagccugggggac

SEQ ID NO: 627870 - RNA, 19 nt, Human
ccaguacaaauuauugccc

SEQ ID NO: 627871 - RNA, 23 nt, Human
ccaucuggaaaaaaaaaacaaag

SEQ ID NO: 627872 - RNA, 22 nt, Human
ccuguaaucccagcacuuuggg

SEQ ID NO: 627873 - RNA, 24 nt, Human
cgaaacuccaucuggaaaaaaaaa

SEQ ID NO: 627874 - RNA, 23 nt, Human
cgccuguaaucccagcacuuugg

SEQ ID NO: 627875 - RNA, 22 nt, Human
cucacgccuguaaucccagcac

SEQ ID NO: 627876 - RNA, 24 nt, Human
cucacgccuguaaucccagcacuu

SEQ ID NO: 627877 - RNA, 18 nt, Human
cuggaaaaaaaaaacaaa

SEQ ID NO: 627878 - RNA, 24 nt, Human
cuggaaaaaaaaaacaaagaaaaa

SEQ ID NO: 627879 - RNA, 19 nt, Human
cuugcauuucuugcuaaaa

SEQ ID NO: 627880 - RNA, 20 nt, Human
gaaagaugaguccagaaguc

SEQ ID NO: 627881 - RNA, 21 nt, Human
gaagaguggcugagaaggagg

SEQ ID NO: 627882 - RNA, 22 nt, Human
gacaagagcgaaacuccaucug

SEQ ID NO: 627883 - RNA, 23 nt, Human
gagaaucguuugaacccaggagg

SEQ ID NO: 627884 - RNA, 19 nt, Human
gagccucauuaagaagagu

SEQ ID NO: 627885 - RNA, 20 nt, Human
ggaaaaaaaaaacaaagaaa

SEQ ID NO: 627886 - RNA, 21 nt, Human
ggaaaaaaaaaacaaagaaaa

SEQ ID NO: 627887 - RNA, 22 nt, Human
gggaggcugagguaggagaauc

SEQ ID NO: 627888 - RNA, 26 nt, Human
gggcauggugguauaugccuguagcc

SEQ ID NO: 627889 - RNA, 24 nt, Human
ggguggaguggcucacgccuguaa

SEQ ID NO: 627890 - RNA, 20 nt, Human
guaaaccaaaagcaguuuaa

SEQ ID NO: 627891 - RNA, 18 nt, Human
guccagaagucgggaagu

SEQ ID NO: 627892 - RNA, 18 nt, Human
guggaguggcucacgccu

SEQ ID NO: 627893 - RNA, 25 nt, Human
uaaaccaaaagcaguuuaauuugaa

SEQ ID NO: 627894 - RNA, 23 nt, Human
uagaaaauucuuccacaugagga

SEQ ID NO: 627895 - RNA, 21 nt, Human
uaguaaagaccaaugauggca

SEQ ID NO: 627896 - RNA, 19 nt, Human
uccaaagugagaaaaucaa

SEQ ID NO: 627897 - RNA, 22 nt, Human
ugaaacaaacagaaaaaaugca

SEQ ID NO: 627898 - RNA, 22 nt, Human
ugaccugagaucgugccacugc

SEQ ID NO: 627899 - RNA, 22 nt, Human
ugagaaggaggcagcaugacca

SEQ ID NO: 627900 - RNA, 20 nt, Human
ugagacagggggagccucau

SEQ ID NO: 627901 - RNA, 27 nt, Human
ugagaucgugccacugcaccacuccag

SEQ ID NO: 627902 - RNA, 20 nt, Human
ugaggaaaagauggccagag

SEQ ID NO: 627903 - RNA, 23 nt, Human
ugaggcaagaagacugcuugagg

SEQ ID NO: 627904 - RNA, 24 nt, Human
ugagguaggagaaucguuugaacc

SEQ ID NO: 627905 - RNA, 19 nt, Human
ugccuguagccccuggcua

SEQ ID NO: 627906 - RNA, 22 nt, Human
uggaaaaaaaaaacaaagaaaa

SEQ ID NO: 627907 - RNA, 22 nt, Human
uggcucacgccuguaaucccag

SEQ ID NO: 627908 - RNA, 24 nt, Human
uggcucacgccuguaaucccagca

SEQ ID NO: 627909 - RNA, 19 nt, Human
uggcugagaaggaggcagc

SEQ ID NO: 627910 - RNA, 23 nt, Human
uggugguauaugccuguagcccc

SEQ ID NO: 627911 - RNA, 18 nt, Human
uuaguugggcaugguggu

SEQ ID NO: 627912 - RNA, 24 nt, Human
uuaguugggcauggugguauaugc

SEQ ID NO: 627913 - RNA, 21 nt, Human
uugcagugaccugagaucgug

SEQ ID NO: 627914 - RNA, 22 nt, Human
uugcagugaccugagaucgugc

SEQ ID NO: 627915 - RNA, 20 nt, Human
uuuuuuuuuuuuuuuugcuu

SEQ ID NO: 627916 - RNA, 22 nt, Human
uuuuuuuuuuuuuuuugcuuag

SEQ ID NO: 627917 - RNA, 24 nt, Human
aaaacgacagauuuaagccauuga

SEQ ID NO: 627918 - RNA, 19 nt, Human
aaacgacagauuuaagcca

SEQ ID NO: 627919 - RNA, 18 nt, Human
aaagaguacuugagauga

SEQ ID NO: 627920 - RNA, 21 nt, Human
aaaucagcagaccaaaaacuu

SEQ ID NO: 627921 - RNA, 20 nt, Human
aacaauucaccauaaucccc

SEQ ID NO: 627922 - RNA, 26 nt, Human
aaccaaaaguaucaguuuaucagucc

SEQ ID NO: 627923 - RNA, 25 nt, Human
aaccaaauaccuucccccacagcua

SEQ ID NO: 627924 - RNA, 20 nt, Human
aagauacugaaauugcaaaa

SEQ ID NO: 627925 - RNA, 24 nt, Human
aagauccaggucaguaguucagcu

SEQ ID NO: 627926 - RNA, 21 nt, Human
aagcaucacuugacgacaucc

SEQ ID NO: 627927 - RNA, 18 nt, Human
acagcgcacaggaacacc

SEQ ID NO: 627928 - RNA, 22 nt, Human
agauaacacagacaaaagguua

SEQ ID NO: 627929 - RNA, 23 nt, Human
agauacugaaauugcaaaagcaa

SEQ ID NO: 627930 - RNA, 18 nt, Human
agcagaccaaaaacuuau

SEQ ID NO: 627931 - RNA, 23 nt, Human
aggaagguaauucuggucaguuu

SEQ ID NO: 627932 - RNA, 18 nt, Human
aggcugaaucaccacacc

SEQ ID NO: 627933 - RNA, 23 nt, Human
aggcugaaucaccacacccacag

SEQ ID NO: 627934 - RNA, 24 nt, Human
auaaacacccccauuuuuaguuuu

SEQ ID NO: 627935 - RNA, 20 nt, Human
auaaagcucuuucagcacag

SEQ ID NO: 627936 - RNA, 20 nt, Human
auggcaguguguacaacccc

SEQ ID NO: 627937 - RNA, 23 nt, Human
auugcaaaagcaaaaaggcuagg

SEQ ID NO: 627938 - RNA, 21 nt, Human
caaaagcaaaaaggcuaggac

SEQ ID NO: 627939 - RNA, 23 nt, Human
caaaagcaaaaaggcuaggacua

SEQ ID NO: 627940 - RNA, 20 nt, Human
cacacccacagcgcacagga

SEQ ID NO: 627941 - RNA, 20 nt, Human
cacaggcauaccaacagggu

SEQ ID NO: 627942 - RNA, 20 nt, Human
cacuugugcuucaugaaaca

SEQ ID NO: 627943 - RNA, 27 nt, Human
cagcacagcagucuauucauucaaagu

SEQ ID NO: 627944 - RNA, 21 nt, Human
caggcugaaucaccacaccca

SEQ ID NO: 627945 - RNA, 24 nt, Human
cagucccacucacaucccaccccc

SEQ ID NO: 627946 - RNA, 22 nt, Human
ccacacccacagcgcacaggaa

SEQ ID NO: 627947 - RNA, 19 nt, Human
cuaaccaaauaccuucccc

SEQ ID NO: 627948 - RNA, 26 nt, Human
cuaauccccacuuuacaacuucaugc

SEQ ID NO: 627949 - RNA, 20 nt, Human
cugaauaucaaaaacgacaa

SEQ ID NO: 627950 - RNA, 19 nt, Human
cugaaucaccacacccaca

SEQ ID NO: 627951 - RNA, 20 nt, Human
cugacucagaacagccuggg

SEQ ID NO: 627952 - RNA, 22 nt, Human
gaaagucauuuuuccuuuaaaa

SEQ ID NO: 627953 - RNA, 19 nt, Human
gacauuauucucccuacac

SEQ ID NO: 627954 - RNA, 21 nt, Human
gcgcacaggaacaccagccca

SEQ ID NO: 627955 - RNA, 20 nt, Human
guaaaguaagagaagacagg

SEQ ID NO: 627956 - RNA, 20 nt, Human
guaaaguaagagaagacagg

SEQ ID NO: 627957 - RNA, 22 nt, Human
gucaguaguucagcuauaccag

SEQ ID NO: 627958 - RNA, 21 nt, Human
uaaaaauguauucaugacugc

SEQ ID NO: 627959 - RNA, 21 nt, Human
uaaauugaggaaaccugaaua

SEQ ID NO: 627960 - RNA, 22 nt, Human
uaaccagauaaauaugguucac

SEQ ID NO: 627961 - RNA, 24 nt, Human
uaagaacaacaauucaccauaauc

SEQ ID NO: 627962 - RNA, 22 nt, Human
uaagagcauccaccuauguauc

SEQ ID NO: 627963 - RNA, 18 nt, Human
uaccuagaaaaacugucu

SEQ ID NO: 627964 - RNA, 20 nt, Human
uacuugagaugacucaguug

SEQ ID NO: 627965 - RNA, 24 nt, Human
uaggacuaagauccaggucaguag

SEQ ID NO: 627966 - RNA, 21 nt, Human
uauaagaacaacaauucacca

SEQ ID NO: 627967 - RNA, 24 nt, Human
ucccacccccacaggcauaccaac

SEQ ID NO: 627968 - RNA, 25 nt, Human
ucuaaccaaauaccuucccccacag

SEQ ID NO: 627969 - RNA, 24 nt, Human
ucuacaguucuacuuagaccagca

SEQ ID NO: 627970 - RNA, 18 nt, Human
ucucuuuuauguauuaaa

SEQ ID NO: 627971 - RNA, 19 nt, Human
ugaaaggucauaaucaguu

SEQ ID NO: 627972 - RNA, 23 nt, Human
ugaaagucauuuuuccuuuaaaa

SEQ ID NO: 627973 - RNA, 18 nt, Human
ugacugcugcaguaagag

SEQ ID NO: 627974 - RNA, 24 nt, Human
ugguagcaaacuaagauauuuuuc

SEQ ID NO: 627975 - RNA, 19 nt, Human
uguauuaaauuccacuugu

SEQ ID NO: 627976 - RNA, 24 nt, Human
uguguacaaccccuccuucacuaa

SEQ ID NO: 627977 - RNA, 20 nt, Human
ugugugacuaaggcugcaaa

SEQ ID NO: 627978 - RNA, 24 nt, Human
uuacaacugaaagcaucacuugac

SEQ ID NO: 627979 - RNA, 22 nt, Human
uuacauacuuugagacagugug

SEQ ID NO: 627980 - RNA, 19 nt, Human
uuagaauuacgaagaguuu

SEQ ID NO: 627981 - RNA, 19 nt, Human
uuagaccagcagggacagc

SEQ ID NO: 627982 - RNA, 23 nt, Human
uucaccauaaucccccuuugcca

SEQ ID NO: 627983 - RNA, 19 nt, Human
uucaugguaccuagaaaaa

SEQ ID NO: 627984 - RNA, 23 nt, Human
uucccuaguuuagagaugaagau

SEQ ID NO: 627985 - RNA, 22 nt, Human
uuuuuuuuuuuguguguagucu

SEQ ID NO: 627986 - RNA, 25 nt, Human
uuuuuuuuuuuuguguguagucuca

SEQ ID NO: 627987 - RNA, 19 nt, Human
uuuuuuuuuuuuuuugugu

SEQ ID NO: 627988 - RNA, 19 nt, Human
uuuuuuuuuuuuuuuuugu

SEQ ID NO: 627989 - RNA, 26 nt, Human
uuuuuuuuuuuuuuuuuuuuuugggg

SEQ ID NO: 627990 - RNA, 22 nt, Human
aaaaauacaaauuagcugcgua

SEQ ID NO: 627991 - RNA, 19 nt, Human
aaaugauaucugagagcuu

SEQ ID NO: 627992 - RNA, 19 nt, Human
aacacuaaaagauuuccca

SEQ ID NO: 627993 - RNA, 20 nt, Human
aacauggugaaacccugucu

SEQ ID NO: 627994 - RNA, 21 nt, Human
aacauggugaaacccugucuc

SEQ ID NO: 627995 - RNA, 25 nt, Human
aacccauuucuauucacgccuucca

SEQ ID NO: 627996 - RNA, 18 nt, Human
aaccucagcauacauuuu

SEQ ID NO: 627997 - RNA, 24 nt, Human
acagagcaagacucugucucaaaa

SEQ ID NO: 627998 - RNA, 19 nt, Human
acccauuucuauucacgcc

SEQ ID NO: 627999 - RNA, 24 nt, Human
acccugucucuacuaaaaauacaa

SEQ ID NO: 628000 - RNA, 18 nt, Human
acucaaugaauucuuuaa

SEQ ID NO: 628001 - RNA, 24 nt, Human
acugcacuccaguuuggaugacag

SEQ ID NO: 628002 - RNA, 26 nt, Human
acugcacuccaguuuggaugacagag

SEQ ID NO: 628003 - RNA, 24 nt, Human
acuugaggucaggaguucaagacc

SEQ ID NO: 628004 - RNA, 23 nt, Human
acuuuuucuaagggcuugcuuuu

SEQ ID NO: 628005 - RNA, 18 nt, Human
agagcaagacucugucuc

SEQ ID NO: 628006 - RNA, 22 nt, Human
agaggcggagguugcagugagc

SEQ ID NO: 628007 - RNA, 24 nt, Human
agcacuuugggaggcugaggcagg

SEQ ID NO: 628008 - RNA, 21 nt, Human
agccaagauugugccacugca

SEQ ID NO: 628009 - RNA, 23 nt, Human
agcugcguaugguggcaugugcc

SEQ ID NO: 628010 - RNA, 23 nt, Human
aggaguucaagaccaggcuggcc

SEQ ID NO: 628011 - RNA, 23 nt, Human
aggcaggagaaucgguugaaccc

SEQ ID NO: 628012 - RNA, 24 nt, Human
aggcaggagaaucgguugaaccca

SEQ ID NO: 628013 - RNA, 18 nt, Human
aggcaggcggaucacuug

SEQ ID NO: 628014 - RNA, 22 nt, Human
aggcaggcggaucacuugaggu

SEQ ID NO: 628015 - RNA, 26 nt, Human
aggcaggcggaucacuugaggucagg

SEQ ID NO: 628016 - RNA, 24 nt, Human
aggcggagguugcagugagccaag

SEQ ID NO: 628017 - RNA, 21 nt, Human
aggcugaggcaggcggaucac

SEQ ID NO: 628018 - RNA, 24 nt, Human
aggcugaggcaggcggaucacuug

SEQ ID NO: 628019 - RNA, 24 nt, Human
aggcuggccaacauggugaaaccc

SEQ ID NO: 628020 - RNA, 24 nt, Human
agguugaggcaggagaaucgguug

SEQ ID NO: 628021 - RNA, 23 nt, Human
aguggcucaugccuguaauccca

SEQ ID NO: 628022 - RNA, 24 nt, Human
aguggcucaugccuguaaucccag

SEQ ID NO: 628023 - RNA, 24 nt, Human
aguuuggaugacagagcaagacuc

SEQ ID NO: 628024 - RNA, 24 nt, Human
aucacuugaggucaggaguucaag

SEQ ID NO: 628025 - RNA, 19 nt, Human
augccuguaaucccagcac

SEQ ID NO: 628026 - RNA, 24 nt, Human
auugugccacugcacuccaguuug

SEQ ID NO: 628027 - RNA, 19 nt, Human
auuuguagaguuucucccc

SEQ ID NO: 628028 - RNA, 24 nt, Human
caacauggugaaacccugucucua

SEQ ID NO: 628029 - RNA, 24 nt, Human
caacuauuugggagguugaggcag

SEQ ID NO: 628030 - RNA, 24 nt, Human
caagaccaggcuggccaacauggu

SEQ ID NO: 628031 - RNA, 24 nt, Human
caagauugugccacugcacuccag

SEQ ID NO: 628032 - RNA, 19 nt, Human
caaguuucuuuuuccuccu

SEQ ID NO: 628033 - RNA, 18 nt, Human
cacaauagcaugcaacuu

SEQ ID NO: 628034 - RNA, 19 nt, Human
cacuaaaagauuucccaca

SEQ ID NO: 628035 - RNA, 18 nt, Human
cacugcacuccaguuugg

SEQ ID NO: 628036 - RNA, 19 nt, Human
cacugcacuccaguuugga

SEQ ID NO: 628037 - RNA, 19 nt, Human
cacugcacuccaguuugga

SEQ ID NO: 628038 - RNA, 22 nt, Human
cacugcacuccaguuuggauga

SEQ ID NO: 628039 - RNA, 23 nt, Human
cacuugaggucaggaguucaaga

SEQ ID NO: 628040 - RNA, 24 nt, Human
cagcacuuugggaggcugaggcag

SEQ ID NO: 628041 - RNA, 24 nt, Human
cagcacuuugggaggcugaggcag

SEQ ID NO: 628042 - RNA, 24 nt, Human
caggcggaucacuugaggucagga

SEQ ID NO: 628043 - RNA, 19 nt, Human
cauauacagcauggauaua

SEQ ID NO: 628044 - RNA, 19 nt, Human
caucacacuauucacaaua

SEQ ID NO: 628045 - RNA, 19 nt, Human
ccacugcacuccaguuugg

SEQ ID NO: 628046 - RNA, 21 nt, Human
ccacugcacuccaguuuggau

SEQ ID NO: 628047 - RNA, 24 nt, Human
ccacugcacuccaguuuggaugac

SEQ ID NO: 628048 - RNA, 20 nt, Human
ccuguaaucccagcacuuug

SEQ ID NO: 628049 - RNA, 22 nt, Human
ccuguaaucccagcacuuuggg

SEQ ID NO: 628050 - RNA, 24 nt, Human
cggaucacuugaggucaggaguuc

SEQ ID NO: 628051 - RNA, 27 nt, Human
cggaucacuugaggucaggaguucaag

SEQ ID NO: 628052 - RNA, 18 nt, Human
cucaaaaaaaaaaaaaaa

SEQ ID NO: 628053 - RNA, 24 nt, Human
cucaugccuguaaucccagcacuu

SEQ ID NO: 628054 - RNA, 22 nt, Human
cucucugcagguugagcuuuau

SEQ ID NO: 628055 - RNA, 19 nt, Human
cucugucucaaaaaaaaaa

SEQ ID NO: 628056 - RNA, 27 nt, Human
cugaaacugugaauaguaccgaaccug

SEQ ID NO: 628057 - RNA, 18 nt, Human
cugaccuucaccgccaag

SEQ ID NO: 628058 - RNA, 21 nt, Human
cuggccaacauggugaaaccc

SEQ ID NO: 628059 - RNA, 24 nt, Human
cuggccaacauggugaaacccugu

SEQ ID NO: 628060 - RNA, 26 nt, Human
cuggcugaaggcuuuuggagcucauu

SEQ ID NO: 628061 - RNA, 19 nt, Human
cuuuggggucauuauacaa

SEQ ID NO: 628062 - RNA, 22 nt, Human
gacaacugagacagcuaaggga

SEQ ID NO: 628063 - RNA, 24 nt, Human
gacagagcaagacucugucucaaa

SEQ ID NO: 628064 - RNA, 23 nt, Human
gagguugcagugagccaagauug

SEQ ID NO: 628065 - RNA, 19 nt, Human
gauaaagguuuuuccacau

SEQ ID NO: 628066 - RNA, 23 nt, Human
gaucacuugaggucaggaguuca

SEQ ID NO: 628067 - RNA, 24 nt, Human
gaucacuugaggucaggaguucaa

SEQ ID NO: 628068 - RNA, 24 nt, Human
gcacuccaguuuggaugacagagc

SEQ ID NO: 628069 - RNA, 22 nt, Human
gcaggagaaucgguugaaccca

SEQ ID NO: 628070 - RNA, 24 nt, Human
gccaacauggugaaacccugucuc

SEQ ID NO: 628071 - RNA, 22 nt, Human
gcuaugaggguugacuucuggc

SEQ ID NO: 628072 - RNA, 24 nt, Human
gcuggccaacauggugaaacccug

SEQ ID NO: 628073 - RNA, 22 nt, Human
ggagguugcagugagccaagau

SEQ ID NO: 628074 - RNA, 24 nt, Human
ggagguugcagugagccaagauug

SEQ ID NO: 628075 - RNA, 22 nt, Human
ggaucacuugaggucaggaguu

SEQ ID NO: 628076 - RNA, 23 nt, Human
ggaucacuugaggucaggaguuc

SEQ ID NO: 628077 - RNA, 18 nt, Human
gggcuugcuuuuggugga

SEQ ID NO: 628078 - RNA, 23 nt, Human
ggugcaguggcucaugccuguaa

SEQ ID NO: 628079 - RNA, 21 nt, Human
gugaaacccugucucuacuaa

SEQ ID NO: 628080 - RNA, 20 nt, Human
uaaaaauacaaauuagcugc

SEQ ID NO: 628081 - RNA, 22 nt, Human
uaaacacuuuuccacauucagu

SEQ ID NO: 628082 - RNA, 18 nt, Human
uaacaaccucagcauaca

SEQ ID NO: 628083 - RNA, 23 nt, Human
uaacacuaaaagauuucccacau

SEQ ID NO: 628084 - RNA, 24 nt, Human
uaacacuaaaagauuucccacauu

SEQ ID NO: 628085 - RNA, 18 nt, Human
uaaugcacaauaugacaa

SEQ ID NO: 628086 - RNA, 20 nt, Human
ucaaaaaaaaaaaaaaaaaa

SEQ ID NO: 628087 - RNA, 21 nt, Human
ucaaaaaaaaaaaaaaaaaaa

SEQ ID NO: 628088 - RNA, 24 nt, Human
ucaaaaaaaaaaaaaaaaaaagau

SEQ ID NO: 628089 - RNA, 25 nt, Human
ucaagccgggugcaguggcucaugc

SEQ ID NO: 628090 - RNA, 22 nt, Human
ucaugccuguaaucccagcacu

SEQ ID NO: 628091 - RNA, 24 nt, Human
uccaguuuggaugacagagcaaga

SEQ ID NO: 628092 - RNA, 24 nt, Human
ucucacagacacugcauuuauagg

SEQ ID NO: 628093 - RNA, 19 nt, Human
ucucuacuaaaaauacaaa

SEQ ID NO: 628094 - RNA, 18 nt, Human
ucucugcagguugagcuu

SEQ ID NO: 628095 - RNA, 26 nt, Human
ucugacaacugagacagcuaagggac

SEQ ID NO: 628096 - RNA, 23 nt, Human
ucugucucaaaaaaaaaaaaaaa

SEQ ID NO: 628097 - RNA, 25 nt, Human
ugacagcaaaacuagcacaaguuuc

SEQ ID NO: 628098 - RNA, 22 nt, Human
ugagacuaagugaggaagcugg

SEQ ID NO: 628099 - RNA, 24 nt, Human
ugagaguugauuuaacacuaaaag

SEQ ID NO: 628100 - RNA, 22 nt, Human
ugagccaagauugugccacugc

SEQ ID NO: 628101 - RNA, 20 nt, Human
ugaggcaggagaaucgguug

SEQ ID NO: 628102 - RNA, 24 nt, Human
ugaggcaggagaaucgguugaacc

SEQ ID NO: 628103 - RNA, 25 nt, Human
ugaggcaggagaaucgguugaaccc

SEQ ID NO: 628104 - RNA, 24 nt, Human
ugaggcaggcggaucacuugaggu

SEQ ID NO: 628105 - RNA, 26 nt, Human
ugaggcaggcggaucacuugagguca

SEQ ID NO: 628106 - RNA, 19 nt, Human
ugauuugcauccugagcag

SEQ ID NO: 628107 - RNA, 21 nt, Human
ugcaacuuaugcauuuauguu

SEQ ID NO: 628108 - RNA, 22 nt, Human
ugcacuguggccacaacuuuug

SEQ ID NO: 628109 - RNA, 23 nt, Human
ugccuguaaucccaacuauuugg

SEQ ID NO: 628110 - RNA, 24 nt, Human
ugccuguaaucccaacuauuuggg

SEQ ID NO: 628111 - RNA, 23 nt, Human
ugccuguaaucccagcacuuugg

SEQ ID NO: 628112 - RNA, 22 nt, Human
uggagaucuccuucugaggccu

SEQ ID NO: 628113 - RNA, 20 nt, Human
uggaugacagagcaagacuc

SEQ ID NO: 628114 - RNA, 21 nt, Human
uggcaugugccuguaauccca

SEQ ID NO: 628115 - RNA, 24 nt, Human
uggccaacauggugaaacccuguc

SEQ ID NO: 628116 - RNA, 24 nt, Human
uggcucaugccuguaaucccagca

SEQ ID NO: 628117 - RNA, 18 nt, Human
ugggaggcugaggcaggc

SEQ ID NO: 628118 - RNA, 20 nt, Human
ugggaggcugaggcaggcgg

SEQ ID NO: 628119 - RNA, 24 nt, Human
ugggaggcugaggcaggcggauca

SEQ ID NO: 628120 - RNA, 23 nt, Human
ugggagguugaggcaggagaauc

SEQ ID NO: 628121 - RNA, 22 nt, Human
ugggcggguagcauauacagca

SEQ ID NO: 628122 - RNA, 24 nt, Human
ugguggcaugugccuguaauccca

SEQ ID NO: 628123 - RNA, 23 nt, Human
uguagaguuucuccccaguuuga

SEQ ID NO: 628124 - RNA, 22 nt, Human
ugugccacugcacuccaguuug

SEQ ID NO: 628125 - RNA, 24 nt, Human
ugugccuguaaucccaacuauuug

SEQ ID NO: 628126 - RNA, 19 nt, Human
uuacacucaaugaauucuu

SEQ ID NO: 628127 - RNA, 24 nt, Human
uuagcugcguaugguggcaugugc

SEQ ID NO: 628128 - RNA, 22 nt, Human
uucaagccgggugcaguggcuc

SEQ ID NO: 628129 - RNA, 24 nt, Human
uuccuacugaaggcuuucucacag

SEQ ID NO: 628130 - RNA, 20 nt, Human
uuccuccuucacaauuucug

SEQ ID NO: 628131 - RNA, 23 nt, Human
uucugcucuggacaaaggaugga

SEQ ID NO: 628132 - RNA, 24 nt, Human
uugaacccaagaggcggagguugc

SEQ ID NO: 628133 - RNA, 20 nt, Human
uugacuuccuacugaaggcu

SEQ ID NO: 628134 - RNA, 22 nt, Human
uugcagugagccaagauugugc

SEQ ID NO: 628135 - RNA, 25 nt, Human
uugggaggcugaggcaggcggauca

SEQ ID NO: 628136 - RNA, 24 nt, Human
uuuaacacuaaaagauuucccaca

SEQ ID NO: 628137 - RNA, 19 nt, Human
uuuauagggucucucucca

SEQ ID NO: 628138 - RNA, 23 nt, Human
uuuauugaaugauuugaguagcu

SEQ ID NO: 628139 - RNA, 19 nt, Human
uuuguagaguuucucccca

SEQ ID NO: 628140 - RNA, 24 nt, Human
uuuuccacauucacugcauucaua

SEQ ID NO: 628141 - RNA, 23 nt, Human
aaaaaaacacaguaaaagauacc

SEQ ID NO: 628142 - RNA, 22 nt, Human
aaaaaacaaaaaaacaaacaaa

SEQ ID NO: 628143 - RNA, 25 nt, Human
aaaaaacaaaaaaacaaacaaacaa

SEQ ID NO: 628144 - RNA, 26 nt, Human
aaaaaacaaaaaaacaaacaaacaaa

SEQ ID NO: 628145 - RNA, 26 nt, Human
aaaaacaaacaaacaaaaaaacacag

SEQ ID NO: 628146 - RNA, 23 nt, Human
aaaacaaaaaaacaaacaaacaa

SEQ ID NO: 628147 - RNA, 22 nt, Human
aaaacaaacaaacaaaaaaaca

SEQ ID NO: 628148 - RNA, 23 nt, Human
aaacaaaaaaacacaguaaaaga

SEQ ID NO: 628149 - RNA, 21 nt, Human
aaacaaacaaaaaaacacagu

SEQ ID NO: 628150 - RNA, 21 nt, Human
aaacaaacaaacaaaaaaaca

SEQ ID NO: 628151 - RNA, 18 nt, Human
aaagauaccacccagcua

SEQ ID NO: 628152 - RNA, 21 nt, Human
aacaaaaaaacaaacaaacaa

SEQ ID NO: 628153 - RNA, 22 nt, Human
aacaaaaaaacacaguaaaaga

SEQ ID NO: 628154 - RNA, 22 nt, Human
aacacaguaaaagauaccaccc

SEQ ID NO: 628155 - RNA, 22 nt, Human
aaccucagcaagccccaagcag

SEQ ID NO: 628156 - RNA, 21 nt, Human
aagacccucucaccguccacc

SEQ ID NO: 628157 - RNA, 19 nt, Human
aagggggggccacaggguc

SEQ ID NO: 628158 - RNA, 21 nt, Human
aauccaaaggacucugacagg

SEQ ID NO: 628159 - RNA, 23 nt, Human
acaaaaaacaaaaaaacaaacaa

SEQ ID NO: 628160 - RNA, 21 nt, Human
acagcuucagaucaaaaagcc

SEQ ID NO: 628161 - RNA, 23 nt, Human
accucagcaagccccaagcagua

SEQ ID NO: 628162 - RNA, 23 nt, Human
accuuccuuccuucuuuggucuu

SEQ ID NO: 628163 - RNA, 22 nt, Human
agaaaagugagucaaggccaga

SEQ ID NO: 628164 - RNA, 18 nt, Human
agaaagacgaagaggcag

SEQ ID NO: 628165 - RNA, 24 nt, Human
agaaagacgaagaggcaggagagc

SEQ ID NO: 628166 - RNA, 19 nt, Human
agccagaaaagugagucaa

SEQ ID NO: 628167 - RNA, 23 nt, Human
agugcuccuccaaauugguguau

SEQ ID NO: 628168 - RNA, 21 nt, Human
auaaaagggguuuauguaaca

SEQ ID NO: 628169 - RNA, 22 nt, Human
auuuaagacccucucaccgucc

SEQ ID NO: 628170 - RNA, 23 nt, Human
caaaaaacaaaaaaacaaacaaa

SEQ ID NO: 628171 - RNA, 20 nt, Human
caaacaaacaaaaaaacaca

SEQ ID NO: 628172 - RNA, 21 nt, Human
caagccccaagcaguagaagg

SEQ ID NO: 628173 - RNA, 24 nt, Human
caaggccagacucacuaugggguc

SEQ ID NO: 628174 - RNA, 23 nt, Human
caccccaaacagcuucagaucaa

SEQ ID NO: 628175 - RNA, 19 nt, Human
cacugccuucagccuucac

SEQ ID NO: 628176 - RNA, 23 nt, Human
cagaaaagugagucaaggccaga

SEQ ID NO: 628177 - RNA, 22 nt, Human
cagauaucccccaucuuguccu

SEQ ID NO: 628178 - RNA, 19 nt, Human
cagauccccugcuacugug

SEQ ID NO: 628179 - RNA, 18 nt, Human
cagcuagcagaaaggacu

SEQ ID NO: 628180 - RNA, 19 nt, Human
caguagaaugaggcuuccc

SEQ ID NO: 628181 - RNA, 24 nt, Human
cagugcuccuccaaauugguguau

SEQ ID NO: 628182 - RNA, 21 nt, Human
ccagaaaagugagucaaggcc

SEQ ID NO: 628183 - RNA, 18 nt, Human
ccaucuuguccucuugca

SEQ ID NO: 628184 - RNA, 23 nt, Human
ccccaaacagcuucagaucaaaa

SEQ ID NO: 628185 - RNA, 19 nt, Human
ccucagauaucccccaucu

SEQ ID NO: 628186 - RNA, 20 nt, Human
ccuuccuuccuucuuugguc

SEQ ID NO: 628187 - RNA, 21 nt, Human
cucaaccucagcaagccccaa

SEQ ID NO: 628188 - RNA, 27 nt, Human
cugacgguacugauaauccaaaggacu

SEQ ID NO: 628189 - RNA, 19 nt, Human
cugccuugcugugaugccc

SEQ ID NO: 628190 - RNA, 19 nt, Human
cuucagaucaaaaagccug

SEQ ID NO: 628191 - RNA, 24 nt, Human
gcaguagaaugaggcuucccugga

SEQ ID NO: 628192 - RNA, 25 nt, Human
gccuucacuuacucagaaauaacuc

SEQ ID NO: 628193 - RNA, 20 nt, Human
ggcuaggcagaggggccagc

SEQ ID NO: 628194 - RNA, 22 nt, Human
uaaaagauaccacccagcuagc

SEQ ID NO: 628195 - RNA, 19 nt, Human
uaaaggguggagaacagca

SEQ ID NO: 628196 - RNA, 23 nt, Human
uaacaaaaaacaaaaaaacaaac

SEQ ID NO: 628197 - RNA, 18 nt, Human
uaucucaaccucagcaag

SEQ ID NO: 628198 - RNA, 23 nt, Human
ucaaggccagacucacuaugggg

SEQ ID NO: 628199 - RNA, 23 nt, Human
ucaccccaaacagcuucagauca

SEQ ID NO: 628200 - RNA, 18 nt, Human
ucagaaagacgaagaggc

SEQ ID NO: 628201 - RNA, 19 nt, Human
ucagaaagacgaagaggca

SEQ ID NO: 628202 - RNA, 20 nt, Human
ucagaaagacgaagaggcag

SEQ ID NO: 628203 - RNA, 22 nt, Human
ucagagucaguguagguaaaga

SEQ ID NO: 628204 - RNA, 23 nt, Human
ucaggaucuccugacgguacuga

SEQ ID NO: 628205 - RNA, 20 nt, Human
ucauaucucaaccucagcaa

SEQ ID NO: 628206 - RNA, 18 nt, Human
uccaaaggacucugacag

SEQ ID NO: 628207 - RNA, 18 nt, Human
ucucugacagugcuccuc

SEQ ID NO: 628208 - RNA, 21 nt, Human
ucucugacagugcuccuccaa

SEQ ID NO: 628209 - RNA, 23 nt, Human
ucugacaggcuguuucauuuugg

SEQ ID NO: 628210 - RNA, 23 nt, Human
ucuugcacugugggccagggcug

SEQ ID NO: 628211 - RNA, 20 nt, Human
ucuuggaagaugaaaggcuc

SEQ ID NO: 628212 - RNA, 19 nt, Human
ucuuuggucuuggaagaug

SEQ ID NO: 628213 - RNA, 19 nt, Human
ugcccaucugacaguggcu

SEQ ID NO: 628214 - RNA, 19 nt, Human
uggaaagaggcugagacuc

SEQ ID NO: 628215 - RNA, 21 nt, Human
uggaaagaggcugagacucac

SEQ ID NO: 628216 - RNA, 24 nt, Human
uggagaacagcagauccccugcua

SEQ ID NO: 628217 - RNA, 19 nt, Human
uggccucagauauccccca

SEQ ID NO: 628218 - RNA, 25 nt, Human
uggggucaccccaaacagcuucaga

SEQ ID NO: 628219 - RNA, 18 nt, Human
uucaggaucuccugacgg

SEQ ID NO: 628220 - RNA, 25 nt, Human
uuuaagacccucucaccguccaccu

SEQ ID NO: 628221 - RNA, 21 nt, Human
cggcgaaggcgacacucaggc

SEQ ID NO: 628222 - RNA, 23 nt, Human
gcggcaguggugagucucggcac

SEQ ID NO: 628223 - RNA, 18 nt, Human
guuuuuuuuuuuuccuuu

SEQ ID NO: 628224 - RNA, 19 nt, Human
uaaucugcuuacaguauga

SEQ ID NO: 628225 - RNA, 21 nt, Human
ucaggcccagcggccgcggca

SEQ ID NO: 628226 - RNA, 20 nt, Human
ucuccaggauuuucaauaug

SEQ ID NO: 628227 - RNA, 24 nt, Human
ugagagguagaaacuuuuugcuca

SEQ ID NO: 628228 - RNA, 24 nt, Human
ugucccuuuuuuaaguagucaaga

SEQ ID NO: 628229 - RNA, 18 nt, Human
uguuuuuuuuuuuuccuu

SEQ ID NO: 628230 - RNA, 20 nt, Human
uuaggcaaaggagcaaauag

SEQ ID NO: 628231 - RNA, 20 nt, Human
uuuuuuuuuuuuuuuuuugg

SEQ ID NO: 628232 - RNA, 24 nt, Human
uuuuuuuuuuuuuuuuuuguuuuu

SEQ ID NO: 628233 - RNA, 25 nt, Human
acccccagcccuugcacaaaaccca

SEQ ID NO: 628234 - RNA, 21 nt, Human
agacccccagcccuugcacaa

SEQ ID NO: 628235 - RNA, 22 nt, Human
aggcaggagacccccagcccuu

SEQ ID NO: 628236 - RNA, 22 nt, Human
cacaaaacccacucccuuggau

SEQ ID NO: 628237 - RNA, 23 nt, Human
caccaggagaggcaggagacccc

SEQ ID NO: 628238 - RNA, 18 nt, Human
caccggcgacaccaggag

SEQ ID NO: 628239 - RNA, 23 nt, Human
cccccagcccuugcacaaaaccc

SEQ ID NO: 628240 - RNA, 25 nt, Human
cccccagcccuugcacaaaacccac

SEQ ID NO: 628241 - RNA, 21 nt, Human
cccgcagagaccucacaugcc

SEQ ID NO: 628242 - RNA, 18 nt, Human
ccuggcccugcggcgugu

SEQ ID NO: 628243 - RNA, 21 nt, Human
ccuugcacaaaacccacuccc

SEQ ID NO: 628244 - RNA, 24 nt, Human
ccuugcacaaaacccacucccuug

SEQ ID NO: 628245 - RNA, 22 nt, Human
cugcggcguguuccucagaggc

SEQ ID NO: 628246 - RNA, 22 nt, Human
cugcguucgugccuccauuugc

SEQ ID NO: 628247 - RNA, 21 nt, Human
gacaccaggagaggcaggaga

SEQ ID NO: 628248 - RNA, 24 nt, Human
uauugcaaaaaaaaaacaaaaccc

SEQ ID NO: 628249 - RNA, 21 nt, Human
ucgugccuccauuugccagaa

SEQ ID NO: 628250 - RNA, 21 nt, Human
ugcaaaaaaaaaacaaaaccc

SEQ ID NO: 628251 - RNA, 23 nt, Human
ugcaaaaaaaaaacaaaacccau

SEQ ID NO: 628252 - RNA, 20 nt, Human
uggccccugcguucgugccu

SEQ ID NO: 628253 - RNA, 21 nt, Human
uuugccagaaaaugagccacc

SEQ ID NO: 628254 - RNA, 23 nt, Human
uuugccagaaaaugagccaccgg

SEQ ID NO: 628255 - RNA, 24 nt, Human
aaagugcugggauuacaggcauga

SEQ ID NO: 628256 - RNA, 22 nt, Human
aagagcucgguccuggccaggc

SEQ ID NO: 628257 - RNA, 19 nt, Human
aagugcugggauuacaggc

SEQ ID NO: 628258 - RNA, 21 nt, Human
aagugcugggauuacaggcau

SEQ ID NO: 628259 - RNA, 26 nt, Human
aagugcugggauuacaggcaugagcc

SEQ ID NO: 628260 - RNA, 24 nt, Human
accauguugggcaggcuggucucg

SEQ ID NO: 628261 - RNA, 20 nt, Human
agaggggugggggucccaca

SEQ ID NO: 628262 - RNA, 23 nt, Human
agagggugggaggacccagggcc

SEQ ID NO: 628263 - RNA, 22 nt, Human
agagugggcugcaccaggccug

SEQ ID NO: 628264 - RNA, 19 nt, Human
agcacaggagcagccacca

SEQ ID NO: 628265 - RNA, 20 nt, Human
aggccgacugccuccaggca

SEQ ID NO: 628266 - RNA, 23 nt, Human
aggggugggagagugggcggggc

SEQ ID NO: 628267 - RNA, 22 nt, Human
agggugggaggacccagggcug

SEQ ID NO: 628268 - RNA, 28 nt, Human
agggugggaggacccagggcugggaggg

SEQ ID NO: 628269 - RNA, 18 nt, Human
agugcagcuucaggggug

SEQ ID NO: 628270 - RNA, 19 nt, Human
agugccugucucugaagga

SEQ ID NO: 628271 - RNA, 24 nt, Human
auuuuuaguagagacagguuucac

SEQ ID NO: 628272 - RNA, 24 nt, Human
caaagugcugggauuacaggcaug

SEQ ID NO: 628273 - RNA, 24 nt, Human
caccauguugggcaggcuggucuc

SEQ ID NO: 628274 - RNA, 21 nt, Human
caccgcacacagggccugggc

SEQ ID NO: 628275 - RNA, 22 nt, Human
caggaggaccugggggcugggg

SEQ ID NO: 628276 - RNA, 21 nt, Human
caggccgacugccuccaggca

SEQ ID NO: 628277 - RNA, 24 nt, Human
cagggcccucccagagcaguccga

SEQ ID NO: 628278 - RNA, 27 nt, Human
cagggcugggaggggaguggucaggag

SEQ ID NO: 628279 - RNA, 23 nt, Human
ccaaagugcugggauuacaggca

SEQ ID NO: 628280 - RNA, 24 nt, Human
ccaaagugcugggauuacaggcau

SEQ ID NO: 628281 - RNA, 20 nt, Human
ccagugccugucucugaagg

SEQ ID NO: 628282 - RNA, 26 nt, Human
ccaguggcuuggcucagagucugggg

SEQ ID NO: 628283 - RNA, 24 nt, Human
cccaaagugcugggauuacaggca

SEQ ID NO: 628284 - RNA, 22 nt, Human
cccaggaccuggggggugcagg

SEQ ID NO: 628285 - RNA, 19 nt, Human
ccccccgccccaaggaagc

SEQ ID NO: 628286 - RNA, 22 nt, Human
cccuggaggcgcuccugggggc

SEQ ID NO: 628287 - RNA, 21 nt, Human
ccugaccucgugauucgccug

SEQ ID NO: 628288 - RNA, 19 nt, Human
ccugcagccccagcuguag

SEQ ID NO: 628289 - RNA, 24 nt, Human
ccugccucggccucccaaagugcu

SEQ ID NO: 628290 - RNA, 24 nt, Human
cuccugaccucgugauucgccugc

SEQ ID NO: 628291 - RNA, 23 nt, Human
cuggaggcgcuccugggggcugg

SEQ ID NO: 628292 - RNA, 24 nt, Human
cugggggcugggggagcuccuagg

SEQ ID NO: 628293 - RNA, 26 nt, Human
cuggggggagcuaggugggugggagu

SEQ ID NO: 628294 - RNA, 25 nt, Human
cuucaggggcuggggugcccucccc

SEQ ID NO: 628295 - RNA, 21 nt, Human
gaauggaguggggucugcagg

SEQ ID NO: 628296 - RNA, 22 nt, Human
gaccucgugauucgccugccuc

SEQ ID NO: 628297 - RNA, 24 nt, Human
gaccucgugauucgccugccucgg

SEQ ID NO: 628298 - RNA, 22 nt, Human
gaccugggggcugggggagcuc

SEQ ID NO: 628299 - RNA, 21 nt, Human
gaccuggggggugcagggcuc

SEQ ID NO: 628300 - RNA, 22 nt, Human
gacugccuccaggcacagcugc

SEQ ID NO: 628301 - RNA, 23 nt, Human
gagcaguccgagcuguggggugg

SEQ ID NO: 628302 - RNA, 18 nt, Human
gaggaccugggggcuggg

SEQ ID NO: 628303 - RNA, 18 nt, Human
gauuacaggcaugagcca

SEQ ID NO: 628304 - RNA, 22 nt, Human
gauuacaggcaugagccaccgc

SEQ ID NO: 628305 - RNA, 23 nt, Human
gauuacaggcaugagccaccgca

SEQ ID NO: 628306 - RNA, 26 nt, Human
gcaaacagcaggaagagccgguaccc

SEQ ID NO: 628307 - RNA, 26 nt, Human
gcagcuucagggguggggggaacgcc

SEQ ID NO: 628308 - RNA, 20 nt, Human
gcagugcugcuugucuucag

SEQ ID NO: 628309 - RNA, 20 nt, Human
gccuugccucccugcaccag

SEQ ID NO: 628310 - RNA, 25 nt, Human
gcgccagugccugucucugaaggag

SEQ ID NO: 628311 - RNA, 24 nt, Human
gcggcggccugcgggggaugucca

SEQ ID NO: 628312 - RNA, 23 nt, Human
gcuggucucgaacuccugaccuc

SEQ ID NO: 628313 - RNA, 21 nt, Human
ggaagccucuggcgccagugc

SEQ ID NO: 628314 - RNA, 22 nt, Human
ggauuacaggcaugagccaccg

SEQ ID NO: 628315 - RNA, 21 nt, Human
ggccuugccucccugcaccag

SEQ ID NO: 628316 - RNA, 24 nt, Human
ggcuggucucgaacuccugaccuc

SEQ ID NO: 628317 - RNA, 20 nt, Human
gggcagcaggcgguaccucu

SEQ ID NO: 628318 - RNA, 18 nt, Human
gggcggggcccuggaggc

SEQ ID NO: 628319 - RNA, 19 nt, Human
gggcgugguguccagggag

SEQ ID NO: 628320 - RNA, 21 nt, Human
gggcugggaggggagugguca

SEQ ID NO: 628321 - RNA, 21 nt, Human
ggggagcuccuagggccuggg

SEQ ID NO: 628322 - RNA, 21 nt, Human
ggggcugggggagcuccuagg

SEQ ID NO: 628323 - RNA, 23 nt, Human
ggggcugggggagcuccuagggc

SEQ ID NO: 628324 - RNA, 18 nt, Human
gggggcccuggggggagc

SEQ ID NO: 628325 - RNA, 19 nt, Human
ggggugagggugggagucc

SEQ ID NO: 628326 - RNA, 21 nt, Human
ggggugcccuccccccgcccc

SEQ ID NO: 628327 - RNA, 22 nt, Human
ggggugggggugagggugggag

SEQ ID NO: 628328 - RNA, 19 nt, Human
ggucucgaacuccugaccu

SEQ ID NO: 628329 - RNA, 23 nt, Human
gguggggaccuccccaggggagc

SEQ ID NO: 628330 - RNA, 28 nt, Human
gugcagcuucagggguggggggaacgcc

SEQ ID NO: 628331 - RNA, 19 nt, Human
gugggaggacccagggcug

SEQ ID NO: 628332 - RNA, 19 nt, Human
gugggggugggggugaggg

SEQ ID NO: 628333 - RNA, 22 nt, Human
uacaggcaugagccaccgcacc

SEQ ID NO: 628334 - RNA, 21 nt, Human
uagagacagguuucaccaugu

SEQ ID NO: 628335 - RNA, 23 nt, Human
uaguagagacagguuucaccaug

SEQ ID NO: 628336 - RNA, 20 nt, Human
uccauuuuugccacugcagu

SEQ ID NO: 628337 - RNA, 24 nt, Human
ucccaaagugcugggauuacaggc

SEQ ID NO: 628338 - RNA, 18 nt, Human
ucggccucccaaagugcu

SEQ ID NO: 628339 - RNA, 19 nt, Human
ucgguccuggccaggcgcu

SEQ ID NO: 628340 - RNA, 19 nt, Human
ucucgaacuccugaccucg

SEQ ID NO: 628341 - RNA, 20 nt, Human
ugacgccaggcgggggcagc

SEQ ID NO: 628342 - RNA, 23 nt, Human
ugaggacacccaccugcgccugu

SEQ ID NO: 628343 - RNA, 24 nt, Human
ugcagccccagcuguaggugcugg

SEQ ID NO: 628344 - RNA, 25 nt, Human
ugcagugcugcuugucuucaggggc

SEQ ID NO: 628345 - RNA, 26 nt, Human
ugcagugcugcuugucuucaggggcu

SEQ ID NO: 628346 - RNA, 21 nt, Human
ugccucggccucccaaagugc

SEQ ID NO: 628347 - RNA, 24 nt, Human
ugccucggccucccaaagugcugg

SEQ ID NO: 628348 - RNA, 25 nt, Human
uggcacugcaggccgacugccucca

SEQ ID NO: 628349 - RNA, 23 nt, Human
uggcagggacugagcugcagaca

SEQ ID NO: 628350 - RNA, 21 nt, Human
uggcuuggcucagagucuggc

SEQ ID NO: 628351 - RNA, 19 nt, Human
ugggagagugggcggggcc

SEQ ID NO: 628352 - RNA, 18 nt, Human
ugggaggacccagggcug

SEQ ID NO: 628353 - RNA, 24 nt, Human
ugggaggggaguggucaggaggaa

SEQ ID NO: 628354 - RNA, 18 nt, Human
ugggauuacaggcaugag

SEQ ID NO: 628355 - RNA, 19 nt, Human
ugggauuacaggcaugagc

SEQ ID NO: 628356 - RNA, 21 nt, Human
ugggauuacaggcaugagcca

SEQ ID NO: 628357 - RNA, 22 nt, Human
ugggauuacaggcaugagccac

SEQ ID NO: 628358 - RNA, 23 nt, Human
ugggauuacaggcaugagccacc

SEQ ID NO: 628359 - RNA, 24 nt, Human
ugggauuacaggcaugagccaccg

SEQ ID NO: 628360 - RNA, 24 nt, Human
ugggauuacaggcaugagccaccg

SEQ ID NO: 628361 - RNA, 26 nt, Human
ugggauuacaggcaugagccaccgca

SEQ ID NO: 628362 - RNA, 24 nt, Human
ugggcaggcuggucucgaacuccu

SEQ ID NO: 628363 - RNA, 19 nt, Human
uggggggcccuggggggag

SEQ ID NO: 628364 - RNA, 21 nt, Human
ugggugggagugcagcuucag

SEQ ID NO: 628365 - RNA, 23 nt, Human
uuaguagagacagguuucaccau

SEQ ID NO: 628366 - RNA, 24 nt, Human
uuaguagagacagguuucaccaug

SEQ ID NO: 628367 - RNA, 22 nt, Human
uugcagccacccguugucuccc

SEQ ID NO: 628368 - RNA, 22 nt, Human
uugucuucaggggcuggggugc

SEQ ID NO: 628369 - RNA, 24 nt, Human
uuuaguagagacagguuucaccau

SEQ ID NO: 628370 - RNA, 21 nt, Human
uuucaccauguugggcaggcu

SEQ ID NO: 628371 - RNA, 22 nt, Human
uuuuguauuuuuaguagagaca

SEQ ID NO: 628372 - RNA, 21 nt, Human
uuuuuguauuuuuaguagaga

SEQ ID NO: 628373 - RNA, 21 nt, Human
uuuuuuguauuuuuaguagag

SEQ ID NO: 628374 - RNA, 22 nt, Human
uuuuuuuuuuuuuuuuguuuuu

SEQ ID NO: 628375 - RNA, 24 nt, Human
aaaaugaaacacauuaguuacaaa

SEQ ID NO: 628376 - RNA, 20 nt, Human
aaacaauaucuagcacugca

SEQ ID NO: 628377 - RNA, 24 nt, Human
aaacaauaucuagcacugcaaccc

SEQ ID NO: 628378 - RNA, 21 nt, Human
aacacauuaguuacaaaaacc

SEQ ID NO: 628379 - RNA, 23 nt, Human
acagcaaauaaaaccauuuaaga

SEQ ID NO: 628380 - RNA, 24 nt, Human
acuggcucugcauuuauuggucuu

SEQ ID NO: 628381 - RNA, 20 nt, Human
agaaagcugauuuuuguagu

SEQ ID NO: 628382 - RNA, 23 nt, Human
aggcaucuuguuuaaaaugaaaa

SEQ ID NO: 628383 - RNA, 18 nt, Human
auuuguuaaaauagacuu

SEQ ID NO: 628384 - RNA, 21 nt, Human
caacccaaagcuaacagacaa

SEQ ID NO: 628385 - RNA, 20 nt, Human
cagcaaaauauaaaaaauga

SEQ ID NO: 628386 - RNA, 25 nt, Human
ccaacuaaguaaacauguaaaauua

SEQ ID NO: 628387 - RNA, 21 nt, Human
ccacugugacauauuucagca

SEQ ID NO: 628388 - RNA, 18 nt, Human
cccaaagcuaacagacaa

SEQ ID NO: 628389 - RNA, 19 nt, Human
ccugugcuugaaacacugg

SEQ ID NO: 628390 - RNA, 20 nt, Human
ccuuuaaaacagagcauaau

SEQ ID NO: 628391 - RNA, 21 nt, Human
gccugcugguauuuccugugc

SEQ ID NO: 628392 - RNA, 19 nt, Human
gcuccaaauagauaccgug

SEQ ID NO: 628393 - RNA, 19 nt, Human
uaaaaaaugaaacacauua

SEQ ID NO: 628394 - RNA, 20 nt, Human
uaacagcaaauaaaaccauu

SEQ ID NO: 628395 - RNA, 24 nt, Human
uaggaaaaaauguuuuauguagug

SEQ ID NO: 628396 - RNA, 18 nt, Human
uaguguuguuuguguaac

SEQ ID NO: 628397 - RNA, 24 nt, Human
uauuggcaucauccauauccaggg

SEQ ID NO: 628398 - RNA, 23 nt, Human
uauuuguuaaaauagacuuauuu

SEQ ID NO: 628399 - RNA, 24 nt, Human
ucacauguucacaaguuuuccaaa

SEQ ID NO: 628400 - RNA, 22 nt, Human
ugaaaacuuuccaaguuguaga

SEQ ID NO: 628401 - RNA, 24 nt, Human
ugaaacacauuaguuacaaaaacc

SEQ ID NO: 628402 - RNA, 23 nt, Human
uguaguguaguauuuacaaauac

SEQ ID NO: 628403 - RNA, 22 nt, Human
uguucacauguguauucacaug

SEQ ID NO: 628404 - RNA, 21 nt, Human
uucaaauguaagacuguucac

SEQ ID NO: 628405 - RNA, 24 nt, Human
uucagcaaaauauaaaaaaugaaa

SEQ ID NO: 628406 - RNA, 28 nt, Human
uuuaaaacaauaucuagcacugcaaccc

SEQ ID NO: 628407 - RNA, 22 nt, Human
uuuguaguguaguauuuacaaa

SEQ ID NO: 628408 - RNA, 23 nt, Human
uuuuugcuccaacuaaguaaaca

SEQ ID NO: 628409 - RNA, 18 nt, Human
uuuuuugcuugguuuuga

SEQ ID NO: 628410 - RNA, 21 nt, Human
aaaaaaaaguacauaggaaaa

SEQ ID NO: 628411 - RNA, 22 nt, Human
aacaauauaauguauauauuuu

SEQ ID NO: 628412 - RNA, 19 nt, Human
aauucugaacacuugguca

SEQ ID NO: 628413 - RNA, 20 nt, Human
acaaugcagcaaauagauac

SEQ ID NO: 628414 - RNA, 28 nt, Human
augaacauugguucuuuaaacacugaca

SEQ ID NO: 628415 - RNA, 19 nt, Human
caaaauccugaaacaauau

SEQ ID NO: 628416 - RNA, 24 nt, Human
caaaggcacaugaaaaugccaguc

SEQ ID NO: 628417 - RNA, 19 nt, Human
caaauacauggcucugagg

SEQ ID NO: 628418 - RNA, 23 nt, Human
ccaacuuucacgcuaguccccug

SEQ ID NO: 628419 - RNA, 20 nt, Human
cugcugccgcagccagcggc

SEQ ID NO: 628420 - RNA, 25 nt, Human
gcuaguccccugcugccgcagccag

SEQ ID NO: 628421 - RNA, 20 nt, Human
gggagcucagggcguccaca

SEQ ID NO: 628422 - RNA, 22 nt, Human
guccccugcugccgcagccagc

SEQ ID NO: 628423 - RNA, 18 nt, Human
uaacccagaaggugauau

SEQ ID NO: 628424 - RNA, 19 nt, Human
uaauuauaacauuuuccuu

SEQ ID NO: 628425 - RNA, 18 nt, Human
uacaaagaugaacauugg

SEQ ID NO: 628426 - RNA, 18 nt, Human
uacaaugcagcaaauaga

SEQ ID NO: 628427 - RNA, 21 nt, Human
ucaaauacauggcucugaggg

SEQ ID NO: 628428 - RNA, 21 nt, Human
uccccugcugccgcagccagc

SEQ ID NO: 628429 - RNA, 24 nt, Human
ucuuuucuuuuuuuuagccaacuu

SEQ ID NO: 628430 - RNA, 21 nt, Human
ugaacacuuggucaaaggcac

SEQ ID NO: 628431 - RNA, 22 nt, Human
ugaacacuuggucaaaggcaca

SEQ ID NO: 628432 - RNA, 22 nt, Human
ugauugaagcauucucaaauac

SEQ ID NO: 628433 - RNA, 24 nt, Human
ugcagcaaauagauacauuaauua

SEQ ID NO: 628434 - RNA, 21 nt, Human
uguauauauuuuaagccacau

SEQ ID NO: 628435 - RNA, 23 nt, Human
uguauauauuuuaagccacauuu

SEQ ID NO: 628436 - RNA, 23 nt, Human
uuuuuuuuuuuuuuuuuuuacgg

SEQ ID NO: 628437 - RNA, 23 nt, Human
aaacaagccauuuaagacuugga

SEQ ID NO: 628438 - RNA, 20 nt, Human
aacugcguuuucucuuccug

SEQ ID NO: 628439 - RNA, 21 nt, Human
aagcaaaauaaguuaguacau

SEQ ID NO: 628440 - RNA, 23 nt, Human
acagugaacaggcuucaacuaaa

SEQ ID NO: 628441 - RNA, 19 nt, Human
accaaggagcaaaacgacg

SEQ ID NO: 628442 - RNA, 21 nt, Human
acggcaaaaagcaaagcaagg

SEQ ID NO: 628443 - RNA, 21 nt, Human
agaccgggccccggcugggcc

SEQ ID NO: 628444 - RNA, 19 nt, Human
agcaaggagauaacaugcc

SEQ ID NO: 628445 - RNA, 20 nt, Human
aggcccggggagccgggccc

SEQ ID NO: 628446 - RNA, 20 nt, Human
aggcuucaacuaaauauagu

SEQ ID NO: 628447 - RNA, 21 nt, Human
aggcuucaacuaaauauagug

SEQ ID NO: 628448 - RNA, 25 nt, Human
aucaaauaccaaggagcaaaacgac

SEQ ID NO: 628449 - RNA, 22 nt, Human
augagcaugcuuucuauacccc

SEQ ID NO: 628450 - RNA, 22 nt, Human
auuuacuggaaccaggucucca

SEQ ID NO: 628451 - RNA, 23 nt, Human
caaaaagcaaagcaaggagauaa

SEQ ID NO: 628452 - RNA, 23 nt, Human
cacaugggacacauuggcacacg

SEQ ID NO: 628453 - RNA, 21 nt, Human
cacuauauauaauaagcaaaa

SEQ ID NO: 628454 - RNA, 22 nt, Human
cacuauauauaauaagcaaaau

SEQ ID NO: 628455 - RNA, 22 nt, Human
cacuggugggacauuuacugga

SEQ ID NO: 628456 - RNA, 20 nt, Human
cagaauagagacugucacag

SEQ ID NO: 628457 - RNA, 22 nt, Human
caugggacacauuggcacacgg

SEQ ID NO: 628458 - RNA, 19 nt, Human
ccacuaggauaagaacggg

SEQ ID NO: 628459 - RNA, 20 nt, Human
ccacuaggauaagaacgggu

SEQ ID NO: 628460 - RNA, 20 nt, Human
ccccggcugggccgggugcc

SEQ ID NO: 628461 - RNA, 25 nt, Human
ccgcccgccuuagcccggcuuggac

SEQ ID NO: 628462 - RNA, 21 nt, Human
ccggugcggacgggaccccgc

SEQ ID NO: 628463 - RNA, 23 nt, Human
cggcaaaaagcaaagcaaggaga

SEQ ID NO: 628464 - RNA, 19 nt, Human
cggcugcuggggcugagga

SEQ ID NO: 628465 - RNA, 22 nt, Human
cggcugggccgggugccggugc

SEQ ID NO: 628466 - RNA, 22 nt, Human
cgggcggcugcuggggcugagg

SEQ ID NO: 628467 - RNA, 18 nt, Human
cuggggcugaggacaaaa

SEQ ID NO: 628468 - RNA, 18 nt, Human
cugucuugaaagugcaaa

SEQ ID NO: 628469 - RNA, 19 nt, Human
gaauagagacugucacaga

SEQ ID NO: 628470 - RNA, 19 nt, Human
gccagccgggcggcugcug

SEQ ID NO: 628471 - RNA, 18 nt, Human
gcgcucaggcccggggag

SEQ ID NO: 628472 - RNA, 20 nt, Human
gggacacauuggcacacggu

SEQ ID NO: 628473 - RNA, 22 nt, Human
uaaaacggcaaaaagcaaagca

SEQ ID NO: 628474 - RNA, 22 nt, Human
uaaagagcuauucaagacuucu

SEQ ID NO: 628475 - RNA, 21 nt, Human
uaacaugccagccuuagagaa

SEQ ID NO: 628476 - RNA, 21 nt, Human
uaauaagcaaaauaaguuagu

SEQ ID NO: 628477 - RNA, 21 nt, Human
uaccaaggagcaaaacgacag

SEQ ID NO: 628478 - RNA, 21 nt, Human
uaguacauguaaacuuaugca

SEQ ID NO: 628479 - RNA, 24 nt, Human
ucaugagcaugcuuucuauacccc

SEQ ID NO: 628480 - RNA, 23 nt, Human
uccugaaccacuaggauaagaac

SEQ ID NO: 628481 - RNA, 19 nt, Human
ugcagccagccgggcggcu

SEQ ID NO: 628482 - RNA, 19 nt, Human
ugcccucggccccucggcc

SEQ ID NO: 628483 - RNA, 18 nt, Human
ugcgcuccggugcccucg

SEQ ID NO: 628484 - RNA, 19 nt, Human
uggcacacgguaacaacaa

SEQ ID NO: 628485 - RNA, 19 nt, Human
uuuuuuuuuuuuaugggag

SEQ ID NO: 628486 - RNA, 24 nt, Human
uuuuuuuuuuuuuuuuuuuauggg

SEQ ID NO: 628487 - RNA, 20 nt, Human
aaaaagaaccuucccauucc

SEQ ID NO: 628488 - RNA, 18 nt, Human
aaagaaccuucccauucc

SEQ ID NO: 628489 - RNA, 19 nt, Human
aacaaagucuuuugucaag

SEQ ID NO: 628490 - RNA, 25 nt, Human
aagaaccuucccauucccaacucaa

SEQ ID NO: 628491 - RNA, 20 nt, Human
aagcaccacaguauugcagc

SEQ ID NO: 628492 - RNA, 22 nt, Human
aagcaccacaguauugcagcca

SEQ ID NO: 628493 - RNA, 24 nt, Human
aauaggccauccaugccacaaaua

SEQ ID NO: 628494 - RNA, 23 nt, Human
acacacacacacacacaugcaga

SEQ ID NO: 628495 - RNA, 29 nt, Human
acacacacacacacacaugcagacacaca

SEQ ID NO: 628496 - RNA, 26 nt, Human
acacacacacaugcagacacacacaa

SEQ ID NO: 628497 - RNA, 22 nt, Human
acacaugcagacacacacaaac

SEQ ID NO: 628498 - RNA, 21 nt, Human
accccuucccucuuaucucuc

SEQ ID NO: 628499 - RNA, 21 nt, Human
accuagguagguagcccuccu

SEQ ID NO: 628500 - RNA, 19 nt, Human
agaagaaacagagacuaga

SEQ ID NO: 628501 - RNA, 22 nt, Human
agaagaaacagagacuagaggc

SEQ ID NO: 628502 - RNA, 22 nt, Human
agacagcacaguggucacgauc

SEQ ID NO: 628503 - RNA, 25 nt, Human
agagacuagaggcugcguaaaagcc

SEQ ID NO: 628504 - RNA, 20 nt, Human
agcacuugggcugauggcug

SEQ ID NO: 628505 - RNA, 18 nt, Human
agcaggugaggagagggg

SEQ ID NO: 628506 - RNA, 24 nt, Human
agccaaacagcaggcuagauagga

SEQ ID NO: 628507 - RNA, 20 nt, Human
agcccuuugugcuggcggug

SEQ ID NO: 628508 - RNA, 23 nt, Human
aggggcaccuuuccuucuacccc

SEQ ID NO: 628509 - RNA, 20 nt, Human
aucaaaaaguaaagcacacc

SEQ ID NO: 628510 - RNA, 24 nt, Human
auggaggaaaagagggaaggcaag

SEQ ID NO: 628511 - RNA, 23 nt, Human
caaaaacaucucuagcgaagccc

SEQ ID NO: 628512 - RNA, 22 nt, Human
caaaaaguaaagcacacccuca

SEQ ID NO: 628513 - RNA, 23 nt, Human
caaaaaguaaagcacacccucac

SEQ ID NO: 628514 - RNA, 21 nt, Human
caacaccaacucccauaaccu

SEQ ID NO: 628515 - RNA, 23 nt, Human
caacuaaaucauccaagcucuua

SEQ ID NO: 628516 - RNA, 21 nt, Human
caagcuccugcucccacuuuu

SEQ ID NO: 628517 - RNA, 23 nt, Human
cacacccucaccucucuuccaca

SEQ ID NO: 628518 - RNA, 18 nt, Human
caccacaguauugcagcc

SEQ ID NO: 628519 - RNA, 20 nt, Human
caccacaguauugcagccag

SEQ ID NO: 628520 - RNA, 22 nt, Human
caccuccaagcuccugcuccca

SEQ ID NO: 628521 - RNA, 22 nt, Human
cagaagaaacagagacuagagg

SEQ ID NO: 628522 - RNA, 19 nt, Human
cagaagguagcccccagca

SEQ ID NO: 628523 - RNA, 20 nt, Human
cagacacacacaaaccuggc

SEQ ID NO: 628524 - RNA, 24 nt, Human
cagaguucccaaauaugugcuuuc

SEQ ID NO: 628525 - RNA, 19 nt, Human
cagcagaggugagauaagc

SEQ ID NO: 628526 - RNA, 24 nt, Human
caguggcuggagcaagacagcaca

SEQ ID NO: 628527 - RNA, 24 nt, Human
cauucccaacucaagcuaccagag

SEQ ID NO: 628528 - RNA, 18 nt, Human
ccaaagcccaugaguaca

SEQ ID NO: 628529 - RNA, 20 nt, Human
ccagcagaggugagauaagc

SEQ ID NO: 628530 - RNA, 21 nt, Human
ccauaaccuaaaagggggugg

SEQ ID NO: 628531 - RNA, 19 nt, Human
cccaacaccaacucccaua

SEQ ID NO: 628532 - RNA, 21 nt, Human
cccaacaccaacucccauaac

SEQ ID NO: 628533 - RNA, 19 nt, Human
cccauucccaacucaagcu

SEQ ID NO: 628534 - RNA, 23 nt, Human
ccccagcagaggugagauaagcu

SEQ ID NO: 628535 - RNA, 24 nt, Human
ccccggcagagcagcuugccacuu

SEQ ID NO: 628536 - RNA, 23 nt, Human
cccgcggcgaucgcugucccaag

SEQ ID NO: 628537 - RNA, 25 nt, Human
cccgguggagcuguucguggcgccc

SEQ ID NO: 628538 - RNA, 25 nt, Human
cccuccaaaaacaucucuagcgaag

SEQ ID NO: 628539 - RNA, 22 nt, Human
cccugaguugucaccaccuucc

SEQ ID NO: 628540 - RNA, 18 nt, Human
cccuggggaaguacuucu

SEQ ID NO: 628541 - RNA, 21 nt, Human
ccggccgcacacgccgcagcc

SEQ ID NO: 628542 - RNA, 19 nt, Human
ccuccaaaaacaucucuag

SEQ ID NO: 628543 - RNA, 27 nt, Human
ccucuggaauccuggagaaguggugag

SEQ ID NO: 628544 - RNA, 24 nt, Human
ccuugugcaggaaaaguucucucc

SEQ ID NO: 628545 - RNA, 18 nt, Human
cggcuccggaccgcuccu

SEQ ID NO: 628546 - RNA, 20 nt, Human
cuaccccuucccucuuaucu

SEQ ID NO: 628547 - RNA, 24 nt, Human
cuaggauugacuccaauauucucu

SEQ ID NO: 628548 - RNA, 20 nt, Human
cuccugagucgguaucucug

SEQ ID NO: 628549 - RNA, 25 nt, Human
cucucuguugccacccgcggcgauc

SEQ ID NO: 628550 - RNA, 19 nt, Human
cugucauggccacaacaaa

SEQ ID NO: 628551 - RNA, 18 nt, Human
cugugcugaaggaaaagg

SEQ ID NO: 628552 - RNA, 22 nt, Human
cuuaggaaagaggguuuggaga

SEQ ID NO: 628553 - RNA, 23 nt, Human
cuuaggacacuggaaauuucaag

SEQ ID NO: 628554 - RNA, 20 nt, Human
gaggagagggguugguggug

SEQ ID NO: 628555 - RNA, 23 nt, Human
gaguacagccaaacagcaggcua

SEQ ID NO: 628556 - RNA, 22 nt, Human
gauggauggaggaaaagaggga

SEQ ID NO: 628557 - RNA, 25 nt, Human
gcucucuguugccacccgcggcgau

SEQ ID NO: 628558 - RNA, 22 nt, Human
gcugucccaaggccggccgcac

SEQ ID NO: 628559 - RNA, 24 nt, Human
ggaggaaaagagggaaggcaagag

SEQ ID NO: 628560 - RNA, 19 nt, Human
uaaaaaagaaccuucccau

SEQ ID NO: 628561 - RNA, 18 nt, Human
uaaaaggggguggaggug

SEQ ID NO: 628562 - RNA, 24 nt, Human
uacucagaagguagcccccagcau

SEQ ID NO: 628563 - RNA, 20 nt, Human
uagcccccagcaugaucaca

SEQ ID NO: 628564 - RNA, 19 nt, Human
ucaagauaaaggcaucaga

SEQ ID NO: 628565 - RNA, 19 nt, Human
ucaagauaaaggcaucaga

SEQ ID NO: 628566 - RNA, 22 nt, Human
ucaccuccaagcuccugcuccc

SEQ ID NO: 628567 - RNA, 22 nt, Human
ucagaguagaaugaaucaagau

SEQ ID NO: 628568 - RNA, 18 nt, Human
ucaggcaguggcccaagc

SEQ ID NO: 628569 - RNA, 21 nt, Human
ucccaacaccaacucccauaa

SEQ ID NO: 628570 - RNA, 25 nt, Human
ucccaacaccaacucccauaaccua

SEQ ID NO: 628571 - RNA, 21 nt, Human
ucccaaggccggccgcacacg

SEQ ID NO: 628572 - RNA, 22 nt, Human
ucccuccaaaaacaucucuagc

SEQ ID NO: 628573 - RNA, 20 nt, Human
ucccuggggaaguacuucug

SEQ ID NO: 628574 - RNA, 22 nt, Human
uccugcucccacuuuugcuugg

SEQ ID NO: 628575 - RNA, 24 nt, Human
ucuagcgaagcccuuugugcuggc

SEQ ID NO: 628576 - RNA, 20 nt, Human
ucuuccacacugacucacua

SEQ ID NO: 628577 - RNA, 23 nt, Human
ucuuccacacugacucacuacuu

SEQ ID NO: 628578 - RNA, 24 nt, Human
ugacccaggagaugaccccggcag

SEQ ID NO: 628579 - RNA, 25 nt, Human
ugacggggauuacccugccuuggaa

SEQ ID NO: 628580 - RNA, 20 nt, Human
ugagagcugugcugaaggaa

SEQ ID NO: 628581 - RNA, 22 nt, Human
ugagauucccaaugcaacauca

SEQ ID NO: 628582 - RNA, 22 nt, Human
ugaggccagggcaguggcugga

SEQ ID NO: 628583 - RNA, 21 nt, Human
ugaguugucaccaccuuccuc

SEQ ID NO: 628584 - RNA, 22 nt, Human
ugauucccuccaaaaacaucuc

SEQ ID NO: 628585 - RNA, 23 nt, Human
ugccuugggucuccccacgaggc

SEQ ID NO: 628586 - RNA, 19 nt, Human
ugcguaaaagccucaagga

SEQ ID NO: 628587 - RNA, 19 nt, Human
uggaauccuggagaagugg

SEQ ID NO: 628588 - RNA, 23 nt, Human
uggcccaagcaccacaguauugc

SEQ ID NO: 628589 - RNA, 19 nt, Human
uggcuggagcaagacagca

SEQ ID NO: 628590 - RNA, 21 nt, Human
uggcuggagcaagacagcaca

SEQ ID NO: 628591 - RNA, 29 nt, Human
uguacaaacacacacacacacacaugcag

SEQ ID NO: 628592 - RNA, 20 nt, Human
ugucccaaggccggccgcac

SEQ ID NO: 628593 - RNA, 19 nt, Human
ugugaaaauuuugcaggca

SEQ ID NO: 628594 - RNA, 20 nt, Human
ugugcuggcggugagagcug

SEQ ID NO: 628595 - RNA, 22 nt, Human
uguucguguucccugaguuguc

SEQ ID NO: 628596 - RNA, 18 nt, Human
uuagaguaaguugacggg

SEQ ID NO: 628597 - RNA, 18 nt, Human
uuaggcccacaagucccg

SEQ ID NO: 628598 - RNA, 19 nt, Human
uucacaaauauacucagaa

SEQ ID NO: 628599 - RNA, 18 nt, Human
uucuucuauuacauacag

SEQ ID NO: 628600 - RNA, 21 nt, Human
uuucacaaauauacucagaag

SEQ ID NO: 628601 - RNA, 21 nt, Human
uuuuuuuuuuuuuuuuucugg

SEQ ID NO: 628602 - RNA, 23 nt, Human
aaaaagccaaguaaagcaguggg

SEQ ID NO: 628603 - RNA, 21 nt, Human
aaacucccccacccccaagaa

SEQ ID NO: 628604 - RNA, 19 nt, Human
aaaggguggggggacaaca

SEQ ID NO: 628605 - RNA, 21 nt, Human
aacaagagagcaagugagaaa

SEQ ID NO: 628606 - RNA, 24 nt, Human
aacccauaaaaagucacuuaaaau

SEQ ID NO: 628607 - RNA, 20 nt, Human
aagacgggaaggaaaaaagc

SEQ ID NO: 628608 - RNA, 19 nt, Human
aagaugcccacuuuaugaa

SEQ ID NO: 628609 - RNA, 24 nt, Human
aagccaaguaaagcacagaccagg

SEQ ID NO: 628610 - RNA, 21 nt, Human
aagggcuguguacuugccacc

SEQ ID NO: 628611 - RNA, 18 nt, Human
aaggggggaaaauaauuc

SEQ ID NO: 628612 - RNA, 20 nt, Human
aaguaaagcacagaccagga

SEQ ID NO: 628613 - RNA, 19 nt, Human
aauaagcagaauuaacuac

SEQ ID NO: 628614 - RNA, 21 nt, Human
acccccaagaaaagguuccug

SEQ ID NO: 628615 - RNA, 21 nt, Human
acccuguaaaaggggggaaaa

SEQ ID NO: 628616 - RNA, 24 nt, Human
acgagaaaagccaggacuucgaua

SEQ ID NO: 628617 - RNA, 21 nt, Human
agaaaagaguaaaaaacacug

SEQ ID NO: 628618 - RNA, 21 nt, Human
agaccaggaagcccccgccga

SEQ ID NO: 628619 - RNA, 21 nt, Human
agccaaguaaagcacagacca

SEQ ID NO: 628620 - RNA, 24 nt, Human
agccaaguaaagcacagaccagga

SEQ ID NO: 628621 - RNA, 21 nt, Human
agggcuguguacuugccacca

SEQ ID NO: 628622 - RNA, 19 nt, Human
agugagaaaacgagaaaag

SEQ ID NO: 628623 - RNA, 24 nt, Human
aguucuaagcacuugguaauucca

SEQ ID NO: 628624 - RNA, 20 nt, Human
caagagagcaagugagaaaa

SEQ ID NO: 628625 - RNA, 21 nt, Human
caaguaaagcacagaccagga

SEQ ID NO: 628626 - RNA, 26 nt, Human
caccacaaacaccaccagagugccca

SEQ ID NO: 628627 - RNA, 18 nt, Human
caccagucugcuugcagc

SEQ ID NO: 628628 - RNA, 18 nt, Human
caccgggugccuggagcu

SEQ ID NO: 628629 - RNA, 25 nt, Human
caccugucugcuaccaaccccucua

SEQ ID NO: 628630 - RNA, 20 nt, Human
caccugugccuuuccuucuu

SEQ ID NO: 628631 - RNA, 18 nt, Human
cacuguggcauguuucau

SEQ ID NO: 628632 - RNA, 20 nt, Human
cauaaaaagucacuuaaaau

SEQ ID NO: 628633 - RNA, 18 nt, Human
cauucuuaaaauaguuuu

SEQ ID NO: 628634 - RNA, 21 nt, Human
cauuuuuguuuuguuuggaag

SEQ ID NO: 628635 - RNA, 21 nt, Human
ccccaagaaaagguuccugca

SEQ ID NO: 628636 - RNA, 24 nt, Human
cccuuuaccaccuaugggaaagcc

SEQ ID NO: 628637 - RNA, 23 nt, Human
ccuaaaacacagaagaugcccag

SEQ ID NO: 628638 - RNA, 21 nt, Human
ccuaccucaaaucccuuuaaa

SEQ ID NO: 628639 - RNA, 24 nt, Human
cuaagacgggaaggaaaaaagcca

SEQ ID NO: 628640 - RNA, 20 nt, Human
cugcaaaaaaaagggcugug

SEQ ID NO: 628641 - RNA, 22 nt, Human
cugcacaagcaagccaagcaca

SEQ ID NO: 628642 - RNA, 19 nt, Human
gaaacucccccacccccaa

SEQ ID NO: 628643 - RNA, 22 nt, Human
gaaagguuauuacuugugaaag

SEQ ID NO: 628644 - RNA, 21 nt, Human
gaccccuuuaccaccuauggg

SEQ ID NO: 628645 - RNA, 20 nt, Human
gagcuucaagucuuuggaua

SEQ ID NO: 628646 - RNA, 22 nt, Human
gccacauccuuuguucucugcc

SEQ ID NO: 628647 - RNA, 23 nt, Human
gcccaccuuuuacuguucuccac

SEQ ID NO: 628648 - RNA, 18 nt, Human
gcuauagcaacucaaucu

SEQ ID NO: 628649 - RNA, 18 nt, Human
ggaaggaaaaaagccaag

SEQ ID NO: 628650 - RNA, 24 nt, Human
guaaagcacagaccaggaagcccc

SEQ ID NO: 628651 - RNA, 19 nt, Human
uaaaaaaacagagaacaag

SEQ ID NO: 628652 - RNA, 23 nt, Human
uaaaaaaacagagaacaagagag

SEQ ID NO: 628653 - RNA, 25 nt, Human
uaaaaaaacagagaacaagagagca

SEQ ID NO: 628654 - RNA, 28 nt, Human
uaaagcacagaccaggaagcccccgccg

SEQ ID NO: 628655 - RNA, 22 nt, Human
uaacuaaaguccuguggcgaug

SEQ ID NO: 628656 - RNA, 24 nt, Human
uaagacgaaaaccuaaauaaccca

SEQ ID NO: 628657 - RNA, 21 nt, Human
uaagacgggaaggaaaaaagc

SEQ ID NO: 628658 - RNA, 23 nt, Human
uaagacgggaaggaaaaaagcca

SEQ ID NO: 628659 - RNA, 21 nt, Human
uagaaaagggaaacuccccca

SEQ ID NO: 628660 - RNA, 24 nt, Human
uagacaaguuagcacugcaaaaaa

SEQ ID NO: 628661 - RNA, 24 nt, Human
uagggugucauuuuuacuuuauuu

SEQ ID NO: 628662 - RNA, 22 nt, Human
uauuggcacuucuguggagaag

SEQ ID NO: 628663 - RNA, 23 nt, Human
ucaauguuccuuauguaauggug

SEQ ID NO: 628664 - RNA, 23 nt, Human
ucacugggucccugcaucaagcu

SEQ ID NO: 628665 - RNA, 18 nt, Human
ucagaccccuuuaccacc

SEQ ID NO: 628666 - RNA, 19 nt, Human
ucuguggagaaguuacuac

SEQ ID NO: 628667 - RNA, 21 nt, Human
ucuucaaagacaucugcccac

SEQ ID NO: 628668 - RNA, 19 nt, Human
ugaaaagccuaaacaugga

SEQ ID NO: 628669 - RNA, 21 nt, Human
ugaaacaccauuugcauuuuu

SEQ ID NO: 628670 - RNA, 21 nt, Human
ugagaaaacgagaaaagccag

SEQ ID NO: 628671 - RNA, 23 nt, Human
ugagaaaacgagaaaagccagga

SEQ ID NO: 628672 - RNA, 21 nt, Human
ugagaaaagaguaaaaaacac

SEQ ID NO: 628673 - RNA, 22 nt, Human
ugauauguacacgaguguguuc

SEQ ID NO: 628674 - RNA, 21 nt, Human
ugcauuuuuagaaaagggaaa

SEQ ID NO: 628675 - RNA, 23 nt, Human
ugccacauccuuuguucucugcc

SEQ ID NO: 628676 - RNA, 18 nt, Human
ugcccaccgggugccugg

SEQ ID NO: 628677 - RNA, 22 nt, Human
uggcgauggaauccagccuacc

SEQ ID NO: 628678 - RNA, 30 nt, Human
ugggucccugcaucaagcuauagcaacucu

SEQ ID NO: 628679 - RNA, 21 nt, Human
uucaaagacaucugcccaccu

SEQ ID NO: 628680 - RNA, 22 nt, Human
uucaguucaccacaaacaccac

SEQ ID NO: 628681 - RNA, 18 nt, Human
uucuguggagaaguuacu

SEQ ID NO: 628682 - RNA, 23 nt, Human
uuuaaggaaaaaagggugggggg

SEQ ID NO: 628683 - RNA, 20 nt, Human
uuuuuuuuuuuuaggguguc

SEQ ID NO: 628684 - RNA, 25 nt, Human
uuuuuuuuuuuuuuuuuuuuagggg

SEQ ID NO: 628685 - RNA, 25 nt, Human
acccucagagaugcuccucugaagg

SEQ ID NO: 628686 - RNA, 21 nt, Human
acuccgcgccuccccgcgggc

SEQ ID NO: 628687 - RNA, 20 nt, Human
agcagagugcgggaggggcu

SEQ ID NO: 628688 - RNA, 20 nt, Human
agccuuuccuggcgagucug

SEQ ID NO: 628689 - RNA, 18 nt, Human
aggaggccuggagaguuc

SEQ ID NO: 628690 - RNA, 27 nt, Human
aggcucccggacccccguccaccccuu

SEQ ID NO: 628691 - RNA, 24 nt, Human
agucuggguccucagcuacgcggg

SEQ ID NO: 628692 - RNA, 26 nt, Human
aucccacuguccaccauucuccccca

SEQ ID NO: 628693 - RNA, 21 nt, Human
cagaaaaggugaaguuccgug

SEQ ID NO: 628694 - RNA, 18 nt, Human
cagccagcugcagggcuc

SEQ ID NO: 628695 - RNA, 19 nt, Human
ccacuccgcgccuccccgc

SEQ ID NO: 628696 - RNA, 19 nt, Human
ccagaaucccacuguccac

SEQ ID NO: 628697 - RNA, 19 nt, Human
ccaggccccuccccugacc

SEQ ID NO: 628698 - RNA, 21 nt, Human
cccaccuuuuuuccgcuccca

SEQ ID NO: 628699 - RNA, 22 nt, Human
ccccagccucacuagccuuucc

SEQ ID NO: 628700 - RNA, 19 nt, Human
ccccgccccugccgccagg

SEQ ID NO: 628701 - RNA, 18 nt, Human
ccccuccucccccgcccc

SEQ ID NO: 628702 - RNA, 20 nt, Human
ccccugccgccaggccccuc

SEQ ID NO: 628703 - RNA, 22 nt, Human
ccccugggacgugaggagugag

SEQ ID NO: 628704 - RNA, 19 nt, Human
cccgccccugccgccaggc

SEQ ID NO: 628705 - RNA, 22 nt, Human
cccgggccccagccucacuagc

SEQ ID NO: 628706 - RNA, 21 nt, Human
cccucacaaaccggcagucua

SEQ ID NO: 628707 - RNA, 20 nt, Human
cccucguccccucccaggga

SEQ ID NO: 628708 - RNA, 20 nt, Human
cccugccgccaggccccucc

SEQ ID NO: 628709 - RNA, 24 nt, Human
cccugccgccaggccccuccccug

SEQ ID NO: 628710 - RNA, 23 nt, Human
ccgccaggccccuccccugaccc

SEQ ID NO: 628711 - RNA, 21 nt, Human
ccgccccugccgccaggcccc

SEQ ID NO: 628712 - RNA, 21 nt, Human
ccucccagggagagauuucca

SEQ ID NO: 628713 - RNA, 22 nt, Human
ccuggagaguucaguccugggu

SEQ ID NO: 628714 - RNA, 20 nt, Human
cgagcgggcgccgcucuacu

SEQ ID NO: 628715 - RNA, 20 nt, Human
cgcacgaaguuucccuaggg

SEQ ID NO: 628716 - RNA, 18 nt, Human
cgccaggccccuccccug

SEQ ID NO: 628717 - RNA, 20 nt, Human
cgcugcggggcgcauagcag

SEQ ID NO: 628718 - RNA, 24 nt, Human
cuaggguggucggggauccucucc

SEQ ID NO: 628719 - RNA, 19 nt, Human
cucugaagcaggggaaaga

SEQ ID NO: 628720 - RNA, 19 nt, Human
cugggacggcgcgaucucg

SEQ ID NO: 628721 - RNA, 22 nt, Human
cuuuaacccuugggggucccaa

SEQ ID NO: 628722 - RNA, 18 nt, Human
gaagguggaggcgcuggc

SEQ ID NO: 628723 - RNA, 21 nt, Human
gacuccagccagcugcagggc

SEQ ID NO: 628724 - RNA, 21 nt, Human
gagccaacccucacaaaccgg

SEQ ID NO: 628725 - RNA, 20 nt, Human
gaggcuugcuggggccuugc

SEQ ID NO: 628726 - RNA, 18 nt, Human
gccacgccugcccggagc

SEQ ID NO: 628727 - RNA, 23 nt, Human
gccagcugcagggcucaggggag

SEQ ID NO: 628728 - RNA, 25 nt, Human
gcugaggccccgccccugccgccag

SEQ ID NO: 628729 - RNA, 18 nt, Human
gcugcagggcucagggga

SEQ ID NO: 628730 - RNA, 20 nt, Human
gcuggggccuugccccuccu

SEQ ID NO: 628731 - RNA, 21 nt, Human
ggaaacaagacuccagccagc

SEQ ID NO: 628732 - RNA, 18 nt, Human
ggaaagaaaacuagaaag

SEQ ID NO: 628733 - RNA, 23 nt, Human
ggagcucgaggcucccggacccc

SEQ ID NO: 628734 - RNA, 18 nt, Human
ggcgugguccucgcgggg

SEQ ID NO: 628735 - RNA, 19 nt, Human
gggaccgccggcuuugcca

SEQ ID NO: 628736 - RNA, 22 nt, Human
gggcucaggggaggaggccugg

SEQ ID NO: 628737 - RNA, 18 nt, Human
gguugugggcuccggagg

SEQ ID NO: 628738 - RNA, 22 nt, Human
uaagcagcaauuaucgcacgaa

SEQ ID NO: 628739 - RNA, 23 nt, Human
uagaacccucagagaugcuccuc

SEQ ID NO: 628740 - RNA, 26 nt, Human
uagccuuuccuggcgagucugggucc

SEQ ID NO: 628741 - RNA, 19 nt, Human
uaggguggucggggauccu

SEQ ID NO: 628742 - RNA, 21 nt, Human
ucagcagagugcgggaggggc

SEQ ID NO: 628743 - RNA, 22 nt, Human
uccagaaucccacuguccaccc

SEQ ID NO: 628744 - RNA, 19 nt, Human
ucccagaaaaggugaaguu

SEQ ID NO: 628745 - RNA, 22 nt, Human
ucccagggagagauuuccaaga

SEQ ID NO: 628746 - RNA, 20 nt, Human
ucgcggggcgcggaagaccc

SEQ ID NO: 628747 - RNA, 20 nt, Human
ugaagguggaggcgcuggcg

SEQ ID NO: 628748 - RNA, 21 nt, Human
ugcagggcucaggggaggagg

SEQ ID NO: 628749 - RNA, 20 nt, Human
ugccccuccucccccgcccc

SEQ ID NO: 628750 - RNA, 22 nt, Human
ugcccggagcucgaggcucccg

SEQ ID NO: 628751 - RNA, 22 nt, Human
ugcgggaggggcuggcugcggc

SEQ ID NO: 628752 - RNA, 20 nt, Human
ugcuccgcgccuuuagcuga

SEQ ID NO: 628753 - RNA, 23 nt, Human
ugggacgugaggagugaggcuuu

SEQ ID NO: 628754 - RNA, 18 nt, Human
ugggccaggcuguucccc

SEQ ID NO: 628755 - RNA, 21 nt, Human
ugggggucccaaacaaguuuc

SEQ ID NO: 628756 - RNA, 22 nt, Human
uuccauacuucaggugcucuuc

SEQ ID NO: 628757 - RNA, 20 nt, Human
uucgugaaugcuggguggcu

SEQ ID NO: 628758 - RNA, 18 nt, Human
uugcuggggccuugcccc

SEQ ID NO: 628759 - RNA, 18 nt, Human
uugugcuuguuuuauugg

SEQ ID NO: 628760 - RNA, 22 nt, Human
uuuccagaaucccacuguccac

SEQ ID NO: 628761 - RNA, 20 nt, Human
uuuuuuuuuuugugcuuguu

SEQ ID NO: 628762 - RNA, 18 nt, Human
uuuuuuuuuuuuuuuugu

SEQ ID NO: 628763 - RNA, 19 nt, Human
aagaagaaguccaaagccu

SEQ ID NO: 628764 - RNA, 23 nt, Human
aagaagccagacugcauuugacu

SEQ ID NO: 628765 - RNA, 22 nt, Human
aauucugaaaaacuucuuccac

SEQ ID NO: 628766 - RNA, 18 nt, Human
acuuauaugguuuuccuc

SEQ ID NO: 628767 - RNA, 21 nt, Human
agacacuaaugaccugaguua

SEQ ID NO: 628768 - RNA, 19 nt, Human
agaggggcaguguggucag

SEQ ID NO: 628769 - RNA, 23 nt, Human
agggaaggaggcacagauucagg

SEQ ID NO: 628770 - RNA, 20 nt, Human
agucaguaggaacagaggcu

SEQ ID NO: 628771 - RNA, 23 nt, Human
aucagcaagaagaaguccaaagc

SEQ ID NO: 628772 - RNA, 24 nt, Human
caaaagaucccuggacugugcuga

SEQ ID NO: 628773 - RNA, 19 nt, Human
caaccacugcgguugcaaa

SEQ ID NO: 628774 - RNA, 18 nt, Human
caagaagaaguccaaagc

SEQ ID NO: 628775 - RNA, 24 nt, Human
caaguagcuauagucaguaggaac

SEQ ID NO: 628776 - RNA, 26 nt, Human
caccaaccauaugcucugguccauac

SEQ ID NO: 628777 - RNA, 18 nt, Human
cagagacacuaaugaccu

SEQ ID NO: 628778 - RNA, 21 nt, Human
cccaugcaaccacugcgguug

SEQ ID NO: 628779 - RNA, 22 nt, Human
cccaugcaaccacugcgguugc

SEQ ID NO: 628780 - RNA, 21 nt, Human
ccccagagacacuaaugaccu

SEQ ID NO: 628781 - RNA, 22 nt, Human
ccggguacuaaagcaaugcacu

SEQ ID NO: 628782 - RNA, 19 nt, Human
cgaggaggagaggggcagu

SEQ ID NO: 628783 - RNA, 19 nt, Human
cugagagggcuucuuuagg

SEQ ID NO: 628784 - RNA, 21 nt, Human
cugaggccgaggaggagaggg

SEQ ID NO: 628785 - RNA, 18 nt, Human
cuggcacugaggccgagg

SEQ ID NO: 628786 - RNA, 20 nt, Human
cugggucuguuccuuccaug

SEQ ID NO: 628787 - RNA, 20 nt, Human
cugggucuguuccuuccaug

SEQ ID NO: 628788 - RNA, 20 nt, Human
gaacuucugggucuguuccu

SEQ ID NO: 628789 - RNA, 27 nt, Human
gaccuuuuuuuccuccugcaaugaaga

SEQ ID NO: 628790 - RNA, 20 nt, Human
gagaggggcaguguggucag

SEQ ID NO: 628791 - RNA, 18 nt, Human
gaggccgaggaggagagg

SEQ ID NO: 628792 - RNA, 24 nt, Human
gauguggccaucuuuucaugaccc

SEQ ID NO: 628793 - RNA, 23 nt, Human
gcaagaagaaguccaaagccucg

SEQ ID NO: 628794 - RNA, 25 nt, Human
gccaucuuuucaugacccuuaacuc

SEQ ID NO: 628795 - RNA, 19 nt, Human
ggaggagaggggcagugug

SEQ ID NO: 628796 - RNA, 27 nt, Human
ggcccagccgggccauucuccugaugc

SEQ ID NO: 628797 - RNA, 20 nt, Human
gguacuggcccagccgggcc

SEQ ID NO: 628798 - RNA, 23 nt, Human
uaaagaaaauccaaguuccuguu

SEQ ID NO: 628799 - RNA, 23 nt, Human
uaagaagggaaggaggcacagau

SEQ ID NO: 628800 - RNA, 21 nt, Human
uagaguagauagaugaagaug

SEQ ID NO: 628801 - RNA, 19 nt, Human
uaggaggcaugugucaagc

SEQ ID NO: 628802 - RNA, 27 nt, Human
uaucagcaagaagaaguccaaagccuc

SEQ ID NO: 628803 - RNA, 18 nt, Human
ucaaugaacuucuggguc

SEQ ID NO: 628804 - RNA, 18 nt, Human
ucaggaccuuuuuuuccu

SEQ ID NO: 628805 - RNA, 28 nt, Human
uccacauugaacucaagccaaauaaaga

SEQ ID NO: 628806 - RNA, 24 nt, Human
ucuccugaugccauggcaaccaac

SEQ ID NO: 628807 - RNA, 21 nt, Human
ucugaaaaacuucuuccacuu

SEQ ID NO: 628808 - RNA, 23 nt, Human
ucugggucuguuccuuccauggc

SEQ ID NO: 628809 - RNA, 20 nt, Human
ucuguuccuuccauggcucu

SEQ ID NO: 628810 - RNA, 23 nt, Human
ugagaaccuccugcagagugacc

SEQ ID NO: 628811 - RNA, 22 nt, Human
ugagaaugcugcugguuacugc

SEQ ID NO: 628812 - RNA, 20 nt, Human
ugcauuggacuccugccaag

SEQ ID NO: 628813 - RNA, 19 nt, Human
uggacugugcugagagggc

SEQ ID NO: 628814 - RNA, 24 nt, Human
uggcaaccaacuggcacugaggcc

SEQ ID NO: 628815 - RNA, 20 nt, Human
uggcccggguacuaaagcaa

SEQ ID NO: 628816 - RNA, 20 nt, Human
ugggaaggagagugagaacc

SEQ ID NO: 628817 - RNA, 19 nt, Human
ugggagaacucucaaggac

SEQ ID NO: 628818 - RNA, 21 nt, Human
ugggucuguuccuuccauggc

SEQ ID NO: 628819 - RNA, 22 nt, Human
uuagggcuuuccaugaugcuga

SEQ ID NO: 628820 - RNA, 18 nt, Human
uuuuuuuuuuuuuuuuug

SEQ ID NO: 628821 - RNA, 19 nt, Human
aaaagcauuucagcuuucc

SEQ ID NO: 628822 - RNA, 18 nt, Human
acacguuuuaaagaaggc

SEQ ID NO: 628823 - RNA, 24 nt, Human
acagacccacgacccacccacgcc

SEQ ID NO: 628824 - RNA, 24 nt, Human
acagacccauguccauccccacac

SEQ ID NO: 628825 - RNA, 19 nt, Human
acccagaaguccuggggcc

SEQ ID NO: 628826 - RNA, 19 nt, Human
accccacagccccugccug

SEQ ID NO: 628827 - RNA, 19 nt, Human
accccuaaggaaagaugag

SEQ ID NO: 628828 - RNA, 24 nt, Human
accccuuaauuuuaaagaugacuu

SEQ ID NO: 628829 - RNA, 28 nt, Human
acuuugaagguacacuugugaagaaaag

SEQ ID NO: 628830 - RNA, 24 nt, Human
agaaaccauucccugcagugaguc

SEQ ID NO: 628831 - RNA, 18 nt, Human
agaaguccuggggccugg

SEQ ID NO: 628832 - RNA, 24 nt, Human
agcagcggcucacaccaccacaga

SEQ ID NO: 628833 - RNA, 24 nt, Human
agcccugcccccucauccacccac

SEQ ID NO: 628834 - RNA, 22 nt, Human
agcccugcccucacccacccac

SEQ ID NO: 628835 - RNA, 22 nt, Human
agcccugcccucacccacccac

SEQ ID NO: 628836 - RNA, 22 nt, Human
agcccugcccucacccauccac

SEQ ID NO: 628837 - RNA, 21 nt, Human
aggagcagcggcucacaccac

SEQ ID NO: 628838 - RNA, 20 nt, Human
aggggaggagagggaaaagg

SEQ ID NO: 628839 - RNA, 21 nt, Human
aggggaggagagggaaaaggu

SEQ ID NO: 628840 - RNA, 18 nt, Human
aguccuggggccugggac

SEQ ID NO: 628841 - RNA, 24 nt, Human
aguggcuugggcacagggcagggg

SEQ ID NO: 628842 - RNA, 24 nt, Human
auaugauugagugugcaaauuggg

SEQ ID NO: 628843 - RNA, 29 nt, Human
auguccacagacccauguccauccccacc

SEQ ID NO: 628844 - RNA, 19 nt, Human
caacaaggaagccaggacu

SEQ ID NO: 628845 - RNA, 22 nt, Human
caauugguguaauuuguggggu

SEQ ID NO: 628846 - RNA, 21 nt, Human
cacaccaccacagacccacga

SEQ ID NO: 628847 - RNA, 24 nt, Human
cacaccaccacagacccacgaccc

SEQ ID NO: 628848 - RNA, 28 nt, Human
cacagacccacgacccacccacgccccc

SEQ ID NO: 628849 - RNA, 19 nt, Human
caccacagacccacgaccc

SEQ ID NO: 628850 - RNA, 19 nt, Human
caccaugcuggcuucagcc

SEQ ID NO: 628851 - RNA, 19 nt, Human
caccaugcuggcuucagcu

SEQ ID NO: 628852 - RNA, 23 nt, Human
cacgccuccccagaaaccauucc

SEQ ID NO: 628853 - RNA, 18 nt, Human
cagaaaccauucccugca

SEQ ID NO: 628854 - RNA, 19 nt, Human
cagauaggacggccccagg

SEQ ID NO: 628855 - RNA, 18 nt, Human
cagcaccaggcucugggg

SEQ ID NO: 628856 - RNA, 19 nt, Human
cagcaccaggcucuggggu

SEQ ID NO: 628857 - RNA, 22 nt, Human
cagccccccaccccaccucucc

SEQ ID NO: 628858 - RNA, 26 nt, Human
cagccccccaccccaccucuccugcc

SEQ ID NO: 628859 - RNA, 20 nt, Human
cagccccuaccccacagccc

SEQ ID NO: 628860 - RNA, 25 nt, Human
cagccccuaccccacagccccugcc

SEQ ID NO: 628861 - RNA, 22 nt, Human
caggcacacaugccccuuucca

SEQ ID NO: 628862 - RNA, 24 nt, Human
caggccccucaugcaguggcuugg

SEQ ID NO: 628863 - RNA, 20 nt, Human
cagggcaggggaggggagga

SEQ ID NO: 628864 - RNA, 20 nt, Human
caggggaggggaggagaggg

SEQ ID NO: 628865 - RNA, 21 nt, Human
ccacaccugucagcccugccc

SEQ ID NO: 628866 - RNA, 23 nt, Human
ccacaccugucagcccugcccuc

SEQ ID NO: 628867 - RNA, 23 nt, Human
ccacaccugucagcccugcccuc

SEQ ID NO: 628868 - RNA, 23 nt, Human
ccacaccugucagcccugcccuc

SEQ ID NO: 628869 - RNA, 25 nt, Human
ccacagacccacgacccacccacgc

SEQ ID NO: 628870 - RNA, 18 nt, Human
ccacccacgcccccacuc

SEQ ID NO: 628871 - RNA, 25 nt, Human
ccacccacgcccccacucaaaaagc

SEQ ID NO: 628872 - RNA, 22 nt, Human
ccaccuggcuguuaacacgggg

SEQ ID NO: 628873 - RNA, 20 nt, Human
ccacuccuggguuuccgccu

SEQ ID NO: 628874 - RNA, 22 nt, Human
ccaggcccacaccugucagcgc

SEQ ID NO: 628875 - RNA, 24 nt, Human
ccauccauguccacagacccaugu

SEQ ID NO: 628876 - RNA, 19 nt, Human
cccacaacucccgcaagcc

SEQ ID NO: 628877 - RNA, 24 nt, Human
cccacaacucccgcaagccuucaa

SEQ ID NO: 628878 - RNA, 24 nt, Human
cccacccacgcccccacucaaaaa

SEQ ID NO: 628879 - RNA, 23 nt, Human
cccacgacccacccacgccccca

SEQ ID NO: 628880 - RNA, 24 nt, Human
cccacguccacaccugucagcccu

SEQ ID NO: 628881 - RNA, 24 nt, Human
cccacguccacaccugucagcccu

SEQ ID NO: 628882 - RNA, 24 nt, Human
cccacguccacaccugucagcccu

SEQ ID NO: 628883 - RNA, 24 nt, Human
cccacguccacaccugucagcccu

SEQ ID NO: 628884 - RNA, 24 nt, Human
cccacguccacaccugucggcccu

SEQ ID NO: 628885 - RNA, 24 nt, Human
cccacguccacaucugucagcccu

SEQ ID NO: 628886 - RNA, 22 nt, Human
cccauccaccagauaggacggc

SEQ ID NO: 628887 - RNA, 20 nt, Human
cccauuuguaacucagcccc

SEQ ID NO: 628888 - RNA, 24 nt, Human
ccccaccaugcuggcuucagcccc

SEQ ID NO: 628889 - RNA, 19 nt, Human
ccccaccccaccucuccug

SEQ ID NO: 628890 - RNA, 24 nt, Human
cccccaccccaccucuccugcccc

SEQ ID NO: 628891 - RNA, 22 nt, Human
ccccccaccccaccucuccugc

SEQ ID NO: 628892 - RNA, 23 nt, Human
ccccccaccccaccucuccugcc

SEQ ID NO: 628893 - RNA, 18 nt, Human
ccccuaccccacagcccc

SEQ ID NO: 628894 - RNA, 20 nt, Human
ccccuccagccccccacccc

SEQ ID NO: 628895 - RNA, 24 nt, Human
ccccuccucuuccccuccagcccc

SEQ ID NO: 628896 - RNA, 20 nt, Human
ccccuuagcccacccacauc

SEQ ID NO: 628897 - RNA, 21 nt, Human
cccucacccacccacguccac

SEQ ID NO: 628898 - RNA, 21 nt, Human
cccucacccacccacguccac

SEQ ID NO: 628899 - RNA, 21 nt, Human
cccucacccacccacguccac

SEQ ID NO: 628900 - RNA, 21 nt, Human
cccucacccacccacguccac

SEQ ID NO: 628901 - RNA, 21 nt, Human
cccucacccacccacguccac

SEQ ID NO: 628902 - RNA, 21 nt, Human
cccucauccacccacguccac

SEQ ID NO: 628903 - RNA, 22 nt, Human
cccugcccccucacccacccac

SEQ ID NO: 628904 - RNA, 20 nt, Human
cccugcccucacccacccac

SEQ ID NO: 628905 - RNA, 20 nt, Human
cccugcccucacccacccac

SEQ ID NO: 628906 - RNA, 21 nt, Human
ccgcaagccuucaaugcuacc

SEQ ID NO: 628907 - RNA, 20 nt, Human
ccggaggagaggaggagagu

SEQ ID NO: 628908 - RNA, 26 nt, Human
ccgucagcccugcccccucacccacc

SEQ ID NO: 628909 - RNA, 22 nt, Human
ccucacccauccauguccacag

SEQ ID NO: 628910 - RNA, 23 nt, Human
ccuccagccccccaccccaccuc

SEQ ID NO: 628911 - RNA, 21 nt, Human
ccucccugggguccaggucca

SEQ ID NO: 628912 - RNA, 24 nt, Human
ccugaagauccucuaugucacccu

SEQ ID NO: 628913 - RNA, 26 nt, Human
ccugaagauccucuaugucacccuuu

SEQ ID NO: 628914 - RNA, 21 nt, Human
ccugcccccucacccacccac

SEQ ID NO: 628915 - RNA, 21 nt, Human
ccugcccccucauccacccac

SEQ ID NO: 628916 - RNA, 22 nt, Human
ccugggacgaggcggggcuggc

SEQ ID NO: 628917 - RNA, 21 nt, Human
ccugucagcccugcccucacc

SEQ ID NO: 628918 - RNA, 21 nt, Human
ccugucagcccugcccucacc

SEQ ID NO: 628919 - RNA, 21 nt, Human
ccugucagcccugcccucacc

SEQ ID NO: 628920 - RNA, 21 nt, Human
ccugucagcccugcccucacc

SEQ ID NO: 628921 - RNA, 22 nt, Human
ccugucagcccugcccucaccc

SEQ ID NO: 628922 - RNA, 22 nt, Human
ccugucagcccugcccucaccc

SEQ ID NO: 628923 - RNA, 22 nt, Human
ccugucagcccugcccucaccc

SEQ ID NO: 628924 - RNA, 22 nt, Human
ccugucagcccugcccucaccc

SEQ ID NO: 628925 - RNA, 24 nt, Human
cgagauaacaauacuuacuaaaac

SEQ ID NO: 628926 - RNA, 21 nt, Human
cgcaagccuucaaugcuacca

SEQ ID NO: 628927 - RNA, 19 nt, Human
cggaggagaggaggagagu

SEQ ID NO: 628928 - RNA, 22 nt, Human
cuaccacacguuuuaaagaagg

SEQ ID NO: 628929 - RNA, 22 nt, Human
cuaccccacagccccugccugu

SEQ ID NO: 628930 - RNA, 24 nt, Human
cucaaaucucuccacuccuggguu

SEQ ID NO: 628931 - RNA, 26 nt, Human
cucacccacccacguccacaccuguc

SEQ ID NO: 628932 - RNA, 26 nt, Human
cucacccacccacguccacaccuguc

SEQ ID NO: 628933 - RNA, 26 nt, Human
cucacccacccacguccacaccuguc

SEQ ID NO: 628934 - RNA, 26 nt, Human
cucacccacccacguccacaccuguc

SEQ ID NO: 628935 - RNA, 26 nt, Human
cucacccacccacguccacaucuguc

SEQ ID NO: 628936 - RNA, 26 nt, Human
cucacccauccacguccacaccuguc

SEQ ID NO: 628937 - RNA, 20 nt, Human
cucauccacccacguccaca

SEQ ID NO: 628938 - RNA, 21 nt, Human
cuccaccagcacuguccccuc

SEQ ID NO: 628939 - RNA, 20 nt, Human
cuccagccccccaccccacc

SEQ ID NO: 628940 - RNA, 21 nt, Human
cuccagccccccaccccaccu

SEQ ID NO: 628941 - RNA, 19 nt, Human
cuccucuuccccuccagcc

SEQ ID NO: 628942 - RNA, 21 nt, Human
cuccuggguuuccgccuuucc

SEQ ID NO: 628943 - RNA, 22 nt, Human
cucugucccccuccucuucccc

SEQ ID NO: 628944 - RNA, 27 nt, Human
cugaagauccucuaugucacccccugg

SEQ ID NO: 628945 - RNA, 19 nt, Human
cugcuacacaacaaggaag

SEQ ID NO: 628946 - RNA, 24 nt, Human
cugucagcccugcccucacccacc

SEQ ID NO: 628947 - RNA, 24 nt, Human
cugucagcccugcccucacccacc

SEQ ID NO: 628948 - RNA, 24 nt, Human
cugucagcccugcccucacccacc

SEQ ID NO: 628949 - RNA, 24 nt, Human
cugucagcccugcccucacccacc

SEQ ID NO: 628950 - RNA, 24 nt, Human
cugucagcccugcccucacccauc

SEQ ID NO: 628951 - RNA, 26 nt, Human
cugucggcccugacuccucacccauc

SEQ ID NO: 628952 - RNA, 25 nt, Human
cugugaguuuucuuuaaucaagcuc

SEQ ID NO: 628953 - RNA, 19 nt, Human
gaagguacacuugugaaga

SEQ ID NO: 628954 - RNA, 23 nt, Human
gacccacgacccacccacgcccc

SEQ ID NO: 628955 - RNA, 20 nt, Human
gagaggaggagagucugugu

SEQ ID NO: 628956 - RNA, 21 nt, Human
gagauaacaauacuuacuaaa

SEQ ID NO: 628957 - RNA, 20 nt, Human
gagucccggaggagaggagg

SEQ ID NO: 628958 - RNA, 21 nt, Human
gaguuaaucuaggucaacacu

SEQ ID NO: 628959 - RNA, 18 nt, Human
gccaccuuuccucugacc

SEQ ID NO: 628960 - RNA, 18 nt, Human
gcccccucauccacccac

SEQ ID NO: 628961 - RNA, 20 nt, Human
gccccucaugcaguggcuug

SEQ ID NO: 628962 - RNA, 21 nt, Human
gcgcagcucugucccccuccu

SEQ ID NO: 628963 - RNA, 19 nt, Human
gcggggcuggcgggcgagc

SEQ ID NO: 628964 - RNA, 20 nt, Human
gcuucagccccaucagcucu

SEQ ID NO: 628965 - RNA, 21 nt, Human
gcuucagccccaucagcucuc

SEQ ID NO: 628966 - RNA, 22 nt, Human
ggcaggggaggggaggagaggg

SEQ ID NO: 628967 - RNA, 23 nt, Human
gggagugucagggcuugcuccgg

SEQ ID NO: 628968 - RNA, 23 nt, Human
gggcaggggaggggaggagaggg

SEQ ID NO: 628969 - RNA, 23 nt, Human
gguccagguccaguuacccuggu

SEQ ID NO: 628970 - RNA, 24 nt, Human
guacacuugugaagaaaagaguua

SEQ ID NO: 628971 - RNA, 18 nt, Human
uaaaacagcagcaagggc

SEQ ID NO: 628972 - RNA, 21 nt, Human
uaacucagccccuaccccaca

SEQ ID NO: 628973 - RNA, 22 nt, Human
uaacucagccccuaccccacag

SEQ ID NO: 628974 - RNA, 24 nt, Human
uaacucagccccuaccccacagcc

SEQ ID NO: 628975 - RNA, 25 nt, Human
uaauaaauucccgcccugugaguuu

SEQ ID NO: 628976 - RNA, 18 nt, Human
uaccccacagccccugcc

SEQ ID NO: 628977 - RNA, 24 nt, Human
uacggugccucuucucaaaucucu

SEQ ID NO: 628978 - RNA, 22 nt, Human
uaggaaagacccacaacucccg

SEQ ID NO: 628979 - RNA, 18 nt, Human
uaggacggccccaggccu

SEQ ID NO: 628980 - RNA, 23 nt, Human
uaugucacccccuggaggucuca

SEQ ID NO: 628981 - RNA, 21 nt, Human
ucacccauccauguccacaga

SEQ ID NO: 628982 - RNA, 24 nt, Human
ucacccccuggaggucucaagggc

SEQ ID NO: 628983 - RNA, 23 nt, Human
ucagcccugcccccucauccacc

SEQ ID NO: 628984 - RNA, 20 nt, Human
uccacagacccauguccauc

SEQ ID NO: 628985 - RNA, 25 nt, Human
uccaccagcacuguccccucugccc

SEQ ID NO: 628986 - RNA, 24 nt, Human
uccacguccacaccugucagcccu

SEQ ID NO: 628987 - RNA, 23 nt, Human
uccccuccagccccccaccccac

SEQ ID NO: 628988 - RNA, 20 nt, Human
ucccugcagugagucccgga

SEQ ID NO: 628989 - RNA, 22 nt, Human
uccgagauguccuagggcacga

SEQ ID NO: 628990 - RNA, 23 nt, Human
uccgucagcccugcccccucacc

SEQ ID NO: 628991 - RNA, 24 nt, Human
uccgucagcccugcccccucaccc

SEQ ID NO: 628992 - RNA, 18 nt, Human
uccucuuccccuccagcc

SEQ ID NO: 628993 - RNA, 18 nt, Human
uccuggggccugggacga

SEQ ID NO: 628994 - RNA, 21 nt, Human
uccuggggccugggacgaggc

SEQ ID NO: 628995 - RNA, 19 nt, Human
uccuggguuuccgccuuuc

SEQ ID NO: 628996 - RNA, 21 nt, Human
ucugucagcccugcccucacc

SEQ ID NO: 628997 - RNA, 22 nt, Human
ucugucagcccugcccucaccc

SEQ ID NO: 628998 - RNA, 20 nt, Human
ugacuccucacccauccaug

SEQ ID NO: 628999 - RNA, 22 nt, Human
ugaggguccuuuucucagccca

SEQ ID NO: 629000 - RNA, 21 nt, Human
ugagggugugugugugaguga

SEQ ID NO: 629001 - RNA, 18 nt, Human
ugcaguggcuugggcaca

SEQ ID NO: 629002 - RNA, 23 nt, Human
ugccccaccaugcuggcuucagc

SEQ ID NO: 629003 - RNA, 25 nt, Human
uggaccccccggggauaugcagucc

SEQ ID NO: 629004 - RNA, 22 nt, Human
uggcgggcgagcgucaggaucu

SEQ ID NO: 629005 - RNA, 23 nt, Human
uggguuuccgccuuucccagcug

SEQ ID NO: 629006 - RNA, 21 nt, Human
uguccaccugcucagaaaccc

SEQ ID NO: 629007 - RNA, 23 nt, Human
ugucccccuccucuuccccucca

SEQ ID NO: 629008 - RNA, 23 nt, Human
uuccccuccagccccccacccca

SEQ ID NO: 629009 - RNA, 20 nt, Human
uucccugcagugagucccgg

SEQ ID NO: 629010 - RNA, 22 nt, Human
uuccucugacccugaagauccu

SEQ ID NO: 629011 - RNA, 26 nt, Human
uuucccagcugcaggcacacaugccc

SEQ ID NO: 629012 - RNA, 21 nt, Human
uuugaagguacacuugugaag

SEQ ID NO: 629013 - RNA, 20 nt, Human
uuuuuuuuuuuccagcaccc

SEQ ID NO: 629014 - RNA, 22 nt, Human
uuuuuuuuuuuuuuuuuuccag

SEQ ID NO: 629015 - RNA, 20 nt, Human
accagcagagaaguacaggc

SEQ ID NO: 629016 - RNA, 18 nt, Human
acugaucccaauaagcau

SEQ ID NO: 629017 - RNA, 19 nt, Human
agcaccaauuuuagcuacc

SEQ ID NO: 629018 - RNA, 18 nt, Human
aggaaacagaaaaugucu

SEQ ID NO: 629019 - RNA, 21 nt, Human
aggccacagcagaaagcacca

SEQ ID NO: 629020 - RNA, 20 nt, Human
aguauuauugugugcugguu

SEQ ID NO: 629021 - RNA, 22 nt, Human
auagggcagcaaaccagcagag

SEQ ID NO: 629022 - RNA, 24 nt, Human
auccuauuucagauuuggccaggc

SEQ ID NO: 629023 - RNA, 21 nt, Human
caauuuuagcuaccuuugauc

SEQ ID NO: 629024 - RNA, 24 nt, Human
caggaaacagaaaaugucuuuggu

SEQ ID NO: 629025 - RNA, 19 nt, Human
cauaaacuaaggccacagc

SEQ ID NO: 629026 - RNA, 22 nt, Human
cauaaacuaaggccacagcaga

SEQ ID NO: 629027 - RNA, 19 nt, Human
ccagcagagaaguacaggc

SEQ ID NO: 629028 - RNA, 18 nt, Human
ccauauucuucccugaga

SEQ ID NO: 629029 - RNA, 19 nt, Human
cccagggagaguuccuucu

SEQ ID NO: 629030 - RNA, 18 nt, Human
cuaaggccacagcagaaa

SEQ ID NO: 629031 - RNA, 24 nt, Human
cuaaggccacagcagaaagcacca

SEQ ID NO: 629032 - RNA, 24 nt, Human
cuccccagguccaccgggcgugau

SEQ ID NO: 629033 - RNA, 23 nt, Human
cugcuggaccaugauacuuauau

SEQ ID NO: 629034 - RNA, 22 nt, Human
cuucuuuuuuaaaaguugaaag

SEQ ID NO: 629035 - RNA, 18 nt, Human
gaagacuuuucaaaagcu

SEQ ID NO: 629036 - RNA, 21 nt, Human
gaccaugauacuuauaucugg

SEQ ID NO: 629037 - RNA, 26 nt, Human
gcucaacuucaacaaagagggaacgc

SEQ ID NO: 629038 - RNA, 23 nt, Human
gggaagguggacauagggcagca

SEQ ID NO: 629039 - RNA, 22 nt, Human
uaaacuaaggccacagcagaaa

SEQ ID NO: 629040 - RNA, 21 nt, Human
uaacacgggauaaacagaauu

SEQ ID NO: 629041 - RNA, 24 nt, Human
uaaggccacagcagaaagcaccaa

SEQ ID NO: 629042 - RNA, 28 nt, Human
uacauaaacuaaggccacagcagaaagc

SEQ ID NO: 629043 - RNA, 21 nt, Human
uagggcagcaaaccagcagag

SEQ ID NO: 629044 - RNA, 22 nt, Human
uaucugggagaugacuuaguuu

SEQ ID NO: 629045 - RNA, 20 nt, Human
uccaggaaacagaaaauguc

SEQ ID NO: 629046 - RNA, 20 nt, Human
uccuucuuuuuuaaaaguug

SEQ ID NO: 629047 - RNA, 19 nt, Human
ugaaagacuggaagucaga

SEQ ID NO: 629048 - RNA, 18 nt, Human
ugagaugggaagguggac

SEQ ID NO: 629049 - RNA, 19 nt, Human
ugagaugggaagguggaca

SEQ ID NO: 629050 - RNA, 22 nt, Human
ugagaugggaagguggacauag

SEQ ID NO: 629051 - RNA, 20 nt, Human
uuagcaguugcugcuuccuc

SEQ ID NO: 629052 - RNA, 21 nt, Human
uuuuuuuuuuuuuuuuuccag

SEQ ID NO: 629053 - RNA, 23 nt, Human
uuuuuuuuuuuuuuuuuuccagg

SEQ ID NO: 629054 - RNA, 24 nt, Human
aaaaaaaacagauuggcuucaaag

SEQ ID NO: 629055 - RNA, 19 nt, Human
aaaacaaucuuuuuuuuac

SEQ ID NO: 629056 - RNA, 21 nt, Human
aaaacugccuucuugaccuuc

SEQ ID NO: 629057 - RNA, 22 nt, Human
aaaauaccaacaucucccauac

SEQ ID NO: 629058 - RNA, 18 nt, Human
aacaauuucuaaguagau

SEQ ID NO: 629059 - RNA, 21 nt, Human
aagaaaacacuaaggaagacc

SEQ ID NO: 629060 - RNA, 21 nt, Human
aagggcccaagauucaggacc

SEQ ID NO: 629061 - RNA, 26 nt, Human
aaucauaugccaacaggggaaucgaa

SEQ ID NO: 629062 - RNA, 22 nt, Human
acaacugacaaaaagugucaga

SEQ ID NO: 629063 - RNA, 20 nt, Human
acagagaagaggcaucucga

SEQ ID NO: 629064 - RNA, 26 nt, Human
agacaacugacaaaaagugucagagc

SEQ ID NO: 629065 - RNA, 20 nt, Human
agacagagaagaggcaucuc

SEQ ID NO: 629066 - RNA, 22 nt, Human
agccuaguaaaagaaugaccug

SEQ ID NO: 629067 - RNA, 21 nt, Human
agcgcggcggccgcagcaacc

SEQ ID NO: 629068 - RNA, 25 nt, Human
aggaagacccacagagcuguauuaa

SEQ ID NO: 629069 - RNA, 18 nt, Human
aucuggccuacuuugugg

SEQ ID NO: 629070 - RNA, 23 nt, Human
auuggcuucaaagaaaacacuaa

SEQ ID NO: 629071 - RNA, 23 nt, Human
caaccaaggugcaguauaaacac

SEQ ID NO: 629072 - RNA, 23 nt, Human
cacauaaaauaccaacaucuccc

SEQ ID NO: 629073 - RNA, 24 nt, Human
caccaaaaucuccauuugagauaa

SEQ ID NO: 629074 - RNA, 26 nt, Human
cagagccagaggccaaccucugcuag

SEQ ID NO: 629075 - RNA, 24 nt, Human
ccaccuaaagacaacugacaaaaa

SEQ ID NO: 629076 - RNA, 24 nt, Human
cccuugcucuccaaaagaaguggu

SEQ ID NO: 629077 - RNA, 21 nt, Human
cgaacagaugaaaaaccaaag

SEQ ID NO: 629078 - RNA, 22 nt, Human
cgggaggcggccgucacuuccu

SEQ ID NO: 629079 - RNA, 21 nt, Human
cuaaguagaugaauauaauca

SEQ ID NO: 629080 - RNA, 21 nt, Human
cuacacaguauucacaaucaa

SEQ ID NO: 629081 - RNA, 23 nt, Human
cuacuuuguggugacugacacaa

SEQ ID NO: 629082 - RNA, 25 nt, Human
cucccaccaaaaucuccauuugaga

SEQ ID NO: 629083 - RNA, 19 nt, Human
gaacagaugaaaaaccaaa

SEQ ID NO: 629084 - RNA, 23 nt, Human
gaauauaaucacgauguuuauac

SEQ ID NO: 629085 - RNA, 20 nt, Human
gaccaccuaaagacaacuga

SEQ ID NO: 629086 - RNA, 22 nt, Human
gccggggagcgcggcggccgca

SEQ ID NO: 629087 - RNA, 22 nt, Human
uaaaaaaaacagauuggcuuca

SEQ ID NO: 629088 - RNA, 26 nt, Human
uaaaaacaauuguuuucuccuccucc

SEQ ID NO: 629089 - RNA, 24 nt, Human
uaacagaaugacagaaucauuuau

SEQ ID NO: 629090 - RNA, 21 nt, Human
uaagccuaguaaaagaaugac

SEQ ID NO: 629091 - RNA, 19 nt, Human
uaaggaaaaaaaccuagac

SEQ ID NO: 629092 - RNA, 22 nt, Human
uaaguagaugaauauaaucacg

SEQ ID NO: 629093 - RNA, 23 nt, Human
ucaaaagggcccaagauucagga

SEQ ID NO: 629094 - RNA, 19 nt, Human
uccaaaagaagugguuuaa

SEQ ID NO: 629095 - RNA, 18 nt, Human
ucgggccggggagcgcgg

SEQ ID NO: 629096 - RNA, 26 nt, Human
ugaauauaaucacgauguuuauacag

SEQ ID NO: 629097 - RNA, 25 nt, Human
ugacuucucggacuccagaaguccc

SEQ ID NO: 629098 - RNA, 21 nt, Human
ugagugaaauacaguaaagcc

SEQ ID NO: 629099 - RNA, 21 nt, Human
ugauuuaaaaacaauuguuuu

SEQ ID NO: 629100 - RNA, 22 nt, Human
ugccaaagacaaacuagagcaa

SEQ ID NO: 629101 - RNA, 23 nt, Human
ugcuuuuauacacauaaaauacc

SEQ ID NO: 629102 - RNA, 24 nt, Human
ugguaaguggucaaagcuuguuuu

SEQ ID NO: 629103 - RNA, 21 nt, Human
uguaacagaaugacagaauca

SEQ ID NO: 629104 - RNA, 20 nt, Human
uguaagaacaaggacucuca

SEQ ID NO: 629105 - RNA, 23 nt, Human
uuaacuuaucuggccuacuuugu

SEQ ID NO: 629106 - RNA, 22 nt, Human
uuaauaaccguuauccaaaaau

SEQ ID NO: 629107 - RNA, 18 nt, Human
uuaguaaaaauaaucaua

SEQ ID NO: 629108 - RNA, 24 nt, Human
uucagauacuugguaaguggucaa

SEQ ID NO: 629109 - RNA, 20 nt, Human
uucuugaccuuccccuugcu

SEQ ID NO: 629110 - RNA, 22 nt, Human
uuuauacacauaaaauaccaac

SEQ ID NO: 629111 - RNA, 20 nt, Human
uuuuauaauuacuuucacug

SEQ ID NO: 629112 - RNA, 20 nt, Human
uuuuuuuuuuuuuugccaaa

SEQ ID NO: 629113 - RNA, 18 nt, Human
uuuuuuuuuuuuuuuuug

SEQ ID NO: 629114 - RNA, 22 nt, Human
uuuuuuuuuuuuuuuuugccaa

SEQ ID NO: 629115 - RNA, 21 nt, Human
aaaucagcugcagauguuugg

SEQ ID NO: 629116 - RNA, 20 nt, Human
aaccacaauuagaucucaug

SEQ ID NO: 629117 - RNA, 21 nt, Human
aagucccaguauauuuaaaac

SEQ ID NO: 629118 - RNA, 18 nt, Human
acccacuuacaaugagau

SEQ ID NO: 629119 - RNA, 20 nt, Human
agacacuuccgcccggacca

SEQ ID NO: 629120 - RNA, 19 nt, Human
agauuuaaaggccacaaac

SEQ ID NO: 629121 - RNA, 22 nt, Human
agcauuaacaccgacuuaaaac

SEQ ID NO: 629122 - RNA, 21 nt, Human
aggauacuuccgcccgggcca

SEQ ID NO: 629123 - RNA, 22 nt, Human
aguagacagaacccaaaaagag

SEQ ID NO: 629124 - RNA, 24 nt, Human
auacggcauuucccccgugugaac

SEQ ID NO: 629125 - RNA, 21 nt, Human
auuaaauuucaguagacagaa

SEQ ID NO: 629126 - RNA, 24 nt, Human
caaaucacauaacaugcagaaucc

SEQ ID NO: 629127 - RNA, 18 nt, Human
cacgacguguggcagggc

SEQ ID NO: 629128 - RNA, 23 nt, Human
cacugcuggcacagaggugccuu

SEQ ID NO: 629129 - RNA, 22 nt, Human
cacuuccacgggaccauguguc

SEQ ID NO: 629130 - RNA, 20 nt, Human
cagaacaaaucacauaacau

SEQ ID NO: 629131 - RNA, 22 nt, Human
cagcacuagcgcuccugcuugc

SEQ ID NO: 629132 - RNA, 18 nt, Human
cagccaauaguucaugaa

SEQ ID NO: 629133 - RNA, 23 nt, Human
caggaugcagccaauaguucaug

SEQ ID NO: 629134 - RNA, 21 nt, Human
caguagacagaacccaaaaag

SEQ ID NO: 629135 - RNA, 21 nt, Human
ccaagcacgagcgcuccugcu

SEQ ID NO: 629136 - RNA, 23 nt, Human
ccagggcagggccugucuccgcu

SEQ ID NO: 629137 - RNA, 19 nt, Human
cccgggccacgugucuacc

SEQ ID NO: 629138 - RNA, 21 nt, Human
ccggacauauaaccuuuaaag

SEQ ID NO: 629139 - RNA, 23 nt, Human
ccggaccacgugucugcccuccc

SEQ ID NO: 629140 - RNA, 21 nt, Human
ccucccagcgccagcuccugc

SEQ ID NO: 629141 - RNA, 23 nt, Human
ccucccagcgugagcuccugcuc

SEQ ID NO: 629142 - RNA, 22 nt, Human
cguguccgcccucccagcacua

SEQ ID NO: 629143 - RNA, 22 nt, Human
cgugucugcccucccagcgcca

SEQ ID NO: 629144 - RNA, 20 nt, Human
cucccagcgccagcuccugc

SEQ ID NO: 629145 - RNA, 22 nt, Human
cucccgcuggcugcacagacac

SEQ ID NO: 629146 - RNA, 19 nt, Human
cugcgggaggagcggcugc

SEQ ID NO: 629147 - RNA, 23 nt, Human
gaacagaacaaaucacauaacau

SEQ ID NO: 629148 - RNA, 20 nt, Human
gcauuaacaccgacuuaaaa

SEQ ID NO: 629149 - RNA, 20 nt, Human
gcugcugaaguggcugcggg

SEQ ID NO: 629150 - RNA, 21 nt, Human
gggcagggccugucuccgcuc

SEQ ID NO: 629151 - RNA, 22 nt, Human
gguguagaaugugcgagaggga

SEQ ID NO: 629152 - RNA, 19 nt, Human
uagacagaacccaaaaaga

SEQ ID NO: 629153 - RNA, 21 nt, Human
uagacagaacccaaaaagaga

SEQ ID NO: 629154 - RNA, 24 nt, Human
ucaguagacagaacccaaaaagag

SEQ ID NO: 629155 - RNA, 20 nt, Human
ucucccagggcagggccugu

SEQ ID NO: 629156 - RNA, 22 nt, Human
ucuuggugggcaccuaagcagg

SEQ ID NO: 629157 - RNA, 19 nt, Human
ugaggaguacauucuugcu

SEQ ID NO: 629158 - RNA, 22 nt, Human
ugcgggucuugggagggcugca

SEQ ID NO: 629159 - RNA, 21 nt, Human
uggcugcgggaggagcggcuu

SEQ ID NO: 629160 - RNA, 24 nt, Human
ugggagggcugcagacaggcccuc

SEQ ID NO: 629161 - RNA, 20 nt, Human
ugggcacgacguguggcagg

SEQ ID NO: 629162 - RNA, 24 nt, Human
uguccgcccucccagcacuagcgc

SEQ ID NO: 629163 - RNA, 18 nt, Human
uuuaauuucaaaucagcu

SEQ ID NO: 629164 - RNA, 20 nt, Human
uuuuuuuuuuaaaacaaaua

SEQ ID NO: 629165 - RNA, 19 nt, Human
aaccucgcuucuuccucac

SEQ ID NO: 629166 - RNA, 18 nt, Human
accaaaggggccaggauc

SEQ ID NO: 629167 - RNA, 21 nt, Human
acuucaggauuacuuugauau

SEQ ID NO: 629168 - RNA, 22 nt, Human
caacggcaucugguucaugcug

SEQ ID NO: 629169 - RNA, 23 nt, Human
caagaccagcaaacuguucaacg

SEQ ID NO: 629170 - RNA, 18 nt, Human
caccccugggcggccccu

SEQ ID NO: 629171 - RNA, 23 nt, Human
cagcugaacucuuaaaaagaacc

SEQ ID NO: 629172 - RNA, 23 nt, Human
caucugguucaugcuguggcauc

SEQ ID NO: 629173 - RNA, 19 nt, Human
ccaccccugggcggccccu

SEQ ID NO: 629174 - RNA, 18 nt, Human
ccaggcccauggaggggu

SEQ ID NO: 629175 - RNA, 24 nt, Human
ccaggcccauggaggggugacuaa

SEQ ID NO: 629176 - RNA, 22 nt, Human
cccugucacucagauccaccaa

SEQ ID NO: 629177 - RNA, 23 nt, Human
cgcuucuuccucacggugcucca

SEQ ID NO: 629178 - RNA, 20 nt, Human
cuuaaaaagaaccucgcuuc

SEQ ID NO: 629179 - RNA, 21 nt, Human
gacccugucacucagauccac

SEQ ID NO: 629180 - RNA, 23 nt, Human
gauacuucaggauuacuuugaua

SEQ ID NO: 629181 - RNA, 20 nt, Human
gccaggauccaccccugggc

SEQ ID NO: 629182 - RNA, 23 nt, Human
gccaggauccaccccugggcggc

SEQ ID NO: 629183 - RNA, 19 nt, Human
ggugacuaaggcaggaaga

SEQ ID NO: 629184 - RNA, 18 nt, Human
guggcauccacagccacc

SEQ ID NO: 629185 - RNA, 19 nt, Human
uauuuuguucugauacuuc

SEQ ID NO: 629186 - RNA, 20 nt, Human
ucugguucaugcuguggcau

SEQ ID NO: 629187 - RNA, 19 nt, Human
ugaaaagcuccuguuuuca

SEQ ID NO: 629188 - RNA, 20 nt, Human
uggggaguuaccaccugaaa

SEQ ID NO: 629189 - RNA, 20 nt, Human
uguggcauccacagccaccu

SEQ ID NO: 629190 - RNA, 20 nt, Human
uuagcaccaggcccauggag

SEQ ID NO: 629191 - RNA, 21 nt, Human
uucugccaggcaagaccagca

SEQ ID NO: 629192 - RNA, 28 nt, Human
uuuuuuuuuuuugaggguaggggguguc

SEQ ID NO: 629193 - RNA, 18 nt, Human
uuuuuuuuuuuuugaggg

SEQ ID NO: 629194 - RNA, 27 nt, Human
uuuuuuuuuuuuuuuuugaggguaggg

SEQ ID NO: 629195 - RNA, 28 nt, Human
uuuuuuuuuuuuuuuuuuuuuuugaggg

SEQ ID NO: 629196 - RNA, 24 nt, Human
aaaaacgcaaaggaaaaagauggc

SEQ ID NO: 629197 - RNA, 19 nt, Human
aaccgaaccucccgccgcc

SEQ ID NO: 629198 - RNA, 21 nt, Human
aagaaaagauacaaugcagga

SEQ ID NO: 629199 - RNA, 24 nt, Human
aagacagccccugccaagaaccag

SEQ ID NO: 629200 - RNA, 22 nt, Human
aagcacagcaggcuucugggaa

SEQ ID NO: 629201 - RNA, 19 nt, Human
aaggaucuugucuuugaug

SEQ ID NO: 629202 - RNA, 18 nt, Human
aaguccacaagaacaauu

SEQ ID NO: 629203 - RNA, 20 nt, Human
acaccaggccgaacaaagca

SEQ ID NO: 629204 - RNA, 20 nt, Human
acagugccuagaaaccaagg

SEQ ID NO: 629205 - RNA, 21 nt, Human
accucccgccgccgucgccgc

SEQ ID NO: 629206 - RNA, 28 nt, Human
agaaacaaugggcagaaagccgguaccc

SEQ ID NO: 629207 - RNA, 20 nt, Human
agaaacaguaagaaaagaua

SEQ ID NO: 629208 - RNA, 24 nt, Human
agaaacugcauucggugggucuuu

SEQ ID NO: 629209 - RNA, 18 nt, Human
agcaggggacuacaugug

SEQ ID NO: 629210 - RNA, 23 nt, Human
agcaugguccguucaccaacgcc

SEQ ID NO: 629211 - RNA, 22 nt, Human
agggagcugcaggcccagucag

SEQ ID NO: 629212 - RNA, 22 nt, Human
aggugguccuggagggaaaaug

SEQ ID NO: 629213 - RNA, 20 nt, Human
augguccguucaccaacgcc

SEQ ID NO: 629214 - RNA, 24 nt, Human
caaagcacagugauuucuucccuu

SEQ ID NO: 629215 - RNA, 20 nt, Human
caacgggcgacaaccgaacc

SEQ ID NO: 629216 - RNA, 21 nt, Human
caagaaacuaguaagaaacaa

SEQ ID NO: 629217 - RNA, 22 nt, Human
caagaacaauucaagaaacuag

SEQ ID NO: 629218 - RNA, 19 nt, Human
caccaaccauccuugcaca

SEQ ID NO: 629219 - RNA, 21 nt, Human
caccaaccauccuugcacacc

SEQ ID NO: 629220 - RNA, 19 nt, Human
caccugccacaguucacau

SEQ ID NO: 629221 - RNA, 23 nt, Human
cagaaacugcauucggugggucu

SEQ ID NO: 629222 - RNA, 23 nt, Human
cagaaagcugugggacgaaagca

SEQ ID NO: 629223 - RNA, 24 nt, Human
cagcaggcuucugggaggcuggag

SEQ ID NO: 629224 - RNA, 19 nt, Human
caggaaaaccaccaaccau

SEQ ID NO: 629225 - RNA, 22 nt, Human
cagucaagcagaaacugcauuc

SEQ ID NO: 629226 - RNA, 19 nt, Human
cagugaagagggaguugga

SEQ ID NO: 629227 - RNA, 22 nt, Human
cauccuugcacaccaggccgaa

SEQ ID NO: 629228 - RNA, 18 nt, Human
ccacaaauaacaucucac

SEQ ID NO: 629229 - RNA, 19 nt, Human
cccacccccacccuaauuc

SEQ ID NO: 629230 - RNA, 22 nt, Human
cccacccccacccuaauuccca

SEQ ID NO: 629231 - RNA, 22 nt, Human
cccaggucagagcuacggaagc

SEQ ID NO: 629232 - RNA, 18 nt, Human
cccauauucccauccaca

SEQ ID NO: 629233 - RNA, 21 nt, Human
cccauccacaucaguuuaaau

SEQ ID NO: 629234 - RNA, 23 nt, Human
ccccacccccacccuaauuccca

SEQ ID NO: 629235 - RNA, 22 nt, Human
cccccacccccacccuaauucc

SEQ ID NO: 629236 - RNA, 22 nt, Human
cccucucaucccauuuauuaaa

SEQ ID NO: 629237 - RNA, 21 nt, Human
cccuucaucccccacccccac

SEQ ID NO: 629238 - RNA, 18 nt, Human
ccgccgccgucgccgccg

SEQ ID NO: 629239 - RNA, 18 nt, Human
ccgccgucgccgccgccg

SEQ ID NO: 629240 - RNA, 21 nt, Human
ccgccgucgccgccgccgcga

SEQ ID NO: 629241 - RNA, 23 nt, Human
ccucccgccgccgucgccgccgc

SEQ ID NO: 629242 - RNA, 20 nt, Human
ccucuaagucccaggagaag

SEQ ID NO: 629243 - RNA, 21 nt, Human
cgaaccucccgccgccgucgc

SEQ ID NO: 629244 - RNA, 23 nt, Human
cuccacaacuacccuuuuaccua

SEQ ID NO: 629245 - RNA, 23 nt, Human
cucuaagucccaggagaagggag

SEQ ID NO: 629246 - RNA, 19 nt, Human
gaggaaaaguccacaagaa

SEQ ID NO: 629247 - RNA, 26 nt, Human
gaggaaaaguccacaagaacaauuca

SEQ ID NO: 629248 - RNA, 19 nt, Human
gauugggaguaccagugaa

SEQ ID NO: 629249 - RNA, 18 nt, Human
gcaggaaaaccaccaacc

SEQ ID NO: 629250 - RNA, 19 nt, Human
gcuuggggcggguuuugaa

SEQ ID NO: 629251 - RNA, 18 nt, Human
ggaaaaccaccaaccauc

SEQ ID NO: 629252 - RNA, 18 nt, Human
uaagacagccccugccaa

SEQ ID NO: 629253 - RNA, 24 nt, Human
uaagacagccccugccaagaacca

SEQ ID NO: 629254 - RNA, 18 nt, Human
uauggcaguagaggauga

SEQ ID NO: 629255 - RNA, 21 nt, Human
ucaagaaaaacgcaaaggaaa

SEQ ID NO: 629256 - RNA, 27 nt, Human
ucacaugccacaaauaacaucucaccu

SEQ ID NO: 629257 - RNA, 21 nt, Human
uccacaacuacccuuuuaccu

SEQ ID NO: 629258 - RNA, 24 nt, Human
ucccgccgccgucgccgccgccgg

SEQ ID NO: 629259 - RNA, 23 nt, Human
uccuugcacaccaggccgaacaa

SEQ ID NO: 629260 - RNA, 26 nt, Human
ucugggaggcuggagauccuuucucu

SEQ ID NO: 629261 - RNA, 20 nt, Human
ugauuucuucccuucauccc

SEQ ID NO: 629262 - RNA, 19 nt, Human
ugcaauggcggccgccgag

SEQ ID NO: 629263 - RNA, 21 nt, Human
ugccaagaaccacagugccua

SEQ ID NO: 629264 - RNA, 20 nt, Human
ugggaggcuggagauccuuu

SEQ ID NO: 629265 - RNA, 19 nt, Human
ugguccuggagggaaaaug

SEQ ID NO: 629266 - RNA, 21 nt, Human
ugucaccagguaccgggugcc

SEQ ID NO: 629267 - RNA, 26 nt, Human
uucaucccccacccccacccuaauuc

SEQ ID NO: 629268 - RNA, 22 nt, Human
uucccuucaucccccaccccca

SEQ ID NO: 629269 - RNA, 21 nt, Human
uugauugggaguaccagugaa

SEQ ID NO: 629270 - RNA, 22 nt, Human
uuucuuggggacgcuggugaua

SEQ ID NO: 629271 - RNA, 21 nt, Human
acacagcuucaggagucaggg

SEQ ID NO: 629272 - RNA, 27 nt, Human
acuacaacucccagaaagcuuugcgcu

SEQ ID NO: 629273 - RNA, 20 nt, Human
agacggccuccuugaugagc

SEQ ID NO: 629274 - RNA, 19 nt, Human
agucguggcagguggcccu

SEQ ID NO: 629275 - RNA, 19 nt, Human
cacagcuucaggagucagg

SEQ ID NO: 629276 - RNA, 21 nt, Human
cacauccuaagcccaugcucc

SEQ ID NO: 629277 - RNA, 18 nt, Human
cagcagcguggcgggccc

SEQ ID NO: 629278 - RNA, 26 nt, Human
ccacagacacagcuucaggagucagg

SEQ ID NO: 629279 - RNA, 22 nt, Human
ccagcagcguggcgggcccgag

SEQ ID NO: 629280 - RNA, 21 nt, Human
cccauccgcuacuucccgaaa

SEQ ID NO: 629281 - RNA, 20 nt, Human
cgauaccacggauaccuuua

SEQ ID NO: 629282 - RNA, 23 nt, Human
cgcucaggcgggcuccuguccgu

SEQ ID NO: 629283 - RNA, 20 nt, Human
cggcccagcagucguggcag

SEQ ID NO: 629284 - RNA, 22 nt, Human
cucccuggcauucacauccuaa

SEQ ID NO: 629285 - RNA, 21 nt, Human
cuuugcgcucaggcgggcucc

SEQ ID NO: 629286 - RNA, 20 nt, Human
gagccgggccaggcggccca

SEQ ID NO: 629287 - RNA, 21 nt, Human
ggcccagcagucguggcaggu

SEQ ID NO: 629288 - RNA, 24 nt, Human
ggcgggcuccuguccguagaagcc

SEQ ID NO: 629289 - RNA, 19 nt, Human
gggauaagaacuacaacuc

SEQ ID NO: 629290 - RNA, 18 nt, Human
gggcccgaggggcggcag

SEQ ID NO: 629291 - RNA, 19 nt, Human
gggcccgaggggcggcagg

SEQ ID NO: 629292 - RNA, 22 nt, Human
uauugcucccuggcauucacau

SEQ ID NO: 629293 - RNA, 21 nt, Human
ucccauccgcuacuucccgaa

SEQ ID NO: 629294 - RNA, 18 nt, Human
ucuggcugacggucucca

SEQ ID NO: 629295 - RNA, 19 nt, Human
ugcgcucaggcgggcuccu

SEQ ID NO: 629296 - RNA, 21 nt, Human
ugcucccaccgucccauccgc

SEQ ID NO: 629297 - RNA, 19 nt, Human
uggcagguggcccagcucc

SEQ ID NO: 629298 - RNA, 20 nt, Human
uggccgcagcuccacagaca

SEQ ID NO: 629299 - RNA, 23 nt, Human
uggcgggcccgaggggcggcagg

SEQ ID NO: 629300 - RNA, 19 nt, Human
uuuuuuuuuugccgauacc

SEQ ID NO: 629301 - RNA, 19 nt, Human
uuuuuuuuuuuuuugccga

SEQ ID NO: 629302 - RNA, 18 nt, Human
uuuuuuuuuuuuuuuuug

SEQ ID NO: 629303 - RNA, 22 nt, Human
uuuuuuuuuuuuuuuuugccga

SEQ ID NO: 629304 - RNA, 23 nt, Human
uuuuuuuuuuuuuuuuugccgau

SEQ ID NO: 629305 - RNA, 20 nt, Human
cccggggaccugggacuggc

SEQ ID NO: 629306 - RNA, 23 nt, Human
ccgcggcugucagagcggccagg

SEQ ID NO: 629307 - RNA, 24 nt, Human
cgcugucagcugugaggcggggcg

SEQ ID NO: 629308 - RNA, 19 nt, Human
gcaggccaggaaggucuuu

SEQ ID NO: 629309 - RNA, 22 nt, Human
gcccacggccagggguccucag

SEQ ID NO: 629310 - RNA, 20 nt, Human
gcgggccuucucuggagccc

SEQ ID NO: 629311 - RNA, 23 nt, Human
gggcggggcgggggacgggccuc

SEQ ID NO: 629312 - RNA, 23 nt, Human
ggggcggggcgggggacgggccu

SEQ ID NO: 629313 - RNA, 23 nt, Human
ugaagccgaggcccaagcccacg

SEQ ID NO: 629314 - RNA, 20 nt, Human
ugaagccgaggcccaagccu

SEQ ID NO: 629315 - RNA, 20 nt, Human
ugucuggggcaggccaggaa

SEQ ID NO: 629316 - RNA, 18 nt, Human
uuuuuuuuuuuuuuuucg

SEQ ID NO: 629317 - RNA, 23 nt, Human
uuuuuuuuuuuuuuuuucgcuuu

SEQ ID NO: 629318 - RNA, 19 nt, Human
aagacguugucuuccagga

SEQ ID NO: 629319 - RNA, 23 nt, Human
aagugcucggauuacaggcauga

SEQ ID NO: 629320 - RNA, 19 nt, Human
accaaaucaaugucucugc

SEQ ID NO: 629321 - RNA, 20 nt, Human
accaucuaucggacagggag

SEQ ID NO: 629322 - RNA, 18 nt, Human
accccagggauccaggaa

SEQ ID NO: 629323 - RNA, 24 nt, Human
accuugugauccgcccgccucagc

SEQ ID NO: 629324 - RNA, 18 nt, Human
acggaguuucaccguguu

SEQ ID NO: 629325 - RNA, 20 nt, Human
acggaguuucaccguguuag

SEQ ID NO: 629326 - RNA, 24 nt, Human
acggaguuucaccguguuagccag

SEQ ID NO: 629327 - RNA, 23 nt, Human
agaagacguugucuuccaggaug

SEQ ID NO: 629328 - RNA, 21 nt, Human
agaguccaguuuccuucuucu

SEQ ID NO: 629329 - RNA, 22 nt, Human
agcacagcacccgccaaagaca

SEQ ID NO: 629330 - RNA, 24 nt, Human
agcccacgcuggagugcaguggcg

SEQ ID NO: 629331 - RNA, 18 nt, Human
aggcccggcucugcccag

SEQ ID NO: 629332 - RNA, 19 nt, Human
aggcuggugucucucacuc

SEQ ID NO: 629333 - RNA, 22 nt, Human
aggggucaggggcuggaguggg

SEQ ID NO: 629334 - RNA, 24 nt, Human
aggguaagaguccaguuuccuucu

SEQ ID NO: 629335 - RNA, 18 nt, Human
agguggucaggggucagg

SEQ ID NO: 629336 - RNA, 18 nt, Human
aguagcugggacuacagg

SEQ ID NO: 629337 - RNA, 19 nt, Human
aguagcugggacuacaggc

SEQ ID NO: 629338 - RNA, 22 nt, Human
aguccuuuccccgcggcuuguu

SEQ ID NO: 629339 - RNA, 20 nt, Human
agugcaguggcgcaaucucg

SEQ ID NO: 629340 - RNA, 24 nt, Human
agugcaguggcgcaaucucggcuc

SEQ ID NO: 629341 - RNA, 25 nt, Human
augauaaugaaaccaaaucaauguc

SEQ ID NO: 629342 - RNA, 20 nt, Human
auucauuugcagggauugag

SEQ ID NO: 629343 - RNA, 21 nt, Human
auucuccugccucagccuccc

SEQ ID NO: 629344 - RNA, 19 nt, Human
cacagcacccgccaaagac

SEQ ID NO: 629345 - RNA, 24 nt, Human
caccauggcguuagggccacagcc

SEQ ID NO: 629346 - RNA, 18 nt, Human
caccguguuagccaggau

SEQ ID NO: 629347 - RNA, 24 nt, Human
caccguguuagccaggauggucuc

SEQ ID NO: 629348 - RNA, 22 nt, Human
cacgccauucuccugccucagc

SEQ ID NO: 629349 - RNA, 24 nt, Human
cacucuguagcccacgcuggagug

SEQ ID NO: 629350 - RNA, 20 nt, Human
cacugugacuucaaaggucc

SEQ ID NO: 629351 - RNA, 18 nt, Human
cagcugggacgggaccag

SEQ ID NO: 629352 - RNA, 20 nt, Human
cagcugggacgggaccagca

SEQ ID NO: 629353 - RNA, 24 nt, Human
caguagacaccacggccuucaagc

SEQ ID NO: 629354 - RNA, 18 nt, Human
ccaccgcgcccggccgcc

SEQ ID NO: 629355 - RNA, 26 nt, Human
ccagcaccaucuaucggacagggagu

SEQ ID NO: 629356 - RNA, 22 nt, Human
ccagcagugcaugcggcucugg

SEQ ID NO: 629357 - RNA, 21 nt, Human
ccagcguucuuugccaacgcc

SEQ ID NO: 629358 - RNA, 20 nt, Human
cccacgcuggagugcagugg

SEQ ID NO: 629359 - RNA, 21 nt, Human
cccagcucccugcagcugcgc

SEQ ID NO: 629360 - RNA, 21 nt, Human
cccaugugccaggcccggcuc

SEQ ID NO: 629361 - RNA, 23 nt, Human
cccgaguagcugggacuacaggc

SEQ ID NO: 629362 - RNA, 24 nt, Human
cccgaguagcugggacuacaggcg

SEQ ID NO: 629363 - RNA, 21 nt, Human
cccggcccucucuccgcuggu

SEQ ID NO: 629364 - RNA, 25 nt, Human
cccggcccucucuccgcugguuuuc

SEQ ID NO: 629365 - RNA, 21 nt, Human
cccugaguuccggccuggcuc

SEQ ID NO: 629366 - RNA, 19 nt, Human
ccgaagugcucggauuaca

SEQ ID NO: 629367 - RNA, 24 nt, Human
ccgaagugcucggauuacaggcau

SEQ ID NO: 629368 - RNA, 24 nt, Human
ccucccugguucacgccauucucc

SEQ ID NO: 629369 - RNA, 22 nt, Human
ccuccugccccaugugccaggc

SEQ ID NO: 629370 - RNA, 23 nt, Human
ccugccucagccucccgaguagc

SEQ ID NO: 629371 - RNA, 24 nt, Human
ccugccucagccucccgaguagcu

SEQ ID NO: 629372 - RNA, 19 nt, Human
ccugugggggagccuuucc

SEQ ID NO: 629373 - RNA, 20 nt, Human
cgaggacccuggcagcggcc

SEQ ID NO: 629374 - RNA, 24 nt, Human
cggaguuucaccguguuagccagg

SEQ ID NO: 629375 - RNA, 20 nt, Human
cggauuacaggcaugagcca

SEQ ID NO: 629376 - RNA, 23 nt, Human
cggauuacaggcaugagccaccg

SEQ ID NO: 629377 - RNA, 23 nt, Human
cggccgggcuccaccugugcacc

SEQ ID NO: 629378 - RNA, 28 nt, Human
cuaauuuuuuaauauuuuuuaguagaga

SEQ ID NO: 629379 - RNA, 24 nt, Human
cucagccucccgaguagcugggac

SEQ ID NO: 629380 - RNA, 24 nt, Human
cuccugaccuugugauccgcccgc

SEQ ID NO: 629381 - RNA, 20 nt, Human
cucggauuacaggcaugagc

SEQ ID NO: 629382 - RNA, 23 nt, Human
cugaggacccugggccuuccugg

SEQ ID NO: 629383 - RNA, 19 nt, Human
cuggcagcggccgucuccu

SEQ ID NO: 629384 - RNA, 25 nt, Human
cuggcaguggaggcuggugucucuc

SEQ ID NO: 629385 - RNA, 21 nt, Human
cuguagcccacgcuggagugc

SEQ ID NO: 629386 - RNA, 21 nt, Human
cuuccuggcaguggaggcugg

SEQ ID NO: 629387 - RNA, 19 nt, Human
cuuucccggcccucucucc

SEQ ID NO: 629388 - RNA, 24 nt, Human
gaccuugugauccgcccgccucag

SEQ ID NO: 629389 - RNA, 25 nt, Human
gagcugcuuaucccagcaccaucua

SEQ ID NO: 629390 - RNA, 19 nt, Human
gaggacccugggccuuccu

SEQ ID NO: 629391 - RNA, 25 nt, Human
gaguagcugggacuacaggcggcca

SEQ ID NO: 629392 - RNA, 18 nt, Human
gauuacaggcaugagcca

SEQ ID NO: 629393 - RNA, 22 nt, Human
gauuacaggcaugagccaccgc

SEQ ID NO: 629394 - RNA, 22 nt, Human
gauuacaggcaugagccaccgc

SEQ ID NO: 629395 - RNA, 20 nt, Human
gcagcugcgccagugugugc

SEQ ID NO: 629396 - RNA, 20 nt, Human
gcaguggaggcuggugucuc

SEQ ID NO: 629397 - RNA, 24 nt, Human
gcccauuuuuuaaugggguuguuu

SEQ ID NO: 629398 - RNA, 24 nt, Human
gccucagcuucccgaagugcucgg

SEQ ID NO: 629399 - RNA, 23 nt, Human
gccugggagggggcuggagggug

SEQ ID NO: 629400 - RNA, 18 nt, Human
gccuuccuggcaguggag

SEQ ID NO: 629401 - RNA, 20 nt, Human
gcucacugcaagcuccuccu

SEQ ID NO: 629402 - RNA, 22 nt, Human
gcucacugcaagcuccuccucc

SEQ ID NO: 629403 - RNA, 19 nt, Human
gcuggagugcaguggcgca

SEQ ID NO: 629404 - RNA, 18 nt, Human
ggaaauggccauucuagg

SEQ ID NO: 629405 - RNA, 23 nt, Human
ggaccagcagugcaugcggcucu

SEQ ID NO: 629406 - RNA, 19 nt, Human
ggagccuuucccggcccuc

SEQ ID NO: 629407 - RNA, 23 nt, Human
ggaggcucccuuacagaagugaa

SEQ ID NO: 629408 - RNA, 21 nt, Human
ggauuacaggcaugagccacc

SEQ ID NO: 629409 - RNA, 22 nt, Human
ggauuacaggcaugagccaccg

SEQ ID NO: 629410 - RNA, 18 nt, Human
gggcuggaggguguggug

SEQ ID NO: 629411 - RNA, 18 nt, Human
ggggauggcgccucaggg

SEQ ID NO: 629412 - RNA, 19 nt, Human
ggucucgaucuccugaccu

SEQ ID NO: 629413 - RNA, 20 nt, Human
ggucucgaucuccugaccuu

SEQ ID NO: 629414 - RNA, 24 nt, Human
gugauccgcccgccucagcuuccc

SEQ ID NO: 629415 - RNA, 19 nt, Human
guggaacugcagguucucu

SEQ ID NO: 629416 - RNA, 26 nt, Human
uaauuuuuuaauauuuuuuaguagag

SEQ ID NO: 629417 - RNA, 27 nt, Human
uaauuuuuuaauauuuuuuaguagaga

SEQ ID NO: 629418 - RNA, 23 nt, Human
uacaggcaugagccaccgcgccc

SEQ ID NO: 629419 - RNA, 23 nt, Human
uagcacagcacccgccaaagaca

SEQ ID NO: 629420 - RNA, 24 nt, Human
uagggccacagccuccugccccau

SEQ ID NO: 629421 - RNA, 21 nt, Human
uaguagagacggaguuucacc

SEQ ID NO: 629422 - RNA, 24 nt, Human
uaguagagacggaguuucaccgug

SEQ ID NO: 629423 - RNA, 25 nt, Human
uaguagagacggaguuucaccgugu

SEQ ID NO: 629424 - RNA, 23 nt, Human
uaguuugcagacauuuucuccca

SEQ ID NO: 629425 - RNA, 24 nt, Human
ucaaucggguccaaaguaaaaaua

SEQ ID NO: 629426 - RNA, 24 nt, Human
ucaccguguuagccaggauggucu

SEQ ID NO: 629427 - RNA, 21 nt, Human
ucacucuguagcccacgcugg

SEQ ID NO: 629428 - RNA, 22 nt, Human
ucacucuguagcccacgcugga

SEQ ID NO: 629429 - RNA, 24 nt, Human
ucacugcaagcuccuccucccugg

SEQ ID NO: 629430 - RNA, 23 nt, Human
ucagccucccgaguagcugggac

SEQ ID NO: 629431 - RNA, 19 nt, Human
ucaggggcuggagugggga

SEQ ID NO: 629432 - RNA, 19 nt, Human
ucaggugccuaucggccgg

SEQ ID NO: 629433 - RNA, 18 nt, Human
ucauuugcagggauugag

SEQ ID NO: 629434 - RNA, 19 nt, Human
ucccgaagugcucggauua

SEQ ID NO: 629435 - RNA, 24 nt, Human
ucccgaagugcucggauuacaggc

SEQ ID NO: 629436 - RNA, 24 nt, Human
ucccgaguagcugggacuacaggc

SEQ ID NO: 629437 - RNA, 22 nt, Human
ucccugaguuccggccuggcuc

SEQ ID NO: 629438 - RNA, 24 nt, Human
ucccugguucacgccauucuccug

SEQ ID NO: 629439 - RNA, 21 nt, Human
uccgcccgccucagcuucccg

SEQ ID NO: 629440 - RNA, 24 nt, Human
uccuugauacugaaaaggggcguu

SEQ ID NO: 629441 - RNA, 18 nt, Human
ucggauuacaggcaugag

SEQ ID NO: 629442 - RNA, 22 nt, Human
ucggauuacaggcaugagccac

SEQ ID NO: 629443 - RNA, 24 nt, Human
ucggauuacaggcaugagccaccg

SEQ ID NO: 629444 - RNA, 19 nt, Human
ucucccauucuguagggug

SEQ ID NO: 629445 - RNA, 23 nt, Human
ucucccauucuguagggugucug

SEQ ID NO: 629446 - RNA, 24 nt, Human
ucuccugccucagccucccgagua

SEQ ID NO: 629447 - RNA, 22 nt, Human
ucugccugugacugagcugcuu

SEQ ID NO: 629448 - RNA, 21 nt, Human
ucuggauaccaaggagcaagg

SEQ ID NO: 629449 - RNA, 24 nt, Human
ucuguagcccacgcuggagugcag

SEQ ID NO: 629450 - RNA, 20 nt, Human
ugaaaccaaaucaaugucuc

SEQ ID NO: 629451 - RNA, 23 nt, Human
ugacugagcugcuuaucccagca

SEQ ID NO: 629452 - RNA, 18 nt, Human
ugacuucaaagguccccg

SEQ ID NO: 629453 - RNA, 24 nt, Human
ugagucagucccauuguuccgugu

SEQ ID NO: 629454 - RNA, 22 nt, Human
ugcaguggcgcaaucucggcuc

SEQ ID NO: 629455 - RNA, 23 nt, Human
ugcaguggcgcaaucucggcuca

SEQ ID NO: 629456 - RNA, 21 nt, Human
ugccaggcccggcucugccca

SEQ ID NO: 629457 - RNA, 24 nt, Human
ugccucagccucccgaguagcugg

SEQ ID NO: 629458 - RNA, 20 nt, Human
ugccucucaguagacaccac

SEQ ID NO: 629459 - RNA, 23 nt, Human
ugccucucaguagacaccacggc

SEQ ID NO: 629460 - RNA, 19 nt, Human
ugccugugacugagcugcu

SEQ ID NO: 629461 - RNA, 20 nt, Human
uggaacugcagguucucucc

SEQ ID NO: 629462 - RNA, 23 nt, Human
uggagugcaguggcgcaaucucg

SEQ ID NO: 629463 - RNA, 24 nt, Human
uggagugcaguggcgcaaucucgg

SEQ ID NO: 629464 - RNA, 22 nt, Human
uggauucauguuuguugaauga

SEQ ID NO: 629465 - RNA, 20 nt, Human
ugggacgggaccagcagugc

SEQ ID NO: 629466 - RNA, 21 nt, Human
ugggacuacaggcggccacca

SEQ ID NO: 629467 - RNA, 25 nt, Human
ugggagggggcuggaggguguggug

SEQ ID NO: 629468 - RNA, 20 nt, Human
uggucccugaggacccuggg

SEQ ID NO: 629469 - RNA, 19 nt, Human
ugguucacgccauucuccu

SEQ ID NO: 629470 - RNA, 18 nt, Human
uguaugugugcagcuuca

SEQ ID NO: 629471 - RNA, 24 nt, Human
ugugauccgcccgccucagcuucc

SEQ ID NO: 629472 - RNA, 21 nt, Human
ugugcagcuucaugucugagu

SEQ ID NO: 629473 - RNA, 23 nt, Human
ugugcugugacucgugcuccugg

SEQ ID NO: 629474 - RNA, 21 nt, Human
uguggccgccucacugugacu

SEQ ID NO: 629475 - RNA, 18 nt, Human
uuaguagagacggaguuu

SEQ ID NO: 629476 - RNA, 22 nt, Human
uuaguagagacggaguuucacc

SEQ ID NO: 629477 - RNA, 24 nt, Human
uuaguagagacggaguuucaccgu

SEQ ID NO: 629478 - RNA, 21 nt, Human
uuggcaguuucuucugcugug

SEQ ID NO: 629479 - RNA, 19 nt, Human
uuucaccguguuagccagg

SEQ ID NO: 629480 - RNA, 24 nt, Human
uuucacucuguagcccacgcugga

SEQ ID NO: 629481 - RNA, 19 nt, Human
uuugcagacauuuucuccc

SEQ ID NO: 629482 - RNA, 23 nt, Human
uuuuuguuuuuguugcaauugcu

SEQ ID NO: 629483 - RNA, 26 nt, Human
uuuuuuaauauuuuuuaguagagacg

SEQ ID NO: 629484 - RNA, 18 nt, Human
uuuuuuaguagagacgga

SEQ ID NO: 629485 - RNA, 25 nt, Human
uuuuuuaguagagacggaguuucac

SEQ ID NO: 629486 - RNA, 20 nt, Human
uuuuuuuuuuugagacagag

SEQ ID NO: 629487 - RNA, 26 nt, Human
uuuuuuuuuuuugagacagaguuuca

SEQ ID NO: 629488 - RNA, 19 nt, Human
aaagagcagugucuucugc

SEQ ID NO: 629489 - RNA, 19 nt, Human
aagucacuuagggaaacag

SEQ ID NO: 629490 - RNA, 21 nt, Human
acagcagaagaaagcucauac

SEQ ID NO: 629491 - RNA, 21 nt, Human
acuuuaagagacaaucaggaa

SEQ ID NO: 629492 - RNA, 23 nt, Human
aggcacagccaggagaggucagc

SEQ ID NO: 629493 - RNA, 23 nt, Human
aucuuacaaaaaauuaaccugga

SEQ ID NO: 629494 - RNA, 24 nt, Human
augaugagggcaauaauaaaagga

SEQ ID NO: 629495 - RNA, 22 nt, Human
caauaauaaaaggagaaauccu

SEQ ID NO: 629496 - RNA, 26 nt, Human
caguaagauaggacucuggagucaca

SEQ ID NO: 629497 - RNA, 24 nt, Human
ccaguagucaguaggucuguugca

SEQ ID NO: 629498 - RNA, 18 nt, Human
ccuacagcuuucucucca

SEQ ID NO: 629499 - RNA, 24 nt, Human
cuccaagccuuuuuguagcucaga

SEQ ID NO: 629500 - RNA, 22 nt, Human
cuccugguccuagacauggguc

SEQ ID NO: 629501 - RNA, 18 nt, Human
cugaagguagcaguauua

SEQ ID NO: 629502 - RNA, 22 nt, Human
cugacuccugguccuagacaug

SEQ ID NO: 629503 - RNA, 23 nt, Human
gaacaggaagacccugguuuccu

SEQ ID NO: 629504 - RNA, 22 nt, Human
gagaaaucuuacaaaaaauuaa

SEQ ID NO: 629505 - RNA, 21 nt, Human
gcacagccaggagaggucagc

SEQ ID NO: 629506 - RNA, 19 nt, Human
gcagaagaaagcucauaca

SEQ ID NO: 629507 - RNA, 19 nt, Human
gcccugaagguagcaguau

SEQ ID NO: 629508 - RNA, 24 nt, Human
ggcuggguuacaaagagcaguguc

SEQ ID NO: 629509 - RNA, 24 nt, Human
guaggucuguugcaaagucaggga

SEQ ID NO: 629510 - RNA, 19 nt, Human
guuugcuuuuugguggugg

SEQ ID NO: 629511 - RNA, 19 nt, Human
uagacaugggucuuaagau

SEQ ID NO: 629512 - RNA, 20 nt, Human
uccacagcagaagaaagcuc

SEQ ID NO: 629513 - RNA, 20 nt, Human
ugaggaacuuaaucugacag

SEQ ID NO: 629514 - RNA, 20 nt, Human
ugcuaggaacaggaagaccc

SEQ ID NO: 629515 - RNA, 20 nt, Human
uggagucacaggcacagcca

SEQ ID NO: 629516 - RNA, 22 nt, Human
uggauccuacagcuuucucucc

SEQ ID NO: 629517 - RNA, 18 nt, Human
uggcuagaucucuccaca

SEQ ID NO: 629518 - RNA, 24 nt, Human
uuagggaaacagauucaguauuau

SEQ ID NO: 629519 - RNA, 21 nt, Human
uuggugguggcuggguuacaa

SEQ ID NO: 629520 - RNA, 18 nt, Human
uuuuuuuuuuuuggaggg

SEQ ID NO: 629521 - RNA, 19 nt, Human
uuuuuuuuuuuuuuggagg

SEQ ID NO: 629522 - RNA, 24 nt, Human
uuuuuuuuuuuuuuuuuuggaggg

SEQ ID NO: 629523 - RNA, 23 nt, Human
aaaaacaaagucugauuucucuc

SEQ ID NO: 629524 - RNA, 26 nt, Human
aaacaucuugaaagacuauugaauuc

SEQ ID NO: 629525 - RNA, 24 nt, Human
aaggagcacauuucaucaggcuua

SEQ ID NO: 629526 - RNA, 25 nt, Human
aaguuuguuuuguggguuuuuuucc

SEQ ID NO: 629527 - RNA, 22 nt, Human
acaaagucccugaugcccacca

SEQ ID NO: 629528 - RNA, 18 nt, Human
agccuuaggaaaggaaag

SEQ ID NO: 629529 - RNA, 22 nt, Human
agccuuaggaaaggaaagaaac

SEQ ID NO: 629530 - RNA, 19 nt, Human
aggagcaaacugagaucca

SEQ ID NO: 629531 - RNA, 21 nt, Human
aggggccauggccaggucccc

SEQ ID NO: 629532 - RNA, 19 nt, Human
aguacaggggcacugaagg

SEQ ID NO: 629533 - RNA, 21 nt, Human
agucugauuucucuccucaga

SEQ ID NO: 629534 - RNA, 23 nt, Human
auggccagguccccacuugcucc

SEQ ID NO: 629535 - RNA, 22 nt, Human
cacacggcccgugggcccgccc

SEQ ID NO: 629536 - RNA, 22 nt, Human
caccaccauggggcugaacgaa

SEQ ID NO: 629537 - RNA, 20 nt, Human
cacccggcgggccagaccag

SEQ ID NO: 629538 - RNA, 24 nt, Human
cacuugcuccccucccuuuggccu

SEQ ID NO: 629539 - RNA, 19 nt, Human
cagaccaaacguguuuugc

SEQ ID NO: 629540 - RNA, 24 nt, Human
cagaccaaacguguuuugcuguga

SEQ ID NO: 629541 - RNA, 19 nt, Human
cagcacuugugaacuccca

SEQ ID NO: 629542 - RNA, 19 nt, Human
cagcuaaaccuuggcaaau

SEQ ID NO: 629543 - RNA, 24 nt, Human
cauggccagguccccacuugcucc

SEQ ID NO: 629544 - RNA, 22 nt, Human
ccaggccccacacggcccgugg

SEQ ID NO: 629545 - RNA, 18 nt, Human
ccccacuugcuccccucc

SEQ ID NO: 629546 - RNA, 22 nt, Human
cgaaugcacacacacuaaugua

SEQ ID NO: 629547 - RNA, 22 nt, Human
cgcccuccggccgggcagcacc

SEQ ID NO: 629548 - RNA, 21 nt, Human
cgcggcggcggcggcggcggc

SEQ ID NO: 629549 - RNA, 22 nt, Human
cgcggcggcggcggcggcggcg

SEQ ID NO: 629550 - RNA, 20 nt, Human
cggcggcggcggcgccgggc

SEQ ID NO: 629551 - RNA, 23 nt, Human
cugaacgaaugcacacacacuaa

SEQ ID NO: 629552 - RNA, 20 nt, Human
gaaucuaaaaacagaccaaa

SEQ ID NO: 629553 - RNA, 20 nt, Human
gagcuguguguguuucccca

SEQ ID NO: 629554 - RNA, 18 nt, Human
gaugcccaccauguccca

SEQ ID NO: 629555 - RNA, 18 nt, Human
gcccgggccccaguccuc

SEQ ID NO: 629556 - RNA, 20 nt, Human
gcccgggguccuccucacac

SEQ ID NO: 629557 - RNA, 22 nt, Human
gcggcggcggcggcgccgggcc

SEQ ID NO: 629558 - RNA, 18 nt, Human
gcggcggcggcggcggcg

SEQ ID NO: 629559 - RNA, 25 nt, Human
gcggcggcggcggcggcgccgggcc

SEQ ID NO: 629560 - RNA, 24 nt, Human
gcggcggcggcggcggcggcgccu

SEQ ID NO: 629561 - RNA, 23 nt, Human
gcggcggcggcggcggcggcggc

SEQ ID NO: 629562 - RNA, 20 nt, Human
ggccgggcagcaccgggccc

SEQ ID NO: 629563 - RNA, 19 nt, Human
ggcggcggcgccgggcccg

SEQ ID NO: 629564 - RNA, 19 nt, Human
ggcggcggcggcggcgccg

SEQ ID NO: 629565 - RNA, 20 nt, Human
ggcggcggcggcggcggcgg

SEQ ID NO: 629566 - RNA, 20 nt, Human
gggcagcaccgggccccggu

SEQ ID NO: 629567 - RNA, 30 nt, Human
uaaaaaaagaaucaauauagugauggaagg

SEQ ID NO: 629568 - RNA, 24 nt, Human
uaaaaaggagcaaacugagaucca

SEQ ID NO: 629569 - RNA, 19 nt, Human
uaaagguccauaaaaagga

SEQ ID NO: 629570 - RNA, 22 nt, Human
uagagacgaagugaggcgggaa

SEQ ID NO: 629571 - RNA, 23 nt, Human
uauagugauggaaggguaaagaa

SEQ ID NO: 629572 - RNA, 20 nt, Human
uauugaauucuucaagaauc

SEQ ID NO: 629573 - RNA, 25 nt, Human
uccaugcuacgaugguuucauggag

SEQ ID NO: 629574 - RNA, 20 nt, Human
ucccugaugcccaccauguc

SEQ ID NO: 629575 - RNA, 22 nt, Human
uccucacgcaccggccgggccg

SEQ ID NO: 629576 - RNA, 25 nt, Human
ugaacucccaacagguucccagcuu

SEQ ID NO: 629577 - RNA, 26 nt, Human
uggcaaauuuguuuuuuuuuuuuuuu

SEQ ID NO: 629578 - RNA, 23 nt, Human
uguaaaugagcagcuaaaccuug

SEQ ID NO: 629579 - RNA, 23 nt, Human
ugugaauagguuuuugcugaggg

SEQ ID NO: 629580 - RNA, 22 nt, Human
uuacucucucuccauuaaaggu

SEQ ID NO: 629581 - RNA, 27 nt, Human
uucccagcuuuaaacacauuaaacauc

SEQ ID NO: 629582 - RNA, 19 nt, Human
uuuguggguuuuuuuccau

SEQ ID NO: 629583 - RNA, 23 nt, Human
aaguaccaaaagguggagagggc

SEQ ID NO: 629584 - RNA, 25 nt, Human
aaugauggggcuuguucagaagaga

SEQ ID NO: 629585 - RNA, 18 nt, Human
accuagcggggaaccacg

SEQ ID NO: 629586 - RNA, 19 nt, Human
agacaauuccauccagcac

SEQ ID NO: 629587 - RNA, 21 nt, Human
agcgggagcaaggccacgacc

SEQ ID NO: 629588 - RNA, 19 nt, Human
aggagaaaagaaagacaaa

SEQ ID NO: 629589 - RNA, 22 nt, Human
aggccacgacccccagaaacca

SEQ ID NO: 629590 - RNA, 21 nt, Human
aucaaggcuuuggcccuucaa

SEQ ID NO: 629591 - RNA, 24 nt, Human
auggggcuuguucagaagagaaac

SEQ ID NO: 629592 - RNA, 22 nt, Human
caaggccacgacccccagaaac

SEQ ID NO: 629593 - RNA, 22 nt, Human
cacagccuagacaauuccaucc

SEQ ID NO: 629594 - RNA, 19 nt, Human
cacccacacgcgcguggaa

SEQ ID NO: 629595 - RNA, 19 nt, Human
cacccagcacugcugcccu

SEQ ID NO: 629596 - RNA, 21 nt, Human
cacgagcacuucggggccccc

SEQ ID NO: 629597 - RNA, 24 nt, Human
cacuaggaaaaaaaauguuccauc

SEQ ID NO: 629598 - RNA, 20 nt, Human
cacugcugccuccagaucug

SEQ ID NO: 629599 - RNA, 18 nt, Human
cagcacugcugcccucgg

SEQ ID NO: 629600 - RNA, 21 nt, Human
cccacacgcgcguggaagggc

SEQ ID NO: 629601 - RNA, 25 nt, Human
cccacuccaauuaauuuagccccca

SEQ ID NO: 629602 - RNA, 18 nt, Human
ccccaaccccauccuacu

SEQ ID NO: 629603 - RNA, 24 nt, Human
cccccgcacccacacgcgcgugga

SEQ ID NO: 629604 - RNA, 21 nt, Human
cccgcacagcgggagcaaggc

SEQ ID NO: 629605 - RNA, 20 nt, Human
cccgcacccacacgcgcgug

SEQ ID NO: 629606 - RNA, 22 nt, Human
cugcugaauccauucuugaugu

SEQ ID NO: 629607 - RNA, 25 nt, Human
cugcugaauccauucuugaugucuc

SEQ ID NO: 629608 - RNA, 20 nt, Human
cugcugccuccagaucuguu

SEQ ID NO: 629609 - RNA, 22 nt, Human
gaaacauuuuauggucagugca

SEQ ID NO: 629610 - RNA, 18 nt, Human
gagggcugcccuucucuu

SEQ ID NO: 629611 - RNA, 20 nt, Human
ggagguucaccaaaugaugg

SEQ ID NO: 629612 - RNA, 24 nt, Human
gugcaaguugaauagaaaguacca

SEQ ID NO: 629613 - RNA, 21 nt, Human
guggagguucaccaaaugaug

SEQ ID NO: 629614 - RNA, 19 nt, Human
uaauuuagcccccaacccc

SEQ ID NO: 629615 - RNA, 24 nt, Human
uagaaaguaccaaaagguggagag

SEQ ID NO: 629616 - RNA, 19 nt, Human
uagcccccaaccccauccu

SEQ ID NO: 629617 - RNA, 20 nt, Human
uagcccccaaccccauccua

SEQ ID NO: 629618 - RNA, 21 nt, Human
ucauuaguggucuucucuuca

SEQ ID NO: 629619 - RNA, 20 nt, Human
uccauucuugaugucucucu

SEQ ID NO: 629620 - RNA, 18 nt, Human
ucucuccuuuuugucuuc

SEQ ID NO: 629621 - RNA, 18 nt, Human
ucuggcucucuccaccca

SEQ ID NO: 629622 - RNA, 18 nt, Human
ucuuuaguggucuucuca

SEQ ID NO: 629623 - RNA, 25 nt, Human
ugccuccagaucuguuuucuggcuc

SEQ ID NO: 629624 - RNA, 18 nt, Human
uuagcccccaaccccauc

SEQ ID NO: 629625 - RNA, 22 nt, Human
uuaguggucuucucauuagugg

SEQ ID NO: 629626 - RNA, 29 nt, Human
uuaguggucuucucauuaguggucuucuu

SEQ ID NO: 629627 - RNA, 18 nt, Human
uuccaguagaagagguac

SEQ ID NO: 629628 - RNA, 22 nt, Human
uucugcugaauccauucuugau

SEQ ID NO: 629629 - RNA, 18 nt, Human
uuucuggcucucuccacc

SEQ ID NO: 629630 - RNA, 24 nt, Human
uuuucuggcucucuccacccagca

SEQ ID NO: 629631 - RNA, 18 nt, Human
uuuuuuuuuuuuuuuuug

SEQ ID NO: 629632 - RNA, 22 nt, Human
uuuuuuuuuuuuuuuuugccag

SEQ ID NO: 629633 - RNA, 23 nt, Human
uuuuuuuuuuuuuuuuugccagu

SEQ ID NO: 629634 - RNA, 24 nt, Human
aaaaaguucgggauggccuuaacc

SEQ ID NO: 629635 - RNA, 22 nt, Human
aaagacaauacuugagacacaa

SEQ ID NO: 629636 - RNA, 22 nt, Human
aagaccaccaacgccgccccgc

SEQ ID NO: 629637 - RNA, 18 nt, Human
aagcuuccagcaucucag

SEQ ID NO: 629638 - RNA, 21 nt, Human
acaaagcaacccauuuucccu

SEQ ID NO: 629639 - RNA, 22 nt, Human
acacaaagcaacccauuuuccc

SEQ ID NO: 629640 - RNA, 19 nt, Human
aggccuccagcgcccgccg

SEQ ID NO: 629641 - RNA, 22 nt, Human
agucuccaccaauccuuugaag

SEQ ID NO: 629642 - RNA, 19 nt, Human
caaagcaacccauuuuccc

SEQ ID NO: 629643 - RNA, 21 nt, Human
caauacuugagacacaaagca

SEQ ID NO: 629644 - RNA, 21 nt, Human
caggcuaaccauuucagcugu

SEQ ID NO: 629645 - RNA, 25 nt, Human
ccagcgcccgccgccgccgccgccg

SEQ ID NO: 629646 - RNA, 18 nt, Human
ccaucacucccucccagg

SEQ ID NO: 629647 - RNA, 24 nt, Human
ccaugcauagucuccaccaauccu

SEQ ID NO: 629648 - RNA, 19 nt, Human
ccccgcgcgccugacucgc

SEQ ID NO: 629649 - RNA, 22 nt, Human
ccccgcgcgccugacucgccag

SEQ ID NO: 629650 - RNA, 21 nt, Human
ccccggugcgccccaucacuc

SEQ ID NO: 629651 - RNA, 18 nt, Human
cccgcuccccggccccgg

SEQ ID NO: 629652 - RNA, 21 nt, Human
cccgcuccccggccccggugc

SEQ ID NO: 629653 - RNA, 19 nt, Human
ccgccccgcgcgccugacu

SEQ ID NO: 629654 - RNA, 21 nt, Human
ccgccgccgccgccgcagccg

SEQ ID NO: 629655 - RNA, 24 nt, Human
ccgccgccgccgccgcagccgccg

SEQ ID NO: 629656 - RNA, 18 nt, Human
ccgccgccgccgccgccg

SEQ ID NO: 629657 - RNA, 19 nt, Human
ccgccgccgccgccgccgc

SEQ ID NO: 629658 - RNA, 21 nt, Human
ccggcugguccgacuuccacg

SEQ ID NO: 629659 - RNA, 21 nt, Human
cgccccaucacucccucccag

SEQ ID NO: 629660 - RNA, 23 nt, Human
cgccgccgccgccgccgcagccg

SEQ ID NO: 629661 - RNA, 21 nt, Human
cuacacuggcgcccgcucccc

SEQ ID NO: 629662 - RNA, 20 nt, Human
cuccccggccccggugcgcc

SEQ ID NO: 629663 - RNA, 26 nt, Human
cuuuaaaaaguucgggauggccuuaa

SEQ ID NO: 629664 - RNA, 18 nt, Human
gccccgcgcgccugacuc

SEQ ID NO: 629665 - RNA, 21 nt, Human
gccuuguguaugacaacugua

SEQ ID NO: 629666 - RNA, 20 nt, Human
ggcucucacaggccuccagc

SEQ ID NO: 629667 - RNA, 21 nt, Human
uaagucucugaugcuucauaa

SEQ ID NO: 629668 - RNA, 21 nt, Human
uaagucucugaugcuucauaa

SEQ ID NO: 629669 - RNA, 21 nt, Human
uauauauaugcgccuugugua

SEQ ID NO: 629670 - RNA, 22 nt, Human
uauauauaugcgccuuguguau

SEQ ID NO: 629671 - RNA, 23 nt, Human
uauauauaugcgccuuguguaug

SEQ ID NO: 629672 - RNA, 24 nt, Human
uauuacagggaaaauaagucucug

SEQ ID NO: 629673 - RNA, 18 nt, Human
ucacaggccuccagcgcc

SEQ ID NO: 629674 - RNA, 21 nt, Human
uccagcaucucaggcuaacca

SEQ ID NO: 629675 - RNA, 23 nt, Human
uccagcaucucaggcuaaccauu

SEQ ID NO: 629676 - RNA, 20 nt, Human
uccccggccccggugcgccc

SEQ ID NO: 629677 - RNA, 22 nt, Human
ucucaggcuaaccauuucagcu

SEQ ID NO: 629678 - RNA, 20 nt, Human
ugaagaacuguacccuguaa

SEQ ID NO: 629679 - RNA, 22 nt, Human
uggccuuaaccaugcauagucu

SEQ ID NO: 629680 - RNA, 21 nt, Human
uugaagcuuccagcaucucag

SEQ ID NO: 629681 - RNA, 22 nt, Human
aauggccucgggacccucaugc

SEQ ID NO: 629682 - RNA, 22 nt, Human
accucagggccccuggaggguc

SEQ ID NO: 629683 - RNA, 19 nt, Human
aggcagaaacucggcgucc

SEQ ID NO: 629684 - RNA, 18 nt, Human
aggggggccgcgggucag

SEQ ID NO: 629685 - RNA, 20 nt, Human
cacccucgccacucaaaccu

SEQ ID NO: 629686 - RNA, 18 nt, Human
cacuguggugaagggaac

SEQ ID NO: 629687 - RNA, 22 nt, Human
cagaccucagggccccuggagg

SEQ ID NO: 629688 - RNA, 22 nt, Human
cagcaucacccucgccacucaa

SEQ ID NO: 629689 - RNA, 26 nt, Human
cagccagcaucacccucgccacucaa

SEQ ID NO: 629690 - RNA, 21 nt, Human
ccagcaucacccucgccacuc

SEQ ID NO: 629691 - RNA, 22 nt, Human
ccccaccuugcagcuggggaca

SEQ ID NO: 629692 - RNA, 20 nt, Human
ccggccccaccuugcagcug

SEQ ID NO: 629693 - RNA, 23 nt, Human
ccucaugcugcugggcccaggag

SEQ ID NO: 629694 - RNA, 25 nt, Human
cugggcccaggagagacaguucuga

SEQ ID NO: 629695 - RNA, 22 nt, Human
gccccuggagggucugcaggca

SEQ ID NO: 629696 - RNA, 19 nt, Human
gcgcaaacagagggggcag

SEQ ID NO: 629697 - RNA, 21 nt, Human
gggcgcaaacagagggggcag

SEQ ID NO: 629698 - RNA, 18 nt, Human
ggggcaggcuaguguccc

SEQ ID NO: 629699 - RNA, 22 nt, Human
gggggcaggcuagugucccgcu

SEQ ID NO: 629700 - RNA, 22 nt, Human
ucagggccccuggagggucugc

SEQ ID NO: 629701 - RNA, 23 nt, Human
ucagggccccuggagggucugca

SEQ ID NO: 629702 - RNA, 28 nt, Human
ugucccgcugccccaggaacagaccuca

SEQ ID NO: 629703 - RNA, 22 nt, Human
aaaaaauaaagagaaaccagga

SEQ ID NO: 629704 - RNA, 20 nt, Human
acacacagcuaugcauaaaa

SEQ ID NO: 629705 - RNA, 21 nt, Human
accccagaacccgcccgcgcc

SEQ ID NO: 629706 - RNA, 18 nt, Human
acccgcccgcgccggggc

SEQ ID NO: 629707 - RNA, 23 nt, Human
agaaaccaggagagugccuaaau

SEQ ID NO: 629708 - RNA, 22 nt, Human
agcagcgucuacaccccagaac

SEQ ID NO: 629709 - RNA, 24 nt, Human
aggaagauuaggaggcagcagcua

SEQ ID NO: 629710 - RNA, 19 nt, Human
aggcccggaaagaccaagc

SEQ ID NO: 629711 - RNA, 21 nt, Human
caagcguaagcauuuccacac

SEQ ID NO: 629712 - RNA, 22 nt, Human
caccccagaacccgcccgcgcc

SEQ ID NO: 629713 - RNA, 19 nt, Human
cagaagaggcccagucaua

SEQ ID NO: 629714 - RNA, 19 nt, Human
caggagagugccuaaaugg

SEQ ID NO: 629715 - RNA, 20 nt, Human
ccccagaacccgcccgcgcc

SEQ ID NO: 629716 - RNA, 21 nt, Human
cccgcgccggggcuccggaac

SEQ ID NO: 629717 - RNA, 21 nt, Human
ccuugcacugaaggcagcccc

SEQ ID NO: 629718 - RNA, 20 nt, Human
cgaggcccggaaagaccaag

SEQ ID NO: 629719 - RNA, 20 nt, Human
cgcccgcgccggggcuccgg

SEQ ID NO: 629720 - RNA, 19 nt, Human
cggaaagaccaagcugaaa

SEQ ID NO: 629721 - RNA, 19 nt, Human
cucaaggcggugccgagaa

SEQ ID NO: 629722 - RNA, 24 nt, Human
cugacacacagcuaugcauaaaaa

SEQ ID NO: 629723 - RNA, 21 nt, Human
gcaggggcugggggaagcgag

SEQ ID NO: 629724 - RNA, 26 nt, Human
ggaaagaccaagcugaaaggcccggg

SEQ ID NO: 629725 - RNA, 24 nt, Human
ggcgcaggggcugggggaagcgag

SEQ ID NO: 629726 - RNA, 19 nt, Human
ggcuggggagggcuggcca

SEQ ID NO: 629727 - RNA, 22 nt, Human
ggugaagguggucccacuagca

SEQ ID NO: 629728 - RNA, 21 nt, Human
uaacuuuauucaggagauaau

SEQ ID NO: 629729 - RNA, 22 nt, Human
uacaauacagggcugacacuga

SEQ ID NO: 629730 - RNA, 23 nt, Human
ucuugggauucuaauccuggggc

SEQ ID NO: 629731 - RNA, 21 nt, Human
ugaagguggucccacuagcag

SEQ ID NO: 629732 - RNA, 22 nt, Human
uggccagcagcgucuacacccc

SEQ ID NO: 629733 - RNA, 22 nt, Human
uuucuugggauucuaauccugg

SEQ ID NO: 629734 - RNA, 19 nt, Human
uuuuuuuuuuuuuuuuuaa

SEQ ID NO: 629735 - RNA, 21 nt, Human
acagcagugaaaggaagaagu

SEQ ID NO: 629736 - RNA, 18 nt, Human
agaaauucagucacucca

SEQ ID NO: 629737 - RNA, 19 nt, Human
cagcaaacauugccucuca

SEQ ID NO: 629738 - RNA, 22 nt, Human
cuaaauauucucuauccaagac

SEQ ID NO: 629739 - RNA, 23 nt, Human
ucgccgccgccagcccagcgccg

SEQ ID NO: 629740 - RNA, 22 nt, Human
uuuuuuuuuuuuuuggaccaga

SEQ ID NO: 629741 - RNA, 18 nt, Human
uuuuuuuuuuuuuuuuug

SEQ ID NO: 629742 - RNA, 19 nt, Human
aacacauuccauaaggguu

SEQ ID NO: 629743 - RNA, 21 nt, Human
aacacauucuucuugcacacu

SEQ ID NO: 629744 - RNA, 22 nt, Human
acaaaaccccaggagugcagag

SEQ ID NO: 629745 - RNA, 20 nt, Human
accccaggagugcagagaua

SEQ ID NO: 629746 - RNA, 21 nt, Human
acccuggaggacgaaggacuc

SEQ ID NO: 629747 - RNA, 21 nt, Human
acgcagccuacccaacagucu

SEQ ID NO: 629748 - RNA, 19 nt, Human
agccauguaacaaaacccc

SEQ ID NO: 629749 - RNA, 23 nt, Human
auauuuuuuuuuuuugcuguguu

SEQ ID NO: 629750 - RNA, 25 nt, Human
caacccuacagucaguugggaaaga

SEQ ID NO: 629751 - RNA, 23 nt, Human
cagccuacccaacagucuacaca

SEQ ID NO: 629752 - RNA, 23 nt, Human
caguaaacaaaguauaaucccaa

SEQ ID NO: 629753 - RNA, 18 nt, Human
caucaaauguucucauuu

SEQ ID NO: 629754 - RNA, 18 nt, Human
ccaggagugcagagauag

SEQ ID NO: 629755 - RNA, 23 nt, Human
cccgcuggcgcaaagaacaggga

SEQ ID NO: 629756 - RNA, 20 nt, Human
cugguggcagcuagaggauc

SEQ ID NO: 629757 - RNA, 21 nt, Human
gaaagcagccauguaacaaaa

SEQ ID NO: 629758 - RNA, 19 nt, Human
gaacucucugguggcagcu

SEQ ID NO: 629759 - RNA, 18 nt, Human
gaagacauguaucucugc

SEQ ID NO: 629760 - RNA, 21 nt, Human
gaggaaagcagccauguaaca

SEQ ID NO: 629761 - RNA, 20 nt, Human
gccuacccaacagucuacac

SEQ ID NO: 629762 - RNA, 20 nt, Human
ggaaaagacacaacccuaca

SEQ ID NO: 629763 - RNA, 19 nt, Human
ggaaagcagccauguaaca

SEQ ID NO: 629764 - RNA, 22 nt, Human
guaaacaaaguauaaucccaaa

SEQ ID NO: 629765 - RNA, 21 nt, Human
guaaauggcaccaaaaaccug

SEQ ID NO: 629766 - RNA, 20 nt, Human
uaagccaucaaauguucuca

SEQ ID NO: 629767 - RNA, 20 nt, Human
uagaaacacauuccauaagg

SEQ ID NO: 629768 - RNA, 21 nt, Human
uagaaacacauuccauaaggg

SEQ ID NO: 629769 - RNA, 22 nt, Human
uauaaucccaaaguucugcaga

SEQ ID NO: 629770 - RNA, 19 nt, Human
ucagaaggggguguacucu

SEQ ID NO: 629771 - RNA, 23 nt, Human
ucagaaggggguguacucucauu

SEQ ID NO: 629772 - RNA, 23 nt, Human
ucucugcaaaauuguuaaguuau

SEQ ID NO: 629773 - RNA, 18 nt, Human
ucugguggcagcuagagg

SEQ ID NO: 629774 - RNA, 19 nt, Human
ucuucagugauguguucug

SEQ ID NO: 629775 - RNA, 18 nt, Human
ugaggaaagcagccaugu

SEQ ID NO: 629776 - RNA, 21 nt, Human
uggcaccaaaaaccuggugaa

SEQ ID NO: 629777 - RNA, 21 nt, Human
uggcagcuagaggaucuucau

SEQ ID NO: 629778 - RNA, 23 nt, Human
ugguggcagcuagaggaucuuca

SEQ ID NO: 629779 - RNA, 22 nt, Human
uguaacaaaaccccaggagugc

SEQ ID NO: 629780 - RNA, 19 nt, Human
uguuagaaacacauuccau

SEQ ID NO: 629781 - RNA, 20 nt, Human
uuccacuuauccaacucuag

SEQ ID NO: 629782 - RNA, 20 nt, Human
uucucauuugagccacgugu

SEQ ID NO: 629783 - RNA, 19 nt, Human
uugagcucuucuucaguga

SEQ ID NO: 629784 - RNA, 25 nt, Human
uuuagaagagaaaaaugaauuguuu

SEQ ID NO: 629785 - RNA, 18 nt, Human
uuuauuaucuuucuacag

SEQ ID NO: 629786 - RNA, 23 nt, Human
uuuuggaagacauguaucucugc

SEQ ID NO: 629787 - RNA, 20 nt, Human
uuuuuugcuguguuagaaac

SEQ ID NO: 629788 - RNA, 18 nt, Human
uuuuuuuuuuuuuuuuug

SEQ ID NO: 629789 - RNA, 21 nt, Human
aagaggccaacaaccuaccug

SEQ ID NO: 629790 - RNA, 18 nt, Human
aauugacuuacaauaggg

SEQ ID NO: 629791 - RNA, 24 nt, Human
aauuguuagccuuuucugagacuu

SEQ ID NO: 629792 - RNA, 24 nt, Human
acacaaggcccacccguggcugac

SEQ ID NO: 629793 - RNA, 25 nt, Human
accggauuuuccaaaucaauggucu

SEQ ID NO: 629794 - RNA, 24 nt, Human
agcaaggaacaacagugucaacag

SEQ ID NO: 629795 - RNA, 24 nt, Human
aggaaaaggcgaggcuucugguaa

SEQ ID NO: 629796 - RNA, 24 nt, Human
aggaacaacagugucaacagccgg

SEQ ID NO: 629797 - RNA, 21 nt, Human
auccaauucagcaaggaacaa

SEQ ID NO: 629798 - RNA, 21 nt, Human
augccugcuuuauuuccuacg

SEQ ID NO: 629799 - RNA, 21 nt, Human
cacccucacuccaucccgggg

SEQ ID NO: 629800 - RNA, 22 nt, Human
cacccucacuccaucccggggc

SEQ ID NO: 629801 - RNA, 26 nt, Human
caucacauaacaagucuaaucgccaa

SEQ ID NO: 629802 - RNA, 18 nt, Human
cccaaguaagaggccaac

SEQ ID NO: 629803 - RNA, 19 nt, Human
ccccaauccugagaacaga

SEQ ID NO: 629804 - RNA, 21 nt, Human
ccuccacccucacuccauccc

SEQ ID NO: 629805 - RNA, 22 nt, Human
cgcgcccuccacccucacucca

SEQ ID NO: 629806 - RNA, 20 nt, Human
cugguaauuucucaucuuug

SEQ ID NO: 629807 - RNA, 21 nt, Human
cuggugcuuaggaaaaggcga

SEQ ID NO: 629808 - RNA, 21 nt, Human
cuucugguaauuucucaucuu

SEQ ID NO: 629809 - RNA, 19 nt, Human
gcgcccuccacccucacuc

SEQ ID NO: 629810 - RNA, 19 nt, Human
uaccugggccgauacgagg

SEQ ID NO: 629811 - RNA, 24 nt, Human
uagccuuuucugagacuucucugu

SEQ ID NO: 629812 - RNA, 21 nt, Human
ucauagagucuuccuuuuuuu

SEQ ID NO: 629813 - RNA, 20 nt, Human
ucaucuuuguaguucccuuu

SEQ ID NO: 629814 - RNA, 21 nt, Human
ucccggggcacagcuccuucc

SEQ ID NO: 629815 - RNA, 24 nt, Human
uccuccagauggcucuuuuuauua

SEQ ID NO: 629816 - RNA, 22 nt, Human
ucugaacuacaagucaacaauc

SEQ ID NO: 629817 - RNA, 23 nt, Human
ucuguuucuucauagagucuucc

SEQ ID NO: 629818 - RNA, 21 nt, Human
ugagguccagagaugccugcu

SEQ ID NO: 629819 - RNA, 19 nt, Human
uggcuggcagagugcugag

SEQ ID NO: 629820 - RNA, 21 nt, Human
ugggccgauacgaggcgacac

SEQ ID NO: 629821 - RNA, 20 nt, Human
uuuguaguucccuuucuaca

SEQ ID NO: 629822 - RNA, 20 nt, Human
uuuguaguucccuuucuaca

SEQ ID NO: 629823 - RNA, 19 nt, Human
uuuuuuuuuuuugaggucc

SEQ ID NO: 629824 - RNA, 23 nt, Human
aaacccacgguccacguccucaa

SEQ ID NO: 629825 - RNA, 19 nt, Human
aaagacaccacucacaaag

SEQ ID NO: 629826 - RNA, 19 nt, Human
aaagcaagacggauaagga

SEQ ID NO: 629827 - RNA, 21 nt, Human
aagacaccacucacaaagaca

SEQ ID NO: 629828 - RNA, 25 nt, Human
aagcaaaggugaaggaggagggacc

SEQ ID NO: 629829 - RNA, 21 nt, Human
aaucagggccacuucuucugc

SEQ ID NO: 629830 - RNA, 24 nt, Human
acaccccaucuuucuucucuggcu

SEQ ID NO: 629831 - RNA, 18 nt, Human
accccaucuuucuucucu

SEQ ID NO: 629832 - RNA, 21 nt, Human
accccaucuuucuucucuggc

SEQ ID NO: 629833 - RNA, 24 nt, Human
acuccugccccuccagacgagggu

SEQ ID NO: 629834 - RNA, 23 nt, Human
acucugagacaauggugcagagg

SEQ ID NO: 629835 - RNA, 21 nt, Human
agaaaaacaagguagucuggg

SEQ ID NO: 629836 - RNA, 20 nt, Human
agagguuccugagaccuggg

SEQ ID NO: 629837 - RNA, 23 nt, Human
aggaggacccaguccugugggcu

SEQ ID NO: 629838 - RNA, 18 nt, Human
aggaucaaaaagcaaagg

SEQ ID NO: 629839 - RNA, 18 nt, Human
agggguuaaagacugccc

SEQ ID NO: 629840 - RNA, 22 nt, Human
agucugagaccccagcucuguc

SEQ ID NO: 629841 - RNA, 19 nt, Human
agugaaggaucaaaaagca

SEQ ID NO: 629842 - RNA, 21 nt, Human
aguggguucuggcuucccauu

SEQ ID NO: 629843 - RNA, 22 nt, Human
auagucccaaaugaucccagaa

SEQ ID NO: 629844 - RNA, 20 nt, Human
auuaucucucuuucucuucc

SEQ ID NO: 629845 - RNA, 21 nt, Human
caaaauauccacugugucuuc

SEQ ID NO: 629846 - RNA, 21 nt, Human
caaagacagcucccaccuagc

SEQ ID NO: 629847 - RNA, 21 nt, Human
caaaggugaaggaggacacug

SEQ ID NO: 629848 - RNA, 20 nt, Human
caagacagagguuccugaga

SEQ ID NO: 629849 - RNA, 21 nt, Human
caauccagaagaaaaacaagg

SEQ ID NO: 629850 - RNA, 21 nt, Human
caccacucacaaagacagcuc

SEQ ID NO: 629851 - RNA, 24 nt, Human
caggaguguuucacccacaggccc

SEQ ID NO: 629852 - RNA, 22 nt, Human
caucacccacaacauccaaguc

SEQ ID NO: 629853 - RNA, 24 nt, Human
caucacccacaacauccaagucaa

SEQ ID NO: 629854 - RNA, 19 nt, Human
cauuccuacggacauguuc

SEQ ID NO: 629855 - RNA, 26 nt, Human
ccaaaauauccacugugucuucagca

SEQ ID NO: 629856 - RNA, 19 nt, Human
ccaauccacucugagacaa

SEQ ID NO: 629857 - RNA, 21 nt, Human
ccaguccugugggcuguuuuc

SEQ ID NO: 629858 - RNA, 22 nt, Human
ccaucugcaucuggcccaaaau

SEQ ID NO: 629859 - RNA, 23 nt, Human
ccccuccagacgagggugagagc

SEQ ID NO: 629860 - RNA, 18 nt, Human
ccucaggagcugcgcugc

SEQ ID NO: 629861 - RNA, 20 nt, Human
ccugagaccugggcacugga

SEQ ID NO: 629862 - RNA, 22 nt, Human
cuagguuggucuucuucauuug

SEQ ID NO: 629863 - RNA, 21 nt, Human
cucaauccagaagaaaaacaa

SEQ ID NO: 629864 - RNA, 18 nt, Human
cucacaaagacagcuccc

SEQ ID NO: 629865 - RNA, 20 nt, Human
cucacaaagacagcucccac

SEQ ID NO: 629866 - RNA, 21 nt, Human
cucacaaagacagcucccacc

SEQ ID NO: 629867 - RNA, 23 nt, Human
cucagaggauaaaaagccagagu

SEQ ID NO: 629868 - RNA, 23 nt, Human
cugcacccaucuccagccaucug

SEQ ID NO: 629869 - RNA, 24 nt, Human
cugggcacuggagugauccucccc

SEQ ID NO: 629870 - RNA, 24 nt, Human
cuuucuucucuggcuuuggggcag

SEQ ID NO: 629871 - RNA, 22 nt, Human
gaccccagcucugucuuagcau

SEQ ID NO: 629872 - RNA, 22 nt, Human
gcacaggaguguuucacccaca

SEQ ID NO: 629873 - RNA, 18 nt, Human
gcacccaucuccagccau

SEQ ID NO: 629874 - RNA, 21 nt, Human
gcuacuuaaguggauuucuau

SEQ ID NO: 629875 - RNA, 23 nt, Human
ggaaaucccauuacaaagauguc

SEQ ID NO: 629876 - RNA, 21 nt, Human
ggaggacccaguccugugggc

SEQ ID NO: 629877 - RNA, 19 nt, Human
gggaagaaacccacggucc

SEQ ID NO: 629878 - RNA, 22 nt, Human
gggcacuggagugauccucccc

SEQ ID NO: 629879 - RNA, 23 nt, Human
gggcacuggagugauccuccccc

SEQ ID NO: 629880 - RNA, 19 nt, Human
gugcagaggcuuucucaga

SEQ ID NO: 629881 - RNA, 20 nt, Human
gugcagaggcuuucucagaa

SEQ ID NO: 629882 - RNA, 28 nt, Human
uaaaaugguuccccaaacuaucaacuaa

SEQ ID NO: 629883 - RNA, 19 nt, Human
uaaccaaaaccucaggagc

SEQ ID NO: 629884 - RNA, 25 nt, Human
uaaccaaaaccucaggagcugcgcu

SEQ ID NO: 629885 - RNA, 25 nt, Human
uaagauagcaaccacagaaauuuac

SEQ ID NO: 629886 - RNA, 24 nt, Human
uaaguagaggugaagaaaagcuaa

SEQ ID NO: 629887 - RNA, 22 nt, Human
uaaugcaaaacuccugccccuc

SEQ ID NO: 629888 - RNA, 22 nt, Human
uaguauucggcuggcuucacug

SEQ ID NO: 629889 - RNA, 21 nt, Human
ucaaggauaugcuuaaugcaa

SEQ ID NO: 629890 - RNA, 20 nt, Human
ucccaaaugaucccagaagc

SEQ ID NO: 629891 - RNA, 19 nt, Human
ucccugggaucugcaccca

SEQ ID NO: 629892 - RNA, 23 nt, Human
ucuggagucugagaccccagcuc

SEQ ID NO: 629893 - RNA, 19 nt, Human
ugaagaaaagcuaaacugc

SEQ ID NO: 629894 - RNA, 19 nt, Human
ugagacaauggugcagagg

SEQ ID NO: 629895 - RNA, 25 nt, Human
ugagacaauggugcagaggcuuucu

SEQ ID NO: 629896 - RNA, 24 nt, Human
ugcauaccaucacccacaacaucc

SEQ ID NO: 629897 - RNA, 28 nt, Human
ugcauaccaucacccacaacauccaagu

SEQ ID NO: 629898 - RNA, 24 nt, Human
ugcauucuugucuucaaggauaug

SEQ ID NO: 629899 - RNA, 23 nt, Human
ugccuguguuuugugagagauga

SEQ ID NO: 629900 - RNA, 20 nt, Human
ugggaagaaacccacggucc

SEQ ID NO: 629901 - RNA, 21 nt, Human
ugggaagaaacccacggucca

SEQ ID NO: 629902 - RNA, 18 nt, Human
uuccugagaccugggcac

SEQ ID NO: 629903 - RNA, 22 nt, Human
uuccugagaccugggcacugga

SEQ ID NO: 629904 - RNA, 19 nt, Human
uuuuuuuuuuuuuuuugca

SEQ ID NO: 629905 - RNA, 18 nt, Human
uuuuuuuuuuuuuuuuug

SEQ ID NO: 629906 - RNA, 22 nt, Human
uuuuuuuuuuuuuuuuugcauu

SEQ ID NO: 629907 - RNA, 24 nt, Human
aacaaagcaguacaagccuccccu

SEQ ID NO: 629908 - RNA, 22 nt, Human
auuuauucaacaaagcaguaca

SEQ ID NO: 629909 - RNA, 25 nt, Human
caacaaagcaguacaagccuccccu

SEQ ID NO: 629910 - RNA, 22 nt, Human
cauggggaaggggagugagggc

SEQ ID NO: 629911 - RNA, 23 nt, Human
cccuucaaucaggaccugccugc

SEQ ID NO: 629912 - RNA, 20 nt, Human
cgacaacauggggaagggga

SEQ ID NO: 629913 - RNA, 23 nt, Human
cguaaaacucauuuauucaacaa

SEQ ID NO: 629914 - RNA, 18 nt, Human
ggaaggggagugagggcc

SEQ ID NO: 629915 - RNA, 20 nt, Human
ggccucggcgccucccgggc

SEQ ID NO: 629916 - RNA, 22 nt, Human
gggugggcuacuucagugucuu

SEQ ID NO: 629917 - RNA, 24 nt, Human
uacaagccuccccuucaaucagga

SEQ ID NO: 629918 - RNA, 19 nt, Human
ucaacaaagcaguacaagc

SEQ ID NO: 629919 - RNA, 18 nt, Human
ucuuuuuuuuuuuuuuuu

SEQ ID NO: 629920 - RNA, 19 nt, Human
uucagugucuucagccaau

SEQ ID NO: 629921 - RNA, 18 nt, Human
uuuuuuuuuuuuucccug

SEQ ID NO: 629922 - RNA, 25 nt, Human
uuuuuuuuuuuuuuuuuuucuuuuu

SEQ ID NO: 629923 - RNA, 22 nt, Human
aaaaaaauuacagcaaaguuag

SEQ ID NO: 629924 - RNA, 23 nt, Human
aaaaaacccucccuccugcccca

SEQ ID NO: 629925 - RNA, 26 nt, Human
aaaaaacccucccuccugccccaaaa

SEQ ID NO: 629926 - RNA, 21 nt, Human
aaaaacccucccuccugcccc

SEQ ID NO: 629927 - RNA, 24 nt, Human
aaaaauucuuuauuuaaccuaauc

SEQ ID NO: 629928 - RNA, 19 nt, Human
aaacaaugaaaacaaauca

SEQ ID NO: 629929 - RNA, 20 nt, Human
aaacaucauauaacucaaaa

SEQ ID NO: 629930 - RNA, 22 nt, Human
aaacccucccuccugccccaaa

SEQ ID NO: 629931 - RNA, 18 nt, Human
aaacuuaagccaaaaaca

SEQ ID NO: 629932 - RNA, 20 nt, Human
aaauaaacaucauauaacuc

SEQ ID NO: 629933 - RNA, 19 nt, Human
aaauauaggagcagcagcu

SEQ ID NO: 629934 - RNA, 19 nt, Human
aacccucccuccugcccca

SEQ ID NO: 629935 - RNA, 22 nt, Human
acaaaacccagguuuaccaugc

SEQ ID NO: 629936 - RNA, 23 nt, Human
acaaaacccagguuuaccaugcu

SEQ ID NO: 629937 - RNA, 23 nt, Human
acacacacacacacacacacaca

SEQ ID NO: 629938 - RNA, 23 nt, Human
acacacacacacacacacacaca

SEQ ID NO: 629939 - RNA, 23 nt, Human
acacacacacacacacacacaca

SEQ ID NO: 629940 - RNA, 19 nt, Human
acagcacucugcacagugc

SEQ ID NO: 629941 - RNA, 19 nt, Human
acggccuuccccaguggac

SEQ ID NO: 629942 - RNA, 18 nt, Human
acuaacauagcucaaucu

SEQ ID NO: 629943 - RNA, 19 nt, Human
acuucaugaaguaugagau

SEQ ID NO: 629944 - RNA, 22 nt, Human
agaaaacaccacaaaaucucau

SEQ ID NO: 629945 - RNA, 19 nt, Human
agaaauaugaaaauaaacu

SEQ ID NO: 629946 - RNA, 19 nt, Human
agaguuguuccccggccuu

SEQ ID NO: 629947 - RNA, 21 nt, Human
aggcaggucaccuuccuggga

SEQ ID NO: 629948 - RNA, 19 nt, Human
aggcggcgaucgcggcccg

SEQ ID NO: 629949 - RNA, 22 nt, Human
agucaaauccuuuagccaaaau

SEQ ID NO: 629950 - RNA, 19 nt, Human
aguuauugaaagcugaacu

SEQ ID NO: 629951 - RNA, 19 nt, Human
auaaaauauacccacccau

SEQ ID NO: 629952 - RNA, 21 nt, Human
aucauauaacucaaaauuaag

SEQ ID NO: 629953 - RNA, 21 nt, Human
auucuaguagucgucauugaa

SEQ ID NO: 629954 - RNA, 24 nt, Human
caaaacaacacaacagauucauaa

SEQ ID NO: 629955 - RNA, 25 nt, Human
caaauuaugucagugagaaaaaucc

SEQ ID NO: 629956 - RNA, 21 nt, Human
cacaagucuccacaagugcau

SEQ ID NO: 629957 - RNA, 20 nt, Human
cacacacacacacacacaca

SEQ ID NO: 629958 - RNA, 20 nt, Human
cacacacacacacacacaca

SEQ ID NO: 629959 - RNA, 20 nt, Human
cacacacacacacacacaca

SEQ ID NO: 629960 - RNA, 20 nt, Human
cacacacacacacacacaca

SEQ ID NO: 629961 - RNA, 19 nt, Human
cacacacgacugcaugagu

SEQ ID NO: 629962 - RNA, 18 nt, Human
cacccagcuucccggggc

SEQ ID NO: 629963 - RNA, 19 nt, Human
cacccagcuucccggggca

SEQ ID NO: 629964 - RNA, 24 nt, Human
cacugaaacacacaaauacacaca

SEQ ID NO: 629965 - RNA, 19 nt, Human
cagcuccgcuagccuggcg

SEQ ID NO: 629966 - RNA, 21 nt, Human
cagggacaauagcacugagag

SEQ ID NO: 629967 - RNA, 23 nt, Human
caggucaccuuccugggaagacu

SEQ ID NO: 629968 - RNA, 22 nt, Human
caguggacccgcucaaggccag

SEQ ID NO: 629969 - RNA, 20 nt, Human
caguucccuccccgcaaccc

SEQ ID NO: 629970 - RNA, 19 nt, Human
cauaaaaguaguacauaca

SEQ ID NO: 629971 - RNA, 20 nt, Human
cauccgaaaaaucuacauca

SEQ ID NO: 629972 - RNA, 19 nt, Human
cauucauacuauagaaacc

SEQ ID NO: 629973 - RNA, 20 nt, Human
cccgcaacccuaaaaaaacc

SEQ ID NO: 629974 - RNA, 19 nt, Human
cccuaaaaaaacccucccu

SEQ ID NO: 629975 - RNA, 25 nt, Human
cccuaaaaaaacccucccuccugcc

SEQ ID NO: 629976 - RNA, 22 nt, Human
cccuaauaccuauaaaaccaag

SEQ ID NO: 629977 - RNA, 21 nt, Human
ccucuccauuuacuuuuccua

SEQ ID NO: 629978 - RNA, 20 nt, Human
cggcggcagccgcgaacccg

SEQ ID NO: 629979 - RNA, 22 nt, Human
cggcggcagccgcgaacccguc

SEQ ID NO: 629980 - RNA, 20 nt, Human
cggcggcggugcagggccug

SEQ ID NO: 629981 - RNA, 24 nt, Human
cuuucacauugaaaacaaaagcca

SEQ ID NO: 629982 - RNA, 21 nt, Human
gaaaaaacucccagagaugga

SEQ ID NO: 629983 - RNA, 22 nt, Human
gaaacacugaaacacacaaaua

SEQ ID NO: 629984 - RNA, 18 nt, Human
gaggaggagccugaggcg

SEQ ID NO: 629985 - RNA, 22 nt, Human
gccggcgcacacggccuucccc

SEQ ID NO: 629986 - RNA, 23 nt, Human
gcggagccggcgcacacggccuu

SEQ ID NO: 629987 - RNA, 19 nt, Human
gcggaguaggccgcagucc

SEQ ID NO: 629988 - RNA, 18 nt, Human
gcggcggagagcgaggag

SEQ ID NO: 629989 - RNA, 19 nt, Human
ggaggaggagccugaggcg

SEQ ID NO: 629990 - RNA, 18 nt, Human
ggcccggguucccguccg

SEQ ID NO: 629991 - RNA, 20 nt, Human
ggcggcggugcagggccugc

SEQ ID NO: 629992 - RNA, 18 nt, Human
uaaaaaaacccucccucc

SEQ ID NO: 629993 - RNA, 25 nt, Human
uaaaaaaacccucccuccugcccca

SEQ ID NO: 629994 - RNA, 19 nt, Human
uaaaaaauauaggagcagc

SEQ ID NO: 629995 - RNA, 24 nt, Human
uaaaaucuaaaaacauuaguguug

SEQ ID NO: 629996 - RNA, 21 nt, Human
uaaaguuuccagaaauaacac

SEQ ID NO: 629997 - RNA, 21 nt, Human
uaaccuaauccagccaguauu

SEQ ID NO: 629998 - RNA, 22 nt, Human
uaagccaaaaacaaugaccuca

SEQ ID NO: 629999 - RNA, 21 nt, Human
uaauaaacuuaagccaaaaac

SEQ ID NO: 630000 - RNA, 21 nt, Human
uaauaauaauaaggcucuuua

SEQ ID NO: 630001 - RNA, 20 nt, Human
uacacacacacacacacaca

SEQ ID NO: 630002 - RNA, 26 nt, Human
uagcucaaucuauauuugcuacacuu

SEQ ID NO: 630003 - RNA, 25 nt, Human
uauaaaaacaaagagcucaaggccu

SEQ ID NO: 630004 - RNA, 19 nt, Human
uauauuugcuacacuccua

SEQ ID NO: 630005 - RNA, 19 nt, Human
uaucaguaaggggaaacau

SEQ ID NO: 630006 - RNA, 24 nt, Human
uaugaacaaaacccagguuuacca

SEQ ID NO: 630007 - RNA, 23 nt, Human
uauuauauuucuuaaaaaauaua

SEQ ID NO: 630008 - RNA, 22 nt, Human
uauuuaaccuaauccagccagu

SEQ ID NO: 630009 - RNA, 21 nt, Human
ucaaauccuuuagccaaaauc

SEQ ID NO: 630010 - RNA, 18 nt, Human
ucaaggccaggcccaggg

SEQ ID NO: 630011 - RNA, 23 nt, Human
ucaucucuuucauuuguccccaa

SEQ ID NO: 630012 - RNA, 19 nt, Human
ucccagagauggaaggacc

SEQ ID NO: 630013 - RNA, 21 nt, Human
ucccagagauggaaggaccuc

SEQ ID NO: 630014 - RNA, 21 nt, Human
uccccgcaacccuaaaaaaac

SEQ ID NO: 630015 - RNA, 28 nt, Human
uccccgcaacccuaaaaaaacccucccu

SEQ ID NO: 630016 - RNA, 21 nt, Human
uccccggccuucaugagcccu

SEQ ID NO: 630017 - RNA, 18 nt, Human
ucccuccccgcaacccua

SEQ ID NO: 630018 - RNA, 20 nt, Human
ucccugucaagggcauuaau

SEQ ID NO: 630019 - RNA, 24 nt, Human
uccgcuagccuggcggcggcggug

SEQ ID NO: 630020 - RNA, 22 nt, Human
uccggcggaggcggcggagagc

SEQ ID NO: 630021 - RNA, 18 nt, Human
uccucaggcacuugcagu

SEQ ID NO: 630022 - RNA, 21 nt, Human
ucuauugaaaauggcuucaau

SEQ ID NO: 630023 - RNA, 21 nt, Human
ucuguaagagcuuggaccaag

SEQ ID NO: 630024 - RNA, 18 nt, Human
ugaaaaaacucccagaga

SEQ ID NO: 630025 - RNA, 22 nt, Human
ugaacaaaacccagguuuacca

SEQ ID NO: 630026 - RNA, 19 nt, Human
ugagaaaacacuaaacaug

SEQ ID NO: 630027 - RNA, 23 nt, Human
ugagucaaaauuacuucaugaag

SEQ ID NO: 630028 - RNA, 24 nt, Human
ugcauaacuuuaguaaaggcugcc

SEQ ID NO: 630029 - RNA, 20 nt, Human
ugcugauucugagaaaacac

SEQ ID NO: 630030 - RNA, 20 nt, Human
uggaaucaaaacaacacaac

SEQ ID NO: 630031 - RNA, 21 nt, Human
uggaaucaaaacaacacaacu

SEQ ID NO: 630032 - RNA, 19 nt, Human
uggagaaaauaugaacaaa

SEQ ID NO: 630033 - RNA, 22 nt, Human
uggagaaaauaugaacaaaacc

SEQ ID NO: 630034 - RNA, 18 nt, Human
uggguuaaagaaaacacc

SEQ ID NO: 630035 - RNA, 21 nt, Human
uggguuaaagaaaacaccaca

SEQ ID NO: 630036 - RNA, 21 nt, Human
uggucaggcaggucaccuucc

SEQ ID NO: 630037 - RNA, 19 nt, Human
uguaaauaaaauuuaauau

SEQ ID NO: 630038 - RNA, 23 nt, Human
uuaauccuagaaauagucuucug

SEQ ID NO: 630039 - RNA, 23 nt, Human
uuccugggaagacuggcaugugg

SEQ ID NO: 630040 - RNA, 19 nt, Human
uuucauaaucauguaaugg

SEQ ID NO: 630041 - RNA, 21 nt, Human
uuugaauaaaacagcaugugc

SEQ ID NO: 630042 - RNA, 21 nt, Human
uuuucagccacuuuggagaua

SEQ ID NO: 630043 - RNA, 21 nt, Human
aaaaugccacaaguaccccuc

SEQ ID NO: 630044 - RNA, 22 nt, Human
aacuguuuauugcgacuuccac

SEQ ID NO: 630045 - RNA, 21 nt, Human
aagagccaggugugaccuaga

SEQ ID NO: 630046 - RNA, 23 nt, Human
aaguaccccuccaaaauaaaccc

SEQ ID NO: 630047 - RNA, 20 nt, Human
aagugggaagccacacucaa

SEQ ID NO: 630048 - RNA, 18 nt, Human
acaaguaccccuccaaaa

SEQ ID NO: 630049 - RNA, 24 nt, Human
acaaugcaggaaaagugggaagcc

SEQ ID NO: 630050 - RNA, 18 nt, Human
agccccaacagcuguagc

SEQ ID NO: 630051 - RNA, 18 nt, Human
aggaugcgcuugcuggca

SEQ ID NO: 630052 - RNA, 21 nt, Human
agugggaagccacacucaagg

SEQ ID NO: 630053 - RNA, 22 nt, Human
augccacaaguaccccuccaaa

SEQ ID NO: 630054 - RNA, 21 nt, Human
auuuccaccuccccacauccc

SEQ ID NO: 630055 - RNA, 21 nt, Human
caaacuggcuaaaacccaaca

SEQ ID NO: 630056 - RNA, 22 nt, Human
caagacaauacaggaaaaugcc

SEQ ID NO: 630057 - RNA, 19 nt, Human
caagagccaggugugaccu

SEQ ID NO: 630058 - RNA, 18 nt, Human
caccagcgaggcaccagu

SEQ ID NO: 630059 - RNA, 22 nt, Human
cagagccccaacagcuguagcc

SEQ ID NO: 630060 - RNA, 20 nt, Human
cagcgaggcaccagucccuu

SEQ ID NO: 630061 - RNA, 24 nt, Human
cagugaccuccccugcagagaccc

SEQ ID NO: 630062 - RNA, 21 nt, Human
ccagcgaggcaccagucccuu

SEQ ID NO: 630063 - RNA, 27 nt, Human
cccauguccaagacaauaccggggucc

SEQ ID NO: 630064 - RNA, 25 nt, Human
ccugcagagaccccagccucaccgg

SEQ ID NO: 630065 - RNA, 19 nt, Human
cuaaaacccaacagggaga

SEQ ID NO: 630066 - RNA, 18 nt, Human
cuccccugcagagacccc

SEQ ID NO: 630067 - RNA, 19 nt, Human
cugcagcaaaccagagacc

SEQ ID NO: 630068 - RNA, 22 nt, Human
gaccuccccugcagagacccca

SEQ ID NO: 630069 - RNA, 25 nt, Human
gaggagccaggaguguccuacggaa

SEQ ID NO: 630070 - RNA, 22 nt, Human
gcaaaccagagacccagcacca

SEQ ID NO: 630071 - RNA, 22 nt, Human
gcagagaccccagccucaccgg

SEQ ID NO: 630072 - RNA, 21 nt, Human
gcucgcuguuccagugaccuc

SEQ ID NO: 630073 - RNA, 21 nt, Human
ggaaaaugccacaaguacccc

SEQ ID NO: 630074 - RNA, 21 nt, Human
ggcaaacuggcuaaaacccaa

SEQ ID NO: 630075 - RNA, 18 nt, Human
gucagcuccacaaugcag

SEQ ID NO: 630076 - RNA, 22 nt, Human
gugggaagccacacucaaggaa

SEQ ID NO: 630077 - RNA, 22 nt, Human
ucaucauuuccaccuccccaca

SEQ ID NO: 630078 - RNA, 22 nt, Human
ucauccacacaaccugcugcuc

SEQ ID NO: 630079 - RNA, 19 nt, Human
uccaaaauaaacccgccug

SEQ ID NO: 630080 - RNA, 20 nt, Human
uccaagacaauacaggaaaa

SEQ ID NO: 630081 - RNA, 18 nt, Human
uccaccuccccacauccc

SEQ ID NO: 630082 - RNA, 21 nt, Human
uccacuggaagcuguuaauaa

SEQ ID NO: 630083 - RNA, 25 nt, Human
uccccacaucccauguccaagacaa

SEQ ID NO: 630084 - RNA, 19 nt, Human
ucccuugcucgcuguucca

SEQ ID NO: 630085 - RNA, 24 nt, Human
ucccuugcucgcuguuccagugac

SEQ ID NO: 630086 - RNA, 22 nt, Human
uccuacggcucugcagcaaacc

SEQ ID NO: 630087 - RNA, 23 nt, Human
uggaagcuguuaauaagccacau

SEQ ID NO: 630088 - RNA, 24 nt, Human
uggcaaacuggcuaaaacccaaca

SEQ ID NO: 630089 - RNA, 19 nt, Human
uguccaagacaauacagga

SEQ ID NO: 630090 - RNA, 21 nt, Human
uguuccagugaccuccccugc

SEQ ID NO: 630091 - RNA, 19 nt, Human
uuuuuugagauuuaccaaa

SEQ ID NO: 630092 - RNA, 18 nt, Human
uuuuuuuuuuuuuuuuug

SEQ ID NO: 630093 - RNA, 23 nt, Human
aaaccccucuuucagcaucucuc

SEQ ID NO: 630094 - RNA, 21 nt, Human
acacaccuucccaaucuaauc

SEQ ID NO: 630095 - RNA, 22 nt, Human
acuguccuuucuaauacccaua

SEQ ID NO: 630096 - RNA, 19 nt, Human
acuuaagguccagaaagaa

SEQ ID NO: 630097 - RNA, 25 nt, Human
agagaugaaaaacaaaaaaccugcu

SEQ ID NO: 630098 - RNA, 21 nt, Human
aggaagagaugaaaaacaaaa

SEQ ID NO: 630099 - RNA, 19 nt, Human
aguguaggucacugaggcc

SEQ ID NO: 630100 - RNA, 22 nt, Human
auaaaacaaaccuuuuuccccc

SEQ ID NO: 630101 - RNA, 22 nt, Human
cacaagguaucaacacaccuuc

SEQ ID NO: 630102 - RNA, 21 nt, Human
cccccuuauuuucaacugucc

SEQ ID NO: 630103 - RNA, 18 nt, Human
gaagccaaaccaugccaa

SEQ ID NO: 630104 - RNA, 18 nt, Human
ggaaacucucuaaaaugu

SEQ ID NO: 630105 - RNA, 18 nt, Human
gugaaaugcaaaagcaca

SEQ ID NO: 630106 - RNA, 23 nt, Human
guguguggccagcuuuuucgcug

SEQ ID NO: 630107 - RNA, 24 nt, Human
uaaucauuuuaucgugucuacaug

SEQ ID NO: 630108 - RNA, 24 nt, Human
uagcaugcuuuuuucauaaauugu

SEQ ID NO: 630109 - RNA, 21 nt, Human
ucaaguuguaauaucuguacu

SEQ ID NO: 630110 - RNA, 24 nt, Human
ucagugaaauauaaaacaaaccuu

SEQ ID NO: 630111 - RNA, 19 nt, Human
uccaaguguguaugaagau

SEQ ID NO: 630112 - RNA, 19 nt, Human
uccagaaagaaauauuuac

SEQ ID NO: 630113 - RNA, 23 nt, Human
ucccccuuauuuucaacuguccu

SEQ ID NO: 630114 - RNA, 18 nt, Human
ucucugcauaucuuaguu

SEQ ID NO: 630115 - RNA, 21 nt, Human
ucuguacucagugacacaagg

SEQ ID NO: 630116 - RNA, 21 nt, Human
ugaaaugcaaaagcacacauc

SEQ ID NO: 630117 - RNA, 18 nt, Human
ugaauuucaaacaugugc

SEQ ID NO: 630118 - RNA, 24 nt, Human
ugacacaagguaucaacacaccuu

SEQ ID NO: 630119 - RNA, 21 nt, Human
ugucaaauaaggaaaagaccc

SEQ ID NO: 630120 - RNA, 22 nt, Human
uuccuagauugucaaacugcgc

SEQ ID NO: 630121 - RNA, 25 nt, Human
uuuuuuuuuuuuuuuuuuucagggg

SEQ ID NO: 630122 - RNA, 18 nt, Human
acaggaagaacacagaug

SEQ ID NO: 630123 - RNA, 18 nt, Human
accauuuauuggggacuu

SEQ ID NO: 630124 - RNA, 19 nt, Human
accccgugguccaggggcc

SEQ ID NO: 630125 - RNA, 24 nt, Human
acucugaggcagcaaggacagagg

SEQ ID NO: 630126 - RNA, 26 nt, Human
acuguaggaggaaagaaggaaggagg

SEQ ID NO: 630127 - RNA, 21 nt, Human
agaaggaaggagggauggaag

SEQ ID NO: 630128 - RNA, 22 nt, Human
agaaggaaggagggauggaagc

SEQ ID NO: 630129 - RNA, 21 nt, Human
agcaacacaggucccaggugu

SEQ ID NO: 630130 - RNA, 23 nt, Human
aggagagguggaccccguggucc

SEQ ID NO: 630131 - RNA, 18 nt, Human
aggcagcaaggacagagg

SEQ ID NO: 630132 - RNA, 27 nt, Human
agguggaccccgugguccaggggcccg

SEQ ID NO: 630133 - RNA, 21 nt, Human
cagcaacacaggucccaggug

SEQ ID NO: 630134 - RNA, 18 nt, Human
cagcacuguaggaggaaa

SEQ ID NO: 630135 - RNA, 20 nt, Human
caggucccagguguccgggg

SEQ ID NO: 630136 - RNA, 23 nt, Human
caggucccagguguccggggucu

SEQ ID NO: 630137 - RNA, 24 nt, Human
cccaaucgucgucugugucccgcc

SEQ ID NO: 630138 - RNA, 18 nt, Human
cccccgagggcugcugug

SEQ ID NO: 630139 - RNA, 19 nt, Human
ccccgagggcugcuguggg

SEQ ID NO: 630140 - RNA, 21 nt, Human
ccuagaaccguaaagcccaga

SEQ ID NO: 630141 - RNA, 19 nt, Human
ccucugcuucuccuguccc

SEQ ID NO: 630142 - RNA, 23 nt, Human
cgaaccugaccgugacgagccaa

SEQ ID NO: 630143 - RNA, 24 nt, Human
cgggcguggagcugacaggaagaa

SEQ ID NO: 630144 - RNA, 21 nt, Human
cgggcucagcaacacaggucc

SEQ ID NO: 630145 - RNA, 22 nt, Human
cgucccgcccacuccgcguuua

SEQ ID NO: 630146 - RNA, 18 nt, Human
cgugguccaggggcccgg

SEQ ID NO: 630147 - RNA, 19 nt, Human
cugaggcagcaaggacaga

SEQ ID NO: 630148 - RNA, 23 nt, Human
gaccccgugguccaggggccccu

SEQ ID NO: 630149 - RNA, 19 nt, Human
ggaagccucuuccucugcu

SEQ ID NO: 630150 - RNA, 22 nt, Human
ggcguggagcugacaggaagaa

SEQ ID NO: 630151 - RNA, 22 nt, Human
uagaccaauugcaaggcagcga

SEQ ID NO: 630152 - RNA, 22 nt, Human
ucagcaacacaggucccaggug

SEQ ID NO: 630153 - RNA, 19 nt, Human
ucagugacugacucugagg

SEQ ID NO: 630154 - RNA, 19 nt, Human
uccggggucuccugaacuc

SEQ ID NO: 630155 - RNA, 18 nt, Human
uccugaacuccaggaagc

SEQ ID NO: 630156 - RNA, 20 nt, Human
uggaagccucuuccucugcu

SEQ ID NO: 630157 - RNA, 21 nt, Human
uugaccgcgauagaguccuuc

SEQ ID NO: 630158 - RNA, 23 nt, Human
aaagugcugggauuacaggcaug

SEQ ID NO: 630159 - RNA, 24 nt, Human
aaagugcugggauuacaggcaugg

SEQ ID NO: 630160 - RNA, 25 nt, Human
aaagugcugggauuacaggcauggg

SEQ ID NO: 630161 - RNA, 24 nt, Human
aacaccguuccucuugccaaugac

SEQ ID NO: 630162 - RNA, 20 nt, Human
aaggagcccuggcuggucug

SEQ ID NO: 630163 - RNA, 24 nt, Human
aaggagcccuggcuggucugggcc

SEQ ID NO: 630164 - RNA, 22 nt, Human
aagguaaugcugggaaaggucc

SEQ ID NO: 630165 - RNA, 19 nt, Human
aagugcugggauuacaggc

SEQ ID NO: 630166 - RNA, 21 nt, Human
aagugcugggauuacaggcau

SEQ ID NO: 630167 - RNA, 20 nt, Human
aauuucucucuguggagccu

SEQ ID NO: 630168 - RNA, 18 nt, Human
acacaggccuggaacacc

SEQ ID NO: 630169 - RNA, 24 nt, Human
accugaggucaggaguucgagacc

SEQ ID NO: 630170 - RNA, 21 nt, Human
acgccuguaaucccagcacuu

SEQ ID NO: 630171 - RNA, 20 nt, Human
acuccaggcgaguccuccuu

SEQ ID NO: 630172 - RNA, 20 nt, Human
agaugauggcaguggcuggg

SEQ ID NO: 630173 - RNA, 24 nt, Human
agcacuuugggagggcaagguggg

SEQ ID NO: 630174 - RNA, 22 nt, Human
aggagcccugagccaaguucuc

SEQ ID NO: 630175 - RNA, 18 nt, Human
agggaagggaagguaaug

SEQ ID NO: 630176 - RNA, 24 nt, Human
aguggcuuacgccuguaaucccag

SEQ ID NO: 630177 - RNA, 20 nt, Human
auuccacucucuuccuccuu

SEQ ID NO: 630178 - RNA, 24 nt, Human
auugucccaccucccaaagugcug

SEQ ID NO: 630179 - RNA, 24 nt, Human
caaagugcugggauuacaggcaug

SEQ ID NO: 630180 - RNA, 24 nt, Human
caagguggguggaucaccugaggu

SEQ ID NO: 630181 - RNA, 26 nt, Human
caagguggguggaucaccugagguca

SEQ ID NO: 630182 - RNA, 21 nt, Human
cacaggccuggaacacccuuc

SEQ ID NO: 630183 - RNA, 20 nt, Human
caccguuccucuugccaaug

SEQ ID NO: 630184 - RNA, 23 nt, Human
caccugaggucaggaguucgaga

SEQ ID NO: 630185 - RNA, 19 nt, Human
cacuuugggagggcaaggu

SEQ ID NO: 630186 - RNA, 18 nt, Human
cagaagucaggaguggag

SEQ ID NO: 630187 - RNA, 21 nt, Human
cagcacuuugggagggcaagg

SEQ ID NO: 630188 - RNA, 24 nt, Human
cagcacuuugggagggcaaggugg

SEQ ID NO: 630189 - RNA, 24 nt, Human
cagccugaccaacauggagaaacc

SEQ ID NO: 630190 - RNA, 19 nt, Human
cauccuagaaccagggcug

SEQ ID NO: 630191 - RNA, 18 nt, Human
caucugccuuagucuucu

SEQ ID NO: 630192 - RNA, 24 nt, Human
cauuccacucucuuccuccuuacc

SEQ ID NO: 630193 - RNA, 23 nt, Human
ccaaagugcugggauuacaggca

SEQ ID NO: 630194 - RNA, 24 nt, Human
ccaaagugcugggauuacaggcau

SEQ ID NO: 630195 - RNA, 19 nt, Human
ccacacaggccuggaacac

SEQ ID NO: 630196 - RNA, 20 nt, Human
ccacugcaccuggccuuuag

SEQ ID NO: 630197 - RNA, 21 nt, Human
ccacugcaccuggccuuuagu

SEQ ID NO: 630198 - RNA, 23 nt, Human
ccacugcaccuggccuuuaguga

SEQ ID NO: 630199 - RNA, 24 nt, Human
cccaaagugcugggauuacaggca

SEQ ID NO: 630200 - RNA, 19 nt, Human
cccuguguugcucaggcca

SEQ ID NO: 630201 - RNA, 19 nt, Human
ccucgugugcgcacauggc

SEQ ID NO: 630202 - RNA, 24 nt, Human
ccugaccaacauggagaaaccuca

SEQ ID NO: 630203 - RNA, 22 nt, Human
ccugaggucaggaguucgagac

SEQ ID NO: 630204 - RNA, 19 nt, Human
ccuguguugcucaggccag

SEQ ID NO: 630205 - RNA, 23 nt, Human
ccuucugagacccuaaucaugaa

SEQ ID NO: 630206 - RNA, 21 nt, Human
cgaagagcaguucagagggcg

SEQ ID NO: 630207 - RNA, 24 nt, Human
cgccuguaaucccagcacuuuggg

SEQ ID NO: 630208 - RNA, 19 nt, Human
cuagggugccuucucucca

SEQ ID NO: 630209 - RNA, 22 nt, Human
cuccacacaggccuggaacacc

SEQ ID NO: 630210 - RNA, 26 nt, Human
cuccacacaggccuggaacacccuuc

SEQ ID NO: 630211 - RNA, 19 nt, Human
cucuuccuccuuaccuucu

SEQ ID NO: 630212 - RNA, 18 nt, Human
cuggaagcccaucugccu

SEQ ID NO: 630213 - RNA, 22 nt, Human
cuuacgccuguaaucccagcac

SEQ ID NO: 630214 - RNA, 21 nt, Human
cuuuucuacaaggagcccugg

SEQ ID NO: 630215 - RNA, 20 nt, Human
gaagagcaguucagagggcg

SEQ ID NO: 630216 - RNA, 23 nt, Human
gaagagcaguucagagggcguga

SEQ ID NO: 630217 - RNA, 19 nt, Human
gaagcagaagucaggagug

SEQ ID NO: 630218 - RNA, 19 nt, Human
gaaguucaagaucaaggug

SEQ ID NO: 630219 - RNA, 22 nt, Human
gacagcccucuuucuggccuug

SEQ ID NO: 630220 - RNA, 18 nt, Human
gacugggccauggggucc

SEQ ID NO: 630221 - RNA, 23 nt, Human
gagaccagccugaccaacaugga

SEQ ID NO: 630222 - RNA, 20 nt, Human
gaguccuccuuguacccucc

SEQ ID NO: 630223 - RNA, 24 nt, Human
gaucaccugaggucaggaguucga

SEQ ID NO: 630224 - RNA, 18 nt, Human
gauuacaggcaugggcca

SEQ ID NO: 630225 - RNA, 22 nt, Human
gauuacaggcaugggccacugc

SEQ ID NO: 630226 - RNA, 23 nt, Human
gauuacaggcaugggccacugca

SEQ ID NO: 630227 - RNA, 23 nt, Human
gcagcuggggaucugggaggcca

SEQ ID NO: 630228 - RNA, 18 nt, Human
gcaguggcuuacgccugu

SEQ ID NO: 630229 - RNA, 20 nt, Human
gcccuggcuggucugggcca

SEQ ID NO: 630230 - RNA, 20 nt, Human
gcgcaguggcuuacgccugu

SEQ ID NO: 630231 - RNA, 23 nt, Human
gcugcuauaacaaugccacagac

SEQ ID NO: 630232 - RNA, 21 nt, Human
gcuucagcauaugaauucugg

SEQ ID NO: 630233 - RNA, 18 nt, Human
ggaauagggaaaacaccu

SEQ ID NO: 630234 - RNA, 18 nt, Human
ggagcccuggcuggucug

SEQ ID NO: 630235 - RNA, 22 nt, Human
ggaucaccugaggucaggaguu

SEQ ID NO: 630236 - RNA, 22 nt, Human
ggauuacaggcaugggccacug

SEQ ID NO: 630237 - RNA, 22 nt, Human
ggccaguugcaaggucuaaagc

SEQ ID NO: 630238 - RNA, 18 nt, Human
ggcgcaguggcuuacgcc

SEQ ID NO: 630239 - RNA, 24 nt, Human
ggcgcaguggcuuacgccuguaaa

SEQ ID NO: 630240 - RNA, 21 nt, Human
gguggaucaccugaggucagg

SEQ ID NO: 630241 - RNA, 21 nt, Human
guucuggaggcugggaaguuc

SEQ ID NO: 630242 - RNA, 19 nt, Human
uacaaggagcccuggcugg

SEQ ID NO: 630243 - RNA, 22 nt, Human
uacaggcaugggccacugcacc

SEQ ID NO: 630244 - RNA, 24 nt, Human
uacgccuguaaucccagcacuuug

SEQ ID NO: 630245 - RNA, 22 nt, Human
uacuuuuuccauuccacucucu

SEQ ID NO: 630246 - RNA, 20 nt, Human
ucaccugaggucaggaguuc

SEQ ID NO: 630247 - RNA, 25 nt, Human
ucagaagcagaagucaggaguggag

SEQ ID NO: 630248 - RNA, 20 nt, Human
ucaguccauaacaccguucc

SEQ ID NO: 630249 - RNA, 24 nt, Human
ucccaaagugcugggauuacaggc

SEQ ID NO: 630250 - RNA, 26 nt, Human
ucccuguguugcucaggccaguugcc

SEQ ID NO: 630251 - RNA, 19 nt, Human
ucucccuguguugcucagg

SEQ ID NO: 630252 - RNA, 23 nt, Human
ucucgagcugcuauaacaaugcc

SEQ ID NO: 630253 - RNA, 21 nt, Human
ucucuguggagccucaggucc

SEQ ID NO: 630254 - RNA, 20 nt, Human
ucucuuccuccuuaccuucu

SEQ ID NO: 630255 - RNA, 22 nt, Human
ucucuuccuccuuaccuucuga

SEQ ID NO: 630256 - RNA, 21 nt, Human
ucugggaggccagaguccggg

SEQ ID NO: 630257 - RNA, 18 nt, Human
ugacugguucaggcaugg

SEQ ID NO: 630258 - RNA, 20 nt, Human
ugcugggaaagguccucagg

SEQ ID NO: 630259 - RNA, 19 nt, Human
uggaggaacaugaacauuc

SEQ ID NO: 630260 - RNA, 24 nt, Human
uggaucaccugaggucaggaguuc

SEQ ID NO: 630261 - RNA, 26 nt, Human
uggaucaccugaggucaggaguucga

SEQ ID NO: 630262 - RNA, 21 nt, Human
uggcaguggcugggcgcagug

SEQ ID NO: 630263 - RNA, 19 nt, Human
uggcaucagccuuuucuac

SEQ ID NO: 630264 - RNA, 21 nt, Human
uggccuuguagacagccaccu

SEQ ID NO: 630265 - RNA, 21 nt, Human
uggcugggcgcaguggcuuac

SEQ ID NO: 630266 - RNA, 23 nt, Human
uggcuggucugggccaguccugg

SEQ ID NO: 630267 - RNA, 22 nt, Human
uggcuuacgccuguaaucccag

SEQ ID NO: 630268 - RNA, 24 nt, Human
uggcuuacgccuguaaucccagca

SEQ ID NO: 630269 - RNA, 21 nt, Human
ugggaaagguccucaggagcc

SEQ ID NO: 630270 - RNA, 22 nt, Human
ugggaaguucaagaucaaggug

SEQ ID NO: 630271 - RNA, 24 nt, Human
ugggaaguucaagaucaaggugcc

SEQ ID NO: 630272 - RNA, 18 nt, Human
ugggaggaauagggaaaa

SEQ ID NO: 630273 - RNA, 18 nt, Human
ugggauuacaggcauggg

SEQ ID NO: 630274 - RNA, 19 nt, Human
ugggauuacaggcaugggc

SEQ ID NO: 630275 - RNA, 21 nt, Human
ugggauuacaggcaugggcca

SEQ ID NO: 630276 - RNA, 22 nt, Human
ugggauuacaggcaugggccac

SEQ ID NO: 630277 - RNA, 22 nt, Human
ugggauuacaggcaugggccac

SEQ ID NO: 630278 - RNA, 24 nt, Human
ugggauuacaggcaugggccacug

SEQ ID NO: 630279 - RNA, 24 nt, Human
ugggauuacaggcaugggccacug

SEQ ID NO: 630280 - RNA, 24 nt, Human
uggguggaucaccugaggucagga

SEQ ID NO: 630281 - RNA, 24 nt, Human
uggucugggccaguccuggaagcc

SEQ ID NO: 630282 - RNA, 24 nt, Human
uguguugcucaggccaguugcaag

SEQ ID NO: 630283 - RNA, 21 nt, Human
uuuugaauacuuuuuccauuc

SEQ ID NO: 630284 - RNA, 18 nt, Human
aaagugcugggacuacaa

SEQ ID NO: 630285 - RNA, 19 nt, Human
aaccauuaaaauuaaagca

SEQ ID NO: 630286 - RNA, 19 nt, Human
aacccuggucuagggcagg

SEQ ID NO: 630287 - RNA, 18 nt, Human
aaccgagauccuccaccu

SEQ ID NO: 630288 - RNA, 20 nt, Human
aaccuccgccucccgggcuc

SEQ ID NO: 630289 - RNA, 18 nt, Human
aagcagcaucuuaaaugg

SEQ ID NO: 630290 - RNA, 19 nt, Human
aagugcugggacuacaagc

SEQ ID NO: 630291 - RNA, 26 nt, Human
aagugcugggacuacaagcguaagcc

SEQ ID NO: 630292 - RNA, 27 nt, Human
aauggacuuucuugacuuccaaaauuu

SEQ ID NO: 630293 - RNA, 18 nt, Human
acaagcguaagccaccgc

SEQ ID NO: 630294 - RNA, 23 nt, Human
accaccugucuuuuccauguaac

SEQ ID NO: 630295 - RNA, 21 nt, Human
accaguguuggccaggcuggu

SEQ ID NO: 630296 - RNA, 25 nt, Human
accaguguuggccaggcuggucucc

SEQ ID NO: 630297 - RNA, 25 nt, Human
accaguguuggccaggcuggucucg

SEQ ID NO: 630298 - RNA, 22 nt, Human
accgagauccuccaccuacuug

SEQ ID NO: 630299 - RNA, 19 nt, Human
accucaacugcagagaaga

SEQ ID NO: 630300 - RNA, 21 nt, Human
acggaguuucacagagaccag

SEQ ID NO: 630301 - RNA, 18 nt, Human
acuggcgcgaucucagcu

SEQ ID NO: 630302 - RNA, 20 nt, Human
agagaccaguguuggccagg

SEQ ID NO: 630303 - RNA, 24 nt, Human
agcgauucuucugccucagccucc

SEQ ID NO: 630304 - RNA, 24 nt, Human
agcucuguuacccaggcuggagug

SEQ ID NO: 630305 - RNA, 23 nt, Human
aggaaggaagucccggcccagcu

SEQ ID NO: 630306 - RNA, 21 nt, Human
aggcagcaguaaaccuuccaa

SEQ ID NO: 630307 - RNA, 24 nt, Human
aggcagcaguaaaccuuccaagcu

SEQ ID NO: 630308 - RNA, 21 nt, Human
aguguacuggcgcgaucucag

SEQ ID NO: 630309 - RNA, 24 nt, Human
caaagugcugggacuacaagcgua

SEQ ID NO: 630310 - RNA, 23 nt, Human
caaccuccgccucccgggcucaa

SEQ ID NO: 630311 - RNA, 22 nt, Human
caagcgauucuucugccucagc

SEQ ID NO: 630312 - RNA, 27 nt, Human
caagcgauucuucugccucagccuccc

SEQ ID NO: 630313 - RNA, 18 nt, Human
cacagagaccaguguugg

SEQ ID NO: 630314 - RNA, 22 nt, Human
caccuccgccgcugcgcccaac

SEQ ID NO: 630315 - RNA, 21 nt, Human
cacugcaaccuccgccucccg

SEQ ID NO: 630316 - RNA, 23 nt, Human
cacugcaaccuccgccucccggg

SEQ ID NO: 630317 - RNA, 18 nt, Human
cagggcgagcgcgcggcc

SEQ ID NO: 630318 - RNA, 26 nt, Human
caguagagacggaguuucacagagac

SEQ ID NO: 630319 - RNA, 24 nt, Human
caguggucccuuuucccuucguuu

SEQ ID NO: 630320 - RNA, 24 nt, Human
ccaaagugcugggacuacaagcgu

SEQ ID NO: 630321 - RNA, 23 nt, Human
ccaccgcguccggccuaaaugga

SEQ ID NO: 630322 - RNA, 22 nt, Human
ccaccuacuugccuaccaccug

SEQ ID NO: 630323 - RNA, 18 nt, Human
cccagacagcugcgaagc

SEQ ID NO: 630324 - RNA, 23 nt, Human
cccgggcucaagcgauucuucug

SEQ ID NO: 630325 - RNA, 24 nt, Human
ccgccucccgggcucaagcgauuc

SEQ ID NO: 630326 - RNA, 26 nt, Human
ccgccugccucagccucccaaagugc

SEQ ID NO: 630327 - RNA, 25 nt, Human
ccgcugcgcccaacccuggucuagg

SEQ ID NO: 630328 - RNA, 21 nt, Human
ccuagguuaaggcgcggaggc

SEQ ID NO: 630329 - RNA, 24 nt, Human
ccuccaccuacuugccuaccaccu

SEQ ID NO: 630330 - RNA, 24 nt, Human
ccucccgggcucaagcgauucuuc

SEQ ID NO: 630331 - RNA, 21 nt, Human
ccuggucuagggcagggcgag

SEQ ID NO: 630332 - RNA, 18 nt, Human
ccugugauccgccugccu

SEQ ID NO: 630333 - RNA, 19 nt, Human
cgagauccuccaccuacuu

SEQ ID NO: 630334 - RNA, 21 nt, Human
cgagcgcgcggccgcggggcu

SEQ ID NO: 630335 - RNA, 22 nt, Human
cgccgcugcgcccaacccuggu

SEQ ID NO: 630336 - RNA, 24 nt, Human
cucaagcgauucuucugccucagc

SEQ ID NO: 630337 - RNA, 24 nt, Human
cucacugcaaccuccgccucccgg

SEQ ID NO: 630338 - RNA, 24 nt, Human
cucccgacccugugauccgccugc

SEQ ID NO: 630339 - RNA, 18 nt, Human
cucuccauauuuuuuuac

SEQ ID NO: 630340 - RNA, 23 nt, Human
cugcaaccuccgccucccgggcu

SEQ ID NO: 630341 - RNA, 23 nt, Human
cugccucagccucccaaagugcu

SEQ ID NO: 630342 - RNA, 24 nt, Human
cugccucagccucccaaagugcug

SEQ ID NO: 630343 - RNA, 23 nt, Human
cugccucagccucccaaguagcu

SEQ ID NO: 630344 - RNA, 25 nt, Human
cugugauccgccugccucagccucc

SEQ ID NO: 630345 - RNA, 19 nt, Human
cuguuacccaggcuggagu

SEQ ID NO: 630346 - RNA, 24 nt, Human
cuuugaaugucugcacuuuguuuc

SEQ ID NO: 630347 - RNA, 24 nt, Human
gaccaguguuggccaggcuggucu

SEQ ID NO: 630348 - RNA, 24 nt, Human
gacccugugauccgccugccucag

SEQ ID NO: 630349 - RNA, 22 nt, Human
gcaaccuccgccucccgggcuc

SEQ ID NO: 630350 - RNA, 19 nt, Human
gcagagaagaggacuugag

SEQ ID NO: 630351 - RNA, 18 nt, Human
gcagcccagaagccaccu

SEQ ID NO: 630352 - RNA, 18 nt, Human
gcccagacagcugcgaag

SEQ ID NO: 630353 - RNA, 21 nt, Human
gccgcugcgcccaacccuggu

SEQ ID NO: 630354 - RNA, 22 nt, Human
gccuagguuaaggcgcggaggc

SEQ ID NO: 630355 - RNA, 19 nt, Human
gcgaucgccgccucccagc

SEQ ID NO: 630356 - RNA, 24 nt, Human
gcgauucuucugccucagccuccc

SEQ ID NO: 630357 - RNA, 20 nt, Human
gcgcagcccagaagccaccu

SEQ ID NO: 630358 - RNA, 23 nt, Human
gcgcagcccagaagccaccuccg

SEQ ID NO: 630359 - RNA, 18 nt, Human
gcgguggaggaaggaagu

SEQ ID NO: 630360 - RNA, 27 nt, Human
gcucuguuacccaggcuggaguguacu

SEQ ID NO: 630361 - RNA, 21 nt, Human
ggacuacaagcguaagccacc

SEQ ID NO: 630362 - RNA, 22 nt, Human
ggacuacaagcguaagccaccg

SEQ ID NO: 630363 - RNA, 18 nt, Human
ggcggaggcggcagccgc

SEQ ID NO: 630364 - RNA, 23 nt, Human
guaacaaugacugauguagauaa

SEQ ID NO: 630365 - RNA, 18 nt, Human
gugauccgccugccucag

SEQ ID NO: 630366 - RNA, 24 nt, Human
gugauccgccugccucagccuccc

SEQ ID NO: 630367 - RNA, 21 nt, Human
uaaacauggacaaacacauaa

SEQ ID NO: 630368 - RNA, 24 nt, Human
uaaaccuuccaagcuaucacacac

SEQ ID NO: 630369 - RNA, 21 nt, Human
uaaaugcacuauaacaauaaa

SEQ ID NO: 630370 - RNA, 22 nt, Human
uaauuugcaaaccgagauccuc

SEQ ID NO: 630371 - RNA, 23 nt, Human
uacaagcguaagccaccgcgucc

SEQ ID NO: 630372 - RNA, 24 nt, Human
uacacagaacaaagauuaguuauc

SEQ ID NO: 630373 - RNA, 20 nt, Human
uacccaggcuggaguguacu

SEQ ID NO: 630374 - RNA, 24 nt, Human
uacccaggcuggaguguacuggcg

SEQ ID NO: 630375 - RNA, 21 nt, Human
uaucacagaugcccgccaaca

SEQ ID NO: 630376 - RNA, 22 nt, Human
uauugggaggauugaaaccuga

SEQ ID NO: 630377 - RNA, 23 nt, Human
ucacugcaaccuccgccucccgg

SEQ ID NO: 630378 - RNA, 24 nt, Human
ucacugcaaccuccgccucccggg

SEQ ID NO: 630379 - RNA, 25 nt, Human
ucacugcaaccuccgccucccgggc

SEQ ID NO: 630380 - RNA, 27 nt, Human
ucacugcaaccuccgccucccgggcuc

SEQ ID NO: 630381 - RNA, 18 nt, Human
ucagccucccaaguagcu

SEQ ID NO: 630382 - RNA, 20 nt, Human
ucagccucccaaguagcugg

SEQ ID NO: 630383 - RNA, 18 nt, Human
ucaguagagacggaguuu

SEQ ID NO: 630384 - RNA, 23 nt, Human
ucagugccugccgcaggguuguu

SEQ ID NO: 630385 - RNA, 22 nt, Human
uccaaaauuuuccuuuccaacu

SEQ ID NO: 630386 - RNA, 24 nt, Human
ucccaaagugcugggacuacaagc

SEQ ID NO: 630387 - RNA, 20 nt, Human
ucccgggcucaagcgauucu

SEQ ID NO: 630388 - RNA, 24 nt, Human
ucccgggcucaagcgauucuucug

SEQ ID NO: 630389 - RNA, 24 nt, Human
ucuagcucuguuacccaggcugga

SEQ ID NO: 630390 - RNA, 20 nt, Human
ucucccagcucgcgcagccc

SEQ ID NO: 630391 - RNA, 18 nt, Human
ucuguuacccaggcugga

SEQ ID NO: 630392 - RNA, 19 nt, Human
ucuucggcaagccgccuag

SEQ ID NO: 630393 - RNA, 21 nt, Human
ugaaaccugaaaccucaacug

SEQ ID NO: 630394 - RNA, 20 nt, Human
ugacuuccaaaauuuuccuu

SEQ ID NO: 630395 - RNA, 30 nt, Human
ugacuuccaaaauuuuccuuuccaacuccu

SEQ ID NO: 630396 - RNA, 24 nt, Human
ugagaucuucggcaagccgccuag

SEQ ID NO: 630397 - RNA, 22 nt, Human
ugagauggagucuagcucuguu

SEQ ID NO: 630398 - RNA, 22 nt, Human
ugauauguagcauuauacacaa

SEQ ID NO: 630399 - RNA, 24 nt, Human
ugccucagccucccaaagugcugg

SEQ ID NO: 630400 - RNA, 24 nt, Human
ugccucagccucccaaguagcugg

SEQ ID NO: 630401 - RNA, 24 nt, Human
ugcugggacuacaagcguaagcca

SEQ ID NO: 630402 - RNA, 19 nt, Human
uggaggaaggaagucccgg

SEQ ID NO: 630403 - RNA, 18 nt, Human
uggaguguacuggcgcga

SEQ ID NO: 630404 - RNA, 24 nt, Human
uggaguguacuggcgcgaucucag

SEQ ID NO: 630405 - RNA, 24 nt, Human
uggcgcgaucucagcucacugcaa

SEQ ID NO: 630406 - RNA, 21 nt, Human
ugggacuacaagcguaagcca

SEQ ID NO: 630407 - RNA, 22 nt, Human
ugggacuacaagcguaagccac

SEQ ID NO: 630408 - RNA, 24 nt, Human
ugggacuacaagcguaagccaccg

SEQ ID NO: 630409 - RNA, 18 nt, Human
ugguaucacagaugcccg

SEQ ID NO: 630410 - RNA, 21 nt, Human
ugguaucacagaugcccgcca

SEQ ID NO: 630411 - RNA, 21 nt, Human
uguagauaauuuuuuuuguug

SEQ ID NO: 630412 - RNA, 19 nt, Human
uguguaagaaucucaagga

SEQ ID NO: 630413 - RNA, 24 nt, Human
uguuucacucuccauauuuuuuua

SEQ ID NO: 630414 - RNA, 20 nt, Human
uuaaauggugcaauucagug

SEQ ID NO: 630415 - RNA, 18 nt, Human
uuacccaggcuggagugu

SEQ ID NO: 630416 - RNA, 22 nt, Human
uugaggcagcaguaaaccuucc

SEQ ID NO: 630417 - RNA, 24 nt, Human
uuggccaggcuggucucgaacucc

SEQ ID NO: 630418 - RNA, 24 nt, Human
uuuucaguagagacggaguuucac

SEQ ID NO: 630419 - RNA, 22 nt, Human
uuuuuuuuuuuuuugagaugga

SEQ ID NO: 630420 - RNA, 21 nt, Human
uuuuuuuuuuuuuuuuuuugg

SEQ ID NO: 630421 - RNA, 25 nt, Human
aagcaauaaccauaccauauguuca

SEQ ID NO: 630422 - RNA, 23 nt, Human
aaguccugcaguuggcccuuugg

SEQ ID NO: 630423 - RNA, 19 nt, Human
acacauuuccuaggaaagc

SEQ ID NO: 630424 - RNA, 22 nt, Human
accaccccccccgcccccccca

SEQ ID NO: 630425 - RNA, 21 nt, Human
accccccccgccccccccaau

SEQ ID NO: 630426 - RNA, 19 nt, Human
accugcucuauaagugggu

SEQ ID NO: 630427 - RNA, 18 nt, Human
agaacucaaguccugcag

SEQ ID NO: 630428 - RNA, 23 nt, Human
aggcaaaagcaauaaccauacca

SEQ ID NO: 630429 - RNA, 18 nt, Human
agggcagagggacagggg

SEQ ID NO: 630430 - RNA, 22 nt, Human
agguuccaccaccccccccgcc

SEQ ID NO: 630431 - RNA, 18 nt, Human
auaguugaaaauagucca

SEQ ID NO: 630432 - RNA, 18 nt, Human
auauacccaaauccauac

SEQ ID NO: 630433 - RNA, 20 nt, Human
caagagaacagugugaguac

SEQ ID NO: 630434 - RNA, 24 nt, Human
cacauaucccucauuuaagaaguc

SEQ ID NO: 630435 - RNA, 20 nt, Human
caccaccccccccgcccccc

SEQ ID NO: 630436 - RNA, 21 nt, Human
cacccccgcccuccgggaccc

SEQ ID NO: 630437 - RNA, 25 nt, Human
cacuccggccucuucccuacaaccu

SEQ ID NO: 630438 - RNA, 24 nt, Human
cauauacccaaauccauacguggu

SEQ ID NO: 630439 - RNA, 24 nt, Human
ccaauguagcuccucuaccucuac

SEQ ID NO: 630440 - RNA, 23 nt, Human
ccaccaccccccccgcccccccc

SEQ ID NO: 630441 - RNA, 22 nt, Human
ccaggccuacaaagaaggccgg

SEQ ID NO: 630442 - RNA, 23 nt, Human
cccaaauccauacgugagaacuc

SEQ ID NO: 630443 - RNA, 19 nt, Human
ccccccccgccccccccaa

SEQ ID NO: 630444 - RNA, 21 nt, Human
ccccgccccccccaauuacag

SEQ ID NO: 630445 - RNA, 22 nt, Human
ccccgcccuccgggaccccagc

SEQ ID NO: 630446 - RNA, 22 nt, Human
ccgccacccccgcccuccggga

SEQ ID NO: 630447 - RNA, 19 nt, Human
ccggcgccgccacccccgc

SEQ ID NO: 630448 - RNA, 19 nt, Human
ccuccgggaccccagcgcu

SEQ ID NO: 630449 - RNA, 22 nt, Human
ccugcaguuggcccuuuggaac

SEQ ID NO: 630450 - RNA, 23 nt, Human
cgaccuccggcgccgccaccccc

SEQ ID NO: 630451 - RNA, 19 nt, Human
cgcuuccuccgcgcagccc

SEQ ID NO: 630452 - RNA, 26 nt, Human
cuccggcgccgccacccccgcccucc

SEQ ID NO: 630453 - RNA, 22 nt, Human
cucucagguccgcagguuccac

SEQ ID NO: 630454 - RNA, 21 nt, Human
gaccuccggcgccgccacccc

SEQ ID NO: 630455 - RNA, 21 nt, Human
gaggaguugaggcagaugggc

SEQ ID NO: 630456 - RNA, 18 nt, Human
gaggcaaaagcaauaacc

SEQ ID NO: 630457 - RNA, 22 nt, Human
gauugguuccaggaacuuccac

SEQ ID NO: 630458 - RNA, 20 nt, Human
gcagaugggcaagagggcag

SEQ ID NO: 630459 - RNA, 20 nt, Human
gcagguuccaccaccccccc

SEQ ID NO: 630460 - RNA, 22 nt, Human
gccccccccaauuacagugcuu

SEQ ID NO: 630461 - RNA, 22 nt, Human
ggaaccugaguauaugaaccug

SEQ ID NO: 630462 - RNA, 18 nt, Human
ggcaagagggcagaggga

SEQ ID NO: 630463 - RNA, 21 nt, Human
gguucuucuccuuuaguaccc

SEQ ID NO: 630464 - RNA, 24 nt, Human
guaguaguuaucccuugguuuaca

SEQ ID NO: 630465 - RNA, 19 nt, Human
gugaagcacuaggccuccc

SEQ ID NO: 630466 - RNA, 22 nt, Human
uaaccauaccauauguucaaac

SEQ ID NO: 630467 - RNA, 24 nt, Human
uaagugaagcacuaggccuccccu

SEQ ID NO: 630468 - RNA, 20 nt, Human
uacagugcuuugggguucga

SEQ ID NO: 630469 - RNA, 22 nt, Human
uaguuaucccuugguuuacaua

SEQ ID NO: 630470 - RNA, 21 nt, Human
uaugaagacagagagggaaaa

SEQ ID NO: 630471 - RNA, 20 nt, Human
uauguugcucaagggucaaa

SEQ ID NO: 630472 - RNA, 22 nt, Human
ucaagggucaaauguauuuacu

SEQ ID NO: 630473 - RNA, 26 nt, Human
ucagaaaaacaugccuugcaugccag

SEQ ID NO: 630474 - RNA, 18 nt, Human
ucagaggggaaggccauc

SEQ ID NO: 630475 - RNA, 21 nt, Human
ucagguccgcagguuccacca

SEQ ID NO: 630476 - RNA, 18 nt, Human
uccaccaccccccccgcc

SEQ ID NO: 630477 - RNA, 20 nt, Human
ucgacaucaaaacagagauc

SEQ ID NO: 630478 - RNA, 26 nt, Human
ucgacaucaaaacagagaucaaauac

SEQ ID NO: 630479 - RNA, 24 nt, Human
ucuacggugccaggccuacaaaga

SEQ ID NO: 630480 - RNA, 20 nt, Human
ucuccuuuaguacccugaug

SEQ ID NO: 630481 - RNA, 24 nt, Human
ucuggcaggcuguagacaaauggg

SEQ ID NO: 630482 - RNA, 25 nt, Human
ugacauguauguuauagcccuuaca

SEQ ID NO: 630483 - RNA, 18 nt, Human
ugagaacucaaguccugc

SEQ ID NO: 630484 - RNA, 24 nt, Human
uggagguuuuuuuuuuacuuuaaa

SEQ ID NO: 630485 - RNA, 18 nt, Human
ugggcuaggacuaggcuu

SEQ ID NO: 630486 - RNA, 18 nt, Human
uguuagagagaugcaaga

SEQ ID NO: 630487 - RNA, 23 nt, Human
uucaaaggccccuaugccuuuga

SEQ ID NO: 630488 - RNA, 24 nt, Human
uucauagccuuuucacauaucccu

SEQ ID NO: 630489 - RNA, 19 nt, Human
uuccaccaccccccccgcc

SEQ ID NO: 630490 - RNA, 21 nt, Human
uucuccuuuaguacccugaug

SEQ ID NO: 630491 - RNA, 24 nt, Human
uuguuuguuuuuaaucagaaaaac

SEQ ID NO: 630492 - RNA, 23 nt, Human
uuuaagaagucacaguguugcag

SEQ ID NO: 630493 - RNA, 27 nt, Human
uuuaaucagaaaaacaugccuugcaug

SEQ ID NO: 630494 - RNA, 21 nt, Human
uuuauaguugaaaauagucca

SEQ ID NO: 630495 - RNA, 22 nt, Human
uuugaaauucaguguaaaucac

SEQ ID NO: 630496 - RNA, 22 nt, Human
uuugggcagaugggcaagagga

SEQ ID NO: 630497 - RNA, 19 nt, Human
uuuguauuuuucauagccu

SEQ ID NO: 630498 - RNA, 18 nt, Human
uuuuuuuuuuuucuucug

SEQ ID NO: 630499 - RNA, 24 nt, Human
aaagugcugggauaacaggcguga

SEQ ID NO: 630500 - RNA, 24 nt, Human
aaagugcugggauuacaggcauga

SEQ ID NO: 630501 - RNA, 24 nt, Human
aagaaacaguuuaacugaaucuca

SEQ ID NO: 630502 - RNA, 20 nt, Human
aagcucggcgugcugugguu

SEQ ID NO: 630503 - RNA, 19 nt, Human
aagugcugggauuacaggc

SEQ ID NO: 630504 - RNA, 21 nt, Human
aagugcugggauuacaggcau

SEQ ID NO: 630505 - RNA, 26 nt, Human
aagugcugggauuacaggcaugagcc

SEQ ID NO: 630506 - RNA, 24 nt, Human
aauuuuguauuuuuaguagagacg

SEQ ID NO: 630507 - RNA, 22 nt, Human
acaggcgugagccaccgcgccc

SEQ ID NO: 630508 - RNA, 21 nt, Human
accccgggcccucucuggugu

SEQ ID NO: 630509 - RNA, 22 nt, Human
accgggugcagaagcagcuccg

SEQ ID NO: 630510 - RNA, 20 nt, Human
acgggguuucuccauguugg

SEQ ID NO: 630511 - RNA, 21 nt, Human
acgggguuucuccauguuggu

SEQ ID NO: 630512 - RNA, 24 nt, Human
acgggguuucuccauguuggucag

SEQ ID NO: 630513 - RNA, 23 nt, Human
acuggucucgaacucccgaccuc

SEQ ID NO: 630514 - RNA, 19 nt, Human
agaagcuggacgcuggcuu

SEQ ID NO: 630515 - RNA, 19 nt, Human
agauuacaggcaugugcca

SEQ ID NO: 630516 - RNA, 24 nt, Human
agcgauucuccugccucagccucu

SEQ ID NO: 630517 - RNA, 19 nt, Human
agcucggcgugcugugguu

SEQ ID NO: 630518 - RNA, 20 nt, Human
aggcaugugccaccacgccc

SEQ ID NO: 630519 - RNA, 24 nt, Human
aggugauccgcccgccucagccuc

SEQ ID NO: 630520 - RNA, 20 nt, Human
aguagagaugggguuucucc

SEQ ID NO: 630521 - RNA, 23 nt, Human
aguagcucggauuauaggcaugu

SEQ ID NO: 630522 - RNA, 21 nt, Human
aguagcugagauuacaggcau

SEQ ID NO: 630523 - RNA, 23 nt, Human
aguagcugagauuacaggcaugu

SEQ ID NO: 630524 - RNA, 21 nt, Human
agucugggcuuagaacacaga

SEQ ID NO: 630525 - RNA, 24 nt, Human
agugauucuccugccucagccucc

SEQ ID NO: 630526 - RNA, 24 nt, Human
agugcaauggcacgaucucggcuc

SEQ ID NO: 630527 - RNA, 20 nt, Human
agugcaauggcgcgaucucg

SEQ ID NO: 630528 - RNA, 24 nt, Human
agugcaauggcgcgaucucggcuc

SEQ ID NO: 630529 - RNA, 18 nt, Human
agugcugggauuacaggc

SEQ ID NO: 630530 - RNA, 24 nt, Human
aguuucguauuuuuaguagagaug

SEQ ID NO: 630531 - RNA, 19 nt, Human
auaaaacgugccaguuccc

SEQ ID NO: 630532 - RNA, 24 nt, Human
augggguuucuccguguuggucag

SEQ ID NO: 630533 - RNA, 23 nt, Human
auugcuggggcuuccgggggucc

SEQ ID NO: 630534 - RNA, 24 nt, Human
caaagugcugggauaacaggcgug

SEQ ID NO: 630535 - RNA, 24 nt, Human
caaagugcugggauuacaggcaug

SEQ ID NO: 630536 - RNA, 22 nt, Human
caacuccgccucccggguucaa

SEQ ID NO: 630537 - RNA, 22 nt, Human
caagcgauucuccugccucagc

SEQ ID NO: 630538 - RNA, 20 nt, Human
caagugauucuccugccuca

SEQ ID NO: 630539 - RNA, 22 nt, Human
caagugauucuccugccucagc

SEQ ID NO: 630540 - RNA, 19 nt, Human
caccaggacacgaaaccag

SEQ ID NO: 630541 - RNA, 23 nt, Human
caguucccaaaauccgcccaaga

SEQ ID NO: 630542 - RNA, 23 nt, Human
cauucucuccaacaggaguuugg

SEQ ID NO: 630543 - RNA, 22 nt, Human
ccaaagugcugggauaacaggc

SEQ ID NO: 630544 - RNA, 24 nt, Human
ccaaagugcugggauaacaggcgu

SEQ ID NO: 630545 - RNA, 23 nt, Human
ccaaagugcugggauuacaggca

SEQ ID NO: 630546 - RNA, 24 nt, Human
ccaaagugcugggauuacaggcau

SEQ ID NO: 630547 - RNA, 20 nt, Human
ccaccacgcccggcuaauuu

SEQ ID NO: 630548 - RNA, 20 nt, Human
ccaccacgcccggcuaauuu

SEQ ID NO: 630549 - RNA, 19 nt, Human
ccauguuggucaggcuggu

SEQ ID NO: 630550 - RNA, 24 nt, Human
cccaaagugcugggauuacaggca

SEQ ID NO: 630551 - RNA, 20 nt, Human
cccagguucaagcgauucuc

SEQ ID NO: 630552 - RNA, 23 nt, Human
cccagguucaagcgauucuccug

SEQ ID NO: 630553 - RNA, 18 nt, Human
cccgaccucaggugaucc

SEQ ID NO: 630554 - RNA, 18 nt, Human
cccgaccucaggugaucc

SEQ ID NO: 630555 - RNA, 21 nt, Human
cccgaccucaggugauccgcc

SEQ ID NO: 630556 - RNA, 22 nt, Human
cccgaccucaggugauccgccc

SEQ ID NO: 630557 - RNA, 23 nt, Human
cccgaccucaggugauccgccug

SEQ ID NO: 630558 - RNA, 22 nt, Human
cccggccccuuucucuuucuuu

SEQ ID NO: 630559 - RNA, 21 nt, Human
cccggguucaagugauucucc

SEQ ID NO: 630560 - RNA, 23 nt, Human
cccggguucaagugauucuccug

SEQ ID NO: 630561 - RNA, 22 nt, Human
ccgcaacuccgccucccggguu

SEQ ID NO: 630562 - RNA, 22 nt, Human
ccgcccaagaaagcuguggcuc

SEQ ID NO: 630563 - RNA, 26 nt, Human
ccgcccgccucagccucccaaagugc

SEQ ID NO: 630564 - RNA, 24 nt, Human
ccgccucagccucccaaagugcug

SEQ ID NO: 630565 - RNA, 24 nt, Human
ccgccucccagguucaagcgauuc

SEQ ID NO: 630566 - RNA, 24 nt, Human
ccgccucccggguucaagugauuc

SEQ ID NO: 630567 - RNA, 19 nt, Human
ccguguuggucagacuggu

SEQ ID NO: 630568 - RNA, 23 nt, Human
ccguguuggucagacuggucucg

SEQ ID NO: 630569 - RNA, 24 nt, Human
ccucccagguucaagcgauucucc

SEQ ID NO: 630570 - RNA, 21 nt, Human
ccucccggguucaagugauuc

SEQ ID NO: 630571 - RNA, 24 nt, Human
ccucccggguucaagugauucucc

SEQ ID NO: 630572 - RNA, 20 nt, Human
ccucuaauucauucucucca

SEQ ID NO: 630573 - RNA, 24 nt, Human
ccugccucagccuccccaguagcu

SEQ ID NO: 630574 - RNA, 20 nt, Human
ccuggcuucguguccaggga

SEQ ID NO: 630575 - RNA, 18 nt, Human
cgaccucaggugauccgc

SEQ ID NO: 630576 - RNA, 18 nt, Human
cgaccucaggugauccgc

SEQ ID NO: 630577 - RNA, 24 nt, Human
cgaccucaggugauccgcccgccu

SEQ ID NO: 630578 - RNA, 24 nt, Human
cgaccucaggugauccgccugccu

SEQ ID NO: 630579 - RNA, 19 nt, Human
cgacuccuccggcaccccc

SEQ ID NO: 630580 - RNA, 24 nt, Human
cgccucagccucccaaagugcugg

SEQ ID NO: 630581 - RNA, 21 nt, Human
cgccugccucgaccucccaaa

SEQ ID NO: 630582 - RNA, 19 nt, Human
cggauuauaggcaugugcc

SEQ ID NO: 630583 - RNA, 24 nt, Human
cggcaaccuccgccucccagguuc

SEQ ID NO: 630584 - RNA, 24 nt, Human
cgggguuucuccauguuggucagg

SEQ ID NO: 630585 - RNA, 25 nt, Human
cuaauucauucucuccaacaggagu

SEQ ID NO: 630586 - RNA, 24 nt, Human
cuaauuuuguauuuuuaguagaga

SEQ ID NO: 630587 - RNA, 22 nt, Human
cuaguagcugagauuacaggca

SEQ ID NO: 630588 - RNA, 23 nt, Human
cuaguagcugagauuacaggcau

SEQ ID NO: 630589 - RNA, 24 nt, Human
cucacggcaaccuccgccucccag

SEQ ID NO: 630590 - RNA, 21 nt, Human
cucauauugucgccucccgga

SEQ ID NO: 630591 - RNA, 22 nt, Human
cuccauguuggucaggcugguc

SEQ ID NO: 630592 - RNA, 26 nt, Human
cucccgaccucaggugauccgcccgc

SEQ ID NO: 630593 - RNA, 26 nt, Human
cucccgaccucaggugauccgccugc

SEQ ID NO: 630594 - RNA, 24 nt, Human
cuccguguuggucagacuggucuc

SEQ ID NO: 630595 - RNA, 23 nt, Human
cuccugccucagccucucuagua

SEQ ID NO: 630596 - RNA, 20 nt, Human
cucggauuauaggcaugugc

SEQ ID NO: 630597 - RNA, 21 nt, Human
cucuuguugcccaggcuagag

SEQ ID NO: 630598 - RNA, 23 nt, Human
cugccucagccucucuaguagcu

SEQ ID NO: 630599 - RNA, 24 nt, Human
cugccucgaccucccaaagugcug

SEQ ID NO: 630600 - RNA, 22 nt, Human
cuucacgcuccccggggacaaa

SEQ ID NO: 630601 - RNA, 23 nt, Human
gaccucaggugauccgcccgccu

SEQ ID NO: 630602 - RNA, 24 nt, Human
gaccucaggugauccgcccgccuc

SEQ ID NO: 630603 - RNA, 23 nt, Human
gaccucaggugauccgccugccu

SEQ ID NO: 630604 - RNA, 24 nt, Human
gaccucaggugauccgccugccuc

SEQ ID NO: 630605 - RNA, 23 nt, Human
gagacgggguuucuccauguugg

SEQ ID NO: 630606 - RNA, 24 nt, Human
gagacgggguuucuccauguuggu

SEQ ID NO: 630607 - RNA, 24 nt, Human
gagaugggguuucuccguguuggu

SEQ ID NO: 630608 - RNA, 18 nt, Human
gauaacaggcgugagcca

SEQ ID NO: 630609 - RNA, 18 nt, Human
gauuacaggcaugagcca

SEQ ID NO: 630610 - RNA, 22 nt, Human
gauuacaggcaugagccacugc

SEQ ID NO: 630611 - RNA, 22 nt, Human
gauuacaggcaugagccacugc

SEQ ID NO: 630612 - RNA, 18 nt, Human
gauuacaggcaugugcca

SEQ ID NO: 630613 - RNA, 18 nt, Human
gauuauaggcaugugcca

SEQ ID NO: 630614 - RNA, 24 nt, Human
gccaggaccccgggcccucucugg

SEQ ID NO: 630615 - RNA, 24 nt, Human
gcgauucuccugccucagccucuc

SEQ ID NO: 630616 - RNA, 19 nt, Human
gcuagagugcaauggcgcg

SEQ ID NO: 630617 - RNA, 21 nt, Human
gcucuuguugcccaggcuaga

SEQ ID NO: 630618 - RNA, 23 nt, Human
gcuggucuagaacucccgaccuc

SEQ ID NO: 630619 - RNA, 21 nt, Human
gcugugguuugggggagaagc

SEQ ID NO: 630620 - RNA, 22 nt, Human
ggauuacaggcaugagccacug

SEQ ID NO: 630621 - RNA, 19 nt, Human
ggauuauaggcaugugcca

SEQ ID NO: 630622 - RNA, 21 nt, Human
ggccaggaccccgggcccucu

SEQ ID NO: 630623 - RNA, 26 nt, Human
gggcgcuggggaugcuccgggcuugg

SEQ ID NO: 630624 - RNA, 23 nt, Human
gggguuucuccauguuggucagg

SEQ ID NO: 630625 - RNA, 18 nt, Human
gggguuucuccguguugg

SEQ ID NO: 630626 - RNA, 22 nt, Human
ggguucaagugauucuccugcc

SEQ ID NO: 630627 - RNA, 23 nt, Human
ggguucaagugauucuccugccu

SEQ ID NO: 630628 - RNA, 20 nt, Human
ggugcagaagcagcuccgga

SEQ ID NO: 630629 - RNA, 23 nt, Human
guagagacgggguuucuccaugu

SEQ ID NO: 630630 - RNA, 20 nt, Human
guagcugagauuacaggcau

SEQ ID NO: 630631 - RNA, 20 nt, Human
gucuccggccaggaccccgg

SEQ ID NO: 630632 - RNA, 24 nt, Human
gugacagugagucugggcuuagaa

SEQ ID NO: 630633 - RNA, 24 nt, Human
gugauccgcccgccucagccuccc

SEQ ID NO: 630634 - RNA, 24 nt, Human
gugauucuccugccucagccuccc

SEQ ID NO: 630635 - RNA, 25 nt, Human
guuucuccguguuggucagacuggu

SEQ ID NO: 630636 - RNA, 21 nt, Human
uaaaacgugccaguucccaaa

SEQ ID NO: 630637 - RNA, 23 nt, Human
uacaggcaugagccacugcgccc

SEQ ID NO: 630638 - RNA, 23 nt, Human
uacaggcaugugccaccacgccc

SEQ ID NO: 630639 - RNA, 24 nt, Human
uaccagagcacccggcgucucaca

SEQ ID NO: 630640 - RNA, 23 nt, Human
uagagugcaauggcgcgaucucg

SEQ ID NO: 630641 - RNA, 24 nt, Human
uagagugcaauggcgcgaucucgg

SEQ ID NO: 630642 - RNA, 24 nt, Human
uaguagagacgggguuucuccaug

SEQ ID NO: 630643 - RNA, 21 nt, Human
uaguagagaugggguuucucc

SEQ ID NO: 630644 - RNA, 22 nt, Human
uaguagagaugggguuucuccg

SEQ ID NO: 630645 - RNA, 24 nt, Human
uaguagagaugggguuucuccgug

SEQ ID NO: 630646 - RNA, 25 nt, Human
uaguagagaugggguuucuccgugu

SEQ ID NO: 630647 - RNA, 24 nt, Human
uaguagcugagauuacaggcaugu

SEQ ID NO: 630648 - RNA, 18 nt, Human
uauuuuuuuuuuuuuuga

SEQ ID NO: 630649 - RNA, 19 nt, Human
ucaagugauucuccugccu

SEQ ID NO: 630650 - RNA, 23 nt, Human
ucaccgcaacuccgccucccggg

SEQ ID NO: 630651 - RNA, 24 nt, Human
ucacggcaaccuccgccucccagg

SEQ ID NO: 630652 - RNA, 25 nt, Human
ucacggcaaccuccgccucccaggu

SEQ ID NO: 630653 - RNA, 21 nt, Human
ucagccuccccaguagcucgg

SEQ ID NO: 630654 - RNA, 18 nt, Human
ucccaaaauccgcccaag

SEQ ID NO: 630655 - RNA, 24 nt, Human
ucccaaagugcugggauaacaggc

SEQ ID NO: 630656 - RNA, 24 nt, Human
ucccaaagugcugggauuacaggc

SEQ ID NO: 630657 - RNA, 21 nt, Human
ucccagguucaagcgauucuc

SEQ ID NO: 630658 - RNA, 24 nt, Human
ucccagguucaagcgauucuccug

SEQ ID NO: 630659 - RNA, 19 nt, Human
uccccggggacaaagcucg

SEQ ID NO: 630660 - RNA, 21 nt, Human
ucccggguucaagugauucuc

SEQ ID NO: 630661 - RNA, 24 nt, Human
ucccggguucaagugauucuccug

SEQ ID NO: 630662 - RNA, 25 nt, Human
ucccugaggauugcuggggcuuccg

SEQ ID NO: 630663 - RNA, 21 nt, Human
uccgcccgccucagccuccca

SEQ ID NO: 630664 - RNA, 18 nt, Human
ucgccucccggagcuggu

SEQ ID NO: 630665 - RNA, 18 nt, Human
ucgcucuuguugcccagg

SEQ ID NO: 630666 - RNA, 24 nt, Human
ucggauuauaggcaugugccacca

SEQ ID NO: 630667 - RNA, 23 nt, Human
ucuaguagcugagauuacaggca

SEQ ID NO: 630668 - RNA, 21 nt, Human
ucuccggccaggaccccgggc

SEQ ID NO: 630669 - RNA, 25 nt, Human
ucuccugccucagccuccccaguag

SEQ ID NO: 630670 - RNA, 24 nt, Human
ucucuaguagcugagauuacaggc

SEQ ID NO: 630671 - RNA, 18 nt, Human
ucuuguugcccaggcuag

SEQ ID NO: 630672 - RNA, 18 nt, Human
ucuuuuuuuuuuuuuuga

SEQ ID NO: 630673 - RNA, 18 nt, Human
ugagauuacaggcaugug

SEQ ID NO: 630674 - RNA, 21 nt, Human
ugagauuacaggcaugugcca

SEQ ID NO: 630675 - RNA, 22 nt, Human
ugagauuacaggcaugugccac

SEQ ID NO: 630676 - RNA, 24 nt, Human
ugagauuacaggcaugugccacca

SEQ ID NO: 630677 - RNA, 20 nt, Human
ugauucuccugccucagccu

SEQ ID NO: 630678 - RNA, 21 nt, Human
ugcccaggcuagagugcaaug

SEQ ID NO: 630679 - RNA, 19 nt, Human
ugccccguccaucgcccuc

SEQ ID NO: 630680 - RNA, 25 nt, Human
ugccccguccaucgcccucauauug

SEQ ID NO: 630681 - RNA, 21 nt, Human
ugccucagccuccccaguagc

SEQ ID NO: 630682 - RNA, 23 nt, Human
ugccucagccuccccaguagcuc

SEQ ID NO: 630683 - RNA, 24 nt, Human
ugccucagccucucuaguagcuga

SEQ ID NO: 630684 - RNA, 24 nt, Human
ugccucgaccucccaaagugcugg

SEQ ID NO: 630685 - RNA, 22 nt, Human
ugcgggcgcuggggaugcuccg

SEQ ID NO: 630686 - RNA, 20 nt, Human
ugcuggggcuuccggggguc

SEQ ID NO: 630687 - RNA, 19 nt, Human
ugggauaacaggcgugagc

SEQ ID NO: 630688 - RNA, 22 nt, Human
ugggauaacaggcgugagccac

SEQ ID NO: 630689 - RNA, 23 nt, Human
ugggauaacaggcgugagccacc

SEQ ID NO: 630690 - RNA, 24 nt, Human
ugggauaacaggcgugagccaccg

SEQ ID NO: 630691 - RNA, 18 nt, Human
ugggauuacaggcaugag

SEQ ID NO: 630692 - RNA, 19 nt, Human
ugggauuacaggcaugagc

SEQ ID NO: 630693 - RNA, 21 nt, Human
ugggauuacaggcaugagcca

SEQ ID NO: 630694 - RNA, 22 nt, Human
ugggauuacaggcaugagccac

SEQ ID NO: 630695 - RNA, 22 nt, Human
ugggauuacaggcaugagccac

SEQ ID NO: 630696 - RNA, 23 nt, Human
ugggauuacaggcaugagccacu

SEQ ID NO: 630697 - RNA, 24 nt, Human
ugggauuacaggcaugagccacug

SEQ ID NO: 630698 - RNA, 26 nt, Human
ugggauuacaggcaugagccacugcg

SEQ ID NO: 630699 - RNA, 22 nt, Human
ugggggagaagcuggacgcugg

SEQ ID NO: 630700 - RNA, 23 nt, Human
uggucagacuggucucgaacucc

SEQ ID NO: 630701 - RNA, 21 nt, Human
uggucaggcuggucuagaacu

SEQ ID NO: 630702 - RNA, 23 nt, Human
uggucuagaacucccgaccucag

SEQ ID NO: 630703 - RNA, 19 nt, Human
uggucucgaacucccgacc

SEQ ID NO: 630704 - RNA, 24 nt, Human
uguagugcaauggcacgaucucgg

SEQ ID NO: 630705 - RNA, 21 nt, Human
uguauuuuuaguagagacggg

SEQ ID NO: 630706 - RNA, 20 nt, Human
uguugcccaggcuagagugc

SEQ ID NO: 630707 - RNA, 22 nt, Human
uguugcccaggcuagagugcaa

SEQ ID NO: 630708 - RNA, 18 nt, Human
uuaguagagacgggguuu

SEQ ID NO: 630709 - RNA, 24 nt, Human
uuaguagagacgggguuucuccau

SEQ ID NO: 630710 - RNA, 18 nt, Human
uuaguagagaugggguuu

SEQ ID NO: 630711 - RNA, 24 nt, Human
uuaguagagaugggguuucuccgu

SEQ ID NO: 630712 - RNA, 21 nt, Human
uucaagcgauucuccugccuc

SEQ ID NO: 630713 - RNA, 23 nt, Human
uucaagcgauucuccugccucag

SEQ ID NO: 630714 - RNA, 24 nt, Human
uucaagcgauucuccugccucagc

SEQ ID NO: 630715 - RNA, 21 nt, Human
uucaagugauucuccugccuc

SEQ ID NO: 630716 - RNA, 23 nt, Human
uucaagugauucuccugccucag

SEQ ID NO: 630717 - RNA, 24 nt, Human
uucaagugauucuccugccucagc

SEQ ID NO: 630718 - RNA, 20 nt, Human
uucacgcaugaaagcggggc

SEQ ID NO: 630719 - RNA, 19 nt, Human
uucccagcagcucucucaa

SEQ ID NO: 630720 - RNA, 23 nt, Human
uucucuuucuuuguggauguucc

SEQ ID NO: 630721 - RNA, 20 nt, Human
uucuuuguggauguucccag

SEQ ID NO: 630722 - RNA, 18 nt, Human
uucuuuuuuuuuuuuuug

SEQ ID NO: 630723 - RNA, 25 nt, Human
uugaaacaguuuugcucuuguugcc

SEQ ID NO: 630724 - RNA, 18 nt, Human
uugcccaggcuagagugc

SEQ ID NO: 630725 - RNA, 18 nt, Human
uugcccaggcuguagugc

SEQ ID NO: 630726 - RNA, 18 nt, Human
uugcucuuguugcccagg

SEQ ID NO: 630727 - RNA, 23 nt, Human
uuguauuuuuaguagagacgggg

SEQ ID NO: 630728 - RNA, 23 nt, Human
uuguugcccaggcuagagugcaa

SEQ ID NO: 630729 - RNA, 23 nt, Human
uuguugcccaggcuguagugcaa

SEQ ID NO: 630730 - RNA, 23 nt, Human
uuucgcucuuguugcccaggcug

SEQ ID NO: 630731 - RNA, 19 nt, Human
uuucguauuuuuaguagag

SEQ ID NO: 630732 - RNA, 20 nt, Human
uuucguauuuuuaguagaga

SEQ ID NO: 630733 - RNA, 21 nt, Human
uuucuccauguuggucaggcu

SEQ ID NO: 630734 - RNA, 20 nt, Human
uuuugcucuuguugcccagg

SEQ ID NO: 630735 - RNA, 23 nt, Human
uuuugcucuuguugcccaggcua

SEQ ID NO: 630736 - RNA, 19 nt, Human
uuuuguauuuuuaguagag

SEQ ID NO: 630737 - RNA, 20 nt, Human
uuuuguauuuuuaguagaga

SEQ ID NO: 630738 - RNA, 22 nt, Human
uuuuuaguagagacgggguuuc

SEQ ID NO: 630739 - RNA, 22 nt, Human
uuuuuaguagagaugggguuuc

SEQ ID NO: 630740 - RNA, 20 nt, Human
uuuuuuuuuuugaaacaguu

SEQ ID NO: 630741 - RNA, 24 nt, Human
uuuuuuuuuuuucuucuucuuuuu

SEQ ID NO: 630742 - RNA, 25 nt, Human
uuuuuuuuuuuugagacggaguuuc

SEQ ID NO: 630743 - RNA, 22 nt, Human
uuuuuuuuuuuuuugagacgga

SEQ ID NO: 630744 - RNA, 21 nt, Human
acagcugggcgccuggcagcc

SEQ ID NO: 630745 - RNA, 22 nt, Human
cacagcugggcgccuggcagcc

SEQ ID NO: 630746 - RNA, 22 nt, Human
ccuggcagcccggguccccucc

SEQ ID NO: 630747 - RNA, 18 nt, Human
gcccggguccccucccag

SEQ ID NO: 630748 - RNA, 23 nt, Human
uggcagcccggguccccucccag

SEQ ID NO: 630749 - RNA, 19 nt, Human
aaaaaaaacaucagaaaca

SEQ ID NO: 630750 - RNA, 21 nt, Human
aaaaaaaacaucagaaacaau

SEQ ID NO: 630751 - RNA, 23 nt, Human
aagagaaagauuauaauggacac

SEQ ID NO: 630752 - RNA, 22 nt, Human
aaggaccacucccgagggagcc

SEQ ID NO: 630753 - RNA, 18 nt, Human
acagggccggaagcagac

SEQ ID NO: 630754 - RNA, 21 nt, Human
agaaagagaaagauuauaaug

SEQ ID NO: 630755 - RNA, 23 nt, Human
agccccugcccgucccgaccucc

SEQ ID NO: 630756 - RNA, 19 nt, Human
aggaagaggcggcgcccga

SEQ ID NO: 630757 - RNA, 24 nt, Human
aggaccacucccgagggagccugc

SEQ ID NO: 630758 - RNA, 21 nt, Human
aggaccagaaggggcucucua

SEQ ID NO: 630759 - RNA, 19 nt, Human
augaaauuuacacuucaau

SEQ ID NO: 630760 - RNA, 22 nt, Human
cacggcccaaggaccacucccg

SEQ ID NO: 630761 - RNA, 23 nt, Human
cacuguucaggccuauaccaucu

SEQ ID NO: 630762 - RNA, 19 nt, Human
cagaaggggcucucuagug

SEQ ID NO: 630763 - RNA, 18 nt, Human
cagccccugcccgucccg

SEQ ID NO: 630764 - RNA, 26 nt, Human
caggaccagaaggggcucucuagugu

SEQ ID NO: 630765 - RNA, 20 nt, Human
cccaagcuggcgcggggucc

SEQ ID NO: 630766 - RNA, 19 nt, Human
ccccuggguuaaguuggcu

SEQ ID NO: 630767 - RNA, 23 nt, Human
cccuagccaggaccagaaggggc

SEQ ID NO: 630768 - RNA, 22 nt, Human
cccugcccgucccgaccucccc

SEQ ID NO: 630769 - RNA, 23 nt, Human
ccgccagaacuccagggcuccca

SEQ ID NO: 630770 - RNA, 19 nt, Human
ccgcuucuccgggcgucug

SEQ ID NO: 630771 - RNA, 26 nt, Human
ccggcuuccauuugacagcuucccuc

SEQ ID NO: 630772 - RNA, 21 nt, Human
cgcauuuggaaaaaauggucc

SEQ ID NO: 630773 - RNA, 21 nt, Human
cgccagaacuccagggcuccc

SEQ ID NO: 630774 - RNA, 21 nt, Human
cgcccgaggcugcuauggcgg

SEQ ID NO: 630775 - RNA, 19 nt, Human
cggcccaaggaccacuccc

SEQ ID NO: 630776 - RNA, 22 nt, Human
cucagccccugcccgucccgac

SEQ ID NO: 630777 - RNA, 19 nt, Human
cuuucagaccccuggguua

SEQ ID NO: 630778 - RNA, 19 nt, Human
gaagcagacgagggcggga

SEQ ID NO: 630779 - RNA, 24 nt, Human
gacacuucucccauuccugaccag

SEQ ID NO: 630780 - RNA, 18 nt, Human
gagcucccucaggccucc

SEQ ID NO: 630781 - RNA, 24 nt, Human
ggaccagaaggggcucucuagugg

SEQ ID NO: 630782 - RNA, 21 nt, Human
ggagccugcagagccccacca

SEQ ID NO: 630783 - RNA, 24 nt, Human
ggcgggaggcuggaaagggggacc

SEQ ID NO: 630784 - RNA, 25 nt, Human
gggccggaagcagacgagggcggga

SEQ ID NO: 630785 - RNA, 20 nt, Human
guguauuuuuacuuucagac

SEQ ID NO: 630786 - RNA, 21 nt, Human
uaaaaauacaugcacaaauca

SEQ ID NO: 630787 - RNA, 24 nt, Human
uacaugcacaaaucauaaaaaaaa

SEQ ID NO: 630788 - RNA, 24 nt, Human
uauguugauugacuagacagaucc

SEQ ID NO: 630789 - RNA, 18 nt, Human
ucaaagagaaagagaaag

SEQ ID NO: 630790 - RNA, 23 nt, Human
ucaggccuauaccaucuugugug

SEQ ID NO: 630791 - RNA, 20 nt, Human
uccagguguauuuuagacuu

SEQ ID NO: 630792 - RNA, 25 nt, Human
ucccucaggccucccagaggggcca

SEQ ID NO: 630793 - RNA, 21 nt, Human
ucccucccgccagaacuccag

SEQ ID NO: 630794 - RNA, 27 nt, Human
ucucuagugucugacacuucucccauu

SEQ ID NO: 630795 - RNA, 24 nt, Human
ucugucucauuucuaccggcuucc

SEQ ID NO: 630796 - RNA, 20 nt, Human
ugacuagacagauccaggug

SEQ ID NO: 630797 - RNA, 19 nt, Human
ugcagagccccaccaggcc

SEQ ID NO: 630798 - RNA, 18 nt, Human
uggaaaaaauggucccac

SEQ ID NO: 630799 - RNA, 18 nt, Human
uggaaaaaauggucccac

SEQ ID NO: 630800 - RNA, 19 nt, Human
uggaaaggaagaggcggcg

SEQ ID NO: 630801 - RNA, 22 nt, Human
ugguagguuuaagacugucucu

SEQ ID NO: 630802 - RNA, 18 nt, Human
uguauuuuagacuuggaa

SEQ ID NO: 630803 - RNA, 21 nt, Human
uguauuuuagacuuggaauac

SEQ ID NO: 630804 - RNA, 21 nt, Human
uuaaauuuacacacaggucaa

SEQ ID NO: 630805 - RNA, 25 nt, Human
uuuaaauuuacacacaggucaaugg

SEQ ID NO: 630806 - RNA, 20 nt, Human
uuuuuuuuuuuuuuuauaac

SEQ ID NO: 630807 - RNA, 21 nt, Human
aaaaaacccggccagcacagc

SEQ ID NO: 630808 - RNA, 25 nt, Human
aaaaaacccggccagcacagcucau

SEQ ID NO: 630809 - RNA, 27 nt, Human
aaauauugcaaauuauuucuuuaagcu

SEQ ID NO: 630810 - RNA, 22 nt, Human
aaaugcaaaagccaccgcaacc

SEQ ID NO: 630811 - RNA, 21 nt, Human
aaugcaaaagccaccgcaacc

SEQ ID NO: 630812 - RNA, 24 nt, Human
aaugcaaaagccaccgcaaccaaa

SEQ ID NO: 630813 - RNA, 20 nt, Human
acagagugagauccugucuc

SEQ ID NO: 630814 - RNA, 24 nt, Human
acagagugagauccugucucgaaa

SEQ ID NO: 630815 - RNA, 22 nt, Human
acagcucaugccuguaauccca

SEQ ID NO: 630816 - RNA, 23 nt, Human
acagcucaugccuguaaucccag

SEQ ID NO: 630817 - RNA, 20 nt, Human
acaucaagaaaaaaaaaccc

SEQ ID NO: 630818 - RNA, 24 nt, Human
acugcaauccagccugugcuacag

SEQ ID NO: 630819 - RNA, 26 nt, Human
acugcaauccagccugugcuacagag

SEQ ID NO: 630820 - RNA, 20 nt, Human
acuggagccugggaggucga

SEQ ID NO: 630821 - RNA, 19 nt, Human
agaaaggagauuuuaaaaa

SEQ ID NO: 630822 - RNA, 22 nt, Human
agacaaaaaugcacagggagcc

SEQ ID NO: 630823 - RNA, 21 nt, Human
agacauggaaauaccaaagcc

SEQ ID NO: 630824 - RNA, 20 nt, Human
agcaaaaccuaaaccugcua

SEQ ID NO: 630825 - RNA, 24 nt, Human
agcuacuuaggaggcugagguggg

SEQ ID NO: 630826 - RNA, 23 nt, Human
agcuaggcgugguggugcgcgcc

SEQ ID NO: 630827 - RNA, 21 nt, Human
aggcauauuuauccuuucaca

SEQ ID NO: 630828 - RNA, 23 nt, Human
aggcgugguggugcgcgccugua

SEQ ID NO: 630829 - RNA, 21 nt, Human
aggucgaggcugcagugcaag

SEQ ID NO: 630830 - RNA, 20 nt, Human
aguacuguauuuauauuugu

SEQ ID NO: 630831 - RNA, 23 nt, Human
auagaagaaagccuuguccauuu

SEQ ID NO: 630832 - RNA, 24 nt, Human
auagaagaaagccuuguccauuuu

SEQ ID NO: 630833 - RNA, 21 nt, Human
auugcacugcaauccagccug

SEQ ID NO: 630834 - RNA, 22 nt, Human
caaccaaaaagucuauaaugcu

SEQ ID NO: 630835 - RNA, 19 nt, Human
caagaaaaaaaaacccggc

SEQ ID NO: 630836 - RNA, 23 nt, Human
caauccagccugugcuacagagu

SEQ ID NO: 630837 - RNA, 21 nt, Human
cacagcucaugccuguaaucc

SEQ ID NO: 630838 - RNA, 24 nt, Human
cacagcucaugccuguaaucccag

SEQ ID NO: 630839 - RNA, 21 nt, Human
caccuagaguaaaaauuagac

SEQ ID NO: 630840 - RNA, 19 nt, Human
cacugcaauccagccugug

SEQ ID NO: 630841 - RNA, 19 nt, Human
cacugcaauccagccugug

SEQ ID NO: 630842 - RNA, 24 nt, Human
cacugcaauccagccugugcuaca

SEQ ID NO: 630843 - RNA, 21 nt, Human
cagcuacuuaggaggcugagg

SEQ ID NO: 630844 - RNA, 24 nt, Human
cagcuacuuaggaggcugaggugg

SEQ ID NO: 630845 - RNA, 19 nt, Human
caguagaaaggagauuuua

SEQ ID NO: 630846 - RNA, 25 nt, Human
caguagaaaggagauuuuaaaaaua

SEQ ID NO: 630847 - RNA, 19 nt, Human
caguggaaagaguucugaa

SEQ ID NO: 630848 - RNA, 20 nt, Human
caucaagaaaaaaaaacccg

SEQ ID NO: 630849 - RNA, 19 nt, Human
cauggaaauaccaaagcca

SEQ ID NO: 630850 - RNA, 20 nt, Human
cauggccaaacccccgucuc

SEQ ID NO: 630851 - RNA, 22 nt, Human
cccgucucuacaaaaaaauaca

SEQ ID NO: 630852 - RNA, 19 nt, Human
ccugugcuacagagugaga

SEQ ID NO: 630853 - RNA, 22 nt, Human
ccuuccacacaccuuuugacag

SEQ ID NO: 630854 - RNA, 24 nt, Human
cgccuguacucccagcuacuuagg

SEQ ID NO: 630855 - RNA, 20 nt, Human
cggccagcacagcucaugcc

SEQ ID NO: 630856 - RNA, 19 nt, Human
cuacaaaaaaauacaaaaa

SEQ ID NO: 630857 - RNA, 19 nt, Human
cucaugccuguaaucccag

SEQ ID NO: 630858 - RNA, 23 nt, Human
cugagggcagcaguugggucuuu

SEQ ID NO: 630859 - RNA, 21 nt, Human
cuggagccugggaggucgagg

SEQ ID NO: 630860 - RNA, 19 nt, Human
cugugcuacagagugagau

SEQ ID NO: 630861 - RNA, 23 nt, Human
cuuuggucuuugcccauucuucu

SEQ ID NO: 630862 - RNA, 23 nt, Human
gagccugggaggucgaggcugca

SEQ ID NO: 630863 - RNA, 24 nt, Human
gccugggaggucgaggcugcagug

SEQ ID NO: 630864 - RNA, 23 nt, Human
gcuacagagugagauccugucuc

SEQ ID NO: 630865 - RNA, 21 nt, Human
gcugcagugcaagauugagaa

SEQ ID NO: 630866 - RNA, 21 nt, Human
ggagagucacuggagccuggg

SEQ ID NO: 630867 - RNA, 18 nt, Human
ggagccugggaggucgag

SEQ ID NO: 630868 - RNA, 22 nt, Human
ggaggcugaggugggagaguca

SEQ ID NO: 630869 - RNA, 18 nt, Human
ggcagcaguugggucuuu

SEQ ID NO: 630870 - RNA, 24 nt, Human
ggccagcacagcucaugccuguaa

SEQ ID NO: 630871 - RNA, 24 nt, Human
gguggugcgcgccuguacucccag

SEQ ID NO: 630872 - RNA, 20 nt, Human
gugcuacagagugagauccu

SEQ ID NO: 630873 - RNA, 24 nt, Human
guggugcgcgccuguacucccagc

SEQ ID NO: 630874 - RNA, 21 nt, Human
uacagagugagauccugucuc

SEQ ID NO: 630875 - RNA, 22 nt, Human
uaccaaagccacuggugacaaa

SEQ ID NO: 630876 - RNA, 18 nt, Human
uacuguauuuauauuugu

SEQ ID NO: 630877 - RNA, 20 nt, Human
uagaagaaagccuuguccau

SEQ ID NO: 630878 - RNA, 19 nt, Human
uaggaggcugaggugggag

SEQ ID NO: 630879 - RNA, 24 nt, Human
uaggaggcugaggugggagaguca

SEQ ID NO: 630880 - RNA, 19 nt, Human
uaugagucugaacuaagac

SEQ ID NO: 630881 - RNA, 23 nt, Human
ucacuggagccugggaggucgag

SEQ ID NO: 630882 - RNA, 24 nt, Human
ucagcuaggcgugguggugcgcgc

SEQ ID NO: 630883 - RNA, 22 nt, Human
ucaugccuguaaucccaggagu

SEQ ID NO: 630884 - RNA, 23 nt, Human
uccagccugugcuacagagugag

SEQ ID NO: 630885 - RNA, 24 nt, Human
uccagccugugcuacagagugaga

SEQ ID NO: 630886 - RNA, 18 nt, Human
ucuagaaaucauagaaaa

SEQ ID NO: 630887 - RNA, 19 nt, Human
ucuuuggucuuugcccauu

SEQ ID NO: 630888 - RNA, 24 nt, Human
ugagaauugcaggauugcacugca

SEQ ID NO: 630889 - RNA, 22 nt, Human
ugagcuaaaauuaagaaccuca

SEQ ID NO: 630890 - RNA, 24 nt, Human
ugagggcagcaguugggucuuugg

SEQ ID NO: 630891 - RNA, 18 nt, Human
ugaggugggagagucacu

SEQ ID NO: 630892 - RNA, 24 nt, Human
ugaggugggagagucacuggagcc

SEQ ID NO: 630893 - RNA, 20 nt, Human
ugcaaaagccaccgcaacca

SEQ ID NO: 630894 - RNA, 19 nt, Human
uggaaagaguucugaacag

SEQ ID NO: 630895 - RNA, 18 nt, Human
uggaaauaccaaagccac

SEQ ID NO: 630896 - RNA, 19 nt, Human
uggaaauaccaaagccacu

SEQ ID NO: 630897 - RNA, 24 nt, Human
ugguggugcgcgccuguacuccca

SEQ ID NO: 630898 - RNA, 22 nt, Human
uguagcaaaaccuaaaccugcu

SEQ ID NO: 630899 - RNA, 21 nt, Human
uguguacauguacaaauauug

SEQ ID NO: 630900 - RNA, 23 nt, Human
uguguacauguacaaauauugca

SEQ ID NO: 630901 - RNA, 18 nt, Human
uguguacguuuucuaauc

SEQ ID NO: 630902 - RNA, 21 nt, Human
uuacauaaccaguagaaagga

SEQ ID NO: 630903 - RNA, 20 nt, Human
uugagaauguagcaaaaccu

SEQ ID NO: 630904 - RNA, 21 nt, Human
uugauauacaacuuuagaaag

SEQ ID NO: 630905 - RNA, 19 nt, Human
uugcccauucuucucugca

SEQ ID NO: 630906 - RNA, 18 nt, Human
uuuacauaaccaguagaa

SEQ ID NO: 630907 - RNA, 22 nt, Human
uuuacaucaagaaaaaaaaacc

SEQ ID NO: 630908 - RNA, 18 nt, Human
uuuuuuuuuuuuuuuuug

SEQ ID NO: 630909 - RNA, 18 nt, Human
acagacugaacccccaug

SEQ ID NO: 630910 - RNA, 20 nt, Human
agaaagcccaaugaugaaga

SEQ ID NO: 630911 - RNA, 21 nt, Human
agcugcagggagggcgggagg

SEQ ID NO: 630912 - RNA, 20 nt, Human
aggcaaagccugcaugccag

SEQ ID NO: 630913 - RNA, 18 nt, Human
aggcucagagcugaacaa

SEQ ID NO: 630914 - RNA, 21 nt, Human
aggcucagagcugaacaaaaa

SEQ ID NO: 630915 - RNA, 22 nt, Human
aggcucagagcugaacaaaaaa

SEQ ID NO: 630916 - RNA, 21 nt, Human
auccacagacugaacccccau

SEQ ID NO: 630917 - RNA, 22 nt, Human
caaagccugcaugccagcgcug

SEQ ID NO: 630918 - RNA, 19 nt, Human
cacaacugcuucgccugca

SEQ ID NO: 630919 - RNA, 21 nt, Human
cacaacugcuucgccugcagu

SEQ ID NO: 630920 - RNA, 19 nt, Human
cacuucaacaaagcccugg

SEQ ID NO: 630921 - RNA, 22 nt, Human
cacuugaggcaggaccaguggu

SEQ ID NO: 630922 - RNA, 22 nt, Human
cacuugggcugaggcaaugagc

SEQ ID NO: 630923 - RNA, 21 nt, Human
cagcugggcaucuaagaagcc

SEQ ID NO: 630924 - RNA, 19 nt, Human
caggaccaguggucugggg

SEQ ID NO: 630925 - RNA, 18 nt, Human
cagugugcccacaccacu

SEQ ID NO: 630926 - RNA, 22 nt, Human
caucuaagaagccggaagcaag

SEQ ID NO: 630927 - RNA, 21 nt, Human
cccugggccacugagggcggg

SEQ ID NO: 630928 - RNA, 20 nt, Human
ccucucguggcagacuugcc

SEQ ID NO: 630929 - RNA, 21 nt, Human
ccugcagugcccucucguggc

SEQ ID NO: 630930 - RNA, 21 nt, Human
cgcagaaggagccauaccagg

SEQ ID NO: 630931 - RNA, 24 nt, Human
cgcagaaggagccauaccagguug

SEQ ID NO: 630932 - RNA, 18 nt, Human
cucauucugccugcugug

SEQ ID NO: 630933 - RNA, 19 nt, Human
cucuuucaaauuacaaagu

SEQ ID NO: 630934 - RNA, 20 nt, Human
cugcagugcccucucguggc

SEQ ID NO: 630935 - RNA, 24 nt, Human
cugccuguggcccucauucugccu

SEQ ID NO: 630936 - RNA, 18 nt, Human
gaaguggggaguuccacu

SEQ ID NO: 630937 - RNA, 23 nt, Human
gcacaacugcuucgccugcagug

SEQ ID NO: 630938 - RNA, 18 nt, Human
gcagugugcccacaccac

SEQ ID NO: 630939 - RNA, 22 nt, Human
gcccugggccacugagggcggg

SEQ ID NO: 630940 - RNA, 19 nt, Human
gccuguggcccucauucug

SEQ ID NO: 630941 - RNA, 23 nt, Human
ggagcugcagggagggcgggagg

SEQ ID NO: 630942 - RNA, 24 nt, Human
ggaggcugggauuagcuucccuuc

SEQ ID NO: 630943 - RNA, 19 nt, Human
ggaggcuuuccguacagca

SEQ ID NO: 630944 - RNA, 21 nt, Human
ggcugaggcaaugagcaagca

SEQ ID NO: 630945 - RNA, 24 nt, Human
uagcagccaggcaaagccugcaug

SEQ ID NO: 630946 - RNA, 21 nt, Human
uccguacagcacgcacagccg

SEQ ID NO: 630947 - RNA, 23 nt, Human
uccugccuguggcccucauucug

SEQ ID NO: 630948 - RNA, 21 nt, Human
ucucguggcagacuugccucu

SEQ ID NO: 630949 - RNA, 23 nt, Human
ugaaggauucagcucaggaggcu

SEQ ID NO: 630950 - RNA, 21 nt, Human
ugacuccuaagcagugugccc

SEQ ID NO: 630951 - RNA, 23 nt, Human
ugacuccuaagcagugugcccuu

SEQ ID NO: 630952 - RNA, 21 nt, Human
ugcuuuaauaauucucuuuca

SEQ ID NO: 630953 - RNA, 18 nt, Human
ugggccacugagggcggg

SEQ ID NO: 630954 - RNA, 18 nt, Human
ugugcauuuacauguaug

SEQ ID NO: 630955 - RNA, 19 nt, Human
uguggcccucauucugccu

SEQ ID NO: 630956 - RNA, 22 nt, Human
uuaccauccacagacugaaccc

SEQ ID NO: 630957 - RNA, 22 nt, Human
uuuugaggcucagagcugaaca

SEQ ID NO: 630958 - RNA, 21 nt, Human
uuuuuuuuuugugagggcugg

SEQ ID NO: 630959 - RNA, 20 nt, Human
uuuuuuuuuuugugagggcu

SEQ ID NO: 630960 - RNA, 20 nt, Human
uuuuuuuuuuuugugagggc

SEQ ID NO: 630961 - RNA, 20 nt, Human
uuuuuuuuuuuuuugugagg

SEQ ID NO: 630962 - RNA, 18 nt, Human
uuuuuuuuuuuuuuuuug

SEQ ID NO: 630963 - RNA, 19 nt, Human
uuuuuuuuuuuuuuuuugu

SEQ ID NO: 630964 - RNA, 26 nt, Human
uuuuuuuuuuuuuuuuuuugugaggg

SEQ ID NO: 630965 - RNA, 19 nt, Human
aacaggauggggugcuggg

SEQ ID NO: 630966 - RNA, 23 nt, Human
aacaggauggggugcugggaugg

SEQ ID NO: 630967 - RNA, 22 nt, Human
aacugaccuccccaggugccca

SEQ ID NO: 630968 - RNA, 21 nt, Human
aagaagaagccgcgcagcccc

SEQ ID NO: 630969 - RNA, 27 nt, Human
aagcagauuuguguccuuccugguaag

SEQ ID NO: 630970 - RNA, 18 nt, Human
aagccgcgcagccccuug

SEQ ID NO: 630971 - RNA, 18 nt, Human
aagccggccacggagcug

SEQ ID NO: 630972 - RNA, 21 nt, Human
aagugacagugacacagauaa

SEQ ID NO: 630973 - RNA, 23 nt, Human
acagugccagcaccccugcgagc

SEQ ID NO: 630974 - RNA, 20 nt, Human
acccccacgaagaagaagcc

SEQ ID NO: 630975 - RNA, 18 nt, Human
agacggccgagaagagga

SEQ ID NO: 630976 - RNA, 19 nt, Human
agccccuucccucccaagu

SEQ ID NO: 630977 - RNA, 25 nt, Human
agcgauggagacggccgagaagagg

SEQ ID NO: 630978 - RNA, 21 nt, Human
caaagcccuuacaggggcaga

SEQ ID NO: 630979 - RNA, 21 nt, Human
caacagccccuucccucccaa

SEQ ID NO: 630980 - RNA, 18 nt, Human
caccaggacccacagugc

SEQ ID NO: 630981 - RNA, 25 nt, Human
cacgaagaagaagccgcgcagcccc

SEQ ID NO: 630982 - RNA, 19 nt, Human
cacucugagaaggcagaau

SEQ ID NO: 630983 - RNA, 22 nt, Human
cacucugagaaggcagaaugga

SEQ ID NO: 630984 - RNA, 21 nt, Human
cagccccuugagccagguccu

SEQ ID NO: 630985 - RNA, 21 nt, Human
cagggcccgaagccgccagcc

SEQ ID NO: 630986 - RNA, 26 nt, Human
ccacgaagaagaagccgcgcagcccc

SEQ ID NO: 630987 - RNA, 20 nt, Human
ccacuugaaggaaaugaagc

SEQ ID NO: 630988 - RNA, 19 nt, Human
ccagcucugggaacaacag

SEQ ID NO: 630989 - RNA, 19 nt, Human
cccugagucuggccucauu

SEQ ID NO: 630990 - RNA, 21 nt, Human
ccgaagccgccagccggagcc

SEQ ID NO: 630991 - RNA, 27 nt, Human
ccgugacccugagucuggccggcgccg

SEQ ID NO: 630992 - RNA, 20 nt, Human
ccuuguaccaacagccccuu

SEQ ID NO: 630993 - RNA, 23 nt, Human
cgaagaagaagccgcgcagcccc

SEQ ID NO: 630994 - RNA, 23 nt, Human
cgagaagaggacccccacgaaga

SEQ ID NO: 630995 - RNA, 19 nt, Human
cggccgagagucacaggug

SEQ ID NO: 630996 - RNA, 26 nt, Human
cuauguugcccccuuccccaaagccc

SEQ ID NO: 630997 - RNA, 25 nt, Human
cuccccaggugcccaaccuggccga

SEQ ID NO: 630998 - RNA, 20 nt, Human
cucugaugccgggugauggc

SEQ ID NO: 630999 - RNA, 18 nt, Human
cugggauggggguuuaag

SEQ ID NO: 631000 - RNA, 23 nt, Human
gaagcacauuccccgugacccug

SEQ ID NO: 631001 - RNA, 19 nt, Human
gcccuuacaggggcagaag

SEQ ID NO: 631002 - RNA, 18 nt, Human
gcggcgcggaggccgagc

SEQ ID NO: 631003 - RNA, 22 nt, Human
ggaaauguaaaaaggugaaagc

SEQ ID NO: 631004 - RNA, 19 nt, Human
ggcaaagagcugaggggca

SEQ ID NO: 631005 - RNA, 25 nt, Human
ggccgguggucugggugcagcaagg

SEQ ID NO: 631006 - RNA, 21 nt, Human
ggcugcggcgccgggcgggcc

SEQ ID NO: 631007 - RNA, 24 nt, Human
gggaacaacaggauggggugcugg

SEQ ID NO: 631008 - RNA, 25 nt, Human
gggcagaagcacauuccccgugacc

SEQ ID NO: 631009 - RNA, 18 nt, Human
gggcaugggcacagguuu

SEQ ID NO: 631010 - RNA, 21 nt, Human
gggcaugggcacagguuuggg

SEQ ID NO: 631011 - RNA, 22 nt, Human
gggccaguguaugggcagaaaa

SEQ ID NO: 631012 - RNA, 25 nt, Human
gggccgagggcgagcgcggccgaga

SEQ ID NO: 631013 - RNA, 22 nt, Human
gggcugcggcgccgggcgggcc

SEQ ID NO: 631014 - RNA, 18 nt, Human
gggcuggaggggcauggg

SEQ ID NO: 631015 - RNA, 24 nt, Human
ggggcaugggcacagguuuggggg

SEQ ID NO: 631016 - RNA, 18 nt, Human
ggggcugcggcgccgggc

SEQ ID NO: 631017 - RNA, 21 nt, Human
ucagauggggagggggagacc

SEQ ID NO: 631018 - RNA, 22 nt, Human
uccagacgaggaagauggagaa

SEQ ID NO: 631019 - RNA, 20 nt, Human
uccccaggugcccaaccugg

SEQ ID NO: 631020 - RNA, 23 nt, Human
uccccaggugcccaaccuggccu

SEQ ID NO: 631021 - RNA, 20 nt, Human
ucuacuauguugcccccuuc

SEQ ID NO: 631022 - RNA, 19 nt, Human
ucugaacugaccuccccag

SEQ ID NO: 631023 - RNA, 22 nt, Human
ucuggccucauuugggaagucu

SEQ ID NO: 631024 - RNA, 23 nt, Human
ucuucugggguguauggaugccu

SEQ ID NO: 631025 - RNA, 24 nt, Human
ugaagggcagugagaggggcugga

SEQ ID NO: 631026 - RNA, 18 nt, Human
ugacccugagucuggccu

SEQ ID NO: 631027 - RNA, 20 nt, Human
ugagaggggcuggaguggga

SEQ ID NO: 631028 - RNA, 22 nt, Human
ugagauggguggggggccacgg

SEQ ID NO: 631029 - RNA, 19 nt, Human
ugcauguacaucacgugcg

SEQ ID NO: 631030 - RNA, 24 nt, Human
ugcgucaccaggacccacagugcc

SEQ ID NO: 631031 - RNA, 18 nt, Human
uggagagguaguagcugg

SEQ ID NO: 631032 - RNA, 22 nt, Human
uggagagguaguagcugguggg

SEQ ID NO: 631033 - RNA, 18 nt, Human
uggagugggagagaaggu

SEQ ID NO: 631034 - RNA, 21 nt, Human
uggagugggagagaaggucuc

SEQ ID NO: 631035 - RNA, 24 nt, Human
ugggaacaacaggauggggugcug

SEQ ID NO: 631036 - RNA, 25 nt, Human
ugggaacaacaggauggggugcugg

SEQ ID NO: 631037 - RNA, 24 nt, Human
ugggcagaaaagcagauuuguguc

SEQ ID NO: 631038 - RNA, 20 nt, Human
uggggcugcggcgccgggcg

SEQ ID NO: 631039 - RNA, 22 nt, Human
uggggggccacggcuaucuggc

SEQ ID NO: 631040 - RNA, 19 nt, Human
uggggugcugggauggggg

SEQ ID NO: 631041 - RNA, 23 nt, Human
ugggugcagcaagggcacucuga

SEQ ID NO: 631042 - RNA, 18 nt, Human
ugguggggucugugaggc

SEQ ID NO: 631043 - RNA, 22 nt, Human
uguauggaugccugugugugug

SEQ ID NO: 631044 - RNA, 18 nt, Human
uguguccuucagaaggga

SEQ ID NO: 631045 - RNA, 23 nt, Human
ugugugugagugagauggguggg

SEQ ID NO: 631046 - RNA, 26 nt, Human
ugugugugagugagaugggugggggg

SEQ ID NO: 631047 - RNA, 21 nt, Human
uucagaagggaaauguaaaaa

SEQ ID NO: 631048 - RNA, 19 nt, Human
uuccccaaagcccuuacag

SEQ ID NO: 631049 - RNA, 20 nt, Human
uucugggguguauggaugcc

SEQ ID NO: 631050 - RNA, 24 nt, Human
uuucugaacugaccuccccaggug

SEQ ID NO: 631051 - RNA, 27 nt, Human
uuuuuuuuuuuuuuuuuuuuuuugggg

SEQ ID NO: 631052 - RNA, 23 nt, Human
agaaauggcggcaccauuuuaua

SEQ ID NO: 631053 - RNA, 25 nt, Human
aguuaaaaaaugagaaauggcggca

SEQ ID NO: 631054 - RNA, 20 nt, Human
auccauuuugcuugagcggc

SEQ ID NO: 631055 - RNA, 21 nt, Human
augccacagccugggcccagc

SEQ ID NO: 631056 - RNA, 18 nt, Human
cacagccugggcccagcc

SEQ ID NO: 631057 - RNA, 20 nt, Human
cccagccgcuuggcggauuc

SEQ ID NO: 631058 - RNA, 18 nt, Human
ccuguguuuuucaaggag

SEQ ID NO: 631059 - RNA, 18 nt, Human
gaaggaaaaauuuaaaag

SEQ ID NO: 631060 - RNA, 22 nt, Human
guguuuuucaaggaguggaggg

SEQ ID NO: 631061 - RNA, 24 nt, Human
ucaaggaguggagggucaaauugu

SEQ ID NO: 631062 - RNA, 18 nt, Human
ucugcugugcuaguucug

SEQ ID NO: 631063 - RNA, 25 nt, Human
ugagaaauggcggcaccauuuuaua

SEQ ID NO: 631064 - RNA, 21 nt, Human
ugcagcgacuaaggaggaauc

SEQ ID NO: 631065 - RNA, 26 nt, Human
ugccuccggccaucaugccacagccu

SEQ ID NO: 631066 - RNA, 22 nt, Human
uggagggucaaauuguuaagaa

SEQ ID NO: 631067 - RNA, 22 nt, Human
uguaaaaaguuaaaaaaugaga

SEQ ID NO: 631068 - RNA, 22 nt, Human
ugucauagaauucugcaugcag

SEQ ID NO: 631069 - RNA, 24 nt, Human
uuaaaaguauuucugcugugcuag

SEQ ID NO: 631070 - RNA, 19 nt, Human
uucaaggaguggaggguca

SEQ ID NO: 631071 - RNA, 19 nt, Human
uucaaggaguggaggguca

SEQ ID NO: 631072 - RNA, 22 nt, Human
uucaaggaguggagggucaaau

SEQ ID NO: 631073 - RNA, 25 nt, Human
uucaaggaguggagggucaaauugu

SEQ ID NO: 631074 - RNA, 20 nt, Human
uuucaaggaguggaggguca

SEQ ID NO: 631075 - RNA, 24 nt, Human
uuucaaggaguggagggucaaauu

SEQ ID NO: 631076 - RNA, 18 nt, Human
uuugacauuuuuuggcgu

SEQ ID NO: 631077 - RNA, 27 nt, Human
uuuuuuuuuuugacauuuuuuggcguu

SEQ ID NO: 631078 - RNA, 18 nt, Human
uuuuuuuuuuuuuuuuug

SEQ ID NO: 631079 - RNA, 24 nt, Human
aagcaugacccaaaggugcagaaa

SEQ ID NO: 631080 - RNA, 20 nt, Human
aagggagacacugcuacaaa

SEQ ID NO: 631081 - RNA, 19 nt, Human
aaggugcagaaaugccugc

SEQ ID NO: 631082 - RNA, 21 nt, Human
accaagcaagacucgaagagc

SEQ ID NO: 631083 - RNA, 20 nt, Human
acugcagccaccgcggacgc

SEQ ID NO: 631084 - RNA, 23 nt, Human
acugcagccaccgcggacgcccg

SEQ ID NO: 631085 - RNA, 18 nt, Human
agacucgaagagcucgcg

SEQ ID NO: 631086 - RNA, 24 nt, Human
agcagggagaccgacgggacugca

SEQ ID NO: 631087 - RNA, 22 nt, Human
caaaaucaccccguggggccaa

SEQ ID NO: 631088 - RNA, 24 nt, Human
cacugcuacaaagcaugacccaaa

SEQ ID NO: 631089 - RNA, 19 nt, Human
caugacccaaaggugcaga

SEQ ID NO: 631090 - RNA, 18 nt, Human
ccaagcaagacucgaaga

SEQ ID NO: 631091 - RNA, 22 nt, Human
cgccggacagcagggagaccga

SEQ ID NO: 631092 - RNA, 22 nt, Human
cucaggcagguaagaaacccac

SEQ ID NO: 631093 - RNA, 23 nt, Human
gccggacagcagggagaccgacg

SEQ ID NO: 631094 - RNA, 21 nt, Human
uacaaagcaugacccaaaggu

SEQ ID NO: 631095 - RNA, 22 nt, Human
ucaggcagguaagaaacccaca

SEQ ID NO: 631096 - RNA, 19 nt, Human
uccaaccaagcaagacucg

SEQ ID NO: 631097 - RNA, 19 nt, Human
ucccugagguggcucaggc

SEQ ID NO: 631098 - RNA, 21 nt, Human
ucccugagguggcucaggcag

SEQ ID NO: 631099 - RNA, 18 nt, Human
uuuuuuuuuuuuuuuuug

SEQ ID NO: 631100 - RNA, 20 nt, Human
acauggaaucuccugaguua

SEQ ID NO: 631101 - RNA, 23 nt, Human
agacauggaaucuccugaguuau

SEQ ID NO: 631102 - RNA, 25 nt, Human
augacagcuauuuuuuaucagagcc

SEQ ID NO: 631103 - RNA, 18 nt, Human
caugaaaauauaaacugc

SEQ ID NO: 631104 - RNA, 25 nt, Human
ccaaacauagaagcgcagaaguaaa

SEQ ID NO: 631105 - RNA, 24 nt, Human
ccuggugcaacagucaagacauca

SEQ ID NO: 631106 - RNA, 19 nt, Human
gcgcgaagcuggggcuugg

SEQ ID NO: 631107 - RNA, 20 nt, Human
ggcaaaacaaucaugaaaau

SEQ ID NO: 631108 - RNA, 19 nt, Human
uacauagucuuaucucaua

SEQ ID NO: 631109 - RNA, 20 nt, Human
uagaauucauaaacucaaaa

SEQ ID NO: 631110 - RNA, 23 nt, Human
uaucagagcaauguuucccaaac

SEQ ID NO: 631111 - RNA, 29 nt, Human
ucaucuuucauuuuaugcauuuccucuca

SEQ ID NO: 631112 - RNA, 18 nt, Human
ugaggcaaaacaaucaug

SEQ ID NO: 631113 - RNA, 19 nt, Human
uguucuuguuuaucucuga

SEQ ID NO: 631114 - RNA, 24 nt, Human
agggggcggcggcggcggcagcgg

SEQ ID NO: 631115 - RNA, 19 nt, Human
cacccaaggcagcgggcgg

SEQ ID NO: 631116 - RNA, 23 nt, Human
cacccaaggcagcgggcggaagc

SEQ ID NO: 631117 - RNA, 19 nt, Human
cacccgggccccgggcagc

SEQ ID NO: 631118 - RNA, 19 nt, Human
cacccgggccccgggcagc

SEQ ID NO: 631119 - RNA, 21 nt, Human
ccacgggcaccacggccccgg

SEQ ID NO: 631120 - RNA, 24 nt, Human
ccauagagccgcggcagcgccgag

SEQ ID NO: 631121 - RNA, 26 nt, Human
ccccgcgcccccggaguaggcaccca

SEQ ID NO: 631122 - RNA, 22 nt, Human
ccgggccccgggcagcugaggg

SEQ ID NO: 631123 - RNA, 20 nt, Human
cgagaccgugcgcgcgaguu

SEQ ID NO: 631124 - RNA, 18 nt, Human
cgcgaguuuuaggagguc

SEQ ID NO: 631125 - RNA, 24 nt, Human
cgcgcccccggaguaggcacccaa

SEQ ID NO: 631126 - RNA, 25 nt, Human
cucaaggucuccuacaggcuucaag

SEQ ID NO: 631127 - RNA, 19 nt, Human
cuucaaucaaggugccagc

SEQ ID NO: 631128 - RNA, 19 nt, Human
cuuccaagcucacucacgu

SEQ ID NO: 631129 - RNA, 19 nt, Human
cuucgucggugggcagacg

SEQ ID NO: 631130 - RNA, 21 nt, Human
gaagcccuggacacccaugcu

SEQ ID NO: 631131 - RNA, 23 nt, Human
gagggggcggcggcggcggcagc

SEQ ID NO: 631132 - RNA, 20 nt, Human
gagggggcggcggcggcggg

SEQ ID NO: 631133 - RNA, 18 nt, Human
gccccgggacagcgcuuc

SEQ ID NO: 631134 - RNA, 21 nt, Human
gcggcagcggagggugcagcc

SEQ ID NO: 631135 - RNA, 24 nt, Human
gcggcggcagcggagggugcagcc

SEQ ID NO: 631136 - RNA, 18 nt, Human
gcggcggcggcagcggag

SEQ ID NO: 631137 - RNA, 22 nt, Human
gcugcagucaucucaaggcuug

SEQ ID NO: 631138 - RNA, 22 nt, Human
gcuuagcuggguccucuggcuc

SEQ ID NO: 631139 - RNA, 18 nt, Human
ggcagcugagggggcggc

SEQ ID NO: 631140 - RNA, 25 nt, Human
ggcggcggcagcggagggugcagcc

SEQ ID NO: 631141 - RNA, 23 nt, Human
gggcugcagucaucucaaggcuu

SEQ ID NO: 631142 - RNA, 22 nt, Human
ggggugauggugccgagucggc

SEQ ID NO: 631143 - RNA, 22 nt, Human
gugcaagugcugcugcugcugc

SEQ ID NO: 631144 - RNA, 19 nt, Human
gugcugcugcugcugcugg

SEQ ID NO: 631145 - RNA, 18 nt, Human
uaguaucuguaggcaugg

SEQ ID NO: 631146 - RNA, 22 nt, Human
uaguaucuguaggcauggcuua

SEQ ID NO: 631147 - RNA, 18 nt, Human
uccacgggcaccacggcc

SEQ ID NO: 631148 - RNA, 22 nt, Human
uccucuggcucaaggucuccua

SEQ ID NO: 631149 - RNA, 20 nt, Human
ucggcggcagcuggcggugc

SEQ ID NO: 631150 - RNA, 23 nt, Human
ucucaaggcuugccuggggaagg

SEQ ID NO: 631151 - RNA, 18 nt, Human
ugcagcccgggcugcgcu

SEQ ID NO: 631152 - RNA, 19 nt, Human
ugcugcugcugcuggcgcg

SEQ ID NO: 631153 - RNA, 20 nt, Human
uggaagcccuggacacccau

SEQ ID NO: 631154 - RNA, 19 nt, Human
uggcuuagcuggguccucu

SEQ ID NO: 631155 - RNA, 18 nt, Human
uuagcuggguccucuggc

SEQ ID NO: 631156 - RNA, 23 nt, Human
uugcagaggcacggagccccugg

SEQ ID NO: 631157 - RNA, 19 nt, Human
uuuuuucuuuuuuuuuuua

SEQ ID NO: 631158 - RNA, 23 nt, Human
uuuuuucuuuuuuuuuuuagugg

SEQ ID NO: 631159 - RNA, 23 nt, Human
uuuuuuuuuuuuuuuuucuuuuu

SEQ ID NO: 631160 - RNA, 21 nt, Human
aaaaaaaacacaacccggggg

SEQ ID NO: 631161 - RNA, 18 nt, Human
aaaaaaacacaacccggg

SEQ ID NO: 631162 - RNA, 21 nt, Human
aaaaaaacacaacccggggaa

SEQ ID NO: 631163 - RNA, 22 nt, Human
aaaaacaagaaaaagaaaaaaa

SEQ ID NO: 631164 - RNA, 18 nt, Human
aaacaggauuaggaagcu

SEQ ID NO: 631165 - RNA, 18 nt, Human
aaacucaggacuuaacag

SEQ ID NO: 631166 - RNA, 21 nt, Human
aaagaagaggaaggccaaaga

SEQ ID NO: 631167 - RNA, 21 nt, Human
aaagacagaaaaacacacaaa

SEQ ID NO: 631168 - RNA, 24 nt, Human
aaagacuuaguucaguuccuuggc

SEQ ID NO: 631169 - RNA, 20 nt, Human
aacauggugaaacccugucu

SEQ ID NO: 631170 - RNA, 21 nt, Human
aacauggugaaacccugucuc

SEQ ID NO: 631171 - RNA, 20 nt, Human
aagaagcaaguaacuuaaca

SEQ ID NO: 631172 - RNA, 26 nt, Human
aagaagcaaguaacuuaacaaggaca

SEQ ID NO: 631173 - RNA, 22 nt, Human
aagccacagcccaaagaagucu

SEQ ID NO: 631174 - RNA, 20 nt, Human
aagccgggacugggcaguca

SEQ ID NO: 631175 - RNA, 20 nt, Human
aaggaagaaggaacggagag

SEQ ID NO: 631176 - RNA, 23 nt, Human
aauaaagacagaaaaacacacaa

SEQ ID NO: 631177 - RNA, 24 nt, Human
aaucgcuugaacccaggaggcaga

SEQ ID NO: 631178 - RNA, 23 nt, Human
acaacaaaagagaccuaaauggg

SEQ ID NO: 631179 - RNA, 21 nt, Human
acacaacccggggaauuuaua

SEQ ID NO: 631180 - RNA, 24 nt, Human
acacuccagcccgggugacagagc

SEQ ID NO: 631181 - RNA, 28 nt, Human
acacugaaggucuuucaaguuucaucca

SEQ ID NO: 631182 - RNA, 21 nt, Human
accacucauauuuaaaaggug

SEQ ID NO: 631183 - RNA, 23 nt, Human
acccagagcaaacaaggugaccc

SEQ ID NO: 631184 - RNA, 24 nt, Human
acccaggaggcagagguugcagug

SEQ ID NO: 631185 - RNA, 24 nt, Human
acccugucucuacuaaaaauacaa

SEQ ID NO: 631186 - RNA, 19 nt, Human
acugcucugccuucccaac

SEQ ID NO: 631187 - RNA, 23 nt, Human
agaaaaaaaaacacaacccgggg

SEQ ID NO: 631188 - RNA, 21 nt, Human
agaaaaagaaaaaaaaauaca

SEQ ID NO: 631189 - RNA, 22 nt, Human
agaaaaagaaaaaaaaauacag

SEQ ID NO: 631190 - RNA, 20 nt, Human
agacacccaagggcagagag

SEQ ID NO: 631191 - RNA, 22 nt, Human
agacccagagcaaacaagguga

SEQ ID NO: 631192 - RNA, 21 nt, Human
agagagagcuggccacaagua

SEQ ID NO: 631193 - RNA, 23 nt, Human
agagagcuggccacaaguaaacc

SEQ ID NO: 631194 - RNA, 22 nt, Human
agagggaaggggccagggaagg

SEQ ID NO: 631195 - RNA, 18 nt, Human
agagguugcagugagcug

SEQ ID NO: 631196 - RNA, 22 nt, Human
agagguugcagugagcugagau

SEQ ID NO: 631197 - RNA, 23 nt, Human
agagguugcagugagcugagauc

SEQ ID NO: 631198 - RNA, 24 nt, Human
agagguugcagugagcugagauca

SEQ ID NO: 631199 - RNA, 20 nt, Human
agagguugcagugagcuggc

SEQ ID NO: 631200 - RNA, 24 nt, Human
agcacuuugggaggccaagguggg

SEQ ID NO: 631201 - RNA, 18 nt, Human
agcagcacacugcaagac

SEQ ID NO: 631202 - RNA, 20 nt, Human
agcaggcagccugcagccuu

SEQ ID NO: 631203 - RNA, 21 nt, Human
agccacagcccaaagaagucu

SEQ ID NO: 631204 - RNA, 21 nt, Human
agccagacccagagcaaacaa

SEQ ID NO: 631205 - RNA, 24 nt, Human
agcccgggugacagagcgagacuc

SEQ ID NO: 631206 - RNA, 22 nt, Human
agccuggccaacauggugaaac

SEQ ID NO: 631207 - RNA, 24 nt, Human
agccuggccaacauggugaaaccc

SEQ ID NO: 631208 - RNA, 21 nt, Human
aggaagagagcccagggcugg

SEQ ID NO: 631209 - RNA, 18 nt, Human
aggaaggggucugggggg

SEQ ID NO: 631210 - RNA, 18 nt, Human
aggaaggggucugggggg

SEQ ID NO: 631211 - RNA, 20 nt, Human
aggaaggggucuggggggcg

SEQ ID NO: 631212 - RNA, 23 nt, Human
aggagcugcagaguugagggagg

SEQ ID NO: 631213 - RNA, 24 nt, Human
aggcacggugguucaugccuauaa

SEQ ID NO: 631214 - RNA, 20 nt, Human
aggcagagguugcagugagc

SEQ ID NO: 631215 - RNA, 24 nt, Human
aggcagagguugcagugagcugag

SEQ ID NO: 631216 - RNA, 23 nt, Human
aggcaggauaaucgcuugaaccc

SEQ ID NO: 631217 - RNA, 18 nt, Human
aggccaagguggguggau

SEQ ID NO: 631218 - RNA, 20 nt, Human
aggcugaggcaggauaaucg

SEQ ID NO: 631219 - RNA, 24 nt, Human
aggcugaggcaggauaaucgcuug

SEQ ID NO: 631220 - RNA, 20 nt, Human
agggaaggggccagggaagg

SEQ ID NO: 631221 - RNA, 23 nt, Human
agggacuaccaugggcuuggaag

SEQ ID NO: 631222 - RNA, 24 nt, Human
agggauacuuggaugacccuaaag

SEQ ID NO: 631223 - RNA, 22 nt, Human
agggggcaggauguggcaggag

SEQ ID NO: 631224 - RNA, 19 nt, Human
agguuuggagaagaugguc

SEQ ID NO: 631225 - RNA, 21 nt, Human
agucagagucuagggcagcac

SEQ ID NO: 631226 - RNA, 26 nt, Human
agucagcuacuauuucuagcuguucu

SEQ ID NO: 631227 - RNA, 24 nt, Human
aguggcgcaugccuguaaucccag

SEQ ID NO: 631228 - RNA, 29 nt, Human
auacagaaaauaaagacagaagggacccc

SEQ ID NO: 631229 - RNA, 22 nt, Human
auagaaaaccaguggaccuccg

SEQ ID NO: 631230 - RNA, 26 nt, Human
aucaaauguaugaaggaagaaggaac

SEQ ID NO: 631231 - RNA, 22 nt, Human
aucccagcacuuugggaggcca

SEQ ID NO: 631232 - RNA, 19 nt, Human
augccuauaaucccagcac

SEQ ID NO: 631233 - RNA, 19 nt, Human
auggugcugcucagcccag

SEQ ID NO: 631234 - RNA, 24 nt, Human
caaaaacaagaaaaagaaaaaaaa

SEQ ID NO: 631235 - RNA, 24 nt, Human
caacauggugaaacccugucucua

SEQ ID NO: 631236 - RNA, 26 nt, Human
caacgcccggacagacccggggccga

SEQ ID NO: 631237 - RNA, 21 nt, Human
caagguggguggauaaccuga

SEQ ID NO: 631238 - RNA, 24 nt, Human
caagguggguggauaaccugaggu

SEQ ID NO: 631239 - RNA, 19 nt, Human
caaguaacuuaacaaggac

SEQ ID NO: 631240 - RNA, 20 nt, Human
caccacgcuggcccgccagc

SEQ ID NO: 631241 - RNA, 22 nt, Human
cacuccagcccgggugacagag

SEQ ID NO: 631242 - RNA, 23 nt, Human
cacuccagcccgggugacagagc

SEQ ID NO: 631243 - RNA, 24 nt, Human
cacuccagcccgggugacagagcg

SEQ ID NO: 631244 - RNA, 28 nt, Human
cagaaaauaaagacagaaaaacacacaa

SEQ ID NO: 631245 - RNA, 26 nt, Human
cagaacuccccggagcagguggcccu

SEQ ID NO: 631246 - RNA, 24 nt, Human
cagagcgagacucuugucucaaaa

SEQ ID NO: 631247 - RNA, 24 nt, Human
cagcacuuugggaggccaaggugg

SEQ ID NO: 631248 - RNA, 21 nt, Human
cagccacaugaagcaagggca

SEQ ID NO: 631249 - RNA, 22 nt, Human
cagccagacccagagcaaacaa

SEQ ID NO: 631250 - RNA, 23 nt, Human
cagccagacccagagcaaacaag

SEQ ID NO: 631251 - RNA, 27 nt, Human
cagccccaaauauugcagagccaaaag

SEQ ID NO: 631252 - RNA, 20 nt, Human
cagcccgggugacagagcga

SEQ ID NO: 631253 - RNA, 24 nt, Human
cagcuacucaggaggcugaggcag

SEQ ID NO: 631254 - RNA, 19 nt, Human
caggaggcuuacaggucac

SEQ ID NO: 631255 - RNA, 19 nt, Human
cagggucugaaggacacag

SEQ ID NO: 631256 - RNA, 18 nt, Human
cagguuccaucucagugc

SEQ ID NO: 631257 - RNA, 21 nt, Human
caguuucuagggagugaagga

SEQ ID NO: 631258 - RNA, 22 nt, Human
ccaagaaagauguguauucucc

SEQ ID NO: 631259 - RNA, 21 nt, Human
ccagaacugucucuaucccca

SEQ ID NO: 631260 - RNA, 24 nt, Human
ccagaccagccuggccaacauggu

SEQ ID NO: 631261 - RNA, 19 nt, Human
ccagagcuacagcugugga

SEQ ID NO: 631262 - RNA, 20 nt, Human
ccagagcuacagcuguggag

SEQ ID NO: 631263 - RNA, 22 nt, Human
ccagagugauggcugagcaagg

SEQ ID NO: 631264 - RNA, 21 nt, Human
cccaaagaagucuauuuccuc

SEQ ID NO: 631265 - RNA, 25 nt, Human
cccaaagaagucuauuuccucccac

SEQ ID NO: 631266 - RNA, 27 nt, Human
cccaacagcgauucccucuccccauaa

SEQ ID NO: 631267 - RNA, 21 nt, Human
cccaggccccaaucccgcaac

SEQ ID NO: 631268 - RNA, 23 nt, Human
cccagggcugggauggugcugcu

SEQ ID NO: 631269 - RNA, 21 nt, Human
ccccaaucccgcaacgcccgg

SEQ ID NO: 631270 - RNA, 22 nt, Human
ccccaaucccgcaacgcccgga

SEQ ID NO: 631271 - RNA, 24 nt, Human
ccccagggcugggauggugcugcu

SEQ ID NO: 631272 - RNA, 19 nt, Human
cccgagucagagucuaggg

SEQ ID NO: 631273 - RNA, 20 nt, Human
cccgcaacgcccggacagac

SEQ ID NO: 631274 - RNA, 25 nt, Human
cccgcaacgcccggacagacccggg

SEQ ID NO: 631275 - RNA, 26 nt, Human
cccgcaacgcccggacagacccgggg

SEQ ID NO: 631276 - RNA, 22 nt, Human
cccggggccgcccgccgucgcu

SEQ ID NO: 631277 - RNA, 22 nt, Human
cccgggugacagagcgagacuc

SEQ ID NO: 631278 - RNA, 25 nt, Human
cccuguuguggccccuguuccuaaa

SEQ ID NO: 631279 - RNA, 21 nt, Human
ccgagaaggaaggggucuggg

SEQ ID NO: 631280 - RNA, 21 nt, Human
ccgcagucgcugcuggucgcc

SEQ ID NO: 631281 - RNA, 20 nt, Human
ccuauaaucccagcacuuug

SEQ ID NO: 631282 - RNA, 22 nt, Human
ccuauaaucccagcacuuuggg

SEQ ID NO: 631283 - RNA, 24 nt, Human
ccugcagccuuucuugccugagag

SEQ ID NO: 631284 - RNA, 22 nt, Human
ccuggccaacauggugaaaccc

SEQ ID NO: 631285 - RNA, 24 nt, Human
ccuggccaacauggugaaacccug

SEQ ID NO: 631286 - RNA, 22 nt, Human
ccuggucuucuggucugccugc

SEQ ID NO: 631287 - RNA, 19 nt, Human
ccuguaaucccagcuacuc

SEQ ID NO: 631288 - RNA, 21 nt, Human
ccuguaaucccagcuacucag

SEQ ID NO: 631289 - RNA, 22 nt, Human
ccuguaaucccagcuacucagg

SEQ ID NO: 631290 - RNA, 18 nt, Human
ccugugugaaaacaggau

SEQ ID NO: 631291 - RNA, 21 nt, Human
cgagaaggaaggggucugggg

SEQ ID NO: 631292 - RNA, 22 nt, Human
cgagaaggaaggggucuggggg

SEQ ID NO: 631293 - RNA, 18 nt, Human
cgagaggagcugcagagu

SEQ ID NO: 631294 - RNA, 23 nt, Human
cgagucagagucuagggcagcac

SEQ ID NO: 631295 - RNA, 22 nt, Human
cgccgaccuccgcggggcgcgc

SEQ ID NO: 631296 - RNA, 20 nt, Human
cggggcuggguguaggcugu

SEQ ID NO: 631297 - RNA, 23 nt, Human
cguuacacuccagcccgggugac

SEQ ID NO: 631298 - RNA, 24 nt, Human
cguuacacuccagcccgggugaca

SEQ ID NO: 631299 - RNA, 21 nt, Human
cuacagccccaaauauugcag

SEQ ID NO: 631300 - RNA, 22 nt, Human
cucacgcuggcuccugcucucc

SEQ ID NO: 631301 - RNA, 19 nt, Human
cucaggacuuaacagaaag

SEQ ID NO: 631302 - RNA, 20 nt, Human
cucaggacuuaacagaaagg

SEQ ID NO: 631303 - RNA, 20 nt, Human
cuccucuauagcucaccaga

SEQ ID NO: 631304 - RNA, 19 nt, Human
cuccuugccugggcuccag

SEQ ID NO: 631305 - RNA, 21 nt, Human
cucggggcuggguguaggcug

SEQ ID NO: 631306 - RNA, 23 nt, Human
cugaagagcucaggguuugaagg

SEQ ID NO: 631307 - RNA, 24 nt, Human
cuggccaacauggugaaacccugu

SEQ ID NO: 631308 - RNA, 20 nt, Human
cuucucugagacaaagggaa

SEQ ID NO: 631309 - RNA, 26 nt, Human
gaaaauaaagacagaaaaacacacaa

SEQ ID NO: 631310 - RNA, 19 nt, Human
gaaacccugucucuacuaa

SEQ ID NO: 631311 - RNA, 21 nt, Human
gaaggaagaaggaacggagag

SEQ ID NO: 631312 - RNA, 21 nt, Human
gaagguuuggagaagaugguc

SEQ ID NO: 631313 - RNA, 21 nt, Human
gaaugugaagggggcaggaug

SEQ ID NO: 631314 - RNA, 23 nt, Human
gagaaagaagaggaaggccaaag

SEQ ID NO: 631315 - RNA, 18 nt, Human
gagaaagaagaggaaggg

SEQ ID NO: 631316 - RNA, 19 nt, Human
gagaaggaaggggucuggg

SEQ ID NO: 631317 - RNA, 21 nt, Human
gagcaaggaagucccagcagc

SEQ ID NO: 631318 - RNA, 18 nt, Human
gagcuacagccccaaaua

SEQ ID NO: 631319 - RNA, 18 nt, Human
gaggagcugcagaguuga

SEQ ID NO: 631320 - RNA, 21 nt, Human
gaggcagagguugcagugagc

SEQ ID NO: 631321 - RNA, 24 nt, Human
gauaaccugagguuaggaguucca

SEQ ID NO: 631322 - RNA, 22 nt, Human
gauggcuagaguuuaggagcca

SEQ ID NO: 631323 - RNA, 20 nt, Human
gcacuuugggaggccaaggu

SEQ ID NO: 631324 - RNA, 19 nt, Human
gcagagagagcuggccaca

SEQ ID NO: 631325 - RNA, 20 nt, Human
gcagagggaaagagaaagaa

SEQ ID NO: 631326 - RNA, 24 nt, Human
gccaacauggugaaacccugucuc

SEQ ID NO: 631327 - RNA, 22 nt, Human
gccaggcacggugguucaugcc

SEQ ID NO: 631328 - RNA, 21 nt, Human
gccagguuccaucucagugcu

SEQ ID NO: 631329 - RNA, 18 nt, Human
gcccggacagacccgggg

SEQ ID NO: 631330 - RNA, 22 nt, Human
gcccggacagacccggggccga

SEQ ID NO: 631331 - RNA, 23 nt, Human
gcuccugcucuccuugccugggc

SEQ ID NO: 631332 - RNA, 20 nt, Human
gcuggggaaaggagcuccuc

SEQ ID NO: 631333 - RNA, 22 nt, Human
gcuucucugagacaaagggaac

SEQ ID NO: 631334 - RNA, 18 nt, Human
ggaaagagaaagaagagg

SEQ ID NO: 631335 - RNA, 21 nt, Human
ggaaagagaaagaagaggaag

SEQ ID NO: 631336 - RNA, 23 nt, Human
ggaguuccagaccagccuggccg

SEQ ID NO: 631337 - RNA, 21 nt, Human
ggcagucagcaggccccaggg

SEQ ID NO: 631338 - RNA, 23 nt, Human
ggcauaguggcgcaugccuguaa

SEQ ID NO: 631339 - RNA, 19 nt, Human
ggcuggguguaggcugugu

SEQ ID NO: 631340 - RNA, 19 nt, Human
gggaaagagaaagaagagg

SEQ ID NO: 631341 - RNA, 24 nt, Human
gggaaagagaaagaagaggaaggg

SEQ ID NO: 631342 - RNA, 22 nt, Human
gggcagagaggguugcaacugc

SEQ ID NO: 631343 - RNA, 19 nt, Human
gggcagcacugggucugaa

SEQ ID NO: 631344 - RNA, 20 nt, Human
ggguguaggcugugugguca

SEQ ID NO: 631345 - RNA, 23 nt, Human
ggguuccugcccuguuguggccc

SEQ ID NO: 631346 - RNA, 23 nt, Human
ggugguucaugccuauaauccca

SEQ ID NO: 631347 - RNA, 24 nt, Human
ggugguucaugccuauaaucccag

SEQ ID NO: 631348 - RNA, 24 nt, Human
gguuccugcccuguuguggccccu

SEQ ID NO: 631349 - RNA, 26 nt, Human
guaguccccuucacucugguccuuga

SEQ ID NO: 631350 - RNA, 26 nt, Human
gucaaauguaugaaggaagaaggaac

SEQ ID NO: 631351 - RNA, 21 nt, Human
gucacugagagggaaggggcc

SEQ ID NO: 631352 - RNA, 20 nt, Human
gucaggauggcagagggaaa

SEQ ID NO: 631353 - RNA, 25 nt, Human
guccucaggagaugaccagucccuu

SEQ ID NO: 631354 - RNA, 21 nt, Human
gugaaacccugucucuacuaa

SEQ ID NO: 631355 - RNA, 23 nt, Human
gugguucaugccuauaaucccag

SEQ ID NO: 631356 - RNA, 24 nt, Human
guuacacuccagcccgggugacag

SEQ ID NO: 631357 - RNA, 21 nt, Human
guuccugcccuguuguggccc

SEQ ID NO: 631358 - RNA, 24 nt, Human
guugcagugagcugagaucaugcc

SEQ ID NO: 631359 - RNA, 20 nt, Human
uaaaaggugaagggcuggga

SEQ ID NO: 631360 - RNA, 21 nt, Human
uaaagacagaaaaacacacaa

SEQ ID NO: 631361 - RNA, 23 nt, Human
uaaagacagaaaaacacacaaau

SEQ ID NO: 631362 - RNA, 25 nt, Human
uaaagugcacagaacuccccggagc

SEQ ID NO: 631363 - RNA, 21 nt, Human
uaacaacaacaaaagagaccu

SEQ ID NO: 631364 - RNA, 19 nt, Human
uaacuuaacaaggacaggu

SEQ ID NO: 631365 - RNA, 22 nt, Human
uacacuccagcccgggugacag

SEQ ID NO: 631366 - RNA, 20 nt, Human
uacagcuguggagcaaacac

SEQ ID NO: 631367 - RNA, 20 nt, Human
uaccgugaugcacacucggg

SEQ ID NO: 631368 - RNA, 21 nt, Human
uacuuggaugacccuaaaggc

SEQ ID NO: 631369 - RNA, 24 nt, Human
uagcaggcagccugcagccuuucu

SEQ ID NO: 631370 - RNA, 25 nt, Human
uagcaggcagccugcagccuuucuu

SEQ ID NO: 631371 - RNA, 24 nt, Human
uaguggcgcaugccuguaauccca

SEQ ID NO: 631372 - RNA, 23 nt, Human
uauagaaaaccaguggaccuccg

SEQ ID NO: 631373 - RNA, 24 nt, Human
uauuuuaaauuacaucuuuggcca

SEQ ID NO: 631374 - RNA, 22 nt, Human
ucaaaaacaagaaaaagaaaaa

SEQ ID NO: 631375 - RNA, 22 nt, Human
ucagacacccaagggcagagag

SEQ ID NO: 631376 - RNA, 27 nt, Human
ucagagucuagggcagcacagggagaa

SEQ ID NO: 631377 - RNA, 23 nt, Human
ucagagucuagggcagcacuggg

SEQ ID NO: 631378 - RNA, 23 nt, Human
ucagcuacuauuucuagcuguuc

SEQ ID NO: 631379 - RNA, 24 nt, Human
ucaggacuuaacagaaagacuuag

SEQ ID NO: 631380 - RNA, 19 nt, Human
ucaggauggcagagggaaa

SEQ ID NO: 631381 - RNA, 20 nt, Human
ucagugcugcaguccugagg

SEQ ID NO: 631382 - RNA, 23 nt, Human
ucaugccuauaaucccagcacuu

SEQ ID NO: 631383 - RNA, 18 nt, Human
ucauuuacagguccucag

SEQ ID NO: 631384 - RNA, 24 nt, Human
uccagcccgggugacagagcgaga

SEQ ID NO: 631385 - RNA, 21 nt, Human
ucccaacagcgauucccucuc

SEQ ID NO: 631386 - RNA, 25 nt, Human
ucccaggccccaaucccgcaacgcc

SEQ ID NO: 631387 - RNA, 23 nt, Human
ucccugaagagagcccucagcuc

SEQ ID NO: 631388 - RNA, 21 nt, Human
uccucagccccucuggguucc

SEQ ID NO: 631389 - RNA, 19 nt, Human
uccugugugaaaacaggau

SEQ ID NO: 631390 - RNA, 22 nt, Human
ucgcugcaggugaagccgggac

SEQ ID NO: 631391 - RNA, 23 nt, Human
ucucacgcuggcuccugcucucc

SEQ ID NO: 631392 - RNA, 22 nt, Human
ucuccaaggaaagucucggucc

SEQ ID NO: 631393 - RNA, 22 nt, Human
ucuccugcuucucugagacaaa

SEQ ID NO: 631394 - RNA, 22 nt, Human
ucucuacuaaaaauacaaaaaa

SEQ ID NO: 631395 - RNA, 25 nt, Human
ucucuacuaaaaauacaaaaaaauu

SEQ ID NO: 631396 - RNA, 22 nt, Human
ucucuauccccaugccucuccu

SEQ ID NO: 631397 - RNA, 24 nt, Human
ucugccugcucagacacccaaggg

SEQ ID NO: 631398 - RNA, 19 nt, Human
ugaacacacucuggcauca

SEQ ID NO: 631399 - RNA, 20 nt, Human
ugacucgugaaugugaaggg

SEQ ID NO: 631400 - RNA, 21 nt, Human
ugagacaaagggaacaaacca

SEQ ID NO: 631401 - RNA, 19 nt, Human
ugagagcagggauacuugg

SEQ ID NO: 631402 - RNA, 21 nt, Human
ugaggagaaguccaaagagua

SEQ ID NO: 631403 - RNA, 22 nt, Human
ugaggagcaccacgcuggcccg

SEQ ID NO: 631404 - RNA, 24 nt, Human
ugaggcaggauaaucgcuugaacc

SEQ ID NO: 631405 - RNA, 25 nt, Human
ugaggcaggauaaucgcuugaaccc

SEQ ID NO: 631406 - RNA, 20 nt, Human
ugaggccugcuggggaaagg

SEQ ID NO: 631407 - RNA, 19 nt, Human
ugcaacugcucugccuucc

SEQ ID NO: 631408 - RNA, 20 nt, Human
ugcacggagcuggcccaugc

SEQ ID NO: 631409 - RNA, 21 nt, Human
ugcaguccugaggagcaccac

SEQ ID NO: 631410 - RNA, 23 nt, Human
ugcaguuucuagggagugaagga

SEQ ID NO: 631411 - RNA, 18 nt, Human
ugccgaggaagagagccc

SEQ ID NO: 631412 - RNA, 23 nt, Human
ugccuauaaucccagcacuuugg

SEQ ID NO: 631413 - RNA, 23 nt, Human
ugccucacaugauguggccccac

SEQ ID NO: 631414 - RNA, 24 nt, Human
ugccuguaaucccagcuacucagg

SEQ ID NO: 631415 - RNA, 18 nt, Human
ugcucagcccagucacgg

SEQ ID NO: 631416 - RNA, 23 nt, Human
uggaccuccgguucugagagcag

SEQ ID NO: 631417 - RNA, 24 nt, Human
uggauaaccugagguuaggaguuc

SEQ ID NO: 631418 - RNA, 19 nt, Human
uggcaggagggaaagagua

SEQ ID NO: 631419 - RNA, 22 nt, Human
uggcaggagggaaagaguacau

SEQ ID NO: 631420 - RNA, 33 nt, Human
uggcaucacagcagugaacugcaagcagccaac

SEQ ID NO: 631421 - RNA, 24 nt, Human
uggccaacauggugaaacccuguc

SEQ ID NO: 631422 - RNA, 24 nt, Human
uggccaggcacggugguucaugcc

SEQ ID NO: 631423 - RNA, 21 nt, Human
uggcgcaugccuguaauccca

SEQ ID NO: 631424 - RNA, 22 nt, Human
uggcgcaugccuguaaucccag

SEQ ID NO: 631425 - RNA, 22 nt, Human
ugggaggccaagguggguggau

SEQ ID NO: 631426 - RNA, 22 nt, Human
ugggcagucagcaggccccagg

SEQ ID NO: 631427 - RNA, 21 nt, Human
ugggcugacagugugggucug

SEQ ID NO: 631428 - RNA, 19 nt, Human
uggguguaggcuguguggu

SEQ ID NO: 631429 - RNA, 21 nt, Human
ugguucaugccuauaauccca

SEQ ID NO: 631430 - RNA, 22 nt, Human
ugguucaugccuauaaucccag

SEQ ID NO: 631431 - RNA, 24 nt, Human
ugguucaugccuauaaucccagca

SEQ ID NO: 631432 - RNA, 22 nt, Human
ugguuuuguuuucccuuuuaau

SEQ ID NO: 631433 - RNA, 20 nt, Human
ugucucuauccccaugccuc

SEQ ID NO: 631434 - RNA, 21 nt, Human
ugugcagauguggcccucacc

SEQ ID NO: 631435 - RNA, 22 nt, Human
uuacacuccagcccgggugaca

SEQ ID NO: 631436 - RNA, 20 nt, Human
uuaguucaguuccuuggcuu

SEQ ID NO: 631437 - RNA, 25 nt, Human
uuaguucaguuccuuggcuuugugc

SEQ ID NO: 631438 - RNA, 23 nt, Human
uucaugccuauaaucccagcacu

SEQ ID NO: 631439 - RNA, 21 nt, Human
uuccugcccuguuguggcccc

SEQ ID NO: 631440 - RNA, 25 nt, Human
uucucggcugccgggggccgagcgu

SEQ ID NO: 631441 - RNA, 18 nt, Human
uugcagugagcugagauc

SEQ ID NO: 631442 - RNA, 19 nt, Human
uugcagugagcugagauca

SEQ ID NO: 631443 - RNA, 20 nt, Human
uugcagugagcugagaucau

SEQ ID NO: 631444 - RNA, 21 nt, Human
uugcagugagcugagaucaug

SEQ ID NO: 631445 - RNA, 23 nt, Human
uugcagugagcugagaucaugcc

SEQ ID NO: 631446 - RNA, 21 nt, Human
uugccugggcuccagccacau

SEQ ID NO: 631447 - RNA, 18 nt, Human
aaaagacacaaaaccagg

SEQ ID NO: 631448 - RNA, 20 nt, Human
aaaagacacaaaaccaggac

SEQ ID NO: 631449 - RNA, 21 nt, Human
aaccaggaccuggugucaacc

SEQ ID NO: 631450 - RNA, 22 nt, Human
aagcauucagaaugauucaugc

SEQ ID NO: 631451 - RNA, 21 nt, Human
acaguccugucuccccugccc

SEQ ID NO: 631452 - RNA, 24 nt, Human
agcaauaggggagcacuucaaaga

SEQ ID NO: 631453 - RNA, 24 nt, Human
agcagaccuuggaaauguaacccc

SEQ ID NO: 631454 - RNA, 28 nt, Human
agcagaccuuggaaauguaaccccgauu

SEQ ID NO: 631455 - RNA, 21 nt, Human
agcugggcaauauagugagac

SEQ ID NO: 631456 - RNA, 23 nt, Human
agcugggcaauauagugagaccc

SEQ ID NO: 631457 - RNA, 21 nt, Human
aggagcaguggcucaugccug

SEQ ID NO: 631458 - RNA, 19 nt, Human
agguucuggaaauuggcuu

SEQ ID NO: 631459 - RNA, 25 nt, Human
aguccugucuccccugcccgaggcu

SEQ ID NO: 631460 - RNA, 18 nt, Human
agucucaccaugcccagu

SEQ ID NO: 631461 - RNA, 24 nt, Human
aguuuguuuuacaauuuucuacau

SEQ ID NO: 631462 - RNA, 23 nt, Human
auccuccccaagacccaguccua

SEQ ID NO: 631463 - RNA, 21 nt, Human
caaaaccaggaccugguguca

SEQ ID NO: 631464 - RNA, 24 nt, Human
caaaaucagacaucuaggcgcuaa

SEQ ID NO: 631465 - RNA, 22 nt, Human
caaagcgugagaacccuccagg

SEQ ID NO: 631466 - RNA, 21 nt, Human
caguguggcucuuugccucuu

SEQ ID NO: 631467 - RNA, 22 nt, Human
caguguggcucuuugccucuug

SEQ ID NO: 631468 - RNA, 27 nt, Human
cauucagaaugauucaugcugcaucac

SEQ ID NO: 631469 - RNA, 24 nt, Human
ccaaaaucagacaucuaaucaacg

SEQ ID NO: 631470 - RNA, 22 nt, Human
ccacaacacucugggaagcuga

SEQ ID NO: 631471 - RNA, 22 nt, Human
ccaggaccuggugucaaccaga

SEQ ID NO: 631472 - RNA, 27 nt, Human
cccacaacacucugggaagcugaaaga

SEQ ID NO: 631473 - RNA, 24 nt, Human
cccgaggcugccggucgccuuccu

SEQ ID NO: 631474 - RNA, 21 nt, Human
cccugagccucagaaaagggc

SEQ ID NO: 631475 - RNA, 21 nt, Human
ccugcggcuacuccagacuca

SEQ ID NO: 631476 - RNA, 21 nt, Human
gaaaaagcggaaaaacuuaaa

SEQ ID NO: 631477 - RNA, 21 nt, Human
gacaaaagacacaaaaccagg

SEQ ID NO: 631478 - RNA, 23 nt, Human
gaccuuggaaauguaaccccgau

SEQ ID NO: 631479 - RNA, 20 nt, Human
gagugagcugggcaauauag

SEQ ID NO: 631480 - RNA, 19 nt, Human
gcacugauguuucaaauau

SEQ ID NO: 631481 - RNA, 18 nt, Human
gcauucucccaccccugc

SEQ ID NO: 631482 - RNA, 22 nt, Human
gcucuuugccucuuguccuugc

SEQ ID NO: 631483 - RNA, 24 nt, Human
gcuuuggaugaugccaagggcagu

SEQ ID NO: 631484 - RNA, 23 nt, Human
gggcuggcauucucccaccccug

SEQ ID NO: 631485 - RNA, 18 nt, Human
ggucaggagcaguggcuc

SEQ ID NO: 631486 - RNA, 19 nt, Human
guucagaaugucagucuuc

SEQ ID NO: 631487 - RNA, 25 nt, Human
uaaaaagaugaacaaauuacauuag

SEQ ID NO: 631488 - RNA, 21 nt, Human
uaaauagacacugaaaaggua

SEQ ID NO: 631489 - RNA, 26 nt, Human
uaaauagacacugaaaagguaucuau

SEQ ID NO: 631490 - RNA, 20 nt, Human
uaaauuguagauauaauaca

SEQ ID NO: 631491 - RNA, 19 nt, Human
uaagguucaaggcacugau

SEQ ID NO: 631492 - RNA, 20 nt, Human
ucagacaucuaggcgcuaau

SEQ ID NO: 631493 - RNA, 23 nt, Human
ucccaccccugcggcuacucccc

SEQ ID NO: 631494 - RNA, 21 nt, Human
uccccaccucuuuagguccac

SEQ ID NO: 631495 - RNA, 22 nt, Human
uccccaccucuuuagguccaca

SEQ ID NO: 631496 - RNA, 24 nt, Human
ucuaaugaaguuuguuuuacaauu

SEQ ID NO: 631497 - RNA, 21 nt, Human
ucucuagcuccauccacuucc

SEQ ID NO: 631498 - RNA, 20 nt, Human
ucugaaaguaacacggccau

SEQ ID NO: 631499 - RNA, 20 nt, Human
ucuucaacuguggugcccgu

SEQ ID NO: 631500 - RNA, 22 nt, Human
ucuuuauaaaagcuuaucacuu

SEQ ID NO: 631501 - RNA, 18 nt, Human
ugaaaaagcggaaaaacu

SEQ ID NO: 631502 - RNA, 21 nt, Human
ugacaaaagacacaaaaccag

SEQ ID NO: 631503 - RNA, 23 nt, Human
ugacaaaagacacaaaaccagga

SEQ ID NO: 631504 - RNA, 19 nt, Human
ugacauacaguccugucuc

SEQ ID NO: 631505 - RNA, 23 nt, Human
ugacucugggcuggcauucuccc

SEQ ID NO: 631506 - RNA, 25 nt, Human
ugagcugggcaauauagugagaccc

SEQ ID NO: 631507 - RNA, 25 nt, Human
ugauucaugcugcaucaccuccccc

SEQ ID NO: 631508 - RNA, 25 nt, Human
ugcaauuggucaaaauuuuuaaaau

SEQ ID NO: 631509 - RNA, 21 nt, Human
ugccaagggcaguguggcucc

SEQ ID NO: 631510 - RNA, 18 nt, Human
uggccaaaaaaacuccug

SEQ ID NO: 631511 - RNA, 23 nt, Human
uggugucaaccagacaaugcuuu

SEQ ID NO: 631512 - RNA, 25 nt, Human
uuaaaauauauuuucugucaaaauc

SEQ ID NO: 631513 - RNA, 19 nt, Human
uuccugaaaaagcggaaaa

SEQ ID NO: 631514 - RNA, 23 nt, Human
uugaaaaauaucuauacccuuua

SEQ ID NO: 631515 - RNA, 23 nt, Human
uuuccuaugaucuuuauaaaagc

SEQ ID NO: 631516 - RNA, 20 nt, Human
uuugccucuuguccuugcuu

SEQ ID NO: 631517 - RNA, 19 nt, Human
uuugggaggcuaugguggg

SEQ ID NO: 631518 - RNA, 22 nt, Human
uuuuuuugcuuuuuaaguuuua

SEQ ID NO: 631519 - RNA, 20 nt, Human
uuuuuuuuuuuuuugcuuuu

SEQ ID NO: 631520 - RNA, 18 nt, Human
uuuuuuuuuuuuuuuuug

SEQ ID NO: 631521 - RNA, 25 nt, Human
uuuuuuuuuuuuuuuuuugcuuuuu

SEQ ID NO: 631522 - RNA, 26 nt, Human
aaaaaaucagaaaacaaacauuuggu

SEQ ID NO: 631523 - RNA, 26 nt, Human
aacaggaggcgagccuauagcucaaa

SEQ ID NO: 631524 - RNA, 23 nt, Human
aacuggccccuaggcucaaccug

SEQ ID NO: 631525 - RNA, 19 nt, Human
aagcagggcuccggcucuc

SEQ ID NO: 631526 - RNA, 21 nt, Human
aaguuaccauaaggcacauag

SEQ ID NO: 631527 - RNA, 20 nt, Human
acaaugggccgucaggggcc

SEQ ID NO: 631528 - RNA, 18 nt, Human
acagucaaggcagcuuug

SEQ ID NO: 631529 - RNA, 18 nt, Human
agaccugaaagcauggca

SEQ ID NO: 631530 - RNA, 22 nt, Human
agagaaagggccaaccucugcc

SEQ ID NO: 631531 - RNA, 21 nt, Human
agagagagaccgaggccugga

SEQ ID NO: 631532 - RNA, 23 nt, Human
agcaagcagggcuccggcucucu

SEQ ID NO: 631533 - RNA, 23 nt, Human
agcccaggcugagucucaaagac

SEQ ID NO: 631534 - RNA, 27 nt, Human
agcuauuaaaaaaaaaucagaaaacaa

SEQ ID NO: 631535 - RNA, 18 nt, Human
aggaagaagggagcagag

SEQ ID NO: 631536 - RNA, 20 nt, Human
aggaagaagggagcagagaa

SEQ ID NO: 631537 - RNA, 20 nt, Human
aggccacagaagaccugaaa

SEQ ID NO: 631538 - RNA, 22 nt, Human
agggggcugagaugacaggggu

SEQ ID NO: 631539 - RNA, 22 nt, Human
augcagcagggcuuuuuccuuu

SEQ ID NO: 631540 - RNA, 22 nt, Human
auuuccccuuuuacucagcaaa

SEQ ID NO: 631541 - RNA, 25 nt, Human
caaauuauagaaaaaugauuuuucc

SEQ ID NO: 631542 - RNA, 22 nt, Human
cacauacaaaggcugauggaau

SEQ ID NO: 631543 - RNA, 23 nt, Human
cagcagggcuuuuuccuuuggcc

SEQ ID NO: 631544 - RNA, 20 nt, Human
ccaacuggccccuaggcuca

SEQ ID NO: 631545 - RNA, 18 nt, Human
ccacagucaaggcagcuu

SEQ ID NO: 631546 - RNA, 23 nt, Human
ccaguaggccacagaagaccuga

SEQ ID NO: 631547 - RNA, 18 nt, Human
cccaacuggccccuaggc

SEQ ID NO: 631548 - RNA, 22 nt, Human
cccacauauuccgccuuccaga

SEQ ID NO: 631549 - RNA, 23 nt, Human
cccagcaggaagaagggagcaga

SEQ ID NO: 631550 - RNA, 21 nt, Human
cccccaacuggccccuaggcu

SEQ ID NO: 631551 - RNA, 23 nt, Human
cccccacaccaggcccagaaaga

SEQ ID NO: 631552 - RNA, 26 nt, Human
ccgggguagacgcgcugguuaggggc

SEQ ID NO: 631553 - RNA, 21 nt, Human
ccuacacauuaaagcccaggc

SEQ ID NO: 631554 - RNA, 19 nt, Human
cggcucucuggguggccag

SEQ ID NO: 631555 - RNA, 22 nt, Human
cuaaaacacagccagaaaagag

SEQ ID NO: 631556 - RNA, 18 nt, Human
cuacacauuaaagcccag

SEQ ID NO: 631557 - RNA, 22 nt, Human
cucaaagaccugugaccccucu

SEQ ID NO: 631558 - RNA, 24 nt, Human
cucaaaucccuuucucuaaaacac

SEQ ID NO: 631559 - RNA, 23 nt, Human
cucaucuugaguugcucauuaag

SEQ ID NO: 631560 - RNA, 24 nt, Human
cucccaaaucguaccgggcccuau

SEQ ID NO: 631561 - RNA, 19 nt, Human
cucuggguggccagaaggc

SEQ ID NO: 631562 - RNA, 19 nt, Human
cuggccccuaggcucaacc

SEQ ID NO: 631563 - RNA, 25 nt, Human
gaagaagggagcagagaauacagca

SEQ ID NO: 631564 - RNA, 20 nt, Human
gacacuggccaaacagugca

SEQ ID NO: 631565 - RNA, 23 nt, Human
gcagauggaaggacuccccuaaa

SEQ ID NO: 631566 - RNA, 18 nt, Human
gcucaaccuggcuggaca

SEQ ID NO: 631567 - RNA, 25 nt, Human
ggaaggacuccccuaaaaccuaaga

SEQ ID NO: 631568 - RNA, 20 nt, Human
ggccaaacagugcacuaggu

SEQ ID NO: 631569 - RNA, 20 nt, Human
ggccuggggcgggaagcagc

SEQ ID NO: 631570 - RNA, 23 nt, Human
ggcggggagguugggcccaggga

SEQ ID NO: 631571 - RNA, 18 nt, Human
ggcugagucucaaagacc

SEQ ID NO: 631572 - RNA, 22 nt, Human
gggaagcagcccccgggggacg

SEQ ID NO: 631573 - RNA, 23 nt, Human
gggccggguucccaagccugggg

SEQ ID NO: 631574 - RNA, 20 nt, Human
gggcugagaugacaggggug

SEQ ID NO: 631575 - RNA, 24 nt, Human
gggcuuuuuccuuuggcccuggcu

SEQ ID NO: 631576 - RNA, 20 nt, Human
ggggaagggcuaugacaaug

SEQ ID NO: 631577 - RNA, 19 nt, Human
gguagacgcgcugguuagg

SEQ ID NO: 631578 - RNA, 24 nt, Human
uaaaacacagccagaaaagaggcc

SEQ ID NO: 631579 - RNA, 25 nt, Human
uaaaacacagccagaaaagaggcug

SEQ ID NO: 631580 - RNA, 22 nt, Human
uacagaaaugucacucccaaau

SEQ ID NO: 631581 - RNA, 22 nt, Human
uaccgggcccuauuauggcuaa

SEQ ID NO: 631582 - RNA, 19 nt, Human
uagcccccacaccaggccc

SEQ ID NO: 631583 - RNA, 26 nt, Human
uauggcuaaaacccagcaggaagaag

SEQ ID NO: 631584 - RNA, 19 nt, Human
ucaaagaccugugaccccu

SEQ ID NO: 631585 - RNA, 19 nt, Human
ucacugcgcguugccgggg

SEQ ID NO: 631586 - RNA, 19 nt, Human
uccagaaggcauuagagaa

SEQ ID NO: 631587 - RNA, 27 nt, Human
ucucuggguggccagaaggccgacuuc

SEQ ID NO: 631588 - RNA, 28 nt, Human
ucucuggguggccagaaggccgacuuuc

SEQ ID NO: 631589 - RNA, 22 nt, Human
ucucuggguggccagaaggcuu

SEQ ID NO: 631590 - RNA, 23 nt, Human
ugaaaagccaacucccuaggaca

SEQ ID NO: 631591 - RNA, 22 nt, Human
ugaaaagccaacucccuagggg

SEQ ID NO: 631592 - RNA, 20 nt, Human
ugaaggaggcuccauccaca

SEQ ID NO: 631593 - RNA, 24 nt, Human
ugagguagcccccacaccaggccc

SEQ ID NO: 631594 - RNA, 23 nt, Human
uggaaaaagagcaguuuucucau

SEQ ID NO: 631595 - RNA, 22 nt, Human
uggccccuaggcucaaccuggc

SEQ ID NO: 631596 - RNA, 26 nt, Human
uggcugaaaagccaacucccuaggac

SEQ ID NO: 631597 - RNA, 23 nt, Human
uggggcuggugggggggaggggu

SEQ ID NO: 631598 - RNA, 18 nt, Human
ugucucaagucaaaacaa

SEQ ID NO: 631599 - RNA, 24 nt, Human
uuggcccuggcugaaaagccaacu

SEQ ID NO: 631600 - RNA, 19 nt, Human
uuuccuacacauuaaagcc

SEQ ID NO: 631601 - RNA, 21 nt, Human
uuugagaaaacuguuaaaaug

SEQ ID NO: 631602 - RNA, 22 nt, Human
aaaaaggcuccaaaauaaaaca

SEQ ID NO: 631603 - RNA, 26 nt, Human
aaaauaaaacaaacuugucugcucaa

SEQ ID NO: 631604 - RNA, 20 nt, Human
aaaaugaacaccaaugacuu

SEQ ID NO: 631605 - RNA, 21 nt, Human
aacacggugaaacugcgccuc

SEQ ID NO: 631606 - RNA, 18 nt, Human
aacagaaaacgcacaagc

SEQ ID NO: 631607 - RNA, 22 nt, Human
aagaaaaacauuagaaagagaa

SEQ ID NO: 631608 - RNA, 27 nt, Human
aagaggccagaggugauggugggcacc

SEQ ID NO: 631609 - RNA, 24 nt, Human
aagcaggagaauggcaugaaccca

SEQ ID NO: 631610 - RNA, 27 nt, Human
aagcaggagaauggcaugaacccagga

SEQ ID NO: 631611 - RNA, 26 nt, Human
aagccagagccaaaaaggcuccaaaa

SEQ ID NO: 631612 - RNA, 18 nt, Human
aagcugccucacccaugg

SEQ ID NO: 631613 - RNA, 23 nt, Human
aaguuguacuagccaauguuugg

SEQ ID NO: 631614 - RNA, 19 nt, Human
aaucaaguuguacuagcca

SEQ ID NO: 631615 - RNA, 23 nt, Human
acaagagugacucggucucaaaa

SEQ ID NO: 631616 - RNA, 19 nt, Human
acacggugaaacugcgccu

SEQ ID NO: 631617 - RNA, 18 nt, Human
acagugcugcucugaaca

SEQ ID NO: 631618 - RNA, 25 nt, Human
acuccagccugggugacaagaguga

SEQ ID NO: 631619 - RNA, 18 nt, Human
acugcacuccagccuggg

SEQ ID NO: 631620 - RNA, 25 nt, Human
acugcacuccagccugggugacaag

SEQ ID NO: 631621 - RNA, 18 nt, Human
acuuuugcuucuauggga

SEQ ID NO: 631622 - RNA, 24 nt, Human
agccaaaaaggcuccaaaauaaaa

SEQ ID NO: 631623 - RNA, 23 nt, Human
agccaaaagcaagacucauggca

SEQ ID NO: 631624 - RNA, 23 nt, Human
agccugggugacaagagugacuc

SEQ ID NO: 631625 - RNA, 24 nt, Human
aggagggcagaucacgaggucagg

SEQ ID NO: 631626 - RNA, 18 nt, Human
aggcaggcagguccagag

SEQ ID NO: 631627 - RNA, 18 nt, Human
aggcaggcagguccagag

SEQ ID NO: 631628 - RNA, 22 nt, Human
aggcaggcagguccagaguuca

SEQ ID NO: 631629 - RNA, 21 nt, Human
aggcugaggagggcagaucac

SEQ ID NO: 631630 - RNA, 21 nt, Human
agguggagcuugcagugagcc

SEQ ID NO: 631631 - RNA, 24 nt, Human
agguggagcuugcagugagccgag

SEQ ID NO: 631632 - RNA, 21 nt, Human
auaaaacaaacuugucugcuc

SEQ ID NO: 631633 - RNA, 24 nt, Human
aucgcgccacugcacuccagccug

SEQ ID NO: 631634 - RNA, 21 nt, Human
caaaggacuccagaaacacag

SEQ ID NO: 631635 - RNA, 21 nt, Human
caaccacuucucggaagagcc

SEQ ID NO: 631636 - RNA, 22 nt, Human
caaccacuucucggaagagccc

SEQ ID NO: 631637 - RNA, 26 nt, Human
caagccggacaggacccuaagaccaa

SEQ ID NO: 631638 - RNA, 24 nt, Human
caaguuguacuagccaauguuugg

SEQ ID NO: 631639 - RNA, 24 nt, Human
caauguuuaaaagccagagccaaa

SEQ ID NO: 631640 - RNA, 22 nt, Human
cacacaugcacccagcuagggu

SEQ ID NO: 631641 - RNA, 23 nt, Human
cacgccuauaaucccagcaccug

SEQ ID NO: 631642 - RNA, 23 nt, Human
cacuccagccugggugacaagag

SEQ ID NO: 631643 - RNA, 24 nt, Human
cacuccagccugggugacaagagu

SEQ ID NO: 631644 - RNA, 25 nt, Human
cacuccagccugggugacaagagug

SEQ ID NO: 631645 - RNA, 19 nt, Human
cacugcacuccagccuggg

SEQ ID NO: 631646 - RNA, 19 nt, Human
cacugcacuccagccuggg

SEQ ID NO: 631647 - RNA, 22 nt, Human
cacugcacuccagccuggguga

SEQ ID NO: 631648 - RNA, 23 nt, Human
cacugcacuccagccugggugac

SEQ ID NO: 631649 - RNA, 24 nt, Human
cacugcacuccagccugggugaca

SEQ ID NO: 631650 - RNA, 25 nt, Human
cacugcacuccagccugggugacaa

SEQ ID NO: 631651 - RNA, 20 nt, Human
cagcucugcaccuacccucu

SEQ ID NO: 631652 - RNA, 29 nt, Human
caggagguggagcuugcagugacaacggu

SEQ ID NO: 631653 - RNA, 23 nt, Human
caggcagguccagaguucaugca

SEQ ID NO: 631654 - RNA, 19 nt, Human
caucagagaaccagugggg

SEQ ID NO: 631655 - RNA, 22 nt, Human
cauggcaccccucccugcagga

SEQ ID NO: 631656 - RNA, 18 nt, Human
cauggcucuccagcucug

SEQ ID NO: 631657 - RNA, 22 nt, Human
caugguggcgggcgccuguagu

SEQ ID NO: 631658 - RNA, 24 nt, Human
ccaaaggacuccagaaacacagca

SEQ ID NO: 631659 - RNA, 19 nt, Human
ccaagccggacaggacccu

SEQ ID NO: 631660 - RNA, 20 nt, Human
ccacugcacuccagccuggg

SEQ ID NO: 631661 - RNA, 20 nt, Human
ccacugcacuccagccuggg

SEQ ID NO: 631662 - RNA, 21 nt, Human
ccacugcacuccagccugggu

SEQ ID NO: 631663 - RNA, 21 nt, Human
ccacugcacuccagccugggu

SEQ ID NO: 631664 - RNA, 23 nt, Human
ccacugcacuccagccuggguga

SEQ ID NO: 631665 - RNA, 24 nt, Human
ccacugcacuccagccugggugac

SEQ ID NO: 631666 - RNA, 19 nt, Human
ccacuucucggaagagccc

SEQ ID NO: 631667 - RNA, 22 nt, Human
ccagagccaaaaaggcuccaaa

SEQ ID NO: 631668 - RNA, 22 nt, Human
ccagcucugcaccuacccucuc

SEQ ID NO: 631669 - RNA, 20 nt, Human
ccauggcucuccagcucugc

SEQ ID NO: 631670 - RNA, 20 nt, Human
ccccaagccggacaggaccc

SEQ ID NO: 631671 - RNA, 18 nt, Human
cccugcaggaaaggggug

SEQ ID NO: 631672 - RNA, 20 nt, Human
ccucacucccuuucacuuug

SEQ ID NO: 631673 - RNA, 21 nt, Human
ccucacucccuuucacuuugu

SEQ ID NO: 631674 - RNA, 21 nt, Human
ccucaggaagaggcagcagcu

SEQ ID NO: 631675 - RNA, 23 nt, Human
ccucaggaagaggcagcagcuuc

SEQ ID NO: 631676 - RNA, 19 nt, Human
ccuguagucccagcuacuc

SEQ ID NO: 631677 - RNA, 21 nt, Human
ccuguagucccagcuacucag

SEQ ID NO: 631678 - RNA, 22 nt, Human
ccuguagucccagcuacucagg

SEQ ID NO: 631679 - RNA, 23 nt, Human
ccuguaugagccaaaagcaagac

SEQ ID NO: 631680 - RNA, 20 nt, Human
ccuuucaucagccccaagcc

SEQ ID NO: 631681 - RNA, 24 nt, Human
cgagaccaucuuggcuaacacggu

SEQ ID NO: 631682 - RNA, 19 nt, Human
cgaggaaccggcaaagggg

SEQ ID NO: 631683 - RNA, 26 nt, Human
cgccacugcacuccagccugggugac

SEQ ID NO: 631684 - RNA, 20 nt, Human
cgccgccucacucccuuuca

SEQ ID NO: 631685 - RNA, 23 nt, Human
cgccuauaaucccagcaccuggg

SEQ ID NO: 631686 - RNA, 24 nt, Human
cgccuguagucccagcuacucagg

SEQ ID NO: 631687 - RNA, 21 nt, Human
cgggcgcggacagcuccuuuc

SEQ ID NO: 631688 - RNA, 20 nt, Human
cggucucaaaaaaaaaaaaa

SEQ ID NO: 631689 - RNA, 21 nt, Human
cuaagauggcuguuguagcuc

SEQ ID NO: 631690 - RNA, 18 nt, Human
cucaaaaaaaaaaaaaaa

SEQ ID NO: 631691 - RNA, 19 nt, Human
cucacgccuauaaucccag

SEQ ID NO: 631692 - RNA, 23 nt, Human
cucacgccuauaaucccagcacc

SEQ ID NO: 631693 - RNA, 19 nt, Human
cuccuguaugagccaaaag

SEQ ID NO: 631694 - RNA, 18 nt, Human
cuccuuucaucagcccca

SEQ ID NO: 631695 - RNA, 24 nt, Human
cucggucucaaaaaaaaaaaaaaa

SEQ ID NO: 631696 - RNA, 21 nt, Human
cugcucugaggcuugcaggga

SEQ ID NO: 631697 - RNA, 21 nt, Human
cugggacacauguuuccaaag

SEQ ID NO: 631698 - RNA, 19 nt, Human
cuugcagugagccgagauc

SEQ ID NO: 631699 - RNA, 21 nt, Human
cuugcagugagccgagaucgc

SEQ ID NO: 631700 - RNA, 22 nt, Human
cuuggcuaacacggugaaacug

SEQ ID NO: 631701 - RNA, 22 nt, Human
gaaaaugaacaccaaugacuug

SEQ ID NO: 631702 - RNA, 22 nt, Human
gaaagcacgagggauguaugag

SEQ ID NO: 631703 - RNA, 20 nt, Human
gacucauggcaccccucccu

SEQ ID NO: 631704 - RNA, 23 nt, Human
gagaucgcgccacugcacuccag

SEQ ID NO: 631705 - RNA, 18 nt, Human
gagcuugcagugagccga

SEQ ID NO: 631706 - RNA, 23 nt, Human
gagcuugcagugagccgagaucg

SEQ ID NO: 631707 - RNA, 19 nt, Human
gagugguggauggugaagg

SEQ ID NO: 631708 - RNA, 25 nt, Human
gauaaagaaaaacauuagaaagaga

SEQ ID NO: 631709 - RNA, 21 nt, Human
gcacaagcgcagaaaagaaac

SEQ ID NO: 631710 - RNA, 19 nt, Human
gcagaaaagaaacuccugg

SEQ ID NO: 631711 - RNA, 19 nt, Human
gccacugcacuccagccug

SEQ ID NO: 631712 - RNA, 24 nt, Human
gccacugcacuccagccuggguga

SEQ ID NO: 631713 - RNA, 22 nt, Human
gcccacgguugcgccaggcacc

SEQ ID NO: 631714 - RNA, 20 nt, Human
gccgagaucgcgccacugca

SEQ ID NO: 631715 - RNA, 21 nt, Human
gcgcgcgguggcucacgccua

SEQ ID NO: 631716 - RNA, 24 nt, Human
gcuaacacggugaaacugcgccuc

SEQ ID NO: 631717 - RNA, 24 nt, Human
gcugcucugaggcuugcagggagu

SEQ ID NO: 631718 - RNA, 21 nt, Human
ggaaaaaucugcuccugcuaa

SEQ ID NO: 631719 - RNA, 24 nt, Human
ggagcuugcagugagccgagaucg

SEQ ID NO: 631720 - RNA, 22 nt, Human
ggcaugguggcgggcgccugua

SEQ ID NO: 631721 - RNA, 19 nt, Human
ggcccccgcucaacagccc

SEQ ID NO: 631722 - RNA, 24 nt, Human
gggcagaucacgaggucaggagau

SEQ ID NO: 631723 - RNA, 24 nt, Human
gggugugggggugugugugugugu

SEQ ID NO: 631724 - RNA, 24 nt, Human
gguggcgggcgccuguagucccag

SEQ ID NO: 631725 - RNA, 24 nt, Human
gguggcucacgccuauaaucccag

SEQ ID NO: 631726 - RNA, 21 nt, Human
ggugugugugugugugugugu

SEQ ID NO: 631727 - RNA, 22 nt, Human
gugggggugugugugugugugu

SEQ ID NO: 631728 - RNA, 30 nt, Human
gugugggggugugugugugugugugugugg

SEQ ID NO: 631729 - RNA, 20 nt, Human
gugugugugugugugugugu

SEQ ID NO: 631730 - RNA, 19 nt, Human
uaaaacaggcaaaucccau

SEQ ID NO: 631731 - RNA, 22 nt, Human
uaacacggugaaacugcgccuc

SEQ ID NO: 631732 - RNA, 24 nt, Human
uaacacggugaaacugcgccucua

SEQ ID NO: 631733 - RNA, 18 nt, Human
ucacgaggucaggagauc

SEQ ID NO: 631734 - RNA, 24 nt, Human
ucacgaggucaggagaucgagacc

SEQ ID NO: 631735 - RNA, 20 nt, Human
uccacgccgccucacucccu

SEQ ID NO: 631736 - RNA, 18 nt, Human
uccagaguucaugcagga

SEQ ID NO: 631737 - RNA, 19 nt, Human
uccagccugggugacaaga

SEQ ID NO: 631738 - RNA, 20 nt, Human
ucccugcaggaaaggggugg

SEQ ID NO: 631739 - RNA, 23 nt, Human
ucgcgccacugcacuccagccug

SEQ ID NO: 631740 - RNA, 21 nt, Human
ucggucucaaaaaaaaaaaaa

SEQ ID NO: 631741 - RNA, 24 nt, Human
ucggucucaaaaaaaaaaaaaaaa

SEQ ID NO: 631742 - RNA, 19 nt, Human
ucuauaaaaauacaaaaaa

SEQ ID NO: 631743 - RNA, 21 nt, Human
ugaagagaaccuacaguaaua

SEQ ID NO: 631744 - RNA, 23 nt, Human
ugaagcaggagaauggcaugaac

SEQ ID NO: 631745 - RNA, 24 nt, Human
ugaagcaggagaauggcaugaacc

SEQ ID NO: 631746 - RNA, 18 nt, Human
ugaauccucacugucacu

SEQ ID NO: 631747 - RNA, 18 nt, Human
ugacaagagugacucggu

SEQ ID NO: 631748 - RNA, 22 nt, Human
ugagccgagaucgcgccacugc

SEQ ID NO: 631749 - RNA, 24 nt, Human
ugaggagggcagaucacgagguca

SEQ ID NO: 631750 - RNA, 24 nt, Human
ugaggcuugcagggaguagacagu

SEQ ID NO: 631751 - RNA, 19 nt, Human
ugcaggaaagggguggaau

SEQ ID NO: 631752 - RNA, 19 nt, Human
ugccucaggaagaggcagc

SEQ ID NO: 631753 - RNA, 21 nt, Human
ugccucaggaagaggcagcag

SEQ ID NO: 631754 - RNA, 18 nt, Human
ugcugggcaccucgggga

SEQ ID NO: 631755 - RNA, 21 nt, Human
uggaagaggccagaggugaug

SEQ ID NO: 631756 - RNA, 19 nt, Human
uggaauggagccccuggca

SEQ ID NO: 631757 - RNA, 20 nt, Human
uggagccccuggcaaagggg

SEQ ID NO: 631758 - RNA, 23 nt, Human
uggagccccuggcaaagggggcu

SEQ ID NO: 631759 - RNA, 18 nt, Human
uggcuaacacggugaaac

SEQ ID NO: 631760 - RNA, 21 nt, Human
uggcucacgccuauaauccca

SEQ ID NO: 631761 - RNA, 24 nt, Human
uggcucacgccuauaaucccagca

SEQ ID NO: 631762 - RNA, 24 nt, Human
ugggaggcugaggagggcagauca

SEQ ID NO: 631763 - RNA, 25 nt, Human
ugggggugugugugugugugugugg

SEQ ID NO: 631764 - RNA, 24 nt, Human
ugguggcgggcgccuguaguccca

SEQ ID NO: 631765 - RNA, 21 nt, Human
ugugugcacacacaugcaccc

SEQ ID NO: 631766 - RNA, 18 nt, Human
ugugugugugcacacaca

SEQ ID NO: 631767 - RNA, 19 nt, Human
ugugugugugugugcacac

SEQ ID NO: 631768 - RNA, 23 nt, Human
ugugugugugugugcacacacau

SEQ ID NO: 631769 - RNA, 18 nt, Human
ugugugugugugugugug

SEQ ID NO: 631770 - RNA, 19 nt, Human
ugugugugugugugugugu

SEQ ID NO: 631771 - RNA, 18 nt, Human
uuagcugggcaugguggc

SEQ ID NO: 631772 - RNA, 24 nt, Human
uuagcugggcaugguggcgggcgc

SEQ ID NO: 631773 - RNA, 21 nt, Human
uucacagaagucugaggcagg

SEQ ID NO: 631774 - RNA, 24 nt, Human
uuccuggagugacucccuccucuu

SEQ ID NO: 631775 - RNA, 25 nt, Human
uugaaauaacccaaaugugaauccu

SEQ ID NO: 631776 - RNA, 24 nt, Human
uugcagugacagugcugcucugaa

SEQ ID NO: 631777 - RNA, 19 nt, Human
uugcagugagccgagaucg

SEQ ID NO: 631778 - RNA, 22 nt, Human
uugcagugagccgagaucgcgc

SEQ ID NO: 631779 - RNA, 18 nt, Human
uuggcuaacacggugaaa

SEQ ID NO: 631780 - RNA, 19 nt, Human
uuggcuaacacggugaaac

SEQ ID NO: 631781 - RNA, 22 nt, Human
uuuaaagaggagcaguaacuug

SEQ ID NO: 631782 - RNA, 20 nt, Human
uuuguucuucuuagcauauc

SEQ ID NO: 631783 - RNA, 23 nt, Human
uuuuauucuuucacagaagucug

SEQ ID NO: 631784 - RNA, 25 nt, Human
uuuuuuuuuuuuuuuuuuuuuuagg

SEQ ID NO: 631785 - RNA, 18 nt, Human
agcgccugccaggcccca

SEQ ID NO: 631786 - RNA, 20 nt, Human
gaggucagguuuaauguccc

SEQ ID NO: 631787 - RNA, 24 nt, Human
uccagcgccugccaggccccacgg

SEQ ID NO: 631788 - RNA, 18 nt, Human
uggaggaggggaggucag

SEQ ID NO: 631789 - RNA, 19 nt, Human
uuuuuuuuuuuggaggagg

SEQ ID NO: 631790 - RNA, 24 nt, Human
uuuuuuuuuuuuuuuggaggaggg

SEQ ID NO: 631791 - RNA, 18 nt, Human
uuuuuuuuuuuuuuuuug

SEQ ID NO: 631792 - RNA, 23 nt, Human
aaguaaaaacaaauuuaggagaa

SEQ ID NO: 631793 - RNA, 22 nt, Human
aaugauaggauauuugaagaga

SEQ ID NO: 631794 - RNA, 21 nt, Human
auuuucuaugacauauuuaaa

SEQ ID NO: 631795 - RNA, 21 nt, Human
ccauuuugcagaggcaucauu

SEQ ID NO: 631796 - RNA, 21 nt, Human
cuucaucaguuccaaucacaa

SEQ ID NO: 631797 - RNA, 18 nt, Human
gaagcuaauagccuaaaa

SEQ ID NO: 631798 - RNA, 20 nt, Human
ggguacuaccauuuugcaga

SEQ ID NO: 631799 - RNA, 22 nt, Human
guaagacaagacucauuacaug

SEQ ID NO: 631800 - RNA, 27 nt, Human
ucaucaguuccaaucacaacacucauc

SEQ ID NO: 631801 - RNA, 23 nt, Human
uuagauacuuauuuuacuucauc

SEQ ID NO: 631802 - RNA, 20 nt, Human
aaaagagagcugaugguugc

SEQ ID NO: 631803 - RNA, 24 nt, Human
aaagauauucacucucuggcccuc

SEQ ID NO: 631804 - RNA, 23 nt, Human
aaugucucccacucuuuuauggc

SEQ ID NO: 631805 - RNA, 18 nt, Human
acucucaaagaaaagaga

SEQ ID NO: 631806 - RNA, 20 nt, Human
acuuggcucauuuuuagugg

SEQ ID NO: 631807 - RNA, 19 nt, Human
agaacaugcaucccucucc

SEQ ID NO: 631808 - RNA, 20 nt, Human
agacaagaaaagauaaaaaa

SEQ ID NO: 631809 - RNA, 18 nt, Human
agagagcugaugguugcu

SEQ ID NO: 631810 - RNA, 20 nt, Human
aggaagaaggagaggcuggu

SEQ ID NO: 631811 - RNA, 25 nt, Human
aggauaucugguuuuuuaaaggcau

SEQ ID NO: 631812 - RNA, 21 nt, Human
auaaagagcguguacccaaaa

SEQ ID NO: 631813 - RNA, 21 nt, Human
auucacucucuggcccucuau

SEQ ID NO: 631814 - RNA, 25 nt, Human
caacauaaaaaaccaguauaguaua

SEQ ID NO: 631815 - RNA, 21 nt, Human
caagaaaagauaaaaaagcaa

SEQ ID NO: 631816 - RNA, 23 nt, Human
ccccgugacaggcccacugggac

SEQ ID NO: 631817 - RNA, 22 nt, Human
cccgugacaggcccacugggac

SEQ ID NO: 631818 - RNA, 22 nt, Human
cccuaagaaguguacagaagga

SEQ ID NO: 631819 - RNA, 20 nt, Human
cucaaagaaaagagagcuga

SEQ ID NO: 631820 - RNA, 18 nt, Human
cuugcggauccugggcgu

SEQ ID NO: 631821 - RNA, 25 nt, Human
cuuucacacuacaaagggaggguug

SEQ ID NO: 631822 - RNA, 19 nt, Human
gaacaugcaucccucuccc

SEQ ID NO: 631823 - RNA, 21 nt, Human
gcaacagaacauguccugcag

SEQ ID NO: 631824 - RNA, 23 nt, Human
gcuagagucagagaggauaucug

SEQ ID NO: 631825 - RNA, 24 nt, Human
gggagugggggacgcgagggaggc

SEQ ID NO: 631826 - RNA, 21 nt, Human
guccugcagaccuccaagugg

SEQ ID NO: 631827 - RNA, 21 nt, Human
uaaaaaagcaaaacaccaggc

SEQ ID NO: 631828 - RNA, 22 nt, Human
uaaaaaagcaaaacaccaggca

SEQ ID NO: 631829 - RNA, 18 nt, Human
uaccaacaacauaaaaaa

SEQ ID NO: 631830 - RNA, 22 nt, Human
uaccaacaacauaaaaaaccag

SEQ ID NO: 631831 - RNA, 18 nt, Human
uagaacacagccacaccc

SEQ ID NO: 631832 - RNA, 19 nt, Human
uauuagaacacagccacac

SEQ ID NO: 631833 - RNA, 18 nt, Human
uccuuggagagacagagg

SEQ ID NO: 631834 - RNA, 19 nt, Human
ucucacuacacacuuggcu

SEQ ID NO: 631835 - RNA, 23 nt, Human
uggcaacagaacauguccugcag

SEQ ID NO: 631836 - RNA, 23 nt, Human
ugggcgcgcagcuugcggauccu

SEQ ID NO: 631837 - RNA, 18 nt, Human
ugggcugguggagcucgu

SEQ ID NO: 631838 - RNA, 24 nt, Human
ugugaaaguccaaaugggugcugg

SEQ ID NO: 631839 - RNA, 21 nt, Human
uguuaccaacaacauaaaaaa

SEQ ID NO: 631840 - RNA, 26 nt, Human
uuuucuguuuuuauaaauagaguuuu

SEQ ID NO: 631841 - RNA, 18 nt, Human
uuuuuuuuuuuuuuucug

SEQ ID NO: 631842 - RNA, 26 nt, Human
uuuuuuuuuuuuuuuuuucuguuuuu

SEQ ID NO: 631843 - RNA, 25 nt, Human
aagaaaaaauacauaguaacgccaa

SEQ ID NO: 631844 - RNA, 23 nt, Human
acuaucuaaggauuuucacucca

SEQ ID NO: 631845 - RNA, 22 nt, Human
cacuccaagaagaaaaaauaca

SEQ ID NO: 631846 - RNA, 21 nt, Human
ggacgaugacuuaacagauac

SEQ ID NO: 631847 - RNA, 23 nt, Human
uaucuaaggauuuucacuccaag

SEQ ID NO: 631848 - RNA, 25 nt, Human
uccaagaagaaaaaauacauaguaa

SEQ ID NO: 631849 - RNA, 21 nt, Human
aagcaugaaggcaagaagacc

SEQ ID NO: 631850 - RNA, 24 nt, Human
agaaacacaagaccaaacaaugug

SEQ ID NO: 631851 - RNA, 26 nt, Human
agcaauaucaacauuuuauccugguu

SEQ ID NO: 631852 - RNA, 19 nt, Human
aguuuuguuuuucuguacu

SEQ ID NO: 631853 - RNA, 19 nt, Human
aucuucggccucauucuaa

SEQ ID NO: 631854 - RNA, 22 nt, Human
auuaagcaaaauaguugcacag

SEQ ID NO: 631855 - RNA, 21 nt, Human
caagagagguugagauacuga

SEQ ID NO: 631856 - RNA, 22 nt, Human
ccagucaagcugguugcucuga

SEQ ID NO: 631857 - RNA, 19 nt, Human
ccuccuaccuucgcucccc

SEQ ID NO: 631858 - RNA, 22 nt, Human
ccuccuaccuucgcuccccucg

SEQ ID NO: 631859 - RNA, 20 nt, Human
gauacugacaucuccucaug

SEQ ID NO: 631860 - RNA, 22 nt, Human
gccaagcaugaaggcaagaaga

SEQ ID NO: 631861 - RNA, 22 nt, Human
gggugcuaggauugaaagggca

SEQ ID NO: 631862 - RNA, 18 nt, Human
gguggccagugaggcaag

SEQ ID NO: 631863 - RNA, 21 nt, Human
uaaagaaacacaagaccaaac

SEQ ID NO: 631864 - RNA, 25 nt, Human
uaauauguaugcuaccaucacuaau

SEQ ID NO: 631865 - RNA, 20 nt, Human
uagaaaacaagccagaggcu

SEQ ID NO: 631866 - RNA, 23 nt, Human
ucaagccuguaaaagaaguacuu

SEQ ID NO: 631867 - RNA, 18 nt, Human
ucccucagguaccucugu

SEQ ID NO: 631868 - RNA, 18 nt, Human
uccucauguggaugaagu

SEQ ID NO: 631869 - RNA, 21 nt, Human
ucgaaaguggcugagauggaa

SEQ ID NO: 631870 - RNA, 23 nt, Human
ucucuugccuuuagcuaccuucu

SEQ ID NO: 631871 - RNA, 18 nt, Human
ugaaagggcaagagaggu

SEQ ID NO: 631872 - RNA, 20 nt, Human
ugaaagggcaagagagguug

SEQ ID NO: 631873 - RNA, 18 nt, Human
ugaaggcaagaagaccac

SEQ ID NO: 631874 - RNA, 19 nt, Human
ugaaggcaagaagaccacu

SEQ ID NO: 631875 - RNA, 24 nt, Human
ugagauuuuucaagccuguaaaag

SEQ ID NO: 631876 - RNA, 22 nt, Human
ugaggagagagggccaagcaug

SEQ ID NO: 631877 - RNA, 24 nt, Human
ugaucuucggccucauucuaauac

SEQ ID NO: 631878 - RNA, 22 nt, Human
ugcucuaaaauaccucaguagc

SEQ ID NO: 631879 - RNA, 19 nt, Human
ugggguugggaggguggcc

SEQ ID NO: 631880 - RNA, 20 nt, Human
uguaaagaaacacaagacca

SEQ ID NO: 631881 - RNA, 18 nt, Human
uguaccaacauugcccuu

SEQ ID NO: 631882 - RNA, 21 nt, Human
uuuccauguauuuucugccau

SEQ ID NO: 631883 - RNA, 22 nt, Human
uuugaggagagagggccaagca

SEQ ID NO: 631884 - RNA, 20 nt, Human
uuuggugcucucuugccuuu

SEQ ID NO: 631885 - RNA, 25 nt, Human
uuuuguuuuucuguacuaaaaauau

SEQ ID NO: 631886 - RNA, 29 nt, Human
aaaaaaccagauuaaaagacagugggcac

SEQ ID NO: 631887 - RNA, 20 nt, Human
aacauuuuaucugcucauug

SEQ ID NO: 631888 - RNA, 20 nt, Human
aagaaagaaaaaagaaaaaa

SEQ ID NO: 631889 - RNA, 20 nt, Human
aagaaagaaaaaagaaaaaa

SEQ ID NO: 631890 - RNA, 21 nt, Human
aagaaagaaaaaagaaaaaaa

SEQ ID NO: 631891 - RNA, 21 nt, Human
aagaaggaacaaguaaaacaa

SEQ ID NO: 631892 - RNA, 20 nt, Human
acaacagaaaaaaaaaaaga

SEQ ID NO: 631893 - RNA, 23 nt, Human
acaacagaaaaaaaaaaagaaaa

SEQ ID NO: 631894 - RNA, 22 nt, Human
acagaaaaaaaaaaagaaagaa

SEQ ID NO: 631895 - RNA, 26 nt, Human
acaggcagcauaacggggcucaaaac

SEQ ID NO: 631896 - RNA, 20 nt, Human
agaaaaaaaaaaagaaagaa

SEQ ID NO: 631897 - RNA, 20 nt, Human
agaaaaaaaaaaagaaagaa

SEQ ID NO: 631898 - RNA, 25 nt, Human
agaaaaaaaaaaccagauuaaaaga

SEQ ID NO: 631899 - RNA, 26 nt, Human
aggaaagauaaacagaauaaaaaugc

SEQ ID NO: 631900 - RNA, 21 nt, Human
augacaacagaaaaaaaaaaa

SEQ ID NO: 631901 - RNA, 25 nt, Human
augccuuuucaguuaaaugcuuugg

SEQ ID NO: 631902 - RNA, 25 nt, Human
caacagaaaaaaaaaaagaaagaaa

SEQ ID NO: 631903 - RNA, 20 nt, Human
caggcagcauaacggggcuc

SEQ ID NO: 631904 - RNA, 21 nt, Human
ccacccguuagugagcccccc

SEQ ID NO: 631905 - RNA, 24 nt, Human
ccagugaugaaugaaccacaggua

SEQ ID NO: 631906 - RNA, 18 nt, Human
ccuuuugggccgucccag

SEQ ID NO: 631907 - RNA, 18 nt, Human
cuccucagacacuguggc

SEQ ID NO: 631908 - RNA, 19 nt, Human
gcagaugaagcacgaggcc

SEQ ID NO: 631909 - RNA, 20 nt, Human
ggaagcccucaggucacggc

SEQ ID NO: 631910 - RNA, 20 nt, Human
ggccugggcaccgcuugugg

SEQ ID NO: 631911 - RNA, 22 nt, Human
guaaaacaacaaacaccgcaag

SEQ ID NO: 631912 - RNA, 23 nt, Human
guggcagaugaagcacgaggccu

SEQ ID NO: 631913 - RNA, 21 nt, Human
uaaaacaacaaacaccgcaag

SEQ ID NO: 631914 - RNA, 21 nt, Human
uaaaaggaaagauaaacagaa

SEQ ID NO: 631915 - RNA, 28 nt, Human
uaauaaguuauuucccuaagcuggguuc

SEQ ID NO: 631916 - RNA, 19 nt, Human
uauuccuaaggaaccagug

SEQ ID NO: 631917 - RNA, 24 nt, Human
ucagucauugaacuuaauaacauu

SEQ ID NO: 631918 - RNA, 23 nt, Human
ucccuaagcuggguuccuggucc

SEQ ID NO: 631919 - RNA, 19 nt, Human
uccucagacacuguggcau

SEQ ID NO: 631920 - RNA, 22 nt, Human
ugacaacagaaaaaaaaaaaga

SEQ ID NO: 631921 - RNA, 20 nt, Human
ugagagaagaugaaagaggg

SEQ ID NO: 631922 - RNA, 24 nt, Human
ugccuuuaacaugcugucccugau

SEQ ID NO: 631923 - RNA, 25 nt, Human
uggaacaauacagguuguacaggca

SEQ ID NO: 631924 - RNA, 25 nt, Human
uggcagaugaagcacgaggccuccu

SEQ ID NO: 631925 - RNA, 19 nt, Human
uggcaugggacccacccgu

SEQ ID NO: 631926 - RNA, 26 nt, Human
ugggacccacccguuagugagccccu

SEQ ID NO: 631927 - RNA, 20 nt, Human
uggugaugcuuuaaugacaa

SEQ ID NO: 631928 - RNA, 19 nt, Human
uuuaacaugcugucccuga

SEQ ID NO: 631929 - RNA, 21 nt, Human
uuuaucugcucauugagucug

SEQ ID NO: 631930 - RNA, 21 nt, Human
uuuugggccgucccaggccuc

SEQ ID NO: 631931 - RNA, 18 nt, Human
uuuuuuuuuuuuuuuuug

SEQ ID NO: 631932 - RNA, 19 nt, Human
uuuuuuuuuuuuuuuuugc

SEQ ID NO: 631933 - RNA, 18 nt, Human
aagccaaagcuggaggag

SEQ ID NO: 631934 - RNA, 19 nt, Human
acccugcacucugucgccu

SEQ ID NO: 631935 - RNA, 21 nt, Human
aggcugugcgcccccacgcgc

SEQ ID NO: 631936 - RNA, 25 nt, Human
caagcagacccucuccuuguugcuc

SEQ ID NO: 631937 - RNA, 24 nt, Human
cacccccacugcgccugcgccugc

SEQ ID NO: 631938 - RNA, 21 nt, Human
cacugcgccugcgccugcgcc

SEQ ID NO: 631939 - RNA, 27 nt, Human
cagcuccccuacagcccagucuugccc

SEQ ID NO: 631940 - RNA, 20 nt, Human
ccaaagccaaagcuggagga

SEQ ID NO: 631941 - RNA, 24 nt, Human
ccaaagccaaagcuggaggagagc

SEQ ID NO: 631942 - RNA, 30 nt, Human
cccacgcgcccucacccccacugcgccugg

SEQ ID NO: 631943 - RNA, 19 nt, Human
ccccacgcgcccucacccc

SEQ ID NO: 631944 - RNA, 19 nt, Human
ccccacugcgccugcgccu

SEQ ID NO: 631945 - RNA, 23 nt, Human
cccccacgcgcccucacccccac

SEQ ID NO: 631946 - RNA, 27 nt, Human
cccccacgcgcccucacccccacugcg

SEQ ID NO: 631947 - RNA, 19 nt, Human
cccccacugcgccugcgcc

SEQ ID NO: 631948 - RNA, 22 nt, Human
cccugcacucugucgccuuagu

SEQ ID NO: 631949 - RNA, 26 nt, Human
ccucgcgcgcgcagcguuucucuuuu

SEQ ID NO: 631950 - RNA, 23 nt, Human
cuacagcccagucuugcccccac

SEQ ID NO: 631951 - RNA, 19 nt, Human
cucccgggccuagcgagca

SEQ ID NO: 631952 - RNA, 18 nt, Human
cucuccuuguugcuccuu

SEQ ID NO: 631953 - RNA, 23 nt, Human
cugcgccugcgccucccgggccu

SEQ ID NO: 631954 - RNA, 25 nt, Human
gaccaagcaucuggcauuucucaag

SEQ ID NO: 631955 - RNA, 20 nt, Human
gcccagucuugcccccaccc

SEQ ID NO: 631956 - RNA, 19 nt, Human
gcuggaagacaggggccca

SEQ ID NO: 631957 - RNA, 22 nt, Human
gcuggaagacaggggcccaccu

SEQ ID NO: 631958 - RNA, 19 nt, Human
ggggcccaccucgcgcgcg

SEQ ID NO: 631959 - RNA, 18 nt, Human
gugcgcccccacgcgccc

SEQ ID NO: 631960 - RNA, 22 nt, Human
uaagaagaaacggugccucucg

SEQ ID NO: 631961 - RNA, 20 nt, Human
uacagcccagucuugccccc

SEQ ID NO: 631962 - RNA, 23 nt, Human
uauuuuguccuuuaggaagacua

SEQ ID NO: 631963 - RNA, 20 nt, Human
ucagucccuggagucuggcu

SEQ ID NO: 631964 - RNA, 19 nt, Human
ucccaaagccaaagcugga

SEQ ID NO: 631965 - RNA, 19 nt, Human
uccuuguugcuccuuuuca

SEQ ID NO: 631966 - RNA, 19 nt, Human
ugcuggaagacaggggccc

SEQ ID NO: 631967 - RNA, 23 nt, Human
uuaguuccuggggaccaagcauc

SEQ ID NO: 631968 - RNA, 22 nt, Human
uucccaaagccaaagcuggagg

SEQ ID NO: 631969 - RNA, 23 nt, Human
uuucucaagcagacccucuccuu

SEQ ID NO: 631970 - RNA, 18 nt, Human
uuuuuuuuuuuuuuccug

SEQ ID NO: 631971 - RNA, 19 nt, Human
aaaaauccauacacaaaga

SEQ ID NO: 631972 - RNA, 20 nt, Human
aaacugguccuuucacugau

SEQ ID NO: 631973 - RNA, 21 nt, Human
aaagaauaaagcaacucuccc

SEQ ID NO: 631974 - RNA, 21 nt, Human
aaagcuuugauaauuucaaau

SEQ ID NO: 631975 - RNA, 19 nt, Human
aagaagacuuaaaacugcu

SEQ ID NO: 631976 - RNA, 23 nt, Human
aagaaucgaacauauccuuccca

SEQ ID NO: 631977 - RNA, 18 nt, Human
acauguauguucuuaugg

SEQ ID NO: 631978 - RNA, 21 nt, Human
accuaugacugugucuuccuc

SEQ ID NO: 631979 - RNA, 22 nt, Human
acgcgggugacgagcggcugcg

SEQ ID NO: 631980 - RNA, 22 nt, Human
agacagaggcccggggaccucg

SEQ ID NO: 631981 - RNA, 25 nt, Human
agauacugaagacaacacuacuuac

SEQ ID NO: 631982 - RNA, 19 nt, Human
agcaaagagcagugaguca

SEQ ID NO: 631983 - RNA, 21 nt, Human
agcaaagagcagugagucagg

SEQ ID NO: 631984 - RNA, 18 nt, Human
aggcaaaaaccuguguuc

SEQ ID NO: 631985 - RNA, 22 nt, Human
aggcaacagcaaagagcaguga

SEQ ID NO: 631986 - RNA, 19 nt, Human
agggaucugcgcucgaccc

SEQ ID NO: 631987 - RNA, 18 nt, Human
auacacuuagaaaaaucc

SEQ ID NO: 631988 - RNA, 20 nt, Human
aucaagucagcacacaccuu

SEQ ID NO: 631989 - RNA, 24 nt, Human
aucugcuuaacuaucugaggacug

SEQ ID NO: 631990 - RNA, 23 nt, Human
caaagagcagugagucaggagca

SEQ ID NO: 631991 - RNA, 20 nt, Human
caccucugacuccacgggug

SEQ ID NO: 631992 - RNA, 22 nt, Human
cacuuagaaaaauccauacaca

SEQ ID NO: 631993 - RNA, 24 nt, Human
cagccggcuaccggccccgaaggc

SEQ ID NO: 631994 - RNA, 19 nt, Human
caggcaacagcaaagagca

SEQ ID NO: 631995 - RNA, 18 nt, Human
caucagauccccaguuua

SEQ ID NO: 631996 - RNA, 24 nt, Human
ccaacgccagaaacagcaucacgc

SEQ ID NO: 631997 - RNA, 19 nt, Human
ccgaaggccccguacucca

SEQ ID NO: 631998 - RNA, 20 nt, Human
ccgaaggccccguacuccaa

SEQ ID NO: 631999 - RNA, 22 nt, Human
cgacccggacgccggagaaggc

SEQ ID NO: 632000 - RNA, 22 nt, Human
cgccagaaacagcaucacgcgg

SEQ ID NO: 632001 - RNA, 24 nt, Human
cggcugcggacgccccagcugcac

SEQ ID NO: 632002 - RNA, 20 nt, Human
cugcggacgccccagcugcc

SEQ ID NO: 632003 - RNA, 21 nt, Human
gacccggacgccggagaaggc

SEQ ID NO: 632004 - RNA, 22 nt, Human
gagcagugagucaggagcagga

SEQ ID NO: 632005 - RNA, 21 nt, Human
gaucaagucagcacacaccuu

SEQ ID NO: 632006 - RNA, 21 nt, Human
gccccguacuccagccggcua

SEQ ID NO: 632007 - RNA, 19 nt, Human
gccggcuaccggccccgaa

SEQ ID NO: 632008 - RNA, 19 nt, Human
gcggccgcacacaaugcag

SEQ ID NO: 632009 - RNA, 18 nt, Human
gcucaauacugauggaag

SEQ ID NO: 632010 - RNA, 24 nt, Human
ggcaaaaaccuguguucugaacca

SEQ ID NO: 632011 - RNA, 20 nt, Human
gggaccucggagcgcggcgg

SEQ ID NO: 632012 - RNA, 23 nt, Human
guaaguuuuucuuguagugauuc

SEQ ID NO: 632013 - RNA, 23 nt, Human
gugagucaggagcaggagcaggu

SEQ ID NO: 632014 - RNA, 21 nt, Human
uaaaagccauggcugcugcaa

SEQ ID NO: 632015 - RNA, 19 nt, Human
uaaccaccaguucaacugu

SEQ ID NO: 632016 - RNA, 23 nt, Human
uaagauacugaagacaacacuac

SEQ ID NO: 632017 - RNA, 27 nt, Human
uacauuaaaacguaaaucacauuugag

SEQ ID NO: 632018 - RNA, 18 nt, Human
uagcaugaacauauuuau

SEQ ID NO: 632019 - RNA, 19 nt, Human
ucaauacugauggaaguaa

SEQ ID NO: 632020 - RNA, 24 nt, Human
ucaaugagucgcuuguggauucuc

SEQ ID NO: 632021 - RNA, 22 nt, Human
ucaucuggaaacgaucccaugc

SEQ ID NO: 632022 - RNA, 22 nt, Human
uccauacacaaagaauaaagca

SEQ ID NO: 632023 - RNA, 23 nt, Human
ucucaaagucuugguaggcauuc

SEQ ID NO: 632024 - RNA, 18 nt, Human
ucucaucuggaaacgauc

SEQ ID NO: 632025 - RNA, 19 nt, Human
ugaaaacaguugacuuaag

SEQ ID NO: 632026 - RNA, 23 nt, Human
ugaagacaacacuacuuaccauu

SEQ ID NO: 632027 - RNA, 18 nt, Human
ugacuuccaucucaacuc

SEQ ID NO: 632028 - RNA, 21 nt, Human
ugacuuccaucucaacuccug

SEQ ID NO: 632029 - RNA, 21 nt, Human
ugauggaaguaaucugcuuaa

SEQ ID NO: 632030 - RNA, 18 nt, Human
ugcccaacgccagaaaca

SEQ ID NO: 632031 - RNA, 23 nt, Human
ugccuuagaaccuucaccguaag

SEQ ID NO: 632032 - RNA, 23 nt, Human
uguagugauucucaaagucuugg

SEQ ID NO: 632033 - RNA, 22 nt, Human
uuaagcauuugcaauggugacu

SEQ ID NO: 632034 - RNA, 22 nt, Human
uucccaauaaacagggaucugc

SEQ ID NO: 632035 - RNA, 21 nt, Human
uucgaccgcccacgggcugcc

SEQ ID NO: 632036 - RNA, 26 nt, Human
uucuuaugggcaaucaugccaggggu

SEQ ID NO: 632037 - RNA, 22 nt, Human
uugaaaauuuuuuaacaacugg

SEQ ID NO: 632038 - RNA, 18 nt, Human
uuuuuuuuuuuuuuuuug

SEQ ID NO: 632039 - RNA, 20 nt, Human
uaaaaacaaaacaaaaauca

SEQ ID NO: 632040 - RNA, 23 nt, Human
uaaaaacaaaacaaaaaucacaa

SEQ ID NO: 632041 - RNA, 24 nt, Human
uaaaaacaaaacaaaaaucacaag

SEQ ID NO: 632042 - RNA, 20 nt, Human
uacuguacaccaaucaaagc

SEQ ID NO: 632043 - RNA, 19 nt, Human
uauuuuuuguauuccuuaa

SEQ ID NO: 632044 - RNA, 22 nt, Human
ugaaauacuguacaccaaucaa

SEQ ID NO: 632045 - RNA, 23 nt, Human
uuugaaauacuguacaccaauca

SEQ ID NO: 632046 - RNA, 25 nt, Human
uuuuuuuuuuuuuuuaaacguuuuu

SEQ ID NO: 632047 - RNA, 23 nt, Human
uuuuuuuuuuuuuuuuuuaaacg

SEQ ID NO: 632048 - RNA, 18 nt, Human
aaguggauacaucaaagg

SEQ ID NO: 632049 - RNA, 24 nt, Human
caacacacggugugcaucugugug

SEQ ID NO: 632050 - RNA, 22 nt, Human
ccaaaugcacacaaacccuguc

SEQ ID NO: 632051 - RNA, 21 nt, Human
ccccaaaugcacacaaacccu

SEQ ID NO: 632052 - RNA, 19 nt, Human
ugcacacaaacccugucuc

SEQ ID NO: 632053 - RNA, 22 nt, Human
uuuuuuuuuuuuuugaagugga

SEQ ID NO: 632054 - RNA, 20 nt, Human
acccgcuccgcgccgucccc

SEQ ID NO: 632055 - RNA, 18 nt, Human
agcugguggcugaccagg

SEQ ID NO: 632056 - RNA, 20 nt, Human
aguggcgggggcaggcgaga

SEQ ID NO: 632057 - RNA, 21 nt, Human
aguggcgggggcaggcgagag

SEQ ID NO: 632058 - RNA, 18 nt, Human
cacccucguugccccagc

SEQ ID NO: 632059 - RNA, 19 nt, Human
cagugggaccuccacccuc

SEQ ID NO: 632060 - RNA, 21 nt, Human
caugagcccuuccucacgacc

SEQ ID NO: 632061 - RNA, 23 nt, Human
caugguccaugacaaggggcagg

SEQ ID NO: 632062 - RNA, 20 nt, Human
ccagacgaguggcgggggca

SEQ ID NO: 632063 - RNA, 22 nt, Human
cccucguugccccagcuggugg

SEQ ID NO: 632064 - RNA, 24 nt, Human
ccgcacccgcuccgcgccgucccc

SEQ ID NO: 632065 - RNA, 22 nt, Human
ccgcacggcaucucccgcaccc

SEQ ID NO: 632066 - RNA, 19 nt, Human
ccgcccgccccgcggcugc

SEQ ID NO: 632067 - RNA, 19 nt, Human
ccgccgccgcccgccccgc

SEQ ID NO: 632068 - RNA, 18 nt, Human
ccgccgccgccgccgccg

SEQ ID NO: 632069 - RNA, 18 nt, Human
ccgccgccgccgccgccg

SEQ ID NO: 632070 - RNA, 24 nt, Human
ccgccgccgccgccgccgcccgcc

SEQ ID NO: 632071 - RNA, 24 nt, Human
ccgccgccgccgccgccgccgccc

SEQ ID NO: 632072 - RNA, 23 nt, Human
ccgcgccguccccaccuggcccg

SEQ ID NO: 632073 - RNA, 22 nt, Human
ccuccacccucguugccccagc

SEQ ID NO: 632074 - RNA, 19 nt, Human
ccucguugccccagcuggu

SEQ ID NO: 632075 - RNA, 21 nt, Human
ccuucccacagaaggcgggga

SEQ ID NO: 632076 - RNA, 19 nt, Human
cgccgccgccgccgccgcc

SEQ ID NO: 632077 - RNA, 21 nt, Human
cucccgcacccgcuccgcgcc

SEQ ID NO: 632078 - RNA, 23 nt, Human
gacgaggcgggcggcucaggugg

SEQ ID NO: 632079 - RNA, 22 nt, Human
gccgccgccgccgccgccgccg

SEQ ID NO: 632080 - RNA, 25 nt, Human
gccgccgccgccgccgccgccgccc

SEQ ID NO: 632081 - RNA, 21 nt, Human
gggacgaggcgggcggcucag

SEQ ID NO: 632082 - RNA, 18 nt, Human
gggcagggcagagggggc

SEQ ID NO: 632083 - RNA, 23 nt, Human
ucccgcacggcaucucccgcacc

SEQ ID NO: 632084 - RNA, 24 nt, Human
ucccggccgccgccgccgccgccg

SEQ ID NO: 632085 - RNA, 18 nt, Human
uuggaucaacaagcacca

SEQ ID NO: 632086 - RNA, 18 nt, Human
uuuuuuuuuuuuuuucug

SEQ ID NO: 632087 - RNA, 24 nt, Human
uuuuuuuuuuuuuuuuucugguuu

SEQ ID NO: 632088 - RNA, 19 nt, Human
aaccaggaauaaaggcaag

SEQ ID NO: 632089 - RNA, 19 nt, Human
acagcugccugggcaggca

SEQ ID NO: 632090 - RNA, 22 nt, Human
agccgaggcuucuuggccucag

SEQ ID NO: 632091 - RNA, 23 nt, Human
agccgggcaugaugaccauguuc

SEQ ID NO: 632092 - RNA, 18 nt, Human
aggaagcuccccagcucc

SEQ ID NO: 632093 - RNA, 18 nt, Human
aggacaccagccggaagu

SEQ ID NO: 632094 - RNA, 18 nt, Human
cacagucacagagccguc

SEQ ID NO: 632095 - RNA, 19 nt, Human
caccagcugcaugaugccc

SEQ ID NO: 632096 - RNA, 23 nt, Human
cagcagcaccuuggugccugggu

SEQ ID NO: 632097 - RNA, 20 nt, Human
cagccccugcgccaucuccc

SEQ ID NO: 632098 - RNA, 20 nt, Human
cagcugggggccugggggag

SEQ ID NO: 632099 - RNA, 24 nt, Human
ccaucucccgcuucagcagcccca

SEQ ID NO: 632100 - RNA, 24 nt, Human
ccaugcaccagcagcacgcucucc

SEQ ID NO: 632101 - RNA, 19 nt, Human
cccuccaucucgagcuucc

SEQ ID NO: 632102 - RNA, 18 nt, Human
ccgccgcgcucccggacc

SEQ ID NO: 632103 - RNA, 20 nt, Human
ccgcugcccgcugaggaucu

SEQ ID NO: 632104 - RNA, 18 nt, Human
ccuccagcaccugccgcc

SEQ ID NO: 632105 - RNA, 24 nt, Human
ccucuguccccagggaugggagag

SEQ ID NO: 632106 - RNA, 24 nt, Human
ccugcccuaaccaggaauaaaggc

SEQ ID NO: 632107 - RNA, 25 nt, Human
ccuggcccaccagcugguccccugg

SEQ ID NO: 632108 - RNA, 18 nt, Human
ccugggggaggcccuucu

SEQ ID NO: 632109 - RNA, 21 nt, Human
cgcgaggcccgccugcgguga

SEQ ID NO: 632110 - RNA, 23 nt, Human
cggccucagcugggggccugggg

SEQ ID NO: 632111 - RNA, 21 nt, Human
cuccagcaccugccgccccuc

SEQ ID NO: 632112 - RNA, 22 nt, Human
cuccagcaccugccgccccucc

SEQ ID NO: 632113 - RNA, 23 nt, Human
cucccggacccgcgaggcccgcc

SEQ ID NO: 632114 - RNA, 18 nt, Human
cuccgccgcgcucccgga

SEQ ID NO: 632115 - RNA, 22 nt, Human
cugaaugacauguacuccaccu

SEQ ID NO: 632116 - RNA, 19 nt, Human
cugcaucuugaccuccagc

SEQ ID NO: 632117 - RNA, 22 nt, Human
cugccuggcccaccagcugcau

SEQ ID NO: 632118 - RNA, 21 nt, Human
cugcuccuugcgugugucaug

SEQ ID NO: 632119 - RNA, 19 nt, Human
cugcugucuaggaccaccu

SEQ ID NO: 632120 - RNA, 19 nt, Human
cuugcgugugucaugcagg

SEQ ID NO: 632121 - RNA, 21 nt, Human
gcagcgucaccgucucgccau

SEQ ID NO: 632122 - RNA, 21 nt, Human
gcaggagccgaggcuucuugg

SEQ ID NO: 632123 - RNA, 21 nt, Human
gccucuguccccagggauggg

SEQ ID NO: 632124 - RNA, 22 nt, Human
gccucuguccccagggauggga

SEQ ID NO: 632125 - RNA, 21 nt, Human
gcuggggcuugugggcagcgu

SEQ ID NO: 632126 - RNA, 20 nt, Human
ggaaacugcugucuaggacc

SEQ ID NO: 632127 - RNA, 21 nt, Human
ggagagggcagagguggcggc

SEQ ID NO: 632128 - RNA, 21 nt, Human
ggcaagacagccuggagacca

SEQ ID NO: 632129 - RNA, 18 nt, Human
ggcggccuggaggaggac

SEQ ID NO: 632130 - RNA, 22 nt, Human
ggggccugggggaggcccuucu

SEQ ID NO: 632131 - RNA, 23 nt, Human
guccugguagguccaggagacca

SEQ ID NO: 632132 - RNA, 22 nt, Human
gugugucaugcaggugcacgcg

SEQ ID NO: 632133 - RNA, 20 nt, Human
ucagcugggggccuggggga

SEQ ID NO: 632134 - RNA, 19 nt, Human
ucccggacccgcgaggccc

SEQ ID NO: 632135 - RNA, 23 nt, Human
uccuucaugaucagggugccgug

SEQ ID NO: 632136 - RNA, 24 nt, Human
ucgguccuggguugucagcaaaag

SEQ ID NO: 632137 - RNA, 19 nt, Human
ucuccggcucugccuggcc

SEQ ID NO: 632138 - RNA, 23 nt, Human
ucuccggcucugccuggcccacc

SEQ ID NO: 632139 - RNA, 20 nt, Human
ugacacaaggccucuguccc

SEQ ID NO: 632140 - RNA, 19 nt, Human
ugacauguacuccaccugc

SEQ ID NO: 632141 - RNA, 20 nt, Human
ugacauguacuccaccugca

SEQ ID NO: 632142 - RNA, 19 nt, Human
ugacccggagcuccugcuc

SEQ ID NO: 632143 - RNA, 24 nt, Human
ugaccuccagcaccugccgccccu

SEQ ID NO: 632144 - RNA, 19 nt, Human
ugaggacaccagccggaag

SEQ ID NO: 632145 - RNA, 19 nt, Human
ugaggaucuuguggccgac

SEQ ID NO: 632146 - RNA, 21 nt, Human
ugagguggcuguagacgcgcc

SEQ ID NO: 632147 - RNA, 20 nt, Human
ugcaaacagcugccugggca

SEQ ID NO: 632148 - RNA, 21 nt, Human
uggaggaggacggacuccaca

SEQ ID NO: 632149 - RNA, 18 nt, Human
ugggagagggcagaggug

SEQ ID NO: 632150 - RNA, 21 nt, Human
ugggagagggcagagguggcg

SEQ ID NO: 632151 - RNA, 21 nt, Human
ugggaggugcugcacacagug

SEQ ID NO: 632152 - RNA, 23 nt, Human
uucuucagcugcaaacagcugcc

SEQ ID NO: 632153 - RNA, 21 nt, Human
uucuuggccucgccaugcacc

SEQ ID NO: 632154 - RNA, 23 nt, Human
uuggugccuggguccucagaagg

SEQ ID NO: 632155 - RNA, 28 nt, Human
uuggugccuggguccucagaaggggcgg

SEQ ID NO: 632156 - RNA, 24 nt, Human
aaaaaaaagcacuucugccaaagg

SEQ ID NO: 632157 - RNA, 25 nt, Human
aaagcacuucugccaaaggaaccag

SEQ ID NO: 632158 - RNA, 27 nt, Human
aaaugauucuccugccucaaccuccca

SEQ ID NO: 632159 - RNA, 20 nt, Human
aacuuccgccuccugaguuc

SEQ ID NO: 632160 - RNA, 18 nt, Human
aagcacaccagaacugaa

SEQ ID NO: 632161 - RNA, 20 nt, Human
aagcacaccagaacugaagc

SEQ ID NO: 632162 - RNA, 22 nt, Human
aagcacuucugccaaaggaacc

SEQ ID NO: 632163 - RNA, 24 nt, Human
aaggugcugggauuacagacguga

SEQ ID NO: 632164 - RNA, 24 nt, Human
aaguagcuggaaucacaggcaugc

SEQ ID NO: 632165 - RNA, 21 nt, Human
acaagguguucugcuuaaaca

SEQ ID NO: 632166 - RNA, 20 nt, Human
acacugaagccacuacucau

SEQ ID NO: 632167 - RNA, 18 nt, Human
acagacgugagccaccgc

SEQ ID NO: 632168 - RNA, 22 nt, Human
acagaguaagauacaccacccc

SEQ ID NO: 632169 - RNA, 21 nt, Human
acgugagccaccgcacccagc

SEQ ID NO: 632170 - RNA, 19 nt, Human
agacuggcacaaagccccg

SEQ ID NO: 632171 - RNA, 23 nt, Human
agagaaaaaugugaguucucuca

SEQ ID NO: 632172 - RNA, 20 nt, Human
agccaccgcacccagccucu

SEQ ID NO: 632173 - RNA, 20 nt, Human
aggcaugcaccaccaugccc

SEQ ID NO: 632174 - RNA, 20 nt, Human
agguaaauggccuuggcaac

SEQ ID NO: 632175 - RNA, 26 nt, Human
aggugcugggauuacagacgugagcc

SEQ ID NO: 632176 - RNA, 24 nt, Human
agugcaauggcacaaucuuggcuc

SEQ ID NO: 632177 - RNA, 20 nt, Human
augguuaagcacaccagaac

SEQ ID NO: 632178 - RNA, 20 nt, Human
caacagaagguggcgcuauu

SEQ ID NO: 632179 - RNA, 24 nt, Human
caaggugcugggauuacagacgug

SEQ ID NO: 632180 - RNA, 22 nt, Human
caccaccaugcccagcuaauuu

SEQ ID NO: 632181 - RNA, 19 nt, Human
caccaccuauucccacuac

SEQ ID NO: 632182 - RNA, 22 nt, Human
caccaguguccugggugguagg

SEQ ID NO: 632183 - RNA, 23 nt, Human
cacccagccucuuaauucuuaau

SEQ ID NO: 632184 - RNA, 21 nt, Human
caccgcaacuuccgccuccug

SEQ ID NO: 632185 - RNA, 21 nt, Human
caccgcacccagccucuuaau

SEQ ID NO: 632186 - RNA, 25 nt, Human
cagaguaagauacaccacccccauc

SEQ ID NO: 632187 - RNA, 21 nt, Human
cagccaaaguugccaacuuag

SEQ ID NO: 632188 - RNA, 23 nt, Human
cagccaccuaaggcaaggagccc

SEQ ID NO: 632189 - RNA, 22 nt, Human
ccaaggugcugggauuacagac

SEQ ID NO: 632190 - RNA, 24 nt, Human
ccaaggugcugggauuacagacgu

SEQ ID NO: 632191 - RNA, 22 nt, Human
ccaucccuuccuucccuguucc

SEQ ID NO: 632192 - RNA, 18 nt, Human
ccauuaaaucaauccaca

SEQ ID NO: 632193 - RNA, 19 nt, Human
cccaggcuggagugcaaug

SEQ ID NO: 632194 - RNA, 21 nt, Human
cccgaccucaggugaucugcc

SEQ ID NO: 632195 - RNA, 23 nt, Human
cccgaccucaggugaucugccug

SEQ ID NO: 632196 - RNA, 20 nt, Human
cccugggaggugggagggcu

SEQ ID NO: 632197 - RNA, 22 nt, Human
cccuguuccccucccaacuuuu

SEQ ID NO: 632198 - RNA, 21 nt, Human
ccgcaaacaagguguucugcu

SEQ ID NO: 632199 - RNA, 23 nt, Human
ccgcaacuuccgccuccugaguu

SEQ ID NO: 632200 - RNA, 24 nt, Human
ccgccuccugaguucaaaugauuc

SEQ ID NO: 632201 - RNA, 26 nt, Human
ccuccgaaauauaaaaccaggacaag

SEQ ID NO: 632202 - RNA, 24 nt, Human
ccuccugaguucaaaugauucucc

SEQ ID NO: 632203 - RNA, 23 nt, Human
ccucuucucucauagaugaaaau

SEQ ID NO: 632204 - RNA, 23 nt, Human
ccugccucaaccucccaaguagc

SEQ ID NO: 632205 - RNA, 18 nt, Human
ccugcugcucugugcugc

SEQ ID NO: 632206 - RNA, 21 nt, Human
ccugggugguagggaugcuac

SEQ ID NO: 632207 - RNA, 18 nt, Human
cgaccucaggugaucugc

SEQ ID NO: 632208 - RNA, 20 nt, Human
cgaccucaggugaucugccu

SEQ ID NO: 632209 - RNA, 24 nt, Human
cgaccucaggugaucugccugccu

SEQ ID NO: 632210 - RNA, 21 nt, Human
cgcucguugcccaggcuggag

SEQ ID NO: 632211 - RNA, 20 nt, Human
cguugcccaggcuggagugc

SEQ ID NO: 632212 - RNA, 26 nt, Human
cucccgaccucaggugaucugccugc

SEQ ID NO: 632213 - RNA, 24 nt, Human
cucguugcccaggcuggagugcaa

SEQ ID NO: 632214 - RNA, 20 nt, Human
cugcuaccugucgauuagca

SEQ ID NO: 632215 - RNA, 19 nt, Human
cugguuaagaacagguggg

SEQ ID NO: 632216 - RNA, 30 nt, Human
cuucccuguuccccucccaacuuuucccug

SEQ ID NO: 632217 - RNA, 23 nt, Human
gaaugcaaguagauggguggcag

SEQ ID NO: 632218 - RNA, 22 nt, Human
gaccucaggugaucugccugcc

SEQ ID NO: 632219 - RNA, 23 nt, Human
gaccucaggugaucugccugccu

SEQ ID NO: 632220 - RNA, 21 nt, Human
gagacggggguuucuccacgu

SEQ ID NO: 632221 - RNA, 18 nt, Human
gauuacagacgugagcca

SEQ ID NO: 632222 - RNA, 23 nt, Human
gauuacagacgugagccaccgca

SEQ ID NO: 632223 - RNA, 19 nt, Human
gcacaccagaacugaagcg

SEQ ID NO: 632224 - RNA, 20 nt, Human
gcaccaccaugcccagcuaa

SEQ ID NO: 632225 - RNA, 23 nt, Human
gcccagcuaauuuuuuguauuuu

SEQ ID NO: 632226 - RNA, 19 nt, Human
gcccaggcuggagugcaau

SEQ ID NO: 632227 - RNA, 19 nt, Human
gcuacagccaccuaaggca

SEQ ID NO: 632228 - RNA, 22 nt, Human
gcugcuccucacccaucuccac

SEQ ID NO: 632229 - RNA, 19 nt, Human
gcuggagugcaauggcaca

SEQ ID NO: 632230 - RNA, 23 nt, Human
gcuggucucgaacucccgaccuc

SEQ ID NO: 632231 - RNA, 23 nt, Human
ggaggugggagggcuugcauggu

SEQ ID NO: 632232 - RNA, 24 nt, Human
ggugcugggauuacagacgugagc

SEQ ID NO: 632233 - RNA, 18 nt, Human
gguuuucugguuaagaac

SEQ ID NO: 632234 - RNA, 19 nt, Human
gugacuuuuaaaacugaaa

SEQ ID NO: 632235 - RNA, 24 nt, Human
gugagccaccgcacccagccucuu

SEQ ID NO: 632236 - RNA, 24 nt, Human
guuucgcucguugcccaggcugga

SEQ ID NO: 632237 - RNA, 23 nt, Human
uaaaaccaggacaagagaaaaau

SEQ ID NO: 632238 - RNA, 25 nt, Human
uaagauacaccacccccauccaucc

SEQ ID NO: 632239 - RNA, 24 nt, Human
uaauuuuuuguauuuuuaguagag

SEQ ID NO: 632240 - RNA, 25 nt, Human
uaauuuuuuguauuuuuaguagaga

SEQ ID NO: 632241 - RNA, 24 nt, Human
uacagacgugagccaccgcaccca

SEQ ID NO: 632242 - RNA, 18 nt, Human
uacagccaccuaaggcaa

SEQ ID NO: 632243 - RNA, 22 nt, Human
uagaagaugaugaucaugcuga

SEQ ID NO: 632244 - RNA, 22 nt, Human
uagcagaggauguuuaccccuc

SEQ ID NO: 632245 - RNA, 18 nt, Human
uagggaugcuacagccac

SEQ ID NO: 632246 - RNA, 19 nt, Human
uaguagagacggggguuuc

SEQ ID NO: 632247 - RNA, 25 nt, Human
uaguagagacggggguuucuccacg

SEQ ID NO: 632248 - RNA, 18 nt, Human
uaugccuccucugacacc

SEQ ID NO: 632249 - RNA, 24 nt, Human
uauucccacuaccuucccccuuca

SEQ ID NO: 632250 - RNA, 20 nt, Human
ucaccgcaacuuccgccucc

SEQ ID NO: 632251 - RNA, 22 nt, Human
ucaccgcaacuuccgccuccug

SEQ ID NO: 632252 - RNA, 25 nt, Human
ucaccgcaacuuccgccuccugagu

SEQ ID NO: 632253 - RNA, 27 nt, Human
ucaccgcaacuuccgccuccugaguuc

SEQ ID NO: 632254 - RNA, 20 nt, Human
uccaacaccgcaaacaaggu

SEQ ID NO: 632255 - RNA, 18 nt, Human
ucccaaggugcugggauu

SEQ ID NO: 632256 - RNA, 24 nt, Human
ucccaaggugcugggauuacagac

SEQ ID NO: 632257 - RNA, 24 nt, Human
ucccaaguagcuggaaucacaggc

SEQ ID NO: 632258 - RNA, 21 nt, Human
ucccacuaccuucccccuuca

SEQ ID NO: 632259 - RNA, 23 nt, Human
ucccacuaccuucccccuucaga

SEQ ID NO: 632260 - RNA, 20 nt, Human
ucccugcaauuccugaauuc

SEQ ID NO: 632261 - RNA, 20 nt, Human
ucccugcugcucugugcugc

SEQ ID NO: 632262 - RNA, 22 nt, Human
ucccugcugcucugugcugcuc

SEQ ID NO: 632263 - RNA, 21 nt, Human
ucccuguuccccucccaacuu

SEQ ID NO: 632264 - RNA, 21 nt, Human
uccugaauucagaggcaucau

SEQ ID NO: 632265 - RNA, 21 nt, Human
uccugaguucaaaugauucuc

SEQ ID NO: 632266 - RNA, 24 nt, Human
uccugaguucaaaugauucuccug

SEQ ID NO: 632267 - RNA, 19 nt, Human
uccugggugguagggaugc

SEQ ID NO: 632268 - RNA, 19 nt, Human
ucgcucguugcccaggcug

SEQ ID NO: 632269 - RNA, 20 nt, Human
ucgcucguugcccaggcugg

SEQ ID NO: 632270 - RNA, 21 nt, Human
ucgcucguugcccaggcugga

SEQ ID NO: 632271 - RNA, 26 nt, Human
ucuccugccucaaccucccaaguagc

SEQ ID NO: 632272 - RNA, 19 nt, Human
ucugcucuugaaaucaaau

SEQ ID NO: 632273 - RNA, 21 nt, Human
ugacccaacagaagguggcgc

SEQ ID NO: 632274 - RNA, 24 nt, Human
ugaguucaaaugauucuccugccu

SEQ ID NO: 632275 - RNA, 18 nt, Human
ugaguucucucaccaccu

SEQ ID NO: 632276 - RNA, 23 nt, Human
ugaguucucucaccaccuauucc

SEQ ID NO: 632277 - RNA, 18 nt, Human
ugcccaggcuggagugca

SEQ ID NO: 632278 - RNA, 21 nt, Human
ugcccaggcuggagugcaaug

SEQ ID NO: 632279 - RNA, 24 nt, Human
ugcccaggcuggagugcaauggca

SEQ ID NO: 632280 - RNA, 24 nt, Human
ugccucaaccucccaaguagcugg

SEQ ID NO: 632281 - RNA, 21 nt, Human
ugccugggccucccaaggugc

SEQ ID NO: 632282 - RNA, 24 nt, Human
ugcugggauuacagacgugagcca

SEQ ID NO: 632283 - RNA, 21 nt, Human
uggaaucacaggcaugcacca

SEQ ID NO: 632284 - RNA, 24 nt, Human
uggaaucacaggcaugcaccacca

SEQ ID NO: 632285 - RNA, 23 nt, Human
uggagugcaauggcacaaucuug

SEQ ID NO: 632286 - RNA, 24 nt, Human
uggagugcaauggcacaaucuugg

SEQ ID NO: 632287 - RNA, 24 nt, Human
uggcacaaucuuggcucaccgcaa

SEQ ID NO: 632288 - RNA, 21 nt, Human
ugggaggugggagggcuugca

SEQ ID NO: 632289 - RNA, 18 nt, Human
ugggauuacagacgugag

SEQ ID NO: 632290 - RNA, 19 nt, Human
ugggauuacagacgugagc

SEQ ID NO: 632291 - RNA, 21 nt, Human
ugggauuacagacgugagcca

SEQ ID NO: 632292 - RNA, 22 nt, Human
ugggauuacagacgugagccac

SEQ ID NO: 632293 - RNA, 23 nt, Human
ugggauuacagacgugagccacc

SEQ ID NO: 632294 - RNA, 24 nt, Human
ugggauuacagacgugagccaccg

SEQ ID NO: 632295 - RNA, 21 nt, Human
uggucacgcuggucucgaacu

SEQ ID NO: 632296 - RNA, 19 nt, Human
uggucucgaacucccgacc

SEQ ID NO: 632297 - RNA, 21 nt, Human
uguauuuuuaguagagacggg

SEQ ID NO: 632298 - RNA, 24 nt, Human
uguguacgcaaggacacugaagcc

SEQ ID NO: 632299 - RNA, 19 nt, Human
uuaguagagacggggguuu

SEQ ID NO: 632300 - RNA, 24 nt, Human
uucaaaugauucuccugccucaac

SEQ ID NO: 632301 - RNA, 20 nt, Human
uucaagaagucuaauaggaa

SEQ ID NO: 632302 - RNA, 18 nt, Human
uucacaccaguguccugg

SEQ ID NO: 632303 - RNA, 25 nt, Human
uuccaacaccgcaaacaagguguuc

SEQ ID NO: 632304 - RNA, 20 nt, Human
uucccuguuccccucccaac

SEQ ID NO: 632305 - RNA, 18 nt, Human
uuccugaauucagaggca

SEQ ID NO: 632306 - RNA, 24 nt, Human
uucgcucguugcccaggcuggagu

SEQ ID NO: 632307 - RNA, 18 nt, Human
uugcccaggcuggagugc

SEQ ID NO: 632308 - RNA, 24 nt, Human
uuguauuuuuaguagagacggggg

SEQ ID NO: 632309 - RNA, 21 nt, Human
uuucgcucguugcccaggcug

SEQ ID NO: 632310 - RNA, 22 nt, Human
uuucgcucguugcccaggcugg

SEQ ID NO: 632311 - RNA, 23 nt, Human
uuucgcucguugcccaggcugga

SEQ ID NO: 632312 - RNA, 20 nt, Human
uuuuuaguagagacgggggu

SEQ ID NO: 632313 - RNA, 21 nt, Human
uuuuuguauuuuuaguagaga

SEQ ID NO: 632314 - RNA, 24 nt, Human
uuuuuuguauuuuuaguagagacg

SEQ ID NO: 632315 - RNA, 22 nt, Human
aaaaagacccucuucuaaugcu

SEQ ID NO: 632316 - RNA, 20 nt, Human
aaaaggggcagggguggggc

SEQ ID NO: 632317 - RNA, 19 nt, Human
aacaucaauccaagcccug

SEQ ID NO: 632318 - RNA, 20 nt, Human
aaccuggaaggaaaaggggc

SEQ ID NO: 632319 - RNA, 25 nt, Human
acagaaccuggaaggaaaaggggca

SEQ ID NO: 632320 - RNA, 18 nt, Human
accccaccugcuccgcca

SEQ ID NO: 632321 - RNA, 21 nt, Human
accccaccugcuccgccaguc

SEQ ID NO: 632322 - RNA, 25 nt, Human
accccaccugcuccgccaguccagc

SEQ ID NO: 632323 - RNA, 20 nt, Human
accugagcugcccguguccc

SEQ ID NO: 632324 - RNA, 20 nt, Human
accuggcuggcuuuucucau

SEQ ID NO: 632325 - RNA, 21 nt, Human
agccacgcacucaugauugcu

SEQ ID NO: 632326 - RNA, 20 nt, Human
agcuuggcuugcaacaccau

SEQ ID NO: 632327 - RNA, 21 nt, Human
aggaaaaggggcagggguggg

SEQ ID NO: 632328 - RNA, 20 nt, Human
aggaacaggcaggggccagc

SEQ ID NO: 632329 - RNA, 18 nt, Human
aggcaggggccagcuugg

SEQ ID NO: 632330 - RNA, 20 nt, Human
aguaacagaaccuggaagga

SEQ ID NO: 632331 - RNA, 21 nt, Human
aguggguggcacagucggcuc

SEQ ID NO: 632332 - RNA, 23 nt, Human
aucuaccaacaggcugaccugag

SEQ ID NO: 632333 - RNA, 23 nt, Human
augaaacaagccuguggggcccu

SEQ ID NO: 632334 - RNA, 19 nt, Human
cacgugcggccaacaagag

SEQ ID NO: 632335 - RNA, 21 nt, Human
cagacgccgaccggaacgcuc

SEQ ID NO: 632336 - RNA, 21 nt, Human
caggagacacuucagagaggu

SEQ ID NO: 632337 - RNA, 21 nt, Human
cagucggcucuucaguggcuc

SEQ ID NO: 632338 - RNA, 23 nt, Human
ccaccagaaacacuucugugagu

SEQ ID NO: 632339 - RNA, 20 nt, Human
ccacgcacucaugauugccg

SEQ ID NO: 632340 - RNA, 24 nt, Human
ccacggcugaccuggccccagagc

SEQ ID NO: 632341 - RNA, 22 nt, Human
ccagccccugcgcccggccggg

SEQ ID NO: 632342 - RNA, 24 nt, Human
ccagugcagcuuggaagggacuga

SEQ ID NO: 632343 - RNA, 21 nt, Human
ccccagagcuacaggaacagg

SEQ ID NO: 632344 - RNA, 20 nt, Human
ccccaggcuuccucuccagc

SEQ ID NO: 632345 - RNA, 18 nt, Human
cccgcagagcccaccaga

SEQ ID NO: 632346 - RNA, 18 nt, Human
cccgcagagcccaccagg

SEQ ID NO: 632347 - RNA, 28 nt, Human
cccugcgcccggccggguccgcuccucc

SEQ ID NO: 632348 - RNA, 19 nt, Human
ccuugguggcaccgcacag

SEQ ID NO: 632349 - RNA, 20 nt, Human
cgaccggaacgcuccggcgg

SEQ ID NO: 632350 - RNA, 20 nt, Human
cgcaaguggguggcacaguc

SEQ ID NO: 632351 - RNA, 20 nt, Human
cgccgcgggccccgcgcagc

SEQ ID NO: 632352 - RNA, 20 nt, Human
cucccagaucaaaaagaccc

SEQ ID NO: 632353 - RNA, 21 nt, Human
cuccggcggccgcggacccca

SEQ ID NO: 632354 - RNA, 19 nt, Human
cugaggcuugguccuuccc

SEQ ID NO: 632355 - RNA, 22 nt, Human
cugcaaaugcccuggcacugcc

SEQ ID NO: 632356 - RNA, 19 nt, Human
cugccgaggccgagaugcc

SEQ ID NO: 632357 - RNA, 20 nt, Human
cuucaggcucuaccuggcug

SEQ ID NO: 632358 - RNA, 29 nt, Human
cuucuaaugcugucccagcaucuaccaau

SEQ ID NO: 632359 - RNA, 18 nt, Human
gagcacaguucugguagg

SEQ ID NO: 632360 - RNA, 23 nt, Human
gauugcuuuuuagcagaagucau

SEQ ID NO: 632361 - RNA, 19 nt, Human
gcacagcugccagcagagc

SEQ ID NO: 632362 - RNA, 22 nt, Human
gccccgcagcccuggggugcug

SEQ ID NO: 632363 - RNA, 23 nt, Human
ggaaggaaaaggggcaggggugg

SEQ ID NO: 632364 - RNA, 21 nt, Human
ggcagggguggggccuuggug

SEQ ID NO: 632365 - RNA, 24 nt, Human
gguagguggggccacggcugaccu

SEQ ID NO: 632366 - RNA, 21 nt, Human
uacacaauucccaaugaccag

SEQ ID NO: 632367 - RNA, 23 nt, Human
ucaguccaagccgcgcccccgcc

SEQ ID NO: 632368 - RNA, 22 nt, Human
ucccagcuucugcaaaugcccu

SEQ ID NO: 632369 - RNA, 18 nt, Human
ucgcugaggcccuggguu

SEQ ID NO: 632370 - RNA, 22 nt, Human
ucucccgcagagcccaccagaa

SEQ ID NO: 632371 - RNA, 27 nt, Human
ucucuggaagaaccagagcugcacccu

SEQ ID NO: 632372 - RNA, 18 nt, Human
ucugguagguggggccac

SEQ ID NO: 632373 - RNA, 23 nt, Human
ugcaaaugcccuggcacugcccu

SEQ ID NO: 632374 - RNA, 24 nt, Human
ugcaaaugcccuggcacugcccuc

SEQ ID NO: 632375 - RNA, 24 nt, Human
ugcaacaccaugaaacaagccugu

SEQ ID NO: 632376 - RNA, 26 nt, Human
ugcccagacgccgaccggaacgcucc

SEQ ID NO: 632377 - RNA, 22 nt, Human
ugccccaggcuuccucuccagc

SEQ ID NO: 632378 - RNA, 23 nt, Human
ugccgaggccgagaugcccagac

SEQ ID NO: 632379 - RNA, 23 nt, Human
ugcggccaacaagagccccgcag

SEQ ID NO: 632380 - RNA, 19 nt, Human
uggagggaagggggcaguc

SEQ ID NO: 632381 - RNA, 20 nt, Human
uggagugccgcuggagggaa

SEQ ID NO: 632382 - RNA, 19 nt, Human
ugguagguggggccacggc

SEQ ID NO: 632383 - RNA, 21 nt, Human
ugguagguggggccacggcug

SEQ ID NO: 632384 - RNA, 22 nt, Human
uguuccucuuuccaacaugggg

SEQ ID NO: 632385 - RNA, 27 nt, Human
uuccucuuuccaacaugggggggacuu

SEQ ID NO: 632386 - RNA, 25 nt, Human
uuucugccgaggccgagaugcccag

SEQ ID NO: 632387 - RNA, 18 nt, Human
uuuuuuuuuuuuaaggcc

SEQ ID NO: 632388 - RNA, 23 nt, Human
uuuuuuuuuuuuuuuuuuuaagg

SEQ ID NO: 632389 - RNA, 23 nt, Human
aaaaugccuuuccaaguagccuc

SEQ ID NO: 632390 - RNA, 22 nt, Human
aaagcucucuccuaacacccuu

SEQ ID NO: 632391 - RNA, 20 nt, Human
aacauacccaaggagacccu

SEQ ID NO: 632392 - RNA, 24 nt, Human
aaccaauuaaagaagggcaucugu

SEQ ID NO: 632393 - RNA, 20 nt, Human
aagaacauacccaaggagac

SEQ ID NO: 632394 - RNA, 23 nt, Human
acaguacaggggccaagaccaaa

SEQ ID NO: 632395 - RNA, 22 nt, Human
acauucagaggcuagaaagcca

SEQ ID NO: 632396 - RNA, 20 nt, Human
acuccgcggcucugcucucc

SEQ ID NO: 632397 - RNA, 19 nt, Human
acugaaggcaaaggcaaca

SEQ ID NO: 632398 - RNA, 22 nt, Human
acugaaggcaaaggcaacacaa

SEQ ID NO: 632399 - RNA, 21 nt, Human
agagguaaaacaguacagggg

SEQ ID NO: 632400 - RNA, 23 nt, Human
agcagcccuuggcagaaaccagg

SEQ ID NO: 632401 - RNA, 18 nt, Human
aggcuagaaagccacugu

SEQ ID NO: 632402 - RNA, 25 nt, Human
agggaaaaaaaaaugccagaauuua

SEQ ID NO: 632403 - RNA, 21 nt, Human
agggguggggcugaagcgcag

SEQ ID NO: 632404 - RNA, 23 nt, Human
caaagcucucuccuaacacccua

SEQ ID NO: 632405 - RNA, 18 nt, Human
caagaacauacccaagga

SEQ ID NO: 632406 - RNA, 22 nt, Human
caagaacauacccaaggagacc

SEQ ID NO: 632407 - RNA, 20 nt, Human
cagaauaguaagaagcagca

SEQ ID NO: 632408 - RNA, 27 nt, Human
cagaauaguaagaagcagccgguaccc

SEQ ID NO: 632409 - RNA, 28 nt, Human
cagagcucuccugggaaaaugccuuucc

SEQ ID NO: 632410 - RNA, 20 nt, Human
caggcgacgcgcuuuaagcc

SEQ ID NO: 632411 - RNA, 24 nt, Human
cauccugcccugcugcaggcuuca

SEQ ID NO: 632412 - RNA, 21 nt, Human
caucuguuccuccucauccua

SEQ ID NO: 632413 - RNA, 25 nt, Human
cauucagaggcuagaaagccacugu

SEQ ID NO: 632414 - RNA, 21 nt, Human
cccgcgccgcagacuccgcgg

SEQ ID NO: 632415 - RNA, 22 nt, Human
ccgggguggaggaagcgccgga

SEQ ID NO: 632416 - RNA, 20 nt, Human
ccucaggcccggcaggcagc

SEQ ID NO: 632417 - RNA, 22 nt, Human
ccucugggcccagggugccguc

SEQ ID NO: 632418 - RNA, 19 nt, Human
ccugugguguagggguggg

SEQ ID NO: 632419 - RNA, 21 nt, Human
ccugugguguagggguggggc

SEQ ID NO: 632420 - RNA, 18 nt, Human
cgcagccaccugacagag

SEQ ID NO: 632421 - RNA, 23 nt, Human
cgcuugggcccagcccuggaggc

SEQ ID NO: 632422 - RNA, 23 nt, Human
cuccucaggcccggcaggcagcu

SEQ ID NO: 632423 - RNA, 23 nt, Human
cuccucauccuaccaucaccuca

SEQ ID NO: 632424 - RNA, 21 nt, Human
cuugggcccagcccuggaggc

SEQ ID NO: 632425 - RNA, 23 nt, Human
gaaagccacugucccguucucca

SEQ ID NO: 632426 - RNA, 19 nt, Human
gacgcgcuuuaagccgcgg

SEQ ID NO: 632427 - RNA, 27 nt, Human
gacucuguagaaggggagauuucgcuu

SEQ ID NO: 632428 - RNA, 24 nt, Human
gcaaagcucucuccuaacacccua

SEQ ID NO: 632429 - RNA, 25 nt, Human
gcaaagcucucuccuaacacccuag

SEQ ID NO: 632430 - RNA, 18 nt, Human
gcagccgccgggguucgg

SEQ ID NO: 632431 - RNA, 22 nt, Human
gcagcuuacagcuucucuggcu

SEQ ID NO: 632432 - RNA, 19 nt, Human
gcugaagcgcagccaccug

SEQ ID NO: 632433 - RNA, 24 nt, Human
ggauccugcuaguccaggggcugc

SEQ ID NO: 632434 - RNA, 22 nt, Human
ggcccggcaggcagcuuacagc

SEQ ID NO: 632435 - RNA, 22 nt, Human
gggcccagggugccgucgacgg

SEQ ID NO: 632436 - RNA, 20 nt, Human
uaaaguacagcacuuuaauu

SEQ ID NO: 632437 - RNA, 21 nt, Human
uccaaguagccucucagagua

SEQ ID NO: 632438 - RNA, 24 nt, Human
uccagagccucugagaaguuaacu

SEQ ID NO: 632439 - RNA, 25 nt, Human
uccugcccauccugcccugcugcag

SEQ ID NO: 632440 - RNA, 19 nt, Human
ucugaaggcugaaaucagg

SEQ ID NO: 632441 - RNA, 18 nt, Human
ugaagaaggcuagggggu

SEQ ID NO: 632442 - RNA, 23 nt, Human
ugccagaauuuagagguaaaaca

SEQ ID NO: 632443 - RNA, 21 nt, Human
ugcccugcugcaggcuucagc

SEQ ID NO: 632444 - RNA, 23 nt, Human
uggaggaagcgccggagggacuc

SEQ ID NO: 632445 - RNA, 19 nt, Human
uggaggccuugaagaaggc

SEQ ID NO: 632446 - RNA, 19 nt, Human
uggaggccuugaagaaggc

SEQ ID NO: 632447 - RNA, 20 nt, Human
ugguuggagcuccucaggcc

SEQ ID NO: 632448 - RNA, 18 nt, Human
uuagguuuuccaaacagc

SEQ ID NO: 632449 - RNA, 19 nt, Human
uuagguuuuccaaacagcu

SEQ ID NO: 632450 - RNA, 23 nt, Human
uugcagggaaaaaaaaaugccag

SEQ ID NO: 632451 - RNA, 23 nt, Human
uuuccagguaggacuucaucucc

SEQ ID NO: 632452 - RNA, 25 nt, Human
uuuuuuagguuuuccaaacagcuuu

SEQ ID NO: 632453 - RNA, 22 nt, Human
aaacguccguuuauuucaaagc

SEQ ID NO: 632454 - RNA, 22 nt, Human
agacagaggacggggaggcugg

SEQ ID NO: 632455 - RNA, 22 nt, Human
agccgcugggccccgucuuccg

SEQ ID NO: 632456 - RNA, 18 nt, Human
cagaggggaccauguggc

SEQ ID NO: 632457 - RNA, 21 nt, Human
cagcgcugggggagccgcugg

SEQ ID NO: 632458 - RNA, 21 nt, Human
cagcgcugggggagccgcugg

SEQ ID NO: 632459 - RNA, 18 nt, Human
cccccgcgcggcacccgc

SEQ ID NO: 632460 - RNA, 23 nt, Human
ccccgcgcggcacccgccgccgg

SEQ ID NO: 632461 - RNA, 25 nt, Human
cccgcgcggcacccgccgccggcca

SEQ ID NO: 632462 - RNA, 19 nt, Human
cccgugcuucagcgcuggg

SEQ ID NO: 632463 - RNA, 20 nt, Human
cccgugcuucagcgcugggg

SEQ ID NO: 632464 - RNA, 24 nt, Human
ccgagggggaggcugggggcccac

SEQ ID NO: 632465 - RNA, 23 nt, Human
ccgccccccgcgcggcacccgcc

SEQ ID NO: 632466 - RNA, 20 nt, Human
ccgcccgccccccgcgcggc

SEQ ID NO: 632467 - RNA, 18 nt, Human
ccgccggggcacccaguc

SEQ ID NO: 632468 - RNA, 24 nt, Human
ccgggucguggaggcggccgaggg

SEQ ID NO: 632469 - RNA, 19 nt, Human
cgccccccgcgcggcaccc

SEQ ID NO: 632470 - RNA, 22 nt, Human
cgccggggcacccagucugugg

SEQ ID NO: 632471 - RNA, 24 nt, Human
cugaaccccgugcuucagcgcugg

SEQ ID NO: 632472 - RNA, 19 nt, Human
cuuccgccacaaaccaugc

SEQ ID NO: 632473 - RNA, 22 nt, Human
gacagaggacggggaggcuggg

SEQ ID NO: 632474 - RNA, 27 nt, Human
gagguuagacagaggacggggaggcuc

SEQ ID NO: 632475 - RNA, 19 nt, Human
gcccacguggcccguccug

SEQ ID NO: 632476 - RNA, 18 nt, Human
gcugaaccccgugcuuca

SEQ ID NO: 632477 - RNA, 22 nt, Human
gcugaaccccgugcuucagcgc

SEQ ID NO: 632478 - RNA, 20 nt, Human
gcugaaccccgugcuucagg

SEQ ID NO: 632479 - RNA, 22 nt, Human
gcugggccccgucuuccgccaa

SEQ ID NO: 632480 - RNA, 23 nt, Human
ggccgagggggaggcugggggcc

SEQ ID NO: 632481 - RNA, 19 nt, Human
ggccgccacgugagcucaa

SEQ ID NO: 632482 - RNA, 18 nt, Human
ggccggugggccgggccc

SEQ ID NO: 632483 - RNA, 19 nt, Human
gucccgagccccccuacuc

SEQ ID NO: 632484 - RNA, 23 nt, Human
uaugucagaguugaugaggaggu

SEQ ID NO: 632485 - RNA, 23 nt, Human
ucugugggugccguguggcgcug

SEQ ID NO: 632486 - RNA, 21 nt, Human
uggaggcggccgagggggagg

SEQ ID NO: 632487 - RNA, 19 nt, Human
ugucagaguugaugaggag

SEQ ID NO: 632488 - RNA, 20 nt, Human
uucaagauacacauauuuuu

SEQ ID NO: 632489 - RNA, 19 nt, Human
uuuuuuuuuuuuucuuugu

SEQ ID NO: 632490 - RNA, 26 nt, Human
uuuuuuuuuuuuuuuuuucuuugggg

SEQ ID NO: 632491 - RNA, 19 nt, Human
accagccuguguggccuca

SEQ ID NO: 632492 - RNA, 21 nt, Human
accagccuguguggccucagu

SEQ ID NO: 632493 - RNA, 24 nt, Human
acucaggcuugugggggcugggua

SEQ ID NO: 632494 - RNA, 20 nt, Human
acugcacucaggcuuguggg

SEQ ID NO: 632495 - RNA, 20 nt, Human
aggagggguccagagagcug

SEQ ID NO: 632496 - RNA, 22 nt, Human
agggaggggacagggugaggcc

SEQ ID NO: 632497 - RNA, 22 nt, Human
agggcauucggggcccaccagc

SEQ ID NO: 632498 - RNA, 19 nt, Human
aggugguagugagaaaaag

SEQ ID NO: 632499 - RNA, 26 nt, Human
cacccggggucuccugcgcgagcgcu

SEQ ID NO: 632500 - RNA, 21 nt, Human
cacccggguggcaguagaagc

SEQ ID NO: 632501 - RNA, 18 nt, Human
ccacugcacucaggcuug

SEQ ID NO: 632502 - RNA, 22 nt, Human
ccacugcacucaggcuuguggg

SEQ ID NO: 632503 - RNA, 22 nt, Human
ccacugcacucaggcuuguggg

SEQ ID NO: 632504 - RNA, 24 nt, Human
ccacugcacucaggcuuguggggg

SEQ ID NO: 632505 - RNA, 25 nt, Human
ccacugcacucaggcuugugggggc

SEQ ID NO: 632506 - RNA, 20 nt, Human
ccagagagcugaggucugcc

SEQ ID NO: 632507 - RNA, 22 nt, Human
ccggguggcaguagaagccucc

SEQ ID NO: 632508 - RNA, 18 nt, Human
cugccacugcacucaggc

SEQ ID NO: 632509 - RNA, 21 nt, Human
cugcgcgagcgcuuccgggcc

SEQ ID NO: 632510 - RNA, 22 nt, Human
gagaaggagcacccggguggca

SEQ ID NO: 632511 - RNA, 18 nt, Human
ggcagcagcugcccuggg

SEQ ID NO: 632512 - RNA, 21 nt, Human
ggggcccaccagccugugugg

SEQ ID NO: 632513 - RNA, 23 nt, Human
ggggguucugcagggaggggaca

SEQ ID NO: 632514 - RNA, 20 nt, Human
uaacaccacccugcaggugg

SEQ ID NO: 632515 - RNA, 21 nt, Human
uaacaccacccugcagguggu

SEQ ID NO: 632516 - RNA, 22 nt, Human
ucagucucagggagaaggagca

SEQ ID NO: 632517 - RNA, 19 nt, Human
ugguagugagaaaaagagg

SEQ ID NO: 632518 - RNA, 23 nt, Human
uucggggcccaccagccugugug

SEQ ID NO: 632519 - RNA, 20 nt, Human
uucugcagggaggggacagg

SEQ ID NO: 632520 - RNA, 21 nt, Human
aaaggcucucuauagccauaa

SEQ ID NO: 632521 - RNA, 22 nt, Human
aaccaccaaaauuaccaucucg

SEQ ID NO: 632522 - RNA, 21 nt, Human
aaccagagcaaugugaggcag

SEQ ID NO: 632523 - RNA, 24 nt, Human
acauggcacauucccugcaggucu

SEQ ID NO: 632524 - RNA, 19 nt, Human
accagcgccagcgacccac

SEQ ID NO: 632525 - RNA, 21 nt, Human
accagcgccagcgacccaccg

SEQ ID NO: 632526 - RNA, 21 nt, Human
acccccgcucugugccggagg

SEQ ID NO: 632527 - RNA, 27 nt, Human
agaaagacauggcacauucccugcagg

SEQ ID NO: 632528 - RNA, 21 nt, Human
agagaaccaccaaaauuacca

SEQ ID NO: 632529 - RNA, 22 nt, Human
agcagaacccaggcugggcccu

SEQ ID NO: 632530 - RNA, 18 nt, Human
aggcggcgugggccgagg

SEQ ID NO: 632531 - RNA, 21 nt, Human
agucagaaaagggaaggaauu

SEQ ID NO: 632532 - RNA, 25 nt, Human
auaacacugaagaaagacauggcac

SEQ ID NO: 632533 - RNA, 21 nt, Human
auagccauaacacugaagaaa

SEQ ID NO: 632534 - RNA, 20 nt, Human
augaagggaagccuuccaca

SEQ ID NO: 632535 - RNA, 20 nt, Human
caaaauuaccaucucggagc

SEQ ID NO: 632536 - RNA, 22 nt, Human
cagcuuccagcagaacccaggc

SEQ ID NO: 632537 - RNA, 21 nt, Human
ccaccagcgccagcgacccac

SEQ ID NO: 632538 - RNA, 20 nt, Human
cccggggcgggaacccaggc

SEQ ID NO: 632539 - RNA, 18 nt, Human
ccuucuggccaaaacugg

SEQ ID NO: 632540 - RNA, 18 nt, Human
cgagguagagaaccacca

SEQ ID NO: 632541 - RNA, 27 nt, Human
cggggcgggaacccaggcacggcugcc

SEQ ID NO: 632542 - RNA, 19 nt, Human
cugaugcgcagcggggcga

SEQ ID NO: 632543 - RNA, 19 nt, Human
cugccucgccuuaguaugc

SEQ ID NO: 632544 - RNA, 19 nt, Human
gaagucccgccuuaccgua

SEQ ID NO: 632545 - RNA, 19 nt, Human
gacccggggcgggaaccca

SEQ ID NO: 632546 - RNA, 22 nt, Human
gacccggggcgggaacccaggc

SEQ ID NO: 632547 - RNA, 19 nt, Human
gcagaacccaggcugggcc

SEQ ID NO: 632548 - RNA, 19 nt, Human
ggaacuaaugggagucuga

SEQ ID NO: 632549 - RNA, 21 nt, Human
ggaagccuuccacaucagcuu

SEQ ID NO: 632550 - RNA, 22 nt, Human
ggaauuuccuccaaggguuggg

SEQ ID NO: 632551 - RNA, 18 nt, Human
ggagcuccugcaagacac

SEQ ID NO: 632552 - RNA, 18 nt, Human
ggcaaaggccuccagcag

SEQ ID NO: 632553 - RNA, 24 nt, Human
ggcugggcccuucuggccaaaacu

SEQ ID NO: 632554 - RNA, 25 nt, Human
gggaacccaggcacggcugccacca

SEQ ID NO: 632555 - RNA, 30 nt, Human
gguggugacuuggaggcuggaaaaacuacc

SEQ ID NO: 632556 - RNA, 20 nt, Human
gugccggaggcagcguuucu

SEQ ID NO: 632557 - RNA, 19 nt, Human
uaacuuuaggcagacggcu

SEQ ID NO: 632558 - RNA, 19 nt, Human
uacuagguggugacuugga

SEQ ID NO: 632559 - RNA, 23 nt, Human
uacuagguggugacuuggaggcu

SEQ ID NO: 632560 - RNA, 22 nt, Human
uagccauaacacugaagaaaga

SEQ ID NO: 632561 - RNA, 21 nt, Human
ucagcuuccagcagaacccag

SEQ ID NO: 632562 - RNA, 24 nt, Human
ucaggcggcgugggccgagguaga

SEQ ID NO: 632563 - RNA, 18 nt, Human
ucagucagaaaagggaag

SEQ ID NO: 632564 - RNA, 26 nt, Human
uccacaucagcuuccagcagaaccca

SEQ ID NO: 632565 - RNA, 20 nt, Human
ugccaccagcgccagcgacc

SEQ ID NO: 632566 - RNA, 18 nt, Human
ugccuggaacuaauggga

SEQ ID NO: 632567 - RNA, 23 nt, Human
ugugaaaacaagaauuuccauga

SEQ ID NO: 632568 - RNA, 19 nt, Human
ugugagcggagcggggccg

SEQ ID NO: 632569 - RNA, 19 nt, Human
uuuaacucuggcaaaggcc

SEQ ID NO: 632570 - RNA, 19 nt, Human
aaaaggcuauuuacaagag

SEQ ID NO: 632571 - RNA, 19 nt, Human
aaagaugaguccguaagaa

SEQ ID NO: 632572 - RNA, 20 nt, Human
aacauucugcccuaaccagg

SEQ ID NO: 632573 - RNA, 20 nt, Human
acagaauaaagagcguggcu

SEQ ID NO: 632574 - RNA, 21 nt, Human
agacuguacacagcagcauca

SEQ ID NO: 632575 - RNA, 20 nt, Human
auucugccuccuccuucucc

SEQ ID NO: 632576 - RNA, 22 nt, Human
caaugcagacauucugccuccu

SEQ ID NO: 632577 - RNA, 22 nt, Human
cacagcagcaucaaaaaggcua

SEQ ID NO: 632578 - RNA, 19 nt, Human
caccagccaauggcaaagc

SEQ ID NO: 632579 - RNA, 19 nt, Human
cagcagcaucaaaaaggcu

SEQ ID NO: 632580 - RNA, 25 nt, Human
caucuggaaaacaguguaaccugaa

SEQ ID NO: 632581 - RNA, 19 nt, Human
cauucugccuccuccuucu

SEQ ID NO: 632582 - RNA, 21 nt, Human
ccagccaauggcaaagcuucu

SEQ ID NO: 632583 - RNA, 18 nt, Human
cccaaaaucuucugaagu

SEQ ID NO: 632584 - RNA, 24 nt, Human
ccgcaaauaagauucccacuuccc

SEQ ID NO: 632585 - RNA, 18 nt, Human
ccuccuccuucuccacca

SEQ ID NO: 632586 - RNA, 19 nt, Human
ccuuuuaaaacucuagcca

SEQ ID NO: 632587 - RNA, 18 nt, Human
cuagugacacugcuuuau

SEQ ID NO: 632588 - RNA, 21 nt, Human
cuguacacagcagcaucaaaa

SEQ ID NO: 632589 - RNA, 23 nt, Human
gagcaguuuaccaaggaacaggg

SEQ ID NO: 632590 - RNA, 23 nt, Human
gcaucaaaaaggcuauuuacaag

SEQ ID NO: 632591 - RNA, 19 nt, Human
gccuccuccuucuccacca

SEQ ID NO: 632592 - RNA, 22 nt, Human
uaacaaugcagacauucugccu

SEQ ID NO: 632593 - RNA, 18 nt, Human
uaggaaaaacuagugaca

SEQ ID NO: 632594 - RNA, 23 nt, Human
ucaacagaauccacuugaaagca

SEQ ID NO: 632595 - RNA, 23 nt, Human
ucagaggcccuguaccagcugcc

SEQ ID NO: 632596 - RNA, 21 nt, Human
ucugaaguuugagcuguaugg

SEQ ID NO: 632597 - RNA, 24 nt, Human
ugaaauaaacgcuaaagaugaguc

SEQ ID NO: 632598 - RNA, 22 nt, Human
ugaaguuugagcuguauggugu

SEQ ID NO: 632599 - RNA, 18 nt, Human
ugccaaggcaucuggaaa

SEQ ID NO: 632600 - RNA, 19 nt, Human
uggaaaacaguguaaccug

SEQ ID NO: 632601 - RNA, 23 nt, Human
ugguguaacaaugcagacauucu

SEQ ID NO: 632602 - RNA, 24 nt, Human
ugguguaacaaugcagacauucug

SEQ ID NO: 632603 - RNA, 21 nt, Human
uguuucauuaguuucuaauga

SEQ ID NO: 632604 - RNA, 22 nt, Human
uuaaaacucuagccagaaauac

SEQ ID NO: 632605 - RNA, 23 nt, Human
uugaaauaaacgcuaaagaugag

SEQ ID NO: 632606 - RNA, 21 nt, Human
uuucagaggcccuguaccaac

SEQ ID NO: 632607 - RNA, 21 nt, Human
uuuuuuuuuuuuuuuuuuagg

SEQ ID NO: 632608 - RNA, 24 nt, Human
aaacacagcggaagaggcgacagc

SEQ ID NO: 632609 - RNA, 20 nt, Human
aaguggagacuuucugacuc

SEQ ID NO: 632610 - RNA, 23 nt, Human
aauaaaaaucaaacauaugaaac

SEQ ID NO: 632611 - RNA, 20 nt, Human
acagcuuccuaauauuuccu

SEQ ID NO: 632612 - RNA, 21 nt, Human
cacagcuuccuaauauuuccu

SEQ ID NO: 632613 - RNA, 24 nt, Human
cagccccuuuccccacgcuccucc

SEQ ID NO: 632614 - RNA, 21 nt, Human
cauguugggaaaaccaugugc

SEQ ID NO: 632615 - RNA, 19 nt, Human
ccaagcgcgcgccuguacc

SEQ ID NO: 632616 - RNA, 20 nt, Human
ccccacgcuccuccuggguu

SEQ ID NO: 632617 - RNA, 21 nt, Human
ccuuuccccacgcuccuccug

SEQ ID NO: 632618 - RNA, 21 nt, Human
cggaagaggcgacagccaagc

SEQ ID NO: 632619 - RNA, 22 nt, Human
cggaagaggcgacagccaagcg

SEQ ID NO: 632620 - RNA, 23 nt, Human
cuccccgagaggcccacagcccc

SEQ ID NO: 632621 - RNA, 24 nt, Human
gaagguucuuaaauuacuccuugg

SEQ ID NO: 632622 - RNA, 21 nt, Human
gagcucugcuguaucuaugcg

SEQ ID NO: 632623 - RNA, 21 nt, Human
gcucccuggagagggagcaac

SEQ ID NO: 632624 - RNA, 19 nt, Human
ggagagggagcaacuugcu

SEQ ID NO: 632625 - RNA, 21 nt, Human
uccccgagaggcccacagccc

SEQ ID NO: 632626 - RNA, 20 nt, Human
ugggaaaaccaugugcaaua

SEQ ID NO: 632627 - RNA, 19 nt, Human
uguuauagagcuauguuca

SEQ ID NO: 632628 - RNA, 23 nt, Human
aaccuugucccuuugcgggaguc

SEQ ID NO: 632629 - RNA, 20 nt, Human
agaaggaaggugggaggggc

SEQ ID NO: 632630 - RNA, 21 nt, Human
aggaaggugggaggggcacug

SEQ ID NO: 632631 - RNA, 23 nt, Human
caccccucccaucccagaacucc

SEQ ID NO: 632632 - RNA, 24 nt, Human
caccccucccaucccagaacuccg

SEQ ID NO: 632633 - RNA, 18 nt, Human
caguguccucuguugagg

SEQ ID NO: 632634 - RNA, 18 nt, Human
caucccagaacuccguug

SEQ ID NO: 632635 - RNA, 20 nt, Human
ccaugcucccaccccuccca

SEQ ID NO: 632636 - RNA, 21 nt, Human
cccagaacuccguugggcuca

SEQ ID NO: 632637 - RNA, 21 nt, Human
cccaugcucccaccccuccca

SEQ ID NO: 632638 - RNA, 20 nt, Human
ccucccuucccaugcuccca

SEQ ID NO: 632639 - RNA, 18 nt, Human
cucugcaggagagggagg

SEQ ID NO: 632640 - RNA, 18 nt, Human
ggcacuguccaccagcac

SEQ ID NO: 632641 - RNA, 18 nt, Human
guggggaagaaggaaggu

SEQ ID NO: 632642 - RNA, 25 nt, Human
ucagcaaucuuuauucaguucuucu

SEQ ID NO: 632643 - RNA, 20 nt, Human
ucccaccccucccaucccag

SEQ ID NO: 632644 - RNA, 22 nt, Human
ugcaggagagggaggaaccuug

SEQ ID NO: 632645 - RNA, 21 nt, Human
ugcucccaccccucccauccc

SEQ ID NO: 632646 - RNA, 19 nt, Human
ugggaugccucccuuccca

SEQ ID NO: 632647 - RNA, 22 nt, Human
uggggaagaaggaaggugggag

SEQ ID NO: 632648 - RNA, 18 nt, Human
uguuguggggaagaagga

SEQ ID NO: 632649 - RNA, 23 nt, Human
uucccaugcucccaccccuccca

SEQ ID NO: 632650 - RNA, 18 nt, Human
uugagggaaggucuuggu

SEQ ID NO: 632651 - RNA, 22 nt, Human
uuuuuuuuuuuuuuuugcucag

SEQ ID NO: 632652 - RNA, 18 nt, Human
uuuuuuuuuuuuuuuuug

SEQ ID NO: 632653 - RNA, 20 nt, Human
uuuuuuuuuuuuuuuuugcu

SEQ ID NO: 632654 - RNA, 22 nt, Human
aaguccacagccacauccucaa

SEQ ID NO: 632655 - RNA, 19 nt, Human
acugacuucugggaauagg

SEQ ID NO: 632656 - RNA, 18 nt, Human
agccacauccucaaaugu

SEQ ID NO: 632657 - RNA, 19 nt, Human
cugcugccacucuuccugc

SEQ ID NO: 632658 - RNA, 28 nt, Human
guccacagccacauccucaaaugucacu

SEQ ID NO: 632659 - RNA, 19 nt, Human
uaagcagaucauucugugg

SEQ ID NO: 632660 - RNA, 20 nt, Human
uaagcagaucauucugugga

SEQ ID NO: 632661 - RNA, 22 nt, Human
ucuacaguugagaaguugucac

SEQ ID NO: 632662 - RNA, 23 nt, Human
ugagggccuaagcagaucauucu

SEQ ID NO: 632663 - RNA, 18 nt, Human
ugugaagagggcugagac

SEQ ID NO: 632664 - RNA, 24 nt, Human
uucuacaguugagaaguugucacu

SEQ ID NO: 632665 - RNA, 21 nt, Human
aaagaguccaguccacuuggc

SEQ ID NO: 632666 - RNA, 21 nt, Human
aaagaguccaguccacuuggc

SEQ ID NO: 632667 - RNA, 18 nt, Human
aaagcccugggccugagc

SEQ ID NO: 632668 - RNA, 18 nt, Human
aacacgcucuuccccuuc

SEQ ID NO: 632669 - RNA, 22 nt, Human
aacagcaucucuagcuccuggu

SEQ ID NO: 632670 - RNA, 23 nt, Human
agauagaucagcuccccaagggu

SEQ ID NO: 632671 - RNA, 21 nt, Human
agcacucucuaggguucuuuu

SEQ ID NO: 632672 - RNA, 22 nt, Human
agcacucucuaggguucuuuuu

SEQ ID NO: 632673 - RNA, 25 nt, Human
agcaguggagugucugaauagguac

SEQ ID NO: 632674 - RNA, 21 nt, Human
aggagaauggcgagugauucu

SEQ ID NO: 632675 - RNA, 20 nt, Human
aggguucuuuuuuuuuucuu

SEQ ID NO: 632676 - RNA, 23 nt, Human
agucuuugaagaugaaucccaca

SEQ ID NO: 632677 - RNA, 21 nt, Human
aucuccuuuuuuuuuccuuua

SEQ ID NO: 632678 - RNA, 20 nt, Human
aucugcuguuccugaaguuu

SEQ ID NO: 632679 - RNA, 27 nt, Human
auggcagugaauaaggucaacauguac

SEQ ID NO: 632680 - RNA, 21 nt, Human
caagggaacagcccagcacuc

SEQ ID NO: 632681 - RNA, 19 nt, Human
caauugccucaacaacagg

SEQ ID NO: 632682 - RNA, 21 nt, Human
cacuaaaaugcagaagaaaac

SEQ ID NO: 632683 - RNA, 19 nt, Human
cagaagaaaacaauuuuua

SEQ ID NO: 632684 - RNA, 21 nt, Human
caugugauucacaacacgcuc

SEQ ID NO: 632685 - RNA, 19 nt, Human
ccuguaauaaagcccuggg

SEQ ID NO: 632686 - RNA, 24 nt, Human
cuguuuuaaucugcuguuccugaa

SEQ ID NO: 632687 - RNA, 20 nt, Human
gcagaaaaggugguacagac

SEQ ID NO: 632688 - RNA, 21 nt, Human
ggccugagcagaaaagguggu

SEQ ID NO: 632689 - RNA, 19 nt, Human
gggccugagcagaaaaggu

SEQ ID NO: 632690 - RNA, 21 nt, Human
gugaauaaggucaacauguac

SEQ ID NO: 632691 - RNA, 24 nt, Human
uaaaaaaugaauucuacaaacaug

SEQ ID NO: 632692 - RNA, 23 nt, Human
uaacagguaaaaucuaagucaaa

SEQ ID NO: 632693 - RNA, 24 nt, Human
uaacagguaaaaucuaagucaaac

SEQ ID NO: 632694 - RNA, 18 nt, Human
uaaggucaacauguacug

SEQ ID NO: 632695 - RNA, 24 nt, Human
uaagucaagaaaagaguccagucc

SEQ ID NO: 632696 - RNA, 24 nt, Human
uaagucaagaaaagaguccagucc

SEQ ID NO: 632697 - RNA, 22 nt, Human
uaaucugcuguuccugaaguuu

SEQ ID NO: 632698 - RNA, 27 nt, Human
uaggguucuuuuuuuuuucuuccuggg

SEQ ID NO: 632699 - RNA, 22 nt, Human
ucccgaaggcaccucauuagca

SEQ ID NO: 632700 - RNA, 26 nt, Human
ucccgcgguugcgcgcaucuccuuuu

SEQ ID NO: 632701 - RNA, 24 nt, Human
ucuacaaacaugacauuacuugug

SEQ ID NO: 632702 - RNA, 24 nt, Human
ucuuggaacauguucagaugaaca

SEQ ID NO: 632703 - RNA, 18 nt, Human
ucuuuuuuuuuucuuccu

SEQ ID NO: 632704 - RNA, 19 nt, Human
ucuuuuuuuuuucuuccug

SEQ ID NO: 632705 - RNA, 23 nt, Human
ugacauuacuuguggaaccacua

SEQ ID NO: 632706 - RNA, 23 nt, Human
ugauucacaacacgcucuucccc

SEQ ID NO: 632707 - RNA, 18 nt, Human
ugcagauggcagaggcca

SEQ ID NO: 632708 - RNA, 21 nt, Human
uggaaggcaguaggagaaugg

SEQ ID NO: 632709 - RNA, 22 nt, Human
uggaaggcaguaggagaauggc

SEQ ID NO: 632710 - RNA, 22 nt, Human
uggcaaaguucaaaaaggccuc

SEQ ID NO: 632711 - RNA, 25 nt, Human
aagcagaaauaaaguuuaauuuuug

SEQ ID NO: 632712 - RNA, 20 nt, Human
aaggagugaacugcugcugc

SEQ ID NO: 632713 - RNA, 23 nt, Human
aagggcauuuaaucaggaggaaa

SEQ ID NO: 632714 - RNA, 18 nt, Human
agggucaaaggaacgagc

SEQ ID NO: 632715 - RNA, 18 nt, Human
agguaacaguacgucacc

SEQ ID NO: 632716 - RNA, 19 nt, Human
aucucuguaaacuugcccu

SEQ ID NO: 632717 - RNA, 24 nt, Human
cagugcagcgugaacaggggcuuu

SEQ ID NO: 632718 - RNA, 21 nt, Human
caucucuguaaacuugcccuu

SEQ ID NO: 632719 - RNA, 24 nt, Human
caucucuguaaacuugcccuugac

SEQ ID NO: 632720 - RNA, 21 nt, Human
ccucugugggcucugcugcuu

SEQ ID NO: 632721 - RNA, 18 nt, Human
cuaauccucacaaagauc

SEQ ID NO: 632722 - RNA, 23 nt, Human
cuuuccaacagcaaguucagucg

SEQ ID NO: 632723 - RNA, 20 nt, Human
cuuuguccuuucucaguucu

SEQ ID NO: 632724 - RNA, 20 nt, Human
gagauaccaucuccuuaaaa

SEQ ID NO: 632725 - RNA, 24 nt, Human
ggaaagguuuggaaaacuaacuca

SEQ ID NO: 632726 - RNA, 20 nt, Human
ggagacaagggucaaaggaa

SEQ ID NO: 632727 - RNA, 21 nt, Human
ggggagauaccaucuccuuaa

SEQ ID NO: 632728 - RNA, 24 nt, Human
guacgucaccauuggcuucuggcu

SEQ ID NO: 632729 - RNA, 21 nt, Human
guucagguaacaguacgucac

SEQ ID NO: 632730 - RNA, 21 nt, Human
uaacaguacgucaccauuggc

SEQ ID NO: 632731 - RNA, 18 nt, Human
uacuuuguccuuucucag

SEQ ID NO: 632732 - RNA, 22 nt, Human
ucaggaggaaagguuuggaaaa

SEQ ID NO: 632733 - RNA, 21 nt, Human
ugugaagguuucguauagcca

SEQ ID NO: 632734 - RNA, 25 nt, Human
uugaagaugguucuuaauuucuuuu

SEQ ID NO: 632735 - RNA, 19 nt, Human
uuuuuuuuuuuuuuuuuaa

SEQ ID NO: 632736 - RNA, 24 nt, Human
uuuuuuuuuuuuuuuuuaaguuuu

SEQ ID NO: 632737 - RNA, 22 nt, Human
aagcaaacuugaauaaagcuag

SEQ ID NO: 632738 - RNA, 21 nt, Human
aauucaaagauuucaagugga

SEQ ID NO: 632739 - RNA, 21 nt, Human
acucuaucucacaucuacuga

SEQ ID NO: 632740 - RNA, 26 nt, Human
agacaggaagggaucagaagggaccc

SEQ ID NO: 632741 - RNA, 20 nt, Human
aggcauguuuguacaccaac

SEQ ID NO: 632742 - RNA, 23 nt, Human
agggcaaaaaacuauccaugaag

SEQ ID NO: 632743 - RNA, 26 nt, Human
auagggcaaaaaacuauccaugaagc

SEQ ID NO: 632744 - RNA, 25 nt, Human
augaagcuaauaaaaaagaaaugug

SEQ ID NO: 632745 - RNA, 20 nt, Human
caaaaaacuauccaugaagc

SEQ ID NO: 632746 - RNA, 23 nt, Human
caaaaaacuauccaugaagcuaa

SEQ ID NO: 632747 - RNA, 25 nt, Human
caaaaaacuauccaugaagcuaaua

SEQ ID NO: 632748 - RNA, 18 nt, Human
ccccgccggcagugcugc

SEQ ID NO: 632749 - RNA, 22 nt, Human
ccccuccaccuccaagucccug

SEQ ID NO: 632750 - RNA, 19 nt, Human
ccgccgcguccccuccacc

SEQ ID NO: 632751 - RNA, 20 nt, Human
ccgccgcguccccuccaccu

SEQ ID NO: 632752 - RNA, 20 nt, Human
cugcuccugugcuccccguc

SEQ ID NO: 632753 - RNA, 19 nt, Human
gcugcuccugugcuccccg

SEQ ID NO: 632754 - RNA, 22 nt, Human
ggaggagccauguaauuuuaug

SEQ ID NO: 632755 - RNA, 23 nt, Human
uacaccaacugaaugauucaaua

SEQ ID NO: 632756 - RNA, 19 nt, Human
uaccgccgcguccccucca

SEQ ID NO: 632757 - RNA, 18 nt, Human
ucccuggcacccgccccc

SEQ ID NO: 632758 - RNA, 25 nt, Human
ucucacaucuacugaaugcaaagca

SEQ ID NO: 632759 - RNA, 26 nt, Human
uuuuuugcuguuccuuucuuuuuuaa

SEQ ID NO: 632760 - RNA, 20 nt, Human
uuuuuuuuuuuuuuuugcug

SEQ ID NO: 632761 - RNA, 21 nt, Human
uuuuuuuuuuuuuuuugcugu

SEQ ID NO: 632762 - RNA, 20 nt, Human
uuuuuuuuuuuuuuuuugcu

SEQ ID NO: 632763 - RNA, 20 nt, Human
uuuuuuuuuuuuuuuuuugg

SEQ ID NO: 632764 - RNA, 21 nt, Human
aaaaacagagaucaagaggaa

SEQ ID NO: 632765 - RNA, 19 nt, Human
aaaacagagaucaagagga

SEQ ID NO: 632766 - RNA, 19 nt, Human
acccuuuggcguccgucgc

SEQ ID NO: 632767 - RNA, 18 nt, Human
agcacacccagugccccc

SEQ ID NO: 632768 - RNA, 18 nt, Human
agugcguggcguggucuc

SEQ ID NO: 632769 - RNA, 19 nt, Human
agugcguggcguggucucg

SEQ ID NO: 632770 - RNA, 24 nt, Human
augaauuucugcuuaaaaacagag

SEQ ID NO: 632771 - RNA, 21 nt, Human
cacccacaguggacuucgcaa

SEQ ID NO: 632772 - RNA, 21 nt, Human
cacccagugcccccacguucc

SEQ ID NO: 632773 - RNA, 24 nt, Human
cacccagugcccccacguucccgc

SEQ ID NO: 632774 - RNA, 22 nt, Human
cacugggugugguggugcugga

SEQ ID NO: 632775 - RNA, 23 nt, Human
cagcgccagggcagccuuggcag

SEQ ID NO: 632776 - RNA, 19 nt, Human
ccaaggccucgaucugaag

SEQ ID NO: 632777 - RNA, 19 nt, Human
ccacugggugugguggugc

SEQ ID NO: 632778 - RNA, 21 nt, Human
ccagagccgaggcugugccca

SEQ ID NO: 632779 - RNA, 19 nt, Human
ccaggauggggacuaccga

SEQ ID NO: 632780 - RNA, 22 nt, Human
cccacaguggacuucgcaaagg

SEQ ID NO: 632781 - RNA, 18 nt, Human
cccacgguggagcccggg

SEQ ID NO: 632782 - RNA, 26 nt, Human
cccagagccgaggcugugcccaggac

SEQ ID NO: 632783 - RNA, 23 nt, Human
cccaugcuaaagcagaccggggc

SEQ ID NO: 632784 - RNA, 18 nt, Human
ccccacgugggcagggau

SEQ ID NO: 632785 - RNA, 27 nt, Human
ccccacgugggcagggaucagccaggc

SEQ ID NO: 632786 - RNA, 22 nt, Human
ccccacguucccgcuggcccag

SEQ ID NO: 632787 - RNA, 18 nt, Human
ccccauagaucgugccag

SEQ ID NO: 632788 - RNA, 19 nt, Human
ccccgaaggccaggccacc

SEQ ID NO: 632789 - RNA, 22 nt, Human
cccgcugugggcucuggagggc

SEQ ID NO: 632790 - RNA, 18 nt, Human
cccggcccaguccccggc

SEQ ID NO: 632791 - RNA, 25 nt, Human
cccggcgcccuccggguuucucuuu

SEQ ID NO: 632792 - RNA, 23 nt, Human
cccuccaggauggggacuaccga

SEQ ID NO: 632793 - RNA, 24 nt, Human
ccgaggcugugcccaggacugucc

SEQ ID NO: 632794 - RNA, 19 nt, Human
ccgcagggcgucugagacc

SEQ ID NO: 632795 - RNA, 23 nt, Human
ccggcgcccuccggguuucucuu

SEQ ID NO: 632796 - RNA, 25 nt, Human
ccgggucccugccgccaagugcgug

SEQ ID NO: 632797 - RNA, 18 nt, Human
ccucagauggggguccca

SEQ ID NO: 632798 - RNA, 20 nt, Human
ccucaggcggcccgggaccc

SEQ ID NO: 632799 - RNA, 21 nt, Human
ccucaggcggcccgggacccu

SEQ ID NO: 632800 - RNA, 19 nt, Human
ccugcagaccccggcccag

SEQ ID NO: 632801 - RNA, 20 nt, Human
ccugcagcuccggaaauggg

SEQ ID NO: 632802 - RNA, 19 nt, Human
cgccaaggggucggccucc

SEQ ID NO: 632803 - RNA, 22 nt, Human
cgcgggaggacagcccagaggc

SEQ ID NO: 632804 - RNA, 22 nt, Human
cgcuggcccaggucccggagac

SEQ ID NO: 632805 - RNA, 19 nt, Human
cggccuccgggucccugcc

SEQ ID NO: 632806 - RNA, 20 nt, Human
cgucugagacccacggugga

SEQ ID NO: 632807 - RNA, 24 nt, Human
cgucugagacccacgguggagccc

SEQ ID NO: 632808 - RNA, 18 nt, Human
cgugccagcuuuggcugc

SEQ ID NO: 632809 - RNA, 22 nt, Human
cgugggcagggaucagccaggc

SEQ ID NO: 632810 - RNA, 20 nt, Human
cguggggaccccgaaggcca

SEQ ID NO: 632811 - RNA, 21 nt, Human
cuaggcagagcggcaccugcc

SEQ ID NO: 632812 - RNA, 23 nt, Human
cucagcgccagggcagccuuggc

SEQ ID NO: 632813 - RNA, 23 nt, Human
cucaggcagcugguuccuaggcu

SEQ ID NO: 632814 - RNA, 22 nt, Human
cucuauccugcagcuccggaaa

SEQ ID NO: 632815 - RNA, 21 nt, Human
cugagcccugcagaccccggc

SEQ ID NO: 632816 - RNA, 20 nt, Human
cugguucccgccaagggguc

SEQ ID NO: 632817 - RNA, 18 nt, Human
cugugguggggaggagcc

SEQ ID NO: 632818 - RNA, 20 nt, Human
cuuucucccaggaacuccgg

SEQ ID NO: 632819 - RNA, 23 nt, Human
gaccccccaaggccucgaucuga

SEQ ID NO: 632820 - RNA, 24 nt, Human
gcagaugcgcagagccugccccuc

SEQ ID NO: 632821 - RNA, 20 nt, Human
gccccuggcuuuucuaggca

SEQ ID NO: 632822 - RNA, 21 nt, Human
gcccgggacccuuuggcgucc

SEQ ID NO: 632823 - RNA, 18 nt, Human
gccgggcaccggcuggaa

SEQ ID NO: 632824 - RNA, 18 nt, Human
gcucagcugagcccugca

SEQ ID NO: 632825 - RNA, 21 nt, Human
gcuggcccaggucccggagac

SEQ ID NO: 632826 - RNA, 18 nt, Human
gcuggggccucaccgugu

SEQ ID NO: 632827 - RNA, 19 nt, Human
ggaccccgaaggccaggcc

SEQ ID NO: 632828 - RNA, 20 nt, Human
ggaggagccucaggcggccc

SEQ ID NO: 632829 - RNA, 20 nt, Human
ggaggcggagggacccagag

SEQ ID NO: 632830 - RNA, 20 nt, Human
ggcggagggacccagagccg

SEQ ID NO: 632831 - RNA, 19 nt, Human
gugccagcuuuggcugcag

SEQ ID NO: 632832 - RNA, 21 nt, Human
guggugcuggaggaguccugc

SEQ ID NO: 632833 - RNA, 21 nt, Human
guguuuccugggggggcccgg

SEQ ID NO: 632834 - RNA, 18 nt, Human
ucagcugagcccugcaga

SEQ ID NO: 632835 - RNA, 19 nt, Human
ucccgcuggcccagguccc

SEQ ID NO: 632836 - RNA, 18 nt, Human
ucccugccgccaagugcg

SEQ ID NO: 632837 - RNA, 21 nt, Human
uccuaggcuguguccucccca

SEQ ID NO: 632838 - RNA, 18 nt, Human
ucgggccacugggugugg

SEQ ID NO: 632839 - RNA, 18 nt, Human
ucgugccagcuuuggcug

SEQ ID NO: 632840 - RNA, 23 nt, Human
ucucaggcagcugguuccuaggc

SEQ ID NO: 632841 - RNA, 20 nt, Human
ucugcuuaaaaacagagauu

SEQ ID NO: 632842 - RNA, 20 nt, Human
ugaggcagugacuugugggg

SEQ ID NO: 632843 - RNA, 21 nt, Human
ugaggcagugacuuguggggg

SEQ ID NO: 632844 - RNA, 20 nt, Human
ugauggcacccacaguggac

SEQ ID NO: 632845 - RNA, 23 nt, Human
ugccaacacuuugugcugguucc

SEQ ID NO: 632846 - RNA, 18 nt, Human
ugcccaggacugucccgg

SEQ ID NO: 632847 - RNA, 23 nt, Human
ugccccauagaucgugccagcuu

SEQ ID NO: 632848 - RNA, 18 nt, Human
ugcgcagagccugccccu

SEQ ID NO: 632849 - RNA, 20 nt, Human
ugcugguucccgccaagggg

SEQ ID NO: 632850 - RNA, 18 nt, Human
uggcugcaggcgcugggg

SEQ ID NO: 632851 - RNA, 18 nt, Human
uggcugcgugcuuggggu

SEQ ID NO: 632852 - RNA, 18 nt, Human
uggcugugguggggagga

SEQ ID NO: 632853 - RNA, 19 nt, Human
uggggaccccgaaggccag

SEQ ID NO: 632854 - RNA, 20 nt, Human
uggggaccccgaaggccagg

SEQ ID NO: 632855 - RNA, 20 nt, Human
ugguggugcuggaggagucc

SEQ ID NO: 632856 - RNA, 23 nt, Human
ugguuccuaggcuguguccuccc

SEQ ID NO: 632857 - RNA, 19 nt, Human
uguggggguuagauguggg

SEQ ID NO: 632858 - RNA, 24 nt, Human
uugugcugguucccgccaaggggu

SEQ ID NO: 632859 - RNA, 22 nt, Human
uuugugcugguucccgccaagg

SEQ ID NO: 632860 - RNA, 22 nt, Human
uuuuuuuuugaguaaugccgac

SEQ ID NO: 632861 - RNA, 18 nt, Human
uuuuuuuuuuuuuuuuug

SEQ ID NO: 632862 - RNA, 18 nt, Human
aaccugaggccucuccuc

SEQ ID NO: 632863 - RNA, 19 nt, Human
acaaagaccaacaaagaca

SEQ ID NO: 632864 - RNA, 21 nt, Human
accucagucuucuccagccag

SEQ ID NO: 632865 - RNA, 24 nt, Human
caaauaacaaccugaggccucucc

SEQ ID NO: 632866 - RNA, 23 nt, Human
caccucugacaccugcugagacc

SEQ ID NO: 632867 - RNA, 24 nt, Human
caccucugacaccugcugagaccu

SEQ ID NO: 632868 - RNA, 19 nt, Human
cagguaagacacuucccuc

SEQ ID NO: 632869 - RNA, 20 nt, Human
ccaacaaagacaaucucaga

SEQ ID NO: 632870 - RNA, 24 nt, Human
ccaacaaagacaaucucagaggca

SEQ ID NO: 632871 - RNA, 26 nt, Human
ccaaccaaauaacaaccugaggccuc

SEQ ID NO: 632872 - RNA, 23 nt, Human
cccaaccaaauaacaaccugagg

SEQ ID NO: 632873 - RNA, 19 nt, Human
cccccgggcucggcccggc

SEQ ID NO: 632874 - RNA, 21 nt, Human
cccccgggcucggcccggccc

SEQ ID NO: 632875 - RNA, 24 nt, Human
ccccugcugcaagguggaugggaa

SEQ ID NO: 632876 - RNA, 20 nt, Human
cccgggcucggcccggcccc

SEQ ID NO: 632877 - RNA, 18 nt, Human
cgcccccgggcucggccc

SEQ ID NO: 632878 - RNA, 23 nt, Human
cgcccccgggcucggcccggccc

SEQ ID NO: 632879 - RNA, 20 nt, Human
cuccaucacucucuccucca

SEQ ID NO: 632880 - RNA, 22 nt, Human
cuccccaaccaaauaacaaccu

SEQ ID NO: 632881 - RNA, 19 nt, Human
cucugcucugugccucccc

SEQ ID NO: 632882 - RNA, 24 nt, Human
cucuugggagaccagguccugcuc

SEQ ID NO: 632883 - RNA, 19 nt, Human
cugagaccugaaccucugc

SEQ ID NO: 632884 - RNA, 20 nt, Human
cugcucugugccuccccaac

SEQ ID NO: 632885 - RNA, 19 nt, Human
gaccucagucuucuccagc

SEQ ID NO: 632886 - RNA, 21 nt, Human
ggaugguccccauugguuccc

SEQ ID NO: 632887 - RNA, 18 nt, Human
gggaagggcuguaaucac

SEQ ID NO: 632888 - RNA, 22 nt, Human
uaaacaaagaccaacaaagaca

SEQ ID NO: 632889 - RNA, 23 nt, Human
uaaacaaagaccaacaaagacaa

SEQ ID NO: 632890 - RNA, 25 nt, Human
ucaaauaucaacaaguagucccgcu

SEQ ID NO: 632891 - RNA, 18 nt, Human
ucagcccuccaucacucu

SEQ ID NO: 632892 - RNA, 26 nt, Human
uccccaaccaaauaacaaccugaggc

SEQ ID NO: 632893 - RNA, 18 nt, Human
uccuggggcaaucacuua

SEQ ID NO: 632894 - RNA, 22 nt, Human
ucuccucagcccuccaucacuc

SEQ ID NO: 632895 - RNA, 19 nt, Human
ucugacuggagauccagaa

SEQ ID NO: 632896 - RNA, 18 nt, Human
ucuugggagaccaggucc

SEQ ID NO: 632897 - RNA, 20 nt, Human
ugaaaggcacaaagccccug

SEQ ID NO: 632898 - RNA, 21 nt, Human
ugaaaggcacaaagccccugc

SEQ ID NO: 632899 - RNA, 20 nt, Human
ugacuggagauccagaaguu

SEQ ID NO: 632900 - RNA, 20 nt, Human
uggaccucagucuucuccag

SEQ ID NO: 632901 - RNA, 20 nt, Human
uucaugaggaaggucggggc

SEQ ID NO: 632902 - RNA, 23 nt, Human
uuuuuuuuuuuuuuuucaugagg

SEQ ID NO: 632903 - RNA, 19 nt, Human
cacuucuccacagucgggg

SEQ ID NO: 632904 - RNA, 20 nt, Human
uaccccggacacuucuccac

SEQ ID NO: 632905 - RNA, 22 nt, Human
uaccccggacacuucuccacag

SEQ ID NO: 632906 - RNA, 23 nt, Human
ucagaaacacauuccuguaacgg

SEQ ID NO: 632907 - RNA, 20 nt, Human
ucgggggcgaugacgcucuc

SEQ ID NO: 632908 - RNA, 23 nt, Human
ucgggggcgaugacgcucucaag

SEQ ID NO: 632909 - RNA, 24 nt, Human
acccuaguggauccaucacucauc

SEQ ID NO: 632910 - RNA, 19 nt, Human
aguugauucauuaaacuug

SEQ ID NO: 632911 - RNA, 20 nt, Human
auguucuucccuucauguuu

SEQ ID NO: 632912 - RNA, 21 nt, Human
auucaaaauagcauuuuugau

SEQ ID NO: 632913 - RNA, 21 nt, Human
cacagugaucuguugcuuccc

SEQ ID NO: 632914 - RNA, 18 nt, Human
cagugaguauuuuugcuu

SEQ ID NO: 632915 - RNA, 18 nt, Human
cccucuaauacuuuccuu

SEQ ID NO: 632916 - RNA, 22 nt, Human
ccuugcauuccuacucucaaaa

SEQ ID NO: 632917 - RNA, 18 nt, Human
cugaagccauaucacccu

SEQ ID NO: 632918 - RNA, 29 nt, Human
cugccucauugccacagucucugccuuua

SEQ ID NO: 632919 - RNA, 25 nt, Human
cuuaagaucauaccaaaguuguucg

SEQ ID NO: 632920 - RNA, 18 nt, Human
gcacugaaaaaaauaugu

SEQ ID NO: 632921 - RNA, 19 nt, Human
gcccagauuccauaaugcu

SEQ ID NO: 632922 - RNA, 18 nt, Human
gcuagaguaaaaagcaca

SEQ ID NO: 632923 - RNA, 24 nt, Human
ggggagaaguuuucuugauguucu

SEQ ID NO: 632924 - RNA, 22 nt, Human
ggguaggccaccuggaaauucu

SEQ ID NO: 632925 - RNA, 20 nt, Human
gugaucuguugcuucccauu

SEQ ID NO: 632926 - RNA, 22 nt, Human
gugaucuguugcuucccauuuc

SEQ ID NO: 632927 - RNA, 19 nt, Human
uaaaaagcacaugagugga

SEQ ID NO: 632928 - RNA, 21 nt, Human
uaaaaagcacaugaguggaaa

SEQ ID NO: 632929 - RNA, 24 nt, Human
uaaaaggcacacauuuuaaaaaca

SEQ ID NO: 632930 - RNA, 21 nt, Human
uaaagccuucaguaccuaaaa

SEQ ID NO: 632931 - RNA, 27 nt, Human
uacacacaaacagauuacuuuuaugug

SEQ ID NO: 632932 - RNA, 23 nt, Human
uagcauuuuugaugaucuuaauu

SEQ ID NO: 632933 - RNA, 19 nt, Human
uaguugaaggcuggauaau

SEQ ID NO: 632934 - RNA, 21 nt, Human
uccaggguaaagauaguugaa

SEQ ID NO: 632935 - RNA, 21 nt, Human
ucucaaaauuccauucucuuu

SEQ ID NO: 632936 - RNA, 20 nt, Human
ucucccaaaacauagacuga

SEQ ID NO: 632937 - RNA, 22 nt, Human
ucuggguaggccaccuggaaau

SEQ ID NO: 632938 - RNA, 22 nt, Human
ucuguugcuucccauuucuccc

SEQ ID NO: 632939 - RNA, 18 nt, Human
ugaaaagucaaaaaucga

SEQ ID NO: 632940 - RNA, 22 nt, Human
ugaguggaaagucaacaggacu

SEQ ID NO: 632941 - RNA, 18 nt, Human
ugccucauugccacaguc

SEQ ID NO: 632942 - RNA, 20 nt, Human
ugccuuuaaugucaaggcca

SEQ ID NO: 632943 - RNA, 19 nt, Human
ugcuucccauuucucccaa

SEQ ID NO: 632944 - RNA, 22 nt, Human
uggagcauacacaacuuugaaa

SEQ ID NO: 632945 - RNA, 19 nt, Human
uguucaugcugucuuccuu

SEQ ID NO: 632946 - RNA, 22 nt, Human
uuaaagccuucaguaccuaaaa

SEQ ID NO: 632947 - RNA, 19 nt, Human
uuauauauauacuuucaua

SEQ ID NO: 632948 - RNA, 24 nt, Human
uuauauauauacuuucauauuccc

SEQ ID NO: 632949 - RNA, 23 nt, Human
uucauauuccccccucuaauacu

SEQ ID NO: 632950 - RNA, 23 nt, Human
uuccaggugguauaucuggcagu

SEQ ID NO: 632951 - RNA, 24 nt, Human
uuuuaaaugucauccucuuccuua

SEQ ID NO: 632952 - RNA, 18 nt, Human
uuuuuuuuuuuuuuuuug

SEQ ID NO: 632953 - RNA, 22 nt, Human
uuuuuuuuuuuuuuuuuggauu

SEQ ID NO: 632954 - RNA, 24 nt, Human
acagcagcaacgggcgggaagggc

SEQ ID NO: 632955 - RNA, 21 nt, Human
ccacaggucccaggggagcuc

SEQ ID NO: 632956 - RNA, 21 nt, Human
cugaguccucugagaauuuau

SEQ ID NO: 632957 - RNA, 21 nt, Human
gucugugggcggcggccacag

SEQ ID NO: 632958 - RNA, 18 nt, Human
uauuacuacggaucacag

SEQ ID NO: 632959 - RNA, 22 nt, Human
ucacagcagcaacgggcgggaa

SEQ ID NO: 632960 - RNA, 21 nt, Human
uuuuuuuuuuuuuaaaggcug

SEQ ID NO: 632961 - RNA, 22 nt, Human
uuuuuuuuuuuuuuuuuaaagg

SEQ ID NO: 632962 - RNA, 20 nt, Human
aaaaacaggguccagugacc

SEQ ID NO: 632963 - RNA, 22 nt, Human
aaaaccaaugaucuaagaauaa

SEQ ID NO: 632964 - RNA, 21 nt, Human
aaagagcaaaaagaccaacac

SEQ ID NO: 632965 - RNA, 29 nt, Human
aaagggaauagucaauugauuucagaggg

SEQ ID NO: 632966 - RNA, 22 nt, Human
aaccuccaauccuggacaucuc

SEQ ID NO: 632967 - RNA, 18 nt, Human
aaguucugguuccugagu

SEQ ID NO: 632968 - RNA, 18 nt, Human
acaagacaggaguggagg

SEQ ID NO: 632969 - RNA, 19 nt, Human
acaggaguggagguaaagg

SEQ ID NO: 632970 - RNA, 21 nt, Human
acuuuuacucugggcuucugc

SEQ ID NO: 632971 - RNA, 22 nt, Human
aguuguuuuuuuucccuccuuu

SEQ ID NO: 632972 - RNA, 20 nt, Human
auucagguauucauggaggg

SEQ ID NO: 632973 - RNA, 24 nt, Human
caaaacccgcuugcugauaauuca

SEQ ID NO: 632974 - RNA, 23 nt, Human
caaugggucagaauauguuuucu

SEQ ID NO: 632975 - RNA, 20 nt, Human
cacuggauauccaucuggag

SEQ ID NO: 632976 - RNA, 19 nt, Human
cauggagggucaagacuuc

SEQ ID NO: 632977 - RNA, 22 nt, Human
ccagugaccuucaugggauccu

SEQ ID NO: 632978 - RNA, 21 nt, Human
ccaucuggaguggagggcugu

SEQ ID NO: 632979 - RNA, 24 nt, Human
ccaucuucagcaaaugaucauucc

SEQ ID NO: 632980 - RNA, 21 nt, Human
cuaugaggaguucacugugcc

SEQ ID NO: 632981 - RNA, 20 nt, Human
cugaaaguuaucugcuccaa

SEQ ID NO: 632982 - RNA, 18 nt, Human
cuggggcagugguuuuca

SEQ ID NO: 632983 - RNA, 22 nt, Human
cuugacaccaucuucagcaaau

SEQ ID NO: 632984 - RNA, 21 nt, Human
cuuuucaaccuccaauccugg

SEQ ID NO: 632985 - RNA, 24 nt, Human
gaguuccaguuguuuuuuuucccu

SEQ ID NO: 632986 - RNA, 24 nt, Human
gauucaggccccuacucuugcuuc

SEQ ID NO: 632987 - RNA, 23 nt, Human
ggaaaagggaauagucaauugau

SEQ ID NO: 632988 - RNA, 22 nt, Human
gguguugcuuaagggagucugu

SEQ ID NO: 632989 - RNA, 23 nt, Human
guggggugugguccaaugcugcu

SEQ ID NO: 632990 - RNA, 23 nt, Human
uaaggaaguccccuuagguguca

SEQ ID NO: 632991 - RNA, 19 nt, Human
uaagucggucacaaaaugc

SEQ ID NO: 632992 - RNA, 18 nt, Human
uaccaguagagcaucugg

SEQ ID NO: 632993 - RNA, 21 nt, Human
uagaaaaaacaggguccagug

SEQ ID NO: 632994 - RNA, 24 nt, Human
uagaacaagacaggaguggaggua

SEQ ID NO: 632995 - RNA, 18 nt, Human
uagaguaccauggcugau

SEQ ID NO: 632996 - RNA, 24 nt, Human
uagaguaccauggcugauaacaag

SEQ ID NO: 632997 - RNA, 24 nt, Human
uaucaagagaagccuuccggacgg

SEQ ID NO: 632998 - RNA, 25 nt, Human
ucaaccuccaauccuggacaucuca

SEQ ID NO: 632999 - RNA, 19 nt, Human
ucagaauauguuuucucau

SEQ ID NO: 633000 - RNA, 22 nt, Human
ucauuugagauuguggggugug

SEQ ID NO: 633001 - RNA, 24 nt, Human
ucccuccuuucugcugaggaaagc

SEQ ID NO: 633002 - RNA, 23 nt, Human
ucuaagaauguucagcaucuacu

SEQ ID NO: 633003 - RNA, 18 nt, Human
ugaaaugcacacucaugg

SEQ ID NO: 633004 - RNA, 24 nt, Human
ugaauaaaaaccaaggggcaauau

SEQ ID NO: 633005 - RNA, 18 nt, Human
ugaggaguucacugugcc

SEQ ID NO: 633006 - RNA, 18 nt, Human
ugaggcaccagcuucaaa

SEQ ID NO: 633007 - RNA, 19 nt, Human
ugaggcaccagcuucaaaa

SEQ ID NO: 633008 - RNA, 21 nt, Human
ugauaagauauugagccccuu

SEQ ID NO: 633009 - RNA, 19 nt, Human
ugccacagaauuucaagcu

SEQ ID NO: 633010 - RNA, 24 nt, Human
ugccacagaauuucaagcuuugag

SEQ ID NO: 633011 - RNA, 25 nt, Human
ugcuccaacuauugcagaacacugu

SEQ ID NO: 633012 - RNA, 19 nt, Human
ugcucucaaaaagauguug

SEQ ID NO: 633013 - RNA, 31 nt, Human
ugcuucacuacuucauccagagcagcuucaa

SEQ ID NO: 633014 - RNA, 21 nt, Human
uggaaaagaagacgaaugaua

SEQ ID NO: 633015 - RNA, 18 nt, Human
uggaacaaacuaggccuu

SEQ ID NO: 633016 - RNA, 25 nt, Human
uggaaucuggugcagccuugugaga

SEQ ID NO: 633017 - RNA, 21 nt, Human
uggaaugccauucaggucaaa

SEQ ID NO: 633018 - RNA, 20 nt, Human
uggcuauaucccauucuagg

SEQ ID NO: 633019 - RNA, 19 nt, Human
uggcugauaacaagagguc

SEQ ID NO: 633020 - RNA, 19 nt, Human
ugguaaaggaagauaguug

SEQ ID NO: 633021 - RNA, 21 nt, Human
uguaaaaaguucugguuccug

SEQ ID NO: 633022 - RNA, 21 nt, Human
ugucaccacggugguaaagga

SEQ ID NO: 633023 - RNA, 24 nt, Human
ugucucugcccuuuaggaaaaggg

SEQ ID NO: 633024 - RNA, 20 nt, Human
ugugauaaaacagcuuuagc

SEQ ID NO: 633025 - RNA, 20 nt, Human
uuauugugugucucugaagg

SEQ ID NO: 633026 - RNA, 18 nt, Human
uucauggagggucaagac

SEQ ID NO: 633027 - RNA, 19 nt, Human
uuccaaagaagaugcuaug

SEQ ID NO: 633028 - RNA, 18 nt, Human
uucuaggaaucacuggau

SEQ ID NO: 633029 - RNA, 24 nt, Human
uucucuggcuauaucccauucuag

SEQ ID NO: 633030 - RNA, 20 nt, Human
uugaucccaaugggucagaa

SEQ ID NO: 633031 - RNA, 19 nt, Human
uuguggggugugguccaau

SEQ ID NO: 633032 - RNA, 24 nt, Human
uuuuuaaagcuuauuagcucauuu

SEQ ID NO: 633033 - RNA, 21 nt, Human
uuuuuuuuuuuuuuuuuaaag

SEQ ID NO: 633034 - RNA, 19 nt, Human
aagcacccccuauguccaa

SEQ ID NO: 633035 - RNA, 18 nt, Human
aaggucccguagcacgug

SEQ ID NO: 633036 - RNA, 22 nt, Human
acagauuugggaacugaaguuu

SEQ ID NO: 633037 - RNA, 21 nt, Human
acugcucccucugcuccccug

SEQ ID NO: 633038 - RNA, 23 nt, Human
agaagaugaggggaugggaggac

SEQ ID NO: 633039 - RNA, 29 nt, Human
agacagugagauaauucaaaagggacccc

SEQ ID NO: 633040 - RNA, 20 nt, Human
aggaggcaggucugggacca

SEQ ID NO: 633041 - RNA, 18 nt, Human
aggggaugggaggacucu

SEQ ID NO: 633042 - RNA, 20 nt, Human
auaguaguggagaagaugag

SEQ ID NO: 633043 - RNA, 21 nt, Human
caagcacaugggcucugugug

SEQ ID NO: 633044 - RNA, 24 nt, Human
caagcacaugggcucugugugggc

SEQ ID NO: 633045 - RNA, 18 nt, Human
caaggcggagaagccaga

SEQ ID NO: 633046 - RNA, 25 nt, Human
cacaaggcggagaagccagauuuca

SEQ ID NO: 633047 - RNA, 18 nt, Human
cacucaaaaaccuuacag

SEQ ID NO: 633048 - RNA, 22 nt, Human
cagucagucucuuaugaaaucu

SEQ ID NO: 633049 - RNA, 26 nt, Human
ccacugagaccaagacugggaguaga

SEQ ID NO: 633050 - RNA, 20 nt, Human
cccguagcacgugguguugu

SEQ ID NO: 633051 - RNA, 21 nt, Human
cccucugcuccccuggccuca

SEQ ID NO: 633052 - RNA, 20 nt, Human
cgacagugaaggaauuucac

SEQ ID NO: 633053 - RNA, 18 nt, Human
cucagaaucugggcaaga

SEQ ID NO: 633054 - RNA, 20 nt, Human
cucuggucagucugauuccc

SEQ ID NO: 633055 - RNA, 24 nt, Human
cugcuccccuggccucacccuugu

SEQ ID NO: 633056 - RNA, 18 nt, Human
cuugcugcaaguuccaca

SEQ ID NO: 633057 - RNA, 18 nt, Human
cuuuagaugcuaccucac

SEQ ID NO: 633058 - RNA, 21 nt, Human
gcucuaggaggcaggucuggg

SEQ ID NO: 633059 - RNA, 19 nt, Human
gcugcaaguuccacaaggc

SEQ ID NO: 633060 - RNA, 22 nt, Human
ggaccagugcgggaagcuagca

SEQ ID NO: 633061 - RNA, 21 nt, Human
ggcucuaggaggcaggucugg

SEQ ID NO: 633062 - RNA, 20 nt, Human
ggggaugggaggacucuucg

SEQ ID NO: 633063 - RNA, 19 nt, Human
gucugggaccagugcggga

SEQ ID NO: 633064 - RNA, 24 nt, Human
uaaauuaguagcagucagucucuu

SEQ ID NO: 633065 - RNA, 18 nt, Human
uaaccacauccacgacag

SEQ ID NO: 633066 - RNA, 18 nt, Human
uaaggaaaguguuguuau

SEQ ID NO: 633067 - RNA, 25 nt, Human
uagaauaauaaccacauccacgaca

SEQ ID NO: 633068 - RNA, 21 nt, Human
uccagucuacagauaaagaaa

SEQ ID NO: 633069 - RNA, 22 nt, Human
ucccguagcacgugguguugug

SEQ ID NO: 633070 - RNA, 21 nt, Human
ucccucugcuccccuggccuc

SEQ ID NO: 633071 - RNA, 23 nt, Human
ugaaaugcagaauuuuauagaga

SEQ ID NO: 633072 - RNA, 22 nt, Human
ugaaugacuaugcaguggacug

SEQ ID NO: 633073 - RNA, 19 nt, Human
ugaggggaugggaggacuc

SEQ ID NO: 633074 - RNA, 20 nt, Human
ugaggggaugggaggacucu

SEQ ID NO: 633075 - RNA, 24 nt, Human
ugaguggaggcuccugcauucuuu

SEQ ID NO: 633076 - RNA, 19 nt, Human
ugcuccccuggccucaccc

SEQ ID NO: 633077 - RNA, 22 nt, Human
uggcuuucagaaaagcaccccc

SEQ ID NO: 633078 - RNA, 26 nt, Human
ugggaccagugcgggaagcuagcagg

SEQ ID NO: 633079 - RNA, 24 nt, Human
uguggggguaaguggcuugcugca

SEQ ID NO: 633080 - RNA, 19 nt, Human
uuccugcagugaguggagg

SEQ ID NO: 633081 - RNA, 23 nt, Human
uuuguggggguaaguggcuugcu

SEQ ID NO: 633082 - RNA, 18 nt, Human
uuuuuuuuuuuuuuuuug

SEQ ID NO: 633083 - RNA, 21 nt, Human
uuuuuuuuuuuuuuuuugcuu

SEQ ID NO: 633084 - RNA, 25 nt, Human
uuuuuuuuuuuuuuuuuuugcuuga

SEQ ID NO: 633085 - RNA, 27 nt, Human
acugagcuugcaugucagacacacauu

SEQ ID NO: 633086 - RNA, 19 nt, Human
caauccacgggucucugcc

SEQ ID NO: 633087 - RNA, 22 nt, Human
cagcaauccacgggucucugcc

SEQ ID NO: 633088 - RNA, 21 nt, Human
ccgcgcccgcccguccggccc

SEQ ID NO: 633089 - RNA, 19 nt, Human
ccgcggccugggccgggcu

SEQ ID NO: 633090 - RNA, 22 nt, Human
ccgcggccugggccgggcucug

SEQ ID NO: 633091 - RNA, 22 nt, Human
cgcagggauccgcgcccgcccg

SEQ ID NO: 633092 - RNA, 18 nt, Human
cgggaccagggaggccgg

SEQ ID NO: 633093 - RNA, 26 nt, Human
cuugcaucccuucccaggcgggacca

SEQ ID NO: 633094 - RNA, 18 nt, Human
gguccggagggcagggca

SEQ ID NO: 633095 - RNA, 22 nt, Human
uaaaauggaaagguaaagaaug

SEQ ID NO: 633096 - RNA, 28 nt, Human
ucagacacacauuuucagcgggacgcag

SEQ ID NO: 633097 - RNA, 24 nt, Human
uccacgggucucugccccacugag

SEQ ID NO: 633098 - RNA, 27 nt, Human
uccgcggccugggccgggcucugaggc

SEQ ID NO: 633099 - RNA, 21 nt, Human
ugaggcgccaggacccgaggg

SEQ ID NO: 633100 - RNA, 18 nt, Human
ugggccgggcucugaggc

SEQ ID NO: 633101 - RNA, 21 nt, Human
aaaaaaaccaucuaaaagugg

SEQ ID NO: 633102 - RNA, 19 nt, Human
aaacacugucugccaaaag

SEQ ID NO: 633103 - RNA, 27 nt, Human
ccaaaaguaauuuuaccaguuuuuuuu

SEQ ID NO: 633104 - RNA, 19 nt, Human
uaagguacauuugaguaga

SEQ ID NO: 633105 - RNA, 23 nt, Human
ucagcagcgcacgugccucuucc

SEQ ID NO: 633106 - RNA, 18 nt, Human
uccaaaggaagaaauuuc

SEQ ID NO: 633107 - RNA, 24 nt, Human
uuuaauauauauauuuuuuccaaa

SEQ ID NO: 633108 - RNA, 28 nt, Human
uuuuaccaguuuuuuuuuuuuuuuuaaa

SEQ ID NO: 633109 - RNA, 21 nt, Human
uuuuuuaauauauauauuuuu

SEQ ID NO: 633110 - RNA, 20 nt, Human
aaaaagaccaaacauguaaa

SEQ ID NO: 633111 - RNA, 22 nt, Human
aaacugguaucuccacauucuc

SEQ ID NO: 633112 - RNA, 24 nt, Human
aagggggugggguagagaugggaa

SEQ ID NO: 633113 - RNA, 23 nt, Human
acaaaaaaagaccaaacauguaa

SEQ ID NO: 633114 - RNA, 25 nt, Human
acaaaccaaaacaaaaaaagaccaa

SEQ ID NO: 633115 - RNA, 20 nt, Human
accccccacccaaacuggua

SEQ ID NO: 633116 - RNA, 22 nt, Human
acccucacuugcucaggcuucu

SEQ ID NO: 633117 - RNA, 20 nt, Human
acccuggucacaaacccuag

SEQ ID NO: 633118 - RNA, 24 nt, Human
agagggggcaggagugacucugag

SEQ ID NO: 633119 - RNA, 20 nt, Human
agcuucaaaggccaguccca

SEQ ID NO: 633120 - RNA, 23 nt, Human
aggcugggggccaaggggguggg

SEQ ID NO: 633121 - RNA, 19 nt, Human
agggggugggguagagaug

SEQ ID NO: 633122 - RNA, 24 nt, Human
augaagacauaccaggcucugucc

SEQ ID NO: 633123 - RNA, 21 nt, Human
auucaagcucauccagacccu

SEQ ID NO: 633124 - RNA, 21 nt, Human
caaaaaaagaccaaacaugua

SEQ ID NO: 633125 - RNA, 27 nt, Human
caaaaaaagaccaaacauguaaaaacc

SEQ ID NO: 633126 - RNA, 20 nt, Human
caaaacaaaaaaagaccaaa

SEQ ID NO: 633127 - RNA, 21 nt, Human
caaaacaaaaaaagaccaaac

SEQ ID NO: 633128 - RNA, 23 nt, Human
caaaccaaaacaaaaaaagacca

SEQ ID NO: 633129 - RNA, 24 nt, Human
caaaccaaaacaaaaaaagaccaa

SEQ ID NO: 633130 - RNA, 25 nt, Human
caaaccaaaacaaaaaaagaccaaa

SEQ ID NO: 633131 - RNA, 25 nt, Human
caccccccacccaaacugguaucuc

SEQ ID NO: 633132 - RNA, 20 nt, Human
ccaaaacaaaaaaagaccaa

SEQ ID NO: 633133 - RNA, 26 nt, Human
ccaccccaucccuggccagagcuuca

SEQ ID NO: 633134 - RNA, 22 nt, Human
ccccaccccaucccuggccaga

SEQ ID NO: 633135 - RNA, 18 nt, Human
ccucuucuccuccuucuu

SEQ ID NO: 633136 - RNA, 23 nt, Human
ccuggccagagcuucaaaggcca

SEQ ID NO: 633137 - RNA, 24 nt, Human
cgggccgggcgcucaggccgcgcc

SEQ ID NO: 633138 - RNA, 21 nt, Human
cuagccuuccucuucuccucc

SEQ ID NO: 633139 - RNA, 22 nt, Human
cucccuagguccccuggugauc

SEQ ID NO: 633140 - RNA, 20 nt, Human
cuuuuggcccccaccccauc

SEQ ID NO: 633141 - RNA, 19 nt, Human
gagaugggaugaagagagg

SEQ ID NO: 633142 - RNA, 22 nt, Human
gaucaccccccacccaaacugg

SEQ ID NO: 633143 - RNA, 18 nt, Human
gcgccgaggagggacggc

SEQ ID NO: 633144 - RNA, 18 nt, Human
gcgccgaggagggacggc

SEQ ID NO: 633145 - RNA, 23 nt, Human
gcgcucaggccgcgccgaggagg

SEQ ID NO: 633146 - RNA, 25 nt, Human
ggcccccaccccaucccuggccaga

SEQ ID NO: 633147 - RNA, 19 nt, Human
ggccgggcgcucaggccgc

SEQ ID NO: 633148 - RNA, 22 nt, Human
ggccggggucgggccgggcgcu

SEQ ID NO: 633149 - RNA, 26 nt, Human
ggcucuguccuuuuggcccccacccc

SEQ ID NO: 633150 - RNA, 21 nt, Human
ggcugggggccaagggggugg

SEQ ID NO: 633151 - RNA, 22 nt, Human
gggggcaggagugacucugagg

SEQ ID NO: 633152 - RNA, 19 nt, Human
uccccuggugaucaccccc

SEQ ID NO: 633153 - RNA, 23 nt, Human
ucccuggccagagcuucaaaggc

SEQ ID NO: 633154 - RNA, 18 nt, Human
ucgagggugacaaaccaa

SEQ ID NO: 633155 - RNA, 23 nt, Human
ugaagacauaccaggcucugucc

SEQ ID NO: 633156 - RNA, 22 nt, Human
ugacaaaccaaaacaaaaaaag

SEQ ID NO: 633157 - RNA, 23 nt, Human
ugacaaaccaaaacaaaaaaaga

SEQ ID NO: 633158 - RNA, 19 nt, Human
uggccagagcuucaaaggc

SEQ ID NO: 633159 - RNA, 24 nt, Human
uuaguagcagguuaggguacugua

SEQ ID NO: 633160 - RNA, 23 nt, Human
uucaaauucaagcucauccagac

SEQ ID NO: 633161 - RNA, 18 nt, Human
uuuuuuuuuuuuuuuuug

SEQ ID NO: 633162 - RNA, 21 nt, Human
uuuuuuuuuuuuuuuuuggau

SEQ ID NO: 633163 - RNA, 25 nt, Human
aacuggcuugggaccccuuguucac

SEQ ID NO: 633164 - RNA, 18 nt, Human
acaccgaggccccgaggg

SEQ ID NO: 633165 - RNA, 22 nt, Human
acacugagaccucaggcccagc

SEQ ID NO: 633166 - RNA, 22 nt, Human
acagggagcaggagaaacggaa

SEQ ID NO: 633167 - RNA, 22 nt, Human
accccacaggcacuggucagcc

SEQ ID NO: 633168 - RNA, 18 nt, Human
agaccagaccaggggcag

SEQ ID NO: 633169 - RNA, 21 nt, Human
agaccaggccugacacccggc

SEQ ID NO: 633170 - RNA, 22 nt, Human
aggcacuggucagccauagaag

SEQ ID NO: 633171 - RNA, 21 nt, Human
agggaguguugucagcccagg

SEQ ID NO: 633172 - RNA, 23 nt, Human
aggggcaagaagagagagagcag

SEQ ID NO: 633173 - RNA, 18 nt, Human
agucaccccacaggcacu

SEQ ID NO: 633174 - RNA, 22 nt, Human
auccaggccccgagaacaccga

SEQ ID NO: 633175 - RNA, 20 nt, Human
caaggggguggucuuggaau

SEQ ID NO: 633176 - RNA, 21 nt, Human
cacacugagaccucaggccca

SEQ ID NO: 633177 - RNA, 18 nt, Human
cagagucuucugcuggug

SEQ ID NO: 633178 - RNA, 19 nt, Human
cagagucuucugcuggugc

SEQ ID NO: 633179 - RNA, 21 nt, Human
caggccccgagaacaccgagg

SEQ ID NO: 633180 - RNA, 19 nt, Human
ccaggccccgagaacaccg

SEQ ID NO: 633181 - RNA, 24 nt, Human
ccaggccccgagaacaccgaggcc

SEQ ID NO: 633182 - RNA, 23 nt, Human
cccacaggcacuggucagccaua

SEQ ID NO: 633183 - RNA, 18 nt, Human
cccaccugaggcaaggag

SEQ ID NO: 633184 - RNA, 23 nt, Human
cccagaccucccucuaggaggca

SEQ ID NO: 633185 - RNA, 24 nt, Human
ccccagaggcuguauccaggcccc

SEQ ID NO: 633186 - RNA, 22 nt, Human
cccucuaggaggcaggggcaag

SEQ ID NO: 633187 - RNA, 21 nt, Human
ccugggucuucugcugcucuc

SEQ ID NO: 633188 - RNA, 24 nt, Human
cgagaacaccgaggccccgaggga

SEQ ID NO: 633189 - RNA, 27 nt, Human
cgagaacaccgaggccccgagggacug

SEQ ID NO: 633190 - RNA, 19 nt, Human
cuaggaggcaggggcaaga

SEQ ID NO: 633191 - RNA, 24 nt, Human
cuccacacugagaccucaggcccc

SEQ ID NO: 633192 - RNA, 22 nt, Human
cugcugccuccagagucuucug

SEQ ID NO: 633193 - RNA, 19 nt, Human
gaacccagaccucccucua

SEQ ID NO: 633194 - RNA, 22 nt, Human
gaccccuuguucacucuggcau

SEQ ID NO: 633195 - RNA, 20 nt, Human
gccauagaagggaacccaga

SEQ ID NO: 633196 - RNA, 23 nt, Human
gccuggacgggccugagagacca

SEQ ID NO: 633197 - RNA, 22 nt, Human
ggcaaggaggucccaggagagg

SEQ ID NO: 633198 - RNA, 22 nt, Human
gggcaagaagagagagagcagc

SEQ ID NO: 633199 - RNA, 25 nt, Human
uccacacugagaccucaggcccagc

SEQ ID NO: 633200 - RNA, 27 nt, Human
uccaggccccgagaacaccgaggcccc

SEQ ID NO: 633201 - RNA, 18 nt, Human
ucccaggagagggagugu

SEQ ID NO: 633202 - RNA, 20 nt, Human
ucccucuaggaggcaggggc

SEQ ID NO: 633203 - RNA, 21 nt, Human
ucccucuaggaggcaggggca

SEQ ID NO: 633204 - RNA, 27 nt, Human
ugggccuggacgggccugagagaccag

SEQ ID NO: 633205 - RNA, 19 nt, Human
ugggggagaccagaccagg

SEQ ID NO: 633206 - RNA, 21 nt, Human
ugucacagggagggagggagc

SEQ ID NO: 633207 - RNA, 24 nt, Human
uuccugggucuucugcugcucucc

SEQ ID NO: 633208 - RNA, 20 nt, Human
uuugaacacccaccugaggc

SEQ ID NO: 633209 - RNA, 23 nt, Human
uuugggggagaccagaccagggg

SEQ ID NO: 633210 - RNA, 24 nt, Human
uuuugggggagaccagaccagggg

SEQ ID NO: 633211 - RNA, 22 nt, Human
aaagugcugggauuacaggcau

SEQ ID NO: 633212 - RNA, 24 nt, Human
aaagugcugggauuacaggcauga

SEQ ID NO: 633213 - RNA, 23 nt, Human
aagagaagaaggaagcgccaggg

SEQ ID NO: 633214 - RNA, 19 nt, Human
aagugcugggauuacaggc

SEQ ID NO: 633215 - RNA, 21 nt, Human
aagugcugggauuacaggcau

SEQ ID NO: 633216 - RNA, 24 nt, Human
accauguuggccaggcuugucuug

SEQ ID NO: 633217 - RNA, 22 nt, Human
agagaagaaggaagcgccaggg

SEQ ID NO: 633218 - RNA, 24 nt, Human
agagauucuccugccucagccucc

SEQ ID NO: 633219 - RNA, 21 nt, Human
agggaaagagccgcaccccca

SEQ ID NO: 633220 - RNA, 23 nt, Human
aguagcugagaugacgggcgugu

SEQ ID NO: 633221 - RNA, 19 nt, Human
agugcaguggugugaucuu

SEQ ID NO: 633222 - RNA, 21 nt, Human
agugcaguggugugaucuuag

SEQ ID NO: 633223 - RNA, 23 nt, Human
agugcaguggugugaucuuagcu

SEQ ID NO: 633224 - RNA, 24 nt, Human
agugcaguggugugaucuuagcuc

SEQ ID NO: 633225 - RNA, 18 nt, Human
agugcugggauuacaggc

SEQ ID NO: 633226 - RNA, 19 nt, Human
agugcugggauuacaggca

SEQ ID NO: 633227 - RNA, 18 nt, Human
augggguuucaccauguu

SEQ ID NO: 633228 - RNA, 22 nt, Human
augggguuucaccauguuggcc

SEQ ID NO: 633229 - RNA, 23 nt, Human
augggguuucaccauguuggcca

SEQ ID NO: 633230 - RNA, 24 nt, Human
augggguuucaccauguuggccag

SEQ ID NO: 633231 - RNA, 24 nt, Human
auuuugguauuuuuaguagagaug

SEQ ID NO: 633232 - RNA, 22 nt, Human
caagagauucuccugccucagc

SEQ ID NO: 633233 - RNA, 22 nt, Human
caccauguuggccaggcuuguc

SEQ ID NO: 633234 - RNA, 23 nt, Human
caccauguuggccaggcuugucu

SEQ ID NO: 633235 - RNA, 24 nt, Human
caccauguuggccaggcuugucuu

SEQ ID NO: 633236 - RNA, 24 nt, Human
cacccuucuuggccuccgaaagug

SEQ ID NO: 633237 - RNA, 21 nt, Human
cacugcaaccuccgccuccca

SEQ ID NO: 633238 - RNA, 20 nt, Human
cagccuccugaguagcugag

SEQ ID NO: 633239 - RNA, 20 nt, Human
cccuucuuggccuccgaaag

SEQ ID NO: 633240 - RNA, 23 nt, Human
ccgaaagugcugggauuacaggc

SEQ ID NO: 633241 - RNA, 24 nt, Human
ccucccaaguucaagagauucucc

SEQ ID NO: 633242 - RNA, 19 nt, Human
ccucucacuacugcagcca

SEQ ID NO: 633243 - RNA, 24 nt, Human
ccugccucagccuccugaguagcu

SEQ ID NO: 633244 - RNA, 24 nt, Human
cgaaagugcugggauuacaggcau

SEQ ID NO: 633245 - RNA, 24 nt, Human
cucacugcaaccuccgccucccaa

SEQ ID NO: 633246 - RNA, 22 nt, Human
cucuccgccggaagagaagaag

SEQ ID NO: 633247 - RNA, 23 nt, Human
cugcaaccuccgccucccaaguu

SEQ ID NO: 633248 - RNA, 24 nt, Human
gaaagugcugggauuacaggcaug

SEQ ID NO: 633249 - RNA, 22 nt, Human
gaagagaagaaggaagcgccag

SEQ ID NO: 633250 - RNA, 18 nt, Human
gagaugggguuucaccau

SEQ ID NO: 633251 - RNA, 24 nt, Human
gagaugggguuucaccauguuggc

SEQ ID NO: 633252 - RNA, 21 nt, Human
gagccgcacccccagccucuc

SEQ ID NO: 633253 - RNA, 18 nt, Human
gauuacaggcaugaggca

SEQ ID NO: 633254 - RNA, 22 nt, Human
gauuacaggcaugaggcaccgc

SEQ ID NO: 633255 - RNA, 21 nt, Human
gauucuccugccucagccucc

SEQ ID NO: 633256 - RNA, 22 nt, Human
gcaaccuccgccucccaaguuc

SEQ ID NO: 633257 - RNA, 24 nt, Human
gcccuggcuggagugcaguggugu

SEQ ID NO: 633258 - RNA, 20 nt, Human
gccucagccuccugaguagc

SEQ ID NO: 633259 - RNA, 22 nt, Human
ggauuacaggcaugaggcaccg

SEQ ID NO: 633260 - RNA, 18 nt, Human
ggccuccgaaagugcugg

SEQ ID NO: 633261 - RNA, 22 nt, Human
gggguuucaccauguuggccag

SEQ ID NO: 633262 - RNA, 22 nt, Human
ggguuucaccauguuggccagg

SEQ ID NO: 633263 - RNA, 23 nt, Human
guagagaugggguuucaccaugu

SEQ ID NO: 633264 - RNA, 19 nt, Human
gugcugggauuacaggcau

SEQ ID NO: 633265 - RNA, 23 nt, Human
uaauuuugguauuuuuaguagag

SEQ ID NO: 633266 - RNA, 24 nt, Human
uaauuuugguauuuuuaguagaga

SEQ ID NO: 633267 - RNA, 22 nt, Human
uagagaugggguuucaccaugu

SEQ ID NO: 633268 - RNA, 24 nt, Human
uaguagagaugggguuucaccaug

SEQ ID NO: 633269 - RNA, 26 nt, Human
uaguagagaugggguuucaccauguu

SEQ ID NO: 633270 - RNA, 21 nt, Human
ucaagccacccuucuuggccu

SEQ ID NO: 633271 - RNA, 18 nt, Human
ucacugcaaccuccgccu

SEQ ID NO: 633272 - RNA, 19 nt, Human
ucacugcaaccuccgccuc

SEQ ID NO: 633273 - RNA, 24 nt, Human
ucacugcaaccuccgccucccaag

SEQ ID NO: 633274 - RNA, 27 nt, Human
ucacugcaaccuccgccucccaaguuc

SEQ ID NO: 633275 - RNA, 21 nt, Human
ucccaaguucaagagauucuc

SEQ ID NO: 633276 - RNA, 24 nt, Human
ucccaaguucaagagauucuccug

SEQ ID NO: 633277 - RNA, 24 nt, Human
uccgaaagugcugggauuacaggc

SEQ ID NO: 633278 - RNA, 24 nt, Human
uccugaguagcugagaugacgggc

SEQ ID NO: 633279 - RNA, 22 nt, Human
ucucacuguugcccuggcugga

SEQ ID NO: 633280 - RNA, 24 nt, Human
ucucacuguugcccuggcuggagu

SEQ ID NO: 633281 - RNA, 24 nt, Human
ucuccugccucagccuccugagua

SEQ ID NO: 633282 - RNA, 21 nt, Human
ugcccuggcuggagugcagug

SEQ ID NO: 633283 - RNA, 24 nt, Human
ugcccuggcuggagugcaguggug

SEQ ID NO: 633284 - RNA, 24 nt, Human
ugccucagccuccugaguagcuga

SEQ ID NO: 633285 - RNA, 24 nt, Human
ugcugggauuacaggcaugaggca

SEQ ID NO: 633286 - RNA, 19 nt, Human
uggagugcaguggugugau

SEQ ID NO: 633287 - RNA, 23 nt, Human
uggagugcaguggugugaucuua

SEQ ID NO: 633288 - RNA, 24 nt, Human
uggagugcaguggugugaucuuag

SEQ ID NO: 633289 - RNA, 24 nt, Human
uggccaggcuugucuugagcuccu

SEQ ID NO: 633290 - RNA, 23 nt, Human
uggcuggagugcaguggugugau

SEQ ID NO: 633291 - RNA, 18 nt, Human
ugggauuacaggcaugag

SEQ ID NO: 633292 - RNA, 18 nt, Human
ugggauuacaggcaugag

SEQ ID NO: 633293 - RNA, 19 nt, Human
ugggauuacaggcaugagg

SEQ ID NO: 633294 - RNA, 21 nt, Human
ugggauuacaggcaugaggca

SEQ ID NO: 633295 - RNA, 22 nt, Human
ugggauuacaggcaugaggcac

SEQ ID NO: 633296 - RNA, 23 nt, Human
ugggauuacaggcaugaggcacc

SEQ ID NO: 633297 - RNA, 24 nt, Human
ugggauuacaggcaugaggcaccg

SEQ ID NO: 633298 - RNA, 24 nt, Human
ugggguuucaccauguuggccagg

SEQ ID NO: 633299 - RNA, 24 nt, Human
uggugugaucuuagcucacugcaa

SEQ ID NO: 633300 - RNA, 19 nt, Human
uguagaacuugaauaucuc

SEQ ID NO: 633301 - RNA, 19 nt, Human
ugucuugagcuccugaucu

SEQ ID NO: 633302 - RNA, 20 nt, Human
uuacaggcaugaggcaccgc

SEQ ID NO: 633303 - RNA, 27 nt, Human
uuagcucacugcaaccuccgccuccca

SEQ ID NO: 633304 - RNA, 18 nt, Human
uuaguagagaugggguuu

SEQ ID NO: 633305 - RNA, 22 nt, Human
uuaguagagaugggguuucacc

SEQ ID NO: 633306 - RNA, 24 nt, Human
uuaguagagaugggguuucaccau

SEQ ID NO: 633307 - RNA, 18 nt, Human
uucaagagauucuccugc

SEQ ID NO: 633308 - RNA, 23 nt, Human
uucaagagauucuccugccucag

SEQ ID NO: 633309 - RNA, 24 nt, Human
uugcccuggcuggagugcaguggu

SEQ ID NO: 633310 - RNA, 24 nt, Human
uuucaccauguuggccaggcuugu

SEQ ID NO: 633311 - RNA, 24 nt, Human
uuuuuaguagagaugggguuucac

SEQ ID NO: 633312 - RNA, 31 nt, Human
uuuuuuuuuuugaacauuuauuuauuuauuu

SEQ ID NO: 633313 - RNA, 20 nt, Human
uuuuuuuuuuuuuuuuuugg

SEQ ID NO: 633314 - RNA, 19 nt, Human
aaaaaugccaaucuaugga

SEQ ID NO: 633315 - RNA, 20 nt, Human
aagaaagacaaaucuaugga

SEQ ID NO: 633316 - RNA, 23 nt, Human
aagacaagugucaaaaugggaug

SEQ ID NO: 633317 - RNA, 23 nt, Human
cauaguaauagcuaaaaaugcca

SEQ ID NO: 633318 - RNA, 21 nt, Human
cuaaaaaugccaaucuaugga

SEQ ID NO: 633319 - RNA, 24 nt, Human
uaaaaaugccaaucuauggaagca

SEQ ID NO: 633320 - RNA, 18 nt, Human
ugcuauguuauacaucuu

SEQ ID NO: 633321 - RNA, 23 nt, Human
uugaagaaagacaaaucuaugga

SEQ ID NO: 633322 - RNA, 20 nt, Human
uuuuauuucaguagucaaug

SEQ ID NO: 633323 - RNA, 22 nt, Human
uuuugcuauguuauacaucuuu

SEQ ID NO: 633324 - RNA, 18 nt, Human
accccugacgcugggcgg

SEQ ID NO: 633325 - RNA, 20 nt, Human
accucuucgccuccgcagcc

SEQ ID NO: 633326 - RNA, 24 nt, Human
acgggaacaccagguccaucccuu

SEQ ID NO: 633327 - RNA, 21 nt, Human
aguucaacacacaggggagcc

SEQ ID NO: 633328 - RNA, 18 nt, Human
ccacggauucuggucccu

SEQ ID NO: 633329 - RNA, 21 nt, Human
ccagagcggacgccacgccgc

SEQ ID NO: 633330 - RNA, 23 nt, Human
ccaggcgccccuccgcguuagcc

SEQ ID NO: 633331 - RNA, 20 nt, Human
ccaucccuucccacggauuc

SEQ ID NO: 633332 - RNA, 22 nt, Human
ccuccaggcgccccuccgcguu

SEQ ID NO: 633333 - RNA, 24 nt, Human
ccuccgagacgcuggucccagcuc

SEQ ID NO: 633334 - RNA, 24 nt, Human
cgcgucacccuccugcauaguuca

SEQ ID NO: 633335 - RNA, 18 nt, Human
cgcugggcggggcaaggg

SEQ ID NO: 633336 - RNA, 20 nt, Human
cugccaccucuucgccuccg

SEQ ID NO: 633337 - RNA, 18 nt, Human
gaguucuccauacauucc

SEQ ID NO: 633338 - RNA, 21 nt, Human
gccgccuccaggcgccccucc

SEQ ID NO: 633339 - RNA, 20 nt, Human
gcucgcgcugccaccucuuc

SEQ ID NO: 633340 - RNA, 19 nt, Human
ggagcccucucacccagcc

SEQ ID NO: 633341 - RNA, 20 nt, Human
ggaguucuccauacauuccu

SEQ ID NO: 633342 - RNA, 18 nt, Human
ggcacugugguuacagaa

SEQ ID NO: 633343 - RNA, 18 nt, Human
gggaacgggaacaccagg

SEQ ID NO: 633344 - RNA, 19 nt, Human
ggggaugguucucggggag

SEQ ID NO: 633345 - RNA, 19 nt, Human
ucacccagccuucagggcc

SEQ ID NO: 633346 - RNA, 19 nt, Human
ucagaugggaacgggaaca

SEQ ID NO: 633347 - RNA, 19 nt, Human
ucagggccacaugcccaug

SEQ ID NO: 633348 - RNA, 19 nt, Human
ucaguccuugcaaagucca

SEQ ID NO: 633349 - RNA, 24 nt, Human
ucugcggcgccuccgagacgcugg

SEQ ID NO: 633350 - RNA, 21 nt, Human
ugaaauguguccgcgucaccc

SEQ ID NO: 633351 - RNA, 25 nt, Human
uuacucuuccccuuuuauuacgaaa

SEQ ID NO: 633352 - RNA, 18 nt, Human
uuuuuuuuuuuuuuuuug

SEQ ID NO: 633353 - RNA, 23 nt, Human
uuuuuuuuuuuuuuuuugucuuu

SEQ ID NO: 633354 - RNA, 21 nt, Human
acaaggcagugaagcagcaaa

SEQ ID NO: 633355 - RNA, 21 nt, Human
agaaggauccaagugugagaa

SEQ ID NO: 633356 - RNA, 21 nt, Human
aggugguuaucccgaaagagc

SEQ ID NO: 633357 - RNA, 21 nt, Human
agugaagcagcaaaagugaaa

SEQ ID NO: 633358 - RNA, 24 nt, Human
aucaucaucuccccauucccccaa

SEQ ID NO: 633359 - RNA, 21 nt, Human
auucccccaaucucucccuca

SEQ ID NO: 633360 - RNA, 19 nt, Human
cacccuauguaaaugaaag

SEQ ID NO: 633361 - RNA, 20 nt, Human
cagccaauuagagacugagg

SEQ ID NO: 633362 - RNA, 18 nt, Human
cauuccacagggugggag

SEQ ID NO: 633363 - RNA, 21 nt, Human
ccaauuagagacugaggugaa

SEQ ID NO: 633364 - RNA, 25 nt, Human
cccaaucucucccucaacuacuucu

SEQ ID NO: 633365 - RNA, 25 nt, Human
ccccaaucucucccucaacuacuuc

SEQ ID NO: 633366 - RNA, 27 nt, Human
ccccaaucucucccucaacuacuucua

SEQ ID NO: 633367 - RNA, 23 nt, Human
ccccauucccccaaucucucccu

SEQ ID NO: 633368 - RNA, 19 nt, Human
cccccaaucucucccucaa

SEQ ID NO: 633369 - RNA, 18 nt, Human
cccgaaagagcugucuuc

SEQ ID NO: 633370 - RNA, 18 nt, Human
cugaggugaauuggcuca

SEQ ID NO: 633371 - RNA, 22 nt, Human
gcaaaaucuucuggggcuuaag

SEQ ID NO: 633372 - RNA, 18 nt, Human
gcaggucuggcccauggc

SEQ ID NO: 633373 - RNA, 22 nt, Human
gguguaaggaagaacagaagga

SEQ ID NO: 633374 - RNA, 22 nt, Human
guagcaaaaucuucuggggcuu

SEQ ID NO: 633375 - RNA, 21 nt, Human
uacccuauucuccugccucag

SEQ ID NO: 633376 - RNA, 21 nt, Human
uacccuauucuccugccucag

SEQ ID NO: 633377 - RNA, 21 nt, Human
uagcaaaaucuucuggggcuu

SEQ ID NO: 633378 - RNA, 19 nt, Human
uauucuccugccucagucu

SEQ ID NO: 633379 - RNA, 20 nt, Human
ucacaggccaguguucagac

SEQ ID NO: 633380 - RNA, 24 nt, Human
ucagacucuucagugccagggagu

SEQ ID NO: 633381 - RNA, 24 nt, Human
ucaggugguuaucccgaaagagcu

SEQ ID NO: 633382 - RNA, 22 nt, Human
uccaagacuggugugguuugac

SEQ ID NO: 633383 - RNA, 18 nt, Human
uccccauucccccaaucu

SEQ ID NO: 633384 - RNA, 19 nt, Human
ucugcagguaucagguggu

SEQ ID NO: 633385 - RNA, 23 nt, Human
ugaagcagcaaaagugaaaguac

SEQ ID NO: 633386 - RNA, 18 nt, Human
ugaauuggcucacagcca

SEQ ID NO: 633387 - RNA, 22 nt, Human
ugaccaucaucaucaucucccu

SEQ ID NO: 633388 - RNA, 20 nt, Human
ugaggugaauuggcucacag

SEQ ID NO: 633389 - RNA, 22 nt, Human
uggaauggaccaaucacaggcc

SEQ ID NO: 633390 - RNA, 18 nt, Human
uggaccaaucacaggcca

SEQ ID NO: 633391 - RNA, 22 nt, Human
uggugugguuugacuccuuaug

SEQ ID NO: 633392 - RNA, 20 nt, Human
uguaaaugaaagacugacuc

SEQ ID NO: 633393 - RNA, 23 nt, Human
uguaaggaagaacagaaggaucc

SEQ ID NO: 633394 - RNA, 21 nt, Human
uuagaucccuaucucuguacc

SEQ ID NO: 633395 - RNA, 19 nt, Human
uuuuuuuuuuuggguggug

SEQ ID NO: 633396 - RNA, 20 nt, Human
uuuuuuuuuuuuuugggugg

SEQ ID NO: 633397 - RNA, 21 nt, Human
uuuuuuuuuuuuuuuuugggu

SEQ ID NO: 633398 - RNA, 24 nt, Human
uuuuuuuuuuuuuuuuuuuuuggg

SEQ ID NO: 633399 - RNA, 23 nt, Human
accccaggcgcaggcuggagagc

SEQ ID NO: 633400 - RNA, 18 nt, Human
ccgggacucaaagaccgu

SEQ ID NO: 633401 - RNA, 23 nt, Human
cucagcaucaucucagauuccgg

SEQ ID NO: 633402 - RNA, 21 nt, Human
cuccaaccccaggcgcaggcu

SEQ ID NO: 633403 - RNA, 19 nt, Human
cuccucgucgcuguccagc

SEQ ID NO: 633404 - RNA, 19 nt, Human
gcgcaggcuggagagcggg

SEQ ID NO: 633405 - RNA, 20 nt, Human
ggaaacgggcagcgucaccc

SEQ ID NO: 633406 - RNA, 21 nt, Human
gggccgccucccuggcucagc

SEQ ID NO: 633407 - RNA, 23 nt, Human
uccaaccccaggcgcaggcugga

SEQ ID NO: 633408 - RNA, 21 nt, Human
ucuccgugggguccucagugu

SEQ ID NO: 633409 - RNA, 20 nt, Human
ugcuggaagggccgccuccc

SEQ ID NO: 633410 - RNA, 26 nt, Human
ugggaaacgggcagcgucacccccga

SEQ ID NO: 633411 - RNA, 18 nt, Human
uuuuuuuuuuuuuuuuug

SEQ ID NO: 633412 - RNA, 21 nt, Human
uuuuuuuuuuuuuuuuugcag

SEQ ID NO: 633413 - RNA, 23 nt, Human
acccucaacgugggaaacuuugc

SEQ ID NO: 633414 - RNA, 20 nt, Human
agaccgaacaccaucgucaa

SEQ ID NO: 633415 - RNA, 21 nt, Human
ccuaagacuacauuuccauuc

SEQ ID NO: 633416 - RNA, 21 nt, Human
ccucgagacccucaacguggg

SEQ ID NO: 633417 - RNA, 19 nt, Human
cucgagacccucaacgugg

SEQ ID NO: 633418 - RNA, 20 nt, Human
cucuagacgcacuacccucc

SEQ ID NO: 633419 - RNA, 18 nt, Human
gaaccccagugccugcuc

SEQ ID NO: 633420 - RNA, 20 nt, Human
uaagacuggccuaagacuac

SEQ ID NO: 633421 - RNA, 21 nt, Human
ugccugcucuggcccucaauc

SEQ ID NO: 633422 - RNA, 24 nt, Human
uuagggaagccagcagccucuucu

SEQ ID NO: 633423 - RNA, 24 nt, Human
uuuuagggaagccagcagccucuu

SEQ ID NO: 633424 - RNA, 23 nt, Human
uuuuauuucaacuuuuagggaag

SEQ ID NO: 633425 - RNA, 25 nt, Human
uuuuuuuuuuaaaggcaaaaaucuu

SEQ ID NO: 633426 - RNA, 20 nt, Human
uuuuuuuuuuuuuaaaggca

SEQ ID NO: 633427 - RNA, 21 nt, Human
uuuuuuuuuuuuuuuuaaagg

SEQ ID NO: 633428 - RNA, 23 nt, Human
aaaaaacuaugaaagagauggaa

SEQ ID NO: 633429 - RNA, 22 nt, Human
aaaaacuaugaaagagauggaa

SEQ ID NO: 633430 - RNA, 21 nt, Human
caccccuaccagcucaggcgu

SEQ ID NO: 633431 - RNA, 23 nt, Human
cauuugcuguuuccuaccugcuc

SEQ ID NO: 633432 - RNA, 18 nt, Human
ccaaccaccaucuugauc

SEQ ID NO: 633433 - RNA, 21 nt, Human
cccgcgcagcagcuucugcau

SEQ ID NO: 633434 - RNA, 24 nt, Human
ccuucagaggcgacccaagcucac

SEQ ID NO: 633435 - RNA, 18 nt, Human
cucauaauauaagacagu

SEQ ID NO: 633436 - RNA, 18 nt, Human
cugcauuugcuguuuccu

SEQ ID NO: 633437 - RNA, 19 nt, Human
gacucccgcgcagcagcuu

SEQ ID NO: 633438 - RNA, 21 nt, Human
gcagcuucugcauuugcuguu

SEQ ID NO: 633439 - RNA, 22 nt, Human
uaccgcuaccacgcugacuggg

SEQ ID NO: 633440 - RNA, 18 nt, Human
uaucaaguguuuuauuua

SEQ ID NO: 633441 - RNA, 22 nt, Human
uccaccccuaccagcucaggcg

SEQ ID NO: 633442 - RNA, 21 nt, Human
uccuaccugcuccaccccuac

SEQ ID NO: 633443 - RNA, 26 nt, Human
ucgagggcggaagucuuggcuaaaga

SEQ ID NO: 633444 - RNA, 18 nt, Human
ucugcauuugcuguuucc

SEQ ID NO: 633445 - RNA, 20 nt, Human
ucuugaucgagggcggaagu

SEQ ID NO: 633446 - RNA, 23 nt, Human
ugacugggggaaaaaacuaugaa

SEQ ID NO: 633447 - RNA, 21 nt, Human
ugcuccaccccuaccagcuca

SEQ ID NO: 633448 - RNA, 22 nt, Human
uggaaaaugguucuccuucaga

SEQ ID NO: 633449 - RNA, 19 nt, Human
uguuuccuaccugcuccac

SEQ ID NO: 633450 - RNA, 18 nt, Human
uuuuuuuuuuuuuuuuug

SEQ ID NO: 633451 - RNA, 23 nt, Human
uuuuuuuuuuuuuuuuuuguguu

SEQ ID NO: 633452 - RNA, 27 nt, Human
aaaaugaaccaugggacucaaaaacau

SEQ ID NO: 633453 - RNA, 19 nt, Human
aacauccuaaguugcaaaa

SEQ ID NO: 633454 - RNA, 19 nt, Human
aaccuggggcggaggcggc

SEQ ID NO: 633455 - RNA, 21 nt, Human
aauacauaauggaaaaucuga

SEQ ID NO: 633456 - RNA, 22 nt, Human
acacagcuucacacgcaaaacc

SEQ ID NO: 633457 - RNA, 24 nt, Human
aggugccaggggucggcagcagcc

SEQ ID NO: 633458 - RNA, 27 nt, Human
auccucccucagccgggcuccucguca

SEQ ID NO: 633459 - RNA, 21 nt, Human
auggaaaaucugacgacauuu

SEQ ID NO: 633460 - RNA, 19 nt, Human
cacacagcuucacacgcaa

SEQ ID NO: 633461 - RNA, 19 nt, Human
cagaggccccucuggagca

SEQ ID NO: 633462 - RNA, 22 nt, Human
cagccgcgugcgccacggccag

SEQ ID NO: 633463 - RNA, 18 nt, Human
cagcggcgcauccucccu

SEQ ID NO: 633464 - RNA, 25 nt, Human
ccacggccagaggccccucuggagc

SEQ ID NO: 633465 - RNA, 20 nt, Human
ccccucuggagcauccuccc

SEQ ID NO: 633466 - RNA, 22 nt, Human
cgcaaaaccuggggcggaggcg

SEQ ID NO: 633467 - RNA, 23 nt, Human
cuucacacgcaaaaccuggggcg

SEQ ID NO: 633468 - RNA, 18 nt, Human
gcggcagcggccacgggc

SEQ ID NO: 633469 - RNA, 21 nt, Human
gcuucacacgcaaaaccuggg

SEQ ID NO: 633470 - RNA, 19 nt, Human
gucagcggcgcauccuccc

SEQ ID NO: 633471 - RNA, 18 nt, Human
ucaauacauaauggaaaa

SEQ ID NO: 633472 - RNA, 20 nt, Human
uggaaaaucugacgacauuu

SEQ ID NO: 633473 - RNA, 19 nt, Human
uggagcauccucccgcccc

SEQ ID NO: 633474 - RNA, 23 nt, Human
ugggacucaaaaacauccuaagu

SEQ ID NO: 633475 - RNA, 18 nt, Human
uuuuuuuuuuuuuuucug

SEQ ID NO: 633476 - RNA, 24 nt, Human
uuuuuuuuuuuuuuuuucuguuuu

SEQ ID NO: 633477 - RNA, 26 nt, Human
uuuuuuuuuuuuuuuuuuucuguuuu

SEQ ID NO: 633478 - RNA, 24 nt, Human
uuuuuuuuuuuuuuuuuuuuucuu

SEQ ID NO: 633479 - RNA, 20 nt, Human
aaaccucaauaaucuacacu

SEQ ID NO: 633480 - RNA, 23 nt, Human
aaacucuaacaauguugaaaaua

SEQ ID NO: 633481 - RNA, 20 nt, Human
aacaccccagcaaacaacaa

SEQ ID NO: 633482 - RNA, 20 nt, Human
aacagagaugacagacaaga

SEQ ID NO: 633483 - RNA, 25 nt, Human
aaccucaauaaucuacacuuagcau

SEQ ID NO: 633484 - RNA, 24 nt, Human
acaucuccaugaacaccccagcaa

SEQ ID NO: 633485 - RNA, 22 nt, Human
accccagcaaacaacaaaauau

SEQ ID NO: 633486 - RNA, 19 nt, Human
agacaggcugacagaccaa

SEQ ID NO: 633487 - RNA, 21 nt, Human
agacaggcugacagaccaagc

SEQ ID NO: 633488 - RNA, 19 nt, Human
agaggggagcugccuguag

SEQ ID NO: 633489 - RNA, 22 nt, Human
agcaaacaacaaaauauaucca

SEQ ID NO: 633490 - RNA, 20 nt, Human
agcaccacaccauuccccgg

SEQ ID NO: 633491 - RNA, 22 nt, Human
agccaucaauaaaaguuacuaa

SEQ ID NO: 633492 - RNA, 23 nt, Human
agcuccuggcagagagacagcuc

SEQ ID NO: 633493 - RNA, 20 nt, Human
agggacaugaaagguagcca

SEQ ID NO: 633494 - RNA, 19 nt, Human
agggagggacagcacaggg

SEQ ID NO: 633495 - RNA, 18 nt, Human
agguguuagaagacaggc

SEQ ID NO: 633496 - RNA, 19 nt, Human
agguguugagauuagcacc

SEQ ID NO: 633497 - RNA, 23 nt, Human
agguucaguuuucacauuuccag

SEQ ID NO: 633498 - RNA, 21 nt, Human
auggugcuguuucacuggauu

SEQ ID NO: 633499 - RNA, 23 nt, Human
caaauugcaauaggguucgccaa

SEQ ID NO: 633500 - RNA, 19 nt, Human
cagaaagaaagaagugaua

SEQ ID NO: 633501 - RNA, 23 nt, Human
cagaaagaaagaagugauaaacc

SEQ ID NO: 633502 - RNA, 21 nt, Human
cagagagacagcucacaccuu

SEQ ID NO: 633503 - RNA, 19 nt, Human
cagcaaacaacaaaauaua

SEQ ID NO: 633504 - RNA, 22 nt, Human
cagcaaacaacaaaauauaucc

SEQ ID NO: 633505 - RNA, 19 nt, Human
cagcugaaaagaagacugg

SEQ ID NO: 633506 - RNA, 28 nt, Human
cagcugaaaagaagacugggucagauac

SEQ ID NO: 633507 - RNA, 18 nt, Human
cauccaauccccuaauga

SEQ ID NO: 633508 - RNA, 24 nt, Human
caugcgguugggcugggccaugcu

SEQ ID NO: 633509 - RNA, 25 nt, Human
cauuuaucacacuucaaucccacuu

SEQ ID NO: 633510 - RNA, 24 nt, Human
ccaugaacaccccagcaaacaaca

SEQ ID NO: 633511 - RNA, 19 nt, Human
cccagcaaacaacaaaaua

SEQ ID NO: 633512 - RNA, 22 nt, Human
cccccagagaccagcugaaaag

SEQ ID NO: 633513 - RNA, 18 nt, Human
ccuaccacuugaaauucu

SEQ ID NO: 633514 - RNA, 19 nt, Human
ccucaauaaucuacacuua

SEQ ID NO: 633515 - RNA, 22 nt, Human
ccugguaacagcugucuucucc

SEQ ID NO: 633516 - RNA, 23 nt, Human
cuccuauuuuaaaugaguugggg

SEQ ID NO: 633517 - RNA, 22 nt, Human
cuccucacuaggcccugauuuc

SEQ ID NO: 633518 - RNA, 23 nt, Human
cuuaacaucuccaugaacacccc

SEQ ID NO: 633519 - RNA, 19 nt, Human
gagaaagguaagcauggga

SEQ ID NO: 633520 - RNA, 23 nt, Human
guaaggcaaaaagugauuccucc

SEQ ID NO: 633521 - RNA, 25 nt, Human
guagaguucaccccagaaaccaaag

SEQ ID NO: 633522 - RNA, 20 nt, Human
gugcuccucacuaggcccug

SEQ ID NO: 633523 - RNA, 21 nt, Human
uaaaaagucuggggaaaagga

SEQ ID NO: 633524 - RNA, 21 nt, Human
uaagaaauggugcuguuucac

SEQ ID NO: 633525 - RNA, 21 nt, Human
uaaugauacuaagaaauggug

SEQ ID NO: 633526 - RNA, 21 nt, Human
uacauuauauacccucagccc

SEQ ID NO: 633527 - RNA, 25 nt, Human
uagacagggacaugaaagguagcca

SEQ ID NO: 633528 - RNA, 19 nt, Human
uagcaccacaccauucccc

SEQ ID NO: 633529 - RNA, 24 nt, Human
uaggaggggaugaacagagaugac

SEQ ID NO: 633530 - RNA, 18 nt, Human
uagguucaguuuucacau

SEQ ID NO: 633531 - RNA, 19 nt, Human
ucaccccucaaaacuggaa

SEQ ID NO: 633532 - RNA, 20 nt, Human
ucacuggauuucauugauga

SEQ ID NO: 633533 - RNA, 21 nt, Human
ucauuuuagcccaaacucuaa

SEQ ID NO: 633534 - RNA, 20 nt, Human
uccaauccccuaaugaaccu

SEQ ID NO: 633535 - RNA, 20 nt, Human
uccaugaacaccccagcaaa

SEQ ID NO: 633536 - RNA, 20 nt, Human
uccccgggucugagucuugc

SEQ ID NO: 633537 - RNA, 21 nt, Human
uccccuaaugaaccuuagcuc

SEQ ID NO: 633538 - RNA, 19 nt, Human
ucccugguaacagcugucu

SEQ ID NO: 633539 - RNA, 23 nt, Human
ucccugguaacagcugucuucuc

SEQ ID NO: 633540 - RNA, 24 nt, Human
ucucuuaacaucuccaugaacacc

SEQ ID NO: 633541 - RNA, 22 nt, Human
ucugcgguuugagauagacaug

SEQ ID NO: 633542 - RNA, 21 nt, Human
ugaaaagaagacugggucaga

SEQ ID NO: 633543 - RNA, 25 nt, Human
ugaaaagaagacugggucagaucaa

SEQ ID NO: 633544 - RNA, 19 nt, Human
ugaaagagaaagucucuuu

SEQ ID NO: 633545 - RNA, 22 nt, Human
ugaacaccccagcaaacaacaa

SEQ ID NO: 633546 - RNA, 24 nt, Human
ugaacaccccagcaaacaacaaaa

SEQ ID NO: 633547 - RNA, 18 nt, Human
ugaacagagaugacagac

SEQ ID NO: 633548 - RNA, 26 nt, Human
ugacggaguguccaacagcagcaaag

SEQ ID NO: 633549 - RNA, 21 nt, Human
ugagagaauuccucauuauac

SEQ ID NO: 633550 - RNA, 26 nt, Human
ugagauagacaugcgguugggcuggg

SEQ ID NO: 633551 - RNA, 20 nt, Human
ugagauuagcaccacaccau

SEQ ID NO: 633552 - RNA, 20 nt, Human
ugaguugggguacagagggg

SEQ ID NO: 633553 - RNA, 19 nt, Human
ugcaggugcccaucccugu

SEQ ID NO: 633554 - RNA, 20 nt, Human
uggaagagaaguugagccuc

SEQ ID NO: 633555 - RNA, 27 nt, Human
uggugguuuuuuucuccuugcucauuu

SEQ ID NO: 633556 - RNA, 28 nt, Human
uuaaaugaguugggguacagagggggaa

SEQ ID NO: 633557 - RNA, 18 nt, Human
uuacaagggagggacagc

SEQ ID NO: 633558 - RNA, 24 nt, Human
uuauagguucaguuuucacauuuc

SEQ ID NO: 633559 - RNA, 27 nt, Human
uuuuaccuagagguuauaggaggggau

SEQ ID NO: 633560 - RNA, 20 nt, Human
uuuuuuuuuuuuuuuuuugg

SEQ ID NO: 633561 - RNA, 23 nt, Human
aaaaaaaaaaaggagguaaauaa

SEQ ID NO: 633562 - RNA, 23 nt, Human
aaaaaaaaaagggagguaaauaa

SEQ ID NO: 633563 - RNA, 25 nt, Human
aaaaaaaaaggagguaaauaaccag

SEQ ID NO: 633564 - RNA, 21 nt, Human
aaaaucugucaaaugccuucc

SEQ ID NO: 633565 - RNA, 23 nt, Human
aaacagacaaaaccuugucagca

SEQ ID NO: 633566 - RNA, 23 nt, Human
aaacagacaaaaccuugucagca

SEQ ID NO: 633567 - RNA, 22 nt, Human
aaacgaaccauugccaauccua

SEQ ID NO: 633568 - RNA, 21 nt, Human
aaaugccuuccuggcagcccc

SEQ ID NO: 633569 - RNA, 21 nt, Human
aagcagaccaucuccuaaugc

SEQ ID NO: 633570 - RNA, 20 nt, Human
aaggaagacagguuaucaaa

SEQ ID NO: 633571 - RNA, 20 nt, Human
aaggaagacagguuaucaaa

SEQ ID NO: 633572 - RNA, 18 nt, Human
aaugcaaaaaucaaaaaa

SEQ ID NO: 633573 - RNA, 21 nt, Human
aaugcaaaaaucaaaaaauaa

SEQ ID NO: 633574 - RNA, 22 nt, Human
acagaaaagaggaaauacugaa

SEQ ID NO: 633575 - RNA, 23 nt, Human
acagcagccgccacccgcgccac

SEQ ID NO: 633576 - RNA, 24 nt, Human
acugcaaagcuugacaaacuguag

SEQ ID NO: 633577 - RNA, 21 nt, Human
agaaaacaagcaaguguucac

SEQ ID NO: 633578 - RNA, 22 nt, Human
agcaaauguucagcuucuucca

SEQ ID NO: 633579 - RNA, 22 nt, Human
agccagcacagcagccgccacc

SEQ ID NO: 633580 - RNA, 26 nt, Human
agccggagccugugacgaccuagccg

SEQ ID NO: 633581 - RNA, 20 nt, Human
auacaaagucuccugaaaca

SEQ ID NO: 633582 - RNA, 20 nt, Human
auacaaagucuccugaaaca

SEQ ID NO: 633583 - RNA, 22 nt, Human
auaugaacaacauucaacagaa

SEQ ID NO: 633584 - RNA, 27 nt, Human
aucauguuacacagaaacaaggaagac

SEQ ID NO: 633585 - RNA, 27 nt, Human
aucauguuacacagaaacaaggaagac

SEQ ID NO: 633586 - RNA, 19 nt, Human
aucuucuguaugugcuuuc

SEQ ID NO: 633587 - RNA, 19 nt, Human
auggcacuucaccgccucc

SEQ ID NO: 633588 - RNA, 22 nt, Human
caaggucugcauacuuuuucca

SEQ ID NO: 633589 - RNA, 21 nt, Human
caaguuuuacaugaauauucu

SEQ ID NO: 633590 - RNA, 21 nt, Human
cacaaguauaacugaaacaga

SEQ ID NO: 633591 - RNA, 21 nt, Human
cacaaguauaacugaaacaga

SEQ ID NO: 633592 - RNA, 23 nt, Human
cacaaguuuuacaugaauauucu

SEQ ID NO: 633593 - RNA, 23 nt, Human
cacaauucacaaguauaacugaa

SEQ ID NO: 633594 - RNA, 23 nt, Human
caccaaagaauguauuacacaau

SEQ ID NO: 633595 - RNA, 24 nt, Human
caccauggguuucuuugggagaug

SEQ ID NO: 633596 - RNA, 20 nt, Human
cacugcaaagcuugacaaac

SEQ ID NO: 633597 - RNA, 19 nt, Human
cacuucaccgccuccgucc

SEQ ID NO: 633598 - RNA, 24 nt, Human
cagacccauuagagcaucaaugac

SEQ ID NO: 633599 - RNA, 20 nt, Human
cagcacagcagccgccaccc

SEQ ID NO: 633600 - RNA, 18 nt, Human
cauaagcauucagaagcu

SEQ ID NO: 633601 - RNA, 22 nt, Human
cauucagcaccuuuauugaacc

SEQ ID NO: 633602 - RNA, 21 nt, Human
cauuccauuuucucauuuaua

SEQ ID NO: 633603 - RNA, 21 nt, Human
cauuccauuuucucauuuaua

SEQ ID NO: 633604 - RNA, 23 nt, Human
cauuuuucccaucagguuggagg

SEQ ID NO: 633605 - RNA, 23 nt, Human
cauuuuucccaucagguuggagg

SEQ ID NO: 633606 - RNA, 24 nt, Human
ccaaaaaugcaauaagacguagca

SEQ ID NO: 633607 - RNA, 18 nt, Human
ccauuagagcaucaauga

SEQ ID NO: 633608 - RNA, 23 nt, Human
ccauugccaauccuagaacacau

SEQ ID NO: 633609 - RNA, 19 nt, Human
cccauuagagcaucaauga

SEQ ID NO: 633610 - RNA, 18 nt, Human
ccccacagccagcacagc

SEQ ID NO: 633611 - RNA, 27 nt, Human
ccccacagccagcacagcagccgccac

SEQ ID NO: 633612 - RNA, 21 nt, Human
cccccuauuacuaaacaaauc

SEQ ID NO: 633613 - RNA, 21 nt, Human
cccccuauuacuaaacaaauc

SEQ ID NO: 633614 - RNA, 19 nt, Human
ccgggcuaguuugacagca

SEQ ID NO: 633615 - RNA, 20 nt, Human
ccucaaaagcugcccaaagc

SEQ ID NO: 633616 - RNA, 22 nt, Human
ccucugguucuucugauccauu

SEQ ID NO: 633617 - RNA, 21 nt, Human
ccugaaacaacauacuuuuga

SEQ ID NO: 633618 - RNA, 21 nt, Human
ccuguaaaauccugaggauua

SEQ ID NO: 633619 - RNA, 24 nt, Human
cggauaguguaugaaaaaucuguc

SEQ ID NO: 633620 - RNA, 21 nt, Human
cuccguccccacagccagcac

SEQ ID NO: 633621 - RNA, 20 nt, Human
cugaaacagacaaaaccuug

SEQ ID NO: 633622 - RNA, 20 nt, Human
cugaaacagacaaaaccuug

SEQ ID NO: 633623 - RNA, 21 nt, Human
cuguaugugcuuucuuuuccu

SEQ ID NO: 633624 - RNA, 24 nt, Human
cuugcacugcaaagcuugacaaac

SEQ ID NO: 633625 - RNA, 24 nt, Human
cuuucaagagaaccacaacucguu

SEQ ID NO: 633626 - RNA, 21 nt, Human
gaagacaugccucacuccuuc

SEQ ID NO: 633627 - RNA, 21 nt, Human
gacccauuagagcaucaauga

SEQ ID NO: 633628 - RNA, 20 nt, Human
gacgaagagaggcaacgagg

SEQ ID NO: 633629 - RNA, 21 nt, Human
gaggucaccacuauauuccau

SEQ ID NO: 633630 - RNA, 22 nt, Human
gcaacagauauaguuauaugaa

SEQ ID NO: 633631 - RNA, 21 nt, Human
gcacagcagccgccacccgcg

SEQ ID NO: 633632 - RNA, 22 nt, Human
gcagaccaucuccuaaugcaac

SEQ ID NO: 633633 - RNA, 23 nt, Human
gcagccaucaagugauucuccug

SEQ ID NO: 633634 - RNA, 19 nt, Human
gccaucaagugauucuccu

SEQ ID NO: 633635 - RNA, 19 nt, Human
guaagugagagaaaagccc

SEQ ID NO: 633636 - RNA, 21 nt, Human
guugcaagcagaccaucuccu

SEQ ID NO: 633637 - RNA, 21 nt, Human
uaaaaaaaaaaaaaaaaggga

SEQ ID NO: 633638 - RNA, 24 nt, Human
uaaaaaaaaaaaaaaaagggaggg

SEQ ID NO: 633639 - RNA, 23 nt, Human
uaaagcagcuauguuuaagaaaa

SEQ ID NO: 633640 - RNA, 24 nt, Human
uaauguauccuuucugcaguuaga

SEQ ID NO: 633641 - RNA, 20 nt, Human
uacagaccauagggcacaga

SEQ ID NO: 633642 - RNA, 20 nt, Human
uauaacugaaacagacaaaa

SEQ ID NO: 633643 - RNA, 20 nt, Human
uauaacugaaacagacaaaa

SEQ ID NO: 633644 - RNA, 20 nt, Human
uauacuguuuacaucccuca

SEQ ID NO: 633645 - RNA, 20 nt, Human
uauacuguuuacaucccuca

SEQ ID NO: 633646 - RNA, 21 nt, Human
uauaguuauaugaacaacauu

SEQ ID NO: 633647 - RNA, 18 nt, Human
ucaaaagcugcccaaagc

SEQ ID NO: 633648 - RNA, 18 nt, Human
ucaagagaaccacaacuc

SEQ ID NO: 633649 - RNA, 22 nt, Human
ucaagugauucuccuguucuac

SEQ ID NO: 633650 - RNA, 22 nt, Human
ucagaauuuuguacuacacuga

SEQ ID NO: 633651 - RNA, 22 nt, Human
ucagaauuuuguacuacacuga

SEQ ID NO: 633652 - RNA, 18 nt, Human
ucagcgucacuggaaggu

SEQ ID NO: 633653 - RNA, 24 nt, Human
ucaguuaacgaucuuaugauggau

SEQ ID NO: 633654 - RNA, 20 nt, Human
uccaaaagcaccuuucuuga

SEQ ID NO: 633655 - RNA, 26 nt, Human
uccacagcacuugccauuucaguuuc

SEQ ID NO: 633656 - RNA, 20 nt, Human
uccauauguaaaaguauaau

SEQ ID NO: 633657 - RNA, 24 nt, Human
uccccacagccagcacagcagccg

SEQ ID NO: 633658 - RNA, 29 nt, Human
uccccacagccagcacagcagccgccacc

SEQ ID NO: 633659 - RNA, 19 nt, Human
ucccccuauuacuaaacaa

SEQ ID NO: 633660 - RNA, 19 nt, Human
ucccccuauuacuaaacaa

SEQ ID NO: 633661 - RNA, 28 nt, Human
ucuuccguuuuauuacaaaaaugaagau

SEQ ID NO: 633662 - RNA, 20 nt, Human
ucuuuaaaaaaaaaaaaaaa

SEQ ID NO: 633663 - RNA, 20 nt, Human
ucuuuaaaaaaaaaaaaaaa

SEQ ID NO: 633664 - RNA, 21 nt, Human
ugaaaagaugccgggcuaguu

SEQ ID NO: 633665 - RNA, 19 nt, Human
ugaaacaacauacuuuuga

SEQ ID NO: 633666 - RNA, 22 nt, Human
ugaaacagacaaaaccuuguca

SEQ ID NO: 633667 - RNA, 22 nt, Human
ugaaacagacaaaaccuuguca

SEQ ID NO: 633668 - RNA, 24 nt, Human
ugaagcaaauguucagcuucuucc

SEQ ID NO: 633669 - RNA, 19 nt, Human
ugaauaauuuacaguugaa

SEQ ID NO: 633670 - RNA, 23 nt, Human
ugacagcgucugaccaaaaaugc

SEQ ID NO: 633671 - RNA, 18 nt, Human
ugaccaaaaaugcaauaa

SEQ ID NO: 633672 - RNA, 23 nt, Human
ugacuagcaaaccaacuauauug

SEQ ID NO: 633673 - RNA, 19 nt, Human
ugagaaaauguaauucuca

SEQ ID NO: 633674 - RNA, 20 nt, Human
ugagaaauaaauguaaguga

SEQ ID NO: 633675 - RNA, 22 nt, Human
ugagagaaaagcccugcccuag

SEQ ID NO: 633676 - RNA, 22 nt, Human
ugauccauuuucugcuuuccuu

SEQ ID NO: 633677 - RNA, 20 nt, Human
ugcaaaagaauucuagacca

SEQ ID NO: 633678 - RNA, 20 nt, Human
ugcaaaagaauucuagacca

SEQ ID NO: 633679 - RNA, 24 nt, Human
ugcagucagguuuuucuuccuacc

SEQ ID NO: 633680 - RNA, 24 nt, Human
ugcagucagguuuuucuuccuacc

SEQ ID NO: 633681 - RNA, 19 nt, Human
ugcaguuagaucucaauuc

SEQ ID NO: 633682 - RNA, 18 nt, Human
ugcccuacuuguuaagcu

SEQ ID NO: 633683 - RNA, 21 nt, Human
ugccugugcugccauuacuag

SEQ ID NO: 633684 - RNA, 22 nt, Human
ugcuaugguuuuccauguacuu

SEQ ID NO: 633685 - RNA, 18 nt, Human
ugcugccauuacuagaau

SEQ ID NO: 633686 - RNA, 22 nt, Human
uggaagguccacagcacuugcc

SEQ ID NO: 633687 - RNA, 22 nt, Human
uggaugccacuugaugccauga

SEQ ID NO: 633688 - RNA, 21 nt, Human
ugguaagcuacuaauugacau

SEQ ID NO: 633689 - RNA, 21 nt, Human
ugguaagcuacuaauugacau

SEQ ID NO: 633690 - RNA, 18 nt, Human
uguaacguucauaaucuc

SEQ ID NO: 633691 - RNA, 24 nt, Human
uguaauacagaggcuugcacugca

SEQ ID NO: 633692 - RNA, 18 nt, Human
ugugugggcaggcuuugg

SEQ ID NO: 633693 - RNA, 21 nt, Human
uguguuuucagaauuuuguac

SEQ ID NO: 633694 - RNA, 21 nt, Human
uguguuuucagaauuuuguac

SEQ ID NO: 633695 - RNA, 19 nt, Human
uguuuaagaaaacaagcaa

SEQ ID NO: 633696 - RNA, 20 nt, Human
uuaaaaaaaaaaaaaaaaaa

SEQ ID NO: 633697 - RNA, 27 nt, Human
uuaaaaguccuuuuuucuccucucgug

SEQ ID NO: 633698 - RNA, 27 nt, Human
uuaaaaguccuuuuuucuccucucgug

SEQ ID NO: 633699 - RNA, 18 nt, Human
uuagaucucaauucacaa

SEQ ID NO: 633700 - RNA, 22 nt, Human
uuauuuucuacaguuuuccaaa

SEQ ID NO: 633701 - RNA, 22 nt, Human
uucacaaguauaacugaaacag

SEQ ID NO: 633702 - RNA, 22 nt, Human
uucacaaguauaacugaaacag

SEQ ID NO: 633703 - RNA, 22 nt, Human
uuccuaccccuuaaggcuacaa

SEQ ID NO: 633704 - RNA, 22 nt, Human
uuccuaccccuuaaggcuacaa

SEQ ID NO: 633705 - RNA, 18 nt, Human
uuccucaaaagcugccca

SEQ ID NO: 633706 - RNA, 24 nt, Human
uuccuggcagccaucaagugauuc

SEQ ID NO: 633707 - RNA, 19 nt, Human
uuguacugaaaggaaaaag

SEQ ID NO: 633708 - RNA, 27 nt, Human
uuuaaaaaaaaaaaaaaaagggaggua

SEQ ID NO: 633709 - RNA, 18 nt, Human
uuuacaucccucauuaaa

SEQ ID NO: 633710 - RNA, 18 nt, Human
uuuacaucccucauuaaa

SEQ ID NO: 633711 - RNA, 25 nt, Human
uuucaaggucugcauacuuuuucca

SEQ ID NO: 633712 - RNA, 21 nt, Human
uuucuuccuaccccuuaaggc

SEQ ID NO: 633713 - RNA, 21 nt, Human
uuucuuccuaccccuuaaggc

SEQ ID NO: 633714 - RNA, 22 nt, Human
uuuuccauguacuuggcauacu

SEQ ID NO: 633715 - RNA, 28 nt, Human
uuuuuucuuuaaaaaaaaaaaaaaaaaa

SEQ ID NO: 633716 - RNA, 22 nt, Human
uuuuuuuuuuuuuuuuacugga

SEQ ID NO: 633717 - RNA, 22 nt, Human
uuuuuuuuuuuuuuuuuacugg

SEQ ID NO: 633718 - RNA, 22 nt, Human
aaaaagacaugcaucugucaaa

SEQ ID NO: 633719 - RNA, 20 nt, Human
aaaauaugcauccuccaagg

SEQ ID NO: 633720 - RNA, 22 nt, Human
aaauccugucagcuuuuaaaag

SEQ ID NO: 633721 - RNA, 19 nt, Human
aaaucuguuagcugucaaa

SEQ ID NO: 633722 - RNA, 21 nt, Human
aaaugugucaguaggagaaag

SEQ ID NO: 633723 - RNA, 24 nt, Human
aacacaauaaucaacugucaaacc

SEQ ID NO: 633724 - RNA, 23 nt, Human
aagaaacagauguaaacuaucaa

SEQ ID NO: 633725 - RNA, 22 nt, Human
acugcaaugucauucacacauc

SEQ ID NO: 633726 - RNA, 19 nt, Human
aggagaaaggaggagcuga

SEQ ID NO: 633727 - RNA, 20 nt, Human
aggaggagcugaagggagua

SEQ ID NO: 633728 - RNA, 22 nt, Human
aggcagauuguuuuaucuuucu

SEQ ID NO: 633729 - RNA, 18 nt, Human
aucaaaauaugcauccuc

SEQ ID NO: 633730 - RNA, 22 nt, Human
auucacacaucaguuuuacaug

SEQ ID NO: 633731 - RNA, 21 nt, Human
auuuguaguggcugagggcua

SEQ ID NO: 633732 - RNA, 23 nt, Human
caaaauaaccagacuccacuaaa

SEQ ID NO: 633733 - RNA, 26 nt, Human
caaaauaugcauccuccaaguucacu

SEQ ID NO: 633734 - RNA, 21 nt, Human
caaguugacaccucauaugga

SEQ ID NO: 633735 - RNA, 24 nt, Human
cacuaaaccauacaaaucuguuag

SEQ ID NO: 633736 - RNA, 21 nt, Human
ccagacuccacuaaaccauac

SEQ ID NO: 633737 - RNA, 22 nt, Human
ccagaugaaaauauaagaccug

SEQ ID NO: 633738 - RNA, 18 nt, Human
ccuccaaguucacuucca

SEQ ID NO: 633739 - RNA, 21 nt, Human
cuuaauugucuuggaaaucau

SEQ ID NO: 633740 - RNA, 19 nt, Human
gagaaaggaggagcugaag

SEQ ID NO: 633741 - RNA, 22 nt, Human
gcagacaauuucaggcuuaaaa

SEQ ID NO: 633742 - RNA, 24 nt, Human
gccccaguaguucuuaauugucuu

SEQ ID NO: 633743 - RNA, 19 nt, Human
guaguucuuaauugucuug

SEQ ID NO: 633744 - RNA, 21 nt, Human
gugucaguaggagaaaggagg

SEQ ID NO: 633745 - RNA, 22 nt, Human
guuacugugaagaagaguauca

SEQ ID NO: 633746 - RNA, 23 nt, Human
guuuugaaauacucaacaacugu

SEQ ID NO: 633747 - RNA, 21 nt, Human
guuuuucuccuuuccucuuug

SEQ ID NO: 633748 - RNA, 20 nt, Human
uaaaagaaugaauuaaacug

SEQ ID NO: 633749 - RNA, 20 nt, Human
uaaaagcauucauugcccca

SEQ ID NO: 633750 - RNA, 20 nt, Human
uaaccagacuccacuaaacc

SEQ ID NO: 633751 - RNA, 23 nt, Human
uaaguacuucauaguaacaauuu

SEQ ID NO: 633752 - RNA, 23 nt, Human
uagauucuuagucauaauuacuc

SEQ ID NO: 633753 - RNA, 23 nt, Human
uauccgaacauuuucugaaaauc

SEQ ID NO: 633754 - RNA, 18 nt, Human
ucauauggaugaaauaag

SEQ ID NO: 633755 - RNA, 22 nt, Human
ucaucugucaaguugacaccuc

SEQ ID NO: 633756 - RNA, 20 nt, Human
ucuuugaacaaagucaggaa

SEQ ID NO: 633757 - RNA, 22 nt, Human
ugaacaaagucaggaaaaaugu

SEQ ID NO: 633758 - RNA, 26 nt, Human
ugaagggaguaaauaauucaagauca

SEQ ID NO: 633759 - RNA, 23 nt, Human
ugcagacaauuucaggcuuaaaa

SEQ ID NO: 633760 - RNA, 22 nt, Human
uggcugagggcuagaaagauau

SEQ ID NO: 633761 - RNA, 23 nt, Human
ugucuuggaaaucauucucuugc

SEQ ID NO: 633762 - RNA, 20 nt, Human
uguuuguuuuucuccuuucc

SEQ ID NO: 633763 - RNA, 22 nt, Human
uuacggcugugcuauccaauau

SEQ ID NO: 633764 - RNA, 22 nt, Human
aaaaggccagguaugaugguuc

SEQ ID NO: 633765 - RNA, 18 nt, Human
aacacauucccccaucuc

SEQ ID NO: 633766 - RNA, 20 nt, Human
aacacauucccccaucucua

SEQ ID NO: 633767 - RNA, 19 nt, Human
aagaagccaucaaauucuu

SEQ ID NO: 633768 - RNA, 21 nt, Human
aagcaaacuuacagaauagga

SEQ ID NO: 633769 - RNA, 27 nt, Human
aagcaacccaccggccucugccuccca

SEQ ID NO: 633770 - RNA, 21 nt, Human
aagcaacuaauuaucucccuc

SEQ ID NO: 633771 - RNA, 19 nt, Human
aaguagcugggacuacagg

SEQ ID NO: 633772 - RNA, 20 nt, Human
aaguagcugggacuacaggu

SEQ ID NO: 633773 - RNA, 26 nt, Human
aaguagcugggacuacaggugcacac

SEQ ID NO: 633774 - RNA, 20 nt, Human
aagugcugggagccacugcc

SEQ ID NO: 633775 - RNA, 20 nt, Human
aaucccuccaugacccaccu

SEQ ID NO: 633776 - RNA, 19 nt, Human
aaugcaguggggugaucuc

SEQ ID NO: 633777 - RNA, 24 nt, Human
aaugcaguggggugaucucagcuc

SEQ ID NO: 633778 - RNA, 24 nt, Human
aauugcuugagccugggaggcgga

SEQ ID NO: 633779 - RNA, 20 nt, Human
acaccacugcacuccagccu

SEQ ID NO: 633780 - RNA, 24 nt, Human
acaccacugcacuccagccugggc

SEQ ID NO: 633781 - RNA, 18 nt, Human
acauaugccuuagaaaaa

SEQ ID NO: 633782 - RNA, 22 nt, Human
accacugcacuccagccugggc

SEQ ID NO: 633783 - RNA, 18 nt, Human
accaucugccucuuacca

SEQ ID NO: 633784 - RNA, 18 nt, Human
accauguugcccaggcuu

SEQ ID NO: 633785 - RNA, 21 nt, Human
accccuguaucuacagaauaa

SEQ ID NO: 633786 - RNA, 25 nt, Human
acuaguagacugaugagcuggauuu

SEQ ID NO: 633787 - RNA, 21 nt, Human
acucccagcccccuuccuuuc

SEQ ID NO: 633788 - RNA, 21 nt, Human
acugcacuccaaacuuaagug

SEQ ID NO: 633789 - RNA, 24 nt, Human
acugcacuccagccugggcaacag

SEQ ID NO: 633790 - RNA, 22 nt, Human
agaauugcuugagccugggagg

SEQ ID NO: 633791 - RNA, 18 nt, Human
agacaacuggauggaaaa

SEQ ID NO: 633792 - RNA, 18 nt, Human
agacuagaaaacguagca

SEQ ID NO: 633793 - RNA, 18 nt, Human
agagaauaauuucuugug

SEQ ID NO: 633794 - RNA, 18 nt, Human
agcaaacuaguagacuga

SEQ ID NO: 633795 - RNA, 23 nt, Human
agcaacccaccggccucugccuc

SEQ ID NO: 633796 - RNA, 18 nt, Human
agccagacgugguggugc

SEQ ID NO: 633797 - RNA, 24 nt, Human
agccugggcaacagaccaagaccu

SEQ ID NO: 633798 - RNA, 22 nt, Human
aggcaggagaauugcuugagcc

SEQ ID NO: 633799 - RNA, 24 nt, Human
aggcaggagaauugcuugagccug

SEQ ID NO: 633800 - RNA, 22 nt, Human
aggccagcaguucaagaccaga

SEQ ID NO: 633801 - RNA, 24 nt, Human
aggcggagauuacggugagccaag

SEQ ID NO: 633802 - RNA, 21 nt, Human
aggcucaagugauucccccac

SEQ ID NO: 633803 - RNA, 18 nt, Human
aggggguaaggaagagaa

SEQ ID NO: 633804 - RNA, 24 nt, Human
agguaugaugguucaugccuguaa

SEQ ID NO: 633805 - RNA, 19 nt, Human
aggugagaauggaucgcuu

SEQ ID NO: 633806 - RNA, 24 nt, Human
agguugaggcaggagaauugcuug

SEQ ID NO: 633807 - RNA, 24 nt, Human
agugauucccccaccucagccucc

SEQ ID NO: 633808 - RNA, 24 nt, Human
aguggggugaucucagcucacugu

SEQ ID NO: 633809 - RNA, 24 nt, Human
aucacaccacugcacuccagccug

SEQ ID NO: 633810 - RNA, 28 nt, Human
aucacaccacugcacuccagccugggca

SEQ ID NO: 633811 - RNA, 19 nt, Human
aucaugccacugcacucca

SEQ ID NO: 633812 - RNA, 22 nt, Human
aucccagcacuuugggaggcca

SEQ ID NO: 633813 - RNA, 22 nt, Human
aucuuaguccccuccccccacc

SEQ ID NO: 633814 - RNA, 18 nt, Human
aucuugaucuuauuucua

SEQ ID NO: 633815 - RNA, 22 nt, Human
augacaggggguaaggaagaga

SEQ ID NO: 633816 - RNA, 25 nt, Human
augccacugcacuccaaacuuaagu

SEQ ID NO: 633817 - RNA, 19 nt, Human
augccuguaaucccagcac

SEQ ID NO: 633818 - RNA, 23 nt, Human
augguucaugccuguaaucccag

SEQ ID NO: 633819 - RNA, 20 nt, Human
caaagugcugggagccacug

SEQ ID NO: 633820 - RNA, 18 nt, Human
caacccaccggccucugc

SEQ ID NO: 633821 - RNA, 27 nt, Human
caagugauucccccaccucagccuccc

SEQ ID NO: 633822 - RNA, 23 nt, Human
cacaccaccaugccagcuaauuu

SEQ ID NO: 633823 - RNA, 21 nt, Human
cacaccacugcacuccagccu

SEQ ID NO: 633824 - RNA, 23 nt, Human
caccaugccagcuaauuuuugua

SEQ ID NO: 633825 - RNA, 24 nt, Human
caccauguugcccaggcuugucuc

SEQ ID NO: 633826 - RNA, 27 nt, Human
caccauguugcccaggcuugucuccaa

SEQ ID NO: 633827 - RNA, 24 nt, Human
caccucagccucccaaguagcugg

SEQ ID NO: 633828 - RNA, 19 nt, Human
cacugcacuccagccuggg

SEQ ID NO: 633829 - RNA, 21 nt, Human
cacugcacuccagccugggca

SEQ ID NO: 633830 - RNA, 22 nt, Human
cacugcacuccagccugggcaa

SEQ ID NO: 633831 - RNA, 23 nt, Human
cacugcacuccagccugggcaac

SEQ ID NO: 633832 - RNA, 24 nt, Human
cacugcacuccagccugggcaaca

SEQ ID NO: 633833 - RNA, 25 nt, Human
cacugcacuccagccugggcaacaa

SEQ ID NO: 633834 - RNA, 26 nt, Human
cacugcacuccagccugggcaacaga

SEQ ID NO: 633835 - RNA, 21 nt, Human
cacugccaccacucccagccc

SEQ ID NO: 633836 - RNA, 20 nt, Human
cacuguggccucgaccuccc

SEQ ID NO: 633837 - RNA, 19 nt, Human
cagaacaugacagggggua

SEQ ID NO: 633838 - RNA, 18 nt, Human
cagaauaggaacaccugc

SEQ ID NO: 633839 - RNA, 22 nt, Human
cagacuagaaaacguagcauga

SEQ ID NO: 633840 - RNA, 20 nt, Human
cagcacuuugggaggccaag

SEQ ID NO: 633841 - RNA, 23 nt, Human
cagcacuuugggaggccaaggug

SEQ ID NO: 633842 - RNA, 27 nt, Human
cagccuaccagaaaagagggccaaugg

SEQ ID NO: 633843 - RNA, 24 nt, Human
cagcuauucggaagguugaggcag

SEQ ID NO: 633844 - RNA, 23 nt, Human
cagcucacuguggccucgaccuc

SEQ ID NO: 633845 - RNA, 21 nt, Human
caggagacugaggcagaaaga

SEQ ID NO: 633846 - RNA, 24 nt, Human
cauguugcccaggcuugucuccaa

SEQ ID NO: 633847 - RNA, 21 nt, Human
ccaaaaaaaaaaaaaaaaaaa

SEQ ID NO: 633848 - RNA, 23 nt, Human
ccaaacuuaagugacaacccaug

SEQ ID NO: 633849 - RNA, 23 nt, Human
ccaacuccugagcuaaagcaacc

SEQ ID NO: 633850 - RNA, 20 nt, Human
ccacugcacuccagccuggg

SEQ ID NO: 633851 - RNA, 21 nt, Human
ccacugcacuccagccugggc

SEQ ID NO: 633852 - RNA, 23 nt, Human
ccacugcacuccagccugggcaa

SEQ ID NO: 633853 - RNA, 24 nt, Human
ccacugcacuccagccugggcaac

SEQ ID NO: 633854 - RNA, 23 nt, Human
ccaugggacucugccuaaugcug

SEQ ID NO: 633855 - RNA, 22 nt, Human
cccaaguagcugggacuacagg

SEQ ID NO: 633856 - RNA, 23 nt, Human
cccaaguagcugggacuacaggu

SEQ ID NO: 633857 - RNA, 19 nt, Human
cccaccuuuuucuucuucu

SEQ ID NO: 633858 - RNA, 21 nt, Human
cccaggcuugucuccaacucc

SEQ ID NO: 633859 - RNA, 24 nt, Human
ccccaccucagccucccaaguagc

SEQ ID NO: 633860 - RNA, 19 nt, Human
ccccaccuuuuucuucuuc

SEQ ID NO: 633861 - RNA, 20 nt, Human
ccccaccuuuuucuucuucu

SEQ ID NO: 633862 - RNA, 18 nt, Human
ccccccaccuuuuucuuc

SEQ ID NO: 633863 - RNA, 18 nt, Human
ccccuuuucucucgaagg

SEQ ID NO: 633864 - RNA, 19 nt, Human
ccuaccagaaaagagccac

SEQ ID NO: 633865 - RNA, 22 nt, Human
ccuaggcucaagugauuccccc

SEQ ID NO: 633866 - RNA, 23 nt, Human
ccuccaugacccaccuaaggcug

SEQ ID NO: 633867 - RNA, 24 nt, Human
ccugagcuaaagcaacccaccggc

SEQ ID NO: 633868 - RNA, 20 nt, Human
ccuguaaucccagcacuuug

SEQ ID NO: 633869 - RNA, 22 nt, Human
ccuguaaucccagcacuuuggg

SEQ ID NO: 633870 - RNA, 21 nt, Human
ccuguagucccagcuauucgg

SEQ ID NO: 633871 - RNA, 19 nt, Human
cgccuguagucccagcuau

SEQ ID NO: 633872 - RNA, 23 nt, Human
cgccuguagucccagcuauucgg

SEQ ID NO: 633873 - RNA, 24 nt, Human
cgcucugucacccaggcuggaaug

SEQ ID NO: 633874 - RNA, 20 nt, Human
cggaagguugaggcaggaga

SEQ ID NO: 633875 - RNA, 19 nt, Human
cuaggcauuauuccaugcc

SEQ ID NO: 633876 - RNA, 21 nt, Human
cucaagugauucccccaccuc

SEQ ID NO: 633877 - RNA, 23 nt, Human
cucaagugauucccccaccucag

SEQ ID NO: 633878 - RNA, 24 nt, Human
cucaagugauucccccaccucagc

SEQ ID NO: 633879 - RNA, 24 nt, Human
cucagccucccaaguagcugggac

SEQ ID NO: 633880 - RNA, 20 nt, Human
cuccccccaccuuuuucuuc

SEQ ID NO: 633881 - RNA, 20 nt, Human
cugacucccuccucccauac

SEQ ID NO: 633882 - RNA, 19 nt, Human
cugccucuuaccauucacc

SEQ ID NO: 633883 - RNA, 19 nt, Human
cuugagccugggaggcgga

SEQ ID NO: 633884 - RNA, 23 nt, Human
gaccauaaucccuccaugaccca

SEQ ID NO: 633885 - RNA, 21 nt, Human
gacuacaggugcacaccacca

SEQ ID NO: 633886 - RNA, 24 nt, Human
gaucgcuugaggccagcaguucaa

SEQ ID NO: 633887 - RNA, 24 nt, Human
gaugguucaugccuguaaucccag

SEQ ID NO: 633888 - RNA, 20 nt, Human
gccaagaucacaccacugca

SEQ ID NO: 633889 - RNA, 22 nt, Human
gccagguaugaugguucaugcc

SEQ ID NO: 633890 - RNA, 19 nt, Human
gccuguacuggucagugag

SEQ ID NO: 633891 - RNA, 23 nt, Human
gcggcgugcgccuguagucccag

SEQ ID NO: 633892 - RNA, 25 nt, Human
gcucugucacccaggcuggaaugca

SEQ ID NO: 633893 - RNA, 21 nt, Human
ggccucgaccucccuaggcuc

SEQ ID NO: 633894 - RNA, 24 nt, Human
ggccuguaguccuagauacucagg

SEQ ID NO: 633895 - RNA, 24 nt, Human
gggccuguaguccuagauacucag

SEQ ID NO: 633896 - RNA, 20 nt, Human
gguaaaguacaaaaacgcca

SEQ ID NO: 633897 - RNA, 24 nt, Human
ggugagaauggaucgcuugaggcc

SEQ ID NO: 633898 - RNA, 18 nt, Human
gugagacaacuggaugga

SEQ ID NO: 633899 - RNA, 24 nt, Human
gugauucccccaccucagccuccc

SEQ ID NO: 633900 - RNA, 19 nt, Human
guggugcggcgugcgccug

SEQ ID NO: 633901 - RNA, 21 nt, Human
guggugcggcgugcgccugua

SEQ ID NO: 633902 - RNA, 18 nt, Human
guugugcgggccuguagu

SEQ ID NO: 633903 - RNA, 20 nt, Human
guugugcgggccuguagucc

SEQ ID NO: 633904 - RNA, 20 nt, Human
uaaagcaacccaccggccuc

SEQ ID NO: 633905 - RNA, 21 nt, Human
uaaagcaacccaccggccucu

SEQ ID NO: 633906 - RNA, 24 nt, Human
uaaaguacaaaaacgccaccuuuu

SEQ ID NO: 633907 - RNA, 21 nt, Human
uaaucccuccaugacccaccu

SEQ ID NO: 633908 - RNA, 24 nt, Human
uaauuuuuguauuuuugauagaga

SEQ ID NO: 633909 - RNA, 18 nt, Human
uaccagaaaagagccacu

SEQ ID NO: 633910 - RNA, 22 nt, Human
uaccuaaagaacauagacugac

SEQ ID NO: 633911 - RNA, 21 nt, Human
uaggaguccaguugacaugcu

SEQ ID NO: 633912 - RNA, 19 nt, Human
uauguuccuagguugcugg

SEQ ID NO: 633913 - RNA, 21 nt, Human
uauguuccuagguugcuggaa

SEQ ID NO: 633914 - RNA, 26 nt, Human
ucaauauuauauagccuggcaaugaa

SEQ ID NO: 633915 - RNA, 23 nt, Human
ucacaccacugcacuccagccug

SEQ ID NO: 633916 - RNA, 19 nt, Human
ucacccaggcuggaaugca

SEQ ID NO: 633917 - RNA, 23 nt, Human
ucacugaugaucaugccacugca

SEQ ID NO: 633918 - RNA, 23 nt, Human
ucacuguggccucgaccucccua

SEQ ID NO: 633919 - RNA, 20 nt, Human
ucagccucccaaguagcugg

SEQ ID NO: 633920 - RNA, 22 nt, Human
ucaugccuguaaucccagcacu

SEQ ID NO: 633921 - RNA, 23 nt, Human
ucaugccuguaaucccagcacuu

SEQ ID NO: 633922 - RNA, 22 nt, Human
uccagguaaaguacaaaaacgc

SEQ ID NO: 633923 - RNA, 24 nt, Human
uccaucagcuaugguuaucuucuu

SEQ ID NO: 633924 - RNA, 24 nt, Human
ucccaaguagcugggacuacaggu

SEQ ID NO: 633925 - RNA, 20 nt, Human
ucccauacaauaacacauuc

SEQ ID NO: 633926 - RNA, 23 nt, Human
ucccccaccucagccucccaagu

SEQ ID NO: 633927 - RNA, 26 nt, Human
ucccccaccucagccucccaaguagc

SEQ ID NO: 633928 - RNA, 25 nt, Human
ucccuaggcucaagugauuccccca

SEQ ID NO: 633929 - RNA, 18 nt, Human
ucccuccaugacccaccu

SEQ ID NO: 633930 - RNA, 20 nt, Human
ucccuccaugacccaccuaa

SEQ ID NO: 633931 - RNA, 26 nt, Human
ucgauagucccucuuaaugauuuccu

SEQ ID NO: 633932 - RNA, 19 nt, Human
ucgauucaaacagugugaa

SEQ ID NO: 633933 - RNA, 23 nt, Human
ucggaagguugaggcaggagaau

SEQ ID NO: 633934 - RNA, 20 nt, Human
ucuauguuccuagguugcug

SEQ ID NO: 633935 - RNA, 20 nt, Human
ucuccaaaaaaaaaaaaaaa

SEQ ID NO: 633936 - RNA, 21 nt, Human
ucuccaacuccugagcuaaag

SEQ ID NO: 633937 - RNA, 19 nt, Human
ucucgcucugucacccagg

SEQ ID NO: 633938 - RNA, 22 nt, Human
ucucgcucugucacccaggcug

SEQ ID NO: 633939 - RNA, 23 nt, Human
ucucgcucugucacccaggcugg

SEQ ID NO: 633940 - RNA, 24 nt, Human
ucucgcucugucacccaggcugga

SEQ ID NO: 633941 - RNA, 26 nt, Human
ucucgcucugucacccaggcuggaau

SEQ ID NO: 633942 - RNA, 27 nt, Human
ucucgcucugucacccaggcuggaaug

SEQ ID NO: 633943 - RNA, 18 nt, Human
ucucgggaaggaggguuc

SEQ ID NO: 633944 - RNA, 24 nt, Human
ucugucacccaggcuggaaugcag

SEQ ID NO: 633945 - RNA, 20 nt, Human
ucuucuuuuuugagacaggg

SEQ ID NO: 633946 - RNA, 19 nt, Human
ucuugaggacuugacaucu

SEQ ID NO: 633947 - RNA, 25 nt, Human
ucuuuggaaugccucuuuccccggu

SEQ ID NO: 633948 - RNA, 22 nt, Human
ugagacagggucucgcucuguc

SEQ ID NO: 633949 - RNA, 18 nt, Human
ugagccugggaggcggag

SEQ ID NO: 633950 - RNA, 24 nt, Human
ugaggcaggagaauugcuugagcc

SEQ ID NO: 633951 - RNA, 25 nt, Human
ugaggcaggagaauugcuugagccu

SEQ ID NO: 633952 - RNA, 22 nt, Human
ugaggccagcaguucaagacca

SEQ ID NO: 633953 - RNA, 24 nt, Human
ugaugguucaugccuguaauccca

SEQ ID NO: 633954 - RNA, 26 nt, Human
ugcagaagaagccaucaaauucuuga

SEQ ID NO: 633955 - RNA, 18 nt, Human
ugcccaggcuugucucca

SEQ ID NO: 633956 - RNA, 23 nt, Human
ugccuguaaucccagcacuuugg

SEQ ID NO: 633957 - RNA, 23 nt, Human
ugccuguaaucccagcacuuugg

SEQ ID NO: 633958 - RNA, 20 nt, Human
ugccuuagaaaaaggccagg

SEQ ID NO: 633959 - RNA, 18 nt, Human
uggaaaaucuauugugua

SEQ ID NO: 633960 - RNA, 19 nt, Human
uggaaugcaguggggugau

SEQ ID NO: 633961 - RNA, 23 nt, Human
uggaaugcaguggggugaucuca

SEQ ID NO: 633962 - RNA, 24 nt, Human
uggaaugcaguggggugaucucag

SEQ ID NO: 633963 - RNA, 21 nt, Human
uggaaugccucuuuccccggu

SEQ ID NO: 633964 - RNA, 24 nt, Human
uggaucgcuugaggccagcaguuc

SEQ ID NO: 633965 - RNA, 20 nt, Human
uggccucgaccucccuaggc

SEQ ID NO: 633966 - RNA, 22 nt, Human
ugggacuacaggugcacaccac

SEQ ID NO: 633967 - RNA, 24 nt, Human
ugggacuacaggugcacaccacca

SEQ ID NO: 633968 - RNA, 25 nt, Human
ugggaggccaaggugagaauggauc

SEQ ID NO: 633969 - RNA, 24 nt, Human
ugggaggcggagauuacggugagc

SEQ ID NO: 633970 - RNA, 23 nt, Human
uggggugaucucagcucacugug

SEQ ID NO: 633971 - RNA, 24 nt, Human
uggggugaucucagcucacugugg

SEQ ID NO: 633972 - RNA, 22 nt, Human
uggucagugaguucggucagcu

SEQ ID NO: 633973 - RNA, 30 nt, Human
ugguggugcggcgugcgccuguagucccaa

SEQ ID NO: 633974 - RNA, 24 nt, Human
ugguucaugccuguaaucccagca

SEQ ID NO: 633975 - RNA, 24 nt, Human
uguagucccagcuauucggaaggu

SEQ ID NO: 633976 - RNA, 24 nt, Human
ugucuccaacuccugagcuaaagc

SEQ ID NO: 633977 - RNA, 22 nt, Human
uuacacuacaaucugauaggag

SEQ ID NO: 633978 - RNA, 19 nt, Human
uucccccaccucagccucc

SEQ ID NO: 633979 - RNA, 22 nt, Human
uucucgggaaggaggguucuac

SEQ ID NO: 633980 - RNA, 22 nt, Human
uugagacagggucucgcucugu

SEQ ID NO: 633981 - RNA, 21 nt, Human
uugagccugggaggcggagau

SEQ ID NO: 633982 - RNA, 18 nt, Human
uugcccagaacaugacag

SEQ ID NO: 633983 - RNA, 18 nt, Human
uugcuugagccugggagg

SEQ ID NO: 633984 - RNA, 23 nt, Human
uugcuugagccugggaggcggag

SEQ ID NO: 633985 - RNA, 23 nt, Human
uugugguuauagcugcagaagaa

SEQ ID NO: 633986 - RNA, 20 nt, Human
uuuaaaaaaaaaaaaaaguu

SEQ ID NO: 633987 - RNA, 24 nt, Human
uuucaccauguugcccaggcuugu

SEQ ID NO: 633988 - RNA, 20 nt, Human
uuuggaaugccucuuucccc

SEQ ID NO: 633989 - RNA, 19 nt, Human
uuuuacaguucuaaagauc

SEQ ID NO: 633990 - RNA, 20 nt, Human
uuuuuguauuuuugauagag

SEQ ID NO: 633991 - RNA, 23 nt, Human
uuuuuguauuuuugauagagaca

SEQ ID NO: 633992 - RNA, 24 nt, Human
aaagugcugggauuacaggccuga

SEQ ID NO: 633993 - RNA, 19 nt, Human
aagaaucucugaagacaga

SEQ ID NO: 633994 - RNA, 19 nt, Human
aagugcugggauuacaggc

SEQ ID NO: 633995 - RNA, 19 nt, Human
aagugcugggauuacaggc

SEQ ID NO: 633996 - RNA, 26 nt, Human
aagugcugggauuacaggccugagcc

SEQ ID NO: 633997 - RNA, 23 nt, Human
aauauaaacaaugccuagaauga

SEQ ID NO: 633998 - RNA, 20 nt, Human
acaauacugcugccccaugc

SEQ ID NO: 633999 - RNA, 24 nt, Human
acagggucucaccguguuggccag

SEQ ID NO: 634000 - RNA, 24 nt, Human
accguguuggccaggcuggucucg

SEQ ID NO: 634001 - RNA, 20 nt, Human
accuugcucagccucccaaa

SEQ ID NO: 634002 - RNA, 21 nt, Human
acucacuguagccucugccuc

SEQ ID NO: 634003 - RNA, 18 nt, Human
acucugucacccaagcug

SEQ ID NO: 634004 - RNA, 26 nt, Human
acucugucacccaagcuggaguugca

SEQ ID NO: 634005 - RNA, 18 nt, Human
agacagggucucaccgug

SEQ ID NO: 634006 - RNA, 21 nt, Human
aggcagaaaagcaguucaggg

SEQ ID NO: 634007 - RNA, 23 nt, Human
aggccugagccaccgugcccggc

SEQ ID NO: 634008 - RNA, 20 nt, Human
aguaaagacagggucucacc

SEQ ID NO: 634009 - RNA, 24 nt, Human
aguaacuucaaauauaaacaaugc

SEQ ID NO: 634010 - RNA, 23 nt, Human
aguagcugggacuacaguggugc

SEQ ID NO: 634011 - RNA, 24 nt, Human
agugcugggauuacaggccugagc

SEQ ID NO: 634012 - RNA, 22 nt, Human
caaaguaguuuuccacagaggc

SEQ ID NO: 634013 - RNA, 24 nt, Human
caaagugcugggauuacaggccug

SEQ ID NO: 634014 - RNA, 20 nt, Human
caagcgauucuccugccuca

SEQ ID NO: 634015 - RNA, 22 nt, Human
caagcgauucuccugccucagc

SEQ ID NO: 634016 - RNA, 23 nt, Human
caagugauccacccaccuugcuc

SEQ ID NO: 634017 - RNA, 21 nt, Human
caccguguuggccaggcuggu

SEQ ID NO: 634018 - RNA, 24 nt, Human
caccguguuggccaggcuggucuc

SEQ ID NO: 634019 - RNA, 25 nt, Human
caccuugcucagccucccaaagugc

SEQ ID NO: 634020 - RNA, 19 nt, Human
cacucacuguagccucugc

SEQ ID NO: 634021 - RNA, 24 nt, Human
cacucugucacccaagcuggaguu

SEQ ID NO: 634022 - RNA, 18 nt, Human
cacuguagccucugccuc

SEQ ID NO: 634023 - RNA, 25 nt, Human
cagaggcagaaaagcaguucagggg

SEQ ID NO: 634024 - RNA, 24 nt, Human
cagggucucaccguguuggccagg

SEQ ID NO: 634025 - RNA, 18 nt, Human
ccaaaacacuuccugcac

SEQ ID NO: 634026 - RNA, 23 nt, Human
ccaaagacugcaucuucaacugg

SEQ ID NO: 634027 - RNA, 19 nt, Human
ccaaagugcugggauuaca

SEQ ID NO: 634028 - RNA, 22 nt, Human
ccaaagugcugggauuacaggc

SEQ ID NO: 634029 - RNA, 24 nt, Human
ccaaagugcugggauuacaggccu

SEQ ID NO: 634030 - RNA, 23 nt, Human
cccaccuugcucagccucccaaa

SEQ ID NO: 634031 - RNA, 20 nt, Human
ccucaguucaagcgauucuc

SEQ ID NO: 634032 - RNA, 22 nt, Human
ccugaguagcugggacuacagu

SEQ ID NO: 634033 - RNA, 22 nt, Human
ccugcaccacucgacacuggca

SEQ ID NO: 634034 - RNA, 18 nt, Human
ccuggccucaagugaucc

SEQ ID NO: 634035 - RNA, 24 nt, Human
ccuggccucaagugauccacccac

SEQ ID NO: 634036 - RNA, 23 nt, Human
cuaccagugcuacuuuuccugcu

SEQ ID NO: 634037 - RNA, 23 nt, Human
cuauuuaaaugagaggcgcucca

SEQ ID NO: 634038 - RNA, 23 nt, Human
cucaagugauccacccaccuugc

SEQ ID NO: 634039 - RNA, 24 nt, Human
cucacucugucacccaagcuggag

SEQ ID NO: 634040 - RNA, 19 nt, Human
cucacuguagccucugccu

SEQ ID NO: 634041 - RNA, 21 nt, Human
cucagccugaguagcugggac

SEQ ID NO: 634042 - RNA, 21 nt, Human
cuccaaaacacuuccugcacc

SEQ ID NO: 634043 - RNA, 20 nt, Human
cuccugccucagccugagua

SEQ ID NO: 634044 - RNA, 23 nt, Human
cuccuggccucaagugauccacc

SEQ ID NO: 634045 - RNA, 27 nt, Human
cuccuggccucaagugauccacccacc

SEQ ID NO: 634046 - RNA, 24 nt, Human
cuugcucagccucccaaagugcug

SEQ ID NO: 634047 - RNA, 24 nt, Human
gaguagcugggacuacaguggugc

SEQ ID NO: 634048 - RNA, 18 nt, Human
gauuacaggccugagcca

SEQ ID NO: 634049 - RNA, 21 nt, Human
gauuacaggccugagccaccg

SEQ ID NO: 634050 - RNA, 24 nt, Human
gauuacaggccugagccaccgugc

SEQ ID NO: 634051 - RNA, 21 nt, Human
gccauguugcuuuuauaauug

SEQ ID NO: 634052 - RNA, 24 nt, Human
gccucaguucaagcgauucuccug

SEQ ID NO: 634053 - RNA, 18 nt, Human
gccuggcuaauuuuugua

SEQ ID NO: 634054 - RNA, 23 nt, Human
gcuggucucgaacuccuggccuc

SEQ ID NO: 634055 - RNA, 26 nt, Human
ggaacuuucacaauacugcugccccu

SEQ ID NO: 634056 - RNA, 24 nt, Human
ggccucaagugauccacccaccuu

SEQ ID NO: 634057 - RNA, 24 nt, Human
ggcuggucucgaacuccuggccuc

SEQ ID NO: 634058 - RNA, 22 nt, Human
gggucucaccguguuggccagg

SEQ ID NO: 634059 - RNA, 28 nt, Human
gugauccacccaccuugcucagccuccc

SEQ ID NO: 634060 - RNA, 19 nt, Human
guugcaguggcgugaucuc

SEQ ID NO: 634061 - RNA, 22 nt, Human
uaaagacagggucucaccgugu

SEQ ID NO: 634062 - RNA, 24 nt, Human
uaauaagcccugggacauucaaau

SEQ ID NO: 634063 - RNA, 24 nt, Human
uaauuuuuguauuuuuaguaaaga

SEQ ID NO: 634064 - RNA, 23 nt, Human
uacaaauacugaagaaucccaaa

SEQ ID NO: 634065 - RNA, 23 nt, Human
uacaggccugagccaccgugccc

SEQ ID NO: 634066 - RNA, 22 nt, Human
uaccagugcuacuuuuccuggg

SEQ ID NO: 634067 - RNA, 24 nt, Human
uacuacaaauacugaagaauccca

SEQ ID NO: 634068 - RNA, 19 nt, Human
uacugcugccccaugcagg

SEQ ID NO: 634069 - RNA, 26 nt, Human
uaguaaagacagggucucaccguguu

SEQ ID NO: 634070 - RNA, 18 nt, Human
ucaccaguucuuacgauu

SEQ ID NO: 634071 - RNA, 24 nt, Human
ucaccguguuggccaggcuggucu

SEQ ID NO: 634072 - RNA, 19 nt, Human
ucacuguagccucugccuc

SEQ ID NO: 634073 - RNA, 21 nt, Human
ucacuguagccucugccucag

SEQ ID NO: 634074 - RNA, 18 nt, Human
ucagaacuaaaacuacaa

SEQ ID NO: 634075 - RNA, 26 nt, Human
ucagaacuaaaacuacaacuccucuc

SEQ ID NO: 634076 - RNA, 24 nt, Human
ucccaaagugcugggauuacaggc

SEQ ID NO: 634077 - RNA, 19 nt, Human
ucucaccguguuggccagg

SEQ ID NO: 634078 - RNA, 24 nt, Human
ucucaccguguuggccaggcuggu

SEQ ID NO: 634079 - RNA, 24 nt, Human
ucucacucugucacccaagcugga

SEQ ID NO: 634080 - RNA, 21 nt, Human
ucucaggaaaaugcuuuuguc

SEQ ID NO: 634081 - RNA, 23 nt, Human
ucuccugccucagccugaguagc

SEQ ID NO: 634082 - RNA, 21 nt, Human
ucucgaacuccuggccucaag

SEQ ID NO: 634083 - RNA, 25 nt, Human
ucugucacccaagcuggaguugcag

SEQ ID NO: 634084 - RNA, 26 nt, Human
ugauccacccaccuugcucagccucc

SEQ ID NO: 634085 - RNA, 22 nt, Human
ugcaguggcgugaucuccacuc

SEQ ID NO: 634086 - RNA, 21 nt, Human
ugccucagccugaguagcugg

SEQ ID NO: 634087 - RNA, 23 nt, Human
ugcucagccucccaaagugcugg

SEQ ID NO: 634088 - RNA, 21 nt, Human
uggaaaaaaaaaacuugaaug

SEQ ID NO: 634089 - RNA, 24 nt, Human
uggagcaucaauuuucugcaaccu

SEQ ID NO: 634090 - RNA, 24 nt, Human
uggccaggcuggucucgaacuccu

SEQ ID NO: 634091 - RNA, 22 nt, Human
uggccucaagugauccacccac

SEQ ID NO: 634092 - RNA, 27 nt, Human
uggccucaagugauccacccaccuugc

SEQ ID NO: 634093 - RNA, 23 nt, Human
uggcgugaucuccacucacugua

SEQ ID NO: 634094 - RNA, 24 nt, Human
uggcgugaucuccacucacuguag

SEQ ID NO: 634095 - RNA, 18 nt, Human
ugggauuacaggccugag

SEQ ID NO: 634096 - RNA, 21 nt, Human
ugggauuacaggccugagcca

SEQ ID NO: 634097 - RNA, 22 nt, Human
ugggauuacaggccugagccac

SEQ ID NO: 634098 - RNA, 23 nt, Human
ugggauuacaggccugagccacc

SEQ ID NO: 634099 - RNA, 23 nt, Human
ugggauuacaggccugagccacc

SEQ ID NO: 634100 - RNA, 24 nt, Human
ugggauuacaggccugagccaccg

SEQ ID NO: 634101 - RNA, 21 nt, Human
uucaagcgauucuccugccuc

SEQ ID NO: 634102 - RNA, 23 nt, Human
uucaagcgauucuccugccucag

SEQ ID NO: 634103 - RNA, 24 nt, Human
uucaagcgauucuccugccucagc

SEQ ID NO: 634104 - RNA, 29 nt, Human
uucuccucuaucaccauucuucuugagau

SEQ ID NO: 634105 - RNA, 23 nt, Human
uugagacggucucacucugucac

SEQ ID NO: 634106 - RNA, 18 nt, Human
uuuccugcuguugacauc

SEQ ID NO: 634107 - RNA, 24 nt, Human
uuuguuuuggggguuaggcaaauu

SEQ ID NO: 634108 - RNA, 21 nt, Human
uuuucugcaaccuuucaagaa

SEQ ID NO: 634109 - RNA, 20 nt, Human
uuuuuguauuuuuaguaaag

SEQ ID NO: 634110 - RNA, 23 nt, Human
uuuuuguauuuuuaguaaagaca

SEQ ID NO: 634111 - RNA, 25 nt, Human
uuuuuuuuuuuuugagacggucuca

SEQ ID NO: 634112 - RNA, 27 nt, Human
uuuuuuuuuuuuuuuuuuuuuuugggg

SEQ ID NO: 634113 - RNA, 22 nt, Human
aaaaaagauucccacaacauga

SEQ ID NO: 634114 - RNA, 22 nt, Human
aaaaaagauucccacaacauga

SEQ ID NO: 634115 - RNA, 24 nt, Human
aaaaaagauucccacaacaugacc

SEQ ID NO: 634116 - RNA, 24 nt, Human
aaaaaagauucccacaacaugacc

SEQ ID NO: 634117 - RNA, 22 nt, Human
aaauuugcuguacaccuaaacc

SEQ ID NO: 634118 - RNA, 22 nt, Human
aaauuugcuguacaccuaaacc

SEQ ID NO: 634119 - RNA, 24 nt, Human
aagaacaaagacaacugcaaaaaa

SEQ ID NO: 634120 - RNA, 25 nt, Human
aagaacaaagacaacugcaaaaaaa

SEQ ID NO: 634121 - RNA, 22 nt, Human
aagacaacugcaaaaaaagcaa

SEQ ID NO: 634122 - RNA, 26 nt, Human
aaucucugugugugugugugugugug

SEQ ID NO: 634123 - RNA, 22 nt, Human
acaacugcaaaaaaagcaacag

SEQ ID NO: 634124 - RNA, 20 nt, Human
acauaaacucugaagaugag

SEQ ID NO: 634125 - RNA, 18 nt, Human
acugcaaaaaaagcaaca

SEQ ID NO: 634126 - RNA, 23 nt, Human
acuuccccaaagcauggccccaa

SEQ ID NO: 634127 - RNA, 23 nt, Human
acuuccccaaagcauggccccaa

SEQ ID NO: 634128 - RNA, 23 nt, Human
agaacaaagacaacugcaaaaaa

SEQ ID NO: 634129 - RNA, 24 nt, Human
agaacaaagacaacugcaaaaaaa

SEQ ID NO: 634130 - RNA, 19 nt, Human
agacaacugcaaaaaaagc

SEQ ID NO: 634131 - RNA, 24 nt, Human
agacagcaauaacaagguaacaaa

SEQ ID NO: 634132 - RNA, 24 nt, Human
agacagcaauaacaagguaacaaa

SEQ ID NO: 634133 - RNA, 25 nt, Human
auaaaguccugcuuaggacauaaag

SEQ ID NO: 634134 - RNA, 25 nt, Human
auaaaguccugcuuaggacauaaag

SEQ ID NO: 634135 - RNA, 19 nt, Human
auagagcagaggaugaccu

SEQ ID NO: 634136 - RNA, 19 nt, Human
auagagcagaggaugaccu

SEQ ID NO: 634137 - RNA, 21 nt, Human
auagagcagaggaugaccuuu

SEQ ID NO: 634138 - RNA, 21 nt, Human
auagagcagaggaugaccuuu

SEQ ID NO: 634139 - RNA, 18 nt, Human
aucuuauuggcacucugc

SEQ ID NO: 634140 - RNA, 18 nt, Human
aucuuauuggcacucugc

SEQ ID NO: 634141 - RNA, 23 nt, Human
augaaucaagaguaggcucaaag

SEQ ID NO: 634142 - RNA, 23 nt, Human
augaaucaagaguaggcucaaag

SEQ ID NO: 634143 - RNA, 19 nt, Human
auguagcaguaguugcguc

SEQ ID NO: 634144 - RNA, 24 nt, Human
caacggccgccgcuuuuugggccg

SEQ ID NO: 634145 - RNA, 20 nt, Human
caacugcaaaaaagcaacag

SEQ ID NO: 634146 - RNA, 25 nt, Human
caaucugcaaaaaaauggaaguucu

SEQ ID NO: 634147 - RNA, 25 nt, Human
caaucugcaaaaaaauggaaguucu

SEQ ID NO: 634148 - RNA, 19 nt, Human
cacccagucagcuccugga

SEQ ID NO: 634149 - RNA, 19 nt, Human
cacccagucagcuccugga

SEQ ID NO: 634150 - RNA, 22 nt, Human
cacccagucagcuccuggaggg

SEQ ID NO: 634151 - RNA, 22 nt, Human
cacccagucagcuccuggaggg

SEQ ID NO: 634152 - RNA, 22 nt, Human
cacuauuuaaaaaaaagauucc

SEQ ID NO: 634153 - RNA, 22 nt, Human
cacuauuuaaaaaaaagauucc

SEQ ID NO: 634154 - RNA, 20 nt, Human
cacucugcaugaaucaagag

SEQ ID NO: 634155 - RNA, 20 nt, Human
cacucugcaugaaucaagag

SEQ ID NO: 634156 - RNA, 21 nt, Human
cacucugcaugaaucaagagu

SEQ ID NO: 634157 - RNA, 21 nt, Human
cacucugcaugaaucaagagu

SEQ ID NO: 634158 - RNA, 21 nt, Human
cagcaacacccagucagcucc

SEQ ID NO: 634159 - RNA, 21 nt, Human
cagcaacacccagucagcucc

SEQ ID NO: 634160 - RNA, 20 nt, Human
ccaaagcauggccccaagaa

SEQ ID NO: 634161 - RNA, 20 nt, Human
ccaaagcauggccccaagaa

SEQ ID NO: 634162 - RNA, 21 nt, Human
ccacaucagcugccgcagcca

SEQ ID NO: 634163 - RNA, 25 nt, Human
cccaagaagccauuauuauaauaga

SEQ ID NO: 634164 - RNA, 25 nt, Human
cccaagaagccauuauuauaauaga

SEQ ID NO: 634165 - RNA, 21 nt, Human
cccacaacaugaccuucugag

SEQ ID NO: 634166 - RNA, 21 nt, Human
cccacaacaugaccuucugag

SEQ ID NO: 634167 - RNA, 27 nt, Human
cuaacacaaaguccaacauuugcuuca

SEQ ID NO: 634168 - RNA, 27 nt, Human
cuaacacaaaguccaacauuugcuuca

SEQ ID NO: 634169 - RNA, 24 nt, Human
cucaaaugauauuaaaagcucuac

SEQ ID NO: 634170 - RNA, 24 nt, Human
cucaaaugauauuaaaagcucuac

SEQ ID NO: 634171 - RNA, 19 nt, Human
cucaaggcccaguugcugg

SEQ ID NO: 634172 - RNA, 19 nt, Human
cucaaggcccaguugcugg

SEQ ID NO: 634173 - RNA, 21 nt, Human
gaaucaagaguaggcucaaag

SEQ ID NO: 634174 - RNA, 21 nt, Human
gaaucaagaguaggcucaaag

SEQ ID NO: 634175 - RNA, 18 nt, Human
gcauggccccaagaagcc

SEQ ID NO: 634176 - RNA, 18 nt, Human
gcauggccccaagaagcc

SEQ ID NO: 634177 - RNA, 20 nt, Human
ggaugaccuuuuuguaaaaa

SEQ ID NO: 634178 - RNA, 20 nt, Human
ggaugaccuuuuuguaaaaa

SEQ ID NO: 634179 - RNA, 22 nt, Human
ggccacaucagcugccgcagcc

SEQ ID NO: 634180 - RNA, 21 nt, Human
gugugugugugugugugugug

SEQ ID NO: 634181 - RNA, 21 nt, Human
gugugugugugugugugugug

SEQ ID NO: 634182 - RNA, 21 nt, Human
gugugugugugugugugugug

SEQ ID NO: 634183 - RNA, 19 nt, Human
guuuugcuuaggaaagucc

SEQ ID NO: 634184 - RNA, 19 nt, Human
uaaaaaaaagauucccaca

SEQ ID NO: 634185 - RNA, 19 nt, Human
uaaaaaaaagauucccaca

SEQ ID NO: 634186 - RNA, 19 nt, Human
uaaaagcucuacacaaaag

SEQ ID NO: 634187 - RNA, 19 nt, Human
uaaaagcucuacacaaaag

SEQ ID NO: 634188 - RNA, 23 nt, Human
uaagacacaauccacugacuauu

SEQ ID NO: 634189 - RNA, 23 nt, Human
uaagacacaauccacugacuauu

SEQ ID NO: 634190 - RNA, 27 nt, Human
uaagacacaauccacugacuauuuuaa

SEQ ID NO: 634191 - RNA, 27 nt, Human
uaagacacaauccacugacuauuuuaa

SEQ ID NO: 634192 - RNA, 18 nt, Human
uacagcugcugcugcuga

SEQ ID NO: 634193 - RNA, 18 nt, Human
uacagcugcugcugcuga

SEQ ID NO: 634194 - RNA, 20 nt, Human
uaguugcgucuguggcuuuc

SEQ ID NO: 634195 - RNA, 18 nt, Human
ucuagcuguauccagggc

SEQ ID NO: 634196 - RNA, 18 nt, Human
ucugcaaaaaaauggaag

SEQ ID NO: 634197 - RNA, 18 nt, Human
ucugcaaaaaaauggaag

SEQ ID NO: 634198 - RNA, 24 nt, Human
ucugugugugugugugugugugug

SEQ ID NO: 634199 - RNA, 24 nt, Human
ucugugugugugugugugugugug

SEQ ID NO: 634200 - RNA, 25 nt, Human
ucuuucaguagaacauaaacucuga

SEQ ID NO: 634201 - RNA, 25 nt, Human
ucuuucaguagaacauaaacucuga

SEQ ID NO: 634202 - RNA, 23 nt, Human
ugaaaggacugggaaugucgauu

SEQ ID NO: 634203 - RNA, 23 nt, Human
ugaaaggacugggaaugucgauu

SEQ ID NO: 634204 - RNA, 25 nt, Human
ugagguaaaauacaauacagcugcu

SEQ ID NO: 634205 - RNA, 25 nt, Human
ugagguaaaauacaauacagcugcu

SEQ ID NO: 634206 - RNA, 19 nt, Human
ugaguuucugcagacaauc

SEQ ID NO: 634207 - RNA, 19 nt, Human
ugaguuucugcagacaauc

SEQ ID NO: 634208 - RNA, 23 nt, Human
ugcagacaaucugcaaaaaaaug

SEQ ID NO: 634209 - RNA, 23 nt, Human
ugcagacaaucugcaaaaaaaug

SEQ ID NO: 634210 - RNA, 20 nt, Human
ugcugcugcugaugagcugu

SEQ ID NO: 634211 - RNA, 20 nt, Human
ugcugcugcugaugagcugu

SEQ ID NO: 634212 - RNA, 22 nt, Human
ugggaaugucgauuaagauaug

SEQ ID NO: 634213 - RNA, 22 nt, Human
ugggaaugucgauuaagauaug

SEQ ID NO: 634214 - RNA, 19 nt, Human
ugucaaaaagacauuuuac

SEQ ID NO: 634215 - RNA, 19 nt, Human
ugucaaaaagacauuuuac

SEQ ID NO: 634216 - RNA, 19 nt, Human
uguguguguguauacacac

SEQ ID NO: 634217 - RNA, 19 nt, Human
uguguguguguauacacac

SEQ ID NO: 634218 - RNA, 21 nt, Human
uguguguguguauacacacgu

SEQ ID NO: 634219 - RNA, 21 nt, Human
uguguguguguauacacacgu

SEQ ID NO: 634220 - RNA, 21 nt, Human
uguguguguguguauacacac

SEQ ID NO: 634221 - RNA, 21 nt, Human
uguguguguguguauacacac

SEQ ID NO: 634222 - RNA, 18 nt, Human
uguguguguguguguaua

SEQ ID NO: 634223 - RNA, 18 nt, Human
uguguguguguguguaua

SEQ ID NO: 634224 - RNA, 22 nt, Human
uguguguguguguguauacaca

SEQ ID NO: 634225 - RNA, 22 nt, Human
uguguguguguguguauacaca

SEQ ID NO: 634226 - RNA, 18 nt, Human
ugugugugugugugugug

SEQ ID NO: 634227 - RNA, 18 nt, Human
ugugugugugugugugug

SEQ ID NO: 634228 - RNA, 18 nt, Human
ugugugugugugugugug

SEQ ID NO: 634229 - RNA, 18 nt, Human
ugugugugugugugugug

SEQ ID NO: 634230 - RNA, 18 nt, Human
ugugugugugugugugug

SEQ ID NO: 634231 - RNA, 18 nt, Human
ugugugugugugugugug

SEQ ID NO: 634232 - RNA, 18 nt, Human
ugugugugugugugugug

SEQ ID NO: 634233 - RNA, 18 nt, Human
ugugugugugugugugug

SEQ ID NO: 634234 - RNA, 18 nt, Human
ugugugugugugugugug

SEQ ID NO: 634235 - RNA, 18 nt, Human
ugugugugugugugugug

SEQ ID NO: 634236 - RNA, 18 nt, Human
ugugugugugugugugug

SEQ ID NO: 634237 - RNA, 22 nt, Human
uguguguguguguguguguaua

SEQ ID NO: 634238 - RNA, 22 nt, Human
uguguguguguguguguguaua

SEQ ID NO: 634239 - RNA, 20 nt, Human
ugugugugugugugugugug

SEQ ID NO: 634240 - RNA, 21 nt, Human
ugugugugugugugugugugu

SEQ ID NO: 634241 - RNA, 21 nt, Human
ugugugugugugugugugugu

SEQ ID NO: 634242 - RNA, 21 nt, Human
ugugugugugugugugugugu

SEQ ID NO: 634243 - RNA, 21 nt, Human
ugugugugugugugugugugu

SEQ ID NO: 634244 - RNA, 21 nt, Human
ugugugugugugugugugugu

SEQ ID NO: 634245 - RNA, 21 nt, Human
ugugugugugugugugugugu

SEQ ID NO: 634246 - RNA, 21 nt, Human
ugugugugugugugugugugu

SEQ ID NO: 634247 - RNA, 21 nt, Human
ugugugugugugugugugugu

SEQ ID NO: 634248 - RNA, 21 nt, Human
ugugugugugugugugugugu

SEQ ID NO: 634249 - RNA, 21 nt, Human
ugugugugugugugugugugu

SEQ ID NO: 634250 - RNA, 21 nt, Human
ugugugugugugugugugugu

SEQ ID NO: 634251 - RNA, 21 nt, Human
ugugugugugugugugugugu

SEQ ID NO: 634252 - RNA, 21 nt, Human
ugugugugugugugugugugu

SEQ ID NO: 634253 - RNA, 21 nt, Human
ugugugugugugugugugugu

SEQ ID NO: 634254 - RNA, 22 nt, Human
ugugugugugugugugugugua

SEQ ID NO: 634255 - RNA, 22 nt, Human
ugugugugugugugugugugua

SEQ ID NO: 634256 - RNA, 22 nt, Human
ugugugugugugugugugugug

SEQ ID NO: 634257 - RNA, 22 nt, Human
ugugugugugugugugugugug

SEQ ID NO: 634258 - RNA, 21 nt, Human
uuguaaaaaauugcugccuca

SEQ ID NO: 634259 - RNA, 21 nt, Human
uuguaaaaaauugcugccuca

SEQ ID NO: 634260 - RNA, 21 nt, Human
uuugcuguacaccuaaaccau

SEQ ID NO: 634261 - RNA, 21 nt, Human
uuugcuguacaccuaaaccau

SEQ ID NO: 634262 - RNA, 20 nt, Human
uuugcuguacaccuaaaccc

SEQ ID NO: 634263 - RNA, 20 nt, Human
uuuuuuuuuuuuuaaaggca

SEQ ID NO: 634264 - RNA, 22 nt, Human
uuuuuuuuuuuuuuuuuaaagg

SEQ ID NO: 634265 - RNA, 24 nt, Human
aaagccugcuuugcaccaggcacu

SEQ ID NO: 634266 - RNA, 19 nt, Human
aaagugcugggauuacagg

SEQ ID NO: 634267 - RNA, 22 nt, Human
aaagugcugggauuacaggggg

SEQ ID NO: 634268 - RNA, 25 nt, Human
aaagugcugggauuacaggggguga

SEQ ID NO: 634269 - RNA, 22 nt, Human
aaaucgcucuugagauuccuac

SEQ ID NO: 634270 - RNA, 23 nt, Human
aaauguauagcccugggggcccu

SEQ ID NO: 634271 - RNA, 18 nt, Human
aagaagcagaaagacccc

SEQ ID NO: 634272 - RNA, 18 nt, Human
aagcagauggucaguuug

SEQ ID NO: 634273 - RNA, 21 nt, Human
aaggagcugagacaguauuuu

SEQ ID NO: 634274 - RNA, 21 nt, Human
aagucaggaaaagggcaguaa

SEQ ID NO: 634275 - RNA, 18 nt, Human
aagugcugggauuacagg

SEQ ID NO: 634276 - RNA, 22 nt, Human
aagugcugggauuacagggggu

SEQ ID NO: 634277 - RNA, 27 nt, Human
aagugcugggauuacagggggugagcc

SEQ ID NO: 634278 - RNA, 25 nt, Human
acaaaggacaaggaugccccacuuc

SEQ ID NO: 634279 - RNA, 23 nt, Human
acaagaaagaagcagaaagaccc

SEQ ID NO: 634280 - RNA, 20 nt, Human
acccccacuccuccagaaau

SEQ ID NO: 634281 - RNA, 19 nt, Human
acuacaggugugcgccacc

SEQ ID NO: 634282 - RNA, 22 nt, Human
acuggguuucacuauauguugg

SEQ ID NO: 634283 - RNA, 26 nt, Human
acuggguuucacuauauguuggccag

SEQ ID NO: 634284 - RNA, 23 nt, Human
agacaggugucacuggguuucuu

SEQ ID NO: 634285 - RNA, 22 nt, Human
agagacagagucuugcucuguc

SEQ ID NO: 634286 - RNA, 18 nt, Human
agauccagagggcagagg

SEQ ID NO: 634287 - RNA, 23 nt, Human
agaugucucugugcuccuggagu

SEQ ID NO: 634288 - RNA, 18 nt, Human
aggaaacaaaauaccugu

SEQ ID NO: 634289 - RNA, 25 nt, Human
aggcuggagugcaguggcgcaaucu

SEQ ID NO: 634290 - RNA, 23 nt, Human
agggaaauguauagcccuggggg

SEQ ID NO: 634291 - RNA, 24 nt, Human
aggugauccgcccaccuuggcuuc

SEQ ID NO: 634292 - RNA, 19 nt, Human
aguagagacuggguuucac

SEQ ID NO: 634293 - RNA, 21 nt, Human
agugcaguggcgcaaucucag

SEQ ID NO: 634294 - RNA, 24 nt, Human
augcaauggauauuuaaacacauc

SEQ ID NO: 634295 - RNA, 18 nt, Human
auguuggccaggcugguc

SEQ ID NO: 634296 - RNA, 25 nt, Human
caaagugcugggauuacagggggug

SEQ ID NO: 634297 - RNA, 21 nt, Human
cacauauucugucaaucugga

SEQ ID NO: 634298 - RNA, 24 nt, Human
caccacaccuagcuaauuuuugua

SEQ ID NO: 634299 - RNA, 22 nt, Human
caccuagacaggugucacuggg

SEQ ID NO: 634300 - RNA, 21 nt, Human
cacugcaaccucugccuccug

SEQ ID NO: 634301 - RNA, 23 nt, Human
cacugcaaccucugccuccuggg

SEQ ID NO: 634302 - RNA, 20 nt, Human
cacuuccacuuccugcccug

SEQ ID NO: 634303 - RNA, 21 nt, Human
cacuuggguccguuguuggca

SEQ ID NO: 634304 - RNA, 21 nt, Human
cacuuugcauuagcugagggu

SEQ ID NO: 634305 - RNA, 25 nt, Human
cagaagagacagauauuaauaaaug

SEQ ID NO: 634306 - RNA, 18 nt, Human
cagaggaggugaagagcu

SEQ ID NO: 634307 - RNA, 18 nt, Human
cagccccuuccucagcag

SEQ ID NO: 634308 - RNA, 19 nt, Human
cagccccuuccucagcagc

SEQ ID NO: 634309 - RNA, 21 nt, Human
cagcuuauccuccccuucuca

SEQ ID NO: 634310 - RNA, 22 nt, Human
cagcuuauccuccccuucucaa

SEQ ID NO: 634311 - RNA, 22 nt, Human
caggugauucuccugccucagc

SEQ ID NO: 634312 - RNA, 24 nt, Human
ccaaagaugucucugugcuccugg

SEQ ID NO: 634313 - RNA, 19 nt, Human
ccaaagugcugggauuaca

SEQ ID NO: 634314 - RNA, 20 nt, Human
ccaaagugcugggauuacag

SEQ ID NO: 634315 - RNA, 21 nt, Human
ccaaagugcugggauuacagg

SEQ ID NO: 634316 - RNA, 25 nt, Human
ccaaagugcugggauuacagggggu

SEQ ID NO: 634317 - RNA, 21 nt, Human
ccaccacccccacuccuccag

SEQ ID NO: 634318 - RNA, 21 nt, Human
ccaggcuggagugcaguggcg

SEQ ID NO: 634319 - RNA, 21 nt, Human
cccaccacccccacuccucca

SEQ ID NO: 634320 - RNA, 26 nt, Human
cccauuauauccacugaagacagaaa

SEQ ID NO: 634321 - RNA, 23 nt, Human
ccccugauucuagacaucaaaau

SEQ ID NO: 634322 - RNA, 18 nt, Human
ccucagcuucccauguag

SEQ ID NO: 634323 - RNA, 24 nt, Human
ccuccuggguucaggugauucucc

SEQ ID NO: 634324 - RNA, 22 nt, Human
ccucugccuccuggguucaggu

SEQ ID NO: 634325 - RNA, 24 nt, Human
ccugaccucaggugauccgcccac

SEQ ID NO: 634326 - RNA, 24 nt, Human
ccugccucagcuucccauguagcu

SEQ ID NO: 634327 - RNA, 18 nt, Human
ccugggaguauuuaauaa

SEQ ID NO: 634328 - RNA, 21 nt, Human
ccuggguucaggugauucucc

SEQ ID NO: 634329 - RNA, 21 nt, Human
cuacccaccacccccacuccu

SEQ ID NO: 634330 - RNA, 20 nt, Human
cuagauccagagggcagagg

SEQ ID NO: 634331 - RNA, 24 nt, Human
cucacugcaaccucugccuccugg

SEQ ID NO: 634332 - RNA, 24 nt, Human
cucagcuucccauguagcugggac

SEQ ID NO: 634333 - RNA, 24 nt, Human
cucaggugauccgcccaccuuggc

SEQ ID NO: 634334 - RNA, 19 nt, Human
cuccacucguucugguuua

SEQ ID NO: 634335 - RNA, 21 nt, Human
cuccuggguucaggugauucu

SEQ ID NO: 634336 - RNA, 19 nt, Human
cugcaaccucugccuccug

SEQ ID NO: 634337 - RNA, 23 nt, Human
cugcaaccucugccuccuggguu

SEQ ID NO: 634338 - RNA, 24 nt, Human
cugcaaccucugccuccuggguuc

SEQ ID NO: 634339 - RNA, 20 nt, Human
cuggaguuugcaggccagca

SEQ ID NO: 634340 - RNA, 26 nt, Human
cuggguuucacuauauguuggccagg

SEQ ID NO: 634341 - RNA, 19 nt, Human
cugugcuccuggaguuugc

SEQ ID NO: 634342 - RNA, 19 nt, Human
cuuacaauauccacugaac

SEQ ID NO: 634343 - RNA, 21 nt, Human
gacaagaaagaagcagaaaga

SEQ ID NO: 634344 - RNA, 24 nt, Human
gacagagucuugcucugucgccag

SEQ ID NO: 634345 - RNA, 24 nt, Human
gaccucaggugauccgcccaccuu

SEQ ID NO: 634346 - RNA, 18 nt, Human
gagggaagggaaaggagu

SEQ ID NO: 634347 - RNA, 19 nt, Human
gauuacagggggugagcca

SEQ ID NO: 634348 - RNA, 23 nt, Human
gauuauuuauuuauuuauuuauu

SEQ ID NO: 634349 - RNA, 22 nt, Human
gauuauuugagcugacaucuga

SEQ ID NO: 634350 - RNA, 19 nt, Human
gauuccuacccaccacccc

SEQ ID NO: 634351 - RNA, 22 nt, Human
gcaaccucugccuccuggguuc

SEQ ID NO: 634352 - RNA, 24 nt, Human
gccucagcuucccauguagcuggg

SEQ ID NO: 634353 - RNA, 18 nt, Human
gcucugggauguaugccc

SEQ ID NO: 634354 - RNA, 19 nt, Human
gcuggagugcaguggcgca

SEQ ID NO: 634355 - RNA, 23 nt, Human
gcuggucuagaacuccugaccuc

SEQ ID NO: 634356 - RNA, 21 nt, Human
ggaaaucauguucaaaaaucc

SEQ ID NO: 634357 - RNA, 24 nt, Human
ggcuggucuagaacuccugaccuc

SEQ ID NO: 634358 - RNA, 22 nt, Human
gggaaaaggcaagucaggaaaa

SEQ ID NO: 634359 - RNA, 24 nt, Human
gggcagaggaggugaagagcuuuu

SEQ ID NO: 634360 - RNA, 24 nt, Human
ggugauucuccugccucagcuucc

SEQ ID NO: 634361 - RNA, 24 nt, Human
gucuugcucugucgccaggcugga

SEQ ID NO: 634362 - RNA, 24 nt, Human
gugauucuccugccucagcuuccc

SEQ ID NO: 634363 - RNA, 21 nt, Human
uaaaaugaguuccacuuccug

SEQ ID NO: 634364 - RNA, 22 nt, Human
uaaacacaagcucuaaaucacc

SEQ ID NO: 634365 - RNA, 27 nt, Human
uaauuuuuguauuuuuuuuaguagaga

SEQ ID NO: 634366 - RNA, 22 nt, Human
uacaggugugcgccaccacacc

SEQ ID NO: 634367 - RNA, 23 nt, Human
uagagacuggguuucacuauaug

SEQ ID NO: 634368 - RNA, 20 nt, Human
uaguagagacuggguuucac

SEQ ID NO: 634369 - RNA, 24 nt, Human
uaguagagacuggguuucacuaua

SEQ ID NO: 634370 - RNA, 25 nt, Human
uaguagagacuggguuucacuauau

SEQ ID NO: 634371 - RNA, 22 nt, Human
uaugccaggccuuuuguguauu

SEQ ID NO: 634372 - RNA, 19 nt, Human
uauguuggccaggcugguc

SEQ ID NO: 634373 - RNA, 20 nt, Human
uauguuggccaggcuggucu

SEQ ID NO: 634374 - RNA, 24 nt, Human
uauguuggccaggcuggucuagaa

SEQ ID NO: 634375 - RNA, 24 nt, Human
uauuacagcauaaauaauccuaaa

SEQ ID NO: 634376 - RNA, 24 nt, Human
uauucugucaaucuggagcuucca

SEQ ID NO: 634377 - RNA, 19 nt, Human
uauuuugagagacagaguc

SEQ ID NO: 634378 - RNA, 20 nt, Human
ucacuagauccagagggcag

SEQ ID NO: 634379 - RNA, 24 nt, Human
ucacugcaaccucugccuccuggg

SEQ ID NO: 634380 - RNA, 25 nt, Human
ucacugcaaccucugccuccugggu

SEQ ID NO: 634381 - RNA, 26 nt, Human
ucacugcaaccucugccuccuggguu

SEQ ID NO: 634382 - RNA, 20 nt, Human
ucagagauuuucauaucuag

SEQ ID NO: 634383 - RNA, 19 nt, Human
ucaggugauucuccugccu

SEQ ID NO: 634384 - RNA, 20 nt, Human
ucaggugauucuccugccuc

SEQ ID NO: 634385 - RNA, 19 nt, Human
uccagagggcagaggaggu

SEQ ID NO: 634386 - RNA, 19 nt, Human
ucccaaagaugucucugug

SEQ ID NO: 634387 - RNA, 18 nt, Human
ucccaaagugcugggauu

SEQ ID NO: 634388 - RNA, 23 nt, Human
ucccaaagugcugggauuacagg

SEQ ID NO: 634389 - RNA, 21 nt, Human
uccccgauguccuguuccggu

SEQ ID NO: 634390 - RNA, 22 nt, Human
uccccgauguccuguuccgguu

SEQ ID NO: 634391 - RNA, 24 nt, Human
uccuggguucaggugauucuccug

SEQ ID NO: 634392 - RNA, 20 nt, Human
ucuaaaucacccauaaauuc

SEQ ID NO: 634393 - RNA, 22 nt, Human
ucuccugccucagcuucccaug

SEQ ID NO: 634394 - RNA, 18 nt, Human
ucugucgccaggcuggag

SEQ ID NO: 634395 - RNA, 21 nt, Human
ucugucgccaggcuggagugc

SEQ ID NO: 634396 - RNA, 23 nt, Human
ucugucgccaggcuggagugcag

SEQ ID NO: 634397 - RNA, 21 nt, Human
ucuugcucugucgccaggcug

SEQ ID NO: 634398 - RNA, 22 nt, Human
ucuugcucugucgccaggcugg

SEQ ID NO: 634399 - RNA, 23 nt, Human
ucuugcucugucgccaggcugga

SEQ ID NO: 634400 - RNA, 19 nt, Human
ugaagacagaaagcuugca

SEQ ID NO: 634401 - RNA, 18 nt, Human
ugacaagaaagaagcaga

SEQ ID NO: 634402 - RNA, 24 nt, Human
ugacaagaaagaagcagaaagacc

SEQ ID NO: 634403 - RNA, 18 nt, Human
ugaccucaggugauccgc

SEQ ID NO: 634404 - RNA, 21 nt, Human
ugaccucaggugauccgccca

SEQ ID NO: 634405 - RNA, 24 nt, Human
ugaccucaggugauccgcccaccu

SEQ ID NO: 634406 - RNA, 26 nt, Human
ugagaagauacaguaugaacuaaaag

SEQ ID NO: 634407 - RNA, 23 nt, Human
ugauccgcccaccuuggcuuccc

SEQ ID NO: 634408 - RNA, 22 nt, Human
ugcaguggcgcaaucucagcuc

SEQ ID NO: 634409 - RNA, 23 nt, Human
ugcaguggcgcaaucucagcuca

SEQ ID NO: 634410 - RNA, 24 nt, Human
ugccucagcuucccauguagcugg

SEQ ID NO: 634411 - RNA, 23 nt, Human
ugcucugucgccaggcuggagug

SEQ ID NO: 634412 - RNA, 27 nt, Human
uggaaagcagauggucaguuuggcuuu

SEQ ID NO: 634413 - RNA, 18 nt, Human
uggagugcaguggcgcaa

SEQ ID NO: 634414 - RNA, 23 nt, Human
uggagugcaguggcgcaaucuca

SEQ ID NO: 634415 - RNA, 24 nt, Human
uggagugcaguggcgcaaucucag

SEQ ID NO: 634416 - RNA, 21 nt, Human
uggaguuugcaggccagcaga

SEQ ID NO: 634417 - RNA, 25 nt, Human
uggcaaguguggauuugugccuucu

SEQ ID NO: 634418 - RNA, 24 nt, Human
uggccaggcuggucuagaacuccu

SEQ ID NO: 634419 - RNA, 24 nt, Human
uggcgcaaucucagcucacugcaa

SEQ ID NO: 634420 - RNA, 18 nt, Human
ugggaaaaugaccuuggu

SEQ ID NO: 634421 - RNA, 23 nt, Human
ugggauuacagggggugagccac

SEQ ID NO: 634422 - RNA, 25 nt, Human
ugggauuacagggggugagccacca

SEQ ID NO: 634423 - RNA, 21 nt, Human
ugggcacauacacacuuugca

SEQ ID NO: 634424 - RNA, 22 nt, Human
ugggcuaagcccuggggaaauc

SEQ ID NO: 634425 - RNA, 21 nt, Human
uggguccguuguuggcaagug

SEQ ID NO: 634426 - RNA, 23 nt, Human
uggucuagaacuccugaccucag

SEQ ID NO: 634427 - RNA, 18 nt, Human
uguagcugggacuacuac

SEQ ID NO: 634428 - RNA, 24 nt, Human
ugucucugugcuccuggaguuugc

SEQ ID NO: 634429 - RNA, 18 nt, Human
ugugcagaggagcaaauc

SEQ ID NO: 634430 - RNA, 20 nt, Human
ugugcgccaccacaccuagc

SEQ ID NO: 634431 - RNA, 20 nt, Human
uuaaucaccacccaaaucau

SEQ ID NO: 634432 - RNA, 21 nt, Human
uuaguagagacuggguuucac

SEQ ID NO: 634433 - RNA, 24 nt, Human
uuaguagagacuggguuucacuau

SEQ ID NO: 634434 - RNA, 21 nt, Human
uuaguagguuuugguaacuca

SEQ ID NO: 634435 - RNA, 18 nt, Human
uuauuuauuuauuuauuu

SEQ ID NO: 634436 - RNA, 18 nt, Human
uuauuuauuuauuuauuu

SEQ ID NO: 634437 - RNA, 19 nt, Human
uuauuuauuuauuuauuua

SEQ ID NO: 634438 - RNA, 25 nt, Human
uuauuuauuuauuuauuuauuuauu

SEQ ID NO: 634439 - RNA, 25 nt, Human
uuauuuauuuauuuauuuauuuauu

SEQ ID NO: 634440 - RNA, 25 nt, Human
uuauuuauuuauuuauuuauuuauu

SEQ ID NO: 634441 - RNA, 28 nt, Human
uuauuuauuuauuuauuuauuuauuuug

SEQ ID NO: 634442 - RNA, 23 nt, Human
uucaggugauucuccugccucag

SEQ ID NO: 634443 - RNA, 22 nt, Human
uuccacuuccugcccugcagcu

SEQ ID NO: 634444 - RNA, 18 nt, Human
uuccgguucagccaugag

SEQ ID NO: 634445 - RNA, 21 nt, Human
uuccucagcagcugugcauga

SEQ ID NO: 634446 - RNA, 23 nt, Human
uucuuugggguucugaauucuga

SEQ ID NO: 634447 - RNA, 21 nt, Human
uugaaagccugcuuugcaccg

SEQ ID NO: 634448 - RNA, 22 nt, Human
uuuauuuauuuauuuauuuauu

SEQ ID NO: 634449 - RNA, 22 nt, Human
uuucaugggcacauacacacuu

SEQ ID NO: 634450 - RNA, 21 nt, Human
uuuuguguauuucuuucuuuu

SEQ ID NO: 634451 - RNA, 24 nt, Human
uuuuuaguagagacuggguuucac

SEQ ID NO: 634452 - RNA, 23 nt, Human
uuuuuguauuuuuuuuaguagag

SEQ ID NO: 634453 - RNA, 21 nt, Human
aaaaccagcacauaggggccu

SEQ ID NO: 634454 - RNA, 24 nt, Human
aaaccccuccuuuucaaggggccu

SEQ ID NO: 634455 - RNA, 24 nt, Human
aaaggccaagggucacuucaccag

SEQ ID NO: 634456 - RNA, 24 nt, Human
aaagugcugggaccacaggcguga

SEQ ID NO: 634457 - RNA, 19 nt, Human
aaagugcugggauuacagg

SEQ ID NO: 634458 - RNA, 23 nt, Human
aaagugcugggauuacaggcaug

SEQ ID NO: 634459 - RNA, 24 nt, Human
aaagugcugggauuacaggcaugc

SEQ ID NO: 634460 - RNA, 23 nt, Human
aaccccuugccuucaccaagaag

SEQ ID NO: 634461 - RNA, 18 nt, Human
aacccuccgcccccaccc

SEQ ID NO: 634462 - RNA, 22 nt, Human
aacgaguccggguccaaggccc

SEQ ID NO: 634463 - RNA, 22 nt, Human
aacuauuuccucaucccuucua

SEQ ID NO: 634464 - RNA, 26 nt, Human
aagugcugggaccacaggcgugagcc

SEQ ID NO: 634465 - RNA, 19 nt, Human
aagugcugggauuacaggc

SEQ ID NO: 634466 - RNA, 21 nt, Human
aagugcugggauuacaggcau

SEQ ID NO: 634467 - RNA, 25 nt, Human
acacagcaagacuaaaaaaaaacaa

SEQ ID NO: 634468 - RNA, 23 nt, Human
agagcaggugcuaggccucccaa

SEQ ID NO: 634469 - RNA, 19 nt, Human
agauguuauccagugagcc

SEQ ID NO: 634470 - RNA, 18 nt, Human
agcaggugcuaggccuuc

SEQ ID NO: 634471 - RNA, 22 nt, Human
agccuguuuccucuccauucca

SEQ ID NO: 634472 - RNA, 25 nt, Human
agcgauaugaaacaggucccgggaa

SEQ ID NO: 634473 - RNA, 23 nt, Human
agcugugauggugggcagcugga

SEQ ID NO: 634474 - RNA, 18 nt, Human
aggccuucaguaggaaca

SEQ ID NO: 634475 - RNA, 19 nt, Human
aggcgaacccuccgccccc

SEQ ID NO: 634476 - RNA, 24 nt, Human
aggugauucacccaccuuggccuc

SEQ ID NO: 634477 - RNA, 23 nt, Human
aguagagauggggcuucaccaug

SEQ ID NO: 634478 - RNA, 18 nt, Human
agugcugggauuacaggc

SEQ ID NO: 634479 - RNA, 25 nt, Human
augcgccaccgcgcccagccgagaa

SEQ ID NO: 634480 - RNA, 18 nt, Human
auggggcuucaccauguu

SEQ ID NO: 634481 - RNA, 20 nt, Human
auggggcuucaccauguugg

SEQ ID NO: 634482 - RNA, 23 nt, Human
auggggcuucaccauguuggcca

SEQ ID NO: 634483 - RNA, 22 nt, Human
auuguuuuuuuucuuuuuaaac

SEQ ID NO: 634484 - RNA, 24 nt, Human
caaagugcugggaccacaggcgug

SEQ ID NO: 634485 - RNA, 24 nt, Human
caaagugcugggauuacaggcaug

SEQ ID NO: 634486 - RNA, 24 nt, Human
caacacagcaagacuaaaaaaaaa

SEQ ID NO: 634487 - RNA, 18 nt, Human
caacaggggacccacauc

SEQ ID NO: 634488 - RNA, 23 nt, Human
caagacuaaaaaaaaacaacuuu

SEQ ID NO: 634489 - RNA, 20 nt, Human
cacacuguaggcccagcuac

SEQ ID NO: 634490 - RNA, 18 nt, Human
cacagaggccaaggggag

SEQ ID NO: 634491 - RNA, 24 nt, Human
cacaggcgugagccaccaugccca

SEQ ID NO: 634492 - RNA, 21 nt, Human
cacaucaucuaccgcgaccag

SEQ ID NO: 634493 - RNA, 22 nt, Human
caccaagaagauggaauguuuc

SEQ ID NO: 634494 - RNA, 21 nt, Human
caccauguuggccaugcugau

SEQ ID NO: 634495 - RNA, 24 nt, Human
caccauguuggccaugcugaucuc

SEQ ID NO: 634496 - RNA, 22 nt, Human
cacccaccuuggccucccaaag

SEQ ID NO: 634497 - RNA, 23 nt, Human
cacccaccuuggccucccaaagu

SEQ ID NO: 634498 - RNA, 23 nt, Human
caccccucucccccacccuccca

SEQ ID NO: 634499 - RNA, 21 nt, Human
cacccucccaucccaccacag

SEQ ID NO: 634500 - RNA, 26 nt, Human
cagguccagccugggcaacacagcaa

SEQ ID NO: 634501 - RNA, 19 nt, Human
caggucccgggacacaggg

SEQ ID NO: 634502 - RNA, 27 nt, Human
caugcgccaccgcgcccagccgagaau

SEQ ID NO: 634503 - RNA, 22 nt, Human
caugcugaucucgaacuccuga

SEQ ID NO: 634504 - RNA, 21 nt, Human
ccaaaccccuccuuuucaagg

SEQ ID NO: 634505 - RNA, 20 nt, Human
ccaaagugcugggaccacag

SEQ ID NO: 634506 - RNA, 22 nt, Human
ccaaagugcugggaccacaggc

SEQ ID NO: 634507 - RNA, 22 nt, Human
ccaaagugcugggaccacaggc

SEQ ID NO: 634508 - RNA, 24 nt, Human
ccaaagugcugggaccacaggcgu

SEQ ID NO: 634509 - RNA, 23 nt, Human
ccaaagugcugggauuacaggca

SEQ ID NO: 634510 - RNA, 24 nt, Human
ccaaagugcugggauuacaggcau

SEQ ID NO: 634511 - RNA, 24 nt, Human
ccacagaagcgauaugaaacaggu

SEQ ID NO: 634512 - RNA, 21 nt, Human
ccacccagggcuggccaacaa

SEQ ID NO: 634513 - RNA, 24 nt, Human
cccaaagugcugggauuacaggca

SEQ ID NO: 634514 - RNA, 18 nt, Human
cccaccacagaagaggau

SEQ ID NO: 634515 - RNA, 24 nt, Human
cccaccuccacccagggcuggcca

SEQ ID NO: 634516 - RNA, 21 nt, Human
cccaucccaccacagaagagg

SEQ ID NO: 634517 - RNA, 19 nt, Human
ccccagaggcuccgggaua

SEQ ID NO: 634518 - RNA, 31 nt, Human
ccccaggcacuaucuguccugcuugcacccc

SEQ ID NO: 634519 - RNA, 22 nt, Human
cccccaggcacuaucuguccug

SEQ ID NO: 634520 - RNA, 24 nt, Human
ccccucucccccacccucccaucc

SEQ ID NO: 634521 - RNA, 22 nt, Human
cccuccgcccccacccccaggc

SEQ ID NO: 634522 - RNA, 22 nt, Human
ccgcccccacccccaggcacua

SEQ ID NO: 634523 - RNA, 23 nt, Human
ccucagcucucggcccaucgccu

SEQ ID NO: 634524 - RNA, 24 nt, Human
ccucuccauuccaccccucucccc

SEQ ID NO: 634525 - RNA, 24 nt, Human
ccugacuucaggugauucacccac

SEQ ID NO: 634526 - RNA, 21 nt, Human
cgcccagccccgcagccgcgc

SEQ ID NO: 634527 - RNA, 24 nt, Human
cgcccccacccccaggcacuaucu

SEQ ID NO: 634528 - RNA, 23 nt, Human
cgccccuaaauuuaaagguaucu

SEQ ID NO: 634529 - RNA, 24 nt, Human
cgcgauggcucacaccugccaaag

SEQ ID NO: 634530 - RNA, 20 nt, Human
cgugaggagcagagaggcug

SEQ ID NO: 634531 - RNA, 24 nt, Human
cgugaggagcagagaggcuguggu

SEQ ID NO: 634532 - RNA, 18 nt, Human
cucaagaagugaaaggcc

SEQ ID NO: 634533 - RNA, 18 nt, Human
cucaagcccaggaguuca

SEQ ID NO: 634534 - RNA, 29 nt, Human
cucaugugcaaacacauacacgcagugug

SEQ ID NO: 634535 - RNA, 21 nt, Human
cuccacccagggcuggccaac

SEQ ID NO: 634536 - RNA, 23 nt, Human
cuccauuccaccccucuccccca

SEQ ID NO: 634537 - RNA, 19 nt, Human
cuccgcccccacccccagg

SEQ ID NO: 634538 - RNA, 24 nt, Human
cugguccugcuuuguuuccacauu

SEQ ID NO: 634539 - RNA, 22 nt, Human
cuguaggcccagcuacuccaga

SEQ ID NO: 634540 - RNA, 18 nt, Human
cuguccugcuugcaccca

SEQ ID NO: 634541 - RNA, 23 nt, Human
cuugcucaagcccaggaguucag

SEQ ID NO: 634542 - RNA, 25 nt, Human
cuuucuuuuccaagaauacccuuuu

SEQ ID NO: 634543 - RNA, 22 nt, Human
gaacagugcgagccaaggcacu

SEQ ID NO: 634544 - RNA, 20 nt, Human
gaacccuccgcccccacccc

SEQ ID NO: 634545 - RNA, 21 nt, Human
gaacccuccgcccccaccccc

SEQ ID NO: 634546 - RNA, 22 nt, Human
gaccgccuccccagaggcuccg

SEQ ID NO: 634547 - RNA, 24 nt, Human
gacuucaggugauucacccaccuu

SEQ ID NO: 634548 - RNA, 20 nt, Human
gagccaaggcacagaggcca

SEQ ID NO: 634549 - RNA, 26 nt, Human
gagccaaggcacagaggccaagggga

SEQ ID NO: 634550 - RNA, 24 nt, Human
gagggcacccaggcagcaagacac

SEQ ID NO: 634551 - RNA, 18 nt, Human
gauuacaggcaugcgcca

SEQ ID NO: 634552 - RNA, 20 nt, Human
gcaacacagcaagacuaaaa

SEQ ID NO: 634553 - RNA, 19 nt, Human
gccucuggucauccggggc

SEQ ID NO: 634554 - RNA, 21 nt, Human
gcgaacccuccgcccccaccc

SEQ ID NO: 634555 - RNA, 19 nt, Human
gcgccuguggaugugucgc

SEQ ID NO: 634556 - RNA, 24 nt, Human
gcgcggcgucccggcggcgcggag

SEQ ID NO: 634557 - RNA, 20 nt, Human
gcugaaguagggugcaaagg

SEQ ID NO: 634558 - RNA, 24 nt, Human
ggaccacaggcgugagccaccaug

SEQ ID NO: 634559 - RNA, 20 nt, Human
ggagggauaaacagacuggc

SEQ ID NO: 634560 - RNA, 18 nt, Human
ggagugaccgccucccca

SEQ ID NO: 634561 - RNA, 22 nt, Human
ggaguucagguccagccugggc

SEQ ID NO: 634562 - RNA, 22 nt, Human
ggauuacaggcaugcgccaccg

SEQ ID NO: 634563 - RNA, 18 nt, Human
ggccaaggggagcgagcu

SEQ ID NO: 634564 - RNA, 18 nt, Human
ggcuucaccauguuggcc

SEQ ID NO: 634565 - RNA, 19 nt, Human
ggggaauagagagcgggag

SEQ ID NO: 634566 - RNA, 21 nt, Human
ggggagcgagcuguagcugug

SEQ ID NO: 634567 - RNA, 21 nt, Human
ggggcuucaccauguuggcca

SEQ ID NO: 634568 - RNA, 23 nt, Human
guagagauggggcuucaccaugu

SEQ ID NO: 634569 - RNA, 22 nt, Human
guagggugcaaaggagagggca

SEQ ID NO: 634570 - RNA, 24 nt, Human
gugauucacccaccuuggccuccc

SEQ ID NO: 634571 - RNA, 24 nt, Human
guuggccgggcgcgauggcucaca

SEQ ID NO: 634572 - RNA, 24 nt, Human
uacaggcaugcgccaccgcgccca

SEQ ID NO: 634573 - RNA, 22 nt, Human
uaccgcgaccagcugaaguagg

SEQ ID NO: 634574 - RNA, 21 nt, Human
uagaaacaaccagcaaaucca

SEQ ID NO: 634575 - RNA, 24 nt, Human
uagaaacaaccagcaaauccacug

SEQ ID NO: 634576 - RNA, 22 nt, Human
uagaaggaaucucaaaccucac

SEQ ID NO: 634577 - RNA, 22 nt, Human
uagagauggggcuucaccaugu

SEQ ID NO: 634578 - RNA, 22 nt, Human
uagaggcgaacccuccgccccc

SEQ ID NO: 634579 - RNA, 22 nt, Human
ucaaggggccucuggucauccg

SEQ ID NO: 634580 - RNA, 20 nt, Human
ucacaauuacaagaccaugg

SEQ ID NO: 634581 - RNA, 18 nt, Human
ucagguccagccugggca

SEQ ID NO: 634582 - RNA, 21 nt, Human
ucagguccagccugggcaaca

SEQ ID NO: 634583 - RNA, 24 nt, Human
ucaguaggaacagugcgagccaag

SEQ ID NO: 634584 - RNA, 22 nt, Human
uccacaucaucuaccgcgacca

SEQ ID NO: 634585 - RNA, 20 nt, Human
uccaccccucucccccaccc

SEQ ID NO: 634586 - RNA, 23 nt, Human
uccauuaacauccugaccugaag

SEQ ID NO: 634587 - RNA, 22 nt, Human
uccauuccaccccucuccccca

SEQ ID NO: 634588 - RNA, 24 nt, Human
ucccaaagugcugggauuacaggc

SEQ ID NO: 634589 - RNA, 22 nt, Human
uccccaaaccccuccuuuucaa

SEQ ID NO: 634590 - RNA, 24 nt, Human
uccccaggggcgccuguggaugug

SEQ ID NO: 634591 - RNA, 27 nt, Human
ucccccacccucccaucccaccacaga

SEQ ID NO: 634592 - RNA, 18 nt, Human
ucccuguccccaaacccc

SEQ ID NO: 634593 - RNA, 21 nt, Human
uccgcccccacccccaggcac

SEQ ID NO: 634594 - RNA, 22 nt, Human
uccuagaggcgaacccuccgcc

SEQ ID NO: 634595 - RNA, 22 nt, Human
ucgcccagccccgcagccgcgc

SEQ ID NO: 634596 - RNA, 21 nt, Human
ucucaagaagugaaaggccaa

SEQ ID NO: 634597 - RNA, 19 nt, Human
ucucccccacccucccauc

SEQ ID NO: 634598 - RNA, 19 nt, Human
ucucgaacuccugacuuca

SEQ ID NO: 634599 - RNA, 24 nt, Human
ucuguggccacggacgugaggagc

SEQ ID NO: 634600 - RNA, 21 nt, Human
ugaccugaagaaccaaccccu

SEQ ID NO: 634601 - RNA, 24 nt, Human
ugacuucaggugauucacccaccu

SEQ ID NO: 634602 - RNA, 19 nt, Human
ugauggugggcagcuggaa

SEQ ID NO: 634603 - RNA, 24 nt, Human
ugauucacccaccuuggccuccca

SEQ ID NO: 634604 - RNA, 24 nt, Human
ugcugggaccacaggcgugagcca

SEQ ID NO: 634605 - RNA, 21 nt, Human
ugcugguccugcuuuguuucc

SEQ ID NO: 634606 - RNA, 25 nt, Human
ugcugguccugcuuuguuuccacau

SEQ ID NO: 634607 - RNA, 18 nt, Human
ugcugugccugcuggucc

SEQ ID NO: 634608 - RNA, 19 nt, Human
uggcagcacacacuguagg

SEQ ID NO: 634609 - RNA, 24 nt, Human
uggccaugcugaucucgaacuccu

SEQ ID NO: 634610 - RNA, 24 nt, Human
ugggaccacaggcgugagccacca

SEQ ID NO: 634611 - RNA, 18 nt, Human
ugggauuacaggcaugcg

SEQ ID NO: 634612 - RNA, 21 nt, Human
ugggauuacaggcaugcgcca

SEQ ID NO: 634613 - RNA, 22 nt, Human
ugggauuacaggcaugcgccac

SEQ ID NO: 634614 - RNA, 23 nt, Human
ugggauuacaggcaugcgccacc

SEQ ID NO: 634615 - RNA, 24 nt, Human
ugggauuacaggcaugcgccaccg

SEQ ID NO: 634616 - RNA, 19 nt, Human
uggggcuucaccauguugg

SEQ ID NO: 634617 - RNA, 25 nt, Human
ugugcaaacacauacacgcagaaua

SEQ ID NO: 634618 - RNA, 19 nt, Human
ugugccugcugguccugcu

SEQ ID NO: 634619 - RNA, 21 nt, Human
uguggcagcacacacuguagg

SEQ ID NO: 634620 - RNA, 21 nt, Human
uguuucauggacacagucccu

SEQ ID NO: 634621 - RNA, 19 nt, Human
uuacugguuccugcuuucc

SEQ ID NO: 634622 - RNA, 22 nt, Human
uucacaauuacaagaccauggg

SEQ ID NO: 634623 - RNA, 24 nt, Human
uucaggugauucacccaccuuggc

SEQ ID NO: 634624 - RNA, 21 nt, Human
uuccaccccucucccccaccc

SEQ ID NO: 634625 - RNA, 18 nt, Human
uuccucagcucucggccc

SEQ ID NO: 634626 - RNA, 22 nt, Human
uucuaaagaaaaguuggccggg

SEQ ID NO: 634627 - RNA, 20 nt, Human
uucuauguugcaugcuucag

SEQ ID NO: 634628 - RNA, 18 nt, Human
uuggccucccaaagugcu

SEQ ID NO: 634629 - RNA, 19 nt, Human
uuuccacaucaucuaccgc

SEQ ID NO: 634630 - RNA, 18 nt, Human
aaaaaugcucauuggccc

SEQ ID NO: 634631 - RNA, 19 nt, Human
aaaaaugcucauuggcccu

SEQ ID NO: 634632 - RNA, 23 nt, Human
aaaagagaaacggguccaaauca

SEQ ID NO: 634633 - RNA, 18 nt, Human
aacaaacaggcucuggcc

SEQ ID NO: 634634 - RNA, 21 nt, Human
aacacaaugagacaacagaga

SEQ ID NO: 634635 - RNA, 18 nt, Human
aacagcccuaacaaacag

SEQ ID NO: 634636 - RNA, 19 nt, Human
acagcagaaggaccccaug

SEQ ID NO: 634637 - RNA, 21 nt, Human
accaggcaguagacacauucc

SEQ ID NO: 634638 - RNA, 22 nt, Human
accugaaaaaugggacagcaac

SEQ ID NO: 634639 - RNA, 18 nt, Human
agacacauuccccuggga

SEQ ID NO: 634640 - RNA, 24 nt, Human
agacgucucucugggcauugcucc

SEQ ID NO: 634641 - RNA, 26 nt, Human
agagacagcagaaggaccccaugugc

SEQ ID NO: 634642 - RNA, 22 nt, Human
agaggcggcgcucacaggaccc

SEQ ID NO: 634643 - RNA, 18 nt, Human
agcaccaacagagccccc

SEQ ID NO: 634644 - RNA, 22 nt, Human
agccccacgucucgggccagga

SEQ ID NO: 634645 - RNA, 22 nt, Human
agccugguggggacggggacag

SEQ ID NO: 634646 - RNA, 18 nt, Human
agcuccuguguggucugg

SEQ ID NO: 634647 - RNA, 25 nt, Human
aggcagcaggugggggccugggacc

SEQ ID NO: 634648 - RNA, 19 nt, Human
aggcagguggaaagagcag

SEQ ID NO: 634649 - RNA, 18 nt, Human
aggcaguagacacauucc

SEQ ID NO: 634650 - RNA, 22 nt, Human
aggcguucagugaggaagcaac

SEQ ID NO: 634651 - RNA, 22 nt, Human
aggguucccguccucagccucc

SEQ ID NO: 634652 - RNA, 20 nt, Human
agguccaucccaagggcagc

SEQ ID NO: 634653 - RNA, 20 nt, Human
agugaggaagcaggagacag

SEQ ID NO: 634654 - RNA, 19 nt, Human
auaaagaaaagaaugaaaa

SEQ ID NO: 634655 - RNA, 25 nt, Human
augagacaacagagacugucuagaa

SEQ ID NO: 634656 - RNA, 23 nt, Human
caaacugaggaacuugaaaaaca

SEQ ID NO: 634657 - RNA, 21 nt, Human
caacagagcagcucugagcuc

SEQ ID NO: 634658 - RNA, 18 nt, Human
caccaacagagcccccca

SEQ ID NO: 634659 - RNA, 21 nt, Human
cagagccccccagggggcucc

SEQ ID NO: 634660 - RNA, 19 nt, Human
cagcaacacaaugagacaa

SEQ ID NO: 634661 - RNA, 24 nt, Human
cagcaacacaaugagacaacagag

SEQ ID NO: 634662 - RNA, 22 nt, Human
cagcagaaucagcccccaccuc

SEQ ID NO: 634663 - RNA, 23 nt, Human
cagcagcagggggcugcguccaa

SEQ ID NO: 634664 - RNA, 23 nt, Human
cagcuccuguguggucugggggg

SEQ ID NO: 634665 - RNA, 19 nt, Human
cagcucugagcucaauccu

SEQ ID NO: 634666 - RNA, 24 nt, Human
caggacccgcuccaggcuugucac

SEQ ID NO: 634667 - RNA, 20 nt, Human
caggagggcugaaagcagca

SEQ ID NO: 634668 - RNA, 19 nt, Human
caggguggagcggccaggc

SEQ ID NO: 634669 - RNA, 19 nt, Human
ccaccagggccuggcacag

SEQ ID NO: 634670 - RNA, 25 nt, Human
cccagagacagcagaaggaccccau

SEQ ID NO: 634671 - RNA, 20 nt, Human
cccagcagaaucagccccca

SEQ ID NO: 634672 - RNA, 22 nt, Human
cccagcagaaucagcccccacc

SEQ ID NO: 634673 - RNA, 23 nt, Human
ccccagagacagcagaaggaccc

SEQ ID NO: 634674 - RNA, 23 nt, Human
ccccucacaggagggcugaaagc

SEQ ID NO: 634675 - RNA, 18 nt, Human
cccgugacccacuuccug

SEQ ID NO: 634676 - RNA, 18 nt, Human
cccuaacaaacaggcucu

SEQ ID NO: 634677 - RNA, 20 nt, Human
cccugggcaggccacucccc

SEQ ID NO: 634678 - RNA, 26 nt, Human
ccuaccccgguacccucaccugaaaa

SEQ ID NO: 634679 - RNA, 20 nt, Human
ccucaccugaaaaaugggac

SEQ ID NO: 634680 - RNA, 25 nt, Human
ccugacccuaacccgguggagcagc

SEQ ID NO: 634681 - RNA, 25 nt, Human
ccugggcuugagcaaacugugggga

SEQ ID NO: 634682 - RNA, 20 nt, Human
ccuguaaaacugaagaucac

SEQ ID NO: 634683 - RNA, 19 nt, Human
ccuugcaccucagaagugc

SEQ ID NO: 634684 - RNA, 18 nt, Human
cucacaggacccgcucca

SEQ ID NO: 634685 - RNA, 23 nt, Human
cucagccuccaccagggccuggc

SEQ ID NO: 634686 - RNA, 20 nt, Human
cugaaagcagcacagcugag

SEQ ID NO: 634687 - RNA, 22 nt, Human
cuggccgucuccugacccuaac

SEQ ID NO: 634688 - RNA, 19 nt, Human
cugucccagcagaaucagc

SEQ ID NO: 634689 - RNA, 22 nt, Human
cugugcacugggaccgccccuc

SEQ ID NO: 634690 - RNA, 20 nt, Human
gaacuugaaaaacaucugug

SEQ ID NO: 634691 - RNA, 21 nt, Human
gagcagcucugagcucaaucc

SEQ ID NO: 634692 - RNA, 24 nt, Human
gagcagcugacuggacgcagugac

SEQ ID NO: 634693 - RNA, 22 nt, Human
gaucacccucuaacagcccuaa

SEQ ID NO: 634694 - RNA, 23 nt, Human
gcaacacaaugagacaacagaga

SEQ ID NO: 634695 - RNA, 19 nt, Human
gcaggagacagaggcggcg

SEQ ID NO: 634696 - RNA, 22 nt, Human
gccacacaucacagcacuuugg

SEQ ID NO: 634697 - RNA, 24 nt, Human
gccccagagacagcagaaggaccc

SEQ ID NO: 634698 - RNA, 22 nt, Human
gcccuaacaaacaggcucuggc

SEQ ID NO: 634699 - RNA, 19 nt, Human
ggaaagagcagcacucaca

SEQ ID NO: 634700 - RNA, 23 nt, Human
ggagggcugaaagcagcacagcu

SEQ ID NO: 634701 - RNA, 24 nt, Human
ggcaggagcagcuccagggguccc

SEQ ID NO: 634702 - RNA, 21 nt, Human
gggcaggagcagcuccaggac

SEQ ID NO: 634703 - RNA, 24 nt, Human
gggcuacguucuuauggacgcugg

SEQ ID NO: 634704 - RNA, 19 nt, Human
uaaaauuaacccgugaccc

SEQ ID NO: 634705 - RNA, 24 nt, Human
uaacaaacaggcucuggccgucuc

SEQ ID NO: 634706 - RNA, 23 nt, Human
uaagaagggugguggaugcagca

SEQ ID NO: 634707 - RNA, 24 nt, Human
ucagcaccaacagagccccccagg

SEQ ID NO: 634708 - RNA, 18 nt, Human
ucaguacaaacugaggaa

SEQ ID NO: 634709 - RNA, 20 nt, Human
ucccaccgagcuggacgauc

SEQ ID NO: 634710 - RNA, 21 nt, Human
ucggucaggggcgaguugggc

SEQ ID NO: 634711 - RNA, 21 nt, Human
ugaaaaaugggacagcaacac

SEQ ID NO: 634712 - RNA, 21 nt, Human
ugaagcccuguuaugaugugc

SEQ ID NO: 634713 - RNA, 22 nt, Human
ugacccugggcaggccacuccc

SEQ ID NO: 634714 - RNA, 22 nt, Human
ugacgccaccacugagguucug

SEQ ID NO: 634715 - RNA, 24 nt, Human
ugagacaacagagacugucuagaa

SEQ ID NO: 634716 - RNA, 21 nt, Human
ugagcaaacuguggggacuca

SEQ ID NO: 634717 - RNA, 24 nt, Human
ugaggaacuugaaaaacaucugug

SEQ ID NO: 634718 - RNA, 18 nt, Human
ugcacugccuuccaaccu

SEQ ID NO: 634719 - RNA, 18 nt, Human
ugcacugggaccgccccu

SEQ ID NO: 634720 - RNA, 20 nt, Human
ugcaggguggagcggccagg

SEQ ID NO: 634721 - RNA, 22 nt, Human
ugccugggcuugagcaaacugu

SEQ ID NO: 634722 - RNA, 23 nt, Human
ugcuuccugcccugaugaauccc

SEQ ID NO: 634723 - RNA, 19 nt, Human
uggaaagagcagcacucac

SEQ ID NO: 634724 - RNA, 18 nt, Human
uggggacggggacaggca

SEQ ID NO: 634725 - RNA, 20 nt, Human
uggggacggggacaggcagu

SEQ ID NO: 634726 - RNA, 19 nt, Human
uggggggaggcugccucug

SEQ ID NO: 634727 - RNA, 23 nt, Human
ugugcaguuuaaaaagagaaacg

SEQ ID NO: 634728 - RNA, 19 nt, Human
uuaaaaucaugcucgacau

SEQ ID NO: 634729 - RNA, 19 nt, Human
uucuuauggacgcuggagg

SEQ ID NO: 634730 - RNA, 22 nt, Human
uugccugggcuugagcaaacug

SEQ ID NO: 634731 - RNA, 24 nt, Human
uuggaggccuccucucccuucuga

SEQ ID NO: 634732 - RNA, 22 nt, Human
uuugaaccaccaggcaguagac

SEQ ID NO: 634733 - RNA, 18 nt, Human
uuuuuuuuuuuuuuuuug

SEQ ID NO: 634734 - RNA, 26 nt, Human
aaaaaaccaaccaaccaacuacccac

SEQ ID NO: 634735 - RNA, 21 nt, Human
aaacaggaccaggaaccacaa

SEQ ID NO: 634736 - RNA, 24 nt, Human
aaacaggaccaggaaccacaaaga

SEQ ID NO: 634737 - RNA, 25 nt, Human
aaacaggaccaggaaccacaaagag

SEQ ID NO: 634738 - RNA, 24 nt, Human
aaagugcugggauuacaggcauga

SEQ ID NO: 634739 - RNA, 19 nt, Human
aaagugcugggauuucagg

SEQ ID NO: 634740 - RNA, 24 nt, Human
aaagugcugggauuucaggcguga

SEQ ID NO: 634741 - RNA, 21 nt, Human
aagcaccacccagcccaggcc

SEQ ID NO: 634742 - RNA, 23 nt, Human
aagcaccacccagcccaggccga

SEQ ID NO: 634743 - RNA, 23 nt, Human
aagugaucugcccccuuggccuc

SEQ ID NO: 634744 - RNA, 19 nt, Human
aagugcugggauuacaggc

SEQ ID NO: 634745 - RNA, 21 nt, Human
aagugcugggauuacaggcau

SEQ ID NO: 634746 - RNA, 26 nt, Human
aagugcugggauuacaggcaugagcc

SEQ ID NO: 634747 - RNA, 19 nt, Human
aagugcugggauuucaggc

SEQ ID NO: 634748 - RNA, 19 nt, Human
aauauggugaaacccgucu

SEQ ID NO: 634749 - RNA, 24 nt, Human
aaucacuuaaacccaggagacaga

SEQ ID NO: 634750 - RNA, 19 nt, Human
aauuuccuuuccucaaaga

SEQ ID NO: 634751 - RNA, 18 nt, Human
acaaaggagaggcacaga

SEQ ID NO: 634752 - RNA, 19 nt, Human
acaagcaccacccagccca

SEQ ID NO: 634753 - RNA, 19 nt, Human
acaggaccaggaaccacaa

SEQ ID NO: 634754 - RNA, 22 nt, Human
acaggaccaggaaccacaaaga

SEQ ID NO: 634755 - RNA, 20 nt, Human
acaggguuucaccaaguuag

SEQ ID NO: 634756 - RNA, 20 nt, Human
acaggguuucauucuguugg

SEQ ID NO: 634757 - RNA, 23 nt, Human
acaggguuucauucuguuggcca

SEQ ID NO: 634758 - RNA, 24 nt, Human
acaggguuucauucuguuggccag

SEQ ID NO: 634759 - RNA, 20 nt, Human
acagugcugagguuacaggc

SEQ ID NO: 634760 - RNA, 24 nt, Human
acagugcugagguuacaggcguga

SEQ ID NO: 634761 - RNA, 21 nt, Human
accaaccaaccaacuacccac

SEQ ID NO: 634762 - RNA, 22 nt, Human
accaaccaaccaacuacccacc

SEQ ID NO: 634763 - RNA, 22 nt, Human
accaacuacccaccugggccac

SEQ ID NO: 634764 - RNA, 24 nt, Human
accacccagcccaggccgaaacaa

SEQ ID NO: 634765 - RNA, 22 nt, Human
accacugcacuccagccugggc

SEQ ID NO: 634766 - RNA, 24 nt, Human
accuugugaucugcccgccucggc

SEQ ID NO: 634767 - RNA, 18 nt, Human
acugcacuccagccuggg

SEQ ID NO: 634768 - RNA, 22 nt, Human
acugcacuccagccugggcgag

SEQ ID NO: 634769 - RNA, 24 nt, Human
acugcacuccagccugggcgagag

SEQ ID NO: 634770 - RNA, 21 nt, Human
acuguagucccagcuacuugg

SEQ ID NO: 634771 - RNA, 23 nt, Human
agaagaagaaucacuuaaaccca

SEQ ID NO: 634772 - RNA, 21 nt, Human
agacagagguugcagugagcc

SEQ ID NO: 634773 - RNA, 24 nt, Human
agacagagguugcagugagccgag

SEQ ID NO: 634774 - RNA, 19 nt, Human
agacaggguuucaccaagu

SEQ ID NO: 634775 - RNA, 19 nt, Human
agagaagcuaagagcagca

SEQ ID NO: 634776 - RNA, 19 nt, Human
agagacugcauccuccacu

SEQ ID NO: 634777 - RNA, 24 nt, Human
agagguugcagugagccgaggucg

SEQ ID NO: 634778 - RNA, 24 nt, Human
agcaccacccagcccaggccgaaa

SEQ ID NO: 634779 - RNA, 24 nt, Human
agcacuuugggaggcugaggcggg

SEQ ID NO: 634780 - RNA, 26 nt, Human
agcccaggccgaaacaaaggagaggc

SEQ ID NO: 634781 - RNA, 19 nt, Human
agcccggcuaauuuuugua

SEQ ID NO: 634782 - RNA, 18 nt, Human
agccuccagaguagcugg

SEQ ID NO: 634783 - RNA, 23 nt, Human
agccugggcugggugugguggcu

SEQ ID NO: 634784 - RNA, 19 nt, Human
agccuggucaauaugguga

SEQ ID NO: 634785 - RNA, 22 nt, Human
agccuggucaauauggugaaac

SEQ ID NO: 634786 - RNA, 24 nt, Human
agccuggucaauauggugaaaccc

SEQ ID NO: 634787 - RNA, 22 nt, Human
aggaguucgagaccagccuggu

SEQ ID NO: 634788 - RNA, 28 nt, Human
aggcagaagaagaaucacuuaaacccag

SEQ ID NO: 634789 - RNA, 24 nt, Human
aggcgggcagaucaugaggucagg

SEQ ID NO: 634790 - RNA, 21 nt, Human
aggcugaggcagaagaagaau

SEQ ID NO: 634791 - RNA, 21 nt, Human
aggcugaggcgggcagaucau

SEQ ID NO: 634792 - RNA, 22 nt, Human
agguuacaggcgugagccacca

SEQ ID NO: 634793 - RNA, 18 nt, Human
aguagcugggacuacagg

SEQ ID NO: 634794 - RNA, 25 nt, Human
agucugaucuugacauccugaccuc

SEQ ID NO: 634795 - RNA, 19 nt, Human
agugcaguggugggagcuc

SEQ ID NO: 634796 - RNA, 24 nt, Human
agugcaguggugggagcucagcuc

SEQ ID NO: 634797 - RNA, 22 nt, Human
agugcugagguuacaggcguga

SEQ ID NO: 634798 - RNA, 18 nt, Human
agugcugggauuacaggc

SEQ ID NO: 634799 - RNA, 22 nt, Human
aucugcccccuuggccucccac

SEQ ID NO: 634800 - RNA, 23 nt, Human
augagccugggcuggguguggug

SEQ ID NO: 634801 - RNA, 22 nt, Human
augcaaguggaaccaggccaag

SEQ ID NO: 634802 - RNA, 18 nt, Human
augggguuucgccauguu

SEQ ID NO: 634803 - RNA, 19 nt, Human
augggguuucgccauguug

SEQ ID NO: 634804 - RNA, 24 nt, Human
augggguuucgccauguugaacag

SEQ ID NO: 634805 - RNA, 19 nt, Human
auggugaaacccgucucua

SEQ ID NO: 634806 - RNA, 24 nt, Human
caaagugcugggauuacaggcaug

SEQ ID NO: 634807 - RNA, 24 nt, Human
caaagugcugggauuucaggcgug

SEQ ID NO: 634808 - RNA, 22 nt, Human
caaaugcucacaagcaccaccc

SEQ ID NO: 634809 - RNA, 22 nt, Human
caacuacccaccugggccacuc

SEQ ID NO: 634810 - RNA, 19 nt, Human
caauauggugaaacccguc

SEQ ID NO: 634811 - RNA, 21 nt, Human
caauauggugaaacccgucuc

SEQ ID NO: 634812 - RNA, 23 nt, Human
caauauggugaaacccgucucua

SEQ ID NO: 634813 - RNA, 22 nt, Human
cacaaagagacugcauccucca

SEQ ID NO: 634814 - RNA, 24 nt, Human
caccaaguuagccaggauggucuc

SEQ ID NO: 634815 - RNA, 18 nt, Human
caccacccagcccaggcc

SEQ ID NO: 634816 - RNA, 21 nt, Human
caccacccagcccaggccgaa

SEQ ID NO: 634817 - RNA, 21 nt, Human
caccaugcccggcccaucuga

SEQ ID NO: 634818 - RNA, 19 nt, Human
cacccggccuaauuuuugu

SEQ ID NO: 634819 - RNA, 25 nt, Human
caccgucugaaaaaaaaaaaccaac

SEQ ID NO: 634820 - RNA, 22 nt, Human
caccucaagaccccagguucuc

SEQ ID NO: 634821 - RNA, 24 nt, Human
caccugaccuugugaucugcccgc

SEQ ID NO: 634822 - RNA, 24 nt, Human
cacgccuguaaucccagcacuuug

SEQ ID NO: 634823 - RNA, 23 nt, Human
cacuccagccugggcgagagagc

SEQ ID NO: 634824 - RNA, 24 nt, Human
cacuccagccugggcgagagagcg

SEQ ID NO: 634825 - RNA, 20 nt, Human
cacugcacuccagccugggc

SEQ ID NO: 634826 - RNA, 21 nt, Human
cacugcacuccagccugggcg

SEQ ID NO: 634827 - RNA, 22 nt, Human
cacugcacuccagccugggcga

SEQ ID NO: 634828 - RNA, 22 nt, Human
cacugcacuccagccugggcga

SEQ ID NO: 634829 - RNA, 24 nt, Human
cacugcacuccagccugggcgaga

SEQ ID NO: 634830 - RNA, 24 nt, Human
cagaucaugaggucaggaguucga

SEQ ID NO: 634831 - RNA, 24 nt, Human
cagcacuuugggaggcugaggcgg

SEQ ID NO: 634832 - RNA, 19 nt, Human
cagcccaggccgaaacaaa

SEQ ID NO: 634833 - RNA, 24 nt, Human
cagcuacuugggaggcugaggcag

SEQ ID NO: 634834 - RNA, 24 nt, Human
caggguuucaccaaguuagccagg

SEQ ID NO: 634835 - RNA, 23 nt, Human
caggguuucauucuguuggccag

SEQ ID NO: 634836 - RNA, 22 nt, Human
caggugaccccuccucagucuc

SEQ ID NO: 634837 - RNA, 22 nt, Human
caugccauucuccugcuucagc

SEQ ID NO: 634838 - RNA, 24 nt, Human
cauucuguuggccagucugaucuu

SEQ ID NO: 634839 - RNA, 23 nt, Human
ccaaagugcugggauuacaggca

SEQ ID NO: 634840 - RNA, 24 nt, Human
ccaaagugcugggauuacaggcau

SEQ ID NO: 634841 - RNA, 22 nt, Human
ccaaagugcugggauuucaggc

SEQ ID NO: 634842 - RNA, 24 nt, Human
ccaaagugcugggauuucaggcgu

SEQ ID NO: 634843 - RNA, 22 nt, Human
ccaaccaaccaacuacccaccu

SEQ ID NO: 634844 - RNA, 22 nt, Human
ccacagugcugagguuacaggc

SEQ ID NO: 634845 - RNA, 24 nt, Human
ccacagugcugagguuacaggcgu

SEQ ID NO: 634846 - RNA, 19 nt, Human
ccacccagcccaggccgaa

SEQ ID NO: 634847 - RNA, 20 nt, Human
ccacugcacuccagccuggg

SEQ ID NO: 634848 - RNA, 21 nt, Human
ccacugcacuccagccugggc

SEQ ID NO: 634849 - RNA, 21 nt, Human
ccacugcacuccagccugggc

SEQ ID NO: 634850 - RNA, 22 nt, Human
ccacugcacuccagccugggcg

SEQ ID NO: 634851 - RNA, 23 nt, Human
ccacugcacuccagccugggcga

SEQ ID NO: 634852 - RNA, 24 nt, Human
ccacugcacuccagccugggcgag

SEQ ID NO: 634853 - RNA, 24 nt, Human
ccagaguagcugggacuacaggug

SEQ ID NO: 634854 - RNA, 22 nt, Human
ccaggagacagagguugcagug

SEQ ID NO: 634855 - RNA, 18 nt, Human
ccaggccaagcugccaug

SEQ ID NO: 634856 - RNA, 24 nt, Human
cccaaagugcugggauuacaggca

SEQ ID NO: 634857 - RNA, 24 nt, Human
cccaggccgaaacaaaggagaggc

SEQ ID NO: 634858 - RNA, 19 nt, Human
cccaggcuggagugcagug

SEQ ID NO: 634859 - RNA, 24 nt, Human
cccgaccugaagugaucugccccc

SEQ ID NO: 634860 - RNA, 23 nt, Human
cccggcccaucugagcaaccccu

SEQ ID NO: 634861 - RNA, 23 nt, Human
cccggguucaugccauucuccug

SEQ ID NO: 634862 - RNA, 22 nt, Human
cccgucucuacuaaaaauacaa

SEQ ID NO: 634863 - RNA, 21 nt, Human
ccgaaacaaaggagaggcaca

SEQ ID NO: 634864 - RNA, 21 nt, Human
ccggcccaucugagcaacccc

SEQ ID NO: 634865 - RNA, 23 nt, Human
ccucaagaccccagguucucaaa

SEQ ID NO: 634866 - RNA, 28 nt, Human
ccucaagaccccagguucucaaacaggg

SEQ ID NO: 634867 - RNA, 24 nt, Human
ccucaggugaccccuccucagucu

SEQ ID NO: 634868 - RNA, 24 nt, Human
ccucagucucccaaagugcuggga

SEQ ID NO: 634869 - RNA, 18 nt, Human
ccugaccucaggugaccc

SEQ ID NO: 634870 - RNA, 22 nt, Human
ccuggucaauauggugaaaccc

SEQ ID NO: 634871 - RNA, 23 nt, Human
ccuggucaauauggugaaacccg

SEQ ID NO: 634872 - RNA, 22 nt, Human
ccuguaaucccagcacuuuggg

SEQ ID NO: 634873 - RNA, 18 nt, Human
cgagaccagccuggucaa

SEQ ID NO: 634874 - RNA, 22 nt, Human
cgaugcaaguggaaccaggcca

SEQ ID NO: 634875 - RNA, 21 nt, Human
cgcaccacugcacuccagccu

SEQ ID NO: 634876 - RNA, 24 nt, Human
cgccucggccucccaaagugcugg

SEQ ID NO: 634877 - RNA, 23 nt, Human
cgccuguaaucccagcacuuugg

SEQ ID NO: 634878 - RNA, 24 nt, Human
cgcugugucgcccaggcuggagug

SEQ ID NO: 634879 - RNA, 22 nt, Human
cgggcagaucaugaggucagga

SEQ ID NO: 634880 - RNA, 30 nt, Human
cgucugaaaaaaaaaaaccaaccaaccuug

SEQ ID NO: 634881 - RNA, 24 nt, Human
cgugagccaccaugcccggcccau

SEQ ID NO: 634882 - RNA, 18 nt, Human
cguggcaggugucaccac

SEQ ID NO: 634883 - RNA, 23 nt, Human
cucacaccuguaaucugcaucuu

SEQ ID NO: 634884 - RNA, 22 nt, Human
cucacgccuguaaucccagcac

SEQ ID NO: 634885 - RNA, 24 nt, Human
cucacgccuguaaucccagcacuu

SEQ ID NO: 634886 - RNA, 23 nt, Human
cuccucagucucccaaagugcug

SEQ ID NO: 634887 - RNA, 21 nt, Human
cucuugguggcauuaguaguu

SEQ ID NO: 634888 - RNA, 20 nt, Human
cugcaucuuaaacacacguu

SEQ ID NO: 634889 - RNA, 23 nt, Human
cugcuucagccuccagaguagcu

SEQ ID NO: 634890 - RNA, 21 nt, Human
cuguagucccagcuacuuggg

SEQ ID NO: 634891 - RNA, 19 nt, Human
gaagcuaagagcagcagug

SEQ ID NO: 634892 - RNA, 19 nt, Human
gacaggccaccucaagacc

SEQ ID NO: 634893 - RNA, 22 nt, Human
gaccccuccucagucucccaaa

SEQ ID NO: 634894 - RNA, 22 nt, Human
gaccuugugaucugcccgccuc

SEQ ID NO: 634895 - RNA, 21 nt, Human
gagacagagguugcagugagc

SEQ ID NO: 634896 - RNA, 23 nt, Human
gaggucgcaccacugcacuccag

SEQ ID NO: 634897 - RNA, 27 nt, Human
gaguagcugggacuacaggugccacgc

SEQ ID NO: 634898 - RNA, 22 nt, Human
gaucaugaggucaggaguucga

SEQ ID NO: 634899 - RNA, 24 nt, Human
gaucaugaggucaggaguucgaga

SEQ ID NO: 634900 - RNA, 19 nt, Human
gauccuggagcaaaugcuc

SEQ ID NO: 634901 - RNA, 20 nt, Human
gaucugcccccuuggccucc

SEQ ID NO: 634902 - RNA, 18 nt, Human
gauuacaggcaugagcca

SEQ ID NO: 634903 - RNA, 23 nt, Human
gauuacaggcaugagccacggca

SEQ ID NO: 634904 - RNA, 20 nt, Human
gcaccacugcacuccagccu

SEQ ID NO: 634905 - RNA, 18 nt, Human
gcacgugugcguggcagg

SEQ ID NO: 634906 - RNA, 23 nt, Human
gccagagaagcuaagagcagcag

SEQ ID NO: 634907 - RNA, 19 nt, Human
gcccaggcuggagugcagu

SEQ ID NO: 634908 - RNA, 20 nt, Human
gcccaggcuggagugcagug

SEQ ID NO: 634909 - RNA, 23 nt, Human
gcccaggcuggagugcaguggug

SEQ ID NO: 634910 - RNA, 19 nt, Human
gcgugagccaccaugcccg

SEQ ID NO: 634911 - RNA, 19 nt, Human
gcugggugugguggcucac

SEQ ID NO: 634912 - RNA, 22 nt, Human
gcuggucuggaacucccgaccu

SEQ ID NO: 634913 - RNA, 19 nt, Human
ggaccaggaaccacaaaga

SEQ ID NO: 634914 - RNA, 21 nt, Human
ggauuacaggcaugagccacg

SEQ ID NO: 634915 - RNA, 22 nt, Human
ggccaagcugccauguuucacc

SEQ ID NO: 634916 - RNA, 24 nt, Human
ggccgcgguggcucacgccuguaa

SEQ ID NO: 634917 - RNA, 23 nt, Human
ggcgggcagaucaugaggucagg

SEQ ID NO: 634918 - RNA, 19 nt, Human
ggcugggugugguggcuca

SEQ ID NO: 634919 - RNA, 24 nt, Human
gggcagaucaugaggucaggaguu

SEQ ID NO: 634920 - RNA, 20 nt, Human
gggcugggugugguggcuca

SEQ ID NO: 634921 - RNA, 26 nt, Human
ggggaugggacccaggccuuccuguc

SEQ ID NO: 634922 - RNA, 24 nt, Human
gggugugguggcucacaccuguaa

SEQ ID NO: 634923 - RNA, 20 nt, Human
ggucucgaucaccugaccuu

SEQ ID NO: 634924 - RNA, 22 nt, Human
gguggcucacaccuguaaucug

SEQ ID NO: 634925 - RNA, 23 nt, Human
gguggcucacgccuguaauccca

SEQ ID NO: 634926 - RNA, 24 nt, Human
gguggcucacgccuguaaucccag

SEQ ID NO: 634927 - RNA, 18 nt, Human
gguuacaggcgugagcca

SEQ ID NO: 634928 - RNA, 21 nt, Human
gguuacaggcgugagccacca

SEQ ID NO: 634929 - RNA, 23 nt, Human
gguuacaggcgugagccaccaug

SEQ ID NO: 634930 - RNA, 24 nt, Human
gguuacaggcgugagccaccaugc

SEQ ID NO: 634931 - RNA, 21 nt, Human
guaaucugcaucuuaaacaca

SEQ ID NO: 634932 - RNA, 18 nt, Human
guagaaugggguuucgcc

SEQ ID NO: 634933 - RNA, 20 nt, Human
guagaaugggguuucgccau

SEQ ID NO: 634934 - RNA, 24 nt, Human
gugaucugcccgccucggccuccc

SEQ ID NO: 634935 - RNA, 18 nt, Human
gugcggcacgugugcgug

SEQ ID NO: 634936 - RNA, 23 nt, Human
guggcucacgccuguaaucccag

SEQ ID NO: 634937 - RNA, 18 nt, Human
gugugguggcucacaccu

SEQ ID NO: 634938 - RNA, 19 nt, Human
guugcagugagccgagguc

SEQ ID NO: 634939 - RNA, 23 nt, Human
guuuugguagaaugggguuucgc

SEQ ID NO: 634940 - RNA, 22 nt, Human
uaauuuuuguaguuuugguaga

SEQ ID NO: 634941 - RNA, 23 nt, Human
uaauuuuuguauuuuuguagaga

SEQ ID NO: 634942 - RNA, 23 nt, Human
uacaggcaugagccacggcaccc

SEQ ID NO: 634943 - RNA, 23 nt, Human
uacaggcgugagccaccaugccc

SEQ ID NO: 634944 - RNA, 21 nt, Human
uagaaugggguuucgccaugu

SEQ ID NO: 634945 - RNA, 22 nt, Human
uagagacaggguuucaccaagu

SEQ ID NO: 634946 - RNA, 22 nt, Human
uagccgggcgugguggcacaug

SEQ ID NO: 634947 - RNA, 19 nt, Human
uaguagagacaggguuuca

SEQ ID NO: 634948 - RNA, 26 nt, Human
uaguagagacaggguuucaccaaguu

SEQ ID NO: 634949 - RNA, 25 nt, Human
uauuuuuuuuuuaguagagacaggg

SEQ ID NO: 634950 - RNA, 24 nt, Human
ucaccaaguuagccaggauggucu

SEQ ID NO: 634951 - RNA, 21 nt, Human
ucacugcaagcgccgccaccc

SEQ ID NO: 634952 - RNA, 23 nt, Human
ucagccuccagaguagcugggac

SEQ ID NO: 634953 - RNA, 24 nt, Human
ucaugaggucaggaguucgagacc

SEQ ID NO: 634954 - RNA, 24 nt, Human
uccagaguagcugggacuacaggu

SEQ ID NO: 634955 - RNA, 23 nt, Human
uccagccugggcgagagagcgag

SEQ ID NO: 634956 - RNA, 24 nt, Human
uccagccugggcgagagagcgaga

SEQ ID NO: 634957 - RNA, 24 nt, Human
ucccaaagugcugggauuacaggc

SEQ ID NO: 634958 - RNA, 24 nt, Human
ucccaaagugcugggauuucaggc

SEQ ID NO: 634959 - RNA, 24 nt, Human
ucccacagugcugagguuacaggc

SEQ ID NO: 634960 - RNA, 20 nt, Human
uccucaaagacaggccucua

SEQ ID NO: 634961 - RNA, 23 nt, Human
ucgcaccacugcacuccagccug

SEQ ID NO: 634962 - RNA, 22 nt, Human
ucgccauguugaacaggcuggu

SEQ ID NO: 634963 - RNA, 24 nt, Human
ucgcccaggcuggagugcaguggu

SEQ ID NO: 634964 - RNA, 24 nt, Human
ucgcugugucgcccaggcuggagu

SEQ ID NO: 634965 - RNA, 18 nt, Human
ucggccucccaaagugcu

SEQ ID NO: 634966 - RNA, 23 nt, Human
ucucgcugugucgcccaggcugg

SEQ ID NO: 634967 - RNA, 24 nt, Human
ucucgcugugucgcccaggcugga

SEQ ID NO: 634968 - RNA, 22 nt, Human
ucucuacuaaaaauacaaaaaa

SEQ ID NO: 634969 - RNA, 19 nt, Human
ugaaaaaaaaaaaccaacc

SEQ ID NO: 634970 - RNA, 23 nt, Human
ugaaaaaaaaaaaccaaccaacc

SEQ ID NO: 634971 - RNA, 18 nt, Human
ugaccccuccucagucuc

SEQ ID NO: 634972 - RNA, 18 nt, Human
ugaccucaggugaccccu

SEQ ID NO: 634973 - RNA, 19 nt, Human
ugaccucaggugaccccuc

SEQ ID NO: 634974 - RNA, 23 nt, Human
ugaccucaggugaccccuccuca

SEQ ID NO: 634975 - RNA, 23 nt, Human
ugacuguagucccagcuacuugg

SEQ ID NO: 634976 - RNA, 24 nt, Human
ugacuguagucccagcuacuuggg

SEQ ID NO: 634977 - RNA, 22 nt, Human
ugagccgaggucgcaccacugc

SEQ ID NO: 634978 - RNA, 22 nt, Human
ugagccugggcuggguguggug

SEQ ID NO: 634979 - RNA, 27 nt, Human
ugaggcagaagaagaaucacuuaaacc

SEQ ID NO: 634980 - RNA, 24 nt, Human
ugaggcgggcagaucaugagguca

SEQ ID NO: 634981 - RNA, 18 nt, Human
ugagguuacaggcgugag

SEQ ID NO: 634982 - RNA, 22 nt, Human
ugagguuacaggcgugagccac

SEQ ID NO: 634983 - RNA, 23 nt, Human
ugagguuacaggcgugagccacc

SEQ ID NO: 634984 - RNA, 24 nt, Human
ugagguuacaggcgugagccacca

SEQ ID NO: 634985 - RNA, 25 nt, Human
ugagguuacaggcgugagccaccau

SEQ ID NO: 634986 - RNA, 23 nt, Human
ugaucugcccccuuggccuccca

SEQ ID NO: 634987 - RNA, 20 nt, Human
ugcccggcccaucugagcaa

SEQ ID NO: 634988 - RNA, 24 nt, Human
ugcuucagccuccagaguagcugg

SEQ ID NO: 634989 - RNA, 19 nt, Human
uggagugcaguggugggag

SEQ ID NO: 634990 - RNA, 22 nt, Human
uggagugcaguggugggagcuc

SEQ ID NO: 634991 - RNA, 23 nt, Human
uggagugcaguggugggagcuca

SEQ ID NO: 634992 - RNA, 28 nt, Human
uggagugcaguggugggagggcucuagc

SEQ ID NO: 634993 - RNA, 18 nt, Human
uggcucacaccuguaauc

SEQ ID NO: 634994 - RNA, 20 nt, Human
uggcucacaccuguaaucug

SEQ ID NO: 634995 - RNA, 22 nt, Human
uggcucacgccuguaaucccag

SEQ ID NO: 634996 - RNA, 24 nt, Human
uggcucacgccuguaaucccagca

SEQ ID NO: 634997 - RNA, 18 nt, Human
ugggacccaggccuuccu

SEQ ID NO: 634998 - RNA, 22 nt, Human
ugggagcucagcucacugcaag

SEQ ID NO: 634999 - RNA, 27 nt, Human
ugggaggcugaggcagaagaagaauca

SEQ ID NO: 635000 - RNA, 19 nt, Human
ugggaggcugaggcgggca

SEQ ID NO: 635001 - RNA, 20 nt, Human
ugggaggcugaggcgggcag

SEQ ID NO: 635002 - RNA, 24 nt, Human
ugggaggcugaggcgggcagauca

SEQ ID NO: 635003 - RNA, 18 nt, Human
ugggauuacaggcaugag

SEQ ID NO: 635004 - RNA, 19 nt, Human
ugggauuacaggcaugagc

SEQ ID NO: 635005 - RNA, 21 nt, Human
ugggauuacaggcaugagcca

SEQ ID NO: 635006 - RNA, 22 nt, Human
ugggauuacaggcaugagccac

SEQ ID NO: 635007 - RNA, 22 nt, Human
ugggauuacaggcaugagccac

SEQ ID NO: 635008 - RNA, 23 nt, Human
ugggauuacaggcaugagccacg

SEQ ID NO: 635009 - RNA, 24 nt, Human
ugggauuacaggcaugagccacgg

SEQ ID NO: 635010 - RNA, 24 nt, Human
ugggauuacaggcaugagccacgg

SEQ ID NO: 635011 - RNA, 26 nt, Human
ugggauuacaggcaugagccacggca

SEQ ID NO: 635012 - RNA, 27 nt, Human
ugggauuacaggcaugagccacggcac

SEQ ID NO: 635013 - RNA, 19 nt, Human
ugggauuucaggcgugagc

SEQ ID NO: 635014 - RNA, 22 nt, Human
ugggauuucaggcgugagcccg

SEQ ID NO: 635015 - RNA, 24 nt, Human
ugggguuucgccauguugaacagg

SEQ ID NO: 635016 - RNA, 24 nt, Human
uggugggagcucagcucacugcaa

SEQ ID NO: 635017 - RNA, 21 nt, Human
uguaaucugcaucuuaaacac

SEQ ID NO: 635018 - RNA, 24 nt, Human
uguaaucugcaucuuaaacacacg

SEQ ID NO: 635019 - RNA, 24 nt, Human
uguauuuuuuuuuuaguagagaca

SEQ ID NO: 635020 - RNA, 21 nt, Human
ugucgcccaggcuggagugca

SEQ ID NO: 635021 - RNA, 18 nt, Human
ugugucgcccaggcugga

SEQ ID NO: 635022 - RNA, 18 nt, Human
uuagccgggcgugguggc

SEQ ID NO: 635023 - RNA, 20 nt, Human
uuagccgggcgugguggcac

SEQ ID NO: 635024 - RNA, 18 nt, Human
uuaguagagacaggguuu

SEQ ID NO: 635025 - RNA, 18 nt, Human
uucaugccauucuccugc

SEQ ID NO: 635026 - RNA, 18 nt, Human
uugcagugagccgagguc

SEQ ID NO: 635027 - RNA, 19 nt, Human
uugcagugagccgaggucg

SEQ ID NO: 635028 - RNA, 22 nt, Human
uugcagugagccgaggucgcac

SEQ ID NO: 635029 - RNA, 29 nt, Human
uugggaggcugaggcagaagaagaaucaa

SEQ ID NO: 635030 - RNA, 25 nt, Human
uugggaggcugaggcgggcagauca

SEQ ID NO: 635031 - RNA, 24 nt, Human
uugguagaaugggguuucgccaug

SEQ ID NO: 635032 - RNA, 24 nt, Human
uuguagagacaggguuucauucug

SEQ ID NO: 635033 - RNA, 18 nt, Human
uuucauucuguuggccag

SEQ ID NO: 635034 - RNA, 24 nt, Human
uuugguagaaugggguuucgccau

SEQ ID NO: 635035 - RNA, 25 nt, Human
uuuguagagacaggguuucauucug

SEQ ID NO: 635036 - RNA, 18 nt, Human
uuuuguaguuuugguaga

SEQ ID NO: 635037 - RNA, 24 nt, Human
uuuuuaguagagacaggguuucac

SEQ ID NO: 635038 - RNA, 23 nt, Human
uuuuuguagagacaggguuucau

SEQ ID NO: 635039 - RNA, 23 nt, Human
uuuuuuaguagagacaggguuuc

SEQ ID NO: 635040 - RNA, 26 nt, Human
uuuuuuuuuuuuagaugggaaaucuc

SEQ ID NO: 635041 - RNA, 21 nt, Human
uuuuuuuuuuuuuuagauggg

SEQ ID NO: 635042 - RNA, 22 nt, Human
uuuuuuuuuuuuuuuagauggg

SEQ ID NO: 635043 - RNA, 19 nt, Human
aaaaaaagggcaauucuga

SEQ ID NO: 635044 - RNA, 24 nt, Human
aaaaauaagaagagagccuagaac

SEQ ID NO: 635045 - RNA, 23 nt, Human
aaacuggcaugaagcucucccac

SEQ ID NO: 635046 - RNA, 18 nt, Human
aacaagcauaucuucaag

SEQ ID NO: 635047 - RNA, 18 nt, Human
aaccuuccuccccaucca

SEQ ID NO: 635048 - RNA, 26 nt, Human
aaccuuccuccccauccacacuccca

SEQ ID NO: 635049 - RNA, 21 nt, Human
aacuggcaugaagcucuccca

SEQ ID NO: 635050 - RNA, 21 nt, Human
aaugagaaaaauaagaagaga

SEQ ID NO: 635051 - RNA, 20 nt, Human
acagauaugcagaccgaaau

SEQ ID NO: 635052 - RNA, 22 nt, Human
acaugccugaaaacugggccca

SEQ ID NO: 635053 - RNA, 19 nt, Human
acuuauuccucuuugccaa

SEQ ID NO: 635054 - RNA, 20 nt, Human
agaccgaaaugcugacacca

SEQ ID NO: 635055 - RNA, 21 nt, Human
agacuuuuaggaaggagcagc

SEQ ID NO: 635056 - RNA, 18 nt, Human
agauacggacacacagau

SEQ ID NO: 635057 - RNA, 21 nt, Human
agauaugcagaccgaaaugcu

SEQ ID NO: 635058 - RNA, 20 nt, Human
agccuagaaccuuccucccc

SEQ ID NO: 635059 - RNA, 24 nt, Human
aggcauugggaaaugagaaaaaua

SEQ ID NO: 635060 - RNA, 18 nt, Human
aguuaccauaaaucucag

SEQ ID NO: 635061 - RNA, 21 nt, Human
augccugaaaacugggcccac

SEQ ID NO: 635062 - RNA, 21 nt, Human
caaggcuucuguuguuggggu

SEQ ID NO: 635063 - RNA, 25 nt, Human
cacguacacgcacacaaacgcagau

SEQ ID NO: 635064 - RNA, 21 nt, Human
cagaccgaaaugcugacacca

SEQ ID NO: 635065 - RNA, 20 nt, Human
cagauuugaagcuugccauc

SEQ ID NO: 635066 - RNA, 28 nt, Human
cagcagcagguuucaaugucguaagggc

SEQ ID NO: 635067 - RNA, 22 nt, Human
caugccugaaaacugggcccac

SEQ ID NO: 635068 - RNA, 20 nt, Human
cauucuauguugacucugug

SEQ ID NO: 635069 - RNA, 18 nt, Human
ccauccacacucccaccc

SEQ ID NO: 635070 - RNA, 24 nt, Human
ccccauccacacucccacccuccu

SEQ ID NO: 635071 - RNA, 20 nt, Human
cguacacgcacacaaacgca

SEQ ID NO: 635072 - RNA, 20 nt, Human
cuauucccuugaacuccgug

SEQ ID NO: 635073 - RNA, 22 nt, Human
cuccccauccacacucccaccc

SEQ ID NO: 635074 - RNA, 28 nt, Human
cuccccauccacacucccacccuccuca

SEQ ID NO: 635075 - RNA, 20 nt, Human
cuccgugaccaaugcugccu

SEQ ID NO: 635076 - RNA, 22 nt, Human
cuccugguuuguuugacuguuu

SEQ ID NO: 635077 - RNA, 20 nt, Human
cugcucuuguccuccaaugu

SEQ ID NO: 635078 - RNA, 21 nt, Human
cuugauuguuuucuuccuuuu

SEQ ID NO: 635079 - RNA, 23 nt, Human
gaagcucucccacagagaggcau

SEQ ID NO: 635080 - RNA, 28 nt, Human
gagaaaaauaagaagagagccgguaccc

SEQ ID NO: 635081 - RNA, 20 nt, Human
gagagcuucccauucaaaag

SEQ ID NO: 635082 - RNA, 21 nt, Human
gauacggacacacagauaugc

SEQ ID NO: 635083 - RNA, 19 nt, Human
gcacgaagccucuuguaca

SEQ ID NO: 635084 - RNA, 22 nt, Human
gcagaucggaauggcccaucca

SEQ ID NO: 635085 - RNA, 21 nt, Human
ggcauugggaaaugagaaaaa

SEQ ID NO: 635086 - RNA, 18 nt, Human
uaaaaggagaguugacau

SEQ ID NO: 635087 - RNA, 19 nt, Human
uaagaagagagccuagaac

SEQ ID NO: 635088 - RNA, 27 nt, Human
uaagaagagagccuagaaccuuccucc

SEQ ID NO: 635089 - RNA, 25 nt, Human
uaagauaucaucaauuuuaugauaa

SEQ ID NO: 635090 - RNA, 24 nt, Human
uacacgcacacaaacgcagauacg

SEQ ID NO: 635091 - RNA, 20 nt, Human
uaccauaaaucucagcugga

SEQ ID NO: 635092 - RNA, 19 nt, Human
uaugcagaccgaaaugcug

SEQ ID NO: 635093 - RNA, 20 nt, Human
uccacacucccacccuccuc

SEQ ID NO: 635094 - RNA, 23 nt, Human
uccacacucccacccuccucaca

SEQ ID NO: 635095 - RNA, 21 nt, Human
uccccauccacacucccaccc

SEQ ID NO: 635096 - RNA, 22 nt, Human
uccccauccacacucccacccu

SEQ ID NO: 635097 - RNA, 20 nt, Human
ucgaaaaguagucaucugcu

SEQ ID NO: 635098 - RNA, 21 nt, Human
ucggaauggcccauccaauaa

SEQ ID NO: 635099 - RNA, 21 nt, Human
ucuacaugccugaaaacuggg

SEQ ID NO: 635100 - RNA, 25 nt, Human
ucucccacagagaggcauugggaaa

SEQ ID NO: 635101 - RNA, 20 nt, Human
ucucuaaauuggauuagcuc

SEQ ID NO: 635102 - RNA, 18 nt, Human
ugacaugggucucuagac

SEQ ID NO: 635103 - RNA, 22 nt, Human
ugcagaccgaaaugcugacacc

SEQ ID NO: 635104 - RNA, 25 nt, Human
ugccccuaacauucuuguggaauuu

SEQ ID NO: 635105 - RNA, 19 nt, Human
ugccugagcguggugaaaa

SEQ ID NO: 635106 - RNA, 19 nt, Human
ugcuugauuguuuucuucc

SEQ ID NO: 635107 - RNA, 20 nt, Human
uggaauuucauaaggcagau

SEQ ID NO: 635108 - RNA, 18 nt, Human
uggcaugaagcucuccca

SEQ ID NO: 635109 - RNA, 20 nt, Human
uggcaugaagcucucccaca

SEQ ID NO: 635110 - RNA, 21 nt, Human
uggcaugaagcucucccacag

SEQ ID NO: 635111 - RNA, 23 nt, Human
uggcaugaagcucucccacagag

SEQ ID NO: 635112 - RNA, 21 nt, Human
uggcccauccaauaacagcug

SEQ ID NO: 635113 - RNA, 24 nt, Human
ugggucucuagacaagccaaguuu

SEQ ID NO: 635114 - RNA, 20 nt, Human
uguuguuuuaaacuccuggu

SEQ ID NO: 635115 - RNA, 20 nt, Human
uucuauguugacucuguguu

SEQ ID NO: 635116 - RNA, 19 nt, Human
uugcuuacucaucuauucc

SEQ ID NO: 635117 - RNA, 21 nt, Human
uuucaauguaacguaauuacu

SEQ ID NO: 635118 - RNA, 19 nt, Human
uuuuuuuuuuuuuuuuuaa

SEQ ID NO: 635119 - RNA, 22 nt, Human
agacagcagcgagaccgggagc

SEQ ID NO: 635120 - RNA, 21 nt, Human
auccauaauaucaucaucauu

SEQ ID NO: 635121 - RNA, 18 nt, Human
cagcagcgagaccgggag

SEQ ID NO: 635122 - RNA, 19 nt, Human
caugagcagguagccaggc

SEQ ID NO: 635123 - RNA, 20 nt, Human
caugagcagguagccaggca

SEQ ID NO: 635124 - RNA, 22 nt, Human
cgggagcgcagggagcggagga

SEQ ID NO: 635125 - RNA, 18 nt, Human
gagcgcagggagcggagg

SEQ ID NO: 635126 - RNA, 22 nt, Human
ggagacacuacagcuucuccau

SEQ ID NO: 635127 - RNA, 21 nt, Human
guuuugucagauggagacacu

SEQ ID NO: 635128 - RNA, 23 nt, Human
uaaaccacaucucuucuucaucu

SEQ ID NO: 635129 - RNA, 20 nt, Human
uaucuugccuuucucuuugu

SEQ ID NO: 635130 - RNA, 23 nt, Human
ucagauggagacacuacagcuuc

SEQ ID NO: 635131 - RNA, 19 nt, Human
ucaugagcagguagccagg

SEQ ID NO: 635132 - RNA, 24 nt, Human
ucccucaugagcagguagccaggc

SEQ ID NO: 635133 - RNA, 22 nt, Human
ugagcagguagccaggcaacca

SEQ ID NO: 635134 - RNA, 18 nt, Human
uggauccauaauaucauc

SEQ ID NO: 635135 - RNA, 19 nt, Human
uucuuuggagaucauggaa

SEQ ID NO: 635136 - RNA, 22 nt, Human
uuucuuuggagaucauggaagu

SEQ ID NO: 635137 - RNA, 21 nt, Human
aaacacagagccgcgaugucc

SEQ ID NO: 635138 - RNA, 20 nt, Human
aaccacagcaaugagaucug

SEQ ID NO: 635139 - RNA, 18 nt, Human
agaagggaaggaagggaa

SEQ ID NO: 635140 - RNA, 23 nt, Human
agacaggagaccgaaacucagag

SEQ ID NO: 635141 - RNA, 21 nt, Human
agacagguagcaacuccagag

SEQ ID NO: 635142 - RNA, 22 nt, Human
agggaaggaagggaaggguagg

SEQ ID NO: 635143 - RNA, 19 nt, Human
caaaaacacagagccgcga

SEQ ID NO: 635144 - RNA, 19 nt, Human
caggagaagacagguagca

SEQ ID NO: 635145 - RNA, 19 nt, Human
caggagaccgaaacucaga

SEQ ID NO: 635146 - RNA, 19 nt, Human
cugguuguggaaccucuuc

SEQ ID NO: 635147 - RNA, 20 nt, Human
cuuccagaacacacaacauc

SEQ ID NO: 635148 - RNA, 22 nt, Human
cuucugauucugccguuucacu

SEQ ID NO: 635149 - RNA, 23 nt, Human
gagaagacagguagcaacuccag

SEQ ID NO: 635150 - RNA, 19 nt, Human
gaucaccaacaagauuccu

SEQ ID NO: 635151 - RNA, 26 nt, Human
gccaagauuuucugguuguggaaccu

SEQ ID NO: 635152 - RNA, 21 nt, Human
uaagaaaggcuaucuggggca

SEQ ID NO: 635153 - RNA, 18 nt, Human
ucaaaaacacagagccgc

SEQ ID NO: 635154 - RNA, 18 nt, Human
uccagagaagggaaggaa

SEQ ID NO: 635155 - RNA, 20 nt, Human
uccagccaagauuuucuggu

SEQ ID NO: 635156 - RNA, 23 nt, Human
uccugcgaccugucacaggcccc

SEQ ID NO: 635157 - RNA, 20 nt, Human
ucuaugugccaggcagcaug

SEQ ID NO: 635158 - RNA, 19 nt, Human
uggauggaucaccaacaag

SEQ ID NO: 635159 - RNA, 19 nt, Human
uguccacuuccagaacaca

SEQ ID NO: 635160 - RNA, 19 nt, Human
uuagacaggagaccgaaac

SEQ ID NO: 635161 - RNA, 20 nt, Human
uucaagaagcuauuaucacc

SEQ ID NO: 635162 - RNA, 21 nt, Human
uuccugauggugaaauuccag

SEQ ID NO: 635163 - RNA, 21 nt, Human
aaaaauacauagaaaugagcc

SEQ ID NO: 635164 - RNA, 24 nt, Human
aaaccaggugcuucaaccuaggga

SEQ ID NO: 635165 - RNA, 19 nt, Human
aaacuguguaauggugccu

SEQ ID NO: 635166 - RNA, 19 nt, Human
aaagauuaguaacaauuca

SEQ ID NO: 635167 - RNA, 23 nt, Human
aaauagucacaaagauuaguaac

SEQ ID NO: 635168 - RNA, 21 nt, Human
aaauccauucauuacagcaaa

SEQ ID NO: 635169 - RNA, 19 nt, Human
aagcagaaauacaaaagcc

SEQ ID NO: 635170 - RNA, 27 nt, Human
aagcagaaauacaaaagccacaauaau

SEQ ID NO: 635171 - RNA, 23 nt, Human
aagccacaauaaucucaauagcc

SEQ ID NO: 635172 - RNA, 20 nt, Human
aagugaaaaagauggcaacc

SEQ ID NO: 635173 - RNA, 21 nt, Human
aauauggacauucacuaaagc

SEQ ID NO: 635174 - RNA, 23 nt, Human
acaaugaagguguucauucugaa

SEQ ID NO: 635175 - RNA, 22 nt, Human
accacacuucugcugaauacag

SEQ ID NO: 635176 - RNA, 20 nt, Human
accuaauuuauaacauuuuu

SEQ ID NO: 635177 - RNA, 19 nt, Human
accuaggugcugggguggc

SEQ ID NO: 635178 - RNA, 19 nt, Human
agaacauucaugaugcuga

SEQ ID NO: 635179 - RNA, 21 nt, Human
agaacucucuguauuggaacu

SEQ ID NO: 635180 - RNA, 21 nt, Human
agacacaagcaaacaaaaucu

SEQ ID NO: 635181 - RNA, 19 nt, Human
agagaaggaaggaguaaga

SEQ ID NO: 635182 - RNA, 19 nt, Human
agagugcacuucuugugcc

SEQ ID NO: 635183 - RNA, 20 nt, Human
agauggauuuuaaaucugcc

SEQ ID NO: 635184 - RNA, 25 nt, Human
agguaccaauaacaaaagcugagcu

SEQ ID NO: 635185 - RNA, 20 nt, Human
aucacaacagccauuuuuac

SEQ ID NO: 635186 - RNA, 25 nt, Human
aucacgacccaagaaccuaauuuag

SEQ ID NO: 635187 - RNA, 24 nt, Human
aucuuucccuagccuggcaggcca

SEQ ID NO: 635188 - RNA, 21 nt, Human
caaaagaguaaagcagcaaau

SEQ ID NO: 635189 - RNA, 18 nt, Human
caaaaugcagucaagaua

SEQ ID NO: 635190 - RNA, 21 nt, Human
caaacaaaaucuuagccagaa

SEQ ID NO: 635191 - RNA, 22 nt, Human
caacagccauuuuuacaauacu

SEQ ID NO: 635192 - RNA, 20 nt, Human
caacauccagacacaagcaa

SEQ ID NO: 635193 - RNA, 23 nt, Human
caacauccagacacaagcaaaca

SEQ ID NO: 635194 - RNA, 23 nt, Human
caaccauaagauuuauaucuccu

SEQ ID NO: 635195 - RNA, 23 nt, Human
caagcaaacaaaaucuuagccag

SEQ ID NO: 635196 - RNA, 24 nt, Human
caagcaaacaaaaucuuagccaga

SEQ ID NO: 635197 - RNA, 22 nt, Human
caauaacaaaagcugagcugag

SEQ ID NO: 635198 - RNA, 18 nt, Human
cagcucucucccccaucc

SEQ ID NO: 635199 - RNA, 25 nt, Human
caggugcuucaaccuaggugcuggg

SEQ ID NO: 635200 - RNA, 19 nt, Human
cauucauuacagcaaaugu

SEQ ID NO: 635201 - RNA, 21 nt, Human
ccacuacugaagaugcaagaa

SEQ ID NO: 635202 - RNA, 22 nt, Human
cuucuugcugggcuggcucccc

SEQ ID NO: 635203 - RNA, 20 nt, Human
cuugcugggcuggcucccca

SEQ ID NO: 635204 - RNA, 20 nt, Human
gcagaaauacaaaagccaca

SEQ ID NO: 635205 - RNA, 24 nt, Human
ggaggauaguuuuauucauuugaa

SEQ ID NO: 635206 - RNA, 21 nt, Human
ggcuacguuugagguuuugca

SEQ ID NO: 635207 - RNA, 24 nt, Human
gggagcaccagcauaugcgcuacc

SEQ ID NO: 635208 - RNA, 19 nt, Human
guaaagcagcaaauacuaa

SEQ ID NO: 635209 - RNA, 20 nt, Human
guaacacuuucauaaucuug

SEQ ID NO: 635210 - RNA, 21 nt, Human
gugaaaaagauggcaaccaca

SEQ ID NO: 635211 - RNA, 21 nt, Human
uaaauagucacaaagauuagu

SEQ ID NO: 635212 - RNA, 23 nt, Human
uaaauuuuguacccuacacacuu

SEQ ID NO: 635213 - RNA, 22 nt, Human
uaagaaaaauacauagaaauga

SEQ ID NO: 635214 - RNA, 22 nt, Human
uaagaaaugugauaaauguagg

SEQ ID NO: 635215 - RNA, 21 nt, Human
uaagaacauucaugaugcuga

SEQ ID NO: 635216 - RNA, 19 nt, Human
uaagcacaauauuugaaga

SEQ ID NO: 635217 - RNA, 18 nt, Human
uaagugaucuacuuaaaa

SEQ ID NO: 635218 - RNA, 23 nt, Human
uacaaaaucuauacuguuucagg

SEQ ID NO: 635219 - RNA, 24 nt, Human
uacaaauaccuaccacggugugcc

SEQ ID NO: 635220 - RNA, 20 nt, Human
uacacacuuccacugaagca

SEQ ID NO: 635221 - RNA, 22 nt, Human
uacacacuuccacugaagcaga

SEQ ID NO: 635222 - RNA, 22 nt, Human
uacccuacacacuuccacugaa

SEQ ID NO: 635223 - RNA, 19 nt, Human
uaucacgacccaagaaccg

SEQ ID NO: 635224 - RNA, 18 nt, Human
uaucacgacccaagaacu

SEQ ID NO: 635225 - RNA, 22 nt, Human
ucaacauccagacacaagcaaa

SEQ ID NO: 635226 - RNA, 18 nt, Human
ucaaguugggagguagcc

SEQ ID NO: 635227 - RNA, 18 nt, Human
ucaugcccaguucaguac

SEQ ID NO: 635228 - RNA, 21 nt, Human
uccagacacaagcaaacaaaa

SEQ ID NO: 635229 - RNA, 19 nt, Human
ucccccauccagaugcaau

SEQ ID NO: 635230 - RNA, 22 nt, Human
ugaaacaucacaaaagcagucu

SEQ ID NO: 635231 - RNA, 21 nt, Human
ugaagcagaaauacaaaagcc

SEQ ID NO: 635232 - RNA, 22 nt, Human
ugaagcagaaauacaaaagcca

SEQ ID NO: 635233 - RNA, 23 nt, Human
ugaagcggcauuguaacacuuuc

SEQ ID NO: 635234 - RNA, 24 nt, Human
ugagcugcccuucugugcugcguu

SEQ ID NO: 635235 - RNA, 20 nt, Human
ugaucacaacagccauuuuu

SEQ ID NO: 635236 - RNA, 19 nt, Human
ugaugcugaaaguuaaacu

SEQ ID NO: 635237 - RNA, 20 nt, Human
ugcugcguucagccugacca

SEQ ID NO: 635238 - RNA, 19 nt, Human
ugcugggcuggcuccccag

SEQ ID NO: 635239 - RNA, 19 nt, Human
uggacauucacuaaagcca

SEQ ID NO: 635240 - RNA, 22 nt, Human
uggcuacguuugagguuuugca

SEQ ID NO: 635241 - RNA, 21 nt, Human
ugggguggcaaucugccaagg

SEQ ID NO: 635242 - RNA, 18 nt, Human
ugggguggggugcaggau

SEQ ID NO: 635243 - RNA, 26 nt, Human
ugggguggggugcaggauacgugcgg

SEQ ID NO: 635244 - RNA, 22 nt, Human
uguaauuaaaagaacuguacaa

SEQ ID NO: 635245 - RNA, 19 nt, Human
uguacaaauaccuaccacg

SEQ ID NO: 635246 - RNA, 19 nt, Human
uguaguagaaccacugucu

SEQ ID NO: 635247 - RNA, 20 nt, Human
uguccagcucucucccccaa

SEQ ID NO: 635248 - RNA, 18 nt, Human
uguguuuggagaacuguc

SEQ ID NO: 635249 - RNA, 24 nt, Human
uuaaauuuuguacccuacacacuu

SEQ ID NO: 635250 - RNA, 22 nt, Human
uuaauauuuuaauguuucaugc

SEQ ID NO: 635251 - RNA, 18 nt, Human
uuacauaaagugaaaaag

SEQ ID NO: 635252 - RNA, 24 nt, Human
uuaguuagucaguuggguauuagu

SEQ ID NO: 635253 - RNA, 23 nt, Human
uucuguguuuggagaacugucua

SEQ ID NO: 635254 - RNA, 18 nt, Human
uugaaugcugucaugacu

SEQ ID NO: 635255 - RNA, 22 nt, Human
uugcugggcuggcuccccaguu

SEQ ID NO: 635256 - RNA, 20 nt, Human
uuggaacuacuguguagccc

SEQ ID NO: 635257 - RNA, 18 nt, Human
uuuacaauacucacagag

SEQ ID NO: 635258 - RNA, 23 nt, Human
uuuauaacauuuuuaaacucuga

SEQ ID NO: 635259 - RNA, 21 nt, Human
uuugcagacuugaagcggcau

SEQ ID NO: 635260 - RNA, 19 nt, Human
aaaaggcaaacauaauuga

SEQ ID NO: 635261 - RNA, 19 nt, Human
aaaauaccuucucccaauu

SEQ ID NO: 635262 - RNA, 23 nt, Human
accaccgagagaggagggcaaca

SEQ ID NO: 635263 - RNA, 21 nt, Human
acgugcgcugggcggacagac

SEQ ID NO: 635264 - RNA, 21 nt, Human
agagcgcuagaaaugccacac

SEQ ID NO: 635265 - RNA, 24 nt, Human
aggcacgguggcucacgccuguaa

SEQ ID NO: 635266 - RNA, 22 nt, Human
aggcgguggaggcugccgcgcc

SEQ ID NO: 635267 - RNA, 19 nt, Human
agggcaacagcaggcggug

SEQ ID NO: 635268 - RNA, 24 nt, Human
caagcaaugcuuuggauuuucuuu

SEQ ID NO: 635269 - RNA, 21 nt, Human
ccgccgcagccgccucggccu

SEQ ID NO: 635270 - RNA, 23 nt, Human
ccgccucggccugacagucgccc

SEQ ID NO: 635271 - RNA, 18 nt, Human
ccugagauuccuucgcac

SEQ ID NO: 635272 - RNA, 26 nt, Human
ccugagauuccuucgcacuuccacuc

SEQ ID NO: 635273 - RNA, 23 nt, Human
ccuguaaucauuaaaaaaugacu

SEQ ID NO: 635274 - RNA, 22 nt, Human
cgcugggcggacagaccaccga

SEQ ID NO: 635275 - RNA, 23 nt, Human
cucuuugaguuuccagugauuaa

SEQ ID NO: 635276 - RNA, 18 nt, Human
gaaguuucuucacugcug

SEQ ID NO: 635277 - RNA, 19 nt, Human
gcgcuagaaaugccacaca

SEQ ID NO: 635278 - RNA, 20 nt, Human
gcugcucagcugggccggcu

SEQ ID NO: 635279 - RNA, 18 nt, Human
gcuuuggauuuucuuucu

SEQ ID NO: 635280 - RNA, 22 nt, Human
ggcaacagcaggcgguggaggc

SEQ ID NO: 635281 - RNA, 20 nt, Human
ggggaagaacugguuucuuu

SEQ ID NO: 635282 - RNA, 19 nt, Human
gguggcucacgccuguaau

SEQ ID NO: 635283 - RNA, 20 nt, Human
uaaaagaacauccaagcaaa

SEQ ID NO: 635284 - RNA, 21 nt, Human
uagaaaugccacacagaucuc

SEQ ID NO: 635285 - RNA, 23 nt, Human
uaggggagaacugaggucgcuug

SEQ ID NO: 635286 - RNA, 19 nt, Human
ucgccgccgcagccgccuc

SEQ ID NO: 635287 - RNA, 24 nt, Human
ucuggccaggcacgguggcucacg

SEQ ID NO: 635288 - RNA, 24 nt, Human
ugaauacuuugggggaagaacugg

SEQ ID NO: 635289 - RNA, 23 nt, Human
ugcucagcugggccggcugacgg

SEQ ID NO: 635290 - RNA, 18 nt, Human
uggcucacgccuguaauc

SEQ ID NO: 635291 - RNA, 19 nt, Human
uggcucacgccuguaauca

SEQ ID NO: 635292 - RNA, 21 nt, Human
ugggggaagaacugguuucuu

SEQ ID NO: 635293 - RNA, 22 nt, Human
uuacagcaauaacucaucaaag

SEQ ID NO: 635294 - RNA, 22 nt, Human
uuuaaaaauaccuucucccaau

SEQ ID NO: 635295 - RNA, 23 nt, Human
uuuaaaaauaccuucucccaauu

SEQ ID NO: 635296 - RNA, 22 nt, Human
uuugggggaagaacugguuucu

SEQ ID NO: 635297 - RNA, 20 nt, Human
ccugcaagacuucaggcucu

SEQ ID NO: 635298 - RNA, 19 nt, Human
ucccugggggcagacgauu

SEQ ID NO: 635299 - RNA, 21 nt, Human
aagcccaggcggccccggcga

SEQ ID NO: 635300 - RNA, 24 nt, Human
aaugcuccugauaaccuugagggc

SEQ ID NO: 635301 - RNA, 18 nt, Human
accuugagggcugaaaag

SEQ ID NO: 635302 - RNA, 19 nt, Human
agaccugaaagcccaggcg

SEQ ID NO: 635303 - RNA, 26 nt, Human
agccucggaagaccugaaagcccagg

SEQ ID NO: 635304 - RNA, 23 nt, Human
ccacuacacuuagguguuacagg

SEQ ID NO: 635305 - RNA, 23 nt, Human
ccucggaagaccugaaagcccag

SEQ ID NO: 635306 - RNA, 18 nt, Human
ccugaaagcccaggcggc

SEQ ID NO: 635307 - RNA, 19 nt, Human
ccugauaaccuugagggcu

SEQ ID NO: 635308 - RNA, 19 nt, Human
cgaaggcacuagagagaag

SEQ ID NO: 635309 - RNA, 19 nt, Human
cgaaggcacuagagagaag

SEQ ID NO: 635310 - RNA, 22 nt, Human
cuccugauaaccuugagggcug

SEQ ID NO: 635311 - RNA, 21 nt, Human
ggcacgaaggcacuagagaga

SEQ ID NO: 635312 - RNA, 21 nt, Human
uagcagugauacaaaugcucc

SEQ ID NO: 635313 - RNA, 18 nt, Human
ugaaaagcuaucccuuaa

SEQ ID NO: 635314 - RNA, 24 nt, Human
ugaaaagcuaucccuuaaugcuac

SEQ ID NO: 635315 - RNA, 19 nt, Human
uuugacaagugauacuacu

SEQ ID NO: 635316 - RNA, 23 nt, Human
uuuuuuuuuuuuuuuuugacaag

SEQ ID NO: 635317 - RNA, 20 nt, Human
uuuuuuuuuuuuuuuuuugg

SEQ ID NO: 635318 - RNA, 25 nt, Human
aaaaaaacacaaaauuauagccgca

SEQ ID NO: 635319 - RNA, 24 nt, Human
aaaacacaaccauuauauacacug

SEQ ID NO: 635320 - RNA, 26 nt, Human
aaacaacaagaccaauuuuuuuguac

SEQ ID NO: 635321 - RNA, 18 nt, Human
aaacaccauagggcauga

SEQ ID NO: 635322 - RNA, 18 nt, Human
aacacuauccuagcugca

SEQ ID NO: 635323 - RNA, 19 nt, Human
aacuauuuagagcuucuuc

SEQ ID NO: 635324 - RNA, 22 nt, Human
aagaauguuauuaucuaacuau

SEQ ID NO: 635325 - RNA, 21 nt, Human
aagcacucaucuaaagguaaa

SEQ ID NO: 635326 - RNA, 19 nt, Human
acaaacaucaaucucacag

SEQ ID NO: 635327 - RNA, 24 nt, Human
acauucauauauuauacaggaaac

SEQ ID NO: 635328 - RNA, 21 nt, Human
agucuucauccuuugaggaug

SEQ ID NO: 635329 - RNA, 19 nt, Human
caacuggauuuuaaucgug

SEQ ID NO: 635330 - RNA, 23 nt, Human
caauuaaaaaaaaaaacacaaaa

SEQ ID NO: 635331 - RNA, 21 nt, Human
cacaggaucaagcauacgagg

SEQ ID NO: 635332 - RNA, 25 nt, Human
caccuccagccacaaacaucaaucu

SEQ ID NO: 635333 - RNA, 22 nt, Human
caggauaaaguagacaagaaug

SEQ ID NO: 635334 - RNA, 19 nt, Human
caggaucaagcauacgagg

SEQ ID NO: 635335 - RNA, 24 nt, Human
cauagccccaugaaaacacaacca

SEQ ID NO: 635336 - RNA, 23 nt, Human
ccaaagcacucaucuaaagguaa

SEQ ID NO: 635337 - RNA, 23 nt, Human
ccgcaacacuauccuagcugcau

SEQ ID NO: 635338 - RNA, 22 nt, Human
ccugcagcaucugcagugaacu

SEQ ID NO: 635339 - RNA, 23 nt, Human
cugcagugaacucuucugaaugu

SEQ ID NO: 635340 - RNA, 19 nt, Human
gcagcaucugcagugaacu

SEQ ID NO: 635341 - RNA, 23 nt, Human
gcagugaacucuucugaaugucc

SEQ ID NO: 635342 - RNA, 24 nt, Human
gugagucuucauccuuugaggaug

SEQ ID NO: 635343 - RNA, 20 nt, Human
uaagguggggugccugacuu

SEQ ID NO: 635344 - RNA, 23 nt, Human
uaggaaaacaggcaguuauucac

SEQ ID NO: 635345 - RNA, 18 nt, Human
uauguugccagugcucaa

SEQ ID NO: 635346 - RNA, 19 nt, Human
ucugcagugaacucuucuc

SEQ ID NO: 635347 - RNA, 27 nt, Human
ugaaaacacaaccauuauauacacugu

SEQ ID NO: 635348 - RNA, 22 nt, Human
ugggauaccacccggguucaaa

SEQ ID NO: 635349 - RNA, 21 nt, Human
aaacacaacuucacaauuccu

SEQ ID NO: 635350 - RNA, 22 nt, Human
aaaccaaaacucccccagggaa

SEQ ID NO: 635351 - RNA, 19 nt, Human
accauguccggccaaaaug

SEQ ID NO: 635352 - RNA, 18 nt, Human
acucauuccccugucccc

SEQ ID NO: 635353 - RNA, 23 nt, Human
agggaaacguucugauguuccag

SEQ ID NO: 635354 - RNA, 23 nt, Human
agucuucuucugcuguaucccau

SEQ ID NO: 635355 - RNA, 19 nt, Human
aucugagcauugucugcau

SEQ ID NO: 635356 - RNA, 25 nt, Human
caaaacucccccagggaaaaugcua

SEQ ID NO: 635357 - RNA, 26 nt, Human
caaaauaaaaacacaacuucacaauu

SEQ ID NO: 635358 - RNA, 23 nt, Human
caagaauuucuuuucuucagcuc

SEQ ID NO: 635359 - RNA, 18 nt, Human
caaguccauuagccaaag

SEQ ID NO: 635360 - RNA, 18 nt, Human
cacugcuaugacuggagc

SEQ ID NO: 635361 - RNA, 23 nt, Human
cauccuguuugaggcuaguuuua

SEQ ID NO: 635362 - RNA, 19 nt, Human
caucugagucugaucguuc

SEQ ID NO: 635363 - RNA, 20 nt, Human
cauugggcacugagcuucug

SEQ ID NO: 635364 - RNA, 21 nt, Human
ccauguccggccaaaauggca

SEQ ID NO: 635365 - RNA, 18 nt, Human
cccauugggcacugagcu

SEQ ID NO: 635366 - RNA, 20 nt, Human
cggccaaaauggcacuaccc

SEQ ID NO: 635367 - RNA, 18 nt, Human
cuaugugcacauuugucc

SEQ ID NO: 635368 - RNA, 18 nt, Human
gcugaauaaaugaaugaa

SEQ ID NO: 635369 - RNA, 24 nt, Human
guuccaagaauuucuuuucuucag

SEQ ID NO: 635370 - RNA, 21 nt, Human
uaaaaccaaaacucccccagg

SEQ ID NO: 635371 - RNA, 27 nt, Human
uagugaaccaucuaauuaaaaccaaaa

SEQ ID NO: 635372 - RNA, 19 nt, Human
ucaaugagguaaugugugc

SEQ ID NO: 635373 - RNA, 23 nt, Human
ucacuggguuaccccaaccaugu

SEQ ID NO: 635374 - RNA, 25 nt, Human
uccaagaauuucuuuucuucagcuc

SEQ ID NO: 635375 - RNA, 23 nt, Human
uccaagagucaacacacguugga

SEQ ID NO: 635376 - RNA, 19 nt, Human
uccgagucaaaacaguggc

SEQ ID NO: 635377 - RNA, 20 nt, Human
uccgcaauaaaagaaguuua

SEQ ID NO: 635378 - RNA, 27 nt, Human
ucuucagcuccuguuuuuggggccgcc

SEQ ID NO: 635379 - RNA, 20 nt, Human
ucuucuucugcuguauccca

SEQ ID NO: 635380 - RNA, 21 nt, Human
ugaaacaaaauaaaaacacaa

SEQ ID NO: 635381 - RNA, 19 nt, Human
ugcugaauaaaugaaugaa

SEQ ID NO: 635382 - RNA, 20 nt, Human
ugcuuucguucuucuacuaa

SEQ ID NO: 635383 - RNA, 20 nt, Human
ugucauuauucacaucugag

SEQ ID NO: 635384 - RNA, 24 nt, Human
ugugcaucagugaaauaaacagaa

SEQ ID NO: 635385 - RNA, 18 nt, Human
uguuccagaauaauguuc

SEQ ID NO: 635386 - RNA, 22 nt, Human
uguuguuuuuuuuuauuuuuuu

SEQ ID NO: 635387 - RNA, 21 nt, Human
uucacaauuccuuacuggguu

SEQ ID NO: 635388 - RNA, 24 nt, Human
uuccaagaauuucuuuucuucagc

SEQ ID NO: 635389 - RNA, 23 nt, Human
uuguuguuuuuuuuuauuuuuuu

SEQ ID NO: 635390 - RNA, 18 nt, Human
uuugcacagcuuuuauua

SEQ ID NO: 635391 - RNA, 22 nt, Human
aaaaaaacaacaaaaaacuuag

SEQ ID NO: 635392 - RNA, 23 nt, Human
aaaaagccagggccuaauaagua

SEQ ID NO: 635393 - RNA, 20 nt, Human
aaacaauguggagccacuga

SEQ ID NO: 635394 - RNA, 21 nt, Human
aacccugucucuaccaaaaaa

SEQ ID NO: 635395 - RNA, 23 nt, Human
aacuccaaagaagaaagggcaac

SEQ ID NO: 635396 - RNA, 21 nt, Human
aagaaaaaauuccaaucaccc

SEQ ID NO: 635397 - RNA, 21 nt, Human
aagaaagaaaaaagaaaaaaa

SEQ ID NO: 635398 - RNA, 21 nt, Human
aauaaaaaauguucaaggcca

SEQ ID NO: 635399 - RNA, 19 nt, Human
acauaaaaacuccaaagaa

SEQ ID NO: 635400 - RNA, 18 nt, Human
acccugucucuaccaaaa

SEQ ID NO: 635401 - RNA, 18 nt, Human
acuccaaagaagaaaggg

SEQ ID NO: 635402 - RNA, 22 nt, Human
agacauaucaaaacacaguaua

SEQ ID NO: 635403 - RNA, 24 nt, Human
agccaagcagccacaaacccggaa

SEQ ID NO: 635404 - RNA, 22 nt, Human
agccuguugggaggcugcagug

SEQ ID NO: 635405 - RNA, 21 nt, Human
aggcugcagugagaggaccau

SEQ ID NO: 635406 - RNA, 23 nt, Human
agguggaaggauugcuugaggcc

SEQ ID NO: 635407 - RNA, 24 nt, Human
aggugugguggcugaugccuguaa

SEQ ID NO: 635408 - RNA, 22 nt, Human
aguaguuaauaguauuuaucca

SEQ ID NO: 635409 - RNA, 21 nt, Human
agucugagguggaaggauugc

SEQ ID NO: 635410 - RNA, 18 nt, Human
agugcaaaggagaguucu

SEQ ID NO: 635411 - RNA, 20 nt, Human
agugcaaaggagaguucuua

SEQ ID NO: 635412 - RNA, 18 nt, Human
agugguauaaacuccaau

SEQ ID NO: 635413 - RNA, 23 nt, Human
caagaccccaucucaaaaaaaga

SEQ ID NO: 635414 - RNA, 24 nt, Human
caaggccaggugugguggcugaug

SEQ ID NO: 635415 - RNA, 21 nt, Human
cacguguggagccaagcagcc

SEQ ID NO: 635416 - RNA, 19 nt, Human
cacuccaagaccccaucuc

SEQ ID NO: 635417 - RNA, 21 nt, Human
cacuccaagaccccaucucaa

SEQ ID NO: 635418 - RNA, 18 nt, Human
cauaaaaacuccaaagaa

SEQ ID NO: 635419 - RNA, 26 nt, Human
cauacaaagaaaaaauuccaaucacc

SEQ ID NO: 635420 - RNA, 20 nt, Human
caucacaacacccuucugca

SEQ ID NO: 635421 - RNA, 28 nt, Human
cauguauauacauuaauacauacauaua

SEQ ID NO: 635422 - RNA, 22 nt, Human
ccagccugggcgaaagagcgca

SEQ ID NO: 635423 - RNA, 21 nt, Human
ccaucucaaaaaaagaaagaa

SEQ ID NO: 635424 - RNA, 23 nt, Human
cccacguguggagccaagcagcc

SEQ ID NO: 635425 - RNA, 26 nt, Human
cccauugacaauaccccaaucagcca

SEQ ID NO: 635426 - RNA, 20 nt, Human
ccuguaaucccaaugcuuug

SEQ ID NO: 635427 - RNA, 22 nt, Human
ccuucugcaguaaugaugagag

SEQ ID NO: 635428 - RNA, 23 nt, Human
ccuucugcaguaaugaugagagu

SEQ ID NO: 635429 - RNA, 19 nt, Human
cggcggcccacguguggag

SEQ ID NO: 635430 - RNA, 19 nt, Human
cucaaaaaaagaaagaaaa

SEQ ID NO: 635431 - RNA, 20 nt, Human
cucuaccaaaaaaaaaaaac

SEQ ID NO: 635432 - RNA, 19 nt, Human
cugaucaagugcaaaggag

SEQ ID NO: 635433 - RNA, 18 nt, Human
cuuggccucugcugccac

SEQ ID NO: 635434 - RNA, 24 nt, Human
gaccauucgagcccaggaauuuga

SEQ ID NO: 635435 - RNA, 24 nt, Human
gauugcuugaggccacaaauuuga

SEQ ID NO: 635436 - RNA, 24 nt, Human
gcacuccaagaccccaucucaaaa

SEQ ID NO: 635437 - RNA, 23 nt, Human
gccacaaauuugagaccagccug

SEQ ID NO: 635438 - RNA, 20 nt, Human
gccucugcugccacucuauc

SEQ ID NO: 635439 - RNA, 27 nt, Human
gccucugcugccacucuauccuucaau

SEQ ID NO: 635440 - RNA, 19 nt, Human
gccuguaaucccaaugcuu

SEQ ID NO: 635441 - RNA, 23 nt, Human
ggccaggugugguggcugaugcc

SEQ ID NO: 635442 - RNA, 23 nt, Human
gguggcugaugccuguaauccca

SEQ ID NO: 635443 - RNA, 20 nt, Human
gucucuaccaaaaaaaaaaa

SEQ ID NO: 635444 - RNA, 18 nt, Human
guggcugcugcacaccaa

SEQ ID NO: 635445 - RNA, 19 nt, Human
uaaaaacuccaaagaagaa

SEQ ID NO: 635446 - RNA, 21 nt, Human
uaacaaauaaaaaauguucaa

SEQ ID NO: 635447 - RNA, 24 nt, Human
uaacauguugaagauuucccaggg

SEQ ID NO: 635448 - RNA, 19 nt, Human
uaaguagauccaaauuugu

SEQ ID NO: 635449 - RNA, 19 nt, Human
uaccaaaaaaaaaaaacaa

SEQ ID NO: 635450 - RNA, 26 nt, Human
uaccaaaaaaaaaaaacaacaaaaaa

SEQ ID NO: 635451 - RNA, 26 nt, Human
uaccaaaaaaaaaaaacaacaaaaaa

SEQ ID NO: 635452 - RNA, 22 nt, Human
uagaaaacuugucucacaaggg

SEQ ID NO: 635453 - RNA, 18 nt, Human
uauuaaaaagccagggcc

SEQ ID NO: 635454 - RNA, 19 nt, Human
ucaaaaaaagaaagaaaaa

SEQ ID NO: 635455 - RNA, 21 nt, Human
ucaaugcagagucugcugcag

SEQ ID NO: 635456 - RNA, 28 nt, Human
uccaagaccccaucucaaaaaaagaaag

SEQ ID NO: 635457 - RNA, 28 nt, Human
ucuaccaaaaaaaaaaaacaacaaaaaa

SEQ ID NO: 635458 - RNA, 20 nt, Human
ucucuaccaaaaaaaaaaaa

SEQ ID NO: 635459 - RNA, 18 nt, Human
ucugaagugaauauaaga

SEQ ID NO: 635460 - RNA, 19 nt, Human
ugaaaggcacagaauucau

SEQ ID NO: 635461 - RNA, 19 nt, Human
ugacaauaccccaaucagc

SEQ ID NO: 635462 - RNA, 19 nt, Human
ugacaauaccccaaucagc

SEQ ID NO: 635463 - RNA, 23 nt, Human
ugagagugggcuaggaaugugau

SEQ ID NO: 635464 - RNA, 24 nt, Human
ugagguggaaggauugcuugaggc

SEQ ID NO: 635465 - RNA, 26 nt, Human
ugagguggaaggauugcuugaggcca

SEQ ID NO: 635466 - RNA, 23 nt, Human
ugccuguaaucccaaugcuuugg

SEQ ID NO: 635467 - RNA, 18 nt, Human
ugcugaucaagugcaaag

SEQ ID NO: 635468 - RNA, 20 nt, Human
uggaaguuuucacuuucuuc

SEQ ID NO: 635469 - RNA, 21 nt, Human
uggcugaugccuguaauccca

SEQ ID NO: 635470 - RNA, 22 nt, Human
uggcugaugccuguaaucccaa

SEQ ID NO: 635471 - RNA, 24 nt, Human
ugguggcugaugccuguaauccca

SEQ ID NO: 635472 - RNA, 19 nt, Human
uguugggaggcugcaguga

SEQ ID NO: 635473 - RNA, 26 nt, Human
uuaacaaauaaaaaauguucaaggcc

SEQ ID NO: 635474 - RNA, 24 nt, Human
uuaauacauacauauauguuccaa

SEQ ID NO: 635475 - RNA, 18 nt, Human
uuagcugagugugguggu

SEQ ID NO: 635476 - RNA, 18 nt, Human
uuccaaucacccauugac

SEQ ID NO: 635477 - RNA, 24 nt, Human
aaagccccucccucuaagccgccu

SEQ ID NO: 635478 - RNA, 25 nt, Human
aaagugaaaagauaaauauuacaaa

SEQ ID NO: 635479 - RNA, 22 nt, Human
aacacugaaaaugugaaaauaa

SEQ ID NO: 635480 - RNA, 22 nt, Human
aaccaauguuuaaaacaucaaa

SEQ ID NO: 635481 - RNA, 26 nt, Human
aagagacaaccuagcuuuuauaaugu

SEQ ID NO: 635482 - RNA, 22 nt, Human
aagucacuuuuguuugcuaauu

SEQ ID NO: 635483 - RNA, 28 nt, Human
acacugaaaaugugaaaauugagggguc

SEQ ID NO: 635484 - RNA, 21 nt, Human
agccagcauuucaacucuugg

SEQ ID NO: 635485 - RNA, 18 nt, Human
agcugcaaacuauguggg

SEQ ID NO: 635486 - RNA, 19 nt, Human
agcugcaugacccugagca

SEQ ID NO: 635487 - RNA, 20 nt, Human
aggcaucagcuucacugaca

SEQ ID NO: 635488 - RNA, 20 nt, Human
auaccaugaaaaauaccaug

SEQ ID NO: 635489 - RNA, 25 nt, Human
augcaaaauaccaugaaaaauacca

SEQ ID NO: 635490 - RNA, 23 nt, Human
cacugaaaaugugaaaauaaggu

SEQ ID NO: 635491 - RNA, 26 nt, Human
cagcuucacugacaaucugguaugau

SEQ ID NO: 635492 - RNA, 22 nt, Human
cagcuugaauuaguaacuaaua

SEQ ID NO: 635493 - RNA, 20 nt, Human
caucccaaaucuaugguaug

SEQ ID NO: 635494 - RNA, 20 nt, Human
ccccucccucuaagccgccu

SEQ ID NO: 635495 - RNA, 24 nt, Human
cccguaguagcagcaguagccuuu

SEQ ID NO: 635496 - RNA, 20 nt, Human
ccuagagcugagacaguaac

SEQ ID NO: 635497 - RNA, 18 nt, Human
cgaaaaagccccucccuc

SEQ ID NO: 635498 - RNA, 28 nt, Human
cguaguagcagcaguagccuuuaggguc

SEQ ID NO: 635499 - RNA, 20 nt, Human
cuucuaucaucacccagcug

SEQ ID NO: 635500 - RNA, 20 nt, Human
gacaguaacugucuagcccc

SEQ ID NO: 635501 - RNA, 21 nt, Human
gagaaaggagagcggaaaugu

SEQ ID NO: 635502 - RNA, 25 nt, Human
ggaagaacgcacauccuagagcuga

SEQ ID NO: 635503 - RNA, 20 nt, Human
ggcgaaaaagccccucccuc

SEQ ID NO: 635504 - RNA, 20 nt, Human
uaaaaugcccucuuauucuc

SEQ ID NO: 635505 - RNA, 22 nt, Human
uaaaugacuuaaaauacaagug

SEQ ID NO: 635506 - RNA, 20 nt, Human
uagcacuguaaagugacuua

SEQ ID NO: 635507 - RNA, 20 nt, Human
uagccccguaguagcagcag

SEQ ID NO: 635508 - RNA, 21 nt, Human
uagguauaggcgaaaaagccc

SEQ ID NO: 635509 - RNA, 24 nt, Human
uauacaagcuauagcuaacaugau

SEQ ID NO: 635510 - RNA, 22 nt, Human
uauaggcgaaaaagccccuccc

SEQ ID NO: 635511 - RNA, 20 nt, Human
uaucaaagugaaaagauaaa

SEQ ID NO: 635512 - RNA, 21 nt, Human
uauguguauauacaagcuaua

SEQ ID NO: 635513 - RNA, 23 nt, Human
uauuacaaacacugaaaauguga

SEQ ID NO: 635514 - RNA, 20 nt, Human
ucaggaguaaugacaucaag

SEQ ID NO: 635515 - RNA, 19 nt, Human
ucaucuaucaccugacuuc

SEQ ID NO: 635516 - RNA, 18 nt, Human
ucccucagaagagcuucu

SEQ ID NO: 635517 - RNA, 20 nt, Human
ucugagaaacugcuucuuca

SEQ ID NO: 635518 - RNA, 19 nt, Human
ugaaaggaucccuuuaaaa

SEQ ID NO: 635519 - RNA, 19 nt, Human
ugaagccagcauuucaacu

SEQ ID NO: 635520 - RNA, 25 nt, Human
ugcaaaauaccaugaaaaauaccau

SEQ ID NO: 635521 - RNA, 19 nt, Human
uggaagaacgcacauccua

SEQ ID NO: 635522 - RNA, 19 nt, Human
uggcaaauugaucucuaug

SEQ ID NO: 635523 - RNA, 21 nt, Human
uggcaaauugaucucuaugug

SEQ ID NO: 635524 - RNA, 18 nt, Human
ugugucugagaaacugcu

SEQ ID NO: 635525 - RNA, 22 nt, Human
uuacuugcaaaaugacuaucuc

SEQ ID NO: 635526 - RNA, 18 nt, Human
uucaagagacaaccuagc

SEQ ID NO: 635527 - RNA, 21 nt, Human
uucacugacaaucugguauga

SEQ ID NO: 635528 - RNA, 19 nt, Human
uuccaccaauucuugccag

SEQ ID NO: 635529 - RNA, 21 nt, Human
uugugucugagaaacugcuuc

SEQ ID NO: 635530 - RNA, 18 nt, Human
uuuacaguaugguagucu

SEQ ID NO: 635531 - RNA, 20 nt, Human
aaaacuguuuucugggucag

SEQ ID NO: 635532 - RNA, 19 nt, Human
aaaauuccuucacucugaa

SEQ ID NO: 635533 - RNA, 25 nt, Human
aaauagccuauaauucacacaaagc

SEQ ID NO: 635534 - RNA, 21 nt, Human
agaaaaagauggcaaccagaa

SEQ ID NO: 635535 - RNA, 21 nt, Human
agaaaugcagaggaguuccac

SEQ ID NO: 635536 - RNA, 22 nt, Human
aggaagaaaugcagaggaguuc

SEQ ID NO: 635537 - RNA, 20 nt, Human
aggaguuccacagaaaaaga

SEQ ID NO: 635538 - RNA, 23 nt, Human
auucacacaaagccuaggcugga

SEQ ID NO: 635539 - RNA, 20 nt, Human
ccacagaaaaagauggcaac

SEQ ID NO: 635540 - RNA, 21 nt, Human
ccacagaaaaagauggcaacc

SEQ ID NO: 635541 - RNA, 18 nt, Human
cucaggauagagggcaaa

SEQ ID NO: 635542 - RNA, 24 nt, Human
cuuguucacauucaguaucaaaac

SEQ ID NO: 635543 - RNA, 20 nt, Human
cuuguucuuccuuuauaaga

SEQ ID NO: 635544 - RNA, 25 nt, Human
uaaaaaaggcuucauguaaaccuug

SEQ ID NO: 635545 - RNA, 26 nt, Human
uaggcuggaaaauacaagugcuuuga

SEQ ID NO: 635546 - RNA, 18 nt, Human
uaucuuguucuuccuuua

SEQ ID NO: 635547 - RNA, 22 nt, Human
ucaguuuaaacaaaaaugacaa

SEQ ID NO: 635548 - RNA, 20 nt, Human
uccacagaaaaagauggcaa

SEQ ID NO: 635549 - RNA, 22 nt, Human
uccacagaaaaagauggcaacc

SEQ ID NO: 635550 - RNA, 18 nt, Human
ugacucauuuauuaaaaa

SEQ ID NO: 635551 - RNA, 24 nt, Human
ugcagaggaguuccacagaaaaag

SEQ ID NO: 635552 - RNA, 28 nt, Human
ugcaugagaagauguccauuaguuacuc

SEQ ID NO: 635553 - RNA, 21 nt, Human
ugggucaguuuccuuagguga

SEQ ID NO: 635554 - RNA, 22 nt, Human
uguuuucugggucaguuuccuu

SEQ ID NO: 635555 - RNA, 21 nt, Human
uuacucaggauagagggcaaa

SEQ ID NO: 635556 - RNA, 23 nt, Human
uucauguaaaccuugcaugagaa

SEQ ID NO: 635557 - RNA, 22 nt, Human
uuguucacauucaguaucaaaa

SEQ ID NO: 635558 - RNA, 19 nt, Human
uuugaaguaauuacuuagg

SEQ ID NO: 635559 - RNA, 20 nt, Human
cacagcgcaugcgcgcuucc

SEQ ID NO: 635560 - RNA, 18 nt, Human
caugcgcgcuuccagccg

SEQ ID NO: 635561 - RNA, 20 nt, Human
caugcgcgcuuccagccgcg

SEQ ID NO: 635562 - RNA, 18 nt, Human
cauuagccacagcgcaug

SEQ ID NO: 635563 - RNA, 22 nt, Human
cgcaugcgcgcuuccagccgcg

SEQ ID NO: 635564 - RNA, 24 nt, Human
cuugcucucagacagcauuucugu

SEQ ID NO: 635565 - RNA, 18 nt, Human
gcaugcgcgcuuccagcc

SEQ ID NO: 635566 - RNA, 18 nt, Human
gcgcuuccagccgcgcuc

SEQ ID NO: 635567 - RNA, 23 nt, Human
gucgaauugucgguggggaucag

SEQ ID NO: 635568 - RNA, 24 nt, Human
uacaauaguaaagcagcagaguac

SEQ ID NO: 635569 - RNA, 23 nt, Human
uccaauauauucuugcucucaga

SEQ ID NO: 635570 - RNA, 21 nt, Human
ucuugguauucuuuuuucagu

SEQ ID NO: 635571 - RNA, 24 nt, Human
uguguggggucgaauugucggugg

SEQ ID NO: 635572 - RNA, 23 nt, Human
uguucuuuaaucuugcugcuuag

SEQ ID NO: 635573 - RNA, 20 nt, Human
uuagauccuccuuguguggg

SEQ ID NO: 635574 - RNA, 23 nt, Human
uugucgguggggaucagcacaga

SEQ ID NO: 635575 - RNA, 23 nt, Human
uuuucaguucauccaauauauuc

SEQ ID NO: 635576 - RNA, 24 nt, Human
aguccugaagugugacaacaugcu

SEQ ID NO: 635577 - RNA, 22 nt, Human
cacaauccuacuuagcaauacc

SEQ ID NO: 635578 - RNA, 20 nt, Human
cugcgcaugcacguuuuaua

SEQ ID NO: 635579 - RNA, 28 nt, Human
uaaaaaaggcuauauagcauccuggugg

SEQ ID NO: 635580 - RNA, 18 nt, Human
uauaaaaaaggcuauaua

SEQ ID NO: 635581 - RNA, 20 nt, Human
ucaaucggauuggcacaguc

SEQ ID NO: 635582 - RNA, 21 nt, Human
ugaaacaccgcugccgggggc

SEQ ID NO: 635583 - RNA, 22 nt, Human
aaaaauacaaacguguacacua

SEQ ID NO: 635584 - RNA, 24 nt, Human
aaaagcugaucaaacauguccaca

SEQ ID NO: 635585 - RNA, 20 nt, Human
aacuuggccacauucucccc

SEQ ID NO: 635586 - RNA, 25 nt, Human
aaggcagaaguccagcagcaggaga

SEQ ID NO: 635587 - RNA, 24 nt, Human
agccagcgaacagcagauacaacc

SEQ ID NO: 635588 - RNA, 24 nt, Human
agcggcuauauuaacaaaaauaca

SEQ ID NO: 635589 - RNA, 21 nt, Human
aggaauguucauuuuucucug

SEQ ID NO: 635590 - RNA, 18 nt, Human
aggcagaaguccagcagc

SEQ ID NO: 635591 - RNA, 18 nt, Human
aggcagaaguccagcagc

SEQ ID NO: 635592 - RNA, 22 nt, Human
aggcagaaguccagcagcagga

SEQ ID NO: 635593 - RNA, 20 nt, Human
agugguuccugcuugcaaaa

SEQ ID NO: 635594 - RNA, 19 nt, Human
auccugaugacaagagcca

SEQ ID NO: 635595 - RNA, 20 nt, Human
caaaaauacaaacguguaca

SEQ ID NO: 635596 - RNA, 25 nt, Human
caaaguacucaggcauuaaacacgg

SEQ ID NO: 635597 - RNA, 19 nt, Human
caaauucaccaaaucugua

SEQ ID NO: 635598 - RNA, 23 nt, Human
caagagccauggaccucaccaug

SEQ ID NO: 635599 - RNA, 19 nt, Human
caaugcauuaaauguguau

SEQ ID NO: 635600 - RNA, 19 nt, Human
cacaaacccgcccgccgac

SEQ ID NO: 635601 - RNA, 22 nt, Human
cacaaacccgcccgccgacccg

SEQ ID NO: 635602 - RNA, 24 nt, Human
caccauaguaacacaauaaaucca

SEQ ID NO: 635603 - RNA, 22 nt, Human
cagauacaaccgccaucccucg

SEQ ID NO: 635604 - RNA, 24 nt, Human
cagcacaucaggccaacaaaggca

SEQ ID NO: 635605 - RNA, 19 nt, Human
cagcagcaggagagggcaa

SEQ ID NO: 635606 - RNA, 18 nt, Human
cagcaucgugaggucagc

SEQ ID NO: 635607 - RNA, 24 nt, Human
caucaggccaacaaaggcagaagu

SEQ ID NO: 635608 - RNA, 26 nt, Human
cauuccuaagaugcguuauuucugac

SEQ ID NO: 635609 - RNA, 21 nt, Human
ccaaccccaacuguguuagaa

SEQ ID NO: 635610 - RNA, 21 nt, Human
ccagaauaaaaucugcagcug

SEQ ID NO: 635611 - RNA, 18 nt, Human
ccagccagcgaacagcag

SEQ ID NO: 635612 - RNA, 21 nt, Human
cccgccgacccgucagcggcu

SEQ ID NO: 635613 - RNA, 27 nt, Human
cuaccagaauaaaaucugcagcugcgu

SEQ ID NO: 635614 - RNA, 21 nt, Human
cuauauuaacaaaaauacaaa

SEQ ID NO: 635615 - RNA, 24 nt, Human
cuauugacccaaccccaacugugu

SEQ ID NO: 635616 - RNA, 19 nt, Human
cucacaguaacaaauucac

SEQ ID NO: 635617 - RNA, 20 nt, Human
cugaaaaccgcaauguugcu

SEQ ID NO: 635618 - RNA, 21 nt, Human
cuggccaagccugcugcggag

SEQ ID NO: 635619 - RNA, 18 nt, Human
cuucaccauuccucggau

SEQ ID NO: 635620 - RNA, 22 nt, Human
gauuccaaagaugaugcuggca

SEQ ID NO: 635621 - RNA, 19 nt, Human
gcacuaccagaauaaaauc

SEQ ID NO: 635622 - RNA, 28 nt, Human
gccacauucuccccggauuucuuugccc

SEQ ID NO: 635623 - RNA, 31 nt, Human
uaacaaaaauacaaacguguacacuaauuag

SEQ ID NO: 635624 - RNA, 21 nt, Human
uaagaugaaggaccagcauca

SEQ ID NO: 635625 - RNA, 20 nt, Human
uaauaaacuuggccacauuc

SEQ ID NO: 635626 - RNA, 21 nt, Human
uaccucacaguaacaaauuca

SEQ ID NO: 635627 - RNA, 20 nt, Human
uacuacuucuucaaucccug

SEQ ID NO: 635628 - RNA, 22 nt, Human
uacuacuucuucaaucccuguu

SEQ ID NO: 635629 - RNA, 21 nt, Human
uagaugucucaucauuuuccu

SEQ ID NO: 635630 - RNA, 23 nt, Human
uaucccaaguuuucuuuuuugga

SEQ ID NO: 635631 - RNA, 25 nt, Human
uauggcagcggcuauauuaacaaaa

SEQ ID NO: 635632 - RNA, 26 nt, Human
ucacacaaacccgcccgccgacccgu

SEQ ID NO: 635633 - RNA, 24 nt, Human
ucucaggugugauuccagcagcua

SEQ ID NO: 635634 - RNA, 20 nt, Human
ucugaaaauauuugggguau

SEQ ID NO: 635635 - RNA, 19 nt, Human
ucugagguucaaaguacuc

SEQ ID NO: 635636 - RNA, 21 nt, Human
ucuguaucuuuucuucuuugu

SEQ ID NO: 635637 - RNA, 20 nt, Human
ugacaagagccauggaccuc

SEQ ID NO: 635638 - RNA, 22 nt, Human
ugacaagagccauggaccucac

SEQ ID NO: 635639 - RNA, 22 nt, Human
ugacuguaccucacaguaacug

SEQ ID NO: 635640 - RNA, 22 nt, Human
ugagaccauugcugcuccugaa

SEQ ID NO: 635641 - RNA, 23 nt, Human
ugaggucagcucaccgacacucc

SEQ ID NO: 635642 - RNA, 21 nt, Human
ugagguucaaaguacucaggc

SEQ ID NO: 635643 - RNA, 21 nt, Human
ugaugacaagagccauggacc

SEQ ID NO: 635644 - RNA, 21 nt, Human
uggcauuagagaaaagauucu

SEQ ID NO: 635645 - RNA, 30 nt, Human
uggccacauucuccccggauuucuuugccc

SEQ ID NO: 635646 - RNA, 19 nt, Human
ugggaaacuauugacccaa

SEQ ID NO: 635647 - RNA, 23 nt, Human
ugucucaucauuuuccucuucca

SEQ ID NO: 635648 - RNA, 21 nt, Human
ugugguaucccuguuuacugu

SEQ ID NO: 635649 - RNA, 21 nt, Human
uguguuagaacugcaugaaca

SEQ ID NO: 635650 - RNA, 20 nt, Human
uucaaucaaugcauuaaaug

SEQ ID NO: 635651 - RNA, 23 nt, Human
uucguuccuucagggcggcuuca

SEQ ID NO: 635652 - RNA, 18 nt, Human
uucugacuguccaguuug

SEQ ID NO: 635653 - RNA, 22 nt, Human
uuuaucccaaguuuucuuuuuu

SEQ ID NO: 635654 - RNA, 28 nt, Human
uuuuaccaguugugcagccuaaacugcc

SEQ ID NO: 635655 - RNA, 21 nt, Human
uuuuuuuuuuuuuuuuuggcu

SEQ ID NO: 635656 - RNA, 22 nt, Human
uuuuuuuuuuuuuuuuuuuggc

SEQ ID NO: 635657 - RNA, 28 nt, Human
uuuuuuuuuuuuuuuuuuuuuuuggggg

SEQ ID NO: 635658 - RNA, 18 nt, Human
aaaacaaacaaugaaugu

SEQ ID NO: 635659 - RNA, 22 nt, Human
aaacaaugucgaucaaggucuu

SEQ ID NO: 635660 - RNA, 19 nt, Human
cgucggacuuugacagcug

SEQ ID NO: 635661 - RNA, 25 nt, Human
ugacaguaccacgucggacuuugac

SEQ ID NO: 635662 - RNA, 19 nt, Human
uggccaaaacaaacaauga

SEQ ID NO: 635663 - RNA, 20 nt, Human
uuuuuuuuuuuuaaagaaau

SEQ ID NO: 635664 - RNA, 19 nt, Human
uuuuuuuuuuuuuuuuuaa

SEQ ID NO: 635665 - RNA, 24 nt, Human
aaauaacgaaacccgaggccaaaa

SEQ ID NO: 635666 - RNA, 19 nt, Human
aaccacagaagccuccuca

SEQ ID NO: 635667 - RNA, 19 nt, Human
aaccuggacugaacugaua

SEQ ID NO: 635668 - RNA, 21 nt, Human
aaccuggacugaacugauaca

SEQ ID NO: 635669 - RNA, 19 nt, Human
acgaaacccgaggccaaaa

SEQ ID NO: 635670 - RNA, 25 nt, Human
acgaaacccgaggccaaaacauacu

SEQ ID NO: 635671 - RNA, 18 nt, Human
auaacgaaacccgaggcc

SEQ ID NO: 635672 - RNA, 22 nt, Human
caccucagaccuggacaaccac

SEQ ID NO: 635673 - RNA, 19 nt, Human
cauuaccaccauccgaguc

SEQ ID NO: 635674 - RNA, 24 nt, Human
cauuucaaugggccaugcugcuuc

SEQ ID NO: 635675 - RNA, 19 nt, Human
ccaaaacauacugaaacuu

SEQ ID NO: 635676 - RNA, 19 nt, Human
ccacucgcacguggauccc

SEQ ID NO: 635677 - RNA, 21 nt, Human
ccacucgcacguggaucccau

SEQ ID NO: 635678 - RNA, 21 nt, Human
ccauuaccaccauccgagucc

SEQ ID NO: 635679 - RNA, 22 nt, Human
cccauuaccaccauccgagucc

SEQ ID NO: 635680 - RNA, 24 nt, Human
cccgaggccaaaacauacugaaac

SEQ ID NO: 635681 - RNA, 24 nt, Human
ccucccauuaccaccauccgaguc

SEQ ID NO: 635682 - RNA, 23 nt, Human
cgcacguggaucccauguguccc

SEQ ID NO: 635683 - RNA, 20 nt, Human
cguggaucccauguguccca

SEQ ID NO: 635684 - RNA, 23 nt, Human
cuaccucccauuaccaccauccg

SEQ ID NO: 635685 - RNA, 25 nt, Human
cucagaccuggacaaccacagaagc

SEQ ID NO: 635686 - RNA, 18 nt, Human
cugaaacuucaauuccag

SEQ ID NO: 635687 - RNA, 24 nt, Human
cugaggucagaauuuggaauucau

SEQ ID NO: 635688 - RNA, 24 nt, Human
cugaucaccaggggacaaaaggga

SEQ ID NO: 635689 - RNA, 20 nt, Human
gccagagcaauuuggaaaaa

SEQ ID NO: 635690 - RNA, 19 nt, Human
ggacaaaagggaugacaac

SEQ ID NO: 635691 - RNA, 24 nt, Human
uaaauaagguagccugcagcucac

SEQ ID NO: 635692 - RNA, 22 nt, Human
uaacgaaacccgaggccaaaac

SEQ ID NO: 635693 - RNA, 19 nt, Human
uagagccugcuuucagggc

SEQ ID NO: 635694 - RNA, 26 nt, Human
ucaauuccagaacugaggucagaauu

SEQ ID NO: 635695 - RNA, 23 nt, Human
ucaccaggcugacuaaauucccg

SEQ ID NO: 635696 - RNA, 18 nt, Human
ucaccaggggacaaaagg

SEQ ID NO: 635697 - RNA, 20 nt, Human
ucagagucggcucaccaggc

SEQ ID NO: 635698 - RNA, 22 nt, Human
uccaucuuggcccuccuucagu

SEQ ID NO: 635699 - RNA, 20 nt, Human
uccucacuggucucucuguu

SEQ ID NO: 635700 - RNA, 24 nt, Human
uggaaaaagcacugugucuuucac

SEQ ID NO: 635701 - RNA, 24 nt, Human
uguuuccaucuuggcccuccuuca

SEQ ID NO: 635702 - RNA, 22 nt, Human
uuaccaccauccgaguccaagu

SEQ ID NO: 635703 - RNA, 24 nt, Human
uuauuuaucauaucaaucuaccuc

SEQ ID NO: 635704 - RNA, 22 nt, Human
uucauaauugcacagaugagcc

SEQ ID NO: 635705 - RNA, 18 nt, Human
uugcacagaugagccuca

SEQ ID NO: 635706 - RNA, 18 nt, Human
uuuuuuuuuuuuuuuuug

SEQ ID NO: 635707 - RNA, 24 nt, Human
uuuuuuuuuuuuuuuuuuuuuggg

SEQ ID NO: 635708 - RNA, 23 nt, Human
aaaaacuuuugucacaaacagaa

SEQ ID NO: 635709 - RNA, 19 nt, Human
aaacgcaaagaagcuguag

SEQ ID NO: 635710 - RNA, 24 nt, Human
aaagugcugggauuacaggcguga

SEQ ID NO: 635711 - RNA, 19 nt, Human
aaguaccugggagcuuacc

SEQ ID NO: 635712 - RNA, 19 nt, Human
aagugcugggauuacaggc

SEQ ID NO: 635713 - RNA, 19 nt, Human
aagugcugggauuacaggc

SEQ ID NO: 635714 - RNA, 26 nt, Human
aagugcugggauuacaggcgugagcc

SEQ ID NO: 635715 - RNA, 20 nt, Human
acaaacagaaaugcccugca

SEQ ID NO: 635716 - RNA, 18 nt, Human
acucugucacccaggcug

SEQ ID NO: 635717 - RNA, 25 nt, Human
acucugucacccaggcugaagugca

SEQ ID NO: 635718 - RNA, 20 nt, Human
acugcaagcuccgccuccug

SEQ ID NO: 635719 - RNA, 23 nt, Human
agaagcuaugcacaucaagaccu

SEQ ID NO: 635720 - RNA, 19 nt, Human
agagaugggguuucaccgu

SEQ ID NO: 635721 - RNA, 20 nt, Human
agagggcaggacgggggcuc

SEQ ID NO: 635722 - RNA, 18 nt, Human
agcuccgccuccuggguu

SEQ ID NO: 635723 - RNA, 24 nt, Human
agcuccgccuccuggguucacacu

SEQ ID NO: 635724 - RNA, 23 nt, Human
agugcaguggcacuaucuuggcu

SEQ ID NO: 635725 - RNA, 24 nt, Human
agugcaguggcacuaucuuggcuc

SEQ ID NO: 635726 - RNA, 18 nt, Human
augggguuucaccguguu

SEQ ID NO: 635727 - RNA, 20 nt, Human
auuaaagcccucaaacucuc

SEQ ID NO: 635728 - RNA, 21 nt, Human
auucuccugccucagccuccc

SEQ ID NO: 635729 - RNA, 19 nt, Human
caaaacagguaugcucaaa

SEQ ID NO: 635730 - RNA, 21 nt, Human
caaaacagguaugcucaaaua

SEQ ID NO: 635731 - RNA, 23 nt, Human
caaaauagcacaguucaaacccc

SEQ ID NO: 635732 - RNA, 21 nt, Human
caaagugcugggauuacaggc

SEQ ID NO: 635733 - RNA, 24 nt, Human
caaagugcugggauuacaggcgug

SEQ ID NO: 635734 - RNA, 20 nt, Human
cacaacuccuaaaguaacau

SEQ ID NO: 635735 - RNA, 22 nt, Human
cacacuauucuccugccucagc

SEQ ID NO: 635736 - RNA, 24 nt, Human
cacaggcgccugccaccacgccca

SEQ ID NO: 635737 - RNA, 18 nt, Human
caccaagacgccacggcg

SEQ ID NO: 635738 - RNA, 23 nt, Human
cacccaggcugaagugcaguggc

SEQ ID NO: 635739 - RNA, 18 nt, Human
caccguguuagccaggau

SEQ ID NO: 635740 - RNA, 24 nt, Human
caccguguuagccaggauggucuc

SEQ ID NO: 635741 - RNA, 23 nt, Human
cacucugucacccaggcugaagu

SEQ ID NO: 635742 - RNA, 24 nt, Human
cacucugucacccaggcugaagug

SEQ ID NO: 635743 - RNA, 19 nt, Human
cagauuucugaagcaugau

SEQ ID NO: 635744 - RNA, 22 nt, Human
cagcagcagcagcuagggucag

SEQ ID NO: 635745 - RNA, 21 nt, Human
caggcgccugccaccacgccc

SEQ ID NO: 635746 - RNA, 20 nt, Human
ccaccacgcccagcuaauuu

SEQ ID NO: 635747 - RNA, 20 nt, Human
ccccagagggcaggacgggg

SEQ ID NO: 635748 - RNA, 22 nt, Human
cccuuaagcacuacaccuaacu

SEQ ID NO: 635749 - RNA, 21 nt, Human
ccucgccugcucgccugcaac

SEQ ID NO: 635750 - RNA, 23 nt, Human
ccugccucagccucccgaguagc

SEQ ID NO: 635751 - RNA, 19 nt, Human
cgccuccuggguucacacu

SEQ ID NO: 635752 - RNA, 24 nt, Human
cucagccucccgaguagcugggac

SEQ ID NO: 635753 - RNA, 24 nt, Human
cucccgaguagcugggaccacagg

SEQ ID NO: 635754 - RNA, 24 nt, Human
cuccugaccucgugauccgcccgc

SEQ ID NO: 635755 - RNA, 21 nt, Human
cuccuggguucacacuauucu

SEQ ID NO: 635756 - RNA, 23 nt, Human
cugccucagccucccgaguagcu

SEQ ID NO: 635757 - RNA, 21 nt, Human
cuggcauaacaugaaaauaaa

SEQ ID NO: 635758 - RNA, 22 nt, Human
gaccucgugauccgcccgccuc

SEQ ID NO: 635759 - RNA, 22 nt, Human
gaccucgugauccgcccgccuc

SEQ ID NO: 635760 - RNA, 24 nt, Human
gaccucgugauccgcccgccucgg

SEQ ID NO: 635761 - RNA, 22 nt, Human
gagaacaccaagacgccacggc

SEQ ID NO: 635762 - RNA, 24 nt, Human
gagaugggguuucaccguguuagc

SEQ ID NO: 635763 - RNA, 26 nt, Human
gaguagcugggaccacaggcgccugc

SEQ ID NO: 635764 - RNA, 26 nt, Human
gagucaacauuugaacaaaauagcac

SEQ ID NO: 635765 - RNA, 18 nt, Human
gauuacaggcgugagcca

SEQ ID NO: 635766 - RNA, 22 nt, Human
gauuacaggcgugagccaccgc

SEQ ID NO: 635767 - RNA, 22 nt, Human
gauuacaggcgugagccaccgc

SEQ ID NO: 635768 - RNA, 19 nt, Human
gcagcagcagcagcuaggg

SEQ ID NO: 635769 - RNA, 23 nt, Human
gcccagcuaauuuuuuguauuuu

SEQ ID NO: 635770 - RNA, 25 nt, Human
gccuccuggguucacacuauucucc

SEQ ID NO: 635771 - RNA, 20 nt, Human
gcugaagugcaguggcacua

SEQ ID NO: 635772 - RNA, 21 nt, Human
ggagccccagagggcaggacg

SEQ ID NO: 635773 - RNA, 18 nt, Human
ggccuguggagccccaga

SEQ ID NO: 635774 - RNA, 21 nt, Human
ggccuugccaggggccugugg

SEQ ID NO: 635775 - RNA, 18 nt, Human
gggguuucaccguguuag

SEQ ID NO: 635776 - RNA, 22 nt, Human
gggguuucaccguguuagccag

SEQ ID NO: 635777 - RNA, 20 nt, Human
ggucucgaucuccugaccuc

SEQ ID NO: 635778 - RNA, 22 nt, Human
gugauccgcccgccucggucuc

SEQ ID NO: 635779 - RNA, 24 nt, Human
gugcaguggcacuaucuuggcuca

SEQ ID NO: 635780 - RNA, 19 nt, Human
guucaaaggcgggcugugc

SEQ ID NO: 635781 - RNA, 18 nt, Human
uaaagcccucaaacucuc

SEQ ID NO: 635782 - RNA, 19 nt, Human
uaaagugagcagcagcagc

SEQ ID NO: 635783 - RNA, 24 nt, Human
uaacaugaaaauaaauuaacccuu

SEQ ID NO: 635784 - RNA, 20 nt, Human
uaacccuuaagcacuacacc

SEQ ID NO: 635785 - RNA, 22 nt, Human
uaacucuaaaaagaaaaugccu

SEQ ID NO: 635786 - RNA, 24 nt, Human
uaauuuuuuguauuuuuaguagag

SEQ ID NO: 635787 - RNA, 25 nt, Human
uaauuuuuuguauuuuuaguagaga

SEQ ID NO: 635788 - RNA, 24 nt, Human
uacaggcgugagccaccgcgccca

SEQ ID NO: 635789 - RNA, 24 nt, Human
uaccaaagccauacaagaauaaag

SEQ ID NO: 635790 - RNA, 22 nt, Human
uaccaacccacaacuccuaaag

SEQ ID NO: 635791 - RNA, 19 nt, Human
uagcacaguucaaacccuu

SEQ ID NO: 635792 - RNA, 21 nt, Human
uaguagagaugggguuucacc

SEQ ID NO: 635793 - RNA, 24 nt, Human
uaguagagaugggguuucaccgug

SEQ ID NO: 635794 - RNA, 26 nt, Human
uaguagagaugggguuucaccguguu

SEQ ID NO: 635795 - RNA, 22 nt, Human
uaugacaucacuacuuucaaag

SEQ ID NO: 635796 - RNA, 19 nt, Human
uauucuccugccucagccu

SEQ ID NO: 635797 - RNA, 20 nt, Human
ucaaaggcgggcugugcccc

SEQ ID NO: 635798 - RNA, 22 nt, Human
ucaaagugcugggauuacaggc

SEQ ID NO: 635799 - RNA, 24 nt, Human
ucaaagugcugggauuacaggcgu

SEQ ID NO: 635800 - RNA, 19 nt, Human
ucacaccauagccucggga

SEQ ID NO: 635801 - RNA, 21 nt, Human
ucacacuauucuccugccuca

SEQ ID NO: 635802 - RNA, 24 nt, Human
ucaccguguuagccaggauggucu

SEQ ID NO: 635803 - RNA, 18 nt, Human
ucacugcaagcuccgccu

SEQ ID NO: 635804 - RNA, 23 nt, Human
ucacugcaagcuccgccuccugg

SEQ ID NO: 635805 - RNA, 24 nt, Human
ucacugcaagcuccgccuccuggg

SEQ ID NO: 635806 - RNA, 23 nt, Human
ucagccucccgaguagcugggac

SEQ ID NO: 635807 - RNA, 24 nt, Human
ucccgaguagcugggaccacaggc

SEQ ID NO: 635808 - RNA, 29 nt, Human
uccgcccgccucggucucucaaagugcug

SEQ ID NO: 635809 - RNA, 24 nt, Human
uccuggguucacacuauucuccug

SEQ ID NO: 635810 - RNA, 24 nt, Human
ucucaaagugcugggauuacaggc

SEQ ID NO: 635811 - RNA, 19 nt, Human
ucucacucugucacccagg

SEQ ID NO: 635812 - RNA, 24 nt, Human
ucucacucugucacccaggcugaa

SEQ ID NO: 635813 - RNA, 26 nt, Human
ucucacucugucacccaggcugaagu

SEQ ID NO: 635814 - RNA, 27 nt, Human
ucucacucugucacccaggcugaagug

SEQ ID NO: 635815 - RNA, 24 nt, Human
ucuccugccucagccucccgagua

SEQ ID NO: 635816 - RNA, 24 nt, Human
ucugucacccaggcugaagugcag

SEQ ID NO: 635817 - RNA, 21 nt, Human
ugaaaauaaauuaacccuuaa

SEQ ID NO: 635818 - RNA, 24 nt, Human
ugaagugcaguggcacuaucuugg

SEQ ID NO: 635819 - RNA, 18 nt, Human
ugagacagagucucacuc

SEQ ID NO: 635820 - RNA, 22 nt, Human
ugagacagagucucacucuguc

SEQ ID NO: 635821 - RNA, 23 nt, Human
ugagaguugcacaagaacagucu

SEQ ID NO: 635822 - RNA, 22 nt, Human
ugcaguggcacuaucuuggcuc

SEQ ID NO: 635823 - RNA, 24 nt, Human
ugccucagccucccgaguagcugg

SEQ ID NO: 635824 - RNA, 24 nt, Human
ugcugggauuacaggcgugagcca

SEQ ID NO: 635825 - RNA, 20 nt, Human
uggaaugagccagugccccc

SEQ ID NO: 635826 - RNA, 21 nt, Human
uggagaacaccaagacgccac

SEQ ID NO: 635827 - RNA, 18 nt, Human
uggcucacugcaagcucc

SEQ ID NO: 635828 - RNA, 21 nt, Human
ugggaccacaggcgccugcca

SEQ ID NO: 635829 - RNA, 24 nt, Human
ugggaccacaggcgccugccacca

SEQ ID NO: 635830 - RNA, 18 nt, Human
ugggauuacaggcgugag

SEQ ID NO: 635831 - RNA, 19 nt, Human
ugggauuacaggcgugagc

SEQ ID NO: 635832 - RNA, 21 nt, Human
ugggauuacaggcgugagcca

SEQ ID NO: 635833 - RNA, 22 nt, Human
ugggauuacaggcgugagccac

SEQ ID NO: 635834 - RNA, 23 nt, Human
ugggauuacaggcgugagccacc

SEQ ID NO: 635835 - RNA, 24 nt, Human
ugggauuacaggcgugagccaccg

SEQ ID NO: 635836 - RNA, 24 nt, Human
ugggguuucaccguguuagccagg

SEQ ID NO: 635837 - RNA, 21 nt, Human
uguauuuuuaguagagauggg

SEQ ID NO: 635838 - RNA, 20 nt, Human
uuaaaggauuaaagcccuca

SEQ ID NO: 635839 - RNA, 18 nt, Human
uuaguagagaugggguuu

SEQ ID NO: 635840 - RNA, 22 nt, Human
uuaguagagaugggguuucacc

SEQ ID NO: 635841 - RNA, 24 nt, Human
uuaguagagaugggguuucaccgu

SEQ ID NO: 635842 - RNA, 22 nt, Human
uucaaaacagguaugcucaaau

SEQ ID NO: 635843 - RNA, 19 nt, Human
uucaaacccuucucugugg

SEQ ID NO: 635844 - RNA, 21 nt, Human
uuggaaugagccagugccccc

SEQ ID NO: 635845 - RNA, 23 nt, Human
uuguauuuuuaguagagaugggg

SEQ ID NO: 635846 - RNA, 19 nt, Human
uuucaccguguuagccagg

SEQ ID NO: 635847 - RNA, 23 nt, Human
uuugucacaaacagaaaugcccu

SEQ ID NO: 635848 - RNA, 24 nt, Human
uuuuuaguagagaugggguuucac

SEQ ID NO: 635849 - RNA, 21 nt, Human
uuuuuguauuuuuaguagaga

SEQ ID NO: 635850 - RNA, 24 nt, Human
uuuuuuguauuuuuaguagagaug

SEQ ID NO: 635851 - RNA, 20 nt, Human
uuuuuuuuuuugagacagag

SEQ ID NO: 635852 - RNA, 26 nt, Human
uuuuuuuuuuuugagacagagucuca

SEQ ID NO: 635853 - RNA, 18 nt, Human
uuuuuuuuuuuuuuuuug

SEQ ID NO: 635854 - RNA, 22 nt, Human
aaaaaccucuauagauuagucc

SEQ ID NO: 635855 - RNA, 22 nt, Human
aaaaaggucccaaagcaaaaca

SEQ ID NO: 635856 - RNA, 24 nt, Human
aaacaucucccaaaguagagaaaa

SEQ ID NO: 635857 - RNA, 18 nt, Human
aaacuguucaucucuuug

SEQ ID NO: 635858 - RNA, 21 nt, Human
aaauauguaaaugacuaauua

SEQ ID NO: 635859 - RNA, 21 nt, Human
aaaugucaagccuaaucccac

SEQ ID NO: 635860 - RNA, 19 nt, Human
aacaucacagaauauaaac

SEQ ID NO: 635861 - RNA, 21 nt, Human
aagagaaggcaaaaauuccaa

SEQ ID NO: 635862 - RNA, 26 nt, Human
aaggucccaaagcaaaacacacacaa

SEQ ID NO: 635863 - RNA, 20 nt, Human
aaugauaccuauguucuucc

SEQ ID NO: 635864 - RNA, 23 nt, Human
acacacacaaaaagucacuaaca

SEQ ID NO: 635865 - RNA, 19 nt, Human
acacaccagaaacauaaaa

SEQ ID NO: 635866 - RNA, 22 nt, Human
acacaccagaaacauaaaaaua

SEQ ID NO: 635867 - RNA, 20 nt, Human
acacugagcuuuacucuuuu

SEQ ID NO: 635868 - RNA, 20 nt, Human
accaaaauaaaaagguccca

SEQ ID NO: 635869 - RNA, 19 nt, Human
accauaaaguucacacacc

SEQ ID NO: 635870 - RNA, 23 nt, Human
acuaugcuauauaaaaccacauu

SEQ ID NO: 635871 - RNA, 21 nt, Human
agaaaauuauuuuuugcccac

SEQ ID NO: 635872 - RNA, 23 nt, Human
agaaagaaaaugaaaauucuagg

SEQ ID NO: 635873 - RNA, 24 nt, Human
agacacugggguccgccgccugcc

SEQ ID NO: 635874 - RNA, 19 nt, Human
agaugugucaauaaacugu

SEQ ID NO: 635875 - RNA, 23 nt, Human
agcaccaaauucugcaaaagcaa

SEQ ID NO: 635876 - RNA, 21 nt, Human
aguaguuccugaauuuuggac

SEQ ID NO: 635877 - RNA, 19 nt, Human
auaaggcaaacaguacaaa

SEQ ID NO: 635878 - RNA, 22 nt, Human
auaccacuuuucaaaaagcaga

SEQ ID NO: 635879 - RNA, 20 nt, Human
augaagcaaugaugaaaaua

SEQ ID NO: 635880 - RNA, 25 nt, Human
caaacacuaagaauagguauuuaau

SEQ ID NO: 635881 - RNA, 19 nt, Human
caaccuacaaugacugaug

SEQ ID NO: 635882 - RNA, 22 nt, Human
caagacaaaaauauguaaauga

SEQ ID NO: 635883 - RNA, 21 nt, Human
caccaaauucugcaaaagcaa

SEQ ID NO: 635884 - RNA, 19 nt, Human
cacggaaugaaacuaacau

SEQ ID NO: 635885 - RNA, 23 nt, Human
cagaacuaagacaauggagaagg

SEQ ID NO: 635886 - RNA, 18 nt, Human
cagcauacgagcaaacaa

SEQ ID NO: 635887 - RNA, 29 nt, Human
caguugauauuagcaaaauacgaauaacc

SEQ ID NO: 635888 - RNA, 22 nt, Human
cauauuuguuucauuuccaaaa

SEQ ID NO: 635889 - RNA, 24 nt, Human
caucacagaauauaaacgaagauc

SEQ ID NO: 635890 - RNA, 20 nt, Human
cccaaagcaaaacacacaca

SEQ ID NO: 635891 - RNA, 30 nt, Human
cccaaagcaaaacacacacaaaaagucacc

SEQ ID NO: 635892 - RNA, 20 nt, Human
cccaaaguagagaaaaaaac

SEQ ID NO: 635893 - RNA, 22 nt, Human
ccuuccuucaaucccccagaua

SEQ ID NO: 635894 - RNA, 23 nt, Human
cgcccggaaagggaaacggagcc

SEQ ID NO: 635895 - RNA, 22 nt, Human
cgucaguguccagaccaugaau

SEQ ID NO: 635896 - RNA, 21 nt, Human
cucccaaaguagagaaaaaaa

SEQ ID NO: 635897 - RNA, 22 nt, Human
cucccaaaguagagaaaaaaac

SEQ ID NO: 635898 - RNA, 20 nt, Human
cugcaauuaaaagagaaggc

SEQ ID NO: 635899 - RNA, 20 nt, Human
cugggguccgccgccugccc

SEQ ID NO: 635900 - RNA, 22 nt, Human
cuuaaauauugucugagcacca

SEQ ID NO: 635901 - RNA, 19 nt, Human
cuuguccaaaauauaugag

SEQ ID NO: 635902 - RNA, 23 nt, Human
gaauauaaggcaaacaguacaaa

SEQ ID NO: 635903 - RNA, 20 nt, Human
gaauuagaaugauaccuaug

SEQ ID NO: 635904 - RNA, 21 nt, Human
gacuuuuuuuccccauuaucu

SEQ ID NO: 635905 - RNA, 19 nt, Human
gagaaaaaaacaaaauuuu

SEQ ID NO: 635906 - RNA, 21 nt, Human
gagacccuucccaaccuacaa

SEQ ID NO: 635907 - RNA, 19 nt, Human
gaucaugauuaaaugucua

SEQ ID NO: 635908 - RNA, 19 nt, Human
gaugacuaaaucccuaaac

SEQ ID NO: 635909 - RNA, 20 nt, Human
gcccggaaagggaaacggag

SEQ ID NO: 635910 - RNA, 21 nt, Human
gcugaaaccucuacucaguaa

SEQ ID NO: 635911 - RNA, 25 nt, Human
ggaaaauuacucaaugaauaaccac

SEQ ID NO: 635912 - RNA, 28 nt, Human
ggaaagaauuccuguauuaguuuauaga

SEQ ID NO: 635913 - RNA, 22 nt, Human
guacugcuaauucaccugcuca

SEQ ID NO: 635914 - RNA, 25 nt, Human
gucacuaacaauauccacuaaacaa

SEQ ID NO: 635915 - RNA, 25 nt, Human
uaaaaauuauucacuuacaaaccac

SEQ ID NO: 635916 - RNA, 20 nt, Human
uaaaauagaaauaaaauacu

SEQ ID NO: 635917 - RNA, 21 nt, Human
uaaacgaagaucauauuuugu

SEQ ID NO: 635918 - RNA, 21 nt, Human
uaaagacacugggguccgccg

SEQ ID NO: 635919 - RNA, 21 nt, Human
uaaaguucacacaccagaaac

SEQ ID NO: 635920 - RNA, 23 nt, Human
uaaauccuguuuauuuugcgaaa

SEQ ID NO: 635921 - RNA, 18 nt, Human
uaacagagacccuuccca

SEQ ID NO: 635922 - RNA, 20 nt, Human
uaaccucauaaucuugauac

SEQ ID NO: 635923 - RNA, 23 nt, Human
uaagagaucugucuuuauaugga

SEQ ID NO: 635924 - RNA, 20 nt, Human
uaaugcauaaggaguguugg

SEQ ID NO: 635925 - RNA, 20 nt, Human
uacaagaagaaauaaaaauu

SEQ ID NO: 635926 - RNA, 24 nt, Human
uacaagaagaaauaaaaauuauuc

SEQ ID NO: 635927 - RNA, 18 nt, Human
uaccaggaagcaacuaug

SEQ ID NO: 635928 - RNA, 19 nt, Human
uaccauaaaguucacacac

SEQ ID NO: 635929 - RNA, 24 nt, Human
uaccauggaauuagaaugauaccu

SEQ ID NO: 635930 - RNA, 19 nt, Human
uaccuguuaguauuccaag

SEQ ID NO: 635931 - RNA, 21 nt, Human
uacuaggcuauucuggcuaaa

SEQ ID NO: 635932 - RNA, 21 nt, Human
uacucaucuaagcuuuucacu

SEQ ID NO: 635933 - RNA, 18 nt, Human
uagaaaauuauuuuuugc

SEQ ID NO: 635934 - RNA, 21 nt, Human
uagcagagaacugaggcauuc

SEQ ID NO: 635935 - RNA, 19 nt, Human
uagcccgggagagcugcag

SEQ ID NO: 635936 - RNA, 21 nt, Human
uaggauuaacagagacccuuc

SEQ ID NO: 635937 - RNA, 20 nt, Human
uaugaaaaaauucagugaca

SEQ ID NO: 635938 - RNA, 18 nt, Human
uauguuacuuuuugcaac

SEQ ID NO: 635939 - RNA, 24 nt, Human
ucacuaacaauauccacuaaacaa

SEQ ID NO: 635940 - RNA, 28 nt, Human
ucagugacauuuucuauaacuauuuccc

SEQ ID NO: 635941 - RNA, 21 nt, Human
uccaaaauauaugagggaaac

SEQ ID NO: 635942 - RNA, 21 nt, Human
uccaaggaaugggcugaaacc

SEQ ID NO: 635943 - RNA, 20 nt, Human
uccacuaaacaaaaacagua

SEQ ID NO: 635944 - RNA, 22 nt, Human
ucgcugaaauguccuuaaauau

SEQ ID NO: 635945 - RNA, 22 nt, Human
ucuaaaucagauaccaggaagc

SEQ ID NO: 635946 - RNA, 23 nt, Human
ugaaaaggguagcagagaacuga

SEQ ID NO: 635947 - RNA, 21 nt, Human
ugaaaauauguuacuuuuugc

SEQ ID NO: 635948 - RNA, 20 nt, Human
ugaaaauucuaggucuaaua

SEQ ID NO: 635949 - RNA, 18 nt, Human
ugaaauguccuuaaauau

SEQ ID NO: 635950 - RNA, 20 nt, Human
ugaaauguccuuaaauauug

SEQ ID NO: 635951 - RNA, 23 nt, Human
ugaaauguccuuaaauauugucc

SEQ ID NO: 635952 - RNA, 18 nt, Human
ugaaggaccccauuauuc

SEQ ID NO: 635953 - RNA, 20 nt, Human
ugaagggaacagcauacgag

SEQ ID NO: 635954 - RNA, 23 nt, Human
ugaauuuuggacugcauauuugu

SEQ ID NO: 635955 - RNA, 22 nt, Human
ugacuaaaucccuaaacaacgu

SEQ ID NO: 635956 - RNA, 23 nt, Human
ugacuaaaucccuaaacaacguc

SEQ ID NO: 635957 - RNA, 23 nt, Human
ugagaaagaaaaugaaaauucua

SEQ ID NO: 635958 - RNA, 23 nt, Human
ugcauucacacugagcuuuacuc

SEQ ID NO: 635959 - RNA, 19 nt, Human
ugccauaggcagaauauca

SEQ ID NO: 635960 - RNA, 19 nt, Human
ugcuaaguuuucacuuccu

SEQ ID NO: 635961 - RNA, 19 nt, Human
uggacugcauauuuguuuc

SEQ ID NO: 635962 - RNA, 21 nt, Human
ugugucaauaaacugugugug

SEQ ID NO: 635963 - RNA, 19 nt, Human
uuaacagcauuuaucucug

SEQ ID NO: 635964 - RNA, 19 nt, Human
uucacacugagcuuuacuc

SEQ ID NO: 635965 - RNA, 19 nt, Human
uucacuuccuuacuaggcu

SEQ ID NO: 635966 - RNA, 25 nt, Human
uucaucucuuugcuccaaacacuuc

SEQ ID NO: 635967 - RNA, 19 nt, Human
uucuagaguagaaguuacc

SEQ ID NO: 635968 - RNA, 26 nt, Human
uugcaacaccaaaauaaaaagguccc

SEQ ID NO: 635969 - RNA, 23 nt, Human
uugcauucacacugagcuuuacu

SEQ ID NO: 635970 - RNA, 21 nt, Human
uugccagauauaauguggugc

SEQ ID NO: 635971 - RNA, 23 nt, Human
uuucacuuccuuacuaggcugag

SEQ ID NO: 635972 - RNA, 21 nt, Human
uuuccaaaaaaaagaaauaug

SEQ ID NO: 635973 - RNA, 18 nt, Human
uuugcuccaaacacuucc

SEQ ID NO: 635974 - RNA, 20 nt, Human
uuuuaugacaaugcaacuga

SEQ ID NO: 635975 - RNA, 23 nt, Human
aaaaaccaccuguaccccaaaac

SEQ ID NO: 635976 - RNA, 19 nt, Human
aaaaagccuagccuugguc

SEQ ID NO: 635977 - RNA, 22 nt, Human
aaaaucucagaacucaccacua

SEQ ID NO: 635978 - RNA, 20 nt, Human
aaagaacuuauccguguaac

SEQ ID NO: 635979 - RNA, 18 nt, Human
aaccaccuguaccccaaa

SEQ ID NO: 635980 - RNA, 22 nt, Human
aacugguccccccugcauccug

SEQ ID NO: 635981 - RNA, 18 nt, Human
aagaagaauaauauaaug

SEQ ID NO: 635982 - RNA, 20 nt, Human
aagaagaauaauauaaugga

SEQ ID NO: 635983 - RNA, 18 nt, Human
aagcagcauuugaagcug

SEQ ID NO: 635984 - RNA, 19 nt, Human
aaguagcugggacuacagg

SEQ ID NO: 635985 - RNA, 20 nt, Human
aaguagcugggacuacaggu

SEQ ID NO: 635986 - RNA, 26 nt, Human
aaguagcugggacuacaggugcgcac

SEQ ID NO: 635987 - RNA, 22 nt, Human
accaugcuggcccggcuggucu

SEQ ID NO: 635988 - RNA, 19 nt, Human
acgggguuucaccaugcug

SEQ ID NO: 635989 - RNA, 20 nt, Human
acgggguuucaccaugcugg

SEQ ID NO: 635990 - RNA, 24 nt, Human
acuggguacaguguacacugcucc

SEQ ID NO: 635991 - RNA, 21 nt, Human
agaaggcagcagaaagaugag

SEQ ID NO: 635992 - RNA, 18 nt, Human
agacacuagaggcggaac

SEQ ID NO: 635993 - RNA, 24 nt, Human
agccagcccugaucugcugacaca

SEQ ID NO: 635994 - RNA, 18 nt, Human
agccuugguccugcccag

SEQ ID NO: 635995 - RNA, 19 nt, Human
aggcuggagugcaguggca

SEQ ID NO: 635996 - RNA, 22 nt, Human
agggagaggcagcaugaccuga

SEQ ID NO: 635997 - RNA, 21 nt, Human
agggauuagaggcuacauacu

SEQ ID NO: 635998 - RNA, 22 nt, Human
aguaugaggacagccauugcca

SEQ ID NO: 635999 - RNA, 25 nt, Human
agugcaguggcaugcgaacucggcu

SEQ ID NO: 636000 - RNA, 26 nt, Human
agugcaguggcaugcgaacucggcuc

SEQ ID NO: 636001 - RNA, 24 nt, Human
auuuuuguauuuuuaguagagacg

SEQ ID NO: 636002 - RNA, 22 nt, Human
caagcaauucuccugccuuagc

SEQ ID NO: 636003 - RNA, 27 nt, Human
caagcaauucuccugccuuagccuccc

SEQ ID NO: 636004 - RNA, 24 nt, Human
cacaccaccaugccuggcuaauuu

SEQ ID NO: 636005 - RNA, 24 nt, Human
caccaugccuggcuaauuuuugua

SEQ ID NO: 636006 - RNA, 18 nt, Human
caccaugcuggcccggcu

SEQ ID NO: 636007 - RNA, 24 nt, Human
caccaugcuggcccggcuggucuu

SEQ ID NO: 636008 - RNA, 19 nt, Human
caccuagauugaauagcua

SEQ ID NO: 636009 - RNA, 24 nt, Human
caguugacagguguaccaaaaucu

SEQ ID NO: 636010 - RNA, 19 nt, Human
ccagguucaagcaauucuc

SEQ ID NO: 636011 - RNA, 22 nt, Human
cccaaguagcugggacuacagg

SEQ ID NO: 636012 - RNA, 23 nt, Human
cccaaguagcugggacuacaggu

SEQ ID NO: 636013 - RNA, 23 nt, Human
cccaggcuggagugcaguggcau

SEQ ID NO: 636014 - RNA, 20 nt, Human
ccccuucugagcagagaaau

SEQ ID NO: 636015 - RNA, 24 nt, Human
ccuaccagguucaagcaauucucc

SEQ ID NO: 636016 - RNA, 22 nt, Human
ccuagccuugguccugcccagc

SEQ ID NO: 636017 - RNA, 23 nt, Human
ccuccaauagccagcccugaucu

SEQ ID NO: 636018 - RNA, 20 nt, Human
ccugcauccuggccggaagc

SEQ ID NO: 636019 - RNA, 23 nt, Human
ccugccuuagccucccaaguagc

SEQ ID NO: 636020 - RNA, 21 nt, Human
ccuucugagcagagaaaugga

SEQ ID NO: 636021 - RNA, 23 nt, Human
cgcacaccaccaugccuggcuaa

SEQ ID NO: 636022 - RNA, 24 nt, Human
cgcucugucgcccaggcuggagug

SEQ ID NO: 636023 - RNA, 19 nt, Human
cgggguuucaccaugcugg

SEQ ID NO: 636024 - RNA, 24 nt, Human
cuagaggcggaacugguccccccu

SEQ ID NO: 636025 - RNA, 19 nt, Human
cucacugcaaccucugccu

SEQ ID NO: 636026 - RNA, 22 nt, Human
cucacugcaaccucugccuacc

SEQ ID NO: 636027 - RNA, 24 nt, Human
cucgcucugucgcccaggcuggag

SEQ ID NO: 636028 - RNA, 19 nt, Human
cugcaaccucugccuacca

SEQ ID NO: 636029 - RNA, 24 nt, Human
cugcaaccucugccuaccagguuc

SEQ ID NO: 636030 - RNA, 23 nt, Human
cugccuuagccucccaaguagcu

SEQ ID NO: 636031 - RNA, 20 nt, Human
cugcucaguugacaggugua

SEQ ID NO: 636032 - RNA, 24 nt, Human
cuuagccucccaaguagcugggac

SEQ ID NO: 636033 - RNA, 22 nt, Human
cuuccaaaagccuccaauagcc

SEQ ID NO: 636034 - RNA, 19 nt, Human
cuuucuggggagauucugg

SEQ ID NO: 636035 - RNA, 24 nt, Human
gagacgggguuucaccaugcuggc

SEQ ID NO: 636036 - RNA, 23 nt, Human
gcccaggcuggagugcaguggca

SEQ ID NO: 636037 - RNA, 21 nt, Human
gccccagacacuagaggcgga

SEQ ID NO: 636038 - RNA, 20 nt, Human
gcccuggagaggucaaauga

SEQ ID NO: 636039 - RNA, 25 nt, Human
gcucugucgcccaggcuggagugca

SEQ ID NO: 636040 - RNA, 19 nt, Human
gcuggagugcaguggcaug

SEQ ID NO: 636041 - RNA, 18 nt, Human
ggacagccauugccauug

SEQ ID NO: 636042 - RNA, 24 nt, Human
ggagaaggcagcagaaagaugaga

SEQ ID NO: 636043 - RNA, 24 nt, Human
ggcuggucuugaacuccugacuuu

SEQ ID NO: 636044 - RNA, 21 nt, Human
ggggacucacaggggagggug

SEQ ID NO: 636045 - RNA, 21 nt, Human
guaaccaaaaaccaccuguac

SEQ ID NO: 636046 - RNA, 24 nt, Human
uaaagaacuuauccguguaaccaa

SEQ ID NO: 636047 - RNA, 24 nt, Human
uaaccaaaaaccaccuguacccca

SEQ ID NO: 636048 - RNA, 21 nt, Human
uaagccccagacacuagaggg

SEQ ID NO: 636049 - RNA, 24 nt, Human
uaauuuuuguauuuuuaguagaga

SEQ ID NO: 636050 - RNA, 19 nt, Human
uacaggugcgcacaccacc

SEQ ID NO: 636051 - RNA, 24 nt, Human
uaccagguucaagcaauucuccug

SEQ ID NO: 636052 - RNA, 24 nt, Human
uaguagagacgggguuucaccaug

SEQ ID NO: 636053 - RNA, 26 nt, Human
uaguagagacgggguuucaccaugcu

SEQ ID NO: 636054 - RNA, 18 nt, Human
ucacugcaaccucugccu

SEQ ID NO: 636055 - RNA, 19 nt, Human
ucacugcaaccucugccua

SEQ ID NO: 636056 - RNA, 24 nt, Human
ucacugcaaccucugccuaccagg

SEQ ID NO: 636057 - RNA, 19 nt, Human
ucaguugacagguguacca

SEQ ID NO: 636058 - RNA, 24 nt, Human
ucaguugacagguguaccaaaauc

SEQ ID NO: 636059 - RNA, 20 nt, Human
uccaauagccagcccugauu

SEQ ID NO: 636060 - RNA, 25 nt, Human
uccaggugaguaugccauuuuggag

SEQ ID NO: 636061 - RNA, 23 nt, Human
ucccaaguagcugggacuacagg

SEQ ID NO: 636062 - RNA, 18 nt, Human
ucccaugagaucaggggc

SEQ ID NO: 636063 - RNA, 22 nt, Human
ucgcccaggcuggagugcagug

SEQ ID NO: 636064 - RNA, 24 nt, Human
ucgcucugucgcccaggcuggagu

SEQ ID NO: 636065 - RNA, 19 nt, Human
ucuaaucucagggaagugu

SEQ ID NO: 636066 - RNA, 20 nt, Human
ucucccaugagaucaggggc

SEQ ID NO: 636067 - RNA, 26 nt, Human
ucuccugccuuagccucccaaguagc

SEQ ID NO: 636068 - RNA, 19 nt, Human
ucucgcucugucgcccagg

SEQ ID NO: 636069 - RNA, 23 nt, Human
ucucgcucugucgcccaggcugg

SEQ ID NO: 636070 - RNA, 24 nt, Human
ucucgcucugucgcccaggcugga

SEQ ID NO: 636071 - RNA, 26 nt, Human
ucucgcucugucgcccaggcuggagu

SEQ ID NO: 636072 - RNA, 19 nt, Human
ucucucuuuuaagugggag

SEQ ID NO: 636073 - RNA, 24 nt, Human
ucugucgcccaggcuggagugcag

SEQ ID NO: 636074 - RNA, 20 nt, Human
ugaaauaaaaaagccuagcc

SEQ ID NO: 636075 - RNA, 20 nt, Human
ugaagaagaauaauauaaug

SEQ ID NO: 636076 - RNA, 22 nt, Human
ugagaaagaaucucccaugaga

SEQ ID NO: 636077 - RNA, 22 nt, Human
ugagacggagucucgcucuguc

SEQ ID NO: 636078 - RNA, 18 nt, Human
ugaggacagccauugcca

SEQ ID NO: 636079 - RNA, 20 nt, Human
ugaggacagccauugccauu

SEQ ID NO: 636080 - RNA, 24 nt, Human
ugaucugcugacacaguuccccuu

SEQ ID NO: 636081 - RNA, 25 nt, Human
ugcccagcgcagagagacaugaagg

SEQ ID NO: 636082 - RNA, 24 nt, Human
ugccuuagccucccaaguagcugg

SEQ ID NO: 636083 - RNA, 26 nt, Human
uggagugcaguggcaugcgaacucgg

SEQ ID NO: 636084 - RNA, 24 nt, Human
uggcccggcuggucuugaacuccu

SEQ ID NO: 636085 - RNA, 23 nt, Human
ugggacuacaggugcgcacacca

SEQ ID NO: 636086 - RNA, 26 nt, Human
ugggacuacaggugcgcacaccacca

SEQ ID NO: 636087 - RNA, 22 nt, Human
uggggacucacaggggagggug

SEQ ID NO: 636088 - RNA, 23 nt, Human
uguaaccaaaaaccaccuguacc

SEQ ID NO: 636089 - RNA, 21 nt, Human
uguauuuuuaguagagacggg

SEQ ID NO: 636090 - RNA, 18 nt, Human
uuaguagagacgggguuu

SEQ ID NO: 636091 - RNA, 22 nt, Human
uuaguagagacgggguuucacc

SEQ ID NO: 636092 - RNA, 24 nt, Human
uuaguagagacgggguuucaccau

SEQ ID NO: 636093 - RNA, 24 nt, Human
uucaagcaauucuccugccuuagc

SEQ ID NO: 636094 - RNA, 22 nt, Human
uucugagcagagaaauggagga

SEQ ID NO: 636095 - RNA, 18 nt, Human
uugcacccaguaggccug

SEQ ID NO: 636096 - RNA, 22 nt, Human
uuuacucuuccaaaagccucca

SEQ ID NO: 636097 - RNA, 23 nt, Human
uuuuguuuuuugagacggagucu

SEQ ID NO: 636098 - RNA, 24 nt, Human
uuuuuaguagagacgggguuucac

SEQ ID NO: 636099 - RNA, 20 nt, Human
uuuuuguauuuuuaguagag

SEQ ID NO: 636100 - RNA, 25 nt, Human
uuuuuguuuuuugagacggagucuc

SEQ ID NO: 636101 - RNA, 24 nt, Human
uuuuuuuuuuuuguuuuuguuuuu

SEQ ID NO: 636102 - RNA, 22 nt, Human
uuuuuuuuuuuuuuuuguuuuu

SEQ ID NO: 636103 - RNA, 23 nt, Human
aaagugcugggauuaugggugug

SEQ ID NO: 636104 - RNA, 24 nt, Human
aaagugcugggauuauggguguga

SEQ ID NO: 636105 - RNA, 22 nt, Human
aagaaaaaggaaguuauacuga

SEQ ID NO: 636106 - RNA, 18 nt, Human
aagugcugggauuauggg

SEQ ID NO: 636107 - RNA, 26 nt, Human
aagugcugggauuaugggugugagcc

SEQ ID NO: 636108 - RNA, 18 nt, Human
acgggguuucaccguguu

SEQ ID NO: 636109 - RNA, 19 nt, Human
acgggguuucaccguguua

SEQ ID NO: 636110 - RNA, 20 nt, Human
acgggguuucaccguguuag

SEQ ID NO: 636111 - RNA, 24 nt, Human
acgggguuucaccguguuagccag

SEQ ID NO: 636112 - RNA, 19 nt, Human
agagacgggguuucaccgu

SEQ ID NO: 636113 - RNA, 21 nt, Human
aguagagacgggguuucaccg

SEQ ID NO: 636114 - RNA, 24 nt, Human
caaagugcugggauuaugggugug

SEQ ID NO: 636115 - RNA, 18 nt, Human
caccguguuagccaggau

SEQ ID NO: 636116 - RNA, 24 nt, Human
caccguguuagccaggauggucuc

SEQ ID NO: 636117 - RNA, 24 nt, Human
caccucagccucccaaagugcugg

SEQ ID NO: 636118 - RNA, 21 nt, Human
cacugcauuaaccucaaaaaa

SEQ ID NO: 636119 - RNA, 22 nt, Human
caggauggucuccaucuccuga

SEQ ID NO: 636120 - RNA, 21 nt, Human
ccaaagugcugggauuauggg

SEQ ID NO: 636121 - RNA, 24 nt, Human
ccaaagugcugggauuaugggugu

SEQ ID NO: 636122 - RNA, 22 nt, Human
ccaucuccugagcucgugaucu

SEQ ID NO: 636123 - RNA, 19 nt, Human
cccccacaaaaaaagaaaa

SEQ ID NO: 636124 - RNA, 20 nt, Human
cccccacaaaaaaagaaaaa

SEQ ID NO: 636125 - RNA, 20 nt, Human
cccccacaaaaaaagaaaaa

SEQ ID NO: 636126 - RNA, 22 nt, Human
ccucaaaaaauggaaaaucucc

SEQ ID NO: 636127 - RNA, 20 nt, Human
cuccugagcucgugaucugc

SEQ ID NO: 636128 - RNA, 21 nt, Human
cugggauuaugggugugagcc

SEQ ID NO: 636129 - RNA, 24 nt, Human
gagacgggguuucaccguguuagc

SEQ ID NO: 636130 - RNA, 22 nt, Human
gagcucgugaucugcccaccuc

SEQ ID NO: 636131 - RNA, 18 nt, Human
gauuaugggugugagcca

SEQ ID NO: 636132 - RNA, 21 nt, Human
gauuaugggugugagccacug

SEQ ID NO: 636133 - RNA, 24 nt, Human
gauuaugggugugagccacugugc

SEQ ID NO: 636134 - RNA, 21 nt, Human
gcugggauuaugggugugagc

SEQ ID NO: 636135 - RNA, 24 nt, Human
gggagucagccucgaagacggccu

SEQ ID NO: 636136 - RNA, 23 nt, Human
gggguuucaccguguuagccagg

SEQ ID NO: 636137 - RNA, 20 nt, Human
gggugugagccacugugccc

SEQ ID NO: 636138 - RNA, 23 nt, Human
gggugugagccacugugcccggc

SEQ ID NO: 636139 - RNA, 22 nt, Human
ggguuucaccguguuagccagg

SEQ ID NO: 636140 - RNA, 23 nt, Human
guagagacgggguuucaccgugu

SEQ ID NO: 636141 - RNA, 20 nt, Human
gucuccucucauugucuucc

SEQ ID NO: 636142 - RNA, 24 nt, Human
gugaucugcccaccucagccuccc

SEQ ID NO: 636143 - RNA, 24 nt, Human
uagccaggauggucuccaucuccu

SEQ ID NO: 636144 - RNA, 21 nt, Human
uaguagagacgggguuucacc

SEQ ID NO: 636145 - RNA, 24 nt, Human
uaguagagacgggguuucaccgug

SEQ ID NO: 636146 - RNA, 26 nt, Human
uaguagagacgggguuucaccguguu

SEQ ID NO: 636147 - RNA, 25 nt, Human
uaguucuaaauugugucccccacaa

SEQ ID NO: 636148 - RNA, 22 nt, Human
uauacugaaguccuaacccuca

SEQ ID NO: 636149 - RNA, 23 nt, Human
uaugggugugagccacugugccc

SEQ ID NO: 636150 - RNA, 24 nt, Human
ucaccguguuagccaggauggucu

SEQ ID NO: 636151 - RNA, 19 nt, Human
ucacugcauuaaccucaaa

SEQ ID NO: 636152 - RNA, 18 nt, Human
ucagccucccaaagugcu

SEQ ID NO: 636153 - RNA, 23 nt, Human
ucccaaagugcugggauuauggg

SEQ ID NO: 636154 - RNA, 27 nt, Human
ucccccacaaaaaaagaaaaaggaagu

SEQ ID NO: 636155 - RNA, 21 nt, Human
ucugcccaccucagccuccca

SEQ ID NO: 636156 - RNA, 18 nt, Human
ugaaaauagggucuuuuc

SEQ ID NO: 636157 - RNA, 24 nt, Human
ugaucugcccaccucagccuccca

SEQ ID NO: 636158 - RNA, 22 nt, Human
ugggauuaugggugugagccac

SEQ ID NO: 636159 - RNA, 22 nt, Human
ugggauuaugggugugagccac

SEQ ID NO: 636160 - RNA, 22 nt, Human
ugggauuaugggugugagccac

SEQ ID NO: 636161 - RNA, 24 nt, Human
ugggauuaugggugugagccacug

SEQ ID NO: 636162 - RNA, 18 nt, Human
uuaguagagacgggguuu

SEQ ID NO: 636163 - RNA, 22 nt, Human
uuaguagagacgggguuucacc

SEQ ID NO: 636164 - RNA, 24 nt, Human
uuaguagagacgggguuucaccgu

SEQ ID NO: 636165 - RNA, 19 nt, Human
uuucaccguguuagccagg

SEQ ID NO: 636166 - RNA, 22 nt, Human
uuuuauuuuuaguagagacggg

SEQ ID NO: 636167 - RNA, 24 nt, Human
uuuuuaguagagacgggguuucac

SEQ ID NO: 636168 - RNA, 24 nt, Human
uuuuuuuuauuuuuaguagagacg

SEQ ID NO: 636169 - RNA, 25 nt, Human
aaagagcaaacgaaaaauaauucaa

SEQ ID NO: 636170 - RNA, 24 nt, Human
aaagcucugugggagccccugccu

SEQ ID NO: 636171 - RNA, 19 nt, Human
aacccacuucccgagcccg

SEQ ID NO: 636172 - RNA, 20 nt, Human
aaugccaacauugccugcag

SEQ ID NO: 636173 - RNA, 20 nt, Human
acaaugccaacauugccugg

SEQ ID NO: 636174 - RNA, 19 nt, Human
acuuggguggaagagguua

SEQ ID NO: 636175 - RNA, 21 nt, Human
agacggaggcgacuagcagga

SEQ ID NO: 636176 - RNA, 23 nt, Human
aggaauuuacaaugccaacauug

SEQ ID NO: 636177 - RNA, 22 nt, Human
aucgucccacuccucuuccccc

SEQ ID NO: 636178 - RNA, 22 nt, Human
augcucaagucugugccagccu

SEQ ID NO: 636179 - RNA, 24 nt, Human
caaaccaaauaucaggcuccuccu

SEQ ID NO: 636180 - RNA, 22 nt, Human
caacccacuucccgagcccggc

SEQ ID NO: 636181 - RNA, 24 nt, Human
caagaaguuacucaaagcucugug

SEQ ID NO: 636182 - RNA, 24 nt, Human
cacaaccaagaaguuacucaaagc

SEQ ID NO: 636183 - RNA, 21 nt, Human
caccagccccaaucaucaguc

SEQ ID NO: 636184 - RNA, 19 nt, Human
cacccaaugagguggugau

SEQ ID NO: 636185 - RNA, 21 nt, Human
cacuucccgagcccggcccau

SEQ ID NO: 636186 - RNA, 27 nt, Human
cagcuccuggucaucgucccacuccuu

SEQ ID NO: 636187 - RNA, 23 nt, Human
caggcaccagccccaaucaucag

SEQ ID NO: 636188 - RNA, 19 nt, Human
caguagcacccucugcaga

SEQ ID NO: 636189 - RNA, 22 nt, Human
caguagcacccucugcagauuc

SEQ ID NO: 636190 - RNA, 22 nt, Human
cauccaacccacuucccgagcc

SEQ ID NO: 636191 - RNA, 21 nt, Human
ccaaugagguggugauuggcu

SEQ ID NO: 636192 - RNA, 20 nt, Human
cccccuccuccuccagcuuc

SEQ ID NO: 636193 - RNA, 24 nt, Human
cccuccuccuccagcuucucacug

SEQ ID NO: 636194 - RNA, 21 nt, Human
ccuccagcuucucacugucau

SEQ ID NO: 636195 - RNA, 21 nt, Human
ccuggaacuuucacccaauga

SEQ ID NO: 636196 - RNA, 23 nt, Human
ccuggccaauaagaguguggucc

SEQ ID NO: 636197 - RNA, 25 nt, Human
ccuggccaauaagagugugguccug

SEQ ID NO: 636198 - RNA, 23 nt, Human
cuccagcuucucacugucaucuc

SEQ ID NO: 636199 - RNA, 20 nt, Human
cugaagugauccccucacca

SEQ ID NO: 636200 - RNA, 19 nt, Human
cuucaguagcacccucugc

SEQ ID NO: 636201 - RNA, 24 nt, Human
gaaaaauaauucaaccuaagcugc

SEQ ID NO: 636202 - RNA, 20 nt, Human
gggcaggacaggagagggcc

SEQ ID NO: 636203 - RNA, 18 nt, Human
ggggcaggacaggagagg

SEQ ID NO: 636204 - RNA, 22 nt, Human
guagcagucuucagcuucuucc

SEQ ID NO: 636205 - RNA, 25 nt, Human
gucccacuccucuucccccuccucc

SEQ ID NO: 636206 - RNA, 23 nt, Human
uaauagggggcugguacccagac

SEQ ID NO: 636207 - RNA, 19 nt, Human
uacccagacggaggcgacu

SEQ ID NO: 636208 - RNA, 18 nt, Human
uacucaaagcucuguggg

SEQ ID NO: 636209 - RNA, 22 nt, Human
uagcagucuucagcuucuucca

SEQ ID NO: 636210 - RNA, 18 nt, Human
uagggggcugguacccag

SEQ ID NO: 636211 - RNA, 25 nt, Human
uaucaggcuccuccucauccagcuc

SEQ ID NO: 636212 - RNA, 24 nt, Human
ucaccacaugaaggaggcugcaag

SEQ ID NO: 636213 - RNA, 21 nt, Human
ucccgagcccggcccaugcuc

SEQ ID NO: 636214 - RNA, 24 nt, Human
uccuccucauccagcuccuggucc

SEQ ID NO: 636215 - RNA, 20 nt, Human
uccuucuuucuucacacgcc

SEQ ID NO: 636216 - RNA, 21 nt, Human
ucucugcaaagcggucccgcu

SEQ ID NO: 636217 - RNA, 19 nt, Human
ucuucagcuucuuccaggc

SEQ ID NO: 636218 - RNA, 20 nt, Human
ugagguggugauuggcuaag

SEQ ID NO: 636219 - RNA, 21 nt, Human
uggaagagguuaagucgguac

SEQ ID NO: 636220 - RNA, 20 nt, Human
uggggcaggacaggagaggg

SEQ ID NO: 636221 - RNA, 19 nt, Human
ugguccuggauugagcccu

SEQ ID NO: 636222 - RNA, 23 nt, Human
uucccccuccuccuccagcuucu

SEQ ID NO: 636223 - RNA, 22 nt, Human
uucccgagcccggcccaugcuc

SEQ ID NO: 636224 - RNA, 23 nt, Human
uugacaucugcaaaccaagcgcg

SEQ ID NO: 636225 - RNA, 22 nt, Human
uuggggcaggacaggagagggc

SEQ ID NO: 636226 - RNA, 18 nt, Human
aaaaaaaacacaaagugu

SEQ ID NO: 636227 - RNA, 18 nt, Human
aaaauuagcugggcgugg

SEQ ID NO: 636228 - RNA, 18 nt, Human
aaaguguguauccuuucc

SEQ ID NO: 636229 - RNA, 20 nt, Human
aacguagugaaagcccaucu

SEQ ID NO: 636230 - RNA, 21 nt, Human
aacguagugaaagcccaucuc

SEQ ID NO: 636231 - RNA, 19 nt, Human
aagacaaaagccucagaac

SEQ ID NO: 636232 - RNA, 24 nt, Human
aauggcgugaacccgggaggugga

SEQ ID NO: 636233 - RNA, 18 nt, Human
acaccacaagagacaaac

SEQ ID NO: 636234 - RNA, 24 nt, Human
acuccagccugggugaaagaguga

SEQ ID NO: 636235 - RNA, 27 nt, Human
acucuauuccccaggcuagagugcgau

SEQ ID NO: 636236 - RNA, 18 nt, Human
acugcacuccagccuggg

SEQ ID NO: 636237 - RNA, 24 nt, Human
acugcacuccagccugggugaaag

SEQ ID NO: 636238 - RNA, 26 nt, Human
acugcacuccagccugggugaaagag

SEQ ID NO: 636239 - RNA, 20 nt, Human
acugcagagacuaaaauugc

SEQ ID NO: 636240 - RNA, 19 nt, Human
agaacugugaggaagccuc

SEQ ID NO: 636241 - RNA, 21 nt, Human
agaaggaugaagauauuacug

SEQ ID NO: 636242 - RNA, 18 nt, Human
agaggacucagagcucug

SEQ ID NO: 636243 - RNA, 19 nt, Human
agagugagacuucucaaaa

SEQ ID NO: 636244 - RNA, 27 nt, Human
agagugcgauggcaccaucucggcuga

SEQ ID NO: 636245 - RNA, 19 nt, Human
agccuggcuaacguaguga

SEQ ID NO: 636246 - RNA, 25 nt, Human
agccuggcuaacguagugaaagccc

SEQ ID NO: 636247 - RNA, 24 nt, Human
agccugggugaaagagugagacuu

SEQ ID NO: 636248 - RNA, 19 nt, Human
aggaggcugaggcaagaga

SEQ ID NO: 636249 - RNA, 20 nt, Human
aggaguuugagaccagccug

SEQ ID NO: 636250 - RNA, 22 nt, Human
aggaugaagauauuacugagaa

SEQ ID NO: 636251 - RNA, 24 nt, Human
aggcaagagaauggcgugaacccg

SEQ ID NO: 636252 - RNA, 20 nt, Human
aggccgagggggguggauca

SEQ ID NO: 636253 - RNA, 25 nt, Human
aggggcugagacuguuaacaucuga

SEQ ID NO: 636254 - RNA, 22 nt, Human
agggggguggaucaugagguca

SEQ ID NO: 636255 - RNA, 20 nt, Human
agguggaguugcagugagcc

SEQ ID NO: 636256 - RNA, 23 nt, Human
agguggaguugcagugagccgag

SEQ ID NO: 636257 - RNA, 21 nt, Human
aguaaguagcuagaagacaaa

SEQ ID NO: 636258 - RNA, 18 nt, Human
caccacaagagacaaaca

SEQ ID NO: 636259 - RNA, 20 nt, Human
caccacaagagacaaacaua

SEQ ID NO: 636260 - RNA, 19 nt, Human
cacucaauaacuuugcuug

SEQ ID NO: 636261 - RNA, 22 nt, Human
cacuccagccugggugaaagag

SEQ ID NO: 636262 - RNA, 22 nt, Human
cacuccagccugggugaaagag

SEQ ID NO: 636263 - RNA, 24 nt, Human
cacuccagccugggugaaagagug

SEQ ID NO: 636264 - RNA, 24 nt, Human
cacucuauuccccaggcuagagug

SEQ ID NO: 636265 - RNA, 19 nt, Human
cacugcacuccagccuggg

SEQ ID NO: 636266 - RNA, 19 nt, Human
cacugcacuccagccuggg

SEQ ID NO: 636267 - RNA, 22 nt, Human
cacugcacuccagccuggguga

SEQ ID NO: 636268 - RNA, 23 nt, Human
cacugcacuccagccugggugaa

SEQ ID NO: 636269 - RNA, 24 nt, Human
cacugcacuccagccugggugaaa

SEQ ID NO: 636270 - RNA, 22 nt, Human
cagcacuuuaggaggccgaggg

SEQ ID NO: 636271 - RNA, 24 nt, Human
caugaggucaggaguuugagacca

SEQ ID NO: 636272 - RNA, 20 nt, Human
ccacugcacuccagccuggg

SEQ ID NO: 636273 - RNA, 20 nt, Human
ccacugcacuccagccuggg

SEQ ID NO: 636274 - RNA, 20 nt, Human
ccacugcacuccagccuggg

SEQ ID NO: 636275 - RNA, 21 nt, Human
ccacugcacuccagccugggu

SEQ ID NO: 636276 - RNA, 21 nt, Human
ccacugcacuccagccugggu

SEQ ID NO: 636277 - RNA, 23 nt, Human
ccacugcacuccagccuggguga

SEQ ID NO: 636278 - RNA, 21 nt, Human
ccuauaggcccagcuacucag

SEQ ID NO: 636279 - RNA, 24 nt, Human
ccuggcuaacguagugaaagccca

SEQ ID NO: 636280 - RNA, 21 nt, Human
ccugggugaaagagugagacu

SEQ ID NO: 636281 - RNA, 24 nt, Human
cgagaucgugccacugcacuccag

SEQ ID NO: 636282 - RNA, 23 nt, Human
cgggagguggaguugcagugagc

SEQ ID NO: 636283 - RNA, 20 nt, Human
cucagaacacauaaaucuca

SEQ ID NO: 636284 - RNA, 20 nt, Human
cugagauaauuggagcucau

SEQ ID NO: 636285 - RNA, 21 nt, Human
cugaggcaagagaauggcgug

SEQ ID NO: 636286 - RNA, 24 nt, Human
gagaacugugaggaagccucgugc

SEQ ID NO: 636287 - RNA, 23 nt, Human
gagggggguggaucaugagguca

SEQ ID NO: 636288 - RNA, 22 nt, Human
gaucaugaggucaggaguuuga

SEQ ID NO: 636289 - RNA, 24 nt, Human
gaucaugaggucaggaguuugaga

SEQ ID NO: 636290 - RNA, 19 nt, Human
gaugccuguaaucccagca

SEQ ID NO: 636291 - RNA, 19 nt, Human
gccacugcacuccagccug

SEQ ID NO: 636292 - RNA, 19 nt, Human
gccacugcacuccagccug

SEQ ID NO: 636293 - RNA, 24 nt, Human
gccacugcacuccagccuggguga

SEQ ID NO: 636294 - RNA, 20 nt, Human
gccgagaucgugccacugca

SEQ ID NO: 636295 - RNA, 19 nt, Human
gccuguaaucccagcacuu

SEQ ID NO: 636296 - RNA, 20 nt, Human
gcgguggcagaugccuguaa

SEQ ID NO: 636297 - RNA, 20 nt, Human
gcuagaagacaaaagccuca

SEQ ID NO: 636298 - RNA, 23 nt, Human
ggaguugcagugagccgagaucg

SEQ ID NO: 636299 - RNA, 21 nt, Human
ggcagaugccuguaaucccag

SEQ ID NO: 636300 - RNA, 22 nt, Human
ggggguggaucaugaggucagg

SEQ ID NO: 636301 - RNA, 24 nt, Human
ggguggaucaugaggucaggaguu

SEQ ID NO: 636302 - RNA, 20 nt, Human
ggugaaagagugagacuucu

SEQ ID NO: 636303 - RNA, 23 nt, Human
gguggcagaugccuguaauccca

SEQ ID NO: 636304 - RNA, 24 nt, Human
gguggcagaugccuguaaucccag

SEQ ID NO: 636305 - RNA, 23 nt, Human
guggaucaugaggucaggaguuu

SEQ ID NO: 636306 - RNA, 24 nt, Human
guugcagugagccgagaucgugcc

SEQ ID NO: 636307 - RNA, 21 nt, Human
uaacuucauaagagaauuaac

SEQ ID NO: 636308 - RNA, 23 nt, Human
uaagccgagugcgguggcagaug

SEQ ID NO: 636309 - RNA, 22 nt, Human
uaaguagcuagaagacaaaagc

SEQ ID NO: 636310 - RNA, 24 nt, Human
uaauaaaaaaaaauuuacaccaca

SEQ ID NO: 636311 - RNA, 23 nt, Human
uagagugcgauggcaccaucucg

SEQ ID NO: 636312 - RNA, 23 nt, Human
uagcuagaagacaaaagccucag

SEQ ID NO: 636313 - RNA, 25 nt, Human
uagcuagaagacaaaagccucagaa

SEQ ID NO: 636314 - RNA, 24 nt, Human
uaggaggccgagggggguggauca

SEQ ID NO: 636315 - RNA, 22 nt, Human
uaggauuucuagggauaagccg

SEQ ID NO: 636316 - RNA, 24 nt, Human
ucaugaggucaggaguuugagacc

SEQ ID NO: 636317 - RNA, 21 nt, Human
ucauggcuauccuagaacuug

SEQ ID NO: 636318 - RNA, 23 nt, Human
uccagccugggugaaagagugag

SEQ ID NO: 636319 - RNA, 24 nt, Human
uccagccugggugaaagagugaga

SEQ ID NO: 636320 - RNA, 20 nt, Human
uccauuuuccaggaaggcuc

SEQ ID NO: 636321 - RNA, 20 nt, Human
ucccccugauuacaaagguu

SEQ ID NO: 636322 - RNA, 23 nt, Human
ucgugccacugcacuccagccug

SEQ ID NO: 636323 - RNA, 26 nt, Human
ucucaaaaaaaacacaaaguguccac

SEQ ID NO: 636324 - RNA, 24 nt, Human
ucucacucuauuccccaggcuaga

SEQ ID NO: 636325 - RNA, 21 nt, Human
ucucuacuaaaaauacaaaaa

SEQ ID NO: 636326 - RNA, 19 nt, Human
ucuuauucacauuucucaa

SEQ ID NO: 636327 - RNA, 19 nt, Human
ucuuuccagugagaaggau

SEQ ID NO: 636328 - RNA, 22 nt, Human
ugagaacugugaggaagccucg

SEQ ID NO: 636329 - RNA, 23 nt, Human
ugagaacugugaggaagccucgu

SEQ ID NO: 636330 - RNA, 26 nt, Human
ugagaccagccuggcuaaagguacac

SEQ ID NO: 636331 - RNA, 20 nt, Human
ugagauaauuggagcucaug

SEQ ID NO: 636332 - RNA, 22 nt, Human
ugagccgagaucgugccacugc

SEQ ID NO: 636333 - RNA, 23 nt, Human
ugaggcaagagaauggcgugaac

SEQ ID NO: 636334 - RNA, 24 nt, Human
ugaggcaagagaauggcgugaacc

SEQ ID NO: 636335 - RNA, 25 nt, Human
ugaggcaagagaauggcgugaaccc

SEQ ID NO: 636336 - RNA, 22 nt, Human
ugaggcaggaucucacucuauu

SEQ ID NO: 636337 - RNA, 18 nt, Human
ugaggucaggaguuugag

SEQ ID NO: 636338 - RNA, 20 nt, Human
ugcaaccuccauuuuccagg

SEQ ID NO: 636339 - RNA, 22 nt, Human
ugcacagggacuggagauuauc

SEQ ID NO: 636340 - RNA, 22 nt, Human
ugccuguaaucccagcacuuua

SEQ ID NO: 636341 - RNA, 24 nt, Human
ugccuguaaucccagcacuuuagg

SEQ ID NO: 636342 - RNA, 23 nt, Human
uggagaaugaaguaaguagcuag

SEQ ID NO: 636343 - RNA, 19 nt, Human
uggagggaaccuauaggcc

SEQ ID NO: 636344 - RNA, 19 nt, Human
uggagggaaccuauaggcc

SEQ ID NO: 636345 - RNA, 21 nt, Human
uggaucaugaggucaggaguu

SEQ ID NO: 636346 - RNA, 24 nt, Human
uggaucaugaggucaggaguuuga

SEQ ID NO: 636347 - RNA, 22 nt, Human
uggcagaugccuguaaucccag

SEQ ID NO: 636348 - RNA, 24 nt, Human
uggcagaugccuguaaucccagca

SEQ ID NO: 636349 - RNA, 21 nt, Human
uucaagacaagagacugcaga

SEQ ID NO: 636350 - RNA, 19 nt, Human
uucuagggauaagccgagu

SEQ ID NO: 636351 - RNA, 18 nt, Human
uugcagugagccgagauc

SEQ ID NO: 636352 - RNA, 21 nt, Human
uugcagugagccgagaucgug

SEQ ID NO: 636353 - RNA, 22 nt, Human
uugcagugagccgagaucgugc

SEQ ID NO: 636354 - RNA, 20 nt, Human
uuucuagggauaagccgagu

SEQ ID NO: 636355 - RNA, 21 nt, Human
uuuuuuucuuuuguacaaaaa

SEQ ID NO: 636356 - RNA, 23 nt, Human
uuuuuuuuugaggcaggaucuca

SEQ ID NO: 636357 - RNA, 19 nt, Human
uuuuuuuuuuuucuuuugu

SEQ ID NO: 636358 - RNA, 27 nt, Human
uuuuuuuuuuuuuuuuuucuuuugggg

SEQ ID NO: 636359 - RNA, 24 nt, Human
uuuuuuuuuuuuuuuuuuucuuuu

SEQ ID NO: 636360 - RNA, 24 nt, Human
aaagugcugggauuacaggcguga

SEQ ID NO: 636361 - RNA, 18 nt, Human
aacgcaaccucugccucc

SEQ ID NO: 636362 - RNA, 21 nt, Human
aagaguugggauuacaggcau

SEQ ID NO: 636363 - RNA, 23 nt, Human
aagaguugggauuacaggcauga

SEQ ID NO: 636364 - RNA, 24 nt, Human
aaggauccucuugccucagccucc

SEQ ID NO: 636365 - RNA, 20 nt, Human
aaguagcugggacuacaagc

SEQ ID NO: 636366 - RNA, 22 nt, Human
aaguagcugggacuacaagcau

SEQ ID NO: 636367 - RNA, 24 nt, Human
aaguagcugggacuacaagcaugc

SEQ ID NO: 636368 - RNA, 19 nt, Human
aagugcugggauuacaggc

SEQ ID NO: 636369 - RNA, 19 nt, Human
aagugcugggauuacaggc

SEQ ID NO: 636370 - RNA, 26 nt, Human
aagugcugggauuacaggcgugagcc

SEQ ID NO: 636371 - RNA, 19 nt, Human
aauccacuaugaccucauc

SEQ ID NO: 636372 - RNA, 18 nt, Human
acagcucacuguagccuc

SEQ ID NO: 636373 - RNA, 19 nt, Human
acaggaucucacucugugg

SEQ ID NO: 636374 - RNA, 19 nt, Human
accaugcccggcuaguuuc

SEQ ID NO: 636375 - RNA, 19 nt, Human
acgcaaccucugccuccug

SEQ ID NO: 636376 - RNA, 24 nt, Human
acgcaaccucugccuccuggguuc

SEQ ID NO: 636377 - RNA, 23 nt, Human
acugcaccuaugcccaccugcac

SEQ ID NO: 636378 - RNA, 20 nt, Human
acugcaguggcgcgaucuug

SEQ ID NO: 636379 - RNA, 24 nt, Human
acugcaguggcgcgaucuuggcuc

SEQ ID NO: 636380 - RNA, 24 nt, Human
agaguugggauuacaggcaugagc

SEQ ID NO: 636381 - RNA, 23 nt, Human
agcccuuaacagcaucacagcuu

SEQ ID NO: 636382 - RNA, 24 nt, Human
agcgauucuccugccucagccuuc

SEQ ID NO: 636383 - RNA, 21 nt, Human
agcugggacuacaagcaugca

SEQ ID NO: 636384 - RNA, 22 nt, Human
aggucauggaguccuugcuuug

SEQ ID NO: 636385 - RNA, 23 nt, Human
aguacaguggcacaagcacagcu

SEQ ID NO: 636386 - RNA, 21 nt, Human
aguagcugggauuacaggcau

SEQ ID NO: 636387 - RNA, 24 nt, Human
aguuucguauuuuuaguagagaug

SEQ ID NO: 636388 - RNA, 24 nt, Human
augaucugcccgccucagccuucc

SEQ ID NO: 636389 - RNA, 20 nt, Human
augggguuucuccauguugg

SEQ ID NO: 636390 - RNA, 21 nt, Human
augggguuucuccauguuggu

SEQ ID NO: 636391 - RNA, 24 nt, Human
caaagugcugggauuacaggcgug

SEQ ID NO: 636392 - RNA, 20 nt, Human
caacgcaaccucugccuccu

SEQ ID NO: 636393 - RNA, 24 nt, Human
caagaguugggauuacaggcauga

SEQ ID NO: 636394 - RNA, 27 nt, Human
caagaguugggauuacaggcaugagcc

SEQ ID NO: 636395 - RNA, 19 nt, Human
caagcgauccuccugccuc

SEQ ID NO: 636396 - RNA, 27 nt, Human
caagcgauccuccugccucugccuccc

SEQ ID NO: 636397 - RNA, 20 nt, Human
caagcgauucuccugccuca

SEQ ID NO: 636398 - RNA, 22 nt, Human
caagcgauucuccugccucagc

SEQ ID NO: 636399 - RNA, 21 nt, Human
caaggauccucuugccucagc

SEQ ID NO: 636400 - RNA, 23 nt, Human
cacaagcacagcucacuguagcc

SEQ ID NO: 636401 - RNA, 20 nt, Human
cacagcucacuguagccucc

SEQ ID NO: 636402 - RNA, 23 nt, Human
caccgugccaggccuggccuuuu

SEQ ID NO: 636403 - RNA, 20 nt, Human
cacgcagcccugggccugug

SEQ ID NO: 636404 - RNA, 24 nt, Human
cacucgaccugcgcccaccugcac

SEQ ID NO: 636405 - RNA, 21 nt, Human
cacugcaccugcaccuucugc

SEQ ID NO: 636406 - RNA, 21 nt, Human
cacugcaccugcaccuucugc

SEQ ID NO: 636407 - RNA, 23 nt, Human
cacugcaccugcaccuucugcac

SEQ ID NO: 636408 - RNA, 23 nt, Human
cacugcaccugcaccuucugcac

SEQ ID NO: 636409 - RNA, 24 nt, Human
cacugcaccugcaccuucugcacc

SEQ ID NO: 636410 - RNA, 24 nt, Human
cacugcaccugugcucaccugcac

SEQ ID NO: 636411 - RNA, 21 nt, Human
cagccagugugcacgcagccc

SEQ ID NO: 636412 - RNA, 23 nt, Human
cagguuccuggccuggguacaca

SEQ ID NO: 636413 - RNA, 19 nt, Human
caguggcgcgaucuuggcu

SEQ ID NO: 636414 - RNA, 23 nt, Human
caugcaccaucauaccuggcuaa

SEQ ID NO: 636415 - RNA, 24 nt, Human
caugcugggcucaagcgauccucc

SEQ ID NO: 636416 - RNA, 22 nt, Human
ccaaagugcugggauuacaggc

SEQ ID NO: 636417 - RNA, 22 nt, Human
ccaaagugcugggauuacaggc

SEQ ID NO: 636418 - RNA, 24 nt, Human
ccaaagugcugggauuacaggcgu

SEQ ID NO: 636419 - RNA, 22 nt, Human
ccaagaguugggauuacaggca

SEQ ID NO: 636420 - RNA, 23 nt, Human
ccaagaguugggauuacaggcau

SEQ ID NO: 636421 - RNA, 21 nt, Human
ccaccgugccaggccuggccu

SEQ ID NO: 636422 - RNA, 19 nt, Human
ccacuaugaccucaucuua

SEQ ID NO: 636423 - RNA, 19 nt, Human
ccauguuggucaggcuggu

SEQ ID NO: 636424 - RNA, 22 nt, Human
ccauguuggucaggcuggucuc

SEQ ID NO: 636425 - RNA, 23 nt, Human
ccauguuggucaggcuggucucg

SEQ ID NO: 636426 - RNA, 18 nt, Human
cccaagaguugggauuac

SEQ ID NO: 636427 - RNA, 23 nt, Human
cccaagaguugggauuacaggca

SEQ ID NO: 636428 - RNA, 24 nt, Human
cccaagaguugggauuacaggcau

SEQ ID NO: 636429 - RNA, 19 nt, Human
cccaaguagcugggacuac

SEQ ID NO: 636430 - RNA, 21 nt, Human
cccacugcaccugugcucacc

SEQ ID NO: 636431 - RNA, 23 nt, Human
ccccaagaguugggauuacaggc

SEQ ID NO: 636432 - RNA, 24 nt, Human
ccuccugccucugccuccccaaga

SEQ ID NO: 636433 - RNA, 24 nt, Human
ccuccuggguucaagcgauucucc

SEQ ID NO: 636434 - RNA, 26 nt, Human
ccucucguggccacuguauccuugac

SEQ ID NO: 636435 - RNA, 19 nt, Human
ccucugccuccuggguuca

SEQ ID NO: 636436 - RNA, 26 nt, Human
ccucuugccucagccucccaaguagc

SEQ ID NO: 636437 - RNA, 22 nt, Human
ccugaccucagaugaucugccc

SEQ ID NO: 636438 - RNA, 23 nt, Human
ccugaguagcugggauuacaggc

SEQ ID NO: 636439 - RNA, 24 nt, Human
ccugaguagcugggauuacaggca

SEQ ID NO: 636440 - RNA, 18 nt, Human
ccugcacccacucgaccu

SEQ ID NO: 636441 - RNA, 24 nt, Human
ccugccucagccuuccugaguagc

SEQ ID NO: 636442 - RNA, 22 nt, Human
ccugccucugccuccccaagag

SEQ ID NO: 636443 - RNA, 23 nt, Human
ccuggguucaagcgauucuccug

SEQ ID NO: 636444 - RNA, 24 nt, Human
cgccucagccuuccaaagugcugg

SEQ ID NO: 636445 - RNA, 24 nt, Human
cuaguuucguauuuuuaguagaga

SEQ ID NO: 636446 - RNA, 24 nt, Human
cucaacgcaaccucugccuccugg

SEQ ID NO: 636447 - RNA, 24 nt, Human
cucaagcgauccuccugccucugc

SEQ ID NO: 636448 - RNA, 21 nt, Human
cucacugcaccuaugcccacc

SEQ ID NO: 636449 - RNA, 21 nt, Human
cucacugcaccuaugcccacc

SEQ ID NO: 636450 - RNA, 24 nt, Human
cucagccucccaaguagcugggac

SEQ ID NO: 636451 - RNA, 26 nt, Human
cuccugaccucagaugaucugcccgc

SEQ ID NO: 636452 - RNA, 24 nt, Human
cuccugccucagccuuccugagua

SEQ ID NO: 636453 - RNA, 21 nt, Human
cuccuggguucaagcgauucu

SEQ ID NO: 636454 - RNA, 23 nt, Human
cugaguagcugggauuacaggca

SEQ ID NO: 636455 - RNA, 24 nt, Human
cugaguagcugggauuacaggcau

SEQ ID NO: 636456 - RNA, 24 nt, Human
cugcaccuacugcaccugcaccca

SEQ ID NO: 636457 - RNA, 18 nt, Human
cugcaccuaugcccaccu

SEQ ID NO: 636458 - RNA, 18 nt, Human
cugcaccugcacccacuc

SEQ ID NO: 636459 - RNA, 19 nt, Human
cugcaccugcaccuucugc

SEQ ID NO: 636460 - RNA, 19 nt, Human
cugcaccugcaccuucugc

SEQ ID NO: 636461 - RNA, 19 nt, Human
cugcaccugcacucacugc

SEQ ID NO: 636462 - RNA, 20 nt, Human
cugcaccugugcccaccugc

SEQ ID NO: 636463 - RNA, 20 nt, Human
cugcaccugugcucaccugc

SEQ ID NO: 636464 - RNA, 24 nt, Human
cugcaccuucugcaccugugccca

SEQ ID NO: 636465 - RNA, 24 nt, Human
cugcacucacugcaccuaugccca

SEQ ID NO: 636466 - RNA, 24 nt, Human
cugcacucacugcaccuaugccca

SEQ ID NO: 636467 - RNA, 18 nt, Human
cugcacuugugcccaccu

SEQ ID NO: 636468 - RNA, 24 nt, Human
cugccucagccuuccugaguagcu

SEQ ID NO: 636469 - RNA, 22 nt, Human
cuggcccuuuccuuuucuuuuc

SEQ ID NO: 636470 - RNA, 23 nt, Human
cuugccucagccucccaaguagc

SEQ ID NO: 636471 - RNA, 25 nt, Human
cuugccucagccucccaaguagcug

SEQ ID NO: 636472 - RNA, 19 nt, Human
cuuuccuuuucuuuucuuu

SEQ ID NO: 636473 - RNA, 22 nt, Human
cuuuucuuuuaaggaagcuggu

SEQ ID NO: 636474 - RNA, 24 nt, Human
gacagggucucccuauguggccca

SEQ ID NO: 636475 - RNA, 24 nt, Human
gaccucagaugaucugcccgccuc

SEQ ID NO: 636476 - RNA, 20 nt, Human
gacuucagcagacacauuuc

SEQ ID NO: 636477 - RNA, 24 nt, Human
gagaugggguuucuccauguuggu

SEQ ID NO: 636478 - RNA, 22 nt, Human
gaguagcugggauuacaggcau

SEQ ID NO: 636479 - RNA, 24 nt, Human
gaguagcugggauuacaggcaugc

SEQ ID NO: 636480 - RNA, 18 nt, Human
gauuacaggcaugagcca

SEQ ID NO: 636481 - RNA, 21 nt, Human
gauuacaggcaugagccacca

SEQ ID NO: 636482 - RNA, 22 nt, Human
gauuacaggcaugagccaccac

SEQ ID NO: 636483 - RNA, 18 nt, Human
gauuacaggcaugcgcca

SEQ ID NO: 636484 - RNA, 22 nt, Human
gauuacaggcaugcgccaccau

SEQ ID NO: 636485 - RNA, 18 nt, Human
gauuacaggcgugagcca

SEQ ID NO: 636486 - RNA, 21 nt, Human
gauuacaggcgugagccaccg

SEQ ID NO: 636487 - RNA, 24 nt, Human
gauuacaggcgugagccaccgugc

SEQ ID NO: 636488 - RNA, 21 nt, Human
gcaaagacccuauuuccaaau

SEQ ID NO: 636489 - RNA, 19 nt, Human
gcaaccucugccuccuggg

SEQ ID NO: 636490 - RNA, 22 nt, Human
gcacucacugcaccuaugccca

SEQ ID NO: 636491 - RNA, 22 nt, Human
gcacucacugcaccuaugccca

SEQ ID NO: 636492 - RNA, 20 nt, Human
gcccaccuguacccacugca

SEQ ID NO: 636493 - RNA, 20 nt, Human
gcccaccuguacccacugca

SEQ ID NO: 636494 - RNA, 21 nt, Human
gcccugggccuguggcagguc

SEQ ID NO: 636495 - RNA, 19 nt, Human
gcccuuuccuuuucuuuuc

SEQ ID NO: 636496 - RNA, 21 nt, Human
gccuggguacacagcagguca

SEQ ID NO: 636497 - RNA, 24 nt, Human
gcgauucuccugccucagccuucc

SEQ ID NO: 636498 - RNA, 20 nt, Human
gcucaccugcaccuacugca

SEQ ID NO: 636499 - RNA, 23 nt, Human
gcucacuguagccuccuucuccc

SEQ ID NO: 636500 - RNA, 19 nt, Human
gcuggaguacaguggcaca

SEQ ID NO: 636501 - RNA, 20 nt, Human
gcugggcucaagcgauccuc

SEQ ID NO: 636502 - RNA, 23 nt, Human
gcuggucucgaacuccugaccuc

SEQ ID NO: 636503 - RNA, 20 nt, Human
ggacagggucucccuaugug

SEQ ID NO: 636504 - RNA, 23 nt, Human
ggauccucuugccucagccuccc

SEQ ID NO: 636505 - RNA, 19 nt, Human
ggauuacaggcaugagcca

SEQ ID NO: 636506 - RNA, 24 nt, Human
ggauuacaggcaugcgccaccaug

SEQ ID NO: 636507 - RNA, 24 nt, Human
ggcuggucucgaacuccugaccuc

SEQ ID NO: 636508 - RNA, 24 nt, Human
gggccuguggcaggucagguuccu

SEQ ID NO: 636509 - RNA, 22 nt, Human
gggcucaagcgauccuccugcc

SEQ ID NO: 636510 - RNA, 22 nt, Human
gggguuucuccauguuggucag

SEQ ID NO: 636511 - RNA, 22 nt, Human
ggguuucuccauguuggucagg

SEQ ID NO: 636512 - RNA, 19 nt, Human
ggucucgaacuccugaccu

SEQ ID NO: 636513 - RNA, 18 nt, Human
guagcugggauuacaggc

SEQ ID NO: 636514 - RNA, 20 nt, Human
guagcugggauuacaggcau

SEQ ID NO: 636515 - RNA, 18 nt, Human
guagggacagggucuccc

SEQ ID NO: 636516 - RNA, 25 nt, Human
gugcacgcagcccugggccuguggc

SEQ ID NO: 636517 - RNA, 22 nt, Human
guggcacaagcacagcucaccg

SEQ ID NO: 636518 - RNA, 19 nt, Human
gugggccaggcuggaguac

SEQ ID NO: 636519 - RNA, 20 nt, Human
uacaggcaugagccaccaca

SEQ ID NO: 636520 - RNA, 23 nt, Human
uacaggcaugcgccaccaugccc

SEQ ID NO: 636521 - RNA, 23 nt, Human
uacaggcgugagccaccgugcca

SEQ ID NO: 636522 - RNA, 20 nt, Human
uacaguggcacaagcacagc

SEQ ID NO: 636523 - RNA, 24 nt, Human
uaguagagaugggguuucuccaug

SEQ ID NO: 636524 - RNA, 24 nt, Human
ucaacgcaaccucugccuccuggg

SEQ ID NO: 636525 - RNA, 22 nt, Human
ucaagcgauccuccugccucug

SEQ ID NO: 636526 - RNA, 19 nt, Human
ucaagcgauucuccugccu

SEQ ID NO: 636527 - RNA, 27 nt, Human
ucaaggauccucuugccucagccuccc

SEQ ID NO: 636528 - RNA, 23 nt, Human
ucacuguagccuccuucucccag

SEQ ID NO: 636529 - RNA, 24 nt, Human
ucagcagacacauuucagcccuua

SEQ ID NO: 636530 - RNA, 27 nt, Human
ucagcagcugcuaccucucguggccac

SEQ ID NO: 636531 - RNA, 18 nt, Human
ucagcccuuaacagcauc

SEQ ID NO: 636532 - RNA, 21 nt, Human
ucagcccuuaacagcaucaca

SEQ ID NO: 636533 - RNA, 18 nt, Human
ucagccucccaaguagcu

SEQ ID NO: 636534 - RNA, 20 nt, Human
ucagccucccaaguagcugg

SEQ ID NO: 636535 - RNA, 21 nt, Human
ucagccuuccugaguagcugg

SEQ ID NO: 636536 - RNA, 23 nt, Human
uccaaagugcugggauuacaggc

SEQ ID NO: 636537 - RNA, 24 nt, Human
uccaaagugcugggauuacaggcg

SEQ ID NO: 636538 - RNA, 25 nt, Human
uccacacaucagcagcugcuaccuc

SEQ ID NO: 636539 - RNA, 18 nt, Human
ucccaaguagcugggacu

SEQ ID NO: 636540 - RNA, 24 nt, Human
uccugaguagcugggauuacaggc

SEQ ID NO: 636541 - RNA, 22 nt, Human
uccugccucugccuccccaaga

SEQ ID NO: 636542 - RNA, 20 nt, Human
uccuggccuggguacacagc

SEQ ID NO: 636543 - RNA, 21 nt, Human
uccuggguucaagcgauucuc

SEQ ID NO: 636544 - RNA, 24 nt, Human
uccuggguucaagcgauucuccug

SEQ ID NO: 636545 - RNA, 22 nt, Human
ucgcucuuguugcccaggcugg

SEQ ID NO: 636546 - RNA, 23 nt, Human
ucgcucuuguugcccaggcugga

SEQ ID NO: 636547 - RNA, 24 nt, Human
ucucacucugugggccaggcugga

SEQ ID NO: 636548 - RNA, 24 nt, Human
ucucccagacucaaggauccucuu

SEQ ID NO: 636549 - RNA, 21 nt, Human
ucugcccgccucagccuucca

SEQ ID NO: 636550 - RNA, 21 nt, Human
ucuggcccuuuccuuuucuuu

SEQ ID NO: 636551 - RNA, 19 nt, Human
ucugugggccaggcuggag

SEQ ID NO: 636552 - RNA, 22 nt, Human
ucuuguugcccaggcuggacug

SEQ ID NO: 636553 - RNA, 18 nt, Human
ugaccucagaugaucugc

SEQ ID NO: 636554 - RNA, 24 nt, Human
ugaccucagaugaucugcccgccu

SEQ ID NO: 636555 - RNA, 20 nt, Human
ugagacaggaucucacucug

SEQ ID NO: 636556 - RNA, 21 nt, Human
ugcaccugcaccuucugcacu

SEQ ID NO: 636557 - RNA, 22 nt, Human
ugcccaccugcacucacugcac

SEQ ID NO: 636558 - RNA, 22 nt, Human
ugcccaccuguacccacugcac

SEQ ID NO: 636559 - RNA, 22 nt, Human
ugcccaccuguacccacugcac

SEQ ID NO: 636560 - RNA, 23 nt, Human
ugcccggcuaguuucguauuuuu

SEQ ID NO: 636561 - RNA, 22 nt, Human
ugccucagccucccaaguagcu

SEQ ID NO: 636562 - RNA, 24 nt, Human
ugccucagccucccaaguagcugg

SEQ ID NO: 636563 - RNA, 25 nt, Human
ugccucagccuuccugaguagcugg

SEQ ID NO: 636564 - RNA, 22 nt, Human
ugcucaccugcaccuacugcac

SEQ ID NO: 636565 - RNA, 24 nt, Human
ugcugggauuacaggcgugagcca

SEQ ID NO: 636566 - RNA, 24 nt, Human
uggacugcaguggcgcgaucuugg

SEQ ID NO: 636567 - RNA, 18 nt, Human
uggaguacaguggcacaa

SEQ ID NO: 636568 - RNA, 20 nt, Human
uggcacaagcacagcucacu

SEQ ID NO: 636569 - RNA, 21 nt, Human
ugggacuacaagcaugcacca

SEQ ID NO: 636570 - RNA, 23 nt, Human
ugggacuacaagcaugcaccauc

SEQ ID NO: 636571 - RNA, 18 nt, Human
ugggauuacaggcaugag

SEQ ID NO: 636572 - RNA, 19 nt, Human
ugggauuacaggcaugagc

SEQ ID NO: 636573 - RNA, 22 nt, Human
ugggauuacaggcaugagccac

SEQ ID NO: 636574 - RNA, 23 nt, Human
ugggauuacaggcaugagccacc

SEQ ID NO: 636575 - RNA, 24 nt, Human
ugggauuacaggcaugagccacca

SEQ ID NO: 636576 - RNA, 24 nt, Human
ugggauuacaggcaugagccacca

SEQ ID NO: 636577 - RNA, 18 nt, Human
ugggauuacaggcaugcg

SEQ ID NO: 636578 - RNA, 21 nt, Human
ugggauuacaggcaugcgcca

SEQ ID NO: 636579 - RNA, 22 nt, Human
ugggauuacaggcaugcgccac

SEQ ID NO: 636580 - RNA, 24 nt, Human
ugggauuacaggcaugcgccacca

SEQ ID NO: 636581 - RNA, 18 nt, Human
ugggauuacaggcgugag

SEQ ID NO: 636582 - RNA, 22 nt, Human
ugggauuacaggcgugagccac

SEQ ID NO: 636583 - RNA, 23 nt, Human
ugggauuacaggcgugagccacc

SEQ ID NO: 636584 - RNA, 23 nt, Human
ugggauuacaggcgugagccacc

SEQ ID NO: 636585 - RNA, 24 nt, Human
ugggauuacaggcgugagccaccg

SEQ ID NO: 636586 - RNA, 27 nt, Human
ugggauuacaggcgugagccaccgugc

SEQ ID NO: 636587 - RNA, 24 nt, Human
ugggcucaagcgauccuccugccu

SEQ ID NO: 636588 - RNA, 24 nt, Human
ugggguuucuccauguuggucagg

SEQ ID NO: 636589 - RNA, 20 nt, Human
uggguacacagcaggucaug

SEQ ID NO: 636590 - RNA, 23 nt, Human
uggguucaagcgauucuccugcc

SEQ ID NO: 636591 - RNA, 24 nt, Human
uggguucaagcgauucuccugccu

SEQ ID NO: 636592 - RNA, 24 nt, Human
uggucaggcuggucucgaacuccu

SEQ ID NO: 636593 - RNA, 18 nt, Human
uuaguagagaugggguuu

SEQ ID NO: 636594 - RNA, 24 nt, Human
uuaguagagaugggguuucuccau

SEQ ID NO: 636595 - RNA, 21 nt, Human
uucaagcgauucuccugccuc

SEQ ID NO: 636596 - RNA, 23 nt, Human
uucaagcgauucuccugccucag

SEQ ID NO: 636597 - RNA, 24 nt, Human
uucaagcgauucuccugccucagc

SEQ ID NO: 636598 - RNA, 18 nt, Human
uuccuggccuggguacac

SEQ ID NO: 636599 - RNA, 24 nt, Human
uucgcucuuguugcccaggcugga

SEQ ID NO: 636600 - RNA, 22 nt, Human
uugagacaggaucucacucugu

SEQ ID NO: 636601 - RNA, 24 nt, Human
uugcccaggcuggacugcaguggc

SEQ ID NO: 636602 - RNA, 23 nt, Human
uuguugcccaggcuggacugcag

SEQ ID NO: 636603 - RNA, 24 nt, Human
uuucgcucuuguugcccaggcugg

SEQ ID NO: 636604 - RNA, 19 nt, Human
uuucguauuuuuaguagag

SEQ ID NO: 636605 - RNA, 20 nt, Human
uuucguauuuuuaguagaga

SEQ ID NO: 636606 - RNA, 21 nt, Human
uuucuccauguuggucaggcu

SEQ ID NO: 636607 - RNA, 21 nt, Human
uuugcaaagacccuauuucca

SEQ ID NO: 636608 - RNA, 18 nt, Human
uuuguagggacagggucu

SEQ ID NO: 636609 - RNA, 18 nt, Human
uuuucuuuuuuuuuuuug

SEQ ID NO: 636610 - RNA, 22 nt, Human
uuuuuaguagagaugggguuuc

SEQ ID NO: 636611 - RNA, 20 nt, Human
uuuuuuuucuugagacaggg

SEQ ID NO: 636612 - RNA, 26 nt, Human
uuuuuuuuucuugagacaggaucuca

SEQ ID NO: 636613 - RNA, 21 nt, Human
uuuuuuuuuuuuuuuucuugg

SEQ ID NO: 636614 - RNA, 23 nt, Human
aaccaguagaguccauuagugag

SEQ ID NO: 636615 - RNA, 23 nt, Human
aaccuguuguuuuucccaacucu

SEQ ID NO: 636616 - RNA, 23 nt, Human
aacuuccuaagcaauagcagcuc

SEQ ID NO: 636617 - RNA, 24 nt, Human
acagacaccaacagcugcaucccu

SEQ ID NO: 636618 - RNA, 18 nt, Human
acucaaaccaguagaguc

SEQ ID NO: 636619 - RNA, 21 nt, Human
agacaccaacagcugcauccc

SEQ ID NO: 636620 - RNA, 18 nt, Human
agacauaauccccacccu

SEQ ID NO: 636621 - RNA, 27 nt, Human
agcaauagcagcuccaggcucuucccu

SEQ ID NO: 636622 - RNA, 25 nt, Human
agccgcaaguagaugcucauaaaug

SEQ ID NO: 636623 - RNA, 25 nt, Human
agcuccaggcucuucccugagaccu

SEQ ID NO: 636624 - RNA, 23 nt, Human
augcucauaaaugcgcacaugcg

SEQ ID NO: 636625 - RNA, 19 nt, Human
caaaccccacagugcaggg

SEQ ID NO: 636626 - RNA, 24 nt, Human
caaccaaguuaacacucaucacac

SEQ ID NO: 636627 - RNA, 27 nt, Human
caaccaaguuaacacucaucacacccc

SEQ ID NO: 636628 - RNA, 25 nt, Human
caacuuccuaagcaauagcagcucc

SEQ ID NO: 636629 - RNA, 24 nt, Human
caccaacagcugcaucccuuggca

SEQ ID NO: 636630 - RNA, 21 nt, Human
caugucaaauaugccaaaccc

SEQ ID NO: 636631 - RNA, 19 nt, Human
ccccacagugcagggggcu

SEQ ID NO: 636632 - RNA, 21 nt, Human
ccccagcagccccgggcccac

SEQ ID NO: 636633 - RNA, 21 nt, Human
ccccaggggagauggaggggg

SEQ ID NO: 636634 - RNA, 22 nt, Human
ccuccaauccaaccccugccac

SEQ ID NO: 636635 - RNA, 23 nt, Human
ccuccaauccaaccccugccaca

SEQ ID NO: 636636 - RNA, 18 nt, Human
cucaaaccaguagagucc

SEQ ID NO: 636637 - RNA, 21 nt, Human
gaacaugccccaaaccccaca

SEQ ID NO: 636638 - RNA, 19 nt, Human
gcucacucacacagacacc

SEQ ID NO: 636639 - RNA, 26 nt, Human
ggacagacaccaacagcugcaucccu

SEQ ID NO: 636640 - RNA, 21 nt, Human
ggcaggcaccagaaggucaag

SEQ ID NO: 636641 - RNA, 22 nt, Human
ggccuccucauagagauaacuc

SEQ ID NO: 636642 - RNA, 19 nt, Human
ggggagauggagggggcug

SEQ ID NO: 636643 - RNA, 19 nt, Human
gucaaauaugccaaacccc

SEQ ID NO: 636644 - RNA, 21 nt, Human
uaaacagagacauaaucccca

SEQ ID NO: 636645 - RNA, 20 nt, Human
uaaagaaccggcagcgcuga

SEQ ID NO: 636646 - RNA, 26 nt, Human
uaaaugcgcacaugcgcucacucaca

SEQ ID NO: 636647 - RNA, 24 nt, Human
ucaaggcacguacaacuuccuaag

SEQ ID NO: 636648 - RNA, 23 nt, Human
ucauccagcucagaagcacucaa

SEQ ID NO: 636649 - RNA, 21 nt, Human
ucauucuuauuacugaacaug

SEQ ID NO: 636650 - RNA, 20 nt, Human
ucccaacucuguucucuccc

SEQ ID NO: 636651 - RNA, 25 nt, Human
ucccugagaccugguuuaccucugg

SEQ ID NO: 636652 - RNA, 19 nt, Human
uccuuggccccagcagccc

SEQ ID NO: 636653 - RNA, 19 nt, Human
ugaccuagcgucacgcgga

SEQ ID NO: 636654 - RNA, 24 nt, Human
ugcacuggguucaaauggcccuga

SEQ ID NO: 636655 - RNA, 20 nt, Human
ugccccaaaccccacagugc

SEQ ID NO: 636656 - RNA, 20 nt, Human
ugcugcguccucagguagug

SEQ ID NO: 636657 - RNA, 24 nt, Human
uggcaauuaauuacacaaacauac

SEQ ID NO: 636658 - RNA, 22 nt, Human
ugguaaagaaccggcagcgcug

SEQ ID NO: 636659 - RNA, 18 nt, Human
aaccucgcugaucgccuc

SEQ ID NO: 636660 - RNA, 19 nt, Human
aucucccucggcgcauccc

SEQ ID NO: 636661 - RNA, 21 nt, Human
aucucccucggcgcaucccug

SEQ ID NO: 636662 - RNA, 23 nt, Human
ccauccgccccguuucccaucuc

SEQ ID NO: 636663 - RNA, 19 nt, Human
cccguuucccaucucccuc

SEQ ID NO: 636664 - RNA, 22 nt, Human
cgcaguggggcgcgaccccagc

SEQ ID NO: 636665 - RNA, 22 nt, Human
gcugggcugggcgccauccgcc

SEQ ID NO: 636666 - RNA, 23 nt, Human
ggcugggcugggcgccauccgcc

SEQ ID NO: 636667 - RNA, 21 nt, Human
gggaggugucuggaacugcag

SEQ ID NO: 636668 - RNA, 24 nt, Human
gggcugggcgccauccgccccguu

SEQ ID NO: 636669 - RNA, 21 nt, Human
uacagaggaggagcucuuuau

SEQ ID NO: 636670 - RNA, 19 nt, Human
ucccucggcgcaucccugg

SEQ ID NO: 636671 - RNA, 23 nt, Human
ucccuggggagccgccaucacuc

SEQ ID NO: 636672 - RNA, 25 nt, Human
ucccuggggagccgccaucacucgg

SEQ ID NO: 636673 - RNA, 20 nt, Human
ucgcugaucgccuccauggu

SEQ ID NO: 636674 - RNA, 21 nt, Human
uggcaguuagggcugggcugg

SEQ ID NO: 636675 - RNA, 23 nt, Human
uggcaguuagggcugggcugggc

SEQ ID NO: 636676 - RNA, 22 nt, Human
uuuuuuuuuuuuuuuuuuacag

SEQ ID NO: 636677 - RNA, 24 nt, Human
aaagaaauaaaggucuguagagag

SEQ ID NO: 636678 - RNA, 20 nt, Human
aacacgauuccuccuggagc

SEQ ID NO: 636679 - RNA, 20 nt, Human
aacucguagaagaagccccu

SEQ ID NO: 636680 - RNA, 19 nt, Human
aaggagccaggugggcagg

SEQ ID NO: 636681 - RNA, 22 nt, Human
aagguagagaaaugucuaaaaa

SEQ ID NO: 636682 - RNA, 19 nt, Human
aauccaccucauaaauuca

SEQ ID NO: 636683 - RNA, 26 nt, Human
acacagccuaaggacguucuuaagga

SEQ ID NO: 636684 - RNA, 18 nt, Human
acuucaacauggacugaa

SEQ ID NO: 636685 - RNA, 23 nt, Human
agaaauaaaggucuguagagaga

SEQ ID NO: 636686 - RNA, 18 nt, Human
agccaggugggcaggcac

SEQ ID NO: 636687 - RNA, 20 nt, Human
agugaaccucucuggugccc

SEQ ID NO: 636688 - RNA, 18 nt, Human
aucugagcaaugcaaagg

SEQ ID NO: 636689 - RNA, 24 nt, Human
aucuuccuccuggccucccuauca

SEQ ID NO: 636690 - RNA, 28 nt, Human
auuuucagaguuaccuugucggaaaucc

SEQ ID NO: 636691 - RNA, 18 nt, Human
caaaguagggcucauucc

SEQ ID NO: 636692 - RNA, 21 nt, Human
cacaggcuuccugcuccccga

SEQ ID NO: 636693 - RNA, 24 nt, Human
cagccuaaggacguucuuaaggac

SEQ ID NO: 636694 - RNA, 21 nt, Human
caggugggcaggcacauggug

SEQ ID NO: 636695 - RNA, 20 nt, Human
cauggacugaagccuccagg

SEQ ID NO: 636696 - RNA, 18 nt, Human
cauggugggugcuuaacc

SEQ ID NO: 636697 - RNA, 19 nt, Human
cccuaagguagagaaaugu

SEQ ID NO: 636698 - RNA, 24 nt, Human
cccuagacccucaucaaaaccaac

SEQ ID NO: 636699 - RNA, 24 nt, Human
ccuaucuuccuccuggccucccua

SEQ ID NO: 636700 - RNA, 19 nt, Human
ccuccuggagcugagugga

SEQ ID NO: 636701 - RNA, 21 nt, Human
ccuccuggccucccuaucaaa

SEQ ID NO: 636702 - RNA, 19 nt, Human
ccucugcguguccauugcu

SEQ ID NO: 636703 - RNA, 22 nt, Human
ccucuugacaaccauacaaagu

SEQ ID NO: 636704 - RNA, 22 nt, Human
ccuggugauaaagaaaacacga

SEQ ID NO: 636705 - RNA, 22 nt, Human
ccuuguacuuauugacuuccuc

SEQ ID NO: 636706 - RNA, 18 nt, Human
cugagcaaugcaaagggg

SEQ ID NO: 636707 - RNA, 21 nt, Human
cugcuccccgaucccaccccu

SEQ ID NO: 636708 - RNA, 22 nt, Human
cuggcaccaaccagcuauggaa

SEQ ID NO: 636709 - RNA, 30 nt, Human
cuggugauaaagaaaacacgauuccuccuu

SEQ ID NO: 636710 - RNA, 22 nt, Human
gagaagaccugguuucucguuc

SEQ ID NO: 636711 - RNA, 21 nt, Human
gaugacggugacagggagaaa

SEQ ID NO: 636712 - RNA, 20 nt, Human
gcacauggugggugcuuaac

SEQ ID NO: 636713 - RNA, 23 nt, Human
gcacauggugggugcuuaaccaa

SEQ ID NO: 636714 - RNA, 19 nt, Human
gcaggcacauggugggugc

SEQ ID NO: 636715 - RNA, 23 nt, Human
gcuccccgaucccaccccugagc

SEQ ID NO: 636716 - RNA, 23 nt, Human
ggaagagagaacauccaaaugac

SEQ ID NO: 636717 - RNA, 22 nt, Human
ggcucuuccuuucuagcaguuu

SEQ ID NO: 636718 - RNA, 18 nt, Human
gggcaagugaaccucucu

SEQ ID NO: 636719 - RNA, 18 nt, Human
gugaaccucucuggugcc

SEQ ID NO: 636720 - RNA, 24 nt, Human
guggaugacggugacagggagaaa

SEQ ID NO: 636721 - RNA, 21 nt, Human
guguccauugcuuuauacaua

SEQ ID NO: 636722 - RNA, 25 nt, Human
uaaccugcaaaggauugugguaucu

SEQ ID NO: 636723 - RNA, 26 nt, Human
uaagguagagaaaugucuaaaaauca

SEQ ID NO: 636724 - RNA, 21 nt, Human
uagaagaagccccuggugaua

SEQ ID NO: 636725 - RNA, 21 nt, Human
ucaaguucacacagguggugg

SEQ ID NO: 636726 - RNA, 19 nt, Human
ucagaguuaccuuguacuu

SEQ ID NO: 636727 - RNA, 26 nt, Human
ucagaguuaccuuguacuuauugacc

SEQ ID NO: 636728 - RNA, 19 nt, Human
uccccuuguuuacagauga

SEQ ID NO: 636729 - RNA, 19 nt, Human
ucccuagccucccuuuggu

SEQ ID NO: 636730 - RNA, 22 nt, Human
uccgugagguucgauaaauggc

SEQ ID NO: 636731 - RNA, 22 nt, Human
uccugcuccccgaucccacccc

SEQ ID NO: 636732 - RNA, 24 nt, Human
ucugcaaaacugugggugacagga

SEQ ID NO: 636733 - RNA, 19 nt, Human
ucuucauacaugcccaguu

SEQ ID NO: 636734 - RNA, 21 nt, Human
ugaagccuccagggaaagaaa

SEQ ID NO: 636735 - RNA, 26 nt, Human
ugacggugacagggagaaaccaauac

SEQ ID NO: 636736 - RNA, 24 nt, Human
ugagguucgauaaauggcucaagu

SEQ ID NO: 636737 - RNA, 22 nt, Human
ugaguucacaaggugaagggau

SEQ ID NO: 636738 - RNA, 19 nt, Human
ugcauuucuaacacagccu

SEQ ID NO: 636739 - RNA, 22 nt, Human
ugcccuagacccucaucaaaac

SEQ ID NO: 636740 - RNA, 19 nt, Human
ugucugcaaaacugugggu

SEQ ID NO: 636741 - RNA, 20 nt, Human
uuaaggacucagggauucau

SEQ ID NO: 636742 - RNA, 23 nt, Human
uuauacauauugucucaaauccu

SEQ ID NO: 636743 - RNA, 18 nt, Human
uucaacauggacugaagc

SEQ ID NO: 636744 - RNA, 23 nt, Human
uuccugcuccccgaucccacccc

SEQ ID NO: 636745 - RNA, 20 nt, Human
uuggcggagauggcuuuccu

SEQ ID NO: 636746 - RNA, 20 nt, Human
uugggccuaucuuccuccug

SEQ ID NO: 636747 - RNA, 22 nt, Human
uuuccugucccuagccucccuu

SEQ ID NO: 636748 - RNA, 23 nt, Human
uuuccugucccuagccucccuuu

SEQ ID NO: 636749 - RNA, 21 nt, Human
uuuuuuuuuuuuuuuuaucuu

SEQ ID NO: 636750 - RNA, 23 nt, Human
acaaacacagacauauggggaua

SEQ ID NO: 636751 - RNA, 26 nt, Human
caaacaaacacagacauauggggaua

SEQ ID NO: 636752 - RNA, 23 nt, Human
cuucagcccuggcaggcacgaua

SEQ ID NO: 636753 - RNA, 18 nt, Human
ggcagcuucagcccuggc

SEQ ID NO: 636754 - RNA, 22 nt, Human
uggcaggcacgauagaagaaaa

SEQ ID NO: 636755 - RNA, 22 nt, Human
uuuuuuuuuuuuuuuuuccauu

SEQ ID NO: 636756 - RNA, 25 nt, Human
uuuuuuuuuuuuuuuuuuccauucu

SEQ ID NO: 636757 - RNA, 20 nt, Human
accuggagagggacuugggg

SEQ ID NO: 636758 - RNA, 20 nt, Human
agagagcaccaugaaaguac

SEQ ID NO: 636759 - RNA, 25 nt, Human
aggagcuugagguucuccuuuggcc

SEQ ID NO: 636760 - RNA, 22 nt, Human
auugcaaacucccuaauaucac

SEQ ID NO: 636761 - RNA, 19 nt, Human
cagaagguagagagcacca

SEQ ID NO: 636762 - RNA, 23 nt, Human
caggaaggagcuggaucaggcca

SEQ ID NO: 636763 - RNA, 19 nt, Human
ccaggagcuugagguucuc

SEQ ID NO: 636764 - RNA, 22 nt, Human
ccaggagcuugagguucuccuu

SEQ ID NO: 636765 - RNA, 19 nt, Human
cccagguuuccagcuccuc

SEQ ID NO: 636766 - RNA, 20 nt, Human
cgggaugggggccagaaggu

SEQ ID NO: 636767 - RNA, 21 nt, Human
cgggaugggggccagaaggua

SEQ ID NO: 636768 - RNA, 23 nt, Human
cuugagguucuccuuuccuaagg

SEQ ID NO: 636769 - RNA, 18 nt, Human
gaaagcuuccaaggacuu

SEQ ID NO: 636770 - RNA, 18 nt, Human
gacuugggguagagaagg

SEQ ID NO: 636771 - RNA, 19 nt, Human
gacuugggguagagaaggc

SEQ ID NO: 636772 - RNA, 18 nt, Human
ggagagggacuuggggua

SEQ ID NO: 636773 - RNA, 22 nt, Human
guauuccauccuugucagcugg

SEQ ID NO: 636774 - RNA, 19 nt, Human
ucauggcguauuccauccu

SEQ ID NO: 636775 - RNA, 22 nt, Human
uccuuuggccaacccaccccag

SEQ ID NO: 636776 - RNA, 18 nt, Human
ugagggagguguggggag

SEQ ID NO: 636777 - RNA, 20 nt, Human
ugcguuggaccucccccuca

SEQ ID NO: 636778 - RNA, 20 nt, Human
uggagagggacuugggguag

SEQ ID NO: 636779 - RNA, 21 nt, Human
uggaugggcuaagcugccuug

SEQ ID NO: 636780 - RNA, 22 nt, Human
uggggagguucgcggcucuaca

SEQ ID NO: 636781 - RNA, 21 nt, Human
uguggccacuaccaguuaagc

SEQ ID NO: 636782 - RNA, 24 nt, Human
uguggccacuaccaguuaagcgug

SEQ ID NO: 636783 - RNA, 22 nt, Human
uuccagcuccuccuccucacuc

SEQ ID NO: 636784 - RNA, 19 nt, Human
uuggccaacccaccccagg

SEQ ID NO: 636785 - RNA, 19 nt, Human
uuuccagcuccuccuccuc

SEQ ID NO: 636786 - RNA, 23 nt, Human
uuuuuuuuuuuuuuuuucagccu

SEQ ID NO: 636787 - RNA, 22 nt, Human
uuuuuuuuuuuuuuuuuuucag

SEQ ID NO: 636788 - RNA, 24 nt, Human
aaaagcucuggacugccuuuaacu

SEQ ID NO: 636789 - RNA, 25 nt, Human
aaacaaaacaaauuaaaaaaaaaaa

SEQ ID NO: 636790 - RNA, 22 nt, Human
aacccuuaaagcuggagcuuaa

SEQ ID NO: 636791 - RNA, 26 nt, Human
aagcaggagaacgccucaccuuccac

SEQ ID NO: 636792 - RNA, 20 nt, Human
aagcaggaugaggaagagug

SEQ ID NO: 636793 - RNA, 24 nt, Human
aagggguuuggguggagaaaaaga

SEQ ID NO: 636794 - RNA, 22 nt, Human
aaucacuaccuaccaaaugcua

SEQ ID NO: 636795 - RNA, 25 nt, Human
aaucacuaccuaccaaaugcuaucc

SEQ ID NO: 636796 - RNA, 22 nt, Human
acaaaacuuaguucagcaaggc

SEQ ID NO: 636797 - RNA, 21 nt, Human
acccuuaaagcuggagcuuaa

SEQ ID NO: 636798 - RNA, 18 nt, Human
agaagagcugccgccucc

SEQ ID NO: 636799 - RNA, 21 nt, Human
agcaguucccugaacccccaa

SEQ ID NO: 636800 - RNA, 21 nt, Human
aggaagagugagggaaggccg

SEQ ID NO: 636801 - RNA, 18 nt, Human
aggaugaggaagagugag

SEQ ID NO: 636802 - RNA, 23 nt, Human
aggcagucuuguuuuugucgugg

SEQ ID NO: 636803 - RNA, 23 nt, Human
agguguagaaugccagauuccuu

SEQ ID NO: 636804 - RNA, 22 nt, Human
aguaggagacaaauuggcugaa

SEQ ID NO: 636805 - RNA, 20 nt, Human
agugagggaaggcggggaca

SEQ ID NO: 636806 - RNA, 24 nt, Human
auauacaccaauuccaaaauaaaa

SEQ ID NO: 636807 - RNA, 20 nt, Human
aucggccgcuuugggacuga

SEQ ID NO: 636808 - RNA, 21 nt, Human
caacccccgagacggugagga

SEQ ID NO: 636809 - RNA, 22 nt, Human
caagcaguucccugaaccccca

SEQ ID NO: 636810 - RNA, 24 nt, Human
cacagcaaacgcuccaggccuggg

SEQ ID NO: 636811 - RNA, 21 nt, Human
cacccugggcaagcaguuccc

SEQ ID NO: 636812 - RNA, 22 nt, Human
cagucuuguuuuugucguggga

SEQ ID NO: 636813 - RNA, 19 nt, Human
caucacacucacacugcac

SEQ ID NO: 636814 - RNA, 23 nt, Human
caucacacucacacugcacccug

SEQ ID NO: 636815 - RNA, 27 nt, Human
ccaauuccaaaauaaaacaaucaaaug

SEQ ID NO: 636816 - RNA, 18 nt, Human
cccagaagagcugccgcc

SEQ ID NO: 636817 - RNA, 22 nt, Human
ccccaaggggcucacaacccuu

SEQ ID NO: 636818 - RNA, 22 nt, Human
cccccaaggggcucacaacccu

SEQ ID NO: 636819 - RNA, 22 nt, Human
cccccgagacggugaggacagg

SEQ ID NO: 636820 - RNA, 29 nt, Human
cccccgagacggugaggacaggcuuccgg

SEQ ID NO: 636821 - RNA, 20 nt, Human
cccccuguaagccagaucca

SEQ ID NO: 636822 - RNA, 27 nt, Human
cccccuguaagccagauccagugggau

SEQ ID NO: 636823 - RNA, 21 nt, Human
cccugaacccccaaggggcuc

SEQ ID NO: 636824 - RNA, 18 nt, Human
ccgaccccccuguaagcc

SEQ ID NO: 636825 - RNA, 28 nt, Human
ccgguggcccaucacacucacacugcac

SEQ ID NO: 636826 - RNA, 23 nt, Human
ccuuccacuccugcuuugucucc

SEQ ID NO: 636827 - RNA, 19 nt, Human
cgccucaccuuccacuccu

SEQ ID NO: 636828 - RNA, 22 nt, Human
cggaagagagggaggcagucuu

SEQ ID NO: 636829 - RNA, 25 nt, Human
cuauccgcagaguuaaaggauuaag

SEQ ID NO: 636830 - RNA, 18 nt, Human
cucacaacccuuaaagcu

SEQ ID NO: 636831 - RNA, 18 nt, Human
cugaaaggcccaaggcug

SEQ ID NO: 636832 - RNA, 21 nt, Human
gagaagcaggaugaggaagag

SEQ ID NO: 636833 - RNA, 19 nt, Human
gcccaaggcugucaccagc

SEQ ID NO: 636834 - RNA, 21 nt, Human
gcuuccgaccccccuguaagc

SEQ ID NO: 636835 - RNA, 22 nt, Human
gggacugaaaggcccaaggcug

SEQ ID NO: 636836 - RNA, 18 nt, Human
gggcggucaccuucccuc

SEQ ID NO: 636837 - RNA, 18 nt, Human
guccagguguagaaugcc

SEQ ID NO: 636838 - RNA, 19 nt, Human
uaaaacaaaacaaauuaaa

SEQ ID NO: 636839 - RNA, 18 nt, Human
uaaagccuccuggcuuag

SEQ ID NO: 636840 - RNA, 24 nt, Human
uaaguacauaggucuuuauuuaaa

SEQ ID NO: 636841 - RNA, 27 nt, Human
uacaagcaggagaacgccucaccuucc

SEQ ID NO: 636842 - RNA, 23 nt, Human
uauauacacacaaaacuuaguuc

SEQ ID NO: 636843 - RNA, 18 nt, Human
ucacacugcacccugggc

SEQ ID NO: 636844 - RNA, 24 nt, Human
ucacuaccuaccaaaugcuauccg

SEQ ID NO: 636845 - RNA, 23 nt, Human
ucccggaagagagggaggcaguc

SEQ ID NO: 636846 - RNA, 22 nt, Human
ucccugaacccccaaggggcuc

SEQ ID NO: 636847 - RNA, 18 nt, Human
uccgcagaguuaaaggau

SEQ ID NO: 636848 - RNA, 23 nt, Human
ugaggaagagugagggaaggcgg

SEQ ID NO: 636849 - RNA, 19 nt, Human
ugccccgguggcccaucac

SEQ ID NO: 636850 - RNA, 21 nt, Human
ugcuuugucuccuuugcucua

SEQ ID NO: 636851 - RNA, 18 nt, Human
ugggaagggguuugggug

SEQ ID NO: 636852 - RNA, 19 nt, Human
uguguauuuauuauucaca

SEQ ID NO: 636853 - RNA, 19 nt, Human
uucauuguguauuuauuau

SEQ ID NO: 636854 - RNA, 19 nt, Human
aagacagcucucugccccc

SEQ ID NO: 636855 - RNA, 19 nt, Human
aagcacacacucugcaaac

SEQ ID NO: 636856 - RNA, 19 nt, Human
acaaauaccccauugcacc

SEQ ID NO: 636857 - RNA, 21 nt, Human
acagccaagcacacacucugc

SEQ ID NO: 636858 - RNA, 18 nt, Human
agcccagagccucggagg

SEQ ID NO: 636859 - RNA, 19 nt, Human
aggaagggcaggcuugaga

SEQ ID NO: 636860 - RNA, 20 nt, Human
aggcaaaaaggugguguuug

SEQ ID NO: 636861 - RNA, 21 nt, Human
aggcaaaaaggugguguuugg

SEQ ID NO: 636862 - RNA, 21 nt, Human
aggcugcccucccucucauuc

SEQ ID NO: 636863 - RNA, 24 nt, Human
agugcagugagugugggguccugg

SEQ ID NO: 636864 - RNA, 22 nt, Human
auuccccuccugauccacaauc

SEQ ID NO: 636865 - RNA, 27 nt, Human
cacagccaagcacacacucugcaaacc

SEQ ID NO: 636866 - RNA, 19 nt, Human
caccccccacccccagggc

SEQ ID NO: 636867 - RNA, 22 nt, Human
cacucugcaaaccuaucacugc

SEQ ID NO: 636868 - RNA, 20 nt, Human
cacugcgaguaguacaguuc

SEQ ID NO: 636869 - RNA, 18 nt, Human
cagaaggcugcccucccu

SEQ ID NO: 636870 - RNA, 24 nt, Human
cagcagcguucuccaagcuaggcu

SEQ ID NO: 636871 - RNA, 18 nt, Human
cagcaggggcucugaggc

SEQ ID NO: 636872 - RNA, 21 nt, Human
cagcguucuccaagcuaggcc

SEQ ID NO: 636873 - RNA, 19 nt, Human
cauuuugcgaauccugaca

SEQ ID NO: 636874 - RNA, 22 nt, Human
ccaagcuaggcugccacagcca

SEQ ID NO: 636875 - RNA, 18 nt, Human
ccacagccaagcacacac

SEQ ID NO: 636876 - RNA, 18 nt, Human
ccaccaccccccaccccc

SEQ ID NO: 636877 - RNA, 19 nt, Human
ccccccacccccagggcug

SEQ ID NO: 636878 - RNA, 18 nt, Human
cccugcccaccacccccc

SEQ ID NO: 636879 - RNA, 21 nt, Human
cccugcccaccaccccccacc

SEQ ID NO: 636880 - RNA, 19 nt, Human
ccugauccacaaucacagu

SEQ ID NO: 636881 - RNA, 20 nt, Human
ccugauccacaaucacaguu

SEQ ID NO: 636882 - RNA, 21 nt, Human
ccugcccaccaccccccaccc

SEQ ID NO: 636883 - RNA, 21 nt, Human
ccugugggugcagcccagagc

SEQ ID NO: 636884 - RNA, 18 nt, Human
cgucuaggaagggcaggc

SEQ ID NO: 636885 - RNA, 20 nt, Human
cgucuaggaagggcaggcuu

SEQ ID NO: 636886 - RNA, 23 nt, Human
uaccugugggugcagcccagagc

SEQ ID NO: 636887 - RNA, 24 nt, Human
ucagcaggggcucugaggccagga

SEQ ID NO: 636888 - RNA, 25 nt, Human
ucccucugacuugagaccaucuccc

SEQ ID NO: 636889 - RNA, 18 nt, Human
ucccugcccaccaccccc

SEQ ID NO: 636890 - RNA, 19 nt, Human
ucugcaaaccuaucacugc

SEQ ID NO: 636891 - RNA, 18 nt, Human
ucugcuucccucugacuu

SEQ ID NO: 636892 - RNA, 18 nt, Human
ugacugccaguggaggcg

SEQ ID NO: 636893 - RNA, 21 nt, Human
ugacugccaguggaggcgacc

SEQ ID NO: 636894 - RNA, 21 nt, Human
ugacuugagaccaucucccuu

SEQ ID NO: 636895 - RNA, 19 nt, Human
ugaggcaaaaagguggugu

SEQ ID NO: 636896 - RNA, 19 nt, Human
ugaggcaaaaagguggugu

SEQ ID NO: 636897 - RNA, 19 nt, Human
uggaggcgacacagguggc

SEQ ID NO: 636898 - RNA, 21 nt, Human
uggagguaccugugggugcag

SEQ ID NO: 636899 - RNA, 18 nt, Human
uggcagaaggcugcccuc

SEQ ID NO: 636900 - RNA, 25 nt, Human
uggcagaaggcugcccucccucuca

SEQ ID NO: 636901 - RNA, 22 nt, Human
uggccgucuaggaagggcaggc

SEQ ID NO: 636902 - RNA, 23 nt, Human
ugggguccugcagguggccgucu

SEQ ID NO: 636903 - RNA, 21 nt, Human
ugugggugcagcccagagccu

SEQ ID NO: 636904 - RNA, 21 nt, Human
uguuuggaaaacagcacacgg

SEQ ID NO: 636905 - RNA, 21 nt, Human
uuccccuccugauccacaauc

SEQ ID NO: 636906 - RNA, 19 nt, Human
uuuacagagaccuugaggc

SEQ ID NO: 636907 - RNA, 25 nt, Human
uuugcgaauccugacauuccccucu

SEQ ID NO: 636908 - RNA, 19 nt, Human
aacacguugaaaccccguc

SEQ ID NO: 636909 - RNA, 20 nt, Human
aacacguugaaaccccgucu

SEQ ID NO: 636910 - RNA, 21 nt, Human
aacacguugaaaccccgucuc

SEQ ID NO: 636911 - RNA, 19 nt, Human
agacugagaccauccuggc

SEQ ID NO: 636912 - RNA, 23 nt, Human
aggacgguggcucacaccuguaa

SEQ ID NO: 636913 - RNA, 21 nt, Human
aggccgaggcgggcggaucac

SEQ ID NO: 636914 - RNA, 19 nt, Human
agggccucacgcacgcccc

SEQ ID NO: 636915 - RNA, 21 nt, Human
auccuggccaacacguugaaa

SEQ ID NO: 636916 - RNA, 24 nt, Human
caacacguugaaaccccgucucua

SEQ ID NO: 636917 - RNA, 22 nt, Human
caacacuuugggaggccgaggc

SEQ ID NO: 636918 - RNA, 24 nt, Human
caacacuuugggaggccgaggcgg

SEQ ID NO: 636919 - RNA, 24 nt, Human
cacaccuguaaucccaacacuuug

SEQ ID NO: 636920 - RNA, 19 nt, Human
caccuguaaucccaacacu

SEQ ID NO: 636921 - RNA, 24 nt, Human
caccuguaaucccaacacuuuggg

SEQ ID NO: 636922 - RNA, 23 nt, Human
cacguugaaaccccgucucuaac

SEQ ID NO: 636923 - RNA, 19 nt, Human
cccucguacacacacucag

SEQ ID NO: 636924 - RNA, 23 nt, Human
ccuggccaacacguugaaacccc

SEQ ID NO: 636925 - RNA, 24 nt, Human
ccuggccaacacguugaaaccccg

SEQ ID NO: 636926 - RNA, 22 nt, Human
cgaggcgggcggaucacagggu

SEQ ID NO: 636927 - RNA, 26 nt, Human
cgaggcgggcggaucacagggucugg

SEQ ID NO: 636928 - RNA, 23 nt, Human
cggccaggacgguggcucacacc

SEQ ID NO: 636929 - RNA, 22 nt, Human
cucacaccuguaaucccaacac

SEQ ID NO: 636930 - RNA, 24 nt, Human
cucacaccuguaaucccaacacuu

SEQ ID NO: 636931 - RNA, 19 nt, Human
gaucacagggucuggagac

SEQ ID NO: 636932 - RNA, 20 nt, Human
gaucacagggucuggagacu

SEQ ID NO: 636933 - RNA, 20 nt, Human
ggccaggacgguggcucaca

SEQ ID NO: 636934 - RNA, 18 nt, Human
gggcggaucacagggucu

SEQ ID NO: 636935 - RNA, 23 nt, Human
gguggcucacaccuguaauccca

SEQ ID NO: 636936 - RNA, 24 nt, Human
ucacagggucuggagacugagacc

SEQ ID NO: 636937 - RNA, 19 nt, Human
ucucuaacgccagccaagg

SEQ ID NO: 636938 - RNA, 23 nt, Human
ugagaccauccuggccaacacgu

SEQ ID NO: 636939 - RNA, 21 nt, Human
uggcucacaccuguaauccca

SEQ ID NO: 636940 - RNA, 19 nt, Human
ugggaggccgaggcgggcg

SEQ ID NO: 636941 - RNA, 24 nt, Human
ugggaggccgaggcgggcggauca

SEQ ID NO: 636942 - RNA, 25 nt, Human
uugggaggccgaggcgggcggauca

SEQ ID NO: 636943 - RNA, 18 nt, Human
uuuuuuuuuugccgggcc

SEQ ID NO: 636944 - RNA, 19 nt, Human
uuuuuuuuuuuuuugccgg

SEQ ID NO: 636945 - RNA, 22 nt, Human
uuuuuuuuuuuuuuuuugccgg

SEQ ID NO: 636946 - RNA, 23 nt, Human
uuuuuuuuuuuuuuuuugccggg

SEQ ID NO: 636947 - RNA, 27 nt, Human
uuuuuuuuuuuuuuuuuuuuuuugggg

SEQ ID NO: 636948 - RNA, 18 nt, Human
aaacagacacgaacacga

SEQ ID NO: 636949 - RNA, 18 nt, Human
aagaacccagggccagga

SEQ ID NO: 636950 - RNA, 19 nt, Human
aagcggagcgcagggcagc

SEQ ID NO: 636951 - RNA, 21 nt, Human
aaggaaucgagcaaaacagac

SEQ ID NO: 636952 - RNA, 20 nt, Human
aagugcguguggucguggag

SEQ ID NO: 636953 - RNA, 20 nt, Human
aaucccaaagcaaagcggag

SEQ ID NO: 636954 - RNA, 20 nt, Human
aauguuccagaugagcaugg

SEQ ID NO: 636955 - RNA, 22 nt, Human
acccagggccaggagugcgccg

SEQ ID NO: 636956 - RNA, 19 nt, Human
acgcauggcgcagagguca

SEQ ID NO: 636957 - RNA, 22 nt, Human
agaauaaauuaaucccaaagca

SEQ ID NO: 636958 - RNA, 20 nt, Human
agcaaaacagacacgaacac

SEQ ID NO: 636959 - RNA, 18 nt, Human
agcaaagcggagcgcagg

SEQ ID NO: 636960 - RNA, 22 nt, Human
agcaaagcggagcgcagggcag

SEQ ID NO: 636961 - RNA, 19 nt, Human
aggagugcgccgucuuccc

SEQ ID NO: 636962 - RNA, 20 nt, Human
aggcagaacgagguuggccc

SEQ ID NO: 636963 - RNA, 20 nt, Human
agggagcagagggugggcag

SEQ ID NO: 636964 - RNA, 20 nt, Human
auggaacgcugagaagggcg

SEQ ID NO: 636965 - RNA, 20 nt, Human
cacacuccuuagcaccggcc

SEQ ID NO: 636966 - RNA, 18 nt, Human
cacgcauggcgcagaggu

SEQ ID NO: 636967 - RNA, 23 nt, Human
cagcagcaagaacccagggccag

SEQ ID NO: 636968 - RNA, 22 nt, Human
cagcagugggagucgagcccgc

SEQ ID NO: 636969 - RNA, 20 nt, Human
cagcuuccagcuuccacccu

SEQ ID NO: 636970 - RNA, 21 nt, Human
ccaaagcaaagcggagcgcag

SEQ ID NO: 636971 - RNA, 18 nt, Human
cccgggaagcggaggccg

SEQ ID NO: 636972 - RNA, 23 nt, Human
ccuccagggcaguuggccggucc

SEQ ID NO: 636973 - RNA, 22 nt, Human
ccucugcacgagcaggggaagu

SEQ ID NO: 636974 - RNA, 19 nt, Human
ccugcaccuggagcagggc

SEQ ID NO: 636975 - RNA, 24 nt, Human
ccugcaccuggagcagggccaggc

SEQ ID NO: 636976 - RNA, 19 nt, Human
ccuggaaagcagaguggcu

SEQ ID NO: 636977 - RNA, 18 nt, Human
ccugugccgcgcgugccu

SEQ ID NO: 636978 - RNA, 18 nt, Human
cgacauaacaguaaacgc

SEQ ID NO: 636979 - RNA, 20 nt, Human
cgccagcguggccagaaggc

SEQ ID NO: 636980 - RNA, 20 nt, Human
cggcagcagugggagucgag

SEQ ID NO: 636981 - RNA, 21 nt, Human
cgggaggccggcagcaguggg

SEQ ID NO: 636982 - RNA, 20 nt, Human
cggggcggcgcgggcggagg

SEQ ID NO: 636983 - RNA, 22 nt, Human
cggguucacagcuccucugugc

SEQ ID NO: 636984 - RNA, 21 nt, Human
cguggccagaaggcaggcgcc

SEQ ID NO: 636985 - RNA, 23 nt, Human
cuccagggcaguuggccgguccu

SEQ ID NO: 636986 - RNA, 20 nt, Human
cucgggaggccggcagcagu

SEQ ID NO: 636987 - RNA, 24 nt, Human
cugaaaccaucacuaaccggcuag

SEQ ID NO: 636988 - RNA, 21 nt, Human
cugcagcaguggaaaacagag

SEQ ID NO: 636989 - RNA, 18 nt, Human
cuggagcagggccaggcc

SEQ ID NO: 636990 - RNA, 20 nt, Human
cuggagcagggccaggccug

SEQ ID NO: 636991 - RNA, 19 nt, Human
cugugucucagcuuccagc

SEQ ID NO: 636992 - RNA, 22 nt, Human
cuuauccuccuuccugcaccug

SEQ ID NO: 636993 - RNA, 21 nt, Human
gagcaaaacagacacgaacac

SEQ ID NO: 636994 - RNA, 22 nt, Human
gagcccgcgccacacuccuuag

SEQ ID NO: 636995 - RNA, 26 nt, Human
gagcccgcgccacacuccuuagcacc

SEQ ID NO: 636996 - RNA, 23 nt, Human
gagcggcugaugacaaucacccg

SEQ ID NO: 636997 - RNA, 24 nt, Human
gagcggguucacagcuccucugug

SEQ ID NO: 636998 - RNA, 20 nt, Human
gagucacucgggaggccggc

SEQ ID NO: 636999 - RNA, 18 nt, Human
gcagagaggaaaugguug

SEQ ID NO: 637000 - RNA, 24 nt, Human
gcagaggucacccagacucauccc

SEQ ID NO: 637001 - RNA, 22 nt, Human
gcccaugggaugguccaggugu

SEQ ID NO: 637002 - RNA, 21 nt, Human
gcgcagggcagccucgcgcca

SEQ ID NO: 637003 - RNA, 19 nt, Human
ggcagcagcaagaacccag

SEQ ID NO: 637004 - RNA, 18 nt, Human
ggccggcagcagugggag

SEQ ID NO: 637005 - RNA, 18 nt, Human
gggagcagagggugggca

SEQ ID NO: 637006 - RNA, 18 nt, Human
gggcggcgcgggcggagg

SEQ ID NO: 637007 - RNA, 19 nt, Human
gguccuggaaagcagagug

SEQ ID NO: 637008 - RNA, 23 nt, Human
guaagauauggcuggggugcccc

SEQ ID NO: 637009 - RNA, 23 nt, Human
guucacagcuccucugugcugcc

SEQ ID NO: 637010 - RNA, 24 nt, Human
uaacaguaaacgcacacgugucuc

SEQ ID NO: 637011 - RNA, 22 nt, Human
ucacucgggaggccggcagcag

SEQ ID NO: 637012 - RNA, 22 nt, Human
uccagcccacggcgaaagcgcg

SEQ ID NO: 637013 - RNA, 19 nt, Human
ucccaaagcaaagcggagc

SEQ ID NO: 637014 - RNA, 23 nt, Human
ucccgggaagcggaggccggccu

SEQ ID NO: 637015 - RNA, 22 nt, Human
uccgcggccgcacguccaggga

SEQ ID NO: 637016 - RNA, 21 nt, Human
ucugugcugccugggccccug

SEQ ID NO: 637017 - RNA, 19 nt, Human
ucuucccgggaagcggagg

SEQ ID NO: 637018 - RNA, 22 nt, Human
ugaccgacauaacaguaaacgc

SEQ ID NO: 637019 - RNA, 24 nt, Human
ugagaagggcgacucagcauggug

SEQ ID NO: 637020 - RNA, 19 nt, Human
ugaugacaaucacccgggg

SEQ ID NO: 637021 - RNA, 21 nt, Human
ugccaggcuccgggcagggug

SEQ ID NO: 637022 - RNA, 20 nt, Human
uggagcagggccaggccugu

SEQ ID NO: 637023 - RNA, 20 nt, Human
uggagcggguucacagcucc

SEQ ID NO: 637024 - RNA, 18 nt, Human
uggaugccuccagggcag

SEQ ID NO: 637025 - RNA, 19 nt, Human
uggcccacgacacguacag

SEQ ID NO: 637026 - RNA, 19 nt, Human
uggccgguguggagcgggu

SEQ ID NO: 637027 - RNA, 19 nt, Human
ugggaugguccaggugugc

SEQ ID NO: 637028 - RNA, 21 nt, Human
uggugguggagucccuugguu

SEQ ID NO: 637029 - RNA, 21 nt, Human
ugugccgccucucggcccggc

SEQ ID NO: 637030 - RNA, 21 nt, Human
ugugcugccugggccccugug

SEQ ID NO: 637031 - RNA, 26 nt, Human
uuaaucccaaagcaaagcggagcgca

SEQ ID NO: 637032 - RNA, 21 nt, Human
uucacagcuccucugugcugc

SEQ ID NO: 637033 - RNA, 23 nt, Human
uucccuggcucucagcagagagg

SEQ ID NO: 637034 - RNA, 24 nt, Human
aaugugggggauggacaggaggga

SEQ ID NO: 637035 - RNA, 23 nt, Human
accuugugcccaggcgaguuccc

SEQ ID NO: 637036 - RNA, 21 nt, Human
aggagggagggccugggcagg

SEQ ID NO: 637037 - RNA, 20 nt, Human
ccaaccggccaggacaggcc

SEQ ID NO: 637038 - RNA, 23 nt, Human
cgaaaacagaaagcucuuuaugc

SEQ ID NO: 637039 - RNA, 20 nt, Human
gaaugugggggauggacagg

SEQ ID NO: 637040 - RNA, 21 nt, Human
gacaggggaaugugggggaug

SEQ ID NO: 637041 - RNA, 21 nt, Human
gccagguugcauucugacagg

SEQ ID NO: 637042 - RNA, 22 nt, Human
ggacaggagggagggccugggc

SEQ ID NO: 637043 - RNA, 19 nt, Human
ggggauggacaggagggag

SEQ ID NO: 637044 - RNA, 24 nt, Human
uaugccaaaucacaaggacagaca

SEQ ID NO: 637045 - RNA, 22 nt, Human
ucccggacccauccaggagcuc

SEQ ID NO: 637046 - RNA, 22 nt, Human
ugccaaaucacaaggacagaca

SEQ ID NO: 637047 - RNA, 18 nt, Human
ugugccuggcucagaacu

SEQ ID NO: 637048 - RNA, 21 nt, Human
uucccggacccauccaggagc

SEQ ID NO: 637049 - RNA, 26 nt, Human
uuuuuuuuuuucgaaaacagaaagcu

SEQ ID NO: 637050 - RNA, 18 nt, Human
uuuuuuuuuuuuuuuucg

SEQ ID NO: 637051 - RNA, 25 nt, Human
aaagacuuggcgaggauuuacagaa

SEQ ID NO: 637052 - RNA, 23 nt, Human
aauaaguagcagagaaucuuaca

SEQ ID NO: 637053 - RNA, 24 nt, Human
aaucuuacagagucgucccuuuga

SEQ ID NO: 637054 - RNA, 22 nt, Human
acaccacugcaguccccugugc

SEQ ID NO: 637055 - RNA, 21 nt, Human
accccuuccccaauugccacc

SEQ ID NO: 637056 - RNA, 23 nt, Human
agaaccccuuccccaauugccac

SEQ ID NO: 637057 - RNA, 18 nt, Human
agaguuguuuauuucuga

SEQ ID NO: 637058 - RNA, 18 nt, Human
agcccagaaccccuuccc

SEQ ID NO: 637059 - RNA, 21 nt, Human
agcccagaaccccuuccccaa

SEQ ID NO: 637060 - RNA, 23 nt, Human
agcccagaaccccuuccccaauu

SEQ ID NO: 637061 - RNA, 20 nt, Human
aggcaggguuaaacagggug

SEQ ID NO: 637062 - RNA, 21 nt, Human
aguggcucuggacaagucacu

SEQ ID NO: 637063 - RNA, 25 nt, Human
augaguaacagaaaccauggauggg

SEQ ID NO: 637064 - RNA, 20 nt, Human
caaagcacaccacugcaguc

SEQ ID NO: 637065 - RNA, 18 nt, Human
cacugcaguccccugugc

SEQ ID NO: 637066 - RNA, 26 nt, Human
cagcccagaaccccuuccccaauugc

SEQ ID NO: 637067 - RNA, 24 nt, Human
caguccccugugccauguuggagu

SEQ ID NO: 637068 - RNA, 19 nt, Human
ccaaagcacaccacugcag

SEQ ID NO: 637069 - RNA, 21 nt, Human
ccaaagcacaccacugcaguc

SEQ ID NO: 637070 - RNA, 19 nt, Human
ccaccucgcccacgcgucc

SEQ ID NO: 637071 - RNA, 19 nt, Human
ccacgaagcucuggccugu

SEQ ID NO: 637072 - RNA, 21 nt, Human
ccagagugaaggaggguugaa

SEQ ID NO: 637073 - RNA, 24 nt, Human
ccagccaacgcaggggugaucagc

SEQ ID NO: 637074 - RNA, 19 nt, Human
ccaggccaggcgaguguuc

SEQ ID NO: 637075 - RNA, 20 nt, Human
cccaauugccaccucgccca

SEQ ID NO: 637076 - RNA, 21 nt, Human
cccagaggaggcugagaugag

SEQ ID NO: 637077 - RNA, 21 nt, Human
ccccagagaaauguuguccuu

SEQ ID NO: 637078 - RNA, 23 nt, Human
ccgaagaccaguguuuacuagca

SEQ ID NO: 637079 - RNA, 21 nt, Human
ccuauccuacauggccuggga

SEQ ID NO: 637080 - RNA, 22 nt, Human
ccuauccuacauggccugggaa

SEQ ID NO: 637081 - RNA, 21 nt, Human
ccuuggguggguacacagguc

SEQ ID NO: 637082 - RNA, 25 nt, Human
ccuuugaaggcaggguuaaacagga

SEQ ID NO: 637083 - RNA, 22 nt, Human
ccuuuugacagaguggcucugg

SEQ ID NO: 637084 - RNA, 19 nt, Human
cucauagccaucacucacu

SEQ ID NO: 637085 - RNA, 25 nt, Human
cugaaaccaugaguaacagaaacca

SEQ ID NO: 637086 - RNA, 27 nt, Human
cugaaaccaugaguaacagaaaccaug

SEQ ID NO: 637087 - RNA, 24 nt, Human
gaggaggcugagaugagcuaacca

SEQ ID NO: 637088 - RNA, 21 nt, Human
gccuuuccuucuccaucuggc

SEQ ID NO: 637089 - RNA, 18 nt, Human
gggaggaugacuggaguc

SEQ ID NO: 637090 - RNA, 21 nt, Human
guggcucuggacaagucacuu

SEQ ID NO: 637091 - RNA, 23 nt, Human
uaacagaaaccauggauggggga

SEQ ID NO: 637092 - RNA, 23 nt, Human
uacacagguccaaagcacaccac

SEQ ID NO: 637093 - RNA, 22 nt, Human
uaugaguaacugaaaccaugag

SEQ ID NO: 637094 - RNA, 24 nt, Human
uauuucugaaauuuuucauuuagu

SEQ ID NO: 637095 - RNA, 23 nt, Human
ucacaaguguccccauaaguaac

SEQ ID NO: 637096 - RNA, 24 nt, Human
ucccagaggaggcugagaugagcu

SEQ ID NO: 637097 - RNA, 24 nt, Human
ucuggcucugccuuuagccuuggg

SEQ ID NO: 637098 - RNA, 19 nt, Human
ugaaggcaggguuaaacag

SEQ ID NO: 637099 - RNA, 19 nt, Human
ugagaugagcuaaccagug

SEQ ID NO: 637100 - RNA, 20 nt, Human
ugagaugagcuaaccagugg

SEQ ID NO: 637101 - RNA, 19 nt, Human
ugaguaacagaaaccaugg

SEQ ID NO: 637102 - RNA, 23 nt, Human
ugaguaacagaaaccauggaugg

SEQ ID NO: 637103 - RNA, 20 nt, Human
ugaguaacugaaaccaugag

SEQ ID NO: 637104 - RNA, 27 nt, Human
ugccuccagccaacgcaggggugaucc

SEQ ID NO: 637105 - RNA, 18 nt, Human
ugccugcggcagcccaga

SEQ ID NO: 637106 - RNA, 18 nt, Human
ugccuuuagccuuggguu

SEQ ID NO: 637107 - RNA, 23 nt, Human
uggaguauccuauccuacauggc

SEQ ID NO: 637108 - RNA, 20 nt, Human
uggccuggagaaagacuugg

SEQ ID NO: 637109 - RNA, 19 nt, Human
ugggggaggaugacuggag

SEQ ID NO: 637110 - RNA, 22 nt, Human
ugugccugcggcagcccagaac

SEQ ID NO: 637111 - RNA, 23 nt, Human
ugugccugcggcagcccagaacc

SEQ ID NO: 637112 - RNA, 20 nt, Human
uucguugcucaccgaagacc

SEQ ID NO: 637113 - RNA, 21 nt, Human
uuuacagaauucugccuccag

SEQ ID NO: 637114 - RNA, 18 nt, Human
aacauagugaucccaucu

SEQ ID NO: 637115 - RNA, 19 nt, Human
aacauagugaucccaucuc

SEQ ID NO: 637116 - RNA, 19 nt, Human
acaauucuuuuacucugcu

SEQ ID NO: 637117 - RNA, 22 nt, Human
acaggcgauaaaaucccagagc

SEQ ID NO: 637118 - RNA, 25 nt, Human
acucugcucuuuucuagguugaagu

SEQ ID NO: 637119 - RNA, 23 nt, Human
acuuuauuagauccacaggcgau

SEQ ID NO: 637120 - RNA, 21 nt, Human
acuuugaucacuucauccauu

SEQ ID NO: 637121 - RNA, 21 nt, Human
agcaugggcaacauagugauc

SEQ ID NO: 637122 - RNA, 23 nt, Human
agcucugacucuguuuucuuuuu

SEQ ID NO: 637123 - RNA, 21 nt, Human
aggcccagaguccgacagcgg

SEQ ID NO: 637124 - RNA, 23 nt, Human
aggcgauaaaaucccagagcuac

SEQ ID NO: 637125 - RNA, 24 nt, Human
agugguucacgccuguaaucccag

SEQ ID NO: 637126 - RNA, 19 nt, Human
aucaagcuugugugacuca

SEQ ID NO: 637127 - RNA, 22 nt, Human
auccuaacacucugggagacca

SEQ ID NO: 637128 - RNA, 18 nt, Human
augccacuauuucuguuc

SEQ ID NO: 637129 - RNA, 22 nt, Human
caaacccaaaauguuaacauug

SEQ ID NO: 637130 - RNA, 21 nt, Human
cacagcgcaggaccgcccuuu

SEQ ID NO: 637131 - RNA, 22 nt, Human
cacagcgcaggaccgcccuuuc

SEQ ID NO: 637132 - RNA, 19 nt, Human
cacgccuguaaucccagca

SEQ ID NO: 637133 - RNA, 24 nt, Human
cacgccuguaauccuaacacucug

SEQ ID NO: 637134 - RNA, 18 nt, Human
cacuggcccgggcgcgcg

SEQ ID NO: 637135 - RNA, 25 nt, Human
cacuuuaaauagacacuuuauuaga

SEQ ID NO: 637136 - RNA, 25 nt, Human
cauuuucugcucugagggcugaaaa

SEQ ID NO: 637137 - RNA, 21 nt, Human
ccccgagcaguucacuggccc

SEQ ID NO: 637138 - RNA, 22 nt, Human
ccuguaauccuaacacucuggg

SEQ ID NO: 637139 - RNA, 18 nt, Human
cgagcgugggccacagcg

SEQ ID NO: 637140 - RNA, 24 nt, Human
cgauguccauguuggccuccagga

SEQ ID NO: 637141 - RNA, 23 nt, Human
cgccuguaauccuaacacucugg

SEQ ID NO: 637142 - RNA, 24 nt, Human
cgggaggaucuuugagcccaggag

SEQ ID NO: 637143 - RNA, 21 nt, Human
cguucaaugaauacaauucuu

SEQ ID NO: 637144 - RNA, 20 nt, Human
cucacgccuguaauccuaac

SEQ ID NO: 637145 - RNA, 23 nt, Human
cucacgccuguaauccuaacacu

SEQ ID NO: 637146 - RNA, 18 nt, Human
cugagggcugaaaauuca

SEQ ID NO: 637147 - RNA, 23 nt, Human
gaagucuaauuugguaucuguuc

SEQ ID NO: 637148 - RNA, 19 nt, Human
gagcaguucacuggcccgg

SEQ ID NO: 637149 - RNA, 21 nt, Human
gaggaucuuugagcccaggag

SEQ ID NO: 637150 - RNA, 23 nt, Human
gcccagaguccgacagcgggagc

SEQ ID NO: 637151 - RNA, 18 nt, Human
gcugggugugguggcuca

SEQ ID NO: 637152 - RNA, 21 nt, Human
gcugggugugguggcucacgc

SEQ ID NO: 637153 - RNA, 24 nt, Human
ggacacagugguucacgccuguaa

SEQ ID NO: 637154 - RNA, 18 nt, Human
ggcucacgccuguaaucc

SEQ ID NO: 637155 - RNA, 19 nt, Human
ggcugggugugguggcuca

SEQ ID NO: 637156 - RNA, 21 nt, Human
ggcugggugugguggcucacg

SEQ ID NO: 637157 - RNA, 24 nt, Human
gggugugguggcucacgccuguaa

SEQ ID NO: 637158 - RNA, 23 nt, Human
gguggcucacgccuguaauccua

SEQ ID NO: 637159 - RNA, 23 nt, Human
uaacauuguuuagcucugacucu

SEQ ID NO: 637160 - RNA, 22 nt, Human
ucacgccuguaaucccagcacu

SEQ ID NO: 637161 - RNA, 21 nt, Human
ucccagagcuacuguuaggca

SEQ ID NO: 637162 - RNA, 19 nt, Human
ucgcuuuuggcgccggcca

SEQ ID NO: 637163 - RNA, 19 nt, Human
ucugcucuuuucuagguug

SEQ ID NO: 637164 - RNA, 20 nt, Human
ucuggguaagggcccgaucu

SEQ ID NO: 637165 - RNA, 23 nt, Human
ugagcccaggaguucagaaccag

SEQ ID NO: 637166 - RNA, 22 nt, Human
uggcaacuggacacagugguuc

SEQ ID NO: 637167 - RNA, 23 nt, Human
uggcccgggcgcgcgcucaugcc

SEQ ID NO: 637168 - RNA, 24 nt, Human
uggcucacgccuguaauccuaaca

SEQ ID NO: 637169 - RNA, 23 nt, Human
uggcugggugugguggcucacgc

SEQ ID NO: 637170 - RNA, 22 nt, Human
ugguggcucacgccuguaaucc

SEQ ID NO: 637171 - RNA, 24 nt, Human
ugguucacgccuguaaucccagca

SEQ ID NO: 637172 - RNA, 25 nt, Human
uucauccauuacuuguuguuuuaac

SEQ ID NO: 637173 - RNA, 21 nt, Human
uuucucauuuucugcucugag

SEQ ID NO: 637174 - RNA, 19 nt, Human
uuuuuuuuuuuuucacuuu

SEQ ID NO: 637175 - RNA, 22 nt, Human
uuuuuuuuuuuuuuuucacuuu

SEQ ID NO: 637176 - RNA, 24 nt, Human
uuuuuuuuuuuuuuuucacuuuaa

SEQ ID NO: 637177 - RNA, 25 nt, Human
uuuuuuuuuuuuuuuucacuuuaau

SEQ ID NO: 637178 - RNA, 25 nt, Human
aaacuucccaaacagcucacaaucc

SEQ ID NO: 637179 - RNA, 18 nt, Human
aaaugcuguucacugaac

SEQ ID NO: 637180 - RNA, 25 nt, Human
aaccacaaguagcauccaaacagcc

SEQ ID NO: 637181 - RNA, 19 nt, Human
aaccagugcugggcgcccc

SEQ ID NO: 637182 - RNA, 19 nt, Human
aacuugccucuuguccccu

SEQ ID NO: 637183 - RNA, 19 nt, Human
aagaaaacaaacucagcga

SEQ ID NO: 637184 - RNA, 19 nt, Human
aauccaaugugaccucauc

SEQ ID NO: 637185 - RNA, 24 nt, Human
aauucaaccacaaguagcauccaa

SEQ ID NO: 637186 - RNA, 23 nt, Human
accugucccaugccucucugcug

SEQ ID NO: 637187 - RNA, 24 nt, Human
aggcuuuugcuaccauuccaaagc

SEQ ID NO: 637188 - RNA, 25 nt, Human
agggaaaggcagaggcgucccaagc

SEQ ID NO: 637189 - RNA, 22 nt, Human
agggagggagggaaaggcagag

SEQ ID NO: 637190 - RNA, 19 nt, Human
agggugauuuuggcuucac

SEQ ID NO: 637191 - RNA, 22 nt, Human
caaaacucucucuucuccuaag

SEQ ID NO: 637192 - RNA, 23 nt, Human
cagaccuggcaccaaauguccug

SEQ ID NO: 637193 - RNA, 22 nt, Human
cagcgauguuugcucacuuucc

SEQ ID NO: 637194 - RNA, 19 nt, Human
caggccccugaaaccuccu

SEQ ID NO: 637195 - RNA, 23 nt, Human
caggggaggccaggccagccccg

SEQ ID NO: 637196 - RNA, 22 nt, Human
caggugucccuccaccugugcu

SEQ ID NO: 637197 - RNA, 20 nt, Human
caugacagguacuugcugaa

SEQ ID NO: 637198 - RNA, 23 nt, Human
caugacuucuguuuuucuauguc

SEQ ID NO: 637199 - RNA, 21 nt, Human
cauuccaaagccaacaugaaa

SEQ ID NO: 637200 - RNA, 19 nt, Human
ccccugaaaccuccugagg

SEQ ID NO: 637201 - RNA, 21 nt, Human
cccgccacauccgcuuggccg

SEQ ID NO: 637202 - RNA, 20 nt, Human
ccuccaggugucccuccacc

SEQ ID NO: 637203 - RNA, 21 nt, Human
ccuccaggugucccuccaccu

SEQ ID NO: 637204 - RNA, 22 nt, Human
cgcuuccacgaaacuucccaaa

SEQ ID NO: 637205 - RNA, 18 nt, Human
cuaaaaguuuuccauuuc

SEQ ID NO: 637206 - RNA, 24 nt, Human
cugaaccagugcugggcgccccug

SEQ ID NO: 637207 - RNA, 20 nt, Human
cuuccuucuaaggcuugugg

SEQ ID NO: 637208 - RNA, 21 nt, Human
cuucucccuuuugagcagagg

SEQ ID NO: 637209 - RNA, 21 nt, Human
gaaacuucccaaacagcucac

SEQ ID NO: 637210 - RNA, 22 nt, Human
gaaacuucccaaacagcucacu

SEQ ID NO: 637211 - RNA, 18 nt, Human
gagauccuuggugucccu

SEQ ID NO: 637212 - RNA, 19 nt, Human
gaguauauccaggggaggc

SEQ ID NO: 637213 - RNA, 21 nt, Human
gcaaagacccuauuuccaaac

SEQ ID NO: 637214 - RNA, 19 nt, Human
gcugggcgccccugggcag

SEQ ID NO: 637215 - RNA, 19 nt, Human
ggaagggagggagggaaag

SEQ ID NO: 637216 - RNA, 18 nt, Human
ggcugcaucacuccaacu

SEQ ID NO: 637217 - RNA, 20 nt, Human
gggaaagcccgcuuggaggc

SEQ ID NO: 637218 - RNA, 22 nt, Human
gggccaugcuuccuucuaaggc

SEQ ID NO: 637219 - RNA, 18 nt, Human
ggggaaagcccgcuugga

SEQ ID NO: 637220 - RNA, 19 nt, Human
ggggaagggagggagggaa

SEQ ID NO: 637221 - RNA, 24 nt, Human
ggugucccuccaccugugcuggca

SEQ ID NO: 637222 - RNA, 19 nt, Human
guccaggggaaagcccgcu

SEQ ID NO: 637223 - RNA, 19 nt, Human
gugcugggcgccccugggc

SEQ ID NO: 637224 - RNA, 23 nt, Human
uagaguauauccaggggaggcca

SEQ ID NO: 637225 - RNA, 21 nt, Human
uauagaguauauccaggggag

SEQ ID NO: 637226 - RNA, 25 nt, Human
uauucuuccaguucuggagucugga

SEQ ID NO: 637227 - RNA, 18 nt, Human
ucaacaggccccugaaac

SEQ ID NO: 637228 - RNA, 23 nt, Human
ucacggggauggggguuaagacu

SEQ ID NO: 637229 - RNA, 18 nt, Human
ucaugucaacaggccccu

SEQ ID NO: 637230 - RNA, 18 nt, Human
uccaccugugcuggcacu

SEQ ID NO: 637231 - RNA, 24 nt, Human
uccccuggucuucuucccacugca

SEQ ID NO: 637232 - RNA, 18 nt, Human
ucccuuuugagcagaggu

SEQ ID NO: 637233 - RNA, 21 nt, Human
ucccuuuugagcagaggucau

SEQ ID NO: 637234 - RNA, 18 nt, Human
uccuucuaaggcuugugg

SEQ ID NO: 637235 - RNA, 22 nt, Human
ucuaaaaguuuuccauuucuuc

SEQ ID NO: 637236 - RNA, 21 nt, Human
ucucuugacauugaauuccag

SEQ ID NO: 637237 - RNA, 21 nt, Human
ucugcaaagacccuauuucca

SEQ ID NO: 637238 - RNA, 30 nt, Human
ugauaaaaaauaaaaaaauacauguacagg

SEQ ID NO: 637239 - RNA, 21 nt, Human
ugauacagagggagugcaggg

SEQ ID NO: 637240 - RNA, 20 nt, Human
ugauuuuggcuucacacauu

SEQ ID NO: 637241 - RNA, 24 nt, Human
ugcacuauagaguauauccagggg

SEQ ID NO: 637242 - RNA, 22 nt, Human
ugcuuuauccuuuuggugcacu

SEQ ID NO: 637243 - RNA, 19 nt, Human
uggagucuggaauucugaa

SEQ ID NO: 637244 - RNA, 23 nt, Human
uggccuccaggugucccuccacc

SEQ ID NO: 637245 - RNA, 22 nt, Human
uggcucgaucacccgccacauc

SEQ ID NO: 637246 - RNA, 23 nt, Human
ugggcgccccugggcaggguggc

SEQ ID NO: 637247 - RNA, 23 nt, Human
ugggggaacacaauucaaccaca

SEQ ID NO: 637248 - RNA, 18 nt, Human
uguggggaaccuguccca

SEQ ID NO: 637249 - RNA, 22 nt, Human
uguucuugucuaagcacuucug

SEQ ID NO: 637250 - RNA, 22 nt, Human
uucaugucaacaggccccugaa

SEQ ID NO: 637251 - RNA, 24 nt, Human
uuccaguucuggagucuggaauuc

SEQ ID NO: 637252 - RNA, 18 nt, Human
uuccuucuaaggcuugug

SEQ ID NO: 637253 - RNA, 23 nt, Human
uucucccgaacaagaaaacaaac

SEQ ID NO: 637254 - RNA, 24 nt, Human
uuggccgccagaagccgucgggga

SEQ ID NO: 637255 - RNA, 21 nt, Human
uuuuaagcaucaucucagcca

SEQ ID NO: 637256 - RNA, 21 nt, Human
aaaaugauaacaugaaauccc

SEQ ID NO: 637257 - RNA, 18 nt, Human
aaagugcugggauuacaa

SEQ ID NO: 637258 - RNA, 24 nt, Human
aaagugcugggauuacaagcguga

SEQ ID NO: 637259 - RNA, 23 nt, Human
aaauuacugauuuagacuuccau

SEQ ID NO: 637260 - RNA, 21 nt, Human
aacaaucaaacgucugcuaaa

SEQ ID NO: 637261 - RNA, 22 nt, Human
aaccacaggaagaggguaaaug

SEQ ID NO: 637262 - RNA, 20 nt, Human
aacuacaagaagaagaaaac

SEQ ID NO: 637263 - RNA, 22 nt, Human
aaguaccugggauuauaggcau

SEQ ID NO: 637264 - RNA, 19 nt, Human
aagugcugggauuacaagc

SEQ ID NO: 637265 - RNA, 19 nt, Human
aagugcugggauuacaagc

SEQ ID NO: 637266 - RNA, 26 nt, Human
aagugcugggauuacaagcgugagcc

SEQ ID NO: 637267 - RNA, 24 nt, Human
aauuuuguauuuucgggagagaug

SEQ ID NO: 637268 - RNA, 19 nt, Human
acaaucaaacgucugcuaa

SEQ ID NO: 637269 - RNA, 24 nt, Human
acccucaccaggaacugacuuggc

SEQ ID NO: 637270 - RNA, 24 nt, Human
acugcaaacuacaaacugauugag

SEQ ID NO: 637271 - RNA, 22 nt, Human
agaaacacguauucuacagugc

SEQ ID NO: 637272 - RNA, 21 nt, Human
agaagaaaacagcuuccugaa

SEQ ID NO: 637273 - RNA, 20 nt, Human
agagcuaccccauuauuauu

SEQ ID NO: 637274 - RNA, 19 nt, Human
agauuaggggcacugcaaa

SEQ ID NO: 637275 - RNA, 20 nt, Human
aggaggugauaaaggucaaa

SEQ ID NO: 637276 - RNA, 21 nt, Human
aggcaguuuugugaugcgguc

SEQ ID NO: 637277 - RNA, 19 nt, Human
aggcaugcaccaccacgcc

SEQ ID NO: 637278 - RNA, 24 nt, Human
aggugauccgcccaccuuggccuc

SEQ ID NO: 637279 - RNA, 24 nt, Human
agugauucuccugccucagccucc

SEQ ID NO: 637280 - RNA, 24 nt, Human
agugcugggauuacaagcgugagc

SEQ ID NO: 637281 - RNA, 19 nt, Human
auaaaauuuacuucaggag

SEQ ID NO: 637282 - RNA, 21 nt, Human
aucccuaaauuagaacuacaa

SEQ ID NO: 637283 - RNA, 21 nt, Human
augggguuucuccauguuggu

SEQ ID NO: 637284 - RNA, 24 nt, Human
augggguuucuccauguuggucag

SEQ ID NO: 637285 - RNA, 18 nt, Human
auucuccugccucagccu

SEQ ID NO: 637286 - RNA, 24 nt, Human
caaagugcugggauuacaagcgug

SEQ ID NO: 637287 - RNA, 22 nt, Human
caagaagaagaaaacagcuucc

SEQ ID NO: 637288 - RNA, 22 nt, Human
caagugauucuccugccucagc

SEQ ID NO: 637289 - RNA, 27 nt, Human
caagugauucuccugccucagccuccc

SEQ ID NO: 637290 - RNA, 22 nt, Human
caccaccacgccuggcuaauuu

SEQ ID NO: 637291 - RNA, 23 nt, Human
cacugcaaucucugccuccuggg

SEQ ID NO: 637292 - RNA, 18 nt, Human
cagcuuccugaaugguaa

SEQ ID NO: 637293 - RNA, 19 nt, Human
cagcuuggagaaacaacag

SEQ ID NO: 637294 - RNA, 23 nt, Human
caugcaccaccacgccuggcuaa

SEQ ID NO: 637295 - RNA, 23 nt, Human
ccaaagccuugaagucaaagugg

SEQ ID NO: 637296 - RNA, 22 nt, Human
ccaaagugcugggauuacaagc

SEQ ID NO: 637297 - RNA, 24 nt, Human
ccaaagugcugggauuacaagcgu

SEQ ID NO: 637298 - RNA, 24 nt, Human
ccaaguaccugggauuauaggcau

SEQ ID NO: 637299 - RNA, 21 nt, Human
ccaucugcaagccaggaagag

SEQ ID NO: 637300 - RNA, 22 nt, Human
ccaucugcaagccaggaagaga

SEQ ID NO: 637301 - RNA, 19 nt, Human
ccauguuggucaggcuggu

SEQ ID NO: 637302 - RNA, 22 nt, Human
ccauguuggucaggcuggucuc

SEQ ID NO: 637303 - RNA, 23 nt, Human
ccauguuggucaggcuggucucg

SEQ ID NO: 637304 - RNA, 23 nt, Human
cccaaguaccugggauuauaggc

SEQ ID NO: 637305 - RNA, 24 nt, Human
cccaaguaccugggauuauaggca

SEQ ID NO: 637306 - RNA, 19 nt, Human
cccaggcuggagugcaaug

SEQ ID NO: 637307 - RNA, 20 nt, Human
ccgugcccaaccuaaaugca

SEQ ID NO: 637308 - RNA, 24 nt, Human
ccuccuggguucaagugauucucc

SEQ ID NO: 637309 - RNA, 24 nt, Human
ccugaccucaggugauccgcccac

SEQ ID NO: 637310 - RNA, 23 nt, Human
ccuggguucaagugauucuccuc

SEQ ID NO: 637311 - RNA, 23 nt, Human
ccuggguucaagugauucuccug

SEQ ID NO: 637312 - RNA, 22 nt, Human
cuagaacucagcuuggagaaac

SEQ ID NO: 637313 - RNA, 24 nt, Human
cucacugcaaucucugccuccugg

SEQ ID NO: 637314 - RNA, 22 nt, Human
cucacuuucaacuuucaaggcc

SEQ ID NO: 637315 - RNA, 24 nt, Human
cucaggugauccgcccaccuuggc

SEQ ID NO: 637316 - RNA, 19 nt, Human
cucccaaaaccacaggaag

SEQ ID NO: 637317 - RNA, 20 nt, Human
cuccuggguucaagugauuc

SEQ ID NO: 637318 - RNA, 21 nt, Human
cuccuggguucaagugauucu

SEQ ID NO: 637319 - RNA, 21 nt, Human
cucuuguugcccaggcuggag

SEQ ID NO: 637320 - RNA, 24 nt, Human
cugcaaucucugccuccuggguuc

SEQ ID NO: 637321 - RNA, 23 nt, Human
cugccuccuggguucaagugauu

SEQ ID NO: 637322 - RNA, 24 nt, Human
cuggagugcaauggcaugaucuca

SEQ ID NO: 637323 - RNA, 24 nt, Human
cuucucuuguugcccaggcuggag

SEQ ID NO: 637324 - RNA, 24 nt, Human
cuuguugcccaggcuggagugcaa

SEQ ID NO: 637325 - RNA, 23 nt, Human
gaccucaggugauccgcccaccu

SEQ ID NO: 637326 - RNA, 19 nt, Human
gacuguauuuggagauaga

SEQ ID NO: 637327 - RNA, 21 nt, Human
gagaaaauaaaauucuguucu

SEQ ID NO: 637328 - RNA, 24 nt, Human
gagaugggguuucuccauguuggu

SEQ ID NO: 637329 - RNA, 21 nt, Human
gauggcaggacaagaaguuaa

SEQ ID NO: 637330 - RNA, 18 nt, Human
gauuacaagcgugagcca

SEQ ID NO: 637331 - RNA, 24 nt, Human
gauuacaagcgugagccaccgugc

SEQ ID NO: 637332 - RNA, 23 nt, Human
gcaagaagguagaggguggccuc

SEQ ID NO: 637333 - RNA, 24 nt, Human
gcccaggcuggagugcaauggcau

SEQ ID NO: 637334 - RNA, 19 nt, Human
gcggucuuggcuuccaggg

SEQ ID NO: 637335 - RNA, 19 nt, Human
gcuggagugcaauggcaug

SEQ ID NO: 637336 - RNA, 23 nt, Human
gcuggucucgaacuccugaccuc

SEQ ID NO: 637337 - RNA, 19 nt, Human
ggagaggagcuacuuggua

SEQ ID NO: 637338 - RNA, 24 nt, Human
ggcuggucucgaacuccugaccuc

SEQ ID NO: 637339 - RNA, 19 nt, Human
ggcugguggaagacuuugg

SEQ ID NO: 637340 - RNA, 18 nt, Human
gggguuucuccauguugg

SEQ ID NO: 637341 - RNA, 22 nt, Human
gggguuucuccauguuggucag

SEQ ID NO: 637342 - RNA, 22 nt, Human
ggguuucuccauguuggucagg

SEQ ID NO: 637343 - RNA, 19 nt, Human
ggucucgaacuccugaccu

SEQ ID NO: 637344 - RNA, 22 nt, Human
ggugauaaaggucaaaugagga

SEQ ID NO: 637345 - RNA, 24 nt, Human
gugauucuccugccucagccuccc

SEQ ID NO: 637346 - RNA, 20 nt, Human
uaaaacgagcgauaagccca

SEQ ID NO: 637347 - RNA, 23 nt, Human
uaaaauucuguucuuugagacac

SEQ ID NO: 637348 - RNA, 19 nt, Human
uaaggaggugauaaagguc

SEQ ID NO: 637349 - RNA, 23 nt, Human
uacaagaagaagaaaacagcuuc

SEQ ID NO: 637350 - RNA, 24 nt, Human
uacaagcgugagccaccgugccca

SEQ ID NO: 637351 - RNA, 18 nt, Human
uagaaaggcuuagacaaa

SEQ ID NO: 637352 - RNA, 19 nt, Human
uaggaugagauuaggggca

SEQ ID NO: 637353 - RNA, 22 nt, Human
uauuucacugaaaauuccugua

SEQ ID NO: 637354 - RNA, 24 nt, Human
uauuucacugaaaauuccuguagg

SEQ ID NO: 637355 - RNA, 19 nt, Human
ucaagugauucuccugccu

SEQ ID NO: 637356 - RNA, 23 nt, Human
ucacucugucaugugaggacaca

SEQ ID NO: 637357 - RNA, 24 nt, Human
ucacugcaaucucugccuccuggg

SEQ ID NO: 637358 - RNA, 25 nt, Human
ucacugcaaucucugccuccugggu

SEQ ID NO: 637359 - RNA, 23 nt, Human
ucacuuccaggucucuuuucaua

SEQ ID NO: 637360 - RNA, 18 nt, Human
ucccaaagugcugggauu

SEQ ID NO: 637361 - RNA, 24 nt, Human
ucccaaagugcugggauuacaagc

SEQ ID NO: 637362 - RNA, 24 nt, Human
ucccaaguaccugggauuauaggc

SEQ ID NO: 637363 - RNA, 21 nt, Human
uccuggguucaagugauucuc

SEQ ID NO: 637364 - RNA, 24 nt, Human
uccuggguucaagugauucuccug

SEQ ID NO: 637365 - RNA, 22 nt, Human
ucuaugaacacuacaacaauca

SEQ ID NO: 637366 - RNA, 25 nt, Human
ucuccugccucagccucccaaguac

SEQ ID NO: 637367 - RNA, 23 nt, Human
ucucgaacuccugaccucaggug

SEQ ID NO: 637368 - RNA, 22 nt, Human
ucucugccuccuggguucaagu

SEQ ID NO: 637369 - RNA, 24 nt, Human
ucucugccuccuggguucaaguga

SEQ ID NO: 637370 - RNA, 21 nt, Human
ucucuuguugcccaggcugga

SEQ ID NO: 637371 - RNA, 22 nt, Human
ucugcaagccaggaagagaacc

SEQ ID NO: 637372 - RNA, 23 nt, Human
ucuucucuuguugcccaggcugg

SEQ ID NO: 637373 - RNA, 24 nt, Human
ucuucucuuguugcccaggcugga

SEQ ID NO: 637374 - RNA, 22 nt, Human
ucuuguugcccaggcuggagug

SEQ ID NO: 637375 - RNA, 18 nt, Human
ucuuugagacaccuaguc

SEQ ID NO: 637376 - RNA, 23 nt, Human
ucuuuuguacugguuucucuucu

SEQ ID NO: 637377 - RNA, 20 nt, Human
ugaaaucccuaaauuagaac

SEQ ID NO: 637378 - RNA, 19 nt, Human
ugaaugguaauaccucacu

SEQ ID NO: 637379 - RNA, 18 nt, Human
ugaccucaggugauccgc

SEQ ID NO: 637380 - RNA, 21 nt, Human
ugaccucaggugauccgccca

SEQ ID NO: 637381 - RNA, 24 nt, Human
ugaccucaggugauccgcccaccu

SEQ ID NO: 637382 - RNA, 20 nt, Human
ugacuuggcuggcaccuuga

SEQ ID NO: 637383 - RNA, 20 nt, Human
ugacuuggcuggcaccuuga

SEQ ID NO: 637384 - RNA, 19 nt, Human
ugagacaccuagucugugg

SEQ ID NO: 637385 - RNA, 21 nt, Human
ugagauggaguuucuucucuu

SEQ ID NO: 637386 - RNA, 18 nt, Human
ugagauuaggggcacugc

SEQ ID NO: 637387 - RNA, 19 nt, Human
ugaggacacagcaagaagg

SEQ ID NO: 637388 - RNA, 24 nt, Human
ugauccgcccaccuuggccuccca

SEQ ID NO: 637389 - RNA, 18 nt, Human
ugaucuuggacuuccccu

SEQ ID NO: 637390 - RNA, 19 nt, Human
ugaucuuggacuuccccuc

SEQ ID NO: 637391 - RNA, 18 nt, Human
ugcccaggcuggagugca

SEQ ID NO: 637392 - RNA, 21 nt, Human
ugcccaggcuggagugcaaug

SEQ ID NO: 637393 - RNA, 24 nt, Human
ugcccaggcuggagugcaauggca

SEQ ID NO: 637394 - RNA, 24 nt, Human
ugccucagccucccaaguaccugg

SEQ ID NO: 637395 - RNA, 22 nt, Human
ugccuccuggguucaagugauu

SEQ ID NO: 637396 - RNA, 24 nt, Human
ugcugggauuacaagcgugagcca

SEQ ID NO: 637397 - RNA, 22 nt, Human
uggaagacuuuggguugagagu

SEQ ID NO: 637398 - RNA, 24 nt, Human
uggaagacuuuggguugagaguca

SEQ ID NO: 637399 - RNA, 19 nt, Human
uggagugcaauggcaugau

SEQ ID NO: 637400 - RNA, 24 nt, Human
uggagugcaauggcaugaucucag

SEQ ID NO: 637401 - RNA, 19 nt, Human
uggcagcccaagcugagac

SEQ ID NO: 637402 - RNA, 19 nt, Human
uggcaggacaagaaguuaa

SEQ ID NO: 637403 - RNA, 24 nt, Human
uggcaugaucucagcucacugcaa

SEQ ID NO: 637404 - RNA, 23 nt, Human
ugggagguaaaugcugauuagaa

SEQ ID NO: 637405 - RNA, 21 nt, Human
ugggauuacaagcgugagcca

SEQ ID NO: 637406 - RNA, 22 nt, Human
ugggauuacaagcgugagccac

SEQ ID NO: 637407 - RNA, 23 nt, Human
ugggauuacaagcgugagccacc

SEQ ID NO: 637408 - RNA, 23 nt, Human
ugggauuacaagcgugagccacc

SEQ ID NO: 637409 - RNA, 24 nt, Human
ugggauuacaagcgugagccaccg

SEQ ID NO: 637410 - RNA, 21 nt, Human
ugggauuauaggcaugcacca

SEQ ID NO: 637411 - RNA, 24 nt, Human
ugggauuauaggcaugcaccacca

SEQ ID NO: 637412 - RNA, 24 nt, Human
ugggguuucuccauguuggucagg

SEQ ID NO: 637413 - RNA, 23 nt, Human
uggguucaagugauucuccugcc

SEQ ID NO: 637414 - RNA, 24 nt, Human
uggguucaagugauucuccugccu

SEQ ID NO: 637415 - RNA, 24 nt, Human
uggucaggcuggucucgaacuccu

SEQ ID NO: 637416 - RNA, 23 nt, Human
ugugagaaaauaaaauucuguuc

SEQ ID NO: 637417 - RNA, 23 nt, Human
ugugguguuugguuauggcagcc

SEQ ID NO: 637418 - RNA, 20 nt, Human
uguugcccaggcuggagugc

SEQ ID NO: 637419 - RNA, 21 nt, Human
uucaagugauucuccugccuc

SEQ ID NO: 637420 - RNA, 23 nt, Human
uucaagugauucuccugccucag

SEQ ID NO: 637421 - RNA, 24 nt, Human
uucaagugauucuccugccucagc

SEQ ID NO: 637422 - RNA, 19 nt, Human
uucauuuuuuucuuggcuc

SEQ ID NO: 637423 - RNA, 21 nt, Human
uuccaugaacucacuuccagg

SEQ ID NO: 637424 - RNA, 24 nt, Human
uucucuuguugcccaggcuggagu

SEQ ID NO: 637425 - RNA, 24 nt, Human
uucuucucuuguugcccaggcugg

SEQ ID NO: 637426 - RNA, 18 nt, Human
uugagacaccuagucugu

SEQ ID NO: 637427 - RNA, 18 nt, Human
uugcccaggcuggagugc

SEQ ID NO: 637428 - RNA, 18 nt, Human
uuggccucccaaagugcu

SEQ ID NO: 637429 - RNA, 21 nt, Human
uuucuccauguuggucaggcu

SEQ ID NO: 637430 - RNA, 18 nt, Human
uuuguacugguuucucuu

SEQ ID NO: 637431 - RNA, 20 nt, Human
uuuuguacugguuucucuuc

SEQ ID NO: 637432 - RNA, 22 nt, Human
uuuuuuuuuuuuuugagaugga

SEQ ID NO: 637433 - RNA, 24 nt, Human
uuuuuuuuuuuuuuuuuuuuuggg

SEQ ID NO: 637434 - RNA, 20 nt, Human
aaagagcugguuuacugcug

SEQ ID NO: 637435 - RNA, 18 nt, Human
ccuccuacgcgacgccag

SEQ ID NO: 637436 - RNA, 24 nt, Human
gagcugguuuacugcugugaaggg

SEQ ID NO: 637437 - RNA, 19 nt, Human
uccaaagagcugguuuacu

SEQ ID NO: 637438 - RNA, 23 nt, Human
uggaaucgguuccaaagagcugg

SEQ ID NO: 637439 - RNA, 18 nt, Human
uuuuuuuuuuuuuuuuug

SEQ ID NO: 637440 - RNA, 20 nt, Human
uuuuuuuuuuuuuuuuugcu

SEQ ID NO: 637441 - RNA, 24 nt, Human
uuuuuuuuuuuuuuuuugcuguga

SEQ ID NO: 637442 - RNA, 19 nt, Human
aagcgcgcugggguguggc

SEQ ID NO: 637443 - RNA, 21 nt, Human
aagcggcccgcgaccuugggc

SEQ ID NO: 637444 - RNA, 19 nt, Human
acacacccacauacugaaa

SEQ ID NO: 637445 - RNA, 24 nt, Human
acugcccccagcuacaccugaaag

SEQ ID NO: 637446 - RNA, 21 nt, Human
agagcagcaggcagguguaga

SEQ ID NO: 637447 - RNA, 21 nt, Human
agcaguguauaaaaauacuuu

SEQ ID NO: 637448 - RNA, 19 nt, Human
agcgcgcugggguguggcc

SEQ ID NO: 637449 - RNA, 19 nt, Human
aggcagguguagaugagaa

SEQ ID NO: 637450 - RNA, 21 nt, Human
aggccaaguggagucugugug

SEQ ID NO: 637451 - RNA, 26 nt, Human
auacugaaaccaucuccaaccggagg

SEQ ID NO: 637452 - RNA, 23 nt, Human
caagucucuuacccagguacaca

SEQ ID NO: 637453 - RNA, 26 nt, Human
cacacacccacauacugaaaccaucu

SEQ ID NO: 637454 - RNA, 23 nt, Human
cacacaggccucucccucggugc

SEQ ID NO: 637455 - RNA, 19 nt, Human
cacagccauaugggggcaa

SEQ ID NO: 637456 - RNA, 22 nt, Human
cacgugcacgcgcggucacgug

SEQ ID NO: 637457 - RNA, 21 nt, Human
cagccauaugggggcaaagac

SEQ ID NO: 637458 - RNA, 25 nt, Human
cagguguagaugagaaacuuacugg

SEQ ID NO: 637459 - RNA, 18 nt, Human
ccaaguggagucugugug

SEQ ID NO: 637460 - RNA, 22 nt, Human
ccaggaggagguucggagcggc

SEQ ID NO: 637461 - RNA, 21 nt, Human
ccccaagcggcccgcgaccuu

SEQ ID NO: 637462 - RNA, 19 nt, Human
ccccgcccaagccggcucc

SEQ ID NO: 637463 - RNA, 24 nt, Human
ccugaaagugcgaaccuggaaagc

SEQ ID NO: 637464 - RNA, 18 nt, Human
cgacuagaagcuuccaca

SEQ ID NO: 637465 - RNA, 21 nt, Human
cgagaagagcagcaggcaggu

SEQ ID NO: 637466 - RNA, 19 nt, Human
cgccucccgggccccgccc

SEQ ID NO: 637467 - RNA, 22 nt, Human
cgcugggguguggcgcgcgcgg

SEQ ID NO: 637468 - RNA, 21 nt, Human
cggccggaagcgcgcuggggu

SEQ ID NO: 637469 - RNA, 24 nt, Human
cguccaggcggaggggcagcagca

SEQ ID NO: 637470 - RNA, 22 nt, Human
cgugcacgcgcggucacguggc

SEQ ID NO: 637471 - RNA, 21 nt, Human
cuacaccugaaagugcgaacc

SEQ ID NO: 637472 - RNA, 22 nt, Human
cucaaacacggcgugagacgag

SEQ ID NO: 637473 - RNA, 20 nt, Human
cuccacacaggccucucccu

SEQ ID NO: 637474 - RNA, 20 nt, Human
cuccacacaggccucuccuu

SEQ ID NO: 637475 - RNA, 19 nt, Human
cucccgggccccgcccaag

SEQ ID NO: 637476 - RNA, 20 nt, Human
cucccgggccccgcccaagc

SEQ ID NO: 637477 - RNA, 21 nt, Human
cucccgggccccgcccaagcc

SEQ ID NO: 637478 - RNA, 23 nt, Human
cuccggccgccgccucccgggcc

SEQ ID NO: 637479 - RNA, 23 nt, Human
cugaugaggcggugaucucaaac

SEQ ID NO: 637480 - RNA, 24 nt, Human
cuuccacagccauaugggggcaaa

SEQ ID NO: 637481 - RNA, 21 nt, Human
gcacgcgcggucacguggccc

SEQ ID NO: 637482 - RNA, 18 nt, Human
gcccgcgcccacgaaggc

SEQ ID NO: 637483 - RNA, 21 nt, Human
gccucggucccgccgccgccc

SEQ ID NO: 637484 - RNA, 20 nt, Human
gcgccugcgacgacuagaag

SEQ ID NO: 637485 - RNA, 26 nt, Human
gcgcugccucggucccgccgccgccc

SEQ ID NO: 637486 - RNA, 24 nt, Human
gcgcugggguguggcgcgcgcggg

SEQ ID NO: 637487 - RNA, 26 nt, Human
gcguguggggcccgaaggggccuggc

SEQ ID NO: 637488 - RNA, 20 nt, Human
ggcccgcgaccuugggcgga

SEQ ID NO: 637489 - RNA, 18 nt, Human
ggccggaagcgcgcuggg

SEQ ID NO: 637490 - RNA, 21 nt, Human
gggcaaagacggcccaguagc

SEQ ID NO: 637491 - RNA, 18 nt, Human
gucugugugugccugggu

SEQ ID NO: 637492 - RNA, 21 nt, Human
guggggcccgaaggggccugg

SEQ ID NO: 637493 - RNA, 23 nt, Human
uaaacaauaguuuugauagguac

SEQ ID NO: 637494 - RNA, 23 nt, Human
ucccucggugcgguagcgagggu

SEQ ID NO: 637495 - RNA, 20 nt, Human
uccgcggcuucuccggccgc

SEQ ID NO: 637496 - RNA, 18 nt, Human
ucggugcgguagcgaggg

SEQ ID NO: 637497 - RNA, 22 nt, Human
ucuccggccgccgccucccggg

SEQ ID NO: 637498 - RNA, 24 nt, Human
ucuccggccgccgccucccgggcc

SEQ ID NO: 637499 - RNA, 25 nt, Human
ucugaaauacaauuuuagauuagca

SEQ ID NO: 637500 - RNA, 23 nt, Human
ugaagccuguuuccauuuccagg

SEQ ID NO: 637501 - RNA, 21 nt, Human
ugaggcggugaucucaaacac

SEQ ID NO: 637502 - RNA, 23 nt, Human
ugcgaaccuggaaagcaagucuc

SEQ ID NO: 637503 - RNA, 27 nt, Human
ugcguguggggcccgaaggggccuggc

SEQ ID NO: 637504 - RNA, 18 nt, Human
uggaacaggccccugggg

SEQ ID NO: 637505 - RNA, 20 nt, Human
uggggcccgaaggggccugg

SEQ ID NO: 637506 - RNA, 19 nt, Human
uguggggcccgaaggggcc

SEQ ID NO: 637507 - RNA, 22 nt, Human
uuacugcccccagcuacaccug

SEQ ID NO: 637508 - RNA, 22 nt, Human
uuuccagguuugggaugaauga

SEQ ID NO: 637509 - RNA, 19 nt, Human
uuugaagccuguuuccauu

SEQ ID NO: 637510 - RNA, 24 nt, Human
uuuuuuuuuuuuuuuuugaacuuu

SEQ ID NO: 637511 - RNA, 23 nt, Human
uuuuuuuuuuuuuuuuuuuuggg

SEQ ID NO: 637512 - RNA, 22 nt, Human
aaaacagcacuugaaaauucac

SEQ ID NO: 637513 - RNA, 20 nt, Human
aaaagaaaaagaaagcagca

SEQ ID NO: 637514 - RNA, 27 nt, Human
aaaagaaagcagcacuuccuuggaaaa

SEQ ID NO: 637515 - RNA, 19 nt, Human
aaacagcacuugaaaauuc

SEQ ID NO: 637516 - RNA, 19 nt, Human
acacagggcaacacagcag

SEQ ID NO: 637517 - RNA, 21 nt, Human
acaccacagccuccaggacgc

SEQ ID NO: 637518 - RNA, 18 nt, Human
accagacagagaagaagc

SEQ ID NO: 637519 - RNA, 24 nt, Human
acuguccuuaagggcauuuaggaa

SEQ ID NO: 637520 - RNA, 23 nt, Human
agacagagaagaagcacaccaca

SEQ ID NO: 637521 - RNA, 18 nt, Human
auccuguuugcugugaac

SEQ ID NO: 637522 - RNA, 19 nt, Human
caaagcacucagguugggg

SEQ ID NO: 637523 - RNA, 23 nt, Human
caaauauuaguagcauaacacau

SEQ ID NO: 637524 - RNA, 23 nt, Human
caacacagcaguugguaaagaua

SEQ ID NO: 637525 - RNA, 19 nt, Human
cacaauaucucaacacgag

SEQ ID NO: 637526 - RNA, 22 nt, Human
cacacaauaucucaacacgaga

SEQ ID NO: 637527 - RNA, 20 nt, Human
cacaccccuccgcucacucc

SEQ ID NO: 637528 - RNA, 20 nt, Human
cacacuccgauuccaccccu

SEQ ID NO: 637529 - RNA, 19 nt, Human
caccaaaagaaagcagcca

SEQ ID NO: 637530 - RNA, 26 nt, Human
caccacagccuccaggacgcuugcag

SEQ ID NO: 637531 - RNA, 19 nt, Human
caccccuccgcucacuccu

SEQ ID NO: 637532 - RNA, 22 nt, Human
cacgagaccucaucgagcggcc

SEQ ID NO: 637533 - RNA, 21 nt, Human
cacuccugcugcccauggagg

SEQ ID NO: 637534 - RNA, 19 nt, Human
cagacggcagcguggcaug

SEQ ID NO: 637535 - RNA, 19 nt, Human
cagagaagaagcacaccac

SEQ ID NO: 637536 - RNA, 21 nt, Human
cagccacccugugccauccua

SEQ ID NO: 637537 - RNA, 20 nt, Human
caggauccuuuaauguccuc

SEQ ID NO: 637538 - RNA, 22 nt, Human
ccaacaaaacagcacuugaaaa

SEQ ID NO: 637539 - RNA, 24 nt, Human
ccagacagagaagaagcacaccac

SEQ ID NO: 637540 - RNA, 25 nt, Human
ccagacagagaagaagcacaccaca

SEQ ID NO: 637541 - RNA, 23 nt, Human
ccagccgcccucugcagccccgg

SEQ ID NO: 637542 - RNA, 19 nt, Human
cccuccgcucacuccugcu

SEQ ID NO: 637543 - RNA, 22 nt, Human
ccgauuccaccccuggaggguc

SEQ ID NO: 637544 - RNA, 23 nt, Human
ccucugcagccccggugccaccu

SEQ ID NO: 637545 - RNA, 25 nt, Human
ccucugcagccccggugccaccucu

SEQ ID NO: 637546 - RNA, 19 nt, Human
ccucuggugucccccggcc

SEQ ID NO: 637547 - RNA, 23 nt, Human
ccucuuuuauuugaccaggaucc

SEQ ID NO: 637548 - RNA, 19 nt, Human
cgacggaaccccagccgcc

SEQ ID NO: 637549 - RNA, 21 nt, Human
cgccucagcccaguaagcuga

SEQ ID NO: 637550 - RNA, 23 nt, Human
cucagcauccggggccagccacc

SEQ ID NO: 637551 - RNA, 21 nt, Human
cucugcagccccggugccacc

SEQ ID NO: 637552 - RNA, 18 nt, Human
cucuguacccagaccugg

SEQ ID NO: 637553 - RNA, 22 nt, Human
cugcagccccggugccaccucu

SEQ ID NO: 637554 - RNA, 20 nt, Human
cuggugucccccggccuggg

SEQ ID NO: 637555 - RNA, 22 nt, Human
gaagaagcacaccacagccucc

SEQ ID NO: 637556 - RNA, 25 nt, Human
gagaagaagcacaccacagccucca

SEQ ID NO: 637557 - RNA, 20 nt, Human
gccacaagcgucagaagccu

SEQ ID NO: 637558 - RNA, 19 nt, Human
gccaccucuccacagacgc

SEQ ID NO: 637559 - RNA, 23 nt, Human
gcccauggaggagccucuggugu

SEQ ID NO: 637560 - RNA, 18 nt, Human
gcggcgugucgggcugga

SEQ ID NO: 637561 - RNA, 20 nt, Human
gcugcggcgugucgggcugg

SEQ ID NO: 637562 - RNA, 18 nt, Human
ggaggagccucugguguc

SEQ ID NO: 637563 - RNA, 19 nt, Human
ggcaugcagauccacaccu

SEQ ID NO: 637564 - RNA, 19 nt, Human
gggugcugcuggcugcggc

SEQ ID NO: 637565 - RNA, 19 nt, Human
guccucauuuguugucugg

SEQ ID NO: 637566 - RNA, 20 nt, Human
uaacacagacggcagcgugg

SEQ ID NO: 637567 - RNA, 21 nt, Human
uaacacauaagugcaauugca

SEQ ID NO: 637568 - RNA, 21 nt, Human
uaaguggucucuguacccaga

SEQ ID NO: 637569 - RNA, 19 nt, Human
uaccucuuuuauuugacca

SEQ ID NO: 637570 - RNA, 19 nt, Human
uagcaacaccacuguaaca

SEQ ID NO: 637571 - RNA, 27 nt, Human
uagcaacaccacuguaacacagacggc

SEQ ID NO: 637572 - RNA, 26 nt, Human
ucacaaaauuaaaaaaagaaaaagaa

SEQ ID NO: 637573 - RNA, 27 nt, Human
uccacagacgccucagcccaguaagcu

SEQ ID NO: 637574 - RNA, 20 nt, Human
ucucuauuuccauuguuguc

SEQ ID NO: 637575 - RNA, 21 nt, Human
ucuggugucccccggccuggg

SEQ ID NO: 637576 - RNA, 19 nt, Human
ucuguacccagaccugggg

SEQ ID NO: 637577 - RNA, 21 nt, Human
ugaugccauuggagggugcug

SEQ ID NO: 637578 - RNA, 22 nt, Human
ugcacugucuuccaacaaaaca

SEQ ID NO: 637579 - RNA, 21 nt, Human
uggaauccugagaggccaacg

SEQ ID NO: 637580 - RNA, 25 nt, Human
uggaauggcaggucuguuucaaaua

SEQ ID NO: 637581 - RNA, 22 nt, Human
uggagcugaucaaguaggugug

SEQ ID NO: 637582 - RNA, 20 nt, Human
uggagggucaccaaaagaaa

SEQ ID NO: 637583 - RNA, 22 nt, Human
uggccacaagcgucagaagccu

SEQ ID NO: 637584 - RNA, 24 nt, Human
uggugagaugggcccacacagggc

SEQ ID NO: 637585 - RNA, 20 nt, Human
uguggaauccugagaggcca

SEQ ID NO: 637586 - RNA, 18 nt, Human
uugcacugucuuccaaca

SEQ ID NO: 637587 - RNA, 22 nt, Human
aaaaaacuuuaaacaacccuga

SEQ ID NO: 637588 - RNA, 23 nt, Human
aaaaagauauucuuuaccuugga

SEQ ID NO: 637589 - RNA, 20 nt, Human
aaaaauacagcaaaugcuau

SEQ ID NO: 637590 - RNA, 21 nt, Human
aaaaauccaacaaauggcaag

SEQ ID NO: 637591 - RNA, 22 nt, Human
aaaacaagguaucaaugacaug

SEQ ID NO: 637592 - RNA, 22 nt, Human
aaaaguauuuauucuguuguug

SEQ ID NO: 637593 - RNA, 19 nt, Human
aaacagaaggaagcacuag

SEQ ID NO: 637594 - RNA, 22 nt, Human
aaacagcaccaacauccaucca

SEQ ID NO: 637595 - RNA, 26 nt, Human
aaacugugcaggacuuuccgguuccc

SEQ ID NO: 637596 - RNA, 25 nt, Human
aaagaucuucccucugguacaaguu

SEQ ID NO: 637597 - RNA, 24 nt, Human
aaagaugcaguaucauuucugaua

SEQ ID NO: 637598 - RNA, 18 nt, Human
aaagcggcuucugccucc

SEQ ID NO: 637599 - RNA, 21 nt, Human
aaaguaaaaauuugacuuuuc

SEQ ID NO: 637600 - RNA, 18 nt, Human
aaaguggggggggggugc

SEQ ID NO: 637601 - RNA, 20 nt, Human
aaaguucccaaccaccuccc

SEQ ID NO: 637602 - RNA, 20 nt, Human
aaaugcuuuuccagccaccu

SEQ ID NO: 637603 - RNA, 24 nt, Human
aacaaacuccgauuucuauaaucc

SEQ ID NO: 637604 - RNA, 20 nt, Human
aacaauauggacagaagaga

SEQ ID NO: 637605 - RNA, 19 nt, Human
aacagaaggaagcacuaga

SEQ ID NO: 637606 - RNA, 18 nt, Human
aacauccauccaccuagc

SEQ ID NO: 637607 - RNA, 23 nt, Human
aagaaagaaaaaucugaaaaaga

SEQ ID NO: 637608 - RNA, 27 nt, Human
aagaaagaaagaaaaaucugaaaaaga

SEQ ID NO: 637609 - RNA, 21 nt, Human
aagcacagggaaggaagcaau

SEQ ID NO: 637610 - RNA, 20 nt, Human
aagcauuauuugcagcauug

SEQ ID NO: 637611 - RNA, 31 nt, Human
aaggaagagacacaaugaguccacaaaggaa

SEQ ID NO: 637612 - RNA, 21 nt, Human
aauaacccaccuugucuauau

SEQ ID NO: 637613 - RNA, 20 nt, Human
acaaaaaccuauuuuuagau

SEQ ID NO: 637614 - RNA, 19 nt, Human
acaaaacauauaguuacca

SEQ ID NO: 637615 - RNA, 19 nt, Human
acaacccugagggagacac

SEQ ID NO: 637616 - RNA, 22 nt, Human
acacucuuucuuuccuuuuuuu

SEQ ID NO: 637617 - RNA, 18 nt, Human
accuacgagagaagacuc

SEQ ID NO: 637618 - RNA, 21 nt, Human
accucauuccuuugaaaacaa

SEQ ID NO: 637619 - RNA, 22 nt, Human
agaaaacaagguaucaaugaca

SEQ ID NO: 637620 - RNA, 20 nt, Human
agaaagaaagaaaaaucuga

SEQ ID NO: 637621 - RNA, 30 nt, Human
aggaagagacacaaugaguccacaaaggaa

SEQ ID NO: 637622 - RNA, 19 nt, Human
aggaagcacagggaaggaa

SEQ ID NO: 637623 - RNA, 23 nt, Human
aggcaucaauaagcuacacaucu

SEQ ID NO: 637624 - RNA, 24 nt, Human
agucaagaaaauggagacugauuu

SEQ ID NO: 637625 - RNA, 22 nt, Human
auaaaacccuuacuaacucuaa

SEQ ID NO: 637626 - RNA, 22 nt, Human
auaaacauggggaacaaaauaa

SEQ ID NO: 637627 - RNA, 22 nt, Human
auaaaguuacuuaaaaaaaucc

SEQ ID NO: 637628 - RNA, 20 nt, Human
auccaugccucagaugggaa

SEQ ID NO: 637629 - RNA, 19 nt, Human
caacagcagaacaagaaga

SEQ ID NO: 637630 - RNA, 23 nt, Human
caauauucaucuuaauacaucaa

SEQ ID NO: 637631 - RNA, 25 nt, Human
caccaacauccauccaccuagccag

SEQ ID NO: 637632 - RNA, 21 nt, Human
caccucccaccauaaauauac

SEQ ID NO: 637633 - RNA, 22 nt, Human
cacugccacuauuuauaaccuu

SEQ ID NO: 637634 - RNA, 19 nt, Human
cagccaccuaaacaccuca

SEQ ID NO: 637635 - RNA, 21 nt, Human
ccaaggcccaugaugcugugc

SEQ ID NO: 637636 - RNA, 20 nt, Human
ccaccauaaauauacaaaaa

SEQ ID NO: 637637 - RNA, 20 nt, Human
ccaccuaaacaccucauucc

SEQ ID NO: 637638 - RNA, 23 nt, Human
ccauucuugcaagccugcuucuc

SEQ ID NO: 637639 - RNA, 23 nt, Human
ccgaagggugaaaggcuuuucuu

SEQ ID NO: 637640 - RNA, 22 nt, Human
ccuagccagacacugcuccaug

SEQ ID NO: 637641 - RNA, 22 nt, Human
ccuccuuuaccucuucaacauc

SEQ ID NO: 637642 - RNA, 24 nt, Human
ccuccuuuaccucuucaacaucuu

SEQ ID NO: 637643 - RNA, 22 nt, Human
ccuugauucgggggggcauguc

SEQ ID NO: 637644 - RNA, 23 nt, Human
cucaugacaaccguccaugauaa

SEQ ID NO: 637645 - RNA, 21 nt, Human
cucauugccucaauauuccua

SEQ ID NO: 637646 - RNA, 20 nt, Human
cucccucucccuguccaggu

SEQ ID NO: 637647 - RNA, 23 nt, Human
cugaguaaaucaaagcggcuucu

SEQ ID NO: 637648 - RNA, 21 nt, Human
cugcuaggacaccagcugugc

SEQ ID NO: 637649 - RNA, 18 nt, Human
cugugcugccuccuuuac

SEQ ID NO: 637650 - RNA, 22 nt, Human
cuuuuaggcguaccagaaaaca

SEQ ID NO: 637651 - RNA, 23 nt, Human
gaacccacaccuggcuucacagg

SEQ ID NO: 637652 - RNA, 21 nt, Human
gaauauuuucuaaagcuugaa

SEQ ID NO: 637653 - RNA, 19 nt, Human
gacaaguuacacguccaaa

SEQ ID NO: 637654 - RNA, 22 nt, Human
gaucuucguuuuaaaaauaaga

SEQ ID NO: 637655 - RNA, 23 nt, Human
gcaccaacauccauccaccuagc

SEQ ID NO: 637656 - RNA, 19 nt, Human
gcagaacaagaagaggaga

SEQ ID NO: 637657 - RNA, 25 nt, Human
ggaaacagaaggaagcaccgguacc

SEQ ID NO: 637658 - RNA, 25 nt, Human
ggaagagacacaaugaguccacaaa

SEQ ID NO: 637659 - RNA, 22 nt, Human
ggagauggaugagaagaaacuu

SEQ ID NO: 637660 - RNA, 22 nt, Human
gucaaaauugcaugcaugaaua

SEQ ID NO: 637661 - RNA, 21 nt, Human
guccagguuuaauacugugcu

SEQ ID NO: 637662 - RNA, 20 nt, Human
gugcuagaagauacaaaaca

SEQ ID NO: 637663 - RNA, 24 nt, Human
gugugcuucaacacucaugacaac

SEQ ID NO: 637664 - RNA, 19 nt, Human
guuugugauguuagccugu

SEQ ID NO: 637665 - RNA, 22 nt, Human
uaaacaccucauuccuuugaaa

SEQ ID NO: 637666 - RNA, 22 nt, Human
uaaagcuugaauuuugcucuuc

SEQ ID NO: 637667 - RNA, 25 nt, Human
uaaaucaaagcggcuucugccucca

SEQ ID NO: 637668 - RNA, 23 nt, Human
uaaaugcccacagacuguacagu

SEQ ID NO: 637669 - RNA, 22 nt, Human
uaacuagaaguaacuuuuauua

SEQ ID NO: 637670 - RNA, 22 nt, Human
uaagacuauacaaaguggguaa

SEQ ID NO: 637671 - RNA, 22 nt, Human
uaauguuaucuauagcuguuuc

SEQ ID NO: 637672 - RNA, 27 nt, Human
uaauuuacuaaauuaugagggaacaac

SEQ ID NO: 637673 - RNA, 23 nt, Human
uacaaaugcuuuuccagccaccu

SEQ ID NO: 637674 - RNA, 18 nt, Human
uaccuugauucggggggg

SEQ ID NO: 637675 - RNA, 24 nt, Human
uagacuucagcuaagggaggcaga

SEQ ID NO: 637676 - RNA, 25 nt, Human
uagcuucaaucaaaaaagguuucau

SEQ ID NO: 637677 - RNA, 18 nt, Human
uaggcguaccagaaaaca

SEQ ID NO: 637678 - RNA, 19 nt, Human
uauaaaaguauuuauucug

SEQ ID NO: 637679 - RNA, 23 nt, Human
uauauuauuuaccaugccuuuga

SEQ ID NO: 637680 - RNA, 22 nt, Human
uauucucucucuuucccucuca

SEQ ID NO: 637681 - RNA, 18 nt, Human
ucagaagacagucacacu

SEQ ID NO: 637682 - RNA, 24 nt, Human
ucagaaucaaaauuacuauguaau

SEQ ID NO: 637683 - RNA, 18 nt, Human
uccaaggcccaugaugcu

SEQ ID NO: 637684 - RNA, 22 nt, Human
ucccuuggaaacagaaggaagc

SEQ ID NO: 637685 - RNA, 21 nt, Human
uccgcaauugcuaccuugauu

SEQ ID NO: 637686 - RNA, 24 nt, Human
ucucuaacacccucccucucccug

SEQ ID NO: 637687 - RNA, 18 nt, Human
ugaaaagaucuuccgaag

SEQ ID NO: 637688 - RNA, 19 nt, Human
ugaauguggacgccagaau

SEQ ID NO: 637689 - RNA, 20 nt, Human
ugacgaagcagguuaagugu

SEQ ID NO: 637690 - RNA, 19 nt, Human
ugagggagaaaaaaaacuu

SEQ ID NO: 637691 - RNA, 23 nt, Human
ugagucaagaaaauggagacuga

SEQ ID NO: 637692 - RNA, 24 nt, Human
ugauauauuauuuaccaugccuuu

SEQ ID NO: 637693 - RNA, 18 nt, Human
ugcuauucagaagucauc

SEQ ID NO: 637694 - RNA, 21 nt, Human
uggcacugaguagaacccaca

SEQ ID NO: 637695 - RNA, 22 nt, Human
uggcuuagccacuuguauucaa

SEQ ID NO: 637696 - RNA, 24 nt, Human
uggggggggggugucaaaaauagc

SEQ ID NO: 637697 - RNA, 22 nt, Human
uguacagauuuuaaaauuuagg

SEQ ID NO: 637698 - RNA, 19 nt, Human
uguuaaaaguucccaacca

SEQ ID NO: 637699 - RNA, 21 nt, Human
uucagcaacagcagaacaaga

SEQ ID NO: 637700 - RNA, 20 nt, Human
uucuuuagggucaccuuaua

SEQ ID NO: 637701 - RNA, 21 nt, Human
uuuacaaugcugaauguacaa

SEQ ID NO: 637702 - RNA, 22 nt, Human
uuuuccagccaccuaaacaccu

SEQ ID NO: 637703 - RNA, 21 nt, Human
aaacacauggaccuucgagcu

SEQ ID NO: 637704 - RNA, 20 nt, Human
accacagcuacuuauucuga

SEQ ID NO: 637705 - RNA, 21 nt, Human
accuuggaaagucgcgaggag

SEQ ID NO: 637706 - RNA, 20 nt, Human
aucugaaagauaccuuggaa

SEQ ID NO: 637707 - RNA, 22 nt, Human
caacagguuuccaccagggugu

SEQ ID NO: 637708 - RNA, 22 nt, Human
caacagguuuccaccagggugu

SEQ ID NO: 637709 - RNA, 26 nt, Human
caacagguuuccaccaggguguuuca

SEQ ID NO: 637710 - RNA, 20 nt, Human
cuuuccacuauugaugucac

SEQ ID NO: 637711 - RNA, 26 nt, Human
gaaaaauucuuccuuucacuuguaaa

SEQ ID NO: 637712 - RNA, 19 nt, Human
gacuguuuuuuccacccua

SEQ ID NO: 637713 - RNA, 20 nt, Human
gauauugagagcaaucagga

SEQ ID NO: 637714 - RNA, 22 nt, Human
gcagaagaaaaauucuuccuuu

SEQ ID NO: 637715 - RNA, 20 nt, Human
uaccuuggaaagucgcgagg

SEQ ID NO: 637716 - RNA, 19 nt, Human
ucaacagguuuccaccagg

SEQ ID NO: 637717 - RNA, 20 nt, Human
ucaguauuuuuuuccauucu

SEQ ID NO: 637718 - RNA, 28 nt, Human
ucaucugaaagauaccuuggaaagucgc

SEQ ID NO: 637719 - RNA, 19 nt, Human
ucugaaagauaccuuggaa

SEQ ID NO: 637720 - RNA, 24 nt, Human
ucuggagagcuugugcaagcuuca

SEQ ID NO: 637721 - RNA, 21 nt, Human
ucuucauuauccuuuggugca

SEQ ID NO: 637722 - RNA, 22 nt, Human
ugaagagaaaguggaaggucug

SEQ ID NO: 637723 - RNA, 22 nt, Human
ugcaaaacacauggaccuucga

SEQ ID NO: 637724 - RNA, 23 nt, Human
uggggaggaauuucuugccaauu

SEQ ID NO: 637725 - RNA, 21 nt, Human
ugucuggagagcuugugcaag

SEQ ID NO: 637726 - RNA, 28 nt, Human
uuaaacaauaauagcacaaugguuuuuu

SEQ ID NO: 637727 - RNA, 30 nt, Human
uuauugacggcagaagaaaaauucuuccuu

SEQ ID NO: 637728 - RNA, 24 nt, Human
uuccaccaggguguuucagucacu

SEQ ID NO: 637729 - RNA, 25 nt, Human
aaacuucauuacacagaagagcaac

SEQ ID NO: 637730 - RNA, 19 nt, Human
aaaguuuuccaaacaagca

SEQ ID NO: 637731 - RNA, 23 nt, Human
aacaagaaugguauccugccaga

SEQ ID NO: 637732 - RNA, 19 nt, Human
acugcgcaacgggcaaggc

SEQ ID NO: 637733 - RNA, 23 nt, Human
agacaggaaggaaaaaaagggac

SEQ ID NO: 637734 - RNA, 23 nt, Human
agcacaguucuucacaaccgaug

SEQ ID NO: 637735 - RNA, 22 nt, Human
aggaaaaaaauauauauacuga

SEQ ID NO: 637736 - RNA, 26 nt, Human
aggaaggaaaaaaauauauauacuga

SEQ ID NO: 637737 - RNA, 28 nt, Human
augaagcaagguguaaauguuuggcccc

SEQ ID NO: 637738 - RNA, 20 nt, Human
auguaauauugagagugcuu

SEQ ID NO: 637739 - RNA, 24 nt, Human
caagcugcaaagaucucaagcuaa

SEQ ID NO: 637740 - RNA, 24 nt, Human
ccaacaacguucuaacgacgugcu

SEQ ID NO: 637741 - RNA, 20 nt, Human
cccauucugcuuuugcacgu

SEQ ID NO: 637742 - RNA, 22 nt, Human
cugauggugguaaauaggucuu

SEQ ID NO: 637743 - RNA, 28 nt, Human
gaaauucuuuccuauccaauguauacuc

SEQ ID NO: 637744 - RNA, 22 nt, Human
gggaagcugucccuuagccuuc

SEQ ID NO: 637745 - RNA, 23 nt, Human
uaaauaaggcggaaagauuugga

SEQ ID NO: 637746 - RNA, 19 nt, Human
uaacccuuuuacggggcaa

SEQ ID NO: 637747 - RNA, 19 nt, Human
uaaugcacucuuucuauca

SEQ ID NO: 637748 - RNA, 18 nt, Human
ucaugacgagcaugucug

SEQ ID NO: 637749 - RNA, 23 nt, Human
ucccaagccauuaaaauacgacu

SEQ ID NO: 637750 - RNA, 20 nt, Human
ucuguccagcuaucaaucag

SEQ ID NO: 637751 - RNA, 21 nt, Human
ugaaaaguacaaaacuuuuug

SEQ ID NO: 637752 - RNA, 27 nt, Human
ugaauguagcacaguucuucacaaccc

SEQ ID NO: 637753 - RNA, 20 nt, Human
uggagaaacaaaagaaggaa

SEQ ID NO: 637754 - RNA, 30 nt, Human
uggccccaaucgggcuucagaaaugguucu

SEQ ID NO: 637755 - RNA, 21 nt, Human
uggguaagccugaauguagca

SEQ ID NO: 637756 - RNA, 23 nt, Human
uuggccccaaucgggcuucagaa

SEQ ID NO: 637757 - RNA, 21 nt, Human
aaacaaacuagaaaauuaccc

SEQ ID NO: 637758 - RNA, 20 nt, Human
aacuuuuuuuuuuuuuugcu

SEQ ID NO: 637759 - RNA, 21 nt, Human
aagaaacaaacuagaaaauua

SEQ ID NO: 637760 - RNA, 18 nt, Human
aaggccaggguguggggg

SEQ ID NO: 637761 - RNA, 23 nt, Human
acaaacuagaaaauuacccacac

SEQ ID NO: 637762 - RNA, 22 nt, Human
acuagaaaauuacccacaccca

SEQ ID NO: 637763 - RNA, 18 nt, Human
agaaaauuacccacaccc

SEQ ID NO: 637764 - RNA, 19 nt, Human
aggaggagcuggcucucuc

SEQ ID NO: 637765 - RNA, 20 nt, Human
aggcaggagggaagucguga

SEQ ID NO: 637766 - RNA, 22 nt, Human
aggcaggagggaagucgugacc

SEQ ID NO: 637767 - RNA, 20 nt, Human
aggcauucaccagcugcaug

SEQ ID NO: 637768 - RNA, 22 nt, Human
aggcucaguccugcagcugccc

SEQ ID NO: 637769 - RNA, 21 nt, Human
agggggucggaggaacuggcg

SEQ ID NO: 637770 - RNA, 23 nt, Human
agucgugaccucuuggcaggcuc

SEQ ID NO: 637771 - RNA, 22 nt, Human
cagcugccccaagcagccagac

SEQ ID NO: 637772 - RNA, 23 nt, Human
caggcucaguccugcagcugccc

SEQ ID NO: 637773 - RNA, 24 nt, Human
caugaucucuuccaccugggggcu

SEQ ID NO: 637774 - RNA, 18 nt, Human
cauggaggagaagagcug

SEQ ID NO: 637775 - RNA, 19 nt, Human
ccaccugggggcucugcag

SEQ ID NO: 637776 - RNA, 23 nt, Human
cccaggcugcaggcaggagggaa

SEQ ID NO: 637777 - RNA, 19 nt, Human
ccgggcgcuggcugggagg

SEQ ID NO: 637778 - RNA, 22 nt, Human
cgcuggcugggaggggaggugu

SEQ ID NO: 637779 - RNA, 21 nt, Human
cuagaaaauuacccacaccca

SEQ ID NO: 637780 - RNA, 19 nt, Human
cucuuggcaggcucagucc

SEQ ID NO: 637781 - RNA, 25 nt, Human
cugcagggccucucgggggaggggu

SEQ ID NO: 637782 - RNA, 20 nt, Human
cuggcccaggcugcaggcag

SEQ ID NO: 637783 - RNA, 20 nt, Human
cuggcugggaggggaggugu

SEQ ID NO: 637784 - RNA, 22 nt, Human
gcaggcucaguccugcagcugc

SEQ ID NO: 637785 - RNA, 21 nt, Human
gcugcaggcaggagggaaguc

SEQ ID NO: 637786 - RNA, 18 nt, Human
ggccaaaaggguccaugu

SEQ ID NO: 637787 - RNA, 26 nt, Human
ggcccgggcgcuggcugggaggggag

SEQ ID NO: 637788 - RNA, 18 nt, Human
ggcucaguccugcagcug

SEQ ID NO: 637789 - RNA, 18 nt, Human
ggggagggguuggccaag

SEQ ID NO: 637790 - RNA, 20 nt, Human
ggggaggugucuggcagguc

SEQ ID NO: 637791 - RNA, 22 nt, Human
uaggcauucaccagcugcauga

SEQ ID NO: 637792 - RNA, 20 nt, Human
ucagagcaguccuggcccag

SEQ ID NO: 637793 - RNA, 19 nt, Human
ucccuggggcucguccagg

SEQ ID NO: 637794 - RNA, 19 nt, Human
uccugcagcugccccaagc

SEQ ID NO: 637795 - RNA, 19 nt, Human
ucucagagcaguccuggcc

SEQ ID NO: 637796 - RNA, 20 nt, Human
ucucagagcaguccuggccc

SEQ ID NO: 637797 - RNA, 18 nt, Human
ucuuggcaggcucagucc

SEQ ID NO: 637798 - RNA, 23 nt, Human
ugaccucuuggcaggcucagucc

SEQ ID NO: 637799 - RNA, 22 nt, Human
ugcccugucccugcagggccaa

SEQ ID NO: 637800 - RNA, 19 nt, Human
uggcaggcucaguccugca

SEQ ID NO: 637801 - RNA, 23 nt, Human
uggcauggaggagaagagcugcu

SEQ ID NO: 637802 - RNA, 20 nt, Human
ugggaggggaggugucuggc

SEQ ID NO: 637803 - RNA, 21 nt, Human
ugggggcucugcaggaggagc

SEQ ID NO: 637804 - RNA, 21 nt, Human
uuacccacacccauuguagcc

SEQ ID NO: 637805 - RNA, 19 nt, Human
uuuuuuuuuuuuuuugugu

SEQ ID NO: 637806 - RNA, 19 nt, Human
uuuuuuuuuuuuuuuuugu

SEQ ID NO: 637807 - RNA, 20 nt, Human
uuuuuuuuuuuuuuuuuugg

SEQ ID NO: 637808 - RNA, 21 nt, Human
aaaaaaaaaaaaaaauagcag

SEQ ID NO: 637809 - RNA, 23 nt, Human
aaaaaaaaaaaaaaauagcaggg

SEQ ID NO: 637810 - RNA, 22 nt, Human
aaacagacuuuaaaccaacaaa

SEQ ID NO: 637811 - RNA, 20 nt, Human
acaagacagaaaauuaacaa

SEQ ID NO: 637812 - RNA, 18 nt, Human
accccacugucaauauua

SEQ ID NO: 637813 - RNA, 24 nt, Human
accucacgugcaaagacacauaua

SEQ ID NO: 637814 - RNA, 28 nt, Human
agacagaaugacaaaacugaagggaccc

SEQ ID NO: 637815 - RNA, 19 nt, Human
agacugcagcucugucuau

SEQ ID NO: 637816 - RNA, 22 nt, Human
agguuuuuagaaccuaaaguuu

SEQ ID NO: 637817 - RNA, 26 nt, Human
auaaaacagacuuuaaaccaacaaag

SEQ ID NO: 637818 - RNA, 21 nt, Human
caaaaaagacaaagaagggca

SEQ ID NO: 637819 - RNA, 22 nt, Human
caaagaagggcauuauauaaug

SEQ ID NO: 637820 - RNA, 22 nt, Human
caacaaagaucaaaaaagacaa

SEQ ID NO: 637821 - RNA, 25 nt, Human
caacaagacagaaaauuaacaagga

SEQ ID NO: 637822 - RNA, 23 nt, Human
caagaagagcuaacuauccuaaa

SEQ ID NO: 637823 - RNA, 19 nt, Human
cacaaauauuuauugcaca

SEQ ID NO: 637824 - RNA, 18 nt, Human
cacagacugcagcucugu

SEQ ID NO: 637825 - RNA, 20 nt, Human
cacgugcaaagacacauaua

SEQ ID NO: 637826 - RNA, 23 nt, Human
cagaucaacaagacagaaaauua

SEQ ID NO: 637827 - RNA, 24 nt, Human
cagcagcggcaggcaggcaggcgc

SEQ ID NO: 637828 - RNA, 20 nt, Human
cagcccuucucccgggcucc

SEQ ID NO: 637829 - RNA, 26 nt, Human
caggaauauuuaucaagcaaaaaaaa

SEQ ID NO: 637830 - RNA, 18 nt, Human
caggagcacccagauuca

SEQ ID NO: 637831 - RNA, 24 nt, Human
cagguuuuuagaaccuaaaguuuu

SEQ ID NO: 637832 - RNA, 21 nt, Human
ccaacaaagaucaaaaaagac

SEQ ID NO: 637833 - RNA, 21 nt, Human
ccaagcggaccuaacagacau

SEQ ID NO: 637834 - RNA, 22 nt, Human
ccagcccuucucccgggcuccu

SEQ ID NO: 637835 - RNA, 23 nt, Human
cccuucucccgggcuccugcgcu

SEQ ID NO: 637836 - RNA, 18 nt, Human
cgugcaaagacacauaua

SEQ ID NO: 637837 - RNA, 22 nt, Human
cucaaaauaaagggauacagga

SEQ ID NO: 637838 - RNA, 24 nt, Human
cuccugcgcucuuccccagggucu

SEQ ID NO: 637839 - RNA, 25 nt, Human
cuguuguauaucucucuucugaccu

SEQ ID NO: 637840 - RNA, 22 nt, Human
cuuccagcccuucucccgggcu

SEQ ID NO: 637841 - RNA, 23 nt, Human
cuuuaaaccaacaaagaucaaaa

SEQ ID NO: 637842 - RNA, 22 nt, Human
gaccuaacagacaucuauggaa

SEQ ID NO: 637843 - RNA, 24 nt, Human
gcaaagacacauauaggcucaaaa

SEQ ID NO: 637844 - RNA, 19 nt, Human
gcucuggaccaagcggacc

SEQ ID NO: 637845 - RNA, 24 nt, Human
gcuuaaacuccucuuaaucacuuu

SEQ ID NO: 637846 - RNA, 24 nt, Human
ggaauucuccgcacguccaguccc

SEQ ID NO: 637847 - RNA, 20 nt, Human
ggaccuaacagacaucuaug

SEQ ID NO: 637848 - RNA, 23 nt, Human
ggagcacccagauucauaaagca

SEQ ID NO: 637849 - RNA, 19 nt, Human
ggcaggcaggcaggcgcuc

SEQ ID NO: 637850 - RNA, 18 nt, Human
gggugggggcgggggcuu

SEQ ID NO: 637851 - RNA, 23 nt, Human
guaugcaccuaauacaggagcac

SEQ ID NO: 637852 - RNA, 24 nt, Human
guccaguccccuccuuccagcccu

SEQ ID NO: 637853 - RNA, 24 nt, Human
uaaaacagacuuuaaaccaacaaa

SEQ ID NO: 637854 - RNA, 19 nt, Human
uaaaccaacaaagaucaaa

SEQ ID NO: 637855 - RNA, 24 nt, Human
uaaagcaaguucuuagagaccuac

SEQ ID NO: 637856 - RNA, 25 nt, Human
uaauguauucucccaauaauuuugu

SEQ ID NO: 637857 - RNA, 25 nt, Human
uacagguuuuuagaaccuaaaguuu

SEQ ID NO: 637858 - RNA, 20 nt, Human
uagaaucucagagacagaau

SEQ ID NO: 637859 - RNA, 22 nt, Human
uagcugccuccuugugucaacu

SEQ ID NO: 637860 - RNA, 23 nt, Human
uauucuauacguuaucaccaagc

SEQ ID NO: 637861 - RNA, 22 nt, Human
ucaaaaaagacaaagaagggca

SEQ ID NO: 637862 - RNA, 23 nt, Human
ucaaaaaagacaaagaagggcaa

SEQ ID NO: 637863 - RNA, 19 nt, Human
ucaaaacccaucggugugc

SEQ ID NO: 637864 - RNA, 18 nt, Human
ucaaaauaaagggauaca

SEQ ID NO: 637865 - RNA, 21 nt, Human
ucaagcaaaaaaaaaaaaaaa

SEQ ID NO: 637866 - RNA, 21 nt, Human
ucaagcaaaaaaaaaaaaaaa

SEQ ID NO: 637867 - RNA, 23 nt, Human
ucaagcaaaaaaaaaaaaaaaaa

SEQ ID NO: 637868 - RNA, 28 nt, Human
ucaauaaauaaccuaauguuguaaugac

SEQ ID NO: 637869 - RNA, 22 nt, Human
ucaaugcagcaagaagagcuaa

SEQ ID NO: 637870 - RNA, 21 nt, Human
ucacgugcaaagacacauaua

SEQ ID NO: 637871 - RNA, 19 nt, Human
ucccgggcuccugcgcucu

SEQ ID NO: 637872 - RNA, 22 nt, Human
ucccgggcuccugcgcucuucc

SEQ ID NO: 637873 - RNA, 18 nt, Human
uccuuccagcccuucucc

SEQ ID NO: 637874 - RNA, 20 nt, Human
ucuagauguggaaauagaau

SEQ ID NO: 637875 - RNA, 23 nt, Human
ucuauggaacucuccaccccaaa

SEQ ID NO: 637876 - RNA, 19 nt, Human
ucuuagagaccuacaagga

SEQ ID NO: 637877 - RNA, 21 nt, Human
uggaacucuccaccccaaauc

SEQ ID NO: 637878 - RNA, 24 nt, Human
uuaaaaaaggccuggguguggagu

SEQ ID NO: 637879 - RNA, 24 nt, Human
uuaaaccaacaaagaucaaaaaag

SEQ ID NO: 637880 - RNA, 19 nt, Human
uuacccugcucuagaugug

SEQ ID NO: 637881 - RNA, 18 nt, Human
uuuuuuuuuuuuagaguc

SEQ ID NO: 637882 - RNA, 30 nt, Human
aaaaaaaaaaaaaaaaaaaaagccguaugg

SEQ ID NO: 637883 - RNA, 20 nt, Human
aaaaaaaaaaaaaaaagccg

SEQ ID NO: 637884 - RNA, 28 nt, Human
aaaaaaaaaaagccguaugugcaaaagg

SEQ ID NO: 637885 - RNA, 22 nt, Human
aaaaauguguguucuuuuccuc

SEQ ID NO: 637886 - RNA, 20 nt, Human
aagaacucagggcugauguu

SEQ ID NO: 637887 - RNA, 18 nt, Human
aagcaaaaaauccuucca

SEQ ID NO: 637888 - RNA, 23 nt, Human
acaauggugaaggcaaucucuuc

SEQ ID NO: 637889 - RNA, 24 nt, Human
agagggcagcuuuccugugccaca

SEQ ID NO: 637890 - RNA, 21 nt, Human
agaucaggaaaugcagucagc

SEQ ID NO: 637891 - RNA, 22 nt, Human
aggaauaaauaaucaaagagaa

SEQ ID NO: 637892 - RNA, 18 nt, Human
aggagauacaauagacac

SEQ ID NO: 637893 - RNA, 20 nt, Human
aggaguagauuacagggguu

SEQ ID NO: 637894 - RNA, 19 nt, Human
aucaaauuaauuccacaau

SEQ ID NO: 637895 - RNA, 22 nt, Human
caaaaaaaaaaaaaaaaaaaaa

SEQ ID NO: 637896 - RNA, 19 nt, Human
cacauaccugaaagcagcc

SEQ ID NO: 637897 - RNA, 20 nt, Human
cacucgguguugcagggagg

SEQ ID NO: 637898 - RNA, 20 nt, Human
cacucgguguugcagggagg

SEQ ID NO: 637899 - RNA, 22 nt, Human
cacucgguguugcagggagggc

SEQ ID NO: 637900 - RNA, 23 nt, Human
caucagaaagauaugauuauuuc

SEQ ID NO: 637901 - RNA, 19 nt, Human
ccugcaaguacuuuucugu

SEQ ID NO: 637902 - RNA, 23 nt, Human
cucuucuuggaaaaaaucagagg

SEQ ID NO: 637903 - RNA, 22 nt, Human
cuuuagcagcucaaccuucucc

SEQ ID NO: 637904 - RNA, 24 nt, Human
gaaagcagccaaucuccauuaaaa

SEQ ID NO: 637905 - RNA, 22 nt, Human
gaacaugacugguuuugggcug

SEQ ID NO: 637906 - RNA, 22 nt, Human
gaaggcaaucucuucuuggaaa

SEQ ID NO: 637907 - RNA, 20 nt, Human
gaucaggaaaugcagucagc

SEQ ID NO: 637908 - RNA, 25 nt, Human
gcaaaaaauccuuccaaggaguaga

SEQ ID NO: 637909 - RNA, 18 nt, Human
ggacaaaaaaaaaaaaaa

SEQ ID NO: 637910 - RNA, 19 nt, Human
ggacuggaagggagguggc

SEQ ID NO: 637911 - RNA, 20 nt, Human
ggaugggaucagugugucca

SEQ ID NO: 637912 - RNA, 24 nt, Human
ggcagcuuuccugugccacaagaa

SEQ ID NO: 637913 - RNA, 20 nt, Human
gggaaggagugacugcgacg

SEQ ID NO: 637914 - RNA, 23 nt, Human
gugagaaaaguaccuaagucuca

SEQ ID NO: 637915 - RNA, 20 nt, Human
uaaaaucagguagcagaugc

SEQ ID NO: 637916 - RNA, 23 nt, Human
uaauaggacaaaaaaaaaaaaaa

SEQ ID NO: 637917 - RNA, 19 nt, Human
uaggacaaaaaaaaaaaaa

SEQ ID NO: 637918 - RNA, 21 nt, Human
ucaaauuaauuccacaaucaa

SEQ ID NO: 637919 - RNA, 20 nt, Human
ucaaccuucuccuggucuuc

SEQ ID NO: 637920 - RNA, 23 nt, Human
uccuggucuucaggaugcuccug

SEQ ID NO: 637921 - RNA, 19 nt, Human
ugaggacaccggcuggagg

SEQ ID NO: 637922 - RNA, 22 nt, Human
ugaggacaccggcuggaggcca

SEQ ID NO: 637923 - RNA, 19 nt, Human
ugggagagggagagggcag

SEQ ID NO: 637924 - RNA, 22 nt, Human
ugggagagggagagggcagcuu

SEQ ID NO: 637925 - RNA, 19 nt, Human
uggugaaggcaaucucuuc

SEQ ID NO: 637926 - RNA, 24 nt, Human
uggugggagagggagagggcagcu

SEQ ID NO: 637927 - RNA, 18 nt, Human
uuccauguggacuggaag

SEQ ID NO: 637928 - RNA, 18 nt, Human
uugaguccaugcucuuuc

SEQ ID NO: 637929 - RNA, 20 nt, Human
aaagaaagggaggagcuagc

SEQ ID NO: 637930 - RNA, 24 nt, Human
aaagggaggagcuagcucucugcc

SEQ ID NO: 637931 - RNA, 22 nt, Human
aacaccucagaaucucuccaga

SEQ ID NO: 637932 - RNA, 23 nt, Human
aaggcccauggguggccuggaac

SEQ ID NO: 637933 - RNA, 21 nt, Human
agaaagaaagggaggagcuag

SEQ ID NO: 637934 - RNA, 19 nt, Human
aggaaguagcagaacucgg

SEQ ID NO: 637935 - RNA, 20 nt, Human
aggcaaaagaggcucaaaca

SEQ ID NO: 637936 - RNA, 24 nt, Human
agucucagguggaaaaagaaagaa

SEQ ID NO: 637937 - RNA, 26 nt, Human
aucucuccagagacgucccuuacuag

SEQ ID NO: 637938 - RNA, 21 nt, Human
cacagguuuccccagaagcuu

SEQ ID NO: 637939 - RNA, 22 nt, Human
cacuuugccucccucggcucca

SEQ ID NO: 637940 - RNA, 19 nt, Human
cagcagcuuccccuggguu

SEQ ID NO: 637941 - RNA, 19 nt, Human
cagcgggccccgccuuucc

SEQ ID NO: 637942 - RNA, 26 nt, Human
caggacccucgccaggggcggccgug

SEQ ID NO: 637943 - RNA, 23 nt, Human
cagggacccagaucuccugaggg

SEQ ID NO: 637944 - RNA, 24 nt, Human
cagguggaaaaagaaagaaaggga

SEQ ID NO: 637945 - RNA, 19 nt, Human
ccagagacgucccuuacua

SEQ ID NO: 637946 - RNA, 20 nt, Human
ccagagaggcccucugagug

SEQ ID NO: 637947 - RNA, 19 nt, Human
ccagccaugaguagggggc

SEQ ID NO: 637948 - RNA, 25 nt, Human
cccauggguggccuggaacuggcuc

SEQ ID NO: 637949 - RNA, 20 nt, Human
ccccacucaucacugcuggg

SEQ ID NO: 637950 - RNA, 21 nt, Human
ccccagaagcuucacuuugcc

SEQ ID NO: 637951 - RNA, 26 nt, Human
ccccagaagcuucacuuugccucccu

SEQ ID NO: 637952 - RNA, 19 nt, Human
cccccuggcuccacucugg

SEQ ID NO: 637953 - RNA, 21 nt, Human
ccuggguuccugggccgaggg

SEQ ID NO: 637954 - RNA, 19 nt, Human
cgccaggggcggccgugcc

SEQ ID NO: 637955 - RNA, 20 nt, Human
cgggaaggacacugccggug

SEQ ID NO: 637956 - RNA, 18 nt, Human
cuccagagaggcccucug

SEQ ID NO: 637957 - RNA, 19 nt, Human
cuccagggacccagaucuc

SEQ ID NO: 637958 - RNA, 24 nt, Human
cuccugagggauguugggggaagc

SEQ ID NO: 637959 - RNA, 21 nt, Human
cuucucagagagaccgggcuc

SEQ ID NO: 637960 - RNA, 19 nt, Human
cuuucagcgggccccgccu

SEQ ID NO: 637961 - RNA, 25 nt, Human
cuuuuuauuguuuuguuuuuuauaa

SEQ ID NO: 637962 - RNA, 25 nt, Human
gagaacuccucaccguuguaauauc

SEQ ID NO: 637963 - RNA, 18 nt, Human
gaggagcguacuggcucc

SEQ ID NO: 637964 - RNA, 23 nt, Human
gauguugggggaagcccccaugg

SEQ ID NO: 637965 - RNA, 22 nt, Human
gcuagauacagggagauuccug

SEQ ID NO: 637966 - RNA, 23 nt, Human
gcuccacucuggaggagcguacu

SEQ ID NO: 637967 - RNA, 22 nt, Human
gcuucagcuagccccacucauc

SEQ ID NO: 637968 - RNA, 22 nt, Human
gggggggaaaagacaucccuac

SEQ ID NO: 637969 - RNA, 22 nt, Human
guggaaaaagaaagaaagggag

SEQ ID NO: 637970 - RNA, 22 nt, Human
uaggcaaaagaggcucaaacac

SEQ ID NO: 637971 - RNA, 20 nt, Human
ucagccaauugaaaucgugg

SEQ ID NO: 637972 - RNA, 21 nt, Human
ucagccaauugaaaucgugga

SEQ ID NO: 637973 - RNA, 18 nt, Human
uccccuggguuccugggc

SEQ ID NO: 637974 - RNA, 18 nt, Human
ucccuacuccccuucccc

SEQ ID NO: 637975 - RNA, 21 nt, Human
ucccuacuccccuuccccgug

SEQ ID NO: 637976 - RNA, 23 nt, Human
ucccucggcuccacugucccccu

SEQ ID NO: 637977 - RNA, 22 nt, Human
uccgggucaggauugcuagggc

SEQ ID NO: 637978 - RNA, 23 nt, Human
ucugcagcuccucccccgcuggg

SEQ ID NO: 637979 - RNA, 22 nt, Human
ucugccagccaugaguaggggg

SEQ ID NO: 637980 - RNA, 24 nt, Human
ucugccuucucagccaauugaaau

SEQ ID NO: 637981 - RNA, 18 nt, Human
ugaguagggggcggggcc

SEQ ID NO: 637982 - RNA, 18 nt, Human
ugcuagggcagcagcuuc

SEQ ID NO: 637983 - RNA, 19 nt, Human
uggaaaaagaaagaaaggg

SEQ ID NO: 637984 - RNA, 18 nt, Human
uggaacuggcuccagaga

SEQ ID NO: 637985 - RNA, 19 nt, Human
uggaacuggcuccagagag

SEQ ID NO: 637986 - RNA, 18 nt, Human
uggaaggucugcagcucc

SEQ ID NO: 637987 - RNA, 21 nt, Human
uggaaggucugcagcuccucc

SEQ ID NO: 637988 - RNA, 19 nt, Human
uggggccacgaaucugcca

SEQ ID NO: 637989 - RNA, 22 nt, Human
uggguggggccacgaaucugcc

SEQ ID NO: 637990 - RNA, 27 nt, Human
uguuuuguuuuuuauaaacaagucuca

SEQ ID NO: 637991 - RNA, 18 nt, Human
uuuuuuuuuuuuuuucug

SEQ ID NO: 637992 - RNA, 23 nt, Human
aaauauucacaaaaauacaacug

SEQ ID NO: 637993 - RNA, 23 nt, Human
agaaagcagugaaaaaacaaugc

SEQ ID NO: 637994 - RNA, 27 nt, Human
auaauaaugagcuugaugguuuuuccc

SEQ ID NO: 637995 - RNA, 18 nt, Human
caagaacaagugaaggcu

SEQ ID NO: 637996 - RNA, 27 nt, Human
cacagcaccagcuucaccaacacaugg

SEQ ID NO: 637997 - RNA, 24 nt, Human
cagugaaaaaacaaugccccuuuu

SEQ ID NO: 637998 - RNA, 19 nt, Human
guggcccccacagcaccag

SEQ ID NO: 637999 - RNA, 24 nt, Human
uauuaaaauauucacaaaaauaca

SEQ ID NO: 638000 - RNA, 19 nt, Human
ucagaaauugaaaaagaug

SEQ ID NO: 638001 - RNA, 21 nt, Human
ugagaaagcagugaaaaaaca

SEQ ID NO: 638002 - RNA, 22 nt, Human
ugagaaagcagugaaaaaacaa

SEQ ID NO: 638003 - RNA, 21 nt, Human
ugagcuugaugguuuuucccu

SEQ ID NO: 638004 - RNA, 21 nt, Human
ugaguggcccccacagcacca

SEQ ID NO: 638005 - RNA, 21 nt, Human
uucacaaaaauacaacugaag

SEQ ID NO: 638006 - RNA, 24 nt, Human
uuuuuuuuuuuuuuuuuuuuucag

SEQ ID NO: 638007 - RNA, 21 nt, Human
uuuuuuuuuuuuuuuuucagg

SEQ ID NO: 638008 - RNA, 22 nt, Human
aaauggcaaauaauucugaaac

SEQ ID NO: 638009 - RNA, 24 nt, Human
aagaaucucauuuccaauaauguc

SEQ ID NO: 638010 - RNA, 19 nt, Human
acaccuuuucuccuacgug

SEQ ID NO: 638011 - RNA, 20 nt, Human
augaagauaaaauauaugca

SEQ ID NO: 638012 - RNA, 22 nt, Human
auucacauugcaaccucucuua

SEQ ID NO: 638013 - RNA, 20 nt, Human
caaaagauacagcacuccac

SEQ ID NO: 638014 - RNA, 19 nt, Human
cuaccaagcaaugcaaaag

SEQ ID NO: 638015 - RNA, 18 nt, Human
cucaaaauggcaaauaau

SEQ ID NO: 638016 - RNA, 20 nt, Human
cucaauacacuuaucacacc

SEQ ID NO: 638017 - RNA, 24 nt, Human
gucacuggugacauuuuuaauugc

SEQ ID NO: 638018 - RNA, 23 nt, Human
uaaaacucuaccaagcaaugccu

SEQ ID NO: 638019 - RNA, 26 nt, Human
uaucacaccuuuucuccuacguguua

SEQ ID NO: 638020 - RNA, 20 nt, Human
ucaaaaagaauuuccuggca

SEQ ID NO: 638021 - RNA, 23 nt, Human
ucucuuaagaaucucauuuccaa

SEQ ID NO: 638022 - RNA, 21 nt, Human
ugaugcaucauuaggaucaaa

SEQ ID NO: 638023 - RNA, 20 nt, Human
ugcaaaggagggaggaagaa

SEQ ID NO: 638024 - RNA, 25 nt, Human
uuccuuuaacuuuuauuaacaguuc

SEQ ID NO: 638025 - RNA, 21 nt, Human
uucugaaacugaaguuuuggg

SEQ ID NO: 638026 - RNA, 22 nt, Human
uuggaccugaggaacccacugu

SEQ ID NO: 638027 - RNA, 19 nt, Human
agaccuggaagucccagug

SEQ ID NO: 638028 - RNA, 24 nt, Human
auccaaguuguuuuguuuuuuuuu

SEQ ID NO: 638029 - RNA, 21 nt, Human
uaagaccuggaagucccagug

SEQ ID NO: 638030 - RNA, 20 nt, Human
uaaguggaauuuucugccuc

SEQ ID NO: 638031 - RNA, 22 nt, Human
uacgcagcaagauaauggcuaa

SEQ ID NO: 638032 - RNA, 24 nt, Human
uguuuuguuuuuuuuuuucuucug

SEQ ID NO: 638033 - RNA, 23 nt, Human
uuugucaguguugugacccacuc

SEQ ID NO: 638034 - RNA, 22 nt, Human
uuuuuuuuuucuucugagcauu

SEQ ID NO: 638035 - RNA, 18 nt, Human
uuuuuuuuuuucaggacc

SEQ ID NO: 638036 - RNA, 22 nt, Human
uuuuuuuuuuuuuuuuuucagg

SEQ ID NO: 638037 - RNA, 22 nt, Human
aauaaaaaaacaaacaacaaaa

SEQ ID NO: 638038 - RNA, 24 nt, Human
auaaaugauacaguaguuuuuucc

SEQ ID NO: 638039 - RNA, 27 nt, Human
caaaauaaaaaaacaaacaacaaaaug

SEQ ID NO: 638040 - RNA, 24 nt, Human
caguaguuuuuuccucucuagccu

SEQ ID NO: 638041 - RNA, 24 nt, Human
cauccaaaauaaaaaaacaaacaa

SEQ ID NO: 638042 - RNA, 19 nt, Human
cauugucauccaaaauaaa

SEQ ID NO: 638043 - RNA, 22 nt, Human
cucagggggaaaagccauugaa

SEQ ID NO: 638044 - RNA, 22 nt, Human
gaauacauucauuuauuggguc

SEQ ID NO: 638045 - RNA, 20 nt, Human
ggggaaaagccauugaaugg

SEQ ID NO: 638046 - RNA, 23 nt, Human
uaaaugauacaguaguuuuuucc

SEQ ID NO: 638047 - RNA, 19 nt, Human
uaggauaaaugauacagua

SEQ ID NO: 638048 - RNA, 26 nt, Human
uaguuaguucuuuggcauagaaguuc

SEQ ID NO: 638049 - RNA, 22 nt, Human
uaguucuuuggcauagaaguuc

SEQ ID NO: 638050 - RNA, 20 nt, Human
uaguuuuuuccucucuagcc

SEQ ID NO: 638051 - RNA, 20 nt, Human
uccaaaauaaaaaaacaaac

SEQ ID NO: 638052 - RNA, 24 nt, Human
ucuuuuguuuuuuugaauuccuca

SEQ ID NO: 638053 - RNA, 23 nt, Human
ugggucuuaucuuaaaucuccuu

SEQ ID NO: 638054 - RNA, 21 nt, Human
uuccucaauuucauauguagu

SEQ ID NO: 638055 - RNA, 18 nt, Human
uugaauguaagugugguu

SEQ ID NO: 638056 - RNA, 21 nt, Human
uuuuuuuuuuuuuuuuuacag

SEQ ID NO: 638057 - RNA, 27 nt, Human
aaggcagcugagcagaaggaggggagg

SEQ ID NO: 638058 - RNA, 24 nt, Human
acaaagcauagagugugugaccuc

SEQ ID NO: 638059 - RNA, 19 nt, Human
agaaaagccaauacacgga

SEQ ID NO: 638060 - RNA, 22 nt, Human
aggcagcugagcagaaggaggg

SEQ ID NO: 638061 - RNA, 22 nt, Human
cagcagagaaagaguuuaauua

SEQ ID NO: 638062 - RNA, 24 nt, Human
ccagaaaagccaauacacggagaa

SEQ ID NO: 638063 - RNA, 22 nt, Human
ccuacacaaacacggaacagaa

SEQ ID NO: 638064 - RNA, 20 nt, Human
gcagcugagcagaaggaggg

SEQ ID NO: 638065 - RNA, 21 nt, Human
gccaauacacggagaacagua

SEQ ID NO: 638066 - RNA, 24 nt, Human
ggagaacaguagggguguugcagc

SEQ ID NO: 638067 - RNA, 22 nt, Human
uaagagagguucacacagcuaa

SEQ ID NO: 638068 - RNA, 18 nt, Human
uagagugugugaccucaa

SEQ ID NO: 638069 - RNA, 20 nt, Human
uccugcugcccagaaaagcc

SEQ ID NO: 638070 - RNA, 20 nt, Human
ugagcagaaggaggggaggu

SEQ ID NO: 638071 - RNA, 24 nt, Human
ugagcagaaggaggggagguaucu

SEQ ID NO: 638072 - RNA, 21 nt, Human
uggcauccucaaccaaauguu

SEQ ID NO: 638073 - RNA, 19 nt, Human
uuuuuuuuuuuuggcaucc

SEQ ID NO: 638074 - RNA, 18 nt, Human
uuuuuuuuuuuuuuuuug

SEQ ID NO: 638075 - RNA, 22 nt, Human
uuuuuuuuuuuuuuuuuuuggc

SEQ ID NO: 638076 - RNA, 23 nt, Human
uuuuuuuuuuuuuuuuuuuuggg

SEQ ID NO: 638077 - RNA, 23 nt, Human
aaaaaaaucccaaugguuaugga

SEQ ID NO: 638078 - RNA, 24 nt, Human
aaaauggcacaccaggguguaaug

SEQ ID NO: 638079 - RNA, 23 nt, Human
aaaguagaaaauaaaaaucagaa

SEQ ID NO: 638080 - RNA, 22 nt, Human
aagagaaaauggcacaccaggg

SEQ ID NO: 638081 - RNA, 23 nt, Human
auaaaaaucagaauguagaucca

SEQ ID NO: 638082 - RNA, 25 nt, Human
auacugagauuguuuacacagcucc

SEQ ID NO: 638083 - RNA, 19 nt, Human
cacaaagcuuaaaaucuca

SEQ ID NO: 638084 - RNA, 19 nt, Human
cacccauccauccacccaa

SEQ ID NO: 638085 - RNA, 20 nt, Human
cagcuccugcggguccggcu

SEQ ID NO: 638086 - RNA, 24 nt, Human
ccaaugguuauggagaucccuccu

SEQ ID NO: 638087 - RNA, 19 nt, Human
gaaagaagaauuuguggag

SEQ ID NO: 638088 - RNA, 21 nt, Human
gaagaauuuguggagggcagg

SEQ ID NO: 638089 - RNA, 18 nt, Human
ggcaugcacgugcccucg

SEQ ID NO: 638090 - RNA, 18 nt, Human
gggauaucacaagagaaa

SEQ ID NO: 638091 - RNA, 19 nt, Human
guagaaaauaaaaaucaga

SEQ ID NO: 638092 - RNA, 18 nt, Human
guagaacacaaugaaaca

SEQ ID NO: 638093 - RNA, 20 nt, Human
uaaguagaacacaaugaaac

SEQ ID NO: 638094 - RNA, 24 nt, Human
ucagccacaaagcuuaaaaucuca

SEQ ID NO: 638095 - RNA, 20 nt, Human
ugagaaagaagaauuugugg

SEQ ID NO: 638096 - RNA, 26 nt, Human
ugcggguccggcuuucuguggcuuuc

SEQ ID NO: 638097 - RNA, 20 nt, Human
uguugggagaggagguuaac

SEQ ID NO: 638098 - RNA, 20 nt, Human
uuaaaaucucaaaugucaac

SEQ ID NO: 638099 - RNA, 22 nt, Human
aagagccacagugauuccaugg

SEQ ID NO: 638100 - RNA, 22 nt, Human
agaccccgaguccuucaugcag

SEQ ID NO: 638101 - RNA, 23 nt, Human
agaguacaaaacugcaacaagag

SEQ ID NO: 638102 - RNA, 21 nt, Human
agaucuagaaaacuagagcuu

SEQ ID NO: 638103 - RNA, 18 nt, Human
agcugcauuuggguccug

SEQ ID NO: 638104 - RNA, 21 nt, Human
agcugcauuuggguccugcug

SEQ ID NO: 638105 - RNA, 22 nt, Human
cacaagcaugucuagccugggg

SEQ ID NO: 638106 - RNA, 22 nt, Human
cacuguaaaagaucuagaaaac

SEQ ID NO: 638107 - RNA, 18 nt, Human
caugcagagcugcagccg

SEQ ID NO: 638108 - RNA, 24 nt, Human
ccaguuucgugcaaagaaugacaa

SEQ ID NO: 638109 - RNA, 22 nt, Human
ccgcccuucaaccucuggcuau

SEQ ID NO: 638110 - RNA, 20 nt, Human
ccucuucuaccccgcccuuc

SEQ ID NO: 638111 - RNA, 21 nt, Human
cuaaacgguggugauuucucu

SEQ ID NO: 638112 - RNA, 25 nt, Human
cucuggcuauuguuacuuucuggga

SEQ ID NO: 638113 - RNA, 19 nt, Human
cugcauuuggguccugcug

SEQ ID NO: 638114 - RNA, 19 nt, Human
cugugcagcuucugagaag

SEQ ID NO: 638115 - RNA, 18 nt, Human
gaacuugaacaggcggca

SEQ ID NO: 638116 - RNA, 22 nt, Human
gagcugcauuuggguccugcug

SEQ ID NO: 638117 - RNA, 22 nt, Human
gucuguaguagggccuuacagc

SEQ ID NO: 638118 - RNA, 19 nt, Human
uaaaagaucuagaaaacua

SEQ ID NO: 638119 - RNA, 22 nt, Human
uaaaagaucuagaaaacuagag

SEQ ID NO: 638120 - RNA, 18 nt, Human
uacuguacacuguaaaag

SEQ ID NO: 638121 - RNA, 22 nt, Human
ucuguaguagggccuuacagcu

SEQ ID NO: 638122 - RNA, 23 nt, Human
ucuguaguagggccuuacagcuu

SEQ ID NO: 638123 - RNA, 24 nt, Human
ucuuguaaguuuacuuguuaaaca

SEQ ID NO: 638124 - RNA, 23 nt, Human
ucuuucuuugucacugcuuuccu

SEQ ID NO: 638125 - RNA, 28 nt, Human
ugaacaggcggcagaauauuguaaugac

SEQ ID NO: 638126 - RNA, 20 nt, Human
ugcaaagaaugacaacuucu

SEQ ID NO: 638127 - RNA, 18 nt, Human
uggggaguggguugggag

SEQ ID NO: 638128 - RNA, 21 nt, Human
uguaaaagaucuagaaaacua

SEQ ID NO: 638129 - RNA, 18 nt, Human
ugugcagcuucugagaag

SEQ ID NO: 638130 - RNA, 21 nt, Human
uucuuugucacugcuuuccuc

SEQ ID NO: 638131 - RNA, 23 nt, Human
uugggagcugcauuuggguccug

SEQ ID NO: 638132 - RNA, 20 nt, Human
uuggguccugcugucgcuuu

SEQ ID NO: 638133 - RNA, 22 nt, Human
uuuuuuuuuuaaaugaacaagc

SEQ ID NO: 638134 - RNA, 23 nt, Human
uuuuuuuuuuuuuuuuuuaaaug

SEQ ID NO: 638135 - RNA, 20 nt, Human
aaaaauccagaaaacaaaca

SEQ ID NO: 638136 - RNA, 23 nt, Human
aaaauccagaaaacaaacaacaa

SEQ ID NO: 638137 - RNA, 20 nt, Human
aaacccggagcagggcggcg

SEQ ID NO: 638138 - RNA, 19 nt, Human
aaagugcugggauuacagg

SEQ ID NO: 638139 - RNA, 23 nt, Human
aaagugcugggauuacaggcgua

SEQ ID NO: 638140 - RNA, 24 nt, Human
aaccagauucuggcaucuuucccg

SEQ ID NO: 638141 - RNA, 25 nt, Human
aagcaaaaaauccagaaaacaaaca

SEQ ID NO: 638142 - RNA, 26 nt, Human
aagcaugccuauaauaugcaucaugc

SEQ ID NO: 638143 - RNA, 19 nt, Human
aagcauuggccgccaggug

SEQ ID NO: 638144 - RNA, 19 nt, Human
aagugcugggauuacaggc

SEQ ID NO: 638145 - RNA, 19 nt, Human
aagugcugggauuacaggc

SEQ ID NO: 638146 - RNA, 26 nt, Human
aagugcugggauuacaggcguaagcc

SEQ ID NO: 638147 - RNA, 18 nt, Human
acaggcguaagccaccgc

SEQ ID NO: 638148 - RNA, 20 nt, Human
acccgccuccgccucccaaa

SEQ ID NO: 638149 - RNA, 18 nt, Human
acgggguuucaccguguu

SEQ ID NO: 638150 - RNA, 19 nt, Human
acgggguuucaccguguua

SEQ ID NO: 638151 - RNA, 20 nt, Human
acgggguuucaccguguuag

SEQ ID NO: 638152 - RNA, 24 nt, Human
acgggguuucaccguguuagccag

SEQ ID NO: 638153 - RNA, 19 nt, Human
agagacgggguuucaccgu

SEQ ID NO: 638154 - RNA, 18 nt, Human
agauugaaacagacuaua

SEQ ID NO: 638155 - RNA, 21 nt, Human
agccacacgauaaagcaugcc

SEQ ID NO: 638156 - RNA, 21 nt, Human
agcggaaggagaaacggaggg

SEQ ID NO: 638157 - RNA, 19 nt, Human
agggaggaagacaaacccg

SEQ ID NO: 638158 - RNA, 18 nt, Human
agugcugggauuacaggc

SEQ ID NO: 638159 - RNA, 24 nt, Human
auaaagcaugccuauaauaugccc

SEQ ID NO: 638160 - RNA, 22 nt, Human
aucuaggaucuuacaaucugau

SEQ ID NO: 638161 - RNA, 24 nt, Human
caaagugcugggauuacaggcgua

SEQ ID NO: 638162 - RNA, 23 nt, Human
caagaugaaugcauacaggucua

SEQ ID NO: 638163 - RNA, 22 nt, Human
caaucaucuuucugaauucaaa

SEQ ID NO: 638164 - RNA, 23 nt, Human
cacccgccuccgccucccaaagu

SEQ ID NO: 638165 - RNA, 18 nt, Human
caccguguuagccaggau

SEQ ID NO: 638166 - RNA, 24 nt, Human
caccguguuagccaggauggccuu

SEQ ID NO: 638167 - RNA, 21 nt, Human
cagaauagagugaaaaaacuc

SEQ ID NO: 638168 - RNA, 24 nt, Human
caucagaauagagugaaaaaacuc

SEQ ID NO: 638169 - RNA, 20 nt, Human
cauccuaaaauaccuggcca

SEQ ID NO: 638170 - RNA, 22 nt, Human
ccaaagugcugggauuacaggc

SEQ ID NO: 638171 - RNA, 22 nt, Human
ccaaagugcugggauuacaggc

SEQ ID NO: 638172 - RNA, 24 nt, Human
ccaaagugcugggauuacaggcgu

SEQ ID NO: 638173 - RNA, 24 nt, Human
ccaccgcgcccagccagcauaaaa

SEQ ID NO: 638174 - RNA, 19 nt, Human
cccagcaccgccgcucucc

SEQ ID NO: 638175 - RNA, 24 nt, Human
ccgccuccgccucccaaagugcug

SEQ ID NO: 638176 - RNA, 18 nt, Human
ccucccagcaccgccgcu

SEQ ID NO: 638177 - RNA, 21 nt, Human
cgccuccaguaaugaugaucu

SEQ ID NO: 638178 - RNA, 24 nt, Human
cgggguuucaccguguuagccagg

SEQ ID NO: 638179 - RNA, 24 nt, Human
cuccugaccucgugauacacccgc

SEQ ID NO: 638180 - RNA, 19 nt, Human
cucugugagauuuguggga

SEQ ID NO: 638181 - RNA, 21 nt, Human
cuggccgggccucccagcacc

SEQ ID NO: 638182 - RNA, 21 nt, Human
cuguuccauucuuuaggcaca

SEQ ID NO: 638183 - RNA, 22 nt, Human
gaccucgugauacacccgccuc

SEQ ID NO: 638184 - RNA, 18 nt, Human
gagaaacggagggaggaa

SEQ ID NO: 638185 - RNA, 24 nt, Human
gagacgggguuucaccguguuagc

SEQ ID NO: 638186 - RNA, 18 nt, Human
gauuacaggcguaagcca

SEQ ID NO: 638187 - RNA, 22 nt, Human
gauuacaggcguaagccaccgc

SEQ ID NO: 638188 - RNA, 18 nt, Human
gccaugggggaaacaaag

SEQ ID NO: 638189 - RNA, 23 nt, Human
gccuccgccucccaaagugcugg

SEQ ID NO: 638190 - RNA, 21 nt, Human
ggagcagggcggcgcggcagu

SEQ ID NO: 638191 - RNA, 22 nt, Human
ggauuacaggcguaagccaccg

SEQ ID NO: 638192 - RNA, 22 nt, Human
gggccucccagcaccgccgcuc

SEQ ID NO: 638193 - RNA, 23 nt, Human
gggguuucaccguguuagccagg

SEQ ID NO: 638194 - RNA, 24 nt, Human
gugauacacccgccuccgccuccc

SEQ ID NO: 638195 - RNA, 18 nt, Human
uaacuugcucacacccau

SEQ ID NO: 638196 - RNA, 18 nt, Human
uaaucgcuugaaaccaga

SEQ ID NO: 638197 - RNA, 23 nt, Human
uacacccgccuccgccucccaaa

SEQ ID NO: 638198 - RNA, 24 nt, Human
uacaggcguaagccaccgcgccca

SEQ ID NO: 638199 - RNA, 24 nt, Human
uacuagagacgggguuucaccgug

SEQ ID NO: 638200 - RNA, 26 nt, Human
uacuagagacgggguuucaccguguu

SEQ ID NO: 638201 - RNA, 18 nt, Human
uagagacgggguuucacc

SEQ ID NO: 638202 - RNA, 18 nt, Human
uagagacgggguuucacc

SEQ ID NO: 638203 - RNA, 18 nt, Human
uaggagaagucuccggua

SEQ ID NO: 638204 - RNA, 18 nt, Human
uauaagguuguucacauu

SEQ ID NO: 638205 - RNA, 24 nt, Human
ucaccguguuagccaggauggccu

SEQ ID NO: 638206 - RNA, 18 nt, Human
uccacagauguucaggcc

SEQ ID NO: 638207 - RNA, 21 nt, Human
uccagaaaacaaacaacaaau

SEQ ID NO: 638208 - RNA, 24 nt, Human
ucccaaagugcugggauuacaggc

SEQ ID NO: 638209 - RNA, 20 nt, Human
ucccagcaccgccgcucucc

SEQ ID NO: 638210 - RNA, 21 nt, Human
ucccagccccaaucgcagcuc

SEQ ID NO: 638211 - RNA, 23 nt, Human
ucccuuuccaggacucaacuuug

SEQ ID NO: 638212 - RNA, 18 nt, Human
ucugaaaaaacaucagaa

SEQ ID NO: 638213 - RNA, 21 nt, Human
ugaaaaaacucuugaugcacc

SEQ ID NO: 638214 - RNA, 24 nt, Human
ugaagcaaaaaauccagaaaacaa

SEQ ID NO: 638215 - RNA, 24 nt, Human
ugcugggauuacaggcguaagcca

SEQ ID NO: 638216 - RNA, 25 nt, Human
uggcaugauaucaggcacauaguga

SEQ ID NO: 638217 - RNA, 18 nt, Human
ugggauuacaggcguaag

SEQ ID NO: 638218 - RNA, 19 nt, Human
ugggauuacaggcguaagc

SEQ ID NO: 638219 - RNA, 21 nt, Human
ugggauuacaggcguaagcca

SEQ ID NO: 638220 - RNA, 22 nt, Human
ugggauuacaggcguaagccac

SEQ ID NO: 638221 - RNA, 23 nt, Human
ugggauuacaggcguaagccacc

SEQ ID NO: 638222 - RNA, 24 nt, Human
ugggauuacaggcguaagccaccg

SEQ ID NO: 638223 - RNA, 20 nt, Human
uguuccauucuuuaggcaca

SEQ ID NO: 638224 - RNA, 22 nt, Human
uuaacaagccaugaucuuccuu

SEQ ID NO: 638225 - RNA, 24 nt, Human
uuacuagagacgggguuucaccgu

SEQ ID NO: 638226 - RNA, 18 nt, Human
uuauuccacagauguuca

SEQ ID NO: 638227 - RNA, 23 nt, Human
uugcuaaauuauuccacagaugu

SEQ ID NO: 638228 - RNA, 19 nt, Human
uuucaccguguuagccagg

SEQ ID NO: 638229 - RNA, 23 nt, Human
uuuccugcagccauaauaagggu

SEQ ID NO: 638230 - RNA, 27 nt, Human
uuugagaucuucuggccuuccccaucc

SEQ ID NO: 638231 - RNA, 24 nt, Human
uuuugagaucuucuggccuucccc

SEQ ID NO: 638232 - RNA, 24 nt, Human
uuuuuacuagagacgggguuucac

SEQ ID NO: 638233 - RNA, 24 nt, Human
uuuuuuguauuuuuacuagagacg

SEQ ID NO: 638234 - RNA, 18 nt, Human
uuuuuuuuuuuuuuuuug

SEQ ID NO: 638235 - RNA, 25 nt, Human
uuuuuuuuuuuuuuuuuuguauuuu

SEQ ID NO: 638236 - RNA, 22 nt, Human
aucaccaaucaaagaagcgaau

SEQ ID NO: 638237 - RNA, 25 nt, Human
auggcucuauucugagcaguuucac

SEQ ID NO: 638238 - RNA, 20 nt, Human
caacacucaggcuaggaaag

SEQ ID NO: 638239 - RNA, 19 nt, Human
ccaaaaucuaaguucccau

SEQ ID NO: 638240 - RNA, 21 nt, Human
gaacuugaugaaagauuauuu

SEQ ID NO: 638241 - RNA, 18 nt, Human
gaucauggcucuauucug

SEQ ID NO: 638242 - RNA, 21 nt, Human
gcucuauucugagcaguuuca

SEQ ID NO: 638243 - RNA, 25 nt, Human
gcugaaacgccaaggcaugacacug

SEQ ID NO: 638244 - RNA, 19 nt, Human
uaaaggagauggaacuuga

SEQ ID NO: 638245 - RNA, 18 nt, Human
ucaaaaucaccaaucaaa

SEQ ID NO: 638246 - RNA, 23 nt, Human
uccaaaaucuaaguucccauuuc

SEQ ID NO: 638247 - RNA, 18 nt, Human
ugaaacgccaaggcauga

SEQ ID NO: 638248 - RNA, 24 nt, Human
ugaaacgccaaggcaugacacugc

SEQ ID NO: 638249 - RNA, 19 nt, Human
uuuuuuuuuuuuuuuuugu

SEQ ID NO: 638250 - RNA, 22 nt, Human
uuuuuuuuuuuuuuuuuugugg

SEQ ID NO: 638251 - RNA, 21 nt, Human
aagggggguguuuuauggggg

SEQ ID NO: 638252 - RNA, 22 nt, Human
aagucacagggagcagagaggg

SEQ ID NO: 638253 - RNA, 19 nt, Human
acacgguguccccacagca

SEQ ID NO: 638254 - RNA, 23 nt, Human
acagaagucacagggagcagaga

SEQ ID NO: 638255 - RNA, 21 nt, Human
agaguccaaaacaagcgcauc

SEQ ID NO: 638256 - RNA, 18 nt, Human
agccagcagcagggaaag

SEQ ID NO: 638257 - RNA, 27 nt, Human
agcgcagaguccaaaacagcagggacu

SEQ ID NO: 638258 - RNA, 21 nt, Human
agcugacuaagacagagcccc

SEQ ID NO: 638259 - RNA, 23 nt, Human
agggaugcagcagagagccagca

SEQ ID NO: 638260 - RNA, 21 nt, Human
agggcacagggcggaggucaa

SEQ ID NO: 638261 - RNA, 23 nt, Human
aguggccacuuccuccaggcagc

SEQ ID NO: 638262 - RNA, 21 nt, Human
aucccaccuuccugcauccaa

SEQ ID NO: 638263 - RNA, 20 nt, Human
augccugcagcugagccugg

SEQ ID NO: 638264 - RNA, 23 nt, Human
caaaacgacccccucgugggagc

SEQ ID NO: 638265 - RNA, 19 nt, Human
caaaccuuccagcugccca

SEQ ID NO: 638266 - RNA, 20 nt, Human
caaaccuuccagcugcccag

SEQ ID NO: 638267 - RNA, 24 nt, Human
caagggggguguaugccaccccag

SEQ ID NO: 638268 - RNA, 18 nt, Human
cacagaaaccccauacag

SEQ ID NO: 638269 - RNA, 19 nt, Human
cacagagcugacuaagaca

SEQ ID NO: 638270 - RNA, 21 nt, Human
cacagagcugacuaagacaga

SEQ ID NO: 638271 - RNA, 19 nt, Human
cacaggaaacaucauucuu

SEQ ID NO: 638272 - RNA, 23 nt, Human
cacucaucccccagaaucaaagu

SEQ ID NO: 638273 - RNA, 23 nt, Human
cagcacagcagcagggaagagga

SEQ ID NO: 638274 - RNA, 18 nt, Human
cagcagggccgcucaauc

SEQ ID NO: 638275 - RNA, 25 nt, Human
cagcgcagaguccaaaacaagcgca

SEQ ID NO: 638276 - RNA, 19 nt, Human
caggagacgccuuguccau

SEQ ID NO: 638277 - RNA, 20 nt, Human
caggccacagagcugacuaa

SEQ ID NO: 638278 - RNA, 19 nt, Human
cauacaggaacgagguccc

SEQ ID NO: 638279 - RNA, 20 nt, Human
cauccaaaccuuccagcugc

SEQ ID NO: 638280 - RNA, 21 nt, Human
cauccaaaccuuccagcugcc

SEQ ID NO: 638281 - RNA, 21 nt, Human
cauuccagcugggacagaagu

SEQ ID NO: 638282 - RNA, 18 nt, Human
cccagaaucaaaguggcc

SEQ ID NO: 638283 - RNA, 21 nt, Human
ccccagaaucaaaguggccac

SEQ ID NO: 638284 - RNA, 22 nt, Human
ccccagaaucaaaguggccacu

SEQ ID NO: 638285 - RNA, 19 nt, Human
ccccauacaggaacgaggu

SEQ ID NO: 638286 - RNA, 18 nt, Human
ccugcagcugagccuggc

SEQ ID NO: 638287 - RNA, 18 nt, Human
ccugcuucagaacaccag

SEQ ID NO: 638288 - RNA, 28 nt, Human
cucaucccccagaaucaaaguggccacu

SEQ ID NO: 638289 - RNA, 18 nt, Human
cugaagucaucuggggac

SEQ ID NO: 638290 - RNA, 20 nt, Human
cugagccuggcaaggggcuu

SEQ ID NO: 638291 - RNA, 25 nt, Human
gacacagaaaccccauacaggaacg

SEQ ID NO: 638292 - RNA, 20 nt, Human
gacaccacucugcucugacu

SEQ ID NO: 638293 - RNA, 18 nt, Human
gagcagagaggguggggc

SEQ ID NO: 638294 - RNA, 25 nt, Human
gagcagagaggguggggcuaggggg

SEQ ID NO: 638295 - RNA, 24 nt, Human
gagccagcagcagggaaagggcaa

SEQ ID NO: 638296 - RNA, 20 nt, Human
gagccugcuucagaacaccg

SEQ ID NO: 638297 - RNA, 20 nt, Human
gaggcaugcugggagcacag

SEQ ID NO: 638298 - RNA, 20 nt, Human
gauggcagcacagcagcagg

SEQ ID NO: 638299 - RNA, 24 nt, Human
gcagacccaguucagucccagcca

SEQ ID NO: 638300 - RNA, 23 nt, Human
gcagggaaagggcacagggcgga

SEQ ID NO: 638301 - RNA, 20 nt, Human
gcccagaugggaaugcgagg

SEQ ID NO: 638302 - RNA, 19 nt, Human
gcggagugagcaggggaug

SEQ ID NO: 638303 - RNA, 22 nt, Human
gcggcugcccagaugggaaugc

SEQ ID NO: 638304 - RNA, 20 nt, Human
ggacagacacagaaacccca

SEQ ID NO: 638305 - RNA, 19 nt, Human
ggagcagagaggguggggc

SEQ ID NO: 638306 - RNA, 21 nt, Human
ggagugagcaggggauggcag

SEQ ID NO: 638307 - RNA, 22 nt, Human
gggcacagggcggaggucaagc

SEQ ID NO: 638308 - RNA, 27 nt, Human
gggggagcugguucugcucagcgcaga

SEQ ID NO: 638309 - RNA, 18 nt, Human
ggggguggaggugacaaa

SEQ ID NO: 638310 - RNA, 22 nt, Human
ggucacagucugccaggaggga

SEQ ID NO: 638311 - RNA, 19 nt, Human
uaagacagagccccugugc

SEQ ID NO: 638312 - RNA, 24 nt, Human
uaucccacucaucccccagaauca

SEQ ID NO: 638313 - RNA, 18 nt, Human
ucagucccagccagugug

SEQ ID NO: 638314 - RNA, 22 nt, Human
ucaucuggggacaccacucugc

SEQ ID NO: 638315 - RNA, 24 nt, Human
uccaacacguguuuaaugagcacc

SEQ ID NO: 638316 - RNA, 18 nt, Human
ucccaccuuccugcaucc

SEQ ID NO: 638317 - RNA, 19 nt, Human
uccccacagcagggccgcu

SEQ ID NO: 638318 - RNA, 18 nt, Human
ucgugggagcaggccugg

SEQ ID NO: 638319 - RNA, 21 nt, Human
ugacggcaccggccacgaggc

SEQ ID NO: 638320 - RNA, 19 nt, Human
ugacuaagacagagccccu

SEQ ID NO: 638321 - RNA, 25 nt, Human
ugacuggggacuauggggggagcac

SEQ ID NO: 638322 - RNA, 22 nt, Human
ugagccuggcaaggggcuugca

SEQ ID NO: 638323 - RNA, 19 nt, Human
ugagggucacagucugcca

SEQ ID NO: 638324 - RNA, 22 nt, Human
ugaucuacaaaacgacccccuc

SEQ ID NO: 638325 - RNA, 24 nt, Human
ugcccagaacugcugguaauccca

SEQ ID NO: 638326 - RNA, 18 nt, Human
uggaagacaccaaggggg

SEQ ID NO: 638327 - RNA, 22 nt, Human
uggaguugggggagcugguucu

SEQ ID NO: 638328 - RNA, 20 nt, Human
uguaccaggccacagagcuu

SEQ ID NO: 638329 - RNA, 19 nt, Human
uuagagcuacaguguuaac

SEQ ID NO: 638330 - RNA, 21 nt, Human
uucgcacacacacgguguccc

SEQ ID NO: 638331 - RNA, 21 nt, Human
uuuacacacuagggcuuaagu

SEQ ID NO: 638332 - RNA, 20 nt, Human
uuugccaagaugcuauccca

SEQ ID NO: 638333 - RNA, 22 nt, Human
uuuuuuuuuuuuuugccaguaa

SEQ ID NO: 638334 - RNA, 20 nt, Human
uuuuuuuuuuuuuuuuugcc

SEQ ID NO: 638335 - RNA, 22 nt, Human
uuuuuuuuuuuuuuuuugccag

SEQ ID NO: 638336 - RNA, 20 nt, Human
uuuuuuuuuuuuuuuuuugg

SEQ ID NO: 638337 - RNA, 20 nt, Human
aaccgccagcaucugauuug

SEQ ID NO: 638338 - RNA, 18 nt, Human
acugaagaguccuguuga

SEQ ID NO: 638339 - RNA, 18 nt, Human
acuuguggaauacuuccu

SEQ ID NO: 638340 - RNA, 21 nt, Human
agcaaaggaaagccaucacca

SEQ ID NO: 638341 - RNA, 20 nt, Human
aggcucaugaaguugaucug

SEQ ID NO: 638342 - RNA, 20 nt, Human
aggugccuucugaacaacag

SEQ ID NO: 638343 - RNA, 21 nt, Human
aguaacggaaguccaaaggaa

SEQ ID NO: 638344 - RNA, 25 nt, Human
aguuccuucauggcagugugggcuu

SEQ ID NO: 638345 - RNA, 21 nt, Human
auaugugcauauccauuuccu

SEQ ID NO: 638346 - RNA, 23 nt, Human
aucucuccuuaagauuuuuguug

SEQ ID NO: 638347 - RNA, 19 nt, Human
cacagacugagacugcugu

SEQ ID NO: 638348 - RNA, 24 nt, Human
cauauccauuuccucuucuguaaa

SEQ ID NO: 638349 - RNA, 19 nt, Human
ccaguacuauuuugaccag

SEQ ID NO: 638350 - RNA, 23 nt, Human
cccacgucuucugcucaacuucu

SEQ ID NO: 638351 - RNA, 19 nt, Human
cccaggaugugaaaaggcu

SEQ ID NO: 638352 - RNA, 18 nt, Human
cccuuugacacugaaccu

SEQ ID NO: 638353 - RNA, 18 nt, Human
ccuguauguaagaaaagg

SEQ ID NO: 638354 - RNA, 27 nt, Human
cugcaacugaaccgccagcaucugauu

SEQ ID NO: 638355 - RNA, 18 nt, Human
cuguggcagagcagguug

SEQ ID NO: 638356 - RNA, 21 nt, Human
cuucgaucauaccuuuuuguu

SEQ ID NO: 638357 - RNA, 22 nt, Human
cuucugaaaccuccaacagauu

SEQ ID NO: 638358 - RNA, 18 nt, Human
cuucugcuauagguugga

SEQ ID NO: 638359 - RNA, 24 nt, Human
gagcaggugguugugaagcaacau

SEQ ID NO: 638360 - RNA, 19 nt, Human
gcucucccucucaauauug

SEQ ID NO: 638361 - RNA, 24 nt, Human
ggaaguccaaaggaauggugagga

SEQ ID NO: 638362 - RNA, 18 nt, Human
ggcagguauaguaacgga

SEQ ID NO: 638363 - RNA, 21 nt, Human
ggccugaagggaacuugugga

SEQ ID NO: 638364 - RNA, 24 nt, Human
ggcuuuccccuaaaugcacagacu

SEQ ID NO: 638365 - RNA, 24 nt, Human
ggugaguauuuccagcaggagcug

SEQ ID NO: 638366 - RNA, 22 nt, Human
gucuucaacaucaccacauccu

SEQ ID NO: 638367 - RNA, 20 nt, Human
gucuucugcucaacuucuuu

SEQ ID NO: 638368 - RNA, 22 nt, Human
gugggcuguucuugcgaggcuu

SEQ ID NO: 638369 - RNA, 23 nt, Human
uaacggacuccgaacaaucuggu

SEQ ID NO: 638370 - RNA, 19 nt, Human
uaagucuaggugccuucug

SEQ ID NO: 638371 - RNA, 22 nt, Human
uacaguuucugcccacgucuuc

SEQ ID NO: 638372 - RNA, 19 nt, Human
uacuauuuugaccagaugg

SEQ ID NO: 638373 - RNA, 22 nt, Human
uaucugggagauuagcaaagga

SEQ ID NO: 638374 - RNA, 24 nt, Human
uauguaagaaaaggggcuggaauu

SEQ ID NO: 638375 - RNA, 19 nt, Human
uauugauccaaguucacau

SEQ ID NO: 638376 - RNA, 23 nt, Human
uauuuugacaagauuuauucuga

SEQ ID NO: 638377 - RNA, 23 nt, Human
ucaggauuuuuugcuucaguugg

SEQ ID NO: 638378 - RNA, 25 nt, Human
uccaacagauucuucaaugucuucu

SEQ ID NO: 638379 - RNA, 19 nt, Human
ucccauguggaacauucug

SEQ ID NO: 638380 - RNA, 22 nt, Human
uccccaagccucucuugguugu

SEQ ID NO: 638381 - RNA, 23 nt, Human
ucccuggcuuaacaucaaauagu

SEQ ID NO: 638382 - RNA, 18 nt, Human
ucuacuugcauugauuga

SEQ ID NO: 638383 - RNA, 19 nt, Human
ucucaagggucccuggcuc

SEQ ID NO: 638384 - RNA, 21 nt, Human
ucugauuugcucucccucuca

SEQ ID NO: 638385 - RNA, 22 nt, Human
ucugcucaacuucuuuuuuucu

SEQ ID NO: 638386 - RNA, 22 nt, Human
ucuucaacaucaccacauccuc

SEQ ID NO: 638387 - RNA, 27 nt, Human
ucuucuguaaaugcuucuacuucuaaa

SEQ ID NO: 638388 - RNA, 19 nt, Human
ucuugguuguggcaaaggc

SEQ ID NO: 638389 - RNA, 21 nt, Human
ugaggagugguaugcccagga

SEQ ID NO: 638390 - RNA, 23 nt, Human
ugaguauuuccagcaggagcugg

SEQ ID NO: 638391 - RNA, 18 nt, Human
ugagugauggaaauaaua

SEQ ID NO: 638392 - RNA, 20 nt, Human
ugauuuggggcauuucuuug

SEQ ID NO: 638393 - RNA, 24 nt, Human
ugcucaacuucuuuuuuucuggcu

SEQ ID NO: 638394 - RNA, 21 nt, Human
uggcagagcagguuggaagga

SEQ ID NO: 638395 - RNA, 18 nt, Human
ugugcugcucucuguggc

SEQ ID NO: 638396 - RNA, 18 nt, Human
uguuguguaucugggaga

SEQ ID NO: 638397 - RNA, 21 nt, Human
uuaggcucaugaaguugaucu

SEQ ID NO: 638398 - RNA, 20 nt, Human
uucaacaucaccacauccuc

SEQ ID NO: 638399 - RNA, 22 nt, Human
uucaaugucuucuucauagucu

SEQ ID NO: 638400 - RNA, 18 nt, Human
uuccuguauguaagaaaa

SEQ ID NO: 638401 - RNA, 19 nt, Human
uucugcccacgucuucugc

SEQ ID NO: 638402 - RNA, 19 nt, Human
uuggagcaggugguuguga

SEQ ID NO: 638403 - RNA, 18 nt, Human
uuuagacuuaaauugaag

SEQ ID NO: 638404 - RNA, 21 nt, Human
cagggagucccagcgaggccc

SEQ ID NO: 638405 - RNA, 22 nt, Human
cgacauggacagcgcguugccc

SEQ ID NO: 638406 - RNA, 24 nt, Human
uauuaaggaacugaugcaucugag

SEQ ID NO: 638407 - RNA, 21 nt, Human
aagcgggcagcgggucugggg

SEQ ID NO: 638408 - RNA, 23 nt, Human
aagcgggcagcgggucugggguc

SEQ ID NO: 638409 - RNA, 19 nt, Human
aaugguuugggguggcucc

SEQ ID NO: 638410 - RNA, 19 nt, Human
acccagcccugcccugccc

SEQ ID NO: 638411 - RNA, 21 nt, Human
acccagcccugcccugcccuu

SEQ ID NO: 638412 - RNA, 18 nt, Human
acuggguggugguggggc

SEQ ID NO: 638413 - RNA, 21 nt, Human
agaggucccuucaugaccucu

SEQ ID NO: 638414 - RNA, 21 nt, Human
agcgggcagcgggucuggggu

SEQ ID NO: 638415 - RNA, 24 nt, Human
agcuggagccacagaggucccuuc

SEQ ID NO: 638416 - RNA, 22 nt, Human
aggcggagcgggcugggcgggu

SEQ ID NO: 638417 - RNA, 23 nt, Human
aggggagggggcggugagccggg

SEQ ID NO: 638418 - RNA, 20 nt, Human
aguuccccucccuggccucc

SEQ ID NO: 638419 - RNA, 19 nt, Human
auggcaccuccagggcuga

SEQ ID NO: 638420 - RNA, 19 nt, Human
caacaagggucucaccccc

SEQ ID NO: 638421 - RNA, 20 nt, Human
caacccagggcggccgucgg

SEQ ID NO: 638422 - RNA, 21 nt, Human
cacccucugcccccgcaccuc

SEQ ID NO: 638423 - RNA, 22 nt, Human
cacuggguccccaaacugggug

SEQ ID NO: 638424 - RNA, 19 nt, Human
cagggagcugcaggcagag

SEQ ID NO: 638425 - RNA, 24 nt, Human
cauaacaggggccaggccggcacc

SEQ ID NO: 638426 - RNA, 21 nt, Human
ccacagaggucccuucaugac

SEQ ID NO: 638427 - RNA, 23 nt, Human
ccagaccacaggucggggugcgg

SEQ ID NO: 638428 - RNA, 20 nt, Human
ccaggccggcaccccucugu

SEQ ID NO: 638429 - RNA, 22 nt, Human
cccacccagcccugcccugccc

SEQ ID NO: 638430 - RNA, 18 nt, Human
cccauaacaggggccagg

SEQ ID NO: 638431 - RNA, 25 nt, Human
cccuccgccggcaccucggggaguc

SEQ ID NO: 638432 - RNA, 21 nt, Human
ccgcgagccacccccuccgcc

SEQ ID NO: 638433 - RNA, 21 nt, Human
ccgggccauggcgggcggggc

SEQ ID NO: 638434 - RNA, 18 nt, Human
ccuggagcggagucgcgg

SEQ ID NO: 638435 - RNA, 21 nt, Human
ccuggcucuugguaagucacc

SEQ ID NO: 638436 - RNA, 20 nt, Human
ccuugcccaaccccgggggg

SEQ ID NO: 638437 - RNA, 24 nt, Human
ccuugucuggcugccaacaagggu

SEQ ID NO: 638438 - RNA, 24 nt, Human
cgagccacccccuccgccggcacc

SEQ ID NO: 638439 - RNA, 22 nt, Human
cgggcgcgaagcgggcagcggg

SEQ ID NO: 638440 - RNA, 19 nt, Human
cgggcugggcggguugggg

SEQ ID NO: 638441 - RNA, 19 nt, Human
cgggcugggcggguugggg

SEQ ID NO: 638442 - RNA, 20 nt, Human
cggggcgcaaggcggagcgg

SEQ ID NO: 638443 - RNA, 22 nt, Human
cggggcugcaggggagggggcg

SEQ ID NO: 638444 - RNA, 22 nt, Human
cgucgggggcagccugagccgc

SEQ ID NO: 638445 - RNA, 20 nt, Human
cucccuggccuccuacaggg

SEQ ID NO: 638446 - RNA, 22 nt, Human
cuccgggcugggggcucccugg

SEQ ID NO: 638447 - RNA, 23 nt, Human
cuggguggugguggggcgccugu

SEQ ID NO: 638448 - RNA, 22 nt, Human
cuugcugucacuugggccuggg

SEQ ID NO: 638449 - RNA, 21 nt, Human
gaggcugacccauaacagggg

SEQ ID NO: 638450 - RNA, 18 nt, Human
gaggucccuucaugaccu

SEQ ID NO: 638451 - RNA, 20 nt, Human
gauggcaccuccagggcuga

SEQ ID NO: 638452 - RNA, 19 nt, Human
gcagcuggagccacagagg

SEQ ID NO: 638453 - RNA, 21 nt, Human
gccggcaccucggggaguccu

SEQ ID NO: 638454 - RNA, 20 nt, Human
gccgucgggauccgggccau

SEQ ID NO: 638455 - RNA, 23 nt, Human
gcggagcgggcugggcggguugg

SEQ ID NO: 638456 - RNA, 22 nt, Human
gcggguccccgcccaggcugcg

SEQ ID NO: 638457 - RNA, 21 nt, Human
gcuccugaacugcugaguucc

SEQ ID NO: 638458 - RNA, 20 nt, Human
ggagcugcaggcagaggagg

SEQ ID NO: 638459 - RNA, 24 nt, Human
ggaggcugaugcaacccagggcgg

SEQ ID NO: 638460 - RNA, 25 nt, Human
ggagggggcggugagccgggcacgu

SEQ ID NO: 638461 - RNA, 23 nt, Human
ggcccggugaagcuuccagacca

SEQ ID NO: 638462 - RNA, 23 nt, Human
ggccgucgggauccgggccaugg

SEQ ID NO: 638463 - RNA, 21 nt, Human
ggcggagcgggcugggcgggu

SEQ ID NO: 638464 - RNA, 22 nt, Human
ggcugcaggggagggggcggug

SEQ ID NO: 638465 - RNA, 22 nt, Human
gggcagcgggucuggggucggg

SEQ ID NO: 638466 - RNA, 20 nt, Human
gggcugcaggggagggggcg

SEQ ID NO: 638467 - RNA, 19 nt, Human
gggcugggcggguuggggg

SEQ ID NO: 638468 - RNA, 19 nt, Human
ggggcgccugugcugccug

SEQ ID NO: 638469 - RNA, 19 nt, Human
ggggcugcaggggaggggg

SEQ ID NO: 638470 - RNA, 19 nt, Human
ggggugccugggcugcagg

SEQ ID NO: 638471 - RNA, 21 nt, Human
gguccccaaacuggguggugg

SEQ ID NO: 638472 - RNA, 22 nt, Human
ggucggggugcggggugccugg

SEQ ID NO: 638473 - RNA, 19 nt, Human
gucccuucaugaccucugg

SEQ ID NO: 638474 - RNA, 24 nt, Human
guccugccuggagcggagucgcgg

SEQ ID NO: 638475 - RNA, 20 nt, Human
uaacaggggccaggccggca

SEQ ID NO: 638476 - RNA, 18 nt, Human
ucacuugggccugggcug

SEQ ID NO: 638477 - RNA, 23 nt, Human
uccccgcccaggcugcgggacag

SEQ ID NO: 638478 - RNA, 22 nt, Human
uccgcggucggggcgccgggcg

SEQ ID NO: 638479 - RNA, 20 nt, Human
uccugaacugcugaguuccc

SEQ ID NO: 638480 - RNA, 21 nt, Human
uccugaacugcugaguucccc

SEQ ID NO: 638481 - RNA, 18 nt, Human
ucggggcgccgggcgugg

SEQ ID NO: 638482 - RNA, 20 nt, Human
ugaacugcugaguuccccuc

SEQ ID NO: 638483 - RNA, 28 nt, Human
ugccugggcugcaggcugcuggaagggc

SEQ ID NO: 638484 - RNA, 19 nt, Human
ugccuguggagccccaccc

SEQ ID NO: 638485 - RNA, 19 nt, Human
ugcuggaagggcuccgggc

SEQ ID NO: 638486 - RNA, 27 nt, Human
ugcuggaagggcuccgggcugggggcu

SEQ ID NO: 638487 - RNA, 24 nt, Human
uggaagggcuccgggcugggggcu

SEQ ID NO: 638488 - RNA, 20 nt, Human
ugggcggguuggggguccug

SEQ ID NO: 638489 - RNA, 22 nt, Human
uggggucggccgcggguccggg

SEQ ID NO: 638490 - RNA, 19 nt, Human
ugguaagucacccucugcc

SEQ ID NO: 638491 - RNA, 22 nt, Human
uggugguggggcgccugugcug

SEQ ID NO: 638492 - RNA, 20 nt, Human
uguggagccccacccuuguc

SEQ ID NO: 638493 - RNA, 19 nt, Human
uuuuuuuuuuuuuuuuugu

SEQ ID NO: 638494 - RNA, 20 nt, Human
uuuuuuuuuuuuuuuuuugg

SEQ ID NO: 638495 - RNA, 22 nt, Human
aacagcccaccucacugugccc

SEQ ID NO: 638496 - RNA, 20 nt, Human
aaguggcugauaaauccaaa

SEQ ID NO: 638497 - RNA, 21 nt, Human
acacagcucacuggcugaguu

SEQ ID NO: 638498 - RNA, 22 nt, Human
acaguccugcugaauguuaaaa

SEQ ID NO: 638499 - RNA, 31 nt, Human
acccacuuguucacggacagggauagagguu

SEQ ID NO: 638500 - RNA, 22 nt, Human
acuggcaaguggggacagagug

SEQ ID NO: 638501 - RNA, 24 nt, Human
acugugcccucuaaaggagaucuu

SEQ ID NO: 638502 - RNA, 23 nt, Human
agaggucaacauucugaggaggu

SEQ ID NO: 638503 - RNA, 18 nt, Human
agcagaggggagacuauu

SEQ ID NO: 638504 - RNA, 22 nt, Human
aggaaauggacacagcucacug

SEQ ID NO: 638505 - RNA, 22 nt, Human
aggcagucucucuagaagaggu

SEQ ID NO: 638506 - RNA, 18 nt, Human
aggcaguggcagcagagg

SEQ ID NO: 638507 - RNA, 20 nt, Human
agggaggggaagugcauggg

SEQ ID NO: 638508 - RNA, 19 nt, Human
aguggagaaucaggcagug

SEQ ID NO: 638509 - RNA, 22 nt, Human
auaaauacuuggugcuaaaaag

SEQ ID NO: 638510 - RNA, 18 nt, Human
augaagaaggugaagaug

SEQ ID NO: 638511 - RNA, 24 nt, Human
augaccacaguccugcugaauguu

SEQ ID NO: 638512 - RNA, 24 nt, Human
auucugaggaggucagcagucuca

SEQ ID NO: 638513 - RNA, 19 nt, Human
caacugcaaguuugugcag

SEQ ID NO: 638514 - RNA, 22 nt, Human
cacccaccucagcaaucagaau

SEQ ID NO: 638515 - RNA, 21 nt, Human
cacugacagcuauuucauuca

SEQ ID NO: 638516 - RNA, 23 nt, Human
cacugugcccucuaaaggagauc

SEQ ID NO: 638517 - RNA, 20 nt, Human
cagaaggagcaaugagccac

SEQ ID NO: 638518 - RNA, 25 nt, Human
cagagccauuuuacagagucagaag

SEQ ID NO: 638519 - RNA, 18 nt, Human
cagugcacauacuuacag

SEQ ID NO: 638520 - RNA, 21 nt, Human
caucccaacagcccaccucac

SEQ ID NO: 638521 - RNA, 20 nt, Human
ccaaaacugggcugaugcua

SEQ ID NO: 638522 - RNA, 27 nt, Human
ccaacagcccaccucacugugcccucu

SEQ ID NO: 638523 - RNA, 19 nt, Human
ccccugccuacggccaucc

SEQ ID NO: 638524 - RNA, 23 nt, Human
cccuucaagaauauggauuuuca

SEQ ID NO: 638525 - RNA, 25 nt, Human
ccuacggccaucccaacagcccacc

SEQ ID NO: 638526 - RNA, 22 nt, Human
ccuccaugcagugcacauacuu

SEQ ID NO: 638527 - RNA, 21 nt, Human
ccugcugaauguuaaaaugga

SEQ ID NO: 638528 - RNA, 20 nt, Human
cuagugagaauaaauacuug

SEQ ID NO: 638529 - RNA, 19 nt, Human
cucaugcccugccagcuau

SEQ ID NO: 638530 - RNA, 18 nt, Human
cucauucaaucuggggca

SEQ ID NO: 638531 - RNA, 20 nt, Human
cucuguuuccugauggcccc

SEQ ID NO: 638532 - RNA, 18 nt, Human
cugaacugcacuccaccc

SEQ ID NO: 638533 - RNA, 20 nt, Human
cugaauguuaaaauggacaa

SEQ ID NO: 638534 - RNA, 20 nt, Human
cugcaaguuugugcagcuga

SEQ ID NO: 638535 - RNA, 21 nt, Human
gaagaaggugaagauguagua

SEQ ID NO: 638536 - RNA, 20 nt, Human
gaaguugcaacauaaacacu

SEQ ID NO: 638537 - RNA, 22 nt, Human
gaccacaguccugcugaauguu

SEQ ID NO: 638538 - RNA, 18 nt, Human
gagauucuuuagcuuugc

SEQ ID NO: 638539 - RNA, 19 nt, Human
gcagcugaauuucuguaaa

SEQ ID NO: 638540 - RNA, 21 nt, Human
gcaguggauaaccuuucugaa

SEQ ID NO: 638541 - RNA, 20 nt, Human
gcuaaaaagauaggugauau

SEQ ID NO: 638542 - RNA, 21 nt, Human
uaaacuaguuaacacuggcua

SEQ ID NO: 638543 - RNA, 26 nt, Human
uacauacaaaaauugcacacauagug

SEQ ID NO: 638544 - RNA, 27 nt, Human
uagaagggagcuggccaauuacugcuc

SEQ ID NO: 638545 - RNA, 23 nt, Human
uagagguuugucuuucuucuuuc

SEQ ID NO: 638546 - RNA, 23 nt, Human
uaguaaaagcaucauccagguac

SEQ ID NO: 638547 - RNA, 24 nt, Human
uauaagcucugaacugcacuccac

SEQ ID NO: 638548 - RNA, 22 nt, Human
uauccagaauuauggaggaaau

SEQ ID NO: 638549 - RNA, 19 nt, Human
ucaagggaaggcaacugca

SEQ ID NO: 638550 - RNA, 23 nt, Human
ucaaucacccaccucagcaauca

SEQ ID NO: 638551 - RNA, 25 nt, Human
ucagcagucucaucaguggccuucu

SEQ ID NO: 638552 - RNA, 21 nt, Human
ucaguggccuucuuccucucc

SEQ ID NO: 638553 - RNA, 27 nt, Human
uccacugacagcuauuucauucagggc

SEQ ID NO: 638554 - RNA, 28 nt, Human
uccacugacagcuauuucauucagggca

SEQ ID NO: 638555 - RNA, 19 nt, Human
uccugauggccccuagaga

SEQ ID NO: 638556 - RNA, 19 nt, Human
ucucauucaaucuggggca

SEQ ID NO: 638557 - RNA, 23 nt, Human
ucuccuggaacaaaagauauagu

SEQ ID NO: 638558 - RNA, 22 nt, Human
ucuuucuucuuuccuugaauuu

SEQ ID NO: 638559 - RNA, 19 nt, Human
ugaaaaugggucuaugacc

SEQ ID NO: 638560 - RNA, 21 nt, Human
ugaacagcucucaaucaccca

SEQ ID NO: 638561 - RNA, 22 nt, Human
ugaacugcacuccacccugcug

SEQ ID NO: 638562 - RNA, 24 nt, Human
ugaauagacccacuuguucacgga

SEQ ID NO: 638563 - RNA, 24 nt, Human
ugcagugcacauacuuacagauaa

SEQ ID NO: 638564 - RNA, 19 nt, Human
ugccuacggccaucccaac

SEQ ID NO: 638565 - RNA, 22 nt, Human
ugccuacggccaucccaacagc

SEQ ID NO: 638566 - RNA, 24 nt, Human
ugccuacggccaucccaacagccc

SEQ ID NO: 638567 - RNA, 21 nt, Human
uggcagcagaggggagacuau

SEQ ID NO: 638568 - RNA, 25 nt, Human
uggcuacugauagaagggagcuggc

SEQ ID NO: 638569 - RNA, 19 nt, Human
ugggucagcucuguaaugg

SEQ ID NO: 638570 - RNA, 20 nt, Human
ugggucagcucuguaauggg

SEQ ID NO: 638571 - RNA, 24 nt, Human
ugguaaccaaaacugggcugaugc

SEQ ID NO: 638572 - RNA, 20 nt, Human
uguuucaagggaaggcaacu

SEQ ID NO: 638573 - RNA, 21 nt, Human
uuaaaauggacagccagacuc

SEQ ID NO: 638574 - RNA, 22 nt, Human
uuagagcuccacugacagcuau

SEQ ID NO: 638575 - RNA, 22 nt, Human
uuauaagcucugaacugcacuc

SEQ ID NO: 638576 - RNA, 22 nt, Human
uuccugauggccccuagagaau

SEQ ID NO: 638577 - RNA, 20 nt, Human
uugaauuuggagugagcacu

SEQ ID NO: 638578 - RNA, 18 nt, Human
uuuuuuuuuuuuuuuuug

SEQ ID NO: 638579 - RNA, 23 nt, Human
aaaaagaaccaaaauaagaacac

SEQ ID NO: 638580 - RNA, 20 nt, Human
aaaagccaagcucagagacu

SEQ ID NO: 638581 - RNA, 23 nt, Human
aaagugcugggauuacaggcaug

SEQ ID NO: 638582 - RNA, 23 nt, Human
aacccaucucucccacucauccc

SEQ ID NO: 638583 - RNA, 24 nt, Human
aacccaucucucccacucaucccu

SEQ ID NO: 638584 - RNA, 20 nt, Human
aagccaagcucagagacugg

SEQ ID NO: 638585 - RNA, 19 nt, Human
aaguagcugggacuacagg

SEQ ID NO: 638586 - RNA, 20 nt, Human
aaguagcugggacuacaggc

SEQ ID NO: 638587 - RNA, 26 nt, Human
aaguagcugggacuacaggcgcacgc

SEQ ID NO: 638588 - RNA, 19 nt, Human
aagugcugggauuacaggc

SEQ ID NO: 638589 - RNA, 23 nt, Human
aagugcugggauuacaggcaugu

SEQ ID NO: 638590 - RNA, 25 nt, Human
acccaucucagcuucccaaagugcu

SEQ ID NO: 638591 - RNA, 24 nt, Human
accguauuggucagguugcucuug

SEQ ID NO: 638592 - RNA, 19 nt, Human
acgcucccggcgaggagac

SEQ ID NO: 638593 - RNA, 20 nt, Human
acgggcuuucaccguauugg

SEQ ID NO: 638594 - RNA, 24 nt, Human
acucuguugcccaggcuggagugc

SEQ ID NO: 638595 - RNA, 21 nt, Human
agcggacuacacagucggccc

SEQ ID NO: 638596 - RNA, 25 nt, Human
aggcuggagugcaguggcaugaucu

SEQ ID NO: 638597 - RNA, 24 nt, Human
aggugauccacccaucucagcuuc

SEQ ID NO: 638598 - RNA, 19 nt, Human
agugcaguggcaugaucuc

SEQ ID NO: 638599 - RNA, 21 nt, Human
agugcaguggcaugaucucag

SEQ ID NO: 638600 - RNA, 23 nt, Human
agugcaguggcaugaucucagcu

SEQ ID NO: 638601 - RNA, 24 nt, Human
aguggcaugaucucagcucacugu

SEQ ID NO: 638602 - RNA, 18 nt, Human
aucaguucaacuguccug

SEQ ID NO: 638603 - RNA, 19 nt, Human
augugccaccgcacccagc

SEQ ID NO: 638604 - RNA, 24 nt, Human
auuuuuguauuuuuaguagagacg

SEQ ID NO: 638605 - RNA, 24 nt, Human
caaagugcugggauuacaggcaug

SEQ ID NO: 638606 - RNA, 19 nt, Human
caagcuauucuccucucuc

SEQ ID NO: 638607 - RNA, 24 nt, Human
caccaccccaggcuaauuuuugua

SEQ ID NO: 638608 - RNA, 23 nt, Human
cacccaucucagcuucccaaagu

SEQ ID NO: 638609 - RNA, 22 nt, Human
caccguauuggucagguugcuc

SEQ ID NO: 638610 - RNA, 20 nt, Human
cacucuccauaaaagccaag

SEQ ID NO: 638611 - RNA, 22 nt, Human
cacucuguugcccaggcuggag

SEQ ID NO: 638612 - RNA, 18 nt, Human
cacuguaaccucugccuc

SEQ ID NO: 638613 - RNA, 18 nt, Human
cagaaugcugaaaugaca

SEQ ID NO: 638614 - RNA, 24 nt, Human
cagagucucacucuguugcccagg

SEQ ID NO: 638615 - RNA, 21 nt, Human
caggcgcacgccaccacccca

SEQ ID NO: 638616 - RNA, 18 nt, Human
cauaaaagccaagcucag

SEQ ID NO: 638617 - RNA, 20 nt, Human
caucuuugaaggacugcagu

SEQ ID NO: 638618 - RNA, 20 nt, Human
caugugccaccgcacccagc

SEQ ID NO: 638619 - RNA, 23 nt, Human
ccaaagugcugggauuacaggca

SEQ ID NO: 638620 - RNA, 24 nt, Human
ccaaagugcugggauuacaggcau

SEQ ID NO: 638621 - RNA, 25 nt, Human
ccaaagugcugggauuacaggcaug

SEQ ID NO: 638622 - RNA, 24 nt, Human
cccaaagugcugggauuacaggca

SEQ ID NO: 638623 - RNA, 23 nt, Human
cccaaguagcugggacuacaggc

SEQ ID NO: 638624 - RNA, 23 nt, Human
cccaaguagcugggacuacaggc

SEQ ID NO: 638625 - RNA, 21 nt, Human
ccgcacccagccauguauuau

SEQ ID NO: 638626 - RNA, 20 nt, Human
ccuccucauagggaaggcca

SEQ ID NO: 638627 - RNA, 22 nt, Human
ccugagcucaggugauccaccc

SEQ ID NO: 638628 - RNA, 23 nt, Human
ccugagcucaggugauccaccca

SEQ ID NO: 638629 - RNA, 20 nt, Human
cgcucccggcgaggagacug

SEQ ID NO: 638630 - RNA, 18 nt, Human
cgggcagagcgcgcugcc

SEQ ID NO: 638631 - RNA, 24 nt, Human
cucacucuguugcccaggcuggag

SEQ ID NO: 638632 - RNA, 19 nt, Human
cucacuguaaccucugccu

SEQ ID NO: 638633 - RNA, 24 nt, Human
cucacuguaaccucugccucucag

SEQ ID NO: 638634 - RNA, 24 nt, Human
cucagccucccaaguagcugggac

SEQ ID NO: 638635 - RNA, 21 nt, Human
cucagcuucccaaagugcugg

SEQ ID NO: 638636 - RNA, 24 nt, Human
cuggagugcaguggcaugaucuca

SEQ ID NO: 638637 - RNA, 24 nt, Human
cuguaaccucugccucucagguuc

SEQ ID NO: 638638 - RNA, 20 nt, Human
cuugaacuccugagcucagg

SEQ ID NO: 638639 - RNA, 24 nt, Human
gagcucaggugauccacccaucuc

SEQ ID NO: 638640 - RNA, 24 nt, Human
gagguuguggaaauaaaaaaaaga

SEQ ID NO: 638641 - RNA, 18 nt, Human
gauuacaggcaugugcca

SEQ ID NO: 638642 - RNA, 24 nt, Human
gcccaggcuggagugcaguggcau

SEQ ID NO: 638643 - RNA, 22 nt, Human
gcucaggugauccacccaucuc

SEQ ID NO: 638644 - RNA, 19 nt, Human
gcuggagugcaguggcaug

SEQ ID NO: 638645 - RNA, 25 nt, Human
ggaaauaaaaaaaagaaccgguacc

SEQ ID NO: 638646 - RNA, 22 nt, Human
ggauuacaggcaugugccaccg

SEQ ID NO: 638647 - RNA, 24 nt, Human
ggauugggcuagaagggcccugug

SEQ ID NO: 638648 - RNA, 21 nt, Human
gugacuucguugaucuuccuc

SEQ ID NO: 638649 - RNA, 24 nt, Human
gugauccacccaucucagcuuccc

SEQ ID NO: 638650 - RNA, 25 nt, Human
uaaaaaaaagaaccaaaauaagaac

SEQ ID NO: 638651 - RNA, 22 nt, Human
uaagaacacucuccauaaaagc

SEQ ID NO: 638652 - RNA, 25 nt, Human
uaagaacacucuccauaaaagccaa

SEQ ID NO: 638653 - RNA, 18 nt, Human
uaagacagagucucacuc

SEQ ID NO: 638654 - RNA, 22 nt, Human
uaagacagagucucacucuguu

SEQ ID NO: 638655 - RNA, 24 nt, Human
uaauuuuuguauuuuuaguagaga

SEQ ID NO: 638656 - RNA, 24 nt, Human
uacaggcaugugccaccgcaccca

SEQ ID NO: 638657 - RNA, 24 nt, Human
uaggaaagcaaaguuuacugaagg

SEQ ID NO: 638658 - RNA, 21 nt, Human
uaguagagacgggcuuucacc

SEQ ID NO: 638659 - RNA, 24 nt, Human
uaguagagacgggcuuucaccgua

SEQ ID NO: 638660 - RNA, 18 nt, Human
uauaacccaucucuccca

SEQ ID NO: 638661 - RNA, 21 nt, Human
uauguauauauuuaaaggcuu

SEQ ID NO: 638662 - RNA, 24 nt, Human
ucaagauaaaaauagggaugacuu

SEQ ID NO: 638663 - RNA, 18 nt, Human
ucaagcuauucuccucuc

SEQ ID NO: 638664 - RNA, 24 nt, Human
ucacucuguugcccaggcuggagu

SEQ ID NO: 638665 - RNA, 19 nt, Human
ucacuguaaccucugccuc

SEQ ID NO: 638666 - RNA, 24 nt, Human
ucacuguaaccucugccucucagg

SEQ ID NO: 638667 - RNA, 20 nt, Human
ucagaaacugaagaauuuuc

SEQ ID NO: 638668 - RNA, 20 nt, Human
ucagccucccaaguagcugg

SEQ ID NO: 638669 - RNA, 20 nt, Human
ucaggcaaucaugaugaagc

SEQ ID NO: 638670 - RNA, 18 nt, Human
ucagguugcucuugaacu

SEQ ID NO: 638671 - RNA, 24 nt, Human
ucccaaagugcugggauuacaggc

SEQ ID NO: 638672 - RNA, 24 nt, Human
ucccaaguagcugggacuacaggc

SEQ ID NO: 638673 - RNA, 20 nt, Human
ucccacucaucccugagccu

SEQ ID NO: 638674 - RNA, 20 nt, Human
ucccggcgaggagacugagg

SEQ ID NO: 638675 - RNA, 23 nt, Human
ucgccgcggccucggagcugcuc

SEQ ID NO: 638676 - RNA, 23 nt, Human
ucucacucuguugcccaggcugg

SEQ ID NO: 638677 - RNA, 24 nt, Human
ucucacucuguugcccaggcugga

SEQ ID NO: 638678 - RNA, 26 nt, Human
ucucacucuguugcccaggcuggagu

SEQ ID NO: 638679 - RNA, 27 nt, Human
ucucacucuguugcccaggcuggagug

SEQ ID NO: 638680 - RNA, 19 nt, Human
ucucagguucaagcuauuc

SEQ ID NO: 638681 - RNA, 21 nt, Human
ucucagguucaagcuauucuc

SEQ ID NO: 638682 - RNA, 20 nt, Human
ucuccucucucagccuccca

SEQ ID NO: 638683 - RNA, 18 nt, Human
ucugucuucucaggcaau

SEQ ID NO: 638684 - RNA, 18 nt, Human
ucuguugcccaggcugga

SEQ ID NO: 638685 - RNA, 23 nt, Human
ucuugaacuccugagcucaggug

SEQ ID NO: 638686 - RNA, 22 nt, Human
ugacuuccuguuucuacuucau

SEQ ID NO: 638687 - RNA, 20 nt, Human
ugacuucguugaucuuccuc

SEQ ID NO: 638688 - RNA, 22 nt, Human
ugagcucaggugauccacccau

SEQ ID NO: 638689 - RNA, 23 nt, Human
ugauccacccaucucagcuuccc

SEQ ID NO: 638690 - RNA, 22 nt, Human
ugcaguggcaugaucucagcuc

SEQ ID NO: 638691 - RNA, 18 nt, Human
ugcccaggcuggagugca

SEQ ID NO: 638692 - RNA, 21 nt, Human
ugcccaggcuggagugcagug

SEQ ID NO: 638693 - RNA, 22 nt, Human
ugcccaggcuggagugcagugg

SEQ ID NO: 638694 - RNA, 24 nt, Human
ugcccaggcuggagugcaguggca

SEQ ID NO: 638695 - RNA, 24 nt, Human
ugcucuugaacuccugagcucagg

SEQ ID NO: 638696 - RNA, 20 nt, Human
ugcugggauuacaggcaugu

SEQ ID NO: 638697 - RNA, 22 nt, Human
uggaaauaaaaaaaagaaccaa

SEQ ID NO: 638698 - RNA, 19 nt, Human
uggagugcaguggcaugau

SEQ ID NO: 638699 - RNA, 24 nt, Human
uggagugcaguggcaugaucucag

SEQ ID NO: 638700 - RNA, 19 nt, Human
uggauugggcuagaagggc

SEQ ID NO: 638701 - RNA, 24 nt, Human
uggcaugaucucagcucacuguaa

SEQ ID NO: 638702 - RNA, 22 nt, Human
ugggacuacaggcgcacgccac

SEQ ID NO: 638703 - RNA, 24 nt, Human
ugggacuacaggcgcacgccacca

SEQ ID NO: 638704 - RNA, 18 nt, Human
ugggauuacaggcaugug

SEQ ID NO: 638705 - RNA, 21 nt, Human
ugggauuacaggcaugugcca

SEQ ID NO: 638706 - RNA, 22 nt, Human
ugggauuacaggcaugugccac

SEQ ID NO: 638707 - RNA, 23 nt, Human
ugggauuacaggcaugugccacc

SEQ ID NO: 638708 - RNA, 24 nt, Human
ugggauuacaggcaugugccaccg

SEQ ID NO: 638709 - RNA, 24 nt, Human
uggucagguugcucuugaacuccu

SEQ ID NO: 638710 - RNA, 21 nt, Human
uguagaaagccuugaucaaga

SEQ ID NO: 638711 - RNA, 21 nt, Human
uguggaaauaaaaaaaagaac

SEQ ID NO: 638712 - RNA, 21 nt, Human
uguugcccaggcuggagugca

SEQ ID NO: 638713 - RNA, 18 nt, Human
uuaguagagacgggcuuu

SEQ ID NO: 638714 - RNA, 24 nt, Human
uuaguagagacgggcuuucaccgu

SEQ ID NO: 638715 - RNA, 23 nt, Human
uucauuuuauuauguaacuguag

SEQ ID NO: 638716 - RNA, 24 nt, Human
uugcccaggcuggagugcaguggc

SEQ ID NO: 638717 - RNA, 24 nt, Human
uuuuuaguagagacgggcuuucac

SEQ ID NO: 638718 - RNA, 20 nt, Human
uuuuuguauuuuuaguagag

SEQ ID NO: 638719 - RNA, 19 nt, Human
uuuuuuuuuuaagacagag

SEQ ID NO: 638720 - RNA, 26 nt, Human
uuuuuuuuuuuuaagacagagucuca

SEQ ID NO: 638721 - RNA, 20 nt, Human
aacuuugcuacuuuuccucu

SEQ ID NO: 638722 - RNA, 20 nt, Human
accaggggucuaccuccaaa

SEQ ID NO: 638723 - RNA, 19 nt, Human
acuuugcuacuuuuccucu

SEQ ID NO: 638724 - RNA, 21 nt, Human
agauuuaaaccaggggucuac

SEQ ID NO: 638725 - RNA, 19 nt, Human
aguuuuauggccagagagg

SEQ ID NO: 638726 - RNA, 24 nt, Human
auccagagucuuuucaauaaaggu

SEQ ID NO: 638727 - RNA, 24 nt, Human
auucccaagucugcuguucucaau

SEQ ID NO: 638728 - RNA, 22 nt, Human
caggggucuaccuccaaagucu

SEQ ID NO: 638729 - RNA, 22 nt, Human
ccagagucuuuucaauaaaggu

SEQ ID NO: 638730 - RNA, 22 nt, Human
guaagcaaaagaaagauccaaa

SEQ ID NO: 638731 - RNA, 22 nt, Human
uaaaugcugaaacacaacaaga

SEQ ID NO: 638732 - RNA, 18 nt, Human
uaagugacuuccucaaac

SEQ ID NO: 638733 - RNA, 22 nt, Human
uacacagcuuauuaaauccaga

SEQ ID NO: 638734 - RNA, 23 nt, Human
uagcacaccaacuuugcuacuuu

SEQ ID NO: 638735 - RNA, 20 nt, Human
uagcuuagaauaaaguucuu

SEQ ID NO: 638736 - RNA, 21 nt, Human
uaguaagcaaaagaaagaucc

SEQ ID NO: 638737 - RNA, 25 nt, Human
uccaaauuuuccucuuuuucaaaca

SEQ ID NO: 638738 - RNA, 18 nt, Human
ucccugagaggugguuug

SEQ ID NO: 638739 - RNA, 19 nt, Human
ugacugucaaguuuuaugg

SEQ ID NO: 638740 - RNA, 22 nt, Human
ugagaacaaaacagcuguaaca

SEQ ID NO: 638741 - RNA, 25 nt, Human
ugagaacaaaacagcuguaacaugc

SEQ ID NO: 638742 - RNA, 20 nt, Human
ugaguuaauccuagcacacc

SEQ ID NO: 638743 - RNA, 23 nt, Human
ugguuaaaacugagaacaaaaca

SEQ ID NO: 638744 - RNA, 22 nt, Human
uguucucaauccuaaaacacau

SEQ ID NO: 638745 - RNA, 19 nt, Human
uucagggaacagggaaacu

SEQ ID NO: 638746 - RNA, 25 nt, Human
uucucaauccuaaaacacaucaccu

SEQ ID NO: 638747 - RNA, 19 nt, Human
uuuuuuuuuuuuaaagaaa

SEQ ID NO: 638748 - RNA, 21 nt, Human
uuuuuuuuuuuuuuuuuaaag

SEQ ID NO: 638749 - RNA, 19 nt, Human
aaaaggccauaacuggccu

SEQ ID NO: 638750 - RNA, 19 nt, Human
aacagguuuaaggucuagg

SEQ ID NO: 638751 - RNA, 21 nt, Human
aacugcacacaggagcagggc

SEQ ID NO: 638752 - RNA, 24 nt, Human
agacugucaaaaauugccaaugcc

SEQ ID NO: 638753 - RNA, 22 nt, Human
agaguucacauugaguggaugu

SEQ ID NO: 638754 - RNA, 22 nt, Human
aggagaaaaaaggcggagcuga

SEQ ID NO: 638755 - RNA, 18 nt, Human
agggagaggggaaaagag

SEQ ID NO: 638756 - RNA, 22 nt, Human
agggaggaacgguaaacugggg

SEQ ID NO: 638757 - RNA, 24 nt, Human
aggggccuccacuaaccuccagug

SEQ ID NO: 638758 - RNA, 26 nt, Human
cacgucagccaaaccagggcagggaa

SEQ ID NO: 638759 - RNA, 22 nt, Human
cacuuuguguguugagacuggg

SEQ ID NO: 638760 - RNA, 19 nt, Human
cauagcucuaggaacaggu

SEQ ID NO: 638761 - RNA, 23 nt, Human
caugggguuuugcugagcacguc

SEQ ID NO: 638762 - RNA, 21 nt, Human
ccagagagaaaauaggagaaa

SEQ ID NO: 638763 - RNA, 18 nt, Human
ccagcacaugcagucucc

SEQ ID NO: 638764 - RNA, 21 nt, Human
ccaugccagcugccccuaccc

SEQ ID NO: 638765 - RNA, 28 nt, Human
cccugcccaucccaggcucccugcuugg

SEQ ID NO: 638766 - RNA, 21 nt, Human
ccuagauggcccccuucaagu

SEQ ID NO: 638767 - RNA, 19 nt, Human
cugccccuaccccaacugc

SEQ ID NO: 638768 - RNA, 18 nt, Human
cugguguggagggagagg

SEQ ID NO: 638769 - RNA, 19 nt, Human
cuugggggugaaagggcag

SEQ ID NO: 638770 - RNA, 22 nt, Human
gagaaaauaggagaaaaaaggc

SEQ ID NO: 638771 - RNA, 22 nt, Human
gagcuucaccagcacaugcagu

SEQ ID NO: 638772 - RNA, 19 nt, Human
gcccugagggaggaacggu

SEQ ID NO: 638773 - RNA, 22 nt, Human
gcugccccuaccccaacugcac

SEQ ID NO: 638774 - RNA, 19 nt, Human
ggagaggggaaaagagcag

SEQ ID NO: 638775 - RNA, 23 nt, Human
ggagcagggcacaugggguuuug

SEQ ID NO: 638776 - RNA, 22 nt, Human
ggagcaggugaccaaggaguuu

SEQ ID NO: 638777 - RNA, 21 nt, Human
ggagggagaggggaaaagagc

SEQ ID NO: 638778 - RNA, 20 nt, Human
ggugaaagggcagacaggga

SEQ ID NO: 638779 - RNA, 19 nt, Human
ggugauggagaagugagga

SEQ ID NO: 638780 - RNA, 18 nt, Human
guauugggaaaaguuuuc

SEQ ID NO: 638781 - RNA, 23 nt, Human
uaccucgggaagcaagccccagc

SEQ ID NO: 638782 - RNA, 20 nt, Human
uaccugaccaugccagcucc

SEQ ID NO: 638783 - RNA, 21 nt, Human
uagaagaacagagcucaccac

SEQ ID NO: 638784 - RNA, 22 nt, Human
uagaagaacagagcucaccaca

SEQ ID NO: 638785 - RNA, 23 nt, Human
uaggcuuuagaguuggggaaagg

SEQ ID NO: 638786 - RNA, 20 nt, Human
uccauggguuggggaccuag

SEQ ID NO: 638787 - RNA, 23 nt, Human
uccauuuauucaacuuuccggua

SEQ ID NO: 638788 - RNA, 20 nt, Human
ucccacagccggcggcacgc

SEQ ID NO: 638789 - RNA, 18 nt, Human
ucgugguaguagaguuca

SEQ ID NO: 638790 - RNA, 21 nt, Human
ucugcggggcugggccacuag

SEQ ID NO: 638791 - RNA, 19 nt, Human
ucuugggggugaaagggca

SEQ ID NO: 638792 - RNA, 20 nt, Human
ucuugggggugaaagggcag

SEQ ID NO: 638793 - RNA, 22 nt, Human
ugaaagggcagacagggaguca

SEQ ID NO: 638794 - RNA, 25 nt, Human
ugaccaugccagcugccccuacccc

SEQ ID NO: 638795 - RNA, 19 nt, Human
ugagucagggaagguggug

SEQ ID NO: 638796 - RNA, 24 nt, Human
ugaguggauguggguucugaguca

SEQ ID NO: 638797 - RNA, 21 nt, Human
uggagaagugaggaauauggg

SEQ ID NO: 638798 - RNA, 18 nt, Human
uggagcaggugaccaagg

SEQ ID NO: 638799 - RNA, 20 nt, Human
uggagggagaggggaaaaga

SEQ ID NO: 638800 - RNA, 19 nt, Human
ugggaaaaguuuucaauua

SEQ ID NO: 638801 - RNA, 20 nt, Human
ugggaaaaguuuucaauuag

SEQ ID NO: 638802 - RNA, 21 nt, Human
ugguagaagaacagagcucac

SEQ ID NO: 638803 - RNA, 21 nt, Human
ugugcugggcuuguggaagau

SEQ ID NO: 638804 - RNA, 21 nt, Human
ugugggucugcggggcugggc

SEQ ID NO: 638805 - RNA, 18 nt, Human
uguguguugagacugggu

SEQ ID NO: 638806 - RNA, 24 nt, Human
uuaagaggugaaauaccucgggaa

SEQ ID NO: 638807 - RNA, 19 nt, Human
uuagcaauaaucgcgccuc

SEQ ID NO: 638808 - RNA, 24 nt, Human
uuggagcaggugaccaaggaguuu

SEQ ID NO: 638809 - RNA, 21 nt, Human
uugugggucugcggggcuggg

SEQ ID NO: 638810 - RNA, 19 nt, Human
uuucauggagugucacgga

SEQ ID NO: 638811 - RNA, 23 nt, Human
uuuguguguugagacuggguugg

SEQ ID NO: 638812 - RNA, 18 nt, Human
uuuuuuuuuuuuuuuuug

SEQ ID NO: 638813 - RNA, 19 nt, Human
aaagcuuguagugcuucuc

SEQ ID NO: 638814 - RNA, 26 nt, Human
accgccgggucucucggguacccaac

SEQ ID NO: 638815 - RNA, 20 nt, Human
agcuuggucugggccuggcg

SEQ ID NO: 638816 - RNA, 23 nt, Human
caaaugaugcuaaugcuucuucu

SEQ ID NO: 638817 - RNA, 20 nt, Human
caacagcaguuaaauuaucu

SEQ ID NO: 638818 - RNA, 21 nt, Human
cagcauuuucuucuucaguuu

SEQ ID NO: 638819 - RNA, 23 nt, Human
cagcgucuucgggaggaagugac

SEQ ID NO: 638820 - RNA, 24 nt, Human
cauuccauuucucaacagcaguua

SEQ ID NO: 638821 - RNA, 23 nt, Human
cccaacaccgcucuucggcccaa

SEQ ID NO: 638822 - RNA, 19 nt, Human
cgagcgaggaggaggggcu

SEQ ID NO: 638823 - RNA, 21 nt, Human
cgagcgaggaggaggggcuaa

SEQ ID NO: 638824 - RNA, 20 nt, Human
cgagcgaggaggaggggcuu

SEQ ID NO: 638825 - RNA, 20 nt, Human
cgcccgcagagccgguccug

SEQ ID NO: 638826 - RNA, 25 nt, Human
cucuccuuucuauuuuucucuuuuc

SEQ ID NO: 638827 - RNA, 18 nt, Human
cucucggguacccaacac

SEQ ID NO: 638828 - RNA, 22 nt, Human
cucucggguacccaacaccgcu

SEQ ID NO: 638829 - RNA, 25 nt, Human
cucucuccuuucuauuuuucucuuu

SEQ ID NO: 638830 - RNA, 22 nt, Human
cucuucggcccaacgugucgcu

SEQ ID NO: 638831 - RNA, 22 nt, Human
cuuccuuuucuuucauagccuu

SEQ ID NO: 638832 - RNA, 18 nt, Human
gugacuuccccaccgccg

SEQ ID NO: 638833 - RNA, 25 nt, Human
uaagauauuccaucuuuuucucuuu

SEQ ID NO: 638834 - RNA, 19 nt, Human
uagcuuggucugggccugg

SEQ ID NO: 638835 - RNA, 18 nt, Human
uauucugugcauuucaug

SEQ ID NO: 638836 - RNA, 22 nt, Human
uccaucuuuuucucuuuccauu

SEQ ID NO: 638837 - RNA, 20 nt, Human
ucucuuuccauuuuucaaaa

SEQ ID NO: 638838 - RNA, 24 nt, Human
ucuuguuuuuuucuucaagccucu

SEQ ID NO: 638839 - RNA, 19 nt, Human
ugcuugaaaaaagcuuccu

SEQ ID NO: 638840 - RNA, 21 nt, Human
uucauguaaauauacauuuuu

SEQ ID NO: 638841 - RNA, 18 nt, Human
uucuucuuguuuuuuucu

SEQ ID NO: 638842 - RNA, 19 nt, Human
uucuuuuuauucugugcau

SEQ ID NO: 638843 - RNA, 23 nt, Human
uuggcagcuauuuucuuugcuuc

SEQ ID NO: 638844 - RNA, 21 nt, Human
uuuggcagcuauuuucuuugc

SEQ ID NO: 638845 - RNA, 24 nt, Human
uuuucuguucauuuuggauccuua

SEQ ID NO: 638846 - RNA, 20 nt, Human
uuuuuuuuuuuuuuuugcuu

SEQ ID NO: 638847 - RNA, 22 nt, Human
uuuuuuuuuuuuuuuugcuuga

SEQ ID NO: 638848 - RNA, 20 nt, Human
aaacaaagaagaggguccuc

SEQ ID NO: 638849 - RNA, 20 nt, Human
aaacaaagaagaggguccuc

SEQ ID NO: 638850 - RNA, 23 nt, Human
aaacaaagaagaggguccucagc

SEQ ID NO: 638851 - RNA, 24 nt, Human
aaagugcugggauuauaggcauga

SEQ ID NO: 638852 - RNA, 21 nt, Human
aaccucugccucccugggcuc

SEQ ID NO: 638853 - RNA, 21 nt, Human
aagaacuaaggcccuguggaa

SEQ ID NO: 638854 - RNA, 24 nt, Human
aagcaauccaccugccucagccuc

SEQ ID NO: 638855 - RNA, 19 nt, Human
aagcagaaagaaaaacagg

SEQ ID NO: 638856 - RNA, 26 nt, Human
aagugauccucccgccucaagccucc

SEQ ID NO: 638857 - RNA, 19 nt, Human
aagugcugggauuauaggc

SEQ ID NO: 638858 - RNA, 21 nt, Human
aagugcugggauuauaggcau

SEQ ID NO: 638859 - RNA, 21 nt, Human
acaaagaagaggguccucagc

SEQ ID NO: 638860 - RNA, 23 nt, Human
acaagccucaguauaaacaaaga

SEQ ID NO: 638861 - RNA, 23 nt, Human
acaauaucccugcagcaaacacu

SEQ ID NO: 638862 - RNA, 23 nt, Human
acacacacacacacacacacaca

SEQ ID NO: 638863 - RNA, 23 nt, Human
acacacacacacacacacacaca

SEQ ID NO: 638864 - RNA, 25 nt, Human
acacacacacacacacacacacagu

SEQ ID NO: 638865 - RNA, 23 nt, Human
acagcaaccucugccucccuggg

SEQ ID NO: 638866 - RNA, 21 nt, Human
accacuuauuuaauuuaacga

SEQ ID NO: 638867 - RNA, 18 nt, Human
acuaaggcccuguggaag

SEQ ID NO: 638868 - RNA, 25 nt, Human
acucuauuucccaggcuggagugca

SEQ ID NO: 638869 - RNA, 18 nt, Human
agaaaauaacagcaauag

SEQ ID NO: 638870 - RNA, 21 nt, Human
agaaagaaaaacaggggaaaa

SEQ ID NO: 638871 - RNA, 21 nt, Human
agcaauccaccugccucagcc

SEQ ID NO: 638872 - RNA, 23 nt, Human
agccauauagccaucaucauccc

SEQ ID NO: 638873 - RNA, 22 nt, Human
agcuaaagaacuaaggcccugu

SEQ ID NO: 638874 - RNA, 23 nt, Human
agcuggguuuauaggugugugcc

SEQ ID NO: 638875 - RNA, 26 nt, Human
aggaaaaacacagauuuaacuauaaa

SEQ ID NO: 638876 - RNA, 31 nt, Human
aggaaacacacacacacacacacacacacag

SEQ ID NO: 638877 - RNA, 21 nt, Human
aggcaugagccacugcaccca

SEQ ID NO: 638878 - RNA, 23 nt, Human
aggcuggagugcaguggcgaucu

SEQ ID NO: 638879 - RNA, 23 nt, Human
aguagcuggguuuauaggugugu

SEQ ID NO: 638880 - RNA, 25 nt, Human
aguggguggguagggggcacugagu

SEQ ID NO: 638881 - RNA, 19 nt, Human
auaccaaaggaaaacauga

SEQ ID NO: 638882 - RNA, 24 nt, Human
auaguagagaugggguuucaccau

SEQ ID NO: 638883 - RNA, 18 nt, Human
aucaacauacaauauccc

SEQ ID NO: 638884 - RNA, 19 nt, Human
augggguuucaccaugcug

SEQ ID NO: 638885 - RNA, 20 nt, Human
augggguuucaccaugcugg

SEQ ID NO: 638886 - RNA, 24 nt, Human
augggguuucaccaugcuggccag

SEQ ID NO: 638887 - RNA, 24 nt, Human
caaagugcugggauuauaggcaug

SEQ ID NO: 638888 - RNA, 24 nt, Human
caaccucugccucccugggcucaa

SEQ ID NO: 638889 - RNA, 20 nt, Human
cacacacacacacacacaca

SEQ ID NO: 638890 - RNA, 20 nt, Human
cacacacacacacacacaca

SEQ ID NO: 638891 - RNA, 20 nt, Human
cacacacacacacacacaca

SEQ ID NO: 638892 - RNA, 20 nt, Human
cacacacacacacacacaca

SEQ ID NO: 638893 - RNA, 20 nt, Human
cacacacacacacacacaca

SEQ ID NO: 638894 - RNA, 20 nt, Human
cacacacacacacacacaca

SEQ ID NO: 638895 - RNA, 22 nt, Human
cacacacacacacacacacaca

SEQ ID NO: 638896 - RNA, 22 nt, Human
cacacacacacacacacacaca

SEQ ID NO: 638897 - RNA, 22 nt, Human
cacacacacacacacacacaca

SEQ ID NO: 638898 - RNA, 26 nt, Human
cacacacacacacacacacacacaca

SEQ ID NO: 638899 - RNA, 26 nt, Human
cacacacacacacacacacacacaca

SEQ ID NO: 638900 - RNA, 26 nt, Human
cacacacacacacacacacacacaua

SEQ ID NO: 638901 - RNA, 26 nt, Human
cacacacacacacacacacacauaug

SEQ ID NO: 638902 - RNA, 22 nt, Human
cacacacacacacacacacaua

SEQ ID NO: 638903 - RNA, 26 nt, Human
cacacacacacacacacacauaugca

SEQ ID NO: 638904 - RNA, 20 nt, Human
cacacacacacacacacaua

SEQ ID NO: 638905 - RNA, 29 nt, Human
cacacacacacacacacauaugcacuuua

SEQ ID NO: 638906 - RNA, 19 nt, Human
cacagcauagccauauagc

SEQ ID NO: 638907 - RNA, 22 nt, Human
caccaucuuaaagaaaugaucu

SEQ ID NO: 638908 - RNA, 21 nt, Human
caccaugcuggccaggcuggu

SEQ ID NO: 638909 - RNA, 22 nt, Human
caccaugcuggccaggcugguc

SEQ ID NO: 638910 - RNA, 27 nt, Human
caccaugcuggccaggcuggucuagaa

SEQ ID NO: 638911 - RNA, 23 nt, Human
caccugccucagccucccaaagu

SEQ ID NO: 638912 - RNA, 23 nt, Human
cacgagccuggcuaauuuuugua

SEQ ID NO: 638913 - RNA, 22 nt, Human
cacucuauuucccaggcuggag

SEQ ID NO: 638914 - RNA, 19 nt, Human
cacugcacccagcccaaga

SEQ ID NO: 638915 - RNA, 19 nt, Human
cacugcacccagcccaaga

SEQ ID NO: 638916 - RNA, 20 nt, Human
caggaaacacacacacacac

SEQ ID NO: 638917 - RNA, 21 nt, Human
cauauagccaucaucauccca

SEQ ID NO: 638918 - RNA, 18 nt, Human
caucuuaaagaaaugauc

SEQ ID NO: 638919 - RNA, 24 nt, Human
caugcuggccaggcuggucuagaa

SEQ ID NO: 638920 - RNA, 24 nt, Human
ccaaagugcugggauuauaggcau

SEQ ID NO: 638921 - RNA, 26 nt, Human
ccaccugccucagccucccaaagugc

SEQ ID NO: 638922 - RNA, 19 nt, Human
ccacugcacccagcccaag

SEQ ID NO: 638923 - RNA, 19 nt, Human
ccacugcacccagcccaag

SEQ ID NO: 638924 - RNA, 20 nt, Human
ccacugcacccagcccaaga

SEQ ID NO: 638925 - RNA, 21 nt, Human
ccacugcacccagcccaagac

SEQ ID NO: 638926 - RNA, 27 nt, Human
ccauuuucauuuuaauuggcuugagga

SEQ ID NO: 638927 - RNA, 19 nt, Human
cccaggaaacacacacaca

SEQ ID NO: 638928 - RNA, 19 nt, Human
cccaggcuggagugcagug

SEQ ID NO: 638929 - RNA, 19 nt, Human
cccaggcuggagugcagug

SEQ ID NO: 638930 - RNA, 31 nt, Human
ccccaggaaacacacacacacacacacacag

SEQ ID NO: 638931 - RNA, 21 nt, Human
ccucagccacgcucccucguu

SEQ ID NO: 638932 - RNA, 26 nt, Human
ccucccgccucaagccuccugaguag

SEQ ID NO: 638933 - RNA, 22 nt, Human
ccugggcucaagugauccuccc

SEQ ID NO: 638934 - RNA, 22 nt, Human
cgccucaagccuccugaguagc

SEQ ID NO: 638935 - RNA, 25 nt, Human
cucaagugauccucccgccucaagc

SEQ ID NO: 638936 - RNA, 23 nt, Human
cucacucuauuucccaggcugga

SEQ ID NO: 638937 - RNA, 24 nt, Human
cuccuggccucaaagcaauccacc

SEQ ID NO: 638938 - RNA, 23 nt, Human
cugccucagccucccaaagugcu

SEQ ID NO: 638939 - RNA, 24 nt, Human
cugccucagccucccaaagugcug

SEQ ID NO: 638940 - RNA, 21 nt, Human
cuggaaguuguauuugguugu

SEQ ID NO: 638941 - RNA, 19 nt, Human
cuggccucaaagcaaucca

SEQ ID NO: 638942 - RNA, 21 nt, Human
cuggccucaaagcaauccacc

SEQ ID NO: 638943 - RNA, 21 nt, Human
cuuuuuuuuuuuuuuuuuuuu

SEQ ID NO: 638944 - RNA, 24 nt, Human
gaacuccuggccucaaagcaaucc

SEQ ID NO: 638945 - RNA, 27 nt, Human
gacuuugucuuccuuuuuuuuuuuuuu

SEQ ID NO: 638946 - RNA, 18 nt, Human
gagaugggguuucaccau

SEQ ID NO: 638947 - RNA, 24 nt, Human
gagaugggguuucaccaugcuggc

SEQ ID NO: 638948 - RNA, 18 nt, Human
gaucacugaggucaacaa

SEQ ID NO: 638949 - RNA, 22 nt, Human
gauuauaggcaugagccacugc

SEQ ID NO: 638950 - RNA, 23 nt, Human
gauuauaggcaugagccacugca

SEQ ID NO: 638951 - RNA, 24 nt, Human
gcaauccaccugccucagccuccc

SEQ ID NO: 638952 - RNA, 24 nt, Human
gccucaaagcaauccaccugccuc

SEQ ID NO: 638953 - RNA, 22 nt, Human
gccucaagccuccugaguagcu

SEQ ID NO: 638954 - RNA, 24 nt, Human
gccucaagccuccugaguagcugg

SEQ ID NO: 638955 - RNA, 19 nt, Human
gcucaagugauccucccgc

SEQ ID NO: 638956 - RNA, 22 nt, Human
gcuggagugcaguggcgaucuc

SEQ ID NO: 638957 - RNA, 23 nt, Human
gcuggucuagaacuccuggccuc

SEQ ID NO: 638958 - RNA, 19 nt, Human
ggaguggguggguaggggg

SEQ ID NO: 638959 - RNA, 24 nt, Human
ggcuggucuagaacuccuggccuc

SEQ ID NO: 638960 - RNA, 22 nt, Human
gggcucaagugauccucccgcc

SEQ ID NO: 638961 - RNA, 22 nt, Human
gggguuucaccaugcuggccag

SEQ ID NO: 638962 - RNA, 22 nt, Human
ggguuucaccaugcuggccagg

SEQ ID NO: 638963 - RNA, 24 nt, Human
guagcuggguuuauaggugugugc

SEQ ID NO: 638964 - RNA, 24 nt, Human
gugauccucccgccucaagccucc

SEQ ID NO: 638965 - RNA, 25 nt, Human
gugaugcaggcgcacaauuucucac

SEQ ID NO: 638966 - RNA, 19 nt, Human
guuuauaggugugugccac

SEQ ID NO: 638967 - RNA, 25 nt, Human
uaaaaaacacacaucaccguuaacc

SEQ ID NO: 638968 - RNA, 27 nt, Human
uaaaaaacacacaucaccguuaacuca

SEQ ID NO: 638969 - RNA, 18 nt, Human
uaacaggguagaugaugu

SEQ ID NO: 638970 - RNA, 24 nt, Human
uaauuuuuguauuuauaguagaga

SEQ ID NO: 638971 - RNA, 24 nt, Human
uacagcaaccucugccucccuggg

SEQ ID NO: 638972 - RNA, 21 nt, Human
uagcuaaagaacuaaggcccu

SEQ ID NO: 638973 - RNA, 23 nt, Human
uagcuggguuuauaggugugugc

SEQ ID NO: 638974 - RNA, 24 nt, Human
uaggugugugccacgagccuggcu

SEQ ID NO: 638975 - RNA, 21 nt, Human
uaguagagaugggguuucacc

SEQ ID NO: 638976 - RNA, 23 nt, Human
uaguagagaugggguuucaccau

SEQ ID NO: 638977 - RNA, 24 nt, Human
uaguagagaugggguuucaccaug

SEQ ID NO: 638978 - RNA, 26 nt, Human
uaguagagaugggguuucaccaugcu

SEQ ID NO: 638979 - RNA, 23 nt, Human
uauggacacagcauagccauaua

SEQ ID NO: 638980 - RNA, 19 nt, Human
ucaacaauauguagucaaa

SEQ ID NO: 638981 - RNA, 23 nt, Human
ucauaccaaaggaaaacaugacc

SEQ ID NO: 638982 - RNA, 25 nt, Human
ucauccaucugccaagucucauuuc

SEQ ID NO: 638983 - RNA, 21 nt, Human
uccaacagcaauaugcugaag

SEQ ID NO: 638984 - RNA, 24 nt, Human
ucccaaagugcugggauuauaggc

SEQ ID NO: 638985 - RNA, 25 nt, Human
ucccaggcuggagugcaguggcgau

SEQ ID NO: 638986 - RNA, 23 nt, Human
ucccaucaggacuuugucuuccu

SEQ ID NO: 638987 - RNA, 26 nt, Human
ucccugcagcaaacacugaguugccu

SEQ ID NO: 638988 - RNA, 25 nt, Human
ucccugggcucaagugauccucccg

SEQ ID NO: 638989 - RNA, 24 nt, Human
uccugaguagcuggguuuauaggu

SEQ ID NO: 638990 - RNA, 18 nt, Human
uccuuuuuuuuuuuuuuu

SEQ ID NO: 638991 - RNA, 18 nt, Human
uccuuuuuuuuuuuuuuu

SEQ ID NO: 638992 - RNA, 19 nt, Human
ucuauuucccaggcuggag

SEQ ID NO: 638993 - RNA, 24 nt, Human
ucuauuucccaggcuggagugcag

SEQ ID NO: 638994 - RNA, 21 nt, Human
ugagccacugcacccagccca

SEQ ID NO: 638995 - RNA, 24 nt, Human
ugccucagccucccaaagugcugg

SEQ ID NO: 638996 - RNA, 19 nt, Human
ugccuuuguggcagaaaca

SEQ ID NO: 638997 - RNA, 20 nt, Human
ugcugaagagauuuucaggg

SEQ ID NO: 638998 - RNA, 20 nt, Human
uggaaagcagaaagaaaaac

SEQ ID NO: 638999 - RNA, 21 nt, Human
uggaaagcagaaagaaaaaca

SEQ ID NO: 639000 - RNA, 21 nt, Human
uggaagaagaaugggagcaau

SEQ ID NO: 639001 - RNA, 24 nt, Human
uggaagaagaaugggagcaauguu

SEQ ID NO: 639002 - RNA, 18 nt, Human
uggagugcaguggcgauc

SEQ ID NO: 639003 - RNA, 24 nt, Human
uggccaggcuggucuagaacuccu

SEQ ID NO: 639004 - RNA, 24 nt, Human
uggccucaaagcaauccaccugcc

SEQ ID NO: 639005 - RNA, 18 nt, Human
ugggauuauaggcaugag

SEQ ID NO: 639006 - RNA, 19 nt, Human
ugggauuauaggcaugagc

SEQ ID NO: 639007 - RNA, 21 nt, Human
ugggauuauaggcaugagcca

SEQ ID NO: 639008 - RNA, 22 nt, Human
ugggauuauaggcaugagccac

SEQ ID NO: 639009 - RNA, 22 nt, Human
ugggauuauaggcaugagccac

SEQ ID NO: 639010 - RNA, 24 nt, Human
ugggauuauaggcaugagccacug

SEQ ID NO: 639011 - RNA, 24 nt, Human
ugggauuauaggcaugagccacug

SEQ ID NO: 639012 - RNA, 24 nt, Human
ugggcucaagugauccucccgccu

SEQ ID NO: 639013 - RNA, 24 nt, Human
ugggguuucaccaugcuggccagg

SEQ ID NO: 639014 - RNA, 22 nt, Human
uggguagggggcacugagucuu

SEQ ID NO: 639015 - RNA, 23 nt, Human
uggguagggggcacugagucuug

SEQ ID NO: 639016 - RNA, 24 nt, Human
uggugguguggaguggguggguag

SEQ ID NO: 639017 - RNA, 18 nt, Human
ugucuaaggaauagcuuc

SEQ ID NO: 639018 - RNA, 23 nt, Human
uuaaaaaugaacagaagugacug

SEQ ID NO: 639019 - RNA, 25 nt, Human
uuacagcaaccucugccucccuggg

SEQ ID NO: 639020 - RNA, 24 nt, Human
uucccaggcuggagugcaguggcg

SEQ ID NO: 639021 - RNA, 24 nt, Human
uuuaaauaaauuccauuuucauuu

SEQ ID NO: 639022 - RNA, 24 nt, Human
uuuauaguagagaugggguuucac

SEQ ID NO: 639023 - RNA, 21 nt, Human
uuucaccaugcuggccaggcu

SEQ ID NO: 639024 - RNA, 18 nt, Human
uuuucagggagucgugca

SEQ ID NO: 639025 - RNA, 20 nt, Human
uuuuuguauuuauaguagag

SEQ ID NO: 639026 - RNA, 23 nt, Human
uuuuuguauuuauaguagagaug

SEQ ID NO: 639027 - RNA, 18 nt, Human
uuuuuuuuuuuuuuuuug

SEQ ID NO: 639028 - RNA, 18 nt, Human
uuuuuuuuuuuuuuuuug

SEQ ID NO: 639029 - RNA, 22 nt, Human
uuuuuuuuuuuuuuuuuggugg

SEQ ID NO: 639030 - RNA, 25 nt, Human
aaaaaaaaagaaaaaagauaaaaaa

SEQ ID NO: 639031 - RNA, 19 nt, Human
aaacagaaauuugaaaaau

SEQ ID NO: 639032 - RNA, 18 nt, Human
aaaucagagaaucugcug

SEQ ID NO: 639033 - RNA, 22 nt, Human
aacacccacugcucuagaugac

SEQ ID NO: 639034 - RNA, 19 nt, Human
aagccaacuauuagugcua

SEQ ID NO: 639035 - RNA, 22 nt, Human
acaaaaaaaaagaaaaaagaua

SEQ ID NO: 639036 - RNA, 19 nt, Human
acagaaauuugaaaaauuc

SEQ ID NO: 639037 - RNA, 22 nt, Human
acccacugcucuagaugacauc

SEQ ID NO: 639038 - RNA, 21 nt, Human
agacuuaaaaugucacaggug

SEQ ID NO: 639039 - RNA, 24 nt, Human
agagaugugaaaaauaacaaagaa

SEQ ID NO: 639040 - RNA, 19 nt, Human
aggugaaugacauuacaaa

SEQ ID NO: 639041 - RNA, 24 nt, Human
agugcacaugugugcauucacaua

SEQ ID NO: 639042 - RNA, 21 nt, Human
aguuuauauaaaucaaggucc

SEQ ID NO: 639043 - RNA, 23 nt, Human
augugugcauucacauacacagg

SEQ ID NO: 639044 - RNA, 21 nt, Human
caaaaaaaauagcugacuuau

SEQ ID NO: 639045 - RNA, 22 nt, Human
caaauagauuuaaacaguuaaa

SEQ ID NO: 639046 - RNA, 20 nt, Human
caaauuaaaaguaaaggcac

SEQ ID NO: 639047 - RNA, 25 nt, Human
cacaggugaaugacauuacaaauca

SEQ ID NO: 639048 - RNA, 19 nt, Human
caccaccccagccccugcc

SEQ ID NO: 639049 - RNA, 18 nt, Human
cagagaugugaaaaauaa

SEQ ID NO: 639050 - RNA, 22 nt, Human
cccagccccugccgggcucagc

SEQ ID NO: 639051 - RNA, 18 nt, Human
ccccagccccugccgggc

SEQ ID NO: 639052 - RNA, 24 nt, Human
ccuauucauuaacacccacugcuc

SEQ ID NO: 639053 - RNA, 25 nt, Human
cucucccaugcaguauggugcuuaa

SEQ ID NO: 639054 - RNA, 23 nt, Human
gaaugggaagacaguaacuuccu

SEQ ID NO: 639055 - RNA, 22 nt, Human
uaaaaaaaaacccugcuucuau

SEQ ID NO: 639056 - RNA, 18 nt, Human
uaaaaugucacaggugaa

SEQ ID NO: 639057 - RNA, 22 nt, Human
uaaacaaaaaaaaagaaaaaag

SEQ ID NO: 639058 - RNA, 19 nt, Human
uaaacaaaaaaaaagaaag

SEQ ID NO: 639059 - RNA, 23 nt, Human
uaaacaaaaaaaaagaaagccaa

SEQ ID NO: 639060 - RNA, 22 nt, Human
uaaaggcaccaggcuauaaagu

SEQ ID NO: 639061 - RNA, 24 nt, Human
uaacauugaaaaacugacuacuua

SEQ ID NO: 639062 - RNA, 25 nt, Human
uaacauugaaaaacugacuacuuau

SEQ ID NO: 639063 - RNA, 18 nt, Human
uaagugcacaugugugca

SEQ ID NO: 639064 - RNA, 18 nt, Human
uacaaaucagagaaucug

SEQ ID NO: 639065 - RNA, 21 nt, Human
uaccuauucauuaacacccac

SEQ ID NO: 639066 - RNA, 25 nt, Human
uagcuuaaacaaaaaaaaagaaaaa

SEQ ID NO: 639067 - RNA, 20 nt, Human
uaggauaacauugaaaaacu

SEQ ID NO: 639068 - RNA, 23 nt, Human
uaggauaacauugaaaaacugac

SEQ ID NO: 639069 - RNA, 23 nt, Human
ucauuaacacccacugcucuaga

SEQ ID NO: 639070 - RNA, 24 nt, Human
ucgcucagaucuucugggagucug

SEQ ID NO: 639071 - RNA, 21 nt, Human
ugaaaaauaacaaagaacuga

SEQ ID NO: 639072 - RNA, 22 nt, Human
ugaaaaauaacaaagaacugaa

SEQ ID NO: 639073 - RNA, 24 nt, Human
ugaaaaauaacaaagaacugaaaa

SEQ ID NO: 639074 - RNA, 24 nt, Human
ugaaaacauaguuuauauaaauca

SEQ ID NO: 639075 - RNA, 22 nt, Human
ugaaagacauccaauccaagua

SEQ ID NO: 639076 - RNA, 25 nt, Human
ugcuucuauguaaacaaaaaaaaag

SEQ ID NO: 639077 - RNA, 24 nt, Human
uggaaaaaaaaaaucaagguuuau

SEQ ID NO: 639078 - RNA, 20 nt, Human
ugggaagacaguaacuuccu

SEQ ID NO: 639079 - RNA, 19 nt, Human
ugggacgggaaugaguuga

SEQ ID NO: 639080 - RNA, 23 nt, Human
uguaaacaaaaaaaaagaaagcc

SEQ ID NO: 639081 - RNA, 25 nt, Human
uguaaacaaaaaaaaagaaagccaa

SEQ ID NO: 639082 - RNA, 22 nt, Human
ugucaaauggaaaaaaaaaauc

SEQ ID NO: 639083 - RNA, 21 nt, Human
uuaauggacaguacuugaaug

SEQ ID NO: 639084 - RNA, 22 nt, Human
uuaauguuacuggaaaauauug

SEQ ID NO: 639085 - RNA, 22 nt, Human
uuauaaaaaaugcucaaaguuu

SEQ ID NO: 639086 - RNA, 19 nt, Human
uuccaaguguguuuccugg

SEQ ID NO: 639087 - RNA, 24 nt, Human
uucucucaaauuaaaaguaaaggc

SEQ ID NO: 639088 - RNA, 18 nt, Human
uuuuuauuuugugugugu

SEQ ID NO: 639089 - RNA, 24 nt, Human
uuuuuuuuuuuuuuuuuuguuuuu

SEQ ID NO: 639090 - RNA, 23 nt, Human
uuuuuuuuuuuuuuuuuuuuggg

SEQ ID NO: 639091 - RNA, 20 nt, Human
acagugcauggaaaaaaaaa

SEQ ID NO: 639092 - RNA, 23 nt, Human
acggcgcagagcgggaggaagac

SEQ ID NO: 639093 - RNA, 18 nt, Human
augggcagagccucucca

SEQ ID NO: 639094 - RNA, 18 nt, Human
caacgggcgcaggcgcgg

SEQ ID NO: 639095 - RNA, 19 nt, Human
ccugcaaaugugggauggg

SEQ ID NO: 639096 - RNA, 19 nt, Human
cgacggcgcagagcgggag

SEQ ID NO: 639097 - RNA, 18 nt, Human
cggaaaagcuagaaaaug

SEQ ID NO: 639098 - RNA, 21 nt, Human
cggaaaagcuagaaaauguug

SEQ ID NO: 639099 - RNA, 19 nt, Human
cggggcgacggcgcagagc

SEQ ID NO: 639100 - RNA, 23 nt, Human
cgugccaaugcuuuucccugcaa

SEQ ID NO: 639101 - RNA, 18 nt, Human
cuagaaaauguugaagua

SEQ ID NO: 639102 - RNA, 21 nt, Human
gaaguagcagaagagcagaug

SEQ ID NO: 639103 - RNA, 21 nt, Human
gcgcggcgccgggacccggag

SEQ ID NO: 639104 - RNA, 22 nt, Human
ggacccggagcgagcagggaga

SEQ ID NO: 639105 - RNA, 21 nt, Human
ggaggaagacucacgccuggc

SEQ ID NO: 639106 - RNA, 24 nt, Human
ggcgacggcgcagagcgggaggaa

SEQ ID NO: 639107 - RNA, 24 nt, Human
uacacacagugcauggaaaaaaaa

SEQ ID NO: 639108 - RNA, 19 nt, Human
uguggacggggcgacggcg

SEQ ID NO: 639109 - RNA, 23 nt, Human
uuacacacagugcauggaaaaaa

SEQ ID NO: 639110 - RNA, 23 nt, Human
uuuaacuccaucaacugccucaa

SEQ ID NO: 639111 - RNA, 21 nt, Human
uuuuuuuuuuuuuuugugaga

SEQ ID NO: 639112 - RNA, 18 nt, Human
uuuuuuuuuuuuuuuuug

SEQ ID NO: 639113 - RNA, 19 nt, Human
uuuuuuuuuuuuuuuuugu

SEQ ID NO: 639114 - RNA, 19 nt, Human
acacugcauugcagauagg

SEQ ID NO: 639115 - RNA, 23 nt, Human
aucaugagagucccaaaauaaga

SEQ ID NO: 639116 - RNA, 23 nt, Human
caaaauaagaaccuagcagcuga

SEQ ID NO: 639117 - RNA, 24 nt, Human
cacugcauugcagauaggucaaaa

SEQ ID NO: 639118 - RNA, 20 nt, Human
cagcccaugucuuagaccaa

SEQ ID NO: 639119 - RNA, 20 nt, Human
caggagggaugccuaaagua

SEQ ID NO: 639120 - RNA, 24 nt, Human
cccacaaagccugaaauagcggac

SEQ ID NO: 639121 - RNA, 21 nt, Human
ccugaaauauuuacuuucugg

SEQ ID NO: 639122 - RNA, 28 nt, Human
cucagcaucaugagagucccaaaauaag

SEQ ID NO: 639123 - RNA, 21 nt, Human
uaaauagauaucccacaaagc

SEQ ID NO: 639124 - RNA, 22 nt, Human
uaaccuguauaaaagaugaaau

SEQ ID NO: 639125 - RNA, 18 nt, Human
uaagaaccuagcagcuga

SEQ ID NO: 639126 - RNA, 24 nt, Human
uaauaaccuguauaaaagaugaaa

SEQ ID NO: 639127 - RNA, 18 nt, Human
uagauaucccacaaagcc

SEQ ID NO: 639128 - RNA, 23 nt, Human
uaugcagcaauacuaaccuuaau

SEQ ID NO: 639129 - RNA, 22 nt, Human
ucccacaaagccugaaauauuu

SEQ ID NO: 639130 - RNA, 24 nt, Human
ugcauugcagauaggucaaaaggc

SEQ ID NO: 639131 - RNA, 21 nt, Human
uggaaaaaguuugucagccca

SEQ ID NO: 639132 - RNA, 27 nt, Human
aaacaccuucugggccugcugucaucc

SEQ ID NO: 639133 - RNA, 20 nt, Human
aaaggggcgagcuggagugc

SEQ ID NO: 639134 - RNA, 21 nt, Human
acuccucccaucucccugccc

SEQ ID NO: 639135 - RNA, 23 nt, Human
agcaggagaggucugaggggccg

SEQ ID NO: 639136 - RNA, 18 nt, Human
aggcagcgugacaguggg

SEQ ID NO: 639137 - RNA, 18 nt, Human
aggcgagagcgcgccccg

SEQ ID NO: 639138 - RNA, 22 nt, Human
aggcgguggggacuugaggaug

SEQ ID NO: 639139 - RNA, 20 nt, Human
agggcggggccagggaaauc

SEQ ID NO: 639140 - RNA, 22 nt, Human
agguccagggaccagcaggaga

SEQ ID NO: 639141 - RNA, 19 nt, Human
auaccuauccaucccaagc

SEQ ID NO: 639142 - RNA, 28 nt, Human
caaggacaccgucagcccuaagagaagu

SEQ ID NO: 639143 - RNA, 20 nt, Human
caccagaguucaucuuuagu

SEQ ID NO: 639144 - RNA, 22 nt, Human
caccccacauaugcauauucca

SEQ ID NO: 639145 - RNA, 22 nt, Human
cagacugcagcagacgcccaua

SEQ ID NO: 639146 - RNA, 21 nt, Human
cagcagcgaccgagggcagcc

SEQ ID NO: 639147 - RNA, 21 nt, Human
caggaacacaucagcaaaagc

SEQ ID NO: 639148 - RNA, 23 nt, Human
ccaagccaauuucuacauugugc

SEQ ID NO: 639149 - RNA, 22 nt, Human
ccacaaauagggggcggggaca

SEQ ID NO: 639150 - RNA, 26 nt, Human
ccagacugcagcagacggugggaaac

SEQ ID NO: 639151 - RNA, 19 nt, Human
cccagccagagguccaggg

SEQ ID NO: 639152 - RNA, 22 nt, Human
cccugcccaaucuaaaaauagg

SEQ ID NO: 639153 - RNA, 18 nt, Human
cccuucucucucucucuc

SEQ ID NO: 639154 - RNA, 25 nt, Human
ccucccaucucccugcccaaucuaa

SEQ ID NO: 639155 - RNA, 21 nt, Human
cgaaugcccuucccuauaccu

SEQ ID NO: 639156 - RNA, 21 nt, Human
cgagggcagccugccagucac

SEQ ID NO: 639157 - RNA, 24 nt, Human
cgcagccagacugcagcagacgcc

SEQ ID NO: 639158 - RNA, 19 nt, Human
cggcggcgccacccagcgg

SEQ ID NO: 639159 - RNA, 21 nt, Human
cgggauccaaguggcucaagu

SEQ ID NO: 639160 - RNA, 19 nt, Human
cggucaggaacacaucagc

SEQ ID NO: 639161 - RNA, 21 nt, Human
cggucaggaacacaucagcaa

SEQ ID NO: 639162 - RNA, 20 nt, Human
cuucugggccugcugucauc

SEQ ID NO: 639163 - RNA, 22 nt, Human
gaagaggcgguggggacuugag

SEQ ID NO: 639164 - RNA, 23 nt, Human
gaccgagggcagccugccaguca

SEQ ID NO: 639165 - RNA, 20 nt, Human
gaccgcagccagacugcagc

SEQ ID NO: 639166 - RNA, 25 nt, Human
gaggcggcggcggcgccacccagcg

SEQ ID NO: 639167 - RNA, 21 nt, Human
gagggcagccugccagucaca

SEQ ID NO: 639168 - RNA, 22 nt, Human
gagguccagggaccagcaggag

SEQ ID NO: 639169 - RNA, 18 nt, Human
gauccacgucugugacaa

SEQ ID NO: 639170 - RNA, 23 nt, Human
gcagccagacugcagcagacgcc

SEQ ID NO: 639171 - RNA, 23 nt, Human
gcccacuucgggauccaaguggc

SEQ ID NO: 639172 - RNA, 23 nt, Human
gcucggagggcagggacagaggc

SEQ ID NO: 639173 - RNA, 19 nt, Human
gcugagggggaacaccagg

SEQ ID NO: 639174 - RNA, 24 nt, Human
gcuggagugcagggcggggccagu

SEQ ID NO: 639175 - RNA, 19 nt, Human
ggacaccgucagcccuaag

SEQ ID NO: 639176 - RNA, 19 nt, Human
ggccgggcgcgcgcggggc

SEQ ID NO: 639177 - RNA, 22 nt, Human
ggcuggcugcuccugcagaugu

SEQ ID NO: 639178 - RNA, 18 nt, Human
gggcacaggugggacccg

SEQ ID NO: 639179 - RNA, 23 nt, Human
ggggacagugaggaagaagaggc

SEQ ID NO: 639180 - RNA, 21 nt, Human
uaaaaccagcguuaauauaga

SEQ ID NO: 639181 - RNA, 19 nt, Human
uaacgucagugaaauagua

SEQ ID NO: 639182 - RNA, 21 nt, Human
uaccuauccaucccaagccaa

SEQ ID NO: 639183 - RNA, 19 nt, Human
uaggagacgccccguccac

SEQ ID NO: 639184 - RNA, 22 nt, Human
uagggggcacaggugggacccg

SEQ ID NO: 639185 - RNA, 20 nt, Human
uauaccuauccaucccaagc

SEQ ID NO: 639186 - RNA, 22 nt, Human
uauagagaccuuugugugugau

SEQ ID NO: 639187 - RNA, 21 nt, Human
uauaggggcuuucuaguuucc

SEQ ID NO: 639188 - RNA, 23 nt, Human
ucaaugccggauuuacagugcaa

SEQ ID NO: 639189 - RNA, 18 nt, Human
ucagcaaaagcuccacuu

SEQ ID NO: 639190 - RNA, 18 nt, Human
uccaccgacauauuuaug

SEQ ID NO: 639191 - RNA, 20 nt, Human
uccaccgacauauuuaugga

SEQ ID NO: 639192 - RNA, 24 nt, Human
ucccucugccuucucugaguucuc

SEQ ID NO: 639193 - RNA, 18 nt, Human
uccggucaucaauuuccc

SEQ ID NO: 639194 - RNA, 19 nt, Human
uccucgggucccuucucuc

SEQ ID NO: 639195 - RNA, 26 nt, Human
ucucccgccgccgcuuucaguucgac

SEQ ID NO: 639196 - RNA, 20 nt, Human
ucugccuucucugaguucuc

SEQ ID NO: 639197 - RNA, 19 nt, Human
ugacaaggacaccgucagc

SEQ ID NO: 639198 - RNA, 24 nt, Human
ugacugcuggguggcggugguggu

SEQ ID NO: 639199 - RNA, 23 nt, Human
ugauggaagccuccuccucgggu

SEQ ID NO: 639200 - RNA, 19 nt, Human
ugcuggguggcgguggugg

SEQ ID NO: 639201 - RNA, 20 nt, Human
ugcuggguggcggugguggu

SEQ ID NO: 639202 - RNA, 24 nt, Human
ugcuggguggcgguggugguuuuc

SEQ ID NO: 639203 - RNA, 24 nt, Human
ugcugucauccuuacuccgaaugg

SEQ ID NO: 639204 - RNA, 19 nt, Human
ugcuuaguaacgucaguga

SEQ ID NO: 639205 - RNA, 19 nt, Human
uggagugcagggcggggcc

SEQ ID NO: 639206 - RNA, 20 nt, Human
uggcucaaguugucuucuug

SEQ ID NO: 639207 - RNA, 22 nt, Human
ugugaaaggagcccggagacuu

SEQ ID NO: 639208 - RNA, 22 nt, Human
uguguagccugcucugcucgag

SEQ ID NO: 639209 - RNA, 20 nt, Human
uuccagcauuuuccuucggg

SEQ ID NO: 639210 - RNA, 20 nt, Human
uucccgggaagcccacuucg

SEQ ID NO: 639211 - RNA, 22 nt, Human
uucuacauugugcugcaaugcu

SEQ ID NO: 639212 - RNA, 18 nt, Human
uucucucucucucucucc

SEQ ID NO: 639213 - RNA, 19 nt, Human
uuucccgggaagcccacuu

SEQ ID NO: 639214 - RNA, 19 nt, Human
uuuuuuuuuuuuaacagga

SEQ ID NO: 639215 - RNA, 22 nt, Human
uuuuuuuuuuuuuuuaacagga

SEQ ID NO: 639216 - RNA, 23 nt, Human
uuuuuuuuuuuuuuuuuaacagg

SEQ ID NO: 639217 - RNA, 23 nt, Human
aaagccuuggguuuccccugcuu

SEQ ID NO: 639218 - RNA, 22 nt, Human
aacccuaaaaaauguggacgug

SEQ ID NO: 639219 - RNA, 19 nt, Human
aacggaagaaaaacaaugg

SEQ ID NO: 639220 - RNA, 21 nt, Human
aagaaaaacaauggaaggaag

SEQ ID NO: 639221 - RNA, 18 nt, Human
aagauaccuuugcuccuc

SEQ ID NO: 639222 - RNA, 24 nt, Human
aauggugugaucucagcucacugc

SEQ ID NO: 639223 - RNA, 24 nt, Human
acaacccuaaaaaauguggacgug

SEQ ID NO: 639224 - RNA, 25 nt, Human
acacagcugcacauauggaaaagcc

SEQ ID NO: 639225 - RNA, 19 nt, Human
acccuaaaaaauguggacg

SEQ ID NO: 639226 - RNA, 25 nt, Human
accuccuggguucaagcaauucucc

SEQ ID NO: 639227 - RNA, 24 nt, Human
acggaguuucuccacguuggucag

SEQ ID NO: 639228 - RNA, 21 nt, Human
agaaaaacaauggaaggaagg

SEQ ID NO: 639229 - RNA, 27 nt, Human
agaaaaacaauggaaggaaggcuugaa

SEQ ID NO: 639230 - RNA, 21 nt, Human
agaagcaacaggcagcaccau

SEQ ID NO: 639231 - RNA, 27 nt, Human
agcuaauuuuguauuuuaguggagacg

SEQ ID NO: 639232 - RNA, 19 nt, Human
agcuuagaagcaacaggca

SEQ ID NO: 639233 - RNA, 23 nt, Human
aggcagcaccaucuucacgcuca

SEQ ID NO: 639234 - RNA, 24 nt, Human
aggugcuccgccugccucggccuc

SEQ ID NO: 639235 - RNA, 23 nt, Human
aguagcugauauuacaggcaugu

SEQ ID NO: 639236 - RNA, 19 nt, Human
aguccauuacaaaacuaca

SEQ ID NO: 639237 - RNA, 21 nt, Human
agugcaauggugugaucucag

SEQ ID NO: 639238 - RNA, 24 nt, Human
agugcaauggugugaucucagcuc

SEQ ID NO: 639239 - RNA, 20 nt, Human
aguuuugcucuuuuugccca

SEQ ID NO: 639240 - RNA, 21 nt, Human
auaggugaaguucugaaauuu

SEQ ID NO: 639241 - RNA, 19 nt, Human
augugccaccacacccagc

SEQ ID NO: 639242 - RNA, 18 nt, Human
auuccaggcuacucccca

SEQ ID NO: 639243 - RNA, 19 nt, Human
caacuuaggugcuccgccu

SEQ ID NO: 639244 - RNA, 22 nt, Human
caagcaauucuccugccucagc

SEQ ID NO: 639245 - RNA, 18 nt, Human
cacuaggucagcuuagaa

SEQ ID NO: 639246 - RNA, 22 nt, Human
cagcaccaucuucacgcucagu

SEQ ID NO: 639247 - RNA, 18 nt, Human
cagccuccugaguagcug

SEQ ID NO: 639248 - RNA, 21 nt, Human
cagcucacugcaaacuccacc

SEQ ID NO: 639249 - RNA, 23 nt, Human
cagcugcacauauggaaaagccu

SEQ ID NO: 639250 - RNA, 20 nt, Human
caugugccaccacacccagc

SEQ ID NO: 639251 - RNA, 22 nt, Human
ccaaaguguugggauaacaggc

SEQ ID NO: 639252 - RNA, 24 nt, Human
ccaaaguguugggauaacaggcgu

SEQ ID NO: 639253 - RNA, 20 nt, Human
ccaccacacccagcuaauuu

SEQ ID NO: 639254 - RNA, 27 nt, Human
ccaccuccuggguucaagcaauucuuu

SEQ ID NO: 639255 - RNA, 19 nt, Human
ccacguuggucaggcuggu

SEQ ID NO: 639256 - RNA, 21 nt, Human
ccacguuggucaggcuggucu

SEQ ID NO: 639257 - RNA, 21 nt, Human
ccacguuggucaggcuggucu

SEQ ID NO: 639258 - RNA, 19 nt, Human
ccaggaaaccagugccaga

SEQ ID NO: 639259 - RNA, 19 nt, Human
cccaggcuggagugcaaug

SEQ ID NO: 639260 - RNA, 20 nt, Human
cccaggcuggagugcaaugg

SEQ ID NO: 639261 - RNA, 24 nt, Human
ccgcugcgcccagccacauguuuu

SEQ ID NO: 639262 - RNA, 24 nt, Human
ccugaguagcugauauuacaggca

SEQ ID NO: 639263 - RNA, 23 nt, Human
ccugccucagccuccugaguagc

SEQ ID NO: 639264 - RNA, 24 nt, Human
ccugccucagccuccugaguagcu

SEQ ID NO: 639265 - RNA, 23 nt, Human
ccuggguucaagcaauucuccug

SEQ ID NO: 639266 - RNA, 22 nt, Human
ccuuccaccgaccuuuucacua

SEQ ID NO: 639267 - RNA, 18 nt, Human
ccuuggguuuccccugcu

SEQ ID NO: 639268 - RNA, 18 nt, Human
ccuuggguuuccccugcu

SEQ ID NO: 639269 - RNA, 18 nt, Human
ccuuugcuccucugagca

SEQ ID NO: 639270 - RNA, 20 nt, Human
cgaccuuuucacuauccaaa

SEQ ID NO: 639271 - RNA, 22 nt, Human
cguuggucaggcuggucuugaa

SEQ ID NO: 639272 - RNA, 23 nt, Human
cucacugcaaacuccaccuccug

SEQ ID NO: 639273 - RNA, 22 nt, Human
cuccugccucagccuccugagu

SEQ ID NO: 639274 - RNA, 21 nt, Human
cuccuggguucaagcaauucu

SEQ ID NO: 639275 - RNA, 20 nt, Human
cucuguaggcucagcagaau

SEQ ID NO: 639276 - RNA, 20 nt, Human
cucuuuuugcccaggcugga

SEQ ID NO: 639277 - RNA, 18 nt, Human
cugccucggccucccaaa

SEQ ID NO: 639278 - RNA, 24 nt, Human
cuggagugcaauggugugaucuca

SEQ ID NO: 639279 - RNA, 24 nt, Human
cuuuuugcccaggcuggagugcaa

SEQ ID NO: 639280 - RNA, 19 nt, Human
gaagauaccuuugcuccuc

SEQ ID NO: 639281 - RNA, 20 nt, Human
gagacggaguuucuccacgu

SEQ ID NO: 639282 - RNA, 24 nt, Human
gagaguuuugcucuuuuugcccag

SEQ ID NO: 639283 - RNA, 18 nt, Human
gauaacaggcgugagccg

SEQ ID NO: 639284 - RNA, 22 nt, Human
gcaaacuccaccuccuggguuc

SEQ ID NO: 639285 - RNA, 18 nt, Human
gccggcaaauaucuuguu

SEQ ID NO: 639286 - RNA, 21 nt, Human
gccuuggguuuccccugcuuu

SEQ ID NO: 639287 - RNA, 22 nt, Human
gcuaguuuccuccaggaaacca

SEQ ID NO: 639288 - RNA, 20 nt, Human
gcucuuuuugcccaggcugg

SEQ ID NO: 639289 - RNA, 21 nt, Human
gcucuuuuugcccaggcugga

SEQ ID NO: 639290 - RNA, 24 nt, Human
gcucuuuuugcccaggcuggagug

SEQ ID NO: 639291 - RNA, 30 nt, Human
gcuggagugcaauggugugaucucagcucc

SEQ ID NO: 639292 - RNA, 21 nt, Human
gcuuaacaaauacgccagggg

SEQ ID NO: 639293 - RNA, 20 nt, Human
ggcagaucauaggugaaguu

SEQ ID NO: 639294 - RNA, 22 nt, Human
ggcuggagugcaauggugugau

SEQ ID NO: 639295 - RNA, 18 nt, Human
ggcuggucuugaacuccc

SEQ ID NO: 639296 - RNA, 24 nt, Human
gggcagaucauaggugaaguucug

SEQ ID NO: 639297 - RNA, 23 nt, Human
gggccagggaggcgauugugcuu

SEQ ID NO: 639298 - RNA, 26 nt, Human
gggcuggguuagguaaacacagcugc

SEQ ID NO: 639299 - RNA, 19 nt, Human
gugcuccgccugccucggc

SEQ ID NO: 639300 - RNA, 21 nt, Human
uaaaaugaaaacugauuacau

SEQ ID NO: 639301 - RNA, 21 nt, Human
uaacagcaacagcuuucuaaa

SEQ ID NO: 639302 - RNA, 24 nt, Human
uaauuuuguauuuuaguggagacg

SEQ ID NO: 639303 - RNA, 21 nt, Human
uacaaugagguauuuauugca

SEQ ID NO: 639304 - RNA, 24 nt, Human
uacaggcaugugccaccacaccca

SEQ ID NO: 639305 - RNA, 23 nt, Human
uagcugauauuacaggcaugugc

SEQ ID NO: 639306 - RNA, 19 nt, Human
uaguggagacggaguuucu

SEQ ID NO: 639307 - RNA, 24 nt, Human
uaguggagacggaguuucuccacg

SEQ ID NO: 639308 - RNA, 20 nt, Human
uauccaaagaaggcucaggg

SEQ ID NO: 639309 - RNA, 19 nt, Human
uauuacaggcaugugccac

SEQ ID NO: 639310 - RNA, 19 nt, Human
ucaagcaauucuccugccu

SEQ ID NO: 639311 - RNA, 21 nt, Human
ucacugcaaacuccaccuccu

SEQ ID NO: 639312 - RNA, 24 nt, Human
ucacugcaaacuccaccuccuggg

SEQ ID NO: 639313 - RNA, 26 nt, Human
ucacugcaaacuccaccuccuggguu

SEQ ID NO: 639314 - RNA, 18 nt, Human
ucagcagaaucacuaggu

SEQ ID NO: 639315 - RNA, 19 nt, Human
uccaggcuacuccccagga

SEQ ID NO: 639316 - RNA, 24 nt, Human
ucccaaaguguugggauaacaggc

SEQ ID NO: 639317 - RNA, 23 nt, Human
uccccaggaaacguguggagcca

SEQ ID NO: 639318 - RNA, 24 nt, Human
uccugaguagcugauauuacaggc

SEQ ID NO: 639319 - RNA, 21 nt, Human
uccuggguucaagcaauucuc

SEQ ID NO: 639320 - RNA, 24 nt, Human
uccuggguucaagcaauucuccug

SEQ ID NO: 639321 - RNA, 19 nt, Human
ucuaaaaccugcacccaac

SEQ ID NO: 639322 - RNA, 25 nt, Human
ugagguauuuauugcauaugguuuu

SEQ ID NO: 639323 - RNA, 21 nt, Human
ugauauuacaggcaugugcca

SEQ ID NO: 639324 - RNA, 24 nt, Human
ugauauuacaggcaugugccacca

SEQ ID NO: 639325 - RNA, 25 nt, Human
ugaugcagaagucccagccggcaaa

SEQ ID NO: 639326 - RNA, 18 nt, Human
ugcccaggcuggagugca

SEQ ID NO: 639327 - RNA, 21 nt, Human
ugcccaggcuggagugcaaug

SEQ ID NO: 639328 - RNA, 24 nt, Human
ugcccaggcuggagugcaauggug

SEQ ID NO: 639329 - RNA, 24 nt, Human
ugccucagccuccugaguagcuga

SEQ ID NO: 639330 - RNA, 24 nt, Human
ugccucggccucccaaaguguugg

SEQ ID NO: 639331 - RNA, 24 nt, Human
ugcuccgccugccucggccuccca

SEQ ID NO: 639332 - RNA, 22 nt, Human
ugcucuuuuugcccaggcugga

SEQ ID NO: 639333 - RNA, 24 nt, Human
ugcucuuuuugcccaggcuggagu

SEQ ID NO: 639334 - RNA, 22 nt, Human
uggaaaagccuaaacucaagaa

SEQ ID NO: 639335 - RNA, 19 nt, Human
uggagugcaauggugugau

SEQ ID NO: 639336 - RNA, 24 nt, Human
uggagugcaauggugugaucucag

SEQ ID NO: 639337 - RNA, 19 nt, Human
ugggauaacaggcgugagc

SEQ ID NO: 639338 - RNA, 20 nt, Human
ugggauaacaggcgugagcc

SEQ ID NO: 639339 - RNA, 21 nt, Human
ugggauaacaggcgugagccg

SEQ ID NO: 639340 - RNA, 22 nt, Human
ugggauaacaggcgugagccgc

SEQ ID NO: 639341 - RNA, 22 nt, Human
ugggcuggucugauuaacaggc

SEQ ID NO: 639342 - RNA, 21 nt, Human
uggguucaagcaauucuccug

SEQ ID NO: 639343 - RNA, 23 nt, Human
uggguucaagcaauucuccugcc

SEQ ID NO: 639344 - RNA, 23 nt, Human
uggucaggcuggucuugaacucc

SEQ ID NO: 639345 - RNA, 24 nt, Human
uggugugaucucagcucacugcaa

SEQ ID NO: 639346 - RNA, 19 nt, Human
uguaaaaguaaaugagucc

SEQ ID NO: 639347 - RNA, 25 nt, Human
ugugaaauaaaggcacaugcauuaa

SEQ ID NO: 639348 - RNA, 24 nt, Human
uguggaaaagcaggaaaauggcug

SEQ ID NO: 639349 - RNA, 18 nt, Human
uguugguuuuugguagag

SEQ ID NO: 639350 - RNA, 18 nt, Human
uuaguggagacggaguuu

SEQ ID NO: 639351 - RNA, 21 nt, Human
uucaagcaauucuccugccuc

SEQ ID NO: 639352 - RNA, 24 nt, Human
uucaagcaauucuccugccucagc

SEQ ID NO: 639353 - RNA, 22 nt, Human
uugacaucuaucaauuuugggu

SEQ ID NO: 639354 - RNA, 18 nt, Human
uugcccaggcuggagugc

SEQ ID NO: 639355 - RNA, 23 nt, Human
uugcucuuuuugcccaggcugga

SEQ ID NO: 639356 - RNA, 23 nt, Human
uuguaagcacaggaaaacaaccc

SEQ ID NO: 639357 - RNA, 24 nt, Human
uuugcucuuuuugcccaggcugga

SEQ ID NO: 639358 - RNA, 23 nt, Human
uuuucuaagucacugaagcccua

SEQ ID NO: 639359 - RNA, 23 nt, Human
uuuugcucuuuuugcccaggcug

SEQ ID NO: 639360 - RNA, 24 nt, Human
uuuugcucuuuuugcccaggcugg

SEQ ID NO: 639361 - RNA, 18 nt, Human
uuuuguauuuuaguggag

SEQ ID NO: 639362 - RNA, 19 nt, Human
uuuuguauuuuaguggaga

SEQ ID NO: 639363 - RNA, 24 nt, Human
uuuuuuucccaguuacaaaaauau

SEQ ID NO: 639364 - RNA, 22 nt, Human
uuuuuuuuuuuuuuuuucccag

SEQ ID NO: 639365 - RNA, 24 nt, Human
aaacaaaagggaaaacguguuuga

SEQ ID NO: 639366 - RNA, 24 nt, Human
aaacaaaagggaaaacguguuuga

SEQ ID NO: 639367 - RNA, 25 nt, Human
aagaaacaaaaaccaaaagccaccc

SEQ ID NO: 639368 - RNA, 22 nt, Human
aagaaagaaacaaaaaccaaaa

SEQ ID NO: 639369 - RNA, 23 nt, Human
aagaaagaaacaaaaaccaaaag

SEQ ID NO: 639370 - RNA, 25 nt, Human
aagacaagacaagaaagaaacaaaa

SEQ ID NO: 639371 - RNA, 23 nt, Human
aauaaaagacaagacaagaaaga

SEQ ID NO: 639372 - RNA, 22 nt, Human
acaagacaagaaagaaacaaaa

SEQ ID NO: 639373 - RNA, 23 nt, Human
acaagacaagaaagaaacaaaaa

SEQ ID NO: 639374 - RNA, 24 nt, Human
acaagacaagaaagaaacaaaaac

SEQ ID NO: 639375 - RNA, 26 nt, Human
acaagacaagaaagaaacaaaaacca

SEQ ID NO: 639376 - RNA, 29 nt, Human
agaaagaaacaaaaaccaaaagccacccu

SEQ ID NO: 639377 - RNA, 22 nt, Human
agacaagaaagaaacaaaaacc

SEQ ID NO: 639378 - RNA, 24 nt, Human
agacaagaaagaaacaaaaaccaa

SEQ ID NO: 639379 - RNA, 26 nt, Human
agacaagaaagaaacaaaaaccaaaa

SEQ ID NO: 639380 - RNA, 18 nt, Human
caacuuggaacucaugag

SEQ ID NO: 639381 - RNA, 24 nt, Human
caagacaagaaagaaacaaaaacc

SEQ ID NO: 639382 - RNA, 21 nt, Human
cauguuucaacuuggaacuca

SEQ ID NO: 639383 - RNA, 18 nt, Human
cauuggaaguaaaugagg

SEQ ID NO: 639384 - RNA, 18 nt, Human
ccucaaaauucuguuuag

SEQ ID NO: 639385 - RNA, 18 nt, Human
ccuuucaauaaaagacaa

SEQ ID NO: 639386 - RNA, 18 nt, Human
gacaagacaagaaagaaa

SEQ ID NO: 639387 - RNA, 20 nt, Human
ucaugaguuauuugggccau

SEQ ID NO: 639388 - RNA, 22 nt, Human
uggaaguaaaugaggauuguaa

SEQ ID NO: 639389 - RNA, 19 nt, Human
uguuucaacuuggaacuca

SEQ ID NO: 639390 - RNA, 26 nt, Human
uuuuuuuuuuuuuuagucacauugga

SEQ ID NO: 639391 - RNA, 18 nt, Human
aaaacacugcauuaagac

SEQ ID NO: 639392 - RNA, 22 nt, Human
aaauugcugggauuacaggcau

SEQ ID NO: 639393 - RNA, 24 nt, Human
aaauugcugggauuacaggcauga

SEQ ID NO: 639394 - RNA, 19 nt, Human
aaccaaugcuugugaaaca

SEQ ID NO: 639395 - RNA, 25 nt, Human
aagugaucuucccaccuuggccucc

SEQ ID NO: 639396 - RNA, 24 nt, Human
acagcacacaaaaccaucauccac

SEQ ID NO: 639397 - RNA, 23 nt, Human
acccagucuccaaacagcacaca

SEQ ID NO: 639398 - RNA, 25 nt, Human
acuauguugcccaggcuggucucaa

SEQ ID NO: 639399 - RNA, 25 nt, Human
agaaacaauaaaguauuugauuggc

SEQ ID NO: 639400 - RNA, 18 nt, Human
agcaaguaaauaaaaaag

SEQ ID NO: 639401 - RNA, 22 nt, Human
aguuagaaucugcaauaauuug

SEQ ID NO: 639402 - RNA, 22 nt, Human
auaaaauguugucguccuugac

SEQ ID NO: 639403 - RNA, 24 nt, Human
augaaauaagaaacauaucaaaac

SEQ ID NO: 639404 - RNA, 20 nt, Human
auguugcccaggcuggucuc

SEQ ID NO: 639405 - RNA, 27 nt, Human
caagugaucuucccaccuuggccuccu

SEQ ID NO: 639406 - RNA, 19 nt, Human
cacuauguugcccaggcug

SEQ ID NO: 639407 - RNA, 24 nt, Human
cacuauguugcccaggcuggucuc

SEQ ID NO: 639408 - RNA, 25 nt, Human
cacuuuauaaacuuaauaacaucac

SEQ ID NO: 639409 - RNA, 24 nt, Human
cacuuuauaaacuuaauaacaucc

SEQ ID NO: 639410 - RNA, 18 nt, Human
cagcacacaaaaccauca

SEQ ID NO: 639411 - RNA, 23 nt, Human
cagcacacaaaaccaucauccac

SEQ ID NO: 639412 - RNA, 22 nt, Human
cauccacuggguuuugcccccu

SEQ ID NO: 639413 - RNA, 18 nt, Human
ccaccacacccagccaca

SEQ ID NO: 639414 - RNA, 19 nt, Human
cccagcaucacaugguaaa

SEQ ID NO: 639415 - RNA, 24 nt, Human
ccuaaauugcugggauuacaggca

SEQ ID NO: 639416 - RNA, 22 nt, Human
ccugggcucaagugaucuuccc

SEQ ID NO: 639417 - RNA, 23 nt, Human
cuaaauugcugggauuacaggca

SEQ ID NO: 639418 - RNA, 24 nt, Human
cuaaauugcugggauuacaggcau

SEQ ID NO: 639419 - RNA, 24 nt, Human
cucaagugaucuucccaccuuggc

SEQ ID NO: 639420 - RNA, 23 nt, Human
cuccaaacagcacacaaaaccau

SEQ ID NO: 639421 - RNA, 22 nt, Human
cuucccaccuuggccuccuaaa

SEQ ID NO: 639422 - RNA, 18 nt, Human
cuuuauaaucucccccuc

SEQ ID NO: 639423 - RNA, 19 nt, Human
gaagguuaaaguggacuua

SEQ ID NO: 639424 - RNA, 20 nt, Human
gagucaauguuuaaauauga

SEQ ID NO: 639425 - RNA, 22 nt, Human
gaugacuacuuguucaacuugu

SEQ ID NO: 639426 - RNA, 18 nt, Human
gauuacaggcaugagcca

SEQ ID NO: 639427 - RNA, 21 nt, Human
gauuacaggcaugagccacca

SEQ ID NO: 639428 - RNA, 22 nt, Human
gauuacaggcaugagccaccac

SEQ ID NO: 639429 - RNA, 19 nt, Human
gcucaagugaucuucccac

SEQ ID NO: 639430 - RNA, 19 nt, Human
ggauuacaggcaugagcca

SEQ ID NO: 639431 - RNA, 19 nt, Human
ggauucggaaaacacugca

SEQ ID NO: 639432 - RNA, 22 nt, Human
gggcucaagugaucuucccacc

SEQ ID NO: 639433 - RNA, 18 nt, Human
gguaguaguuauauuucu

SEQ ID NO: 639434 - RNA, 21 nt, Human
guaaacacccagucuccaaac

SEQ ID NO: 639435 - RNA, 24 nt, Human
gucucacucacuauguugcccagg

SEQ ID NO: 639436 - RNA, 18 nt, Human
gugguaaacacccagucu

SEQ ID NO: 639437 - RNA, 22 nt, Human
guuauaaaauuuaaauaugggg

SEQ ID NO: 639438 - RNA, 24 nt, Human
uaaauagcagccaugaagaugaaa

SEQ ID NO: 639439 - RNA, 24 nt, Human
uacaggcaugagccaccacaccca

SEQ ID NO: 639440 - RNA, 21 nt, Human
uagcgagaaacaauaaaguau

SEQ ID NO: 639441 - RNA, 19 nt, Human
uaguaacagaaguuugauu

SEQ ID NO: 639442 - RNA, 23 nt, Human
uauguugcccaggcuggucucaa

SEQ ID NO: 639443 - RNA, 24 nt, Human
uauguugcccaggcuggucucaaa

SEQ ID NO: 639444 - RNA, 18 nt, Human
ucaaagcuagagaguuau

SEQ ID NO: 639445 - RNA, 21 nt, Human
uccacuggguuuugcccccug

SEQ ID NO: 639446 - RNA, 24 nt, Human
uccuaaauugcugggauuacaggc

SEQ ID NO: 639447 - RNA, 20 nt, Human
uccugggcucaagugaucuu

SEQ ID NO: 639448 - RNA, 22 nt, Human
uccugggcucaagugaucuucc

SEQ ID NO: 639449 - RNA, 24 nt, Human
uccugggcucaagugaucuuccca

SEQ ID NO: 639450 - RNA, 27 nt, Human
ucucacucacuauguugcccaggcugg

SEQ ID NO: 639451 - RNA, 26 nt, Human
ugaaauaagaaacauaucaaaacacu

SEQ ID NO: 639452 - RNA, 21 nt, Human
ugaauaaauagcagccaugaa

SEQ ID NO: 639453 - RNA, 23 nt, Human
ugacauuaacaauaaugcuacag

SEQ ID NO: 639454 - RNA, 21 nt, Human
ugacucuuuauaaucuccccc

SEQ ID NO: 639455 - RNA, 20 nt, Human
ugaggagacuaaaauagaua

SEQ ID NO: 639456 - RNA, 24 nt, Human
ugcccaggcuggucucaaauuccu

SEQ ID NO: 639457 - RNA, 28 nt, Human
ugcccaggcuggucucaaauuccugggc

SEQ ID NO: 639458 - RNA, 18 nt, Human
ugcugggauuacaggcau

SEQ ID NO: 639459 - RNA, 20 nt, Human
ugcugggauuacaggcauga

SEQ ID NO: 639460 - RNA, 22 nt, Human
uggaaggacacuucuuuaaaaa

SEQ ID NO: 639461 - RNA, 18 nt, Human
ugggauuacaggcaugag

SEQ ID NO: 639462 - RNA, 19 nt, Human
ugggauuacaggcaugagc

SEQ ID NO: 639463 - RNA, 22 nt, Human
ugggauuacaggcaugagccac

SEQ ID NO: 639464 - RNA, 23 nt, Human
ugggauuacaggcaugagccacc

SEQ ID NO: 639465 - RNA, 24 nt, Human
ugggauuacaggcaugagccacca

SEQ ID NO: 639466 - RNA, 24 nt, Human
ugggauuacaggcaugagccacca

SEQ ID NO: 639467 - RNA, 22 nt, Human
ugggcucaagugaucuucccac

SEQ ID NO: 639468 - RNA, 24 nt, Human
ugggcucaagugaucuucccaccu

SEQ ID NO: 639469 - RNA, 18 nt, Human
uguugcuaagaaacagaa

SEQ ID NO: 639470 - RNA, 20 nt, Human
uguuuguacuuaagagugaa

SEQ ID NO: 639471 - RNA, 23 nt, Human
uucccaccuuggccuccuaaauu

SEQ ID NO: 639472 - RNA, 25 nt, Human
uucuuuagcguuggaaggacacuuc

SEQ ID NO: 639473 - RNA, 20 nt, Human
uugacauuaacaauaaugcu

SEQ ID NO: 639474 - RNA, 20 nt, Human
uuggccuccuaaauugcugg

SEQ ID NO: 639475 - RNA, 22 nt, Human
uuguaaaaacauuaaaucaaac

SEQ ID NO: 639476 - RNA, 22 nt, Human
uuuauaaacuuaauaacaucac

SEQ ID NO: 639477 - RNA, 20 nt, Human
uuucuguugcuaagaaacag

SEQ ID NO: 639478 - RNA, 20 nt, Human
uuuuaaauuauaagaggagu

SEQ ID NO: 639479 - RNA, 22 nt, Human
uuuuuuuuuuuuuuuuuggcag

SEQ ID NO: 639480 - RNA, 20 nt, Human
uuuuuuuuuuuuuuuuuugg

SEQ ID NO: 639481 - RNA, 20 nt, Human
aaaacauaaaacaacagcaa

SEQ ID NO: 639482 - RNA, 19 nt, Human
aaacaacagcaaaaacguc

SEQ ID NO: 639483 - RNA, 21 nt, Human
aaacaacagcaaaaacgucaa

SEQ ID NO: 639484 - RNA, 18 nt, Human
aaacacacacacacagac

SEQ ID NO: 639485 - RNA, 19 nt, Human
aaagagagagagaaaggag

SEQ ID NO: 639486 - RNA, 23 nt, Human
aaagccaacucuguccucugccu

SEQ ID NO: 639487 - RNA, 27 nt, Human
aaaugcauguuuuaccaucacaaauaa

SEQ ID NO: 639488 - RNA, 24 nt, Human
aacacacacacacagacacacaca

SEQ ID NO: 639489 - RNA, 18 nt, Human
aacagcaaaaacgucaaa

SEQ ID NO: 639490 - RNA, 20 nt, Human
aacagcaaaaacgucaaacc

SEQ ID NO: 639491 - RNA, 21 nt, Human
aacauaaaacaacagcaaaaa

SEQ ID NO: 639492 - RNA, 21 nt, Human
aagaagaaacuccgggguccc

SEQ ID NO: 639493 - RNA, 23 nt, Human
aagcaaauaugcauugccugggc

SEQ ID NO: 639494 - RNA, 19 nt, Human
aaggaaggggaggaaaacg

SEQ ID NO: 639495 - RNA, 19 nt, Human
aaucguuccuccaaagcug

SEQ ID NO: 639496 - RNA, 25 nt, Human
acacacacacacacacacacacccc

SEQ ID NO: 639497 - RNA, 31 nt, Human
acacacacacacagacacacacacacacaca

SEQ ID NO: 639498 - RNA, 23 nt, Human
acacacacacagacacacacaca

SEQ ID NO: 639499 - RNA, 24 nt, Human
acacacacacagacacacacacac

SEQ ID NO: 639500 - RNA, 33 nt, Human
acacacacagacacacacacacacacacacagu

SEQ ID NO: 639501 - RNA, 33 nt, Human
acacacagacacacacacacacacacacacagu

SEQ ID NO: 639502 - RNA, 22 nt, Human
acucuggacuuuggguaaaacg

SEQ ID NO: 639503 - RNA, 19 nt, Human
acugccuccuuguuucucc

SEQ ID NO: 639504 - RNA, 21 nt, Human
acugccuccuuguuucuccca

SEQ ID NO: 639505 - RNA, 20 nt, Human
acuuguuuaugagaaccucg

SEQ ID NO: 639506 - RNA, 20 nt, Human
aggacccacagaauuaagcc

SEQ ID NO: 639507 - RNA, 21 nt, Human
aggacccacagaauuaagccc

SEQ ID NO: 639508 - RNA, 24 nt, Human
auaaaacaacagcaaaaacgucaa

SEQ ID NO: 639509 - RNA, 28 nt, Human
auaaaacaacagcaaaaacgucaaacca

SEQ ID NO: 639510 - RNA, 25 nt, Human
auauacacacacaagugugaacgca

SEQ ID NO: 639511 - RNA, 27 nt, Human
aucccucccacccugcccaccccuuca

SEQ ID NO: 639512 - RNA, 23 nt, Human
aucuacaugcacauauacacaca

SEQ ID NO: 639513 - RNA, 21 nt, Human
augacaaaugaaacgaaaaaa

SEQ ID NO: 639514 - RNA, 18 nt, Human
auggagauguguguagua

SEQ ID NO: 639515 - RNA, 25 nt, Human
caaacacaaagcagauacauuuuua

SEQ ID NO: 639516 - RNA, 22 nt, Human
caaagagcuggccuggaaaggc

SEQ ID NO: 639517 - RNA, 20 nt, Human
caaaugaaacgaaaaaaucc

SEQ ID NO: 639518 - RNA, 21 nt, Human
caacacacacacacagaaaga

SEQ ID NO: 639519 - RNA, 23 nt, Human
caacacacacacacagaaagaga

SEQ ID NO: 639520 - RNA, 20 nt, Human
caagaagaaaugaaagcaaa

SEQ ID NO: 639521 - RNA, 21 nt, Human
cacacaagugugaacgcauac

SEQ ID NO: 639522 - RNA, 20 nt, Human
cacacacacacacacacaca

SEQ ID NO: 639523 - RNA, 20 nt, Human
cacacacacacacacacaca

SEQ ID NO: 639524 - RNA, 22 nt, Human
cacacacacacacacacacaca

SEQ ID NO: 639525 - RNA, 21 nt, Human
cacacacacacaccccaugcc

SEQ ID NO: 639526 - RNA, 27 nt, Human
cacacacacacagaaagagagagagaa

SEQ ID NO: 639527 - RNA, 24 nt, Human
cacacacacacagacacacacaca

SEQ ID NO: 639528 - RNA, 28 nt, Human
cacacaccccaugccauugccccugagg

SEQ ID NO: 639529 - RNA, 21 nt, Human
cacagaucuaaggggucaucu

SEQ ID NO: 639530 - RNA, 22 nt, Human
caccccuucacaugcacacaca

SEQ ID NO: 639531 - RNA, 22 nt, Human
cagagaccgcgcaaagccaacu

SEQ ID NO: 639532 - RNA, 25 nt, Human
cagagauccucauuuuccaagauuu

SEQ ID NO: 639533 - RNA, 21 nt, Human
cagcccaaggaaauucccaga

SEQ ID NO: 639534 - RNA, 18 nt, Human
cagcucccuucagcggug

SEQ ID NO: 639535 - RNA, 25 nt, Human
cauacgcgugcaucccucccacccu

SEQ ID NO: 639536 - RNA, 19 nt, Human
cauauacacacacaagugu

SEQ ID NO: 639537 - RNA, 24 nt, Human
caucccucccacccugcccacccc

SEQ ID NO: 639538 - RNA, 24 nt, Human
cauccuuguucacaaucucagggg

SEQ ID NO: 639539 - RNA, 19 nt, Human
caugaaacacaccauucca

SEQ ID NO: 639540 - RNA, 24 nt, Human
ccaacacacacacacagaaagaga

SEQ ID NO: 639541 - RNA, 20 nt, Human
ccacccugcccaccccuuca

SEQ ID NO: 639542 - RNA, 23 nt, Human
ccagcccaaggaaauucccagau

SEQ ID NO: 639543 - RNA, 21 nt, Human
cccaaggaaauucccagauga

SEQ ID NO: 639544 - RNA, 19 nt, Human
cccacagaauuaagcccuc

SEQ ID NO: 639545 - RNA, 20 nt, Human
cccagaaagcuuaauuuauu

SEQ ID NO: 639546 - RNA, 21 nt, Human
cccaugccauugcuuggucca

SEQ ID NO: 639547 - RNA, 22 nt, Human
cccaugccauugcuugguccac

SEQ ID NO: 639548 - RNA, 23 nt, Human
cccaugccauugcuugguccaca

SEQ ID NO: 639549 - RNA, 20 nt, Human
ccccacccacuuuccuuuuc

SEQ ID NO: 639550 - RNA, 22 nt, Human
cccuggauggcggggaaggcuc

SEQ ID NO: 639551 - RNA, 21 nt, Human
cccuucacaugcacacacagc

SEQ ID NO: 639552 - RNA, 19 nt, Human
ccgcaggagugggcacagg

SEQ ID NO: 639553 - RNA, 21 nt, Human
ccgugcuuuuccagugggaag

SEQ ID NO: 639554 - RNA, 24 nt, Human
ccucccacccugcccaccccuuca

SEQ ID NO: 639555 - RNA, 23 nt, Human
ccuccuuguuucucccaugagag

SEQ ID NO: 639556 - RNA, 18 nt, Human
ccugcucccguccccugg

SEQ ID NO: 639557 - RNA, 21 nt, Human
ccuucccagaaagcuuaauuu

SEQ ID NO: 639558 - RNA, 19 nt, Human
cgaccugcugccuccagga

SEQ ID NO: 639559 - RNA, 22 nt, Human
cgcauacacaaacacacacaca

SEQ ID NO: 639560 - RNA, 22 nt, Human
cucaagcucaagaagaaaugaa

SEQ ID NO: 639561 - RNA, 22 nt, Human
cucccguccccugggaccucau

SEQ ID NO: 639562 - RNA, 20 nt, Human
cucuacccgaccugcugccu

SEQ ID NO: 639563 - RNA, 22 nt, Human
cugccugcccccgcaagggcug

SEQ ID NO: 639564 - RNA, 20 nt, Human
cugcuauccugagaaaaaga

SEQ ID NO: 639565 - RNA, 24 nt, Human
cuguugugcugaagcccagagcug

SEQ ID NO: 639566 - RNA, 21 nt, Human
gaagcccagagcuggaagcca

SEQ ID NO: 639567 - RNA, 27 nt, Human
gacacacacacacacacacacacaccc

SEQ ID NO: 639568 - RNA, 20 nt, Human
gaccuucccuucuuuaugga

SEQ ID NO: 639569 - RNA, 18 nt, Human
gacucaaggcgaucgcag

SEQ ID NO: 639570 - RNA, 21 nt, Human
gacugccuccuuguuucuccc

SEQ ID NO: 639571 - RNA, 24 nt, Human
gagacagucguuuggcuccaauac

SEQ ID NO: 639572 - RNA, 21 nt, Human
gagagagaaaggagaaaauuu

SEQ ID NO: 639573 - RNA, 19 nt, Human
gagcaggccaaacucacuc

SEQ ID NO: 639574 - RNA, 22 nt, Human
gaggagacauggggcccuccca

SEQ ID NO: 639575 - RNA, 19 nt, Human
gcacaagcgacugccuccu

SEQ ID NO: 639576 - RNA, 23 nt, Human
gcccaaggaaauucccagaugac

SEQ ID NO: 639577 - RNA, 24 nt, Human
gcuacaaaacaaagagcuggccug

SEQ ID NO: 639578 - RNA, 20 nt, Human
gcuuccuccuccccaguaaa

SEQ ID NO: 639579 - RNA, 18 nt, Human
ggagcuccucaagcucaa

SEQ ID NO: 639580 - RNA, 21 nt, Human
ggggggcuuuggaaugagggc

SEQ ID NO: 639581 - RNA, 21 nt, Human
ggucaugagcaggccaaacuc

SEQ ID NO: 639582 - RNA, 18 nt, Human
guaaaacguccugagccc

SEQ ID NO: 639583 - RNA, 19 nt, Human
guccgcuuccuccucccca

SEQ ID NO: 639584 - RNA, 21 nt, Human
gugaacuuguuuaugagaacc

SEQ ID NO: 639585 - RNA, 26 nt, Human
gugcugaagcccagagcuggaagcca

SEQ ID NO: 639586 - RNA, 22 nt, Human
uaaaacaacagcaaaaacguca

SEQ ID NO: 639587 - RNA, 23 nt, Human
uaaaacaacagcaaaaacgucaa

SEQ ID NO: 639588 - RNA, 20 nt, Human
uaaaacguccugagcccgau

SEQ ID NO: 639589 - RNA, 24 nt, Human
uaaaacuucuggaacaugcacaag

SEQ ID NO: 639590 - RNA, 18 nt, Human
uaaccaggucuccaggua

SEQ ID NO: 639591 - RNA, 20 nt, Human
uacccgaccugcugccucca

SEQ ID NO: 639592 - RNA, 18 nt, Human
uaccugcucccguccccu

SEQ ID NO: 639593 - RNA, 19 nt, Human
uagaacacugcuacuucca

SEQ ID NO: 639594 - RNA, 22 nt, Human
uaggacccacagaauuaagccc

SEQ ID NO: 639595 - RNA, 24 nt, Human
uauacacacacaagugugaacgca

SEQ ID NO: 639596 - RNA, 22 nt, Human
uaugcagaggcuggacucaagg

SEQ ID NO: 639597 - RNA, 27 nt, Human
uaugcagcaucuacaugcacauauaca

SEQ ID NO: 639598 - RNA, 20 nt, Human
uaugcucacauacgcgugca

SEQ ID NO: 639599 - RNA, 22 nt, Human
ucaaagccucaauugucugcua

SEQ ID NO: 639600 - RNA, 24 nt, Human
ucaaagccucaauugucugcuacu

SEQ ID NO: 639601 - RNA, 22 nt, Human
uccaaagcugguauuggaaacu

SEQ ID NO: 639602 - RNA, 20 nt, Human
uccaacuugcacaaaaggaa

SEQ ID NO: 639603 - RNA, 20 nt, Human
uccacacugcaugaaacaca

SEQ ID NO: 639604 - RNA, 22 nt, Human
ucccagaugacacagaucuaag

SEQ ID NO: 639605 - RNA, 20 nt, Human
uccccugggaccucauccug

SEQ ID NO: 639606 - RNA, 21 nt, Human
uccccugggaccucauccugg

SEQ ID NO: 639607 - RNA, 18 nt, Human
uccgcuuccuccucccca

SEQ ID NO: 639608 - RNA, 24 nt, Human
uccuccccaguaaaacuucuggaa

SEQ ID NO: 639609 - RNA, 23 nt, Human
uccucuguccgcuuccuccuccc

SEQ ID NO: 639610 - RNA, 22 nt, Human
uccugguguugccagcucccuu

SEQ ID NO: 639611 - RNA, 19 nt, Human
uccuuguuucucccaugag

SEQ ID NO: 639612 - RNA, 28 nt, Human
ucucucauacacagaagcuaagggagaa

SEQ ID NO: 639613 - RNA, 19 nt, Human
ucugaggagacauggggcc

SEQ ID NO: 639614 - RNA, 23 nt, Human
ucuuuuagaaacaaauuccuccu

SEQ ID NO: 639615 - RNA, 18 nt, Human
ugaaacacaccauuccag

SEQ ID NO: 639616 - RNA, 25 nt, Human
ugaaacgaaaaaauccaucugggug

SEQ ID NO: 639617 - RNA, 29 nt, Human
ugaacgcauacacaaacacacacacacag

SEQ ID NO: 639618 - RNA, 23 nt, Human
ugaagcccagagcuggaagccag

SEQ ID NO: 639619 - RNA, 23 nt, Human
ugacaaaugaaacgaaaaaaucc

SEQ ID NO: 639620 - RNA, 22 nt, Human
ugagagaccacaggcugguguc

SEQ ID NO: 639621 - RNA, 21 nt, Human
ugagaggaauuggaacugcuc

SEQ ID NO: 639622 - RNA, 18 nt, Human
ugaugagggccaccugug

SEQ ID NO: 639623 - RNA, 18 nt, Human
ugcacccaggagcuccuc

SEQ ID NO: 639624 - RNA, 22 nt, Human
ugccccugcuuuggaauguugc

SEQ ID NO: 639625 - RNA, 20 nt, Human
ugccuucccagaaagcuuaa

SEQ ID NO: 639626 - RNA, 22 nt, Human
ugcucccguccccugggaccuc

SEQ ID NO: 639627 - RNA, 21 nt, Human
ugcuugguccacacugcauga

SEQ ID NO: 639628 - RNA, 19 nt, Human
ugggagcagcuucaaaaac

SEQ ID NO: 639629 - RNA, 19 nt, Human
ugggccucugcugaagcag

SEQ ID NO: 639630 - RNA, 22 nt, Human
ugggccucugcugaagcagccu

SEQ ID NO: 639631 - RNA, 20 nt, Human
uggguaaaacguccugagcc

SEQ ID NO: 639632 - RNA, 19 nt, Human
ugucuaaaccagcccaagg

SEQ ID NO: 639633 - RNA, 18 nt, Human
uguugccagcucccuuca

SEQ ID NO: 639634 - RNA, 22 nt, Human
uucucucauacacagaagcuaa

SEQ ID NO: 639635 - RNA, 23 nt, Human
uuggaaacuugccauuuucccaa

SEQ ID NO: 639636 - RNA, 23 nt, Human
uuguucuuacuuugaaaaacaga

SEQ ID NO: 639637 - RNA, 22 nt, Human
uuucaaagcagguuaucugcua

SEQ ID NO: 639638 - RNA, 22 nt, Human
uuucccaacacacacacacaga

SEQ ID NO: 639639 - RNA, 23 nt, Human
uuuucccaacacacacacacaga

SEQ ID NO: 639640 - RNA, 23 nt, Human
uuuuuauuuccaaacacaaagca

SEQ ID NO: 639641 - RNA, 24 nt, Human
uuuuuuuucauagaccaaaauaga

SEQ ID NO: 639642 - RNA, 20 nt, Human
aaaaagauuugacauaucug

SEQ ID NO: 639643 - RNA, 21 nt, Human
aaaacccacagcaaacuaagc

SEQ ID NO: 639644 - RNA, 22 nt, Human
aaaagcuauaagacacagauaa

SEQ ID NO: 639645 - RNA, 25 nt, Human
aaacagauagucuuaugagaccaag

SEQ ID NO: 639646 - RNA, 18 nt, Human
aacagcacuuucaaggac

SEQ ID NO: 639647 - RNA, 23 nt, Human
aagcagcacaccagcacagcacc

SEQ ID NO: 639648 - RNA, 20 nt, Human
aagccaaaacccacagcaaa

SEQ ID NO: 639649 - RNA, 18 nt, Human
acccaacccuguccuacc

SEQ ID NO: 639650 - RNA, 22 nt, Human
acccacagcaaacuaagcagca

SEQ ID NO: 639651 - RNA, 23 nt, Human
agaccaggacagugugugaagga

SEQ ID NO: 639652 - RNA, 22 nt, Human
agaggcagaauauagagaagaa

SEQ ID NO: 639653 - RNA, 20 nt, Human
agccaaaacccacagcaaac

SEQ ID NO: 639654 - RNA, 22 nt, Human
agccaaaacccacagcaaacua

SEQ ID NO: 639655 - RNA, 19 nt, Human
agccuuccaagugaacagg

SEQ ID NO: 639656 - RNA, 26 nt, Human
aggcagaauauagagaagagggaccc

SEQ ID NO: 639657 - RNA, 23 nt, Human
agugaaaaugaaaaccaaaauga

SEQ ID NO: 639658 - RNA, 23 nt, Human
auaccaagucaucucgaaugucc

SEQ ID NO: 639659 - RNA, 22 nt, Human
augugugugugugcuugugugu

SEQ ID NO: 639660 - RNA, 22 nt, Human
auucccauuuuacaggcaggga

SEQ ID NO: 639661 - RNA, 27 nt, Human
caaacuaagcagcacaccagcacagca

SEQ ID NO: 639662 - RNA, 24 nt, Human
caaggaauguuugggaaaagccaa

SEQ ID NO: 639663 - RNA, 24 nt, Human
caaugugcuggaggaaggggguag

SEQ ID NO: 639664 - RNA, 18 nt, Human
cagcaaacuaagcagcac

SEQ ID NO: 639665 - RNA, 21 nt, Human
cagcaaacuaagcagcacacc

SEQ ID NO: 639666 - RNA, 21 nt, Human
cagcacaccagcacagcaccc

SEQ ID NO: 639667 - RNA, 21 nt, Human
cagcacagcacccaacccugu

SEQ ID NO: 639668 - RNA, 18 nt, Human
cagcacccaacccugucc

SEQ ID NO: 639669 - RNA, 22 nt, Human
cagccagagcauccaugggcag

SEQ ID NO: 639670 - RNA, 25 nt, Human
cagccugacacaaagauggagaugg

SEQ ID NO: 639671 - RNA, 25 nt, Human
caugugugugugugcuugugugugu

SEQ ID NO: 639672 - RNA, 22 nt, Human
ccaaaagcuauaagacacagau

SEQ ID NO: 639673 - RNA, 21 nt, Human
ccaagugaacaggccaaguca

SEQ ID NO: 639674 - RNA, 21 nt, Human
ccacagcaaacuaagcagcac

SEQ ID NO: 639675 - RNA, 22 nt, Human
ccacagcaaacuaagcagcaca

SEQ ID NO: 639676 - RNA, 21 nt, Human
ccugacacaaagauggagaug

SEQ ID NO: 639677 - RNA, 23 nt, Human
cuaugugugcaugugugugugug

SEQ ID NO: 639678 - RNA, 19 nt, Human
cucucuagcugaguucuag

SEQ ID NO: 639679 - RNA, 18 nt, Human
cucugguuucugggggac

SEQ ID NO: 639680 - RNA, 20 nt, Human
cugagaccaggacagugugu

SEQ ID NO: 639681 - RNA, 21 nt, Human
gaacaggccaagucacaccau

SEQ ID NO: 639682 - RNA, 23 nt, Human
gaauauagagaagaauuagaaau

SEQ ID NO: 639683 - RNA, 18 nt, Human
gcagcagaugggagcugg

SEQ ID NO: 639684 - RNA, 20 nt, Human
ggcagcagaugggagcuggg

SEQ ID NO: 639685 - RNA, 22 nt, Human
gggaaaagccaaaacccacagc

SEQ ID NO: 639686 - RNA, 18 nt, Human
gugugugugugugugugu

SEQ ID NO: 639687 - RNA, 19 nt, Human
uaaaaccauccaaaagcua

SEQ ID NO: 639688 - RNA, 21 nt, Human
uaacaaaaugaugagacacag

SEQ ID NO: 639689 - RNA, 19 nt, Human
uaagacacagauaacaaaa

SEQ ID NO: 639690 - RNA, 28 nt, Human
uaagccaccaaagucagccugucaaggg

SEQ ID NO: 639691 - RNA, 19 nt, Human
uacauguuauuagugccug

SEQ ID NO: 639692 - RNA, 22 nt, Human
uaggacaaggaauguuugggaa

SEQ ID NO: 639693 - RNA, 21 nt, Human
uaugugugcaugugugugugu

SEQ ID NO: 639694 - RNA, 23 nt, Human
ucacucagcugccagugcucugg

SEQ ID NO: 639695 - RNA, 24 nt, Human
ucacucagcugccagugcucuggu

SEQ ID NO: 639696 - RNA, 18 nt, Human
ucagccagagcauccaug

SEQ ID NO: 639697 - RNA, 20 nt, Human
ucaucaaggucacucagcug

SEQ ID NO: 639698 - RNA, 21 nt, Human
ucaucucgaauguccaauuau

SEQ ID NO: 639699 - RNA, 23 nt, Human
uccuaagccaccaaagucagccu

SEQ ID NO: 639700 - RNA, 21 nt, Human
uccuaugugugcaugugugug

SEQ ID NO: 639701 - RNA, 21 nt, Human
ucugucaggaaaaauauuacu

SEQ ID NO: 639702 - RNA, 22 nt, Human
ugaccuccaaauaccaagucau

SEQ ID NO: 639703 - RNA, 26 nt, Human
ugagaccaggacagugugugaaggaa

SEQ ID NO: 639704 - RNA, 19 nt, Human
ugaggcauccuaagccacc

SEQ ID NO: 639705 - RNA, 22 nt, Human
ugaugagacacaguucagcuca

SEQ ID NO: 639706 - RNA, 20 nt, Human
ugaugggaggugguaugugg

SEQ ID NO: 639707 - RNA, 18 nt, Human
ugcaugugugugugugcu

SEQ ID NO: 639708 - RNA, 18 nt, Human
ugccagugcucugguuuc

SEQ ID NO: 639709 - RNA, 24 nt, Human
ugcugccugaccuccaaauaccaa

SEQ ID NO: 639710 - RNA, 22 nt, Human
uggaauaauuagauuaaggaau

SEQ ID NO: 639711 - RNA, 22 nt, Human
uggaggaaggggguagauuuuc

SEQ ID NO: 639712 - RNA, 26 nt, Human
ugggaaaagccaaaacccacagcaaa

SEQ ID NO: 639713 - RNA, 20 nt, Human
ugggaaaagccaaaacccag

SEQ ID NO: 639714 - RNA, 20 nt, Human
ugugcaugugugugugugcu

SEQ ID NO: 639715 - RNA, 23 nt, Human
ugugcuugugugugugugugugu

SEQ ID NO: 639716 - RNA, 19 nt, Human
ugugugcaugugugugugu

SEQ ID NO: 639717 - RNA, 19 nt, Human
ugugugcaugugugugugu

SEQ ID NO: 639718 - RNA, 20 nt, Human
ugugugcaugugugugugug

SEQ ID NO: 639719 - RNA, 19 nt, Human
ugugugcuugugugugugu

SEQ ID NO: 639720 - RNA, 23 nt, Human
ugugugcuugugugugugugugu

SEQ ID NO: 639721 - RNA, 18 nt, Human
ugugugugcuugugugug

SEQ ID NO: 639722 - RNA, 21 nt, Human
ugugugugcuugugugugugu

SEQ ID NO: 639723 - RNA, 21 nt, Human
ugugugugcuugugugugugu

SEQ ID NO: 639724 - RNA, 21 nt, Human
ugugugugcuugugugugugu

SEQ ID NO: 639725 - RNA, 26 nt, Human
ugugugugugcuugugugugugugug

SEQ ID NO: 639726 - RNA, 20 nt, Human
ugugugugugugcuugugug

SEQ ID NO: 639727 - RNA, 21 nt, Human
ugugugugugugcuugugugu

SEQ ID NO: 639728 - RNA, 18 nt, Human
ugugugugugugugugug

SEQ ID NO: 639729 - RNA, 21 nt, Human
uguguguguguguguguuuug

SEQ ID NO: 639730 - RNA, 22 nt, Human
uguguguguguguuuuguccuu

SEQ ID NO: 639731 - RNA, 20 nt, Human
uguguguguguuuuguccuu

SEQ ID NO: 639732 - RNA, 27 nt, Human
uguuuuguccucucuagcugaguucua

SEQ ID NO: 639733 - RNA, 18 nt, Human
uucaaugcuauacaaauc

SEQ ID NO: 639734 - RNA, 19 nt, Human
uucaaugcuauacaaaucu

SEQ ID NO: 639735 - RNA, 20 nt, Human
uugugugugugugugugugu

SEQ ID NO: 639736 - RNA, 20 nt, Human
uuuacauuuacauguuauua

SEQ ID NO: 639737 - RNA, 18 nt, Human
uuuuuuuuuuuuuuuuug

SEQ ID NO: 639738 - RNA, 19 nt, Human
aaaaaaaaaaaaaagaaaa

SEQ ID NO: 639739 - RNA, 19 nt, Human
aaaaaaaaaaagaaaaaga

SEQ ID NO: 639740 - RNA, 18 nt, Human
aaacugagugagcugaua

SEQ ID NO: 639741 - RNA, 20 nt, Human
aacauggugaaacccugucu

SEQ ID NO: 639742 - RNA, 21 nt, Human
aacauggugaaacccugucuc

SEQ ID NO: 639743 - RNA, 19 nt, Human
aagaauggguuuuguuguc

SEQ ID NO: 639744 - RNA, 23 nt, Human
aagaauugcuugaacccaggagg

SEQ ID NO: 639745 - RNA, 20 nt, Human
aagcauuucaaaaaaauauu

SEQ ID NO: 639746 - RNA, 24 nt, Human
aaucucccagagagagguagaaau

SEQ ID NO: 639747 - RNA, 18 nt, Human
aauuagccaggcauggug

SEQ ID NO: 639748 - RNA, 20 nt, Human
aauugcuugaacccaggagg

SEQ ID NO: 639749 - RNA, 24 nt, Human
aauugcuugaacccaggaggcgga

SEQ ID NO: 639750 - RNA, 21 nt, Human
acaacauacacagaaguagca

SEQ ID NO: 639751 - RNA, 24 nt, Human
acagugcgagacuuugucucaaaa

SEQ ID NO: 639752 - RNA, 24 nt, Human
acccugucucuacuaaaaauacag

SEQ ID NO: 639753 - RNA, 22 nt, Human
acggcauuaaaaaaaguacauc

SEQ ID NO: 639754 - RNA, 24 nt, Human
acugcgcugcugcaguccagccug

SEQ ID NO: 639755 - RNA, 28 nt, Human
acuuugucucaaaaaaaaaaaaaaaaaa

SEQ ID NO: 639756 - RNA, 21 nt, Human
agaaauauguauuuuuaaaac

SEQ ID NO: 639757 - RNA, 24 nt, Human
agcacuuugggaggccgaggcggg

SEQ ID NO: 639758 - RNA, 23 nt, Human
agccaggcaugguggugugcacc

SEQ ID NO: 639759 - RNA, 22 nt, Human
agccuggccaacauggugaaac

SEQ ID NO: 639760 - RNA, 24 nt, Human
agccuggccaacauggugaaaccc

SEQ ID NO: 639761 - RNA, 23 nt, Human
agccugggagacagugcgagacu

SEQ ID NO: 639762 - RNA, 24 nt, Human
aggcacggugcuccaugccuguaa

SEQ ID NO: 639763 - RNA, 20 nt, Human
aggccgaggcggguagauca

SEQ ID NO: 639764 - RNA, 18 nt, Human
aggcggagguugcaguga

SEQ ID NO: 639765 - RNA, 24 nt, Human
aggcggagguugcagugaucugag

SEQ ID NO: 639766 - RNA, 24 nt, Human
aggcggguagaucaugaggucagg

SEQ ID NO: 639767 - RNA, 24 nt, Human
aggcugagucagaagaauugcuug

SEQ ID NO: 639768 - RNA, 21 nt, Human
auaaugcaaagaacauaauuu

SEQ ID NO: 639769 - RNA, 19 nt, Human
augccuguaaucccagcac

SEQ ID NO: 639770 - RNA, 22 nt, Human
caacauacacagaaguagcaua

SEQ ID NO: 639771 - RNA, 24 nt, Human
caacauggugaaacccugucucua

SEQ ID NO: 639772 - RNA, 20 nt, Human
cacccaucaauauauuucau

SEQ ID NO: 639773 - RNA, 23 nt, Human
caccuguacucccagcuacucgg

SEQ ID NO: 639774 - RNA, 24 nt, Human
caccuguacucccagcuacucggg

SEQ ID NO: 639775 - RNA, 24 nt, Human
cagcacuuugggaggccgaggcgg

SEQ ID NO: 639776 - RNA, 24 nt, Human
caguuuuuaauguacuguuugcau

SEQ ID NO: 639777 - RNA, 20 nt, Human
cauacacaacauacacagaa

SEQ ID NO: 639778 - RNA, 20 nt, Human
cauagcaaaaucuccauauc

SEQ ID NO: 639779 - RNA, 20 nt, Human
caugccuguaaucccagcac

SEQ ID NO: 639780 - RNA, 24 nt, Human
caugccuguaaucccagcacuuug

SEQ ID NO: 639781 - RNA, 21 nt, Human
cauggaccacaugaagauucc

SEQ ID NO: 639782 - RNA, 18 nt, Human
cauuaauaugaaugccug

SEQ ID NO: 639783 - RNA, 22 nt, Human
ccaggaggcggagguugcagug

SEQ ID NO: 639784 - RNA, 19 nt, Human
ccauccauaccucuagccc

SEQ ID NO: 639785 - RNA, 18 nt, Human
ccaugccuguaaucccag

SEQ ID NO: 639786 - RNA, 22 nt, Human
ccaugccuguaaucccagcacu

SEQ ID NO: 639787 - RNA, 23 nt, Human
ccaugccuguaaucccagcacuu

SEQ ID NO: 639788 - RNA, 22 nt, Human
ccuggccaacauggugaaaccc

SEQ ID NO: 639789 - RNA, 24 nt, Human
ccuggccaacauggugaaacccug

SEQ ID NO: 639790 - RNA, 22 nt, Human
ccuguaaucccagcacuuuggg

SEQ ID NO: 639791 - RNA, 21 nt, Human
ccuguacucccagcuacucgg

SEQ ID NO: 639792 - RNA, 24 nt, Human
cgagaccagccuggccaacauggu

SEQ ID NO: 639793 - RNA, 24 nt, Human
cgaggcggguagaucaugagguca

SEQ ID NO: 639794 - RNA, 18 nt, Human
cucaaaaaaaaaaaaaaa

SEQ ID NO: 639795 - RNA, 18 nt, Human
cucaaaaaaaaaaaaaaa

SEQ ID NO: 639796 - RNA, 21 nt, Human
cugcaguccagccugggagac

SEQ ID NO: 639797 - RNA, 23 nt, Human
cugcaguccagccugggagacag

SEQ ID NO: 639798 - RNA, 24 nt, Human
cugcugcaguccagccugggagac

SEQ ID NO: 639799 - RNA, 24 nt, Human
cuggccaacauggugaaacccugu

SEQ ID NO: 639800 - RNA, 21 nt, Human
cuguacucccagcuacucggg

SEQ ID NO: 639801 - RNA, 19 nt, Human
gaaacccugucucuacuaa

SEQ ID NO: 639802 - RNA, 24 nt, Human
gacagugcgagacuuugucucaaa

SEQ ID NO: 639803 - RNA, 26 nt, Human
gaccuuuuuuucuuuugucucuaaga

SEQ ID NO: 639804 - RNA, 24 nt, Human
gagucagaagaauugcuugaaccc

SEQ ID NO: 639805 - RNA, 24 nt, Human
gccaacauggugaaacccugucuc

SEQ ID NO: 639806 - RNA, 22 nt, Human
gccaggcacggugcuccaugcc

SEQ ID NO: 639807 - RNA, 18 nt, Human
gcuaaaggaaauuaacuc

SEQ ID NO: 639808 - RNA, 21 nt, Human
gcuccaugccuguaaucccag

SEQ ID NO: 639809 - RNA, 20 nt, Human
gcugcaguccagccugggag

SEQ ID NO: 639810 - RNA, 24 nt, Human
gcugcaguccagccugggagacag

SEQ ID NO: 639811 - RNA, 18 nt, Human
ggagguugcagugaucug

SEQ ID NO: 639812 - RNA, 22 nt, Human
ggagguugcagugaucugagac

SEQ ID NO: 639813 - RNA, 23 nt, Human
ggcggguagaucaugaggucagg

SEQ ID NO: 639814 - RNA, 23 nt, Human
gguagaucaugaggucaggcguu

SEQ ID NO: 639815 - RNA, 23 nt, Human
ggugcuccaugccuguaauccca

SEQ ID NO: 639816 - RNA, 24 nt, Human
ggugcuccaugccuguaaucccag

SEQ ID NO: 639817 - RNA, 24 nt, Human
guguuauaaugaagaaaauaccag

SEQ ID NO: 639818 - RNA, 22 nt, Human
guugcagaccuuuuuuucuuuu

SEQ ID NO: 639819 - RNA, 21 nt, Human
guugcagugaucugagacugc

SEQ ID NO: 639820 - RNA, 24 nt, Human
uaaaaagcaaacuuugaaagaaaa

SEQ ID NO: 639821 - RNA, 21 nt, Human
uaaaaauacagaaauuagcca

SEQ ID NO: 639822 - RNA, 21 nt, Human
uaaugaagaaaauaccagaaa

SEQ ID NO: 639823 - RNA, 22 nt, Human
uagaaaaacaauuugggaaaca

SEQ ID NO: 639824 - RNA, 18 nt, Human
uagaaauagcuguccaug

SEQ ID NO: 639825 - RNA, 23 nt, Human
uaugauuuuauucugggagcaua

SEQ ID NO: 639826 - RNA, 21 nt, Human
uauggucacccaagcacugcu

SEQ ID NO: 639827 - RNA, 22 nt, Human
ucaaaaaaaaaaaaaaaaaaaa

SEQ ID NO: 639828 - RNA, 25 nt, Human
ucaaaaaaaaaaaaaaaaaaaagaa

SEQ ID NO: 639829 - RNA, 19 nt, Human
ucaaauaccuguguuaaua

SEQ ID NO: 639830 - RNA, 27 nt, Human
ucacccaucaauauauuucauuauuuc

SEQ ID NO: 639831 - RNA, 18 nt, Human
ucagcacagaccaauuug

SEQ ID NO: 639832 - RNA, 23 nt, Human
ucagcacagaccaauuugaauaa

SEQ ID NO: 639833 - RNA, 25 nt, Human
ucagcucauauuugaccuugcucca

SEQ ID NO: 639834 - RNA, 24 nt, Human
ucaugaggucaggcguucgagacc

SEQ ID NO: 639835 - RNA, 23 nt, Human
ucgggaggcugagucagaagaau

SEQ ID NO: 639836 - RNA, 19 nt, Human
ucucaaaaaaaaaaaaaaa

SEQ ID NO: 639837 - RNA, 23 nt, Human
ucucuacuaaaaauacagaaauu

SEQ ID NO: 639838 - RNA, 21 nt, Human
ucuucuguaaauacuugugaa

SEQ ID NO: 639839 - RNA, 21 nt, Human
ugaacauacacagaaauagca

SEQ ID NO: 639840 - RNA, 18 nt, Human
ugacguagaucuauuuua

SEQ ID NO: 639841 - RNA, 27 nt, Human
ugacuuccauauauuaauaaauccuuu

SEQ ID NO: 639842 - RNA, 24 nt, Human
ugagucagaagaauugcuugaacc

SEQ ID NO: 639843 - RNA, 26 nt, Human
ugagucagaagaauugcuugaaccca

SEQ ID NO: 639844 - RNA, 19 nt, Human
ugcaccuguacucccagcu

SEQ ID NO: 639845 - RNA, 23 nt, Human
ugccuguaaucccagcacuuugg

SEQ ID NO: 639846 - RNA, 19 nt, Human
ugcuaugaaauuuuaaggg

SEQ ID NO: 639847 - RNA, 23 nt, Human
ugcuccauccauaccucuagcca

SEQ ID NO: 639848 - RNA, 24 nt, Human
ugcuccauccauaccucuagccac

SEQ ID NO: 639849 - RNA, 24 nt, Human
ugcuccaugccuguaaucccagca

SEQ ID NO: 639850 - RNA, 26 nt, Human
ugcugcaguccagccugggagacagu

SEQ ID NO: 639851 - RNA, 18 nt, Human
uggaagccaguaugacau

SEQ ID NO: 639852 - RNA, 20 nt, Human
uggaccacaugaagauucuu

SEQ ID NO: 639853 - RNA, 24 nt, Human
uggccaacauggugaaacccuguc

SEQ ID NO: 639854 - RNA, 20 nt, Human
ugggaggccgaggcggguag

SEQ ID NO: 639855 - RNA, 24 nt, Human
ugggaggccgaggcggguagauca

SEQ ID NO: 639856 - RNA, 22 nt, Human
uggugugcaccuguacucccag

SEQ ID NO: 639857 - RNA, 22 nt, Human
ugucaaguaaguucgagaaauu

SEQ ID NO: 639858 - RNA, 23 nt, Human
ugucacauagcaaaaucuccaua

SEQ ID NO: 639859 - RNA, 21 nt, Human
uuagccucuuuuuucuaagga

SEQ ID NO: 639860 - RNA, 18 nt, Human
uucgagaccagccuggcc

SEQ ID NO: 639861 - RNA, 24 nt, Human
uugaacccaggaggcggagguugc

SEQ ID NO: 639862 - RNA, 19 nt, Human
uugcagugaucugagacug

SEQ ID NO: 639863 - RNA, 22 nt, Human
uugcagugaucugagacugcgc

SEQ ID NO: 639864 - RNA, 24 nt, Human
uugcuugaacccaggaggcggagg

SEQ ID NO: 639865 - RNA, 25 nt, Human
uugggaggccgaggcggguagauca

SEQ ID NO: 639866 - RNA, 21 nt, Human
uugucauuaauaugaaugccu

SEQ ID NO: 639867 - RNA, 19 nt, Human
uuuaaauugcuaugaaauu

SEQ ID NO: 639868 - RNA, 19 nt, Human
uuuguugucaaguaaguuc

SEQ ID NO: 639869 - RNA, 23 nt, Human
uuuuauuucuuuacugauugaaa

SEQ ID NO: 639870 - RNA, 21 nt, Human
aaguagaaaauaaaugcaggg

SEQ ID NO: 639871 - RNA, 31 nt, Human
acccuacaauugauaaaucuuauaccauuuu

SEQ ID NO: 639872 - RNA, 25 nt, Human
caauugauaaaucuuauaccauuuu

SEQ ID NO: 639873 - RNA, 23 nt, Human
cauguuaauuaaauggugguccu

SEQ ID NO: 639874 - RNA, 18 nt, Human
cugcuccgcccugggauc

SEQ ID NO: 639875 - RNA, 27 nt, Human
gacuuugugacacacacaucaucaguc

SEQ ID NO: 639876 - RNA, 18 nt, Human
gcccugggaucgcuggac

SEQ ID NO: 639877 - RNA, 22 nt, Human
uaagaaaaaaaaucaguauuca

SEQ ID NO: 639878 - RNA, 24 nt, Human
uagaaauacuaagaaaaaaaauca

SEQ ID NO: 639879 - RNA, 24 nt, Human
uucuucucugacaacuuuuuauug

SEQ ID NO: 639880 - RNA, 24 nt, Human
uuuauuguaugagcaacccaaacu

SEQ ID NO: 639881 - RNA, 21 nt, Human
aaaaaaaagacaaaauguaga

SEQ ID NO: 639882 - RNA, 23 nt, Human
aaaaaccagccaacccauauggu

SEQ ID NO: 639883 - RNA, 23 nt, Human
aaaacgccucgggaagcaccuuc

SEQ ID NO: 639884 - RNA, 20 nt, Human
aaaagcagcaaaaucuuccu

SEQ ID NO: 639885 - RNA, 22 nt, Human
aaaauuauuucccuccccacuu

SEQ ID NO: 639886 - RNA, 23 nt, Human
aaacuacuaacauaguccaccua

SEQ ID NO: 639887 - RNA, 19 nt, Human
aagggagaggcaggagggc

SEQ ID NO: 639888 - RNA, 22 nt, Human
acagauacaaacgauguaacca

SEQ ID NO: 639889 - RNA, 23 nt, Human
acagcaacaaaacaaaacauaaa

SEQ ID NO: 639890 - RNA, 24 nt, Human
acauaacaggagaacugaaaaaaa

SEQ ID NO: 639891 - RNA, 22 nt, Human
agacaaaauguagagggacccc

SEQ ID NO: 639892 - RNA, 22 nt, Human
agagaugggucuguuuucuuca

SEQ ID NO: 639893 - RNA, 22 nt, Human
agcagggugcacucaaacaaaa

SEQ ID NO: 639894 - RNA, 20 nt, Human
agcuguccacuaggccaaca

SEQ ID NO: 639895 - RNA, 24 nt, Human
aggaaggaaguauaagugaguugg

SEQ ID NO: 639896 - RNA, 22 nt, Human
aggcaaaagcagcaaaaucuuc

SEQ ID NO: 639897 - RNA, 22 nt, Human
auuuauuaaaagccagaggugc

SEQ ID NO: 639898 - RNA, 22 nt, Human
caaaacauaaacauaauguuaa

SEQ ID NO: 639899 - RNA, 21 nt, Human
caaaagcagcaaaaucuuccu

SEQ ID NO: 639900 - RNA, 23 nt, Human
caaaagcagcaaaaucuuccuca

SEQ ID NO: 639901 - RNA, 21 nt, Human
caaccagaacauaacaggaga

SEQ ID NO: 639902 - RNA, 28 nt, Human
caagcaagcggcgccgugcuguaaugac

SEQ ID NO: 639903 - RNA, 22 nt, Human
caagcggcgccgugcccucccc

SEQ ID NO: 639904 - RNA, 18 nt, Human
caccaggcacagcugucc

SEQ ID NO: 639905 - RNA, 19 nt, Human
caccucugaccagcagggu

SEQ ID NO: 639906 - RNA, 22 nt, Human
cauaacaggagaacugaaaaaa

SEQ ID NO: 639907 - RNA, 22 nt, Human
ccaacccauaugguaaauaguu

SEQ ID NO: 639908 - RNA, 21 nt, Human
ccagccaacccauaugguaaa

SEQ ID NO: 639909 - RNA, 27 nt, Human
ccagccaacccauaugguaaauaguua

SEQ ID NO: 639910 - RNA, 19 nt, Human
ccgcgcgccuggcucugcc

SEQ ID NO: 639911 - RNA, 23 nt, Human
ccgggccgcgccaagcucccggg

SEQ ID NO: 639912 - RNA, 19 nt, Human
ccucagagagucaagguca

SEQ ID NO: 639913 - RNA, 25 nt, Human
ccuccccacuuuccugagcuggaga

SEQ ID NO: 639914 - RNA, 18 nt, Human
ccucgggaagcaccuucu

SEQ ID NO: 639915 - RNA, 23 nt, Human
cgcgccuggcucugccccggcuc

SEQ ID NO: 639916 - RNA, 22 nt, Human
cgugcccuccccugcacccucc

SEQ ID NO: 639917 - RNA, 23 nt, Human
cucgucccggcuucuagguccgg

SEQ ID NO: 639918 - RNA, 19 nt, Human
cuugguuaaaggaauuuac

SEQ ID NO: 639919 - RNA, 20 nt, Human
gaaaacuacuaacauagucc

SEQ ID NO: 639920 - RNA, 23 nt, Human
gagaggcaggagggcgggaagga

SEQ ID NO: 639921 - RNA, 19 nt, Human
gauggcccaagcaaucugg

SEQ ID NO: 639922 - RNA, 25 nt, Human
gcaaaaucuuccucagagagucaag

SEQ ID NO: 639923 - RNA, 21 nt, Human
gcaaaggauaaaaacauacaa

SEQ ID NO: 639924 - RNA, 21 nt, Human
gcaggccaagcaagcggcgcc

SEQ ID NO: 639925 - RNA, 23 nt, Human
gccaagcucccggggccgcggac

SEQ ID NO: 639926 - RNA, 21 nt, Human
gcgccuggcucugccccggcu

SEQ ID NO: 639927 - RNA, 21 nt, Human
gcgggaaggacuaaaaaggca

SEQ ID NO: 639928 - RNA, 18 nt, Human
ggaaacaugagguauucc

SEQ ID NO: 639929 - RNA, 21 nt, Human
ggacuaaaaaggcacagggug

SEQ ID NO: 639930 - RNA, 21 nt, Human
gguggaguguuugcugacgcc

SEQ ID NO: 639931 - RNA, 18 nt, Human
guuaagagggguguaagg

SEQ ID NO: 639932 - RNA, 22 nt, Human
uaaaaagcauaguuaagucuug

SEQ ID NO: 639933 - RNA, 27 nt, Human
uaaaagccagaggugcaccaggcacag

SEQ ID NO: 639934 - RNA, 26 nt, Human
uaacaggagaacugaaaaaaaaaaga

SEQ ID NO: 639935 - RNA, 21 nt, Human
uaagggagaggcaggagggcg

SEQ ID NO: 639936 - RNA, 20 nt, Human
uagguccgggugcgcaggcc

SEQ ID NO: 639937 - RNA, 23 nt, Human
uccgauggcccaagcaaucuggu

SEQ ID NO: 639938 - RNA, 21 nt, Human
ugacaaaacacaguguuagca

SEQ ID NO: 639939 - RNA, 19 nt, Human
ugagaaauuaagacacaca

SEQ ID NO: 639940 - RNA, 18 nt, Human
ugaguugguaguaguaga

SEQ ID NO: 639941 - RNA, 18 nt, Human
ugauauucuugccaaaaa

SEQ ID NO: 639942 - RNA, 18 nt, Human
ugauuaucaaaugcauug

SEQ ID NO: 639943 - RNA, 24 nt, Human
ugcacaagaaccaaaauuauuucc

SEQ ID NO: 639944 - RNA, 23 nt, Human
ugcagauagaaacagaauauccu

SEQ ID NO: 639945 - RNA, 21 nt, Human
ugccccggcucgucccggcuu

SEQ ID NO: 639946 - RNA, 22 nt, Human
uggaaaaagaguuaaaaagcau

SEQ ID NO: 639947 - RNA, 24 nt, Human
ugguaaauaguuagcaaaccacca

SEQ ID NO: 639948 - RNA, 23 nt, Human
uguuucaaccaaugaguauuuau

SEQ ID NO: 639949 - RNA, 26 nt, Human
uuaaaaagcauaguuaagucuugguu

SEQ ID NO: 639950 - RNA, 19 nt, Human
uuauccaagagaguguguu

SEQ ID NO: 639951 - RNA, 22 nt, Human
uucaccuugcuugauauucuug

SEQ ID NO: 639952 - RNA, 23 nt, Human
uucaugcugaaagggauuuuagc

SEQ ID NO: 639953 - RNA, 28 nt, Human
uucgcugggcccuuccugagaccuccaa

SEQ ID NO: 639954 - RNA, 20 nt, Human
uugaaugcugaauacagaca

SEQ ID NO: 639955 - RNA, 21 nt, Human
uugaaugcugaauacagacau

SEQ ID NO: 639956 - RNA, 22 nt, Human
uugaaugcugaauacagacauc

SEQ ID NO: 639957 - RNA, 21 nt, Human
uuugaaaugauuacuugggag

SEQ ID NO: 639958 - RNA, 18 nt, Human
uuuuuuuuuuuuuuuuug

SEQ ID NO: 639959 - RNA, 22 nt, Human
aaaaaaaaaaaaaaaagaaaaa

SEQ ID NO: 639960 - RNA, 31 nt, Human
aaaaaaaaaaaaacaaaaaaaaacaaaaaag

SEQ ID NO: 639961 - RNA, 19 nt, Human
aaaaaaaaaaagaaaaaga

SEQ ID NO: 639962 - RNA, 22 nt, Human
aaaaaaaaaagaaaaagaaaag

SEQ ID NO: 639963 - RNA, 24 nt, Human
aaaaaaaaacaaaaaaaaacaaaa

SEQ ID NO: 639964 - RNA, 20 nt, Human
aaaaauuccaagauuccgcc

SEQ ID NO: 639965 - RNA, 18 nt, Human
aaaacuaaaaacaccugu

SEQ ID NO: 639966 - RNA, 22 nt, Human
aaaagaaaaagaaaagcuuucc

SEQ ID NO: 639967 - RNA, 22 nt, Human
aaaagcccugcacccacaaagg

SEQ ID NO: 639968 - RNA, 21 nt, Human
aaaauccaagauucccaccuc

SEQ ID NO: 639969 - RNA, 23 nt, Human
aaacaaaaaauccaagauuccca

SEQ ID NO: 639970 - RNA, 18 nt, Human
aaacagaugcagccuaca

SEQ ID NO: 639971 - RNA, 23 nt, Human
aaaccugcaucuuuucgcuucag

SEQ ID NO: 639972 - RNA, 20 nt, Human
aaacgaagccacccccgaac

SEQ ID NO: 639973 - RNA, 19 nt, Human
aaacugaaacugaaggcca

SEQ ID NO: 639974 - RNA, 22 nt, Human
aaacuggcuccuaccaccuaac

SEQ ID NO: 639975 - RNA, 24 nt, Human
aaacuggcuccuaccaccuaacag

SEQ ID NO: 639976 - RNA, 20 nt, Human
aaagaaaagcuuuccuggug

SEQ ID NO: 639977 - RNA, 19 nt, Human
aacaccuguuuauucugcc

SEQ ID NO: 639978 - RNA, 19 nt, Human
aacauggugaaaccccauc

SEQ ID NO: 639979 - RNA, 20 nt, Human
aacauggugaaaccccaucu

SEQ ID NO: 639980 - RNA, 20 nt, Human
aacauggugaaaccccaucu

SEQ ID NO: 639981 - RNA, 21 nt, Human
aacauggugaaaccccaucuc

SEQ ID NO: 639982 - RNA, 24 nt, Human
aaccacuugaacccaggaagcgga

SEQ ID NO: 639983 - RNA, 19 nt, Human
aacgaagccacccccgaac

SEQ ID NO: 639984 - RNA, 23 nt, Human
aagaaaacagaagagaaguuuca

SEQ ID NO: 639985 - RNA, 24 nt, Human
aagcggaguuugcagugagccgag

SEQ ID NO: 639986 - RNA, 26 nt, Human
aagcuugcucgccagggcacaccgcc

SEQ ID NO: 639987 - RNA, 21 nt, Human
aaguccaagaacuaaagcuga

SEQ ID NO: 639988 - RNA, 18 nt, Human
aauggccucacaggaggg

SEQ ID NO: 639989 - RNA, 28 nt, Human
acaaaugaacacaccguguugcaaugaa

SEQ ID NO: 639990 - RNA, 25 nt, Human
acaagucaacaggaccagcacgaaa

SEQ ID NO: 639991 - RNA, 30 nt, Human
acacagcucucaccuggacucagaaagccc

SEQ ID NO: 639992 - RNA, 19 nt, Human
acacaggccacacacagag

SEQ ID NO: 639993 - RNA, 20 nt, Human
acaccacugcacgccagccu

SEQ ID NO: 639994 - RNA, 22 nt, Human
acacugaaaaaaguccccuaga

SEQ ID NO: 639995 - RNA, 24 nt, Human
acagagugggagagugggggaggg

SEQ ID NO: 639996 - RNA, 21 nt, Human
acagccaaagaaaacagaaga

SEQ ID NO: 639997 - RNA, 24 nt, Human
accacggaggcgacaggugcuuug

SEQ ID NO: 639998 - RNA, 24 nt, Human
accccaucucuacuaaaaauacaa

SEQ ID NO: 639999 - RNA, 23 nt, Human
acccgggcagcagaguacagucc

SEQ ID NO: 640000 - RNA, 19 nt, Human
acccuccccagggccuggg

SEQ ID NO: 640001 - RNA, 21 nt, Human
acccuggugggugaugggaug

SEQ ID NO: 640002 - RNA, 23 nt, Human
accucaaaaaaaaaaaaacaaaa

SEQ ID NO: 640003 - RNA, 18 nt, Human
accuggacucagaaagcc

SEQ ID NO: 640004 - RNA, 18 nt, Human
acgccacgaugccugcug

SEQ ID NO: 640005 - RNA, 18 nt, Human
acgggaggcgccugcagg

SEQ ID NO: 640006 - RNA, 18 nt, Human
acugcacgccagccuggg

SEQ ID NO: 640007 - RNA, 24 nt, Human
acuggcucaugccuguaaucccag

SEQ ID NO: 640008 - RNA, 19 nt, Human
acuggcugaggugggggag

SEQ ID NO: 640009 - RNA, 26 nt, Human
acuucaccucaaaaaaaaaaaaacaa

SEQ ID NO: 640010 - RNA, 24 nt, Human
acuugaggucaggaguuugagacc

SEQ ID NO: 640011 - RNA, 21 nt, Human
agaaagcccccagcaggagag

SEQ ID NO: 640012 - RNA, 20 nt, Human
agaacacucucaaccuccuc

SEQ ID NO: 640013 - RNA, 19 nt, Human
agagagaaugaggcuggag

SEQ ID NO: 640014 - RNA, 19 nt, Human
agagcccagccacgcacug

SEQ ID NO: 640015 - RNA, 22 nt, Human
agaucacuugaggucaggaguu

SEQ ID NO: 640016 - RNA, 25 nt, Human
agaucacuugaggucaggaguuuga

SEQ ID NO: 640017 - RNA, 21 nt, Human
agauucccaccuccuuccacc

SEQ ID NO: 640018 - RNA, 18 nt, Human
agcaggcagucuggggag

SEQ ID NO: 640019 - RNA, 20 nt, Human
agcccugcacccacaaaggc

SEQ ID NO: 640020 - RNA, 23 nt, Human
agccugggugucagagcgagacu

SEQ ID NO: 640021 - RNA, 23 nt, Human
agcugagcgugguggcgcaugcc

SEQ ID NO: 640022 - RNA, 22 nt, Human
agcuuggccaacauggugaaac

SEQ ID NO: 640023 - RNA, 24 nt, Human
agcuuggccaacauggugaaaccc

SEQ ID NO: 640024 - RNA, 23 nt, Human
aggaaacauucugcucugagaac

SEQ ID NO: 640025 - RNA, 18 nt, Human
aggaaggacaaggaaaag

SEQ ID NO: 640026 - RNA, 23 nt, Human
aggaguuugagaccagcuuggcc

SEQ ID NO: 640027 - RNA, 24 nt, Human
aggcaggaacacacgacaggccca

SEQ ID NO: 640028 - RNA, 21 nt, Human
aggcaggaggugugcggcugg

SEQ ID NO: 640029 - RNA, 22 nt, Human
aggcaggcgauccacagggagg

SEQ ID NO: 640030 - RNA, 21 nt, Human
aggcaggcggcaggggagaga

SEQ ID NO: 640031 - RNA, 18 nt, Human
aggcagucuggggagggg

SEQ ID NO: 640032 - RNA, 18 nt, Human
aggccacacacagagccc

SEQ ID NO: 640033 - RNA, 18 nt, Human
aggcccagcucugcccag

SEQ ID NO: 640034 - RNA, 21 nt, Human
aggcccagcucugcccagggg

SEQ ID NO: 640035 - RNA, 22 nt, Human
aggcggcguggaaggaaaaggc

SEQ ID NO: 640036 - RNA, 22 nt, Human
aggcgggcagaucacuugaggu

SEQ ID NO: 640037 - RNA, 23 nt, Human
aggcgggcagaucacuugagguc

SEQ ID NO: 640038 - RNA, 26 nt, Human
aggcgggcagaucacuugaggucagg

SEQ ID NO: 640039 - RNA, 21 nt, Human
aggcuccggacacagccaucc

SEQ ID NO: 640040 - RNA, 22 nt, Human
aggcugacaauuuccacaaaag

SEQ ID NO: 640041 - RNA, 24 nt, Human
aggcuggggcaggagaaccacuug

SEQ ID NO: 640042 - RNA, 21 nt, Human
agggaccaguggcucugggcu

SEQ ID NO: 640043 - RNA, 22 nt, Human
agggagaaguuugaaaaacugg

SEQ ID NO: 640044 - RNA, 22 nt, Human
agugagaggcggcguggaagga

SEQ ID NO: 640045 - RNA, 21 nt, Human
agugggggagggggugggggu

SEQ ID NO: 640046 - RNA, 18 nt, Human
auacagccaaagaaaaca

SEQ ID NO: 640047 - RNA, 24 nt, Human
aucacaccacugcacgccagccug

SEQ ID NO: 640048 - RNA, 20 nt, Human
aucacuugaggucaggaguu

SEQ ID NO: 640049 - RNA, 21 nt, Human
auccagaaggucaccacacac

SEQ ID NO: 640050 - RNA, 18 nt, Human
aucuauaccaccuucccu

SEQ ID NO: 640051 - RNA, 19 nt, Human
augccuguaaucccagcac

SEQ ID NO: 640052 - RNA, 26 nt, Human
caaaagcccugcacccacaaaggcac

SEQ ID NO: 640053 - RNA, 23 nt, Human
caaacauccacauggcacaagca

SEQ ID NO: 640054 - RNA, 22 nt, Human
caaacgaagccacccccgaacc

SEQ ID NO: 640055 - RNA, 22 nt, Human
caaacuggcuccuaccaccuaa

SEQ ID NO: 640056 - RNA, 25 nt, Human
caaagaacgcacuccuggcaagcga

SEQ ID NO: 640057 - RNA, 18 nt, Human
caaaggcaccaucugcuc

SEQ ID NO: 640058 - RNA, 26 nt, Human
caaaggcaccaucugcucucagaaac

SEQ ID NO: 640059 - RNA, 27 nt, Human
caaaugaacacaccguguugcaaugaa

SEQ ID NO: 640060 - RNA, 24 nt, Human
caacauggugaaaccccaucucua

SEQ ID NO: 640061 - RNA, 23 nt, Human
cacaaacauccacauggcacaag

SEQ ID NO: 640062 - RNA, 22 nt, Human
cacacaaacuggcuccuaccac

SEQ ID NO: 640063 - RNA, 18 nt, Human
cacacacagagcccagcc

SEQ ID NO: 640064 - RNA, 19 nt, Human
cacacaccuggcacccucc

SEQ ID NO: 640065 - RNA, 24 nt, Human
cacacagcucucaccuggacucag

SEQ ID NO: 640066 - RNA, 21 nt, Human
cacaccacugcacgccagccu

SEQ ID NO: 640067 - RNA, 23 nt, Human
cacacugaaaaaaguccccuaga

SEQ ID NO: 640068 - RNA, 21 nt, Human
cacagagcccagccacgcacu

SEQ ID NO: 640069 - RNA, 21 nt, Human
caccacacaccuggcacccuc

SEQ ID NO: 640070 - RNA, 22 nt, Human
caccacacaccuggcacccucc

SEQ ID NO: 640071 - RNA, 24 nt, Human
cacccguguccucggagccaggaa

SEQ ID NO: 640072 - RNA, 21 nt, Human
caccgugcaccuacugugggc

SEQ ID NO: 640073 - RNA, 21 nt, Human
caccucaaaaaaaaaaaaaca

SEQ ID NO: 640074 - RNA, 25 nt, Human
caccucaaaaaaaaaaaaacaaaaa

SEQ ID NO: 640075 - RNA, 27 nt, Human
caccuggacucagaaagccggggguuc

SEQ ID NO: 640076 - RNA, 21 nt, Human
caccuggcacccuccaagggc

SEQ ID NO: 640077 - RNA, 23 nt, Human
cacgccagccugggugucagagc

SEQ ID NO: 640078 - RNA, 20 nt, Human
cacugcacgccagccugggu

SEQ ID NO: 640079 - RNA, 24 nt, Human
cacugcacgccagccuggguguca

SEQ ID NO: 640080 - RNA, 24 nt, Human
cacugccaaugcccaagguuaccu

SEQ ID NO: 640081 - RNA, 23 nt, Human
cacugcguucucaugcuggguuu

SEQ ID NO: 640082 - RNA, 23 nt, Human
cacugcguucucaugcuggguuu

SEQ ID NO: 640083 - RNA, 25 nt, Human
cacugcguucucaugcuggguuuuu

SEQ ID NO: 640084 - RNA, 23 nt, Human
cacuugaggucaggaguuugaga

SEQ ID NO: 640085 - RNA, 24 nt, Human
cagaacgaacagagugggagagug

SEQ ID NO: 640086 - RNA, 25 nt, Human
cagaaggucaccacacaccuggcac

SEQ ID NO: 640087 - RNA, 21 nt, Human
cagaaucgaaagaaaaauucc

SEQ ID NO: 640088 - RNA, 21 nt, Human
cagagcccagccacgcacugu

SEQ ID NO: 640089 - RNA, 23 nt, Human
cagagcgagacuucaccucaaaa

SEQ ID NO: 640090 - RNA, 19 nt, Human
cagaggccgcacucccuca

SEQ ID NO: 640091 - RNA, 24 nt, Human
cagaucacuugaggucaggaguuu

SEQ ID NO: 640092 - RNA, 21 nt, Human
cagaugcacauaauaaccuug

SEQ ID NO: 640093 - RNA, 22 nt, Human
cagcacgaaacagaugcagccu

SEQ ID NO: 640094 - RNA, 24 nt, Human
cagcacucugggaggccgaggcgg

SEQ ID NO: 640095 - RNA, 18 nt, Human
cagcauccaucugagugc

SEQ ID NO: 640096 - RNA, 21 nt, Human
cagccucugaaacgagcucaa

SEQ ID NO: 640097 - RNA, 24 nt, Human
cagcuacuugggaggcuggggcag

SEQ ID NO: 640098 - RNA, 24 nt, Human
cagcuuggccaacauggugaaacc

SEQ ID NO: 640099 - RNA, 23 nt, Human
caggaccagcacgaaacagaugc

SEQ ID NO: 640100 - RNA, 19 nt, Human
caggagacacacaugcgac

SEQ ID NO: 640101 - RNA, 22 nt, Human
caggagagacgaacaugcccgg

SEQ ID NO: 640102 - RNA, 22 nt, Human
cagggcacaccgcccguaacac

SEQ ID NO: 640103 - RNA, 19 nt, Human
cagggcauuuuucaacaaa

SEQ ID NO: 640104 - RNA, 21 nt, Human
cagugggaaaacuaaaaacac

SEQ ID NO: 640105 - RNA, 20 nt, Human
caugccuguaaucccagcac

SEQ ID NO: 640106 - RNA, 24 nt, Human
caugccuguaaucccagcacucug

SEQ ID NO: 640107 - RNA, 22 nt, Human
cauggacacugcugccccgaca

SEQ ID NO: 640108 - RNA, 20 nt, Human
cauucugcucugagaacaaa

SEQ ID NO: 640109 - RNA, 18 nt, Human
ccaagauucccaccuccu

SEQ ID NO: 640110 - RNA, 21 nt, Human
ccacgcuccaggcuucccugg

SEQ ID NO: 640111 - RNA, 19 nt, Human
ccacggaggcgacaggugc

SEQ ID NO: 640112 - RNA, 20 nt, Human
ccacugcacgccagccuggg

SEQ ID NO: 640113 - RNA, 20 nt, Human
ccacugcacgccagccuggg

SEQ ID NO: 640114 - RNA, 20 nt, Human
ccacugcacgccagccuggg

SEQ ID NO: 640115 - RNA, 22 nt, Human
ccacugcacgccagccugggug

SEQ ID NO: 640116 - RNA, 20 nt, Human
ccagaaggucaccacacacc

SEQ ID NO: 640117 - RNA, 23 nt, Human
ccagaaucgaaagaaaaauucca

SEQ ID NO: 640118 - RNA, 20 nt, Human
ccagacccgccaggccacgc

SEQ ID NO: 640119 - RNA, 20 nt, Human
ccaggcuucccuggcuuagg

SEQ ID NO: 640120 - RNA, 23 nt, Human
ccagucaucuaaacuuacucauu

SEQ ID NO: 640121 - RNA, 18 nt, Human
ccauugguccaguuuugc

SEQ ID NO: 640122 - RNA, 19 nt, Human
cccacagccacccucccca

SEQ ID NO: 640123 - RNA, 20 nt, Human
cccacagccacccuccccag

SEQ ID NO: 640124 - RNA, 23 nt, Human
cccacagccacccuccccagggc

SEQ ID NO: 640125 - RNA, 18 nt, Human
ccccaggggcuuuggccu

SEQ ID NO: 640126 - RNA, 24 nt, Human
ccccaggggcuuuggccucuuacc

SEQ ID NO: 640127 - RNA, 19 nt, Human
ccccaugcuauacgugcuc

SEQ ID NO: 640128 - RNA, 18 nt, Human
cccgcaaucugagggcca

SEQ ID NO: 640129 - RNA, 19 nt, Human
cccgcaaucugagggccau

SEQ ID NO: 640130 - RNA, 23 nt, Human
cccguaacacccacugcaggggc

SEQ ID NO: 640131 - RNA, 20 nt, Human
cccugcucugggcccaggcc

SEQ ID NO: 640132 - RNA, 18 nt, Human
ccgaagagcugagcucca

SEQ ID NO: 640133 - RNA, 24 nt, Human
ccgcacucccucagcagggggacc

SEQ ID NO: 640134 - RNA, 22 nt, Human
ccgccaggcuccggacacagcc

SEQ ID NO: 640135 - RNA, 20 nt, Human
ccggcgggcagaguggcauc

SEQ ID NO: 640136 - RNA, 23 nt, Human
ccguaacacccacugcaggggca

SEQ ID NO: 640137 - RNA, 26 nt, Human
ccucaaaaaaaaaaaaacaaaaaaaa

SEQ ID NO: 640138 - RNA, 27 nt, Human
ccucaaaaaaaaaaaaacaaaaaaaaa

SEQ ID NO: 640139 - RNA, 22 nt, Human
ccucccacagccacccucccca

SEQ ID NO: 640140 - RNA, 19 nt, Human
ccuccggcgggcagagugg

SEQ ID NO: 640141 - RNA, 20 nt, Human
ccugcagauggccagcaccu

SEQ ID NO: 640142 - RNA, 22 nt, Human
ccugcaucuuuucgcuucaggg

SEQ ID NO: 640143 - RNA, 18 nt, Human
ccuggcccuggcucuggu

SEQ ID NO: 640144 - RNA, 23 nt, Human
ccuggcccuggcucuggucuggc

SEQ ID NO: 640145 - RNA, 21 nt, Human
ccugggugucagagcgagacu

SEQ ID NO: 640146 - RNA, 21 nt, Human
ccugguucggcugauacagcc

SEQ ID NO: 640147 - RNA, 18 nt, Human
ccuguaaucccagcacuc

SEQ ID NO: 640148 - RNA, 22 nt, Human
ccuguaaucccagcacucuggg

SEQ ID NO: 640149 - RNA, 19 nt, Human
ccuguaaucccagcuacuu

SEQ ID NO: 640150 - RNA, 21 nt, Human
ccuguaaucccagcuacuugg

SEQ ID NO: 640151 - RNA, 18 nt, Human
cgacaggagacacacaug

SEQ ID NO: 640152 - RNA, 22 nt, Human
cgacaggugcuuugaugccucc

SEQ ID NO: 640153 - RNA, 23 nt, Human
cgagaucacaccacugcacgcca

SEQ ID NO: 640154 - RNA, 24 nt, Human
cgaggcgggcagaucacuugaggu

SEQ ID NO: 640155 - RNA, 26 nt, Human
cgaggcgggcagaucacuugagguca

SEQ ID NO: 640156 - RNA, 22 nt, Human
cgcacuccuggcaagcgagucu

SEQ ID NO: 640157 - RNA, 19 nt, Human
cgcagcccaggccucuccu

SEQ ID NO: 640158 - RNA, 20 nt, Human
cgcccguaacacccacugca

SEQ ID NO: 640159 - RNA, 22 nt, Human
cggaguggggacgguguccacc

SEQ ID NO: 640160 - RNA, 24 nt, Human
cgggcagaucacuugaggucagga

SEQ ID NO: 640161 - RNA, 21 nt, Human
cgggcaguggacuuggccucc

SEQ ID NO: 640162 - RNA, 25 nt, Human
cucaaaaaaaaaaaaacaaaaaaaa

SEQ ID NO: 640163 - RNA, 26 nt, Human
cucaaaaaaaaaaaaacaaaaaaaaa

SEQ ID NO: 640164 - RNA, 24 nt, Human
cucagacagugggaaaacuaaaaa

SEQ ID NO: 640165 - RNA, 22 nt, Human
cucagguauccuccccugugcu

SEQ ID NO: 640166 - RNA, 23 nt, Human
cucaugccuguaaucccagcacu

SEQ ID NO: 640167 - RNA, 23 nt, Human
cuccaguuccccugcucugggcc

SEQ ID NO: 640168 - RNA, 23 nt, Human
cuccugguucggcugauacagcc

SEQ ID NO: 640169 - RNA, 18 nt, Human
cucgugaagacauucaga

SEQ ID NO: 640170 - RNA, 22 nt, Human
cucuaacgagcuuaagaacagg

SEQ ID NO: 640171 - RNA, 26 nt, Human
cugacucacuggcugaggugggggag

SEQ ID NO: 640172 - RNA, 20 nt, Human
cugaugcacgcucgugaaga

SEQ ID NO: 640173 - RNA, 24 nt, Human
cugcacccacaaaggcaccaucug

SEQ ID NO: 640174 - RNA, 18 nt, Human
cugcguucucaugcuggg

SEQ ID NO: 640175 - RNA, 19 nt, Human
cuuccuggaugagaaacug

SEQ ID NO: 640176 - RNA, 23 nt, Human
cuucuugggggccccaugggccc

SEQ ID NO: 640177 - RNA, 20 nt, Human
cuugcagaggccgcacuccc

SEQ ID NO: 640178 - RNA, 23 nt, Human
cuuggccaacauggugaaacccc

SEQ ID NO: 640179 - RNA, 18 nt, Human
cuuggcucagacaguggg

SEQ ID NO: 640180 - RNA, 23 nt, Human
gaaaaaaguccccuagaaggaug

SEQ ID NO: 640181 - RNA, 20 nt, Human
gaaaacuaaaaacaccuguu

SEQ ID NO: 640182 - RNA, 19 nt, Human
gaaaagagcuccagcugcc

SEQ ID NO: 640183 - RNA, 18 nt, Human
gaaaaggcucagcaggca

SEQ ID NO: 640184 - RNA, 18 nt, Human
gaagguggacgggcagag

SEQ ID NO: 640185 - RNA, 20 nt, Human
gacacagccauccuccuucc

SEQ ID NO: 640186 - RNA, 21 nt, Human
gacagugggaaaacuaaaaac

SEQ ID NO: 640187 - RNA, 21 nt, Human
gacuguuaccccaggggcuuu

SEQ ID NO: 640188 - RNA, 24 nt, Human
gagcgugguggcgcaugccuguaa

SEQ ID NO: 640189 - RNA, 19 nt, Human
gaggcuggggcaggagaac

SEQ ID NO: 640190 - RNA, 21 nt, Human
gaggggaugccggacucugcc

SEQ ID NO: 640191 - RNA, 21 nt, Human
gaguacaguccagccacacag

SEQ ID NO: 640192 - RNA, 19 nt, Human
gagugggggaggggguggg

SEQ ID NO: 640193 - RNA, 22 nt, Human
gagugggggagggggugggggu

SEQ ID NO: 640194 - RNA, 22 nt, Human
gaguuugcagugagccgagauc

SEQ ID NO: 640195 - RNA, 24 nt, Human
gaucacuugaggucaggaguuuga

SEQ ID NO: 640196 - RNA, 19 nt, Human
gcagaguggggagcugcuc

SEQ ID NO: 640197 - RNA, 22 nt, Human
gcaggagaaccacuugaaccca

SEQ ID NO: 640198 - RNA, 18 nt, Human
gcaggcuccagcugcucc

SEQ ID NO: 640199 - RNA, 23 nt, Human
gcaguggacuuggccucccacag

SEQ ID NO: 640200 - RNA, 24 nt, Human
gccaacauggugaaaccccaucuc

SEQ ID NO: 640201 - RNA, 19 nt, Human
gccacccccgaaccuugca

SEQ ID NO: 640202 - RNA, 18 nt, Human
gcccccagcaggagagac

SEQ ID NO: 640203 - RNA, 20 nt, Human
gccgagaucacaccacugca

SEQ ID NO: 640204 - RNA, 19 nt, Human
gccugggguccuucuggga

SEQ ID NO: 640205 - RNA, 20 nt, Human
gccuguaaucccagcuacuu

SEQ ID NO: 640206 - RNA, 19 nt, Human
gcugcaacgggccugccac

SEQ ID NO: 640207 - RNA, 19 nt, Human
ggaagguggacgggcagag

SEQ ID NO: 640208 - RNA, 23 nt, Human
ggacaggguccugcuuggcucag

SEQ ID NO: 640209 - RNA, 20 nt, Human
ggacucagaaagccaggucc

SEQ ID NO: 640210 - RNA, 21 nt, Human
ggagaaccacuugaacccagg

SEQ ID NO: 640211 - RNA, 20 nt, Human
ggagaaguuugaaaaacugg

SEQ ID NO: 640212 - RNA, 21 nt, Human
ggagaaguuugaaaaacugga

SEQ ID NO: 640213 - RNA, 18 nt, Human
ggagagugggggaggggg

SEQ ID NO: 640214 - RNA, 20 nt, Human
ggagccagcugaggacucac

SEQ ID NO: 640215 - RNA, 23 nt, Human
ggagccaggcgcccugaugcacg

SEQ ID NO: 640216 - RNA, 21 nt, Human
ggaggcgacaggugcuuugau

SEQ ID NO: 640217 - RNA, 20 nt, Human
ggaggggaugccggacucug

SEQ ID NO: 640218 - RNA, 18 nt, Human
ggaguuugcagugagccg

SEQ ID NO: 640219 - RNA, 24 nt, Human
ggaguuugcagugagccgagauca

SEQ ID NO: 640220 - RNA, 19 nt, Human
ggaugccggacucugcccg

SEQ ID NO: 640221 - RNA, 18 nt, Human
ggcacaagcagggccggc

SEQ ID NO: 640222 - RNA, 19 nt, Human
ggcagaguggcaucggggg

SEQ ID NO: 640223 - RNA, 21 nt, Human
ggcagaguggcaucggggggc

SEQ ID NO: 640224 - RNA, 20 nt, Human
ggcagaguggggagcugcuc

SEQ ID NO: 640225 - RNA, 25 nt, Human
ggcagaucacuugaggucaggaguu

SEQ ID NO: 640226 - RNA, 21 nt, Human
ggccugggguccuucugggag

SEQ ID NO: 640227 - RNA, 19 nt, Human
ggcggcaggggagagaggg

SEQ ID NO: 640228 - RNA, 22 nt, Human
ggcugauacagccaaagaaaac

SEQ ID NO: 640229 - RNA, 19 nt, Human
gggcagaguggcaucgggg

SEQ ID NO: 640230 - RNA, 25 nt, Human
gggcagaguggggagcugcucgggg

SEQ ID NO: 640231 - RNA, 23 nt, Human
ggggacuguuaccccaggggcuu

SEQ ID NO: 640232 - RNA, 23 nt, Human
gggguccuucugggagcccccuc

SEQ ID NO: 640233 - RNA, 24 nt, Human
gggugcacuggcucaugccuguaa

SEQ ID NO: 640234 - RNA, 19 nt, Human
ggucaggaguuugagacca

SEQ ID NO: 640235 - RNA, 24 nt, Human
gguggcgcaugccuguaaucccag

SEQ ID NO: 640236 - RNA, 20 nt, Human
gguguuuaaaaaaaaaaaaa

SEQ ID NO: 640237 - RNA, 18 nt, Human
gucaccuuaaaauaaauu

SEQ ID NO: 640238 - RNA, 20 nt, Human
guggcacaggccacacaaac

SEQ ID NO: 640239 - RNA, 23 nt, Human
guggcgcaugccuguaaucccag

SEQ ID NO: 640240 - RNA, 23 nt, Human
guuuaaaaaaaaaaaaaaaagaa

SEQ ID NO: 640241 - RNA, 20 nt, Human
uaaacauggacacugcugcc

SEQ ID NO: 640242 - RNA, 20 nt, Human
uaacagagacgagucgcaca

SEQ ID NO: 640243 - RNA, 22 nt, Human
uaagaaaguauuaaacuucugu

SEQ ID NO: 640244 - RNA, 20 nt, Human
uaagaacaggacauuaaacu

SEQ ID NO: 640245 - RNA, 24 nt, Human
uaagaccaaacguuucaaaacugg

SEQ ID NO: 640246 - RNA, 20 nt, Human
uacaggcucagguauccucc

SEQ ID NO: 640247 - RNA, 22 nt, Human
uagaagacacuggaauggccuc

SEQ ID NO: 640248 - RNA, 21 nt, Human
uagggaccaguggcucugggc

SEQ ID NO: 640249 - RNA, 26 nt, Human
uaucauacaagucaacaggaccagca

SEQ ID NO: 640250 - RNA, 19 nt, Human
uauuuugcauguuauuaac

SEQ ID NO: 640251 - RNA, 23 nt, Human
ucacaccacugcacgccagccug

SEQ ID NO: 640252 - RNA, 26 nt, Human
ucaccucaaaaaaaaaaaaacaaaaa

SEQ ID NO: 640253 - RNA, 21 nt, Human
ucacuggcugaggugggggag

SEQ ID NO: 640254 - RNA, 19 nt, Human
ucacuugaggucaggaguu

SEQ ID NO: 640255 - RNA, 19 nt, Human
ucagcagggggaccacgga

SEQ ID NO: 640256 - RNA, 19 nt, Human
ucagccucugaaacgagcu

SEQ ID NO: 640257 - RNA, 21 nt, Human
ucaucagcguggcuaagccaa

SEQ ID NO: 640258 - RNA, 22 nt, Human
ucaugccuguaaucccagcacu

SEQ ID NO: 640259 - RNA, 26 nt, Human
uccaagauucccaccuccuuccaccu

SEQ ID NO: 640260 - RNA, 22 nt, Human
uccacaaaagcccugcacccac

SEQ ID NO: 640261 - RNA, 24 nt, Human
uccacagggaggggugugugaagg

SEQ ID NO: 640262 - RNA, 21 nt, Human
uccacauggcacaagcagggc

SEQ ID NO: 640263 - RNA, 21 nt, Human
uccagaaggucaccacacacc

SEQ ID NO: 640264 - RNA, 19 nt, Human
ucccacagccacccucccc

SEQ ID NO: 640265 - RNA, 22 nt, Human
ucccacagccacccuccccagg

SEQ ID NO: 640266 - RNA, 19 nt, Human
ucccagggccuugcaccgu

SEQ ID NO: 640267 - RNA, 18 nt, Human
uccccagggccugggguc

SEQ ID NO: 640268 - RNA, 22 nt, Human
uccgaagagcugagcuccauuc

SEQ ID NO: 640269 - RNA, 21 nt, Human
uccgggcaguggacuuggccu

SEQ ID NO: 640270 - RNA, 20 nt, Human
uccguggggaagguagcggg

SEQ ID NO: 640271 - RNA, 19 nt, Human
ucgauuuuaaaaaggaucc

SEQ ID NO: 640272 - RNA, 21 nt, Human
ucgcagcccaggccucuccug

SEQ ID NO: 640273 - RNA, 18 nt, Human
ucucaaccuccucucuuu

SEQ ID NO: 640274 - RNA, 24 nt, Human
ucuccagcgagucucagcggaagc

SEQ ID NO: 640275 - RNA, 27 nt, Human
ucuccauaaacauggacacugcugccc

SEQ ID NO: 640276 - RNA, 21 nt, Human
ucucuacuaaaaauacaaaaa

SEQ ID NO: 640277 - RNA, 19 nt, Human
ugaaaccccaucucuacua

SEQ ID NO: 640278 - RNA, 18 nt, Human
ugaaaggcaggaacgugg

SEQ ID NO: 640279 - RNA, 19 nt, Human
ugaaguuaaaggcauccag

SEQ ID NO: 640280 - RNA, 22 nt, Human
ugacaauuuccacaaaagcccu

SEQ ID NO: 640281 - RNA, 23 nt, Human
ugagaaacugaaacugaaggcca

SEQ ID NO: 640282 - RNA, 23 nt, Human
ugagaccagcuuggccaacaugg

SEQ ID NO: 640283 - RNA, 24 nt, Human
ugagaccagcuuggccaacauggu

SEQ ID NO: 640284 - RNA, 20 nt, Human
ugagcuccauuccacggagg

SEQ ID NO: 640285 - RNA, 18 nt, Human
ugaggucaggaguuugag

SEQ ID NO: 640286 - RNA, 19 nt, Human
ugaggugggggagccaggc

SEQ ID NO: 640287 - RNA, 19 nt, Human
ugaugccuccgaagagcug

SEQ ID NO: 640288 - RNA, 19 nt, Human
ugaugggaugcccgggcag

SEQ ID NO: 640289 - RNA, 19 nt, Human
ugcaaugaaaggcaggaac

SEQ ID NO: 640290 - RNA, 22 nt, Human
ugcacccacaaaggcaccaucu

SEQ ID NO: 640291 - RNA, 21 nt, Human
ugccacccguguccucggagc

SEQ ID NO: 640292 - RNA, 20 nt, Human
ugccagaaucgaaagaaaaa

SEQ ID NO: 640293 - RNA, 23 nt, Human
ugccagaaucgaaagaaaaauuc

SEQ ID NO: 640294 - RNA, 23 nt, Human
ugccuguaaucccagcacucugg

SEQ ID NO: 640295 - RNA, 23 nt, Human
ugccuguaaucccagcuacuugg

SEQ ID NO: 640296 - RNA, 24 nt, Human
ugccuguaaucccagcuacuuggg

SEQ ID NO: 640297 - RNA, 21 nt, Human
ugcucugcucacucacaaacc

SEQ ID NO: 640298 - RNA, 24 nt, Human
ugcucugcucacucacaaacucca

SEQ ID NO: 640299 - RNA, 27 nt, Human
ugcugcaacuguuuacauguauuggga

SEQ ID NO: 640300 - RNA, 19 nt, Human
ugcuuggcucagacagugg

SEQ ID NO: 640301 - RNA, 24 nt, Human
uggaaaaauaacagaugcacauaa

SEQ ID NO: 640302 - RNA, 21 nt, Human
uggagaguccgcuucuugggg

SEQ ID NO: 640303 - RNA, 19 nt, Human
uggcacacgccccagucuc

SEQ ID NO: 640304 - RNA, 23 nt, Human
uggcagugagaggcggcguggaa

SEQ ID NO: 640305 - RNA, 25 nt, Human
uggcagugagaggcggcguggaagg

SEQ ID NO: 640306 - RNA, 22 nt, Human
uggccaacauggugaaacccca

SEQ ID NO: 640307 - RNA, 24 nt, Human
uggccaacauggugaaaccccauc

SEQ ID NO: 640308 - RNA, 21 nt, Human
uggcgcaugccuguaauccca

SEQ ID NO: 640309 - RNA, 22 nt, Human
uggcgcaugccuguaaucccag

SEQ ID NO: 640310 - RNA, 21 nt, Human
uggcucaugccuguaauccca

SEQ ID NO: 640311 - RNA, 22 nt, Human
uggcucaugccuguaaucccag

SEQ ID NO: 640312 - RNA, 24 nt, Human
uggcucaugccuguaaucccagca

SEQ ID NO: 640313 - RNA, 22 nt, Human
uggcucugggcugcaacgggcc

SEQ ID NO: 640314 - RNA, 22 nt, Human
ugggagagugggggagggggug

SEQ ID NO: 640315 - RNA, 23 nt, Human
ugggagagugggggagggggugg

SEQ ID NO: 640316 - RNA, 20 nt, Human
ugggaggccgaggcgggcag

SEQ ID NO: 640317 - RNA, 24 nt, Human
ugggaggccgaggcgggcagauca

SEQ ID NO: 640318 - RNA, 18 nt, Human
ugggaggcuggggcagga

SEQ ID NO: 640319 - RNA, 24 nt, Human
ugggaggcuggggcaggagaacca

SEQ ID NO: 640320 - RNA, 19 nt, Human
uggggagcugcucggggcc

SEQ ID NO: 640321 - RNA, 20 nt, Human
uggggaggggaugccggacu

SEQ ID NO: 640322 - RNA, 20 nt, Human
uggggcaggagaaccacuug

SEQ ID NO: 640323 - RNA, 24 nt, Human
uggggcaggagaaccacuugaacc

SEQ ID NO: 640324 - RNA, 24 nt, Human
ugggggccccaugggcccccacuu

SEQ ID NO: 640325 - RNA, 18 nt, Human
uggucuggcggcaacccc

SEQ ID NO: 640326 - RNA, 24 nt, Human
ugguggcgcaugccuguaauccca

SEQ ID NO: 640327 - RNA, 19 nt, Human
ugugcugggaguccggagu

SEQ ID NO: 640328 - RNA, 18 nt, Human
uguggggacucagccucu

SEQ ID NO: 640329 - RNA, 18 nt, Human
uucaccucaaaaaaaaaa

SEQ ID NO: 640330 - RNA, 19 nt, Human
uuccaggaagaacuucuua

SEQ ID NO: 640331 - RNA, 21 nt, Human
uuccccugcucugggcccagg

SEQ ID NO: 640332 - RNA, 22 nt, Human
uucccuggccagugcccuccca

SEQ ID NO: 640333 - RNA, 18 nt, Human
uugaugccuccgaagagc

SEQ ID NO: 640334 - RNA, 19 nt, Human
uugcagugagccgagauca

SEQ ID NO: 640335 - RNA, 20 nt, Human
uugcagugagccgagaucac

SEQ ID NO: 640336 - RNA, 23 nt, Human
uuggccaacauggugaaacccca

SEQ ID NO: 640337 - RNA, 26 nt, Human
uuuaaaaaaaaaaaaaaaagaaaaag

SEQ ID NO: 640338 - RNA, 21 nt, Human
uuucgcuucagggcauuuuuc

SEQ ID NO: 640339 - RNA, 19 nt, Human
uuugcagugagccgagauc

SEQ ID NO: 640340 - RNA, 27 nt, Human
uuuuucaacaaagaacgcacuccuggg

SEQ ID NO: 640341 - RNA, 24 nt, Human
agggccugagucucuagucaguug

SEQ ID NO: 640342 - RNA, 18 nt, Human
caccuucugccccacccc

SEQ ID NO: 640343 - RNA, 24 nt, Human
ccaaggggggcagugaguauggcc

SEQ ID NO: 640344 - RNA, 22 nt, Human
cccaccccaaggggguuggggc

SEQ ID NO: 640345 - RNA, 20 nt, Human
ccuucugccccaccccaagg

SEQ ID NO: 640346 - RNA, 20 nt, Human
cuucugccccaccccaaggg

SEQ ID NO: 640347 - RNA, 18 nt, Human
ugcagggccugagucucu

SEQ ID NO: 640348 - RNA, 21 nt, Human
ugcagggccugagucucuagu

SEQ ID NO: 640349 - RNA, 19 nt, Human
uggccacagguucuauagg

SEQ ID NO: 640350 - RNA, 24 nt, Human
uggccacagguucuauagggcccu

SEQ ID NO: 640351 - RNA, 21 nt, Human
ugggaugcuucaccuucugcc

SEQ ID NO: 640352 - RNA, 24 nt, Human
ugggaugcuucaccuucugcccca

SEQ ID NO: 640353 - RNA, 20 nt, Human
uuuuuuuuuuuuuuuuacca

SEQ ID NO: 640354 - RNA, 24 nt, Human
uuuuuuuuuuuuuuuuuaccacgg

SEQ ID NO: 640355 - RNA, 25 nt, Human
uuuuuuuuuuuuuuuuuaccacggg

SEQ ID NO: 640356 - RNA, 20 nt, Human
aaaacaaguguuacacccuc

SEQ ID NO: 640357 - RNA, 21 nt, Human
aaaauacugaaucaaaaucua

SEQ ID NO: 640358 - RNA, 19 nt, Human
aaacaaguguuacacccuc

SEQ ID NO: 640359 - RNA, 19 nt, Human
aaacuccaaauuucacgug

SEQ ID NO: 640360 - RNA, 23 nt, Human
aaacugcuggggguggggggggg

SEQ ID NO: 640361 - RNA, 24 nt, Human
aaagugcuggguuuacaggcauga

SEQ ID NO: 640362 - RNA, 24 nt, Human
aacauuguuaauguacuuaugcca

SEQ ID NO: 640363 - RNA, 19 nt, Human
aacugcugggggugggggg

SEQ ID NO: 640364 - RNA, 19 nt, Human
aacuugcaaucaucuuacc

SEQ ID NO: 640365 - RNA, 25 nt, Human
aagcucuuuacacacgcugcugccu

SEQ ID NO: 640366 - RNA, 20 nt, Human
aaguagcugggacugcaggc

SEQ ID NO: 640367 - RNA, 20 nt, Human
aaguagcugggacugcaggc

SEQ ID NO: 640368 - RNA, 24 nt, Human
aaucaaacuccuuacugagaccug

SEQ ID NO: 640369 - RNA, 21 nt, Human
aaucacuguuaaaaugauuug

SEQ ID NO: 640370 - RNA, 22 nt, Human
aaucucucuucugcaugcaguu

SEQ ID NO: 640371 - RNA, 21 nt, Human
aauucucgugccucggccucc

SEQ ID NO: 640372 - RNA, 24 nt, Human
acagggucucaccauguuggccag

SEQ ID NO: 640373 - RNA, 24 nt, Human
accaagcuauuguucugaaaacug

SEQ ID NO: 640374 - RNA, 18 nt, Human
accauguuggccaggcug

SEQ ID NO: 640375 - RNA, 20 nt, Human
acccaggcuggaguacuagu

SEQ ID NO: 640376 - RNA, 18 nt, Human
acccuugggggcaauuuu

SEQ ID NO: 640377 - RNA, 21 nt, Human
acuguaaccucugccuccugg

SEQ ID NO: 640378 - RNA, 22 nt, Human
acuguaaccucugccuccuggg

SEQ ID NO: 640379 - RNA, 23 nt, Human
agcaauucucgugccucggccuc

SEQ ID NO: 640380 - RNA, 22 nt, Human
agcagagacagggucucaccau

SEQ ID NO: 640381 - RNA, 24 nt, Human
aggugauccacccgcuucagccuc

SEQ ID NO: 640382 - RNA, 18 nt, Human
auggaugguggugauggc

SEQ ID NO: 640383 - RNA, 23 nt, Human
augucgugccuccugagucucac

SEQ ID NO: 640384 - RNA, 20 nt, Human
auguugaaaaaguucuggag

SEQ ID NO: 640385 - RNA, 26 nt, Human
caaacuucugaccucaggugauccaa

SEQ ID NO: 640386 - RNA, 24 nt, Human
caaagugcuggguuuacaggcaug

SEQ ID NO: 640387 - RNA, 28 nt, Human
caagcaauucucgugccucggccuccca

SEQ ID NO: 640388 - RNA, 19 nt, Human
cacagcccugcccaccucu

SEQ ID NO: 640389 - RNA, 20 nt, Human
cacagcccugcccaccucuc

SEQ ID NO: 640390 - RNA, 24 nt, Human
caccacaucuggcuaauuuuugua

SEQ ID NO: 640391 - RNA, 20 nt, Human
caccaugccuggccaagacu

SEQ ID NO: 640392 - RNA, 21 nt, Human
caccauguuggccaggcuggu

SEQ ID NO: 640393 - RNA, 24 nt, Human
caccauguuggccaggcuggucuc

SEQ ID NO: 640394 - RNA, 21 nt, Human
cagaaagcuccugccucccuc

SEQ ID NO: 640395 - RNA, 22 nt, Human
cagagacagggucucaccaugu

SEQ ID NO: 640396 - RNA, 18 nt, Human
caggcuuaugccaccaca

SEQ ID NO: 640397 - RNA, 24 nt, Human
cagggucucaccauguuggccagg

SEQ ID NO: 640398 - RNA, 24 nt, Human
cauguuggccaggcuggucucaaa

SEQ ID NO: 640399 - RNA, 24 nt, Human
ccaaagugcuggguuuacaggcau

SEQ ID NO: 640400 - RNA, 20 nt, Human
ccaccacaucuggcuaauuu

SEQ ID NO: 640401 - RNA, 20 nt, Human
ccaccaugccuggccaagac

SEQ ID NO: 640402 - RNA, 27 nt, Human
ccacccaaaaaauauuuuugccuaaaa

SEQ ID NO: 640403 - RNA, 18 nt, Human
cccaaaaaauauuuuugc

SEQ ID NO: 640404 - RNA, 24 nt, Human
cccaaguagcugggacugcaggcu

SEQ ID NO: 640405 - RNA, 22 nt, Human
cccaccucuccagccucauguc

SEQ ID NO: 640406 - RNA, 24 nt, Human
ccgcuucagccucccaaagugcug

SEQ ID NO: 640407 - RNA, 22 nt, Human
ccuacucaugaugcuccucccg

SEQ ID NO: 640408 - RNA, 22 nt, Human
ccuccuacucaugaugcuccuc

SEQ ID NO: 640409 - RNA, 22 nt, Human
ccuccuggguucaagcaauucu

SEQ ID NO: 640410 - RNA, 19 nt, Human
ccucugccuccuggguuca

SEQ ID NO: 640411 - RNA, 20 nt, Human
ccuggguucaagcaauucuc

SEQ ID NO: 640412 - RNA, 24 nt, Human
cgcuucagccucccaaagugcugg

SEQ ID NO: 640413 - RNA, 21 nt, Human
cuaaaauacugaaucaaaauc

SEQ ID NO: 640414 - RNA, 23 nt, Human
cuaauuuuuguauuuuuagcaga

SEQ ID NO: 640415 - RNA, 30 nt, Human
cuccagccucaugucgugccuccugagucu

SEQ ID NO: 640416 - RNA, 21 nt, Human
cuccaguuucauuuuuauucc

SEQ ID NO: 640417 - RNA, 22 nt, Human
cuccaguuucauuuuuauuccu

SEQ ID NO: 640418 - RNA, 21 nt, Human
cuccuggguucaagcaauucu

SEQ ID NO: 640419 - RNA, 24 nt, Human
cucggccucccaaguagcugggac

SEQ ID NO: 640420 - RNA, 25 nt, Human
cucgugccucggccucccaaguagc

SEQ ID NO: 640421 - RNA, 21 nt, Human
cugaccucaggugauccaccc

SEQ ID NO: 640422 - RNA, 21 nt, Human
cugcacagcccugcccaccuc

SEQ ID NO: 640423 - RNA, 18 nt, Human
cugcuggggguggggggg

SEQ ID NO: 640424 - RNA, 18 nt, Human
cugggggugggggggggg

SEQ ID NO: 640425 - RNA, 24 nt, Human
cuguaaccucugccuccuggguuc

SEQ ID NO: 640426 - RNA, 22 nt, Human
cuugauggagaaguuuaugaug

SEQ ID NO: 640427 - RNA, 24 nt, Human
cuugcucugucacccaggcuggag

SEQ ID NO: 640428 - RNA, 18 nt, Human
gaaagugcuuaaucaaag

SEQ ID NO: 640429 - RNA, 24 nt, Human
gaccucaggugauccacccgcuuc

SEQ ID NO: 640430 - RNA, 24 nt, Human
gaccugcacagcccugcccaccuc

SEQ ID NO: 640431 - RNA, 21 nt, Human
gagauggagucuugcucuguc

SEQ ID NO: 640432 - RNA, 21 nt, Human
gagguguuaaggcaccaagcu

SEQ ID NO: 640433 - RNA, 18 nt, Human
gcaccaagcuauuguucu

SEQ ID NO: 640434 - RNA, 18 nt, Human
gccacugaaauguauaau

SEQ ID NO: 640435 - RNA, 20 nt, Human
gcccugcccaccucuccagc

SEQ ID NO: 640436 - RNA, 24 nt, Human
gcccugcccaccucuccagccuca

SEQ ID NO: 640437 - RNA, 21 nt, Human
gccucggccucccaaguagcu

SEQ ID NO: 640438 - RNA, 26 nt, Human
gcucugucacccaggcuggaguacua

SEQ ID NO: 640439 - RNA, 20 nt, Human
gcuggggguggggggggggg

SEQ ID NO: 640440 - RNA, 24 nt, Human
ggcuggucucaaacuucugaccuc

SEQ ID NO: 640441 - RNA, 18 nt, Human
gggggugggggggggggg

SEQ ID NO: 640442 - RNA, 22 nt, Human
gggucucaccauguuggccagg

SEQ ID NO: 640443 - RNA, 19 nt, Human
ggucucaaacuucugaccu

SEQ ID NO: 640444 - RNA, 20 nt, Human
ggugaaacuugauggagaag

SEQ ID NO: 640445 - RNA, 24 nt, Human
gguuuacaggcaugagccaccaug

SEQ ID NO: 640446 - RNA, 24 nt, Human
gugauccacccgcuucagccuccc

SEQ ID NO: 640447 - RNA, 22 nt, Human
gugccucggccucccaaguagc

SEQ ID NO: 640448 - RNA, 23 nt, Human
gugccucggccucccaaguagcu

SEQ ID NO: 640449 - RNA, 24 nt, Human
guuuacaggcaugagccaccaugc

SEQ ID NO: 640450 - RNA, 19 nt, Human
uaaaaugauuuggugaaac

SEQ ID NO: 640451 - RNA, 22 nt, Human
uaaaaugauuuggugaaacuug

SEQ ID NO: 640452 - RNA, 21 nt, Human
uaauguacuuaugccacugaa

SEQ ID NO: 640453 - RNA, 24 nt, Human
uaauuuuuguauuuuuagcagaga

SEQ ID NO: 640454 - RNA, 22 nt, Human
uacaggcaugagccaccaugcc

SEQ ID NO: 640455 - RNA, 21 nt, Human
uacuguaaccucugccuccug

SEQ ID NO: 640456 - RNA, 23 nt, Human
uacuguaaccucugccuccuggg

SEQ ID NO: 640457 - RNA, 19 nt, Human
uagacccuugggggcaauu

SEQ ID NO: 640458 - RNA, 21 nt, Human
uagacccuugggggcaauuuu

SEQ ID NO: 640459 - RNA, 26 nt, Human
uagcagagacagggucucaccauguu

SEQ ID NO: 640460 - RNA, 25 nt, Human
uauaugccuaucauugugacaaaau

SEQ ID NO: 640461 - RNA, 21 nt, Human
uccacccgcuucagccuccca

SEQ ID NO: 640462 - RNA, 24 nt, Human
ucccaaagugcuggguuuacaggc

SEQ ID NO: 640463 - RNA, 24 nt, Human
ucccaaguagcugggacugcaggc

SEQ ID NO: 640464 - RNA, 23 nt, Human
ucccguucauccuuuagcucuca

SEQ ID NO: 640465 - RNA, 21 nt, Human
uccuggguucaagcaauucuc

SEQ ID NO: 640466 - RNA, 24 nt, Human
uccuggguucaagcaauucucgug

SEQ ID NO: 640467 - RNA, 24 nt, Human
ucucaccauguuggccaggcuggu

SEQ ID NO: 640468 - RNA, 24 nt, Human
ucugccuccuggguucaagcaauu

SEQ ID NO: 640469 - RNA, 18 nt, Human
ucugucacccaggcugga

SEQ ID NO: 640470 - RNA, 23 nt, Human
ucuugcucugucacccaggcugg

SEQ ID NO: 640471 - RNA, 24 nt, Human
ucuugcucugucacccaggcugga

SEQ ID NO: 640472 - RNA, 20 nt, Human
ugaaaucaagcauuuauccc

SEQ ID NO: 640473 - RNA, 21 nt, Human
ugaccucaggugauccacccg

SEQ ID NO: 640474 - RNA, 22 nt, Human
ugaccucaggugauccacccgc

SEQ ID NO: 640475 - RNA, 23 nt, Human
ugaccucaggugauccacccgcu

SEQ ID NO: 640476 - RNA, 24 nt, Human
ugaccucaggugauccacccgcuu

SEQ ID NO: 640477 - RNA, 21 nt, Human
ugccccaagcucuuuacacac

SEQ ID NO: 640478 - RNA, 18 nt, Human
ugccuccugagucucacu

SEQ ID NO: 640479 - RNA, 21 nt, Human
ugccucggccucccaaguagc

SEQ ID NO: 640480 - RNA, 24 nt, Human
ugccucggccucccaaguagcugg

SEQ ID NO: 640481 - RNA, 22 nt, Human
ugcucugucacccaggcuggag

SEQ ID NO: 640482 - RNA, 19 nt, Human
uggagucuugcucugucac

SEQ ID NO: 640483 - RNA, 24 nt, Human
uggccaggcuggucucaaacuucu

SEQ ID NO: 640484 - RNA, 18 nt, Human
uggcugcacaacauuguu

SEQ ID NO: 640485 - RNA, 24 nt, Human
ugggacugcaggcuuaugccacca

SEQ ID NO: 640486 - RNA, 22 nt, Human
uggguuuacaggcaugagccac

SEQ ID NO: 640487 - RNA, 23 nt, Human
uggguuuacaggcaugagccacc

SEQ ID NO: 640488 - RNA, 24 nt, Human
uggguuuacaggcaugagccacca

SEQ ID NO: 640489 - RNA, 21 nt, Human
uggugaaacuugauggagaag

SEQ ID NO: 640490 - RNA, 22 nt, Human
uguuaugcauauucuaccacaa

SEQ ID NO: 640491 - RNA, 22 nt, Human
uguuccuuuaaaguuucagguu

SEQ ID NO: 640492 - RNA, 20 nt, Human
uuaaucaaagaaaauuagcc

SEQ ID NO: 640493 - RNA, 24 nt, Human
uuacuguaaccucugccuccuggg

SEQ ID NO: 640494 - RNA, 25 nt, Human
uuacuguaaccucugccuccugggu

SEQ ID NO: 640495 - RNA, 23 nt, Human
uucaguuugggauguugaaaaag

SEQ ID NO: 640496 - RNA, 26 nt, Human
uucugaaaacugcugggggugggggg

SEQ ID NO: 640497 - RNA, 24 nt, Human
uugcucugucacccaggcuggagu

SEQ ID NO: 640498 - RNA, 18 nt, Human
uuggucuaagugaguuag

SEQ ID NO: 640499 - RNA, 24 nt, Human
uuuacuguaaccucugccuccugg

SEQ ID NO: 640500 - RNA, 22 nt, Human
uuucauaggucuuuucaaacgu

SEQ ID NO: 640501 - RNA, 23 nt, Human
uuuggugaaacuugauggagaag

SEQ ID NO: 640502 - RNA, 20 nt, Human
uuuuuguauuuuuagcagag

SEQ ID NO: 640503 - RNA, 23 nt, Human
uuuuuguauuuuuagcagagaca

SEQ ID NO: 640504 - RNA, 25 nt, Human
uuuuuuuuuuuuagagauggagucu

SEQ ID NO: 640505 - RNA, 18 nt, Human
aacuaaauaauucacagc

SEQ ID NO: 640506 - RNA, 23 nt, Human
agcuacaaaacaauaacuaaaua

SEQ ID NO: 640507 - RNA, 24 nt, Human
augauaugggugaaugcccuuuau

SEQ ID NO: 640508 - RNA, 20 nt, Human
caaaacaauaacuaaauaau

SEQ ID NO: 640509 - RNA, 21 nt, Human
cagcuacaaaacaauaacuaa

SEQ ID NO: 640510 - RNA, 21 nt, Human
uaaauaauucacagccaugaa

SEQ ID NO: 640511 - RNA, 22 nt, Human
uaaauaauucacagccaugaaa

SEQ ID NO: 640512 - RNA, 19 nt, Human
uacaaaacaauaacuaaau

SEQ ID NO: 640513 - RNA, 18 nt, Human
ugaaugcccuuuauuuuu

SEQ ID NO: 640514 - RNA, 23 nt, Human
ugauaugggugaaugcccuuuau

SEQ ID NO: 640515 - RNA, 18 nt, Human
ugcacuggagaaucagug

SEQ ID NO: 640516 - RNA, 21 nt, Human
uuacagcuacaaaacaauaac

SEQ ID NO: 640517 - RNA, 25 nt, Human
uuacagcuacaaaacaauaacuaaa

SEQ ID NO: 640518 - RNA, 24 nt, Human
uuuuuuuuuuuuuuuccuugauua

SEQ ID NO: 640519 - RNA, 27 nt, Human
uuuuuuuuuuuuuuuuuuuccuugggg

SEQ ID NO: 640520 - RNA, 25 nt, Human
uuuuuuuuuuuuuuuuuuuuuccuu

SEQ ID NO: 640521 - RNA, 22 nt, Human
aaacacauacagcaagcuacga

SEQ ID NO: 640522 - RNA, 21 nt, Human
aaacaggcacaggcugcccuu

SEQ ID NO: 640523 - RNA, 26 nt, Human
aaacaggcacaggcugcccuuuggua

SEQ ID NO: 640524 - RNA, 24 nt, Human
aaacucgagaacacagaacaacaa

SEQ ID NO: 640525 - RNA, 19 nt, Human
aaagaaaaagcuccacuga

SEQ ID NO: 640526 - RNA, 19 nt, Human
aaagagccuggaucaaaac

SEQ ID NO: 640527 - RNA, 24 nt, Human
aacaaaaauaacuuccuugaacau

SEQ ID NO: 640528 - RNA, 21 nt, Human
aacacagaacaacaacaaaaa

SEQ ID NO: 640529 - RNA, 22 nt, Human
aaccugagggcaggcacauggu

SEQ ID NO: 640530 - RNA, 29 nt, Human
aacgcggcaggcccgggucccgggcggca

SEQ ID NO: 640531 - RNA, 24 nt, Human
aagaaaaagcuccacugaaaaaaa

SEQ ID NO: 640532 - RNA, 22 nt, Human
aagaguuaaaauaagcucaaag

SEQ ID NO: 640533 - RNA, 19 nt, Human
aagcaaguuuaauucucca

SEQ ID NO: 640534 - RNA, 22 nt, Human
aaggggucaaagccaagguuuc

SEQ ID NO: 640535 - RNA, 22 nt, Human
aauaaagaauaaacacauacag

SEQ ID NO: 640536 - RNA, 20 nt, Human
aauaaagugaaccaaaaaaa

SEQ ID NO: 640537 - RNA, 23 nt, Human
aauacaaacaaaaauaacugccu

SEQ ID NO: 640538 - RNA, 19 nt, Human
aaugggacuggcuggaggg

SEQ ID NO: 640539 - RNA, 21 nt, Human
acaaaaauaacuuccuugaac

SEQ ID NO: 640540 - RNA, 18 nt, Human
acaccagcaaccuacacg

SEQ ID NO: 640541 - RNA, 19 nt, Human
acuauucgaagggcaugau

SEQ ID NO: 640542 - RNA, 19 nt, Human
acuccaccaccaccgugag

SEQ ID NO: 640543 - RNA, 18 nt, Human
acuccugaaaacaaagag

SEQ ID NO: 640544 - RNA, 20 nt, Human
agagcaguacuauucgaagg

SEQ ID NO: 640545 - RNA, 21 nt, Human
agaguuaaaauaagcucaaag

SEQ ID NO: 640546 - RNA, 18 nt, Human
agccuggcccgauggcug

SEQ ID NO: 640547 - RNA, 23 nt, Human
aggaaaacuuauuuaagggaggc

SEQ ID NO: 640548 - RNA, 22 nt, Human
aggagguugccucugaccuucc

SEQ ID NO: 640549 - RNA, 19 nt, Human
aggcccgggucccgggcgg

SEQ ID NO: 640550 - RNA, 25 nt, Human
agguuugugaggaauauaggagagu

SEQ ID NO: 640551 - RNA, 23 nt, Human
aguauaagagguaguaggaggaa

SEQ ID NO: 640552 - RNA, 20 nt, Human
auaauuuggggagaugagua

SEQ ID NO: 640553 - RNA, 22 nt, Human
auacugucgaaauacaaacaaa

SEQ ID NO: 640554 - RNA, 18 nt, Human
auggcuaacaggucacgu

SEQ ID NO: 640555 - RNA, 22 nt, Human
augggacuggcuggaggggcca

SEQ ID NO: 640556 - RNA, 23 nt, Human
caaagaaaaagcuccacugaaaa

SEQ ID NO: 640557 - RNA, 20 nt, Human
caaaggcagagaggauccau

SEQ ID NO: 640558 - RNA, 21 nt, Human
caauagauggaugagacaugc

SEQ ID NO: 640559 - RNA, 21 nt, Human
caccacuacauauugcaggaa

SEQ ID NO: 640560 - RNA, 22 nt, Human
cacgagaaggggucaaagccaa

SEQ ID NO: 640561 - RNA, 23 nt, Human
cagcaaccuacacguguagcauu

SEQ ID NO: 640562 - RNA, 21 nt, Human
cagccccaucccuccaggcaa

SEQ ID NO: 640563 - RNA, 19 nt, Human
caguuagauuagaauggaa

SEQ ID NO: 640564 - RNA, 22 nt, Human
cauccaagaacuccaccaccac

SEQ ID NO: 640565 - RNA, 19 nt, Human
ccaaaaaaauuacaaagac

SEQ ID NO: 640566 - RNA, 19 nt, Human
ccaccaccgugagcccggc

SEQ ID NO: 640567 - RNA, 18 nt, Human
ccauaaacaggcacaggc

SEQ ID NO: 640568 - RNA, 21 nt, Human
ccccaaagcugaaagcaauaa

SEQ ID NO: 640569 - RNA, 20 nt, Human
cccugugcaggucccagggc

SEQ ID NO: 640570 - RNA, 18 nt, Human
ccggccuccgguuucauc

SEQ ID NO: 640571 - RNA, 24 nt, Human
ccgggucccgggcggcauggcccc

SEQ ID NO: 640572 - RNA, 18 nt, Human
ccuccucacccaggcugg

SEQ ID NO: 640573 - RNA, 24 nt, Human
ccuggaucaaaacuggaagugacc

SEQ ID NO: 640574 - RNA, 22 nt, Human
ccuggcccgauggcugaagcug

SEQ ID NO: 640575 - RNA, 23 nt, Human
cgaugaacacaagucacaggucc

SEQ ID NO: 640576 - RNA, 24 nt, Human
cgcggcaggcccgggucccgggcg

SEQ ID NO: 640577 - RNA, 21 nt, Human
cggccccgccgcccgcagccc

SEQ ID NO: 640578 - RNA, 24 nt, Human
cggccggggcgcggaacgcggcag

SEQ ID NO: 640579 - RNA, 23 nt, Human
cggccuccgguuucaucuuuccc

SEQ ID NO: 640580 - RNA, 19 nt, Human
cgggcggcauggccccuac

SEQ ID NO: 640581 - RNA, 19 nt, Human
cggggcgcggaacgcggca

SEQ ID NO: 640582 - RNA, 24 nt, Human
cuccaggaagagaaauuagauuuc

SEQ ID NO: 640583 - RNA, 18 nt, Human
cugaccacagaauuagca

SEQ ID NO: 640584 - RNA, 18 nt, Human
cuggagcaaguccgcugc

SEQ ID NO: 640585 - RNA, 19 nt, Human
cuggagcaaguccgcugca

SEQ ID NO: 640586 - RNA, 22 nt, Human
gaaauacaaacaaaaauaacug

SEQ ID NO: 640587 - RNA, 24 nt, Human
gaaauacaaacaaaaauaacugcc

SEQ ID NO: 640588 - RNA, 18 nt, Human
gaacaaauuccuccagga

SEQ ID NO: 640589 - RNA, 20 nt, Human
gaacaggggaggagguugcc

SEQ ID NO: 640590 - RNA, 20 nt, Human
gaccagcuuaccuucuagga

SEQ ID NO: 640591 - RNA, 23 nt, Human
gacucuucucuugcagugcucug

SEQ ID NO: 640592 - RNA, 20 nt, Human
gagaacacagaacaacaaca

SEQ ID NO: 640593 - RNA, 22 nt, Human
gagaggauccauaaacaggcac

SEQ ID NO: 640594 - RNA, 19 nt, Human
gaggaagcuaagggaaauc

SEQ ID NO: 640595 - RNA, 20 nt, Human
gcaggcccgggucccgggcg

SEQ ID NO: 640596 - RNA, 19 nt, Human
gcaguuagauuagaaugga

SEQ ID NO: 640597 - RNA, 25 nt, Human
gcccgggucccgggcggcauggccc

SEQ ID NO: 640598 - RNA, 19 nt, Human
gccuccucacccaggcugg

SEQ ID NO: 640599 - RNA, 19 nt, Human
gcgcggacguggggcgcgg

SEQ ID NO: 640600 - RNA, 18 nt, Human
gcggaacgcggcaggccc

SEQ ID NO: 640601 - RNA, 21 nt, Human
gcuggaggggccaagcugcuu

SEQ ID NO: 640602 - RNA, 22 nt, Human
ggaauccgagaaguccaaugca

SEQ ID NO: 640603 - RNA, 19 nt, Human
ggagguugccucugaccuu

SEQ ID NO: 640604 - RNA, 20 nt, Human
ggcagguguaagacucuucu

SEQ ID NO: 640605 - RNA, 18 nt, Human
ggcccccgaugaacacaa

SEQ ID NO: 640606 - RNA, 20 nt, Human
ggcgcggcggccggggcgcg

SEQ ID NO: 640607 - RNA, 23 nt, Human
ggggucaaagccaagguuuccuc

SEQ ID NO: 640608 - RNA, 21 nt, Human
gguaguaggaggaagcuaagg

SEQ ID NO: 640609 - RNA, 21 nt, Human
gucccaggaggcgaguucuuc

SEQ ID NO: 640610 - RNA, 24 nt, Human
guguaagacucuucucuugcagaa

SEQ ID NO: 640611 - RNA, 18 nt, Human
uaaacaggcacaggcugc

SEQ ID NO: 640612 - RNA, 23 nt, Human
uaaagaauaaacacauacagcaa

SEQ ID NO: 640613 - RNA, 25 nt, Human
uaaagugaaccaaaaaaauuacaaa

SEQ ID NO: 640614 - RNA, 23 nt, Human
uaacuccugaaacucgagaacac

SEQ ID NO: 640615 - RNA, 18 nt, Human
uaauuuggggagaugagu

SEQ ID NO: 640616 - RNA, 21 nt, Human
uacacgucaggauauggcuaa

SEQ ID NO: 640617 - RNA, 26 nt, Human
uacagccccaaagcugaaagcaauaa

SEQ ID NO: 640618 - RNA, 18 nt, Human
uacagugaaagagccugg

SEQ ID NO: 640619 - RNA, 24 nt, Human
uaccacuggaaaauaaccugaggg

SEQ ID NO: 640620 - RNA, 22 nt, Human
uacccuggcugaguagcccaca

SEQ ID NO: 640621 - RNA, 21 nt, Human
uaccuguuacagccccaaagc

SEQ ID NO: 640622 - RNA, 19 nt, Human
uagaauguucccauuacuc

SEQ ID NO: 640623 - RNA, 23 nt, Human
uauggcccaaagaaaaagcucca

SEQ ID NO: 640624 - RNA, 20 nt, Human
uauguugcucaagaguuaaa

SEQ ID NO: 640625 - RNA, 19 nt, Human
uauucuagaccuugagccg

SEQ ID NO: 640626 - RNA, 19 nt, Human
ucaaaggagaggcugauuc

SEQ ID NO: 640627 - RNA, 18 nt, Human
ucacauuaaaucuauguu

SEQ ID NO: 640628 - RNA, 21 nt, Human
ucacccaggcuggagcaaguc

SEQ ID NO: 640629 - RNA, 22 nt, Human
ucccaggaggcgaguucuucag

SEQ ID NO: 640630 - RNA, 21 nt, Human
ucccgggcggcauggccccua

SEQ ID NO: 640631 - RNA, 20 nt, Human
ucccuccaggcaggcgccgg

SEQ ID NO: 640632 - RNA, 25 nt, Human
ucccuccaggcaggcgccggccccc

SEQ ID NO: 640633 - RNA, 23 nt, Human
ucuaggaaaacuuauuuaaggga

SEQ ID NO: 640634 - RNA, 20 nt, Human
ucuauguuauguugcucaag

SEQ ID NO: 640635 - RNA, 22 nt, Human
ucugcuaaaacagugcucucca

SEQ ID NO: 640636 - RNA, 20 nt, Human
ucuuccugcagccuggcccg

SEQ ID NO: 640637 - RNA, 18 nt, Human
ucuucuuccugcagccug

SEQ ID NO: 640638 - RNA, 28 nt, Human
ugaaaaaaacauugaauacugaccacag

SEQ ID NO: 640639 - RNA, 23 nt, Human
ugaaagcaauaaagaauaaacac

SEQ ID NO: 640640 - RNA, 21 nt, Human
ugagaacaaauuccuccagga

SEQ ID NO: 640641 - RNA, 18 nt, Human
ugagaacaaauuccuccc

SEQ ID NO: 640642 - RNA, 18 nt, Human
ugagggcaggcacauggu

SEQ ID NO: 640643 - RNA, 22 nt, Human
ugaguagcccacaguuaauuuu

SEQ ID NO: 640644 - RNA, 22 nt, Human
ugcaaacacauggaauccgaga

SEQ ID NO: 640645 - RNA, 18 nt, Human
uggaauccgagaagucca

SEQ ID NO: 640646 - RNA, 25 nt, Human
uggcaaaagaaaugagaacaaauuc

SEQ ID NO: 640647 - RNA, 19 nt, Human
uggcuggaggggccaagcu

SEQ ID NO: 640648 - RNA, 18 nt, Human
uggggagugcuuuaugcc

SEQ ID NO: 640649 - RNA, 19 nt, Human
uggggcgcggcggccgggg

SEQ ID NO: 640650 - RNA, 24 nt, Human
ugugcaggucccagggcugaguca

SEQ ID NO: 640651 - RNA, 24 nt, Human
uuccugaggcucccacuguacccu

SEQ ID NO: 640652 - RNA, 21 nt, Human
uuccugcagccuggcccgaug

SEQ ID NO: 640653 - RNA, 18 nt, Human
uucgaagggcaugauguc

SEQ ID NO: 640654 - RNA, 18 nt, Human
aaaauucucccucccucc

SEQ ID NO: 640655 - RNA, 19 nt, Human
aaacguucaaguucuucuc

SEQ ID NO: 640656 - RNA, 24 nt, Human
aaccaccagcuaaacuguuucgcc

SEQ ID NO: 640657 - RNA, 21 nt, Human
aacucaucuuuccuaauccaa

SEQ ID NO: 640658 - RNA, 21 nt, Human
aaguauaguuagggcagugau

SEQ ID NO: 640659 - RNA, 21 nt, Human
acaaugacacccuaacuagag

SEQ ID NO: 640660 - RNA, 18 nt, Human
accaagacaguguaccag

SEQ ID NO: 640661 - RNA, 18 nt, Human
agaagccaguuugccaag

SEQ ID NO: 640662 - RNA, 20 nt, Human
agagaguguuccagagcucc

SEQ ID NO: 640663 - RNA, 26 nt, Human
agagcuccuccauggccuccagcacc

SEQ ID NO: 640664 - RNA, 21 nt, Human
agaggcugcuacuucuguugg

SEQ ID NO: 640665 - RNA, 22 nt, Human
agagggaaauuuagagaguguu

SEQ ID NO: 640666 - RNA, 23 nt, Human
agauccuuccagcuuuggggugu

SEQ ID NO: 640667 - RNA, 22 nt, Human
agaugccuuucuggaaccccaa

SEQ ID NO: 640668 - RNA, 18 nt, Human
agggaaauuuagagagug

SEQ ID NO: 640669 - RNA, 21 nt, Human
agggauuaauacuguucuuua

SEQ ID NO: 640670 - RNA, 22 nt, Human
agggcuauacucucugccccau

SEQ ID NO: 640671 - RNA, 23 nt, Human
agucauguaccacgcagagcccc

SEQ ID NO: 640672 - RNA, 19 nt, Human
agugagguucagugagugc

SEQ ID NO: 640673 - RNA, 20 nt, Human
aguuuuggggcuccucuggu

SEQ ID NO: 640674 - RNA, 25 nt, Human
auaaagucuuauuuaaacaguuaga

SEQ ID NO: 640675 - RNA, 20 nt, Human
auauucccaaacaccuacug

SEQ ID NO: 640676 - RNA, 25 nt, Human
aucccaaagugcaugaccgaagagc

SEQ ID NO: 640677 - RNA, 19 nt, Human
augaagcuguagagguccc

SEQ ID NO: 640678 - RNA, 20 nt, Human
caagaggaagucauuauccu

SEQ ID NO: 640679 - RNA, 24 nt, Human
caagaucagaauuccaugaaccag

SEQ ID NO: 640680 - RNA, 22 nt, Human
cacagagcaagcaagccucuga

SEQ ID NO: 640681 - RNA, 22 nt, Human
cacauaccacuccccucuaccu

SEQ ID NO: 640682 - RNA, 23 nt, Human
cagaagccaguuugccaagggga

SEQ ID NO: 640683 - RNA, 22 nt, Human
cagagaaagguccauuucuauu

SEQ ID NO: 640684 - RNA, 22 nt, Human
caugaaccagauccuuucccca

SEQ ID NO: 640685 - RNA, 22 nt, Human
caugcaagaggaagucauuauc

SEQ ID NO: 640686 - RNA, 20 nt, Human
cauguaccacgcagagcccc

SEQ ID NO: 640687 - RNA, 23 nt, Human
cauuuaaaaucacacucccaccc

SEQ ID NO: 640688 - RNA, 18 nt, Human
ccaaccuucuaugauccc

SEQ ID NO: 640689 - RNA, 23 nt, Human
ccaaccuucuaugauccccaaaa

SEQ ID NO: 640690 - RNA, 18 nt, Human
cccacauacacacccgaa

SEQ ID NO: 640691 - RNA, 21 nt, Human
cccacgaggcugucaaaguuu

SEQ ID NO: 640692 - RNA, 23 nt, Human
cccgcaagugccgcaggcccugg

SEQ ID NO: 640693 - RNA, 19 nt, Human
cccucccucccuuaccccu

SEQ ID NO: 640694 - RNA, 19 nt, Human
cccucuaccucaggccucc

SEQ ID NO: 640695 - RNA, 21 nt, Human
cccugggccgucacaaagccc

SEQ ID NO: 640696 - RNA, 23 nt, Human
ccuacugaggacaccagucccca

SEQ ID NO: 640697 - RNA, 24 nt, Human
ccuuauccagaaccaaaacguuca

SEQ ID NO: 640698 - RNA, 21 nt, Human
cgugcuguugcucccaagaaa

SEQ ID NO: 640699 - RNA, 19 nt, Human
cuccccucuaccucaggcc

SEQ ID NO: 640700 - RNA, 18 nt, Human
cucuaccucaggccuccc

SEQ ID NO: 640701 - RNA, 19 nt, Human
cucuaccucaggccuccca

SEQ ID NO: 640702 - RNA, 20 nt, Human
cucucaaaugacaaugacac

SEQ ID NO: 640703 - RNA, 18 nt, Human
cugcaccuauacgcuguc

SEQ ID NO: 640704 - RNA, 21 nt, Human
cuucccauauucccaaacacc

SEQ ID NO: 640705 - RNA, 21 nt, Human
gacaguaaccuaagacucgag

SEQ ID NO: 640706 - RNA, 18 nt, Human
gagaagaaagaaccacca

SEQ ID NO: 640707 - RNA, 22 nt, Human
gcacuauuuuggugguucaccu

SEQ ID NO: 640708 - RNA, 19 nt, Human
gccuuuaucuaacauccug

SEQ ID NO: 640709 - RNA, 20 nt, Human
gcucgguccaccuagcaccu

SEQ ID NO: 640710 - RNA, 19 nt, Human
ggagaagaaagaaccacca

SEQ ID NO: 640711 - RNA, 21 nt, Human
ggcuauacucucugccccauu

SEQ ID NO: 640712 - RNA, 22 nt, Human
ggcuuuaagaguucugcuggcu

SEQ ID NO: 640713 - RNA, 18 nt, Human
gggaagagggaaaauacu

SEQ ID NO: 640714 - RNA, 21 nt, Human
gggauuaauacuguucuuuau

SEQ ID NO: 640715 - RNA, 22 nt, Human
gggcugcaccuauacgcuguau

SEQ ID NO: 640716 - RNA, 24 nt, Human
ggggaagagggaaaauacugaaaa

SEQ ID NO: 640717 - RNA, 19 nt, Human
gucaucccaagucuuugau

SEQ ID NO: 640718 - RNA, 22 nt, Human
gugcaugaccgaagagcaaguc

SEQ ID NO: 640719 - RNA, 20 nt, Human
gugucagucucucaaaugac

SEQ ID NO: 640720 - RNA, 20 nt, Human
uaaaaugccacaccacucuu

SEQ ID NO: 640721 - RNA, 23 nt, Human
uaaagugagguucagugagugcu

SEQ ID NO: 640722 - RNA, 22 nt, Human
uacaaaaauucucccucccucc

SEQ ID NO: 640723 - RNA, 19 nt, Human
uaccacuccccucuaccuc

SEQ ID NO: 640724 - RNA, 22 nt, Human
uaccacuccccucuaccucagg

SEQ ID NO: 640725 - RNA, 24 nt, Human
uaccucacucccuggcaauaacau

SEQ ID NO: 640726 - RNA, 26 nt, Human
uaccucaggccucccaaagggagugg

SEQ ID NO: 640727 - RNA, 21 nt, Human
uagagcuccuccauggccucc

SEQ ID NO: 640728 - RNA, 21 nt, Human
uagaucccaagaauaagccag

SEQ ID NO: 640729 - RNA, 23 nt, Human
uagaucccaagaauaagccaggg

SEQ ID NO: 640730 - RNA, 23 nt, Human
uagaugagcucaggagaaaccug

SEQ ID NO: 640731 - RNA, 23 nt, Human
uaggacagugaccuuauccagaa

SEQ ID NO: 640732 - RNA, 20 nt, Human
uauaaaggggaagagggaaa

SEQ ID NO: 640733 - RNA, 18 nt, Human
uauucugucaggcacugc

SEQ ID NO: 640734 - RNA, 22 nt, Human
uauuuuggugguucaccuaugg

SEQ ID NO: 640735 - RNA, 23 nt, Human
ucaaagggauuaauacuguucuu

SEQ ID NO: 640736 - RNA, 23 nt, Human
ucaaaguuuuggggcuccucugg

SEQ ID NO: 640737 - RNA, 19 nt, Human
ucaggucaagugcacaugg

SEQ ID NO: 640738 - RNA, 19 nt, Human
uccaaaggaagggucuacc

SEQ ID NO: 640739 - RNA, 24 nt, Human
uccacugagucuuuugcucggucc

SEQ ID NO: 640740 - RNA, 24 nt, Human
uccagcaccccuuuaccagcugcu

SEQ ID NO: 640741 - RNA, 19 nt, Human
ucccaaacaccuacugagg

SEQ ID NO: 640742 - RNA, 22 nt, Human
ucccaaacaccuacugaggaca

SEQ ID NO: 640743 - RNA, 26 nt, Human
ucccaaacaccuacugaggacaccag

SEQ ID NO: 640744 - RNA, 21 nt, Human
uccccaugcucaggaccucca

SEQ ID NO: 640745 - RNA, 21 nt, Human
uccggggcuaucaccugaucc

SEQ ID NO: 640746 - RNA, 25 nt, Human
uccguacuacaacuggcuuuaagag

SEQ ID NO: 640747 - RNA, 22 nt, Human
uccuccauggccuccagcaccc

SEQ ID NO: 640748 - RNA, 22 nt, Human
ucucucaaaugacaaugacacc

SEQ ID NO: 640749 - RNA, 24 nt, Human
ucucucaaaugacaaugacacccu

SEQ ID NO: 640750 - RNA, 23 nt, Human
ucuuccuagaucccaccuuuugc

SEQ ID NO: 640751 - RNA, 20 nt, Human
ucuuugaugacaguaaccua

SEQ ID NO: 640752 - RNA, 20 nt, Human
ucuuuguucucccaaaagag

SEQ ID NO: 640753 - RNA, 21 nt, Human
ugaccgaagagcaagucuggc

SEQ ID NO: 640754 - RNA, 24 nt, Human
ugagaauacagcaaguagggaaau

SEQ ID NO: 640755 - RNA, 20 nt, Human
ugauauggaucagaagccag

SEQ ID NO: 640756 - RNA, 21 nt, Human
ugauauggaucagaagccagu

SEQ ID NO: 640757 - RNA, 18 nt, Human
ugauuuauuuuuguuuuu

SEQ ID NO: 640758 - RNA, 22 nt, Human
ugcaagggcgagggaggaaaau

SEQ ID NO: 640759 - RNA, 21 nt, Human
ugcacagagcaagcaagccuc

SEQ ID NO: 640760 - RNA, 19 nt, Human
ugcacguagacacacacau

SEQ ID NO: 640761 - RNA, 19 nt, Human
ugcacuccauccuuugagg

SEQ ID NO: 640762 - RNA, 19 nt, Human
ugccacaccacucuuaucc

SEQ ID NO: 640763 - RNA, 18 nt, Human
ugcccacauacacacccg

SEQ ID NO: 640764 - RNA, 19 nt, Human
ugccuuucuggaaccccaa

SEQ ID NO: 640765 - RNA, 20 nt, Human
uggcaauaacauaccauugu

SEQ ID NO: 640766 - RNA, 18 nt, Human
uggcuggcucccaugccu

SEQ ID NO: 640767 - RNA, 22 nt, Human
ugggcacaugcccacauacaca

SEQ ID NO: 640768 - RNA, 21 nt, Human
ugggugacugcacccagaggc

SEQ ID NO: 640769 - RNA, 30 nt, Human
uguauuauugucauagagagagagaaaggg

SEQ ID NO: 640770 - RNA, 21 nt, Human
ugucaccacugggcuagggcu

SEQ ID NO: 640771 - RNA, 23 nt, Human
uguuccagagcuccacagcaagg

SEQ ID NO: 640772 - RNA, 18 nt, Human
uuaauacuguucuuuauu

SEQ ID NO: 640773 - RNA, 18 nt, Human
uuauugucauagagagag

SEQ ID NO: 640774 - RNA, 19 nt, Human
uucaccuaugggccaagau

SEQ ID NO: 640775 - RNA, 22 nt, Human
uucuacacuggauucuuucuuc

SEQ ID NO: 640776 - RNA, 22 nt, Human
uucucccaaaagagcauuuaaa

SEQ ID NO: 640777 - RNA, 24 nt, Human
uugaugcacuccauccuuugaggu

SEQ ID NO: 640778 - RNA, 21 nt, Human
uuuaaaaucacacucccaccc

SEQ ID NO: 640779 - RNA, 25 nt, Human
uuuaaaaugccacaccacucuuauc

SEQ ID NO: 640780 - RNA, 20 nt, Human
uuuuaauagagggaaauuua

SEQ ID NO: 640781 - RNA, 18 nt, Human
uuuugcuggagauugcaa

SEQ ID NO: 640782 - RNA, 22 nt, Human
aacccccgaacguuguggaccu

SEQ ID NO: 640783 - RNA, 22 nt, Human
aacccuugcuccuccaccgccc

SEQ ID NO: 640784 - RNA, 22 nt, Human
aagcaguggggcucccccagga

SEQ ID NO: 640785 - RNA, 19 nt, Human
aagcggccccagcggaacc

SEQ ID NO: 640786 - RNA, 20 nt, Human
acaggcacguuggguguggg

SEQ ID NO: 640787 - RNA, 22 nt, Human
acucugagcuccuguggggguc

SEQ ID NO: 640788 - RNA, 24 nt, Human
acugccagagugguugggaccagc

SEQ ID NO: 640789 - RNA, 19 nt, Human
agaagcagcggcuuccacc

SEQ ID NO: 640790 - RNA, 19 nt, Human
agaaggggcgggucugaua

SEQ ID NO: 640791 - RNA, 18 nt, Human
agagggccuuggagaguc

SEQ ID NO: 640792 - RNA, 18 nt, Human
agaguugggggcuccagg

SEQ ID NO: 640793 - RNA, 23 nt, Human
agccacagcucggcgcgcacgcc

SEQ ID NO: 640794 - RNA, 21 nt, Human
agccgcagcgacaggcgacgu

SEQ ID NO: 640795 - RNA, 21 nt, Human
agcgacucccuagagcccaga

SEQ ID NO: 640796 - RNA, 23 nt, Human
agcgacucccuagagcccagagc

SEQ ID NO: 640797 - RNA, 21 nt, Human
agcggaacccuccagccgccu

SEQ ID NO: 640798 - RNA, 18 nt, Human
aggacccuccuccucucc

SEQ ID NO: 640799 - RNA, 24 nt, Human
aggcaggaugggcagcucaggugg

SEQ ID NO: 640800 - RNA, 20 nt, Human
aggcagggccuggacagacu

SEQ ID NO: 640801 - RNA, 23 nt, Human
aggcgacgcgcccgaauccgcgc

SEQ ID NO: 640802 - RNA, 20 nt, Human
aggcggagcuuguccagacu

SEQ ID NO: 640803 - RNA, 23 nt, Human
aggcggggcagguguguuggggg

SEQ ID NO: 640804 - RNA, 24 nt, Human
aggcggggcagguguguugggggc

SEQ ID NO: 640805 - RNA, 22 nt, Human
aggcgguuacgcggaagucuuc

SEQ ID NO: 640806 - RNA, 19 nt, Human
aggcuggggugcaguggcc

SEQ ID NO: 640807 - RNA, 19 nt, Human
agggccuggucagaucuaa

SEQ ID NO: 640808 - RNA, 20 nt, Human
aggggcugggguugacucca

SEQ ID NO: 640809 - RNA, 21 nt, Human
agggugcuuugaggggcuggg

SEQ ID NO: 640810 - RNA, 19 nt, Human
auaguggaaggugaggaac

SEQ ID NO: 640811 - RNA, 22 nt, Human
auaucucagugcccggcccagc

SEQ ID NO: 640812 - RNA, 19 nt, Human
auggggccgggaguggaca

SEQ ID NO: 640813 - RNA, 20 nt, Human
caagagaagcagcggcuucc

SEQ ID NO: 640814 - RNA, 18 nt, Human
caagaggcagggccugga

SEQ ID NO: 640815 - RNA, 23 nt, Human
caccccaaagaaggcaccgcaag

SEQ ID NO: 640816 - RNA, 24 nt, Human
cacccccccuaagauggcuaucuc

SEQ ID NO: 640817 - RNA, 19 nt, Human
cacccggggccuucgagga

SEQ ID NO: 640818 - RNA, 19 nt, Human
caccgcgcuucccgggccc

SEQ ID NO: 640819 - RNA, 20 nt, Human
cagagcacugggggguccau

SEQ ID NO: 640820 - RNA, 19 nt, Human
cagcaaagcggccccagcg

SEQ ID NO: 640821 - RNA, 22 nt, Human
cagcaaagcggccccagcggaa

SEQ ID NO: 640822 - RNA, 19 nt, Human
cagccagguugggaggggc

SEQ ID NO: 640823 - RNA, 20 nt, Human
cagccucuugagcaaccccc

SEQ ID NO: 640824 - RNA, 21 nt, Human
cagcggccgagcgacaagaga

SEQ ID NO: 640825 - RNA, 23 nt, Human
cagcgggaaccagcgcuccagac

SEQ ID NO: 640826 - RNA, 20 nt, Human
cagcucggcgcgcacgccgg

SEQ ID NO: 640827 - RNA, 21 nt, Human
cagcucuggcuccggcuccag

SEQ ID NO: 640828 - RNA, 23 nt, Human
cagcucuggcuccggcuccagcu

SEQ ID NO: 640829 - RNA, 20 nt, Human
caggagagggcugcaccgca

SEQ ID NO: 640830 - RNA, 20 nt, Human
caggaugggcagcucaggug

SEQ ID NO: 640831 - RNA, 26 nt, Human
caggcgacgcgcccgaauccgcgccc

SEQ ID NO: 640832 - RNA, 18 nt, Human
caguucagagaguguggc

SEQ ID NO: 640833 - RNA, 23 nt, Human
caucccuuggaggugggguuugg

SEQ ID NO: 640834 - RNA, 21 nt, Human
ccaccgcccagaccugcccca

SEQ ID NO: 640835 - RNA, 26 nt, Human
ccacguuguccugcagaugggagugg

SEQ ID NO: 640836 - RNA, 25 nt, Human
ccagaccacgugugaugaggcagga

SEQ ID NO: 640837 - RNA, 21 nt, Human
ccagagggccuuggagagucg

SEQ ID NO: 640838 - RNA, 22 nt, Human
ccagcagcgcgccauccagcca

SEQ ID NO: 640839 - RNA, 19 nt, Human
ccagccagcaaagcggccc

SEQ ID NO: 640840 - RNA, 23 nt, Human
ccagccagguugggaggggcuga

SEQ ID NO: 640841 - RNA, 27 nt, Human
ccagccgccuucuccccaccgcccccu

SEQ ID NO: 640842 - RNA, 22 nt, Human
ccagcggucucucucagcggcc

SEQ ID NO: 640843 - RNA, 20 nt, Human
ccagggacuccgggggcgga

SEQ ID NO: 640844 - RNA, 19 nt, Human
ccaugguuggggggggggg

SEQ ID NO: 640845 - RNA, 22 nt, Human
cccagaccugccccagggcuca

SEQ ID NO: 640846 - RNA, 21 nt, Human
cccagcaccgcgcuucccggg

SEQ ID NO: 640847 - RNA, 23 nt, Human
cccagccagcaaagcggccccag

SEQ ID NO: 640848 - RNA, 27 nt, Human
cccauggccacguggaugcugccuugu

SEQ ID NO: 640849 - RNA, 24 nt, Human
ccccauggccacguggaugcugcc

SEQ ID NO: 640850 - RNA, 23 nt, Human
cccccaaugucccagacaggcac

SEQ ID NO: 640851 - RNA, 25 nt, Human
cccccgcguccuuggagaaagcugc

SEQ ID NO: 640852 - RNA, 21 nt, Human
ccccuucgcuucgugcaccca

SEQ ID NO: 640853 - RNA, 20 nt, Human
cccggggccuucgaggaccc

SEQ ID NO: 640854 - RNA, 22 nt, Human
cccuagagcccagagcacuggg

SEQ ID NO: 640855 - RNA, 22 nt, Human
cccugaaguuccccauggccac

SEQ ID NO: 640856 - RNA, 25 nt, Human
ccgcagcgcugcgcccgccggcgcc

SEQ ID NO: 640857 - RNA, 19 nt, Human
ccgccagcuccuccuuggc

SEQ ID NO: 640858 - RNA, 18 nt, Human
ccgcgcccgcagcgcugc

SEQ ID NO: 640859 - RNA, 19 nt, Human
ccgcgcccgcagcgcugcg

SEQ ID NO: 640860 - RNA, 25 nt, Human
ccgcgcccgcagcgcugcgcccgcc

SEQ ID NO: 640861 - RNA, 24 nt, Human
ccuaagauggcuaucucucugcuc

SEQ ID NO: 640862 - RNA, 25 nt, Human
ccucagcugagccugaguucucucc

SEQ ID NO: 640863 - RNA, 19 nt, Human
ccuccaagcagcaccagcu

SEQ ID NO: 640864 - RNA, 24 nt, Human
ccucgaaguggaagcgcucggccc

SEQ ID NO: 640865 - RNA, 20 nt, Human
ccugccccagccagcaaagc

SEQ ID NO: 640866 - RNA, 22 nt, Human
ccugguggcucagggcccugcc

SEQ ID NO: 640867 - RNA, 24 nt, Human
cgcagcgcugcgcccgccggcgcc

SEQ ID NO: 640868 - RNA, 23 nt, Human
cgccauccagccacagcucggcg

SEQ ID NO: 640869 - RNA, 21 nt, Human
cgccggcgccccgagcagcgg

SEQ ID NO: 640870 - RNA, 26 nt, Human
cuagcacuucccacccggggccuucg

SEQ ID NO: 640871 - RNA, 19 nt, Human
cucagugcccggcccagcc

SEQ ID NO: 640872 - RNA, 22 nt, Human
cucagugcccggcccagccagg

SEQ ID NO: 640873 - RNA, 19 nt, Human
cucuggcuccggcuccagc

SEQ ID NO: 640874 - RNA, 19 nt, Human
cugaaagcaguggggcucc

SEQ ID NO: 640875 - RNA, 22 nt, Human
cugaaguuccccauggccacgu

SEQ ID NO: 640876 - RNA, 22 nt, Human
cugauggagggguggggccugg

SEQ ID NO: 640877 - RNA, 21 nt, Human
cugcaccgcaacccuugcucc

SEQ ID NO: 640878 - RNA, 19 nt, Human
cugggccuuuggggaaaga

SEQ ID NO: 640879 - RNA, 20 nt, Human
cugggugggcuggaauuggc

SEQ ID NO: 640880 - RNA, 18 nt, Human
cuguuuuuccaggcaucc

SEQ ID NO: 640881 - RNA, 22 nt, Human
cuucauacugccagagugguug

SEQ ID NO: 640882 - RNA, 20 nt, Human
gaacccuccagccgccuucu

SEQ ID NO: 640883 - RNA, 20 nt, Human
gaaggggcgggucugauauu

SEQ ID NO: 640884 - RNA, 20 nt, Human
gaaggugaggaacuccgcca

SEQ ID NO: 640885 - RNA, 20 nt, Human
gaaguggaagcgcucggccc

SEQ ID NO: 640886 - RNA, 23 nt, Human
gaccacgugugaugaggcaggau

SEQ ID NO: 640887 - RNA, 19 nt, Human
gaccagcagcuccacuccc

SEQ ID NO: 640888 - RNA, 22 nt, Human
gacccuccuccucuccuccaag

SEQ ID NO: 640889 - RNA, 23 nt, Human
gacuccuugggaggcgcagauag

SEQ ID NO: 640890 - RNA, 24 nt, Human
gcagcgcgggcuccagggccccgc

SEQ ID NO: 640891 - RNA, 19 nt, Human
gcagggugcuuugaggggc

SEQ ID NO: 640892 - RNA, 19 nt, Human
gcagucuccgguucuguuu

SEQ ID NO: 640893 - RNA, 23 nt, Human
gccacgcggcccagcaccgcgcu

SEQ ID NO: 640894 - RNA, 20 nt, Human
gccagggccacgcggcccag

SEQ ID NO: 640895 - RNA, 18 nt, Human
gccaggguccuaggccga

SEQ ID NO: 640896 - RNA, 23 nt, Human
gcccgaauccgcgcccgcagcgc

SEQ ID NO: 640897 - RNA, 21 nt, Human
gccgggugcccccgccgcugc

SEQ ID NO: 640898 - RNA, 23 nt, Human
gccgggugcccccgccgcugcuc

SEQ ID NO: 640899 - RNA, 21 nt, Human
gccuggacagacuuauugggg

SEQ ID NO: 640900 - RNA, 20 nt, Human
gcgggccaggccugugggcg

SEQ ID NO: 640901 - RNA, 18 nt, Human
gcggggccaggguggggc

SEQ ID NO: 640902 - RNA, 21 nt, Human
gcucagggcccugccccagcc

SEQ ID NO: 640903 - RNA, 21 nt, Human
gcuccagggcauacaagagua

SEQ ID NO: 640904 - RNA, 23 nt, Human
ggaacccuccagccgccuucucc

SEQ ID NO: 640905 - RNA, 23 nt, Human
ggagagggcugcaccgcaacccu

SEQ ID NO: 640906 - RNA, 19 nt, Human
ggaggcaguggugaugggg

SEQ ID NO: 640907 - RNA, 19 nt, Human
ggaggcaguggugaugggg

SEQ ID NO: 640908 - RNA, 24 nt, Human
ggaggugggguuuggccaggggac

SEQ ID NO: 640909 - RNA, 21 nt, Human
ggagugccagggacuccgggg

SEQ ID NO: 640910 - RNA, 25 nt, Human
ggccuuuggggaaagaaguggagcc

SEQ ID NO: 640911 - RNA, 20 nt, Human
ggcggggccaggguggggcu

SEQ ID NO: 640912 - RNA, 18 nt, Human
ggcuccggcuccagcucu

SEQ ID NO: 640913 - RNA, 19 nt, Human
ggcucuccgggagaguugg

SEQ ID NO: 640914 - RNA, 24 nt, Human
gggaaccagcgcuccagaccggcg

SEQ ID NO: 640915 - RNA, 19 nt, Human
gggaaugguuggaaugaca

SEQ ID NO: 640916 - RNA, 19 nt, Human
gggaccagcagcuccacuc

SEQ ID NO: 640917 - RNA, 22 nt, Human
gggauggggggaagcguuuugg

SEQ ID NO: 640918 - RNA, 24 nt, Human
gggauuggggcgaagggcagaggc

SEQ ID NO: 640919 - RNA, 19 nt, Human
gggcggggccagggugggg

SEQ ID NO: 640920 - RNA, 21 nt, Human
ggggaggcaguggugaugggg

SEQ ID NO: 640921 - RNA, 20 nt, Human
ggggccaggguggggcuugg

SEQ ID NO: 640922 - RNA, 19 nt, Human
ggggggggggagggccugg

SEQ ID NO: 640923 - RNA, 21 nt, Human
gggugcuuugaggggcugggg

SEQ ID NO: 640924 - RNA, 24 nt, Human
gguugggggggggggucuccuugg

SEQ ID NO: 640925 - RNA, 21 nt, Human
gugaagcguggagccucaaac

SEQ ID NO: 640926 - RNA, 23 nt, Human
gugggguuuggccaguccugggu

SEQ ID NO: 640927 - RNA, 18 nt, Human
guggguccaccugggggc

SEQ ID NO: 640928 - RNA, 22 nt, Human
guuugggggggggggggagggc

SEQ ID NO: 640929 - RNA, 19 nt, Human
uaagauggcuaucucucug

SEQ ID NO: 640930 - RNA, 19 nt, Human
uaaggcaaagucagacacc

SEQ ID NO: 640931 - RNA, 20 nt, Human
uaaggcaaagucagacaccc

SEQ ID NO: 640932 - RNA, 18 nt, Human
uaccugaaagcagugggg

SEQ ID NO: 640933 - RNA, 20 nt, Human
uacugggcaacuucauacug

SEQ ID NO: 640934 - RNA, 18 nt, Human
uagguugugcucugaauc

SEQ ID NO: 640935 - RNA, 21 nt, Human
ucagauggcaaucucaccaac

SEQ ID NO: 640936 - RNA, 18 nt, Human
ucagcggccgagcgacaa

SEQ ID NO: 640937 - RNA, 21 nt, Human
ucagugcccggcccagccagg

SEQ ID NO: 640938 - RNA, 19 nt, Human
uccaccgcccagaccugcc

SEQ ID NO: 640939 - RNA, 22 nt, Human
uccacuccccacuguaggccaa

SEQ ID NO: 640940 - RNA, 19 nt, Human
uccagacugaggggcgggg

SEQ ID NO: 640941 - RNA, 21 nt, Human
uccagccgccuucuccccacc

SEQ ID NO: 640942 - RNA, 18 nt, Human
uccagcuccuccagcgcc

SEQ ID NO: 640943 - RNA, 20 nt, Human
uccccaccgcccccugugug

SEQ ID NO: 640944 - RNA, 28 nt, Human
uccccacuguaggccaaguagggcuaag

SEQ ID NO: 640945 - RNA, 26 nt, Human
uccccauggccacguggaugcugccc

SEQ ID NO: 640946 - RNA, 23 nt, Human
ucccccaggaggcuggggugcag

SEQ ID NO: 640947 - RNA, 21 nt, Human
ucccggggcuccaaccuggcc

SEQ ID NO: 640948 - RNA, 22 nt, Human
ucccggggcuccaaccuggccu

SEQ ID NO: 640949 - RNA, 24 nt, Human
ucccuuccagcuccuggugggagu

SEQ ID NO: 640950 - RNA, 19 nt, Human
uccgcacaucccgcucggc

SEQ ID NO: 640951 - RNA, 23 nt, Human
uccgguucuguuuuuccaggcau

SEQ ID NO: 640952 - RNA, 19 nt, Human
ucgaggacccuccuccucu

SEQ ID NO: 640953 - RNA, 21 nt, Human
ucuccauugaggcagggugcu

SEQ ID NO: 640954 - RNA, 18 nt, Human
ucuccgggagaguugggg

SEQ ID NO: 640955 - RNA, 21 nt, Human
ucugaaucaaacucugagcuc

SEQ ID NO: 640956 - RNA, 18 nt, Human
ucuggaucccugaaguuc

SEQ ID NO: 640957 - RNA, 18 nt, Human
ucugugggguagggggcu

SEQ ID NO: 640958 - RNA, 19 nt, Human
ucugugggguagggggcuc

SEQ ID NO: 640959 - RNA, 22 nt, Human
ugaaaucaagauuuuacugggc

SEQ ID NO: 640960 - RNA, 21 nt, Human
ugaagcccccaaugucccaga

SEQ ID NO: 640961 - RNA, 19 nt, Human
ugagcaacccccgaacguu

SEQ ID NO: 640962 - RNA, 21 nt, Human
ugauggagggguggggccugg

SEQ ID NO: 640963 - RNA, 18 nt, Human
ugccagcagcgcgccauc

SEQ ID NO: 640964 - RNA, 25 nt, Human
ugcccaggcugagauaucucagugc

SEQ ID NO: 640965 - RNA, 20 nt, Human
ugccccagggcucagauggc

SEQ ID NO: 640966 - RNA, 21 nt, Human
ugcuccggcuccgggucuggc

SEQ ID NO: 640967 - RNA, 22 nt, Human
ugcugaccaugggcuccuggug

SEQ ID NO: 640968 - RNA, 19 nt, Human
ugcugcccucggagcuagc

SEQ ID NO: 640969 - RNA, 24 nt, Human
ugcugggccuuuggggaaagaagu

SEQ ID NO: 640970 - RNA, 24 nt, Human
uggaugcugcccucggagcuagca

SEQ ID NO: 640971 - RNA, 19 nt, Human
uggcaaucucaccagguuu

SEQ ID NO: 640972 - RNA, 18 nt, Human
uggcaggcagggcuuugg

SEQ ID NO: 640973 - RNA, 23 nt, Human
uggccugcgcaggcagcgcgggc

SEQ ID NO: 640974 - RNA, 24 nt, Human
uggccuuuuucuucucuuucagcc

SEQ ID NO: 640975 - RNA, 21 nt, Human
ugggaccagcagcuccacucc

SEQ ID NO: 640976 - RNA, 23 nt, Human
ugggaggggcugauggaggggug

SEQ ID NO: 640977 - RNA, 18 nt, Human
ugggagugggaugggggg

SEQ ID NO: 640978 - RNA, 21 nt, Human
ugggagugggauggggggaag

SEQ ID NO: 640979 - RNA, 23 nt, Human
ugggauggggggaagcguuuugg

SEQ ID NO: 640980 - RNA, 22 nt, Human
uggggaggcaguggugaugggg

SEQ ID NO: 640981 - RNA, 23 nt, Human
uggggccgggaguggacagaagg

SEQ ID NO: 640982 - RNA, 19 nt, Human
uggggcggggccagggugg

SEQ ID NO: 640983 - RNA, 22 nt, Human
uggggcggggccaggguggggc

SEQ ID NO: 640984 - RNA, 23 nt, Human
uggggcggggccaggguggggcu

SEQ ID NO: 640985 - RNA, 20 nt, Human
uggggcguccagcuccucca

SEQ ID NO: 640986 - RNA, 24 nt, Human
ugggggcggagcuaauggagaggg

SEQ ID NO: 640987 - RNA, 22 nt, Human
ugggggggggggggagggccug

SEQ ID NO: 640988 - RNA, 23 nt, Human
ugggguugacuccaagacccccg

SEQ ID NO: 640989 - RNA, 27 nt, Human
uggguccaugguugggggggggggucu

SEQ ID NO: 640990 - RNA, 19 nt, Human
ugggugggcuggaauuggc

SEQ ID NO: 640991 - RNA, 20 nt, Human
uggguggguccaccuggggg

SEQ ID NO: 640992 - RNA, 23 nt, Human
uggugucuccauugaggcagggu

SEQ ID NO: 640993 - RNA, 22 nt, Human
ugguuuguuggcaccccaaaga

SEQ ID NO: 640994 - RNA, 21 nt, Human
uguccagacugaggggcgggg

SEQ ID NO: 640995 - RNA, 22 nt, Human
uguccagacugaggggcggggc

SEQ ID NO: 640996 - RNA, 24 nt, Human
ugucccagacaggcacguugggug

SEQ ID NO: 640997 - RNA, 22 nt, Human
uucagaaaccaggagagggcug

SEQ ID NO: 640998 - RNA, 19 nt, Human
uucccgggcccaagccgcg

SEQ ID NO: 640999 - RNA, 25 nt, Human
uucuccccaccgcccccugugugcc

SEQ ID NO: 641000 - RNA, 18 nt, Human
uucucuccaucucauuua

SEQ ID NO: 641001 - RNA, 21 nt, Human
uucuuaugccucccccagagg

SEQ ID NO: 641002 - RNA, 24 nt, Human
uugcugggccuuuggggaaagaag

SEQ ID NO: 641003 - RNA, 23 nt, Human
uugggaggggcugauggaggggu

SEQ ID NO: 641004 - RNA, 22 nt, Human
uuuaggcggugcuccuggggag

SEQ ID NO: 641005 - RNA, 24 nt, Human
uuucagacugugcccuucauugcu

SEQ ID NO: 641006 - RNA, 18 nt, Human
uuuggccaguccugggug

SEQ ID NO: 641007 - RNA, 21 nt, Human
uuuggguagaguggaaggggc

SEQ ID NO: 641008 - RNA, 25 nt, Human
uuuucagacugugcccuucauugcu

SEQ ID NO: 641009 - RNA, 26 nt, Human
uuuucugggcucuccgggagaguugg

SEQ ID NO: 641010 - RNA, 21 nt, Human
uuuuucuucucuuucagccuc

SEQ ID NO: 641011 - RNA, 22 nt, Human
aaaguagaagcuguccugagga

SEQ ID NO: 641012 - RNA, 25 nt, Human
aaucaucuaaaaucaaucuauuuua

SEQ ID NO: 641013 - RNA, 21 nt, Human
aucugucagaaucugcuaaca

SEQ ID NO: 641014 - RNA, 21 nt, Human
caagaaaacagacaccuauga

SEQ ID NO: 641015 - RNA, 22 nt, Human
caagaaaacagacaccuaugaa

SEQ ID NO: 641016 - RNA, 26 nt, Human
caaugcauucuucuucucaucacauc

SEQ ID NO: 641017 - RNA, 21 nt, Human
cauuauuggaucaucuaaagu

SEQ ID NO: 641018 - RNA, 27 nt, Human
gaucaucuaaaguagaagcuguccuga

SEQ ID NO: 641019 - RNA, 24 nt, Human
uaaaaugguguggaugaacaauca

SEQ ID NO: 641020 - RNA, 23 nt, Human
uaacaguacaagaaaacagacac

SEQ ID NO: 641021 - RNA, 21 nt, Human
uaauacuaguaucuauauaaa

SEQ ID NO: 641022 - RNA, 24 nt, Human
uaggaauuuccuccugaaaaguuu

SEQ ID NO: 641023 - RNA, 19 nt, Human
ucaucuaaaguagaagcug

SEQ ID NO: 641024 - RNA, 23 nt, Human
uccaaugcauucuucuucucauc

SEQ ID NO: 641025 - RNA, 24 nt, Human
ugaacaaucaucuaaaaucaaucu

SEQ ID NO: 641026 - RNA, 21 nt, Human
ugcuaacaguacaagaaaaca

SEQ ID NO: 641027 - RNA, 21 nt, Human
uugcuaccuacuacccacaaa

SEQ ID NO: 641028 - RNA, 19 nt, Human
aagaaggagauggucccac

SEQ ID NO: 641029 - RNA, 25 nt, Human
accccuggggaggaagggcgugguu

SEQ ID NO: 641030 - RNA, 18 nt, Human
accuuaauaucccuaaag

SEQ ID NO: 641031 - RNA, 23 nt, Human
accuuaauaucccuaaagaagaa

SEQ ID NO: 641032 - RNA, 21 nt, Human
acuuuggaucugggagagaga

SEQ ID NO: 641033 - RNA, 18 nt, Human
agccaccacacucuuccu

SEQ ID NO: 641034 - RNA, 21 nt, Human
aggugggguccuggggaagac

SEQ ID NO: 641035 - RNA, 22 nt, Human
aggugggguccuggggaagacg

SEQ ID NO: 641036 - RNA, 23 nt, Human
caagaggccucuuucucugauuc

SEQ ID NO: 641037 - RNA, 24 nt, Human
caccccuggggaggaagggcgugg

SEQ ID NO: 641038 - RNA, 20 nt, Human
cacguacuccuuccuccugu

SEQ ID NO: 641039 - RNA, 21 nt, Human
cacuguugcuugucucuggga

SEQ ID NO: 641040 - RNA, 24 nt, Human
cagaggcccuuugccaagaggccu

SEQ ID NO: 641041 - RNA, 19 nt, Human
cagccuucuucccucccag

SEQ ID NO: 641042 - RNA, 24 nt, Human
cauccuacauuucaccccugggga

SEQ ID NO: 641043 - RNA, 18 nt, Human
ccaccuuuuauugugucc

SEQ ID NO: 641044 - RNA, 21 nt, Human
cccacacucauaguccaggaa

SEQ ID NO: 641045 - RNA, 19 nt, Human
cccaugaucgggagacaaa

SEQ ID NO: 641046 - RNA, 22 nt, Human
ccccuggggaggaagggcgugg

SEQ ID NO: 641047 - RNA, 19 nt, Human
cccuuugccaagaggccuc

SEQ ID NO: 641048 - RNA, 21 nt, Human
ccuccuggggagcuuuucuau

SEQ ID NO: 641049 - RNA, 18 nt, Human
ccugggugacugggcaga

SEQ ID NO: 641050 - RNA, 23 nt, Human
cgggagacaaagucacguacucc

SEQ ID NO: 641051 - RNA, 21 nt, Human
cucacuguugcuugucucugg

SEQ ID NO: 641052 - RNA, 19 nt, Human
cucugcgugagcggagggc

SEQ ID NO: 641053 - RNA, 18 nt, Human
cugcgugagcggagggca

SEQ ID NO: 641054 - RNA, 19 nt, Human
cuuagccagauggagugag

SEQ ID NO: 641055 - RNA, 21 nt, Human
cuucucagagugaggcaccuc

SEQ ID NO: 641056 - RNA, 19 nt, Human
gaaauacaaauguucucca

SEQ ID NO: 641057 - RNA, 21 nt, Human
gagagcaaacuaaauguaaug

SEQ ID NO: 641058 - RNA, 21 nt, Human
gcauggaaacggaugacagga

SEQ ID NO: 641059 - RNA, 21 nt, Human
gcuugucucugggauugcaga

SEQ ID NO: 641060 - RNA, 22 nt, Human
gggcgugguugccugugaggag

SEQ ID NO: 641061 - RNA, 22 nt, Human
ggugacggauggauuagagaga

SEQ ID NO: 641062 - RNA, 21 nt, Human
gugagcggagggcaaacugcg

SEQ ID NO: 641063 - RNA, 23 nt, Human
uaaaucucuucucagagugaggc

SEQ ID NO: 641064 - RNA, 21 nt, Human
uauuucaagaucacuuagcca

SEQ ID NO: 641065 - RNA, 19 nt, Human
ucaagaucacuuagccaga

SEQ ID NO: 641066 - RNA, 18 nt, Human
ucaggguauaaauaaggg

SEQ ID NO: 641067 - RNA, 19 nt, Human
ucauaguccaggaagaccc

SEQ ID NO: 641068 - RNA, 18 nt, Human
ucccaguaauguuucccu

SEQ ID NO: 641069 - RNA, 18 nt, Human
ucccuaaagaagaaugug

SEQ ID NO: 641070 - RNA, 21 nt, Human
ucuacaccacagccugugaga

SEQ ID NO: 641071 - RNA, 19 nt, Human
ugggagagagaccuuaaua

SEQ ID NO: 641072 - RNA, 23 nt, Human
ugggugacugggcagaugacuau

SEQ ID NO: 641073 - RNA, 19 nt, Human
ugguugccugugaggagga

SEQ ID NO: 641074 - RNA, 22 nt, Human
uuagagagaagaggagaacugg

SEQ ID NO: 641075 - RNA, 18 nt, Human
uugaagaaggagaugguc

SEQ ID NO: 641076 - RNA, 18 nt, Human
uuuuuuuuuuuuacugaa

SEQ ID NO: 641077 - RNA, 23 nt, Human
uuuuuuuuuuuuuuuuuuacuga

SEQ ID NO: 641078 - RNA, 20 nt, Human
aaaaaaaaaaaaaaaagcac

SEQ ID NO: 641079 - RNA, 25 nt, Human
aaaaaaaaaaaaaaaagcacaacug

SEQ ID NO: 641080 - RNA, 28 nt, Human
aaaaaaaaaaaaaaagaccguccaagag

SEQ ID NO: 641081 - RNA, 23 nt, Human
aaaaaaaaaaaaagcacaacuga

SEQ ID NO: 641082 - RNA, 24 nt, Human
aaaaaaaaaaagaccguccaagag

SEQ ID NO: 641083 - RNA, 24 nt, Human
aaaaaaaaaaagcacaacugaaga

SEQ ID NO: 641084 - RNA, 22 nt, Human
aaaaaaaaaagcacaacugaag

SEQ ID NO: 641085 - RNA, 23 nt, Human
aaaaaaaaaagcacaacugaaga

SEQ ID NO: 641086 - RNA, 21 nt, Human
aaaaaaaagcacaacugaaga

SEQ ID NO: 641087 - RNA, 23 nt, Human
aaaaagaccguccaagaguggga

SEQ ID NO: 641088 - RNA, 24 nt, Human
aagcuucgcuggcuugccggcccc

SEQ ID NO: 641089 - RNA, 25 nt, Human
aaucccaccccauaaaccgaacaaa

SEQ ID NO: 641090 - RNA, 22 nt, Human
acagagugagacugucucaaaa

SEQ ID NO: 641091 - RNA, 23 nt, Human
acccuguuuccacaaaaaauaca

SEQ ID NO: 641092 - RNA, 24 nt, Human
accugaggucaggaguucgagacc

SEQ ID NO: 641093 - RNA, 21 nt, Human
accugcugugcaccccacuuc

SEQ ID NO: 641094 - RNA, 21 nt, Human
acuagacagccccaucugggg

SEQ ID NO: 641095 - RNA, 18 nt, Human
acugcaccccagccuggg

SEQ ID NO: 641096 - RNA, 24 nt, Human
acugcaccccagccugggugacag

SEQ ID NO: 641097 - RNA, 23 nt, Human
agccaagugugguggcguaugcc

SEQ ID NO: 641098 - RNA, 24 nt, Human
agccuggccaacaugguaacaccc

SEQ ID NO: 641099 - RNA, 22 nt, Human
agccugggugacagagugagac

SEQ ID NO: 641100 - RNA, 20 nt, Human
aggaggcugaggcaggagag

SEQ ID NO: 641101 - RNA, 24 nt, Human
aggcaggagagucgcuugaacccg

SEQ ID NO: 641102 - RNA, 21 nt, Human
aggcaugauggcucacaccug

SEQ ID NO: 641103 - RNA, 24 nt, Human
aggcaugauggcucacaccuguaa

SEQ ID NO: 641104 - RNA, 21 nt, Human
aggccgaggcggucggaucac

SEQ ID NO: 641105 - RNA, 24 nt, Human
aggcggaguuugcagugagccgag

SEQ ID NO: 641106 - RNA, 22 nt, Human
aggcggucggaucaccugaggu

SEQ ID NO: 641107 - RNA, 21 nt, Human
aggcugaggcaggagagucgc

SEQ ID NO: 641108 - RNA, 24 nt, Human
aggcugaggcaggagagucgcuug

SEQ ID NO: 641109 - RNA, 20 nt, Human
aguuuuuagcacuuauguuc

SEQ ID NO: 641110 - RNA, 24 nt, Human
auagcgccacugcaccccagccug

SEQ ID NO: 641111 - RNA, 19 nt, Human
auggagcgguccaccuaca

SEQ ID NO: 641112 - RNA, 23 nt, Human
auggcucacaccuguaaucccag

SEQ ID NO: 641113 - RNA, 18 nt, Human
caauggacugggcccacc

SEQ ID NO: 641114 - RNA, 24 nt, Human
cacaccuguaaucccagcaccuug

SEQ ID NO: 641115 - RNA, 19 nt, Human
cacagugcugguuccuucc

SEQ ID NO: 641116 - RNA, 22 nt, Human
caccccagccugggugacagag

SEQ ID NO: 641117 - RNA, 22 nt, Human
caccccagccugggugacagag

SEQ ID NO: 641118 - RNA, 24 nt, Human
caccccagccugggugacagagug

SEQ ID NO: 641119 - RNA, 23 nt, Human
caccugaggucaggaguucgaga

SEQ ID NO: 641120 - RNA, 23 nt, Human
caccuguaaucccagcaccuugg

SEQ ID NO: 641121 - RNA, 24 nt, Human
caccuguaaucccagcaccuuggg

SEQ ID NO: 641122 - RNA, 23 nt, Human
cacugcaccccagccugggugac

SEQ ID NO: 641123 - RNA, 24 nt, Human
cacugcaccccagccugggugaca

SEQ ID NO: 641124 - RNA, 24 nt, Human
cagcaaggcagccucucucuggcc

SEQ ID NO: 641125 - RNA, 24 nt, Human
cagcaccuugggaggccgaggcgg

SEQ ID NO: 641126 - RNA, 20 nt, Human
cagccccaucugggggugac

SEQ ID NO: 641127 - RNA, 24 nt, Human
caguuacucaggaggcugaggcag

SEQ ID NO: 641128 - RNA, 21 nt, Human
caucacagagacucaguggga

SEQ ID NO: 641129 - RNA, 22 nt, Human
ccaaaaccagcaaggcagccuc

SEQ ID NO: 641130 - RNA, 24 nt, Human
ccaaaaccagcaaggcagccucuc

SEQ ID NO: 641131 - RNA, 20 nt, Human
ccacugcaccccagccuggg

SEQ ID NO: 641132 - RNA, 21 nt, Human
ccacugcaccccagccugggu

SEQ ID NO: 641133 - RNA, 24 nt, Human
ccacugcaccccagccugggugac

SEQ ID NO: 641134 - RNA, 24 nt, Human
cccacagugcugguuccuuccaga

SEQ ID NO: 641135 - RNA, 24 nt, Human
cccagccugggugacagagugaga

SEQ ID NO: 641136 - RNA, 24 nt, Human
ccggccccuaaccugcugugcacc

SEQ ID NO: 641137 - RNA, 22 nt, Human
ccugaggucaggaguucgagac

SEQ ID NO: 641138 - RNA, 18 nt, Human
ccugcaacuagacagccc

SEQ ID NO: 641139 - RNA, 22 nt, Human
ccuggccaacaugguaacaccc

SEQ ID NO: 641140 - RNA, 24 nt, Human
ccuggccaacaugguaacacccug

SEQ ID NO: 641141 - RNA, 20 nt, Human
ccugggugacagagugagac

SEQ ID NO: 641142 - RNA, 19 nt, Human
ccuguaaucccagcaccuu

SEQ ID NO: 641143 - RNA, 19 nt, Human
ccuguaaucccaguuacuc

SEQ ID NO: 641144 - RNA, 21 nt, Human
ccuguaaucccaguuacucag

SEQ ID NO: 641145 - RNA, 22 nt, Human
ccuguaaucccaguuacucagg

SEQ ID NO: 641146 - RNA, 24 nt, Human
cgagaccagccuggccaacauggu

SEQ ID NO: 641147 - RNA, 20 nt, Human
cgaggcggucggaucaccug

SEQ ID NO: 641148 - RNA, 26 nt, Human
cgaggcggucggaucaccugagguca

SEQ ID NO: 641149 - RNA, 24 nt, Human
cgccacugcaccccagccgggugc

SEQ ID NO: 641150 - RNA, 26 nt, Human
cgccacugcaccccagccugggugac

SEQ ID NO: 641151 - RNA, 24 nt, Human
cggaucaccugaggucaggaguuc

SEQ ID NO: 641152 - RNA, 27 nt, Human
cggaucaccugaggucaggaguucgag

SEQ ID NO: 641153 - RNA, 24 nt, Human
cggucggaucaccugaggucagga

SEQ ID NO: 641154 - RNA, 24 nt, Human
cuagugguaccuccuuccaucucc

SEQ ID NO: 641155 - RNA, 18 nt, Human
cucaaaaaaaaaaaaaaa

SEQ ID NO: 641156 - RNA, 24 nt, Human
cucaaaaaaaaaaaaaaaagcaca

SEQ ID NO: 641157 - RNA, 25 nt, Human
cucaaaaaaaaaaaaaaaagcacaa

SEQ ID NO: 641158 - RNA, 23 nt, Human
cucacaccuguaaucccagcacc

SEQ ID NO: 641159 - RNA, 24 nt, Human
cucacaccuguaaucccagcaccu

SEQ ID NO: 641160 - RNA, 18 nt, Human
cuccaaaaccagcaaggc

SEQ ID NO: 641161 - RNA, 19 nt, Human
cucuggccagcagggaaag

SEQ ID NO: 641162 - RNA, 21 nt, Human
cugcugugcaccccacuuccu

SEQ ID NO: 641163 - RNA, 18 nt, Human
cuggccagcagggaaagg

SEQ ID NO: 641164 - RNA, 19 nt, Human
cuggccagcagggaaaggu

SEQ ID NO: 641165 - RNA, 23 nt, Human
cuggcuugccggccccuaaccug

SEQ ID NO: 641166 - RNA, 22 nt, Human
cugucucaaaaaaaaaaaaaaa

SEQ ID NO: 641167 - RNA, 24 nt, Human
cuguuuccacaaaaaauacagaaa

SEQ ID NO: 641168 - RNA, 25 nt, Human
cuguuuccacaaaaaauacagaaag

SEQ ID NO: 641169 - RNA, 21 nt, Human
cuuuuuggcaccagagaccgg

SEQ ID NO: 641170 - RNA, 24 nt, Human
gacugcuugcaauccuugacuagu

SEQ ID NO: 641171 - RNA, 24 nt, Human
gagcuuguuuuccugcaacuagac

SEQ ID NO: 641172 - RNA, 21 nt, Human
gaguuugcagugagccgagau

SEQ ID NO: 641173 - RNA, 21 nt, Human
gaucaccugaggucaggaguu

SEQ ID NO: 641174 - RNA, 24 nt, Human
gaucaccugaggucaggaguucga

SEQ ID NO: 641175 - RNA, 24 nt, Human
gauggcucacaccuguaaucccag

SEQ ID NO: 641176 - RNA, 23 nt, Human
gcaucaaaaaaaaaaaaaaaaaa

SEQ ID NO: 641177 - RNA, 21 nt, Human
gccaacaugguaacacccugu

SEQ ID NO: 641178 - RNA, 24 nt, Human
gccacugcaccccagccuggguga

SEQ ID NO: 641179 - RNA, 18 nt, Human
ggaguuugcagugagccg

SEQ ID NO: 641180 - RNA, 23 nt, Human
ggaucaccugaggucaggaguuc

SEQ ID NO: 641181 - RNA, 24 nt, Human
gguggcguaugccuguaaucccag

SEQ ID NO: 641182 - RNA, 24 nt, Human
guaacacccuguuuccacaaaaaa

SEQ ID NO: 641183 - RNA, 24 nt, Human
guaccuccuuccaucuccaaaacc

SEQ ID NO: 641184 - RNA, 22 nt, Human
gugacagagugagacugucuca

SEQ ID NO: 641185 - RNA, 23 nt, Human
guggcguaugccuguaaucccag

SEQ ID NO: 641186 - RNA, 22 nt, Human
uaaauaagaaaucccaccccau

SEQ ID NO: 641187 - RNA, 24 nt, Human
uaaggagcgugcaaccuacauccc

SEQ ID NO: 641188 - RNA, 24 nt, Human
uacagaugaagcuucgcuggcuug

SEQ ID NO: 641189 - RNA, 25 nt, Human
uacuggucuguguccggaguguugg

SEQ ID NO: 641190 - RNA, 21 nt, Human
uagugguaccuccuuccaucu

SEQ ID NO: 641191 - RNA, 23 nt, Human
uauaaauacagaugaagcuucgc

SEQ ID NO: 641192 - RNA, 22 nt, Human
uauugugcacuuuauuucuacu

SEQ ID NO: 641193 - RNA, 21 nt, Human
ucaaaaaaaaaaaaaaaaaaa

SEQ ID NO: 641194 - RNA, 20 nt, Human
ucaccugaggucaggaguuc

SEQ ID NO: 641195 - RNA, 23 nt, Human
ucagccaggcaugauggcucaca

SEQ ID NO: 641196 - RNA, 18 nt, Human
ucagugggagcccugagc

SEQ ID NO: 641197 - RNA, 18 nt, Human
uccagcuuuuccagaagc

SEQ ID NO: 641198 - RNA, 22 nt, Human
ucccaccccauaaaccgaacaa

SEQ ID NO: 641199 - RNA, 19 nt, Human
ucccacuccuaauaucuaa

SEQ ID NO: 641200 - RNA, 24 nt, Human
ucccucgugugugcaguucacaau

SEQ ID NO: 641201 - RNA, 18 nt, Human
ucgcuugaacccgggagg

SEQ ID NO: 641202 - RNA, 22 nt, Human
ucgcuugaacccgggaggcgga

SEQ ID NO: 641203 - RNA, 18 nt, Human
ucucaaaaaaaaaaaaaa

SEQ ID NO: 641204 - RNA, 27 nt, Human
ucucaaaaaaaaaaaaaaaagcacaac

SEQ ID NO: 641205 - RNA, 21 nt, Human
ugaaauaaguagucauuuaca

SEQ ID NO: 641206 - RNA, 23 nt, Human
ugacagagugagacugucucaaa

SEQ ID NO: 641207 - RNA, 20 nt, Human
ugacaggaggcggagcucgg

SEQ ID NO: 641208 - RNA, 22 nt, Human
ugagccgagauagcgccacugc

SEQ ID NO: 641209 - RNA, 24 nt, Human
ugaggcaggagagucgcuugaacc

SEQ ID NO: 641210 - RNA, 25 nt, Human
ugaggcaggagagucgcuugaaccc

SEQ ID NO: 641211 - RNA, 24 nt, Human
ugauggcucacaccuguaauccca

SEQ ID NO: 641212 - RNA, 19 nt, Human
ugcauuuauugugcacuuu

SEQ ID NO: 641213 - RNA, 19 nt, Human
ugccggccccuaaccugcu

SEQ ID NO: 641214 - RNA, 24 nt, Human
ugccuguaaucccaguuacucagg

SEQ ID NO: 641215 - RNA, 20 nt, Human
ugcuaugagaaucuaaugcc

SEQ ID NO: 641216 - RNA, 20 nt, Human
ugcugugcaccccacuuccu

SEQ ID NO: 641217 - RNA, 22 nt, Human
uggaccacuacuggucuguguc

SEQ ID NO: 641218 - RNA, 18 nt, Human
uggacugggcccacccag

SEQ ID NO: 641219 - RNA, 21 nt, Human
uggacuuucugucccacuccu

SEQ ID NO: 641220 - RNA, 22 nt, Human
uggauuggggucggggagggau

SEQ ID NO: 641221 - RNA, 25 nt, Human
uggauuggggucggggagggauggu

SEQ ID NO: 641222 - RNA, 24 nt, Human
uggccaacaugguaacacccuguu

SEQ ID NO: 641223 - RNA, 21 nt, Human
uggcguaugccuguaauccca

SEQ ID NO: 641224 - RNA, 22 nt, Human
uggcguaugccuguaaucccag

SEQ ID NO: 641225 - RNA, 24 nt, Human
uggcguaugccuguaaucccaguu

SEQ ID NO: 641226 - RNA, 25 nt, Human
uggcuauaaauacagaugaagcuuc

SEQ ID NO: 641227 - RNA, 21 nt, Human
uggcucacaccuguaauccca

SEQ ID NO: 641228 - RNA, 24 nt, Human
uggcucacaccuguaaucccagca

SEQ ID NO: 641229 - RNA, 19 nt, Human
ugggaggccgaggcggucg

SEQ ID NO: 641230 - RNA, 24 nt, Human
ugggaggccgaggcggucggauca

SEQ ID NO: 641231 - RNA, 20 nt, Human
uggggucggggagggauggu

SEQ ID NO: 641232 - RNA, 24 nt, Human
ugguggcguaugccuguaauccca

SEQ ID NO: 641233 - RNA, 23 nt, Human
uucuagagacugcuugcaauccu

SEQ ID NO: 641234 - RNA, 20 nt, Human
uugaaggacucacccaaugg

SEQ ID NO: 641235 - RNA, 22 nt, Human
uugaugacaagauggacuuucu

SEQ ID NO: 641236 - RNA, 19 nt, Human
uugcagugagccgagauag

SEQ ID NO: 641237 - RNA, 22 nt, Human
uugcagugagccgagauagcgc

SEQ ID NO: 641238 - RNA, 19 nt, Human
uugugcacuuuauuucuac

SEQ ID NO: 641239 - RNA, 22 nt, Human
uuuccacaaaaaauacagaaaa

SEQ ID NO: 641240 - RNA, 18 nt, Human
uuugcagugagccgagau

SEQ ID NO: 641241 - RNA, 24 nt, Human
uuugcagugagccgagauagcgcc

SEQ ID NO: 641242 - RNA, 22 nt, Human
aaaccaaauacugcauguucuc

SEQ ID NO: 641243 - RNA, 20 nt, Human
aaaguauugaaaaaaaagaa

SEQ ID NO: 641244 - RNA, 21 nt, Human
aaagugcuuugucuggcacca

SEQ ID NO: 641245 - RNA, 22 nt, Human
aacacaagaacagaaaaccaaa

SEQ ID NO: 641246 - RNA, 19 nt, Human
aaccugcacauucugcaca

SEQ ID NO: 641247 - RNA, 21 nt, Human
aauacugcucucuuaagaguu

SEQ ID NO: 641248 - RNA, 20 nt, Human
aauagaagacaucuucugga

SEQ ID NO: 641249 - RNA, 23 nt, Human
acaaagauuccucaaggaucuag

SEQ ID NO: 641250 - RNA, 25 nt, Human
acacaauugggaaaugucuccaauc

SEQ ID NO: 641251 - RNA, 21 nt, Human
acacggaugaacaggaaacca

SEQ ID NO: 641252 - RNA, 19 nt, Human
acacuggagcccaucgggg

SEQ ID NO: 641253 - RNA, 18 nt, Human
accaaauacugcauguuc

SEQ ID NO: 641254 - RNA, 19 nt, Human
acucucuccaucuuucucu

SEQ ID NO: 641255 - RNA, 20 nt, Human
agaaaaccaaauacugcaug

SEQ ID NO: 641256 - RNA, 25 nt, Human
agaauagaagacaucuucuggaugu

SEQ ID NO: 641257 - RNA, 22 nt, Human
agacuuggaaccaaccccagug

SEQ ID NO: 641258 - RNA, 22 nt, Human
agauuccucaaggaucuagaac

SEQ ID NO: 641259 - RNA, 22 nt, Human
agcccuaucuccuaaaucaaaa

SEQ ID NO: 641260 - RNA, 25 nt, Human
auucugcacauguaucccagaacuu

SEQ ID NO: 641261 - RNA, 23 nt, Human
caaaaaaugggugaaggauauga

SEQ ID NO: 641262 - RNA, 21 nt, Human
caagaacagaaaaccaaauac

SEQ ID NO: 641263 - RNA, 24 nt, Human
caagaacagaaaaccaaauacugc

SEQ ID NO: 641264 - RNA, 21 nt, Human
caagguaacaguccaggcauu

SEQ ID NO: 641265 - RNA, 21 nt, Human
caauagcaaagacuuggaacc

SEQ ID NO: 641266 - RNA, 19 nt, Human
cacaagaacagaaaaccaa

SEQ ID NO: 641267 - RNA, 20 nt, Human
caccauggcaaaggggauac

SEQ ID NO: 641268 - RNA, 18 nt, Human
cagaaaaccaaauacugc

SEQ ID NO: 641269 - RNA, 21 nt, Human
cagauaaaaaacucgucucau

SEQ ID NO: 641270 - RNA, 19 nt, Human
caggacacaacagaugcug

SEQ ID NO: 641271 - RNA, 25 nt, Human
cauauacaccauggaauauuaugca

SEQ ID NO: 641272 - RNA, 19 nt, Human
caucucacgccagugagaa

SEQ ID NO: 641273 - RNA, 24 nt, Human
cauuuuauagcccuaucuccuaaa

SEQ ID NO: 641274 - RNA, 21 nt, Human
ccaaccccagugcccaucagc

SEQ ID NO: 641275 - RNA, 22 nt, Human
ccaucagcaaacuaacacaaga

SEQ ID NO: 641276 - RNA, 20 nt, Human
ccaucccucacacucaaaag

SEQ ID NO: 641277 - RNA, 19 nt, Human
cgccagugagaauagugau

SEQ ID NO: 641278 - RNA, 23 nt, Human
cuagacacagaccugcccugaca

SEQ ID NO: 641279 - RNA, 21 nt, Human
cucccaugugaauggucugcu

SEQ ID NO: 641280 - RNA, 21 nt, Human
cucuccaucuuucucuuucuc

SEQ ID NO: 641281 - RNA, 23 nt, Human
cucucuccaucuuucucuuucuc

SEQ ID NO: 641282 - RNA, 24 nt, Human
cucucuccaucuuucucuuucucc

SEQ ID NO: 641283 - RNA, 24 nt, Human
cugcuaucaccauggcaaagggga

SEQ ID NO: 641284 - RNA, 19 nt, Human
cuggcacacaauugggaaa

SEQ ID NO: 641285 - RNA, 20 nt, Human
gaaaccaucagcaaacuaac

SEQ ID NO: 641286 - RNA, 20 nt, Human
gaaauaccauuugaccagca

SEQ ID NO: 641287 - RNA, 22 nt, Human
gaacagaaaaccaaauacugca

SEQ ID NO: 641288 - RNA, 22 nt, Human
gaacuuaaaguauugaaaaaaa

SEQ ID NO: 641289 - RNA, 23 nt, Human
gagaaacaggaauacuuuuacac

SEQ ID NO: 641290 - RNA, 22 nt, Human
gagaaaugcaaaucaaaaccac

SEQ ID NO: 641291 - RNA, 19 nt, Human
ggggagggauagcauuagg

SEQ ID NO: 641292 - RNA, 22 nt, Human
ggggguggggaggggaaccaag

SEQ ID NO: 641293 - RNA, 22 nt, Human
ggggguggggaggggaaccaag

SEQ ID NO: 641294 - RNA, 22 nt, Human
ggggguggggaggggaaccaag

SEQ ID NO: 641295 - RNA, 23 nt, Human
gggguggggaggggaaccaaguu

SEQ ID NO: 641296 - RNA, 19 nt, Human
gggguugggggcuagggga

SEQ ID NO: 641297 - RNA, 23 nt, Human
gggguugggggcuaggggaggga

SEQ ID NO: 641298 - RNA, 20 nt, Human
gguggggaggggaaccaagu

SEQ ID NO: 641299 - RNA, 25 nt, Human
gugaauggucugcuaucaccauggc

SEQ ID NO: 641300 - RNA, 18 nt, Human
guguguguguguguugug

SEQ ID NO: 641301 - RNA, 18 nt, Human
uaaagaaaauguggcaca

SEQ ID NO: 641302 - RNA, 21 nt, Human
uaacuagcauacucuaaguac

SEQ ID NO: 641303 - RNA, 20 nt, Human
uagaaagugugugugugugu

SEQ ID NO: 641304 - RNA, 18 nt, Human
uagaagacaucuucugga

SEQ ID NO: 641305 - RNA, 25 nt, Human
uagaauagaagacaucuucuggaug

SEQ ID NO: 641306 - RNA, 21 nt, Human
uagcccuaucuccuaaaucaa

SEQ ID NO: 641307 - RNA, 20 nt, Human
uaggagaaauaccuaaggua

SEQ ID NO: 641308 - RNA, 26 nt, Human
uagguuucuaacucauagggauguuu

SEQ ID NO: 641309 - RNA, 21 nt, Human
uaugaacagacacuucucaaa

SEQ ID NO: 641310 - RNA, 21 nt, Human
uauuaaaucugaccaugcacc

SEQ ID NO: 641311 - RNA, 19 nt, Human
uauuaugcagccauaaaaa

SEQ ID NO: 641312 - RNA, 19 nt, Human
ucaaaacuuugccucagug

SEQ ID NO: 641313 - RNA, 22 nt, Human
ucagcaaacuaacacaagaaca

SEQ ID NO: 641314 - RNA, 22 nt, Human
ucauucuacuaaagacacaugc

SEQ ID NO: 641315 - RNA, 25 nt, Human
uccuuugcagggacacggaugaaca

SEQ ID NO: 641316 - RNA, 28 nt, Human
ucuccaucuuucucuuucuccucugaag

SEQ ID NO: 641317 - RNA, 21 nt, Human
ucuguuagaauagaagacauc

SEQ ID NO: 641318 - RNA, 21 nt, Human
ugaaggggaaccacauauggg

SEQ ID NO: 641319 - RNA, 22 nt, Human
ugaaggggaaccacauauggga

SEQ ID NO: 641320 - RNA, 18 nt, Human
ugaccaugcaccuagaca

SEQ ID NO: 641321 - RNA, 19 nt, Human
ugagaaauuccuaagccuu

SEQ ID NO: 641322 - RNA, 20 nt, Human
ugagauaacaucucacgcca

SEQ ID NO: 641323 - RNA, 18 nt, Human
ugauggguuggugggugc

SEQ ID NO: 641324 - RNA, 19 nt, Human
ugcugaagaggauguagag

SEQ ID NO: 641325 - RNA, 20 nt, Human
uggauaaagaaaauguggca

SEQ ID NO: 641326 - RNA, 27 nt, Human
uguauaccuauguaacaaaccugcaca

SEQ ID NO: 641327 - RNA, 18 nt, Human
ugucaggacacaacagau

SEQ ID NO: 641328 - RNA, 23 nt, Human
uguguguguguguuguggggggg

SEQ ID NO: 641329 - RNA, 22 nt, Human
uuacuggguauauacccaaagg

SEQ ID NO: 641330 - RNA, 21 nt, Human
uuagagaaaugcaaaucaaaa

SEQ ID NO: 641331 - RNA, 23 nt, Human
uuagagaaaugcaaaucaaaacc

SEQ ID NO: 641332 - RNA, 21 nt, Human
uucucacucauaagugggaau

SEQ ID NO: 641333 - RNA, 23 nt, Human
uucuuagaaagugugugugugug

SEQ ID NO: 641334 - RNA, 22 nt, Human
uuugaccagcaaucccauuacu

SEQ ID NO: 641335 - RNA, 20 nt, Human
uuuuuuuuuuuuagguuucu

SEQ ID NO: 641336 - RNA, 22 nt, Human
uuuuuuuuuuuuuuuuuuuagg

SEQ ID NO: 641337 - RNA, 18 nt, Human
aaagguuuagggccagug

SEQ ID NO: 641338 - RNA, 18 nt, Human
aaaugccacaugcuuugg

SEQ ID NO: 641339 - RNA, 19 nt, Human
agaggcucuuugagaggag

SEQ ID NO: 641340 - RNA, 19 nt, Human
aggaggccacagagggaaa

SEQ ID NO: 641341 - RNA, 21 nt, Human
aggagggggaggcaagguugg

SEQ ID NO: 641342 - RNA, 19 nt, Human
aggcaagguugguaguggu

SEQ ID NO: 641343 - RNA, 22 nt, Human
aggcaggaggggaagcuuccaa

SEQ ID NO: 641344 - RNA, 20 nt, Human
aggcaggaggggaagcuugg

SEQ ID NO: 641345 - RNA, 23 nt, Human
aggcaggaggggaagcuugggac

SEQ ID NO: 641346 - RNA, 21 nt, Human
auaccauuguggcaaaggggg

SEQ ID NO: 641347 - RNA, 20 nt, Human
auuggaggggucagugcugu

SEQ ID NO: 641348 - RNA, 22 nt, Human
caagccaucauaccauuguggc

SEQ ID NO: 641349 - RNA, 26 nt, Human
cagcuaugcccauuccucugccucca

SEQ ID NO: 641350 - RNA, 19 nt, Human
caucuggauggcgacaccc

SEQ ID NO: 641351 - RNA, 19 nt, Human
cauuguggcaaagggggca

SEQ ID NO: 641352 - RNA, 21 nt, Human
ccgcugaaguugaggcgcagg

SEQ ID NO: 641353 - RNA, 22 nt, Human
cugccucgaggggcuaccaagc

SEQ ID NO: 641354 - RNA, 21 nt, Human
cuuugagaggagggggaggca

SEQ ID NO: 641355 - RNA, 27 nt, Human
cuuugagaggagggggaggcaagguug

SEQ ID NO: 641356 - RNA, 19 nt, Human
gaagugcaagguggcacaa

SEQ ID NO: 641357 - RNA, 24 nt, Human
gagcagugcaagccaggaggccac

SEQ ID NO: 641358 - RNA, 22 nt, Human
gaggaugaggagagagcaccaa

SEQ ID NO: 641359 - RNA, 23 nt, Human
gauuccagacucaguccugguca

SEQ ID NO: 641360 - RNA, 21 nt, Human
ggagcagugcaagccaggagg

SEQ ID NO: 641361 - RNA, 19 nt, Human
ggcaugaggaugaggagag

SEQ ID NO: 641362 - RNA, 20 nt, Human
ggcgugggggcaugcaggaa

SEQ ID NO: 641363 - RNA, 18 nt, Human
gggcaugaggaugaggag

SEQ ID NO: 641364 - RNA, 18 nt, Human
gugagccccuuggugaca

SEQ ID NO: 641365 - RNA, 20 nt, Human
uaauagcagcaagucaggug

SEQ ID NO: 641366 - RNA, 19 nt, Human
uaccauuguggcaaagggg

SEQ ID NO: 641367 - RNA, 23 nt, Human
uagcagcaagucaggugcaucug

SEQ ID NO: 641368 - RNA, 21 nt, Human
uccuucuagcugaauggagag

SEQ ID NO: 641369 - RNA, 19 nt, Human
ucuagagggagcagugcaa

SEQ ID NO: 641370 - RNA, 24 nt, Human
ugaaggaaucuuucuagagggagc

SEQ ID NO: 641371 - RNA, 22 nt, Human
ugagaggagggggaggcaaggu

SEQ ID NO: 641372 - RNA, 26 nt, Human
ugagaggagggggaggcaagguuggu

SEQ ID NO: 641373 - RNA, 19 nt, Human
ugauucaccaucuuuaacu

SEQ ID NO: 641374 - RNA, 18 nt, Human
ugccacaugcuuuggucc

SEQ ID NO: 641375 - RNA, 18 nt, Human
ugcccagcaggcgugggg

SEQ ID NO: 641376 - RNA, 20 nt, Human
ugcccauuccucugccucca

SEQ ID NO: 641377 - RNA, 20 nt, Human
uggcacaaacgagccagcaa

SEQ ID NO: 641378 - RNA, 18 nt, Human
uggcagacauaagaugug

SEQ ID NO: 641379 - RNA, 19 nt, Human
uggcauggcagacauaaga

SEQ ID NO: 641380 - RNA, 24 nt, Human
ugguagaaggcacacggcuuuuua

SEQ ID NO: 641381 - RNA, 21 nt, Human
uuuuuugguagaaggcacacg

SEQ ID NO: 641382 - RNA, 21 nt, Human
uuuuuuuuuuugguagaaggc

SEQ ID NO: 641383 - RNA, 20 nt, Human
uuuuuuuuuuuuuuuuuggu

SEQ ID NO: 641384 - RNA, 22 nt, Human
uuuuuuuuuuuuuuuuugguag

SEQ ID NO: 641385 - RNA, 21 nt, Human
aagugagccccagccaacuga

SEQ ID NO: 641386 - RNA, 22 nt, Human
cauguguauuuucccacuuuca

SEQ ID NO: 641387 - RNA, 24 nt, Human
cccacuuucauuaaucucuucuuu

SEQ ID NO: 641388 - RNA, 23 nt, Human
cccgccgccgcguccucccgggc

SEQ ID NO: 641389 - RNA, 19 nt, Human
cccgcugcccuagcccugc

SEQ ID NO: 641390 - RNA, 23 nt, Human
cccuagcccugcgcccccagguu

SEQ ID NO: 641391 - RNA, 20 nt, Human
ccgccgcguccucccgggcc

SEQ ID NO: 641392 - RNA, 18 nt, Human
ccgcgucccguugccaag

SEQ ID NO: 641393 - RNA, 20 nt, Human
ccgcugcccuagcccugcgc

SEQ ID NO: 641394 - RNA, 21 nt, Human
cgucccguugccaagugagcc

SEQ ID NO: 641395 - RNA, 22 nt, Human
cguugccaagugagccccagcc

SEQ ID NO: 641396 - RNA, 22 nt, Human
cucccgggccugcguccgcgcc

SEQ ID NO: 641397 - RNA, 23 nt, Human
cugcguccgcgccccucguuccc

SEQ ID NO: 641398 - RNA, 21 nt, Human
cuuuuuaucuuacauacuuuu

SEQ ID NO: 641399 - RNA, 22 nt, Human
gccgccgcguccucccgggccu

SEQ ID NO: 641400 - RNA, 21 nt, Human
gccgugcgggucgggcccgcu

SEQ ID NO: 641401 - RNA, 20 nt, Human
gcgaggggcagcgcuuucca

SEQ ID NO: 641402 - RNA, 24 nt, Human
uaccauguguuuuuuaaguugagg

SEQ ID NO: 641403 - RNA, 20 nt, Human
ucccgccgccgcguccuccc

SEQ ID NO: 641404 - RNA, 18 nt, Human
ucccgcgucccguugcca

SEQ ID NO: 641405 - RNA, 24 nt, Human
ugacccacuugccgaaccgaggca

SEQ ID NO: 641406 - RNA, 20 nt, Human
uggagguaauuucccacugc

SEQ ID NO: 641407 - RNA, 20 nt, Human
uuuuuuuuuuuuagagaaau

SEQ ID NO: 641408 - RNA, 27 nt, Human
aaaacaaaagcaaacacaaaaaggcaa

SEQ ID NO: 641409 - RNA, 21 nt, Human
aaacaacaaacaugggugcca

SEQ ID NO: 641410 - RNA, 23 nt, Human
aaacaugggugccaugaaauucu

SEQ ID NO: 641411 - RNA, 20 nt, Human
aaagcaaacacaaaaaggca

SEQ ID NO: 641412 - RNA, 24 nt, Human
aaaguguugggcuuacaggcauga

SEQ ID NO: 641413 - RNA, 23 nt, Human
aaaguuacgaccugaggugaaag

SEQ ID NO: 641414 - RNA, 22 nt, Human
aacaaaacacaugcugcuccuu

SEQ ID NO: 641415 - RNA, 24 nt, Human
aaccaagcaaacacaucugaacua

SEQ ID NO: 641416 - RNA, 20 nt, Human
aaccaugaucaugcacagca

SEQ ID NO: 641417 - RNA, 24 nt, Human
aagcaaacacaaaaaggcaaauca

SEQ ID NO: 641418 - RNA, 27 nt, Human
aagcagaaagcacagagucaagacuuc

SEQ ID NO: 641419 - RNA, 23 nt, Human
aagcuccucccccaaccucuuuu

SEQ ID NO: 641420 - RNA, 22 nt, Human
aaggaaaaggagaaagugggga

SEQ ID NO: 641421 - RNA, 19 nt, Human
aaguggauuauguggaauu

SEQ ID NO: 641422 - RNA, 19 nt, Human
aaugaugcuggugggugcc

SEQ ID NO: 641423 - RNA, 19 nt, Human
acagagcagccaauaccuu

SEQ ID NO: 641424 - RNA, 20 nt, Human
accuagagugcucaguggca

SEQ ID NO: 641425 - RNA, 18 nt, Human
acgggguuucaccagguu

SEQ ID NO: 641426 - RNA, 20 nt, Human
acgggguuucaccagguugg

SEQ ID NO: 641427 - RNA, 24 nt, Human
acgggguuucaccagguuggccag

SEQ ID NO: 641428 - RNA, 18 nt, Human
agaaguucagucaccagg

SEQ ID NO: 641429 - RNA, 20 nt, Human
agagacgggguuucaccagg

SEQ ID NO: 641430 - RNA, 21 nt, Human
agccacucuaagcagaaagca

SEQ ID NO: 641431 - RNA, 19 nt, Human
aggcaauccaccugccuca

SEQ ID NO: 641432 - RNA, 22 nt, Human
aggcaauccaccugccucagcc

SEQ ID NO: 641433 - RNA, 24 nt, Human
aggcaauccaccugccucagccuc

SEQ ID NO: 641434 - RNA, 18 nt, Human
aguauuucuuacaucuau

SEQ ID NO: 641435 - RNA, 23 nt, Human
agucugcagaaauaucauaaaua

SEQ ID NO: 641436 - RNA, 23 nt, Human
agugcguggcacgaucuuggcuc

SEQ ID NO: 641437 - RNA, 21 nt, Human
auuacaggcgcaugccaccau

SEQ ID NO: 641438 - RNA, 22 nt, Human
caacaaagcaaguuagauucuc

SEQ ID NO: 641439 - RNA, 23 nt, Human
caaccuccaccuccuggguucaa

SEQ ID NO: 641440 - RNA, 24 nt, Human
caagcaaacacaucugaacuagaa

SEQ ID NO: 641441 - RNA, 22 nt, Human
caagcgauucuccugucucagc

SEQ ID NO: 641442 - RNA, 18 nt, Human
cacaagacuucccaaagc

SEQ ID NO: 641443 - RNA, 23 nt, Human
cacagagcagccaauaccuuuaa

SEQ ID NO: 641444 - RNA, 23 nt, Human
cacauuuacaaaaaauacagaaa

SEQ ID NO: 641445 - RNA, 19 nt, Human
caccagguuggccagggug

SEQ ID NO: 641446 - RNA, 24 nt, Human
caccagguuggccaggguggucuu

SEQ ID NO: 641447 - RNA, 24 nt, Human
caccaugccagucuaauuuuugua

SEQ ID NO: 641448 - RNA, 22 nt, Human
cacccagguugcagugcguggc

SEQ ID NO: 641449 - RNA, 23 nt, Human
caccugccucagccucccaaagu

SEQ ID NO: 641450 - RNA, 21 nt, Human
cacugcaaccuccaccuccug

SEQ ID NO: 641451 - RNA, 23 nt, Human
cacugcaaccuccaccuccuggg

SEQ ID NO: 641452 - RNA, 26 nt, Human
cagaacaaaacacaugcugcuccuuu

SEQ ID NO: 641453 - RNA, 20 nt, Human
cagccuccuggguagcuggg

SEQ ID NO: 641454 - RNA, 26 nt, Human
caggaucagccaugugguuaacuccu

SEQ ID NO: 641455 - RNA, 21 nt, Human
caguuugcugauuucuucagc

SEQ ID NO: 641456 - RNA, 21 nt, Human
cauccagauuugcccagaagu

SEQ ID NO: 641457 - RNA, 24 nt, Human
ccaaaguguugggcuuacaggcau

SEQ ID NO: 641458 - RNA, 24 nt, Human
ccaccuccuggguucaagcgauuc

SEQ ID NO: 641459 - RNA, 19 nt, Human
ccaccugccucagccuccc

SEQ ID NO: 641460 - RNA, 20 nt, Human
ccauccagagaacauuugau

SEQ ID NO: 641461 - RNA, 19 nt, Human
ccuccaccuccuggguuca

SEQ ID NO: 641462 - RNA, 24 nt, Human
ccuccuggguucaagcgauucucc

SEQ ID NO: 641463 - RNA, 21 nt, Human
ccucuuugggauccuaaacuu

SEQ ID NO: 641464 - RNA, 22 nt, Human
ccugcagaauuaagcaaucacc

SEQ ID NO: 641465 - RNA, 23 nt, Human
ccuggguagcugggauuacaggc

SEQ ID NO: 641466 - RNA, 24 nt, Human
ccuggguagcugggauuacaggcg

SEQ ID NO: 641467 - RNA, 23 nt, Human
ccuggguucaagcgauucuccug

SEQ ID NO: 641468 - RNA, 21 nt, Human
cgcaugccaccaugccagucu

SEQ ID NO: 641469 - RNA, 24 nt, Human
cgggguuucaccagguuggccagg

SEQ ID NO: 641470 - RNA, 24 nt, Human
cucacugcaaccuccaccuccugg

SEQ ID NO: 641471 - RNA, 26 nt, Human
cucacugcaaccuccaccuccugggu

SEQ ID NO: 641472 - RNA, 24 nt, Human
cucagccuccuggguagcugggau

SEQ ID NO: 641473 - RNA, 21 nt, Human
cuccuggguucaagcgauucu

SEQ ID NO: 641474 - RNA, 22 nt, Human
cuccugucucagccuccugggu

SEQ ID NO: 641475 - RNA, 18 nt, Human
cugcaaccuccaccuccu

SEQ ID NO: 641476 - RNA, 23 nt, Human
cugcaaccuccaccuccuggguu

SEQ ID NO: 641477 - RNA, 24 nt, Human
cugcaaccuccaccuccuggguuc

SEQ ID NO: 641478 - RNA, 18 nt, Human
cugccucagccucccaaa

SEQ ID NO: 641479 - RNA, 24 nt, Human
cugccucagccucccaaaguguug

SEQ ID NO: 641480 - RNA, 20 nt, Human
cuggguagcugggauuacag

SEQ ID NO: 641481 - RNA, 23 nt, Human
cugucucagccuccuggguagcu

SEQ ID NO: 641482 - RNA, 22 nt, Human
cuugaacuacugaccucaggca

SEQ ID NO: 641483 - RNA, 21 nt, Human
cuugcaaaaacaaaagcaaac

SEQ ID NO: 641484 - RNA, 22 nt, Human
gaacaaaacacaugcugcuccu

SEQ ID NO: 641485 - RNA, 24 nt, Human
gaccucaggcaauccaccugccuc

SEQ ID NO: 641486 - RNA, 22 nt, Human
gagaacauuugauuagugguca

SEQ ID NO: 641487 - RNA, 19 nt, Human
gagaacuacaauaaaaaag

SEQ ID NO: 641488 - RNA, 20 nt, Human
gagacgggguuucaccaggu

SEQ ID NO: 641489 - RNA, 18 nt, Human
gauuacaggcgcaugcca

SEQ ID NO: 641490 - RNA, 22 nt, Human
gauuacaggcgcaugccaccau

SEQ ID NO: 641491 - RNA, 21 nt, Human
gauucuccugucucagccucc

SEQ ID NO: 641492 - RNA, 24 nt, Human
gcaauccaccugccucagccuccc

SEQ ID NO: 641493 - RNA, 20 nt, Human
gcaugccaccaugccagucu

SEQ ID NO: 641494 - RNA, 18 nt, Human
gcauuuuuaaggacaaaa

SEQ ID NO: 641495 - RNA, 23 nt, Human
gcgauucuccugucucagccucc

SEQ ID NO: 641496 - RNA, 21 nt, Human
gcuggugggugccucgcaacc

SEQ ID NO: 641497 - RNA, 22 nt, Human
gcuuacaggcaugagccgcugc

SEQ ID NO: 641498 - RNA, 23 nt, Human
ggaaggaaaaggagaaagugggg

SEQ ID NO: 641499 - RNA, 22 nt, Human
ggcuuacaggcaugagccgcug

SEQ ID NO: 641500 - RNA, 23 nt, Human
gggcauuuaguuagcaauuagca

SEQ ID NO: 641501 - RNA, 23 nt, Human
gggguuucaccagguuggccagg

SEQ ID NO: 641502 - RNA, 19 nt, Human
ggugaaaguaacaggaaag

SEQ ID NO: 641503 - RNA, 23 nt, Human
gguggucuugaacuacugaccuc

SEQ ID NO: 641504 - RNA, 29 nt, Human
guaagcuccucccccaaccucuuuuuuuu

SEQ ID NO: 641505 - RNA, 18 nt, Human
guagcugggauuacaggc

SEQ ID NO: 641506 - RNA, 18 nt, Human
guagcugggauuacaggc

SEQ ID NO: 641507 - RNA, 20 nt, Human
gugcaguuagcaacuccugg

SEQ ID NO: 641508 - RNA, 21 nt, Human
uaaaagaaaaacaacccaacc

SEQ ID NO: 641509 - RNA, 27 nt, Human
uaaaagaaaaacaacccaaccaaacaa

SEQ ID NO: 641510 - RNA, 25 nt, Human
uaaacacauuuacaaaaaauacaga

SEQ ID NO: 641511 - RNA, 22 nt, Human
uaaauauauuucauuuaaauuu

SEQ ID NO: 641512 - RNA, 18 nt, Human
uaagaugcaguaaaugug

SEQ ID NO: 641513 - RNA, 18 nt, Human
uaagcagaaagcacagag

SEQ ID NO: 641514 - RNA, 23 nt, Human
uaagcuugcaaaaacaaaagcaa

SEQ ID NO: 641515 - RNA, 19 nt, Human
uaauagagacgggguuuca

SEQ ID NO: 641516 - RNA, 26 nt, Human
uaauagagacgggguuucaccagguu

SEQ ID NO: 641517 - RNA, 24 nt, Human
uaauuuuuguauuuuuaauagaga

SEQ ID NO: 641518 - RNA, 18 nt, Human
uacaauauccaagguaau

SEQ ID NO: 641519 - RNA, 21 nt, Human
uacagaacaaaacacaugcug

SEQ ID NO: 641520 - RNA, 23 nt, Human
uacaggcaugagccgcugcaccc

SEQ ID NO: 641521 - RNA, 20 nt, Human
uaccuuuaauggaaauaacc

SEQ ID NO: 641522 - RNA, 25 nt, Human
uacgaccugaggugaaaguaacagg

SEQ ID NO: 641523 - RNA, 23 nt, Human
uagaguuuugguaacuacguggc

SEQ ID NO: 641524 - RNA, 19 nt, Human
uaugcacaagacuucccaa

SEQ ID NO: 641525 - RNA, 23 nt, Human
ucacugcaaccuccaccuccugg

SEQ ID NO: 641526 - RNA, 24 nt, Human
ucacugcaaccuccaccuccuggg

SEQ ID NO: 641527 - RNA, 25 nt, Human
ucacugcaaccuccaccuccugggu

SEQ ID NO: 641528 - RNA, 27 nt, Human
ucacugcaaccuccaccuccuggguuc

SEQ ID NO: 641529 - RNA, 20 nt, Human
ucagccuccuggguagcugg

SEQ ID NO: 641530 - RNA, 23 nt, Human
ucagucaccaggaucagccaugu

SEQ ID NO: 641531 - RNA, 18 nt, Human
ucauagggagagccucuu

SEQ ID NO: 641532 - RNA, 26 nt, Human
uccacccuuauuaaaccaaccccuag

SEQ ID NO: 641533 - RNA, 24 nt, Human
ucccaaaguguugggcuuacaggc

SEQ ID NO: 641534 - RNA, 24 nt, Human
uccuggguagcugggauuacaggc

SEQ ID NO: 641535 - RNA, 21 nt, Human
uccuggguucaagcgauucuc

SEQ ID NO: 641536 - RNA, 24 nt, Human
uccuggguucaagcgauucuccug

SEQ ID NO: 641537 - RNA, 19 nt, Human
ucucgcucugucacccagg

SEQ ID NO: 641538 - RNA, 22 nt, Human
ucucgcucugucacccagguug

SEQ ID NO: 641539 - RNA, 23 nt, Human
ucucgcucugucacccagguugc

SEQ ID NO: 641540 - RNA, 24 nt, Human
ucucgcucugucacccagguugca

SEQ ID NO: 641541 - RNA, 19 nt, Human
ucugucacccagguugcag

SEQ ID NO: 641542 - RNA, 21 nt, Human
ucugucuguauaacccagaga

SEQ ID NO: 641543 - RNA, 21 nt, Human
ucuuugggauccuaaacuuga

SEQ ID NO: 641544 - RNA, 22 nt, Human
ucuuuuuuuuuuuugagaugga

SEQ ID NO: 641545 - RNA, 21 nt, Human
ugaaagcuuuuaaaaauagag

SEQ ID NO: 641546 - RNA, 18 nt, Human
ugaaaguaacaggaaaga

SEQ ID NO: 641547 - RNA, 22 nt, Human
ugaccacuuaaaagaaaaacaa

SEQ ID NO: 641548 - RNA, 21 nt, Human
ugaccucaggcaauccaccug

SEQ ID NO: 641549 - RNA, 22 nt, Human
ugagauggagucucgcucuguc

SEQ ID NO: 641550 - RNA, 18 nt, Human
ugaggugaaaguaacagg

SEQ ID NO: 641551 - RNA, 21 nt, Human
ugaucaugcacagcaagcuuu

SEQ ID NO: 641552 - RNA, 21 nt, Human
ugcagaaaauccaaauagauu

SEQ ID NO: 641553 - RNA, 23 nt, Human
ugcagugcguggcacgaucuugg

SEQ ID NO: 641554 - RNA, 24 nt, Human
ugccucagccucccaaaguguugg

SEQ ID NO: 641555 - RNA, 21 nt, Human
uggccaggguggucuugaacu

SEQ ID NO: 641556 - RNA, 21 nt, Human
uggcugagaagaucaacauua

SEQ ID NO: 641557 - RNA, 21 nt, Human
ugggauuacaggcgcaugcca

SEQ ID NO: 641558 - RNA, 22 nt, Human
ugggauuacaggcgcaugccac

SEQ ID NO: 641559 - RNA, 24 nt, Human
ugggauuacaggcgcaugccacca

SEQ ID NO: 641560 - RNA, 25 nt, Human
ugggauuacaggcgcaugccaccau

SEQ ID NO: 641561 - RNA, 20 nt, Human
ugggcuuacaggcaugagcc

SEQ ID NO: 641562 - RNA, 22 nt, Human
ugggcuuacaggcaugagccgc

SEQ ID NO: 641563 - RNA, 24 nt, Human
ugggcuuacaggcaugagccgcug

SEQ ID NO: 641564 - RNA, 24 nt, Human
ugggcuuacaggcaugagccgcug

SEQ ID NO: 641565 - RNA, 23 nt, Human
uggguucaagcgauucuccuguc

SEQ ID NO: 641566 - RNA, 24 nt, Human
uggguucaagcgauucuccugucu

SEQ ID NO: 641567 - RNA, 19 nt, Human
ugguuaaguggcuaccaga

SEQ ID NO: 641568 - RNA, 24 nt, Human
ugucucagccuccuggguagcugg

SEQ ID NO: 641569 - RNA, 21 nt, Human
ugugguuaacucuucagugga

SEQ ID NO: 641570 - RNA, 20 nt, Human
uuaaaagcaugacacuuuug

SEQ ID NO: 641571 - RNA, 18 nt, Human
uuaauagagacgggguuu

SEQ ID NO: 641572 - RNA, 21 nt, Human
uuacaggcaugagccgcugca

SEQ ID NO: 641573 - RNA, 18 nt, Human
uuagcaauuagcauccag

SEQ ID NO: 641574 - RNA, 23 nt, Human
uucaagcgauucuccugucucag

SEQ ID NO: 641575 - RNA, 18 nt, Human
uucaguggaaucugucca

SEQ ID NO: 641576 - RNA, 23 nt, Human
uugaagcaugcauacaauaucca

SEQ ID NO: 641577 - RNA, 24 nt, Human
uugaagcaugcauacaauauccaa

SEQ ID NO: 641578 - RNA, 22 nt, Human
uugcugauuucuucagcuaugu

SEQ ID NO: 641579 - RNA, 21 nt, Human
uuggacucuucuuuccacccu

SEQ ID NO: 641580 - RNA, 19 nt, Human
uuucaccagguuggccagg

SEQ ID NO: 641581 - RNA, 22 nt, Human
uuugcccagaaguucagucacc

SEQ ID NO: 641582 - RNA, 18 nt, Human
uuuggacucuucuuucca

SEQ ID NO: 641583 - RNA, 21 nt, Human
uuuguucagugacauauugau

SEQ ID NO: 641584 - RNA, 20 nt, Human
uuuucugugaguccugggag

SEQ ID NO: 641585 - RNA, 19 nt, Human
uuuugccucaggaaauucu

SEQ ID NO: 641586 - RNA, 24 nt, Human
uuuuuaauagagacgggguuucac

SEQ ID NO: 641587 - RNA, 20 nt, Human
uuuuuguauuuuuaauagag

SEQ ID NO: 641588 - RNA, 23 nt, Human
uuuuuguauuuuuaauagagacg

SEQ ID NO: 641589 - RNA, 22 nt, Human
uuuuuuuuuuuuuuuuaacagg

SEQ ID NO: 641590 - RNA, 18 nt, Human
aaaaaaccaauagcagcc

SEQ ID NO: 641591 - RNA, 29 nt, Human
aaaaaaccaauagcagccaaaacagaaca

SEQ ID NO: 641592 - RNA, 22 nt, Human
aaaaccacaacuaucagcccug

SEQ ID NO: 641593 - RNA, 28 nt, Human
aaacaagcuuuagagaaagagaaacuga

SEQ ID NO: 641594 - RNA, 19 nt, Human
aaccacaacuaucagcccu

SEQ ID NO: 641595 - RNA, 28 nt, Human
aauacaaaaguauaaaaaaccucuuuaa

SEQ ID NO: 641596 - RNA, 21 nt, Human
agcagccaaaacagaacauuu

SEQ ID NO: 641597 - RNA, 24 nt, Human
agccaaacccgagcgguggaacgc

SEQ ID NO: 641598 - RNA, 18 nt, Human
auacaaaaguauaaaaaa

SEQ ID NO: 641599 - RNA, 22 nt, Human
auagaccaucuuuuuccuuaau

SEQ ID NO: 641600 - RNA, 25 nt, Human
caagcuuuagagaaagagaaacuga

SEQ ID NO: 641601 - RNA, 21 nt, Human
caccacauggccagcuggggg

SEQ ID NO: 641602 - RNA, 21 nt, Human
cacugaaaggaccaaccaguu

SEQ ID NO: 641603 - RNA, 23 nt, Human
cagaacauuuguaaacaaaacca

SEQ ID NO: 641604 - RNA, 24 nt, Human
cuuuaaaaaaccaauagcagccaa

SEQ ID NO: 641605 - RNA, 19 nt, Human
gcccugugcuuaaacacag

SEQ ID NO: 641606 - RNA, 23 nt, Human
gcgcggcuccgggcagcguuccg

SEQ ID NO: 641607 - RNA, 21 nt, Human
gcuggugugaauccauucaaa

SEQ ID NO: 641608 - RNA, 19 nt, Human
gggcccugaacucaccaca

SEQ ID NO: 641609 - RNA, 26 nt, Human
guauaaaaaaccucuuuaaaaaacca

SEQ ID NO: 641610 - RNA, 18 nt, Human
ucugcauucuuuugaaac

SEQ ID NO: 641611 - RNA, 26 nt, Human
ugaaacauaacuauucaaauacaaaa

SEQ ID NO: 641612 - RNA, 18 nt, Human
ugaauccauucaaaacag

SEQ ID NO: 641613 - RNA, 18 nt, Human
uggguaaacgccgcgcgu

SEQ ID NO: 641614 - RNA, 20 nt, Human
ugucaguuacaguucacaua

SEQ ID NO: 641615 - RNA, 25 nt, Human
uuaauauacaauacccaauaucuaa

SEQ ID NO: 641616 - RNA, 22 nt, Human
uucccugauugcugguacuacu

SEQ ID NO: 641617 - RNA, 23 nt, Human
uuuguaaacaaaaccacaacuau

SEQ ID NO: 641618 - RNA, 18 nt, Human
uuuuuuuuuuuugggguc

SEQ ID NO: 641619 - RNA, 18 nt, Human
uuuuuuuuuuuuuuuuug

SEQ ID NO: 641620 - RNA, 22 nt, Human
aaggugccugcuugccggcccc

SEQ ID NO: 641621 - RNA, 20 nt, Human
agcaggacuuuuuguguuuu

SEQ ID NO: 641622 - RNA, 22 nt, Human
aggcgcucauggcuggcuggua

SEQ ID NO: 641623 - RNA, 22 nt, Human
aggcggccuucucaggggcugc

SEQ ID NO: 641624 - RNA, 23 nt, Human
cacggccuggugagucuggugcc

SEQ ID NO: 641625 - RNA, 19 nt, Human
ccauccccaucucuuuccc

SEQ ID NO: 641626 - RNA, 27 nt, Human
ccgaccacggugacagcucccugagcg

SEQ ID NO: 641627 - RNA, 22 nt, Human
ccgccgccgccgccgaccacgg

SEQ ID NO: 641628 - RNA, 18 nt, Human
ccgccgccgccgccgccg

SEQ ID NO: 641629 - RNA, 23 nt, Human
ccgccgccgccgccgccgccgac

SEQ ID NO: 641630 - RNA, 24 nt, Human
ccgccgccgccgccgccgccgccg

SEQ ID NO: 641631 - RNA, 25 nt, Human
ccgccgccgccgccgccgccgccga

SEQ ID NO: 641632 - RNA, 19 nt, Human
ccgcugccuccccacuggc

SEQ ID NO: 641633 - RNA, 21 nt, Human
ccgcugccuccccacuggccc

SEQ ID NO: 641634 - RNA, 20 nt, Human
cgaccacggugacagcuccc

SEQ ID NO: 641635 - RNA, 21 nt, Human
cggccuggugagucuggugcc

SEQ ID NO: 641636 - RNA, 21 nt, Human
cuccaccaccggcucugugcc

SEQ ID NO: 641637 - RNA, 24 nt, Human
cuccaccaccggcucugugccgcc

SEQ ID NO: 641638 - RNA, 20 nt, Human
cucugugccgccgccgccgc

SEQ ID NO: 641639 - RNA, 24 nt, Human
cuuucccgcuagcgcagcuggggg

SEQ ID NO: 641640 - RNA, 19 nt, Human
gaacuuggggccccuagug

SEQ ID NO: 641641 - RNA, 25 nt, Human
gagcacggccuggugagucuggugc

SEQ ID NO: 641642 - RNA, 23 nt, Human
gagggguugaguugaacuugggg

SEQ ID NO: 641643 - RNA, 19 nt, Human
gcccgcacuuccggccucg

SEQ ID NO: 641644 - RNA, 18 nt, Human
gccgccgaccacggugac

SEQ ID NO: 641645 - RNA, 23 nt, Human
gccgccgccgccgccgccgccgg

SEQ ID NO: 641646 - RNA, 22 nt, Human
gccgccgccgccgccgccggcg

SEQ ID NO: 641647 - RNA, 20 nt, Human
ggcuguggcauaaggcacug

SEQ ID NO: 641648 - RNA, 20 nt, Human
gugagucuggugccgcugcc

SEQ ID NO: 641649 - RNA, 20 nt, Human
ucccugagcgcccgcacuuc

SEQ ID NO: 641650 - RNA, 22 nt, Human
ucccugagcgcccgcacuuccg

SEQ ID NO: 641651 - RNA, 26 nt, Human
ucccugagcgcccgcacuuccggccu

SEQ ID NO: 641652 - RNA, 22 nt, Human
ugagcgcccgcacuuccggccu

SEQ ID NO: 641653 - RNA, 24 nt, Human
ugagggguugaguugaacuugggg

SEQ ID NO: 641654 - RNA, 23 nt, Human
ugcaggaaggcgcucauggcugg

SEQ ID NO: 641655 - RNA, 20 nt, Human
ugccgccgccgccgccgccc

SEQ ID NO: 641656 - RNA, 24 nt, Human
uucugcaggaaggcgcucauggcu

SEQ ID NO: 641657 - RNA, 21 nt, Human
uuuuuuuuuuuugaaaggguc

SEQ ID NO: 641658 - RNA, 21 nt, Human
uuuuuuuuuuuuuugaaaggg

SEQ ID NO: 641659 - RNA, 18 nt, Human
uuuuuuuuuuuuuuuuug

SEQ ID NO: 641660 - RNA, 24 nt, Human
uuuuuuuuuuuuuuuuugaaaggg

SEQ ID NO: 641661 - RNA, 22 nt, Human
aaaaaaaccaaacugucuugga

SEQ ID NO: 641662 - RNA, 23 nt, Human
aaaaaaccaaacugucuuggaac

SEQ ID NO: 641663 - RNA, 21 nt, Human
aaaaacuauaccccuugggcc

SEQ ID NO: 641664 - RNA, 25 nt, Human
aaaaggcagaaugacgcugaaagua

SEQ ID NO: 641665 - RNA, 19 nt, Human
aaacagaaaacggaggccc

SEQ ID NO: 641666 - RNA, 23 nt, Human
aaacagaaaacggaggcccagaa

SEQ ID NO: 641667 - RNA, 22 nt, Human
aaacagaaaacggaggcccagg

SEQ ID NO: 641668 - RNA, 23 nt, Human
aaagcacacagcuacucaaacaa

SEQ ID NO: 641669 - RNA, 19 nt, Human
aacaggaccccugagcccc

SEQ ID NO: 641670 - RNA, 25 nt, Human
aacccauccagaauacugcaaccuc

SEQ ID NO: 641671 - RNA, 23 nt, Human
aaccuccugauuugcaaaacaga

SEQ ID NO: 641672 - RNA, 22 nt, Human
aaccuggccuaccuaccagcgg

SEQ ID NO: 641673 - RNA, 28 nt, Human
aaccuggccuaccuaccagcggcugcag

SEQ ID NO: 641674 - RNA, 19 nt, Human
aacuggccucucccucccc

SEQ ID NO: 641675 - RNA, 20 nt, Human
aagaagaugcuagaacucuu

SEQ ID NO: 641676 - RNA, 18 nt, Human
aagcaagacaccccgaca

SEQ ID NO: 641677 - RNA, 22 nt, Human
aagcuaagaaagguacagauac

SEQ ID NO: 641678 - RNA, 22 nt, Human
aaggugcccuggagcuacgggg

SEQ ID NO: 641679 - RNA, 19 nt, Human
aagucccauggaggcccac

SEQ ID NO: 641680 - RNA, 24 nt, Human
aauacugcaaccuccucccacccu

SEQ ID NO: 641681 - RNA, 22 nt, Human
acaaaacccagagacaaaaggc

SEQ ID NO: 641682 - RNA, 25 nt, Human
acaaagcacacagcuacucaaacaa

SEQ ID NO: 641683 - RNA, 21 nt, Human
acacagcuacucaaacaaagc

SEQ ID NO: 641684 - RNA, 21 nt, Human
acagaaggggccaggaggcug

SEQ ID NO: 641685 - RNA, 21 nt, Human
acagagaaaggcagauacaga

SEQ ID NO: 641686 - RNA, 21 nt, Human
acagagccuuuccaacuccaa

SEQ ID NO: 641687 - RNA, 24 nt, Human
acauuugucuguucuguauuuugg

SEQ ID NO: 641688 - RNA, 19 nt, Human
accccucccucugauucac

SEQ ID NO: 641689 - RNA, 21 nt, Human
acccuggggcccagaucucua

SEQ ID NO: 641690 - RNA, 20 nt, Human
accugggcagcuuuaaaaac

SEQ ID NO: 641691 - RNA, 19 nt, Human
acugaucuagcccaaccuc

SEQ ID NO: 641692 - RNA, 22 nt, Human
agaacaaaacccagagacaaaa

SEQ ID NO: 641693 - RNA, 25 nt, Human
agaauuaaaagcaagacaccccgac

SEQ ID NO: 641694 - RNA, 23 nt, Human
agacaaaaggcagaaugagggac

SEQ ID NO: 641695 - RNA, 20 nt, Human
agagagcaaaguaaagaaau

SEQ ID NO: 641696 - RNA, 20 nt, Human
agagccuuuccaacuccaac

SEQ ID NO: 641697 - RNA, 21 nt, Human
agaggguaaaacaguuuggaa

SEQ ID NO: 641698 - RNA, 22 nt, Human
agaggguaaaacaguuuggaaa

SEQ ID NO: 641699 - RNA, 23 nt, Human
agagguaccaagucccauggagg

SEQ ID NO: 641700 - RNA, 23 nt, Human
agcaaaguaaagaaauuggggcu

SEQ ID NO: 641701 - RNA, 19 nt, Human
aggcaagacccuggacacc

SEQ ID NO: 641702 - RNA, 23 nt, Human
aggcaagacccuggacaccugug

SEQ ID NO: 641703 - RNA, 20 nt, Human
aggcagcagaaaaaggggaa

SEQ ID NO: 641704 - RNA, 22 nt, Human
aggcagggacaaagagacacag

SEQ ID NO: 641705 - RNA, 22 nt, Human
auacuaucugccagaaggaucc

SEQ ID NO: 641706 - RNA, 28 nt, Human
auacugcaaccuccucccaaccggaggg

SEQ ID NO: 641707 - RNA, 21 nt, Human
aucgcuuucaccaugcaauga

SEQ ID NO: 641708 - RNA, 24 nt, Human
auggaauagccaggcagcagaaaa

SEQ ID NO: 641709 - RNA, 21 nt, Human
caaaacaaucacuaccuuaga

SEQ ID NO: 641710 - RNA, 21 nt, Human
caaaacagaaaacggaggccc

SEQ ID NO: 641711 - RNA, 22 nt, Human
caaaacccagagacaaaaggca

SEQ ID NO: 641712 - RNA, 24 nt, Human
caaaacccagagacaaaaggcaga

SEQ ID NO: 641713 - RNA, 27 nt, Human
caaagcagcuguguuugccaaaaaaac

SEQ ID NO: 641714 - RNA, 25 nt, Human
caacaagccaaaacucacauaagac

SEQ ID NO: 641715 - RNA, 24 nt, Human
caagacaccccgacaagcuaagaa

SEQ ID NO: 641716 - RNA, 21 nt, Human
caagccccagagaauuaaaag

SEQ ID NO: 641717 - RNA, 18 nt, Human
caaggaaaucauguacag

SEQ ID NO: 641718 - RNA, 22 nt, Human
cacacagcuacucaaacaaagc

SEQ ID NO: 641719 - RNA, 24 nt, Human
caccagaucauucuacuauacagg

SEQ ID NO: 641720 - RNA, 23 nt, Human
caccugggcagcuuuaaaaacaa

SEQ ID NO: 641721 - RNA, 23 nt, Human
cacucagcaaccauccacucagc

SEQ ID NO: 641722 - RNA, 22 nt, Human
cagaaaacggaggcccagaagu

SEQ ID NO: 641723 - RNA, 20 nt, Human
cagauuccagaagggaacaa

SEQ ID NO: 641724 - RNA, 21 nt, Human
cagcagagccugcaaagucuc

SEQ ID NO: 641725 - RNA, 20 nt, Human
caggaacuggccucucccuc

SEQ ID NO: 641726 - RNA, 18 nt, Human
cagggacaaagagacaca

SEQ ID NO: 641727 - RNA, 23 nt, Human
cagggcucuccucgcucaccggg

SEQ ID NO: 641728 - RNA, 24 nt, Human
caguaaagguguuuaaugucuucu

SEQ ID NO: 641729 - RNA, 23 nt, Human
cauacuaucugccagaaggaucc

SEQ ID NO: 641730 - RNA, 23 nt, Human
caugagcauggaauagccaggca

SEQ ID NO: 641731 - RNA, 27 nt, Human
caugcaaugacagauaauggccaugcg

SEQ ID NO: 641732 - RNA, 20 nt, Human
ccacuaagucuugagccaag

SEQ ID NO: 641733 - RNA, 21 nt, Human
ccagaauacugcaaccuccuc

SEQ ID NO: 641734 - RNA, 22 nt, Human
ccaugagcauggaauagccagg

SEQ ID NO: 641735 - RNA, 18 nt, Human
cccagaaguaggaaggcc

SEQ ID NO: 641736 - RNA, 26 nt, Human
ccccagagaauuaaaagcaagacacc

SEQ ID NO: 641737 - RNA, 22 nt, Human
ccccugagccccuucaucagau

SEQ ID NO: 641738 - RNA, 22 nt, Human
cccuggacaccugugccaggga

SEQ ID NO: 641739 - RNA, 22 nt, Human
ccgcuuacacuccauuuuguuu

SEQ ID NO: 641740 - RNA, 24 nt, Human
ccgcuuacacuccauuuuguuuuu

SEQ ID NO: 641741 - RNA, 21 nt, Human
ccucagccagggcucuccucg

SEQ ID NO: 641742 - RNA, 23 nt, Human
ccucucccuccccacucggcuuc

SEQ ID NO: 641743 - RNA, 28 nt, Human
ccucugauucacucagcaaccauccacu

SEQ ID NO: 641744 - RNA, 19 nt, Human
ccugaugccucagccaggg

SEQ ID NO: 641745 - RNA, 25 nt, Human
ccugcaaagucucaaacagcggacc

SEQ ID NO: 641746 - RNA, 20 nt, Human
ccuggagggaggguuccuga

SEQ ID NO: 641747 - RNA, 21 nt, Human
cgagcaaggccuuccucuccc

SEQ ID NO: 641748 - RNA, 19 nt, Human
cgccugggaugacugagag

SEQ ID NO: 641749 - RNA, 22 nt, Human
cuaagaaagguacagauaccau

SEQ ID NO: 641750 - RNA, 20 nt, Human
cuagcaucugcucucgucca

SEQ ID NO: 641751 - RNA, 24 nt, Human
cuauacaggcaagacccuggacac

SEQ ID NO: 641752 - RNA, 19 nt, Human
cucacauaagacaggcagu

SEQ ID NO: 641753 - RNA, 21 nt, Human
cucccagcacugccugccacg

SEQ ID NO: 641754 - RNA, 20 nt, Human
cugagaacaaaacccagaga

SEQ ID NO: 641755 - RNA, 25 nt, Human
cugcgcacaggccucuaccuuuccc

SEQ ID NO: 641756 - RNA, 18 nt, Human
cuggccucucccucccca

SEQ ID NO: 641757 - RNA, 20 nt, Human
cugggaggcagggacaaaga

SEQ ID NO: 641758 - RNA, 18 nt, Human
cuuacaagccccagagaa

SEQ ID NO: 641759 - RNA, 21 nt, Human
cuugacaaagaagaugcuaga

SEQ ID NO: 641760 - RNA, 19 nt, Human
gaaacaagcaaaacaauca

SEQ ID NO: 641761 - RNA, 24 nt, Human
gaaagacacagcagagccugcaaa

SEQ ID NO: 641762 - RNA, 21 nt, Human
gaacuggccucucccucccca

SEQ ID NO: 641763 - RNA, 22 nt, Human
gaagagcaggcaggaacuggcc

SEQ ID NO: 641764 - RNA, 20 nt, Human
gagaacaaaacccagagaca

SEQ ID NO: 641765 - RNA, 18 nt, Human
gagacuucuaccaucaca

SEQ ID NO: 641766 - RNA, 20 nt, Human
gagcaggcaggaacuggccu

SEQ ID NO: 641767 - RNA, 21 nt, Human
gaggcagggacaaagagacac

SEQ ID NO: 641768 - RNA, 24 nt, Human
gaucuagcccaaccuccugauuug

SEQ ID NO: 641769 - RNA, 24 nt, Human
gaugcugagaacaaaacccagaga

SEQ ID NO: 641770 - RNA, 22 nt, Human
gauucacucagcaaccauccac

SEQ ID NO: 641771 - RNA, 24 nt, Human
gcaaaaacuauaccccuugggcca

SEQ ID NO: 641772 - RNA, 23 nt, Human
gccaggcagcagaaaaaggggaa

SEQ ID NO: 641773 - RNA, 21 nt, Human
gcccaaccuccugauuugcaa

SEQ ID NO: 641774 - RNA, 21 nt, Human
gcgcucugggaggcagggaca

SEQ ID NO: 641775 - RNA, 25 nt, Human
gcuccaccccgugccacguuuugcc

SEQ ID NO: 641776 - RNA, 18 nt, Human
gcuuacacuccauuuugu

SEQ ID NO: 641777 - RNA, 23 nt, Human
ggaccuacaacuaacccauccag

SEQ ID NO: 641778 - RNA, 19 nt, Human
ggagaaacaagcaaaacaa

SEQ ID NO: 641779 - RNA, 21 nt, Human
ggccaggaggcugggagugca

SEQ ID NO: 641780 - RNA, 20 nt, Human
ggccucggggacgccgugag

SEQ ID NO: 641781 - RNA, 23 nt, Human
gggucuggacugaggggccucgg

SEQ ID NO: 641782 - RNA, 22 nt, Human
ggguuagaacacagcugguacc

SEQ ID NO: 641783 - RNA, 20 nt, Human
ggugggaggaguggcagaag

SEQ ID NO: 641784 - RNA, 18 nt, Human
gucaagcugugcccaucu

SEQ ID NO: 641785 - RNA, 18 nt, Human
guuuguuuugguucccaa

SEQ ID NO: 641786 - RNA, 21 nt, Human
uaaaagcaagacaccccgaca

SEQ ID NO: 641787 - RNA, 24 nt, Human
uaaggaaaaagucaacauugcaaa

SEQ ID NO: 641788 - RNA, 23 nt, Human
uaagggagagaaaagagggaggg

SEQ ID NO: 641789 - RNA, 20 nt, Human
uaagucuugagccaagaaaa

SEQ ID NO: 641790 - RNA, 22 nt, Human
uaaugaaccuggccuaccuacc

SEQ ID NO: 641791 - RNA, 23 nt, Human
uacagcuuagccgcuuacacucc

SEQ ID NO: 641792 - RNA, 21 nt, Human
uaccaagucccauggaggccc

SEQ ID NO: 641793 - RNA, 19 nt, Human
uaccagaugacacacuucc

SEQ ID NO: 641794 - RNA, 18 nt, Human
uaccccucccucugauuc

SEQ ID NO: 641795 - RNA, 21 nt, Human
uaccuggagggaggguuccug

SEQ ID NO: 641796 - RNA, 28 nt, Human
uacuauacaggcaagacccuggacaccu

SEQ ID NO: 641797 - RNA, 19 nt, Human
uaggauuuggaaucagaga

SEQ ID NO: 641798 - RNA, 18 nt, Human
uagggaccuacaacuaac

SEQ ID NO: 641799 - RNA, 26 nt, Human
uagggaccuacaacuaacccauccag

SEQ ID NO: 641800 - RNA, 19 nt, Human
uaguaaggaaaaagucaac

SEQ ID NO: 641801 - RNA, 28 nt, Human
uauaaaggaaaaacagaaaguuaugaca

SEQ ID NO: 641802 - RNA, 24 nt, Human
uaugggucccacccugagagacuu

SEQ ID NO: 641803 - RNA, 23 nt, Human
ucaacaagccaaaacucacauaa

SEQ ID NO: 641804 - RNA, 21 nt, Human
ucaccagaucauucuacuaua

SEQ ID NO: 641805 - RNA, 19 nt, Human
ucacuaccuuagagagcaa

SEQ ID NO: 641806 - RNA, 21 nt, Human
ucacuggguugcuugcuauaa

SEQ ID NO: 641807 - RNA, 24 nt, Human
ucagaggguaaaacaguuuggaaa

SEQ ID NO: 641808 - RNA, 20 nt, Human
ucagcaaccauccacucagc

SEQ ID NO: 641809 - RNA, 18 nt, Human
uccaacuccaacccaggc

SEQ ID NO: 641810 - RNA, 18 nt, Human
uccccacucggcuucauc

SEQ ID NO: 641811 - RNA, 18 nt, Human
ucuagagacagagaaagg

SEQ ID NO: 641812 - RNA, 23 nt, Human
ucuagagacagagaaaggcagau

SEQ ID NO: 641813 - RNA, 19 nt, Human
ucuagcuacaacagcagag

SEQ ID NO: 641814 - RNA, 23 nt, Human
ucucaaacauggacuauguggcc

SEQ ID NO: 641815 - RNA, 20 nt, Human
ucucucacaugacagcuugu

SEQ ID NO: 641816 - RNA, 18 nt, Human
ugaaagacacagcagagc

SEQ ID NO: 641817 - RNA, 23 nt, Human
ugaaagacacagcagagccugca

SEQ ID NO: 641818 - RNA, 18 nt, Human
ugaaagccaugagcaugg

SEQ ID NO: 641819 - RNA, 18 nt, Human
ugaaaguaggauuuggaa

SEQ ID NO: 641820 - RNA, 24 nt, Human
ugacaucagguuucuucuagaggg

SEQ ID NO: 641821 - RNA, 19 nt, Human
ugacugauagugcauggca

SEQ ID NO: 641822 - RNA, 21 nt, Human
ugagaacaaaacccagagaca

SEQ ID NO: 641823 - RNA, 24 nt, Human
ugagaacaaaacccagagacaaaa

SEQ ID NO: 641824 - RNA, 19 nt, Human
ugcaaagucucaaacaugg

SEQ ID NO: 641825 - RNA, 21 nt, Human
ugcaaccuccucccacccucc

SEQ ID NO: 641826 - RNA, 21 nt, Human
ugcauggaguggccacaagga

SEQ ID NO: 641827 - RNA, 20 nt, Human
ugcgccugggguguggcugc

SEQ ID NO: 641828 - RNA, 21 nt, Human
ugcucuagagcucaaggacac

SEQ ID NO: 641829 - RNA, 23 nt, Human
uggaaaaacacugaucuagccca

SEQ ID NO: 641830 - RNA, 23 nt, Human
uggaauagccaggcagcagaaaa

SEQ ID NO: 641831 - RNA, 18 nt, Human
uggaaucagagaugcgag

SEQ ID NO: 641832 - RNA, 18 nt, Human
uggccucucccuccccac

SEQ ID NO: 641833 - RNA, 30 nt, Human
ugucuacucaacaagccaaaacucacauag

SEQ ID NO: 641834 - RNA, 24 nt, Human
ugugauaaguucauuuuccugcag

SEQ ID NO: 641835 - RNA, 22 nt, Human
uucacucagcaaccauccacuc

SEQ ID NO: 641836 - RNA, 22 nt, Human
uucccagggcugggcgcucugg

SEQ ID NO: 641837 - RNA, 25 nt, Human
uuugccaaaaaaaccaaacugucuu

SEQ ID NO: 641838 - RNA, 22 nt, Human
uuuugggcuuugacaucagguu

SEQ ID NO: 641839 - RNA, 20 nt, Human
aaaagaaaaagaaaauucaa

SEQ ID NO: 641840 - RNA, 19 nt, Human
aacagggugaaaccccauc

SEQ ID NO: 641841 - RNA, 20 nt, Human
aacagggugaaaccccaucu

SEQ ID NO: 641842 - RNA, 21 nt, Human
aacagggugaaaccccaucuc

SEQ ID NO: 641843 - RNA, 20 nt, Human
aaccucugccucccaggcuc

SEQ ID NO: 641844 - RNA, 25 nt, Human
aagaaaaagaaaauucaagacuuau

SEQ ID NO: 641845 - RNA, 23 nt, Human
aaggcgggcagaucacgagguca

SEQ ID NO: 641846 - RNA, 22 nt, Human
aauacaaaggugauagauuaga

SEQ ID NO: 641847 - RNA, 22 nt, Human
acagagcgaggcugucucaaaa

SEQ ID NO: 641848 - RNA, 24 nt, Human
accccaucucuacuaaaaauacaa

SEQ ID NO: 641849 - RNA, 22 nt, Human
acuccagccugggugacagagc

SEQ ID NO: 641850 - RNA, 23 nt, Human
acucugugguccagacuggacug

SEQ ID NO: 641851 - RNA, 24 nt, Human
acugcaguguugcaaucucggcuc

SEQ ID NO: 641852 - RNA, 24 nt, Human
acuguacuccagccugggugacag

SEQ ID NO: 641853 - RNA, 26 nt, Human
acuguacuccagccugggugacagag

SEQ ID NO: 641854 - RNA, 21 nt, Human
agacuucuggauaaauauccu

SEQ ID NO: 641855 - RNA, 25 nt, Human
agccagacuucuggauaguccgggg

SEQ ID NO: 641856 - RNA, 18 nt, Human
aggaauacagaggugugg

SEQ ID NO: 641857 - RNA, 21 nt, Human
aggagcaguggcucacgccug

SEQ ID NO: 641858 - RNA, 24 nt, Human
aggcaggagaauggcaugaaccca

SEQ ID NO: 641859 - RNA, 27 nt, Human
aggcaggagaauggcaugaacccagga

SEQ ID NO: 641860 - RNA, 21 nt, Human
aggcagggcuugcagugagcc

SEQ ID NO: 641861 - RNA, 24 nt, Human
aggcagggcuugcagugagccgag

SEQ ID NO: 641862 - RNA, 23 nt, Human
aggccaaggcgggcagaucacga

SEQ ID NO: 641863 - RNA, 24 nt, Human
aggcgggcagaucacgaggucagg

SEQ ID NO: 641864 - RNA, 19 nt, Human
aggcugaggcaggagaaug

SEQ ID NO: 641865 - RNA, 23 nt, Human
agggcuugcagugagccgagauu

SEQ ID NO: 641866 - RNA, 23 nt, Human
aguggcucacgccugcaauccca

SEQ ID NO: 641867 - RNA, 18 nt, Human
aucaaugguugucugcau

SEQ ID NO: 641868 - RNA, 20 nt, Human
aucacgaggucaggagauuc

SEQ ID NO: 641869 - RNA, 22 nt, Human
augccacuguacuccagccugg

SEQ ID NO: 641870 - RNA, 24 nt, Human
auuaugccacuguacuccagccug

SEQ ID NO: 641871 - RNA, 23 nt, Human
caaauccucccauguagcaaucc

SEQ ID NO: 641872 - RNA, 24 nt, Human
caacacuuugagaggccaaggcgg

SEQ ID NO: 641873 - RNA, 23 nt, Human
caaccucugccucccaggcucaa

SEQ ID NO: 641874 - RNA, 24 nt, Human
cacgccugcaaucccaacacuuug

SEQ ID NO: 641875 - RNA, 18 nt, Human
cacugcaaccucugccuc

SEQ ID NO: 641876 - RNA, 21 nt, Human
cacugcaaccucugccuccca

SEQ ID NO: 641877 - RNA, 19 nt, Human
cacuguacuccagccuggg

SEQ ID NO: 641878 - RNA, 19 nt, Human
cacuguacuccagccuggg

SEQ ID NO: 641879 - RNA, 19 nt, Human
cacuguacuccagccuggg

SEQ ID NO: 641880 - RNA, 22 nt, Human
cacuguacuccagccuggguga

SEQ ID NO: 641881 - RNA, 23 nt, Human
cacuguacuccagccugggugac

SEQ ID NO: 641882 - RNA, 24 nt, Human
cacuguacuccagccugggugaca

SEQ ID NO: 641883 - RNA, 24 nt, Human
cacuguacuccagccugggugaca

SEQ ID NO: 641884 - RNA, 22 nt, Human
cagccagacuucuggauaaaua

SEQ ID NO: 641885 - RNA, 21 nt, Human
caugaacccaggaggcagggc

SEQ ID NO: 641886 - RNA, 19 nt, Human
ccaacacuuugagaggcca

SEQ ID NO: 641887 - RNA, 20 nt, Human
ccacuguacuccagccuggg

SEQ ID NO: 641888 - RNA, 20 nt, Human
ccacuguacuccagccuggg

SEQ ID NO: 641889 - RNA, 20 nt, Human
ccacuguacuccagccuggg

SEQ ID NO: 641890 - RNA, 21 nt, Human
ccacuguacuccagccugggu

SEQ ID NO: 641891 - RNA, 21 nt, Human
ccacuguacuccagccugggu

SEQ ID NO: 641892 - RNA, 23 nt, Human
ccacuguacuccagccuggguga

SEQ ID NO: 641893 - RNA, 24 nt, Human
ccacuguacuccagccugggugac

SEQ ID NO: 641894 - RNA, 21 nt, Human
cccaggcucaagcaaauccuc

SEQ ID NO: 641895 - RNA, 22 nt, Human
cccaggcucaagcaaauccucc

SEQ ID NO: 641896 - RNA, 21 nt, Human
ccuccacagcuguaauggcuu

SEQ ID NO: 641897 - RNA, 24 nt, Human
ccuggcuaacagggugaaacccca

SEQ ID NO: 641898 - RNA, 18 nt, Human
ccugggugacagagcgag

SEQ ID NO: 641899 - RNA, 21 nt, Human
ccuguagucccagcuauuagg

SEQ ID NO: 641900 - RNA, 22 nt, Human
ccuguagucccagcuauuaggg

SEQ ID NO: 641901 - RNA, 22 nt, Human
cgggcagaucacgaggucagga

SEQ ID NO: 641902 - RNA, 24 nt, Human
cucaagcaaauccucccauguagc

SEQ ID NO: 641903 - RNA, 22 nt, Human
cucacgccugcaaucccaacac

SEQ ID NO: 641904 - RNA, 24 nt, Human
cucacgccugcaaucccaacacuu

SEQ ID NO: 641905 - RNA, 24 nt, Human
cucacugcaaccucugccucccag

SEQ ID NO: 641906 - RNA, 24 nt, Human
cucacugcaaccucugccucccag

SEQ ID NO: 641907 - RNA, 26 nt, Human
cucccaggcucaagcaaauccuccca

SEQ ID NO: 641908 - RNA, 23 nt, Human
cucuacuaaaaauacaaaaaagg

SEQ ID NO: 641909 - RNA, 23 nt, Human
cugcaaccucugccucccaggcu

SEQ ID NO: 641910 - RNA, 24 nt, Human
cugcaaccucugccucccaggcuc

SEQ ID NO: 641911 - RNA, 23 nt, Human
cuggcuaacagggugaaacccca

SEQ ID NO: 641912 - RNA, 25 nt, Human
cuuccuggcuaacagggugaaaccc

SEQ ID NO: 641913 - RNA, 24 nt, Human
cuugcagugagccgagauuaugcc

SEQ ID NO: 641914 - RNA, 20 nt, Human
gauuauaagaaaauucaagc

SEQ ID NO: 641915 - RNA, 23 nt, Human
gcaauccucccacaugaaagcuc

SEQ ID NO: 641916 - RNA, 22 nt, Human
gcaggagaauggcaugaaccca

SEQ ID NO: 641917 - RNA, 19 nt, Human
gccacuguacuccagccug

SEQ ID NO: 641918 - RNA, 24 nt, Human
gccacuguacuccagccuggguga

SEQ ID NO: 641919 - RNA, 23 nt, Human
gccucccaggcucaagcaaaucc

SEQ ID NO: 641920 - RNA, 24 nt, Human
gcuaacagggugaaaccccaucuc

SEQ ID NO: 641921 - RNA, 21 nt, Human
ggcagaucacgaggucaggag

SEQ ID NO: 641922 - RNA, 24 nt, Human
guacuccagccugggugacagagc

SEQ ID NO: 641923 - RNA, 22 nt, Human
gucucaaaaaaaagaaaaagaa

SEQ ID NO: 641924 - RNA, 22 nt, Human
gugacagagcgaggcugucuca

SEQ ID NO: 641925 - RNA, 24 nt, Human
uaacagggugaaaccccaucucua

SEQ ID NO: 641926 - RNA, 19 nt, Human
uaauggcuuuuucccccau

SEQ ID NO: 641927 - RNA, 23 nt, Human
uacaucagucagaaaauucuaga

SEQ ID NO: 641928 - RNA, 22 nt, Human
uacuccagccugggugacagag

SEQ ID NO: 641929 - RNA, 24 nt, Human
uacuccagccugggugacagagcg

SEQ ID NO: 641930 - RNA, 24 nt, Human
uagaaaauggaaaguauuauacag

SEQ ID NO: 641931 - RNA, 22 nt, Human
uauaaaggcuccaggugaauac

SEQ ID NO: 641932 - RNA, 18 nt, Human
uaugcagccagacuucug

SEQ ID NO: 641933 - RNA, 22 nt, Human
uauuuuauuuuugaaacagggu

SEQ ID NO: 641934 - RNA, 24 nt, Human
uauuuuauuuuugaaacagggucu

SEQ ID NO: 641935 - RNA, 24 nt, Human
ucaagccaggagcaguggcucacg

SEQ ID NO: 641936 - RNA, 18 nt, Human
ucacgaggucaggagauu

SEQ ID NO: 641937 - RNA, 22 nt, Human
ucacgaggucaggagauugaga

SEQ ID NO: 641938 - RNA, 19 nt, Human
ucacugcaaccucugccuc

SEQ ID NO: 641939 - RNA, 24 nt, Human
ucacugcaaccucugccucccagg

SEQ ID NO: 641940 - RNA, 25 nt, Human
ucacugcaaccucugccucccaggc

SEQ ID NO: 641941 - RNA, 21 nt, Human
uccaaggagagcagaccuuug

SEQ ID NO: 641942 - RNA, 24 nt, Human
uccacagcuguaauggcuuuuucc

SEQ ID NO: 641943 - RNA, 23 nt, Human
uccagccugggugacagagcgag

SEQ ID NO: 641944 - RNA, 24 nt, Human
uccagccugggugacagagcgagg

SEQ ID NO: 641945 - RNA, 19 nt, Human
ucccaggcucaagcaaauc

SEQ ID NO: 641946 - RNA, 23 nt, Human
ucccccaugaaacagagacacac

SEQ ID NO: 641947 - RNA, 23 nt, Human
ucucaaaaaaaagaaaaagaaaa

SEQ ID NO: 641948 - RNA, 24 nt, Human
ucucacucugugguccagacugga

SEQ ID NO: 641949 - RNA, 22 nt, Human
ucucuacuaaaaauacaaaaaa

SEQ ID NO: 641950 - RNA, 18 nt, Human
ucugugguccagacugga

SEQ ID NO: 641951 - RNA, 19 nt, Human
ugaaaccccaucucuacua

SEQ ID NO: 641952 - RNA, 24 nt, Human
ugagaggccaaggcgggcagauca

SEQ ID NO: 641953 - RNA, 22 nt, Human
ugagccgagauuaugccacugu

SEQ ID NO: 641954 - RNA, 23 nt, Human
ugaggcaggagaauggcaugaac

SEQ ID NO: 641955 - RNA, 24 nt, Human
ugaggcaggagaauggcaugaacc

SEQ ID NO: 641956 - RNA, 25 nt, Human
ugaggcaggagaauggcaugaaccc

SEQ ID NO: 641957 - RNA, 23 nt, Human
ugccuguagucccagcuauuagg

SEQ ID NO: 641958 - RNA, 18 nt, Human
uggaaaguauuauacagc

SEQ ID NO: 641959 - RNA, 24 nt, Human
uggacugcaguguugcaaucucgg

SEQ ID NO: 641960 - RNA, 19 nt, Human
uggcuacaaaacugcccaa

SEQ ID NO: 641961 - RNA, 24 nt, Human
uggcucacgccugcaaucccaaca

SEQ ID NO: 641962 - RNA, 19 nt, Human
ugggauuauaagaaaauuc

SEQ ID NO: 641963 - RNA, 24 nt, Human
ugguggugguugccuguaguccca

SEQ ID NO: 641964 - RNA, 23 nt, Human
uguagucccagcuauuagggagg

SEQ ID NO: 641965 - RNA, 18 nt, Human
ugugacucugaugauggu

SEQ ID NO: 641966 - RNA, 23 nt, Human
uuaugccacuguacuccagccug

SEQ ID NO: 641967 - RNA, 22 nt, Human
uucaagccaggagcaguggcuc

SEQ ID NO: 641968 - RNA, 18 nt, Human
uugcagugagccgagauu

SEQ ID NO: 641969 - RNA, 20 nt, Human
uugcagugagccgagauuau

SEQ ID NO: 641970 - RNA, 21 nt, Human
uugcagugagccgagauuaug

SEQ ID NO: 641971 - RNA, 19 nt, Human
uuugcugcaaucacaggau

SEQ ID NO: 641972 - RNA, 23 nt, Human
uuuuauuuuugaaacagggucuc

SEQ ID NO: 641973 - RNA, 23 nt, Human
uuuuuuuuuuuuuuuauaagagg

SEQ ID NO: 641974 - RNA, 18 nt, Human
auaguaagaguuucucuu

SEQ ID NO: 641975 - RNA, 26 nt, Human
caguuuuguuccaugcuggccggggg

SEQ ID NO: 641976 - RNA, 23 nt, Human
cccccgccgccgccaccggcacc

SEQ ID NO: 641977 - RNA, 20 nt, Human
cccgaagccuccugucccgc

SEQ ID NO: 641978 - RNA, 23 nt, Human
ccgccgccgccaccggcaccacc

SEQ ID NO: 641979 - RNA, 25 nt, Human
ccgccgccgccaccggcaccacccg

SEQ ID NO: 641980 - RNA, 24 nt, Human
cucccccgccgccgccaccggcac

SEQ ID NO: 641981 - RNA, 20 nt, Human
uaauaaauaucauaccuucu

SEQ ID NO: 641982 - RNA, 24 nt, Human
ucugcacaugccuuuuuuucuuuu

SEQ ID NO: 641983 - RNA, 20 nt, Human
ucuguacagcauuuuuauug

SEQ ID NO: 641984 - RNA, 18 nt, Human
ugcaaaaacaugaaauug

SEQ ID NO: 641985 - RNA, 20 nt, Human
ugucccagcccaccccuucu

SEQ ID NO: 641986 - RNA, 22 nt, Human
uuuagcagcugcugaguguuug

SEQ ID NO: 641987 - RNA, 24 nt, Human
uuuuuuuuuuuuuaaagauuuuua

SEQ ID NO: 641988 - RNA, 24 nt, Human
acgccgccucggccgccgccgccc

SEQ ID NO: 641989 - RNA, 22 nt, Human
cacuguccggaccacggaaaua

SEQ ID NO: 641990 - RNA, 24 nt, Human
cccccuccccucucagcccagccc

SEQ ID NO: 641991 - RNA, 20 nt, Human
cccgcgccgccacgcacugu

SEQ ID NO: 641992 - RNA, 25 nt, Human
cccgcgccgccacgcacuguccgga

SEQ ID NO: 641993 - RNA, 22 nt, Human
ccgcccccuccccucucagccc

SEQ ID NO: 641994 - RNA, 21 nt, Human
ccgccucggccgccgccgccc

SEQ ID NO: 641995 - RNA, 18 nt, Human
ccgcgccgccacgcacug

SEQ ID NO: 641996 - RNA, 19 nt, Human
ccuccccucucagcccagc

SEQ ID NO: 641997 - RNA, 22 nt, Human
ccuuuccucugccauuugagag

SEQ ID NO: 641998 - RNA, 21 nt, Human
cgcccccuccccucucagcca

SEQ ID NO: 641999 - RNA, 20 nt, Human
cgccgccucggccgccgccg

SEQ ID NO: 642000 - RNA, 23 nt, Human
cgccgccucggccgccgccgccc

SEQ ID NO: 642001 - RNA, 23 nt, Human
cggcacgacucaauguugacauc

SEQ ID NO: 642002 - RNA, 24 nt, Human
cggcacgacucaauguugacauca

SEQ ID NO: 642003 - RNA, 23 nt, Human
cuacggccuuucugcugcucuuc

SEQ ID NO: 642004 - RNA, 20 nt, Human
cucccguggucacccgcgcc

SEQ ID NO: 642005 - RNA, 24 nt, Human
gcacuguccggaccacggaaauaa

SEQ ID NO: 642006 - RNA, 22 nt, Human
gccuacuucucccguggucacc

SEQ ID NO: 642007 - RNA, 18 nt, Human
gcgugcacgcaugcguau

SEQ ID NO: 642008 - RNA, 19 nt, Human
ucccguggucacccgcgcc

SEQ ID NO: 642009 - RNA, 22 nt, Human
ucccguggucacccgcgccgcc

SEQ ID NO: 642010 - RNA, 18 nt, Human
uuuuuuuuuuuuuuuuug

SEQ ID NO: 642011 - RNA, 23 nt, Human
uuuuuuuuuuuuuuuuuguuuuu

SEQ ID NO: 642012 - RNA, 18 nt, Human
aaacaagcauacacacuu

SEQ ID NO: 642013 - RNA, 24 nt, Human
aaacaccaagcauacucaggauca

SEQ ID NO: 642014 - RNA, 25 nt, Human
aaacagcucaugauccuuuaaaagu

SEQ ID NO: 642015 - RNA, 23 nt, Human
aagcccagagaugaaggucagga

SEQ ID NO: 642016 - RNA, 23 nt, Human
aaggccgcaaaaaggcaagcuga

SEQ ID NO: 642017 - RNA, 23 nt, Human
acaauuuuguuuuuggccaagug

SEQ ID NO: 642018 - RNA, 20 nt, Human
acaguucuuagagcaacccu

SEQ ID NO: 642019 - RNA, 19 nt, Human
acuguuuuccccagaagug

SEQ ID NO: 642020 - RNA, 20 nt, Human
agcauacacacuuacgcaua

SEQ ID NO: 642021 - RNA, 18 nt, Human
agccugaauacugccauu

SEQ ID NO: 642022 - RNA, 18 nt, Human
aggcucaaaauccagcaa

SEQ ID NO: 642023 - RNA, 25 nt, Human
auaaaauucaucuucagaaaugaag

SEQ ID NO: 642024 - RNA, 22 nt, Human
auacauuuuuaauuuuuaaaaa

SEQ ID NO: 642025 - RNA, 22 nt, Human
augauccuuuaaaaguuuaaau

SEQ ID NO: 642026 - RNA, 21 nt, Human
auguacauauguacguugagu

SEQ ID NO: 642027 - RNA, 24 nt, Human
auguauuuuuuaaaaauaaaauuc

SEQ ID NO: 642028 - RNA, 24 nt, Human
auuauauucuacuucauuguuccu

SEQ ID NO: 642029 - RNA, 19 nt, Human
caacuacucaaaaauucug

SEQ ID NO: 642030 - RNA, 24 nt, Human
caagcccagagaugaaggucagga

SEQ ID NO: 642031 - RNA, 22 nt, Human
caccauagacaucagcaagcag

SEQ ID NO: 642032 - RNA, 19 nt, Human
cacguggauaauaaaaaug

SEQ ID NO: 642033 - RNA, 20 nt, Human
cagcaagagcuaacacagca

SEQ ID NO: 642034 - RNA, 22 nt, Human
ccccagaagugagauuucuacu

SEQ ID NO: 642035 - RNA, 24 nt, Human
cucaaaauccagcaagagcuaaca

SEQ ID NO: 642036 - RNA, 22 nt, Human
cuuacgcauaccugcguaugua

SEQ ID NO: 642037 - RNA, 23 nt, Human
cuuuaugguucuguacauauuuc

SEQ ID NO: 642038 - RNA, 21 nt, Human
gcccaagaaacagcucaugau

SEQ ID NO: 642039 - RNA, 21 nt, Human
gccgcaaaaaggcaagcugaa

SEQ ID NO: 642040 - RNA, 21 nt, Human
ggugguucuuuaugguucugu

SEQ ID NO: 642041 - RNA, 18 nt, Human
guaggaccuaggcucaaa

SEQ ID NO: 642042 - RNA, 20 nt, Human
guauuuuuuuuuucugaagg

SEQ ID NO: 642043 - RNA, 18 nt, Human
guguagauuauguacaua

SEQ ID NO: 642044 - RNA, 22 nt, Human
uaaaaaaauccacagccacaaa

SEQ ID NO: 642045 - RNA, 25 nt, Human
uaaaaaaauccacagccacaaauua

SEQ ID NO: 642046 - RNA, 20 nt, Human
uaaaaauaaaauucaucuuc

SEQ ID NO: 642047 - RNA, 21 nt, Human
uaaaauauucaaguguuaugu

SEQ ID NO: 642048 - RNA, 21 nt, Human
uaacaccauagacaucagcaa

SEQ ID NO: 642049 - RNA, 24 nt, Human
uaacaccauagacaucagcaagca

SEQ ID NO: 642050 - RNA, 24 nt, Human
uacacacuuacgcauaccugcgua

SEQ ID NO: 642051 - RNA, 22 nt, Human
uacgcauaccugcguauguagc

SEQ ID NO: 642052 - RNA, 25 nt, Human
uagaauucuccagaauuuaaauuuc

SEQ ID NO: 642053 - RNA, 24 nt, Human
uagacaucagcaagcaggugaugu

SEQ ID NO: 642054 - RNA, 18 nt, Human
uagcacuucuguaacacc

SEQ ID NO: 642055 - RNA, 24 nt, Human
uagcaguuaaaaaaauccacagcc

SEQ ID NO: 642056 - RNA, 21 nt, Human
uaggcucaaaauccagcaaga

SEQ ID NO: 642057 - RNA, 20 nt, Human
uaggugauauauagguuuug

SEQ ID NO: 642058 - RNA, 26 nt, Human
uauagaacaauguguuugcaaauuua

SEQ ID NO: 642059 - RNA, 22 nt, Human
uaucaaagauaaauucaaguuu

SEQ ID NO: 642060 - RNA, 23 nt, Human
uaucaaagauaaauucaaguuua

SEQ ID NO: 642061 - RNA, 25 nt, Human
uauguacauauguacguugaguguu

SEQ ID NO: 642062 - RNA, 21 nt, Human
uaugugauauaaauaugugua

SEQ ID NO: 642063 - RNA, 26 nt, Human
uauguguagauuauguacauauguac

SEQ ID NO: 642064 - RNA, 21 nt, Human
uccccagaagugagauuucua

SEQ ID NO: 642065 - RNA, 23 nt, Human
uccuuuacaauuuuguuuuuggc

SEQ ID NO: 642066 - RNA, 23 nt, Human
ugaaauuuuaggauauguggaau

SEQ ID NO: 642067 - RNA, 19 nt, Human
ugacugaagaaagccacau

SEQ ID NO: 642068 - RNA, 21 nt, Human
ugagaagacaguucuuagagc

SEQ ID NO: 642069 - RNA, 24 nt, Human
ugagaauauucaucgcccaagaaa

SEQ ID NO: 642070 - RNA, 24 nt, Human
ugcaagccaguuuguuuuuaauga

SEQ ID NO: 642071 - RNA, 25 nt, Human
ugccuuugguuucagaaauuugucc

SEQ ID NO: 642072 - RNA, 21 nt, Human
uggcaggcaguaggaccuagg

SEQ ID NO: 642073 - RNA, 24 nt, Human
uggcauugagaugagaauaauuuu

SEQ ID NO: 642074 - RNA, 19 nt, Human
ugggagaacucccacaaua

SEQ ID NO: 642075 - RNA, 22 nt, Human
uguacauauuucuuuucuuccc

SEQ ID NO: 642076 - RNA, 21 nt, Human
ugucuaucaguucuaaaaugc

SEQ ID NO: 642077 - RNA, 25 nt, Human
uguguagauuauguacauauguacg

SEQ ID NO: 642078 - RNA, 24 nt, Human
uguguuugcaaauuuaaauaauau

SEQ ID NO: 642079 - RNA, 25 nt, Human
uguguuugcaaauuuaaauaauauc

SEQ ID NO: 642080 - RNA, 22 nt, Human
uuccuuuacaauuuuguuuuug

SEQ ID NO: 642081 - RNA, 25 nt, Human
uucuguacauauuucuuuucuuccc

SEQ ID NO: 642082 - RNA, 23 nt, Human
uugagaugagaauaauuuucuuu

SEQ ID NO: 642083 - RNA, 22 nt, Human
uuguuuuuggccaagugcuggu

SEQ ID NO: 642084 - RNA, 19 nt, Human
uuucuacugucaguuuucu

SEQ ID NO: 642085 - RNA, 18 nt, Human
uuuuaaugagcuuaaugc

SEQ ID NO: 642086 - RNA, 20 nt, Human
aauggugucugucauuccug

SEQ ID NO: 642087 - RNA, 23 nt, Human
acccaagauuuuacacguagucu

SEQ ID NO: 642088 - RNA, 20 nt, Human
agaguauaugcaaaggcuga

SEQ ID NO: 642089 - RNA, 24 nt, Human
agcacccaaagaaguauaaucuag

SEQ ID NO: 642090 - RNA, 31 nt, Human
aucauggucccaaaggcagaaggcaguauuu

SEQ ID NO: 642091 - RNA, 18 nt, Human
auuuuaucuacuaaguca

SEQ ID NO: 642092 - RNA, 22 nt, Human
caagacccuaacagcuaccuga

SEQ ID NO: 642093 - RNA, 20 nt, Human
cagaacaagacccuaacagc

SEQ ID NO: 642094 - RNA, 21 nt, Human
cauguuaacuucaaacaaaau

SEQ ID NO: 642095 - RNA, 18 nt, Human
cccaaaggcagaaggcag

SEQ ID NO: 642096 - RNA, 20 nt, Human
ccucacgcugagguggggau

SEQ ID NO: 642097 - RNA, 22 nt, Human
ccuuugacucuguggauacucc

SEQ ID NO: 642098 - RNA, 22 nt, Human
gaacugagggcuaucuaaauac

SEQ ID NO: 642099 - RNA, 21 nt, Human
ggcugggagagggaaguuugg

SEQ ID NO: 642100 - RNA, 21 nt, Human
guuuuugucuuuguuuuuaau

SEQ ID NO: 642101 - RNA, 21 nt, Human
uaacuugucauguuuaaccuc

SEQ ID NO: 642102 - RNA, 21 nt, Human
uaagaacacauguuaaggacc

SEQ ID NO: 642103 - RNA, 24 nt, Human
uagcacagcacccaaagaaguaua

SEQ ID NO: 642104 - RNA, 20 nt, Human
uagcuggaccuucuuccaaa

SEQ ID NO: 642105 - RNA, 23 nt, Human
uagcuggaccuucuuccaaacuu

SEQ ID NO: 642106 - RNA, 24 nt, Human
uauaaugaggcacggcuuauugca

SEQ ID NO: 642107 - RNA, 21 nt, Human
uccugugccacgaccucagcu

SEQ ID NO: 642108 - RNA, 18 nt, Human
ucuguggauacuccccaa

SEQ ID NO: 642109 - RNA, 22 nt, Human
ucuuggaaugcuaagacggagc

SEQ ID NO: 642110 - RNA, 20 nt, Human
ugacauacaagaaacugcaa

SEQ ID NO: 642111 - RNA, 23 nt, Human
ugccaucuucacagaacaagacc

SEQ ID NO: 642112 - RNA, 18 nt, Human
uggaagcuguagcuguag

SEQ ID NO: 642113 - RNA, 24 nt, Human
ugugccacgaccucagcuugcauc

SEQ ID NO: 642114 - RNA, 19 nt, Human
uuagcacagcacccaaaga

SEQ ID NO: 642115 - RNA, 24 nt, Human
uuccauugacauucuuagcacagc

SEQ ID NO: 642116 - RNA, 22 nt, Human
uucccauaugaacuuccuccau

SEQ ID NO: 642117 - RNA, 23 nt, Human
uuccuuugacucuguggauacuc

SEQ ID NO: 642118 - RNA, 19 nt, Human
uugguugguugguugguug

SEQ ID NO: 642119 - RNA, 21 nt, Human
uuuuuuuuuuuuuuuuuaaug

SEQ ID NO: 642120 - RNA, 26 nt, Human
aaacuggaaaugcacaacugggucug

SEQ ID NO: 642121 - RNA, 18 nt, Human
aagucuacagcgcucuuc

SEQ ID NO: 642122 - RNA, 23 nt, Human
cuagaacauagcuaagcacaagu

SEQ ID NO: 642123 - RNA, 23 nt, Human
gaaaugaauaaaacagcaggcca

SEQ ID NO: 642124 - RNA, 22 nt, Human
gaacauagcuaagcacaagucu

SEQ ID NO: 642125 - RNA, 19 nt, Human
gcaggccaggcgugguggc

SEQ ID NO: 642126 - RNA, 23 nt, Human
ggagugcuggggucagcugcugg

SEQ ID NO: 642127 - RNA, 24 nt, Human
ggagugcuggggucagcugcugga

SEQ ID NO: 642128 - RNA, 18 nt, Human
uaaaacagcaggccaggc

SEQ ID NO: 642129 - RNA, 25 nt, Human
uaaacccucuagaacauagcuaagc

SEQ ID NO: 642130 - RNA, 18 nt, Human
uagccccucgggaccccc

SEQ ID NO: 642131 - RNA, 18 nt, Human
uauuuuaacgggauugga

SEQ ID NO: 642132 - RNA, 25 nt, Human
ugcuggggucagcugcuggaagguc

SEQ ID NO: 642133 - RNA, 28 nt, Human
ugcuggggucagcugcuggaaggucgcu

SEQ ID NO: 642134 - RNA, 21 nt, Human
uggagugcuggggucagcugc

SEQ ID NO: 642135 - RNA, 21 nt, Human
uggggucagcugcuggaaggu

SEQ ID NO: 642136 - RNA, 25 nt, Human
ugugucauggcaaacuggaaaugca

SEQ ID NO: 642137 - RNA, 18 nt, Human
uuuuuugaugcugcuauc

SEQ ID NO: 642138 - RNA, 18 nt, Human
aacugaaagauucccaca

SEQ ID NO: 642139 - RNA, 21 nt, Human
acauuuauuagguuucuacau

SEQ ID NO: 642140 - RNA, 18 nt, Human
acuuaucuucagcaugac

SEQ ID NO: 642141 - RNA, 24 nt, Human
aggcaguggcagauuaggacuaca

SEQ ID NO: 642142 - RNA, 19 nt, Human
aggcaguggcagauuaggg

SEQ ID NO: 642143 - RNA, 24 nt, Human
auuacauuuauuagguuucuacau

SEQ ID NO: 642144 - RNA, 21 nt, Human
caaauaaagaaccauaaccug

SEQ ID NO: 642145 - RNA, 18 nt, Human
ggcaaguuguccaaggca

SEQ ID NO: 642146 - RNA, 23 nt, Human
guagcauuuuagagcuaacagag

SEQ ID NO: 642147 - RNA, 21 nt, Human
guggaaguaggcaaguugucc

SEQ ID NO: 642148 - RNA, 21 nt, Human
uaacagagcuccuacaagauu

SEQ ID NO: 642149 - RNA, 19 nt, Human
uaagggccagugaaaacau

SEQ ID NO: 642150 - RNA, 21 nt, Human
ucacauuuuucucuccagugu

SEQ ID NO: 642151 - RNA, 24 nt, Human
uuucuaacuccaaaaucauucauu

SEQ ID NO: 642152 - RNA, 18 nt, Human
uuugcuguguaucaagga

SEQ ID NO: 642153 - RNA, 23 nt, Human
uuuuuuuuuuuuuuuuuucccag

SEQ ID NO: 642154 - RNA, 28 nt, Human
aaaaaaaaacuccccuaaagagcuugaa

SEQ ID NO: 642155 - RNA, 22 nt, Human
aaaaaaacuccccuaaagagcu

SEQ ID NO: 642156 - RNA, 21 nt, Human
aaaauaaguagacuguaauau

SEQ ID NO: 642157 - RNA, 24 nt, Human
aaacaaacugauagcaacuaaaau

SEQ ID NO: 642158 - RNA, 23 nt, Human
aaacauucaacaccccggcuucu

SEQ ID NO: 642159 - RNA, 23 nt, Human
aaagugcuacuguagccaacaug

SEQ ID NO: 642160 - RNA, 24 nt, Human
aaaguguugggauuacaggcguga

SEQ ID NO: 642161 - RNA, 19 nt, Human
aagaaaaucugaagacagc

SEQ ID NO: 642162 - RNA, 26 nt, Human
aagaaaaucugaagacagcagaugcc

SEQ ID NO: 642163 - RNA, 21 nt, Human
aaguguugggauuacaggcgu

SEQ ID NO: 642164 - RNA, 26 nt, Human
aaguguugggauuacaggcgugagcc

SEQ ID NO: 642165 - RNA, 22 nt, Human
acaaccucugccucccagguuc

SEQ ID NO: 642166 - RNA, 24 nt, Human
accauguuggccaggcuggucucg

SEQ ID NO: 642167 - RNA, 18 nt, Human
acgggguuucaccauguu

SEQ ID NO: 642168 - RNA, 23 nt, Human
acgggguuucaccauguuggcca

SEQ ID NO: 642169 - RNA, 24 nt, Human
acgggguuucaccauguuggccag

SEQ ID NO: 642170 - RNA, 24 nt, Human
acuuauuauuuucaaaacaguuaa

SEQ ID NO: 642171 - RNA, 25 nt, Human
agaaaaaaaaaacuccccuaaagag

SEQ ID NO: 642172 - RNA, 23 nt, Human
agaaaaaguagaaaagguuuugc

SEQ ID NO: 642173 - RNA, 20 nt, Human
agaugccauauaugccacaa

SEQ ID NO: 642174 - RNA, 22 nt, Human
aguagagacgggguuucaccau

SEQ ID NO: 642175 - RNA, 24 nt, Human
agugcaguggccccaucucagcuc

SEQ ID NO: 642176 - RNA, 20 nt, Human
auaaacaccuaacuguauuu

SEQ ID NO: 642177 - RNA, 22 nt, Human
auaaagcauucugcaaauuaaa

SEQ ID NO: 642178 - RNA, 22 nt, Human
auaacuaaauaauauaaacacc

SEQ ID NO: 642179 - RNA, 19 nt, Human
auagcugaaacuacaggug

SEQ ID NO: 642180 - RNA, 25 nt, Human
aucaaauuuacccccacuauauaau

SEQ ID NO: 642181 - RNA, 19 nt, Human
augacauuucuggucuuuu

SEQ ID NO: 642182 - RNA, 22 nt, Human
auucuuauuuauuuauuuuaug

SEQ ID NO: 642183 - RNA, 24 nt, Human
auuuuuguauuuuuaguagagacg

SEQ ID NO: 642184 - RNA, 21 nt, Human
caaaacaguuaaaacuaacac

SEQ ID NO: 642185 - RNA, 24 nt, Human
caaaguguugggauuacaggcgug

SEQ ID NO: 642186 - RNA, 20 nt, Human
caaccucugccucccagguu

SEQ ID NO: 642187 - RNA, 22 nt, Human
caagugaccugccugccucggc

SEQ ID NO: 642188 - RNA, 21 nt, Human
cacaggcugcagugcaguggc

SEQ ID NO: 642189 - RNA, 21 nt, Human
caccauguuggccaggcuggu

SEQ ID NO: 642190 - RNA, 24 nt, Human
caccauguuggccaggcuggucuc

SEQ ID NO: 642191 - RNA, 27 nt, Human
caccauguuggccaggcuggucucgaa

SEQ ID NO: 642192 - RNA, 18 nt, Human
cacccuugcuggcauggg

SEQ ID NO: 642193 - RNA, 21 nt, Human
cacuacaaccucugccuccca

SEQ ID NO: 642194 - RNA, 22 nt, Human
cagaccuucucuccacuucucc

SEQ ID NO: 642195 - RNA, 24 nt, Human
cagcacgcccaguuaauuuuugua

SEQ ID NO: 642196 - RNA, 22 nt, Human
cagcagaugccauauaugccac

SEQ ID NO: 642197 - RNA, 18 nt, Human
caguuaaaacuaacacac

SEQ ID NO: 642198 - RNA, 22 nt, Human
caucaaaacuccauuacaaagu

SEQ ID NO: 642199 - RNA, 24 nt, Human
cauguuggccaggcuggucucgaa

SEQ ID NO: 642200 - RNA, 22 nt, Human
ccaaaguguugggauuacaggc

SEQ ID NO: 642201 - RNA, 22 nt, Human
ccaaaguguugggauuacaggc

SEQ ID NO: 642202 - RNA, 24 nt, Human
ccaaaguguugggauuacaggcgu

SEQ ID NO: 642203 - RNA, 21 nt, Human
ccacaaagaaaagcagguacc

SEQ ID NO: 642204 - RNA, 23 nt, Human
cccaguuaauuuuuguauuuuua

SEQ ID NO: 642205 - RNA, 22 nt, Human
ccccuaaagagcuugaaccuuc

SEQ ID NO: 642206 - RNA, 20 nt, Human
ccucccagguucaagccauu

SEQ ID NO: 642207 - RNA, 23 nt, Human
ccugaccucaagugaccugccug

SEQ ID NO: 642208 - RNA, 24 nt, Human
ccugccucggccucccaaaguguu

SEQ ID NO: 642209 - RNA, 21 nt, Human
ccuucucuccacuucuccaaa

SEQ ID NO: 642210 - RNA, 24 nt, Human
cgggguuucaccauguuggccagg

SEQ ID NO: 642211 - RNA, 19 nt, Human
cuagagauaccaaaaaaua

SEQ ID NO: 642212 - RNA, 24 nt, Human
cucacuacaaccucugccucccag

SEQ ID NO: 642213 - RNA, 24 nt, Human
cucccaucagaccuucucuccacu

SEQ ID NO: 642214 - RNA, 22 nt, Human
cucuaauauugcacuagaguug

SEQ ID NO: 642215 - RNA, 21 nt, Human
cugaaacuacaggugcacacc

SEQ ID NO: 642216 - RNA, 23 nt, Human
cugccucagccucccgaauagcu

SEQ ID NO: 642217 - RNA, 20 nt, Human
cugccucccagguucaagcc

SEQ ID NO: 642218 - RNA, 21 nt, Human
gaaaaaaacaguaaaaauaua

SEQ ID NO: 642219 - RNA, 21 nt, Human
gaaagaaaaaggaaaaagcaa

SEQ ID NO: 642220 - RNA, 26 nt, Human
gaauagcugaaacuacaggugcacac

SEQ ID NO: 642221 - RNA, 24 nt, Human
gaccucaagugaccugccugccuc

SEQ ID NO: 642222 - RNA, 24 nt, Human
gagacgggguuucaccauguuggc

SEQ ID NO: 642223 - RNA, 18 nt, Human
gauuacaggcgugagcca

SEQ ID NO: 642224 - RNA, 21 nt, Human
gauuacaggcgugagccacca

SEQ ID NO: 642225 - RNA, 22 nt, Human
gauuacaggcgugagccaccac

SEQ ID NO: 642226 - RNA, 22 nt, Human
gcccaguuaauuuuuguauuuu

SEQ ID NO: 642227 - RNA, 23 nt, Human
gcuggucucgaacuccugaccuc

SEQ ID NO: 642228 - RNA, 19 nt, Human
ggauuacaggcgugagcca

SEQ ID NO: 642229 - RNA, 24 nt, Human
ggcuggucucgaacuccugaccuc

SEQ ID NO: 642230 - RNA, 21 nt, Human
ggggaagaagcuggaccuggu

SEQ ID NO: 642231 - RNA, 23 nt, Human
gggguuucaccauguuggccagg

SEQ ID NO: 642232 - RNA, 19 nt, Human
ggucucgaacuccugaccu

SEQ ID NO: 642233 - RNA, 23 nt, Human
guagagacgggguuucaccaugu

SEQ ID NO: 642234 - RNA, 22 nt, Human
uaaaacuaacacacgagauucu

SEQ ID NO: 642235 - RNA, 21 nt, Human
uaaagugcuacuguagccaaa

SEQ ID NO: 642236 - RNA, 19 nt, Human
uaaauuuuccuucucuaau

SEQ ID NO: 642237 - RNA, 22 nt, Human
uaacaaguauaauuuuuaaaaa

SEQ ID NO: 642238 - RNA, 23 nt, Human
uaauaaagaggaaucauuuuaau

SEQ ID NO: 642239 - RNA, 24 nt, Human
uaauuuuuguauuuuuaguagaga

SEQ ID NO: 642240 - RNA, 24 nt, Human
uacaagaaaaucugcuguggauaa

SEQ ID NO: 642241 - RNA, 23 nt, Human
uacaggcgugagccaccacgucc

SEQ ID NO: 642242 - RNA, 18 nt, Human
uaccauuauaccaaccaa

SEQ ID NO: 642243 - RNA, 23 nt, Human
uagaaaacaaacauucaacaccc

SEQ ID NO: 642244 - RNA, 19 nt, Human
uagaagaucaaccugaaag

SEQ ID NO: 642245 - RNA, 22 nt, Human
uagagacgggguuucaccaugu

SEQ ID NO: 642246 - RNA, 23 nt, Human
uaggcuagagauaccaaaaaaua

SEQ ID NO: 642247 - RNA, 24 nt, Human
uaguagagacgggguuucaccaug

SEQ ID NO: 642248 - RNA, 26 nt, Human
uaguagagacgggguuucaccauguu

SEQ ID NO: 642249 - RNA, 23 nt, Human
uauaccaaccaaacuuauacaau

SEQ ID NO: 642250 - RNA, 21 nt, Human
uaucaggcagaguaaaauauu

SEQ ID NO: 642251 - RNA, 18 nt, Human
uaugcugucuuucaguaa

SEQ ID NO: 642252 - RNA, 22 nt, Human
uauuuccagaaaaugaacugga

SEQ ID NO: 642253 - RNA, 23 nt, Human
ucaaaacaguuaaaacuaacaca

SEQ ID NO: 642254 - RNA, 20 nt, Human
ucaaccugaaagaaaaagga

SEQ ID NO: 642255 - RNA, 23 nt, Human
ucaaccugaaagaaaaaggaaaa

SEQ ID NO: 642256 - RNA, 19 nt, Human
ucacuacaaccucugccuc

SEQ ID NO: 642257 - RNA, 24 nt, Human
ucacuacaaccucugccucccagg

SEQ ID NO: 642258 - RNA, 25 nt, Human
ucacuacaaccucugccucccaggu

SEQ ID NO: 642259 - RNA, 18 nt, Human
ucagccucccgaauagcu

SEQ ID NO: 642260 - RNA, 20 nt, Human
ucagccucccgaauagcugg

SEQ ID NO: 642261 - RNA, 27 nt, Human
ucagcucacuacaaccucugccuccca

SEQ ID NO: 642262 - RNA, 18 nt, Human
uccauggauuucugaagc

SEQ ID NO: 642263 - RNA, 24 nt, Human
ucccaaaguguugggauuacaggc

SEQ ID NO: 642264 - RNA, 18 nt, Human
ucccagguucaagccauu

SEQ ID NO: 642265 - RNA, 19 nt, Human
ucccagguucaagccauug

SEQ ID NO: 642266 - RNA, 24 nt, Human
ucccaucagaccuucucuccacuu

SEQ ID NO: 642267 - RNA, 20 nt, Human
ucccuuugucacacaggcug

SEQ ID NO: 642268 - RNA, 23 nt, Human
uccugggcccacaagugcagcuc

SEQ ID NO: 642269 - RNA, 19 nt, Human
uccuuucuauaaaccucag

SEQ ID NO: 642270 - RNA, 19 nt, Human
ucuauaaaccucaggauuu

SEQ ID NO: 642271 - RNA, 20 nt, Human
ucuccaaauccugggcccac

SEQ ID NO: 642272 - RNA, 21 nt, Human
ucucgaacuccugaccucaag

SEQ ID NO: 642273 - RNA, 23 nt, Human
ucucuccacuucuccaaauccug

SEQ ID NO: 642274 - RNA, 28 nt, Human
ucugaagccagugcuuaaaaaaaaaaga

SEQ ID NO: 642275 - RNA, 21 nt, Human
ugaaaaauaaguagacuguaa

SEQ ID NO: 642276 - RNA, 26 nt, Human
ugaaacuacaggugcacaccagcacg

SEQ ID NO: 642277 - RNA, 18 nt, Human
ugaccucaagugaccugc

SEQ ID NO: 642278 - RNA, 24 nt, Human
ugaccugccugccucggccuccca

SEQ ID NO: 642279 - RNA, 22 nt, Human
ugcaaaauauaauagauugcaa

SEQ ID NO: 642280 - RNA, 20 nt, Human
ugcaguggccccaucucagc

SEQ ID NO: 642281 - RNA, 27 nt, Human
ugccucagccucccgaauagcugaaac

SEQ ID NO: 642282 - RNA, 24 nt, Human
ugccucggccucccaaaguguugg

SEQ ID NO: 642283 - RNA, 21 nt, Human
ugcuguggauaaggcauugcu

SEQ ID NO: 642284 - RNA, 22 nt, Human
uggaauaaaugaaacucuaaua

SEQ ID NO: 642285 - RNA, 23 nt, Human
uggaauaaaugaaacucuaauau

SEQ ID NO: 642286 - RNA, 20 nt, Human
uggauaaggcauugcuuuau

SEQ ID NO: 642287 - RNA, 24 nt, Human
uggccaggcuggucucgaacuccu

SEQ ID NO: 642288 - RNA, 24 nt, Human
uggccccaucucagcucacuacaa

SEQ ID NO: 642289 - RNA, 18 nt, Human
ugggauuacaggcgugag

SEQ ID NO: 642290 - RNA, 19 nt, Human
ugggauuacaggcgugagc

SEQ ID NO: 642291 - RNA, 22 nt, Human
ugggauuacaggcgugagccac

SEQ ID NO: 642292 - RNA, 23 nt, Human
ugggauuacaggcgugagccacc

SEQ ID NO: 642293 - RNA, 24 nt, Human
ugggauuacaggcgugagccacca

SEQ ID NO: 642294 - RNA, 19 nt, Human
ugggcccacaagugcagcu

SEQ ID NO: 642295 - RNA, 20 nt, Human
uguggaauaaaugaaacucu

SEQ ID NO: 642296 - RNA, 18 nt, Human
uuaguagagacgggguuu

SEQ ID NO: 642297 - RNA, 22 nt, Human
uuaguagagacgggguuucacc

SEQ ID NO: 642298 - RNA, 24 nt, Human
uuaguagagacgggguuucaccau

SEQ ID NO: 642299 - RNA, 19 nt, Human
uuccauggauuucugaagc

SEQ ID NO: 642300 - RNA, 18 nt, Human
uuccuaaaacuuuauuuu

SEQ ID NO: 642301 - RNA, 23 nt, Human
uuguauuuuuaguagagacgggg

SEQ ID NO: 642302 - RNA, 24 nt, Human
uuucaccauguuggccaggcuggu

SEQ ID NO: 642303 - RNA, 23 nt, Human
uuuccuaaaacuuuauuuugaaa

SEQ ID NO: 642304 - RNA, 24 nt, Human
uuuuuaguagagacgggguuucac

SEQ ID NO: 642305 - RNA, 20 nt, Human
uuuuuguauuuuuaguagag

SEQ ID NO: 642306 - RNA, 18 nt, Human
uuuuuuuuuuuuuugccu

SEQ ID NO: 642307 - RNA, 18 nt, Human
uuuuuuuuuuuuuuuuug

SEQ ID NO: 642308 - RNA, 24 nt, Human
aaagugcugggauuacaggcguga

SEQ ID NO: 642309 - RNA, 24 nt, Human
aaccacaccuccaccaggcucuaa

SEQ ID NO: 642310 - RNA, 22 nt, Human
aaccauuuuauuaccucccccu

SEQ ID NO: 642311 - RNA, 18 nt, Human
aagcaaagauaacaugug

SEQ ID NO: 642312 - RNA, 19 nt, Human
aagcugcccugcuucuagg

SEQ ID NO: 642313 - RNA, 20 nt, Human
aagcugcccugcuucuaggc

SEQ ID NO: 642314 - RNA, 22 nt, Human
aaggaagcugcccugcuucuag

SEQ ID NO: 642315 - RNA, 19 nt, Human
aagugcugggauuacaggc

SEQ ID NO: 642316 - RNA, 19 nt, Human
aagugcugggauuacaggc

SEQ ID NO: 642317 - RNA, 26 nt, Human
aagugcugggauuacaggcgugagcc

SEQ ID NO: 642318 - RNA, 18 nt, Human
aaugucuaucuacagcuc

SEQ ID NO: 642319 - RNA, 22 nt, Human
acagaguggcccgggcagcccc

SEQ ID NO: 642320 - RNA, 23 nt, Human
accacaccuggcuaauuuuugua

SEQ ID NO: 642321 - RNA, 19 nt, Human
acccaggcuggagugcagu

SEQ ID NO: 642322 - RNA, 23 nt, Human
acccaggcuggagugcaguggug

SEQ ID NO: 642323 - RNA, 18 nt, Human
acgggguuucaccaucuu

SEQ ID NO: 642324 - RNA, 20 nt, Human
acgggguuucaccaucuugg

SEQ ID NO: 642325 - RNA, 24 nt, Human
acgggguuucaccaucuuggccag

SEQ ID NO: 642326 - RNA, 23 nt, Human
acuaggccggaagugggagaccg

SEQ ID NO: 642327 - RNA, 21 nt, Human
agaaaaagaaagcacgccaga

SEQ ID NO: 642328 - RNA, 18 nt, Human
agaaccagaagcgcaggc

SEQ ID NO: 642329 - RNA, 24 nt, Human
agaccgcaggccucuggcgaagga

SEQ ID NO: 642330 - RNA, 22 nt, Human
agagaaaaagaaagcacgccag

SEQ ID NO: 642331 - RNA, 18 nt, Human
agcgccuggcaagucaag

SEQ ID NO: 642332 - RNA, 19 nt, Human
aggccucuggcgaaggaag

SEQ ID NO: 642333 - RNA, 25 nt, Human
aggcuggagugcaguggugcgaucu

SEQ ID NO: 642334 - RNA, 21 nt, Human
aguagcugugauuacaggcac

SEQ ID NO: 642335 - RNA, 23 nt, Human
agugcaguggugcgaucuuggcu

SEQ ID NO: 642336 - RNA, 24 nt, Human
agugcaguggugcgaucuuggcuc

SEQ ID NO: 642337 - RNA, 18 nt, Human
agugcugggauuacaggc

SEQ ID NO: 642338 - RNA, 25 nt, Human
auugcaauaaagccaguagcaggga

SEQ ID NO: 642339 - RNA, 22 nt, Human
auuuuauuaccucccccuccca

SEQ ID NO: 642340 - RNA, 24 nt, Human
caaagugcugggauuacaggcgug

SEQ ID NO: 642341 - RNA, 23 nt, Human
caaccuccaccuccuggauucaa

SEQ ID NO: 642342 - RNA, 21 nt, Human
caagcaggaucgacccaccug

SEQ ID NO: 642343 - RNA, 19 nt, Human
caagugcccagcggccaca

SEQ ID NO: 642344 - RNA, 18 nt, Human
cacacaagcccggcugcg

SEQ ID NO: 642345 - RNA, 24 nt, Human
caccaucuuggccaggcugcucuu

SEQ ID NO: 642346 - RNA, 21 nt, Human
cacccaggcuggagugcagug

SEQ ID NO: 642347 - RNA, 27 nt, Human
cacgccagacugaggaccggcagaagc

SEQ ID NO: 642348 - RNA, 19 nt, Human
cagaguccagcacgcuaac

SEQ ID NO: 642349 - RNA, 19 nt, Human
cagggccccagccggugcc

SEQ ID NO: 642350 - RNA, 19 nt, Human
caggugaaauugagaggac

SEQ ID NO: 642351 - RNA, 19 nt, Human
caguagagacgggguuuca

SEQ ID NO: 642352 - RNA, 25 nt, Human
caguagagacgggguuucaccaucu

SEQ ID NO: 642353 - RNA, 19 nt, Human
caguggugcgaucuuggcu

SEQ ID NO: 642354 - RNA, 27 nt, Human
caugccaugcacaauaauuuaugugug

SEQ ID NO: 642355 - RNA, 24 nt, Human
cauuuuauuaccucccccucccag

SEQ ID NO: 642356 - RNA, 22 nt, Human
ccaaagugcugggauuacaggc

SEQ ID NO: 642357 - RNA, 22 nt, Human
ccaaagugcugggauuacaggc

SEQ ID NO: 642358 - RNA, 24 nt, Human
ccaaagugcugggauuacaggcgu

SEQ ID NO: 642359 - RNA, 26 nt, Human
ccaccuccuggauucaagcaauucuu

SEQ ID NO: 642360 - RNA, 21 nt, Human
ccaugcacaauaauuuaugug

SEQ ID NO: 642361 - RNA, 22 nt, Human
cccacaaugucuaucuacagcu

SEQ ID NO: 642362 - RNA, 18 nt, Human
ccccagccggugcccgga

SEQ ID NO: 642363 - RNA, 19 nt, Human
cccgaguagcugugauuac

SEQ ID NO: 642364 - RNA, 24 nt, Human
cccgaguagcugugauuacaggca

SEQ ID NO: 642365 - RNA, 22 nt, Human
cccggcccguccaggggcgcug

SEQ ID NO: 642366 - RNA, 18 nt, Human
ccggaagugggagaccgc

SEQ ID NO: 642367 - RNA, 24 nt, Human
ccuccuggauucaagcaauucucu

SEQ ID NO: 642368 - RNA, 21 nt, Human
ccucugccagcgccuuccucg

SEQ ID NO: 642369 - RNA, 22 nt, Human
ccucuucacccuccagcuccca

SEQ ID NO: 642370 - RNA, 21 nt, Human
ccugccacgacaggcucaccu

SEQ ID NO: 642371 - RNA, 20 nt, Human
ccuggauucaagcaauucuc

SEQ ID NO: 642372 - RNA, 22 nt, Human
cgaaccauuuuauuaccucccc

SEQ ID NO: 642373 - RNA, 19 nt, Human
cgcaggcuagccggcugga

SEQ ID NO: 642374 - RNA, 23 nt, Human
cgcugcgaggggaguguggucag

SEQ ID NO: 642375 - RNA, 24 nt, Human
cgggguuucaccaucuuggccagg

SEQ ID NO: 642376 - RNA, 21 nt, Human
cgugagccaccacgccuggcc

SEQ ID NO: 642377 - RNA, 24 nt, Human
cgugauccaccagccucggccucc

SEQ ID NO: 642378 - RNA, 23 nt, Human
cuaauuuuuguauuuucaguaga

SEQ ID NO: 642379 - RNA, 23 nt, Human
cuaccacaccuggcuaauuuuug

SEQ ID NO: 642380 - RNA, 20 nt, Human
cuacgugccagcaaaagcug

SEQ ID NO: 642381 - RNA, 21 nt, Human
cuccaaggccaccuggacucu

SEQ ID NO: 642382 - RNA, 21 nt, Human
cuccagcaucuccacaguacc

SEQ ID NO: 642383 - RNA, 21 nt, Human
cuccgccccaaagggggcucc

SEQ ID NO: 642384 - RNA, 21 nt, Human
cuccuuccggcgcaggcgcaa

SEQ ID NO: 642385 - RNA, 24 nt, Human
cucgcucugucacccaggcuggag

SEQ ID NO: 642386 - RNA, 24 nt, Human
cucgcugcaaccuccaccuccugg

SEQ ID NO: 642387 - RNA, 24 nt, Human
cucugccucagccucccgaguagc

SEQ ID NO: 642388 - RNA, 20 nt, Human
cucugucacccaggcuggag

SEQ ID NO: 642389 - RNA, 23 nt, Human
cucugucacccaggcuggagugc

SEQ ID NO: 642390 - RNA, 18 nt, Human
cucuugaccucgugaucc

SEQ ID NO: 642391 - RNA, 21 nt, Human
cugaagaaccacaccuccacc

SEQ ID NO: 642392 - RNA, 19 nt, Human
cugagcagcgggugggggg

SEQ ID NO: 642393 - RNA, 23 nt, Human
cugcaaccuccaccuccuggauu

SEQ ID NO: 642394 - RNA, 24 nt, Human
cugcaaccuccaccuccuggauuc

SEQ ID NO: 642395 - RNA, 23 nt, Human
cugccucagccucccgaguagcu

SEQ ID NO: 642396 - RNA, 18 nt, Human
cuggugcaguccugccac

SEQ ID NO: 642397 - RNA, 21 nt, Human
cuucuagccuugcuaucccga

SEQ ID NO: 642398 - RNA, 28 nt, Human
cuugaccucgugauccaccagccucggc

SEQ ID NO: 642399 - RNA, 19 nt, Human
cuuuaaauucuuucuuccu

SEQ ID NO: 642400 - RNA, 21 nt, Human
gaaaaugggggcacggcccaa

SEQ ID NO: 642401 - RNA, 20 nt, Human
gaaauggacauauucggaua

SEQ ID NO: 642402 - RNA, 22 nt, Human
gaaccacaccuccaccaggcuc

SEQ ID NO: 642403 - RNA, 19 nt, Human
gaagaaccacaccuccacc

SEQ ID NO: 642404 - RNA, 21 nt, Human
gaagcucuuggggaggugcca

SEQ ID NO: 642405 - RNA, 19 nt, Human
gaccucgugauccaccagc

SEQ ID NO: 642406 - RNA, 22 nt, Human
gaccucgugauccaccagccuc

SEQ ID NO: 642407 - RNA, 22 nt, Human
gaccucgugauccaccagccuc

SEQ ID NO: 642408 - RNA, 24 nt, Human
gagacgggguuucaccaucuuggc

SEQ ID NO: 642409 - RNA, 21 nt, Human
gauuacaggcaccugcuacca

SEQ ID NO: 642410 - RNA, 18 nt, Human
gauuacaggcgugagcca

SEQ ID NO: 642411 - RNA, 21 nt, Human
gauuacaggcgugagccacca

SEQ ID NO: 642412 - RNA, 22 nt, Human
gauuacaggcgugagccaccac

SEQ ID NO: 642413 - RNA, 23 nt, Human
gcaaaagcuggcagacuaggccg

SEQ ID NO: 642414 - RNA, 21 nt, Human
gcaggaaagcagcagcacgaa

SEQ ID NO: 642415 - RNA, 22 nt, Human
gcaggaaagcagcagcacgaag

SEQ ID NO: 642416 - RNA, 18 nt, Human
gcugcaaccuccaccucc

SEQ ID NO: 642417 - RNA, 24 nt, Human
gcugcaguucuucaccauguacgg

SEQ ID NO: 642418 - RNA, 18 nt, Human
ggaccaaaccaaguggaa

SEQ ID NO: 642419 - RNA, 21 nt, Human
ggaccaaaccaaguggaagcu

SEQ ID NO: 642420 - RNA, 19 nt, Human
ggauuacaggcgugagcca

SEQ ID NO: 642421 - RNA, 19 nt, Human
ggcccgggcagccccaccc

SEQ ID NO: 642422 - RNA, 18 nt, Human
gggcuccagggccccagc

SEQ ID NO: 642423 - RNA, 19 nt, Human
ggggauggggccgagugcu

SEQ ID NO: 642424 - RNA, 23 nt, Human
gggguuucaccaucuuggccagg

SEQ ID NO: 642425 - RNA, 24 nt, Human
gggugugacuguauuuauagacug

SEQ ID NO: 642426 - RNA, 22 nt, Human
ggucagagccacugagcagcgg

SEQ ID NO: 642427 - RNA, 23 nt, Human
gguucuaacagccuuuuuuagcc

SEQ ID NO: 642428 - RNA, 24 nt, Human
gucuuguuccuccagcaucuccac

SEQ ID NO: 642429 - RNA, 22 nt, Human
gugaaggaaacucugggccucu

SEQ ID NO: 642430 - RNA, 24 nt, Human
gugauccaccagccucggccuccc

SEQ ID NO: 642431 - RNA, 24 nt, Human
guggcccgggcagccccaccccgc

SEQ ID NO: 642432 - RNA, 23 nt, Human
gugugcacacaagcccggcugca

SEQ ID NO: 642433 - RNA, 22 nt, Human
guguggcgugugcacacaagcc

SEQ ID NO: 642434 - RNA, 18 nt, Human
uaacagccuccuuccggc

SEQ ID NO: 642435 - RNA, 18 nt, Human
uaaguacaugguggcugg

SEQ ID NO: 642436 - RNA, 24 nt, Human
uaauuuuuguauuuucaguagaga

SEQ ID NO: 642437 - RNA, 22 nt, Human
uacaggcaccugcuaccacacc

SEQ ID NO: 642438 - RNA, 22 nt, Human
uacaggcgugagccaccacgcc

SEQ ID NO: 642439 - RNA, 23 nt, Human
uacaggcgugagccaccacgccu

SEQ ID NO: 642440 - RNA, 18 nt, Human
uacaucagcuacacaaag

SEQ ID NO: 642441 - RNA, 19 nt, Human
uaccacugacgcugcgagg

SEQ ID NO: 642442 - RNA, 24 nt, Human
uagcacagugcaacauauacaguu

SEQ ID NO: 642443 - RNA, 25 nt, Human
uagcagggauaaaacuaaguacaug

SEQ ID NO: 642444 - RNA, 21 nt, Human
uauguccgcagaguccagcac

SEQ ID NO: 642445 - RNA, 24 nt, Human
ucacccaggcuggagugcaguggu

SEQ ID NO: 642446 - RNA, 18 nt, Human
ucaggauguggugacagc

SEQ ID NO: 642447 - RNA, 18 nt, Human
ucagggguagcuggaagc

SEQ ID NO: 642448 - RNA, 24 nt, Human
ucaguagagacgggguuucaccau

SEQ ID NO: 642449 - RNA, 18 nt, Human
uccaaggccaccuggacu

SEQ ID NO: 642450 - RNA, 22 nt, Human
uccagggccccagccggugccc

SEQ ID NO: 642451 - RNA, 24 nt, Human
ucccaaagugcugggauuacaggc

SEQ ID NO: 642452 - RNA, 24 nt, Human
ucccgaguagcugugauuacaggc

SEQ ID NO: 642453 - RNA, 22 nt, Human
ucccugggccucacuuuccucc

SEQ ID NO: 642454 - RNA, 24 nt, Human
uccgcagaguccagcacgcuaaca

SEQ ID NO: 642455 - RNA, 18 nt, Human
uccgucagaccacagcuu

SEQ ID NO: 642456 - RNA, 20 nt, Human
uccgucagaccacagcuucc

SEQ ID NO: 642457 - RNA, 24 nt, Human
uccucugcgaaauggacauauucg

SEQ ID NO: 642458 - RNA, 21 nt, Human
uccuggauucaagcaauucuc

SEQ ID NO: 642459 - RNA, 23 nt, Human
uccuggauucaagcaauucucug

SEQ ID NO: 642460 - RNA, 18 nt, Human
uccuguggggggaugggg

SEQ ID NO: 642461 - RNA, 24 nt, Human
ucgcucugucacccaggcuggagu

SEQ ID NO: 642462 - RNA, 19 nt, Human
ucgcugcaaccuccaccuc

SEQ ID NO: 642463 - RNA, 23 nt, Human
ucgcugcaaccuccaccuccugg

SEQ ID NO: 642464 - RNA, 24 nt, Human
ucgcugcaaccuccaccuccugga

SEQ ID NO: 642465 - RNA, 27 nt, Human
ucgcugcaaccuccaccuccuggauuc

SEQ ID NO: 642466 - RNA, 18 nt, Human
ucggccucccaaagugcu

SEQ ID NO: 642467 - RNA, 26 nt, Human
ucuacagcucuaaccacucaaguguu

SEQ ID NO: 642468 - RNA, 19 nt, Human
ucucgcucugucacccagg

SEQ ID NO: 642469 - RNA, 23 nt, Human
ucucgcucugucacccaggcugg

SEQ ID NO: 642470 - RNA, 24 nt, Human
ucucgcucugucacccaggcugga

SEQ ID NO: 642471 - RNA, 26 nt, Human
ucucgcucugucacccaggcuggagu

SEQ ID NO: 642472 - RNA, 27 nt, Human
ucucgcucugucacccaggcuggagug

SEQ ID NO: 642473 - RNA, 24 nt, Human
ucugucacccaggcuggagugcag

SEQ ID NO: 642474 - RNA, 23 nt, Human
ugacuucugaagaaccacaccuc

SEQ ID NO: 642475 - RNA, 21 nt, Human
ugagacccuguacaccucccc

SEQ ID NO: 642476 - RNA, 23 nt, Human
ugagaggacagacuugggaauca

SEQ ID NO: 642477 - RNA, 22 nt, Human
ugcaguggugcgaucuuggcuc

SEQ ID NO: 642478 - RNA, 24 nt, Human
ugccucagccucccgaguagcugu

SEQ ID NO: 642479 - RNA, 24 nt, Human
ugcugggauuacaggcgugagcca

SEQ ID NO: 642480 - RNA, 23 nt, Human
uggagugcaguggugcgaucuug

SEQ ID NO: 642481 - RNA, 24 nt, Human
uggagugcaguggugcgaucuugg

SEQ ID NO: 642482 - RNA, 24 nt, Human
uggccaggcugcucuugaacucuu

SEQ ID NO: 642483 - RNA, 24 nt, Human
uggcgugugcacacaagcccggcu

SEQ ID NO: 642484 - RNA, 20 nt, Human
uggcucgcugcaaccuccac

SEQ ID NO: 642485 - RNA, 22 nt, Human
ugggagaccgcaggccucuggc

SEQ ID NO: 642486 - RNA, 18 nt, Human
ugggauuacaggcgugag

SEQ ID NO: 642487 - RNA, 19 nt, Human
ugggauuacaggcgugagc

SEQ ID NO: 642488 - RNA, 22 nt, Human
ugggauuacaggcgugagccac

SEQ ID NO: 642489 - RNA, 23 nt, Human
ugggauuacaggcgugagccacc

SEQ ID NO: 642490 - RNA, 24 nt, Human
ugggauuacaggcgugagccacca

SEQ ID NO: 642491 - RNA, 18 nt, Human
ugggggcacggcccaaag

SEQ ID NO: 642492 - RNA, 19 nt, Human
ugggggcacggcccaaagg

SEQ ID NO: 642493 - RNA, 24 nt, Human
uggggggaccaaaccaaguggaag

SEQ ID NO: 642494 - RNA, 23 nt, Human
ugggguuacuauuauuagucucc

SEQ ID NO: 642495 - RNA, 19 nt, Human
uguauuuauagacuggggc

SEQ ID NO: 642496 - RNA, 24 nt, Human
ugucuuguuccuccagcaucucca

SEQ ID NO: 642497 - RNA, 24 nt, Human
ugugauuacaggcaccugcuacca

SEQ ID NO: 642498 - RNA, 19 nt, Human
uguggggggauggggccga

SEQ ID NO: 642499 - RNA, 23 nt, Human
uguguggcgugugcacacaagcc

SEQ ID NO: 642500 - RNA, 18 nt, Human
uuaaauucuuucuuccuu

SEQ ID NO: 642501 - RNA, 20 nt, Human
uuccgagacaggacugugga

SEQ ID NO: 642502 - RNA, 21 nt, Human
uuuacagaguggcccgggcag

SEQ ID NO: 642503 - RNA, 21 nt, Human
uuucaccaucuuggccaggcu

SEQ ID NO: 642504 - RNA, 24 nt, Human
uuuucaguagagacgggguuucac

SEQ ID NO: 642505 - RNA, 20 nt, Human
uuuuuguauuuucaguagag

SEQ ID NO: 642506 - RNA, 23 nt, Human
uuuuuguauuuucaguagagacg

SEQ ID NO: 642507 - RNA, 19 nt, Human
aacccuaagaacuuggcug

SEQ ID NO: 642508 - RNA, 18 nt, Human
aagcaccgaaccaaaccc

SEQ ID NO: 642509 - RNA, 21 nt, Human
aagcggaagagccacugcaga

SEQ ID NO: 642510 - RNA, 23 nt, Human
acagcagccugcuuggcacccac

SEQ ID NO: 642511 - RNA, 24 nt, Human
accaacaaucauguauccugccac

SEQ ID NO: 642512 - RNA, 31 nt, Human
acccuaagaacuuggcugcagcugggaaguu

SEQ ID NO: 642513 - RNA, 23 nt, Human
acugagcugguugucccgaaaac

SEQ ID NO: 642514 - RNA, 19 nt, Human
agaaagcccguuguuacug

SEQ ID NO: 642515 - RNA, 21 nt, Human
agacugggcuucuccacuccc

SEQ ID NO: 642516 - RNA, 18 nt, Human
agagaggcaaagcuuuca

SEQ ID NO: 642517 - RNA, 18 nt, Human
agaggcgggugaggcuug

SEQ ID NO: 642518 - RNA, 19 nt, Human
agcaggcucagcugaggga

SEQ ID NO: 642519 - RNA, 21 nt, Human
agcucuacaaccuuuggcccu

SEQ ID NO: 642520 - RNA, 20 nt, Human
aggauugaggcaggaggggg

SEQ ID NO: 642521 - RNA, 18 nt, Human
aggcaggaggggacuuaa

SEQ ID NO: 642522 - RNA, 21 nt, Human
aggcgggugaggcuugggggc

SEQ ID NO: 642523 - RNA, 31 nt, Human
aggggcuuuucggggacagucccgucuggcc

SEQ ID NO: 642524 - RNA, 22 nt, Human
agggucucaugggugucugggc

SEQ ID NO: 642525 - RNA, 23 nt, Human
agguaagcaguccaguagagucu

SEQ ID NO: 642526 - RNA, 18 nt, Human
agguggcagcuuccuccc

SEQ ID NO: 642527 - RNA, 23 nt, Human
agguggcagcuuccucccagagc

SEQ ID NO: 642528 - RNA, 19 nt, Human
augcagcgcugacggaacc

SEQ ID NO: 642529 - RNA, 18 nt, Human
augugugccuugagcugg

SEQ ID NO: 642530 - RNA, 22 nt, Human
caaaccggagaugggcaccugc

SEQ ID NO: 642531 - RNA, 22 nt, Human
caacuucuucaacaccugcacu

SEQ ID NO: 642532 - RNA, 23 nt, Human
caagcaaaccggagaugggcacc

SEQ ID NO: 642533 - RNA, 18 nt, Human
caagcagaguaggguuga

SEQ ID NO: 642534 - RNA, 27 nt, Human
cacacaguccucauugcccugcgccag

SEQ ID NO: 642535 - RNA, 19 nt, Human
caccccggccacagaaagc

SEQ ID NO: 642536 - RNA, 18 nt, Human
caccgaaccaaacccaac

SEQ ID NO: 642537 - RNA, 20 nt, Human
caccuggcugaggucuuuac

SEQ ID NO: 642538 - RNA, 25 nt, Human
cacgcacucacggcccucagcacac

SEQ ID NO: 642539 - RNA, 21 nt, Human
cacuugcucagcaaccagcag

SEQ ID NO: 642540 - RNA, 21 nt, Human
cagcacacaaugcaccccggc

SEQ ID NO: 642541 - RNA, 18 nt, Human
cagcgcugacggaacccu

SEQ ID NO: 642542 - RNA, 20 nt, Human
cagcucagagggcaucugga

SEQ ID NO: 642543 - RNA, 18 nt, Human
cagcucugccagggucca

SEQ ID NO: 642544 - RNA, 19 nt, Human
cagcugagccagccgggcu

SEQ ID NO: 642545 - RNA, 19 nt, Human
cagcugguucccugagagg

SEQ ID NO: 642546 - RNA, 20 nt, Human
cagcuguggacagagaggca

SEQ ID NO: 642547 - RNA, 19 nt, Human
caggcucagcugagggagu

SEQ ID NO: 642548 - RNA, 19 nt, Human
caggucggugcaggucagu

SEQ ID NO: 642549 - RNA, 21 nt, Human
caggugcaggaugccaggccc

SEQ ID NO: 642550 - RNA, 25 nt, Human
cauacacacaaucuauaaauaugua

SEQ ID NO: 642551 - RNA, 20 nt, Human
cauccagggacaaaccguuc

SEQ ID NO: 642552 - RNA, 21 nt, Human
caucugaguccgcugucgccc

SEQ ID NO: 642553 - RNA, 22 nt, Human
ccaaaaaaguucucccugagga

SEQ ID NO: 642554 - RNA, 21 nt, Human
ccaaacccaacacggcaucca

SEQ ID NO: 642555 - RNA, 20 nt, Human
ccaccuggucacugagcugg

SEQ ID NO: 642556 - RNA, 22 nt, Human
ccagcacccaugccacagaaca

SEQ ID NO: 642557 - RNA, 21 nt, Human
ccaguagagucuccaggcucu

SEQ ID NO: 642558 - RNA, 18 nt, Human
cccaaaaaaguucucccu

SEQ ID NO: 642559 - RNA, 21 nt, Human
cccacacaguccucauugccc

SEQ ID NO: 642560 - RNA, 20 nt, Human
cccacacuuccugcucuuaa

SEQ ID NO: 642561 - RNA, 24 nt, Human
cccagcaucugcagccuccccauu

SEQ ID NO: 642562 - RNA, 20 nt, Human
cccagcugaagacccuucuc

SEQ ID NO: 642563 - RNA, 23 nt, Human
cccauugucggcaagcuccugga

SEQ ID NO: 642564 - RNA, 19 nt, Human
ccccggccacagaaagccc

SEQ ID NO: 642565 - RNA, 21 nt, Human
cccgccaggcuggcccuaccu

SEQ ID NO: 642566 - RNA, 19 nt, Human
cccugaggacugcagcagg

SEQ ID NO: 642567 - RNA, 23 nt, Human
cccugcuugucuuguccccucuc

SEQ ID NO: 642568 - RNA, 21 nt, Human
cccuucugcuccucuggcucc

SEQ ID NO: 642569 - RNA, 20 nt, Human
ccucagcacacaaugcaccc

SEQ ID NO: 642570 - RNA, 23 nt, Human
ccuccacaauguucagcaccacc

SEQ ID NO: 642571 - RNA, 20 nt, Human
ccuccaggugagggccuucc

SEQ ID NO: 642572 - RNA, 22 nt, Human
ccucccagagccuugcagagcu

SEQ ID NO: 642573 - RNA, 22 nt, Human
ccugagucauuuaucccagugg

SEQ ID NO: 642574 - RNA, 24 nt, Human
ccugcacuacagcagccugcuugg

SEQ ID NO: 642575 - RNA, 21 nt, Human
ccugcgccagguggcuaagga

SEQ ID NO: 642576 - RNA, 19 nt, Human
ccugcggcagacauuccag

SEQ ID NO: 642577 - RNA, 19 nt, Human
ccuggcccuugagccccug

SEQ ID NO: 642578 - RNA, 19 nt, Human
ccuggggccccuucugcuc

SEQ ID NO: 642579 - RNA, 21 nt, Human
ccuuuguccagacccagcucc

SEQ ID NO: 642580 - RNA, 18 nt, Human
cgggcggaagacuuuucc

SEQ ID NO: 642581 - RNA, 25 nt, Human
cgugacugccacccuugccaagcag

SEQ ID NO: 642582 - RNA, 23 nt, Human
cuaugugugccuugagcuggauu

SEQ ID NO: 642583 - RNA, 21 nt, Human
cucccgccaggcuggcccuac

SEQ ID NO: 642584 - RNA, 23 nt, Human
cuccugguucccaaaaaaguucu

SEQ ID NO: 642585 - RNA, 24 nt, Human
cucugugggcggggaaagaagggg

SEQ ID NO: 642586 - RNA, 22 nt, Human
cugagcugguugucccgaaaac

SEQ ID NO: 642587 - RNA, 22 nt, Human
cugcagcaggacacacguaucc

SEQ ID NO: 642588 - RNA, 19 nt, Human
cuggagcagggcuaugagg

SEQ ID NO: 642589 - RNA, 20 nt, Human
cuggagcagggcuaugaggg

SEQ ID NO: 642590 - RNA, 18 nt, Human
cuuaagguguuggccagc

SEQ ID NO: 642591 - RNA, 22 nt, Human
cuuccuggcgaugugcagcugg

SEQ ID NO: 642592 - RNA, 26 nt, Human
cuucgggagcucagaggcagcucaga

SEQ ID NO: 642593 - RNA, 20 nt, Human
cuuuguccagacccagcucc

SEQ ID NO: 642594 - RNA, 23 nt, Human
gaccaacaaucauguauccugcc

SEQ ID NO: 642595 - RNA, 19 nt, Human
gacccuucucagcuccaag

SEQ ID NO: 642596 - RNA, 19 nt, Human
gagccuugcagagcugcuc

SEQ ID NO: 642597 - RNA, 22 nt, Human
gagcugacacuucugcagccug

SEQ ID NO: 642598 - RNA, 21 nt, Human
gagcugguugucccgaaaacu

SEQ ID NO: 642599 - RNA, 24 nt, Human
gagggucucaugggugucugggcu

SEQ ID NO: 642600 - RNA, 20 nt, Human
gaguggcacagaggcgggug

SEQ ID NO: 642601 - RNA, 19 nt, Human
gcaaagcuuucaccaggug

SEQ ID NO: 642602 - RNA, 24 nt, Human
gcaggacacacguauccuuccucc

SEQ ID NO: 642603 - RNA, 18 nt, Human
gcauggagacucaccuga

SEQ ID NO: 642604 - RNA, 19 nt, Human
gcccuggcccuugagcccc

SEQ ID NO: 642605 - RNA, 21 nt, Human
gcccuggcccuugagccccug

SEQ ID NO: 642606 - RNA, 20 nt, Human
gcuccagaggacacucacug

SEQ ID NO: 642607 - RNA, 19 nt, Human
gcugcagcugggaagucug

SEQ ID NO: 642608 - RNA, 20 nt, Human
gcuggacccaguagccuagc

SEQ ID NO: 642609 - RNA, 21 nt, Human
ggacacacguauccuuccucc

SEQ ID NO: 642610 - RNA, 20 nt, Human
ggagcagggcuaugagggcc

SEQ ID NO: 642611 - RNA, 23 nt, Human
ggcaaacaugaagaucacaguuu

SEQ ID NO: 642612 - RNA, 18 nt, Human
ggcaagcuccuggagagg

SEQ ID NO: 642613 - RNA, 19 nt, Human
gggcaguccuucagagugg

SEQ ID NO: 642614 - RNA, 21 nt, Human
gggcaguugauaggggaggcu

SEQ ID NO: 642615 - RNA, 22 nt, Human
gguccagcacgcacucacggcc

SEQ ID NO: 642616 - RNA, 21 nt, Human
gguggagugcagagcgcccug

SEQ ID NO: 642617 - RNA, 23 nt, Human
gucccuggcuuguuccagagccc

SEQ ID NO: 642618 - RNA, 21 nt, Human
gugaagugcauggagacucac

SEQ ID NO: 642619 - RNA, 21 nt, Human
gugacacagcucuacaaccuu

SEQ ID NO: 642620 - RNA, 18 nt, Human
gugagacuggccagcuca

SEQ ID NO: 642621 - RNA, 21 nt, Human
uaagaacuuggcugcagcugg

SEQ ID NO: 642622 - RNA, 23 nt, Human
uacacuugcucagcaaccagcag

SEQ ID NO: 642623 - RNA, 21 nt, Human
uaccagagccucagggcagug

SEQ ID NO: 642624 - RNA, 23 nt, Human
uaccagagccucagggcaguggg

SEQ ID NO: 642625 - RNA, 19 nt, Human
uagauggguaggcugagga

SEQ ID NO: 642626 - RNA, 23 nt, Human
uauccuuccuccuggguggagug

SEQ ID NO: 642627 - RNA, 24 nt, Human
uaucugcccacagccuaccagagc

SEQ ID NO: 642628 - RNA, 23 nt, Human
ucaacaccugcacuacagcagcc

SEQ ID NO: 642629 - RNA, 21 nt, Human
ucacugagcugguugucccga

SEQ ID NO: 642630 - RNA, 21 nt, Human
ucacugaggcagaggcuccug

SEQ ID NO: 642631 - RNA, 22 nt, Human
ucacugaggcagaggcuccugg

SEQ ID NO: 642632 - RNA, 23 nt, Human
ucacugaggcagaggcuccuggg

SEQ ID NO: 642633 - RNA, 23 nt, Human
ucacugagguucaaggacugcag

SEQ ID NO: 642634 - RNA, 19 nt, Human
ucagaggcagcucagaggg

SEQ ID NO: 642635 - RNA, 24 nt, Human
ucagcacacaaugcaccccggcca

SEQ ID NO: 642636 - RNA, 18 nt, Human
ucaggcuccugugucuca

SEQ ID NO: 642637 - RNA, 20 nt, Human
ucaugugucauauauagacc

SEQ ID NO: 642638 - RNA, 19 nt, Human
ucccaaaaaaguucucccu

SEQ ID NO: 642639 - RNA, 18 nt, Human
ucccacguaaugcagggu

SEQ ID NO: 642640 - RNA, 24 nt, Human
uccccaauugaucacacauauccc

SEQ ID NO: 642641 - RNA, 23 nt, Human
uccccauugucggcaagcuccug

SEQ ID NO: 642642 - RNA, 20 nt, Human
ucccugaggacugcagcagg

SEQ ID NO: 642643 - RNA, 22 nt, Human
ucccugugcucuaggauguugg

SEQ ID NO: 642644 - RNA, 18 nt, Human
uccucccagagccuugca

SEQ ID NO: 642645 - RNA, 23 nt, Human
uccugguucccaaaaaaguucuc

SEQ ID NO: 642646 - RNA, 23 nt, Human
uccuucagaguggcacagaggcg

SEQ ID NO: 642647 - RNA, 23 nt, Human
ucgagguggaggugaccgaggug

SEQ ID NO: 642648 - RNA, 19 nt, Human
ucgcauguccccaauugau

SEQ ID NO: 642649 - RNA, 21 nt, Human
ucgcccagcagguuugcugag

SEQ ID NO: 642650 - RNA, 20 nt, Human
ucuccaggcucuggucacuc

SEQ ID NO: 642651 - RNA, 21 nt, Human
ucuccaggcucuggucacuca

SEQ ID NO: 642652 - RNA, 22 nt, Human
ucuccuuggaaguaacaagaac

SEQ ID NO: 642653 - RNA, 23 nt, Human
ucuuuacacuugcucagcaacca

SEQ ID NO: 642654 - RNA, 19 nt, Human
ugacacagcucuacaaccu

SEQ ID NO: 642655 - RNA, 20 nt, Human
ugacgguaggacacgugacu

SEQ ID NO: 642656 - RNA, 21 nt, Human
ugagauccaccuuuuuaaccc

SEQ ID NO: 642657 - RNA, 20 nt, Human
ugagccccuggacuggucag

SEQ ID NO: 642658 - RNA, 23 nt, Human
ugagccccuuuccucuggccguc

SEQ ID NO: 642659 - RNA, 25 nt, Human
ugagccccuuuccucuggccguccu

SEQ ID NO: 642660 - RNA, 20 nt, Human
ugagcuggauugacagguug

SEQ ID NO: 642661 - RNA, 24 nt, Human
ugagcugguugucccgaaaacuga

SEQ ID NO: 642662 - RNA, 21 nt, Human
ugaggcagaggcuccugggga

SEQ ID NO: 642663 - RNA, 22 nt, Human
ugagggccuuccuggagcaggg

SEQ ID NO: 642664 - RNA, 19 nt, Human
ugagguccagcuuccuggc

SEQ ID NO: 642665 - RNA, 20 nt, Human
ugagucccuggcuuguucca

SEQ ID NO: 642666 - RNA, 24 nt, Human
ugagucccuggcuuguuccagagc

SEQ ID NO: 642667 - RNA, 23 nt, Human
ugaguccugugacauggacauuu

SEQ ID NO: 642668 - RNA, 18 nt, Human
ugcauugucaugacaccc

SEQ ID NO: 642669 - RNA, 19 nt, Human
ugccacagaacacgugcca

SEQ ID NO: 642670 - RNA, 23 nt, Human
ugccacagaacacgugccacacu

SEQ ID NO: 642671 - RNA, 22 nt, Human
ugccugagaagucgagguggag

SEQ ID NO: 642672 - RNA, 19 nt, Human
ugcggugagacuggccagc

SEQ ID NO: 642673 - RNA, 24 nt, Human
ugcggugagacuggccagcucagg

SEQ ID NO: 642674 - RNA, 19 nt, Human
ugcucagcaaccagcagag

SEQ ID NO: 642675 - RNA, 20 nt, Human
ugcugcaggcugaugugcag

SEQ ID NO: 642676 - RNA, 20 nt, Human
uggaaguaacaagaacacug

SEQ ID NO: 642677 - RNA, 19 nt, Human
uggacagagaggcaaagcu

SEQ ID NO: 642678 - RNA, 22 nt, Human
uggagugcagagcgcccugccg

SEQ ID NO: 642679 - RNA, 19 nt, Human
uggccagcaggaaggggcu

SEQ ID NO: 642680 - RNA, 19 nt, Human
uggcccugugagcuugcgg

SEQ ID NO: 642681 - RNA, 20 nt, Human
uggcccugugagcuugcggg

SEQ ID NO: 642682 - RNA, 20 nt, Human
uggcccuugagccccuggac

SEQ ID NO: 642683 - RNA, 18 nt, Human
uggcugaggcugcagccu

SEQ ID NO: 642684 - RNA, 22 nt, Human
uggcugcagcugggaagucugg

SEQ ID NO: 642685 - RNA, 21 nt, Human
uggcuucgagugugacagagc

SEQ ID NO: 642686 - RNA, 21 nt, Human
uggcuuguuccagagcccugg

SEQ ID NO: 642687 - RNA, 25 nt, Human
ugggagcagcugagccagccgggcu

SEQ ID NO: 642688 - RNA, 19 nt, Human
ugggcaccugcggcagaca

SEQ ID NO: 642689 - RNA, 19 nt, Human
uggucacucaggaacucac

SEQ ID NO: 642690 - RNA, 20 nt, Human
uguaaguaagggaggaguca

SEQ ID NO: 642691 - RNA, 21 nt, Human
ugugaagugcauggagacuca

SEQ ID NO: 642692 - RNA, 20 nt, Human
ugugacagagccauucuugg

SEQ ID NO: 642693 - RNA, 22 nt, Human
ugugcagcugggaugcagccuc

SEQ ID NO: 642694 - RNA, 24 nt, Human
uguugcugcucaggucaagcuucc

SEQ ID NO: 642695 - RNA, 25 nt, Human
uuacauaggacagacugggcuucuc

SEQ ID NO: 642696 - RNA, 27 nt, Human
uuacuuccugcuaaccaggcaucccca

SEQ ID NO: 642697 - RNA, 18 nt, Human
uucagcaccaccugguca

SEQ ID NO: 642698 - RNA, 21 nt, Human
uucaucccccagagcauugcc

SEQ ID NO: 642699 - RNA, 19 nt, Human
uucaucuuccagcugguuc

SEQ ID NO: 642700 - RNA, 20 nt, Human
uuccaggggucccgggcagu

SEQ ID NO: 642701 - RNA, 23 nt, Human
uuccuccuggguggagugcagag

SEQ ID NO: 642702 - RNA, 21 nt, Human
uucugcucugagccccuuucc

SEQ ID NO: 642703 - RNA, 20 nt, Human
uugauaggggaggcuuugug

SEQ ID NO: 642704 - RNA, 24 nt, Human
uugccugagaagucgagguggagg

SEQ ID NO: 642705 - RNA, 30 nt, Human
aaaaaaaaaaaaaagaaaagugaagaaaaa

SEQ ID NO: 642706 - RNA, 24 nt, Human
aaaaaaaaaaaaagaaaagugaag

SEQ ID NO: 642707 - RNA, 23 nt, Human
aaaaaaaaaagaaaagugaagaa

SEQ ID NO: 642708 - RNA, 24 nt, Human
aaaaaaaagaaaagugaagaaaaa

SEQ ID NO: 642709 - RNA, 22 nt, Human
aaaaacaaacaaacacacaaac

SEQ ID NO: 642710 - RNA, 21 nt, Human
aaacaaacaaacacacaaaca

SEQ ID NO: 642711 - RNA, 22 nt, Human
aaacaaacaaacacacaaacaa

SEQ ID NO: 642712 - RNA, 28 nt, Human
aaacaaacaaacacacaaaccggacccc

SEQ ID NO: 642713 - RNA, 22 nt, Human
aaacaaacacacaaacaacaac

SEQ ID NO: 642714 - RNA, 26 nt, Human
aaacaaacacacaaacaacaacaaca

SEQ ID NO: 642715 - RNA, 33 nt, Human
aacaaacaaacacacaaacaacaacaacaacua

SEQ ID NO: 642716 - RNA, 19 nt, Human
aacuggucuccccaagcca

SEQ ID NO: 642717 - RNA, 22 nt, Human
aagagcauaacuccagucacag

SEQ ID NO: 642718 - RNA, 22 nt, Human
aaggcucuggguucaaguucag

SEQ ID NO: 642719 - RNA, 20 nt, Human
aauggaagggacuuggcuca

SEQ ID NO: 642720 - RNA, 24 nt, Human
acaaacaaacacacaaacaacaac

SEQ ID NO: 642721 - RNA, 25 nt, Human
acaaacaaacacacaaacaacaacc

SEQ ID NO: 642722 - RNA, 18 nt, Human
acaaugucggugggggcc

SEQ ID NO: 642723 - RNA, 18 nt, Human
acaaugucggugggggcc

SEQ ID NO: 642724 - RNA, 24 nt, Human
acacaaacaacaacaacaacgaaa

SEQ ID NO: 642725 - RNA, 23 nt, Human
acacaaagguucuccacaucccc

SEQ ID NO: 642726 - RNA, 21 nt, Human
acacugucaccucucacuucc

SEQ ID NO: 642727 - RNA, 24 nt, Human
acccaguggauccagcacuggggc

SEQ ID NO: 642728 - RNA, 18 nt, Human
accccagcccugaggccc

SEQ ID NO: 642729 - RNA, 20 nt, Human
acccuucuggccagggugga

SEQ ID NO: 642730 - RNA, 22 nt, Human
acucagcaaacacccccuagcu

SEQ ID NO: 642731 - RNA, 22 nt, Human
agaaagcaggaaaggcacuuca

SEQ ID NO: 642732 - RNA, 20 nt, Human
agacacggugcuagccucgg

SEQ ID NO: 642733 - RNA, 18 nt, Human
agacucggggccgcacag

SEQ ID NO: 642734 - RNA, 24 nt, Human
agaggaggagaccccucccgcccu

SEQ ID NO: 642735 - RNA, 21 nt, Human
agcaaacacccccuagcucca

SEQ ID NO: 642736 - RNA, 20 nt, Human
agcaagauuuauugcaaaga

SEQ ID NO: 642737 - RNA, 20 nt, Human
agcagguggagcugccugcc

SEQ ID NO: 642738 - RNA, 21 nt, Human
agccaagaagguucaggccug

SEQ ID NO: 642739 - RNA, 19 nt, Human
agccagauacagagugugg

SEQ ID NO: 642740 - RNA, 25 nt, Human
agccaggaagggagggaggacccgg

SEQ ID NO: 642741 - RNA, 19 nt, Human
agcccagagaaggcaggga

SEQ ID NO: 642742 - RNA, 23 nt, Human
agcccagagaaggcagggaaggc

SEQ ID NO: 642743 - RNA, 24 nt, Human
agccuggaugauggaucgaggcuc

SEQ ID NO: 642744 - RNA, 19 nt, Human
aggacuucucccaucccag

SEQ ID NO: 642745 - RNA, 24 nt, Human
aggagaccccagcccugaggcccc

SEQ ID NO: 642746 - RNA, 21 nt, Human
aggcuggaucccuuggcgccc

SEQ ID NO: 642747 - RNA, 18 nt, Human
aggcuuccugggggagug

SEQ ID NO: 642748 - RNA, 18 nt, Human
agggagcuggcuccggcc

SEQ ID NO: 642749 - RNA, 22 nt, Human
agggcugugagggcugccagca

SEQ ID NO: 642750 - RNA, 26 nt, Human
aggggcuccuacagugcagcggcggg

SEQ ID NO: 642751 - RNA, 20 nt, Human
agggggcggcgcuccuuggg

SEQ ID NO: 642752 - RNA, 21 nt, Human
agggggguugucacugcuggc

SEQ ID NO: 642753 - RNA, 23 nt, Human
caaaaaacaaacaaacacacaaa

SEQ ID NO: 642754 - RNA, 23 nt, Human
caaacaaacacacaaacaacaac

SEQ ID NO: 642755 - RNA, 21 nt, Human
caaacaacaacaacaacgaaa

SEQ ID NO: 642756 - RNA, 21 nt, Human
caaugccccagaggugggagg

SEQ ID NO: 642757 - RNA, 23 nt, Human
cacacugucaccucucacuuccu

SEQ ID NO: 642758 - RNA, 19 nt, Human
cacagcccagagaaggcag

SEQ ID NO: 642759 - RNA, 24 nt, Human
cacagggugcugauugguguguuu

SEQ ID NO: 642760 - RNA, 22 nt, Human
cacauccccacuagauuagcua

SEQ ID NO: 642761 - RNA, 26 nt, Human
caccacuugaagagugguuugcccca

SEQ ID NO: 642762 - RNA, 21 nt, Human
caccagacucaggagcccagc

SEQ ID NO: 642763 - RNA, 23 nt, Human
caccagaguagccagauacagag

SEQ ID NO: 642764 - RNA, 24 nt, Human
cacccccuagcuccaggucccacc

SEQ ID NO: 642765 - RNA, 19 nt, Human
caccuggaaaggaauggaa

SEQ ID NO: 642766 - RNA, 18 nt, Human
cacuggggcagcaggugg

SEQ ID NO: 642767 - RNA, 25 nt, Human
cagaugcccuccccuggccuguccu

SEQ ID NO: 642768 - RNA, 22 nt, Human
cagcagcugcuggcccaggugc

SEQ ID NO: 642769 - RNA, 19 nt, Human
cagccaagaagguucaggc

SEQ ID NO: 642770 - RNA, 21 nt, Human
cagcccgagugggugggucuc

SEQ ID NO: 642771 - RNA, 21 nt, Human
cagcggcggguugaagggcuc

SEQ ID NO: 642772 - RNA, 23 nt, Human
cagcuaaggcccagcgagaaauc

SEQ ID NO: 642773 - RNA, 24 nt, Human
caggagaccccagcccugaggccc

SEQ ID NO: 642774 - RNA, 18 nt, Human
caggggccaggacugggc

SEQ ID NO: 642775 - RNA, 18 nt, Human
caggucccgagcccugcc

SEQ ID NO: 642776 - RNA, 20 nt, Human
caggucccgagcccugcccc

SEQ ID NO: 642777 - RNA, 19 nt, Human
ccaagacgaaaaaaaaaaa

SEQ ID NO: 642778 - RNA, 22 nt, Human
ccaagacgaaaaaaaaaaaaaa

SEQ ID NO: 642779 - RNA, 21 nt, Human
ccaggaagggagggaggaccc

SEQ ID NO: 642780 - RNA, 19 nt, Human
ccagucccgcgcugugcac

SEQ ID NO: 642781 - RNA, 25 nt, Human
ccagucccgcgcugugcacccgcac

SEQ ID NO: 642782 - RNA, 26 nt, Human
ccaucugaaaaccucuuggugcuuuu

SEQ ID NO: 642783 - RNA, 21 nt, Human
cccacgcccacccggaacuca

SEQ ID NO: 642784 - RNA, 23 nt, Human
cccacgcccacccggaacucacu

SEQ ID NO: 642785 - RNA, 19 nt, Human
cccagcccugaggcccgag

SEQ ID NO: 642786 - RNA, 22 nt, Human
ccccagaaacuggucuccccaa

SEQ ID NO: 642787 - RNA, 19 nt, Human
ccccauuuugagagagcuc

SEQ ID NO: 642788 - RNA, 22 nt, Human
ccccgguuccugcccgccccuc

SEQ ID NO: 642789 - RNA, 18 nt, Human
cccgcccuagucugaggc

SEQ ID NO: 642790 - RNA, 19 nt, Human
cccgccgagcccacgccca

SEQ ID NO: 642791 - RNA, 20 nt, Human
cccugaggcccgagcuacuc

SEQ ID NO: 642792 - RNA, 20 nt, Human
ccgccccucucccuccgcag

SEQ ID NO: 642793 - RNA, 18 nt, Human
ccggccuuggccagccca

SEQ ID NO: 642794 - RNA, 21 nt, Human
ccucccgcccuagucugaggc

SEQ ID NO: 642795 - RNA, 21 nt, Human
ccuccgcaccuccccgcaagc

SEQ ID NO: 642796 - RNA, 21 nt, Human
ccuggaugauggaucgaggcu

SEQ ID NO: 642797 - RNA, 20 nt, Human
cgagggggguugucacugcu

SEQ ID NO: 642798 - RNA, 29 nt, Human
cgcagccccgguuccugcccgccccucuu

SEQ ID NO: 642799 - RNA, 24 nt, Human
cgcuguggagcagggggcggcgcu

SEQ ID NO: 642800 - RNA, 22 nt, Human
cgggccugagagguugaggcag

SEQ ID NO: 642801 - RNA, 22 nt, Human
cuaaggucugcucuaggcugga

SEQ ID NO: 642802 - RNA, 21 nt, Human
cucaaaaaacaaacaaacaca

SEQ ID NO: 642803 - RNA, 20 nt, Human
cuccaggucccacccgaucc

SEQ ID NO: 642804 - RNA, 20 nt, Human
cucccuccgcaccuccccgc

SEQ ID NO: 642805 - RNA, 19 nt, Human
cuccuacagugcagcggcg

SEQ ID NO: 642806 - RNA, 22 nt, Human
cucuggcccgcaagcgcugcgc

SEQ ID NO: 642807 - RNA, 22 nt, Human
cucugucucaaaaaacaaacaa

SEQ ID NO: 642808 - RNA, 18 nt, Human
cugcacugcagccuggau

SEQ ID NO: 642809 - RNA, 21 nt, Human
cugcgcgcagccccgguuccu

SEQ ID NO: 642810 - RNA, 19 nt, Human
cugcucuaggcuggauccc

SEQ ID NO: 642811 - RNA, 21 nt, Human
cugcugcacugcagccuggau

SEQ ID NO: 642812 - RNA, 24 nt, Human
cugugucuuggugggugcucuugg

SEQ ID NO: 642813 - RNA, 20 nt, Human
gaaagaacaaagcuuccacg

SEQ ID NO: 642814 - RNA, 18 nt, Human
gagaaggcagggaaggcu

SEQ ID NO: 642815 - RNA, 18 nt, Human
gagagucaaguggucugu

SEQ ID NO: 642816 - RNA, 20 nt, Human
gaguauggcuuuggcaccug

SEQ ID NO: 642817 - RNA, 27 nt, Human
gagugggguuaggcuaauccccauuuu

SEQ ID NO: 642818 - RNA, 21 nt, Human
gaucgaggcucugucucaaaa

SEQ ID NO: 642819 - RNA, 24 nt, Human
gauggaucgaggcucugucucaaa

SEQ ID NO: 642820 - RNA, 18 nt, Human
gauugcucgggccugaga

SEQ ID NO: 642821 - RNA, 22 nt, Human
gcacagcccagagaaggcaggg

SEQ ID NO: 642822 - RNA, 20 nt, Human
gcacuggggcugggagcugg

SEQ ID NO: 642823 - RNA, 27 nt, Human
gccaagacgaaaaaaaaaaaaaaagaa

SEQ ID NO: 642824 - RNA, 23 nt, Human
gccaggaagggagggaggacccg

SEQ ID NO: 642825 - RNA, 24 nt, Human
gccccacccacauccugcugauug

SEQ ID NO: 642826 - RNA, 24 nt, Human
gccugaguauggcuuuggcaccug

SEQ ID NO: 642827 - RNA, 18 nt, Human
gcgcuguggagcaggggg

SEQ ID NO: 642828 - RNA, 21 nt, Human
gcuagacacaaagguucucca

SEQ ID NO: 642829 - RNA, 19 nt, Human
gcuagauacagagugccca

SEQ ID NO: 642830 - RNA, 20 nt, Human
gcugcacugcagccuggaug

SEQ ID NO: 642831 - RNA, 22 nt, Human
gcugggagcuggcauccagcgu

SEQ ID NO: 642832 - RNA, 21 nt, Human
ggaagggagggaggacccggc

SEQ ID NO: 642833 - RNA, 21 nt, Human
ggagaggcgggcugccgugcu

SEQ ID NO: 642834 - RNA, 24 nt, Human
ggcacuucagggagagggaagaac

SEQ ID NO: 642835 - RNA, 19 nt, Human
ggccagcccagaaaggggc

SEQ ID NO: 642836 - RNA, 18 nt, Human
ggccccgccgagcccacg

SEQ ID NO: 642837 - RNA, 24 nt, Human
ggccuguccugcugugucuuggug

SEQ ID NO: 642838 - RNA, 24 nt, Human
ggcgcuguggagcagggggcggcg

SEQ ID NO: 642839 - RNA, 21 nt, Human
ggcuccuacagugcagcggcg

SEQ ID NO: 642840 - RNA, 19 nt, Human
ggcuggaucccuuggcgcc

SEQ ID NO: 642841 - RNA, 26 nt, Human
gggaggcuccggccgcacaggagccc

SEQ ID NO: 642842 - RNA, 21 nt, Human
gggagugaguccuccaggaag

SEQ ID NO: 642843 - RNA, 24 nt, Human
gggccaggacugggcagcagagag

SEQ ID NO: 642844 - RNA, 19 nt, Human
gggcgcuguggagcagggg

SEQ ID NO: 642845 - RNA, 20 nt, Human
ggggcagcagguggagcugc

SEQ ID NO: 642846 - RNA, 23 nt, Human
ggggcugggagcuggcauccagc

SEQ ID NO: 642847 - RNA, 19 nt, Human
ggggguggggggaggguca

SEQ ID NO: 642848 - RNA, 21 nt, Human
gguugucacugcuggcucagg

SEQ ID NO: 642849 - RNA, 18 nt, Human
gugacagagugggguuag

SEQ ID NO: 642850 - RNA, 20 nt, Human
guggacugugcucuaaugga

SEQ ID NO: 642851 - RNA, 21 nt, Human
uagaagaauaagaaugacaga

SEQ ID NO: 642852 - RNA, 22 nt, Human
uagaagaauaagaaugacagaa

SEQ ID NO: 642853 - RNA, 24 nt, Human
uagaggaaugugcuagaaccuacc

SEQ ID NO: 642854 - RNA, 21 nt, Human
uagcaagauuuauugcaaaga

SEQ ID NO: 642855 - RNA, 20 nt, Human
uagccagauacagagugugg

SEQ ID NO: 642856 - RNA, 22 nt, Human
uagcuccaggucccacccgauc

SEQ ID NO: 642857 - RNA, 19 nt, Human
ucacucacucacucagcaa

SEQ ID NO: 642858 - RNA, 19 nt, Human
ucacucacucagcaaacac

SEQ ID NO: 642859 - RNA, 22 nt, Human
ucagcaaacacccccuagcucc

SEQ ID NO: 642860 - RNA, 19 nt, Human
ucagcagcugccauuccca

SEQ ID NO: 642861 - RNA, 21 nt, Human
ucagcagggggagaggcgggc

SEQ ID NO: 642862 - RNA, 23 nt, Human
ucagggagagggaagaacuugua

SEQ ID NO: 642863 - RNA, 19 nt, Human
uccaaguccccaccagacu

SEQ ID NO: 642864 - RNA, 19 nt, Human
uccaggaagcuagaggaau

SEQ ID NO: 642865 - RNA, 23 nt, Human
uccaggagaccccagcccugagg

SEQ ID NO: 642866 - RNA, 20 nt, Human
uccccagaaacuggucuccc

SEQ ID NO: 642867 - RNA, 21 nt, Human
ucccuccgcaccuccccgcaa

SEQ ID NO: 642868 - RNA, 22 nt, Human
uccugcccgccccucucccucc

SEQ ID NO: 642869 - RNA, 22 nt, Human
uccuggugugggugacagagug

SEQ ID NO: 642870 - RNA, 19 nt, Human
ucgagcacagcagcugcug

SEQ ID NO: 642871 - RNA, 19 nt, Human
ucuccaaguccccaccaga

SEQ ID NO: 642872 - RNA, 22 nt, Human
ucucccuccgcaccuccccgca

SEQ ID NO: 642873 - RNA, 30 nt, Human
ucucugugacaauagcccgacggaugcccu

SEQ ID NO: 642874 - RNA, 19 nt, Human
ucugccaccacuugaagag

SEQ ID NO: 642875 - RNA, 23 nt, Human
ugacagaaacaagaugcucggga

SEQ ID NO: 642876 - RNA, 22 nt, Human
ugacagagugggguuaggcuaa

SEQ ID NO: 642877 - RNA, 24 nt, Human
ugagcuagacacaaagguucucca

SEQ ID NO: 642878 - RNA, 22 nt, Human
ugagcuagauacagagugccca

SEQ ID NO: 642879 - RNA, 19 nt, Human
ugaggcccgagcuacucag

SEQ ID NO: 642880 - RNA, 20 nt, Human
ugagggggagacagacacag

SEQ ID NO: 642881 - RNA, 18 nt, Human
ugauggauucuguugucu

SEQ ID NO: 642882 - RNA, 26 nt, Human
ugcauucacaaacacugagcuagaca

SEQ ID NO: 642883 - RNA, 27 nt, Human
ugcauucacaaacacugagcuagacac

SEQ ID NO: 642884 - RNA, 27 nt, Human
ugccagucccgcgcugugcacccgcac

SEQ ID NO: 642885 - RNA, 19 nt, Human
ugccccagaggugggaggc

SEQ ID NO: 642886 - RNA, 22 nt, Human
ugcuagccucggguggacugug

SEQ ID NO: 642887 - RNA, 24 nt, Human
ugcucugaguggggccccgccgag

SEQ ID NO: 642888 - RNA, 27 nt, Human
uggaaaggaauggaagggacuuggcuc

SEQ ID NO: 642889 - RNA, 19 nt, Human
uggaagggacuuggcucau

SEQ ID NO: 642890 - RNA, 20 nt, Human
uggagcagggggcggcgcuc

SEQ ID NO: 642891 - RNA, 21 nt, Human
uggagcugccugccagucccg

SEQ ID NO: 642892 - RNA, 22 nt, Human
uggauuggugcauucacaaaca

SEQ ID NO: 642893 - RNA, 23 nt, Human
uggcaccugaaggcucuggguuu

SEQ ID NO: 642894 - RNA, 24 nt, Human
uggccuguccugcugugucuuggu

SEQ ID NO: 642895 - RNA, 18 nt, Human
uggcucaggcagccugcu

SEQ ID NO: 642896 - RNA, 19 nt, Human
ugggaggggacccgagggg

SEQ ID NO: 642897 - RNA, 21 nt, Human
ugggaggggacccgagggggg

SEQ ID NO: 642898 - RNA, 19 nt, Human
uggggccggccagcugcuc

SEQ ID NO: 642899 - RNA, 24 nt, Human
uggggccggccagcugcucugagu

SEQ ID NO: 642900 - RNA, 23 nt, Human
uggucgaugggacugggcgcugu

SEQ ID NO: 642901 - RNA, 19 nt, Human
uggugcauucacaaacacu

SEQ ID NO: 642902 - RNA, 19 nt, Human
uggugugggugacagagug

SEQ ID NO: 642903 - RNA, 21 nt, Human
uggugugggugacagaguggg

SEQ ID NO: 642904 - RNA, 24 nt, Human
uggugugggugacagagugggguu

SEQ ID NO: 642905 - RNA, 21 nt, Human
ugucuuggugggugcucuugg

SEQ ID NO: 642906 - RNA, 18 nt, Human
uguggagcagggggcggc

SEQ ID NO: 642907 - RNA, 19 nt, Human
uguggauuggugcauucac

SEQ ID NO: 642908 - RNA, 18 nt, Human
uguguuuacaaaccuuga

SEQ ID NO: 642909 - RNA, 20 nt, Human
uguguuuacaaaccuugagc

SEQ ID NO: 642910 - RNA, 21 nt, Human
uguguuuacaaaccuugagcu

SEQ ID NO: 642911 - RNA, 18 nt, Human
uguuucacucacucacuc

SEQ ID NO: 642912 - RNA, 18 nt, Human
uuccugggggagugaguc

SEQ ID NO: 642913 - RNA, 19 nt, Human
uuccugggggagugagucc

SEQ ID NO: 642914 - RNA, 18 nt, Human
uucuccacauccccacua

SEQ ID NO: 642915 - RNA, 24 nt, Human
uugcucgggccugagagguugagg

SEQ ID NO: 642916 - RNA, 22 nt, Human
uuggaagcuccccagaaacugg

SEQ ID NO: 642917 - RNA, 20 nt, Human
uuggugcauucacaaacacu

SEQ ID NO: 642918 - RNA, 21 nt, Human
uuugagagagcuccucugagg

SEQ ID NO: 642919 - RNA, 22 nt, Human
uuuuuuuuuuuuuuuuuuuggg

SEQ ID NO: 642920 - RNA, 23 nt, Human
aagcagccggcugccacagggcc

SEQ ID NO: 642921 - RNA, 21 nt, Human
acagguaaaagcgcagauguc

SEQ ID NO: 642922 - RNA, 19 nt, Human
accaccucagcggaacagc

SEQ ID NO: 642923 - RNA, 20 nt, Human
accccagauacacucaucac

SEQ ID NO: 642924 - RNA, 20 nt, Human
agaggagccacugggcugca

SEQ ID NO: 642925 - RNA, 28 nt, Human
agaggcagccgccacauuccccaagggg

SEQ ID NO: 642926 - RNA, 22 nt, Human
aggagccacugggcugcaggag

SEQ ID NO: 642927 - RNA, 23 nt, Human
agggcagugccugaggccccuuc

SEQ ID NO: 642928 - RNA, 23 nt, Human
agggcgugggcaccagaggagcc

SEQ ID NO: 642929 - RNA, 19 nt, Human
augaguucuuccgagcaaa

SEQ ID NO: 642930 - RNA, 21 nt, Human
augcucggagcccacagccac

SEQ ID NO: 642931 - RNA, 19 nt, Human
caagucuucaggcucguaa

SEQ ID NO: 642932 - RNA, 18 nt, Human
cacagcagcaggcucggc

SEQ ID NO: 642933 - RNA, 19 nt, Human
cacccuucccaguggucac

SEQ ID NO: 642934 - RNA, 18 nt, Human
cagaagaaguuagggaag

SEQ ID NO: 642935 - RNA, 20 nt, Human
cagauccaagagucgagggc

SEQ ID NO: 642936 - RNA, 18 nt, Human
cagccgccacauucaggc

SEQ ID NO: 642937 - RNA, 23 nt, Human
caggagaagaggaacagguaaaa

SEQ ID NO: 642938 - RNA, 22 nt, Human
cagggcccucagcccacccuuc

SEQ ID NO: 642939 - RNA, 20 nt, Human
caguggccggggggccaggg

SEQ ID NO: 642940 - RNA, 21 nt, Human
caucaggccucuccccacagc

SEQ ID NO: 642941 - RNA, 24 nt, Human
ccacugggcugcaggaggacagcc

SEQ ID NO: 642942 - RNA, 19 nt, Human
ccagagccccugcaucugg

SEQ ID NO: 642943 - RNA, 21 nt, Human
ccaguggucaccccuccuucc

SEQ ID NO: 642944 - RNA, 22 nt, Human
ccauccacuggggcaccugauc

SEQ ID NO: 642945 - RNA, 19 nt, Human
cccacagcggacccucgag

SEQ ID NO: 642946 - RNA, 23 nt, Human
cccauccacuggggcaccugauc

SEQ ID NO: 642947 - RNA, 18 nt, Human
cccaugagucaguguucc

SEQ ID NO: 642948 - RNA, 21 nt, Human
ccccaccaccucagcggaaca

SEQ ID NO: 642949 - RNA, 18 nt, Human
ccucagcccacccuuccc

SEQ ID NO: 642950 - RNA, 23 nt, Human
ccuccagaagccgcucccggucc

SEQ ID NO: 642951 - RNA, 24 nt, Human
ccuccuuccugugcugggcugcag

SEQ ID NO: 642952 - RNA, 20 nt, Human
ccugaggccccuuccugugg

SEQ ID NO: 642953 - RNA, 18 nt, Human
cgaggucucggagcagau

SEQ ID NO: 642954 - RNA, 19 nt, Human
cggagcagauccaagaguc

SEQ ID NO: 642955 - RNA, 19 nt, Human
cggucacgguccaggagcc

SEQ ID NO: 642956 - RNA, 21 nt, Human
cguggucacacacggaaugcc

SEQ ID NO: 642957 - RNA, 22 nt, Human
cuccagaagccgcucccggucc

SEQ ID NO: 642958 - RNA, 20 nt, Human
cuccccaggaagacgacgcc

SEQ ID NO: 642959 - RNA, 18 nt, Human
cuccuuccugugcugggc

SEQ ID NO: 642960 - RNA, 19 nt, Human
cuguggauuaacuccugau

SEQ ID NO: 642961 - RNA, 23 nt, Human
cuuaagugcugcgcugguaacuc

SEQ ID NO: 642962 - RNA, 18 nt, Human
cuuccuguggccucccca

SEQ ID NO: 642963 - RNA, 20 nt, Human
cuugguaccguugcuguggc

SEQ ID NO: 642964 - RNA, 18 nt, Human
gagcaaaaaugcgggccc

SEQ ID NO: 642965 - RNA, 19 nt, Human
gcagauccaagagucgagg

SEQ ID NO: 642966 - RNA, 21 nt, Human
gccucuccccacagcggaccc

SEQ ID NO: 642967 - RNA, 23 nt, Human
gccugaggccccuuccuguggcc

SEQ ID NO: 642968 - RNA, 20 nt, Human
gcggaacagcaggguggcaa

SEQ ID NO: 642969 - RNA, 22 nt, Human
gcggaacagcaggguggcaagg

SEQ ID NO: 642970 - RNA, 21 nt, Human
ggaacagcaggguggcaaggg

SEQ ID NO: 642971 - RNA, 19 nt, Human
ggccaggguccacagcuug

SEQ ID NO: 642972 - RNA, 23 nt, Human
ggcugcaggaggacagcccugug

SEQ ID NO: 642973 - RNA, 23 nt, Human
ggcugggugcagcccauccacug

SEQ ID NO: 642974 - RNA, 20 nt, Human
gggcgugggcaccagaggag

SEQ ID NO: 642975 - RNA, 21 nt, Human
ggguggucuaggaaccugagg

SEQ ID NO: 642976 - RNA, 20 nt, Human
ggugcuuugcuuuuguuaag

SEQ ID NO: 642977 - RNA, 20 nt, Human
ggugggcugggugcagccca

SEQ ID NO: 642978 - RNA, 20 nt, Human
gguggucuaggaaccugagg

SEQ ID NO: 642979 - RNA, 20 nt, Human
gugggcugggugcagcccau

SEQ ID NO: 642980 - RNA, 19 nt, Human
ucaaggucaaggucgcgcu

SEQ ID NO: 642981 - RNA, 19 nt, Human
ucagcccacccuucccagu

SEQ ID NO: 642982 - RNA, 19 nt, Human
uccacaaggccugaauuca

SEQ ID NO: 642983 - RNA, 21 nt, Human
uccacagaccaugggucccca

SEQ ID NO: 642984 - RNA, 21 nt, Human
uccacagaccaugggucccca

SEQ ID NO: 642985 - RNA, 23 nt, Human
uccacagaccauggguccccacc

SEQ ID NO: 642986 - RNA, 24 nt, Human
uccacagcuugugaugggugggag

SEQ ID NO: 642987 - RNA, 23 nt, Human
ucccaguggucaccccuccuucc

SEQ ID NO: 642988 - RNA, 23 nt, Human
uccccaccaccucagcggaacag

SEQ ID NO: 642989 - RNA, 24 nt, Human
ucgcggucccgguccaagucguca

SEQ ID NO: 642990 - RNA, 23 nt, Human
ucggagcccacagccacagggcc

SEQ ID NO: 642991 - RNA, 18 nt, Human
ucucggagcagauccaag

SEQ ID NO: 642992 - RNA, 19 nt, Human
ugaagggcguuuuaaugga

SEQ ID NO: 642993 - RNA, 23 nt, Human
ugaagggcguuuuaauggagaca

SEQ ID NO: 642994 - RNA, 21 nt, Human
ugagggccagggugggcuggg

SEQ ID NO: 642995 - RNA, 21 nt, Human
ugaguucuuccgagcaaaaau

SEQ ID NO: 642996 - RNA, 23 nt, Human
ugccugaggccccuuccuguggc

SEQ ID NO: 642997 - RNA, 24 nt, Human
ugcucggagcccacagccacaggg

SEQ ID NO: 642998 - RNA, 18 nt, Human
uggcaagggcgugggcac

SEQ ID NO: 642999 - RNA, 22 nt, Human
uggcaagggcgugggcaccaga

SEQ ID NO: 643000 - RNA, 19 nt, Human
ugggagcagaacggccucu

SEQ ID NO: 643001 - RNA, 20 nt, Human
ugggugcagcccauccacug

SEQ ID NO: 643002 - RNA, 24 nt, Human
ugucugcaguggccggggggccag

SEQ ID NO: 643003 - RNA, 23 nt, Human
uuuuuuuuuuuuucaaugaaggg

SEQ ID NO: 643004 - RNA, 28 nt, Human
uuuuuuuuuuuuuucaaugaagggcguu

SEQ ID NO: 643005 - RNA, 24 nt, Human
uuuuuuuuuuuuuuuuuuucaaug

SEQ ID NO: 643006 - RNA, 18 nt, Human
aaaaaaaaaaaaauuagc

SEQ ID NO: 643007 - RNA, 24 nt, Human
aaaaaagugacauauagaaaagaa

SEQ ID NO: 643008 - RNA, 19 nt, Human
aaacaagauuagcacugua

SEQ ID NO: 643009 - RNA, 21 nt, Human
aaauggucgguguacacgaac

SEQ ID NO: 643010 - RNA, 19 nt, Human
aacgugcugggauuacagg

SEQ ID NO: 643011 - RNA, 18 nt, Human
aagaaacaaaaagaugug

SEQ ID NO: 643012 - RNA, 22 nt, Human
aaggguaauaauaacacaaaac

SEQ ID NO: 643013 - RNA, 20 nt, Human
aaguccuuuuuuuuuuuuuu

SEQ ID NO: 643014 - RNA, 18 nt, Human
aaguucaccugcagguga

SEQ ID NO: 643015 - RNA, 25 nt, Human
aauaacacaaaacagagaugaggga

SEQ ID NO: 643016 - RNA, 20 nt, Human
aaucugcccgccuuggccuc

SEQ ID NO: 643017 - RNA, 23 nt, Human
acaggcgcccgccaccacgcccg

SEQ ID NO: 643018 - RNA, 22 nt, Human
accauguuggccaggcuggucu

SEQ ID NO: 643019 - RNA, 18 nt, Human
acgagguuucaccauguu

SEQ ID NO: 643020 - RNA, 20 nt, Human
acgagguuucaccauguugg

SEQ ID NO: 643021 - RNA, 24 nt, Human
acgagguuucaccauguuggccag

SEQ ID NO: 643022 - RNA, 21 nt, Human
acgugcuucggggccuguagu

SEQ ID NO: 643023 - RNA, 25 nt, Human
agacgggagugcaguggcgccaucu

SEQ ID NO: 643024 - RNA, 23 nt, Human
agcagcuaggauuacaggcgccc

SEQ ID NO: 643025 - RNA, 20 nt, Human
agcugcucugcggggccgug

SEQ ID NO: 643026 - RNA, 24 nt, Human
aggagugcaguggcgcgaucucgg

SEQ ID NO: 643027 - RNA, 23 nt, Human
aggaguucaagaccagccuaggc

SEQ ID NO: 643028 - RNA, 25 nt, Human
aggcaggagugcaguggcgcgaucu

SEQ ID NO: 643029 - RNA, 24 nt, Human
aggcugagggggguggaucgcuug

SEQ ID NO: 643030 - RNA, 20 nt, Human
aggcuuccggguggagcccu

SEQ ID NO: 643031 - RNA, 23 nt, Human
agggguucuucugccucagcucc

SEQ ID NO: 643032 - RNA, 20 nt, Human
agguguagugauccacaacc

SEQ ID NO: 643033 - RNA, 22 nt, Human
agguuucaccauguuggccagg

SEQ ID NO: 643034 - RNA, 22 nt, Human
aguagagacgagguuucaccau

SEQ ID NO: 643035 - RNA, 21 nt, Human
aguauagaagaaacaaaaaga

SEQ ID NO: 643036 - RNA, 19 nt, Human
agugcaguggcgccaucuc

SEQ ID NO: 643037 - RNA, 20 nt, Human
agugcaguggcgcgaucucg

SEQ ID NO: 643038 - RNA, 23 nt, Human
agugcaguggcgcgaucucggcu

SEQ ID NO: 643039 - RNA, 24 nt, Human
agugcaguggcgcgaucucggcuc

SEQ ID NO: 643040 - RNA, 24 nt, Human
auauauuuguauuuuuaguagaga

SEQ ID NO: 643041 - RNA, 24 nt, Human
auauuuguauuuuuaguagagacg

SEQ ID NO: 643042 - RNA, 21 nt, Human
auugcacuccagccuggguga

SEQ ID NO: 643043 - RNA, 24 nt, Human
auugcgccauugcacuccagccug

SEQ ID NO: 643044 - RNA, 22 nt, Human
caacauggagagaccuugucuc

SEQ ID NO: 643045 - RNA, 18 nt, Human
caaccaaaaaaaaaaaag

SEQ ID NO: 643046 - RNA, 22 nt, Human
caaccaaaaaaaaaaaagugac

SEQ ID NO: 643047 - RNA, 18 nt, Human
caacgugcugggauuaca

SEQ ID NO: 643048 - RNA, 26 nt, Human
caagcaauucucugccucagccuccc

SEQ ID NO: 643049 - RNA, 22 nt, Human
caagggguucuucugccucagc

SEQ ID NO: 643050 - RNA, 23 nt, Human
cacaaaacagagaugagggacaa

SEQ ID NO: 643051 - RNA, 24 nt, Human
cacaaaacagagaugagggacaag

SEQ ID NO: 643052 - RNA, 19 nt, Human
cacaacauguugggccugg

SEQ ID NO: 643053 - RNA, 20 nt, Human
caccauauugccuuaaugcc

SEQ ID NO: 643054 - RNA, 21 nt, Human
caccauguuggccaggcuggu

SEQ ID NO: 643055 - RNA, 22 nt, Human
caccauguuggccaggcugguc

SEQ ID NO: 643056 - RNA, 24 nt, Human
caccauguuggccaggcuggucuu

SEQ ID NO: 643057 - RNA, 18 nt, Human
cacuccagccugggugac

SEQ ID NO: 643058 - RNA, 22 nt, Human
cacuccagccugggugacacaa

SEQ ID NO: 643059 - RNA, 23 nt, Human
cacuccagccugggugacacaag

SEQ ID NO: 643060 - RNA, 24 nt, Human
cagccuaggcaacauggagagacc

SEQ ID NO: 643061 - RNA, 21 nt, Human
caggcgcccgccaccacgccc

SEQ ID NO: 643062 - RNA, 22 nt, Human
caggugggcgcagugacucaug

SEQ ID NO: 643063 - RNA, 24 nt, Human
caucuguguugccuacuacuuggg

SEQ ID NO: 643064 - RNA, 21 nt, Human
cauggagagaccuugucucca

SEQ ID NO: 643065 - RNA, 24 nt, Human
cauguuggccaggcuggucuugaa

SEQ ID NO: 643066 - RNA, 19 nt, Human
cauugcacuccagccuggg

SEQ ID NO: 643067 - RNA, 21 nt, Human
cauugcacuccagccugggug

SEQ ID NO: 643068 - RNA, 22 nt, Human
cauugcacuccagccuggguga

SEQ ID NO: 643069 - RNA, 24 nt, Human
cauugcacuccagccugggugaca

SEQ ID NO: 643070 - RNA, 26 nt, Human
cauugugucccaggcaggagugcagu

SEQ ID NO: 643071 - RNA, 19 nt, Human
ccaacgugcugggauuaca

SEQ ID NO: 643072 - RNA, 22 nt, Human
ccaacgugcugggauuacaggc

SEQ ID NO: 643073 - RNA, 19 nt, Human
ccaccuucuccucgccccg

SEQ ID NO: 643074 - RNA, 21 nt, Human
ccagacaggaagugaugagau

SEQ ID NO: 643075 - RNA, 20 nt, Human
ccaggguucaagcaauucuc

SEQ ID NO: 643076 - RNA, 20 nt, Human
ccaggguucaagcaauucuc

SEQ ID NO: 643077 - RNA, 18 nt, Human
ccauugcacuccagccug

SEQ ID NO: 643078 - RNA, 20 nt, Human
ccauugcacuccagccuggg

SEQ ID NO: 643079 - RNA, 21 nt, Human
ccauugcacuccagccugggu

SEQ ID NO: 643080 - RNA, 21 nt, Human
ccauugcacuccagccugggu

SEQ ID NO: 643081 - RNA, 22 nt, Human
ccauugcacuccagccugggug

SEQ ID NO: 643082 - RNA, 23 nt, Human
ccauugcacuccagccuggguga

SEQ ID NO: 643083 - RNA, 23 nt, Human
ccauugcacuccagccuggguga

SEQ ID NO: 643084 - RNA, 24 nt, Human
ccauugcacuccagccugggugac

SEQ ID NO: 643085 - RNA, 24 nt, Human
cccaacgugcugggauuacaggcu

SEQ ID NO: 643086 - RNA, 22 nt, Human
ccccgcuagggcgcuccccuug

SEQ ID NO: 643087 - RNA, 19 nt, Human
cccgccuuggccucccaac

SEQ ID NO: 643088 - RNA, 24 nt, Human
cccgggcuguaggacccucauuuc

SEQ ID NO: 643089 - RNA, 23 nt, Human
cccggguucaagggguucuucug

SEQ ID NO: 643090 - RNA, 18 nt, Human
cccuggggccccgcuagg

SEQ ID NO: 643091 - RNA, 18 nt, Human
cccuggggccccgcuagg

SEQ ID NO: 643092 - RNA, 18 nt, Human
cccuugcucugccgccug

SEQ ID NO: 643093 - RNA, 20 nt, Human
cccuugcucugccgccuggg

SEQ ID NO: 643094 - RNA, 21 nt, Human
ccgccuuggccucccaacgug

SEQ ID NO: 643095 - RNA, 24 nt, Human
ccggguggagcccugcgcccuauc

SEQ ID NO: 643096 - RNA, 24 nt, Human
ccuccaggguucaagcaauucucu

SEQ ID NO: 643097 - RNA, 21 nt, Human
ccugaccuugcccaggacggc

SEQ ID NO: 643098 - RNA, 19 nt, Human
ccuugucuccacaaaaaaa

SEQ ID NO: 643099 - RNA, 18 nt, Human
ccuuuuuuuuuuuuuuga

SEQ ID NO: 643100 - RNA, 20 nt, Human
cggcugcgcgcugcuccucg

SEQ ID NO: 643101 - RNA, 24 nt, Human
cgugcugggauuacaggcuugagc

SEQ ID NO: 643102 - RNA, 19 nt, Human
cuacuggccguuagcugug

SEQ ID NO: 643103 - RNA, 22 nt, Human
cucacaacauguugggccuggg

SEQ ID NO: 643104 - RNA, 22 nt, Human
cucacugaaaccuccgccuccc

SEQ ID NO: 643105 - RNA, 24 nt, Human
cucacugaaaccuccgccucccgg

SEQ ID NO: 643106 - RNA, 18 nt, Human
cucccggaaccugcggcc

SEQ ID NO: 643107 - RNA, 21 nt, Human
cucccggguucaagggguucu

SEQ ID NO: 643108 - RNA, 22 nt, Human
cucucucucucucccccagacg

SEQ ID NO: 643109 - RNA, 21 nt, Human
cucugccucagccucccaagc

SEQ ID NO: 643110 - RNA, 24 nt, Human
cugcaaccuccgccuccaggguuc

SEQ ID NO: 643111 - RNA, 23 nt, Human
cugccucagccucccaagcagcu

SEQ ID NO: 643112 - RNA, 22 nt, Human
cugccucagcuccugaguagcu

SEQ ID NO: 643113 - RNA, 21 nt, Human
cugcgcgcugcuccucgcccu

SEQ ID NO: 643114 - RNA, 21 nt, Human
cuggucuugaacgccuggucu

SEQ ID NO: 643115 - RNA, 20 nt, Human
cuuugggaggucgaaggggg

SEQ ID NO: 643116 - RNA, 23 nt, Human
gagguuucaccauguuggccagg

SEQ ID NO: 643117 - RNA, 24 nt, Human
gaucgcuugagcccaggaguucaa

SEQ ID NO: 643118 - RNA, 18 nt, Human
gauuacaggcgcccgcca

SEQ ID NO: 643119 - RNA, 18 nt, Human
gauuacaggcuugagcca

SEQ ID NO: 643120 - RNA, 22 nt, Human
gauuacaggcuugagccaccgc

SEQ ID NO: 643121 - RNA, 23 nt, Human
gauuucauuccccuuaagcuuca

SEQ ID NO: 643122 - RNA, 22 nt, Human
gcaaccuccgccuccaggguuc

SEQ ID NO: 643123 - RNA, 19 nt, Human
gcagcggccucagccgggg

SEQ ID NO: 643124 - RNA, 19 nt, Human
gccauugcacuccagccug

SEQ ID NO: 643125 - RNA, 24 nt, Human
gccauugcacuccagccuggguga

SEQ ID NO: 643126 - RNA, 22 nt, Human
gcccaggaguucaagaccagcc

SEQ ID NO: 643127 - RNA, 18 nt, Human
gcccggacccuggggccc

SEQ ID NO: 643128 - RNA, 18 nt, Human
gcccucgaaguuuuauuu

SEQ ID NO: 643129 - RNA, 21 nt, Human
gccucccaagcagcuaggauu

SEQ ID NO: 643130 - RNA, 20 nt, Human
ggaggcgggucgggggugcu

SEQ ID NO: 643131 - RNA, 22 nt, Human
ggauuacaggcgcccgccacca

SEQ ID NO: 643132 - RNA, 20 nt, Human
gggaggucgaagggggaaga

SEQ ID NO: 643133 - RNA, 19 nt, Human
gggcgcagugacucaugcu

SEQ ID NO: 643134 - RNA, 21 nt, Human
gggcgcuccccuugcucugcc

SEQ ID NO: 643135 - RNA, 27 nt, Human
ggggguggaucgcuugagcugggguug

SEQ ID NO: 643136 - RNA, 21 nt, Human
gggguggaucgcuugagcugg

SEQ ID NO: 643137 - RNA, 20 nt, Human
ggguggaccugucacuucgg

SEQ ID NO: 643138 - RNA, 24 nt, Human
guaucaaaaaacaaccaaaaaaaa

SEQ ID NO: 643139 - RNA, 18 nt, Human
uaacgcuuugggaggucg

SEQ ID NO: 643140 - RNA, 23 nt, Human
uacaggcgcccgccaccacgccc

SEQ ID NO: 643141 - RNA, 23 nt, Human
uacaggcuugagccaccgcgccc

SEQ ID NO: 643142 - RNA, 22 nt, Human
uacgugcuucggggccuguagu

SEQ ID NO: 643143 - RNA, 25 nt, Human
uagaagaaacaaaaagaugugacag

SEQ ID NO: 643144 - RNA, 22 nt, Human
uagagacgagguuucaccaugu

SEQ ID NO: 643145 - RNA, 25 nt, Human
uagcaauaaauuguguaacucuaau

SEQ ID NO: 643146 - RNA, 19 nt, Human
uagcugggcguagucgcac

SEQ ID NO: 643147 - RNA, 21 nt, Human
uaggauuacaggcgcccgcca

SEQ ID NO: 643148 - RNA, 22 nt, Human
uaggauuacaggcgcccgccac

SEQ ID NO: 643149 - RNA, 24 nt, Human
uaggauuacaggcgcccgccacca

SEQ ID NO: 643150 - RNA, 24 nt, Human
uaguagagacgagguuucaccaug

SEQ ID NO: 643151 - RNA, 26 nt, Human
uaguagagacgagguuucaccauguu

SEQ ID NO: 643152 - RNA, 18 nt, Human
uaucaaaaaacaaccaaa

SEQ ID NO: 643153 - RNA, 23 nt, Human
uaucaaaaaacaaccaaaaaaaa

SEQ ID NO: 643154 - RNA, 24 nt, Human
uaugauugcgccauugcacuccag

SEQ ID NO: 643155 - RNA, 24 nt, Human
ucacugaaaccuccgccucccggg

SEQ ID NO: 643156 - RNA, 25 nt, Human
ucacugaaaccuccgccucccgggu

SEQ ID NO: 643157 - RNA, 23 nt, Human
ucacugcaaccuccgccuccagg

SEQ ID NO: 643158 - RNA, 24 nt, Human
ucacugcaaccuccgccuccaggg

SEQ ID NO: 643159 - RNA, 25 nt, Human
ucacugcaaccuccgccuccagggu

SEQ ID NO: 643160 - RNA, 27 nt, Human
ucacugcaaccuccgccuccaggguuc

SEQ ID NO: 643161 - RNA, 20 nt, Human
ucagccucccaagcagcuag

SEQ ID NO: 643162 - RNA, 22 nt, Human
uccacagaagcagaaccagaca

SEQ ID NO: 643163 - RNA, 21 nt, Human
uccagccugggugacacaaga

SEQ ID NO: 643164 - RNA, 23 nt, Human
uccaggguucaagcaauucucug

SEQ ID NO: 643165 - RNA, 24 nt, Human
ucccaacgugcugggauuacaggc

SEQ ID NO: 643166 - RNA, 23 nt, Human
ucccaagcagcuaggauuacagg

SEQ ID NO: 643167 - RNA, 24 nt, Human
ucccaagcagcuaggauuacaggc

SEQ ID NO: 643168 - RNA, 19 nt, Human
ucccaggcaggagugcagu

SEQ ID NO: 643169 - RNA, 19 nt, Human
ucccggguucaagggguuc

SEQ ID NO: 643170 - RNA, 20 nt, Human
ucccggguucaagggguucu

SEQ ID NO: 643171 - RNA, 24 nt, Human
ucccggguucaagggguucuucug

SEQ ID NO: 643172 - RNA, 24 nt, Human
uccgccuccaggguucaagcaauu

SEQ ID NO: 643173 - RNA, 23 nt, Human
ucgcuugagcccaggaguucaag

SEQ ID NO: 643174 - RNA, 23 nt, Human
ucucaccgauuucauuccccuua

SEQ ID NO: 643175 - RNA, 20 nt, Human
ucuccacaaaaaaaaaaaaa

SEQ ID NO: 643176 - RNA, 18 nt, Human
ucucccccagacgggagu

SEQ ID NO: 643177 - RNA, 21 nt, Human
ucucucucucucucuccccca

SEQ ID NO: 643178 - RNA, 19 nt, Human
ucuguguugccuacuacuu

SEQ ID NO: 643179 - RNA, 19 nt, Human
ucuguguugccuacuacuu

SEQ ID NO: 643180 - RNA, 26 nt, Human
ugacacaagacccuguaucaaaaaac

SEQ ID NO: 643181 - RNA, 18 nt, Human
ugaccuguggcagaggug

SEQ ID NO: 643182 - RNA, 24 nt, Human
ugaccuguggcagagguggcgucu

SEQ ID NO: 643183 - RNA, 23 nt, Human
ugagcccaggaguucaagaccag

SEQ ID NO: 643184 - RNA, 22 nt, Human
ugagcugggguugucaaggcuu

SEQ ID NO: 643185 - RNA, 22 nt, Human
ugagggggguggaucgcuugag

SEQ ID NO: 643186 - RNA, 21 nt, Human
ugcacuccagccugggugaca

SEQ ID NO: 643187 - RNA, 20 nt, Human
ugcaggugaggcggcccgga

SEQ ID NO: 643188 - RNA, 22 nt, Human
ugcaguggcgcgaucucggcuc

SEQ ID NO: 643189 - RNA, 18 nt, Human
ugcccaggacggcugacc

SEQ ID NO: 643190 - RNA, 23 nt, Human
ugccucagccucccaagcagcua

SEQ ID NO: 643191 - RNA, 24 nt, Human
ugccucagccucccaagcagcuag

SEQ ID NO: 643192 - RNA, 19 nt, Human
ugccucagcuccugaguag

SEQ ID NO: 643193 - RNA, 20 nt, Human
ugccucagcuccugaguagc

SEQ ID NO: 643194 - RNA, 22 nt, Human
ugccucagcuccugaguagcuc

SEQ ID NO: 643195 - RNA, 23 nt, Human
ugcggccacggcuucccaccuuc

SEQ ID NO: 643196 - RNA, 21 nt, Human
ugcuaugauugcgccauugca

SEQ ID NO: 643197 - RNA, 18 nt, Human
uggagccugcagggccgg

SEQ ID NO: 643198 - RNA, 25 nt, Human
uggaggacaaguccuuuuuuuuuuu

SEQ ID NO: 643199 - RNA, 18 nt, Human
uggagucacuaggggugg

SEQ ID NO: 643200 - RNA, 18 nt, Human
uggaucgcuugagcuggg

SEQ ID NO: 643201 - RNA, 24 nt, Human
uggccaggcuggucuugaacgccu

SEQ ID NO: 643202 - RNA, 18 nt, Human
uggcgaggcuuccgggug

SEQ ID NO: 643203 - RNA, 21 nt, Human
uggcugacacauuaaaugucu

SEQ ID NO: 643204 - RNA, 19 nt, Human
ugggaggcugaggggggug

SEQ ID NO: 643205 - RNA, 23 nt, Human
ugggaggcugagggggguggauc

SEQ ID NO: 643206 - RNA, 18 nt, Human
ugggauuacaggcuugag

SEQ ID NO: 643207 - RNA, 19 nt, Human
ugggauuacaggcuugagc

SEQ ID NO: 643208 - RNA, 21 nt, Human
ugggauuacaggcuugagcca

SEQ ID NO: 643209 - RNA, 22 nt, Human
ugggauuacaggcuugagccac

SEQ ID NO: 643210 - RNA, 23 nt, Human
ugggauuacaggcuugagccacc

SEQ ID NO: 643211 - RNA, 24 nt, Human
ugggauuacaggcuugagccaccg

SEQ ID NO: 643212 - RNA, 22 nt, Human
ugggccuggguggcugacacau

SEQ ID NO: 643213 - RNA, 18 nt, Human
ugggucacauagcugacc

SEQ ID NO: 643214 - RNA, 18 nt, Human
ugucaaggcuucagugug

SEQ ID NO: 643215 - RNA, 18 nt, Human
uuagcugggcguagucgc

SEQ ID NO: 643216 - RNA, 24 nt, Human
uuaguagagacgagguuucaccau

SEQ ID NO: 643217 - RNA, 23 nt, Human
uucaagggguucuucugccucag

SEQ ID NO: 643218 - RNA, 21 nt, Human
uucccaccuucuccucgcccc

SEQ ID NO: 643219 - RNA, 18 nt, Human
uucuucugccucagcucc

SEQ ID NO: 643220 - RNA, 22 nt, Human
uucuuuagcaauaaauugugua

SEQ ID NO: 643221 - RNA, 22 nt, Human
uugagcccaggaguucaagacc

SEQ ID NO: 643222 - RNA, 24 nt, Human
uugggaggcugagggggguggauc

SEQ ID NO: 643223 - RNA, 24 nt, Human
uuucaccauguuggccaggcuggu

SEQ ID NO: 643224 - RNA, 18 nt, Human
uuuguauuuuuaguagag

SEQ ID NO: 643225 - RNA, 19 nt, Human
uuuguauuuuuaguagaga

SEQ ID NO: 643226 - RNA, 24 nt, Human
uuuuuaguagagacgagguuucac

SEQ ID NO: 643227 - RNA, 24 nt, Human
uuuuuugagacaagagucucucuc

SEQ ID NO: 643228 - RNA, 24 nt, Human
uuuuuuuuuuuugagacaagaguc

SEQ ID NO: 643229 - RNA, 18 nt, Human
aaaaaaaggcuaauugua

SEQ ID NO: 643230 - RNA, 26 nt, Human
aaaaagccaguugauuaccaauaaug

SEQ ID NO: 643231 - RNA, 22 nt, Human
aaaccacacugcaaauuaacaa

SEQ ID NO: 643232 - RNA, 26 nt, Human
aaagaaauaaaacagaaaauuuugcc

SEQ ID NO: 643233 - RNA, 26 nt, Human
aaagaacaaucccuuguuaggccuag

SEQ ID NO: 643234 - RNA, 23 nt, Human
aaagaagauuuuaaaagaacaau

SEQ ID NO: 643235 - RNA, 25 nt, Human
aacaaaaagaaaucagacaaucuaa

SEQ ID NO: 643236 - RNA, 24 nt, Human
aaccaacaaaaucuuagcaauuau

SEQ ID NO: 643237 - RNA, 19 nt, Human
aaguacauacagauauucu

SEQ ID NO: 643238 - RNA, 18 nt, Human
aagucaggucagcucuuu

SEQ ID NO: 643239 - RNA, 20 nt, Human
acaaaaagaaaucagacaau

SEQ ID NO: 643240 - RNA, 22 nt, Human
acaacaaaaagaaaucagacaa

SEQ ID NO: 643241 - RNA, 24 nt, Human
acacugcaaagucaauuuccuggg

SEQ ID NO: 643242 - RNA, 22 nt, Human
acagcuuuuugcucuuucuucu

SEQ ID NO: 643243 - RNA, 19 nt, Human
accacacugcaaauuaaca

SEQ ID NO: 643244 - RNA, 26 nt, Human
accauuauaaaagagacuugccugaa

SEQ ID NO: 643245 - RNA, 26 nt, Human
acucaauauauuuaacacacauauuu

SEQ ID NO: 643246 - RNA, 20 nt, Human
acuuucaaacaugcaaaaca

SEQ ID NO: 643247 - RNA, 20 nt, Human
aguguuuacagcucaaggga

SEQ ID NO: 643248 - RNA, 22 nt, Human
auaaaacagaaaauuuugccuu

SEQ ID NO: 643249 - RNA, 18 nt, Human
aucuaaaggacauuggcu

SEQ ID NO: 643250 - RNA, 24 nt, Human
caaaacaagcuccuaacaccagau

SEQ ID NO: 643251 - RNA, 22 nt, Human
caaauuaacaaaagaauuguac

SEQ ID NO: 643252 - RNA, 22 nt, Human
caagcuccuaacaccagauauu

SEQ ID NO: 643253 - RNA, 19 nt, Human
caauauauuuaacacacau

SEQ ID NO: 643254 - RNA, 24 nt, Human
caccaguggugacacugcaaaguc

SEQ ID NO: 643255 - RNA, 23 nt, Human
cacugcaaagucaauuuccuggg

SEQ ID NO: 643256 - RNA, 21 nt, Human
cacuugaaaaaccauuauaaa

SEQ ID NO: 643257 - RNA, 20 nt, Human
cagaacaauacgaaaugcag

SEQ ID NO: 643258 - RNA, 24 nt, Human
cagcaaaacaagcuccuaacacca

SEQ ID NO: 643259 - RNA, 25 nt, Human
caucugaacaaacaaucuugcaguc

SEQ ID NO: 643260 - RNA, 21 nt, Human
ccaaguacauacagauauucu

SEQ ID NO: 643261 - RNA, 23 nt, Human
ccacaacaaaaagaaaucagaca

SEQ ID NO: 643262 - RNA, 21 nt, Human
ccacacugcaaauuaacaaaa

SEQ ID NO: 643263 - RNA, 22 nt, Human
ccacacugcaaauuaacaaaag

SEQ ID NO: 643264 - RNA, 24 nt, Human
ccagugauuugggugauaaaguua

SEQ ID NO: 643265 - RNA, 23 nt, Human
cuccaagcccuuauuugcuuaug

SEQ ID NO: 643266 - RNA, 19 nt, Human
gaaaaaccauuauaaaaga

SEQ ID NO: 643267 - RNA, 19 nt, Human
gcaaauuaacaaaagaauu

SEQ ID NO: 643268 - RNA, 22 nt, Human
gcuacugguugccuuuauucuc

SEQ ID NO: 643269 - RNA, 22 nt, Human
uaaaagugaucgcugcaaaauc

SEQ ID NO: 643270 - RNA, 20 nt, Human
uaacacguauacguguauac

SEQ ID NO: 643271 - RNA, 23 nt, Human
uaaguugaacuucauuugccguu

SEQ ID NO: 643272 - RNA, 21 nt, Human
uacaccacuucugcaaauaag

SEQ ID NO: 643273 - RNA, 21 nt, Human
uacaccacuucugcaaauaag

SEQ ID NO: 643274 - RNA, 18 nt, Human
uacauuaaccaacaaaau

SEQ ID NO: 643275 - RNA, 21 nt, Human
uaccauuuugaaauauacaga

SEQ ID NO: 643276 - RNA, 21 nt, Human
uagaauaaauggcacuugaaa

SEQ ID NO: 643277 - RNA, 22 nt, Human
uagcuuacaccaguggugacac

SEQ ID NO: 643278 - RNA, 20 nt, Human
uauaaaagagacuugccuga

SEQ ID NO: 643279 - RNA, 20 nt, Human
ucaaugccagugauuugggu

SEQ ID NO: 643280 - RNA, 21 nt, Human
uccacaaucaugauuuuuguc

SEQ ID NO: 643281 - RNA, 22 nt, Human
uccacaaucaugauuuuugucc

SEQ ID NO: 643282 - RNA, 24 nt, Human
uccuaacaccagauauucucuuua

SEQ ID NO: 643283 - RNA, 18 nt, Human
uccugggcauuugauggc

SEQ ID NO: 643284 - RNA, 20 nt, Human
ugaaguggacuguugccuca

SEQ ID NO: 643285 - RNA, 21 nt, Human
ugaaguggacuguugccucag

SEQ ID NO: 643286 - RNA, 18 nt, Human
ugauccaauuuaucaaaa

SEQ ID NO: 643287 - RNA, 20 nt, Human
ugauuaaaaacaguuuauua

SEQ ID NO: 643288 - RNA, 21 nt, Human
ugcagaaaagucauaucuuua

SEQ ID NO: 643289 - RNA, 19 nt, Human
ugcccugaaguggacuguu

SEQ ID NO: 643290 - RNA, 18 nt, Human
uggacuguugccucaguu

SEQ ID NO: 643291 - RNA, 23 nt, Human
ugggugauaaaguuauucuguau

SEQ ID NO: 643292 - RNA, 23 nt, Human
uguuggguuuucucaucuggggu

SEQ ID NO: 643293 - RNA, 23 nt, Human
uuaggccuacaucugaacaaaca

SEQ ID NO: 643294 - RNA, 18 nt, Human
uucauucuuguaagagau

SEQ ID NO: 643295 - RNA, 22 nt, Human
uuccacagaagucaggucagcu

SEQ ID NO: 643296 - RNA, 22 nt, Human
uuggguuuucucaucugggguu

SEQ ID NO: 643297 - RNA, 23 nt, Human
uuguaaaaaauaaaauaaaauaa

SEQ ID NO: 643298 - RNA, 22 nt, Human
uuuacuacauauauauauacau

SEQ ID NO: 643299 - RNA, 22 nt, Human
uuucaaacaugcaaaacaugau

SEQ ID NO: 643300 - RNA, 26 nt, Human
aagcagugauaaagguaaaugugagc

SEQ ID NO: 643301 - RNA, 22 nt, Human
acaccagucuuccccgcccggc

SEQ ID NO: 643302 - RNA, 22 nt, Human
acugccuuguuuccagcaauca

SEQ ID NO: 643303 - RNA, 25 nt, Human
agaugagaugguucuuccuagaaaa

SEQ ID NO: 643304 - RNA, 20 nt, Human
agguuugugacacugaagca

SEQ ID NO: 643305 - RNA, 24 nt, Human
cagcggagaaucacuacugccuug

SEQ ID NO: 643306 - RNA, 21 nt, Human
ccacaccagucuuccccgccc

SEQ ID NO: 643307 - RNA, 18 nt, Human
ccaccuccaacuucuccu

SEQ ID NO: 643308 - RNA, 25 nt, Human
ccccgcccggccggccggggccgaa

SEQ ID NO: 643309 - RNA, 18 nt, Human
cccgacccgcccaugaaa

SEQ ID NO: 643310 - RNA, 20 nt, Human
cccgcccggccggccggggc

SEQ ID NO: 643311 - RNA, 19 nt, Human
cgacccgcccaugaaaaag

SEQ ID NO: 643312 - RNA, 21 nt, Human
cggccggccggggccgaagcu

SEQ ID NO: 643313 - RNA, 21 nt, Human
cuagaugagaugguucuuccu

SEQ ID NO: 643314 - RNA, 18 nt, Human
gaaaaagaacucagauga

SEQ ID NO: 643315 - RNA, 26 nt, Human
gcagugauaaagguaaaugugagcac

SEQ ID NO: 643316 - RNA, 18 nt, Human
uacaaauuuaacaauaac

SEQ ID NO: 643317 - RNA, 19 nt, Human
uagaagaccuuccgagguu

SEQ ID NO: 643318 - RNA, 19 nt, Human
uagcaguggcagcggagaa

SEQ ID NO: 643319 - RNA, 21 nt, Human
ucacuacugccuuguuuccag

SEQ ID NO: 643320 - RNA, 20 nt, Human
uccaaaaaaaaucuaauauc

SEQ ID NO: 643321 - RNA, 22 nt, Human
ugaaagauccaaauuccaaaaa

SEQ ID NO: 643322 - RNA, 23 nt, Human
ugaaguuggugcucugaaaugau

SEQ ID NO: 643323 - RNA, 19 nt, Human
ugccuuguuuccagcaauc

SEQ ID NO: 643324 - RNA, 21 nt, Human
uuaauaacuuuucuaagguuc

SEQ ID NO: 643325 - RNA, 22 nt, Human
uucuuccuagaagaccuuccga

SEQ ID NO: 643326 - RNA, 23 nt, Human
uuuaaggaaaaaaaaaaaaaaaa

SEQ ID NO: 643327 - RNA, 22 nt, Human
uuuuucauucuuuggcacuuua

SEQ ID NO: 643328 - RNA, 21 nt, Human
uuuuuuuuuuuuuuuuucauu

SEQ ID NO: 643329 - RNA, 24 nt, Human
aaaaauacuaagaggcccaauaua

SEQ ID NO: 643330 - RNA, 26 nt, Human
aaaugugggaaauuacaaaaaucaac

SEQ ID NO: 643331 - RNA, 24 nt, Human
aagaaagggaauccucuuuuugau

SEQ ID NO: 643332 - RNA, 22 nt, Human
accuaaaacccuuuuucucaaa

SEQ ID NO: 643333 - RNA, 21 nt, Human
acuccaaaaaauacuaagagg

SEQ ID NO: 643334 - RNA, 24 nt, Human
acuccaaaaaauacuaagaggccc

SEQ ID NO: 643335 - RNA, 19 nt, Human
aggcugauuuucuuuuucc

SEQ ID NO: 643336 - RNA, 20 nt, Human
auauuuaaaacuccaaaaaa

SEQ ID NO: 643337 - RNA, 23 nt, Human
cacuauuacuccaagaaagggaa

SEQ ID NO: 643338 - RNA, 23 nt, Human
caggcuagaaguuggcaaaagug

SEQ ID NO: 643339 - RNA, 25 nt, Human
cauccaagaucaguggugcuaccau

SEQ ID NO: 643340 - RNA, 27 nt, Human
cgacuuuucuucccuuucacuugaaua

SEQ ID NO: 643341 - RNA, 23 nt, Human
cuccaaaaaauacuaagaggccc

SEQ ID NO: 643342 - RNA, 24 nt, Human
cuggggugcaggcugauuuucuuu

SEQ ID NO: 643343 - RNA, 19 nt, Human
gaaagcaucaucauccaag

SEQ ID NO: 643344 - RNA, 22 nt, Human
ggaaauuacaaaaaucaaccua

SEQ ID NO: 643345 - RNA, 22 nt, Human
ggugcuugggcaacugccuucc

SEQ ID NO: 643346 - RNA, 28 nt, Human
uagaauaaaaaauaagucugucuggaca

SEQ ID NO: 643347 - RNA, 19 nt, Human
uaugaaauggagccgugaa

SEQ ID NO: 643348 - RNA, 26 nt, Human
ucaaaguauauauaaauguacauccu

SEQ ID NO: 643349 - RNA, 19 nt, Human
uccaagaaagggaauccuc

SEQ ID NO: 643350 - RNA, 19 nt, Human
uccaagaaagggaauccuc

SEQ ID NO: 643351 - RNA, 20 nt, Human
ucccuaugaaauggagccgu

SEQ ID NO: 643352 - RNA, 23 nt, Human
ugcuggggugcaggcugauuuuc

SEQ ID NO: 643353 - RNA, 20 nt, Human
ugcuugggcaacugccuucc

SEQ ID NO: 643354 - RNA, 30 nt, Human
uggacauaaacaagcaaucauuuuaagugg

SEQ ID NO: 643355 - RNA, 21 nt, Human
ugggcccagcgggagagcuga

SEQ ID NO: 643356 - RNA, 21 nt, Human
ugugaggugacuucuuccuug

SEQ ID NO: 643357 - RNA, 22 nt, Human
uugggcaacugccuuccuagac

SEQ ID NO: 643358 - RNA, 19 nt, Human
uuuccuguguaucuucuac

SEQ ID NO: 643359 - RNA, 22 nt, Human
uuugugugaggugacuucuucc

SEQ ID NO: 643360 - RNA, 23 nt, Human
uuuuuuuuuuuuuuuuuuuucag

SEQ ID NO: 643361 - RNA, 30 nt, Human
aaagcccuuucccacauccuccucugccuu

SEQ ID NO: 643362 - RNA, 20 nt, Human
aaucacaacacgugcccagu

SEQ ID NO: 643363 - RNA, 21 nt, Human
acaaaaacuagcugagaaaag

SEQ ID NO: 643364 - RNA, 21 nt, Human
agaaaagcccuuucccacauc

SEQ ID NO: 643365 - RNA, 20 nt, Human
agggaaggguucuuuccagg

SEQ ID NO: 643366 - RNA, 18 nt, Human
agggacaggacagcugau

SEQ ID NO: 643367 - RNA, 20 nt, Human
augaugcugaaccaugucuu

SEQ ID NO: 643368 - RNA, 23 nt, Human
auugcuucauugagaucuuaaaa

SEQ ID NO: 643369 - RNA, 22 nt, Human
caacugcccugacugugaaagu

SEQ ID NO: 643370 - RNA, 22 nt, Human
cagggacaggacagcugauuga

SEQ ID NO: 643371 - RNA, 18 nt, Human
ccacauccuccucugccu

SEQ ID NO: 643372 - RNA, 19 nt, Human
ccaggugcuggcagggaca

SEQ ID NO: 643373 - RNA, 20 nt, Human
cccagaagaaaugagcacac

SEQ ID NO: 643374 - RNA, 21 nt, Human
ccccuugugaauaccacucuu

SEQ ID NO: 643375 - RNA, 19 nt, Human
cucuagcgucaaaacaacu

SEQ ID NO: 643376 - RNA, 23 nt, Human
gagacaaaaaguuucucccaaaa

SEQ ID NO: 643377 - RNA, 19 nt, Human
gcaauuuggacacagacaa

SEQ ID NO: 643378 - RNA, 21 nt, Human
gcacugaggcaacugcccuga

SEQ ID NO: 643379 - RNA, 20 nt, Human
gcccuuucccacauccuccu

SEQ ID NO: 643380 - RNA, 22 nt, Human
ggugcuggcagggacaggacag

SEQ ID NO: 643381 - RNA, 20 nt, Human
uaaaauaguccugcuuauuc

SEQ ID NO: 643382 - RNA, 21 nt, Human
uaaugcucccagaagaaauga

SEQ ID NO: 643383 - RNA, 22 nt, Human
uacauacaaguauuuccgaaca

SEQ ID NO: 643384 - RNA, 22 nt, Human
uagacucaugccaaaaaaauga

SEQ ID NO: 643385 - RNA, 24 nt, Human
uagcugagaaaagcccuuucccac

SEQ ID NO: 643386 - RNA, 23 nt, Human
uaguuggugcuccaggugcuggc

SEQ ID NO: 643387 - RNA, 21 nt, Human
uauccaggcagcaaacuuaau

SEQ ID NO: 643388 - RNA, 18 nt, Human
ucacacagagacccauac

SEQ ID NO: 643389 - RNA, 23 nt, Human
uccaggcagcaaacuuaaugagg

SEQ ID NO: 643390 - RNA, 19 nt, Human
ucuccugguuucucacaca

SEQ ID NO: 643391 - RNA, 22 nt, Human
ugacugugaaaguucaccccuu

SEQ ID NO: 643392 - RNA, 22 nt, Human
ugagaaaagcccuuucccacau

SEQ ID NO: 643393 - RNA, 18 nt, Human
ugccaaaaaaaugagcuu

SEQ ID NO: 643394 - RNA, 27 nt, Human
ugccaguuuuccuuuguuaccaagugg

SEQ ID NO: 643395 - RNA, 27 nt, Human
ugcuuauucaaguuaguuucuccucca

SEQ ID NO: 643396 - RNA, 18 nt, Human
uggacacagacaaucaca

SEQ ID NO: 643397 - RNA, 19 nt, Human
uggcucagugacugaccaa

SEQ ID NO: 643398 - RNA, 20 nt, Human
ugggcacugaggcaacugcc

SEQ ID NO: 643399 - RNA, 18 nt, Human
uggguagaaaaugugaca

SEQ ID NO: 643400 - RNA, 19 nt, Human
uuagguacuaagcaagucc

SEQ ID NO: 643401 - RNA, 18 nt, Human
uucaaguuaguuucuccu

SEQ ID NO: 643402 - RNA, 19 nt, Human
uugaaaccccaccagcauu

SEQ ID NO: 643403 - RNA, 23 nt, Human
uugacaccaaaauacauacaagu

SEQ ID NO: 643404 - RNA, 21 nt, Human
uuggugcuccaggugcuggca

SEQ ID NO: 643405 - RNA, 21 nt, Human
uuggugcuccaggugcuggca

SEQ ID NO: 643406 - RNA, 20 nt, Human
uuuuuuuuuuuuaaugaggu

SEQ ID NO: 643407 - RNA, 23 nt, Human
uuuuuuuuuuuuuuuuaaugagg

SEQ ID NO: 643408 - RNA, 22 nt, Human
uuuuuuuuuuuuuuuuuuaaug

SEQ ID NO: 643409 - RNA, 20 nt, Human
aaauaggaauuaagaaugag

SEQ ID NO: 643410 - RNA, 23 nt, Human
aaauauggaguaacauuuaaaau

SEQ ID NO: 643411 - RNA, 18 nt, Human
aacagcacuccuugucug

SEQ ID NO: 643412 - RNA, 19 nt, Human
aaggaucuguguacagccc

SEQ ID NO: 643413 - RNA, 19 nt, Human
aaggcgcucagagccauga

SEQ ID NO: 643414 - RNA, 24 nt, Human
aaguuggcagcaaaucagagccaa

SEQ ID NO: 643415 - RNA, 19 nt, Human
aauguuacucuuuauucug

SEQ ID NO: 643416 - RNA, 22 nt, Human
acauucacugauuuauuuuaca

SEQ ID NO: 643417 - RNA, 21 nt, Human
acugagcaguuuaaaagaagc

SEQ ID NO: 643418 - RNA, 20 nt, Human
agaacuugcugguuguccug

SEQ ID NO: 643419 - RNA, 19 nt, Human
agaucacuguguucccuga

SEQ ID NO: 643420 - RNA, 25 nt, Human
agccugggcucaucuucaucuucug

SEQ ID NO: 643421 - RNA, 19 nt, Human
agcuuggcuuuuccccucu

SEQ ID NO: 643422 - RNA, 23 nt, Human
aggagaaaaaggaauauuucuga

SEQ ID NO: 643423 - RNA, 21 nt, Human
aguauuguuuacaugccuuga

SEQ ID NO: 643424 - RNA, 20 nt, Human
agugcaagaauuacagaagg

SEQ ID NO: 643425 - RNA, 21 nt, Human
agugcaagaauuacagaagga

SEQ ID NO: 643426 - RNA, 18 nt, Human
agugccucuccauccugg

SEQ ID NO: 643427 - RNA, 19 nt, Human
aucaaguacauguagauuu

SEQ ID NO: 643428 - RNA, 20 nt, Human
caucuucugucuuacaggag

SEQ ID NO: 643429 - RNA, 18 nt, Human
ccacugggcaucuugugc

SEQ ID NO: 643430 - RNA, 22 nt, Human
ccuauucuacaauguaacucaa

SEQ ID NO: 643431 - RNA, 18 nt, Human
ccugggcucaucuucauc

SEQ ID NO: 643432 - RNA, 23 nt, Human
cgugcagacuuuugaaauaugga

SEQ ID NO: 643433 - RNA, 20 nt, Human
cuaggagaaaaaggaauauu

SEQ ID NO: 643434 - RNA, 18 nt, Human
cugggcucaucuucaucu

SEQ ID NO: 643435 - RNA, 21 nt, Human
cuuacggccuauguaucuauu

SEQ ID NO: 643436 - RNA, 24 nt, Human
gauuuacccaguauuguuuacaug

SEQ ID NO: 643437 - RNA, 23 nt, Human
gccaaagcacaguaacucauuca

SEQ ID NO: 643438 - RNA, 18 nt, Human
ggaaugauucaucaacug

SEQ ID NO: 643439 - RNA, 23 nt, Human
guccuuagggaaugauaaugcca

SEQ ID NO: 643440 - RNA, 24 nt, Human
gugcagacuuuugaaauauggagu

SEQ ID NO: 643441 - RNA, 22 nt, Human
uaaaauaacagauaaaagaaaa

SEQ ID NO: 643442 - RNA, 21 nt, Human
uacacuucacauaucuaacua

SEQ ID NO: 643443 - RNA, 18 nt, Human
uaccaaaauaaaccauau

SEQ ID NO: 643444 - RNA, 23 nt, Human
uagaacuugcugguuguccugug

SEQ ID NO: 643445 - RNA, 18 nt, Human
uagcugaccagaguaaug

SEQ ID NO: 643446 - RNA, 21 nt, Human
uaguacacugacugccuccau

SEQ ID NO: 643447 - RNA, 24 nt, Human
uaucuaacuauacucuuaacauuc

SEQ ID NO: 643448 - RNA, 26 nt, Human
uaucuuucuuaggcucuaaaaaccag

SEQ ID NO: 643449 - RNA, 25 nt, Human
ucacauaucuaacuauacucuuaac

SEQ ID NO: 643450 - RNA, 24 nt, Human
ucagagccaaaucuuucaucaggg

SEQ ID NO: 643451 - RNA, 18 nt, Human
uccagaagaaaagaauca

SEQ ID NO: 643452 - RNA, 21 nt, Human
uccauccucaauggcuagcac

SEQ ID NO: 643453 - RNA, 19 nt, Human
uccauccuggcucuggaga

SEQ ID NO: 643454 - RNA, 23 nt, Human
uccuucaacaauucuuuaucugg

SEQ ID NO: 643455 - RNA, 18 nt, Human
ucuaauaucagucuucaa

SEQ ID NO: 643456 - RNA, 22 nt, Human
ucugcaaagauccugccuacca

SEQ ID NO: 643457 - RNA, 24 nt, Human
ucuuucuuaggcucuaaaaaccag

SEQ ID NO: 643458 - RNA, 18 nt, Human
ugaauguuacucuuuauu

SEQ ID NO: 643459 - RNA, 23 nt, Human
ugagucaauuuaggggaggcagc

SEQ ID NO: 643460 - RNA, 22 nt, Human
ugcaaacacaagacucugugua

SEQ ID NO: 643461 - RNA, 18 nt, Human
ugcaaagauccugccuac

SEQ ID NO: 643462 - RNA, 28 nt, Human
ugcuaaguuagccugggcucaucuucau

SEQ ID NO: 643463 - RNA, 21 nt, Human
ugcuuugggacagcccagugc

SEQ ID NO: 643464 - RNA, 19 nt, Human
uggaaggcugcccgcucuc

SEQ ID NO: 643465 - RNA, 25 nt, Human
uggagcuuggcuuuuccccucugag

SEQ ID NO: 643466 - RNA, 19 nt, Human
uggcaggaggcacaguugg

SEQ ID NO: 643467 - RNA, 20 nt, Human
ugggaggcuaaggcucagca

SEQ ID NO: 643468 - RNA, 19 nt, Human
ugggguccuucaacaauuc

SEQ ID NO: 643469 - RNA, 22 nt, Human
uguccuguggcaggaggcacag

SEQ ID NO: 643470 - RNA, 26 nt, Human
uguggcaggaggcacaguuggggucc

SEQ ID NO: 643471 - RNA, 18 nt, Human
uuaacauucacugauuua

SEQ ID NO: 643472 - RNA, 20 nt, Human
uuaaugcagaaauggagagu

SEQ ID NO: 643473 - RNA, 23 nt, Human
uuccuagcuucuaacauccgauu

SEQ ID NO: 643474 - RNA, 24 nt, Human
uugagucaauuuaggggaggcagc

SEQ ID NO: 643475 - RNA, 18 nt, Human
uuuugaaauauggaguaa

SEQ ID NO: 643476 - RNA, 23 nt, Human
uuuuuuuuuuuuuuugcugguaa

SEQ ID NO: 643477 - RNA, 18 nt, Human
uuuuuuuuuuuuuuuuug

SEQ ID NO: 643478 - RNA, 22 nt, Human
uuuuuuuuuuuuuuuuugcugg

SEQ ID NO: 643479 - RNA, 23 nt, Human
uuuuuuuuuuuuuuuuuugcugg

SEQ ID NO: 643480 - RNA, 26 nt, Human
aaaaacacccgagcgccgcggugccc

SEQ ID NO: 643481 - RNA, 18 nt, Human
aaaacacccgagcgccgc

SEQ ID NO: 643482 - RNA, 20 nt, Human
aaaacacccgagcgccgcgg

SEQ ID NO: 643483 - RNA, 19 nt, Human
aaacagucagugggggaga

SEQ ID NO: 643484 - RNA, 21 nt, Human
aagcugccacugaauagggcc

SEQ ID NO: 643485 - RNA, 22 nt, Human
aaucagcggccuggaggggaac

SEQ ID NO: 643486 - RNA, 22 nt, Human
aaugccacuggucagggcugac

SEQ ID NO: 643487 - RNA, 24 nt, Human
acaaaccucagguuggcccaaggg

SEQ ID NO: 643488 - RNA, 19 nt, Human
accuccuaccccuucccca

SEQ ID NO: 643489 - RNA, 18 nt, Human
agacccggggagaaacag

SEQ ID NO: 643490 - RNA, 19 nt, Human
aggcaggggcagagcgggg

SEQ ID NO: 643491 - RNA, 21 nt, Human
aggccgcaccuugggccccgg

SEQ ID NO: 643492 - RNA, 21 nt, Human
agggagggaagggguggcagg

SEQ ID NO: 643493 - RNA, 20 nt, Human
caaaccucagguuggcccaa

SEQ ID NO: 643494 - RNA, 22 nt, Human
cacacguugaauucauagucag

SEQ ID NO: 643495 - RNA, 25 nt, Human
cacccgggcccccaaaaacacccga

SEQ ID NO: 643496 - RNA, 26 nt, Human
caccuugggccccggcacccgggccc

SEQ ID NO: 643497 - RNA, 19 nt, Human
cacugcucucccugguccg

SEQ ID NO: 643498 - RNA, 20 nt, Human
cagcuccaugguggggcugg

SEQ ID NO: 643499 - RNA, 23 nt, Human
caggauauaggagaaaaggcagg

SEQ ID NO: 643500 - RNA, 19 nt, Human
ccacccgggcccccaaaaa

SEQ ID NO: 643501 - RNA, 19 nt, Human
ccacuguuaccccaucuug

SEQ ID NO: 643502 - RNA, 22 nt, Human
cccaccuccuaccccuucccca

SEQ ID NO: 643503 - RNA, 22 nt, Human
ccccaccuccuaccccuucccc

SEQ ID NO: 643504 - RNA, 19 nt, Human
cccccaaaaacacccgagc

SEQ ID NO: 643505 - RNA, 24 nt, Human
cccccaaaaacacccgagcgccgc

SEQ ID NO: 643506 - RNA, 18 nt, Human
ccccgcucuggcccugag

SEQ ID NO: 643507 - RNA, 19 nt, Human
cccgagcgccgcggugccc

SEQ ID NO: 643508 - RNA, 24 nt, Human
cccgggcccccaaaaacacccgag

SEQ ID NO: 643509 - RNA, 22 nt, Human
ccgcaccuugggccccggcacc

SEQ ID NO: 643510 - RNA, 19 nt, Human
ccuccacccgggcccccaa

SEQ ID NO: 643511 - RNA, 21 nt, Human
ccuccuaccccuuccccauca

SEQ ID NO: 643512 - RNA, 22 nt, Human
ccugaaucaaagcgagaacuga

SEQ ID NO: 643513 - RNA, 24 nt, Human
ccuugggccccggcacccgggccc

SEQ ID NO: 643514 - RNA, 25 nt, Human
ccuugggccccggcacccgggcccu

SEQ ID NO: 643515 - RNA, 20 nt, Human
cgcucuggcccugagagcuc

SEQ ID NO: 643516 - RNA, 18 nt, Human
cggccuggaggggaacua

SEQ ID NO: 643517 - RNA, 19 nt, Human
cuccacccgggcccccaaa

SEQ ID NO: 643518 - RNA, 19 nt, Human
cuccagcucacugcucucc

SEQ ID NO: 643519 - RNA, 18 nt, Human
cugaacagcaauccccca

SEQ ID NO: 643520 - RNA, 19 nt, Human
cuugggccccggcacccgg

SEQ ID NO: 643521 - RNA, 19 nt, Human
gcaggucccuguuuuguuc

SEQ ID NO: 643522 - RNA, 25 nt, Human
gccccaccuccuaccccuuccccau

SEQ ID NO: 643523 - RNA, 21 nt, Human
gcggggccgugggggccuggc

SEQ ID NO: 643524 - RNA, 22 nt, Human
ggaucccagcuccagcucacug

SEQ ID NO: 643525 - RNA, 20 nt, Human
ggcacccgggcccuccaccc

SEQ ID NO: 643526 - RNA, 19 nt, Human
ggccccggcacccgggccc

SEQ ID NO: 643527 - RNA, 19 nt, Human
ggccgugggggccuggccu

SEQ ID NO: 643528 - RNA, 20 nt, Human
ggccugaggcagcccuggug

SEQ ID NO: 643529 - RNA, 22 nt, Human
gggaccccugcuguaacaauuc

SEQ ID NO: 643530 - RNA, 21 nt, Human
gggcagagcggggccgugggg

SEQ ID NO: 643531 - RNA, 23 nt, Human
gggcagagcggggccgugggggc

SEQ ID NO: 643532 - RNA, 20 nt, Human
gggccccggcacccgggccc

SEQ ID NO: 643533 - RNA, 24 nt, Human
ggggccuggccugaggcagcccug

SEQ ID NO: 643534 - RNA, 18 nt, Human
ggggguaggggauguggg

SEQ ID NO: 643535 - RNA, 24 nt, Human
uagcagagcaggaucccagcucca

SEQ ID NO: 643536 - RNA, 20 nt, Human
uaggagaaaaggcaggggca

SEQ ID NO: 643537 - RNA, 21 nt, Human
uagggcccaguauaggggcuu

SEQ ID NO: 643538 - RNA, 22 nt, Human
uauagacuuuuuuuuguggucc

SEQ ID NO: 643539 - RNA, 21 nt, Human
uccacacguugaauucauagu

SEQ ID NO: 643540 - RNA, 18 nt, Human
uccaugguggggcuggga

SEQ ID NO: 643541 - RNA, 22 nt, Human
ucccagcuccagcucacugcuc

SEQ ID NO: 643542 - RNA, 21 nt, Human
uccccaucacuggacaaagau

SEQ ID NO: 643543 - RNA, 19 nt, Human
ucccccacagcgcagcucc

SEQ ID NO: 643544 - RNA, 21 nt, Human
ucccugaaucaaagcgagaac

SEQ ID NO: 643545 - RNA, 25 nt, Human
uccugccccgcucuggcccugagag

SEQ ID NO: 643546 - RNA, 21 nt, Human
ucuuggggcuauauccuggga

SEQ ID NO: 643547 - RNA, 22 nt, Human
ugaacagcaaucccccacagcg

SEQ ID NO: 643548 - RNA, 18 nt, Human
ugaaguagaaccaugacc

SEQ ID NO: 643549 - RNA, 22 nt, Human
ugaaguagaaccaugaccuguu

SEQ ID NO: 643550 - RNA, 21 nt, Human
ugaguuuuccuggcauuccuc

SEQ ID NO: 643551 - RNA, 23 nt, Human
ugccccgcucuggcccugagagc

SEQ ID NO: 643552 - RNA, 20 nt, Human
ugcugcggagggagggaagg

SEQ ID NO: 643553 - RNA, 19 nt, Human
ugggccccggcacccgggc

SEQ ID NO: 643554 - RNA, 21 nt, Human
ugguggggcugggaaagcauc

SEQ ID NO: 643555 - RNA, 18 nt, Human
uguggggccugaagagcc

SEQ ID NO: 643556 - RNA, 20 nt, Human
uuagggacaaaacaaaccuc

SEQ ID NO: 643557 - RNA, 21 nt, Human
uuuccuggcauuccuccccgg

SEQ ID NO: 643558 - RNA, 20 nt, Human
uuuuuuuuuuuuuuuuuugg

SEQ ID NO: 643559 - RNA, 24 nt, Human
uuuuuuuuuuuuuuuuuuggauuu

SEQ ID NO: 643560 - RNA, 21 nt, Human
aagccucugggccacaggccu

SEQ ID NO: 643561 - RNA, 20 nt, Human
accccuaaguccccagugcc

SEQ ID NO: 643562 - RNA, 21 nt, Human
agagcacuccccuccuccucc

SEQ ID NO: 643563 - RNA, 22 nt, Human
agccccugcccaagaggucuuc

SEQ ID NO: 643564 - RNA, 21 nt, Human
agcccguucaucacuccccca

SEQ ID NO: 643565 - RNA, 19 nt, Human
aggaacugacccuggccca

SEQ ID NO: 643566 - RNA, 21 nt, Human
aggccucucagccaggacccu

SEQ ID NO: 643567 - RNA, 20 nt, Human
agucagcacaugggagugcc

SEQ ID NO: 643568 - RNA, 19 nt, Human
agugagguggcgcagggcu

SEQ ID NO: 643569 - RNA, 19 nt, Human
cacuccccuccuccuccug

SEQ ID NO: 643570 - RNA, 19 nt, Human
cagccagaaaccguauguc

SEQ ID NO: 643571 - RNA, 22 nt, Human
cagcccguucaucacuccccca

SEQ ID NO: 643572 - RNA, 23 nt, Human
caggagggcgugcuacugcagug

SEQ ID NO: 643573 - RNA, 22 nt, Human
caggcagggacuagccaggcag

SEQ ID NO: 643574 - RNA, 19 nt, Human
caggcagggccacagcgug

SEQ ID NO: 643575 - RNA, 22 nt, Human
caggcagggccacagcguggca

SEQ ID NO: 643576 - RNA, 24 nt, Human
cagggcuggugagcuugggcacaa

SEQ ID NO: 643577 - RNA, 21 nt, Human
caugcugugacuuccccucca

SEQ ID NO: 643578 - RNA, 21 nt, Human
cccaagaggucuucagagcac

SEQ ID NO: 643579 - RNA, 19 nt, Human
cccaggugaacaggagccc

SEQ ID NO: 643580 - RNA, 23 nt, Human
cccagugccgggcagauggucuu

SEQ ID NO: 643581 - RNA, 23 nt, Human
ccccgcaccccuaaguccccagu

SEQ ID NO: 643582 - RNA, 26 nt, Human
ccccuaaguccccagugccgggcaga

SEQ ID NO: 643583 - RNA, 19 nt, Human
ccccugaggaccaggacuc

SEQ ID NO: 643584 - RNA, 19 nt, Human
cccguucaucacuccccca

SEQ ID NO: 643585 - RNA, 18 nt, Human
cccuaaguccccagugcc

SEQ ID NO: 643586 - RNA, 24 nt, Human
ccgcaccccuaaguccccagugcc

SEQ ID NO: 643587 - RNA, 22 nt, Human
ccucagagacuagcggcauucc

SEQ ID NO: 643588 - RNA, 20 nt, Human
ccuuccccuccccgcacccc

SEQ ID NO: 643589 - RNA, 19 nt, Human
cgcaccccuaaguccccag

SEQ ID NO: 643590 - RNA, 21 nt, Human
cggaagagaaaagagaccgac

SEQ ID NO: 643591 - RNA, 25 nt, Human
cguccuuccccuccccgcaccccua

SEQ ID NO: 643592 - RNA, 22 nt, Human
cgucugacccacugaggaugga

SEQ ID NO: 643593 - RNA, 25 nt, Human
cguucaucacucccccauucacaug

SEQ ID NO: 643594 - RNA, 21 nt, Human
cuagccaggcagggccacagc

SEQ ID NO: 643595 - RNA, 24 nt, Human
cuagcggcauuccuugccccacuu

SEQ ID NO: 643596 - RNA, 19 nt, Human
cuccugagcagggagcggg

SEQ ID NO: 643597 - RNA, 24 nt, Human
cuggcccaggugaacaggagcccc

SEQ ID NO: 643598 - RNA, 21 nt, Human
cugugacuuccccuccaaguu

SEQ ID NO: 643599 - RNA, 18 nt, Human
cuucagagcacuccccuc

SEQ ID NO: 643600 - RNA, 24 nt, Human
cuucaggaacugacccuggcccag

SEQ ID NO: 643601 - RNA, 21 nt, Human
gaaaagagaccgacggggaca

SEQ ID NO: 643602 - RNA, 24 nt, Human
gaccaggacucucuaucuccuucc

SEQ ID NO: 643603 - RNA, 21 nt, Human
gacggggacaaugacggggcg

SEQ ID NO: 643604 - RNA, 18 nt, Human
gaggcguccuuccccucc

SEQ ID NO: 643605 - RNA, 20 nt, Human
gagggcuuuccugagccagu

SEQ ID NO: 643606 - RNA, 19 nt, Human
gagugaacuucaggaacug

SEQ ID NO: 643607 - RNA, 19 nt, Human
gcagggcuggugagcuugg

SEQ ID NO: 643608 - RNA, 23 nt, Human
gccaguucugcagcccuccaucc

SEQ ID NO: 643609 - RNA, 18 nt, Human
gcccguucaucacucccc

SEQ ID NO: 643610 - RNA, 23 nt, Human
gcguggcagggauggggggaguc

SEQ ID NO: 643611 - RNA, 18 nt, Human
gcugcuccugagcaggga

SEQ ID NO: 643612 - RNA, 18 nt, Human
ggauggacagacgcgggg

SEQ ID NO: 643613 - RNA, 21 nt, Human
uccccgcaccccuaagucccc

SEQ ID NO: 643614 - RNA, 22 nt, Human
uccccgcaccccuaagucccca

SEQ ID NO: 643615 - RNA, 22 nt, Human
uccuacagccuccauucuugga

SEQ ID NO: 643616 - RNA, 23 nt, Human
uccugagccaguucugcagcccu

SEQ ID NO: 643617 - RNA, 23 nt, Human
ucucuaucuccuucccucugagu

SEQ ID NO: 643618 - RNA, 19 nt, Human
ugacccacugaggauggac

SEQ ID NO: 643619 - RNA, 18 nt, Human
ugacggggcggggcgggg

SEQ ID NO: 643620 - RNA, 21 nt, Human
ugacggggcggggcggggugg

SEQ ID NO: 643621 - RNA, 20 nt, Human
ugacuuagccuaugagaugg

SEQ ID NO: 643622 - RNA, 22 nt, Human
ugagcuugggcacaaaagccag

SEQ ID NO: 643623 - RNA, 24 nt, Human
ugagugaacuucaggaacugaccc

SEQ ID NO: 643624 - RNA, 25 nt, Human
ugccccacuuccucagacugcucca

SEQ ID NO: 643625 - RNA, 27 nt, Human
ugccccacuuccucagacugcuccagc

SEQ ID NO: 643626 - RNA, 25 nt, Human
ugcugugacuuccccuccaaguugg

SEQ ID NO: 643627 - RNA, 19 nt, Human
uggcgcagggcuggugagc

SEQ ID NO: 643628 - RNA, 18 nt, Human
uuaggacggaagagaaaa

SEQ ID NO: 643629 - RNA, 21 nt, Human
uucaucacucccccauucaca

SEQ ID NO: 643630 - RNA, 18 nt, Human
uuccccuccccgcacccc

SEQ ID NO: 643631 - RNA, 21 nt, Human
uuugccacaccccuuuucacc

SEQ ID NO: 643632 - RNA, 22 nt, Human
uuuuuuuuuuugaagcggaggc

SEQ ID NO: 643633 - RNA, 22 nt, Human
uuuuuuuuuuuuuugaagcgga

SEQ ID NO: 643634 - RNA, 18 nt, Human
uuuuuuuuuuuuuuuuug

SEQ ID NO: 643635 - RNA, 19 nt, Human
aacagaccccaccccagac

SEQ ID NO: 643636 - RNA, 21 nt, Human
aagagcacagaaccccuaauc

SEQ ID NO: 643637 - RNA, 24 nt, Human
aaggaccacaacagaccccacccc

SEQ ID NO: 643638 - RNA, 23 nt, Human
aaggagccccggcucagaguggc

SEQ ID NO: 643639 - RNA, 22 nt, Human
acaacagaccccaccccagacc

SEQ ID NO: 643640 - RNA, 19 nt, Human
acagccacuucccugcaug

SEQ ID NO: 643641 - RNA, 19 nt, Human
acccagccuugcccuccuc

SEQ ID NO: 643642 - RNA, 22 nt, Human
acccagccuugcccuccucuga

SEQ ID NO: 643643 - RNA, 23 nt, Human
accccagaccagccgcaggauga

SEQ ID NO: 643644 - RNA, 22 nt, Human
accguggaaggaccacaacaga

SEQ ID NO: 643645 - RNA, 18 nt, Human
acgaggcugagaagggag

SEQ ID NO: 643646 - RNA, 22 nt, Human
acucacuucuccuucugggacc

SEQ ID NO: 643647 - RNA, 19 nt, Human
acucaggcuggggcugggc

SEQ ID NO: 643648 - RNA, 25 nt, Human
agaaagagcaggaaggaccgguacc

SEQ ID NO: 643649 - RNA, 24 nt, Human
agaaccccuaaucccagucucugc

SEQ ID NO: 643650 - RNA, 30 nt, Human
agagaagaaagagcaggaaggacagaggag

SEQ ID NO: 643651 - RNA, 19 nt, Human
agagcaggaaggacagagg

SEQ ID NO: 643652 - RNA, 20 nt, Human
agccccggcucagaguggcu

SEQ ID NO: 643653 - RNA, 24 nt, Human
aggacacagagaggccaggagccc

SEQ ID NO: 643654 - RNA, 25 nt, Human
aggcaagagcacagaaccccuaauc

SEQ ID NO: 643655 - RNA, 19 nt, Human
aggccgugggguccagaca

SEQ ID NO: 643656 - RNA, 18 nt, Human
agggggucagcagaggga

SEQ ID NO: 643657 - RNA, 27 nt, Human
aggggucagccuggaggucuucccggg

SEQ ID NO: 643658 - RNA, 21 nt, Human
augcccacagcccggaagaga

SEQ ID NO: 643659 - RNA, 18 nt, Human
caaaagcgagggacuuca

SEQ ID NO: 643660 - RNA, 18 nt, Human
caacagaccccaccccag

SEQ ID NO: 643661 - RNA, 19 nt, Human
caacagaccccaccccaga

SEQ ID NO: 643662 - RNA, 22 nt, Human
caacagaccccaccccagacca

SEQ ID NO: 643663 - RNA, 18 nt, Human
cacagagcaucccagccc

SEQ ID NO: 643664 - RNA, 22 nt, Human
caccugugcugacugcugcuca

SEQ ID NO: 643665 - RNA, 23 nt, Human
cacgcccccacgcaccugugcug

SEQ ID NO: 643666 - RNA, 18 nt, Human
cacgcgagcccugcaugg

SEQ ID NO: 643667 - RNA, 21 nt, Human
cacucaggcuggggcugggcu

SEQ ID NO: 643668 - RNA, 20 nt, Human
cacugcagaggacacagaga

SEQ ID NO: 643669 - RNA, 23 nt, Human
cacuggcccuauguggccugggg

SEQ ID NO: 643670 - RNA, 21 nt, Human
cagagcaucccagcccucagc

SEQ ID NO: 643671 - RNA, 21 nt, Human
cagcccggaagagacgccgca

SEQ ID NO: 643672 - RNA, 22 nt, Human
cagcgcagacugccucacagcc

SEQ ID NO: 643673 - RNA, 20 nt, Human
cagcuccuggaaggagcccc

SEQ ID NO: 643674 - RNA, 23 nt, Human
cagcugcagcggccugggcagag

SEQ ID NO: 643675 - RNA, 21 nt, Human
caggaaggacagaggaaggcg

SEQ ID NO: 643676 - RNA, 18 nt, Human
caggacaguccccggcaa

SEQ ID NO: 643677 - RNA, 24 nt, Human
caggacaguccccgggcuggcucc

SEQ ID NO: 643678 - RNA, 23 nt, Human
caggagccccuuccugguucccc

SEQ ID NO: 643679 - RNA, 23 nt, Human
caggggcugcugaaaacgcuccg

SEQ ID NO: 643680 - RNA, 18 nt, Human
caguccccggcagcagcu

SEQ ID NO: 643681 - RNA, 18 nt, Human
caugaaagaagggcagca

SEQ ID NO: 643682 - RNA, 23 nt, Human
caugcccacagcccggaagagac

SEQ ID NO: 643683 - RNA, 23 nt, Human
ccacccaggacaguccccggcag

SEQ ID NO: 643684 - RNA, 19 nt, Human
ccaccugguggccucuucc

SEQ ID NO: 643685 - RNA, 21 nt, Human
ccagacugugagaaaauaauu

SEQ ID NO: 643686 - RNA, 21 nt, Human
ccagagcccacggccucucgc

SEQ ID NO: 643687 - RNA, 23 nt, Human
ccagcacuuaaaaaacagacuuc

SEQ ID NO: 643688 - RNA, 18 nt, Human
ccagcagaggggcacagg

SEQ ID NO: 643689 - RNA, 19 nt, Human
ccagcagaggggcacaggc

SEQ ID NO: 643690 - RNA, 19 nt, Human
ccagcagaggggcacaggc

SEQ ID NO: 643691 - RNA, 18 nt, Human
ccaggcaggcaaggaaga

SEQ ID NO: 643692 - RNA, 23 nt, Human
ccaggggcugcugaaaacgcucc

SEQ ID NO: 643693 - RNA, 26 nt, Human
cccacaacccccacugcagaggacac

SEQ ID NO: 643694 - RNA, 23 nt, Human
cccagcccucagcacugcccgac

SEQ ID NO: 643695 - RNA, 22 nt, Human
cccagccuugcccuccucugac

SEQ ID NO: 643696 - RNA, 20 nt, Human
cccccacaacccccacugca

SEQ ID NO: 643697 - RNA, 22 nt, Human
cccccacaacccccacugcaga

SEQ ID NO: 643698 - RNA, 23 nt, Human
cccccacaacccccacugcagag

SEQ ID NO: 643699 - RNA, 24 nt, Human
cccccacaacccccacugcagagg

SEQ ID NO: 643700 - RNA, 18 nt, Human
ccccuaaucccagucucu

SEQ ID NO: 643701 - RNA, 19 nt, Human
cccuauguggccugggggu

SEQ ID NO: 643702 - RNA, 21 nt, Human
cccugcauggcggugggcugg

SEQ ID NO: 643703 - RNA, 19 nt, Human
ccucucgcugggcagaggc

SEQ ID NO: 643704 - RNA, 27 nt, Human
ccucucgcugggcagaggcagggccac

SEQ ID NO: 643705 - RNA, 18 nt, Human
ccugcacucaggcugggg

SEQ ID NO: 643706 - RNA, 22 nt, Human
ccugcacucaggcuggggcugg

SEQ ID NO: 643707 - RNA, 22 nt, Human
ccugcauggcggugggcugggg

SEQ ID NO: 643708 - RNA, 18 nt, Human
ccugccguccacccagga

SEQ ID NO: 643709 - RNA, 18 nt, Human
ccugccucccucacgccc

SEQ ID NO: 643710 - RNA, 23 nt, Human
ccugcuaccccagccugaagggc

SEQ ID NO: 643711 - RNA, 21 nt, Human
ccuggaggucuucccggugcu

SEQ ID NO: 643712 - RNA, 20 nt, Human
ccugguucccccugguucca

SEQ ID NO: 643713 - RNA, 22 nt, Human
ccuguggugaagacccugccuc

SEQ ID NO: 643714 - RNA, 19 nt, Human
cgccccccacaacccccac

SEQ ID NO: 643715 - RNA, 19 nt, Human
cggguccugcagcuccugc

SEQ ID NO: 643716 - RNA, 21 nt, Human
cgugaaggaacagaguagcug

SEQ ID NO: 643717 - RNA, 25 nt, Human
cguggaaggaccacaacagacccca

SEQ ID NO: 643718 - RNA, 20 nt, Human
cucuacuaggcccccuuacu

SEQ ID NO: 643719 - RNA, 23 nt, Human
cugcccuccacccaggacagucc

SEQ ID NO: 643720 - RNA, 20 nt, Human
cuggcccuauguggccuggg

SEQ ID NO: 643721 - RNA, 18 nt, Human
cugguuccaaaugagaca

SEQ ID NO: 643722 - RNA, 24 nt, Human
cugugcagcugcagcggccugggc

SEQ ID NO: 643723 - RNA, 20 nt, Human
cuuguguucaccugcccucc

SEQ ID NO: 643724 - RNA, 25 nt, Human
gacccugccucccucacgcccccac

SEQ ID NO: 643725 - RNA, 22 nt, Human
gagccuccugccccauauccuu

SEQ ID NO: 643726 - RNA, 24 nt, Human
gaggacacagagaggccaggagcc

SEQ ID NO: 643727 - RNA, 20 nt, Human
gcaccugugcugacugcugc

SEQ ID NO: 643728 - RNA, 21 nt, Human
gcagaggcagggccacagcgc

SEQ ID NO: 643729 - RNA, 21 nt, Human
gcagcugcagcggccugggca

SEQ ID NO: 643730 - RNA, 19 nt, Human
gcuuguguucaccugcccu

SEQ ID NO: 643731 - RNA, 18 nt, Human
ggccgugggguccagaca

SEQ ID NO: 643732 - RNA, 18 nt, Human
ggcuggcuccaggcugca

SEQ ID NO: 643733 - RNA, 19 nt, Human
ggcuggggagccggggcgg

SEQ ID NO: 643734 - RNA, 22 nt, Human
gggcacaggcuuaaacgccggc

SEQ ID NO: 643735 - RNA, 21 nt, Human
gggugagagacccccccccca

SEQ ID NO: 643736 - RNA, 21 nt, Human
guccagagcccacggccucuc

SEQ ID NO: 643737 - RNA, 19 nt, Human
gugagagacccccccccca

SEQ ID NO: 643738 - RNA, 20 nt, Human
gugcagcugcagcggccugg

SEQ ID NO: 643739 - RNA, 20 nt, Human
gugcugccaccugguggccu

SEQ ID NO: 643740 - RNA, 21 nt, Human
gugugggcuccagcugggguc

SEQ ID NO: 643741 - RNA, 23 nt, Human
uaaaauauucgggggaaccagca

SEQ ID NO: 643742 - RNA, 22 nt, Human
uaccacuggcccuauguggccu

SEQ ID NO: 643743 - RNA, 18 nt, Human
uaccccagccugaagggc

SEQ ID NO: 643744 - RNA, 25 nt, Human
uagcagaggcugugcagcugcagcg

SEQ ID NO: 643745 - RNA, 21 nt, Human
ucaggccacugacaccgugga

SEQ ID NO: 643746 - RNA, 22 nt, Human
uccagacaccacaccaggaagc

SEQ ID NO: 643747 - RNA, 26 nt, Human
uccccggcagcagcuuguguucaccu

SEQ ID NO: 643748 - RNA, 22 nt, Human
uccugguucccccugguuccaa

SEQ ID NO: 643749 - RNA, 28 nt, Human
ugaaaaaaagucgagugaguggcuacau

SEQ ID NO: 643750 - RNA, 20 nt, Human
ugaaagaagggcagcaaggc

SEQ ID NO: 643751 - RNA, 19 nt, Human
ugaaaugauguggaugcca

SEQ ID NO: 643752 - RNA, 20 nt, Human
ugagaagggaggacgugaag

SEQ ID NO: 643753 - RNA, 22 nt, Human
ugagagaccccccccccaaaag

SEQ ID NO: 643754 - RNA, 23 nt, Human
ugagagaccccccccccaaaagc

SEQ ID NO: 643755 - RNA, 19 nt, Human
ugaguggcuacaugcggca

SEQ ID NO: 643756 - RNA, 21 nt, Human
ugauguggaugccagcccuua

SEQ ID NO: 643757 - RNA, 22 nt, Human
ugcccuccacccaggacagucc

SEQ ID NO: 643758 - RNA, 19 nt, Human
ugcucaaggggucagccug

SEQ ID NO: 643759 - RNA, 21 nt, Human
ugcucaaggggucagccugga

SEQ ID NO: 643760 - RNA, 26 nt, Human
ugcugaaaacgcuccggagaugaccu

SEQ ID NO: 643761 - RNA, 23 nt, Human
ugcugccaccugguggccucuuc

SEQ ID NO: 643762 - RNA, 24 nt, Human
ugcuuggacgaggcugagaaggga

SEQ ID NO: 643763 - RNA, 22 nt, Human
uggacgaggcugagaagggagg

SEQ ID NO: 643764 - RNA, 21 nt, Human
uggagacagguggauuucagc

SEQ ID NO: 643765 - RNA, 23 nt, Human
uggaugcugcgccccccacaacc

SEQ ID NO: 643766 - RNA, 24 nt, Human
uggaugcugcgccccccacaaccc

SEQ ID NO: 643767 - RNA, 22 nt, Human
uggcccuauguggccugggggu

SEQ ID NO: 643768 - RNA, 24 nt, Human
uggcggugggcuggggagccgggg

SEQ ID NO: 643769 - RNA, 20 nt, Human
uggcuacaugcggcagccgc

SEQ ID NO: 643770 - RNA, 23 nt, Human
uggggcugggcuggcgcgggggg

SEQ ID NO: 643771 - RNA, 25 nt, Human
ugugcugccaccugguggccucuuc

SEQ ID NO: 643772 - RNA, 26 nt, Human
uguguucaccugccguccacccagga

SEQ ID NO: 643773 - RNA, 18 nt, Human
uguucaccugccguccac

SEQ ID NO: 643774 - RNA, 22 nt, Human
uucugggaccacacaagagaca

SEQ ID NO: 643775 - RNA, 21 nt, Human
uuguguucaccugccguccac

SEQ ID NO: 643776 - RNA, 23 nt, Human
uuuuuuuuuuuuuuuuucacaau

SEQ ID NO: 643777 - RNA, 24 nt, Human
uuuuuuuuuuuuuuuuucacaaug

SEQ ID NO: 643778 - RNA, 27 nt, Human
aaacaaauucaaugaccaucuagagac

SEQ ID NO: 643779 - RNA, 20 nt, Human
aaaccagaaacaguuucugu

SEQ ID NO: 643780 - RNA, 22 nt, Human
aaagaagcaauuuuuacccaaa

SEQ ID NO: 643781 - RNA, 23 nt, Human
aaagacauccacuuuucccagaa

SEQ ID NO: 643782 - RNA, 24 nt, Human
aaagugcugggauuacaggcauga

SEQ ID NO: 643783 - RNA, 22 nt, Human
aaaguuagugagaauccgaaag

SEQ ID NO: 643784 - RNA, 18 nt, Human
aacuacgcgacccaaaag

SEQ ID NO: 643785 - RNA, 21 nt, Human
aacuacgcgacccaaaagacu

SEQ ID NO: 643786 - RNA, 19 nt, Human
aaguagcugggacuacagg

SEQ ID NO: 643787 - RNA, 20 nt, Human
aaguagcugggacuacaggc

SEQ ID NO: 643788 - RNA, 24 nt, Human
aaguagcugggacuacaggcacgc

SEQ ID NO: 643789 - RNA, 24 nt, Human
aagugauccaccugccucggccuc

SEQ ID NO: 643790 - RNA, 20 nt, Human
aagugauucucaugccucag

SEQ ID NO: 643791 - RNA, 21 nt, Human
aagugauucucaugccucagc

SEQ ID NO: 643792 - RNA, 19 nt, Human
aagugcugggauuacaggc

SEQ ID NO: 643793 - RNA, 21 nt, Human
aagugcugggauuacaggcau

SEQ ID NO: 643794 - RNA, 26 nt, Human
aagugcugggauuacaggcaugagcc

SEQ ID NO: 643795 - RNA, 24 nt, Human
acagguuuucaccauguuggccag

SEQ ID NO: 643796 - RNA, 22 nt, Human
accauacuuaaacgaguacuua

SEQ ID NO: 643797 - RNA, 18 nt, Human
accauguuggccaggcug

SEQ ID NO: 643798 - RNA, 22 nt, Human
acggcggcggagucuggcgggc

SEQ ID NO: 643799 - RNA, 19 nt, Human
acuuuggucucaaugugaa

SEQ ID NO: 643800 - RNA, 24 nt, Human
agagucuccguugcccaggcugga

SEQ ID NO: 643801 - RNA, 20 nt, Human
agcauuuaaauauagaaaua

SEQ ID NO: 643802 - RNA, 18 nt, Human
agcuucaccaccuccacg

SEQ ID NO: 643803 - RNA, 20 nt, Human
aggcugcuaaguguucucuu

SEQ ID NO: 643804 - RNA, 25 nt, Human
aggcuggagugcagugucgugaucu

SEQ ID NO: 643805 - RNA, 25 nt, Human
agggaaguggagggcagagaagagg

SEQ ID NO: 643806 - RNA, 21 nt, Human
agguggaaaccauacuacaga

SEQ ID NO: 643807 - RNA, 23 nt, Human
agguuuucaccauguuggccagg

SEQ ID NO: 643808 - RNA, 24 nt, Human
agugauucucaugccucagccucc

SEQ ID NO: 643809 - RNA, 20 nt, Human
agugcagugucgugaucuug

SEQ ID NO: 643810 - RNA, 24 nt, Human
agugcagugucgugaucuuggcuc

SEQ ID NO: 643811 - RNA, 19 nt, Human
aguggagggcagagaagag

SEQ ID NO: 643812 - RNA, 19 nt, Human
auagaacaaugguuaaaua

SEQ ID NO: 643813 - RNA, 23 nt, Human
auagugguguuagagauaggugg

SEQ ID NO: 643814 - RNA, 22 nt, Human
aucggauuuuguugagucuggg

SEQ ID NO: 643815 - RNA, 22 nt, Human
augccucagccuccuaaguagc

SEQ ID NO: 643816 - RNA, 21 nt, Human
auucccuuuuauaaagugcca

SEQ ID NO: 643817 - RNA, 24 nt, Human
auuuuuguauuuuuaguagagaca

SEQ ID NO: 643818 - RNA, 24 nt, Human
caaagugcugggauuacaggcaug

SEQ ID NO: 643819 - RNA, 26 nt, Human
caaaugcaauuaguaaaaacggggca

SEQ ID NO: 643820 - RNA, 21 nt, Human
caacugcaaccuccaccucuc

SEQ ID NO: 643821 - RNA, 24 nt, Human
caacugcaaccuccaccucucagg

SEQ ID NO: 643822 - RNA, 22 nt, Human
caagaaaagcuuggaaaauuaa

SEQ ID NO: 643823 - RNA, 24 nt, Human
caagucauagagacuaccaaugua

SEQ ID NO: 643824 - RNA, 22 nt, Human
caagugauccaccugccucggc

SEQ ID NO: 643825 - RNA, 22 nt, Human
caccaccacgcucggcuaauuu

SEQ ID NO: 643826 - RNA, 24 nt, Human
caccacgcucggcuaauuuuugua

SEQ ID NO: 643827 - RNA, 21 nt, Human
caccauguuggccaggcuggu

SEQ ID NO: 643828 - RNA, 21 nt, Human
caccauguuggccaggcuggu

SEQ ID NO: 643829 - RNA, 24 nt, Human
caccauguuggccaggcugguuuc

SEQ ID NO: 643830 - RNA, 31 nt, Human; identical to SEQ ID NO: 466129

SEQ ID NO: 643831 - RNA, 23 nt, Human
caccugccucggccucccaaagu

SEQ ID NO: 643832 - RNA, 19 nt, Human
cacucccuccuccccccug

SEQ ID NO: 643833 - RNA, 22 nt, Human
cacucccuccuccccccugccc

SEQ ID NO: 643834 - RNA, 19 nt, Human
cagagucuccguugcccag

SEQ ID NO: 643835 - RNA, 21 nt, Human
caggcacgcaccaccacgcuc

SEQ ID NO: 643836 - RNA, 24 nt, Human
cagguuuucaccauguuggccagg

SEQ ID NO: 643837 - RNA, 23 nt, Human
cauguuggccaggcugguuucaa

SEQ ID NO: 643838 - RNA, 20 nt, Human
cauuuuuuuguuacucuuga

SEQ ID NO: 643839 - RNA, 23 nt, Human
ccaaagugcugggauuacaggca

SEQ ID NO: 643840 - RNA, 24 nt, Human
ccaaagugcugggauuacaggcau

SEQ ID NO: 643841 - RNA, 22 nt, Human
ccacaucggcgucguaggcccc

SEQ ID NO: 643842 - RNA, 19 nt, Human
ccagcggcugcucuggguc

SEQ ID NO: 643843 - RNA, 18 nt, Human
ccaggaaugguuaaagca

SEQ ID NO: 643844 - RNA, 24 nt, Human
cccaaagugcugggauuacaggca

SEQ ID NO: 643845 - RNA, 18 nt, Human
cccaccagguucuugauc

SEQ ID NO: 643846 - RNA, 21 nt, Human
cccacucccuccuccccccug

SEQ ID NO: 643847 - RNA, 19 nt, Human
cccaggcuggagugcagug

SEQ ID NO: 643848 - RNA, 19 nt, Human
cccauagcgacgggcuccc

SEQ ID NO: 643849 - RNA, 24 nt, Human
cccccaccagcagcuucaccaccu

SEQ ID NO: 643850 - RNA, 22 nt, Human
cccccacucccuccuccccccc

SEQ ID NO: 643851 - RNA, 21 nt, Human
ccccgcucguccuggcgucca

SEQ ID NO: 643852 - RNA, 22 nt, Human
ccccugcccuccagcggcugcu

SEQ ID NO: 643853 - RNA, 21 nt, Human
cccgaggcuuugcgcccugga

SEQ ID NO: 643854 - RNA, 18 nt, Human
cccuccuccccccugccc

SEQ ID NO: 643855 - RNA, 18 nt, Human
cccuccuccccccugccc

SEQ ID NO: 643856 - RNA, 30 nt, Human
ccgacggcggcggagucuggcgggcucuuu

SEQ ID NO: 643857 - RNA, 21 nt, Human
ccgccccauccauuccgaucc

SEQ ID NO: 643858 - RNA, 23 nt, Human
ccuaaguagcugggacuacaggc

SEQ ID NO: 643859 - RNA, 24 nt, Human
ccuaaguagcugggacuacaggca

SEQ ID NO: 643860 - RNA, 20 nt, Human
ccucgaccgcgcugcucccc

SEQ ID NO: 643861 - RNA, 18 nt, Human
ccuggccucaagugaucc

SEQ ID NO: 643862 - RNA, 21 nt, Human
ccuggccucaagugauccacc

SEQ ID NO: 643863 - RNA, 23 nt, Human
ccuggccucaagugauccaccug

SEQ ID NO: 643864 - RNA, 23 nt, Human
ccuggccucaagugauccaccug

SEQ ID NO: 643865 - RNA, 23 nt, Human
ccugucguuuucacacuuagaaa

SEQ ID NO: 643866 - RNA, 22 nt, Human
ccuuugaaagccuccagcgccc

SEQ ID NO: 643867 - RNA, 18 nt, Human
ccuuuuauaaagugccau

SEQ ID NO: 643868 - RNA, 25 nt, Human
cgccagcgggcggcucagcgcgguc

SEQ ID NO: 643869 - RNA, 18 nt, Human
cgcgcugcucccccgcca

SEQ ID NO: 643870 - RNA, 21 nt, Human
cgcgcugcucccccgccagcg

SEQ ID NO: 643871 - RNA, 23 nt, Human
cguccagggcucccaccagguuc

SEQ ID NO: 643872 - RNA, 21 nt, Human
cucaagugauccaccugccuc

SEQ ID NO: 643873 - RNA, 24 nt, Human
cucagccuccuaaguagcugggac

SEQ ID NO: 643874 - RNA, 18 nt, Human
cucccuccuccccccugc

SEQ ID NO: 643875 - RNA, 20 nt, Human
cucccuccuccccccugccc

SEQ ID NO: 643876 - RNA, 19 nt, Human
cuccguugcccaggcugga

SEQ ID NO: 643877 - RNA, 23 nt, Human
cuccguugcccaggcuggagugc

SEQ ID NO: 643878 - RNA, 19 nt, Human
cuccuccccccugcccucc

SEQ ID NO: 643879 - RNA, 19 nt, Human
cuccucggcgaugcuccga

SEQ ID NO: 643880 - RNA, 23 nt, Human
cuccuggccucaagugauccacc

SEQ ID NO: 643881 - RNA, 22 nt, Human
cucuaauauaaaugaaugaaau

SEQ ID NO: 643882 - RNA, 21 nt, Human
cugcaaccuccaccucucagg

SEQ ID NO: 643883 - RNA, 23 nt, Human
cugccucggccucccaaagugcu

SEQ ID NO: 643884 - RNA, 21 nt, Human
cuuugaucugaccuucaguag

SEQ ID NO: 643885 - RNA, 22 nt, Human
cuuugccuccgacccaccccuc

SEQ ID NO: 643886 - RNA, 21 nt, Human
cuuugcgcccuggauccuugg

SEQ ID NO: 643887 - RNA, 19 nt, Human
gaauaaacaccccagcaaa

SEQ ID NO: 643888 - RNA, 19 nt, Human
gauuaaaacugaaauugcu

SEQ ID NO: 643889 - RNA, 18 nt, Human
gauuacaggcaugagcca

SEQ ID NO: 643890 - RNA, 21 nt, Human
gauuacaggcaugagccacca

SEQ ID NO: 643891 - RNA, 22 nt, Human
gauuacaggcaugagccaccau

SEQ ID NO: 643892 - RNA, 21 nt, Human
gcaaccuccaccucucagguu

SEQ ID NO: 643893 - RNA, 21 nt, Human
gcccaggcuggagugcagugu

SEQ ID NO: 643894 - RNA, 23 nt, Human
gccccauccauuccgaucccuca

SEQ ID NO: 643895 - RNA, 20 nt, Human
gccucagccuccuaaguagc

SEQ ID NO: 643896 - RNA, 23 nt, Human
gcucugggucccugaaagagggu

SEQ ID NO: 643897 - RNA, 23 nt, Human
gcugguuucaaacuccuggccuc

SEQ ID NO: 643898 - RNA, 24 nt, Human
ggauuacaggcaugagccaccaug

SEQ ID NO: 643899 - RNA, 20 nt, Human
ggcagagaagagguacaggu

SEQ ID NO: 643900 - RNA, 24 nt, Human
ggccucaagugauccaccugccuc

SEQ ID NO: 643901 - RNA, 22 nt, Human
ggcugcucugggucccugaaag

SEQ ID NO: 643902 - RNA, 24 nt, Human
ggcugguuucaaacuccuggccuc

SEQ ID NO: 643903 - RNA, 20 nt, Human
gggcucccagcggccggcuc

SEQ ID NO: 643904 - RNA, 23 nt, Human
gggugugguguggacgaucuggg

SEQ ID NO: 643905 - RNA, 20 nt, Human
gucuccguugcccaggcugg

SEQ ID NO: 643906 - RNA, 21 nt, Human
gucuccguugcccaggcugga

SEQ ID NO: 643907 - RNA, 23 nt, Human
gucuccguugcccaggcuggagu

SEQ ID NO: 643908 - RNA, 24 nt, Human
gucuccguugcccaggcuggagug

SEQ ID NO: 643909 - RNA, 24 nt, Human
gugauccaccugccucggccuccc

SEQ ID NO: 643910 - RNA, 24 nt, Human
gugauucucaugccucagccuccu

SEQ ID NO: 643911 - RNA, 22 nt, Human
guuaugccaaauagaacaaugg

SEQ ID NO: 643912 - RNA, 22 nt, Human
uaaaauaaaaaguguaccuuac

SEQ ID NO: 643913 - RNA, 22 nt, Human
uaaaccagaaacaguuucugua

SEQ ID NO: 643914 - RNA, 27 nt, Human
uaacaggucguuccucccccacucccu

SEQ ID NO: 643915 - RNA, 18 nt, Human
uaacccccgcucguccug

SEQ ID NO: 643916 - RNA, 27 nt, Human
uaagugauucucaugccucagccuccu

SEQ ID NO: 643917 - RNA, 24 nt, Human
uaauuuuuguauuuuuaguagaga

SEQ ID NO: 643918 - RNA, 22 nt, Human
uacaggcaugagccaccaugcc

SEQ ID NO: 643919 - RNA, 19 nt, Human
uacccagauuuucaguaac

SEQ ID NO: 643920 - RNA, 21 nt, Human
uagaaauacaauguaguuuca

SEQ ID NO: 643921 - RNA, 22 nt, Human
uagagacagguuuucaccaugu

SEQ ID NO: 643922 - RNA, 19 nt, Human
uagcccgaagagaacuccg

SEQ ID NO: 643923 - RNA, 23 nt, Human
uagccuccagaaacggacuccag

SEQ ID NO: 643924 - RNA, 23 nt, Human
uagcuuguccuucuggucucacu

SEQ ID NO: 643925 - RNA, 26 nt, Human
uagcuuguccuucugguuggaagacc

SEQ ID NO: 643926 - RNA, 26 nt, Human
uaggguuaugccaaauagaacaaagu

SEQ ID NO: 643927 - RNA, 22 nt, Human
uagguaauucagcucuaagcac

SEQ ID NO: 643928 - RNA, 21 nt, Human
uaguaaaaacggggcagccug

SEQ ID NO: 643929 - RNA, 23 nt, Human
uaguagagacagguuuucaccau

SEQ ID NO: 643930 - RNA, 24 nt, Human
uaguagagacagguuuucaccaug

SEQ ID NO: 643931 - RNA, 21 nt, Human
ucaagugauccaccugccucg

SEQ ID NO: 643932 - RNA, 22 nt, Human
ucagaauaaacaccccagcaaa

SEQ ID NO: 643933 - RNA, 22 nt, Human
ucauaggcugcuaaguguucuc

SEQ ID NO: 643934 - RNA, 22 nt, Human
ucauccaucuuuaaacaaauuc

SEQ ID NO: 643935 - RNA, 24 nt, Human
ucauucauucuguucccccaauuu

SEQ ID NO: 643936 - RNA, 22 nt, Human
uccacaucggcgucguaggccc

SEQ ID NO: 643937 - RNA, 19 nt, Human
uccacuagagcugcccgag

SEQ ID NO: 643938 - RNA, 20 nt, Human
uccagggcagggaaguggag

SEQ ID NO: 643939 - RNA, 24 nt, Human
ucccaaagugcugggauuacaggc

SEQ ID NO: 643940 - RNA, 21 nt, Human
ucccauagcgacgggcuccca

SEQ ID NO: 643941 - RNA, 21 nt, Human
ucccauagcgacgggcuccca

SEQ ID NO: 643942 - RNA, 19 nt, Human
ucccccacucccuccuccc

SEQ ID NO: 643943 - RNA, 22 nt, Human
ucccuccuccccccugcccucc

SEQ ID NO: 643944 - RNA, 19 nt, Human
ucccugaaagagggugugg

SEQ ID NO: 643945 - RNA, 20 nt, Human
uccgaaagagaggcaacauu

SEQ ID NO: 643946 - RNA, 24 nt, Human
uccguugcccaggcuggagugcag

SEQ ID NO: 643947 - RNA, 24 nt, Human
uccuaaguagcugggacuacaggc

SEQ ID NO: 643948 - RNA, 18 nt, Human
uccucagaauaaacaccc

SEQ ID NO: 643949 - RNA, 21 nt, Human
uccuggcguccauguucaccg

SEQ ID NO: 643950 - RNA, 25 nt, Human
uccuuacuuugcaggcauccaggaa

SEQ ID NO: 643951 - RNA, 19 nt, Human
uccuuggcuuugccuccga

SEQ ID NO: 643952 - RNA, 25 nt, Human
uccuuggcuuugccuccgacccacc

SEQ ID NO: 643953 - RNA, 18 nt, Human
ucggccucccaaagugcu

SEQ ID NO: 643954 - RNA, 18 nt, Human
ucuccguugcccaggcug

SEQ ID NO: 643955 - RNA, 19 nt, Human
ucuggcgggcucagcgggc

SEQ ID NO: 643956 - RNA, 20 nt, Human
ucugugcaguucacacaugg

SEQ ID NO: 643957 - RNA, 20 nt, Human
ugaaaaagacauccacuuuu

SEQ ID NO: 643958 - RNA, 24 nt, Human
ugaaaaagacauccacuuuuccca

SEQ ID NO: 643959 - RNA, 24 nt, Human
ugaaagaguaaccccuuauaaaau

SEQ ID NO: 643960 - RNA, 19 nt, Human
ugaaucucugaaaaagaca

SEQ ID NO: 643961 - RNA, 22 nt, Human
ugagacagagucuccguugccc

SEQ ID NO: 643962 - RNA, 21 nt, Human
ugcagggcgguguaacccccg

SEQ ID NO: 643963 - RNA, 18 nt, Human
ugcccaggcuggagugca

SEQ ID NO: 643964 - RNA, 21 nt, Human
ugcccaggcuggagugcagug

SEQ ID NO: 643965 - RNA, 19 nt, Human
ugcccuccagcggcugcuc

SEQ ID NO: 643966 - RNA, 22 nt, Human
ugccucagccuccuaaguagcu

SEQ ID NO: 643967 - RNA, 24 nt, Human
ugccucagccuccuaaguagcugg

SEQ ID NO: 643968 - RNA, 21 nt, Human
ugccucggccucccaaagugc

SEQ ID NO: 643969 - RNA, 24 nt, Human
ugccucggccucccaaagugcugg

SEQ ID NO: 643970 - RNA, 18 nt, Human
ugcgcccuggauccuugg

SEQ ID NO: 643971 - RNA, 21 nt, Human
uggagugcagugucgugaucc

SEQ ID NO: 643972 - RNA, 23 nt, Human
uggagugcagugucgugaucuug

SEQ ID NO: 643973 - RNA, 24 nt, Human
uggagugcagugucgugaucuugg

SEQ ID NO: 643974 - RNA, 24 nt, Human
uggccaggcugguuucaaacuccu

SEQ ID NO: 643975 - RNA, 24 nt, Human
uggccucaagugauccaccugccu

SEQ ID NO: 643976 - RNA, 22 nt, Human
uggcucaacugcaaccuccacc

SEQ ID NO: 643977 - RNA, 21 nt, Human
ugggacuacaggcacgcacca

SEQ ID NO: 643978 - RNA, 24 nt, Human
ugggacuacaggcacgcaccacca

SEQ ID NO: 643979 - RNA, 18 nt, Human
ugggauuacaggcaugag

SEQ ID NO: 643980 - RNA, 22 nt, Human
ugggauuacaggcaugagccac

SEQ ID NO: 643981 - RNA, 23 nt, Human
ugggauuacaggcaugagccacc

SEQ ID NO: 643982 - RNA, 24 nt, Human
ugggauuacaggcaugagccacca

SEQ ID NO: 643983 - RNA, 25 nt, Human
ugggauuacaggcaugagccaccau

SEQ ID NO: 643984 - RNA, 18 nt, Human
ugguguggacgaucuggg

SEQ ID NO: 643985 - RNA, 19 nt, Human
uguugccuguuucuuuugu

SEQ ID NO: 643986 - RNA, 20 nt, Human
uuaauucauucauucuguuc

SEQ ID NO: 643987 - RNA, 22 nt, Human
uuaauucauucauucuguuccc

SEQ ID NO: 643988 - RNA, 23 nt, Human
uuaauucauucauucuguucccc

SEQ ID NO: 643989 - RNA, 22 nt, Human
uuacuucacagaaacaugggcu

SEQ ID NO: 643990 - RNA, 22 nt, Human
uuagguuucagcaacuacgcga

SEQ ID NO: 643991 - RNA, 24 nt, Human
uuaguagagacagguuuucaccau

SEQ ID NO: 643992 - RNA, 23 nt, Human
uucaaacuuuuagaauaguaaca

SEQ ID NO: 643993 - RNA, 24 nt, Human
uucacacauggguucauucacccc

SEQ ID NO: 643994 - RNA, 21 nt, Human
uucacauuauucucuaauuag

SEQ ID NO: 643995 - RNA, 20 nt, Human
uucuaaaagaagcaauuuuu

SEQ ID NO: 643996 - RNA, 24 nt, Human
uugcccaggcuggagugcaguguc

SEQ ID NO: 643997 - RNA, 21 nt, Human
uugccuguuucuuuuguucag

SEQ ID NO: 643998 - RNA, 18 nt, Human
uuuaaacaaauucaauga

SEQ ID NO: 643999 - RNA, 24 nt, Human
uuucaccauguuggccaggcuggu

SEQ ID NO: 644000 - RNA, 22 nt, Human
uuugaaagccuccagcgcccgc

SEQ ID NO: 644001 - RNA, 21 nt, Human
uuugcauuuuuuuguuacucu

SEQ ID NO: 644002 - RNA, 23 nt, Human
uuuucaccauguuggccaggcug

SEQ ID NO: 644003 - RNA, 20 nt, Human
uuuuuguauuuuuaguagag

SEQ ID NO: 644004 - RNA, 20 nt, Human
uuuuuuuuuuugagacagag

SEQ ID NO: 644005 - RNA, 18 nt, Human
uuuuuuuuuuuuuuuuug

SEQ ID NO: 644006 - RNA, 19 nt, Human
aaaaauccacacauacccc

SEQ ID NO: 644007 - RNA, 23 nt, Human
acacauacccccaucccaauccc

SEQ ID NO: 644008 - RNA, 18 nt, Human
aggaaaaauccacacaua

SEQ ID NO: 644009 - RNA, 19 nt, Human
caacauguuuccugcagau

SEQ ID NO: 644010 - RNA, 22 nt, Human
caucccaaucccccagauuuuc

SEQ ID NO: 644011 - RNA, 22 nt, Human
ccccaucccaaucccccagauu

SEQ ID NO: 644012 - RNA, 22 nt, Human
ggaaaaauccacacauaccccc

SEQ ID NO: 644013 - RNA, 20 nt, Human
uccacacauacccccauccc

SEQ ID NO: 644014 - RNA, 23 nt, Human
uccuuugcccuuuuaacuccaaa

SEQ ID NO: 644015 - RNA, 21 nt, Human
uuuauguucaacauguuuccu

SEQ ID NO: 644016 - RNA, 22 nt, Human
uuuuuuuuuuuuuuuuugggau

SEQ ID NO: 644017 - RNA, 26 nt, Human
uuuuuuuuuuuuuuuuuuuuuuuggg

SEQ ID NO: 644018 - RNA, 27 nt, Human
ccuuuuuuuuuuuuuuuuuuuuuuuuu

SEQ ID NO: 644019 - RNA, 18 nt, Human
uccuuuuuuuuuuuuuuu

SEQ ID NO: 644020 - RNA, 18 nt, Human
uccuuuuuuuuuuuuuuu

SEQ ID NO: 644021 - RNA, 21 nt, Human
uuuuuuccuuuuuuuuuuuuu

SEQ ID NO: 644022 - RNA, 30 nt, Human
uuuuuuccuuuuuuuuuuuuuuuuuuuuuu

SEQ ID NO: 644023 - RNA, 30 nt, Human
uuuuuuuccuuuuuuuuuuuuuuuuuuuuu

SEQ ID NO: 644024 - RNA, 31 nt, Human
uuuuuuuuccuuuuuuuuuuuuuuuuuuuuu

SEQ ID NO: 644025 - RNA, 32 nt, Human
uuuuuuuuuccuuuuuuuuuuuuuuuuuuuuu

SEQ ID NO: 644026 - RNA, 21 nt, Human
uuuuuuuuuuuuuuccuuuuu

SEQ ID NO: 644027 - RNA, 22 nt, Human
uuuuuuuuuuuuuuuccuuuuu

SEQ ID NO: 644028 - RNA, 21 nt, Human
uuuuuuuuuuuuuuuuccuuu

SEQ ID NO: 644029 - RNA, 21 nt, Human
uuuuuuuuuuuuuuuuccuuu

SEQ ID NO: 644030 - RNA, 23 nt, Human
uuuuuuuuuuuuuuuuccuuuuu

SEQ ID NO: 644031 - RNA, 23 nt, Human
uuuuuuuuuuuuuuuuuuaauug

SEQ ID NO: 644032 - RNA, 22 nt, Human
agaaaaacagaguucacuugaa

SEQ ID NO: 644033 - RNA, 21 nt, Human
auuuucuuaaaaagcaaaaca

SEQ ID NO: 644034 - RNA, 23 nt, Human
caaaacacuuucaguagaaaaaa

SEQ ID NO: 644035 - RNA, 23 nt, Human
cagaaaaacagaguucacuugaa

SEQ ID NO: 644036 - RNA, 18 nt, Human
cccgccgcacugccaccc

SEQ ID NO: 644037 - RNA, 19 nt, Human
cccgccgcacugccacccc

SEQ ID NO: 644038 - RNA, 20 nt, Human
cguaacccgccgcacugcca

SEQ ID NO: 644039 - RNA, 28 nt, Human
guagaaaaaauuuacauaugaaagucaa

SEQ ID NO: 644040 - RNA, 22 nt, Human
uucaguagaaaaaauuuacaua

SEQ ID NO: 644041 - RNA, 23 nt, Human
uuuuuuuuuuuuuuuuucucauu

SEQ ID NO: 644042 - RNA, 20 nt, Human
aaacaagcucucaaagcaaa

SEQ ID NO: 644043 - RNA, 18 nt, Human
aaaccacaccgcagcccu

SEQ ID NO: 644044 - RNA, 23 nt, Human
aagaaacaaguccagagagggca

SEQ ID NO: 644045 - RNA, 27 nt, Human
aagaagccaggggcagccugcaaagcg

SEQ ID NO: 644046 - RNA, 19 nt, Human
aagcgggaaagggaggaag

SEQ ID NO: 644047 - RNA, 18 nt, Human
aaggcccagagcccaccu

SEQ ID NO: 644048 - RNA, 20 nt, Human
acagcccccuccccacuccu

SEQ ID NO: 644049 - RNA, 20 nt, Human
accagaggccccauuuuucu

SEQ ID NO: 644050 - RNA, 25 nt, Human
agacagaaauacacagauucugguc

SEQ ID NO: 644051 - RNA, 20 nt, Human
agagaauuauccaggaagug

SEQ ID NO: 644052 - RNA, 19 nt, Human
agagacaccagaggcccca

SEQ ID NO: 644053 - RNA, 20 nt, Human
agagggaauuucuccagcca

SEQ ID NO: 644054 - RNA, 25 nt, Human
agcagcaccaauagauuccccagug

SEQ ID NO: 644055 - RNA, 21 nt, Human
agccagagccuuuggauccaa

SEQ ID NO: 644056 - RNA, 23 nt, Human
aggaagcugcuggccggaauucc

SEQ ID NO: 644057 - RNA, 25 nt, Human
aggauuugcuggggaugaugggaca

SEQ ID NO: 644058 - RNA, 22 nt, Human
aggcaguucuagcccugagaga

SEQ ID NO: 644059 - RNA, 20 nt, Human
agggacugugcucuuucugu

SEQ ID NO: 644060 - RNA, 23 nt, Human
agggauccccuggagacuugucu

SEQ ID NO: 644061 - RNA, 22 nt, Human
agggcgugggggcggcggagaa

SEQ ID NO: 644062 - RNA, 21 nt, Human
aggugacccacccagggccuc

SEQ ID NO: 644063 - RNA, 21 nt, Human
agucugccaaacagcucugcu

SEQ ID NO: 644064 - RNA, 22 nt, Human
agugacacaaaucugacauuug

SEQ ID NO: 644065 - RNA, 23 nt, Human
augaaaccugugagaagguggcc

SEQ ID NO: 644066 - RNA, 25 nt, Human
augcagcagcaccaauagauuccag

SEQ ID NO: 644067 - RNA, 18 nt, Human
auggugggacacugaaca

SEQ ID NO: 644068 - RNA, 24 nt, Human
auugauuuaaaaguuuccuuugga

SEQ ID NO: 644069 - RNA, 22 nt, Human
caaagccugccacaccuuuuca

SEQ ID NO: 644070 - RNA, 23 nt, Human
cacaagccacaaauacagagaca

SEQ ID NO: 644071 - RNA, 30 nt, Human
cacacaagccacaaauacagagacauagcu

SEQ ID NO: 644072 - RNA, 21 nt, Human
cacagcacaggcaagucuccu

SEQ ID NO: 644073 - RNA, 23 nt, Human
cacuauguuuucccuucgagaca

SEQ ID NO: 644074 - RNA, 18 nt, Human
cagagcccaccuuacagc

SEQ ID NO: 644075 - RNA, 27 nt, Human
cagcagcaccaauagauuccccaguag

SEQ ID NO: 644076 - RNA, 28 nt, Human
cagcagcaccaauagauucccccaguag

SEQ ID NO: 644077 - RNA, 21 nt, Human
cagcauaggcagggaccuccu

SEQ ID NO: 644078 - RNA, 19 nt, Human
cagccaaggcgucauccag

SEQ ID NO: 644079 - RNA, 21 nt, Human
cagggacugugcucuuucugu

SEQ ID NO: 644080 - RNA, 21 nt, Human
caggucccgccccagcgagga

SEQ ID NO: 644081 - RNA, 20 nt, Human
caggugacccacccagggcc

SEQ ID NO: 644082 - RNA, 21 nt, Human
cagugcccuaugcuuccuguc

SEQ ID NO: 644083 - RNA, 20 nt, Human
cauucagaaugcagucccau

SEQ ID NO: 644084 - RNA, 18 nt, Human
ccacaaauacagagacau

SEQ ID NO: 644085 - RNA, 18 nt, Human
ccacaccuuuucauccac

SEQ ID NO: 644086 - RNA, 21 nt, Human
ccacccagggccucacugcga

SEQ ID NO: 644087 - RNA, 24 nt, Human
ccacccagggccucacugcgaacu

SEQ ID NO: 644088 - RNA, 21 nt, Human
cccaccuuacagccccuuaga

SEQ ID NO: 644089 - RNA, 22 nt, Human
ccccaaagggcaauuccacacc

SEQ ID NO: 644090 - RNA, 23 nt, Human
cccccacgcuuccaguguacuuc

SEQ ID NO: 644091 - RNA, 19 nt, Human
ccccuggaagccacucacu

SEQ ID NO: 644092 - RNA, 18 nt, Human
cccugaagggcucguccc

SEQ ID NO: 644093 - RNA, 18 nt, Human
cccugagagagguagagg

SEQ ID NO: 644094 - RNA, 22 nt, Human
ccugcauuuuccauuuccucuu

SEQ ID NO: 644095 - RNA, 23 nt, Human
cggaauucccaggcgguuuccac

SEQ ID NO: 644096 - RNA, 19 nt, Human
cuaccacacaagccacaaa

SEQ ID NO: 644097 - RNA, 26 nt, Human
cuagcccugagagagguagaggggcc

SEQ ID NO: 644098 - RNA, 27 nt, Human
cucacugaguuacagcccccuccccaa

SEQ ID NO: 644099 - RNA, 23 nt, Human
cuccccacuccuguaucugcuca

SEQ ID NO: 644100 - RNA, 18 nt, Human
cuccuacuaaaggcuaaa

SEQ ID NO: 644101 - RNA, 19 nt, Human
cuggacuuuggcaaaaaaa

SEQ ID NO: 644102 - RNA, 20 nt, Human
cugguucgguggcggggacc

SEQ ID NO: 644103 - RNA, 20 nt, Human
cuuacugccuagggaagcug

SEQ ID NO: 644104 - RNA, 23 nt, Human
cuucugaggcuaccacacaagcc

SEQ ID NO: 644105 - RNA, 26 nt, Human
gaagaaacaaguccagagagggcagg

SEQ ID NO: 644106 - RNA, 18 nt, Human
gaccagagccgccaggcc

SEQ ID NO: 644107 - RNA, 18 nt, Human
gacucuuuuguaggccug

SEQ ID NO: 644108 - RNA, 27 nt, Human
gagggccccugugaguuuccggggggc

SEQ ID NO: 644109 - RNA, 23 nt, Human
gauggaaucuugaagguccugag

SEQ ID NO: 644110 - RNA, 20 nt, Human
gauggcucuguggggugagg

SEQ ID NO: 644111 - RNA, 23 nt, Human
gcccagagcccaccuuacagccc

SEQ ID NO: 644112 - RNA, 20 nt, Human
gccccauuuuucuacaaugg

SEQ ID NO: 644113 - RNA, 20 nt, Human
gccgcgggaggcgcgggcgg

SEQ ID NO: 644114 - RNA, 21 nt, Human
gccucacugcgaacuggggug

SEQ ID NO: 644115 - RNA, 21 nt, Human
gccuuuggauccaaacuccag

SEQ ID NO: 644116 - RNA, 22 nt, Human
gccuuuggauccaaacuccagc

SEQ ID NO: 644117 - RNA, 22 nt, Human
gcuucugcugugcuugagagcc

SEQ ID NO: 644118 - RNA, 18 nt, Human
ggaaagggaggaagaagc

SEQ ID NO: 644119 - RNA, 21 nt, Human
ggaaagggaggaagaagccag

SEQ ID NO: 644120 - RNA, 22 nt, Human
ggacagguuggggaauaucccu

SEQ ID NO: 644121 - RNA, 22 nt, Human
ggagagaaaguaucauaauaaa

SEQ ID NO: 644122 - RNA, 25 nt, Human
ggaggaagaagccaggggcagccug

SEQ ID NO: 644123 - RNA, 19 nt, Human
ggccagguggcugaaggag

SEQ ID NO: 644124 - RNA, 24 nt, Human
ggccagugguuuuuugcaaaaagg

SEQ ID NO: 644125 - RNA, 19 nt, Human
ggccuggggccccuggaag

SEQ ID NO: 644126 - RNA, 19 nt, Human
ggcucagggaggugaagug

SEQ ID NO: 644127 - RNA, 24 nt, Human
gggaagccaccgagucacugccaa

SEQ ID NO: 644128 - RNA, 20 nt, Human
gggaaggacagguuggggaa

SEQ ID NO: 644129 - RNA, 21 nt, Human
gggaauuggggcucagggagg

SEQ ID NO: 644130 - RNA, 20 nt, Human
gggacagcugcagcuuccug

SEQ ID NO: 644131 - RNA, 21 nt, Human
gggcaggugacccacccaggg

SEQ ID NO: 644132 - RNA, 19 nt, Human
guaaagagacaccagaggc

SEQ ID NO: 644133 - RNA, 23 nt, Human
uaaaauaaauacuaaaaauccua

SEQ ID NO: 644134 - RNA, 21 nt, Human
uaaccaauaauccagugacac

SEQ ID NO: 644135 - RNA, 23 nt, Human
uaaggaaggaccccaaagggcaa

SEQ ID NO: 644136 - RNA, 18 nt, Human
uaccauaguccauagugg

SEQ ID NO: 644137 - RNA, 20 nt, Human
uagcagcaccucugcccagc

SEQ ID NO: 644138 - RNA, 21 nt, Human
uagcagcaccucugcccagcc

SEQ ID NO: 644139 - RNA, 19 nt, Human
uauggaaaccagggucccu

SEQ ID NO: 644140 - RNA, 18 nt, Human
ucagagcccaguccaaca

SEQ ID NO: 644141 - RNA, 18 nt, Human
ucagaggugacagucaaa

SEQ ID NO: 644142 - RNA, 20 nt, Human
ucagcauaggcagggaccuc

SEQ ID NO: 644143 - RNA, 18 nt, Human
ucagggaggugaagugac

SEQ ID NO: 644144 - RNA, 19 nt, Human
ucaguugggaaacagggau

SEQ ID NO: 644145 - RNA, 20 nt, Human
ucaugucauguguuccccca

SEQ ID NO: 644146 - RNA, 23 nt, Human
uccacaguggaaaucuccccacu

SEQ ID NO: 644147 - RNA, 22 nt, Human
ucccugcagaaugaaaccugug

SEQ ID NO: 644148 - RNA, 21 nt, Human
ucucaaagcaacucuccuucc

SEQ ID NO: 644149 - RNA, 21 nt, Human
ucucauagaccauggugggac

SEQ ID NO: 644150 - RNA, 19 nt, Human
ucugaggcuaccacacaag

SEQ ID NO: 644151 - RNA, 22 nt, Human
ucugccagagcuugaguguccu

SEQ ID NO: 644152 - RNA, 19 nt, Human
ugaagaaacaaguccagag

SEQ ID NO: 644153 - RNA, 19 nt, Human
ugaaggaggaagcugcugg

SEQ ID NO: 644154 - RNA, 22 nt, Human
ugaagugacuuggccaagauca

SEQ ID NO: 644155 - RNA, 22 nt, Human
ugacacauagguauuguugcca

SEQ ID NO: 644156 - RNA, 21 nt, Human
ugacuuagccagagccuuugg

SEQ ID NO: 644157 - RNA, 23 nt, Human
ugacuuggccaagaucauacagg

SEQ ID NO: 644158 - RNA, 21 nt, Human
ugagaaagugacauaaugacu

SEQ ID NO: 644159 - RNA, 19 nt, Human
ugagagagaacguggggga

SEQ ID NO: 644160 - RNA, 22 nt, Human
ugagagagguagaggggcccca

SEQ ID NO: 644161 - RNA, 23 nt, Human
ugagggcaguauggaaaccaggg

SEQ ID NO: 644162 - RNA, 21 nt, Human
ugcagugcccuaugcuuccuu

SEQ ID NO: 644163 - RNA, 22 nt, Human
ugccaaacagcucugcuucuga

SEQ ID NO: 644164 - RNA, 18 nt, Human
ugccacaccuuuucaucc

SEQ ID NO: 644165 - RNA, 18 nt, Human
ugccagagcuugaguguc

SEQ ID NO: 644166 - RNA, 19 nt, Human
ugccagagcuugagugucc

SEQ ID NO: 644167 - RNA, 20 nt, Human
ugccagagcuugaguguccu

SEQ ID NO: 644168 - RNA, 20 nt, Human
ugccggccagcccacagaug

SEQ ID NO: 644169 - RNA, 20 nt, Human
ugcucugcucagcugggucc

SEQ ID NO: 644170 - RNA, 20 nt, Human
uggaaaucuccccacugcca

SEQ ID NO: 644171 - RNA, 22 nt, Human
uggaagcacagcacaggcaagu

SEQ ID NO: 644172 - RNA, 28 nt, Human
uggacaagcaagguaacauuguaaugac

SEQ ID NO: 644173 - RNA, 22 nt, Human
uggacuggacucuuuuguaggc

SEQ ID NO: 644174 - RNA, 18 nt, Human
uggcaaaaaaaggaaguc

SEQ ID NO: 644175 - RNA, 19 nt, Human
uggcuccuagacucucucu

SEQ ID NO: 644176 - RNA, 19 nt, Human
uggcugaaggaggaagcug

SEQ ID NO: 644177 - RNA, 18 nt, Human
ugggaauuggggcucagg

SEQ ID NO: 644178 - RNA, 21 nt, Human
ugggaauuggggcucagggag

SEQ ID NO: 644179 - RNA, 22 nt, Human
uggggaugaugggacagcugca

SEQ ID NO: 644180 - RNA, 18 nt, Human
uggggugaggguagagaa

SEQ ID NO: 644181 - RNA, 19 nt, Human
ugguaaagagacaccagag

SEQ ID NO: 644182 - RNA, 19 nt, Human
uguggguccccacuggugc

SEQ ID NO: 644183 - RNA, 25 nt, Human
uuccacacccugcauuuuccauuuc

SEQ ID NO: 644184 - RNA, 21 nt, Human
uuccacaguggaaaucucccc

SEQ ID NO: 644185 - RNA, 24 nt, Human
uucccaggcgguuuccacagugga

SEQ ID NO: 644186 - RNA, 18 nt, Human
uugccggccagcccacag

SEQ ID NO: 644187 - RNA, 20 nt, Human
uugcuggggaugaugggaca

SEQ ID NO: 644188 - RNA, 20 nt, Human
uuuaagggguauggccaggu

SEQ ID NO: 644189 - RNA, 23 nt, Human
uuucugggaagagggccccugug

SEQ ID NO: 644190 - RNA, 18 nt, Human
aacaguauccuuaaucug

SEQ ID NO: 644191 - RNA, 21 nt, Human
aagagaagaucgaguuccaaa

SEQ ID NO: 644192 - RNA, 26 nt, Human
acaaauacaaagggaagaagagccag

SEQ ID NO: 644193 - RNA, 22 nt, Human
accagguugagggugcuggucu

SEQ ID NO: 644194 - RNA, 25 nt, Human
acccccagcccugcaugcagggucc

SEQ ID NO: 644195 - RNA, 21 nt, Human
accccuggcacaacauggucu

SEQ ID NO: 644196 - RNA, 21 nt, Human
acuuaagggcucuccaggugc

SEQ ID NO: 644197 - RNA, 18 nt, Human
agaaagaagcuaccaggu

SEQ ID NO: 644198 - RNA, 22 nt, Human
agcuggcucuuaccuccuggcu

SEQ ID NO: 644199 - RNA, 23 nt, Human
aggggcuggcucucuccccccug

SEQ ID NO: 644200 - RNA, 22 nt, Human
auacauugaagguaccagagcu

SEQ ID NO: 644201 - RNA, 22 nt, Human
augccuggcucaggccaucagg

SEQ ID NO: 644202 - RNA, 24 nt, Human
auggagcuggggcuugggcuccuc

SEQ ID NO: 644203 - RNA, 21 nt, Human
auuccacccccagcccugcau

SEQ ID NO: 644204 - RNA, 21 nt, Human
caaagggaagaagagccagca

SEQ ID NO: 644205 - RNA, 24 nt, Human
caacaguauccuuaaucugucuga

SEQ ID NO: 644206 - RNA, 26 nt, Human
caacauggucucugagguccagauac

SEQ ID NO: 644207 - RNA, 22 nt, Human
caccccuggcacaacauggucu

SEQ ID NO: 644208 - RNA, 20 nt, Human
cacgcggaccgacgaggcgc

SEQ ID NO: 644209 - RNA, 24 nt, Human
cacuuuggggcaaaguuaaggguc

SEQ ID NO: 644210 - RNA, 26 nt, Human
cagccaggacagacuuaagggcucuc

SEQ ID NO: 644211 - RNA, 20 nt, Human
caugcaggguccagccauug

SEQ ID NO: 644212 - RNA, 18 nt, Human
ccacagccaggacagacu

SEQ ID NO: 644213 - RNA, 25 nt, Human
ccacagccaggacagacuuaagggc

SEQ ID NO: 644214 - RNA, 19 nt, Human
ccccauuccacccccagcc

SEQ ID NO: 644215 - RNA, 21 nt, Human
ccccauuccacccccagcccu

SEQ ID NO: 644216 - RNA, 24 nt, Human
cccccagcccugcaugcagggucc

SEQ ID NO: 644217 - RNA, 22 nt, Human
cccuuuaaaauucaagccugaa

SEQ ID NO: 644218 - RNA, 19 nt, Human
ccuggcacaacauggucuc

SEQ ID NO: 644219 - RNA, 21 nt, Human
ccuggcacaacauggucucug

SEQ ID NO: 644220 - RNA, 21 nt, Human
cgcacgcaccgaccgaccgca

SEQ ID NO: 644221 - RNA, 19 nt, Human
cuuaccuccuggcuuucuc

SEQ ID NO: 644222 - RNA, 19 nt, Human
cuucaguucuguaccauuu

SEQ ID NO: 644223 - RNA, 27 nt, Human
cuuccgaggcuucaguuccuccgcggg

SEQ ID NO: 644224 - RNA, 18 nt, Human
gagcuggggcuugggcuc

SEQ ID NO: 644225 - RNA, 20 nt, Human
gaggauggagcuggggcuug

SEQ ID NO: 644226 - RNA, 18 nt, Human
gcacgcacgcaccgaccg

SEQ ID NO: 644227 - RNA, 24 nt, Human
gccuacugcccccuaaugucuucu

SEQ ID NO: 644228 - RNA, 19 nt, Human
gccugggguugguguggag

SEQ ID NO: 644229 - RNA, 22 nt, Human
gccugggguugguguggagccc

SEQ ID NO: 644230 - RNA, 19 nt, Human
ggcuucaguucuguaccau

SEQ ID NO: 644231 - RNA, 23 nt, Human
guucagggcaacuggcuuuccca

SEQ ID NO: 644232 - RNA, 23 nt, Human
uacaaagggaagaagagccagca

SEQ ID NO: 644233 - RNA, 19 nt, Human
uacacaaauacaaagggaa

SEQ ID NO: 644234 - RNA, 26 nt, Human
uaccagguugagggugcuggucuucu

SEQ ID NO: 644235 - RNA, 24 nt, Human
uacucagaggcucagauggacccu

SEQ ID NO: 644236 - RNA, 22 nt, Human
ucacuuuggggcaaaguuaagg

SEQ ID NO: 644237 - RNA, 19 nt, Human
ucagauggacccuugauuc

SEQ ID NO: 644238 - RNA, 21 nt, Human
uccagauacucugaggguagg

SEQ ID NO: 644239 - RNA, 25 nt, Human
uccccuacaagagggacagggagag

SEQ ID NO: 644240 - RNA, 20 nt, Human
ucugucugaguguuccuccg

SEQ ID NO: 644241 - RNA, 25 nt, Human
ugaaauaauaaacagugacagguca

SEQ ID NO: 644242 - RNA, 21 nt, Human
ugaagguaccagagcuuccag

SEQ ID NO: 644243 - RNA, 21 nt, Human
ugaagguuuugugugggggcc

SEQ ID NO: 644244 - RNA, 19 nt, Human
ugacaggucaacaguaucc

SEQ ID NO: 644245 - RNA, 19 nt, Human
ugaggguaggggcuggcuc

SEQ ID NO: 644246 - RNA, 19 nt, Human
uggagcuggggcuugggcc

SEQ ID NO: 644247 - RNA, 18 nt, Human
uggcacaacauggucucu

SEQ ID NO: 644248 - RNA, 26 nt, Human
ugggaccaccccuggcacaacauggu

SEQ ID NO: 644249 - RNA, 24 nt, Human
ugggggaaacaggcagaauaagug

SEQ ID NO: 644250 - RNA, 21 nt, Human
uguggagccccucacuuuggg

SEQ ID NO: 644251 - RNA, 19 nt, Human
uguguucuuguacauuuug

SEQ ID NO: 644252 - RNA, 21 nt, Human
uucauuuaaggaagagaagau

SEQ ID NO: 644253 - RNA, 19 nt, Human
uucccaaggcauacaagaa

SEQ ID NO: 644254 - RNA, 23 nt, Human
uucuggugauacugcagcacagu

SEQ ID NO: 644255 - RNA, 24 nt, Human
uugauucucccaggagucauacau

SEQ ID NO: 644256 - RNA, 18 nt, Human
uuuuuuuuuuuuuuuuug

SEQ ID NO: 644257 - RNA, 23 nt, Human
uuuuuuuuuuuuuuuuuggaauu

SEQ ID NO: 644258 - RNA, 29 nt, Human
uuuuuuuuuuuuuuuuuuuuuuggaauug

SEQ ID NO: 644259 - RNA, 23 nt, Human
aaaaaaaaaaacagacucaagga

SEQ ID NO: 644260 - RNA, 24 nt, Human
aaaaaaaaaacagacucaaggaaa

SEQ ID NO: 644261 - RNA, 21 nt, Human
aaaaaaaaacagacucaagga

SEQ ID NO: 644262 - RNA, 20 nt, Human
aaaaaaaaccaaaaaaaaaa

SEQ ID NO: 644263 - RNA, 24 nt, Human
aaaaaaacagacucaaggaaaugg

SEQ ID NO: 644264 - RNA, 19 nt, Human
aaaaaaaccaaaaaaaaaa

SEQ ID NO: 644265 - RNA, 23 nt, Human
aaaacaaaaaaaaaaacagacuc

SEQ ID NO: 644266 - RNA, 22 nt, Human
aaaaccaaaaaaaaaacaaaaa

SEQ ID NO: 644267 - RNA, 24 nt, Human
aaacaaaaaaaaaaacagacucaa

SEQ ID NO: 644268 - RNA, 20 nt, Human
aaaccaagaccugaagggga

SEQ ID NO: 644269 - RNA, 22 nt, Human
aaacgucccuucagaacaaacc

SEQ ID NO: 644270 - RNA, 18 nt, Human
aaagcuccuccuuccacc

SEQ ID NO: 644271 - RNA, 23 nt, Human
aagggacacccacacacugaguc

SEQ ID NO: 644272 - RNA, 22 nt, Human
accucagaccaaccuaagccuc

SEQ ID NO: 644273 - RNA, 19 nt, Human
agaccugaaggggaagcag

SEQ ID NO: 644274 - RNA, 23 nt, Human
agccagaggagaaagcuccuccu

SEQ ID NO: 644275 - RNA, 23 nt, Human
agccucuggcuucagucagaucc

SEQ ID NO: 644276 - RNA, 24 nt, Human
aggaggagggaaggggcuaggggc

SEQ ID NO: 644277 - RNA, 22 nt, Human
caaaaaaaaaaacagacucaac

SEQ ID NO: 644278 - RNA, 23 nt, Human
caccaagaaggagagggcagucc

SEQ ID NO: 644279 - RNA, 23 nt, Human
cagaucccaaauaucacugggaa

SEQ ID NO: 644280 - RNA, 19 nt, Human
ccaccgggggagcuugggg

SEQ ID NO: 644281 - RNA, 24 nt, Human
ccacuauggucugauuuuacagag

SEQ ID NO: 644282 - RNA, 24 nt, Human
ccagcugccccuuugucauuuccc

SEQ ID NO: 644283 - RNA, 18 nt, Human
cccaugauuaggaaugga

SEQ ID NO: 644284 - RNA, 22 nt, Human
ccccaggaggagggaaggggcu

SEQ ID NO: 644285 - RNA, 19 nt, Human
ccccaugauuaggaaugga

SEQ ID NO: 644286 - RNA, 20 nt, Human
cccucuucuuuccuuugcug

SEQ ID NO: 644287 - RNA, 30 nt, Human
ccucacacugggccuccguaucacucccuu

SEQ ID NO: 644288 - RNA, 18 nt, Human
ccucugggacucccuggg

SEQ ID NO: 644289 - RNA, 21 nt, Human
ccugcaaucuccucagccucu

SEQ ID NO: 644290 - RNA, 24 nt, Human
ccuucagaacaaaccaagaccuga

SEQ ID NO: 644291 - RNA, 21 nt, Human
ccuugauaggguggaagcgaa

SEQ ID NO: 644292 - RNA, 18 nt, Human
cgggggugggauggggaa

SEQ ID NO: 644293 - RNA, 23 nt, Human
cucaaacucagccagaggagaaa

SEQ ID NO: 644294 - RNA, 29 nt, Human
cucccucuucuuuccuuugcuguugagaa

SEQ ID NO: 644295 - RNA, 22 nt, Human
cucuauuaaccuuugaaucacc

SEQ ID NO: 644296 - RNA, 18 nt, Human
cucugccaaaaaaaaaac

SEQ ID NO: 644297 - RNA, 21 nt, Human
cugggacucccugggcucugg

SEQ ID NO: 644298 - RNA, 19 nt, Human
gaggagggaaggggcuagg

SEQ ID NO: 644299 - RNA, 24 nt, Human
gaggccccaggaggagggaagggg

SEQ ID NO: 644300 - RNA, 21 nt, Human
gccaaccucagaccaaccuaa

SEQ ID NO: 644301 - RNA, 19 nt, Human
gccagcugccccuuuguca

SEQ ID NO: 644302 - RNA, 21 nt, Human
gccccaggaggagggaagggg

SEQ ID NO: 644303 - RNA, 19 nt, Human
gccucugggacucccuggg

SEQ ID NO: 644304 - RNA, 19 nt, Human
gcgaaacucccucuucuuu

SEQ ID NO: 644305 - RNA, 18 nt, Human
gcuuaucuggccagcugc

SEQ ID NO: 644306 - RNA, 21 nt, Human
gggaagcaggaagggacaccc

SEQ ID NO: 644307 - RNA, 19 nt, Human
gggccuccguaucacuccc

SEQ ID NO: 644308 - RNA, 20 nt, Human
ggggcuguggccacccuuuc

SEQ ID NO: 644309 - RNA, 21 nt, Human
ggggugggauggggaaugcag

SEQ ID NO: 644310 - RNA, 22 nt, Human
uagcuggaguacuuugucccuc

SEQ ID NO: 644311 - RNA, 20 nt, Human
uaggaauggacacccugacc

SEQ ID NO: 644312 - RNA, 19 nt, Human
ucacuccccuucuguagcu

SEQ ID NO: 644313 - RNA, 21 nt, Human
ucuccuugauaggguggaagc

SEQ ID NO: 644314 - RNA, 18 nt, Human
ucucugccaaaaaaaaaa

SEQ ID NO: 644315 - RNA, 26 nt, Human
ucugccaaaaaaaaaaccaaaaaaaa

SEQ ID NO: 644316 - RNA, 24 nt, Human
ugaaugcuuguggcaucugcccca

SEQ ID NO: 644317 - RNA, 19 nt, Human
ugacauucuggcuuguuuu

SEQ ID NO: 644318 - RNA, 24 nt, Human
ugacuauaaaacgucccuucagaa

SEQ ID NO: 644319 - RNA, 21 nt, Human
ugaggggcuggaggccccagg

SEQ ID NO: 644320 - RNA, 24 nt, Human
ugccaaaaaaaaaaccaaaaaaaa

SEQ ID NO: 644321 - RNA, 27 nt, Human
ugccaaaaaaaaaaccaaaaaaaaaac

SEQ ID NO: 644322 - RNA, 25 nt, Human
ugccaaccucagaccaaccuaagcc

SEQ ID NO: 644323 - RNA, 21 nt, Human
ugcuuguggcaucugccccau

SEQ ID NO: 644324 - RNA, 21 nt, Human
ugggagacugggggaggagau

SEQ ID NO: 644325 - RNA, 18 nt, Human
uggggcuguggccacccu

SEQ ID NO: 644326 - RNA, 19 nt, Human
ugugaaacuugccucuggg

SEQ ID NO: 644327 - RNA, 19 nt, Human
uuucacacuggcaugugga

SEQ ID NO: 644328 - RNA, 18 nt, Human
uuuuuuuugacauucugg

SEQ ID NO: 644329 - RNA, 21 nt, Human
aagcaagcaccaacagcuuca

SEQ ID NO: 644330 - RNA, 26 nt, Human
aagcaagcaccaacagcuucaaaaca

SEQ ID NO: 644331 - RNA, 20 nt, Human
cucucuccacuuauacuucu

SEQ ID NO: 644332 - RNA, 21 nt, Human
gucacccccuaagguaaauuc

SEQ ID NO: 644333 - RNA, 22 nt, Human
uauggcgauguaaagcaagcac

SEQ ID NO: 644334 - RNA, 24 nt, Human
ucugauguagcacucucuccacuu

SEQ ID NO: 644335 - RNA, 18 nt, Human
uuuuuuuuuuuuuuuuug

SEQ ID NO: 644336 - RNA, 22 nt, Human
uuuuuuuuuuuuuuuuugcaau

SEQ ID NO: 644337 - RNA, 24 nt, Human
uuuuuuuuuuuuuuuuugcaauaa

SEQ ID NO: 644338 - RNA, 24 nt, Human
aaaauacaacgaaagaaugagaua

SEQ ID NO: 644339 - RNA, 19 nt, Human
aaacagaaaaaaguauugg

SEQ ID NO: 644340 - RNA, 23 nt, Human
aagaaaacagaaaaaaguauugg

SEQ ID NO: 644341 - RNA, 23 nt, Human
aauacagcaaacuuuucuaagca

SEQ ID NO: 644342 - RNA, 23 nt, Human
acaccaggaauaaucauauugca

SEQ ID NO: 644343 - RNA, 23 nt, Human
agaaguaaugacaucaucaaaac

SEQ ID NO: 644344 - RNA, 23 nt, Human
auggcaaucaugagaaaggucuu

SEQ ID NO: 644345 - RNA, 19 nt, Human
cacccuaucacuuaagguu

SEQ ID NO: 644346 - RNA, 20 nt, Human
cauagccagcuaaucucaua

SEQ ID NO: 644347 - RNA, 21 nt, Human
caucaagaaaacagaaaaaag

SEQ ID NO: 644348 - RNA, 20 nt, Human
cauuauguuucucauagcca

SEQ ID NO: 644349 - RNA, 22 nt, Human
ccagcuaaucucauagaacacu

SEQ ID NO: 644350 - RNA, 23 nt, Human
ccuugugucacaaagugagagaa

SEQ ID NO: 644351 - RNA, 22 nt, Human
cgaaagaaugagauauacucac

SEQ ID NO: 644352 - RNA, 24 nt, Human
cuugaauaucuuacugacauguuc

SEQ ID NO: 644353 - RNA, 18 nt, Human
gaacacuuaccugauuug

SEQ ID NO: 644354 - RNA, 19 nt, Human
gaaggcuuccuguagucaa

SEQ ID NO: 644355 - RNA, 20 nt, Human
gacaucaucaaaacagucau

SEQ ID NO: 644356 - RNA, 23 nt, Human
gucuauggaaauacagcaaacuu

SEQ ID NO: 644357 - RNA, 19 nt, Human
uaaagaauaaacauauaaa

SEQ ID NO: 644358 - RNA, 23 nt, Human
uaucagaaauaggaaaauuuaga

SEQ ID NO: 644359 - RNA, 24 nt, Human
uaucaucaagaaaacagaaaaaag

SEQ ID NO: 644360 - RNA, 23 nt, Human
uaucaucauuuuaaaauugaaau

SEQ ID NO: 644361 - RNA, 21 nt, Human
uaugacaguaaaaaaaugaga

SEQ ID NO: 644362 - RNA, 19 nt, Human
ucacccuaucacuuaaggu

SEQ ID NO: 644363 - RNA, 20 nt, Human
ucugagaucacugaugcugg

SEQ ID NO: 644364 - RNA, 22 nt, Human
ugaaaaagaaacaucauuaugu

SEQ ID NO: 644365 - RNA, 18 nt, Human
ugaaaagcaguucacuga

SEQ ID NO: 644366 - RNA, 19 nt, Human
ugaaaagcaguucacugau

SEQ ID NO: 644367 - RNA, 23 nt, Human
ugaaaagcaguucacugaucuua

SEQ ID NO: 644368 - RNA, 23 nt, Human
uucuuuaaguguacuaucaaaua

SEQ ID NO: 644369 - RNA, 22 nt, Human
uuugugugguuuacugaauuuu

SEQ ID NO: 644370 - RNA, 23 nt, Human
aaaccacgucuacaaucuccaau

SEQ ID NO: 644371 - RNA, 26 nt, Human
acagcgaagggagcugcuccgggcac

SEQ ID NO: 644372 - RNA, 22 nt, Human
accagcacgggccggagggagg

SEQ ID NO: 644373 - RNA, 18 nt, Human
aggaccacugaaagagau

SEQ ID NO: 644374 - RNA, 22 nt, Human
agggccgcccccaaggccgccg

SEQ ID NO: 644375 - RNA, 22 nt, Human
agucccauuucuucugacucgg

SEQ ID NO: 644376 - RNA, 25 nt, Human
aguuuguuaaauaauuucuugggag

SEQ ID NO: 644377 - RNA, 25 nt, Human
auggagcuagagggugcucuuucau

SEQ ID NO: 644378 - RNA, 22 nt, Human
caaaaucuccuuucaguuuguu

SEQ ID NO: 644379 - RNA, 22 nt, Human
caacaaaacacugugaccaaaa

SEQ ID NO: 644380 - RNA, 24 nt, Human
caacaaaacacugugaccaaaaaa

SEQ ID NO: 644381 - RNA, 23 nt, Human
cagaagccaggcuacguagggcc

SEQ ID NO: 644382 - RNA, 23 nt, Human
cagaagccaggcuacguagggga

SEQ ID NO: 644383 - RNA, 22 nt, Human
cauacuagaaaaccaacuaugu

SEQ ID NO: 644384 - RNA, 23 nt, Human
cgccgcuuccacagcgaagggag

SEQ ID NO: 644385 - RNA, 22 nt, Human
cgggaccagcacgggccggagg

SEQ ID NO: 644386 - RNA, 20 nt, Human
gccgaggcaggaggggccgg

SEQ ID NO: 644387 - RNA, 19 nt, Human
gggccggagggaggggaag

SEQ ID NO: 644388 - RNA, 19 nt, Human
uaaccuacucacauugcca

SEQ ID NO: 644389 - RNA, 18 nt, Human
uaugaacagauauuuaga

SEQ ID NO: 644390 - RNA, 22 nt, Human
uauguugguuuuuguacuauug

SEQ ID NO: 644391 - RNA, 22 nt, Human
ucgaagacaccgccgcuuccac

SEQ ID NO: 644392 - RNA, 20 nt, Human
ugaaacgcaauagcauauaa

SEQ ID NO: 644393 - RNA, 21 nt, Human
ugaaagagauaaguguccuca

SEQ ID NO: 644394 - RNA, 23 nt, Human
ugacucggcaggagcccgggacg

SEQ ID NO: 644395 - RNA, 20 nt, Human
uguacaguguguucaaauau

SEQ ID NO: 644396 - RNA, 18 nt, Human
ugugcugggacaaaguug

SEQ ID NO: 644397 - RNA, 21 nt, Human
uucaaauauagauacugaaga

SEQ ID NO: 644398 - RNA, 21 nt, Human
uugaagaaacauguucugugg

SEQ ID NO: 644399 - RNA, 18 nt, Human
uuucuugggaggaccacu

SEQ ID NO: 644400 - RNA, 23 nt, Human
uuugaagaaacauguucugugcg

SEQ ID NO: 644401 - RNA, 22 nt, Human
uuuguaaaaccacgucuacaau

SEQ ID NO: 644402 - RNA, 27 nt, Human
aaaaaaaauggaaggcggccgguaccc

SEQ ID NO: 644403 - RNA, 18 nt, Human
aaaaagcccauucguaac

SEQ ID NO: 644404 - RNA, 20 nt, Human
aaacaaauuccaggucuaca

SEQ ID NO: 644405 - RNA, 23 nt, Human
aaacauaagccagugaaaacaua

SEQ ID NO: 644406 - RNA, 23 nt, Human
aaauaggcaugauguucuuccac

SEQ ID NO: 644407 - RNA, 22 nt, Human
aaguguuaaaaagcccauucgu

SEQ ID NO: 644408 - RNA, 26 nt, Human
aaugcaggaaaggaguggggagagga

SEQ ID NO: 644409 - RNA, 23 nt, Human
acauaagccagugaaaacauacu

SEQ ID NO: 644410 - RNA, 24 nt, Human
acuauuuuauucauuacaaacauc

SEQ ID NO: 644411 - RNA, 18 nt, Human
acuguaauucaguguuuu

SEQ ID NO: 644412 - RNA, 24 nt, Human
agacgaaaacaaauuccaggucua

SEQ ID NO: 644413 - RNA, 24 nt, Human
aggaaagaguaagguacacaucag

SEQ ID NO: 644414 - RNA, 21 nt, Human
aggaagagagggaggaaagag

SEQ ID NO: 644415 - RNA, 20 nt, Human
aggaagggaggaagagaggg

SEQ ID NO: 644416 - RNA, 21 nt, Human
auaaucacagaaaaagaacau

SEQ ID NO: 644417 - RNA, 22 nt, Human
augcaggaaaggaguggggaga

SEQ ID NO: 644418 - RNA, 21 nt, Human
augugacgagggaaggaggga

SEQ ID NO: 644419 - RNA, 18 nt, Human
caacacucuaaaaguguu

SEQ ID NO: 644420 - RNA, 24 nt, Human
caacacucuaaaaguguuaaaaag

SEQ ID NO: 644421 - RNA, 18 nt, Human
cagaaaaagaacauccaa

SEQ ID NO: 644422 - RNA, 22 nt, Human
cagaaaaagaacauccaacuuu

SEQ ID NO: 644423 - RNA, 18 nt, Human
caucgcccugcccugccu

SEQ ID NO: 644424 - RNA, 25 nt, Human
ccauucguaacacacaccccaccuc

SEQ ID NO: 644425 - RNA, 22 nt, Human
cccaccucaguuuuugaaaguc

SEQ ID NO: 644426 - RNA, 19 nt, Human
cuuguuguuguuuuccccg

SEQ ID NO: 644427 - RNA, 25 nt, Human
gaacauccaacuuuauucuuaaaug

SEQ ID NO: 644428 - RNA, 21 nt, Human
gacgagggaaggagggaggga

SEQ ID NO: 644429 - RNA, 18 nt, Human
gagaggaggaagggagga

SEQ ID NO: 644430 - RNA, 22 nt, Human
gaggaagagagggaggaaagag

SEQ ID NO: 644431 - RNA, 19 nt, Human
gagggaaggagggagggag

SEQ ID NO: 644432 - RNA, 24 nt, Human
gcaacacucuaaaaguguuaaaaa

SEQ ID NO: 644433 - RNA, 20 nt, Human
ggaaaggaguggggagagga

SEQ ID NO: 644434 - RNA, 18 nt, Human
ggaaggagggagggagaa

SEQ ID NO: 644435 - RNA, 18 nt, Human
gggagggagaaaugcagg

SEQ ID NO: 644436 - RNA, 20 nt, Human
guggggagaggaggaaggga

SEQ ID NO: 644437 - RNA, 22 nt, Human
uaaaaggggcagaauuaggaau

SEQ ID NO: 644438 - RNA, 22 nt, Human
uaagguacacaucagguuaaaa

SEQ ID NO: 644439 - RNA, 22 nt, Human
uaaucacagaaaaagaacaucc

SEQ ID NO: 644440 - RNA, 24 nt, Human
uaaugaaacuacuauuuuauucau

SEQ ID NO: 644441 - RNA, 26 nt, Human
uaauuacugugcuccauauaaagaga

SEQ ID NO: 644442 - RNA, 22 nt, Human
uaggaauaaaacuaagcacuua

SEQ ID NO: 644443 - RNA, 23 nt, Human
uaggaauaaaacuaagcacuuaa

SEQ ID NO: 644444 - RNA, 26 nt, Human
uauaaaaauuuaaaugcuuccuuucu

SEQ ID NO: 644445 - RNA, 19 nt, Human
ucaaguuguagccaaaaca

SEQ ID NO: 644446 - RNA, 21 nt, Human
ucaaucaaguuguagccaaaa

SEQ ID NO: 644447 - RNA, 21 nt, Human
uccuuguuguuguuuuccccg

SEQ ID NO: 644448 - RNA, 21 nt, Human
ucuaaagcaacacucuaaaag

SEQ ID NO: 644449 - RNA, 21 nt, Human
ucuaaucugaucaggaagaaa

SEQ ID NO: 644450 - RNA, 24 nt, Human
ugaaaacauaagccagugaaaaca

SEQ ID NO: 644451 - RNA, 24 nt, Human
ugacgagggaaggagggagggaga

SEQ ID NO: 644452 - RNA, 18 nt, Human
ugcauuaaaaagucauca

SEQ ID NO: 644453 - RNA, 25 nt, Human
ugccaaauaaugaaacuacuauuuu

SEQ ID NO: 644454 - RNA, 19 nt, Human
uguagccaaaacaaaaagg

SEQ ID NO: 644455 - RNA, 21 nt, Human
uguuguuguccuuguuguugu

SEQ ID NO: 644456 - RNA, 21 nt, Human
uguuuucuaaugauaaucuua

SEQ ID NO: 644457 - RNA, 21 nt, Human
uuccacagcuaagaguucuga

SEQ ID NO: 644458 - RNA, 24 nt, Human
uuccacagcuaagaguucugaguc

SEQ ID NO: 644459 - RNA, 24 nt, Human
uuuuuuuuuuuuaauagaauuuca

SEQ ID NO: 644460 - RNA, 23 nt, Human
uuuuuuuuuuuuuuuuuuaauag

SEQ ID NO: 644461 - RNA, 20 nt, Human
acacugauguuuaaugaagu

SEQ ID NO: 644462 - RNA, 18 nt, Human
acuguauucaucaaauug

SEQ ID NO: 644463 - RNA, 18 nt, Human
caaauuauuucaccuccu

SEQ ID NO: 644464 - RNA, 21 nt, Human
caacaggcagcaccauguuua

SEQ ID NO: 644465 - RNA, 23 nt, Human
cacacaucugucaacaggcagca

SEQ ID NO: 644466 - RNA, 23 nt, Human
ccaauuggcuagaaacacacuga

SEQ ID NO: 644467 - RNA, 18 nt, Human
gcacuaccuuauuuacug

SEQ ID NO: 644468 - RNA, 18 nt, Human
uaaaagaccaccaaaggc

SEQ ID NO: 644469 - RNA, 25 nt, Human
uaaaagaccaccaaaggcuggagac

SEQ ID NO: 644470 - RNA, 22 nt, Human
ugacagugaagccuuuuccaca

SEQ ID NO: 644471 - RNA, 21 nt, Human
uuugacagugaagccuuuucc

SEQ ID NO: 644472 - RNA, 20 nt, Human
uuuuuuuuuuuccacauuaa

SEQ ID NO: 644473 - RNA, 20 nt, Human
uuuuuuuuuuuuuuuuccac

SEQ ID NO: 644474 - RNA, 18 nt, Human
aaaggaaggggggaaaag

SEQ ID NO: 644475 - RNA, 22 nt, Human
aagccaagaaaaagaccuauaa

SEQ ID NO: 644476 - RNA, 19 nt, Human
aagggacacaaagccucag

SEQ ID NO: 644477 - RNA, 26 nt, Human
acaaagccucagagaaaccgggacgu

SEQ ID NO: 644478 - RNA, 21 nt, Human
acacaaagccucagagaaacc

SEQ ID NO: 644479 - RNA, 22 nt, Human
acacaaagccucagagaaacca

SEQ ID NO: 644480 - RNA, 21 nt, Human
acagucaugaauacauaaaca

SEQ ID NO: 644481 - RNA, 23 nt, Human
accacacagucaugaauacauaa

SEQ ID NO: 644482 - RNA, 22 nt, Human
agacagacaggaguccccaagg

SEQ ID NO: 644483 - RNA, 22 nt, Human
agccaagaaaaagaccuauaag

SEQ ID NO: 644484 - RNA, 22 nt, Human
agugcagugggagucucauugg

SEQ ID NO: 644485 - RNA, 25 nt, Human
auaaaacaccauccauauggcacca

SEQ ID NO: 644486 - RNA, 18 nt, Human
augcagcuuuggacaagg

SEQ ID NO: 644487 - RNA, 21 nt, Human
caaccuccucuugaagccaag

SEQ ID NO: 644488 - RNA, 18 nt, Human
caagaaaaagaccuauaa

SEQ ID NO: 644489 - RNA, 22 nt, Human
caagaaaaagaccuauaacaau

SEQ ID NO: 644490 - RNA, 23 nt, Human
cacaaagccucagagaaaccaua

SEQ ID NO: 644491 - RNA, 28 nt, Human
cacacagucaugaauacauaaacaccac

SEQ ID NO: 644492 - RNA, 19 nt, Human
cacagcagcgagccucagc

SEQ ID NO: 644493 - RNA, 24 nt, Human
cacuugaaccacaaaaugggcccu

SEQ ID NO: 644494 - RNA, 19 nt, Human
cagcucaggggaaacaggg

SEQ ID NO: 644495 - RNA, 20 nt, Human
cagcuuuggacaagggacac

SEQ ID NO: 644496 - RNA, 20 nt, Human
caggagagccgaccauggca

SEQ ID NO: 644497 - RNA, 19 nt, Human
caggccuuguuuguaaugg

SEQ ID NO: 644498 - RNA, 23 nt, Human
cagugagaagugguguuaccauc

SEQ ID NO: 644499 - RNA, 18 nt, Human
cauggcaagcgcuucgcc

SEQ ID NO: 644500 - RNA, 20 nt, Human
ccacaaaaugggcccucacu

SEQ ID NO: 644501 - RNA, 24 nt, Human
ccagcagacuccucaaccuccucu

SEQ ID NO: 644502 - RNA, 18 nt, Human
ccaggagagccgaccaug

SEQ ID NO: 644503 - RNA, 20 nt, Human
ccaggccucagacuguucuc

SEQ ID NO: 644504 - RNA, 21 nt, Human
ccagugggucucugguccucc

SEQ ID NO: 644505 - RNA, 21 nt, Human
cccauaagugaaacaaaaugg

SEQ ID NO: 644506 - RNA, 18 nt, Human
ccccagauacuuccaagu

SEQ ID NO: 644507 - RNA, 18 nt, Human
ccccagcagcugucuagu

SEQ ID NO: 644508 - RNA, 23 nt, Human
cccucacuucuuuccuaacccag

SEQ ID NO: 644509 - RNA, 23 nt, Human
ccucaaccuccucuugaagccaa

SEQ ID NO: 644510 - RNA, 21 nt, Human
cucaggggaaacagggggaaa

SEQ ID NO: 644511 - RNA, 19 nt, Human
cuccucaaccuccucuuga

SEQ ID NO: 644512 - RNA, 23 nt, Human
cugcaguaggacuuaccugggcu

SEQ ID NO: 644513 - RNA, 27 nt, Human
cuuccuguuccugagagcagaagcugg

SEQ ID NO: 644514 - RNA, 20 nt, Human
gaaccacaaaaugggcccuc

SEQ ID NO: 644515 - RNA, 18 nt, Human
gagaaaccauaaaacacc

SEQ ID NO: 644516 - RNA, 19 nt, Human
gagccgaccauggcaagcg

SEQ ID NO: 644517 - RNA, 25 nt, Human
gcacaaccucaaguggaacccagag

SEQ ID NO: 644518 - RNA, 21 nt, Human
gccagaauuuguuaaggaagc

SEQ ID NO: 644519 - RNA, 25 nt, Human
ggaaacagggggaaaccaggagagc

SEQ ID NO: 644520 - RNA, 18 nt, Human
ggacaagggacacaaagc

SEQ ID NO: 644521 - RNA, 18 nt, Human
gugaaacaaaauggcacu

SEQ ID NO: 644522 - RNA, 18 nt, Human
gugcagugggagucucau

SEQ ID NO: 644523 - RNA, 19 nt, Human
uaaaacaccauccauaugg

SEQ ID NO: 644524 - RNA, 25 nt, Human
uaacagacagacaggaguccccaag

SEQ ID NO: 644525 - RNA, 18 nt, Human
uaacccagcuccaucuug

SEQ ID NO: 644526 - RNA, 25 nt, Human
uaauaaagacugagcucugcuacac

SEQ ID NO: 644527 - RNA, 18 nt, Human
ucaaguggaacccagagg

SEQ ID NO: 644528 - RNA, 26 nt, Human
ucacagauucucugcuggucucuaag

SEQ ID NO: 644529 - RNA, 21 nt, Human
ucacugaucaauuuguuaugc

SEQ ID NO: 644530 - RNA, 23 nt, Human
ucccaaaacuggauuuaaaaaaa

SEQ ID NO: 644531 - RNA, 26 nt, Human
ucccacagcugauugcagacauugcc

SEQ ID NO: 644532 - RNA, 24 nt, Human
uccucuugaagccaagaaaaagac

SEQ ID NO: 644533 - RNA, 24 nt, Human
ucgcaccccagauacuuccaagug

SEQ ID NO: 644534 - RNA, 22 nt, Human
ucuauggcugaaacaauuuauc

SEQ ID NO: 644535 - RNA, 22 nt, Human
ucucucacagauucucugcugg

SEQ ID NO: 644536 - RNA, 22 nt, Human
ugagagcagaagccaguggguc

SEQ ID NO: 644537 - RNA, 18 nt, Human
ugagugcagugggagucu

SEQ ID NO: 644538 - RNA, 21 nt, Human
ugagugcagugggagucucau

SEQ ID NO: 644539 - RNA, 22 nt, Human
ugagugcagugggagucucauu

SEQ ID NO: 644540 - RNA, 18 nt, Human
ugauugcagacauugccu

SEQ ID NO: 644541 - RNA, 22 nt, Human
ugccugugcuuccuaccccagc

SEQ ID NO: 644542 - RNA, 19 nt, Human
ugcuacacagcagcgagcc

SEQ ID NO: 644543 - RNA, 19 nt, Human
ugcuuccuaccccagcagc

SEQ ID NO: 644544 - RNA, 20 nt, Human
uggauuuaaaaaaaaaaaaa

SEQ ID NO: 644545 - RNA, 20 nt, Human
uggcaagcgcuucgccugag

SEQ ID NO: 644546 - RNA, 21 nt, Human
uggcaagcgcuucgccugagu

SEQ ID NO: 644547 - RNA, 21 nt, Human
ugggucucugguccuccuugg

SEQ ID NO: 644548 - RNA, 23 nt, Human
uuaaaggaaggggggaaaaggaa

SEQ ID NO: 644549 - RNA, 18 nt, Human
uuauuucagggacacuca

SEQ ID NO: 644550 - RNA, 22 nt, Human
uugaaauuucauucaaaauuuu

SEQ ID NO: 644551 - RNA, 18 nt, Human
uuuaaaggaaggggggaa

SEQ ID NO: 644552 - RNA, 18 nt, Human
uuuaagaguaccuggacc

SEQ ID NO: 644553 - RNA, 18 nt, Human
uuuuuuuuuuuuuuuccg

SEQ ID NO: 644554 - RNA, 23 nt, Human
uuuuuuuuuuuuuuuuuccguuu

SEQ ID NO: 644555 - RNA, 23 nt, Human
accacaugcagaugcuccuggca

SEQ ID NO: 644556 - RNA, 20 nt, Human
auauaagaaauaucaacuga

SEQ ID NO: 644557 - RNA, 21 nt, Human
augugccacaaguccaugugu

SEQ ID NO: 644558 - RNA, 27 nt, Human
caagccgagcaccucucggccagcgcc

SEQ ID NO: 644559 - RNA, 23 nt, Human
cacccggaacagauuuuuuccuc

SEQ ID NO: 644560 - RNA, 20 nt, Human
cagaaaaugccguuaacuua

SEQ ID NO: 644561 - RNA, 23 nt, Human
cagauuacaccauuuucacuguc

SEQ ID NO: 644562 - RNA, 22 nt, Human
cagcccaggacaagcagagagc

SEQ ID NO: 644563 - RNA, 21 nt, Human
caggacaagcagagagcaaac

SEQ ID NO: 644564 - RNA, 22 nt, Human
caggacaagcagagagcaaacc

SEQ ID NO: 644565 - RNA, 20 nt, Human
caguguggucccuggugucu

SEQ ID NO: 644566 - RNA, 19 nt, Human
cauggcacuagggcaccuu

SEQ ID NO: 644567 - RNA, 23 nt, Human
caugugccacaaguccaugugug

SEQ ID NO: 644568 - RNA, 20 nt, Human
ccuuugagggggaggaagag

SEQ ID NO: 644569 - RNA, 24 nt, Human
cgucauggacaccucagcccagga

SEQ ID NO: 644570 - RNA, 22 nt, Human
cuuugagggggaggaagaggug

SEQ ID NO: 644571 - RNA, 20 nt, Human
gaggaaaagaacaucuuaac

SEQ ID NO: 644572 - RNA, 20 nt, Human
gaggaagaggugguaaagaa

SEQ ID NO: 644573 - RNA, 20 nt, Human
gccagcgcccucgccaggac

SEQ ID NO: 644574 - RNA, 21 nt, Human
gcuggagugcgggaccugcua

SEQ ID NO: 644575 - RNA, 20 nt, Human
ggaaaagagaaguaccacau

SEQ ID NO: 644576 - RNA, 23 nt, Human
ggaugaaauguuuuuccuuugag

SEQ ID NO: 644577 - RNA, 19 nt, Human
gggaacuguaucugcaggu

SEQ ID NO: 644578 - RNA, 18 nt, Human
ggggaggaagagguggua

SEQ ID NO: 644579 - RNA, 21 nt, Human
gggggaacuguaucugcaggu

SEQ ID NO: 644580 - RNA, 19 nt, Human
uagggcaccuuugaggaaa

SEQ ID NO: 644581 - RNA, 24 nt, Human
ucugugcgcacauuuccaugugcc

SEQ ID NO: 644582 - RNA, 20 nt, Human
ugagggggaggaagaggugg

SEQ ID NO: 644583 - RNA, 21 nt, Human
ugagggggaggaagagguggu

SEQ ID NO: 644584 - RNA, 22 nt, Human
uggcagcgagaggcuggagugc

SEQ ID NO: 644585 - RNA, 21 nt, Human
uggucugaaacccaaccucag

SEQ ID NO: 644586 - RNA, 19 nt, Human
ugugccacaaguccaugug

SEQ ID NO: 644587 - RNA, 23 nt, Human
uuuggcaaggaagaaugccuucc

SEQ ID NO: 644588 - RNA, 20 nt, Human
acugaaauauuuauuucuga

SEQ ID NO: 644589 - RNA, 18 nt, Human
cucaaaauaggaauaaga

SEQ ID NO: 644590 - RNA, 24 nt, Human
uuuaggccaaguuuuacaauucac

SEQ ID NO: 644591 - RNA, 25 nt, Human
uuucugagaaacaacucaaauaauu

SEQ ID NO: 644592 - RNA, 24 nt, Human
uuuuuuuuuuuuuucacauguuuu

SEQ ID NO: 644593 - RNA, 24 nt, Human
uuuuuuuuuuuuuuuucacaugau

SEQ ID NO: 644594 - RNA, 20 nt, Human
uuuuuuuuuuuuuuuuucac

SEQ ID NO: 644595 - RNA, 21 nt, Human
uuuuuuuuuuuuuuuuucaca

SEQ ID NO: 644596 - RNA, 22 nt, Human
aacaacacagacacuggugccu

SEQ ID NO: 644597 - RNA, 27 nt, Human
aacacagacacuggugccugaaagccc

SEQ ID NO: 644598 - RNA, 25 nt, Human
aagcauuuuaguaaggucugagauc

SEQ ID NO: 644599 - RNA, 22 nt, Human
accucaugauccauucacuccc

SEQ ID NO: 644600 - RNA, 23 nt, Human
accuccuugcccuacccccacug

SEQ ID NO: 644601 - RNA, 19 nt, Human
accugugagguaccuccuu

SEQ ID NO: 644602 - RNA, 22 nt, Human
agaaaacagucccuuugugcca

SEQ ID NO: 644603 - RNA, 24 nt, Human
agaaagcauuuuaguaaggucugg

SEQ ID NO: 644604 - RNA, 25 nt, Human
agaagagaguggguaagugaauggc

SEQ ID NO: 644605 - RNA, 22 nt, Human
agaaggcuugagggggcucugg

SEQ ID NO: 644606 - RNA, 22 nt, Human
agaauucuggcugccucuacuu

SEQ ID NO: 644607 - RNA, 25 nt, Human
agacuggagcccaacagauuaaggc

SEQ ID NO: 644608 - RNA, 22 nt, Human
agagauccaguugcucuaccuu

SEQ ID NO: 644609 - RNA, 18 nt, Human
agaguaagaaaacagucc

SEQ ID NO: 644610 - RNA, 21 nt, Human
agcuccagggucuugagcagc

SEQ ID NO: 644611 - RNA, 18 nt, Human
aggcagaauucuccuugc

SEQ ID NO: 644612 - RNA, 21 nt, Human
aggccucaagccuagcagcuc

SEQ ID NO: 644613 - RNA, 21 nt, Human
agggaccacacacucuaccuu

SEQ ID NO: 644614 - RNA, 20 nt, Human
aggucugcgggaagggggug

SEQ ID NO: 644615 - RNA, 22 nt, Human
aucuacaggaggaagccccagc

SEQ ID NO: 644616 - RNA, 19 nt, Human
auggggccaucccaccuca

SEQ ID NO: 644617 - RNA, 20 nt, Human
auuuuaguaaggucugagau

SEQ ID NO: 644618 - RNA, 21 nt, Human
caacaaggaggccugucccuu

SEQ ID NO: 644619 - RNA, 19 nt, Human
caacacagacacuggugcc

SEQ ID NO: 644620 - RNA, 23 nt, Human
cacagcuaagcccaggagcuucc

SEQ ID NO: 644621 - RNA, 21 nt, Human
cacccuggccaaguacagcuc

SEQ ID NO: 644622 - RNA, 24 nt, Human
caccucaugauccauucacuccca

SEQ ID NO: 644623 - RNA, 24 nt, Human
cacucagacuaagaguaagaaaac

SEQ ID NO: 644624 - RNA, 20 nt, Human
cagaaacucaucauggggca

SEQ ID NO: 644625 - RNA, 21 nt, Human
cagaaacuccagagggggccu

SEQ ID NO: 644626 - RNA, 21 nt, Human
cagcucagccuuuaagccucc

SEQ ID NO: 644627 - RNA, 21 nt, Human
caggcuccugacaugaccccc

SEQ ID NO: 644628 - RNA, 18 nt, Human
caucauaaacaauggagc

SEQ ID NO: 644629 - RNA, 20 nt, Human
caugacccccugaaagcccc

SEQ ID NO: 644630 - RNA, 21 nt, Human
cccacagcuaagcccaggagc

SEQ ID NO: 644631 - RNA, 21 nt, Human
cccaccucaugauccauucac

SEQ ID NO: 644632 - RNA, 21 nt, Human
cccacugaggccucaggcccc

SEQ ID NO: 644633 - RNA, 23 nt, Human
cccccugucggcugcugccccug

SEQ ID NO: 644634 - RNA, 27 nt, Human
ccccugaaagccccugcagcucagccu

SEQ ID NO: 644635 - RNA, 19 nt, Human
cccugcugcugccagggag

SEQ ID NO: 644636 - RNA, 21 nt, Human
cccugcugcugccagggaguc

SEQ ID NO: 644637 - RNA, 19 nt, Human
ccucaugauccauucacuc

SEQ ID NO: 644638 - RNA, 20 nt, Human
ccucugaggucuucgaagcc

SEQ ID NO: 644639 - RNA, 22 nt, Human
ccucugaguucuaacaacacag

SEQ ID NO: 644640 - RNA, 22 nt, Human
ccugccucuuccucugaguucu

SEQ ID NO: 644641 - RNA, 21 nt, Human
cucaugauccauucacuccca

SEQ ID NO: 644642 - RNA, 21 nt, Human
cuccugacaugacccccugaa

SEQ ID NO: 644643 - RNA, 20 nt, Human
cugaaagccccugcagcuca

SEQ ID NO: 644644 - RNA, 18 nt, Human
cugaaagcccugcugcug

SEQ ID NO: 644645 - RNA, 21 nt, Human
cugaaagcccugcugcugcca

SEQ ID NO: 644646 - RNA, 23 nt, Human
gaauggccagaaacuccagaggg

SEQ ID NO: 644647 - RNA, 20 nt, Human
gacuaagaguaagaaaacag

SEQ ID NO: 644648 - RNA, 19 nt, Human
gagaaagugaaggagccuc

SEQ ID NO: 644649 - RNA, 19 nt, Human
gagacagcaaggggugugg

SEQ ID NO: 644650 - RNA, 19 nt, Human
gagcagccgugagagacac

SEQ ID NO: 644651 - RNA, 19 nt, Human
gccaauacuuccaacucug

SEQ ID NO: 644652 - RNA, 21 nt, Human
gccagaaacuccagagggggc

SEQ ID NO: 644653 - RNA, 21 nt, Human
gccugaaagcccugcugcugc

SEQ ID NO: 644654 - RNA, 21 nt, Human
gcuccugacaugacccccuga

SEQ ID NO: 644655 - RNA, 20 nt, Human
ggccagaaacucaucauggg

SEQ ID NO: 644656 - RNA, 22 nt, Human
ggccagaaacuccagagggggc

SEQ ID NO: 644657 - RNA, 21 nt, Human
ggcccagaaagcauuuuagua

SEQ ID NO: 644658 - RNA, 19 nt, Human
ggcucugggugacacaaca

SEQ ID NO: 644659 - RNA, 26 nt, Human
ggcugcugccccugccucuuccucug

SEQ ID NO: 644660 - RNA, 18 nt, Human
gggaguacccccaacccc

SEQ ID NO: 644661 - RNA, 22 nt, Human
gggcuaggauggagcagccgug

SEQ ID NO: 644662 - RNA, 18 nt, Human
gucccuuugacacccugg

SEQ ID NO: 644663 - RNA, 19 nt, Human
gugccugaaagcccugcug

SEQ ID NO: 644664 - RNA, 22 nt, Human
uaaaagagcuuucccggcacga

SEQ ID NO: 644665 - RNA, 21 nt, Human
uaagaaaacagucccuuugug

SEQ ID NO: 644666 - RNA, 21 nt, Human
uaagugaauggccagaaacuc

SEQ ID NO: 644667 - RNA, 24 nt, Human
uaggcuagggagccagcuacagcc

SEQ ID NO: 644668 - RNA, 21 nt, Human
uaugaauuuccuccuucccuc

SEQ ID NO: 644669 - RNA, 20 nt, Human
uccaucauaaacaauggagc

SEQ ID NO: 644670 - RNA, 26 nt, Human
uccaucauaaacaauggagcgggggu

SEQ ID NO: 644671 - RNA, 19 nt, Human
ucccacagcuaagcccagg

SEQ ID NO: 644672 - RNA, 21 nt, Human
ucuccuugcucuggaggcagg

SEQ ID NO: 644673 - RNA, 22 nt, Human
ucuuuuauuugaaaacugcugg

SEQ ID NO: 644674 - RNA, 21 nt, Human
ugaaagccccugcagcucagc

SEQ ID NO: 644675 - RNA, 18 nt, Human
ugaaggagccucagaugg

SEQ ID NO: 644676 - RNA, 18 nt, Human
ugaaggugagauccuuga

SEQ ID NO: 644677 - RNA, 22 nt, Human
ugaagucuagcugccccucaug

SEQ ID NO: 644678 - RNA, 21 nt, Human
ugacacaacagucaaggccuc

SEQ ID NO: 644679 - RNA, 20 nt, Human
ugacccccugaaagccccuu

SEQ ID NO: 644680 - RNA, 25 nt, Human
ugagacagcaagggguguggccugg

SEQ ID NO: 644681 - RNA, 25 nt, Human
ugagagacaccuagccaaauguccg

SEQ ID NO: 644682 - RNA, 18 nt, Human
ugaggguacuuggcuucc

SEQ ID NO: 644683 - RNA, 21 nt, Human
ugaggucuucgaagccucagc

SEQ ID NO: 644684 - RNA, 21 nt, Human
ugccggugaggguacuuggcu

SEQ ID NO: 644685 - RNA, 20 nt, Human
ugcugcugccagggagucag

SEQ ID NO: 644686 - RNA, 22 nt, Human
uggccaauacuuccaacucugc

SEQ ID NO: 644687 - RNA, 22 nt, Human
uggccagaaacuccagaggggg

SEQ ID NO: 644688 - RNA, 22 nt, Human
uggccaggcuccugacaugacc

SEQ ID NO: 644689 - RNA, 18 nt, Human
uggccuggccaggcuccu

SEQ ID NO: 644690 - RNA, 21 nt, Human
uggggccaucccaccucauga

SEQ ID NO: 644691 - RNA, 19 nt, Human
uggguaagugaauggccag

SEQ ID NO: 644692 - RNA, 19 nt, Human
ugugggggcuaggauggag

SEQ ID NO: 644693 - RNA, 22 nt, Human
uuaguaaggucugagaucagaa

SEQ ID NO: 644694 - RNA, 21 nt, Human
uucaugugagcuuuguccuug

SEQ ID NO: 644695 - RNA, 23 nt, Human
uugugggggcuaggauggagcag

SEQ ID NO: 644696 - RNA, 20 nt, Human
acacagagggacucacugga

SEQ ID NO: 644697 - RNA, 21 nt, Human
acccaauuaaaguuuauuacu

SEQ ID NO: 644698 - RNA, 21 nt, Human
acucacuggaaguugcaguuc

SEQ ID NO: 644699 - RNA, 20 nt, Human
agaaaaauaguccaggugau

SEQ ID NO: 644700 - RNA, 18 nt, Human
aggcaggagcgaaugagg

SEQ ID NO: 644701 - RNA, 21 nt, Human
aggcaggagcgaaugagggcc

SEQ ID NO: 644702 - RNA, 18 nt, Human
augugcagggguggggca

SEQ ID NO: 644703 - RNA, 18 nt, Human
caagugaaagggaaaauc

SEQ ID NO: 644704 - RNA, 21 nt, Human
cacacagagggacucacugga

SEQ ID NO: 644705 - RNA, 18 nt, Human
cagggguggggcagggag

SEQ ID NO: 644706 - RNA, 18 nt, Human
cauuuagggucccaggau

SEQ ID NO: 644707 - RNA, 27 nt, Human
gugcagggguggggcagggaggucauu

SEQ ID NO: 644708 - RNA, 19 nt, Human
uaggaugggggaaaccgca

SEQ ID NO: 644709 - RNA, 23 nt, Human
uauaaaaccaucagaucucguga

SEQ ID NO: 644710 - RNA, 20 nt, Human
uauuuccaguuucuugguug

SEQ ID NO: 644711 - RNA, 20 nt, Human
ucagaaaaauaguccaggug

SEQ ID NO: 644712 - RNA, 19 nt, Human
ugagacuuacucacuacca

SEQ ID NO: 644713 - RNA, 20 nt, Human
uggggcagggaggucauuua

SEQ ID NO: 644714 - RNA, 19 nt, Human
uucuugguugcauaguccc

SEQ ID NO: 644715 - RNA, 24 nt, Human
uuuguuuuuauuuccaguuucuug

SEQ ID NO: 644716 - RNA, 26 nt, Human
acagagcuucaagggaaggggaacgc

SEQ ID NO: 644717 - RNA, 21 nt, Human
acaggcugaagccccucacgc

SEQ ID NO: 644718 - RNA, 21 nt, Human
agaacccgucuugcucugccu

SEQ ID NO: 644719 - RNA, 18 nt, Human
agacaggccuggugggga

SEQ ID NO: 644720 - RNA, 21 nt, Human
agggccaacggaacaggcucu

SEQ ID NO: 644721 - RNA, 21 nt, Human
auuuugggggaagcccugggg

SEQ ID NO: 644722 - RNA, 21 nt, Human
caaccccgggacaggcugaag

SEQ ID NO: 644723 - RNA, 24 nt, Human
caacggaacaggcucugggaccuc

SEQ ID NO: 644724 - RNA, 19 nt, Human
caccccaccugggcagagc

SEQ ID NO: 644725 - RNA, 19 nt, Human
caccccccccugccagggu

SEQ ID NO: 644726 - RNA, 24 nt, Human
caccccccccugccaggguccaca

SEQ ID NO: 644727 - RNA, 24 nt, Human
caccugggcagagccagugggaac

SEQ ID NO: 644728 - RNA, 20 nt, Human
cagaauuuugggggaagccc

SEQ ID NO: 644729 - RNA, 19 nt, Human
cagcagcagcaagggcagc

SEQ ID NO: 644730 - RNA, 22 nt, Human
cagcagcagcaagggcagcacc

SEQ ID NO: 644731 - RNA, 22 nt, Human
cagccucguaacgguaaccccu

SEQ ID NO: 644732 - RNA, 22 nt, Human
caggggccuggcaccccccccu

SEQ ID NO: 644733 - RNA, 20 nt, Human
caggggugagaacccgucuu

SEQ ID NO: 644734 - RNA, 22 nt, Human
caggguccacacgcaggguugu

SEQ ID NO: 644735 - RNA, 19 nt, Human
cagguccagcucuguuucc

SEQ ID NO: 644736 - RNA, 19 nt, Human
ccaccccaccccaccuggg

SEQ ID NO: 644737 - RNA, 19 nt, Human
ccaccccugcagguccagc

SEQ ID NO: 644738 - RNA, 26 nt, Human
ccagcucuguuucccaccuuuugcca

SEQ ID NO: 644739 - RNA, 19 nt, Human
cccagaggcacccaacugg

SEQ ID NO: 644740 - RNA, 21 nt, Human
ccccccccugccaggguccac

SEQ ID NO: 644741 - RNA, 22 nt, Human
ccccugcuuuccaggggccugg

SEQ ID NO: 644742 - RNA, 18 nt, Human
ccccugggaguccugguc

SEQ ID NO: 644743 - RNA, 21 nt, Human
ccuccagaagucaggggugag

SEQ ID NO: 644744 - RNA, 24 nt, Human
ccuccagaagucaggggugagaac

SEQ ID NO: 644745 - RNA, 20 nt, Human
ccuggcaccccccccugcca

SEQ ID NO: 644746 - RNA, 22 nt, Human
ccugugggccucggcccagggc

SEQ ID NO: 644747 - RNA, 22 nt, Human
cgaccagcagcagcaagggcag

SEQ ID NO: 644748 - RNA, 22 nt, Human
cggcccagggccaacggaacag

SEQ ID NO: 644749 - RNA, 24 nt, Human
cgggaccaccccugcagguccagc

SEQ ID NO: 644750 - RNA, 18 nt, Human
cucugccucaggcaaccc

SEQ ID NO: 644751 - RNA, 21 nt, Human
cucugccucaggcaaccccgg

SEQ ID NO: 644752 - RNA, 18 nt, Human
cugcagcucacucagaau

SEQ ID NO: 644753 - RNA, 18 nt, Human
cuguuucccaccuuuugc

SEQ ID NO: 644754 - RNA, 20 nt, Human
cuucguacuuggcuugcccc

SEQ ID NO: 644755 - RNA, 21 nt, Human
cuuuccaggggccuggcaccc

SEQ ID NO: 644756 - RNA, 18 nt, Human
gaagccccucacgcacuu

SEQ ID NO: 644757 - RNA, 19 nt, Human
gaccuggcugggggaugau

SEQ ID NO: 644758 - RNA, 20 nt, Human
gcaaccccgggacaggcuga

SEQ ID NO: 644759 - RNA, 18 nt, Human
gcaccccccccugccagg

SEQ ID NO: 644760 - RNA, 18 nt, Human
gccaggguccacacgcag

SEQ ID NO: 644761 - RNA, 21 nt, Human
gcccccugggaguccuggucc

SEQ ID NO: 644762 - RNA, 21 nt, Human
gccugguggggaccuggcugg

SEQ ID NO: 644763 - RNA, 18 nt, Human
gcggcugcggguccuggc

SEQ ID NO: 644764 - RNA, 22 nt, Human
ggcagcaccugugggccucggc

SEQ ID NO: 644765 - RNA, 21 nt, Human
ggccugguggggaccuggcug

SEQ ID NO: 644766 - RNA, 24 nt, Human
gggucccagcacacccugcagcuc

SEQ ID NO: 644767 - RNA, 21 nt, Human
guccagcucuguuucccaccu

SEQ ID NO: 644768 - RNA, 25 nt, Human
uccacacgcaggguuguggcgggac

SEQ ID NO: 644769 - RNA, 22 nt, Human
uccaggggccuggcaccccccc

SEQ ID NO: 644770 - RNA, 24 nt, Human
ugccccggaccacagccucguaac

SEQ ID NO: 644771 - RNA, 21 nt, Human
uggcuaguccuagcuccuacu

SEQ ID NO: 644772 - RNA, 22 nt, Human
ugggaacccagaggcacccaac

SEQ ID NO: 644773 - RNA, 18 nt, Human
ugggagacaggccuggug

SEQ ID NO: 644774 - RNA, 19 nt, Human
ugggcagagccagugggaa

SEQ ID NO: 644775 - RNA, 21 nt, Human
ugggccucggcccagggccaa

SEQ ID NO: 644776 - RNA, 23 nt, Human
uggggcaugugguucugcuguca

SEQ ID NO: 644777 - RNA, 25 nt, Human
ugggggaagcccuggggucuugggg

SEQ ID NO: 644778 - RNA, 23 nt, Human
ugguggggaccuggcugggggau

SEQ ID NO: 644779 - RNA, 19 nt, Human
uuucccaccuuuugcacag

SEQ ID NO: 644780 - RNA, 21 nt, Human
uuuuuuuuuuuuaggaggggu

SEQ ID NO: 644781 - RNA, 23 nt, Human
uuuuuuuuuuuuuuuuaggaggg

SEQ ID NO: 644782 - RNA, 23 nt, Human
uuuuuuuuuuuuuuuuuuuuagg

SEQ ID NO: 644783 - RNA, 24 nt, Human
aaaaaaacaaacaaaaaacacugg

SEQ ID NO: 644784 - RNA, 27 nt, Human
aaaaaacaaacaaaaaacacuggccca

SEQ ID NO: 644785 - RNA, 22 nt, Human
aaaaauucuuuuuauagcuguc

SEQ ID NO: 644786 - RNA, 24 nt, Human
aaaacaaacaaaaaacacuggccc

SEQ ID NO: 644787 - RNA, 19 nt, Human
aaacaaaaaacacuggccc

SEQ ID NO: 644788 - RNA, 22 nt, Human
aaacagauauagagauauuuac

SEQ ID NO: 644789 - RNA, 22 nt, Human
aaacugcaccaaaaaaacaaac

SEQ ID NO: 644790 - RNA, 25 nt, Human
aaacugcaccaaaaaaacaaacaaa

SEQ ID NO: 644791 - RNA, 19 nt, Human
aacauggcgaaaccucauc

SEQ ID NO: 644792 - RNA, 20 nt, Human
aacauggcgaaaccucaucu

SEQ ID NO: 644793 - RNA, 21 nt, Human
aacauggcgaaaccucaucuc

SEQ ID NO: 644794 - RNA, 24 nt, Human
aaucacuugaaccugggaggcgga

SEQ ID NO: 644795 - RNA, 20 nt, Human
acagauguaguaccugaaaa

SEQ ID NO: 644796 - RNA, 27 nt, Human
accaaaaaaacaaacaaaaaacacugg

SEQ ID NO: 644797 - RNA, 19 nt, Human
accacagcuauccuuugcu

SEQ ID NO: 644798 - RNA, 22 nt, Human
accucaucucuauuaaaaauaa

SEQ ID NO: 644799 - RNA, 20 nt, Human
acuacuuccuccauucaagu

SEQ ID NO: 644800 - RNA, 19 nt, Human
acuccaaaucaguguuuga

SEQ ID NO: 644801 - RNA, 18 nt, Human
acuggcccaaauccuaau

SEQ ID NO: 644802 - RNA, 26 nt, Human
agaaaaagacaauguucacugaagaa

SEQ ID NO: 644803 - RNA, 24 nt, Human
agaggcucacgccuguaauccuag

SEQ ID NO: 644804 - RNA, 23 nt, Human
agcacuuugggaggccgaggugg

SEQ ID NO: 644805 - RNA, 23 nt, Human
agccaugugugguguugcaugcc

SEQ ID NO: 644806 - RNA, 18 nt, Human
agccuggaaaacauggcg

SEQ ID NO: 644807 - RNA, 22 nt, Human
aggcaggagaaucacuugaacc

SEQ ID NO: 644808 - RNA, 24 nt, Human
aggcaggagaaucacuugaaccug

SEQ ID NO: 644809 - RNA, 21 nt, Human
aggccgagguggauggaucac

SEQ ID NO: 644810 - RNA, 19 nt, Human
aggcggagguugcagugag

SEQ ID NO: 644811 - RNA, 20 nt, Human
aggcggagguugcagugagc

SEQ ID NO: 644812 - RNA, 22 nt, Human
aggcggagguugcagugagcug

SEQ ID NO: 644813 - RNA, 24 nt, Human
aggcugaggcaggagaaucacuug

SEQ ID NO: 644814 - RNA, 19 nt, Human
agggaaacugcugucuaca

SEQ ID NO: 644815 - RNA, 21 nt, Human
aggucagagguucaagaucag

SEQ ID NO: 644816 - RNA, 24 nt, Human
aggugcagaggcucacgccuguaa

SEQ ID NO: 644817 - RNA, 22 nt, Human
agguggauggaucaccugaggu

SEQ ID NO: 644818 - RNA, 18 nt, Human
aguaaauucacaaacaua

SEQ ID NO: 644819 - RNA, 22 nt, Human
caaaaucugacucaacacccac

SEQ ID NO: 644820 - RNA, 28 nt, Human
caaacaaaaaacacuggcccaaauccua

SEQ ID NO: 644821 - RNA, 18 nt, Human
caacacccacugcccauc

SEQ ID NO: 644822 - RNA, 18 nt, Human
caaccacagcuauccuuu

SEQ ID NO: 644823 - RNA, 21 nt, Human
caccaaaaaaacaaacaaaaa

SEQ ID NO: 644824 - RNA, 22 nt, Human
caccaaaaaaacaaacaaaaaa

SEQ ID NO: 644825 - RNA, 22 nt, Human
cacccuaaccguacacauccaa

SEQ ID NO: 644826 - RNA, 24 nt, Human
cacgccuguaauccuagcacuuug

SEQ ID NO: 644827 - RNA, 21 nt, Human
cacuugaaccugggaggcgga

SEQ ID NO: 644828 - RNA, 26 nt, Human
cagaaaaagacaauguucacugaaga

SEQ ID NO: 644829 - RNA, 22 nt, Human
cagacaucgacugggcuuccaa

SEQ ID NO: 644830 - RNA, 22 nt, Human
cagacaucgacugggcuuccaa

SEQ ID NO: 644831 - RNA, 24 nt, Human
cagcuaccugggaggcugaggcag

SEQ ID NO: 644832 - RNA, 19 nt, Human
caggaaaaaaugcaaccac

SEQ ID NO: 644833 - RNA, 19 nt, Human
caguguuugagauuuauua

SEQ ID NO: 644834 - RNA, 24 nt, Human
caugccuguaaucccagcuaccug

SEQ ID NO: 644835 - RNA, 23 nt, Human
ccaaaaaaacaaacaaaaaacac

SEQ ID NO: 644836 - RNA, 19 nt, Human
ccacugcccauccauuuuc

SEQ ID NO: 644837 - RNA, 24 nt, Human
ccacugcccauccauuuucucucu

SEQ ID NO: 644838 - RNA, 23 nt, Human
ccagacauuuugguccacauaac

SEQ ID NO: 644839 - RNA, 24 nt, Human
ccaguaaaaucagaaucauuaaaa

SEQ ID NO: 644840 - RNA, 23 nt, Human
ccauccauuuucucucugacugc

SEQ ID NO: 644841 - RNA, 25 nt, Human
ccccucaugagcagaaggcaaaagu

SEQ ID NO: 644842 - RNA, 23 nt, Human
cccuaaccguacacauccaaagg

SEQ ID NO: 644843 - RNA, 27 nt, Human
ccgagguggauggaucaccugagguca

SEQ ID NO: 644844 - RNA, 24 nt, Human
ccuagccaggugcagaggcucacg

SEQ ID NO: 644845 - RNA, 20 nt, Human
ccucaugagcagaaggcaaa

SEQ ID NO: 644846 - RNA, 19 nt, Human
ccugggaggcggagguugc

SEQ ID NO: 644847 - RNA, 18 nt, Human
ccuguaaucccagcuacc

SEQ ID NO: 644848 - RNA, 21 nt, Human
ccuguaaucccagcuaccugg

SEQ ID NO: 644849 - RNA, 22 nt, Human
ccuguaauccuagcacuuuggg

SEQ ID NO: 644850 - RNA, 20 nt, Human
cgagguggauggaucaccug

SEQ ID NO: 644851 - RNA, 24 nt, Human
cgagguggauggaucaccugaggu

SEQ ID NO: 644852 - RNA, 18 nt, Human
cgccuguaauccuagcac

SEQ ID NO: 644853 - RNA, 23 nt, Human
cgccuguaauccuagcacuuugg

SEQ ID NO: 644854 - RNA, 24 nt, Human
cucacgccuguaauccuagcacuu

SEQ ID NO: 644855 - RNA, 22 nt, Human
cugacucaacacccacugccca

SEQ ID NO: 644856 - RNA, 25 nt, Human
cugggaggcugaggcaggagaauca

SEQ ID NO: 644857 - RNA, 24 nt, Human
gaauuugaggaggguuaaaaacac

SEQ ID NO: 644858 - RNA, 23 nt, Human
gagaaucacuugaaccugggagg

SEQ ID NO: 644859 - RNA, 24 nt, Human
gaucaccugaggucagagguucaa

SEQ ID NO: 644860 - RNA, 20 nt, Human
gcaccaaaaaaacaaacaaa

SEQ ID NO: 644861 - RNA, 24 nt, Human
gcaccaaaaaaacaaacaaaaaac

SEQ ID NO: 644862 - RNA, 23 nt, Human
gcaggagaaucacuugaaccugg

SEQ ID NO: 644863 - RNA, 18 nt, Human
gcaugccuguaaucccag

SEQ ID NO: 644864 - RNA, 24 nt, Human
gccaggugcagaggcucacgccug

SEQ ID NO: 644865 - RNA, 19 nt, Human
ggaaacugcugucuacaaa

SEQ ID NO: 644866 - RNA, 18 nt, Human
ggagguugcagugagcug

SEQ ID NO: 644867 - RNA, 20 nt, Human
ggagguugcagugagcuggc

SEQ ID NO: 644868 - RNA, 18 nt, Human
ggccgagguggauggauc

SEQ ID NO: 644869 - RNA, 18 nt, Human
ggcucacgccuguaaucc

SEQ ID NO: 644870 - RNA, 18 nt, Human
ggcucacgccuguaaucc

SEQ ID NO: 644871 - RNA, 23 nt, Human
ggcucacgccuguaauccuagca

SEQ ID NO: 644872 - RNA, 19 nt, Human
guguaucaguugugugcag

SEQ ID NO: 644873 - RNA, 23 nt, Human
guguugcaugccuguaaucccag

SEQ ID NO: 644874 - RNA, 21 nt, Human
guugcagugagcugaaacugc

SEQ ID NO: 644875 - RNA, 21 nt, Human
uaaaaauaaaaaaauuagcca

SEQ ID NO: 644876 - RNA, 22 nt, Human
uaaaaauaaaaaaauuagccau

SEQ ID NO: 644877 - RNA, 24 nt, Human
uaaauccuugacuaacaagaucaa

SEQ ID NO: 644878 - RNA, 24 nt, Human
uaaauccuugacuaacaagaucaa

SEQ ID NO: 644879 - RNA, 23 nt, Human
uaagaaagccaguaaaaucagaa

SEQ ID NO: 644880 - RNA, 21 nt, Human
uaauuuuggaaaaccuuccuc

SEQ ID NO: 644881 - RNA, 21 nt, Human
uaccagacauuuugguccaca

SEQ ID NO: 644882 - RNA, 22 nt, Human
uagaaaaaaaaauuuacucuga

SEQ ID NO: 644883 - RNA, 24 nt, Human
uagcacuuugggaggccgaggugg

SEQ ID NO: 644884 - RNA, 23 nt, Human
ucacaaacauaaaucaugguuaa

SEQ ID NO: 644885 - RNA, 19 nt, Human
ucacuuccagauuaaagau

SEQ ID NO: 644886 - RNA, 24 nt, Human
ucacuugaaccugggaggcggagg

SEQ ID NO: 644887 - RNA, 25 nt, Human
ucacuugaaccugggaggcggaggu

SEQ ID NO: 644888 - RNA, 19 nt, Human
ucauccuggauuucaguua

SEQ ID NO: 644889 - RNA, 18 nt, Human
uccaaaauggaauuugag

SEQ ID NO: 644890 - RNA, 23 nt, Human
uccaaaggagagugaaggacaga

SEQ ID NO: 644891 - RNA, 24 nt, Human
uccacaguaagaaagccaguaaaa

SEQ ID NO: 644892 - RNA, 19 nt, Human
uccacauaacagugagggu

SEQ ID NO: 644893 - RNA, 22 nt, Human
uccauucucaggaaaaaaugca

SEQ ID NO: 644894 - RNA, 22 nt, Human
ucuaaucaacagaguauucacu

SEQ ID NO: 644895 - RNA, 22 nt, Human
ucuacaaauacacuccuauuga

SEQ ID NO: 644896 - RNA, 21 nt, Human
ucugacucaacacccacugcc

SEQ ID NO: 644897 - RNA, 22 nt, Human
ucugacucaacacccacugccc

SEQ ID NO: 644898 - RNA, 19 nt, Human
ucuggcaaaaaucaaaauc

SEQ ID NO: 644899 - RNA, 26 nt, Human
ucuggcaaaaaucaaaaucugacuca

SEQ ID NO: 644900 - RNA, 21 nt, Human
ugaaaaucacuuacuccauuc

SEQ ID NO: 644901 - RNA, 24 nt, Human
ugaaccugggaggcggagguugca

SEQ ID NO: 644902 - RNA, 22 nt, Human
ugaagaaauaaacaacaaauua

SEQ ID NO: 644903 - RNA, 22 nt, Human
ugacauggaguucucaugucag

SEQ ID NO: 644904 - RNA, 23 nt, Human
ugagauacacauuaguuguaguc

SEQ ID NO: 644905 - RNA, 25 nt, Human
ugagcugaaacugcaccaaccccgg

SEQ ID NO: 644906 - RNA, 20 nt, Human
ugaggcaggagaaucacuug

SEQ ID NO: 644907 - RNA, 24 nt, Human
ugaggcaggagaaucacuugaacc

SEQ ID NO: 644908 - RNA, 25 nt, Human
ugaggcaggagaaucacuugaaccu

SEQ ID NO: 644909 - RNA, 23 nt, Human
ugaggucagagguucaagaucag

SEQ ID NO: 644910 - RNA, 21 nt, Human
ugccagaaaaagacaauguuc

SEQ ID NO: 644911 - RNA, 24 nt, Human
ugccuguaaucccagcuaccuggg

SEQ ID NO: 644912 - RNA, 21 nt, Human
uggacagugugagauacacau

SEQ ID NO: 644913 - RNA, 24 nt, Human
uggaucaccugaggucagagguuc

SEQ ID NO: 644914 - RNA, 27 nt, Human
uggauggaucaccugaggucagagguu

SEQ ID NO: 644915 - RNA, 20 nt, Human
uggcaaaaaucaaaaucuga

SEQ ID NO: 644916 - RNA, 20 nt, Human
uggcauacacugcugcuaaa

SEQ ID NO: 644917 - RNA, 20 nt, Human
uggcauacacugcugcuaaa

SEQ ID NO: 644918 - RNA, 19 nt, Human
ugggaggccgagguggaug

SEQ ID NO: 644919 - RNA, 24 nt, Human
ugggaggccgagguggauggauca

SEQ ID NO: 644920 - RNA, 29 nt, Human
ugggaggcggagguugcagugacaacggu

SEQ ID NO: 644921 - RNA, 24 nt, Human
ugggaggcggagguugcagugagc

SEQ ID NO: 644922 - RNA, 19 nt, Human
ugggaggcugaggcaggag

SEQ ID NO: 644923 - RNA, 24 nt, Human
ugggaggcugaggcaggagaauca

SEQ ID NO: 644924 - RNA, 24 nt, Human
ugguguugcaugccuguaauccca

SEQ ID NO: 644925 - RNA, 19 nt, Human
ugucuggcaaaaaucaaaa

SEQ ID NO: 644926 - RNA, 25 nt, Human
uguguuaccuuuugucacuuccaga

SEQ ID NO: 644927 - RNA, 24 nt, Human
uuccaaacagauauagagauauuu

SEQ ID NO: 644928 - RNA, 19 nt, Human
uucuaaguaguucugcuua

SEQ ID NO: 644929 - RNA, 24 nt, Human
uugaaccugggaggcggagguugc

SEQ ID NO: 644930 - RNA, 23 nt, Human
uugacuaacaagaucaagauaug

SEQ ID NO: 644931 - RNA, 23 nt, Human
uugacuaacaagaucaagauaug

SEQ ID NO: 644932 - RNA, 22 nt, Human
uugcagugagcugaaacugcac

SEQ ID NO: 644933 - RNA, 25 nt, Human
uugggaggccgagguggauggauca

SEQ ID NO: 644934 - RNA, 18 nt, Human
uuucaaacaucgucaccc

SEQ ID NO: 644935 - RNA, 23 nt, Human
uuugaaaaucacuuacuccauuc

SEQ ID NO: 644936 - RNA, 25 nt, Human
uuuuuggucuugacaaucuuuaauu

SEQ ID NO: 644937 - RNA, 18 nt, Human
uuuuuuuuuuuuuuuuug

SEQ ID NO: 644938 - RNA, 18 nt, Human
uuuuuuuuuuuuuuuuug

SEQ ID NO: 644939 - RNA, 22 nt, Human
uuuuuuuuuuuuuuuuuggucu

SEQ ID NO: 644940 - RNA, 20 nt, Human
aaaaauauaauccacacuua

SEQ ID NO: 644941 - RNA, 19 nt, Human
aaggcaccuaaugcuauaa

SEQ ID NO: 644942 - RNA, 24 nt, Human
aaugaagaaaacagguaugagaaa

SEQ ID NO: 644943 - RNA, 25 nt, Human
aaugaagaaaacagguaugagaaaa

SEQ ID NO: 644944 - RNA, 20 nt, Human
acccaacuccacucggccca

SEQ ID NO: 644945 - RNA, 19 nt, Human
acuccacucggcccaggag

SEQ ID NO: 644946 - RNA, 21 nt, Human
acuuccccuuuaaaaauuugc

SEQ ID NO: 644947 - RNA, 22 nt, Human
agcauuuuaccugucagaaaua

SEQ ID NO: 644948 - RNA, 18 nt, Human
agcccggaagcgguggcg

SEQ ID NO: 644949 - RNA, 19 nt, Human
aggccccgcagccgcccag

SEQ ID NO: 644950 - RNA, 23 nt, Human
aggcucccgacaccacccaacuc

SEQ ID NO: 644951 - RNA, 22 nt, Human
auaauacaguaaauguagugua

SEQ ID NO: 644952 - RNA, 22 nt, Human
caaaacccaaaaauauaaucca

SEQ ID NO: 644953 - RNA, 23 nt, Human
cacagauuuaaaauacaaggcac

SEQ ID NO: 644954 - RNA, 25 nt, Human
cagcuccugaagccgcggugccccu

SEQ ID NO: 644955 - RNA, 21 nt, Human
ccacccaacuccacucggccc

SEQ ID NO: 644956 - RNA, 24 nt, Human
ccacccaacuccacucggcccagg

SEQ ID NO: 644957 - RNA, 22 nt, Human
cccaacuccacucggcccagga

SEQ ID NO: 644958 - RNA, 20 nt, Human
ccccagcccggaagcggugg

SEQ ID NO: 644959 - RNA, 19 nt, Human
cccccggcuugcccuccgc

SEQ ID NO: 644960 - RNA, 24 nt, Human
cccccggcuugcccuccgcgcggc

SEQ ID NO: 644961 - RNA, 21 nt, Human
ccccucagggagaggcucccg

SEQ ID NO: 644962 - RNA, 22 nt, Human
cccggccccgcccccggcuugc

SEQ ID NO: 644963 - RNA, 19 nt, Human
ccgcccagcgccacggccg

SEQ ID NO: 644964 - RNA, 21 nt, Human
ccgcccagcgccacggccgcg

SEQ ID NO: 644965 - RNA, 21 nt, Human
ccuugagauguguaaggcagg

SEQ ID NO: 644966 - RNA, 24 nt, Human
cgccacggccgcggccucggacuc

SEQ ID NO: 644967 - RNA, 23 nt, Human
cggcccaggagggcguggagcgg

SEQ ID NO: 644968 - RNA, 19 nt, Human
cucacagagcugucaccgc

SEQ ID NO: 644969 - RNA, 22 nt, Human
cuccugaagccgcggugccccu

SEQ ID NO: 644970 - RNA, 25 nt, Human
cugaaacauuuuuucuacaaaaacu

SEQ ID NO: 644971 - RNA, 21 nt, Human
cugcgcgcgggcgcguaugca

SEQ ID NO: 644972 - RNA, 23 nt, Human
cuggccccggccccgcccccggc

SEQ ID NO: 644973 - RNA, 19 nt, Human
gaagaaaacagguaugaga

SEQ ID NO: 644974 - RNA, 22 nt, Human
gaagaaaacagguaugagaaaa

SEQ ID NO: 644975 - RNA, 18 nt, Human
gaagccgcggugccccuc

SEQ ID NO: 644976 - RNA, 18 nt, Human
gaagccgcggugccccuc

SEQ ID NO: 644977 - RNA, 20 nt, Human
gagauguguaaggcagguug

SEQ ID NO: 644978 - RNA, 24 nt, Human
gaggcucccgacaccacccaacuc

SEQ ID NO: 644979 - RNA, 18 nt, Human
gcccaggagggcguggag

SEQ ID NO: 644980 - RNA, 21 nt, Human
gcgcgugggugacgucauagg

SEQ ID NO: 644981 - RNA, 20 nt, Human
gcgguggcgcgugggugacg

SEQ ID NO: 644982 - RNA, 23 nt, Human
ggagcgggugaggggaagggacg

SEQ ID NO: 644983 - RNA, 18 nt, Human
ggcccagcuccugaagcc

SEQ ID NO: 644984 - RNA, 22 nt, Human
ggccccgcccccaguccccagc

SEQ ID NO: 644985 - RNA, 19 nt, Human
guaaauguaguguaaguga

SEQ ID NO: 644986 - RNA, 28 nt, Human
uaaaagaauaauacaguaaauguagugg

SEQ ID NO: 644987 - RNA, 20 nt, Human
uaaguuuacagcaauauagc

SEQ ID NO: 644988 - RNA, 23 nt, Human
uacuuauucuuuuuaaaguccca

SEQ ID NO: 644989 - RNA, 18 nt, Human
uaguucaaaugauuucaa

SEQ ID NO: 644990 - RNA, 21 nt, Human
uaguuccauuaucaagcuggg

SEQ ID NO: 644991 - RNA, 20 nt, Human
uauaacuguagugauaugua

SEQ ID NO: 644992 - RNA, 23 nt, Human
uaugaaaaugaagaaaacaggua

SEQ ID NO: 644993 - RNA, 19 nt, Human
uccacacuuauuacaggua

SEQ ID NO: 644994 - RNA, 20 nt, Human
ucccaugaaauuugcacaaa

SEQ ID NO: 644995 - RNA, 22 nt, Human
ugcucuggccccggccccgccc

SEQ ID NO: 644996 - RNA, 22 nt, Human
uggaggcccagcuccugaagcc

SEQ ID NO: 644997 - RNA, 18 nt, Human
ugguuugucacagauuua

SEQ ID NO: 644998 - RNA, 18 nt, Human
ugugaaaauaaaguccca

SEQ ID NO: 644999 - RNA, 20 nt, Human
uuaacaugugaaaauaaagu

SEQ ID NO: 645000 - RNA, 24 nt, Human
uuccauuaucaagcugggcuacag

SEQ ID NO: 645001 - RNA, 21 nt, Human
uuccuugagauguguaaggca

SEQ ID NO: 645002 - RNA, 22 nt, Human
uuuagaguuucaaagaacucaa

SEQ ID NO: 645003 - RNA, 21 nt, Human
uuuagaguuucaaagaacucc

SEQ ID NO: 645004 - RNA, 23 nt, Human
uuucuucaaaacucuaaauuaaa

SEQ ID NO: 645005 - RNA, 18 nt, Human
uuugugugguuaauuugc

SEQ ID NO: 645006 - RNA, 18 nt, Human
aaagugcugcgauuacaa

SEQ ID NO: 645007 - RNA, 24 nt, Human
aaagugcugcgauuacaagcguga

SEQ ID NO: 645008 - RNA, 18 nt, Human
aagagaaaaauacuuuuu

SEQ ID NO: 645009 - RNA, 22 nt, Human
aagcccaaauaaucaaauauaa

SEQ ID NO: 645010 - RNA, 24 nt, Human
aaggauccucuagccucagccucc

SEQ ID NO: 645011 - RNA, 23 nt, Human
aagugcuaaagguaauuacacuu

SEQ ID NO: 645012 - RNA, 18 nt, Human
aauauuuuuaaagcuguu

SEQ ID NO: 645013 - RNA, 18 nt, Human
acacuaaaaaguuacuac

SEQ ID NO: 645014 - RNA, 19 nt, Human
acugcagccucaaccuccu

SEQ ID NO: 645015 - RNA, 23 nt, Human
agacagggucucacuauguugcc

SEQ ID NO: 645016 - RNA, 21 nt, Human
agacuuucagauaagcaaucu

SEQ ID NO: 645017 - RNA, 23 nt, Human
agagaaaaauacuuuuuuuuuuu

SEQ ID NO: 645018 - RNA, 20 nt, Human
agccucaaccuccugggcuc

SEQ ID NO: 645019 - RNA, 23 nt, Human
agccucagccuccugaguagcug

SEQ ID NO: 645020 - RNA, 24 nt, Human
agccucagccuccugaguagcugg

SEQ ID NO: 645021 - RNA, 20 nt, Human
aggauccucuagccucagcc

SEQ ID NO: 645022 - RNA, 19 nt, Human
aguagagacagggucucac

SEQ ID NO: 645023 - RNA, 23 nt, Human
aucacaccucacugcagccucaa

SEQ ID NO: 645024 - RNA, 24 nt, Human
caaagugcugcgauuacaagcgug

SEQ ID NO: 645025 - RNA, 24 nt, Human
caaccuccugggcucaaggauccu

SEQ ID NO: 645026 - RNA, 24 nt, Human
caagaacacccagcagauacaggu

SEQ ID NO: 645027 - RNA, 22 nt, Human
caagugauccuccugccucagc

SEQ ID NO: 645028 - RNA, 27 nt, Human
caagugauccuccugccucagccuccc

SEQ ID NO: 645029 - RNA, 27 nt, Human
caagugauccuccugccucagccuccc

SEQ ID NO: 645030 - RNA, 22 nt, Human
caccucacugcagccucaaccu

SEQ ID NO: 645031 - RNA, 24 nt, Human
caccucacugcagccucaaccucc

SEQ ID NO: 645032 - RNA, 20 nt, Human
cacuaaaaaguuacuaccag

SEQ ID NO: 645033 - RNA, 24 nt, Human
cacuauguugccuaggcuagucuu

SEQ ID NO: 645034 - RNA, 19 nt, Human
cacugcagccucaaccucc

SEQ ID NO: 645035 - RNA, 23 nt, Human
cagccucaaccuccugggcucaa

SEQ ID NO: 645036 - RNA, 24 nt, Human
cagccucaaccuccugggcucaag

SEQ ID NO: 645037 - RNA, 19 nt, Human
cagccuccugaguagcugg

SEQ ID NO: 645038 - RNA, 24 nt, Human
cagggucucacuauguugccuagg

SEQ ID NO: 645039 - RNA, 20 nt, Human
ccaaagugcugcgauuacaa

SEQ ID NO: 645040 - RNA, 24 nt, Human
ccaaagugcugcgauuacaagcgu

SEQ ID NO: 645041 - RNA, 19 nt, Human
ccucaaccuccugggcuca

SEQ ID NO: 645042 - RNA, 23 nt, Human
ccuccugggcucaaggauccucu

SEQ ID NO: 645043 - RNA, 24 nt, Human
ccugccucagccucccaaagugcu

SEQ ID NO: 645044 - RNA, 19 nt, Human
ccugggcucaaggauccuc

SEQ ID NO: 645045 - RNA, 22 nt, Human
ccugggcucaagugauccuccu

SEQ ID NO: 645046 - RNA, 23 nt, Human
ccugggcucaagugauccuccug

SEQ ID NO: 645047 - RNA, 18 nt, Human
ccuguaacucuccucaca

SEQ ID NO: 645048 - RNA, 19 nt, Human
ccuuccuuacuuccucguc

SEQ ID NO: 645049 - RNA, 19 nt, Human
cgcucugucgcccaagcug

SEQ ID NO: 645050 - RNA, 20 nt, Human
cgcuguuuugacgacugcau

SEQ ID NO: 645051 - RNA, 22 nt, Human
cuagccucagccuccugaguag

SEQ ID NO: 645052 - RNA, 24 nt, Human
cucaagugauccuccugccucagc

SEQ ID NO: 645053 - RNA, 24 nt, Human
cucacugcagccucaaccuccugg

SEQ ID NO: 645054 - RNA, 25 nt, Human
cucuagccucagccuccugaguagc

SEQ ID NO: 645055 - RNA, 22 nt, Human
cugcagccucaaccuccugggc

SEQ ID NO: 645056 - RNA, 24 nt, Human
cugccucagccucccaaagugcug

SEQ ID NO: 645057 - RNA, 18 nt, Human
cuggaacuacaugcaugc

SEQ ID NO: 645058 - RNA, 21 nt, Human
cuguaauugggaugaaaaggc

SEQ ID NO: 645059 - RNA, 20 nt, Human
cuugaacuccugggcucaag

SEQ ID NO: 645060 - RNA, 21 nt, Human
gaaccauguguauaagaaagc

SEQ ID NO: 645061 - RNA, 21 nt, Human
gacaauacagcaaacuacaau

SEQ ID NO: 645062 - RNA, 24 nt, Human
gaguagcuggaacuacaugcaugc

SEQ ID NO: 645063 - RNA, 22 nt, Human
gauaacaagaacacccagcaga

SEQ ID NO: 645064 - RNA, 21 nt, Human
gauccucuagccucagccucc

SEQ ID NO: 645065 - RNA, 25 nt, Human
gaugaaaaggcaacucuaagaagaa

SEQ ID NO: 645066 - RNA, 18 nt, Human
gauuacaagcgugagcca

SEQ ID NO: 645067 - RNA, 20 nt, Human
gcagugauucuuagggcagc

SEQ ID NO: 645068 - RNA, 20 nt, Human
gcccaagcuggaaugcagug

SEQ ID NO: 645069 - RNA, 20 nt, Human
gccucagccuccugaguagc

SEQ ID NO: 645070 - RNA, 21 nt, Human
gccucagccuccugaguagcu

SEQ ID NO: 645071 - RNA, 19 nt, Human
gcuagucuugaacuccugg

SEQ ID NO: 645072 - RNA, 20 nt, Human
gcuagucuugaacuccuggg

SEQ ID NO: 645073 - RNA, 25 nt, Human
gcucugucgcccaagcuggaaugca

SEQ ID NO: 645074 - RNA, 19 nt, Human
gcuggaaugcaguggcgca

SEQ ID NO: 645075 - RNA, 19 nt, Human
gcuuaauaugagagaacca

SEQ ID NO: 645076 - RNA, 21 nt, Human
gggcucaagugauccuccugc

SEQ ID NO: 645077 - RNA, 22 nt, Human
gggcucaagugauccuccugcc

SEQ ID NO: 645078 - RNA, 24 nt, Human
gugauccuccugccucagccuccc

SEQ ID NO: 645079 - RNA, 23 nt, Human
guggcgcaaucacaccucacugc

SEQ ID NO: 645080 - RNA, 22 nt, Human
uaaaauacagacaauacagcaa

SEQ ID NO: 645081 - RNA, 21 nt, Human
uaaauuuauuuuuaguagaga

SEQ ID NO: 645082 - RNA, 25 nt, Human
uaagaagaaugcuguacauaugaca

SEQ ID NO: 645083 - RNA, 18 nt, Human
uaagagaaaaauacuuuu

SEQ ID NO: 645084 - RNA, 23 nt, Human
uaagagaaaaauacuuuuuuuuu

SEQ ID NO: 645085 - RNA, 23 nt, Human
uaagcaaucuccaaauauuuucu

SEQ ID NO: 645086 - RNA, 23 nt, Human
uaaugcaaucuuaaucgagguuc

SEQ ID NO: 645087 - RNA, 18 nt, Human
uacaauggcagcagugau

SEQ ID NO: 645088 - RNA, 20 nt, Human
uacuuuuuuuuuuuuuugaa

SEQ ID NO: 645089 - RNA, 22 nt, Human
uagagacagggucucacuaugu

SEQ ID NO: 645090 - RNA, 18 nt, Human
uaggcuagucuugaacuc

SEQ ID NO: 645091 - RNA, 24 nt, Human
uaguagagacagggucucacuaug

SEQ ID NO: 645092 - RNA, 23 nt, Human
uaugagagaaccauguguauaag

SEQ ID NO: 645093 - RNA, 18 nt, Human
uaugauaacaagaacacc

SEQ ID NO: 645094 - RNA, 28 nt, Human
uaugauaacaagaacacccagcagauac

SEQ ID NO: 645095 - RNA, 19 nt, Human
uauguugccuaggcuaguc

SEQ ID NO: 645096 - RNA, 20 nt, Human
uauguugccuaggcuagucu

SEQ ID NO: 645097 - RNA, 24 nt, Human
uauguugccuaggcuagucuugaa

SEQ ID NO: 645098 - RNA, 23 nt, Human
ucacugcagccucaaccuccugg

SEQ ID NO: 645099 - RNA, 24 nt, Human
ucacugcagccucaaccuccuggg

SEQ ID NO: 645100 - RNA, 23 nt, Human
ucagccuccugaguagcuggaac

SEQ ID NO: 645101 - RNA, 24 nt, Human
ucccaaagugcugcgauuacaagc

SEQ ID NO: 645102 - RNA, 27 nt, Human
uccuccugccucagccucccaaagugc

SEQ ID NO: 645103 - RNA, 19 nt, Human
uccucuagccucagccucc

SEQ ID NO: 645104 - RNA, 20 nt, Human
uccugggcucaaggauccuc

SEQ ID NO: 645105 - RNA, 21 nt, Human
uccugggcucaagugauccuc

SEQ ID NO: 645106 - RNA, 22 nt, Human
uccugggcucaagugauccucc

SEQ ID NO: 645107 - RNA, 22 nt, Human
uccugggcucaagugauccucc

SEQ ID NO: 645108 - RNA, 24 nt, Human
uccugggcucaagugauccuccug

SEQ ID NO: 645109 - RNA, 21 nt, Human
ucucacuauguugccuaggcu

SEQ ID NO: 645110 - RNA, 23 nt, Human
ucucacuauguugccuaggcuag

SEQ ID NO: 645111 - RNA, 23 nt, Human
ucucgcucugucgcccaagcugg

SEQ ID NO: 645112 - RNA, 24 nt, Human
ucucgcucugucgcccaagcugga

SEQ ID NO: 645113 - RNA, 26 nt, Human
ucucgcucugucgcccaagcuggaau

SEQ ID NO: 645114 - RNA, 23 nt, Human
ucuugaacuccugggcucaagug

SEQ ID NO: 645115 - RNA, 22 nt, Human
ugaaaaggcaacucuaagaaga

SEQ ID NO: 645116 - RNA, 25 nt, Human
ugaacuccugggcucaagugauccu

SEQ ID NO: 645117 - RNA, 24 nt, Human
ugacgacugcauagcucaacagaa

SEQ ID NO: 645118 - RNA, 23 nt, Human
ugagccaccgccuggcccgaaaa

SEQ ID NO: 645119 - RNA, 22 nt, Human
ugcaugcaccaccacacucagc

SEQ ID NO: 645120 - RNA, 24 nt, Human
ugccuaggcuagucuugaacuccu

SEQ ID NO: 645121 - RNA, 25 nt, Human
ugccucagccucccaaagugcugcg

SEQ ID NO: 645122 - RNA, 22 nt, Human
ugcgauuacaagcgugagccac

SEQ ID NO: 645123 - RNA, 24 nt, Human
ugcgauuacaagcgugagccaccg

SEQ ID NO: 645124 - RNA, 24 nt, Human
ugcugcgauuacaagcgugagcca

SEQ ID NO: 645125 - RNA, 24 nt, Human
uggaacuacaugcaugcaccacca

SEQ ID NO: 645126 - RNA, 18 nt, Human
uggaaugcaguggcgcaa

SEQ ID NO: 645127 - RNA, 19 nt, Human
uggaaugcaguggcgcaau

SEQ ID NO: 645128 - RNA, 19 nt, Human
ugggaugaaaaggcaacuc

SEQ ID NO: 645129 - RNA, 20 nt, Human
ugggcucaagugauccuccu

SEQ ID NO: 645130 - RNA, 24 nt, Human
ugggcucaagugauccuccugccu

SEQ ID NO: 645131 - RNA, 25 nt, Human
uguacauaugacaccuauugcauuu

SEQ ID NO: 645132 - RNA, 18 nt, Human
uuaaagcuguuuuacaau

SEQ ID NO: 645133 - RNA, 24 nt, Human
uuaaauuuauuuuuaguagagaca

SEQ ID NO: 645134 - RNA, 19 nt, Human
uuaaugucacauacaguuu

SEQ ID NO: 645135 - RNA, 19 nt, Human
uuacuaccaggcuuaauau

SEQ ID NO: 645136 - RNA, 23 nt, Human
uuaggcagauaaauucccaauca

SEQ ID NO: 645137 - RNA, 24 nt, Human
uuaguagagacagggucucacuau

SEQ ID NO: 645138 - RNA, 22 nt, Human
uuccucgucuuugaagugcuaa

SEQ ID NO: 645139 - RNA, 22 nt, Human
uuucuuauaaagagggaguguu

SEQ ID NO: 645140 - RNA, 26 nt, Human
uuuuuuaaauuuauuuuuaguagagg

SEQ ID NO: 645141 - RNA, 25 nt, Human
uuuuuuuuuuuugagacugggucuc

SEQ ID NO: 645142 - RNA, 22 nt, Human
uuuuuuuuuuuuuugagacugg

SEQ ID NO: 645143 - RNA, 19 nt, Human
agacagggugcccagggcc

SEQ ID NO: 645144 - RNA, 24 nt, Human
aggcaggugcgggccagucccugc

SEQ ID NO: 645145 - RNA, 22 nt, Human
agggcagcuggucccagggccc

SEQ ID NO: 645146 - RNA, 18 nt, Human
agguggaggugacggggg

SEQ ID NO: 645147 - RNA, 21 nt, Human
augaggccaauccaggcuggg

SEQ ID NO: 645148 - RNA, 18 nt, Human
augcugcugaccccccgc

SEQ ID NO: 645149 - RNA, 19 nt, Human
augcugcugaccccccgcc

SEQ ID NO: 645150 - RNA, 20 nt, Human
caagauggggcagcgugggg

SEQ ID NO: 645151 - RNA, 19 nt, Human
caccccccuuauuggacca

SEQ ID NO: 645152 - RNA, 19 nt, Human
cacccugcaccccuggcca

SEQ ID NO: 645153 - RNA, 24 nt, Human
cagcagugagaccaggggagacag

SEQ ID NO: 645154 - RNA, 18 nt, Human
cagcugaccccagagaca

SEQ ID NO: 645155 - RNA, 19 nt, Human
ccccaaggcccuugaccag

SEQ ID NO: 645156 - RNA, 22 nt, Human
ccccagagacagcagaggugaa

SEQ ID NO: 645157 - RNA, 23 nt, Human
cccccaaggcccuugaccagaac

SEQ ID NO: 645158 - RNA, 20 nt, Human
cccccgccacccugcacccc

SEQ ID NO: 645159 - RNA, 19 nt, Human
ccccgccacccugcacccc

SEQ ID NO: 645160 - RNA, 21 nt, Human
ccccgccacccugcaccccug

SEQ ID NO: 645161 - RNA, 24 nt, Human
cccugggaacugccagaggcccag

SEQ ID NO: 645162 - RNA, 24 nt, Human
ccgccacccugcaccccuggccac

SEQ ID NO: 645163 - RNA, 23 nt, Human
ccugagacuggugcugcucuaga

SEQ ID NO: 645164 - RNA, 23 nt, Human
cucacaccccccuuauuggacca

SEQ ID NO: 645165 - RNA, 22 nt, Human
cucuagaaggccuggugggggg

SEQ ID NO: 645166 - RNA, 19 nt, Human
cuuccagcuugaggaugag

SEQ ID NO: 645167 - RNA, 18 nt, Human
cuucgaggaccccgggcg

SEQ ID NO: 645168 - RNA, 25 nt, Human
gagcagcagcugaccccagagacag

SEQ ID NO: 645169 - RNA, 18 nt, Human
gaggaccccgggcgucgg

SEQ ID NO: 645170 - RNA, 21 nt, Human
gccacaugcuagcgggcagcu

SEQ ID NO: 645171 - RNA, 22 nt, Human
gccacccugcaccccuggccac

SEQ ID NO: 645172 - RNA, 19 nt, Human
gcccugagacuggugcugc

SEQ ID NO: 645173 - RNA, 21 nt, Human
gcgggccagucccugcggggc

SEQ ID NO: 645174 - RNA, 20 nt, Human
gcggggcucacaccccccuu

SEQ ID NO: 645175 - RNA, 20 nt, Human
gggacaugcugcugaccccc

SEQ ID NO: 645176 - RNA, 18 nt, Human
gggcagcugaugagcagc

SEQ ID NO: 645177 - RNA, 21 nt, Human
gugcgggccagucccugcggg

SEQ ID NO: 645178 - RNA, 24 nt, Human
uccagcuugaggaugagccgugag

SEQ ID NO: 645179 - RNA, 20 nt, Human
ucuccuggcuacaaaccugg

SEQ ID NO: 645180 - RNA, 19 nt, Human
ugaccaaagauccuggaug

SEQ ID NO: 645181 - RNA, 21 nt, Human
ugaccagaacuggaacagcag

SEQ ID NO: 645182 - RNA, 22 nt, Human
ugaccccccgccacccugcacc

SEQ ID NO: 645183 - RNA, 24 nt, Human
ugaccccccgccacccugcacccc

SEQ ID NO: 645184 - RNA, 19 nt, Human
ugcccagggccugcccagg

SEQ ID NO: 645185 - RNA, 22 nt, Human
ugcccagggccugcccagggac

SEQ ID NO: 645186 - RNA, 19 nt, Human
ugcccccuucuccuggcua

SEQ ID NO: 645187 - RNA, 23 nt, Human
uggaacagcaggcaagauggggc

SEQ ID NO: 645188 - RNA, 20 nt, Human
ugugaugcccccuucuccug

SEQ ID NO: 645189 - RNA, 25 nt, Human
uuuaauugcugaaaacauccaaggc

SEQ ID NO: 645190 - RNA, 18 nt, Human
uuuuuuuuuuuuuuuuug

SEQ ID NO: 645191 - RNA, 24 nt, Human
uuuuuuuuuuuuuuuuugccagcu

SEQ ID NO: 645192 - RNA, 22 nt, Human
aaaaaaaaaaaaauugcaagaa

SEQ ID NO: 645193 - RNA, 25 nt, Human
aaaccauagccauauuuugacauuu

SEQ ID NO: 645194 - RNA, 19 nt, Human
aauacaggagcuaagaaaa

SEQ ID NO: 645195 - RNA, 20 nt, Human
agauggaggaaaaaaauuca

SEQ ID NO: 645196 - RNA, 24 nt, Human
augagcuuaaaaaaaaaaaaauug

SEQ ID NO: 645197 - RNA, 25 nt, Human
caacaaaaaaggaguaagucaucaa

SEQ ID NO: 645198 - RNA, 26 nt, Human
caacuuccagaagaaggcugcaaaca

SEQ ID NO: 645199 - RNA, 20 nt, Human
cagaagaaggcugcaaacau

SEQ ID NO: 645200 - RNA, 18 nt, Human
cugggcugcauuagaccc

SEQ ID NO: 645201 - RNA, 21 nt, Human
ggugauaaaaagauggaggaa

SEQ ID NO: 645202 - RNA, 23 nt, Human
guuuuuaaaagaauuucacugag

SEQ ID NO: 645203 - RNA, 26 nt, Human
uaaacauauuuauguuuaaaacacag

SEQ ID NO: 645204 - RNA, 23 nt, Human
uaaauaaacuuugaacugauuuc

SEQ ID NO: 645205 - RNA, 24 nt, Human
uaaauauguagaucaaggaugucc

SEQ ID NO: 645206 - RNA, 21 nt, Human
uaaauauguagaucagggaug

SEQ ID NO: 645207 - RNA, 23 nt, Human
uaagaaaguuuacaaaaaaugua

SEQ ID NO: 645208 - RNA, 31 nt, Human
uacaaaaaauguaaaauauuugagaauaagg

SEQ ID NO: 645209 - RNA, 19 nt, Human
uacaggagcuaagaaaaga

SEQ ID NO: 645210 - RNA, 24 nt, Human
uacauuuggcuaaguagauaacuu

SEQ ID NO: 645211 - RNA, 24 nt, Human
uacuuagcuauauuuuuucuuuug

SEQ ID NO: 645212 - RNA, 25 nt, Human
uagauaacuuaccuaaauuugcucc

SEQ ID NO: 645213 - RNA, 26 nt, Human
uagcugaugagcuuaaaaaaaaaaaa

SEQ ID NO: 645214 - RNA, 27 nt, Human
uauaaaaccagaaguacaauucaacaa

SEQ ID NO: 645215 - RNA, 18 nt, Human
uaugccauuauuuuugua

SEQ ID NO: 645216 - RNA, 21 nt, Human
uaugccauuauuuuuguaguu

SEQ ID NO: 645217 - RNA, 19 nt, Human
uaugcuaacacugaugaua

SEQ ID NO: 645218 - RNA, 20 nt, Human
ucauucauuuuauugacuug

SEQ ID NO: 645219 - RNA, 20 nt, Human
uccacgaauaucauuaucac

SEQ ID NO: 645220 - RNA, 18 nt, Human
ucuuaaguuuuuuaugcc

SEQ ID NO: 645221 - RNA, 23 nt, Human
ucuuuuggcuucccugagccaca

SEQ ID NO: 645222 - RNA, 23 nt, Human
ucuuuuggcuucccugagccaca

SEQ ID NO: 645223 - RNA, 21 nt, Human
ugacauuucacaaagaauggu

SEQ ID NO: 645224 - RNA, 19 nt, Human
ugauuuuucuggugucauu

SEQ ID NO: 645225 - RNA, 20 nt, Human
uggcuucccugagccacauu

SEQ ID NO: 645226 - RNA, 20 nt, Human
uggcuucccugagccacauu

SEQ ID NO: 645227 - RNA, 21 nt, Human
uguuuuaagaaaguuuacaaa

SEQ ID NO: 645228 - RNA, 21 nt, Human
uguuuuaagaaaguuuacaga

SEQ ID NO: 645229 - RNA, 20 nt, Human
uuaacucaauacagucauuc

SEQ ID NO: 645230 - RNA, 21 nt, Human
uucaaauguuucuucuaaauc

SEQ ID NO: 645231 - RNA, 19 nt, Human
uucaacaaaaaaggaguaa

SEQ ID NO: 645232 - RNA, 18 nt, Human
uuccagaagaaggcugca

SEQ ID NO: 645233 - RNA, 18 nt, Human
uuucaaacuuagaauuua

SEQ ID NO: 645234 - RNA, 18 nt, Human
uuucaguguggucaucau

SEQ ID NO: 645235 - RNA, 20 nt, Human
uuuggcuucccugagccaca

SEQ ID NO: 645236 - RNA, 23 nt, Human
uuuggcuucccugagccacauug

SEQ ID NO: 645237 - RNA, 19 nt, Human
uuuuuuuuuuuuuuuuugu

SEQ ID NO: 645238 - RNA, 22 nt, Human
uuuuuuuuuuuuuuuuuguagg

SEQ ID NO: 645239 - RNA, 21 nt, Human
aaaaaaaaccaaacaccaaaa

SEQ ID NO: 645240 - RNA, 20 nt, Human
aaaaacacaaaucuucaguc

SEQ ID NO: 645241 - RNA, 22 nt, Human
aaaaaggaaauugucuuaagga

SEQ ID NO: 645242 - RNA, 24 nt, Human
aaaacaaaaacacaaaucuucagu

SEQ ID NO: 645243 - RNA, 19 nt, Human
aaaagccuugaugcuggca

SEQ ID NO: 645244 - RNA, 24 nt, Human
aaacaagacaaauuaaaacagaaa

SEQ ID NO: 645245 - RNA, 22 nt, Human
aaacuugguucauuggcuagca

SEQ ID NO: 645246 - RNA, 21 nt, Human
aaagcgcuccucuccucgcca

SEQ ID NO: 645247 - RNA, 21 nt, Human
aaagugaacagaugaaaaaau

SEQ ID NO: 645248 - RNA, 27 nt, Human
aaauguuagaaaucugcuugauaaacu

SEQ ID NO: 645249 - RNA, 19 nt, Human
aacaagacaaauuaaaaca

SEQ ID NO: 645250 - RNA, 19 nt, Human
aaccaccggcugaaccaag

SEQ ID NO: 645251 - RNA, 22 nt, Human
aaccagguguucccgcacaggu

SEQ ID NO: 645252 - RNA, 19 nt, Human
aacuuguucauccaaaaua

SEQ ID NO: 645253 - RNA, 19 nt, Human
aaggacaaaaaggaaauug

SEQ ID NO: 645254 - RNA, 21 nt, Human
aaugcgcacauacugggcaac

SEQ ID NO: 645255 - RNA, 23 nt, Human
acaagacaaauuaaaacagaaac

SEQ ID NO: 645256 - RNA, 22 nt, Human
acacaaaggagaagcaaaacca

SEQ ID NO: 645257 - RNA, 23 nt, Human
accaaaaaaaaccaaacaccaaa

SEQ ID NO: 645258 - RNA, 21 nt, Human
accaaaacaaaaacacaaauc

SEQ ID NO: 645259 - RNA, 21 nt, Human
accaaacaccaaaacaaaaac

SEQ ID NO: 645260 - RNA, 18 nt, Human
acgcugcacuccagcgug

SEQ ID NO: 645261 - RNA, 18 nt, Human
acugcuaacuaccagccu

SEQ ID NO: 645262 - RNA, 19 nt, Human
acuuuacaaauuaaugugu

SEQ ID NO: 645263 - RNA, 21 nt, Human
agauaaagcaauagcaaaaaa

SEQ ID NO: 645264 - RNA, 22 nt, Human
agaugcugaaaacagcucaccu

SEQ ID NO: 645265 - RNA, 21 nt, Human
agcaauagcaaaaaauuuuaa

SEQ ID NO: 645266 - RNA, 27 nt, Human
aggcucagaaguugcuuaauuugaacu

SEQ ID NO: 645267 - RNA, 20 nt, Human
agggccaccacuaggcacca

SEQ ID NO: 645268 - RNA, 27 nt, Human
aggugaaauucuaaacuggaggacaca

SEQ ID NO: 645269 - RNA, 18 nt, Human
agucaacagcuaaucuga

SEQ ID NO: 645270 - RNA, 24 nt, Human
auaaagcaauagcaaaaaauuuua

SEQ ID NO: 645271 - RNA, 19 nt, Human
auaauccccccacacacau

SEQ ID NO: 645272 - RNA, 21 nt, Human
auccaaaauaggcuuuuuaau

SEQ ID NO: 645273 - RNA, 20 nt, Human
auucuuuuucuaguuuuccu

SEQ ID NO: 645274 - RNA, 20 nt, Human
caaaacaaaaacacaaaucu

SEQ ID NO: 645275 - RNA, 23 nt, Human
caaaacaaaaacacaaaucuuca

SEQ ID NO: 645276 - RNA, 23 nt, Human
caaaagcaucuggucacaacugc

SEQ ID NO: 645277 - RNA, 25 nt, Human
caacuauuuaccauaaauuauagau

SEQ ID NO: 645278 - RNA, 23 nt, Human
caauauagucucuucugugucaa

SEQ ID NO: 645279 - RNA, 21 nt, Human
cacagggccaccacuaggcac

SEQ ID NO: 645280 - RNA, 24 nt, Human
cacauacugggcaacauuugugua

SEQ ID NO: 645281 - RNA, 23 nt, Human
caccccuccagcucucucugucc

SEQ ID NO: 645282 - RNA, 21 nt, Human
cacuaugcugacuuuuaaagu

SEQ ID NO: 645283 - RNA, 24 nt, Human
cagccugagacagauuuuauucuu

SEQ ID NO: 645284 - RNA, 28 nt, Human
caggaacacaaaggagaagcaaaaccac

SEQ ID NO: 645285 - RNA, 25 nt, Human
cagguguucccgcacaggugauggc

SEQ ID NO: 645286 - RNA, 18 nt, Human
caugaaucccaagaucuu

SEQ ID NO: 645287 - RNA, 25 nt, Human
ccaaaaaaaaccaaacaccaaaaca

SEQ ID NO: 645288 - RNA, 22 nt, Human
ccacuggcaaugcgcacauacu

SEQ ID NO: 645289 - RNA, 25 nt, Human
ccauccuuagauuuagggcaaaaca

SEQ ID NO: 645290 - RNA, 23 nt, Human
ccccacacacauucuucccuuug

SEQ ID NO: 645291 - RNA, 18 nt, Human
cccccucuucuugguuac

SEQ ID NO: 645292 - RNA, 20 nt, Human
cccccucuucuugguuacac

SEQ ID NO: 645293 - RNA, 21 nt, Human
cccgcacaggugauggccgug

SEQ ID NO: 645294 - RNA, 19 nt, Human
cccuuugccucccaacuau

SEQ ID NO: 645295 - RNA, 21 nt, Human
cucagaacacagggccaccac

SEQ ID NO: 645296 - RNA, 27 nt, Human
cugaaaacagcucaccuucauuuaccu

SEQ ID NO: 645297 - RNA, 18 nt, Human
cugccauguccaguuaug

SEQ ID NO: 645298 - RNA, 25 nt, Human
cugccucuauuccauuuuuacaaaa

SEQ ID NO: 645299 - RNA, 20 nt, Human
cugguuuuuguucaaagcag

SEQ ID NO: 645300 - RNA, 20 nt, Human
cuuucccccucuucuugguu

SEQ ID NO: 645301 - RNA, 19 nt, Human
cuuuuucuaguuuuccuua

SEQ ID NO: 645302 - RNA, 20 nt, Human
gacaaaaaggaaauugucuu

SEQ ID NO: 645303 - RNA, 21 nt, Human
gaugaaagacuuauaaagcug

SEQ ID NO: 645304 - RNA, 21 nt, Human
gcaaaacacuagugcaagcca

SEQ ID NO: 645305 - RNA, 24 nt, Human
ggaacaaaacuuuuuuuuuuuuuu

SEQ ID NO: 645306 - RNA, 21 nt, Human
ggcugagugagacaaaccagc

SEQ ID NO: 645307 - RNA, 23 nt, Human
ggcugguuuuuguucaaagcagu

SEQ ID NO: 645308 - RNA, 25 nt, Human
gggguccauuccuuuaagacaauuu

SEQ ID NO: 645309 - RNA, 23 nt, Human
gguguucuuucuucucccugccc

SEQ ID NO: 645310 - RNA, 20 nt, Human
guagugcuccuuuguauucu

SEQ ID NO: 645311 - RNA, 22 nt, Human
uaaaaaugagagcuaugaagua

SEQ ID NO: 645312 - RNA, 20 nt, Human
uaaaagccuugaugcuggcc

SEQ ID NO: 645313 - RNA, 18 nt, Human
uaaaauaaguucaucucu

SEQ ID NO: 645314 - RNA, 20 nt, Human
uaacuaccagccugagacag

SEQ ID NO: 645315 - RNA, 18 nt, Human
uaaggaaaccagguguuc

SEQ ID NO: 645316 - RNA, 29 nt, Human
uacaaaaagucaacagcuaaucugaugaa

SEQ ID NO: 645317 - RNA, 24 nt, Human
uacaaaaugaaguccacuggcaaa

SEQ ID NO: 645318 - RNA, 25 nt, Human
uaccaaaaaaaaccaaacaccaaaa

SEQ ID NO: 645319 - RNA, 25 nt, Human
uaccaaaaaaaaccaaacaccaaaa

SEQ ID NO: 645320 - RNA, 20 nt, Human
uaccacguggcgcugcugcc

SEQ ID NO: 645321 - RNA, 23 nt, Human
uacguuaccaaaaaaaaccaaac

SEQ ID NO: 645322 - RNA, 18 nt, Human
uauuagauggcuaaccca

SEQ ID NO: 645323 - RNA, 18 nt, Human
ucagaacacagggccacc

SEQ ID NO: 645324 - RNA, 26 nt, Human
uccaauaacaugaacuuuccaaaaua

SEQ ID NO: 645325 - RNA, 19 nt, Human
uccuuuaaucuaugugaug

SEQ ID NO: 645326 - RNA, 18 nt, Human
ucuaacugaggaacaaaa

SEQ ID NO: 645327 - RNA, 18 nt, Human
ugaacuuuccaaaauaua

SEQ ID NO: 645328 - RNA, 25 nt, Human
ugagacagauuuuauucuuuaauac

SEQ ID NO: 645329 - RNA, 21 nt, Human
ugauuuuuucuuuuuuaagca

SEQ ID NO: 645330 - RNA, 18 nt, Human
ugccgaugcauuucccuc

SEQ ID NO: 645331 - RNA, 25 nt, Human
uggcaaugcgcacauacugggcaac

SEQ ID NO: 645332 - RNA, 18 nt, Human
uggcuaacccaaaauugu

SEQ ID NO: 645333 - RNA, 20 nt, Human
ugggcagccuuaaaggacug

SEQ ID NO: 645334 - RNA, 19 nt, Human
ugguuuuuguucaaagcag

SEQ ID NO: 645335 - RNA, 23 nt, Human
uguaccuguaacacuuaagauuc

SEQ ID NO: 645336 - RNA, 23 nt, Human
ugugucaaauauuuaaaauggcc

SEQ ID NO: 645337 - RNA, 20 nt, Human
uguucagaauuuaaccugau

SEQ ID NO: 645338 - RNA, 24 nt, Human
uuaaaagcugccuauaaauacaua

SEQ ID NO: 645339 - RNA, 28 nt, Human
uuaauaauccccccacacacauucuucc

SEQ ID NO: 645340 - RNA, 18 nt, Human
uucaagaguugacaguua

SEQ ID NO: 645341 - RNA, 19 nt, Human
uucaucucucauguuagaa

SEQ ID NO: 645342 - RNA, 21 nt, Human
uugaacacuuaaugcaaauuc

SEQ ID NO: 645343 - RNA, 22 nt, Human
uugacaguuacguuaccaaaaa

SEQ ID NO: 645344 - RNA, 23 nt, Human
uuuaaaauggccagaaucaaacu

SEQ ID NO: 645345 - RNA, 22 nt, Human
uuuaagaagugccugggucggg

SEQ ID NO: 645346 - RNA, 23 nt, Human
uuuaagcauauaaaaauuacacu

SEQ ID NO: 645347 - RNA, 23 nt, Human
uuugaacuucaauuccaauaaca

SEQ ID NO: 645348 - RNA, 28 nt, Human
uuuuuguauuacaaaaagucaacagcua

SEQ ID NO: 645349 - RNA, 19 nt, Human
uuuuuuuuuuuuuuuccuu

SEQ ID NO: 645350 - RNA, 27 nt, Human
aaaagagagcaaguccaggcaacaaaa

SEQ ID NO: 645351 - RNA, 26 nt, Human
aaaaugcccccuucaaaagaagcuga

SEQ ID NO: 645352 - RNA, 20 nt, Human
aacaaaaugcccccuucaaa

SEQ ID NO: 645353 - RNA, 18 nt, Human
aaggcaaauaugcauaua

SEQ ID NO: 645354 - RNA, 22 nt, Human
aaugccaaccuuaauucuacaa

SEQ ID NO: 645355 - RNA, 19 nt, Human
acaaugaccauauuuucua

SEQ ID NO: 645356 - RNA, 19 nt, Human
acaguaccuguagaaggac

SEQ ID NO: 645357 - RNA, 22 nt, Human
acaguaccuguagaaggacacu

SEQ ID NO: 645358 - RNA, 22 nt, Human
acuuugaagauaaaagaccaua

SEQ ID NO: 645359 - RNA, 21 nt, Human
agagagcaaguccaggcaaca

SEQ ID NO: 645360 - RNA, 21 nt, Human
agagcaagccucuguaguugc

SEQ ID NO: 645361 - RNA, 21 nt, Human
agggcucaaccuuuccaacuu

SEQ ID NO: 645362 - RNA, 24 nt, Human
augcauauagaaccaaacacaaag

SEQ ID NO: 645363 - RNA, 23 nt, Human
auucugggagaccuugauuugga

SEQ ID NO: 645364 - RNA, 20 nt, Human
cacugauucugggagaccuu

SEQ ID NO: 645365 - RNA, 23 nt, Human
cagaacucucuuagaaaaugcua

SEQ ID NO: 645366 - RNA, 22 nt, Human
caggcaacaaaaugcccccuuc

SEQ ID NO: 645367 - RNA, 21 nt, Human
ccaaagucuuuaccucaaugg

SEQ ID NO: 645368 - RNA, 22 nt, Human
ccaucugaaacugugaagugga

SEQ ID NO: 645369 - RNA, 25 nt, Human
cccaagcaaaauaguuaguuugaaa

SEQ ID NO: 645370 - RNA, 23 nt, Human
ccccugugucucucucucgguag

SEQ ID NO: 645371 - RNA, 21 nt, Human
ccuccaggucacuggcaguuu

SEQ ID NO: 645372 - RNA, 22 nt, Human
ccuggugccagccccuuuccac

SEQ ID NO: 645373 - RNA, 26 nt, Human
cucaaaauagcauuuaauguggcacc

SEQ ID NO: 645374 - RNA, 22 nt, Human
cuuccccaaaugccaaccuuaa

SEQ ID NO: 645375 - RNA, 21 nt, Human
gcagccauauuugggcagagc

SEQ ID NO: 645376 - RNA, 23 nt, Human
gcaguaaaauaagaaaaggcaaa

SEQ ID NO: 645377 - RNA, 21 nt, Human
gccccuuuccaccacugaccc

SEQ ID NO: 645378 - RNA, 22 nt, Human
gcuaagcauaccacaguaccug

SEQ ID NO: 645379 - RNA, 19 nt, Human
guccaggcaacaaaaugcc

SEQ ID NO: 645380 - RNA, 20 nt, Human
uaauguggcaccaucuuuac

SEQ ID NO: 645381 - RNA, 24 nt, Human
uacaaugaccauauuuucuagacc

SEQ ID NO: 645382 - RNA, 19 nt, Human
uaccacaguaccuguagaa

SEQ ID NO: 645383 - RNA, 22 nt, Human
uagaaaaugcuaagcauaccac

SEQ ID NO: 645384 - RNA, 18 nt, Human
uagauuucuaacucaagc

SEQ ID NO: 645385 - RNA, 18 nt, Human
ucccaagcaaaauaguua

SEQ ID NO: 645386 - RNA, 20 nt, Human
ucccaagcaaaauaguuagu

SEQ ID NO: 645387 - RNA, 23 nt, Human
uccccaaaugccaaccuuaauuc

SEQ ID NO: 645388 - RNA, 18 nt, Human
uccccuccccugugucuc

SEQ ID NO: 645389 - RNA, 21 nt, Human
ucucugaccuucacaaacugu

SEQ ID NO: 645390 - RNA, 19 nt, Human
ucugaccuucacaaacugu

SEQ ID NO: 645391 - RNA, 23 nt, Human
ucuucuuugcuuuugagucccua

SEQ ID NO: 645392 - RNA, 22 nt, Human
ugagauuuaucuuuccccuccc

SEQ ID NO: 645393 - RNA, 22 nt, Human
ugcagccauauuugggcagagc

SEQ ID NO: 645394 - RNA, 18 nt, Human
ugcccuggugccagcccc

SEQ ID NO: 645395 - RNA, 22 nt, Human
ugcccuggugccagccccuuuc

SEQ ID NO: 645396 - RNA, 20 nt, Human
uggaauuucacugauucugg

SEQ ID NO: 645397 - RNA, 21 nt, Human
uggacauuucauaaaaguuuu

SEQ ID NO: 645398 - RNA, 28 nt, Human
uguggucaagggcucaaccccguggucg

SEQ ID NO: 645399 - RNA, 25 nt, Human
uugaauaggaaaugaugccuccagg

SEQ ID NO: 645400 - RNA, 21 nt, Human
uugaugcugugaauuucugaa

SEQ ID NO: 645401 - RNA, 19 nt, Human
uuuuuuuuuuuucaccuca

SEQ ID NO: 645402 - RNA, 22 nt, Human
uuuuuuuuuuuuuuuuucaccu

SEQ ID NO: 645403 - RNA, 19 nt, Human
aaaguuuucugcaccccaa

SEQ ID NO: 645404 - RNA, 19 nt, Human
aacacagugaagaaauaaa

SEQ ID NO: 645405 - RNA, 23 nt, Human
aaccucaggcagauagguuaagg

SEQ ID NO: 645406 - RNA, 24 nt, Human
aagacuccucccagcucaacacag

SEQ ID NO: 645407 - RNA, 19 nt, Human
aagaggcagcagaaaccag

SEQ ID NO: 645408 - RNA, 21 nt, Human
aaggcaaggauaggcaagaaa

SEQ ID NO: 645409 - RNA, 26 nt, Human
aaggcaaggauaggcaagaaaggucu

SEQ ID NO: 645410 - RNA, 19 nt, Human
acaauguaagagaagaggc

SEQ ID NO: 645411 - RNA, 21 nt, Human
acaauguaagagaagaggcag

SEQ ID NO: 645412 - RNA, 25 nt, Human
acaauguaagagaagaggcagcaga

SEQ ID NO: 645413 - RNA, 23 nt, Human
acagcaaucuuuuggaauuuucu

SEQ ID NO: 645414 - RNA, 21 nt, Human
accccaaacccucacaaaaca

SEQ ID NO: 645415 - RNA, 27 nt, Human
accccaaacccucacaaaacagaccuc

SEQ ID NO: 645416 - RNA, 22 nt, Human
accccaacccagguuuagcuga

SEQ ID NO: 645417 - RNA, 19 nt, Human
accucaucuucuccucaca

SEQ ID NO: 645418 - RNA, 19 nt, Human
agaaaaucccuucccacau

SEQ ID NO: 645419 - RNA, 20 nt, Human
agaagauacugccccaggac

SEQ ID NO: 645420 - RNA, 20 nt, Human
agagaagaggcagcagaaac

SEQ ID NO: 645421 - RNA, 24 nt, Human
agauaauccaggucacccagccuc

SEQ ID NO: 645422 - RNA, 23 nt, Human
aggcaaaaagcagguuacuuugg

SEQ ID NO: 645423 - RNA, 21 nt, Human
aggcacuaauuagacuaagcu

SEQ ID NO: 645424 - RNA, 19 nt, Human
aggcagcagaaaccagagc

SEQ ID NO: 645425 - RNA, 21 nt, Human
aguaacaguaguugggagaaa

SEQ ID NO: 645426 - RNA, 23 nt, Human
aucccuucccacauugaagacuc

SEQ ID NO: 645427 - RNA, 19 nt, Human
auguaagagaagaggcagc

SEQ ID NO: 645428 - RNA, 25 nt, Human
caaaggcagaaaagcuaggggccaa

SEQ ID NO: 645429 - RNA, 23 nt, Human
caacuucugcacuucucaguccu

SEQ ID NO: 645430 - RNA, 23 nt, Human
cacagaaagauacauauuagucc

SEQ ID NO: 645431 - RNA, 19 nt, Human
caccccaaacccucacaaa

SEQ ID NO: 645432 - RNA, 19 nt, Human
cagaaaccagagccugccc

SEQ ID NO: 645433 - RNA, 20 nt, Human
cagcagaaaccagagccugg

SEQ ID NO: 645434 - RNA, 24 nt, Human
cagccuuaccacuguuccaacuuc

SEQ ID NO: 645435 - RNA, 22 nt, Human
caggcagauagguuaaggcaag

SEQ ID NO: 645436 - RNA, 18 nt, Human
caggucacccagccuccc

SEQ ID NO: 645437 - RNA, 20 nt, Human
cauugaagacuccucccagc

SEQ ID NO: 645438 - RNA, 21 nt, Human
ccaaacccucacaaaacagac

SEQ ID NO: 645439 - RNA, 23 nt, Human
ccaagacccacugggcagaaagc

SEQ ID NO: 645440 - RNA, 20 nt, Human
ccagguuuagcugaucuuua

SEQ ID NO: 645441 - RNA, 22 nt, Human
cccagcucaacacagugaagaa

SEQ ID NO: 645442 - RNA, 24 nt, Human
ccggggaucuggcugauucuucuc

SEQ ID NO: 645443 - RNA, 21 nt, Human
ccucacaaaacagaccucuau

SEQ ID NO: 645444 - RNA, 24 nt, Human
ccucacgggucagcugcuuggucu

SEQ ID NO: 645445 - RNA, 19 nt, Human
ccugcaguucacuuuucag

SEQ ID NO: 645446 - RNA, 18 nt, Human
ccugcuguaacugagccu

SEQ ID NO: 645447 - RNA, 23 nt, Human
cgggcagccucuuccugaaguuc

SEQ ID NO: 645448 - RNA, 19 nt, Human
cuagcuuugugccaggagc

SEQ ID NO: 645449 - RNA, 25 nt, Human
cuauaaccaguaacaguaguuggga

SEQ ID NO: 645450 - RNA, 24 nt, Human
cucuauaaccaguaacaguaguug

SEQ ID NO: 645451 - RNA, 21 nt, Human
cuucucaguccuaaccucauc

SEQ ID NO: 645452 - RNA, 21 nt, Human
cuuuucuuaaaagagcaggau

SEQ ID NO: 645453 - RNA, 20 nt, Human
gacucacaaucucaggccaa

SEQ ID NO: 645454 - RNA, 23 nt, Human
gagaacccccuuuccagacugcc

SEQ ID NO: 645455 - RNA, 20 nt, Human
gcaaggauaggcaagaaagg

SEQ ID NO: 645456 - RNA, 20 nt, Human
gcagaaagcaccccaaccca

SEQ ID NO: 645457 - RNA, 19 nt, Human
ggcucuuaaggcgggcagc

SEQ ID NO: 645458 - RNA, 20 nt, Human
gggucagcugcuuggucugc

SEQ ID NO: 645459 - RNA, 23 nt, Human
uaaaacaaaacaucuuauuuuaa

SEQ ID NO: 645460 - RNA, 22 nt, Human
uaacugaacucccuuuggaguc

SEQ ID NO: 645461 - RNA, 22 nt, Human
uaacugagccuggaaauggcuc

SEQ ID NO: 645462 - RNA, 21 nt, Human
uaaggcgggcagccucuuccc

SEQ ID NO: 645463 - RNA, 21 nt, Human
uacugccccaggacuuucagu

SEQ ID NO: 645464 - RNA, 18 nt, Human
uaguccaguuaguggcca

SEQ ID NO: 645465 - RNA, 22 nt, Human
ucaaaguuuucugcaccccaaa

SEQ ID NO: 645466 - RNA, 20 nt, Human
ucaaauccuuccaucuguuc

SEQ ID NO: 645467 - RNA, 24 nt, Human
ucacaugcacaccaucagaagaua

SEQ ID NO: 645468 - RNA, 21 nt, Human
ucacuuuucagcuccuccacc

SEQ ID NO: 645469 - RNA, 23 nt, Human
uccagaauaaacucacuauuccu

SEQ ID NO: 645470 - RNA, 25 nt, Human
uccagaauaaacucacuauuccuua

SEQ ID NO: 645471 - RNA, 18 nt, Human
uccaguuaguggccaaac

SEQ ID NO: 645472 - RNA, 22 nt, Human
ucccuaagaucaagcuggugcu

SEQ ID NO: 645473 - RNA, 19 nt, Human
ucccuacaaaggcagaaaa

SEQ ID NO: 645474 - RNA, 20 nt, Human
ucccuacaaaggcagaaaag

SEQ ID NO: 645475 - RNA, 21 nt, Human
ucucuagggccuaaggauaaa

SEQ ID NO: 645476 - RNA, 24 nt, Human
ucugagaacccccuuuccagacug

SEQ ID NO: 645477 - RNA, 22 nt, Human
ucugcaccccaaacccucacaa

SEQ ID NO: 645478 - RNA, 19 nt, Human
ucugcaguucaaauccuuc

SEQ ID NO: 645479 - RNA, 19 nt, Human
ugaagacuccucccagcuc

SEQ ID NO: 645480 - RNA, 18 nt, Human
ugagagggagaaaauagc

SEQ ID NO: 645481 - RNA, 18 nt, Human
ugcaguucacuuuucagc

SEQ ID NO: 645482 - RNA, 19 nt, Human
ugccccaggacuuucagua

SEQ ID NO: 645483 - RNA, 19 nt, Human
ugcuguaacugagccugga

SEQ ID NO: 645484 - RNA, 26 nt, Human
ugugccaggagcauauuauuaaaaca

SEQ ID NO: 645485 - RNA, 21 nt, Human
uuaaggcgggcagccucuucc

SEQ ID NO: 645486 - RNA, 22 nt, Human
uuacuccuagcuuugugccagg

SEQ ID NO: 645487 - RNA, 23 nt, Human
uuagcugaucuuuaccacuuccc

SEQ ID NO: 645488 - RNA, 24 nt, Human
uucagcugcauaugcucguccugc

SEQ ID NO: 645489 - RNA, 20 nt, Human
uuccugcuguaacugagccu

SEQ ID NO: 645490 - RNA, 22 nt, Human
uuccugcuguaacugagccugg

SEQ ID NO: 645491 - RNA, 23 nt, Human
uucucaguccuaaccucaucuuc

SEQ ID NO: 645492 - RNA, 19 nt, Human
uuggaauuuucugcagcaa

SEQ ID NO: 645493 - RNA, 27 nt, Human
uuuaacccuauccaggcaaaaagcagg

SEQ ID NO: 645494 - RNA, 19 nt, Human
uuuucagcuccuccaccuc

SEQ ID NO: 645495 - RNA, 24 nt, Human
uuuuuuuuuuuuuuuuuuuucaag

SEQ ID NO: 645496 - RNA, 23 nt, Human
aacuucugcaguucaugcacacc

SEQ ID NO: 645497 - RNA, 22 nt, Human
accuugcucucuucaaccucca

SEQ ID NO: 645498 - RNA, 19 nt, Human
acggagcugcaggaacuug

SEQ ID NO: 645499 - RNA, 18 nt, Human
acuugguccuccaggugg

SEQ ID NO: 645500 - RNA, 23 nt, Human
agaggucccccgucaggguacgg

SEQ ID NO: 645501 - RNA, 21 nt, Human
agcuccucuagggcccucuuc

SEQ ID NO: 645502 - RNA, 24 nt, Human
aucuuggcucucauggcccucuca

SEQ ID NO: 645503 - RNA, 19 nt, Human
augacuuucaggcccauuc

SEQ ID NO: 645504 - RNA, 25 nt, Human
caacugaauucgaaucaccuugcuc

SEQ ID NO: 645505 - RNA, 28 nt, Human
caacuucugcaguucaugcacacuccuu

SEQ ID NO: 645506 - RNA, 22 nt, Human
cagcucagccucccgcuugcgg

SEQ ID NO: 645507 - RNA, 19 nt, Human
cagcucggccauggagucc

SEQ ID NO: 645508 - RNA, 18 nt, Human
cagcucugacuugccucc

SEQ ID NO: 645509 - RNA, 25 nt, Human
cagcugccucuuguaaucauccacu

SEQ ID NO: 645510 - RNA, 21 nt, Human
cagcuucuuccagggccaccu

SEQ ID NO: 645511 - RNA, 19 nt, Human
caggcucuccacaugcucc

SEQ ID NO: 645512 - RNA, 23 nt, Human
cagggcggccucuuccagcuccc

SEQ ID NO: 645513 - RNA, 22 nt, Human
cccauucugcgaaaagaaucca

SEQ ID NO: 645514 - RNA, 21 nt, Human
cccggauuuucuuuuccugcu

SEQ ID NO: 645515 - RNA, 19 nt, Human
ccgcagcuucagcagcuca

SEQ ID NO: 645516 - RNA, 19 nt, Human
ccgccaugcccucuuccuc

SEQ ID NO: 645517 - RNA, 20 nt, Human
ccgucagcucggccauggag

SEQ ID NO: 645518 - RNA, 21 nt, Human
ccuccagggaagacucagcuu

SEQ ID NO: 645519 - RNA, 21 nt, Human
ccucguaggcagucuugaucu

SEQ ID NO: 645520 - RNA, 20 nt, Human
ccucuaggucccgcuucagg

SEQ ID NO: 645521 - RNA, 22 nt, Human
ccugagcuccuccuccuuggcc

SEQ ID NO: 645522 - RNA, 27 nt, Human
ccugcuucuccuucucugucuuggccc

SEQ ID NO: 645523 - RNA, 18 nt, Human
ccuggcugagcguggcug

SEQ ID NO: 645524 - RNA, 22 nt, Human
cggcggugcugcgagacuuuga

SEQ ID NO: 645525 - RNA, 21 nt, Human
cuagggcccucuucuccuucu

SEQ ID NO: 645526 - RNA, 18 nt, Human
cuaguucuucuuccagcu

SEQ ID NO: 645527 - RNA, 21 nt, Human
cucauggcccucucagcuucu

SEQ ID NO: 645528 - RNA, 23 nt, Human
cuccagggaagacucagcuucuu

SEQ ID NO: 645529 - RNA, 22 nt, Human
cucuagggcccucuucuccuuc

SEQ ID NO: 645530 - RNA, 27 nt, Human
cucuuuuucaccaccuccucgagaucc

SEQ ID NO: 645531 - RNA, 18 nt, Human
cugcagcguggaauucag

SEQ ID NO: 645532 - RNA, 18 nt, Human
cugcagcuggauggugag

SEQ ID NO: 645533 - RNA, 22 nt, Human
cuggauggugaggucauucuuc

SEQ ID NO: 645534 - RNA, 23 nt, Human
cuucucugucuuggccagcgugg

SEQ ID NO: 645535 - RNA, 20 nt, Human
cuucuugccgagccacauuc

SEQ ID NO: 645536 - RNA, 22 nt, Human
cuugacccucugcaggcucucc

SEQ ID NO: 645537 - RNA, 22 nt, Human
cuugcucucuucaaccuccagg

SEQ ID NO: 645538 - RNA, 18 nt, Human
cuuggccuucaucuccuc

SEQ ID NO: 645539 - RNA, 23 nt, Human
gacuugccucccugcuccuccuc

SEQ ID NO: 645540 - RNA, 23 nt, Human
gagccaguuccaacugaauucga

SEQ ID NO: 645541 - RNA, 22 nt, Human
gccaugcccucuuccuccucca

SEQ ID NO: 645542 - RNA, 25 nt, Human
gcgcugcagcucugacuugccuccc

SEQ ID NO: 645543 - RNA, 22 nt, Human
gcgguucugcucgaucuuggcu

SEQ ID NO: 645544 - RNA, 21 nt, Human
gcuuccaccagccccagaaac

SEQ ID NO: 645545 - RNA, 22 nt, Human
ggacucuucauauucccugcuc

SEQ ID NO: 645546 - RNA, 22 nt, Human
ggccauggaguccacgugcuuc

SEQ ID NO: 645547 - RNA, 24 nt, Human
ggugguucaccuuguccuccucag

SEQ ID NO: 645548 - RNA, 21 nt, Human
gucagcuuuaaccugagccag

SEQ ID NO: 645549 - RNA, 18 nt, Human
uaucuccuccugcagggu

SEQ ID NO: 645550 - RNA, 18 nt, Human
ucaaucucagccuucaug

SEQ ID NO: 645551 - RNA, 19 nt, Human
ucaaucucagccuucauga

SEQ ID NO: 645552 - RNA, 24 nt, Human
ucaccuuguccuccucagccugua

SEQ ID NO: 645553 - RNA, 24 nt, Human
ucagcuccccuuccaacuugcgcu

SEQ ID NO: 645554 - RNA, 19 nt, Human
ucaggaguggcuugaccuu

SEQ ID NO: 645555 - RNA, 21 nt, Human
uccaaaucccucuuuuucacc

SEQ ID NO: 645556 - RNA, 25 nt, Human
ucccugcuccuccuccagcugcucc

SEQ ID NO: 645557 - RNA, 21 nt, Human
uccgcugcagcguggaauuca

SEQ ID NO: 645558 - RNA, 20 nt, Human
uccuccuccagcugcuccuu

SEQ ID NO: 645559 - RNA, 18 nt, Human
uccuccugcagggucuua

SEQ ID NO: 645560 - RNA, 21 nt, Human
uccuggguuugggccauggcu

SEQ ID NO: 645561 - RNA, 23 nt, Human
uccuggguuugggccauggcuuu

SEQ ID NO: 645562 - RNA, 26 nt, Human
uccuggugcuccuucaguuuccgcug

SEQ ID NO: 645563 - RNA, 18 nt, Human
ucuaguucuucuuccagc

SEQ ID NO: 645564 - RNA, 20 nt, Human
ucuaguucuucuuccagcuc

SEQ ID NO: 645565 - RNA, 22 nt, Human
ucucagcuuuccgacgagccuu

SEQ ID NO: 645566 - RNA, 20 nt, Human
ucucuagcuuggacuugacc

SEQ ID NO: 645567 - RNA, 23 nt, Human
ucucuugcucagccugcagcugg

SEQ ID NO: 645568 - RNA, 20 nt, Human
ucugauaagcugucuuccag

SEQ ID NO: 645569 - RNA, 22 nt, Human
ucugcagggcggccucuuccag

SEQ ID NO: 645570 - RNA, 25 nt, Human
ucuucaggucacucucagcuuuccg

SEQ ID NO: 645571 - RNA, 19 nt, Human
ugaaugacuuucaggccca

SEQ ID NO: 645572 - RNA, 20 nt, Human
ugacccucugcaggcucucc

SEQ ID NO: 645573 - RNA, 22 nt, Human
ugacccucugcaggcucuccac

SEQ ID NO: 645574 - RNA, 21 nt, Human
ugaccuguuuaucuuucucua

SEQ ID NO: 645575 - RNA, 23 nt, Human
ugagauccuuuaucuccuccugc

SEQ ID NO: 645576 - RNA, 23 nt, Human
ugaggccgccaugcccucuuccu

SEQ ID NO: 645577 - RNA, 18 nt, Human
ugaggucauucuucuccu

SEQ ID NO: 645578 - RNA, 20 nt, Human
ugccucccugcuccuccucc

SEQ ID NO: 645579 - RNA, 23 nt, Human
ugccucccugcuccuccuccagc

SEQ ID NO: 645580 - RNA, 19 nt, Human
ugcuucuccuucucugucu

SEQ ID NO: 645581 - RNA, 20 nt, Human
uggcucucauggcccucuca

SEQ ID NO: 645582 - RNA, 21 nt, Human
uggcugagcguggcugucuuc

SEQ ID NO: 645583 - RNA, 25 nt, Human
ugugauccagggccugcuucuccuu

SEQ ID NO: 645584 - RNA, 19 nt, Human
uuacuagguccaggucgug

SEQ ID NO: 645585 - RNA, 25 nt, Human
uucaauucgguccuggugcuccuuc

SEQ ID NO: 645586 - RNA, 22 nt, Human
uucaccaccuccucgagaucca

SEQ ID NO: 645587 - RNA, 18 nt, Human
uuccaccuccgcccggau

SEQ ID NO: 645588 - RNA, 23 nt, Human
uuccaggcccucuaggucccgcu

SEQ ID NO: 645589 - RNA, 22 nt, Human
uucucuugcucagccugcagcu

SEQ ID NO: 645590 - RNA, 22 nt, Human
uugcucucuucaaccuccaggg

SEQ ID NO: 645591 - RNA, 22 nt, Human
uuggacacgaggcgcugcagcu

SEQ ID NO: 645592 - RNA, 19 nt, Human
uuggaggcggguccugaug

SEQ ID NO: 645593 - RNA, 22 nt, Human
uuggugauggagucuucacgga

SEQ ID NO: 645594 - RNA, 24 nt, Human
uuguacagcuuccaccagccccag

SEQ ID NO: 645595 - RNA, 21 nt, Human
uuuccaucuccaauuuuuucu

SEQ ID NO: 645596 - RNA, 20 nt, Human
uuuccugagcuccuccuccu

SEQ ID NO: 645597 - RNA, 23 nt, Human
uuucgaguugacagaguuuauuu

SEQ ID NO: 645598 - RNA, 20 nt, Human
uuuucaccaccuccucgaga

SEQ ID NO: 645599 - RNA, 23 nt, Human
aaagaaacccugaucucaauuca

SEQ ID NO: 645600 - RNA, 24 nt, Human
aaagugcugggauuacagguguga

SEQ ID NO: 645601 - RNA, 21 nt, Human
aacagguaauuuuaacagaug

SEQ ID NO: 645602 - RNA, 19 nt, Human
aagaguuaaacuaaugagu

SEQ ID NO: 645603 - RNA, 21 nt, Human
aagcaaauauacgauaaaacu

SEQ ID NO: 645604 - RNA, 20 nt, Human
aagggguuucaccauguugg

SEQ ID NO: 645605 - RNA, 23 nt, Human
aagguucugaacaugagugauuc

SEQ ID NO: 645606 - RNA, 18 nt, Human
aagugcugggauuacagg

SEQ ID NO: 645607 - RNA, 19 nt, Human
aagugcugggauuacaggu

SEQ ID NO: 645608 - RNA, 26 nt, Human
aagugcugggauuacaggugugagcc

SEQ ID NO: 645609 - RNA, 25 nt, Human
aauaauacagugggguuguauacaa

SEQ ID NO: 645610 - RNA, 24 nt, Human
accauguuggccaggcugaucucg

SEQ ID NO: 645611 - RNA, 18 nt, Human
agacaaggaaucaaagca

SEQ ID NO: 645612 - RNA, 20 nt, Human
agagaagggguuucaccaug

SEQ ID NO: 645613 - RNA, 25 nt, Human
aggcuggagugcaguggcaugaucu

SEQ ID NO: 645614 - RNA, 24 nt, Human
agggguuucaccauguuggccagg

SEQ ID NO: 645615 - RNA, 22 nt, Human
aggugauccgccagucugggcc

SEQ ID NO: 645616 - RNA, 20 nt, Human
agugcaguggcaugaucucg

SEQ ID NO: 645617 - RNA, 23 nt, Human
agugcaguggcaugaucucggcu

SEQ ID NO: 645618 - RNA, 24 nt, Human
agugcaguggcaugaucucggcuc

SEQ ID NO: 645619 - RNA, 24 nt, Human
aguggcaugaucucggcucacugc

SEQ ID NO: 645620 - RNA, 23 nt, Human
auaaaacagacaaggaaucaaag

SEQ ID NO: 645621 - RNA, 19 nt, Human
auauuacaaugaaaaaagg

SEQ ID NO: 645622 - RNA, 26 nt, Human
caaaaaauacuguuuaacaacacuau

SEQ ID NO: 645623 - RNA, 23 nt, Human
caaaaagcuauccacccgccccc

SEQ ID NO: 645624 - RNA, 22 nt, Human
caaaguaacuuaguuaagaaag

SEQ ID NO: 645625 - RNA, 24 nt, Human
caaagugcugggauuacaggugug

SEQ ID NO: 645626 - RNA, 23 nt, Human
caaccuccaccucccagguucaa

SEQ ID NO: 645627 - RNA, 21 nt, Human
caccauguuggccaggcugau

SEQ ID NO: 645628 - RNA, 24 nt, Human
caccauguuggccaggcugaucuc

SEQ ID NO: 645629 - RNA, 21 nt, Human
cacgucuggcuaauuuuugua

SEQ ID NO: 645630 - RNA, 21 nt, Human
cacugcaaccuccaccuccca

SEQ ID NO: 645631 - RNA, 24 nt, Human
caguagagaagggguuucaccaug

SEQ ID NO: 645632 - RNA, 23 nt, Human
cauguuggccaggcugaucucga

SEQ ID NO: 645633 - RNA, 21 nt, Human
ccaaagugcugggauuacagg

SEQ ID NO: 645634 - RNA, 21 nt, Human
ccaaagugcugggauuacagg

SEQ ID NO: 645635 - RNA, 24 nt, Human
ccaaagugcugggauuacaggugu

SEQ ID NO: 645636 - RNA, 20 nt, Human
ccacccgcccccaaaaaaua

SEQ ID NO: 645637 - RNA, 24 nt, Human
ccaccucccagguucaagcgauuc

SEQ ID NO: 645638 - RNA, 20 nt, Human
cccagguucaagcgauucuc

SEQ ID NO: 645639 - RNA, 24 nt, Human
ccucccagguucaagcgauucucc

SEQ ID NO: 645640 - RNA, 18 nt, Human
ccugaccucaggugaucc

SEQ ID NO: 645641 - RNA, 23 nt, Human
cggccucagcuccugggcagcuu

SEQ ID NO: 645642 - RNA, 23 nt, Human
cuagaguacccuuauucaaccag

SEQ ID NO: 645643 - RNA, 23 nt, Human
cuauaaugcucccuugaagcaca

SEQ ID NO: 645644 - RNA, 24 nt, Human
cucacugcaaccuccaccucccag

SEQ ID NO: 645645 - RNA, 20 nt, Human
cucuguugcccaggcuggag

SEQ ID NO: 645646 - RNA, 21 nt, Human
cugaaaucagaaucuaaagaa

SEQ ID NO: 645647 - RNA, 23 nt, Human
cugcaaccuccaccucccagguu

SEQ ID NO: 645648 - RNA, 24 nt, Human
cuggagugcaguggcaugaucucg

SEQ ID NO: 645649 - RNA, 21 nt, Human
cugggccucccaaagugcugg

SEQ ID NO: 645650 - RNA, 19 nt, Human
gaagggguuucaccauguu

SEQ ID NO: 645651 - RNA, 22 nt, Human
gaagggguuucaccauguuggc

SEQ ID NO: 645652 - RNA, 18 nt, Human
gaccucaggugauccgcc

SEQ ID NO: 645653 - RNA, 21 nt, Human
gagauggagucuugcucuguu

SEQ ID NO: 645654 - RNA, 18 nt, Human
gauuacagguaugugcca

SEQ ID NO: 645655 - RNA, 18 nt, Human
gauuacaggugugagcca

SEQ ID NO: 645656 - RNA, 21 nt, Human
gauuacaggugugagccacca

SEQ ID NO: 645657 - RNA, 22 nt, Human
gauuacaggugugagccaccac

SEQ ID NO: 645658 - RNA, 22 nt, Human
gcaaccuccaccucccagguuc

SEQ ID NO: 645659 - RNA, 22 nt, Human
gcagcuuggauuacagguaugu

SEQ ID NO: 645660 - RNA, 24 nt, Human
gcccaggcuggagugcaguggcau

SEQ ID NO: 645661 - RNA, 25 nt, Human
gcucuguugcccaggcuggagugca

SEQ ID NO: 645662 - RNA, 23 nt, Human
gcugaucucgaucuccugaccuc

SEQ ID NO: 645663 - RNA, 23 nt, Human
ggagucuugcucuguugcccagg

SEQ ID NO: 645664 - RNA, 19 nt, Human
ggauuacagguaugugcca

SEQ ID NO: 645665 - RNA, 22 nt, Human
ggauuacagguaugugccauca

SEQ ID NO: 645666 - RNA, 22 nt, Human
gggguuucaccauguuggccag

SEQ ID NO: 645667 - RNA, 23 nt, Human
gggguuucaccauguuggccagg

SEQ ID NO: 645668 - RNA, 24 nt, Human
gugcuuuaauuaaaaagcaagcaa

SEQ ID NO: 645669 - RNA, 20 nt, Human
uaaaaagcaagcaaauauac

SEQ ID NO: 645670 - RNA, 23 nt, Human
uaaaacagacaaggaaucaaagc

SEQ ID NO: 645671 - RNA, 21 nt, Human
uaaaaugcacccuggaaaaga

SEQ ID NO: 645672 - RNA, 18 nt, Human
uaaccaaauauuucauuu

SEQ ID NO: 645673 - RNA, 30 nt, Human
uaagaauaaacagguaauuuuaacagaugg

SEQ ID NO: 645674 - RNA, 24 nt, Human
uaauuauacagaagcgaucggagc

SEQ ID NO: 645675 - RNA, 24 nt, Human
uaauuuuuguauuuucaguagaga

SEQ ID NO: 645676 - RNA, 19 nt, Human
uacagguaugugccaucac

SEQ ID NO: 645677 - RNA, 24 nt, Human
uacaggugugagccaccacgccca

SEQ ID NO: 645678 - RNA, 23 nt, Human
uacagugggguuguauacaacuu

SEQ ID NO: 645679 - RNA, 21 nt, Human
uagagaagggguuucaccaug

SEQ ID NO: 645680 - RNA, 22 nt, Human
uagagaagggguuucaccaugu

SEQ ID NO: 645681 - RNA, 24 nt, Human
uaguaagaaauuauaauuauacag

SEQ ID NO: 645682 - RNA, 19 nt, Human
ucaaagcacagauccugaa

SEQ ID NO: 645683 - RNA, 19 nt, Human
ucaaagcacagauccugaa

SEQ ID NO: 645684 - RNA, 23 nt, Human
ucacugcaaccuccaccucccag

SEQ ID NO: 645685 - RNA, 24 nt, Human
ucacugcaaccuccaccucccagg

SEQ ID NO: 645686 - RNA, 27 nt, Human
ucacugcaaccuccaccucccagguuc

SEQ ID NO: 645687 - RNA, 24 nt, Human
ucaguagagaagggguuucaccau

SEQ ID NO: 645688 - RNA, 23 nt, Human
ucccaaagugcugggauuacagg

SEQ ID NO: 645689 - RNA, 21 nt, Human
ucccagguucaagcgauucuc

SEQ ID NO: 645690 - RNA, 22 nt, Human
ucccagguucaagcgauucucc

SEQ ID NO: 645691 - RNA, 24 nt, Human
uccugggcagcuuggauuacaggu

SEQ ID NO: 645692 - RNA, 19 nt, Human
ucuaaagaaaauaauacag

SEQ ID NO: 645693 - RNA, 23 nt, Human
ucuacauaaaacuagaguacccu

SEQ ID NO: 645694 - RNA, 18 nt, Human
ucuguugcccaggcugga

SEQ ID NO: 645695 - RNA, 24 nt, Human
ucuguugcccaggcuggagugcag

SEQ ID NO: 645696 - RNA, 23 nt, Human
ucuugcucuguugcccaggcugg

SEQ ID NO: 645697 - RNA, 24 nt, Human
ucuugcucuguugcccaggcugga

SEQ ID NO: 645698 - RNA, 18 nt, Human
ugaccucaggugauccgc

SEQ ID NO: 645699 - RNA, 19 nt, Human
ugaccucaggugauccgcc

SEQ ID NO: 645700 - RNA, 20 nt, Human
ugaccucaggugauccgcca

SEQ ID NO: 645701 - RNA, 20 nt, Human
ugaccucaggugauccgcca

SEQ ID NO: 645702 - RNA, 24 nt, Human
ugacugacaggcaaaccagccuuc

SEQ ID NO: 645703 - RNA, 18 nt, Human
ugagucuauaggaguccg

SEQ ID NO: 645704 - RNA, 18 nt, Human
ugcccaggcuggagugca

SEQ ID NO: 645705 - RNA, 21 nt, Human
ugcccaggcuggagugcagug

SEQ ID NO: 645706 - RNA, 22 nt, Human
ugcccaggcuggagugcagugg

SEQ ID NO: 645707 - RNA, 24 nt, Human
ugcccaggcuggagugcaguggca

SEQ ID NO: 645708 - RNA, 24 nt, Human
ugcugggauuacaggugugagcca

SEQ ID NO: 645709 - RNA, 24 nt, Human
uggagucuugcucuguugcccagg

SEQ ID NO: 645710 - RNA, 19 nt, Human
uggagugcaguggcaugau

SEQ ID NO: 645711 - RNA, 24 nt, Human
uggagugcaguggcaugaucucgg

SEQ ID NO: 645712 - RNA, 19 nt, Human
uggauuacagguaugugcc

SEQ ID NO: 645713 - RNA, 20 nt, Human
uggauuacagguaugugcca

SEQ ID NO: 645714 - RNA, 24 nt, Human
uggccaggcugaucucgaucuccu

SEQ ID NO: 645715 - RNA, 18 nt, Human
ugggauuacaggugugag

SEQ ID NO: 645716 - RNA, 19 nt, Human
ugggauuacaggugugagc

SEQ ID NO: 645717 - RNA, 22 nt, Human
ugggauuacaggugugagccac

SEQ ID NO: 645718 - RNA, 23 nt, Human
ugggauuacaggugugagccacc

SEQ ID NO: 645719 - RNA, 24 nt, Human
ugggauuacaggugugagccacca

SEQ ID NO: 645720 - RNA, 24 nt, Human
uggucaaugcauggcuauaacaac

SEQ ID NO: 645721 - RNA, 27 nt, Human
uuaacggcuuccucuaauggauuuucu

SEQ ID NO: 645722 - RNA, 23 nt, Human
uucaaauaaacuucaauaucugc

SEQ ID NO: 645723 - RNA, 22 nt, Human
uucaacaauuuuaccagugaau

SEQ ID NO: 645724 - RNA, 23 nt, Human
uucaagcgauucuccggccucag

SEQ ID NO: 645725 - RNA, 21 nt, Human
uucuccggccucagcuccugg

SEQ ID NO: 645726 - RNA, 21 nt, Human
uucuugccugugggcuuuuaa

SEQ ID NO: 645727 - RNA, 24 nt, Human
uugcccaggcuggagugcaguggc

SEQ ID NO: 645728 - RNA, 24 nt, Human
uugcucuguugcccaggcuggagu

SEQ ID NO: 645729 - RNA, 22 nt, Human
uuggauuacagguaugugccau

SEQ ID NO: 645730 - RNA, 24 nt, Human
uuggauuacagguaugugccauca

SEQ ID NO: 645731 - RNA, 24 nt, Human
uuggcaggucggguaaagaacaaa

SEQ ID NO: 645732 - RNA, 21 nt, Human
uuuacagcgaguuuuucccgu

SEQ ID NO: 645733 - RNA, 21 nt, Human
uuucaccauguuggccaggcu

SEQ ID NO: 645734 - RNA, 24 nt, Human
uuuucaguagagaagggguuucac

SEQ ID NO: 645735 - RNA, 20 nt, Human
uuuuuguauuuucaguagag

SEQ ID NO: 645736 - RNA, 24 nt, Human
aaaaaaaaaguggaagccucaagg

SEQ ID NO: 645737 - RNA, 19 nt, Human
aaacaacaggagauauuac

SEQ ID NO: 645738 - RNA, 25 nt, Human
aaacaacccccuuccccuagcuccu

SEQ ID NO: 645739 - RNA, 24 nt, Human
aaaugaccagaauugauccaagua

SEQ ID NO: 645740 - RNA, 19 nt, Human
aagaagagaacugguggcu

SEQ ID NO: 645741 - RNA, 23 nt, Human
aagagaacagaaaaacaaaucca

SEQ ID NO: 645742 - RNA, 20 nt, Human
aagcagacuucucaugggga

SEQ ID NO: 645743 - RNA, 19 nt, Human
aaggaagaagagaacuggu

SEQ ID NO: 645744 - RNA, 19 nt, Human
aaggcaaacaacccccuuc

SEQ ID NO: 645745 - RNA, 18 nt, Human
aagugucucagaacccca

SEQ ID NO: 645746 - RNA, 21 nt, Human
aagugucucagaaccccacca

SEQ ID NO: 645747 - RNA, 20 nt, Human
aauagucaaacaucuucccc

SEQ ID NO: 645748 - RNA, 24 nt, Human
aaucuaugacagagacccaaucca

SEQ ID NO: 645749 - RNA, 22 nt, Human
acacacccacugaaggguucca

SEQ ID NO: 645750 - RNA, 22 nt, Human
acacuugaggccuccauccucu

SEQ ID NO: 645751 - RNA, 18 nt, Human
acaggacagaagagaaca

SEQ ID NO: 645752 - RNA, 21 nt, Human
acaggagauauuacaaagauc

SEQ ID NO: 645753 - RNA, 21 nt, Human
acccuggcccaucauuccagc

SEQ ID NO: 645754 - RNA, 21 nt, Human
agaaaaacaaauccaacugga

SEQ ID NO: 645755 - RNA, 25 nt, Human
agaaacaacaggagauauuacaaag

SEQ ID NO: 645756 - RNA, 25 nt, Human
agagggaagaaaaaugggcaaagag

SEQ ID NO: 645757 - RNA, 24 nt, Human
agcaauagucaaacaucuuccccc

SEQ ID NO: 645758 - RNA, 18 nt, Human
aggaagagagggaagaaa

SEQ ID NO: 645759 - RNA, 24 nt, Human
aggaagagagggaagaaaaauggg

SEQ ID NO: 645760 - RNA, 22 nt, Human
aggagauauuacaaagaucaag

SEQ ID NO: 645761 - RNA, 21 nt, Human
aggauggaguuaucuggaugg

SEQ ID NO: 645762 - RNA, 23 nt, Human
agggaagaaaaaugggcaaagag

SEQ ID NO: 645763 - RNA, 25 nt, Human
agggaagaaaaaugggcaaagagga

SEQ ID NO: 645764 - RNA, 21 nt, Human
aggugugagguucuggugaag

SEQ ID NO: 645765 - RNA, 24 nt, Human
aggugugagguucuggugaagagc

SEQ ID NO: 645766 - RNA, 23 nt, Human
aguauaagacaggacagaagaga

SEQ ID NO: 645767 - RNA, 20 nt, Human
agugucauccauccuagggc

SEQ ID NO: 645768 - RNA, 22 nt, Human
aguugcugaugcccagcuuuau

SEQ ID NO: 645769 - RNA, 19 nt, Human
aucgggggaaagggagaug

SEQ ID NO: 645770 - RNA, 18 nt, Human
caaacaacccccuucccc

SEQ ID NO: 645771 - RNA, 22 nt, Human
caaacaucuucccccaggcuug

SEQ ID NO: 645772 - RNA, 21 nt, Human
caacccccuuccccuagcucc

SEQ ID NO: 645773 - RNA, 24 nt, Human
cagaaaaacaaauccaacuggaaa

SEQ ID NO: 645774 - RNA, 24 nt, Human
cagccugaauuuagcaaaggaaga

SEQ ID NO: 645775 - RNA, 23 nt, Human
caggagggaagcaugccauagug

SEQ ID NO: 645776 - RNA, 23 nt, Human
cagguccugaagaaggcaaacaa

SEQ ID NO: 645777 - RNA, 19 nt, Human
cagucuucugacaggaaga

SEQ ID NO: 645778 - RNA, 20 nt, Human
caucauuccagccuccaaaa

SEQ ID NO: 645779 - RNA, 18 nt, Human
caucgggggaaagggaga

SEQ ID NO: 645780 - RNA, 22 nt, Human
caugccugcacccacaucugua

SEQ ID NO: 645781 - RNA, 21 nt, Human
ccacaggccaguugcugaugc

SEQ ID NO: 645782 - RNA, 23 nt, Human
ccaccaggagggaagcaugccau

SEQ ID NO: 645783 - RNA, 18 nt, Human
ccagaguaguugcuugag

SEQ ID NO: 645784 - RNA, 22 nt, Human
ccauccucuugaaaugaccaga

SEQ ID NO: 645785 - RNA, 22 nt, Human
cccaagugucucagaaccccac

SEQ ID NO: 645786 - RNA, 24 nt, Human
cccacaauucccccaagugucuca

SEQ ID NO: 645787 - RNA, 19 nt, Human
cccacacuugaggccucca

SEQ ID NO: 645788 - RNA, 18 nt, Human
cccaggagaggugugagg

SEQ ID NO: 645789 - RNA, 21 nt, Human
ccuaacuggguacuccucuug

SEQ ID NO: 645790 - RNA, 19 nt, Human
ccuccaaaacuggccacac

SEQ ID NO: 645791 - RNA, 22 nt, Human
ccuccaaaacuggccacacacc

SEQ ID NO: 645792 - RNA, 24 nt, Human
ccugcacccacaucuguaguaucu

SEQ ID NO: 645793 - RNA, 25 nt, Human
cuacacccuggcccaucauuccagc

SEQ ID NO: 645794 - RNA, 24 nt, Human
cucgacaggauggaguuaucugga

SEQ ID NO: 645795 - RNA, 25 nt, Human
cucuuaggucccaccucugugaggu

SEQ ID NO: 645796 - RNA, 20 nt, Human
gaaaaaggggugggagaagg

SEQ ID NO: 645797 - RNA, 24 nt, Human
gaaacaacaggagauauuacaaag

SEQ ID NO: 645798 - RNA, 20 nt, Human
gaagaaaaaugggcaaagag

SEQ ID NO: 645799 - RNA, 24 nt, Human
gagcuucucccuauggccucaugg

SEQ ID NO: 645800 - RNA, 21 nt, Human
gaggaagagagggaagaaaaa

SEQ ID NO: 645801 - RNA, 21 nt, Human
gaggauagcaagaagaauggg

SEQ ID NO: 645802 - RNA, 18 nt, Human
gagguucuggugaagagc

SEQ ID NO: 645803 - RNA, 20 nt, Human
gaguccucuuaggucccacc

SEQ ID NO: 645804 - RNA, 19 nt, Human
gcaaacaacccccuucccc

SEQ ID NO: 645805 - RNA, 21 nt, Human
gcaaagaggaaaaaggacaau

SEQ ID NO: 645806 - RNA, 23 nt, Human
gcaugccugcacccacaucugua

SEQ ID NO: 645807 - RNA, 21 nt, Human
ggaagaaaaaugggcaaagag

SEQ ID NO: 645808 - RNA, 23 nt, Human
ggaagaaaaaugggcaaagagga

SEQ ID NO: 645809 - RNA, 20 nt, Human
ggagaaggaagugugcuagg

SEQ ID NO: 645810 - RNA, 19 nt, Human
ggagcagaagaugaagggg

SEQ ID NO: 645811 - RNA, 22 nt, Human
ggagcuucucccuauggccuca

SEQ ID NO: 645812 - RNA, 21 nt, Human
gggaagaaaaaugggcaaaga

SEQ ID NO: 645813 - RNA, 21 nt, Human
gggagaaggaagugugcuagg

SEQ ID NO: 645814 - RNA, 18 nt, Human
ggggaggaagagagggaa

SEQ ID NO: 645815 - RNA, 24 nt, Human
ggggauggaggauagcaagaagaa

SEQ ID NO: 645816 - RNA, 24 nt, Human
gguucuggugaagagcagcaauag

SEQ ID NO: 645817 - RNA, 22 nt, Human
uacaagcagacuucucaugggg

SEQ ID NO: 645818 - RNA, 24 nt, Human
uacaagcagacuucucauggggag

SEQ ID NO: 645819 - RNA, 26 nt, Human
uagcaagaagaaugggugccuuggcc

SEQ ID NO: 645820 - RNA, 22 nt, Human
uaggggaaguucccacacuuga

SEQ ID NO: 645821 - RNA, 19 nt, Human
uagucaaacaucuuccccc

SEQ ID NO: 645822 - RNA, 23 nt, Human
uaucagcaaaauucagacacuuu

SEQ ID NO: 645823 - RNA, 22 nt, Human
ucacacaucaacuaucuuugga

SEQ ID NO: 645824 - RNA, 21 nt, Human
ucagaaagagccuacucgaca

SEQ ID NO: 645825 - RNA, 23 nt, Human
ucagcaaaauucagacacuuuua

SEQ ID NO: 645826 - RNA, 23 nt, Human
ucaguccagccagauacagagca

SEQ ID NO: 645827 - RNA, 21 nt, Human
ucaucccacacagcaaagugc

SEQ ID NO: 645828 - RNA, 23 nt, Human
uccauccuagggcccaccaggag

SEQ ID NO: 645829 - RNA, 22 nt, Human
ucuaaaaaaaaaaaaaguggaa

SEQ ID NO: 645830 - RNA, 18 nt, Human
ucuaauacuacaagcaga

SEQ ID NO: 645831 - RNA, 20 nt, Human
ucugcauaaucaugaguccu

SEQ ID NO: 645832 - RNA, 21 nt, Human
ucuucuggaaauaaaccuugg

SEQ ID NO: 645833 - RNA, 19 nt, Human
ugaaaggaaacuuuacaug

SEQ ID NO: 645834 - RNA, 26 nt, Human
ugaaaugaccagaauugauccaagua

SEQ ID NO: 645835 - RNA, 22 nt, Human
ugaaugcuuuuggccaucucug

SEQ ID NO: 645836 - RNA, 20 nt, Human
ugaccagaauugauccaagu

SEQ ID NO: 645837 - RNA, 24 nt, Human
ugagugucauccauccuagggccc

SEQ ID NO: 645838 - RNA, 23 nt, Human
ugcugacccacucucuaccccac

SEQ ID NO: 645839 - RNA, 21 nt, Human
ugcuugagccagguccaucug

SEQ ID NO: 645840 - RNA, 23 nt, Human
uggaauugagguaagggaagaga

SEQ ID NO: 645841 - RNA, 27 nt, Human
uggccauauuccaucgugugugugcaa

SEQ ID NO: 645842 - RNA, 19 nt, Human
uggcuagaauauccccaca

SEQ ID NO: 645843 - RNA, 19 nt, Human
uggcuagaauauccccaca

SEQ ID NO: 645844 - RNA, 22 nt, Human
uggcuaggcaggaugaaaggaa

SEQ ID NO: 645845 - RNA, 19 nt, Human
ugggcaaagaggaaaaagg

SEQ ID NO: 645846 - RNA, 21 nt, Human
ugggcaaagaggaaaaaggac

SEQ ID NO: 645847 - RNA, 25 nt, Human
uggugaagagcagcaauagucaaac

SEQ ID NO: 645848 - RNA, 22 nt, Human
uguccagucagguccugaagaa

SEQ ID NO: 645849 - RNA, 18 nt, Human
uguccccuaggagacaca

SEQ ID NO: 645850 - RNA, 22 nt, Human
ugugugcaugccugcacccaca

SEQ ID NO: 645851 - RNA, 21 nt, Human
uuauaugggggcuccaacccc

SEQ ID NO: 645852 - RNA, 27 nt, Human
uuaugucuaaaaaaaaaaaaaguggaa

SEQ ID NO: 645853 - RNA, 27 nt, Human
uucuucuggaaauaaaccuuggggaug

SEQ ID NO: 645854 - RNA, 20 nt, Human
uugaacaucagagagaacca

SEQ ID NO: 645855 - RNA, 22 nt, Human
uuggagcagaagaugaagggga

SEQ ID NO: 645856 - RNA, 20 nt, Human
uuuuuuuuuuuuuuugcugg

SEQ ID NO: 645857 - RNA, 22 nt, Human
aacuuggugguaucuccagccc

SEQ ID NO: 645858 - RNA, 23 nt, Human
aaggagcuuaaggaguuguuuga

SEQ ID NO: 645859 - RNA, 23 nt, Human
acagcugcugggcguccucacac

SEQ ID NO: 645860 - RNA, 25 nt, Human
accauguccagcacggcggccgcgc

SEQ ID NO: 645861 - RNA, 21 nt, Human
accccaugggaggggacccug

SEQ ID NO: 645862 - RNA, 20 nt, Human
agaccgccccccacuccaac

SEQ ID NO: 645863 - RNA, 23 nt, Human
agcaaaggcagaccgccccccac

SEQ ID NO: 645864 - RNA, 25 nt, Human
agcaggugggaggcuggcacgugca

SEQ ID NO: 645865 - RNA, 22 nt, Human
agccacaacaccccaagaaggc

SEQ ID NO: 645866 - RNA, 20 nt, Human
agcccggaucauagcagcga

SEQ ID NO: 645867 - RNA, 19 nt, Human
agcugcagggcagaggccu

SEQ ID NO: 645868 - RNA, 18 nt, Human
agcuggccucugagcgga

SEQ ID NO: 645869 - RNA, 21 nt, Human
aggaagcaggugggaggcugg

SEQ ID NO: 645870 - RNA, 19 nt, Human
aggcuccaggagggccccg

SEQ ID NO: 645871 - RNA, 22 nt, Human
aggcugcaccgggcgcaugcgg

SEQ ID NO: 645872 - RNA, 18 nt, Human
aggcuggcacgugcaggc

SEQ ID NO: 645873 - RNA, 23 nt, Human
agggaauggccagcaggaggagg

SEQ ID NO: 645874 - RNA, 20 nt, Human
agggggcagcggcugcuggg

SEQ ID NO: 645875 - RNA, 24 nt, Human
agggggcaggcucggguagccugc

SEQ ID NO: 645876 - RNA, 19 nt, Human
auggccucaaacagcucga

SEQ ID NO: 645877 - RNA, 19 nt, Human
auuggccacgcauccagcc

SEQ ID NO: 645878 - RNA, 20 nt, Human
auuuugauuaaaccuugcug

SEQ ID NO: 645879 - RNA, 21 nt, Human
caaaggcagaccgccccccac

SEQ ID NO: 645880 - RNA, 26 nt, Human
caacaccccaagaaggcuccaggagg

SEQ ID NO: 645881 - RNA, 24 nt, Human
caagcaguaaagacuugcaaagca

SEQ ID NO: 645882 - RNA, 19 nt, Human
caccauguccagcacggcg

SEQ ID NO: 645883 - RNA, 18 nt, Human
caccccaagaaggcucca

SEQ ID NO: 645884 - RNA, 20 nt, Human
caccccaagaaggcuccagg

SEQ ID NO: 645885 - RNA, 23 nt, Human
cacccugcagccccucaggugga

SEQ ID NO: 645886 - RNA, 20 nt, Human
cagaauggcagcauguccug

SEQ ID NO: 645887 - RNA, 20 nt, Human
cagcaccccccgacuggccc

SEQ ID NO: 645888 - RNA, 23 nt, Human
cagcauguccuguggccugggcu

SEQ ID NO: 645889 - RNA, 19 nt, Human
cagcccggaucauagcagc

SEQ ID NO: 645890 - RNA, 20 nt, Human
cagcuuaccccugccuaggg

SEQ ID NO: 645891 - RNA, 22 nt, Human
caggagggcaccaggccuggca

SEQ ID NO: 645892 - RNA, 24 nt, Human
caggucccggggcagcugcaggag

SEQ ID NO: 645893 - RNA, 20 nt, Human
caugcgggugugggccaggg

SEQ ID NO: 645894 - RNA, 22 nt, Human
ccaacuucaggggcuggacaug

SEQ ID NO: 645895 - RNA, 23 nt, Human
ccaccuccaagcaguaaagacuu

SEQ ID NO: 645896 - RNA, 18 nt, Human
ccagccacaacaccccaa

SEQ ID NO: 645897 - RNA, 20 nt, Human
ccauggcacugccugccagc

SEQ ID NO: 645898 - RNA, 20 nt, Human
cccaacucagccaccuccaa

SEQ ID NO: 645899 - RNA, 22 nt, Human
cccagccacaacaccccaagaa

SEQ ID NO: 645900 - RNA, 26 nt, Human
ccccaagaaggcuccaggagggcccc

SEQ ID NO: 645901 - RNA, 25 nt, Human
ccccacuccaacuucaggggcugga

SEQ ID NO: 645902 - RNA, 19 nt, Human
ccccccacuccaacuucag

SEQ ID NO: 645903 - RNA, 22 nt, Human
ccccccacuccaacuucagggg

SEQ ID NO: 645904 - RNA, 21 nt, Human
cccuuggcaggcugcaccggg

SEQ ID NO: 645905 - RNA, 18 nt, Human
ccgccccccacuccaacu

SEQ ID NO: 645906 - RNA, 18 nt, Human
ccggggcccagucccagc

SEQ ID NO: 645907 - RNA, 26 nt, Human
ccuagggcccccaacucagccaccuc

SEQ ID NO: 645908 - RNA, 21 nt, Human
ccucugagcggaugaucucca

SEQ ID NO: 645909 - RNA, 23 nt, Human
ccuggcagggggcaggcucgggu

SEQ ID NO: 645910 - RNA, 24 nt, Human
ccuugcugggcugaagggcaggca

SEQ ID NO: 645911 - RNA, 19 nt, Human
cgugcaggcgguccaggag

SEQ ID NO: 645912 - RNA, 21 nt, Human
cuccaagcaguaaagacuugc

SEQ ID NO: 645913 - RNA, 25 nt, Human
cuccagggacagcugcugggcgucc

SEQ ID NO: 645914 - RNA, 21 nt, Human
cucgaccagugcccggaaggc

SEQ ID NO: 645915 - RNA, 18 nt, Human
cucuuuuccgcuuccucc

SEQ ID NO: 645916 - RNA, 25 nt, Human
cugcaggaggucgggguggcucuuu

SEQ ID NO: 645917 - RNA, 26 nt, Human
cuuggccuugggccugggccugaggc

SEQ ID NO: 645918 - RNA, 24 nt, Human
cuuuuuauuggccacgcauccagc

SEQ ID NO: 645919 - RNA, 24 nt, Human
gaacgggggccagaccccauggga

SEQ ID NO: 645920 - RNA, 18 nt, Human
gacacuggcaggacgcag

SEQ ID NO: 645921 - RNA, 24 nt, Human
gacgcagcaccccccgacuggccc

SEQ ID NO: 645922 - RNA, 24 nt, Human
gcagaccgccccccacuccaacuu

SEQ ID NO: 645923 - RNA, 20 nt, Human
gcagcuggcggcuggugagc

SEQ ID NO: 645924 - RNA, 22 nt, Human
gccuagggcccccaacucagcc

SEQ ID NO: 645925 - RNA, 22 nt, Human
gccugccagcuuaccccugccu

SEQ ID NO: 645926 - RNA, 18 nt, Human
gcugggugucacccugca

SEQ ID NO: 645927 - RNA, 21 nt, Human
ggcagcugcaggaggucgggg

SEQ ID NO: 645928 - RNA, 23 nt, Human
ggcaguggcagcaaaggcagacc

SEQ ID NO: 645929 - RNA, 23 nt, Human
ggccuugggccugggccugaggc

SEQ ID NO: 645930 - RNA, 18 nt, Human
gggaauggccagcaggag

SEQ ID NO: 645931 - RNA, 21 nt, Human
gggaggcuggcacgugcaggc

SEQ ID NO: 645932 - RNA, 23 nt, Human
gggcagcuggcggcuggugagca

SEQ ID NO: 645933 - RNA, 18 nt, Human
gggcgcaugcgggugugg

SEQ ID NO: 645934 - RNA, 23 nt, Human
gggugugggccaggguugccuuu

SEQ ID NO: 645935 - RNA, 19 nt, Human
guaaggcacggaguuuugg

SEQ ID NO: 645936 - RNA, 18 nt, Human
guagccugcccucgcugg

SEQ ID NO: 645937 - RNA, 20 nt, Human
gugagggggcagcggcugcu

SEQ ID NO: 645938 - RNA, 19 nt, Human
gugcagcagcgucacgcgg

SEQ ID NO: 645939 - RNA, 20 nt, Human
gugcagcagcgucacgcggu

SEQ ID NO: 645940 - RNA, 22 nt, Human
uaccccugccuagggcccccaa

SEQ ID NO: 645941 - RNA, 21 nt, Human
uagaaguggucggcgcuggcc

SEQ ID NO: 645942 - RNA, 19 nt, Human
uagggcccccaacucagcc

SEQ ID NO: 645943 - RNA, 22 nt, Human
ucacccugcagccccucaggug

SEQ ID NO: 645944 - RNA, 20 nt, Human
ucaggggcuggacaugcugg

SEQ ID NO: 645945 - RNA, 19 nt, Human
uccagaagcuucuucaggu

SEQ ID NO: 645946 - RNA, 23 nt, Human
ucccagccacaacaccccaagaa

SEQ ID NO: 645947 - RNA, 18 nt, Human
ucucacuuggccuuggga

SEQ ID NO: 645948 - RNA, 24 nt, Human
ucuccaggcugaucccugcugcuu

SEQ ID NO: 645949 - RNA, 22 nt, Human
ugagggggcagcggcugcuggg

SEQ ID NO: 645950 - RNA, 22 nt, Human
ugccuagggcccccaacucagc

SEQ ID NO: 645951 - RNA, 18 nt, Human
ugcugggcugaagggcag

SEQ ID NO: 645952 - RNA, 19 nt, Human
ugcugggcugaagggcagg

SEQ ID NO: 645953 - RNA, 19 nt, Human
uggcacugccugccagcuu

SEQ ID NO: 645954 - RNA, 18 nt, Human
uggcagcaaaggcagacc

SEQ ID NO: 645955 - RNA, 18 nt, Human
uggcagggcacuggugcc

SEQ ID NO: 645956 - RNA, 22 nt, Human
uggcagggcacuggugccuguc

SEQ ID NO: 645957 - RNA, 21 nt, Human
uggcagggggcaggcucgggu

SEQ ID NO: 645958 - RNA, 22 nt, Human
uggcaguggcagcaaaggcaga

SEQ ID NO: 645959 - RNA, 23 nt, Human
uggcaguggcagcaaaggcagac

SEQ ID NO: 645960 - RNA, 18 nt, Human
uggccucaaacagcucga

SEQ ID NO: 645961 - RNA, 21 nt, Human
uggccuggaggcgcucggugu

SEQ ID NO: 645962 - RNA, 18 nt, Human
uggccugggcucucucac

SEQ ID NO: 645963 - RNA, 24 nt, Human
ugggaggcuggcacgugcaggcgg

SEQ ID NO: 645964 - RNA, 22 nt, Human
ugggagggguuuucuguugaug

SEQ ID NO: 645965 - RNA, 21 nt, Human
ugggcucucucacuuggccuu

SEQ ID NO: 645966 - RNA, 24 nt, Human
ugggcucucucacuuggccuuggg

SEQ ID NO: 645967 - RNA, 21 nt, Human
ugggugucacccugcagcccc

SEQ ID NO: 645968 - RNA, 19 nt, Human
ugguagcagggaauggcca

SEQ ID NO: 645969 - RNA, 19 nt, Human
uguauuguccccagggccu

SEQ ID NO: 645970 - RNA, 21 nt, Human
uuauuggccacgcauccagcc

SEQ ID NO: 645971 - RNA, 18 nt, Human
uuccuccagcacgugggc

SEQ ID NO: 645972 - RNA, 21 nt, Human
uucugcugggacuuggucucc

SEQ ID NO: 645973 - RNA, 18 nt, Human
uucuucagguuggagcug

SEQ ID NO: 645974 - RNA, 26 nt, Human
uuuuauuggccacgcauccagccgcc

SEQ ID NO: 645975 - RNA, 18 nt, Human
uuuuuuuuuuuuaggucu

SEQ ID NO: 645976 - RNA, 23 nt, Human
uuuuuuuuuuuuuuuuuuuuagg

SEQ ID NO: 645977 - RNA, 21 nt, Human
aagagcuccuguguggcugcc

SEQ ID NO: 645978 - RNA, 20 nt, Human
aagagcuggucacaggcuga

SEQ ID NO: 645979 - RNA, 25 nt, Human
acacccccuaccccaugaguacgcc

SEQ ID NO: 645980 - RNA, 19 nt, Human
agaacuuacaagguggugg

SEQ ID NO: 645981 - RNA, 18 nt, Human
agaggaagggacacagua

SEQ ID NO: 645982 - RNA, 24 nt, Human
aggaagggacacaguauguacaga

SEQ ID NO: 645983 - RNA, 19 nt, Human
aggccugcaccuccugcug

SEQ ID NO: 645984 - RNA, 25 nt, Human
cagcaacagggaauggaggugccaa

SEQ ID NO: 645985 - RNA, 18 nt, Human
cagcgguaggugccuggg

SEQ ID NO: 645986 - RNA, 20 nt, Human
caggaggcagcgguaggugc

SEQ ID NO: 645987 - RNA, 23 nt, Human
caggggccucuggcucuccaguc

SEQ ID NO: 645988 - RNA, 18 nt, Human
ccacuguuguuccuccgg

SEQ ID NO: 645989 - RNA, 18 nt, Human
cccagagcaccccccuca

SEQ ID NO: 645990 - RNA, 24 nt, Human
cccagagcaccccccucacgagag

SEQ ID NO: 645991 - RNA, 18 nt, Human
ccccagagcaccccccuc

SEQ ID NO: 645992 - RNA, 20 nt, Human
ccccucacgagagaauaaau

SEQ ID NO: 645993 - RNA, 19 nt, Human
cccucccggugacuccgca

SEQ ID NO: 645994 - RNA, 20 nt, Human
cccugcgcccccggcgaucc

SEQ ID NO: 645995 - RNA, 19 nt, Human
ccugcgcccccggcgaucc

SEQ ID NO: 645996 - RNA, 22 nt, Human
ccugcugaggucuccucagaca

SEQ ID NO: 645997 - RNA, 19 nt, Human
cuccucagacacagggggc

SEQ ID NO: 645998 - RNA, 24 nt, Human
cuccugcuguaaggcaggcuccug

SEQ ID NO: 645999 - RNA, 21 nt, Human
cugcaaggccuuuccaaauuc

SEQ ID NO: 646000 - RNA, 22 nt, Human
cugcugaggucuccucagacac

SEQ ID NO: 646001 - RNA, 24 nt, Human
cuguaaggcaggcuccugagacuc

SEQ ID NO: 646002 - RNA, 18 nt, Human
cuucaccauugcgcagcu

SEQ ID NO: 646003 - RNA, 22 nt, Human
cuuuccaaauucacggcugcac

SEQ ID NO: 646004 - RNA, 19 nt, Human
gagcaccccccucacgaga

SEQ ID NO: 646005 - RNA, 22 nt, Human
gaggauucggggugugggcucc

SEQ ID NO: 646006 - RNA, 22 nt, Human
gcagcgggcccugcugaggucu

SEQ ID NO: 646007 - RNA, 24 nt, Human
gccaggaggagggccucugugccc

SEQ ID NO: 646008 - RNA, 18 nt, Human
gcgcccccggcgaucccg

SEQ ID NO: 646009 - RNA, 21 nt, Human
gcuauggucuccaaggugcug

SEQ ID NO: 646010 - RNA, 19 nt, Human
gcucaggggccucuggcuc

SEQ ID NO: 646011 - RNA, 22 nt, Human
ggaauggaggugccaaagagga

SEQ ID NO: 646012 - RNA, 21 nt, Human
ggacacccccuaccccaugag

SEQ ID NO: 646013 - RNA, 22 nt, Human
gggaauggaggugccaaagagg

SEQ ID NO: 646014 - RNA, 23 nt, Human
gggaauggaggugccaaagagga

SEQ ID NO: 646015 - RNA, 24 nt, Human
gggaauggaggugccaaagaggaa

SEQ ID NO: 646016 - RNA, 20 nt, Human
gggaugggaagaggaaggga

SEQ ID NO: 646017 - RNA, 18 nt, Human
gggccucuggcucuccag

SEQ ID NO: 646018 - RNA, 21 nt, Human
gggccucuggcucuccagucu

SEQ ID NO: 646019 - RNA, 19 nt, Human
ggggaugggaagaggaagg

SEQ ID NO: 646020 - RNA, 22 nt, Human
ggugggacugguguugugggca

SEQ ID NO: 646021 - RNA, 20 nt, Human
ggugguggggaugggaagag

SEQ ID NO: 646022 - RNA, 20 nt, Human
ggugguggggaugggaagga

SEQ ID NO: 646023 - RNA, 24 nt, Human
guggaaggugggggggcaccuuua

SEQ ID NO: 646024 - RNA, 19 nt, Human
gugggggggcaccuuuaug

SEQ ID NO: 646025 - RNA, 24 nt, Human
guuucauuuuuggggucaccagug

SEQ ID NO: 646026 - RNA, 19 nt, Human
uaggugccuggggcagcgg

SEQ ID NO: 646027 - RNA, 27 nt, Human
uaggugccuggggcagcgggcccugcu

SEQ ID NO: 646028 - RNA, 24 nt, Human
uccgggcccugcgcccccggcgau

SEQ ID NO: 646029 - RNA, 19 nt, Human
ucgcugcuauggucuccaa

SEQ ID NO: 646030 - RNA, 24 nt, Human
ucuccaaggugcugguccagacug

SEQ ID NO: 646031 - RNA, 23 nt, Human
ucucugcuggggcuggcucaggg

SEQ ID NO: 646032 - RNA, 24 nt, Human
ucugugccgaaggccaggccacag

SEQ ID NO: 646033 - RNA, 18 nt, Human
ugagacacaggcaccucu

SEQ ID NO: 646034 - RNA, 24 nt, Human
ugcacagggggcacuuaaccucag

SEQ ID NO: 646035 - RNA, 19 nt, Human
ugccaaagaggaagucggg

SEQ ID NO: 646036 - RNA, 22 nt, Human
ugccaaagaggaagucgggcag

SEQ ID NO: 646037 - RNA, 24 nt, Human
ugcgcccccggcgaucccgcccaa

SEQ ID NO: 646038 - RNA, 19 nt, Human
uggaggugccaaagaggaa

SEQ ID NO: 646039 - RNA, 20 nt, Human
uggcaaggggucaggcugag

SEQ ID NO: 646040 - RNA, 20 nt, Human
ugggacugguguugugggca

SEQ ID NO: 646041 - RNA, 19 nt, Human
uggggaugggaagaggaag

SEQ ID NO: 646042 - RNA, 21 nt, Human
ugggggggcaccuuuaugugu

SEQ ID NO: 646043 - RNA, 21 nt, Human
uggucagaagcuggcaagggg

SEQ ID NO: 646044 - RNA, 22 nt, Human
uggucagaagcuggcaaggggu

SEQ ID NO: 646045 - RNA, 18 nt, Human
uguggcugccccgccugc

SEQ ID NO: 646046 - RNA, 21 nt, Human
ugugucaaggaccccagagca

SEQ ID NO: 646047 - RNA, 24 nt, Human
uuaaagacgcccucccggugacuc

SEQ ID NO: 646048 - RNA, 21 nt, Human
uuagaacuuacaagguggugg

SEQ ID NO: 646049 - RNA, 19 nt, Human
uucggggugugggcucgcc

SEQ ID NO: 646050 - RNA, 24 nt, Human
uucuccacuguuguuccuccgggc

SEQ ID NO: 646051 - RNA, 18 nt, Human
uuuuuuuuuuggcaaccc

SEQ ID NO: 646052 - RNA, 19 nt, Human
uuuuuuuuuuuuuuuuugg

SEQ ID NO: 646053 - RNA, 25 nt, Human
aaaagacacagucccugcccacaag

SEQ ID NO: 646054 - RNA, 22 nt, Human
aaagacacagucccugcccaca

SEQ ID NO: 646055 - RNA, 21 nt, Human
aaauaacuagaauacaaggca

SEQ ID NO: 646056 - RNA, 23 nt, Human
aacacgaugaaauaguguugucu

SEQ ID NO: 646057 - RNA, 22 nt, Human
acacagucccugcccacaagga

SEQ ID NO: 646058 - RNA, 21 nt, Human
acauggugcugauauaaguac

SEQ ID NO: 646059 - RNA, 20 nt, Human
agacaaauacacaaauaacu

SEQ ID NO: 646060 - RNA, 24 nt, Human
agcaacaagaaggccuuaaagaga

SEQ ID NO: 646061 - RNA, 23 nt, Human
aggccaauaacaagugcugacca

SEQ ID NO: 646062 - RNA, 25 nt, Human
auaacaagugcugaccaccuccuuc

SEQ ID NO: 646063 - RNA, 18 nt, Human
auacauauauaucauaua

SEQ ID NO: 646064 - RNA, 25 nt, Human
auagcacuauucuaacagcaacaag

SEQ ID NO: 646065 - RNA, 26 nt, Human
auauauacauauauaucauauauaua

SEQ ID NO: 646066 - RNA, 18 nt, Human
aucacaccuacauacaug

SEQ ID NO: 646067 - RNA, 21 nt, Human
auccugccauaggcaauuuua

SEQ ID NO: 646068 - RNA, 18 nt, Human
augaaagauacaaagaug

SEQ ID NO: 646069 - RNA, 18 nt, Human
auggugcugauauaagua

SEQ ID NO: 646070 - RNA, 21 nt, Human
caaacagguggaaauaacaac

SEQ ID NO: 646071 - RNA, 20 nt, Human
caaagcacuaugcuaggugc

SEQ ID NO: 646072 - RNA, 21 nt, Human
caaagcacuaugcuaggugca

SEQ ID NO: 646073 - RNA, 20 nt, Human
caccuacauacauggugcug

SEQ ID NO: 646074 - RNA, 25 nt, Human
cauuuccuggcuccuuuucccacuu

SEQ ID NO: 646075 - RNA, 23 nt, Human
cucaagguuccaauuugaaacac

SEQ ID NO: 646076 - RNA, 19 nt, Human
gaaaacaucucaaugacag

SEQ ID NO: 646077 - RNA, 23 nt, Human
gacaaauacacaaauaacuagaa

SEQ ID NO: 646078 - RNA, 18 nt, Human
gcugaccaccuccucuug

SEQ ID NO: 646079 - RNA, 20 nt, Human
ggaaauaacagaguaggccc

SEQ ID NO: 646080 - RNA, 18 nt, Human
guccuuugguuaauggcu

SEQ ID NO: 646081 - RNA, 19 nt, Human
uacaaggcaguaaacaaga

SEQ ID NO: 646082 - RNA, 18 nt, Human
uagccucaagguuccaau

SEQ ID NO: 646083 - RNA, 21 nt, Human
uauacauauauaucauauaua

SEQ ID NO: 646084 - RNA, 21 nt, Human
uauauaucauauauauauaua

SEQ ID NO: 646085 - RNA, 20 nt, Human
uauaucauauauauauauau

SEQ ID NO: 646086 - RNA, 21 nt, Human
uauguucagccuucugaaaua

SEQ ID NO: 646087 - RNA, 24 nt, Human
ucaagguuccaauuugaaacacga

SEQ ID NO: 646088 - RNA, 20 nt, Human
ucacauaccugauauauagc

SEQ ID NO: 646089 - RNA, 21 nt, Human
ugaaagauacaaagaugaaaa

SEQ ID NO: 646090 - RNA, 21 nt, Human
ugaaaguacuaucacaccuac

SEQ ID NO: 646091 - RNA, 19 nt, Human
ugaaauaaauggucacaua

SEQ ID NO: 646092 - RNA, 20 nt, Human
ugaaauaacuggcaaaguag

SEQ ID NO: 646093 - RNA, 24 nt, Human
ugaaauaacuggcaaaguagaagc

SEQ ID NO: 646094 - RNA, 21 nt, Human
ugagugacuacuaugugcaaa

SEQ ID NO: 646095 - RNA, 19 nt, Human
ugcaugaaagauacaaaga

SEQ ID NO: 646096 - RNA, 20 nt, Human
ugucuuucauugguuucaug

SEQ ID NO: 646097 - RNA, 21 nt, Human
uuaaauggcccuacccaaaca

SEQ ID NO: 646098 - RNA, 25 nt, Human
uuaaauggcccuacccaaacaggug

SEQ ID NO: 646099 - RNA, 21 nt, Human
uucgaaaaucccaucccaagu

SEQ ID NO: 646100 - RNA, 23 nt, Human
uugcuuaugacuauggcaacccc

SEQ ID NO: 646101 - RNA, 20 nt, Human
uuuccuggcuccuuuuccca

SEQ ID NO: 646102 - RNA, 22 nt, Human
aaaacuacagauacaauacaca

SEQ ID NO: 646103 - RNA, 20 nt, Human
aacaacccugaccauggcca

SEQ ID NO: 646104 - RNA, 24 nt, Human
aauccuucuacauuuuuuuuuucu

SEQ ID NO: 646105 - RNA, 19 nt, Human
agcacuaacguccuccggg

SEQ ID NO: 646106 - RNA, 27 nt, Human
agucggcaagccuggacaagaagagca

SEQ ID NO: 646107 - RNA, 19 nt, Human
aguuuauuacaaaacuaca

SEQ ID NO: 646108 - RNA, 18 nt, Human
auggccagugcuauggag

SEQ ID NO: 646109 - RNA, 22 nt, Human
caacaacccugaccauggccag

SEQ ID NO: 646110 - RNA, 23 nt, Human
caagaagagcacuaacguccucc

SEQ ID NO: 646111 - RNA, 25 nt, Human
caagaagagcacuaacguccuccgg

SEQ ID NO: 646112 - RNA, 18 nt, Human
caccagagcugccagggc

SEQ ID NO: 646113 - RNA, 20 nt, Human
caccagagcugccagggcuu

SEQ ID NO: 646114 - RNA, 22 nt, Human
caggucagauguuccaacaacc

SEQ ID NO: 646115 - RNA, 23 nt, Human
cagugcuauggagucacuccaaa

SEQ ID NO: 646116 - RNA, 20 nt, Human
ccaugacuacgggacuccuc

SEQ ID NO: 646117 - RNA, 24 nt, Human
ccucaaagcccgucugcuuggccu

SEQ ID NO: 646118 - RNA, 23 nt, Human
ccuccggggccacgccacugccc

SEQ ID NO: 646119 - RNA, 21 nt, Human
ccugacuccucggcuccugga

SEQ ID NO: 646120 - RNA, 21 nt, Human
cgccuucgacaucuagaaagu

SEQ ID NO: 646121 - RNA, 19 nt, Human
cggagcugcugucauccgg

SEQ ID NO: 646122 - RNA, 25 nt, Human
cugccagggcuugaagaauuucccu

SEQ ID NO: 646123 - RNA, 18 nt, Human
cugccgccuucgacaucu

SEQ ID NO: 646124 - RNA, 20 nt, Human
cuuugcugacaagaugauuc

SEQ ID NO: 646125 - RNA, 19 nt, Human
gaaauccuucuacauuuuu

SEQ ID NO: 646126 - RNA, 24 nt, Human
gcacuaacguccuccggggccacg

SEQ ID NO: 646127 - RNA, 20 nt, Human
gcagagccuuucuuagaccg

SEQ ID NO: 646128 - RNA, 20 nt, Human
ggagucacuccaaagguggu

SEQ ID NO: 646129 - RNA, 20 nt, Human
ggucagauguuccaacaacc

SEQ ID NO: 646130 - RNA, 23 nt, Human
gucuuccuacugccgccuucgac

SEQ ID NO: 646131 - RNA, 20 nt, Human
guggaucucggugcgggcgg

SEQ ID NO: 646132 - RNA, 21 nt, Human
uagugaacggauuguuucugc

SEQ ID NO: 646133 - RNA, 22 nt, Human
ucaaagcccgucugcuuggccu

SEQ ID NO: 646134 - RNA, 21 nt, Human
uccaagugcuguucaucaaca

SEQ ID NO: 646135 - RNA, 21 nt, Human
ucggugcgggcggagcugcug

SEQ ID NO: 646136 - RNA, 19 nt, Human
ucugccccuaagaugaaau

SEQ ID NO: 646137 - RNA, 18 nt, Human
ugaacggauuguuucugc

SEQ ID NO: 646138 - RNA, 24 nt, Human
ugaacggauuguuucugccccuaa

SEQ ID NO: 646139 - RNA, 22 nt, Human
ugcuauggagucacuccaaagg

SEQ ID NO: 646140 - RNA, 23 nt, Human
ugguugagcccucugugaaaauu

SEQ ID NO: 646141 - RNA, 19 nt, Human
ugugaaaauuuaaauggcu

SEQ ID NO: 646142 - RNA, 18 nt, Human
uuaguuuauuacaaaacu

SEQ ID NO: 646143 - RNA, 21 nt, Human
uucaucaacaauuaccuguaa

SEQ ID NO: 646144 - RNA, 22 nt, Human
uugaagaauuucccuguguguc

SEQ ID NO: 646145 - RNA, 18 nt, Human
uuugacauuuggagccau

SEQ ID NO: 646146 - RNA, 18 nt, Human
uuuuggggacacacuauu

SEQ ID NO: 646147 - RNA, 22 nt, Human
aaaaacaaaacaaaugaaaaga

SEQ ID NO: 646148 - RNA, 22 nt, Human
aaaaacuguaaauagcgaccau

SEQ ID NO: 646149 - RNA, 18 nt, Human
aaacaaacaucauaaacc

SEQ ID NO: 646150 - RNA, 23 nt, Human
aaacaucuuuuuaaaccugacag

SEQ ID NO: 646151 - RNA, 18 nt, Human
aaagaaaaugaggugcag

SEQ ID NO: 646152 - RNA, 22 nt, Human
aaagaaaaugaggugcaguucc

SEQ ID NO: 646153 - RNA, 24 nt, Human
aaauaaacaggucaguucuacaaa

SEQ ID NO: 646154 - RNA, 22 nt, Human
aacagcauugccaaauaaacag

SEQ ID NO: 646155 - RNA, 20 nt, Human
aagaaaaacaaaacaaauga

SEQ ID NO: 646156 - RNA, 25 nt, Human
aagcaacaucuuccuaaaaagcuuc

SEQ ID NO: 646157 - RNA, 23 nt, Human
aaggccccauuagcaguuagaaa

SEQ ID NO: 646158 - RNA, 25 nt, Human
aaucaacuuugaagucugaaaccga

SEQ ID NO: 646159 - RNA, 22 nt, Human
aauggugacaaugauauucaag

SEQ ID NO: 646160 - RNA, 18 nt, Human
acaaaacaaaugaaaaga

SEQ ID NO: 646161 - RNA, 20 nt, Human
acaaaacaaaugaaaagaag

SEQ ID NO: 646162 - RNA, 23 nt, Human
acugcauaauuugcacuggccua

SEQ ID NO: 646163 - RNA, 20 nt, Human
aggugcaaaacauccauuac

SEQ ID NO: 646164 - RNA, 20 nt, Human
aguaaacacaguaccaacca

SEQ ID NO: 646165 - RNA, 21 nt, Human
aguauacaaggcuugaugaaa

SEQ ID NO: 646166 - RNA, 24 nt, Human
aguguaauacuucugugaaagauu

SEQ ID NO: 646167 - RNA, 31 nt, Human
auuauguccauauaaaugaaaacaaacaucu

SEQ ID NO: 646168 - RNA, 21 nt, Human
auugccaaauaaacaggucag

SEQ ID NO: 646169 - RNA, 21 nt, Human
caaacaucauaaaccuauagg

SEQ ID NO: 646170 - RNA, 22 nt, Human
caacaucuuccuaaaaagcuuc

SEQ ID NO: 646171 - RNA, 21 nt, Human
caacuuuuuagcaacaaaaug

SEQ ID NO: 646172 - RNA, 24 nt, Human
caauaauuuaugaauuaaaacauc

SEQ ID NO: 646173 - RNA, 21 nt, Human
cacugggcugccaaauagccc

SEQ ID NO: 646174 - RNA, 20 nt, Human
ccauuagcaguuagaaauga

SEQ ID NO: 646175 - RNA, 21 nt, Human
cccauuagcaguuagaaauga

SEQ ID NO: 646176 - RNA, 24 nt, Human
cucucauuaucagcaggacuuuau

SEQ ID NO: 646177 - RNA, 20 nt, Human
cuuuuuagcaacaaaaugua

SEQ ID NO: 646178 - RNA, 22 nt, Human
gaaaacaaacaucauaaaccua

SEQ ID NO: 646179 - RNA, 20 nt, Human
gaaccugaauggaauuagug

SEQ ID NO: 646180 - RNA, 21 nt, Human
gaaguuuaaaaguuuuguuuu

SEQ ID NO: 646181 - RNA, 20 nt, Human
gagucugucuuuuuguuggg

SEQ ID NO: 646182 - RNA, 19 nt, Human
ggagaaccugaauggaauu

SEQ ID NO: 646183 - RNA, 21 nt, Human
ggugacaaugauauucaagaa

SEQ ID NO: 646184 - RNA, 24 nt, Human
ggugacaaugauauucaagaagaa

SEQ ID NO: 646185 - RNA, 19 nt, Human
gucaguucuacaaagcuaa

SEQ ID NO: 646186 - RNA, 24 nt, Human
guucgagcuugggcccccuccuuu

SEQ ID NO: 646187 - RNA, 26 nt, Human
uaaagacaucuuuuaaaguaauuuua

SEQ ID NO: 646188 - RNA, 25 nt, Human
uaacugaaauaacacugaaguucga

SEQ ID NO: 646189 - RNA, 23 nt, Human
uaacuguagaccacuucagcucu

SEQ ID NO: 646190 - RNA, 21 nt, Human
uaagcacaauuucuggauaaa

SEQ ID NO: 646191 - RNA, 22 nt, Human
uaagcagaaguauacaaggcuu

SEQ ID NO: 646192 - RNA, 22 nt, Human
uacucuuguuuguuauuacacu

SEQ ID NO: 646193 - RNA, 20 nt, Human
uagaccaaacccauguaccc

SEQ ID NO: 646194 - RNA, 18 nt, Human
uauccaaaugguaugaga

SEQ ID NO: 646195 - RNA, 21 nt, Human
uauugcuuguggacauaauuu

SEQ ID NO: 646196 - RNA, 24 nt, Human
uccuuuaacagcauugccaaauaa

SEQ ID NO: 646197 - RNA, 21 nt, Human
ugaaaacaaacaucauaaacc

SEQ ID NO: 646198 - RNA, 22 nt, Human
ugaaaagaguaucucuaacuga

SEQ ID NO: 646199 - RNA, 19 nt, Human
ugaccaaaugauaaagugg

SEQ ID NO: 646200 - RNA, 25 nt, Human
ugauccagaaucuuauucuggcuau

SEQ ID NO: 646201 - RNA, 23 nt, Human
ugccaaauagcccaauuaacugg

SEQ ID NO: 646202 - RNA, 21 nt, Human
uggaauuagugacaaauggac

SEQ ID NO: 646203 - RNA, 18 nt, Human
uuaaacagcugagaggac

SEQ ID NO: 646204 - RNA, 21 nt, Human
uuaguacauagguucacuggg

SEQ ID NO: 646205 - RNA, 20 nt, Human
uucaagaugaaacauuuagu

SEQ ID NO: 646206 - RNA, 18 nt, Human
uucaauaucacaguccuu

SEQ ID NO: 646207 - RNA, 25 nt, Human
uugaaaaaaagcauggauaccacga

SEQ ID NO: 646208 - RNA, 23 nt, Human
uugaccaaaugauaaaguggcuc

SEQ ID NO: 646209 - RNA, 21 nt, Human
uuuaaaccugacaggaaaaua

SEQ ID NO: 646210 - RNA, 19 nt, Human
uuuagcaacaaaauguauu

SEQ ID NO: 646211 - RNA, 20 nt, Human
uuuauccaaaugguaugaga

SEQ ID NO: 646212 - RNA, 18 nt, Human
uuuguaaauccuaaaaug

SEQ ID NO: 646213 - RNA, 21 nt, Human
aaggaaccugaucggcggggc

SEQ ID NO: 646214 - RNA, 21 nt, Human
aguccagaauuuuuuuucccu

SEQ ID NO: 646215 - RNA, 23 nt, Human
ccacccugcgggcgucucgaccu

SEQ ID NO: 646216 - RNA, 18 nt, Human
ccccugggaaccgcgugc

SEQ ID NO: 646217 - RNA, 23 nt, Human
ccuucacaaauccuucaacauca

SEQ ID NO: 646218 - RNA, 20 nt, Human
cugaccgccgcuggcccccu

SEQ ID NO: 646219 - RNA, 24 nt, Human
gcuggcccccugggaaccgcgugc

SEQ ID NO: 646220 - RNA, 20 nt, Human
ucaacaucaggacaaggcau

SEQ ID NO: 646221 - RNA, 19 nt, Human
ucuacaaccuuucucuacc

SEQ ID NO: 646222 - RNA, 24 nt, Human
ucuacaaccuuucucuacccuaga

SEQ ID NO: 646223 - RNA, 22 nt, Human
uuccgcaauucccaauugggau

SEQ ID NO: 646224 - RNA, 22 nt, Human
uuuuuuuuuuuuuuuuuuucag

SEQ ID NO: 646225 - RNA, 25 nt, Human
aaaaaaaaaaaaaaaagcgccauca

SEQ ID NO: 646226 - RNA, 23 nt, Human
aaaaaaaaaaaaagcgccaucag

SEQ ID NO: 646227 - RNA, 21 nt, Human
aaaaaaaaaaagcgccaucag

SEQ ID NO: 646228 - RNA, 19 nt, Human
aaaaagcgccaucaguacc

SEQ ID NO: 646229 - RNA, 24 nt, Human
aaaugcuaaaauaucacaaaagcu

SEQ ID NO: 646230 - RNA, 22 nt, Human
aaauucuguuuaagccaaaaag

SEQ ID NO: 646231 - RNA, 19 nt, Human
aacagaagccaaccuuggu

SEQ ID NO: 646232 - RNA, 20 nt, Human
aacccgccugcuccuucuuc

SEQ ID NO: 646233 - RNA, 19 nt, Human
aagaaugggcuacacugaa

SEQ ID NO: 646234 - RNA, 27 nt, Human
aagcauggcugugugcacgauucauac

SEQ ID NO: 646235 - RNA, 18 nt, Human
aaggagcguggguuggag

SEQ ID NO: 646236 - RNA, 23 nt, Human
acacagcgaggcuccccaaccuu

SEQ ID NO: 646237 - RNA, 20 nt, Human
acacauuuccaucgcacacc

SEQ ID NO: 646238 - RNA, 22 nt, Human
acagaagccaaccuuggucaca

SEQ ID NO: 646239 - RNA, 23 nt, Human
acagggaaggagcguggguugga

SEQ ID NO: 646240 - RNA, 19 nt, Human
accacaagaguauggcagc

SEQ ID NO: 646241 - RNA, 21 nt, Human
acccuggugccucagacuccg

SEQ ID NO: 646242 - RNA, 20 nt, Human
acggcagaacgcuggacucu

SEQ ID NO: 646243 - RNA, 22 nt, Human
agagggugggugagggcagggc

SEQ ID NO: 646244 - RNA, 20 nt, Human
agccgcugcuccacaugugu

SEQ ID NO: 646245 - RNA, 19 nt, Human
aggcaacagcucuggauca

SEQ ID NO: 646246 - RNA, 25 nt, Human
aggcaagacagaagcaagugucuaa

SEQ ID NO: 646247 - RNA, 21 nt, Human
aggcuccccugccccggccuu

SEQ ID NO: 646248 - RNA, 26 nt, Human
aucuuuguaaaaaaacuguugccgga

SEQ ID NO: 646249 - RNA, 21 nt, Human
augcuuggcagacgggugggg

SEQ ID NO: 646250 - RNA, 22 nt, Human
caaaagcuuuaaaaaucaaugg

SEQ ID NO: 646251 - RNA, 22 nt, Human
cacaucguugucaaagucaucc

SEQ ID NO: 646252 - RNA, 27 nt, Human
caccacuguccacagucaccagcugcc

SEQ ID NO: 646253 - RNA, 21 nt, Human
caccaugugcaccuccugacc

SEQ ID NO: 646254 - RNA, 22 nt, Human
caccaugugcaccuccugacug

SEQ ID NO: 646255 - RNA, 21 nt, Human
caccuugaugguuugccucca

SEQ ID NO: 646256 - RNA, 23 nt, Human
cacgggccagccacaggacucag

SEQ ID NO: 646257 - RNA, 19 nt, Human
cacuaaagucuccacccua

SEQ ID NO: 646258 - RNA, 26 nt, Human
cagcaagacacagcgaggcuccccaa

SEQ ID NO: 646259 - RNA, 18 nt, Human
cagcgaggcuccccaacc

SEQ ID NO: 646260 - RNA, 21 nt, Human
caucacgggccagccacagga

SEQ ID NO: 646261 - RNA, 22 nt, Human
cauccagagaaaccgcugucac

SEQ ID NO: 646262 - RNA, 25 nt, Human
cauccagagaaaccgcugucacagg

SEQ ID NO: 646263 - RNA, 20 nt, Human
ccacaucguugucaaaguca

SEQ ID NO: 646264 - RNA, 23 nt, Human
ccaccaccagggccagccuuuga

SEQ ID NO: 646265 - RNA, 19 nt, Human
ccaggcacagcccagugcc

SEQ ID NO: 646266 - RNA, 25 nt, Human
cccaugcuuggcagacggguggggg

SEQ ID NO: 646267 - RNA, 18 nt, Human
cccgccugcuccuucuuc

SEQ ID NO: 646268 - RNA, 25 nt, Human
cccugccccggccuugaagcauggc

SEQ ID NO: 646269 - RNA, 23 nt, Human
ccugacagaaaaaaaaaaaaaaa

SEQ ID NO: 646270 - RNA, 22 nt, Human
ccuguagggggcaugguggggg

SEQ ID NO: 646271 - RNA, 24 nt, Human
ccuucuacucucacugugaaaguc

SEQ ID NO: 646272 - RNA, 27 nt, Human
cgccugcuccuucuucaucuagcucca

SEQ ID NO: 646273 - RNA, 19 nt, Human
cgcugcuccacaugugugc

SEQ ID NO: 646274 - RNA, 22 nt, Human
cucacugugaaagucuuucaaa

SEQ ID NO: 646275 - RNA, 21 nt, Human
cucaguguccaaagaggcgcu

SEQ ID NO: 646276 - RNA, 18 nt, Human
cuccacaugugugcugug

SEQ ID NO: 646277 - RNA, 21 nt, Human
cucgccuuccaggcacagccc

SEQ ID NO: 646278 - RNA, 18 nt, Human
cugaacgauugcuuuagc

SEQ ID NO: 646279 - RNA, 20 nt, Human
cugacagaaaaaaaaaaaaa

SEQ ID NO: 646280 - RNA, 18 nt, Human
cugaugcuaaaauucugu

SEQ ID NO: 646281 - RNA, 19 nt, Human
cugcacacuugucucucca

SEQ ID NO: 646282 - RNA, 21 nt, Human
cuggugccucagacuccggca

SEQ ID NO: 646283 - RNA, 24 nt, Human
cugugaaagucuuucaaaaugcua

SEQ ID NO: 646284 - RNA, 21 nt, Human
cugugugcacgauucauaccc

SEQ ID NO: 646285 - RNA, 18 nt, Human
cuguucgccucuuuuugg

SEQ ID NO: 646286 - RNA, 23 nt, Human
cuuccuguuucaacaaguccacu

SEQ ID NO: 646287 - RNA, 19 nt, Human
cuugcuggcaucgugucca

SEQ ID NO: 646288 - RNA, 23 nt, Human
cuuggcagacggguggggggggg

SEQ ID NO: 646289 - RNA, 21 nt, Human
cuuuaaaaaucaaugggugga

SEQ ID NO: 646290 - RNA, 23 nt, Human
cuuucaaaaugcuaaaauaucac

SEQ ID NO: 646291 - RNA, 23 nt, Human
cuuugguucacaggcgcaucugg

SEQ ID NO: 646292 - RNA, 23 nt, Human
gaggccaggguaacuccaggagg

SEQ ID NO: 646293 - RNA, 22 nt, Human
gaugguuugccuccaaucccag

SEQ ID NO: 646294 - RNA, 19 nt, Human
gcacacggcacucugcaca

SEQ ID NO: 646295 - RNA, 25 nt, Human
gcaccacaagcacacggcacucugc

SEQ ID NO: 646296 - RNA, 19 nt, Human
gcaccaugugcaccuccug

SEQ ID NO: 646297 - RNA, 19 nt, Human
gcacgauucauacccaugc

SEQ ID NO: 646298 - RNA, 18 nt, Human
gccaccagucgagaagca

SEQ ID NO: 646299 - RNA, 24 nt, Human
gccauccccucucaucugucaucc

SEQ ID NO: 646300 - RNA, 23 nt, Human
gcccugcaggcgcccugggcaca

SEQ ID NO: 646301 - RNA, 19 nt, Human
gcccugggcacaugggccc

SEQ ID NO: 646302 - RNA, 26 nt, Human
gcggcccccgcgcccuggcccgugcc

SEQ ID NO: 646303 - RNA, 19 nt, Human
gcggcuggcggcccccgcg

SEQ ID NO: 646304 - RNA, 25 nt, Human
gcuaaaaugcaugauuccaaaucua

SEQ ID NO: 646305 - RNA, 23 nt, Human
gcuaaaauucuguuuaagccaaa

SEQ ID NO: 646306 - RNA, 19 nt, Human
gcuaagggcaacagucaca

SEQ ID NO: 646307 - RNA, 20 nt, Human
ggagagggaccaccuugaug

SEQ ID NO: 646308 - RNA, 22 nt, Human
ggaggccugacacuguggugca

SEQ ID NO: 646309 - RNA, 22 nt, Human
ggcagacggguggggggggggg

SEQ ID NO: 646310 - RNA, 22 nt, Human
ggccaccuggcaucacgggcca

SEQ ID NO: 646311 - RNA, 19 nt, Human
ggcccccgcgcccuggccc

SEQ ID NO: 646312 - RNA, 18 nt, Human
gggaacagcaagacacag

SEQ ID NO: 646313 - RNA, 24 nt, Human
gguaacuccaggagguggcaggac

SEQ ID NO: 646314 - RNA, 19 nt, Human
gugggugagggcagggcac

SEQ ID NO: 646315 - RNA, 18 nt, Human
guucacaggcgcaucugg

SEQ ID NO: 646316 - RNA, 18 nt, Human
uaaaaagagccugcagca

SEQ ID NO: 646317 - RNA, 19 nt, Human
uaaaaagagccugcagcag

SEQ ID NO: 646318 - RNA, 24 nt, Human
uaaaauaucacaaaagcuuuaaaa

SEQ ID NO: 646319 - RNA, 19 nt, Human
uaaaauauuccuuucucuu

SEQ ID NO: 646320 - RNA, 22 nt, Human
uaagccaaaaagguuuaaaaua

SEQ ID NO: 646321 - RNA, 19 nt, Human
uaagggcaacagucacagu

SEQ ID NO: 646322 - RNA, 25 nt, Human
uacacuaaagucuccacccuaaggc

SEQ ID NO: 646323 - RNA, 18 nt, Human
uaggggccaccagucgag

SEQ ID NO: 646324 - RNA, 24 nt, Human
uaucacaaaagcuuuaaaaaucaa

SEQ ID NO: 646325 - RNA, 25 nt, Human
uauucacagcugcagacaggaggca

SEQ ID NO: 646326 - RNA, 25 nt, Human
ucaaagaaggggaaacacagagggu

SEQ ID NO: 646327 - RNA, 19 nt, Human
ucagacuccggcaggaaca

SEQ ID NO: 646328 - RNA, 21 nt, Human
ucccuguacacuaaagucucc

SEQ ID NO: 646329 - RNA, 22 nt, Human
ucccuguacacuaaagucucca

SEQ ID NO: 646330 - RNA, 26 nt, Human
ucccuguagcagcccugcaggcgccc

SEQ ID NO: 646331 - RNA, 22 nt, Human
uccugacagaaaaaaaaaaaaa

SEQ ID NO: 646332 - RNA, 21 nt, Human
uccuucuucaucuagcuccaa

SEQ ID NO: 646333 - RNA, 24 nt, Human
uccuuucucuucuaccuuuucaaa

SEQ ID NO: 646334 - RNA, 23 nt, Human
ucgcugaguccauccauucaggc

SEQ ID NO: 646335 - RNA, 24 nt, Human
ucucugaacgauugcuuuagccgu

SEQ ID NO: 646336 - RNA, 22 nt, Human
ugacagaaaaaaaaaaaaaaaa

SEQ ID NO: 646337 - RNA, 18 nt, Human
ugagggaaggauauguug

SEQ ID NO: 646338 - RNA, 22 nt, Human
ugagggaaggauauguuguggg

SEQ ID NO: 646339 - RNA, 22 nt, Human
ugaggguuucuuuuuuaaaagg

SEQ ID NO: 646340 - RNA, 23 nt, Human
ugccccggccuugaagcauggcu

SEQ ID NO: 646341 - RNA, 21 nt, Human
ugcccuggauggcaucagcac

SEQ ID NO: 646342 - RNA, 20 nt, Human
ugccuccaaucccagaaagc

SEQ ID NO: 646343 - RNA, 26 nt, Human
ugccuccaaucccagaaagcuaguuc

SEQ ID NO: 646344 - RNA, 23 nt, Human
ugccuuugacauccagagaaacc

SEQ ID NO: 646345 - RNA, 21 nt, Human
uggagcuuuccagggagagcc

SEQ ID NO: 646346 - RNA, 18 nt, Human
uggcagcaccugcugugg

SEQ ID NO: 646347 - RNA, 18 nt, Human
uggcaucacgggccagcc

SEQ ID NO: 646348 - RNA, 18 nt, Human
uggcggcccccgcgcccu

SEQ ID NO: 646349 - RNA, 22 nt, Human
uggcggcccccgcgcccuggcc

SEQ ID NO: 646350 - RNA, 21 nt, Human
ugggaacagcaagacacagcg

SEQ ID NO: 646351 - RNA, 24 nt, Human
uggguuggaggccugacacugugg

SEQ ID NO: 646352 - RNA, 22 nt, Human
uggugggggacagacacggcag

SEQ ID NO: 646353 - RNA, 23 nt, Human
uguaaaaaaacuguugccggagg

SEQ ID NO: 646354 - RNA, 20 nt, Human
uguccaaagaggcgcuuuua

SEQ ID NO: 646355 - RNA, 23 nt, Human
uguccaaagaggcgcuuuuaggg

SEQ ID NO: 646356 - RNA, 18 nt, Human
uguccagacuggagaggg

SEQ ID NO: 646357 - RNA, 21 nt, Human
uguuucaacaaguccacuugc

SEQ ID NO: 646358 - RNA, 20 nt, Human
uuccaggcacagcccagugc

SEQ ID NO: 646359 - RNA, 23 nt, Human
uuccucuguucgccucuuuuugg

SEQ ID NO: 646360 - RNA, 21 nt, Human
uugcuuccuguuucaacaagu

SEQ ID NO: 646361 - RNA, 21 nt, Human
uuggcagacgggugggggggg

SEQ ID NO: 646362 - RNA, 23 nt, Human
uugggggcacaaaggccuucuuc

SEQ ID NO: 646363 - RNA, 24 nt, Human
uugggggcacaaaggccuucuucc

SEQ ID NO: 646364 - RNA, 23 nt, Human
uuuuuccucuguucgccucuuuu

SEQ ID NO: 646365 - RNA, 22 nt, Human
uuuuuuuuuuuuuuuuucuggg

SEQ ID NO: 646366 - RNA, 21 nt, Human
aagccucuggguccaggcacu

SEQ ID NO: 646367 - RNA, 24 nt, Human
aauggguuucuuuccuggguucag

SEQ ID NO: 646368 - RNA, 18 nt, Human
accuuggcuuucuagucu

SEQ ID NO: 646369 - RNA, 18 nt, Human
agaagaugcaguuaccag

SEQ ID NO: 646370 - RNA, 18 nt, Human
aggacccccagggacggg

SEQ ID NO: 646371 - RNA, 26 nt, Human
agggaagagggggucggcaaaugggu

SEQ ID NO: 646372 - RNA, 23 nt, Human
augcaguuaccagggcuggugcc

SEQ ID NO: 646373 - RNA, 23 nt, Human
caccagggccugagucugguggu

SEQ ID NO: 646374 - RNA, 19 nt, Human
cagcaguaggggugccacg

SEQ ID NO: 646375 - RNA, 23 nt, Human
cagcaguaggggugccacggucu

SEQ ID NO: 646376 - RNA, 18 nt, Human
cagcgaaggcagcucucc

SEQ ID NO: 646377 - RNA, 20 nt, Human
caggcccagcuccugagaaa

SEQ ID NO: 646378 - RNA, 23 nt, Human
caguaggggugccacggucucgc

SEQ ID NO: 646379 - RNA, 22 nt, Human
cagugguccccuaaucugcccc

SEQ ID NO: 646380 - RNA, 25 nt, Human
cauccaccaggcccaaaugcccagc

SEQ ID NO: 646381 - RNA, 21 nt, Human
caucuucccagggugagaucc

SEQ ID NO: 646382 - RNA, 19 nt, Human
cauuaagucccugggcugu

SEQ ID NO: 646383 - RNA, 23 nt, Human
ccacaucuucccagggugagauc

SEQ ID NO: 646384 - RNA, 22 nt, Human
ccaccaggcccaaaugcccagc

SEQ ID NO: 646385 - RNA, 24 nt, Human
ccaccaggcccaaaugcccagcuu

SEQ ID NO: 646386 - RNA, 22 nt, Human
ccccauuuucccugagcuccac

SEQ ID NO: 646387 - RNA, 20 nt, Human
cccuugagcaacacucacug

SEQ ID NO: 646388 - RNA, 19 nt, Human
ccgagcgagacccucaccc

SEQ ID NO: 646389 - RNA, 22 nt, Human
ccgagcgagacccucacccgcu

SEQ ID NO: 646390 - RNA, 19 nt, Human
ccgcggugacggaggaccc

SEQ ID NO: 646391 - RNA, 22 nt, Human
ccugcaaagccucuggguccag

SEQ ID NO: 646392 - RNA, 22 nt, Human
ccugggcugucacucaagggca

SEQ ID NO: 646393 - RNA, 22 nt, Human
cgaggcaucucauuccuauacc

SEQ ID NO: 646394 - RNA, 22 nt, Human
cuaaucugccccauuuccaugc

SEQ ID NO: 646395 - RNA, 19 nt, Human
cucuggguccaggcacuug

SEQ ID NO: 646396 - RNA, 21 nt, Human
cuggcuuccucacucccagug

SEQ ID NO: 646397 - RNA, 20 nt, Human
cugguggugguggcaccuga

SEQ ID NO: 646398 - RNA, 18 nt, Human
gagagccccugggggagg

SEQ ID NO: 646399 - RNA, 26 nt, Human
gagcccuucccuccccucugaguccc

SEQ ID NO: 646400 - RNA, 18 nt, Human
gcaaggggagaagaugca

SEQ ID NO: 646401 - RNA, 21 nt, Human
gcaguuaccagggcuggugcc

SEQ ID NO: 646402 - RNA, 20 nt, Human
gccacauuaagucccugggc

SEQ ID NO: 646403 - RNA, 19 nt, Human
gccaugggguggcaagggg

SEQ ID NO: 646404 - RNA, 21 nt, Human
ggagggugggaaaggugcagg

SEQ ID NO: 646405 - RNA, 19 nt, Human
ggccgcggugacggaggac

SEQ ID NO: 646406 - RNA, 19 nt, Human
ggcgggagggugggaaagg

SEQ ID NO: 646407 - RNA, 19 nt, Human
gggaacauaaagggacagg

SEQ ID NO: 646408 - RNA, 23 nt, Human
gggagggugggaaaggugcaggg

SEQ ID NO: 646409 - RNA, 18 nt, Human
gggauaugggagauggga

SEQ ID NO: 646410 - RNA, 18 nt, Human
gggcgcgggagacaggga

SEQ ID NO: 646411 - RNA, 24 nt, Human
ggugccuaacagcaaggcugggug

SEQ ID NO: 646412 - RNA, 18 nt, Human
gguucagauucugcagua

SEQ ID NO: 646413 - RNA, 18 nt, Human
gguuggggcucgcggagg

SEQ ID NO: 646414 - RNA, 20 nt, Human
guagggcuccccaucauuga

SEQ ID NO: 646415 - RNA, 22 nt, Human
uaaaugccuguccugcugaaag

SEQ ID NO: 646416 - RNA, 20 nt, Human
uaacagcaaggcugggugga

SEQ ID NO: 646417 - RNA, 18 nt, Human
uaagucccugggcuguca

SEQ ID NO: 646418 - RNA, 23 nt, Human
uaccugaaaacuacuccagacac

SEQ ID NO: 646419 - RNA, 22 nt, Human
uauccagguuggcauccaccag

SEQ ID NO: 646420 - RNA, 18 nt, Human
uauuugggaacauaaagg

SEQ ID NO: 646421 - RNA, 26 nt, Human
ucaggcccagcuccugagaacacugu

SEQ ID NO: 646422 - RNA, 18 nt, Human
uccauccuccagagcccu

SEQ ID NO: 646423 - RNA, 23 nt, Human
ucccagggugagauccuuucacc

SEQ ID NO: 646424 - RNA, 20 nt, Human
ucccugggcugucacucaag

SEQ ID NO: 646425 - RNA, 23 nt, Human
ucccugggcugucacucaagggc

SEQ ID NO: 646426 - RNA, 22 nt, Human
uccuaagccucaggcccagcuc

SEQ ID NO: 646427 - RNA, 27 nt, Human
uccugggccaucuaaggggucagccuu

SEQ ID NO: 646428 - RNA, 22 nt, Human
ucgugggauacacuucuggggu

SEQ ID NO: 646429 - RNA, 19 nt, Human
ucugcaguaauuugcagcu

SEQ ID NO: 646430 - RNA, 18 nt, Human
ucuggagagggaagaggg

SEQ ID NO: 646431 - RNA, 23 nt, Human
ucuggagagggaagagggggucg

SEQ ID NO: 646432 - RNA, 21 nt, Human
ugaaaaggcaccaauggggca

SEQ ID NO: 646433 - RNA, 21 nt, Human
ugaaaaggcaccaauggggca

SEQ ID NO: 646434 - RNA, 19 nt, Human
ugaaagaacccgccuuuca

SEQ ID NO: 646435 - RNA, 26 nt, Human
ugagauccuuucaccacgaggcaucu

SEQ ID NO: 646436 - RNA, 19 nt, Human
uggacauggagccacaucc

SEQ ID NO: 646437 - RNA, 21 nt, Human
uggagagggaagagggggucg

SEQ ID NO: 646438 - RNA, 19 nt, Human
uggagucauggugccuaac

SEQ ID NO: 646439 - RNA, 18 nt, Human
uggcugaaaaggcaccaa

SEQ ID NO: 646440 - RNA, 19 nt, Human
uggcuuccucacucccagu

SEQ ID NO: 646441 - RNA, 20 nt, Human
ugggacggggucucagaauc

SEQ ID NO: 646442 - RNA, 24 nt, Human
uggggcucgcggagggggcacugg

SEQ ID NO: 646443 - RNA, 19 nt, Human
ugggguagggcuccccauc

SEQ ID NO: 646444 - RNA, 18 nt, Human
ugguccccagcaguaggg

SEQ ID NO: 646445 - RNA, 26 nt, Human
uguaggauugagagugccagccuaug

SEQ ID NO: 646446 - RNA, 18 nt, Human
uguccugcaaagccucug

SEQ ID NO: 646447 - RNA, 22 nt, Human
uucaucuuggagucauggugcc

SEQ ID NO: 646448 - RNA, 19 nt, Human
uuguagcaccugccauucc

SEQ ID NO: 646449 - RNA, 21 nt, Human
uuuuuuuuuuuuuuuuaccag

SEQ ID NO: 646450 - RNA, 22 nt, Human
uuuuuuuuuuuuuuuuuaccag

SEQ ID NO: 646451 - RNA, 25 nt, Human
uuuuuuuuuuuuuuuuuuuuaccag

SEQ ID NO: 646452 - RNA, 25 nt, Human
aaaaaaaaaaaaaacaacaaaaaag

SEQ ID NO: 646453 - RNA, 22 nt, Human
aaaaaaaaaaaacaacaaaaaa

SEQ ID NO: 646454 - RNA, 21 nt, Human
aaaaaacaacaaaaaaaaaac

SEQ ID NO: 646455 - RNA, 24 nt, Human
aaaaugcugggauuacaggcauga

SEQ ID NO: 646456 - RNA, 20 nt, Human
aaagauaaacaaguaaauaa

SEQ ID NO: 646457 - RNA, 26 nt, Human
aaaugcugggauuacaggcaugagcc

SEQ ID NO: 646458 - RNA, 19 nt, Human
aacacagugagaccccauc

SEQ ID NO: 646459 - RNA, 20 nt, Human
aacacagugagaccccaucu

SEQ ID NO: 646460 - RNA, 21 nt, Human
aacacagugagaccccaucuc

SEQ ID NO: 646461 - RNA, 21 nt, Human
aacgcugaucacaaauccaug

SEQ ID NO: 646462 - RNA, 21 nt, Human
aacugucuaccuacccaccca

SEQ ID NO: 646463 - RNA, 20 nt, Human
aagcagagaggugagagcag

SEQ ID NO: 646464 - RNA, 22 nt, Human
aagcagagaggugagagcagag

SEQ ID NO: 646465 - RNA, 24 nt, Human
aaguagcugggauuacaggagugu

SEQ ID NO: 646466 - RNA, 26 nt, Human
aaguagcugggauuacaggagugugc

SEQ ID NO: 646467 - RNA, 25 nt, Human
aagugauucucccaccucagccucc

SEQ ID NO: 646468 - RNA, 19 nt, Human
aagugcuguaggcagcaug

SEQ ID NO: 646469 - RNA, 18 nt, Human
acaaggugugcuucugua

SEQ ID NO: 646470 - RNA, 18 nt, Human
acagagucuccagaagac

SEQ ID NO: 646471 - RNA, 22 nt, Human
acaggcuaucuaucuguagaga

SEQ ID NO: 646472 - RNA, 20 nt, Human
accacaguucggggccugcu

SEQ ID NO: 646473 - RNA, 24 nt, Human
acccaagcuagggugcaguggcau

SEQ ID NO: 646474 - RNA, 24 nt, Human
accccaucucuacuaaaaauacaa

SEQ ID NO: 646475 - RNA, 25 nt, Human
acccgccucagccucucaaaaugcu

SEQ ID NO: 646476 - RNA, 19 nt, Human
accuacccacccacccacc

SEQ ID NO: 646477 - RNA, 23 nt, Human
accucagccuccuaaguagcugg

SEQ ID NO: 646478 - RNA, 24 nt, Human
acuauguuggccaggcugguuucg

SEQ ID NO: 646479 - RNA, 20 nt, Human
acugcaaccuccaccucugg

SEQ ID NO: 646480 - RNA, 21 nt, Human
acugcaaccuccaccucugga

SEQ ID NO: 646481 - RNA, 18 nt, Human
acugcacugcagccugag

SEQ ID NO: 646482 - RNA, 20 nt, Human
acugcacugcagccugagug

SEQ ID NO: 646483 - RNA, 21 nt, Human
acugcacugcagccugaguga

SEQ ID NO: 646484 - RNA, 23 nt, Human
acugcagccugagugaagaguga

SEQ ID NO: 646485 - RNA, 23 nt, Human
agaaacgugcaguccuugccuac

SEQ ID NO: 646486 - RNA, 21 nt, Human
agaagaccaguuccucacugg

SEQ ID NO: 646487 - RNA, 25 nt, Human
agaagacucaaaggaaaaccgagaa

SEQ ID NO: 646488 - RNA, 20 nt, Human
agacauaggccagaauauaa

SEQ ID NO: 646489 - RNA, 18 nt, Human
agagaggggguuucacua

SEQ ID NO: 646490 - RNA, 20 nt, Human
agagcaccaccaggcucgcc

SEQ ID NO: 646491 - RNA, 21 nt, Human
agagcaccaccaggcucgccg

SEQ ID NO: 646492 - RNA, 21 nt, Human
agagcaccaccaggcucgccg

SEQ ID NO: 646493 - RNA, 22 nt, Human
agagguggcagugagcugagau

SEQ ID NO: 646494 - RNA, 24 nt, Human
agagguggcagugagcugagauug

SEQ ID NO: 646495 - RNA, 19 nt, Human
agccaccgcacccggccug

SEQ ID NO: 646496 - RNA, 23 nt, Human
agccaggcgugauggugggcgcc

SEQ ID NO: 646497 - RNA, 23 nt, Human
agccugagugaagagugagacuc

SEQ ID NO: 646498 - RNA, 21 nt, Human
aggagagaaagaaacgugcag

SEQ ID NO: 646499 - RNA, 20 nt, Human
aggcagagguggcagugagc

SEQ ID NO: 646500 - RNA, 24 nt, Human
aggcagagguggcagugagcugag

SEQ ID NO: 646501 - RNA, 22 nt, Human
aggcaggagaauggcgugaacc

SEQ ID NO: 646502 - RNA, 24 nt, Human
aggcaggagaauggcgugaaccug

SEQ ID NO: 646503 - RNA, 21 nt, Human
aggccgaggcgggcggaucac

SEQ ID NO: 646504 - RNA, 23 nt, Human
aggccgaggcgggcggaucacga

SEQ ID NO: 646505 - RNA, 24 nt, Human
aggcgcgguugcucacgccuguaa

SEQ ID NO: 646506 - RNA, 24 nt, Human
aggcgggcggaucacgaggucagg

SEQ ID NO: 646507 - RNA, 24 nt, Human
aggcgugauggugggcgccuguag

SEQ ID NO: 646508 - RNA, 19 nt, Human
aggcugaggcaggagaaug

SEQ ID NO: 646509 - RNA, 18 nt, Human
aggggguuucacuauguu

SEQ ID NO: 646510 - RNA, 20 nt, Human
aggggguuucacuauguugg

SEQ ID NO: 646511 - RNA, 24 nt, Human
aggggguuucacuauguuggccag

SEQ ID NO: 646512 - RNA, 22 nt, Human
agguaggggcaagaguugcuuu

SEQ ID NO: 646513 - RNA, 24 nt, Human
aggugauccacccgccucagccuc

SEQ ID NO: 646514 - RNA, 25 nt, Human
agugaagagugagacucccguuuca

SEQ ID NO: 646515 - RNA, 24 nt, Human
aguggcaugaucucagcuuacugc

SEQ ID NO: 646516 - RNA, 23 nt, Human
auggugggcgccuguagucccag

SEQ ID NO: 646517 - RNA, 19 nt, Human
auuacaggagugugccacc

SEQ ID NO: 646518 - RNA, 18 nt, Human
auucucccaccucagccu

SEQ ID NO: 646519 - RNA, 24 nt, Human
auugcgccacugcacugcagccug

SEQ ID NO: 646520 - RNA, 23 nt, Human
caaaaugcugggauuacaggcau

SEQ ID NO: 646521 - RNA, 24 nt, Human
caaaaugcugggauuacaggcaug

SEQ ID NO: 646522 - RNA, 18 nt, Human
caacgcugaucacaaauc

SEQ ID NO: 646523 - RNA, 22 nt, Human
caagugauucucccaccucagc

SEQ ID NO: 646524 - RNA, 23 nt, Human
cacaaauccaugggagaugucuc

SEQ ID NO: 646525 - RNA, 21 nt, Human
cacagagucuccagaagacca

SEQ ID NO: 646526 - RNA, 23 nt, Human
cacccgccucagccucucaaaau

SEQ ID NO: 646527 - RNA, 18 nt, Human
caccgcacccggccuggc

SEQ ID NO: 646528 - RNA, 24 nt, Human
cacgccuguaaucccagcauuaug

SEQ ID NO: 646529 - RNA, 21 nt, Human
cacuauguuggccaggcuggu

SEQ ID NO: 646530 - RNA, 24 nt, Human
cacuauguuggccaggcugguuuc

SEQ ID NO: 646531 - RNA, 20 nt, Human
cacugcacugcagccugagu

SEQ ID NO: 646532 - RNA, 22 nt, Human
cacugcacugcagccugaguga

SEQ ID NO: 646533 - RNA, 22 nt, Human
cagaagacucaaaggaaaaccg

SEQ ID NO: 646534 - RNA, 24 nt, Human
cagcauuaugggaggccgaggcgg

SEQ ID NO: 646535 - RNA, 24 nt, Human
cagcccucagauuccggcuacccu

SEQ ID NO: 646536 - RNA, 24 nt, Human
cagcuacucgggaggcugaggcag

SEQ ID NO: 646537 - RNA, 20 nt, Human
ccaccacgccggacuaauuu

SEQ ID NO: 646538 - RNA, 19 nt, Human
ccacccgccucagccucuc

SEQ ID NO: 646539 - RNA, 20 nt, Human
ccacugcacugcagccugag

SEQ ID NO: 646540 - RNA, 21 nt, Human
ccacugcacugcagccugagu

SEQ ID NO: 646541 - RNA, 19 nt, Human
ccagaauauagucugugcu

SEQ ID NO: 646542 - RNA, 19 nt, Human
ccagaggucuucuuaaggu

SEQ ID NO: 646543 - RNA, 21 nt, Human
ccagaguuggagcagcagcca

SEQ ID NO: 646544 - RNA, 18 nt, Human
cccaagacucccaagguc

SEQ ID NO: 646545 - RNA, 23 nt, Human
cccaccucagccuccuaaguagc

SEQ ID NO: 646546 - RNA, 24 nt, Human
cccguuucaaaaaaaaaaaaaaaa

SEQ ID NO: 646547 - RNA, 24 nt, Human
ccgccucagccucucaaaaugcug

SEQ ID NO: 646548 - RNA, 23 nt, Human
ccuaaguagcugggauuacagga

SEQ ID NO: 646549 - RNA, 22 nt, Human
ccugaccucaggugauccaccc

SEQ ID NO: 646550 - RNA, 23 nt, Human
ccugaccucaggugauccacccg

SEQ ID NO: 646551 - RNA, 24 nt, Human
ccuggcuaacacagugagacccca

SEQ ID NO: 646552 - RNA, 19 nt, Human
ccuggcucugccacuuccu

SEQ ID NO: 646553 - RNA, 25 nt, Human
ccugggaggcagagguggcagugag

SEQ ID NO: 646554 - RNA, 22 nt, Human
ccuguaaucccagcauuauggg

SEQ ID NO: 646555 - RNA, 21 nt, Human
ccuguagucccagcuacucgg

SEQ ID NO: 646556 - RNA, 22 nt, Human
ccuguagucccagcuacucggg

SEQ ID NO: 646557 - RNA, 23 nt, Human
cgagaaucaggagagaaagaaac

SEQ ID NO: 646558 - RNA, 24 nt, Human
cgagaccauccuggcuaacacagu

SEQ ID NO: 646559 - RNA, 21 nt, Human
cgagcacuuucccaggaauac

SEQ ID NO: 646560 - RNA, 24 nt, Human
cgaggcgggcggaucacgagguca

SEQ ID NO: 646561 - RNA, 22 nt, Human
cgagguugaauccuggcucugc

SEQ ID NO: 646562 - RNA, 22 nt, Human
cgcccagaagagguaggggcaa

SEQ ID NO: 646563 - RNA, 20 nt, Human
cgccggacuaauuuuugcau

SEQ ID NO: 646564 - RNA, 24 nt, Human
cgccucagccucucaaaaugcugg

SEQ ID NO: 646565 - RNA, 23 nt, Human
cgccuguagucccagcuacucgg

SEQ ID NO: 646566 - RNA, 23 nt, Human
cuacccacccacccaccuacuua

SEQ ID NO: 646567 - RNA, 24 nt, Human
cuagggugcaguggcaugaucuca

SEQ ID NO: 646568 - RNA, 24 nt, Human
cucaaaaugcugggauuacaggca

SEQ ID NO: 646569 - RNA, 21 nt, Human
cucacgccuguaaucccagca

SEQ ID NO: 646570 - RNA, 21 nt, Human
cucacgccuguaaucccagca

SEQ ID NO: 646571 - RNA, 19 nt, Human
cucacugggagcuuucuca

SEQ ID NO: 646572 - RNA, 24 nt, Human
cucagccuccuaaguagcugggau

SEQ ID NO: 646573 - RNA, 22 nt, Human
cucuaugccacacagagucucc

SEQ ID NO: 646574 - RNA, 23 nt, Human
cugcaaccuccaccucuggaguc

SEQ ID NO: 646575 - RNA, 19 nt, Human
cugggaggcagagguggca

SEQ ID NO: 646576 - RNA, 18 nt, Human
cugugacggaucacuuua

SEQ ID NO: 646577 - RNA, 22 nt, Human
gaaccugggaggcagagguggc

SEQ ID NO: 646578 - RNA, 20 nt, Human
gaagugcuguaggcagcaug

SEQ ID NO: 646579 - RNA, 24 nt, Human
gaccucaggugauccacccgccuc

SEQ ID NO: 646580 - RNA, 23 nt, Human
gaccugcuuccccaugcgcccca

SEQ ID NO: 646581 - RNA, 20 nt, Human
gagaugucucgacaucugug

SEQ ID NO: 646582 - RNA, 22 nt, Human
gaggggguuucacuauguuggc

SEQ ID NO: 646583 - RNA, 20 nt, Human
gaggugagagcagaguacug

SEQ ID NO: 646584 - RNA, 18 nt, Human
gagucuccagaagaccag

SEQ ID NO: 646585 - RNA, 22 nt, Human
gagucuugcucugccacccaag

SEQ ID NO: 646586 - RNA, 21 nt, Human
gaugagaaggcagcuccagaa

SEQ ID NO: 646587 - RNA, 22 nt, Human
gauggagcccaagaagcagaga

SEQ ID NO: 646588 - RNA, 18 nt, Human
gauuacaggagugugcca

SEQ ID NO: 646589 - RNA, 18 nt, Human
gauuacaggcaugagcca

SEQ ID NO: 646590 - RNA, 22 nt, Human
gauuacaggcaugagccaccgc

SEQ ID NO: 646591 - RNA, 23 nt, Human
gauuacaggcaugagccaccgca

SEQ ID NO: 646592 - RNA, 21 nt, Human
gauucucccaccucagccucc

SEQ ID NO: 646593 - RNA, 20 nt, Human
gcagagaggugagagcagag

SEQ ID NO: 646594 - RNA, 19 nt, Human
gcagccugagugaagagug

SEQ ID NO: 646595 - RNA, 22 nt, Human
gcagcuccagaagacucaaagg

SEQ ID NO: 646596 - RNA, 18 nt, Human
gccagaguuggagcagcg

SEQ ID NO: 646597 - RNA, 23 nt, Human
gccuguagucccagcuacucggg

SEQ ID NO: 646598 - RNA, 19 nt, Human
gcgguugcucacgccugua

SEQ ID NO: 646599 - RNA, 20 nt, Human
gcucacgccuguaaucccag

SEQ ID NO: 646600 - RNA, 22 nt, Human
gcucacgccuguaaucccagca

SEQ ID NO: 646601 - RNA, 18 nt, Human
gcuccagaagacucaaag

SEQ ID NO: 646602 - RNA, 25 nt, Human
gcucugccacccaagcuagggugca

SEQ ID NO: 646603 - RNA, 22 nt, Human
gcugaggcaggagaauggcgug

SEQ ID NO: 646604 - RNA, 23 nt, Human
gcugguuucgaacuccugaccuc

SEQ ID NO: 646605 - RNA, 19 nt, Human
ggaaagccagaggucuucu

SEQ ID NO: 646606 - RNA, 20 nt, Human
ggagcuaaaagggcuugaug

SEQ ID NO: 646607 - RNA, 22 nt, Human
ggauuacaggcaugagccaccg

SEQ ID NO: 646608 - RNA, 21 nt, Human
ggcggaucacgaggucaggag

SEQ ID NO: 646609 - RNA, 24 nt, Human
ggcugguuucgaacuccugaccuc

SEQ ID NO: 646610 - RNA, 25 nt, Human
gggaacacgcagucaugcccauaac

SEQ ID NO: 646611 - RNA, 21 nt, Human
ggggaagggaacacgcaguca

SEQ ID NO: 646612 - RNA, 24 nt, Human
ggggguuucacuauguuggccagg

SEQ ID NO: 646613 - RNA, 22 nt, Human
gggguuucacuauguuggccag

SEQ ID NO: 646614 - RNA, 23 nt, Human
gggguuucacuauguuggccagg

SEQ ID NO: 646615 - RNA, 22 nt, Human
gggugcaguggcaugaucucag

SEQ ID NO: 646616 - RNA, 23 nt, Human
ggguguccuggagcccugugggu

SEQ ID NO: 646617 - RNA, 22 nt, Human
ggguuucacuauguuggccagg

SEQ ID NO: 646618 - RNA, 21 nt, Human
ggugcaguggcaugaucucag

SEQ ID NO: 646619 - RNA, 23 nt, Human
ggugcaguggcaugaucucagcu

SEQ ID NO: 646620 - RNA, 24 nt, Human
ggugcaguggcaugaucucagcuu

SEQ ID NO: 646621 - RNA, 24 nt, Human
gguugcucacgccuguaaucccag

SEQ ID NO: 646622 - RNA, 19 nt, Human
gguuucgaacuccugaccu

SEQ ID NO: 646623 - RNA, 24 nt, Human
guccaguugcagaauaauguggga

SEQ ID NO: 646624 - RNA, 22 nt, Human
gugauccacccgccucagccuc

SEQ ID NO: 646625 - RNA, 24 nt, Human
gugauucucccaccucagccuccu

SEQ ID NO: 646626 - RNA, 18 nt, Human
gugcaguggcaugaucuc

SEQ ID NO: 646627 - RNA, 19 nt, Human
guggcagugagcugagauu

SEQ ID NO: 646628 - RNA, 23 nt, Human
guugcucacgccuguaaucccag

SEQ ID NO: 646629 - RNA, 24 nt, Human
uaaacaaguaaauaagguggacaa

SEQ ID NO: 646630 - RNA, 28 nt, Human
uaaagauaaacaaguaaauaagguggac

SEQ ID NO: 646631 - RNA, 19 nt, Human
uaagguggacaaagaacag

SEQ ID NO: 646632 - RNA, 26 nt, Human
uaaggugguugaaucacucuaugcca

SEQ ID NO: 646633 - RNA, 24 nt, Human
uaauuuuugcauuuuuaguagaga

SEQ ID NO: 646634 - RNA, 23 nt, Human
uacaggcaugagccaccgcaccc

SEQ ID NO: 646635 - RNA, 19 nt, Human
uaccuggcucacaggaucc

SEQ ID NO: 646636 - RNA, 22 nt, Human
uagagaggggguuucacuaugu

SEQ ID NO: 646637 - RNA, 23 nt, Human
uaggccagaauauagucugugcu

SEQ ID NO: 646638 - RNA, 24 nt, Human
uagggugcaguggcaugaucucag

SEQ ID NO: 646639 - RNA, 24 nt, Human
uaguagagaggggguuucacuaug

SEQ ID NO: 646640 - RNA, 19 nt, Human
uagucugugcucacagcag

SEQ ID NO: 646641 - RNA, 21 nt, Human
uauguuggccaggcugguuuc

SEQ ID NO: 646642 - RNA, 24 nt, Human
uauguuggccaggcugguuucgaa

SEQ ID NO: 646643 - RNA, 23 nt, Human
ucaaaaugcugggauuacaggca

SEQ ID NO: 646644 - RNA, 24 nt, Human
ucaaaaugcugggauuacaggcau

SEQ ID NO: 646645 - RNA, 19 nt, Human
ucaccgccguccagggcug

SEQ ID NO: 646646 - RNA, 18 nt, Human
ucacgaggucaggagauc

SEQ ID NO: 646647 - RNA, 24 nt, Human
ucacgaggucaggagaucgagacc

SEQ ID NO: 646648 - RNA, 21 nt, Human
ucacgccuguaaucccagcau

SEQ ID NO: 646649 - RNA, 22 nt, Human
ucacuauguuggccaggcuggu

SEQ ID NO: 646650 - RNA, 23 nt, Human
ucagccaggcgcgguugcucacg

SEQ ID NO: 646651 - RNA, 22 nt, Human
ucaggagagaaagaaacgugca

SEQ ID NO: 646652 - RNA, 23 nt, Human
uccaagugauucucccaccucag

SEQ ID NO: 646653 - RNA, 24 nt, Human
uccaagugauucucccaccucagc

SEQ ID NO: 646654 - RNA, 24 nt, Human
ucccguuucaaaaaaaaaaaaaaa

SEQ ID NO: 646655 - RNA, 25 nt, Human
ucgacaucuguguuccaggaaagcc

SEQ ID NO: 646656 - RNA, 26 nt, Human
ucuaugccacacagagucuccagaag

SEQ ID NO: 646657 - RNA, 24 nt, Human
ucucaaaaugcugggauuacaggc

SEQ ID NO: 646658 - RNA, 24 nt, Human
ucucccaccucagccuccuaagua

SEQ ID NO: 646659 - RNA, 24 nt, Human
ucucuacuaaaaauacaaaaaauu

SEQ ID NO: 646660 - RNA, 19 nt, Human
ucucugugacggaucacuu

SEQ ID NO: 646661 - RNA, 24 nt, Human
ucugccacccaagcuagggugcag

SEQ ID NO: 646662 - RNA, 21 nt, Human
ucuggaguccaagugauucuc

SEQ ID NO: 646663 - RNA, 18 nt, Human
ucuugcucugccacccaa

SEQ ID NO: 646664 - RNA, 25 nt, Human
ucuugcucugccacccaagcuaggg

SEQ ID NO: 646665 - RNA, 27 nt, Human
ucuugcucugccacccaagcuagggug

SEQ ID NO: 646666 - RNA, 18 nt, Human
ugaaccugggaggcagag

SEQ ID NO: 646667 - RNA, 25 nt, Human
ugaagagugagacucccguuucaaa

SEQ ID NO: 646668 - RNA, 21 nt, Human
ugaccucaggugauccacccg

SEQ ID NO: 646669 - RNA, 24 nt, Human
ugaccucaggugauccacccgccu

SEQ ID NO: 646670 - RNA, 21 nt, Human
ugagaaggcagcuccagaaga

SEQ ID NO: 646671 - RNA, 19 nt, Human
ugagagcagaguacugucc

SEQ ID NO: 646672 - RNA, 22 nt, Human
ugagagcagaguacuguccugg

SEQ ID NO: 646673 - RNA, 24 nt, Human
ugagauugcgccacugcacugcag

SEQ ID NO: 646674 - RNA, 22 nt, Human
ugagcugagauugcgccacugc

SEQ ID NO: 646675 - RNA, 23 nt, Human
ugaggcaggagaauggcgugaac

SEQ ID NO: 646676 - RNA, 24 nt, Human
ugaggcaggagaauggcgugaacc

SEQ ID NO: 646677 - RNA, 25 nt, Human
ugaggcaggagaauggcgugaaccu

SEQ ID NO: 646678 - RNA, 22 nt, Human
ugagugaagagugagacucccg

SEQ ID NO: 646679 - RNA, 24 nt, Human
ugauggugggcgccuguaguccca

SEQ ID NO: 646680 - RNA, 22 nt, Human
ugcaccuuuuacaaggugugcu

SEQ ID NO: 646681 - RNA, 23 nt, Human
ugcagucgccuccugggccuggc

SEQ ID NO: 646682 - RNA, 24 nt, Human
ugcccagugcccucagggaucagc

SEQ ID NO: 646683 - RNA, 24 nt, Human
uggaguccaagugauucucccacc

SEQ ID NO: 646684 - RNA, 22 nt, Human
uggcagugagcugagauugcgc

SEQ ID NO: 646685 - RNA, 24 nt, Human
uggcaugaucucagcuuacugcaa

SEQ ID NO: 646686 - RNA, 24 nt, Human
uggccaggcugguuucgaacuccu

SEQ ID NO: 646687 - RNA, 18 nt, Human
ugggagcuuucucaaagc

SEQ ID NO: 646688 - RNA, 18 nt, Human
ugggaggcagagguggca

SEQ ID NO: 646689 - RNA, 19 nt, Human
ugggaggcagagguggcag

SEQ ID NO: 646690 - RNA, 21 nt, Human
ugggaggcagagguggcagug

SEQ ID NO: 646691 - RNA, 19 nt, Human
ugggaggccgaggcgggcg

SEQ ID NO: 646692 - RNA, 24 nt, Human
ugggaggccgaggcgggcggauca

SEQ ID NO: 646693 - RNA, 21 nt, Human
ugggauaucaucaaacugucu

SEQ ID NO: 646694 - RNA, 20 nt, Human
ugggauggagcccaagaagc

SEQ ID NO: 646695 - RNA, 18 nt, Human
ugggauuacaggagugug

SEQ ID NO: 646696 - RNA, 22 nt, Human
ugggauuacaggagugugccac

SEQ ID NO: 646697 - RNA, 24 nt, Human
ugggauuacaggagugugccacca

SEQ ID NO: 646698 - RNA, 18 nt, Human
ugggauuacaggcaugag

SEQ ID NO: 646699 - RNA, 19 nt, Human
ugggauuacaggcaugagc

SEQ ID NO: 646700 - RNA, 21 nt, Human
ugggauuacaggcaugagcca

SEQ ID NO: 646701 - RNA, 22 nt, Human
ugggauuacaggcaugagccac

SEQ ID NO: 646702 - RNA, 23 nt, Human
ugggauuacaggcaugagccacc

SEQ ID NO: 646703 - RNA, 24 nt, Human
ugggauuacaggcaugagccaccg

SEQ ID NO: 646704 - RNA, 24 nt, Human
ugggauuacaggcaugagccaccg

SEQ ID NO: 646705 - RNA, 18 nt, Human
uggggaguugggauggag

SEQ ID NO: 646706 - RNA, 19 nt, Human
ugggggaagggaacacgca

SEQ ID NO: 646707 - RNA, 21 nt, Human
uggugggcgccuguaguccca

SEQ ID NO: 646708 - RNA, 18 nt, Human
ugucagccaggcgcgguu

SEQ ID NO: 646709 - RNA, 21 nt, Human
ugugcucacagcagaagucca

SEQ ID NO: 646710 - RNA, 22 nt, Human
uguggguuugcaagaagaucag

SEQ ID NO: 646711 - RNA, 18 nt, Human
uuacugcaaccuccaccu

SEQ ID NO: 646712 - RNA, 22 nt, Human
uuacugcaaccuccaccucugg

SEQ ID NO: 646713 - RNA, 31 nt, Human
uuacugcaaccuccaccucuggaguccaagg

SEQ ID NO: 646714 - RNA, 24 nt, Human
uuagccaggcgugauggugggcgc

SEQ ID NO: 646715 - RNA, 18 nt, Human
uuaguagagaggggguuu

SEQ ID NO: 646716 - RNA, 21 nt, Human
uuaguagagaggggguuucac

SEQ ID NO: 646717 - RNA, 24 nt, Human
uuaguagagaggggguuucacuau

SEQ ID NO: 646718 - RNA, 24 nt, Human
uuccucacugggagcuuucucaaa

SEQ ID NO: 646719 - RNA, 24 nt, Human
uugauaguagggaccugcuucccc

SEQ ID NO: 646720 - RNA, 24 nt, Human
uugcucacgccuguaaucccagca

SEQ ID NO: 646721 - RNA, 20 nt, Human
uugucaucacugguggggag

SEQ ID NO: 646722 - RNA, 24 nt, Human
uuucacuauguuggccaggcuggu

SEQ ID NO: 646723 - RNA, 23 nt, Human
uuucgaacuccugaccucaggug

SEQ ID NO: 646724 - RNA, 23 nt, Human
uuugucauuaaagauaaacaagu

SEQ ID NO: 646725 - RNA, 24 nt, Human
uuuuuaguagagaggggguuucac

SEQ ID NO: 646726 - RNA, 20 nt, Human
uuuuugcauuuuuaguagag

SEQ ID NO: 646727 - RNA, 25 nt, Human
uuuuuuuuuuuuuuuuucggacuuu

SEQ ID NO: 646728 - RNA, 23 nt, Human
uuuuuuuuuuuuuuuuuuuucgg

SEQ ID NO: 646729 - RNA, 23 nt, Human
aaaguauuuccauccugcuccua

SEQ ID NO: 646730 - RNA, 19 nt, Human
aacugcaugagcucaaaga

SEQ ID NO: 646731 - RNA, 26 nt, Human
aacugcaugagcucaaagaucucccc

SEQ ID NO: 646732 - RNA, 22 nt, Human
aagaucuccccgaugagcauac

SEQ ID NO: 646733 - RNA, 20 nt, Human
aagcaaaagccgaacggaac

SEQ ID NO: 646734 - RNA, 24 nt, Human
aagcaaaagccgaacggaacggga

SEQ ID NO: 646735 - RNA, 25 nt, Human
aagcagcaaugagggcccaggaaga

SEQ ID NO: 646736 - RNA, 18 nt, Human
aagccgguggauccagaa

SEQ ID NO: 646737 - RNA, 23 nt, Human
acagcaccaggcucugcagcugu

SEQ ID NO: 646738 - RNA, 23 nt, Human
acccuaacgcaaagcaaaagccg

SEQ ID NO: 646739 - RNA, 28 nt, Human
agaagacaccagcaaugacuggagaccc

SEQ ID NO: 646740 - RNA, 21 nt, Human
agacaccagcaaugaccagga

SEQ ID NO: 646741 - RNA, 20 nt, Human
agcaagcgaacagaacagga

SEQ ID NO: 646742 - RNA, 21 nt, Human
agcaccaggcucugcagcugu

SEQ ID NO: 646743 - RNA, 18 nt, Human
agccugggccugcugcuu

SEQ ID NO: 646744 - RNA, 18 nt, Human
agcgagaugcgggccaga

SEQ ID NO: 646745 - RNA, 20 nt, Human
agcuccaggccggggugcug

SEQ ID NO: 646746 - RNA, 19 nt, Human
aggcaaccacaaagaggaa

SEQ ID NO: 646747 - RNA, 23 nt, Human
aggcacagacacacaaacaccac

SEQ ID NO: 646748 - RNA, 22 nt, Human
aggcagccgagagaaaugagag

SEQ ID NO: 646749 - RNA, 23 nt, Human
agggaagguugcagggguugagg

SEQ ID NO: 646750 - RNA, 18 nt, Human
agggauagcuagcagagc

SEQ ID NO: 646751 - RNA, 19 nt, Human
auggugcugugagcccggc

SEQ ID NO: 646752 - RNA, 24 nt, Human
caaacaccacacacguggggccag

SEQ ID NO: 646753 - RNA, 21 nt, Human
caaagcaaaagccgaacggaa

SEQ ID NO: 646754 - RNA, 20 nt, Human
caagcagcacacacaggcca

SEQ ID NO: 646755 - RNA, 23 nt, Human
cacacacaggccagugaugugca

SEQ ID NO: 646756 - RNA, 21 nt, Human
cacagccugaccugcucaucu

SEQ ID NO: 646757 - RNA, 21 nt, Human
caccagcaaugaccaggaugg

SEQ ID NO: 646758 - RNA, 20 nt, Human
caccccagagccugucaugg

SEQ ID NO: 646759 - RNA, 27 nt, Human
cacccuccaagaggcagccgagagaaa

SEQ ID NO: 646760 - RNA, 22 nt, Human
cacgcugcucccggagcuggcu

SEQ ID NO: 646761 - RNA, 24 nt, Human
cagaagacaccagcaaugaccagg

SEQ ID NO: 646762 - RNA, 25 nt, Human
cagacacacaaacaccacacacgug

SEQ ID NO: 646763 - RNA, 20 nt, Human
cagcccaaagccucgggcga

SEQ ID NO: 646764 - RNA, 18 nt, Human
cagcugggugaggggugg

SEQ ID NO: 646765 - RNA, 19 nt, Human
caggcccaaccuccccacu

SEQ ID NO: 646766 - RNA, 20 nt, Human
caggucucugggcaguggag

SEQ ID NO: 646767 - RNA, 23 nt, Human
ccacaaagaggaacugcaugagc

SEQ ID NO: 646768 - RNA, 22 nt, Human
ccacacacguggggccagggaa

SEQ ID NO: 646769 - RNA, 20 nt, Human
ccaggccggggugcugcaca

SEQ ID NO: 646770 - RNA, 19 nt, Human
cccaaagccggaccacagc

SEQ ID NO: 646771 - RNA, 21 nt, Human
cccacacgcugcucccggagc

SEQ ID NO: 646772 - RNA, 23 nt, Human
ccccaaauuccucuccuggggcu

SEQ ID NO: 646773 - RNA, 22 nt, Human
ccccaugcagggcgguggucuc

SEQ ID NO: 646774 - RNA, 20 nt, Human
cccggagcuggcuguccugg

SEQ ID NO: 646775 - RNA, 20 nt, Human
cccgggcgcccucucccccu

SEQ ID NO: 646776 - RNA, 21 nt, Human
cccgugugcccucgguuccua

SEQ ID NO: 646777 - RNA, 21 nt, Human
ccugugccuggagcccugcag

SEQ ID NO: 646778 - RNA, 24 nt, Human
cgacugcccaucuucugcccaccc

SEQ ID NO: 646779 - RNA, 23 nt, Human
cgggcagcgcaauucaccacucu

SEQ ID NO: 646780 - RNA, 23 nt, Human
cgguuccuaggccccaaauuccu

SEQ ID NO: 646781 - RNA, 21 nt, Human
cuacccugcuccgcuccgagu

SEQ ID NO: 646782 - RNA, 22 nt, Human
cuccaagaggcagccgagagaa

SEQ ID NO: 646783 - RNA, 20 nt, Human
cuccacaguuggcacagguu

SEQ ID NO: 646784 - RNA, 20 nt, Human
cucccaaagccggaccacag

SEQ ID NO: 646785 - RNA, 22 nt, Human
cucucccaaagccggaccacag

SEQ ID NO: 646786 - RNA, 19 nt, Human
cuguacacggucccuaccc

SEQ ID NO: 646787 - RNA, 18 nt, Human
gaacuugauaagccggug

SEQ ID NO: 646788 - RNA, 21 nt, Human
gagcuggacgcuagggucuuc

SEQ ID NO: 646789 - RNA, 22 nt, Human
gcaaagcaaaagccgaacggaa

SEQ ID NO: 646790 - RNA, 22 nt, Human
gcaaugagggcccaggaagacc

SEQ ID NO: 646791 - RNA, 18 nt, Human
gcaauucaccacucuccc

SEQ ID NO: 646792 - RNA, 18 nt, Human
gcacugugccaggaucug

SEQ ID NO: 646793 - RNA, 18 nt, Human
gcagcaaaguauuuccau

SEQ ID NO: 646794 - RNA, 18 nt, Human
gcccucucccccuucauc

SEQ ID NO: 646795 - RNA, 19 nt, Human
gcccucucccccuucauca

SEQ ID NO: 646796 - RNA, 20 nt, Human
gcccugugccuggagcccug

SEQ ID NO: 646797 - RNA, 19 nt, Human
gcgacuucagcccugugcc

SEQ ID NO: 646798 - RNA, 20 nt, Human
ggcacagacacacaaacacc

SEQ ID NO: 646799 - RNA, 18 nt, Human
ggcaguggagggccccgg

SEQ ID NO: 646800 - RNA, 21 nt, Human
ggcccauccuaaaagauggca

SEQ ID NO: 646801 - RNA, 23 nt, Human
gggagaaggagcgcagggcagag

SEQ ID NO: 646802 - RNA, 18 nt, Human
ggggagaaggagcgcagg

SEQ ID NO: 646803 - RNA, 25 nt, Human
ggggagaaggagcgcagggcagagg

SEQ ID NO: 646804 - RNA, 27 nt, Human
gguagugaaggcaaccacaaagaggaa

SEQ ID NO: 646805 - RNA, 24 nt, Human
ggucucugggcaguggagggcccc

SEQ ID NO: 646806 - RNA, 21 nt, Human
guuucuagcaccacacucuga

SEQ ID NO: 646807 - RNA, 21 nt, Human
uacagacuugagcaggcaaaa

SEQ ID NO: 646808 - RNA, 23 nt, Human
uacgauaagcagcaaugagggcc

SEQ ID NO: 646809 - RNA, 24 nt, Human
uacgauaagcagcaaugagggccc

SEQ ID NO: 646810 - RNA, 18 nt, Human
uagcucauccuccgagcc

SEQ ID NO: 646811 - RNA, 19 nt, Human
uaggagcagucccagcaug

SEQ ID NO: 646812 - RNA, 21 nt, Human
uaggccccaaauuccucuccu

SEQ ID NO: 646813 - RNA, 22 nt, Human
ucagaggagccgucccauggca

SEQ ID NO: 646814 - RNA, 21 nt, Human
ucagggcacagcgagaugcgg

SEQ ID NO: 646815 - RNA, 22 nt, Human
uccaagaggcagccgagagaaa

SEQ ID NO: 646816 - RNA, 23 nt, Human
uccaggcccaaccuccccacucc

SEQ ID NO: 646817 - RNA, 26 nt, Human
uccauccugcuccuacaauuuagaaa

SEQ ID NO: 646818 - RNA, 23 nt, Human
ucccagcaugcagugcagcagcc

SEQ ID NO: 646819 - RNA, 19 nt, Human
uccccgaugagcauacaug

SEQ ID NO: 646820 - RNA, 22 nt, Human
ucccugcuuggcagcuucuauc

SEQ ID NO: 646821 - RNA, 24 nt, Human
uccgagcccucuucgggcacgggc

SEQ ID NO: 646822 - RNA, 19 nt, Human
uccuaggccccaaauuccu

SEQ ID NO: 646823 - RNA, 20 nt, Human
uccuaggccccaaauuccuc

SEQ ID NO: 646824 - RNA, 25 nt, Human
uccuaggccccaaauuccucuccug

SEQ ID NO: 646825 - RNA, 19 nt, Human
uccugggccacaggaaccc

SEQ ID NO: 646826 - RNA, 24 nt, Human
uccugggccacaggaacccugcuc

SEQ ID NO: 646827 - RNA, 21 nt, Human
ucucugggcaguggagggccc

SEQ ID NO: 646828 - RNA, 23 nt, Human
ucugacagcaccaggcucugcag

SEQ ID NO: 646829 - RNA, 18 nt, Human
ugaauccuggcacuacag

SEQ ID NO: 646830 - RNA, 19 nt, Human
ugagagggaacccugggca

SEQ ID NO: 646831 - RNA, 22 nt, Human
ugagcaggcaaaaaggcgucug

SEQ ID NO: 646832 - RNA, 19 nt, Human
ugcagcggggagaaggagc

SEQ ID NO: 646833 - RNA, 18 nt, Human
ugcagcuguccuucccac

SEQ ID NO: 646834 - RNA, 22 nt, Human
ugcagggguugaggguccaggc

SEQ ID NO: 646835 - RNA, 20 nt, Human
ugcagguagaaggaguggaa

SEQ ID NO: 646836 - RNA, 21 nt, Human
ugcagugcagcagcccaaagc

SEQ ID NO: 646837 - RNA, 22 nt, Human
ugcagugcagcagcccaaagcc

SEQ ID NO: 646838 - RNA, 19 nt, Human
ugcccucgguuccuaggcc

SEQ ID NO: 646839 - RNA, 20 nt, Human
ugccgacugcccaucuucug

SEQ ID NO: 646840 - RNA, 26 nt, Human
ugcugugagcccggccugugggcgcc

SEQ ID NO: 646841 - RNA, 23 nt, Human
uggagcuggugcauauagagggc

SEQ ID NO: 646842 - RNA, 19 nt, Human
uggcacagguucucccugc

SEQ ID NO: 646843 - RNA, 24 nt, Human
uggcacuacagacuugagcaggca

SEQ ID NO: 646844 - RNA, 20 nt, Human
uguaaagguggcaguacugg

SEQ ID NO: 646845 - RNA, 20 nt, Human
uguccuucccacacgcugcu

SEQ ID NO: 646846 - RNA, 23 nt, Human
uucaccacucucccaaagccgga

SEQ ID NO: 646847 - RNA, 21 nt, Human
uuccuaggccccaaauuccuc

SEQ ID NO: 646848 - RNA, 21 nt, Human
uuuuucuggucaaacucccuu

SEQ ID NO: 646849 - RNA, 28 nt, Human
uuuuuuuuuuuuuuuuuuuuucuggggg

SEQ ID NO: 646850 - RNA, 19 nt, Human
aaagucuuucccagcacau

SEQ ID NO: 646851 - RNA, 24 nt, Human
accccaucuccuccuugccugcag

SEQ ID NO: 646852 - RNA, 23 nt, Human
accccgacagccccgcaaagcug

SEQ ID NO: 646853 - RNA, 21 nt, Human
agaaggagauuagucacacug

SEQ ID NO: 646854 - RNA, 21 nt, Human
aggccucuggccggcgaguuc

SEQ ID NO: 646855 - RNA, 18 nt, Human
agggcugugggaacucug

SEQ ID NO: 646856 - RNA, 24 nt, Human
agucaccccaucuccuccuugccu

SEQ ID NO: 646857 - RNA, 25 nt, Human
aucauccccucagcuucagggaccc

SEQ ID NO: 646858 - RNA, 22 nt, Human
aucgucuuucccaccuccccag

SEQ ID NO: 646859 - RNA, 23 nt, Human
caagcccguucucccaucgcuca

SEQ ID NO: 646860 - RNA, 18 nt, Human
cagccaccaccccaucuc

SEQ ID NO: 646861 - RNA, 22 nt, Human
cauccccucagcuucagggacc

SEQ ID NO: 646862 - RNA, 24 nt, Human
caucucugccuccucugagcaaaa

SEQ ID NO: 646863 - RNA, 22 nt, Human
ccaucgcucaucaaaugaacuc

SEQ ID NO: 646864 - RNA, 19 nt, Human
cccaucucugccuccucug

SEQ ID NO: 646865 - RNA, 19 nt, Human
ccccaucuccuccuugccu

SEQ ID NO: 646866 - RNA, 20 nt, Human
ccuccucugagcaaaaucgu

SEQ ID NO: 646867 - RNA, 21 nt, Human
ccugcagggucucgcuccauc

SEQ ID NO: 646868 - RNA, 21 nt, Human
ccuugaaggguagggaccaug

SEQ ID NO: 646869 - RNA, 23 nt, Human
cgucuuucccaccuccccagccc

SEQ ID NO: 646870 - RNA, 18 nt, Human
cugcuuccuuaccuuugc

SEQ ID NO: 646871 - RNA, 20 nt, Human
cuuggaccccgcagccuccc

SEQ ID NO: 646872 - RNA, 23 nt, Human
gacccugcaucucucucagccac

SEQ ID NO: 646873 - RNA, 24 nt, Human
gagcaaaaucgucuuucccaccuc

SEQ ID NO: 646874 - RNA, 22 nt, Human
gaguucucaagaugugcaaagg

SEQ ID NO: 646875 - RNA, 18 nt, Human
gccauccuuuccuugacc

SEQ ID NO: 646876 - RNA, 18 nt, Human
gccuuuugccccagcaaa

SEQ ID NO: 646877 - RNA, 19 nt, Human
ggaacucuggugcgauucu

SEQ ID NO: 646878 - RNA, 20 nt, Human
guccaccuagguucacuacc

SEQ ID NO: 646879 - RNA, 21 nt, Human
uagcucuggauuauauguccu

SEQ ID NO: 646880 - RNA, 19 nt, Human
uaggaucaagcccguucuc

SEQ ID NO: 646881 - RNA, 21 nt, Human
ucagcuguccucuuggacccc

SEQ ID NO: 646882 - RNA, 23 nt, Human
ucccaaccccgacagccccgcaa

SEQ ID NO: 646883 - RNA, 19 nt, Human
uccuguggccuuuugcccc

SEQ ID NO: 646884 - RNA, 18 nt, Human
ucucucagccaccacccc

SEQ ID NO: 646885 - RNA, 21 nt, Human
ucucugccuccucugagcaaa

SEQ ID NO: 646886 - RNA, 19 nt, Human
ucugcagacugccucggcc

SEQ ID NO: 646887 - RNA, 18 nt, Human
ugagucaccccaucuccu

SEQ ID NO: 646888 - RNA, 23 nt, Human
ugcacaccuuugcuuauuccuuu

SEQ ID NO: 646889 - RNA, 23 nt, Human
ugcaucucucucagccaccaccc

SEQ ID NO: 646890 - RNA, 24 nt, Human
ugcaucucucucagccaccacccc

SEQ ID NO: 646891 - RNA, 26 nt, Human
ugccucuccugccugaccaccgacuc

SEQ ID NO: 646892 - RNA, 19 nt, Human
ugccugcagggucucgcuc

SEQ ID NO: 646893 - RNA, 20 nt, Human
uggccuuuugccccagcaaa

SEQ ID NO: 646894 - RNA, 22 nt, Human
ugggcaucauccccucagcuuc

SEQ ID NO: 646895 - RNA, 19 nt, Human
ugucuuagcucuggauuau

SEQ ID NO: 646896 - RNA, 20 nt, Human
ugugcaaagguuuccugcuu

SEQ ID NO: 646897 - RNA, 24 nt, Human
uuaccuuugcacaccuuugcuuau

SEQ ID NO: 646898 - RNA, 19 nt, Human
uucccaccuccccagcccc

SEQ ID NO: 646899 - RNA, 20 nt, Human
uugccugcagggucucgcuc

SEQ ID NO: 646900 - RNA, 19 nt, Human
uuuccugcuuccuuaccuu

SEQ ID NO: 646901 - RNA, 22 nt, Human
aaaaaaaaguuuacacgaccag

SEQ ID NO: 646902 - RNA, 20 nt, Human
aaacaaaaacauguaaccuu

SEQ ID NO: 646903 - RNA, 20 nt, Human
aaagaacaaagugaagaaau

SEQ ID NO: 646904 - RNA, 23 nt, Human
aacaguguguguuuaauccagcc

SEQ ID NO: 646905 - RNA, 18 nt, Human
aaccuuuuuccuguuucu

SEQ ID NO: 646906 - RNA, 22 nt, Human
aagucagccucacacccacugg

SEQ ID NO: 646907 - RNA, 25 nt, Human
acacagcuuacagaggcguucaaag

SEQ ID NO: 646908 - RNA, 24 nt, Human
acaguuuuuauauuacaaccucaa

SEQ ID NO: 646909 - RNA, 23 nt, Human
acuccaaaaaagguaaaaggaag

SEQ ID NO: 646910 - RNA, 21 nt, Human
acucugcucccaagagcccag

SEQ ID NO: 646911 - RNA, 25 nt, Human
acuggacucugcucccaagagccca

SEQ ID NO: 646912 - RNA, 20 nt, Human
acuugguaaacagugugugu

SEQ ID NO: 646913 - RNA, 22 nt, Human
agaaaaagaacaaagugaagaa

SEQ ID NO: 646914 - RNA, 18 nt, Human
aggaagugguggugucug

SEQ ID NO: 646915 - RNA, 21 nt, Human
aggccucccuccacccaccuc

SEQ ID NO: 646916 - RNA, 22 nt, Human
agguacaacagaugcgacacca

SEQ ID NO: 646917 - RNA, 20 nt, Human
agguuuguuuuuguuuucuu

SEQ ID NO: 646918 - RNA, 28 nt, Human
caaaaaagguaaaaggaauuucacaagu

SEQ ID NO: 646919 - RNA, 22 nt, Human
caaccucaaggacagagggagg

SEQ ID NO: 646920 - RNA, 23 nt, Human
cacacgggacaugaaagcgaggu

SEQ ID NO: 646921 - RNA, 25 nt, Human
cacagaaucacaguguaagauauuc

SEQ ID NO: 646922 - RNA, 24 nt, Human
cacggaucagcagaacauacacga

SEQ ID NO: 646923 - RNA, 23 nt, Human
cacuggacucugcucccaagagc

SEQ ID NO: 646924 - RNA, 19 nt, Human
cagagaauucccacccaca

SEQ ID NO: 646925 - RNA, 18 nt, Human
cagaugcgacaccaugca

SEQ ID NO: 646926 - RNA, 26 nt, Human
cagcagaacauacacgaacaagggaa

SEQ ID NO: 646927 - RNA, 22 nt, Human
caguaaacaaaaacauguaacc

SEQ ID NO: 646928 - RNA, 18 nt, Human
cagugucuucguuggacc

SEQ ID NO: 646929 - RNA, 18 nt, Human
ccaaaacacacgggacau

SEQ ID NO: 646930 - RNA, 21 nt, Human
ccaaagguacaacagaugcga

SEQ ID NO: 646931 - RNA, 22 nt, Human
ccagugagacugcucgcaacuu

SEQ ID NO: 646932 - RNA, 20 nt, Human
cccacacguacagaaacaca

SEQ ID NO: 646933 - RNA, 24 nt, Human
cccacccacacguacagaaacaca

SEQ ID NO: 646934 - RNA, 22 nt, Human
ccgucagagaauucccacccac

SEQ ID NO: 646935 - RNA, 24 nt, Human
ccucaaggacagagggagggaagu

SEQ ID NO: 646936 - RNA, 23 nt, Human
ccucccccgcacaugcgauaccu

SEQ ID NO: 646937 - RNA, 18 nt, Human
ccucccuccacccaccuc

SEQ ID NO: 646938 - RNA, 28 nt, Human
ccucgcuggauccuucccaccuucccca

SEQ ID NO: 646939 - RNA, 18 nt, Human
ccuuuuuccuguuucucu

SEQ ID NO: 646940 - RNA, 20 nt, Human
cgacaccaugcagacacgca

SEQ ID NO: 646941 - RNA, 22 nt, Human
cuacagcuucaauuuccaaaaa

SEQ ID NO: 646942 - RNA, 18 nt, Human
cucccuccacccaccucg

SEQ ID NO: 646943 - RNA, 23 nt, Human
cucgcuggauccuucccaccuuc

SEQ ID NO: 646944 - RNA, 23 nt, Human
cuguucuguagccaaaccaauuu

SEQ ID NO: 646945 - RNA, 19 nt, Human
cuuacagaggcguucaaag

SEQ ID NO: 646946 - RNA, 19 nt, Human
cuuccccaacugccuacug

SEQ ID NO: 646947 - RNA, 27 nt, Human
gaaaaaaauuccucuuaauuuuacuga

SEQ ID NO: 646948 - RNA, 18 nt, Human
gaacauacacgaacaagg

SEQ ID NO: 646949 - RNA, 20 nt, Human
gaccaguuuuuuauugucau

SEQ ID NO: 646950 - RNA, 18 nt, Human
gcagaacauacacgaaca

SEQ ID NO: 646951 - RNA, 19 nt, Human
gcguucaaaguagugacgc

SEQ ID NO: 646952 - RNA, 22 nt, Human
ggaagacauuccagaggaaauc

SEQ ID NO: 646953 - RNA, 26 nt, Human
ggacucgaagcagagugagaggccuc

SEQ ID NO: 646954 - RNA, 23 nt, Human
ggacucugcucccaagagcccag

SEQ ID NO: 646955 - RNA, 18 nt, Human
ggacugcaggguggccug

SEQ ID NO: 646956 - RNA, 20 nt, Human
ggcugaagugcugagcagug

SEQ ID NO: 646957 - RNA, 22 nt, Human
ggucugaaugaacacggaggau

SEQ ID NO: 646958 - RNA, 21 nt, Human
guccugauggcugaagugcug

SEQ ID NO: 646959 - RNA, 18 nt, Human
gucugaaugaacacggag

SEQ ID NO: 646960 - RNA, 23 nt, Human
gugcagacguacaccuguccagg

SEQ ID NO: 646961 - RNA, 18 nt, Human
guuuguuuuuguuuucuu

SEQ ID NO: 646962 - RNA, 22 nt, Human
uacaacagaugcgacaccaugc

SEQ ID NO: 646963 - RNA, 22 nt, Human
uaccagcccgucuuccagaugc

SEQ ID NO: 646964 - RNA, 22 nt, Human
uacuccaaaaaagguaaaagga

SEQ ID NO: 646965 - RNA, 19 nt, Human
uacuuuauuaaagaaauau

SEQ ID NO: 646966 - RNA, 18 nt, Human
uagggcauuugauaagag

SEQ ID NO: 646967 - RNA, 18 nt, Human
uauagcaaguacuccaaa

SEQ ID NO: 646968 - RNA, 22 nt, Human
uauagcaaguacuccaaaaaag

SEQ ID NO: 646969 - RNA, 23 nt, Human
ucaauuuccaaaaaaaaaaaaaa

SEQ ID NO: 646970 - RNA, 23 nt, Human
ucaauuuccaaaaaaaaaaaaaa

SEQ ID NO: 646971 - RNA, 19 nt, Human
ucagaacucagcguaagcu

SEQ ID NO: 646972 - RNA, 20 nt, Human
ucaggccacggaucagcaga

SEQ ID NO: 646973 - RNA, 18 nt, Human
ucauuugagguggagauc

SEQ ID NO: 646974 - RNA, 22 nt, Human
ucgggcagcacucuacagcuuc

SEQ ID NO: 646975 - RNA, 19 nt, Human
ugaagaaauguucagcucc

SEQ ID NO: 646976 - RNA, 22 nt, Human
ugaagacacagcuuacagaggc

SEQ ID NO: 646977 - RNA, 21 nt, Human
ugagguggagaucagagauca

SEQ ID NO: 646978 - RNA, 24 nt, Human
ugaugggugcagacguacaccugu

SEQ ID NO: 646979 - RNA, 19 nt, Human
ugcagacacgcagcuguga

SEQ ID NO: 646980 - RNA, 19 nt, Human
ugcucccaagagcccaggc

SEQ ID NO: 646981 - RNA, 24 nt, Human
uguuuuuguuuucuuucuguucug

SEQ ID NO: 646982 - RNA, 20 nt, Human
uuccucaaagcuagccucuu

SEQ ID NO: 646983 - RNA, 23 nt, Human
uugagguggagaucagagaucau

SEQ ID NO: 646984 - RNA, 20 nt, Human
uuuguuuucuuucuguucug

SEQ ID NO: 646985 - RNA, 18 nt, Human
uuuuuuuuuuuuuuuuug

SEQ ID NO: 646986 - RNA, 18 nt, Human
uuuuuuuuuuuuuuuuug

SEQ ID NO: 646987 - RNA, 19 nt, Human
auugcaaacucaggcugug

SEQ ID NO: 646988 - RNA, 21 nt, Human
caagucccagugucccaguuu

SEQ ID NO: 646989 - RNA, 20 nt, Human
cagggcaguggaggcggggu

SEQ ID NO: 646990 - RNA, 22 nt, Human
cuaagacuaauccacccagcgg

SEQ ID NO: 646991 - RNA, 21 nt, Human
gcaguggaggcggggucuaaa

SEQ ID NO: 646992 - RNA, 24 nt, Human
ggcggauccuaaggcagggguggg

SEQ ID NO: 646993 - RNA, 25 nt, Human
ggcguguccuaggccaaaggggcgg

SEQ ID NO: 646994 - RNA, 25 nt, Human
gggcguguccuaggccaaaggggcg

SEQ ID NO: 646995 - RNA, 24 nt, Human
ggugccugaggagagugggaggcc

SEQ ID NO: 646996 - RNA, 18 nt, Human
uaaaacaaacggcguacc

SEQ ID NO: 646997 - RNA, 19 nt, Human
uaaaacaaacggcguaccc

SEQ ID NO: 646998 - RNA, 27 nt, Human
uaggucccgagccuccgaggccaaagg

SEQ ID NO: 646999 - RNA, 27 nt, Human
ucccgagccuccgaggccaaaggcucc

SEQ ID NO: 647000 - RNA, 20 nt, Human
ucggggaaacggggcguguc

SEQ ID NO: 647001 - RNA, 21 nt, Human
ugggguguagcaggcggggcu

SEQ ID NO: 647002 - RNA, 23 nt, Human
ugggguguagcaggcggggcugu

SEQ ID NO: 647003 - RNA, 19 nt, Human
uguccuaggccaaaggggc

SEQ ID NO: 647004 - RNA, 19 nt, Human
uguccuaggccaaaggggc

SEQ ID NO: 647005 - RNA, 21 nt, Human
uguccuaggccaaaggggcgg

SEQ ID NO: 647006 - RNA, 19 nt, Human
uuuuuuuuuugcaaguccc

SEQ ID NO: 647007 - RNA, 22 nt, Human
uuuuuuuuuuuugcaaguccca

SEQ ID NO: 647008 - RNA, 18 nt, Human
uuuuuuuuuuuuuuuuug

SEQ ID NO: 647009 - RNA, 21 nt, Human
uuuuuuuuuuuuuuuuugcaa

SEQ ID NO: 647010 - RNA, 23 nt, Human
uuuuuuuuuuuuuuuuugcaagu

SEQ ID NO: 647011 - RNA, 22 nt, Human
agggaggaacaggugcaacagc

SEQ ID NO: 647012 - RNA, 21 nt, Human
cugaagcuuugaccacauuga

SEQ ID NO: 647013 - RNA, 26 nt, Human
gaacaggugcaacagcuagcguccuu

SEQ ID NO: 647014 - RNA, 18 nt, Human
ggacagccccgaacaaag

SEQ ID NO: 647015 - RNA, 21 nt, Human
uggacagccccgaacaaagac

SEQ ID NO: 647016 - RNA, 18 nt, Human
uuuuuuuuuuuuuuuuug

SEQ ID NO: 647017 - RNA, 19 nt, Human
uuuuuuuuuuuuuuuuugg

SEQ ID NO: 647018 - RNA, 20 nt, Human
aaaaaaacaacagucucaga

SEQ ID NO: 647019 - RNA, 26 nt, Human
aaaaaaacaacagucucagaagagga

SEQ ID NO: 647020 - RNA, 20 nt, Human
aaaacaacagucucagaaga

SEQ ID NO: 647021 - RNA, 26 nt, Human
aaacaacacacauuuuuuggaacuca

SEQ ID NO: 647022 - RNA, 18 nt, Human
aagccauggaccccucug

SEQ ID NO: 647023 - RNA, 25 nt, Human
acaaacaacacacauuuuuuggaac

SEQ ID NO: 647024 - RNA, 24 nt, Human
acaagcuuuucucccacaaucaag

SEQ ID NO: 647025 - RNA, 24 nt, Human
accacgcuucucagcaggcuggcu

SEQ ID NO: 647026 - RNA, 20 nt, Human
accccucugucuccccaacu

SEQ ID NO: 647027 - RNA, 19 nt, Human
acccuaucaccuaaccaug

SEQ ID NO: 647028 - RNA, 19 nt, Human
acuccaugcacacugacag

SEQ ID NO: 647029 - RNA, 18 nt, Human
acuugcacuuacucuggc

SEQ ID NO: 647030 - RNA, 18 nt, Human
agaagaggaugaggagga

SEQ ID NO: 647031 - RNA, 20 nt, Human
agaguaagcucuagugaagu

SEQ ID NO: 647032 - RNA, 19 nt, Human
agcucuaaaaaaacaacag

SEQ ID NO: 647033 - RNA, 21 nt, Human
aggcagacccucacccccucg

SEQ ID NO: 647034 - RNA, 21 nt, Human
aggccacaccagcuguuuggu

SEQ ID NO: 647035 - RNA, 18 nt, Human
auccauccacacacacac

SEQ ID NO: 647036 - RNA, 20 nt, Human
caccauggccacccucaggc

SEQ ID NO: 647037 - RNA, 22 nt, Human
cacccaaggaaacaaaggaaag

SEQ ID NO: 647038 - RNA, 24 nt, Human
cacuaccaccccacuaggcagggg

SEQ ID NO: 647039 - RNA, 19 nt, Human
cacuaggcaggggagcaga

SEQ ID NO: 647040 - RNA, 23 nt, Human
cacuucugagcccuggcaacccu

SEQ ID NO: 647041 - RNA, 24 nt, Human
cacuucugagcccuggcaacccua

SEQ ID NO: 647042 - RNA, 18 nt, Human
cagacccagcugcaccac

SEQ ID NO: 647043 - RNA, 25 nt, Human
caggcagacccucacccccucgugc

SEQ ID NO: 647044 - RNA, 24 nt, Human
caggcaggcagacccucacccccu

SEQ ID NO: 647045 - RNA, 21 nt, Human
cauacaaauauucauuuauac

SEQ ID NO: 647046 - RNA, 18 nt, Human
cauccacacacacacacc

SEQ ID NO: 647047 - RNA, 26 nt, Human
caugcacacgugcacauccauccaca

SEQ ID NO: 647048 - RNA, 18 nt, Human
caugcccauuucccacca

SEQ ID NO: 647049 - RNA, 21 nt, Human
ccagacccagcugcaccacgc

SEQ ID NO: 647050 - RNA, 26 nt, Human
ccauccacacacacacaccucacucc

SEQ ID NO: 647051 - RNA, 23 nt, Human
cccuaccauccucuccugcuggg

SEQ ID NO: 647052 - RNA, 18 nt, Human
cccuaggcauugcucuga

SEQ ID NO: 647053 - RNA, 22 nt, Human
cccucaggccacaccagcuguu

SEQ ID NO: 647054 - RNA, 21 nt, Human
cccucugucuccccaacuggg

SEQ ID NO: 647055 - RNA, 22 nt, Human
ccucacuccaugcacacugacc

SEQ ID NO: 647056 - RNA, 20 nt, Human
ccucugucuccccaacuggg

SEQ ID NO: 647057 - RNA, 27 nt, Human
ccugccacuuggugaagauucuaagag

SEQ ID NO: 647058 - RNA, 19 nt, Human
cgaggcaggguggggugag

SEQ ID NO: 647059 - RNA, 22 nt, Human
cggcaaaaagaaaaaaagcaug

SEQ ID NO: 647060 - RNA, 25 nt, Human
cggcaaaaagaaaaaaagcaugcac

SEQ ID NO: 647061 - RNA, 30 nt, Human
cgugcacauccauccacacacacacaccuu

SEQ ID NO: 647062 - RNA, 23 nt, Human
cuaaaaaaacaacagucucagaa

SEQ ID NO: 647063 - RNA, 25 nt, Human
cuaggcauugcucugaacccauacc

SEQ ID NO: 647064 - RNA, 24 nt, Human
cucacuccaugcacacugacagga

SEQ ID NO: 647065 - RNA, 20 nt, Human
cucaggccacaccagcuguu

SEQ ID NO: 647066 - RNA, 18 nt, Human
cugaaccccucugucucc

SEQ ID NO: 647067 - RNA, 20 nt, Human
cugcaccacgcuucucagca

SEQ ID NO: 647068 - RNA, 18 nt, Human
cuggcuccagccaccccc

SEQ ID NO: 647069 - RNA, 22 nt, Human
gaagccauggaccccucugccu

SEQ ID NO: 647070 - RNA, 21 nt, Human
gaguaagcucuagugaagucc

SEQ ID NO: 647071 - RNA, 18 nt, Human
gcacagaaaauaggugcu

SEQ ID NO: 647072 - RNA, 22 nt, Human
gcaggcagacccucacccccuc

SEQ ID NO: 647073 - RNA, 18 nt, Human
gcaggugguccugcccag

SEQ ID NO: 647074 - RNA, 22 nt, Human
gcccccuuuuauuuuuuggggg

SEQ ID NO: 647075 - RNA, 22 nt, Human
ggaaacaaaggaaaggugcggc

SEQ ID NO: 647076 - RNA, 19 nt, Human
ggagguauuuauucucaug

SEQ ID NO: 647077 - RNA, 22 nt, Human
ggcaggcagacccucacccccu

SEQ ID NO: 647078 - RNA, 21 nt, Human
ggggguggggaggugaagagg

SEQ ID NO: 647079 - RNA, 21 nt, Human
gggguggggaggugaagaggg

SEQ ID NO: 647080 - RNA, 22 nt, Human
gggguggggaggugaagaggga

SEQ ID NO: 647081 - RNA, 18 nt, Human
ggugcggcgaggcagggu

SEQ ID NO: 647082 - RNA, 25 nt, Human
gugcacauccauccacacacacaca

SEQ ID NO: 647083 - RNA, 21 nt, Human
guggaauaaaguuuaugcccc

SEQ ID NO: 647084 - RNA, 18 nt, Human
guggccugccacuuggug

SEQ ID NO: 647085 - RNA, 27 nt, Human
uaaaaaaacaacagucucagaagagga

SEQ ID NO: 647086 - RNA, 24 nt, Human
uaagaggagcagggacuauugggg

SEQ ID NO: 647087 - RNA, 24 nt, Human
uaggcaccaugaggccccaccaca

SEQ ID NO: 647088 - RNA, 26 nt, Human
uaucuccuccuaggcaccaugaggcc

SEQ ID NO: 647089 - RNA, 23 nt, Human
uccacacacacacaccucacucc

SEQ ID NO: 647090 - RNA, 24 nt, Human
uccacacacacacaccucacucca

SEQ ID NO: 647091 - RNA, 26 nt, Human
uccacacacacacaccucacuccaug

SEQ ID NO: 647092 - RNA, 22 nt, Human
uccagaguaagcucuagugaag

SEQ ID NO: 647093 - RNA, 19 nt, Human
ucccugggcuggggaagcc

SEQ ID NO: 647094 - RNA, 20 nt, Human
uccuaggcaccaugaggccc

SEQ ID NO: 647095 - RNA, 21 nt, Human
uccuaggcaccaugaggcccc

SEQ ID NO: 647096 - RNA, 26 nt, Human
uccugggugccagacgcagguggucc

SEQ ID NO: 647097 - RNA, 20 nt, Human
ucuacacacaccacugucca

SEQ ID NO: 647098 - RNA, 22 nt, Human
ucuacacacaccacuguccagg

SEQ ID NO: 647099 - RNA, 21 nt, Human
ucucagcaggcuggcuccagc

SEQ ID NO: 647100 - RNA, 19 nt, Human
ucucccacaaucaagcucu

SEQ ID NO: 647101 - RNA, 27 nt, Human
ugaggccuguggcguggguaccuggca

SEQ ID NO: 647102 - RNA, 31 nt, Human
ugcacacgugcacauccauccacacacacag

SEQ ID NO: 647103 - RNA, 21 nt, Human
ugccucaccuccugggugcca

SEQ ID NO: 647104 - RNA, 21 nt, Human
ugccucaccuccugggugccg

SEQ ID NO: 647105 - RNA, 21 nt, Human
ugccugcacuccaugacuugc

SEQ ID NO: 647106 - RNA, 24 nt, Human
ugccugcacuccaugacuugcacu

SEQ ID NO: 647107 - RNA, 18 nt, Human
ugcucugaacccauacca

SEQ ID NO: 647108 - RNA, 21 nt, Human
uggaauaaaguuuaugccccc

SEQ ID NO: 647109 - RNA, 18 nt, Human
uggcaacccuaccauccu

SEQ ID NO: 647110 - RNA, 22 nt, Human
uucacccaaggaaacaaaggaa

SEQ ID NO: 647111 - RNA, 22 nt, Human
uucauuuauacaauaaggaaaa

SEQ ID NO: 647112 - RNA, 22 nt, Human
uucccaagucugaaccccucug

SEQ ID NO: 647113 - RNA, 22 nt, Human
uucccaccauggccacccucag

SEQ ID NO: 647114 - RNA, 22 nt, Human
uucuacacacaccacuguccag

SEQ ID NO: 647115 - RNA, 20 nt, Human
uucuccaguggaauaaaguu

SEQ ID NO: 647116 - RNA, 22 nt, Human
uucucccacaaucaagcucuaa

SEQ ID NO: 647117 - RNA, 21 nt, Human
uuugggggguggggaggugaa

SEQ ID NO: 647118 - RNA, 21 nt, Human
uuuuuugggggguggggaggu

SEQ ID NO: 647119 - RNA, 21 nt, Human
uuuuuuuuuuuggugugugug

SEQ ID NO: 647120 - RNA, 20 nt, Human
uuuuuuuuuuuuuuuuuggu

SEQ ID NO: 647121 - RNA, 23 nt, Human
uuuuuuuuuuuuuuuuuggugug

SEQ ID NO: 647122 - RNA, 20 nt, Human
uuuuuuuuuuuuuuuuuugg

SEQ ID NO: 647123 - RNA, 22 nt, Human
aaaaagaaacaugcaaaaaaaa

SEQ ID NO: 647124 - RNA, 18 nt, Human
aaaagaaacaugcaaaaa

SEQ ID NO: 647125 - RNA, 24 nt, Human
aaugauacaaacaacaauacaaaa

SEQ ID NO: 647126 - RNA, 18 nt, Human
acaguuggacauugcucu

SEQ ID NO: 647127 - RNA, 23 nt, Human
agacguucgacacugauuguaug

SEQ ID NO: 647128 - RNA, 21 nt, Human
agagagacguucgacacugau

SEQ ID NO: 647129 - RNA, 21 nt, Human
aggcugggggcugccugcuga

SEQ ID NO: 647130 - RNA, 18 nt, Human
aucucaguggacugugug

SEQ ID NO: 647131 - RNA, 19 nt, Human
augauacaaacaacaauac

SEQ ID NO: 647132 - RNA, 18 nt, Human
augcaaaaaaaaucggaa

SEQ ID NO: 647133 - RNA, 28 nt, Human
caaaaaaaaucggaaugaaaaaaggaga

SEQ ID NO: 647134 - RNA, 23 nt, Human
caaaaagaaacaugcaaaaaaaa

SEQ ID NO: 647135 - RNA, 23 nt, Human
caaaacaaaaauucccuaaagga

SEQ ID NO: 647136 - RNA, 24 nt, Human
caaaacaacugugcucaugcaggc

SEQ ID NO: 647137 - RNA, 21 nt, Human
caaaauaguugugcuguugac

SEQ ID NO: 647138 - RNA, 18 nt, Human
caccuggccagcauuggc

SEQ ID NO: 647139 - RNA, 24 nt, Human
cagaaauugagacuaccccucgcc

SEQ ID NO: 647140 - RNA, 22 nt, Human
caugcaaaaaaaaucggaauga

SEQ ID NO: 647141 - RNA, 24 nt, Human
ccagcauuggccucccggccucca

SEQ ID NO: 647142 - RNA, 20 nt, Human
ccagcugccccuugaccucu

SEQ ID NO: 647143 - RNA, 18 nt, Human
ccaggcccugaagaggac

SEQ ID NO: 647144 - RNA, 21 nt, Human
ccccuugaccucuguuggucc

SEQ ID NO: 647145 - RNA, 22 nt, Human
ccucccggccuccagugggagu

SEQ ID NO: 647146 - RNA, 21 nt, Human
ccuggccagcauuggccuccc

SEQ ID NO: 647147 - RNA, 22 nt, Human
ccuggccagcauuggccucccg

SEQ ID NO: 647148 - RNA, 22 nt, Human
cggccuccagugggaguccccu

SEQ ID NO: 647149 - RNA, 19 nt, Human
cuacggacccacggcgcca

SEQ ID NO: 647150 - RNA, 21 nt, Human
cuccaaccugcagcacagguu

SEQ ID NO: 647151 - RNA, 22 nt, Human
cuggacuggcugucugcagagg

SEQ ID NO: 647152 - RNA, 22 nt, Human
cugggucacgugugucugggag

SEQ ID NO: 647153 - RNA, 20 nt, Human
gaaauuggggcugcccaggc

SEQ ID NO: 647154 - RNA, 19 nt, Human
gaacucggggaccccggug

SEQ ID NO: 647155 - RNA, 18 nt, Human
gacagaaauugagacuac

SEQ ID NO: 647156 - RNA, 21 nt, Human
gagaaaagaaaaguaaaacgc

SEQ ID NO: 647157 - RNA, 23 nt, Human
gauuugcaggugugaguacauca

SEQ ID NO: 647158 - RNA, 24 nt, Human
gauuugcaggugugaguacaucau

SEQ ID NO: 647159 - RNA, 18 nt, Human
ggaaugaaaaaaggagag

SEQ ID NO: 647160 - RNA, 18 nt, Human
ggcccuaggcugggggcu

SEQ ID NO: 647161 - RNA, 20 nt, Human
ggccucccggccuccagugg

SEQ ID NO: 647162 - RNA, 22 nt, Human
ggggcugccugcugaccaaggc

SEQ ID NO: 647163 - RNA, 22 nt, Human
uccccaaaacaacugugcucau

SEQ ID NO: 647164 - RNA, 22 nt, Human
ucucugagagccugacaguugg

SEQ ID NO: 647165 - RNA, 21 nt, Human
ugaccucuguugguccaucuc

SEQ ID NO: 647166 - RNA, 18 nt, Human
ugaggcaucucugagagc

SEQ ID NO: 647167 - RNA, 23 nt, Human
ugauacaaacaacaauacaaaau

SEQ ID NO: 647168 - RNA, 25 nt, Human
ugauacaaacaacaauacaaaauag

SEQ ID NO: 647169 - RNA, 19 nt, Human
ugcagcacagguuucuccu

SEQ ID NO: 647170 - RNA, 24 nt, Human
ugcccaggcccugaagaggacugu

SEQ ID NO: 647171 - RNA, 24 nt, Human
ugcuagggaaacugaggcaucucu

SEQ ID NO: 647172 - RNA, 24 nt, Human
uggagagaacagaauuaucaucuc

SEQ ID NO: 647173 - RNA, 19 nt, Human
uggcccuaggcugggggcu

SEQ ID NO: 647174 - RNA, 18 nt, Human
ugggggcugccugcugac

SEQ ID NO: 647175 - RNA, 22 nt, Human
ugguacaaaaugauacaaacaa

SEQ ID NO: 647176 - RNA, 24 nt, Human
uucuccuguuugcaaaacaaaaau

SEQ ID NO: 647177 - RNA, 18 nt, Human
uuuuuuuuuuuuuuuuug

SEQ ID NO: 647178 - RNA, 28 nt, Human
uuuuuuuuuuuuuuuuuuuuuuuggggg

SEQ ID NO: 647179 - RNA, 22 nt, Human
aaacccaaaguccagccagcag

SEQ ID NO: 647180 - RNA, 21 nt, Human
aagaagauggugugguugcug

SEQ ID NO: 647181 - RNA, 21 nt, Human
aagaagauggugugguugcug

SEQ ID NO: 647182 - RNA, 21 nt, Human
aagaggcgaggugagcauugc

SEQ ID NO: 647183 - RNA, 21 nt, Human
aagaggcgaggugagcauugc

SEQ ID NO: 647184 - RNA, 23 nt, Human
aagcaacugcagcauggcccuuc

SEQ ID NO: 647185 - RNA, 28 nt, Human
acccaaaguccagccagcagggcccccc

SEQ ID NO: 647186 - RNA, 23 nt, Human
accccacuccccagaaaucuggg

SEQ ID NO: 647187 - RNA, 21 nt, Human
accucucacagcaagaagaug

SEQ ID NO: 647188 - RNA, 21 nt, Human
accucucacagcaagaagaug

SEQ ID NO: 647189 - RNA, 20 nt, Human
acggaagguuuccugucagu

SEQ ID NO: 647190 - RNA, 20 nt, Human
acggaagguuuccugucagu

SEQ ID NO: 647191 - RNA, 19 nt, Human
acggguauguggggagcag

SEQ ID NO: 647192 - RNA, 18 nt, Human
acucgcccuuccucuucu

SEQ ID NO: 647193 - RNA, 25 nt, Human
acugagaccccaggccucugucugg

SEQ ID NO: 647194 - RNA, 19 nt, Human
agaaacccaaaguccagcc

SEQ ID NO: 647195 - RNA, 19 nt, Human
agaaacccaaaguccagcc

SEQ ID NO: 647196 - RNA, 21 nt, Human
agauggugugguugcuggggc

SEQ ID NO: 647197 - RNA, 21 nt, Human
agauggugugguugcuggggc

SEQ ID NO: 647198 - RNA, 19 nt, Human
agcaggguuguggccaggg

SEQ ID NO: 647199 - RNA, 21 nt, Human
agccucugcacugcacccugg

SEQ ID NO: 647200 - RNA, 24 nt, Human
aggacuaggcggggcggggacugc

SEQ ID NO: 647201 - RNA, 24 nt, Human
aggacuaggcggggcggggacugc

SEQ ID NO: 647202 - RNA, 21 nt, Human
aggagguggggcccgaggccc

SEQ ID NO: 647203 - RNA, 18 nt, Human
aggcacccccacccuggg

SEQ ID NO: 647204 - RNA, 18 nt, Human
aggcacccccacccuggg

SEQ ID NO: 647205 - RNA, 23 nt, Human
aggcccgggccugcaacccuggc

SEQ ID NO: 647206 - RNA, 20 nt, Human
aggccgggccugcacccguc

SEQ ID NO: 647207 - RNA, 21 nt, Human
agggggcaggggcugcacgaa

SEQ ID NO: 647208 - RNA, 20 nt, Human
agggugcuccgugagcuggg

SEQ ID NO: 647209 - RNA, 18 nt, Human
agugacaggagguagccc

SEQ ID NO: 647210 - RNA, 18 nt, Human
agugacaggagguagccc

SEQ ID NO: 647211 - RNA, 24 nt, Human
aguggccuugugacguggccgggc

SEQ ID NO: 647212 - RNA, 19 nt, Human
aguggggaagaggcgaggu

SEQ ID NO: 647213 - RNA, 19 nt, Human
aguggggaagaggcgaggu

SEQ ID NO: 647214 - RNA, 20 nt, Human
caaaguccagccagcagggc

SEQ ID NO: 647215 - RNA, 19 nt, Human
caaagugcaggugcuucuc

SEQ ID NO: 647216 - RNA, 23 nt, Human
caaccugucagggacuggucugg

SEQ ID NO: 647217 - RNA, 24 nt, Human
caaccugucagggacuggucuggc

SEQ ID NO: 647218 - RNA, 22 nt, Human
caacuagaagcaacugcagcau

SEQ ID NO: 647219 - RNA, 19 nt, Human
cacaaccugucagggacug

SEQ ID NO: 647220 - RNA, 22 nt, Human
cacccccacccugggcaacuug

SEQ ID NO: 647221 - RNA, 22 nt, Human
cacccccacccugggcaacuug

SEQ ID NO: 647222 - RNA, 23 nt, Human
caccugcagugacacacacagcc

SEQ ID NO: 647223 - RNA, 22 nt, Human
caccuggcuaggcacccccacc

SEQ ID NO: 647224 - RNA, 22 nt, Human
caccuggcuaggcacccccacc

SEQ ID NO: 647225 - RNA, 20 nt, Human
cacggacccacacgacgccc

SEQ ID NO: 647226 - RNA, 18 nt, Human
cacuccggagaacagggu

SEQ ID NO: 647227 - RNA, 24 nt, Human
cagcagggcccccccacagacacc

SEQ ID NO: 647228 - RNA, 19 nt, Human
cagcccccucugccucucc

SEQ ID NO: 647229 - RNA, 20 nt, Human
cagccucugcacugcacccu

SEQ ID NO: 647230 - RNA, 24 nt, Human
cagcguccaggugccccuacucgc

SEQ ID NO: 647231 - RNA, 24 nt, Human
cagcguccaggugccccuacucgc

SEQ ID NO: 647232 - RNA, 19 nt, Human
cagcugagcauccuggcca

SEQ ID NO: 647233 - RNA, 19 nt, Human
cagcugagcauccuggcca

SEQ ID NO: 647234 - RNA, 20 nt, Human
cagcuucccgcgauuccccu

SEQ ID NO: 647235 - RNA, 20 nt, Human
cagcuucccgcgauuccccu

SEQ ID NO: 647236 - RNA, 23 nt, Human
caggacccaagcugcccgcccca

SEQ ID NO: 647237 - RNA, 19 nt, Human
caggagaaacccaaagucc

SEQ ID NO: 647238 - RNA, 24 nt, Human
caggcgccaggcggggaagcccug

SEQ ID NO: 647239 - RNA, 21 nt, Human
caggggcugcacgaaggagau

SEQ ID NO: 647240 - RNA, 19 nt, Human
caggugccccuacucgccc

SEQ ID NO: 647241 - RNA, 19 nt, Human
caggugccccuacucgccc

SEQ ID NO: 647242 - RNA, 19 nt, Human
caggugcugcccuccuggc

SEQ ID NO: 647243 - RNA, 19 nt, Human
caggugcugcccuccuggc

SEQ ID NO: 647244 - RNA, 21 nt, Human
caguggccuugugacguggcc

SEQ ID NO: 647245 - RNA, 18 nt, Human
caucuccucucacgugac

SEQ ID NO: 647246 - RNA, 20 nt, Human
cauugcgugacgccgaggac

SEQ ID NO: 647247 - RNA, 20 nt, Human
cauugcgugacgccgaggac

SEQ ID NO: 647248 - RNA, 22 nt, Human
ccagccagcagggcccccccac

SEQ ID NO: 647249 - RNA, 21 nt, Human
ccagcugagcauccuggccac

SEQ ID NO: 647250 - RNA, 21 nt, Human
ccagcugagcauccuggccac

SEQ ID NO: 647251 - RNA, 19 nt, Human
ccaggcgaggccccagccc

SEQ ID NO: 647252 - RNA, 23 nt, Human
ccagggcccccgcucugcccucu

SEQ ID NO: 647253 - RNA, 21 nt, Human
ccaggugccccuacucgcccu

SEQ ID NO: 647254 - RNA, 21 nt, Human
ccaggugccccuacucgcccu

SEQ ID NO: 647255 - RNA, 19 nt, Human
ccauuccucugauucccag

SEQ ID NO: 647256 - RNA, 19 nt, Human
ccauuccucugauucccag

SEQ ID NO: 647257 - RNA, 18 nt, Human
cccacacgacgcccggcu

SEQ ID NO: 647258 - RNA, 19 nt, Human
cccacagacacccccugca

SEQ ID NO: 647259 - RNA, 21 nt, Human
ccccagcaggugcugcccucc

SEQ ID NO: 647260 - RNA, 21 nt, Human
ccccagcaggugcugcccucc

SEQ ID NO: 647261 - RNA, 22 nt, Human
ccccagcaggugcugcccuccu

SEQ ID NO: 647262 - RNA, 22 nt, Human
ccccagcaggugcugcccuccu

SEQ ID NO: 647263 - RNA, 19 nt, Human
ccccagccuucugaacacc

SEQ ID NO: 647264 - RNA, 19 nt, Human
ccccaggccucugucuggc

SEQ ID NO: 647265 - RNA, 22 nt, Human
ccccauuccucugauucccagu

SEQ ID NO: 647266 - RNA, 22 nt, Human
ccccauuccucugauucccagu

SEQ ID NO: 647267 - RNA, 21 nt, Human
cccccagccuucugaacaccu

SEQ ID NO: 647268 - RNA, 19 nt, Human
ccccugggaagugcucccu

SEQ ID NO: 647269 - RNA, 19 nt, Human
ccccugggaagugcucccu

SEQ ID NO: 647270 - RNA, 23 nt, Human
cccgaauuucagcccccucugcc

SEQ ID NO: 647271 - RNA, 24 nt, Human
cccgcccccagccuucugaacacc

SEQ ID NO: 647272 - RNA, 19 nt, Human
cccgggccugcaacccugg

SEQ ID NO: 647273 - RNA, 18 nt, Human
cccggggccugauagugg

SEQ ID NO: 647274 - RNA, 26 nt, Human
cccugggcaacuugcccacggacccc

SEQ ID NO: 647275 - RNA, 26 nt, Human
cccugggcaacuugcccacggacccc

SEQ ID NO: 647276 - RNA, 21 nt, Human
ccgcugccaccugcagggugc

SEQ ID NO: 647277 - RNA, 20 nt, Human
ccgcuuccuaucaacgucca

SEQ ID NO: 647278 - RNA, 20 nt, Human
ccgcuuccuaucaacgucca

SEQ ID NO: 647279 - RNA, 20 nt, Human
ccguccccagcaggugcugc

SEQ ID NO: 647280 - RNA, 20 nt, Human
ccguccccagcaggugcugc

SEQ ID NO: 647281 - RNA, 24 nt, Human
ccgucugccggguugggcgccucc

SEQ ID NO: 647282 - RNA, 24 nt, Human
ccucccagcuucucaugugagucu

SEQ ID NO: 647283 - RNA, 27 nt, Human
ccuccuggccagcugagcauccuggcc

SEQ ID NO: 647284 - RNA, 27 nt, Human
ccuccuggccagcugagcauccuggcc

SEQ ID NO: 647285 - RNA, 18 nt, Human
ccucucggcugggcgggg

SEQ ID NO: 647286 - RNA, 25 nt, Human
ccugccgaccagcagugcaguugug

SEQ ID NO: 647287 - RNA, 26 nt, Human
ccugcggccccugggaagugcucccu

SEQ ID NO: 647288 - RNA, 26 nt, Human
ccugcggccccugggaagugcucccu

SEQ ID NO: 647289 - RNA, 24 nt, Human
ccugcucacagagaggguggaaac

SEQ ID NO: 647290 - RNA, 21 nt, Human
ccuggccaccaucagcgucca

SEQ ID NO: 647291 - RNA, 21 nt, Human
ccuggccaccaucagcgucca

SEQ ID NO: 647292 - RNA, 19 nt, Human
ccuggccagcugagcaucc

SEQ ID NO: 647293 - RNA, 19 nt, Human
ccuggccagcugagcaucc

SEQ ID NO: 647294 - RNA, 20 nt, Human
ccuggccagcugagcauccu

SEQ ID NO: 647295 - RNA, 21 nt, Human
ccugggcaugaaggcagggcc

SEQ ID NO: 647296 - RNA, 21 nt, Human
ccugggcaugaaggcagggcc

SEQ ID NO: 647297 - RNA, 23 nt, Human
cgaaguacccagggcucucccca

SEQ ID NO: 647298 - RNA, 22 nt, Human
cgagaauggagccccucagcuc

SEQ ID NO: 647299 - RNA, 23 nt, Human
cgcucugcccucucgggauugca

SEQ ID NO: 647300 - RNA, 21 nt, Human
cggccccugggaagugcuccc

SEQ ID NO: 647301 - RNA, 22 nt, Human
cggcucugggcggggauggggc

SEQ ID NO: 647302 - RNA, 21 nt, Human
cguccaggacccaagcugccc

SEQ ID NO: 647303 - RNA, 21 nt, Human
cguccaggacccaagcugccc

SEQ ID NO: 647304 - RNA, 24 nt, Human
cguccaggacccaagcugcccgcc

SEQ ID NO: 647305 - RNA, 24 nt, Human
cguccaggacccaagcugcccgcc

SEQ ID NO: 647306 - RNA, 23 nt, Human
cguccaggugccccuacucgccc

SEQ ID NO: 647307 - RNA, 23 nt, Human
cguccaggugccccuacucgccc

SEQ ID NO: 647308 - RNA, 19 nt, Human
cucaagguccugaaugccc

SEQ ID NO: 647309 - RNA, 19 nt, Human
cucaagguccugaaugccc

SEQ ID NO: 647310 - RNA, 24 nt, Human
cucacagcaagaagaugguguggu

SEQ ID NO: 647311 - RNA, 24 nt, Human
cucacagcaagaagaugguguggu

SEQ ID NO: 647312 - RNA, 28 nt, Human
cucacagcaagaagauggugugguucua

SEQ ID NO: 647313 - RNA, 28 nt, Human
cucacagcaagaagauggugugguucua

SEQ ID NO: 647314 - RNA, 24 nt, Human
cucucaauuaucacccacggaccc

SEQ ID NO: 647315 - RNA, 22 nt, Human
cugaacaccugccacguggauc

SEQ ID NO: 647316 - RNA, 21 nt, Human
cugagaccccaggccucuguc

SEQ ID NO: 647317 - RNA, 18 nt, Human
cugcacccgucugccggg

SEQ ID NO: 647318 - RNA, 18 nt, Human
cugcagcauggcccuucc

SEQ ID NO: 647319 - RNA, 21 nt, Human
cugccaccugcagggugcucc

SEQ ID NO: 647320 - RNA, 22 nt, Human
cugcggccgcagggagagggcc

SEQ ID NO: 647321 - RNA, 18 nt, Human
cugcggggucccgccagg

SEQ ID NO: 647322 - RNA, 22 nt, Human
cuucugaacaccugccacgugg

SEQ ID NO: 647323 - RNA, 22 nt, Human
gaagcaacugcagcauggcccu

SEQ ID NO: 647324 - RNA, 21 nt, Human
gaagguuuccugucagugcgg

SEQ ID NO: 647325 - RNA, 21 nt, Human
gaagguuuccugucagugcgg

SEQ ID NO: 647326 - RNA, 20 nt, Human
gacccaagcugcccgcccca

SEQ ID NO: 647327 - RNA, 21 nt, Human
gacgcggggacagccgguuca

SEQ ID NO: 647328 - RNA, 20 nt, Human
gacugcaccuggcuaggcac

SEQ ID NO: 647329 - RNA, 20 nt, Human
gacugcaccuggcuaggcac

SEQ ID NO: 647330 - RNA, 24 nt, Human
gagcagccucccuucggggucucc

SEQ ID NO: 647331 - RNA, 19 nt, Human
gagcugggccugggcucag

SEQ ID NO: 647332 - RNA, 20 nt, Human
gaggcccgggccugcaaccc

SEQ ID NO: 647333 - RNA, 19 nt, Human
gcacccccacccugggcaa

SEQ ID NO: 647334 - RNA, 19 nt, Human
gcacccccacccugggcaa

SEQ ID NO: 647335 - RNA, 20 nt, Human
gccacguggaucacaaccuu

SEQ ID NO: 647336 - RNA, 22 nt, Human
gcccuuggcaaggaaguccugg

SEQ ID NO: 647337 - RNA, 22 nt, Human
gccggugcugacaaugaacacg

SEQ ID NO: 647338 - RNA, 20 nt, Human
gcggggacagccgguucaca

SEQ ID NO: 647339 - RNA, 23 nt, Human
gcuccgugagcugggccugggcu

SEQ ID NO: 647340 - RNA, 19 nt, Human
gcuccucccugaacagucc

SEQ ID NO: 647341 - RNA, 19 nt, Human
gcuccucccugaacagucc

SEQ ID NO: 647342 - RNA, 19 nt, Human
gcuuggacaccccacuccc

SEQ ID NO: 647343 - RNA, 21 nt, Human
ggaagguuuccugucagugcg

SEQ ID NO: 647344 - RNA, 21 nt, Human
ggaagguuuccugucagugcg

SEQ ID NO: 647345 - RNA, 22 nt, Human
ggagcuccucccagcuucucau

SEQ ID NO: 647346 - RNA, 23 nt, Human
ggagguggggcccgaggcccggg

SEQ ID NO: 647347 - RNA, 19 nt, Human
ggcaggggcugaggcagcg

SEQ ID NO: 647348 - RNA, 21 nt, Human
ggcagugccuuuucacccucu

SEQ ID NO: 647349 - RNA, 20 nt, Human
ggccccugggaagugcuccc

SEQ ID NO: 647350 - RNA, 20 nt, Human
ggccgcagggagagggccgg

SEQ ID NO: 647351 - RNA, 20 nt, Human
ggcggggauggggccggggc

SEQ ID NO: 647352 - RNA, 23 nt, Human
gggaagugcucccucacgacgga

SEQ ID NO: 647353 - RNA, 23 nt, Human
gggaagugcucccucacgacgga

SEQ ID NO: 647354 - RNA, 20 nt, Human
gggacugcaccuggcuaggc

SEQ ID NO: 647355 - RNA, 20 nt, Human
gggacugcaccuggcuaggc

SEQ ID NO: 647356 - RNA, 18 nt, Human
gggagagggccggggucg

SEQ ID NO: 647357 - RNA, 20 nt, Human
gggagcaggguuguggccag

SEQ ID NO: 647358 - RNA, 19 nt, Human
gggaggugaccgcagcccu

SEQ ID NO: 647359 - RNA, 21 nt, Human
gggagguggaggagacgcggg

SEQ ID NO: 647360 - RNA, 23 nt, Human
gggcagaggggaggcagagccuc

SEQ ID NO: 647361 - RNA, 24 nt, Human
gggcagaggggaggcagagccucu

SEQ ID NO: 647362 - RNA, 19 nt, Human
gggcaggggcugcacgaag

SEQ ID NO: 647363 - RNA, 21 nt, Human
gggcaggggcugcacgaagga

SEQ ID NO: 647364 - RNA, 19 nt, Human
gggcaugaaggcagggcca

SEQ ID NO: 647365 - RNA, 19 nt, Human
gggcaugaaggcagggcca

SEQ ID NO: 647366 - RNA, 21 nt, Human
gggcccuuggcaaggaagucc

SEQ ID NO: 647367 - RNA, 19 nt, Human
gggccggggcugcugcggg

SEQ ID NO: 647368 - RNA, 21 nt, Human
gggcggggauggggccggggc

SEQ ID NO: 647369 - RNA, 19 nt, Human
ggggcccgaggcccgggcc

SEQ ID NO: 647370 - RNA, 19 nt, Human
gugcugcccuccuggccag

SEQ ID NO: 647371 - RNA, 19 nt, Human
gugcugcccuccuggccag

SEQ ID NO: 647372 - RNA, 20 nt, Human
uaaaaugccuggggcuacau

SEQ ID NO: 647373 - RNA, 18 nt, Human
uacccagggcucucccca

SEQ ID NO: 647374 - RNA, 18 nt, Human
uagaaacaggcgaccugc

SEQ ID NO: 647375 - RNA, 21 nt, Human
uagaagcaacugcagcauggc

SEQ ID NO: 647376 - RNA, 21 nt, Human
uaucaacguccaggacccaag

SEQ ID NO: 647377 - RNA, 21 nt, Human
uaucaacguccaggacccaag

SEQ ID NO: 647378 - RNA, 22 nt, Human
ucagaagccuuugcggaccuga

SEQ ID NO: 647379 - RNA, 22 nt, Human
ucagaagccuuugcggaccuga

SEQ ID NO: 647380 - RNA, 19 nt, Human
ucagcccccucugccucuc

SEQ ID NO: 647381 - RNA, 21 nt, Human
uccacagaagccacugaggcc

SEQ ID NO: 647382 - RNA, 19 nt, Human
ucccggggccugauagugg

SEQ ID NO: 647383 - RNA, 18 nt, Human
ucccucacgacggaaggu

SEQ ID NO: 647384 - RNA, 22 nt, Human
ucccuggagagugucgucccug

SEQ ID NO: 647385 - RNA, 22 nt, Human
ucccuggagagugucgucccug

SEQ ID NO: 647386 - RNA, 19 nt, Human
uccggggccagagcuguuc

SEQ ID NO: 647387 - RNA, 25 nt, Human
uccggggccagagcuguucugagac

SEQ ID NO: 647388 - RNA, 22 nt, Human
uccugaaugcccagcucugccc

SEQ ID NO: 647389 - RNA, 22 nt, Human
uccugaaugcccagcucugccc

SEQ ID NO: 647390 - RNA, 22 nt, Human
ucucacagcaagaagauggugu

SEQ ID NO: 647391 - RNA, 22 nt, Human
ucucacagcaagaagauggugu

SEQ ID NO: 647392 - RNA, 19 nt, Human
ucuggacugagaccccagg

SEQ ID NO: 647393 - RNA, 21 nt, Human
ucuggagagcuucacgugcug

SEQ ID NO: 647394 - RNA, 18 nt, Human
ugacaggagguagcccgg

SEQ ID NO: 647395 - RNA, 18 nt, Human
ugacaggagguagcccgg

SEQ ID NO: 647396 - RNA, 18 nt, Human
ugacuugguuuauuaccg

SEQ ID NO: 647397 - RNA, 20 nt, Human
ugaggcagcggcugacagcu

SEQ ID NO: 647398 - RNA, 19 nt, Human
ugcagagcuggagcuccuc

SEQ ID NO: 647399 - RNA, 24 nt, Human
ugcaguugugagcacgccaccugc

SEQ ID NO: 647400 - RNA, 20 nt, Human
ugccagacggguaugugggg

SEQ ID NO: 647401 - RNA, 21 nt, Human
ugccccauuccucugauuccc

SEQ ID NO: 647402 - RNA, 21 nt, Human
ugccccauuccucugauuccc

SEQ ID NO: 647403 - RNA, 19 nt, Human
ugcggccgcagggagaggg

SEQ ID NO: 647404 - RNA, 19 nt, Human
ugcuggggccucccuggag

SEQ ID NO: 647405 - RNA, 19 nt, Human
ugcuggggccucccuggag

SEQ ID NO: 647406 - RNA, 25 nt, Human
uggccgggcccuuggcaaggaaguc

SEQ ID NO: 647407 - RNA, 19 nt, Human
uggccugacuugggggcua

SEQ ID NO: 647408 - RNA, 21 nt, Human
uggcgcaggugugggagcagc

SEQ ID NO: 647409 - RNA, 20 nt, Human
ugggcagaggggaggcagag

SEQ ID NO: 647410 - RNA, 20 nt, Human
uggggcccgaggcccgggcc

SEQ ID NO: 647411 - RNA, 18 nt, Human
uguccugggcaugaaggc

SEQ ID NO: 647412 - RNA, 18 nt, Human
uguccugggcaugaaggc

SEQ ID NO: 647413 - RNA, 23 nt, Human
uucccuagguggcucccagcagc

SEQ ID NO: 647414 - RNA, 19 nt, Human
uuccucuucuucagaagcc

SEQ ID NO: 647415 - RNA, 19 nt, Human
uuccucuucuucagaagcc

SEQ ID NO: 647416 - RNA, 18 nt, Human
uuggcacugagauggaga

SEQ ID NO: 647417 - RNA, 23 nt, Human
uuggcacugagauggagacggca

SEQ ID NO: 647418 - RNA, 21 nt, Human
uuuauuaccgucacuauagaa

SEQ ID NO: 647419 - RNA, 21 nt, Human
uuuuuuuuuuuuuuuuucggu

SEQ ID NO: 647420 - RNA, 22 nt, Human
uuuuuuuuuuuuuuuuuucggg

SEQ ID NO: 647421 - RNA, 22 nt, Human
acacagcaguucucccagcuca

SEQ ID NO: 647422 - RNA, 25 nt, Human
agaaggccugaagcccaggcaaggg

SEQ ID NO: 647423 - RNA, 21 nt, Human
agaucuccagcagcaagggcc

SEQ ID NO: 647424 - RNA, 18 nt, Human
agcaagggccgcacucuc

SEQ ID NO: 647425 - RNA, 23 nt, Human
agcagugaccucagaucuccagc

SEQ ID NO: 647426 - RNA, 22 nt, Human
aggugccagaaggccugaagcc

SEQ ID NO: 647427 - RNA, 23 nt, Human
auccagccauccccuucccccaa

SEQ ID NO: 647428 - RNA, 22 nt, Human
auccccuucccccaaacuccag

SEQ ID NO: 647429 - RNA, 21 nt, Human
caagagguacacagcaguucu

SEQ ID NO: 647430 - RNA, 21 nt, Human
caaggcuguugggugcuggca

SEQ ID NO: 647431 - RNA, 18 nt, Human
cacagcacuaagcggcuu

SEQ ID NO: 647432 - RNA, 21 nt, Human
cacauccagccauccccuucc

SEQ ID NO: 647433 - RNA, 19 nt, Human
cagaaggccugaagcccag

SEQ ID NO: 647434 - RNA, 23 nt, Human
cagcagcaagggccgcacucucg

SEQ ID NO: 647435 - RNA, 24 nt, Human
cagcagugaccucagaucuccagc

SEQ ID NO: 647436 - RNA, 18 nt, Human
cagcccuucucagagggg

SEQ ID NO: 647437 - RNA, 20 nt, Human
ccagagcaaagccagguuuc

SEQ ID NO: 647438 - RNA, 19 nt, Human
cccaaacuccagcccuucu

SEQ ID NO: 647439 - RNA, 20 nt, Human
cccccggcaggaggggcggg

SEQ ID NO: 647440 - RNA, 21 nt, Human
ccccuucccccaaacuccagc

SEQ ID NO: 647441 - RNA, 23 nt, Human
cccucggcggccugauucccagg

SEQ ID NO: 647442 - RNA, 22 nt, Human
cccugggccucccccggcaggg

SEQ ID NO: 647443 - RNA, 21 nt, Human
cccuuuguccagagcaaagcc

SEQ ID NO: 647444 - RNA, 19 nt, Human
ccuccagcauggccuggag

SEQ ID NO: 647445 - RNA, 21 nt, Human
ccuggagcacauccagccauc

SEQ ID NO: 647446 - RNA, 22 nt, Human
ccugggccucccccggcaggag

SEQ ID NO: 647447 - RNA, 19 nt, Human
cuccggucccugggccucc

SEQ ID NO: 647448 - RNA, 24 nt, Human
cuccugccugcagugaggccacag

SEQ ID NO: 647449 - RNA, 18 nt, Human
cucgugcccacaagggcc

SEQ ID NO: 647450 - RNA, 21 nt, Human
gagcaaagccagguuuccaag

SEQ ID NO: 647451 - RNA, 18 nt, Human
gauggugcggcucuggag

SEQ ID NO: 647452 - RNA, 19 nt, Human
gcaggaggggcggggcucc

SEQ ID NO: 647453 - RNA, 21 nt, Human
gccagaaggccugaagcccag

SEQ ID NO: 647454 - RNA, 19 nt, Human
gcucacagcagugaccuca

SEQ ID NO: 647455 - RNA, 22 nt, Human
gggaacgggcagugccugugcc

SEQ ID NO: 647456 - RNA, 19 nt, Human
guccagagcaaagccaggu

SEQ ID NO: 647457 - RNA, 22 nt, Human
uccagcauggccuggagcacau

SEQ ID NO: 647458 - RNA, 20 nt, Human
ucccagggguccaagccacc

SEQ ID NO: 647459 - RNA, 19 nt, Human
uccccacggcaaggcuguu

SEQ ID NO: 647460 - RNA, 18 nt, Human
ucccccaaacuccagccc

SEQ ID NO: 647461 - RNA, 23 nt, Human
ucgugcccacaagggccuugcag

SEQ ID NO: 647462 - RNA, 18 nt, Human
ucucagaggggcucuggg

SEQ ID NO: 647463 - RNA, 21 nt, Human
ugaccucagaucuccagcagc

SEQ ID NO: 647464 - RNA, 22 nt, Human
ugagaaggugccagaaggccug

SEQ ID NO: 647465 - RNA, 22 nt, Human
uggcagauggugcggcucugga

SEQ ID NO: 647466 - RNA, 23 nt, Human
uggccuggagcacauccagccau

SEQ ID NO: 647467 - RNA, 23 nt, Human
uuuuuagcacccgcugcuuuugg

SEQ ID NO: 647468 - RNA, 27 nt, Human
uuuuuuuuagcacccgcugcuuuuggc

SEQ ID NO: 647469 - RNA, 24 nt, Human
uuuuuuuuuuuuuagcacccgcug

SEQ ID NO: 647470 - RNA, 22 nt, Human
aaaugcugugagauugauaccu

SEQ ID NO: 647471 - RNA, 18 nt, Human
aaggguggguacagcaca

SEQ ID NO: 647472 - RNA, 18 nt, Human
acacaggaaauucccaca

SEQ ID NO: 647473 - RNA, 19 nt, Human
accaugaggaauacagaaa

SEQ ID NO: 647474 - RNA, 24 nt, Human
accaugaggaauacagaaaccaac

SEQ ID NO: 647475 - RNA, 24 nt, Human
agaaaccaacgaggcaugauucuu

SEQ ID NO: 647476 - RNA, 19 nt, Human
agaaggcacuguguuuggg

SEQ ID NO: 647477 - RNA, 23 nt, Human
aggaagaaaacacuauuugggga

SEQ ID NO: 647478 - RNA, 19 nt, Human
aggcaugauucuugccuua

SEQ ID NO: 647479 - RNA, 18 nt, Human
augcugugagauugauac

SEQ ID NO: 647480 - RNA, 22 nt, Human
caacauuauaagaacccagagg

SEQ ID NO: 647481 - RNA, 25 nt, Human
caccuaagaaacaaugucuucagcu

SEQ ID NO: 647482 - RNA, 20 nt, Human
cacuauuuggggaugaggau

SEQ ID NO: 647483 - RNA, 23 nt, Human
cagcacaacccuguggccacguu

SEQ ID NO: 647484 - RNA, 21 nt, Human
caggaagcacuaaaugcugug

SEQ ID NO: 647485 - RNA, 24 nt, Human
ccacagaacacccaggagggugac

SEQ ID NO: 647486 - RNA, 20 nt, Human
cgccggggaaggguggguac

SEQ ID NO: 647487 - RNA, 19 nt, Human
cucccaugaacaaugccgu

SEQ ID NO: 647488 - RNA, 19 nt, Human
gaaauucccacagaacacc

SEQ ID NO: 647489 - RNA, 23 nt, Human
gaaggcucuaauuaaaaccagaa

SEQ ID NO: 647490 - RNA, 22 nt, Human
gccugcaauguagaaggcacug

SEQ ID NO: 647491 - RNA, 24 nt, Human
ggaaggguggguacagcacaaccc

SEQ ID NO: 647492 - RNA, 20 nt, Human
ggggaaggguggguacagca

SEQ ID NO: 647493 - RNA, 19 nt, Human
uaaaaccagaagcaggagg

SEQ ID NO: 647494 - RNA, 24 nt, Human
uacagcacaacccuguggccacgu

SEQ ID NO: 647495 - RNA, 20 nt, Human
uaggggguuuaaacaugaca

SEQ ID NO: 647496 - RNA, 18 nt, Human
ucccacagaacacccagg

SEQ ID NO: 647497 - RNA, 21 nt, Human
ucuguuuguccuuuguccccg

SEQ ID NO: 647498 - RNA, 23 nt, Human
ucuguuuguccuuuguccccgau

SEQ ID NO: 647499 - RNA, 22 nt, Human
ugccuuaggaagcucacagucu

SEQ ID NO: 647500 - RNA, 23 nt, Human
uggaggcaggagaagccccgcug

SEQ ID NO: 647501 - RNA, 18 nt, Human
ugugauggaggcaggaga

SEQ ID NO: 647502 - RNA, 20 nt, Human
ugugauggaggcaggagaag

SEQ ID NO: 647503 - RNA, 18 nt, Human
uguggccacguuuuccuc

SEQ ID NO: 647504 - RNA, 19 nt, Human
uugcacaugcacacaggua

SEQ ID NO: 647505 - RNA, 19 nt, Human
uuuuuuuuuuuuuugcuuu

SEQ ID NO: 647506 - RNA, 18 nt, Human
uuuuuuuuuuuuuuuuug

SEQ ID NO: 647507 - RNA, 22 nt, Human
uuuuuuuuuuuuuuuuugcuuu

SEQ ID NO: 647508 - RNA, 23 nt, Human
aacacacacacacacaaccagga

SEQ ID NO: 647509 - RNA, 24 nt, Human
aaccugaccucacucaccaacaca

SEQ ID NO: 647510 - RNA, 25 nt, Human
acacacacacacaaccaggacacaa

SEQ ID NO: 647511 - RNA, 33 nt, Human
acacacacacacacaaccaggacacauguggug

SEQ ID NO: 647512 - RNA, 22 nt, Human
acacucgcaaaccugaccucac

SEQ ID NO: 647513 - RNA, 19 nt, Human
accaacacacacacacaca

SEQ ID NO: 647514 - RNA, 19 nt, Human
accaggacacaugugccag

SEQ ID NO: 647515 - RNA, 20 nt, Human
acuuugaaggacaggaagga

SEQ ID NO: 647516 - RNA, 18 nt, Human
agacccgaggcaaagcgg

SEQ ID NO: 647517 - RNA, 24 nt, Human
agcucccacccgcccuuucugccg

SEQ ID NO: 647518 - RNA, 19 nt, Human
aggaagccgacuugggagc

SEQ ID NO: 647519 - RNA, 26 nt, Human
aggaaggaaugaacacacccaggugg

SEQ ID NO: 647520 - RNA, 21 nt, Human
aggaaugaacacacccaggug

SEQ ID NO: 647521 - RNA, 25 nt, Human
aggagucaggaggguggggcccagg

SEQ ID NO: 647522 - RNA, 18 nt, Human
aggcagagcccgccgccc

SEQ ID NO: 647523 - RNA, 25 nt, Human
agggguucagggaggguugcagggg

SEQ ID NO: 647524 - RNA, 23 nt, Human
agguaagaagggggcagaugcag

SEQ ID NO: 647525 - RNA, 22 nt, Human
augaacacacccagguggacgu

SEQ ID NO: 647526 - RNA, 20 nt, Human
caaccaggacacaugugcca

SEQ ID NO: 647527 - RNA, 22 nt, Human
caauaaauagaacccugggccc

SEQ ID NO: 647528 - RNA, 19 nt, Human
caggcagcuggugcaggca

SEQ ID NO: 647529 - RNA, 19 nt, Human
cagggcggaguucgcaacu

SEQ ID NO: 647530 - RNA, 26 nt, Human
ccaacacacacacacacaaccaggac

SEQ ID NO: 647531 - RNA, 25 nt, Human
cccacaaccggggaagggagagggc

SEQ ID NO: 647532 - RNA, 20 nt, Human
cccagguggacguuugguuu

SEQ ID NO: 647533 - RNA, 18 nt, Human
ccccagggcuccggcuug

SEQ ID NO: 647534 - RNA, 22 nt, Human
cccgccgcccacggccuccgac

SEQ ID NO: 647535 - RNA, 23 nt, Human
cccgcggccggggcaguuacagc

SEQ ID NO: 647536 - RNA, 21 nt, Human
cccggcccuuaaccaucagcc

SEQ ID NO: 647537 - RNA, 18 nt, Human
cccuggagcccugcaggg

SEQ ID NO: 647538 - RNA, 18 nt, Human
cccugggcccagccugcu

SEQ ID NO: 647539 - RNA, 22 nt, Human
cccugggcccagccugcuuugg

SEQ ID NO: 647540 - RNA, 23 nt, Human
ccgacuugggagcgggcgcgccc

SEQ ID NO: 647541 - RNA, 21 nt, Human
ccucacucaccaacacacaca

SEQ ID NO: 647542 - RNA, 23 nt, Human
ccuccaaauagcccuggagcccu

SEQ ID NO: 647543 - RNA, 23 nt, Human
ccuugcugcuggucccgcgcugg

SEQ ID NO: 647544 - RNA, 18 nt, Human
ccuuucugccgcggagaa

SEQ ID NO: 647545 - RNA, 18 nt, Human
cggccggggcaguuacag

SEQ ID NO: 647546 - RNA, 23 nt, Human
cggcggggaggaagccgacuugg

SEQ ID NO: 647547 - RNA, 19 nt, Human
cgguuccagcgcgccgggc

SEQ ID NO: 647548 - RNA, 24 nt, Human
cuccaaauagcccuggagcccugc

SEQ ID NO: 647549 - RNA, 19 nt, Human
cucccggcccuuaaccauc

SEQ ID NO: 647550 - RNA, 19 nt, Human
cucgcaaaccugaccucac

SEQ ID NO: 647551 - RNA, 25 nt, Human
cugaccucacucaccaacacacaca

SEQ ID NO: 647552 - RNA, 21 nt, Human
cuggucccgcgcuggagcggg

SEQ ID NO: 647553 - RNA, 20 nt, Human
gaagccgacuugggagcggg

SEQ ID NO: 647554 - RNA, 20 nt, Human
gagcaaggcaauaaauagaa

SEQ ID NO: 647555 - RNA, 24 nt, Human
gagcccgccgcccacggccuccga

SEQ ID NO: 647556 - RNA, 21 nt, Human
gaggguggggcccaggcagcu

SEQ ID NO: 647557 - RNA, 18 nt, Human
gcaggccagaugugcagc

SEQ ID NO: 647558 - RNA, 18 nt, Human
gcaucccugcauguggcc

SEQ ID NO: 647559 - RNA, 19 nt, Human
gcaucccugcauguggccu

SEQ ID NO: 647560 - RNA, 20 nt, Human
gcaucccugcauguggccuu

SEQ ID NO: 647561 - RNA, 23 nt, Human
gcccaaggucccuccaaauagcc

SEQ ID NO: 647562 - RNA, 22 nt, Human
gcccuggagcccugcagggcac

SEQ ID NO: 647563 - RNA, 23 nt, Human
gccgcgguuccagcgcgccgggc

SEQ ID NO: 647564 - RNA, 23 nt, Human
ggaaccgagugcugcccaacccc

SEQ ID NO: 647565 - RNA, 19 nt, Human
ggaagggagagggcagagc

SEQ ID NO: 647566 - RNA, 18 nt, Human
ggagacccgaggcaaagc

SEQ ID NO: 647567 - RNA, 22 nt, Human
gggaagcagaggggcgauccgg

SEQ ID NO: 647568 - RNA, 22 nt, Human
gggaggguugcagggguucagg

SEQ ID NO: 647569 - RNA, 21 nt, Human
gggggugaucagggcaguugc

SEQ ID NO: 647570 - RNA, 20 nt, Human
gguggggcccaggcagcugg

SEQ ID NO: 647571 - RNA, 20 nt, Human
gugcaguucaggggaccugg

SEQ ID NO: 647572 - RNA, 22 nt, Human
uaagaagggggcagaugcagca

SEQ ID NO: 647573 - RNA, 21 nt, Human
uacagcucccacccgcccuuu

SEQ ID NO: 647574 - RNA, 18 nt, Human
uagaacccugggcccagc

SEQ ID NO: 647575 - RNA, 19 nt, Human
uauuuauuuaucaaaacac

SEQ ID NO: 647576 - RNA, 21 nt, Human
ucaaaacacucgcaaaccuga

SEQ ID NO: 647577 - RNA, 22 nt, Human
ucaaaacacucgcaaaccugac

SEQ ID NO: 647578 - RNA, 24 nt, Human
ucccacccgcccuuucugccgcgg

SEQ ID NO: 647579 - RNA, 18 nt, Human
ugaucagggcaguugcgg

SEQ ID NO: 647580 - RNA, 22 nt, Human
ugcccaaccccagggcuccggc

SEQ ID NO: 647581 - RNA, 20 nt, Human
ugcuuugguacauugugggu

SEQ ID NO: 647582 - RNA, 20 nt, Human
uggcagcaucugcucccggc

SEQ ID NO: 647583 - RNA, 20 nt, Human
ugggagcgggcgcgccccgc

SEQ ID NO: 647584 - RNA, 22 nt, Human
uggggaggaccccaggaagccg

SEQ ID NO: 647585 - RNA, 23 nt, Human
uuuuuugccccuuuauguauuua

SEQ ID NO: 647586 - RNA, 18 nt, Human
uuuuuuuuuuuuuuuuug

SEQ ID NO: 647587 - RNA, 23 nt, Human
uuuuuuuuuuuuuuuuugccccu

SEQ ID NO: 647588 - RNA, 21 nt, Human
agcccuuucgcccccgcccgc

SEQ ID NO: 647589 - RNA, 22 nt, Human
ccccgcccgcagguggaccaga

SEQ ID NO: 647590 - RNA, 23 nt, Human
ccgcaaggagcccuuucgccccc

SEQ ID NO: 647591 - RNA, 18 nt, Human
ccgccugcgggcggaggu

SEQ ID NO: 647592 - RNA, 21 nt, Human
ccgccugcgggcggagguggg

SEQ ID NO: 647593 - RNA, 19 nt, Human
ccugcgggcggaggugggg

SEQ ID NO: 647594 - RNA, 19 nt, Human
cgccggucccgccggccgc

SEQ ID NO: 647595 - RNA, 21 nt, Human
cuccacgggucuccgccgguc

SEQ ID NO: 647596 - RNA, 20 nt, Human
gcagguggaccagauguucc

SEQ ID NO: 647597 - RNA, 18 nt, Human
ggccgggccacggggggc

SEQ ID NO: 647598 - RNA, 22 nt, Human
guggcgggcaaccuggacuaca

SEQ ID NO: 647599 - RNA, 23 nt, Human
uggaccagauguuccaguucgcc

SEQ ID NO: 647600 - RNA, 22 nt, Human
uuuuuuuuuuugcaggugcgcg

SEQ ID NO: 647601 - RNA, 19 nt, Human
uuuuuuuuuuuuuuuuugc

SEQ ID NO: 647602 - RNA, 21 nt, Human
uuuuuuuuuuuuuuuuugcag

SEQ ID NO: 647603 - RNA, 22 nt, Human
uuuuuuuuuuuuuuuuugcagg

SEQ ID NO: 647604 - RNA, 25 nt, Human
aaacagcuaccaaagccaucauuuc

SEQ ID NO: 647605 - RNA, 19 nt, Human
aaauccacuuuuuaaacua

SEQ ID NO: 647606 - RNA, 22 nt, Human
aaggacagugucacaguggggu

SEQ ID NO: 647607 - RNA, 26 nt, Human
aagucagccugcaaagguugugcuga

SEQ ID NO: 647608 - RNA, 26 nt, Human
acaggacccaauaguuguuacuacaa

SEQ ID NO: 647609 - RNA, 24 nt, Human
acaugaaaaggacagugucacagu

SEQ ID NO: 647610 - RNA, 23 nt, Human
accccaugcuuccaccucccaga

SEQ ID NO: 647611 - RNA, 22 nt, Human
aggcaaagaaccaauggguuau

SEQ ID NO: 647612 - RNA, 18 nt, Human
aggcaaagcacucaagua

SEQ ID NO: 647613 - RNA, 22 nt, Human
aggcagcuggugugaggcugcg

SEQ ID NO: 647614 - RNA, 18 nt, Human
agguaauaugaauauucu

SEQ ID NO: 647615 - RNA, 24 nt, Human
agguucccauccaugccuccugcc

SEQ ID NO: 647616 - RNA, 22 nt, Human
aguaaacgaucaauaacuaccu

SEQ ID NO: 647617 - RNA, 25 nt, Human
cacccccagccccaccagugagacu

SEQ ID NO: 647618 - RNA, 19 nt, Human
caccgaucccaccccaugc

SEQ ID NO: 647619 - RNA, 25 nt, Human
cagccccaccagugagacuucugau

SEQ ID NO: 647620 - RNA, 19 nt, Human
cauccaugccuccugccug

SEQ ID NO: 647621 - RNA, 25 nt, Human
cauuucacgcuucccuguaguuuua

SEQ ID NO: 647622 - RNA, 28 nt, Human
ccaaagucugaggcuacccagggcacaa

SEQ ID NO: 647623 - RNA, 24 nt, Human
ccaagaaccaagucaucccuugcu

SEQ ID NO: 647624 - RNA, 25 nt, Human
ccaccccaugcuuccaccucccaga

SEQ ID NO: 647625 - RNA, 21 nt, Human
ccacgggacagccacuggcca

SEQ ID NO: 647626 - RNA, 18 nt, Human
cccacccccagccccacc

SEQ ID NO: 647627 - RNA, 19 nt, Human
cccaugcuuccaccuccca

SEQ ID NO: 647628 - RNA, 20 nt, Human
cccaugcuuccaccucccag

SEQ ID NO: 647629 - RNA, 21 nt, Human
cccaugcuuccaccucccaga

SEQ ID NO: 647630 - RNA, 20 nt, Human
ccccagccccaccagugaga

SEQ ID NO: 647631 - RNA, 25 nt, Human
cccccagccccaccagugagacuuc

SEQ ID NO: 647632 - RNA, 23 nt, Human
cccugguccaccgaucccacccc

SEQ ID NO: 647633 - RNA, 20 nt, Human
ccggccgccucgcuggcgcc

SEQ ID NO: 647634 - RNA, 28 nt, Human
ccucacuccgcagccuucuguggcuaaa

SEQ ID NO: 647635 - RNA, 21 nt, Human
ccucccagagcucuugagaua

SEQ ID NO: 647636 - RNA, 20 nt, Human
ccugcccccacccccagccc

SEQ ID NO: 647637 - RNA, 22 nt, Human
cgaucaauaacuaccuacccac

SEQ ID NO: 647638 - RNA, 19 nt, Human
cgggacagccacuggccag

SEQ ID NO: 647639 - RNA, 18 nt, Human
cgggcaugaaggggugug

SEQ ID NO: 647640 - RNA, 18 nt, Human
cucaaguacucugcaguc

SEQ ID NO: 647641 - RNA, 18 nt, Human
cucgcuggcgccgcgugg

SEQ ID NO: 647642 - RNA, 21 nt, Human
cucuuggccacacuaccuacu

SEQ ID NO: 647643 - RNA, 21 nt, Human
cugcagucuagaugacacauu

SEQ ID NO: 647644 - RNA, 18 nt, Human
cugccugcccccaccccc

SEQ ID NO: 647645 - RNA, 18 nt, Human
cuuccaccucccagagcu

SEQ ID NO: 647646 - RNA, 20 nt, Human
gagaacacaugguagcacag

SEQ ID NO: 647647 - RNA, 21 nt, Human
gagauaagaccuuaagaagga

SEQ ID NO: 647648 - RNA, 18 nt, Human
gcaagucagccugcaaag

SEQ ID NO: 647649 - RNA, 19 nt, Human
gcaaguuagaagaaggagg

SEQ ID NO: 647650 - RNA, 26 nt, Human
gcccccacccccagccccaccaguga

SEQ ID NO: 647651 - RNA, 18 nt, Human
gccugacucccaggagca

SEQ ID NO: 647652 - RNA, 18 nt, Human
gcugccgccucacuccgc

SEQ ID NO: 647653 - RNA, 20 nt, Human
gcuuccaccucccagagcuc

SEQ ID NO: 647654 - RNA, 18 nt, Human
ggaaagccgggcaugaag

SEQ ID NO: 647655 - RNA, 19 nt, Human
ggaaagccgggcaugaagg

SEQ ID NO: 647656 - RNA, 23 nt, Human
ggggaaagccgggcaugaagggg

SEQ ID NO: 647657 - RNA, 19 nt, Human
guccggccgccucgcuggc

SEQ ID NO: 647658 - RNA, 19 nt, Human
guccugagugguuuggaag

SEQ ID NO: 647659 - RNA, 21 nt, Human
guggaggaggcagcuggugug

SEQ ID NO: 647660 - RNA, 21 nt, Human
uagcaagucagccugcaaagg

SEQ ID NO: 647661 - RNA, 21 nt, Human
uaguaaacgaucaauaacuac

SEQ ID NO: 647662 - RNA, 21 nt, Human
uaugagcucgcccucugcaug

SEQ ID NO: 647663 - RNA, 19 nt, Human
ucagacuuagcaagucagc

SEQ ID NO: 647664 - RNA, 19 nt, Human
ucagguucccauccaugcc

SEQ ID NO: 647665 - RNA, 21 nt, Human
ucccaccccaugcuuccaccu

SEQ ID NO: 647666 - RNA, 18 nt, Human
ucucuuggccacacuacc

SEQ ID NO: 647667 - RNA, 23 nt, Human
ucuuuagaaaaacucaaauccau

SEQ ID NO: 647668 - RNA, 18 nt, Human
ugaaaaagaacagccucu

SEQ ID NO: 647669 - RNA, 21 nt, Human
ugaaaaagaacagccucugug

SEQ ID NO: 647670 - RNA, 23 nt, Human
ugagaacacaugguagcacaguc

SEQ ID NO: 647671 - RNA, 23 nt, Human
ugagaacacaugguagcacaguc

SEQ ID NO: 647672 - RNA, 23 nt, Human
ugagaggaugaggcaaagaacca

SEQ ID NO: 647673 - RNA, 20 nt, Human
ugaggcaaagaaccaauggg

SEQ ID NO: 647674 - RNA, 18 nt, Human
ugcugaucucuuggccac

SEQ ID NO: 647675 - RNA, 20 nt, Human
ugcugaucucuuggccacac

SEQ ID NO: 647676 - RNA, 19 nt, Human
ugcuugcagaagggggcgc

SEQ ID NO: 647677 - RNA, 22 nt, Human
ugcuugcagaagggggcgcagg

SEQ ID NO: 647678 - RNA, 22 nt, Human
uggaagucuauagacauaagaa

SEQ ID NO: 647679 - RNA, 19 nt, Human
uggaggaggcagcuggugu

SEQ ID NO: 647680 - RNA, 24 nt, Human
uggcaggacggacacacaggaaug

SEQ ID NO: 647681 - RNA, 18 nt, Human
ugugaaaaagaacagccu

SEQ ID NO: 647682 - RNA, 20 nt, Human
uucaacucugacccauggau

SEQ ID NO: 647683 - RNA, 23 nt, Human
uucccauccaugccuccugccug

SEQ ID NO: 647684 - RNA, 19 nt, Human
uucuguggcuaaauggcag

SEQ ID NO: 647685 - RNA, 22 nt, Human
uuuaaacuaccacuugagaaca

SEQ ID NO: 647686 - RNA, 20 nt, Human
uuuagaaaaacucaaaucca

SEQ ID NO: 647687 - RNA, 18 nt, Human
uuuccacaucacaugaaa

SEQ ID NO: 647688 - RNA, 18 nt, Human
uuuuuuuuuuuuuuuuug

SEQ ID NO: 647689 - RNA, 21 nt, Human
aaacagacaaaacagcaaacc

SEQ ID NO: 647690 - RNA, 23 nt, Human
aaacagacaaaacagcaaacccg

SEQ ID NO: 647691 - RNA, 22 nt, Human
aaacagcaaacccggaagaacc

SEQ ID NO: 647692 - RNA, 19 nt, Human
aaaccacagcacagccagg

SEQ ID NO: 647693 - RNA, 22 nt, Human
aacagcaaacccggaagaacca

SEQ ID NO: 647694 - RNA, 22 nt, Human
aaccacacaagggggaaacaga

SEQ ID NO: 647695 - RNA, 20 nt, Human
aagcaaauggauaaaaguac

SEQ ID NO: 647696 - RNA, 19 nt, Human
acaaaacagcaaacccgga

SEQ ID NO: 647697 - RNA, 18 nt, Human
accccagggcucccacag

SEQ ID NO: 647698 - RNA, 21 nt, Human
acccugggaccccagcauagc

SEQ ID NO: 647699 - RNA, 19 nt, Human
agacaaaacagcaaacccg

SEQ ID NO: 647700 - RNA, 22 nt, Human
agccccacggagucacagcccu

SEQ ID NO: 647701 - RNA, 22 nt, Human
agcccucaacaaccugcagccc

SEQ ID NO: 647702 - RNA, 19 nt, Human
agccgacccggcagccaca

SEQ ID NO: 647703 - RNA, 18 nt, Human
aggccaggcgggcggggg

SEQ ID NO: 647704 - RNA, 22 nt, Human
aggccaggcgggcgggggaggu

SEQ ID NO: 647705 - RNA, 18 nt, Human
aggcggucuggcccaugg

SEQ ID NO: 647706 - RNA, 23 nt, Human
caacaaccugcagccccggcacc

SEQ ID NO: 647707 - RNA, 24 nt, Human
caacaaccugcagccccggcaccg

SEQ ID NO: 647708 - RNA, 18 nt, Human
caacagcagaaaaguucc

SEQ ID NO: 647709 - RNA, 19 nt, Human
cacaagggggaaacagaca

SEQ ID NO: 647710 - RNA, 18 nt, Human
cacagcacagccaggagu

SEQ ID NO: 647711 - RNA, 18 nt, Human
cacagcugcagagcacac

SEQ ID NO: 647712 - RNA, 21 nt, Human
caccgugcuguggaccagagc

SEQ ID NO: 647713 - RNA, 24 nt, Human
cacgucugacccugcuggagccuu

SEQ ID NO: 647714 - RNA, 21 nt, Human
cacucaggacaggccaggcgg

SEQ ID NO: 647715 - RNA, 21 nt, Human
cagagccgacccggcagccac

SEQ ID NO: 647716 - RNA, 26 nt, Human
cagcauagccauccgcgccgaugacu

SEQ ID NO: 647717 - RNA, 18 nt, Human
cagccuggagcauccacu

SEQ ID NO: 647718 - RNA, 20 nt, Human
cagccuggagcauccacuga

SEQ ID NO: 647719 - RNA, 20 nt, Human
caggacaggccaggcgggcg

SEQ ID NO: 647720 - RNA, 24 nt, Human
ccacagcaaacacgacacagagcu

SEQ ID NO: 647721 - RNA, 20 nt, Human
ccacagcacagccaggagua

SEQ ID NO: 647722 - RNA, 21 nt, Human
cccacagugacccugacugcu

SEQ ID NO: 647723 - RNA, 21 nt, Human
cccagcauagccauccgcgcc

SEQ ID NO: 647724 - RNA, 22 nt, Human
ccccagcauagccauccgcgcc

SEQ ID NO: 647725 - RNA, 18 nt, Human
ccccggcaccgugcugug

SEQ ID NO: 647726 - RNA, 22 nt, Human
cccgcuccucucccugcagcca

SEQ ID NO: 647727 - RNA, 23 nt, Human
cccucaacaaccugcagccccgg

SEQ ID NO: 647728 - RNA, 18 nt, Human
cccugacugcugcggcca

SEQ ID NO: 647729 - RNA, 22 nt, Human
ccuggcugagccccacggaguc

SEQ ID NO: 647730 - RNA, 21 nt, Human
ccugggaccccagcauagcca

SEQ ID NO: 647731 - RNA, 19 nt, Human
cgacacagagcagcggcuc

SEQ ID NO: 647732 - RNA, 22 nt, Human
cgucucugcucccgccucuaac

SEQ ID NO: 647733 - RNA, 25 nt, Human
cuggagcauccacugagaauggaca

SEQ ID NO: 647734 - RNA, 21 nt, Human
cuggagccuggcugagcccca

SEQ ID NO: 647735 - RNA, 20 nt, Human
gaacaacuuggcagggucag

SEQ ID NO: 647736 - RNA, 21 nt, Human
gacaaaacagcaaacccggaa

SEQ ID NO: 647737 - RNA, 18 nt, Human
gcagccagggcauguggc

SEQ ID NO: 647738 - RNA, 25 nt, Human
gcccucaacaaccugcagccccggc

SEQ ID NO: 647739 - RNA, 19 nt, Human
gcgguuugucacuccaccc

SEQ ID NO: 647740 - RNA, 18 nt, Human
gcugcggccacccuggga

SEQ ID NO: 647741 - RNA, 21 nt, Human
gcuggagccuggcugagcccc

SEQ ID NO: 647742 - RNA, 24 nt, Human
ggaaacagacaaaacagcaaaccc

SEQ ID NO: 647743 - RNA, 22 nt, Human
gggagaaaccacagcacagcca

SEQ ID NO: 647744 - RNA, 18 nt, Human
gggcgggggagguggagg

SEQ ID NO: 647745 - RNA, 19 nt, Human
gggcgggggagguggaggc

SEQ ID NO: 647746 - RNA, 23 nt, Human
gggggagguggaggcggucuggc

SEQ ID NO: 647747 - RNA, 24 nt, Human
gucccgcuccucucccugcagcca

SEQ ID NO: 647748 - RNA, 20 nt, Human
gugacccugacugcugcggc

SEQ ID NO: 647749 - RNA, 21 nt, Human
ucacaacagcagaaaaguucc

SEQ ID NO: 647750 - RNA, 24 nt, Human
uccaugaucacggcagaccggggc

SEQ ID NO: 647751 - RNA, 19 nt, Human
uccgaagcuccaugaucac

SEQ ID NO: 647752 - RNA, 19 nt, Human
uccgcgccgaugacugaga

SEQ ID NO: 647753 - RNA, 23 nt, Human
ucgucuguggcuuugcucuuaac

SEQ ID NO: 647754 - RNA, 24 nt, Human
ugacccugacugcugcggccaccc

SEQ ID NO: 647755 - RNA, 23 nt, Human
ugagaauggacaagucaucgucu

SEQ ID NO: 647756 - RNA, 23 nt, Human
ugagccccacggagucacagccc

SEQ ID NO: 647757 - RNA, 19 nt, Human
ugccauggcgggcacagga

SEQ ID NO: 647758 - RNA, 23 nt, Human
ugcuguguaggcacagccuggag

SEQ ID NO: 647759 - RNA, 21 nt, Human
uggcgggcacaggacaaugcg

SEQ ID NO: 647760 - RNA, 19 nt, Human
uggcugagccccacggagu

SEQ ID NO: 647761 - RNA, 22 nt, Human
ugggaccccagcauagccaucc

SEQ ID NO: 647762 - RNA, 23 nt, Human
ugggaccccagcauagccauccg

SEQ ID NO: 647763 - RNA, 22 nt, Human
ugucccgcuccucucccugcag

SEQ ID NO: 647764 - RNA, 21 nt, Human
uguguaggcacagccuggagc

SEQ ID NO: 647765 - RNA, 21 nt, Human
uucccgcuuccgaagcuccau

SEQ ID NO: 647766 - RNA, 21 nt, Human
uuuuuuuuuuuuuuggucugg

SEQ ID NO: 647767 - RNA, 20 nt, Human
uuuuuuuuuuuuuuuuuggu

SEQ ID NO: 647768 - RNA, 25 nt, Human
uuuuuuuuuuuuuuuuuggucuggg

SEQ ID NO: 647769 - RNA, 22 nt, Human
aaacuggaaagguaggaggcca

SEQ ID NO: 647770 - RNA, 23 nt, Human
aaacuggaaagguaggaggccac

SEQ ID NO: 647771 - RNA, 24 nt, Human
aaauaaccucauguuccacuuggc

SEQ ID NO: 647772 - RNA, 22 nt, Human
aacaugguucugagaggccccu

SEQ ID NO: 647773 - RNA, 20 nt, Human
aaccucauguuccacuuggc

SEQ ID NO: 647774 - RNA, 22 nt, Human
aagaggcaggacaacaaaagua

SEQ ID NO: 647775 - RNA, 23 nt, Human
aagaugugggcuggaaugagaua

SEQ ID NO: 647776 - RNA, 19 nt, Human
aaggagaagaugugggcug

SEQ ID NO: 647777 - RNA, 18 nt, Human
acaggcaaaagggucacg

SEQ ID NO: 647778 - RNA, 23 nt, Human
accaccuuuagagaagccucagc

SEQ ID NO: 647779 - RNA, 20 nt, Human
accggcuccaggggauuuuc

SEQ ID NO: 647780 - RNA, 22 nt, Human
accuggcuggggaacaugguuc

SEQ ID NO: 647781 - RNA, 24 nt, Human
agaauaaaggcaggaaaaucagaa

SEQ ID NO: 647782 - RNA, 19 nt, Human
agagaggaaagggggaggc

SEQ ID NO: 647783 - RNA, 22 nt, Human
agcuccuagcauggagacaucc

SEQ ID NO: 647784 - RNA, 26 nt, Human
aggcaggacaacaaaaguaaucagga

SEQ ID NO: 647785 - RNA, 21 nt, Human
aggccgcaaaaacuggucuga

SEQ ID NO: 647786 - RNA, 22 nt, Human
agucugggcucuggagcuucug

SEQ ID NO: 647787 - RNA, 20 nt, Human
auaggacaagagaagacaga

SEQ ID NO: 647788 - RNA, 21 nt, Human
auaggacaagagaagacagaa

SEQ ID NO: 647789 - RNA, 21 nt, Human
auguguggccaugcuaagggc

SEQ ID NO: 647790 - RNA, 18 nt, Human
caaaagggccgacagggu

SEQ ID NO: 647791 - RNA, 22 nt, Human
caaaagggccgacaggguagua

SEQ ID NO: 647792 - RNA, 23 nt, Human
caacagaaacuggaaagguagga

SEQ ID NO: 647793 - RNA, 19 nt, Human
caaccaccuuuagagaagc

SEQ ID NO: 647794 - RNA, 21 nt, Human
caagaagccacagggcuggua

SEQ ID NO: 647795 - RNA, 23 nt, Human
caccccaugcuggagcucauccc

SEQ ID NO: 647796 - RNA, 24 nt, Human
cacgcugggcaggaguagccgcau

SEQ ID NO: 647797 - RNA, 22 nt, Human
cagcauggcaaaagggccgaca

SEQ ID NO: 647798 - RNA, 24 nt, Human
caggaaaaucagaaacaccagaga

SEQ ID NO: 647799 - RNA, 22 nt, Human
cauguguggccaugcuaagggc

SEQ ID NO: 647800 - RNA, 22 nt, Human
ccaaaucugugaccauuaccug

SEQ ID NO: 647801 - RNA, 22 nt, Human
ccaaccaccuuuagagaagccu

SEQ ID NO: 647802 - RNA, 19 nt, Human
ccacaggcaaaagggucac

SEQ ID NO: 647803 - RNA, 18 nt, Human
ccacaucgucuuuuccca

SEQ ID NO: 647804 - RNA, 20 nt, Human
ccacccaccuccauacccac

SEQ ID NO: 647805 - RNA, 20 nt, Human
ccaggggauuuuccauccug

SEQ ID NO: 647806 - RNA, 24 nt, Human
ccaucuacgaguugccucaacugu

SEQ ID NO: 647807 - RNA, 21 nt, Human
cccacccaccuccauacccac

SEQ ID NO: 647808 - RNA, 24 nt, Human
ccccaccacgcugggcaggaguug

SEQ ID NO: 647809 - RNA, 19 nt, Human
ccccaugcuggagcucauc

SEQ ID NO: 647810 - RNA, 19 nt, Human
ccccucgggauggggaggu

SEQ ID NO: 647811 - RNA, 21 nt, Human
cccucgggauggggaggucac

SEQ ID NO: 647812 - RNA, 20 nt, Human
ccgcaugggauguccuccuc

SEQ ID NO: 647813 - RNA, 21 nt, Human
ccggucgccgacugccuccuc

SEQ ID NO: 647814 - RNA, 20 nt, Human
ccucaacuguccccgugaua

SEQ ID NO: 647815 - RNA, 18 nt, Human
ccucagcaagccucccuc

SEQ ID NO: 647816 - RNA, 23 nt, Human
ccuccauacccacauuucucaga

SEQ ID NO: 647817 - RNA, 19 nt, Human
cgcccgcgucggcuagugg

SEQ ID NO: 647818 - RNA, 23 nt, Human
cgcuugagucccaaggcacgcuc

SEQ ID NO: 647819 - RNA, 20 nt, Human
cgugacuggccaccucugcc

SEQ ID NO: 647820 - RNA, 22 nt, Human
cuccauacccacauuucucaga

SEQ ID NO: 647821 - RNA, 23 nt, Human
cucccaugauuuggaaauaaccu

SEQ ID NO: 647822 - RNA, 19 nt, Human
cucuggagcuucugcugcc

SEQ ID NO: 647823 - RNA, 21 nt, Human
cugcugccccaccacgcuggg

SEQ ID NO: 647824 - RNA, 18 nt, Human
cuggccaccucugccagg

SEQ ID NO: 647825 - RNA, 22 nt, Human
cugggcucuggagcuucugcug

SEQ ID NO: 647826 - RNA, 20 nt, Human
cuguaccucaccccaugcug

SEQ ID NO: 647827 - RNA, 24 nt, Human
cuucaagucucucuucuguaccuc

SEQ ID NO: 647828 - RNA, 23 nt, Human
cuuucccacccaccuccauaccc

SEQ ID NO: 647829 - RNA, 19 nt, Human
cuuugugcacccacauggu

SEQ ID NO: 647830 - RNA, 18 nt, Human
gaaaggagaagauguggg

SEQ ID NO: 647831 - RNA, 24 nt, Human
gaaccaagagucaagaagccacag

SEQ ID NO: 647832 - RNA, 27 nt, Human
gaauaaaggcaggaaaaucagaaacac

SEQ ID NO: 647833 - RNA, 25 nt, Human
gacaacaaaaguaaucaggaaagga

SEQ ID NO: 647834 - RNA, 20 nt, Human
gacuggggcgggggagcgag

SEQ ID NO: 647835 - RNA, 23 nt, Human
gagccugcaagucugggcucugg

SEQ ID NO: 647836 - RNA, 21 nt, Human
gagucccaaggcacgcucuuc

SEQ ID NO: 647837 - RNA, 22 nt, Human
gccuccgaguggggggagcggg

SEQ ID NO: 647838 - RNA, 19 nt, Human
gcuccugucccucucgccc

SEQ ID NO: 647839 - RNA, 26 nt, Human
ggcaggacaacaaaaguaaucaggaa

SEQ ID NO: 647840 - RNA, 26 nt, Human
ggcaggacaacaaaaguaaucaggaa

SEQ ID NO: 647841 - RNA, 18 nt, Human
ggcuccaggggauuuucc

SEQ ID NO: 647842 - RNA, 23 nt, Human
gggcgggggagcgaggaaggggc

SEQ ID NO: 647843 - RNA, 18 nt, Human
ggggcgggggagcgagga

SEQ ID NO: 647844 - RNA, 24 nt, Human
ggucugauuucaggguucuucucu

SEQ ID NO: 647845 - RNA, 18 nt, Human
guggccagguucacccug

SEQ ID NO: 647846 - RNA, 25 nt, Human
uaaaggcaggaaaaucagaaacacc

SEQ ID NO: 647847 - RNA, 20 nt, Human
uaagaugugcauuuccuucc

SEQ ID NO: 647848 - RNA, 25 nt, Human
uagcauuaaagggacacaccaacac

SEQ ID NO: 647849 - RNA, 21 nt, Human
uaggaggccacaucgucuuuu

SEQ ID NO: 647850 - RNA, 20 nt, Human
uauuucacuagccaugagca

SEQ ID NO: 647851 - RNA, 19 nt, Human
ucagaaacaccagagagca

SEQ ID NO: 647852 - RNA, 22 nt, Human
ucagaaacaccagagagcacag

SEQ ID NO: 647853 - RNA, 21 nt, Human
ucaucccacaggcaaaagggu

SEQ ID NO: 647854 - RNA, 18 nt, Human
uccauuacggaugcggag

SEQ ID NO: 647855 - RNA, 21 nt, Human
ucccugcaccuacaccugagg

SEQ ID NO: 647856 - RNA, 18 nt, Human
uccugcccucucccugcu

SEQ ID NO: 647857 - RNA, 22 nt, Human
ucuaaggggcagacauuguggc

SEQ ID NO: 647858 - RNA, 18 nt, Human
ucuggagcuucugcugcc

SEQ ID NO: 647859 - RNA, 21 nt, Human
ugaagaggcaggacaacaaaa

SEQ ID NO: 647860 - RNA, 24 nt, Human
ugaagaggcaggacaacaaaagua

SEQ ID NO: 647861 - RNA, 21 nt, Human
ugccgacccccgccucccgga

SEQ ID NO: 647862 - RNA, 22 nt, Human
ugccucaacuguccccgugaua

SEQ ID NO: 647863 - RNA, 19 nt, Human
uggaaagggcacuguaaca

SEQ ID NO: 647864 - RNA, 19 nt, Human
uggagacauccuucaugga

SEQ ID NO: 647865 - RNA, 18 nt, Human
ugggcucuggagcuucug

SEQ ID NO: 647866 - RNA, 25 nt, Human
ugggcucuugcacacaggggagucu

SEQ ID NO: 647867 - RNA, 24 nt, Human
ugugaccauuaccugaagaggcag

SEQ ID NO: 647868 - RNA, 25 nt, Human
ugugcacccacaugguuuuggccug

SEQ ID NO: 647869 - RNA, 23 nt, Human
uucacgugacuggccaccucugc

SEQ ID NO: 647870 - RNA, 19 nt, Human
uucauggaagugagcuuuc

SEQ ID NO: 647871 - RNA, 22 nt, Human
uugaucugcccuggggacaugu

SEQ ID NO: 647872 - RNA, 22 nt, Human
uuggcgcuugagucccaaggca

SEQ ID NO: 647873 - RNA, 22 nt, Human
aaaaaaaaaacucagauauuua

SEQ ID NO: 647874 - RNA, 25 nt, Human
aaaaaacucagauauuuaguagucc

SEQ ID NO: 647875 - RNA, 21 nt, Human
aaagaaauaagacaugaaaau

SEQ ID NO: 647876 - RNA, 19 nt, Human
aaagugcugggauuacaga

SEQ ID NO: 647877 - RNA, 24 nt, Human
aaagugcugggauuacagacguga

SEQ ID NO: 647878 - RNA, 22 nt, Human
aaauugcacuguuauuuaaacc

SEQ ID NO: 647879 - RNA, 23 nt, Human
aacccacccgccucggccuccca

SEQ ID NO: 647880 - RNA, 20 nt, Human
aagaugggguuucgccaugu

SEQ ID NO: 647881 - RNA, 18 nt, Human
aagcccaaaagagccgag

SEQ ID NO: 647882 - RNA, 22 nt, Human
aaguaacccacccgccucggcc

SEQ ID NO: 647883 - RNA, 24 nt, Human
aaguagcugggauuacaggcgcgu

SEQ ID NO: 647884 - RNA, 27 nt, Human
aaguagcugggauuacaggcgcgugac

SEQ ID NO: 647885 - RNA, 19 nt, Human
aagugcugggauuacagac

SEQ ID NO: 647886 - RNA, 26 nt, Human
aagugcugggauuacagacgugagcc

SEQ ID NO: 647887 - RNA, 25 nt, Human
acccgccucggccucccaaagugcu

SEQ ID NO: 647888 - RNA, 24 nt, Human
acccggcuaauuuuuuuguauuuu

SEQ ID NO: 647889 - RNA, 21 nt, Human
acgugagccauggcgcccggc

SEQ ID NO: 647890 - RNA, 25 nt, Human
acucugucgcccaggguggagugca

SEQ ID NO: 647891 - RNA, 20 nt, Human
agcccaaaagagccgagaug

SEQ ID NO: 647892 - RNA, 19 nt, Human
aggagaaaggaagcguccg

SEQ ID NO: 647893 - RNA, 21 nt, Human
agugcaguggcccaaucucag

SEQ ID NO: 647894 - RNA, 24 nt, Human
agugcaguggcccaaucucagcuc

SEQ ID NO: 647895 - RNA, 24 nt, Human
agugcugggauuacagacgugagc

SEQ ID NO: 647896 - RNA, 18 nt, Human
augggguuucgccauguu

SEQ ID NO: 647897 - RNA, 20 nt, Human
augggguuucgccauguuug

SEQ ID NO: 647898 - RNA, 19 nt, Human
auuacagacgugagccaug

SEQ ID NO: 647899 - RNA, 24 nt, Human
caaagugcugggauuacagacgug

SEQ ID NO: 647900 - RNA, 19 nt, Human
caaggauggacugaggugg

SEQ ID NO: 647901 - RNA, 23 nt, Human
cacccgccucggccucccaaagu

SEQ ID NO: 647902 - RNA, 20 nt, Human
cacggcccagccccgggucu

SEQ ID NO: 647903 - RNA, 22 nt, Human
cacucugucgcccaggguggag

SEQ ID NO: 647904 - RNA, 21 nt, Human
cacugcaaccuccgccuccug

SEQ ID NO: 647905 - RNA, 23 nt, Human
cacugcaaccuccgccuccuggg

SEQ ID NO: 647906 - RNA, 22 nt, Human
cagcucuuuaaagaaauaagac

SEQ ID NO: 647907 - RNA, 18 nt, Human
caguggcccaaucucagc

SEQ ID NO: 647908 - RNA, 22 nt, Human
ccaaagugcugggauuacagac

SEQ ID NO: 647909 - RNA, 24 nt, Human
ccaaagugcugggauuacagacgu

SEQ ID NO: 647910 - RNA, 22 nt, Human
ccaaguagcugggauuacaggc

SEQ ID NO: 647911 - RNA, 23 nt, Human
ccauguuugccaggcuggucucg

SEQ ID NO: 647912 - RNA, 23 nt, Human
cccaaguagcugggauuacaggc

SEQ ID NO: 647913 - RNA, 24 nt, Human
cccaaguagcugggauuacaggcg

SEQ ID NO: 647914 - RNA, 24 nt, Human
ccccaaguagcugggauuacaggc

SEQ ID NO: 647915 - RNA, 22 nt, Human
ccgccgggcuccggacugugga

SEQ ID NO: 647916 - RNA, 26 nt, Human
ccgccuccuggguucaggcaauucuu

SEQ ID NO: 647917 - RNA, 24 nt, Human
ccggccguggaggcagcucucccc

SEQ ID NO: 647918 - RNA, 18 nt, Human
ccuaaagaaaaaaaacac

SEQ ID NO: 647919 - RNA, 19 nt, Human
ccuccgccuccuggguuca

SEQ ID NO: 647920 - RNA, 24 nt, Human
ccuccuggguucaggcaauucucc

SEQ ID NO: 647921 - RNA, 23 nt, Human
ccugaccucaaguaacccacccg

SEQ ID NO: 647922 - RNA, 19 nt, Human
cgaagcccauugccgguac

SEQ ID NO: 647923 - RNA, 21 nt, Human
cgaagcccauugccgguacca

SEQ ID NO: 647924 - RNA, 24 nt, Human
cgccauguuugccaggcuggucuc

SEQ ID NO: 647925 - RNA, 24 nt, Human
cgccucggccucccaaagugcugg

SEQ ID NO: 647926 - RNA, 23 nt, Human
cgggugaaagggagagaagcuga

SEQ ID NO: 647927 - RNA, 24 nt, Human
cucacugcaaccuccgccuccugg

SEQ ID NO: 647928 - RNA, 21 nt, Human
cuccuggguucaggcaauucu

SEQ ID NO: 647929 - RNA, 24 nt, Human
cugagccccccaaguagcugggau

SEQ ID NO: 647930 - RNA, 19 nt, Human
cugaggugguggcgacugc

SEQ ID NO: 647931 - RNA, 23 nt, Human
cugcaaccuccgccuccuggguu

SEQ ID NO: 647932 - RNA, 24 nt, Human
cugcaaccuccgccuccuggguuc

SEQ ID NO: 647933 - RNA, 24 nt, Human
gaccucaaguaacccacccgccuc

SEQ ID NO: 647934 - RNA, 18 nt, Human
gauuacagacgugagcca

SEQ ID NO: 647935 - RNA, 22 nt, Human
gauuacagacgugagccauggc

SEQ ID NO: 647936 - RNA, 19 nt, Human
gcacuggaggauacgaagc

SEQ ID NO: 647937 - RNA, 22 nt, Human
gccaggcuggucucgaacuccu

SEQ ID NO: 647938 - RNA, 20 nt, Human
gccgagauggucaccgccgg

SEQ ID NO: 647939 - RNA, 23 nt, Human
gcuggucucgaacuccugaccuc

SEQ ID NO: 647940 - RNA, 18 nt, Human
ggacuguggaggccgucg

SEQ ID NO: 647941 - RNA, 21 nt, Human
ggaucuuuaaaaaaaaaaaaa

SEQ ID NO: 647942 - RNA, 24 nt, Human
ggcuggucucgaacuccugaccuc

SEQ ID NO: 647943 - RNA, 22 nt, Human
gggguuucgccauguuugccag

SEQ ID NO: 647944 - RNA, 19 nt, Human
ggucucgaacuccugaccu

SEQ ID NO: 647945 - RNA, 23 nt, Human
gguggagugcaguggcccaaucu

SEQ ID NO: 647946 - RNA, 24 nt, Human
guaacccacccgccucggccuccc

SEQ ID NO: 647947 - RNA, 24 nt, Human
uaaaauauucauaugcaugagaag

SEQ ID NO: 647948 - RNA, 18 nt, Human
uaaagaaaaaaaacaccu

SEQ ID NO: 647949 - RNA, 19 nt, Human
uaaagaaaaaaaacaccuc

SEQ ID NO: 647950 - RNA, 23 nt, Human
uaggaucuuuaaaaaaaaaaaaa

SEQ ID NO: 647951 - RNA, 24 nt, Human
uaguuaagaugggguuucgccaug

SEQ ID NO: 647952 - RNA, 23 nt, Human
ucacugcaaccuccgccuccugg

SEQ ID NO: 647953 - RNA, 24 nt, Human
ucacugcaaccuccgccuccuggg

SEQ ID NO: 647954 - RNA, 25 nt, Human
ucacugcaaccuccgccuccugggu

SEQ ID NO: 647955 - RNA, 27 nt, Human
ucacugcaaccuccgccuccuggguuc

SEQ ID NO: 647956 - RNA, 19 nt, Human
ucaggcaauucuccugccu

SEQ ID NO: 647957 - RNA, 22 nt, Human
uccauucgugcuuaaaauauuc

SEQ ID NO: 647958 - RNA, 18 nt, Human
ucccaaagugcugggauu

SEQ ID NO: 647959 - RNA, 24 nt, Human
ucccaaagugcugggauuacagac

SEQ ID NO: 647960 - RNA, 21 nt, Human
uccguggcagccgcucccuuc

SEQ ID NO: 647961 - RNA, 21 nt, Human
uccuggguucaggcaauucuc

SEQ ID NO: 647962 - RNA, 24 nt, Human
uccuggguucaggcaauucuccug

SEQ ID NO: 647963 - RNA, 22 nt, Human
ucgccauguuugccaggcuggu

SEQ ID NO: 647964 - RNA, 18 nt, Human
ucgcccaggguggagugc

SEQ ID NO: 647965 - RNA, 18 nt, Human
ucggccucccaaagugcu

SEQ ID NO: 647966 - RNA, 18 nt, Human
ucucacucugucgcccag

SEQ ID NO: 647967 - RNA, 19 nt, Human
ucucacucugucgcccagg

SEQ ID NO: 647968 - RNA, 20 nt, Human
ucucacucugucgcccaggg

SEQ ID NO: 647969 - RNA, 24 nt, Human
ucucacucugucgcccagggugga

SEQ ID NO: 647970 - RNA, 21 nt, Human
ucucgaacuccugaccucaag

SEQ ID NO: 647971 - RNA, 24 nt, Human
ucugucgcccaggguggagugcag

SEQ ID NO: 647972 - RNA, 20 nt, Human
ucuuuaaaaaaaaaaaaaaa

SEQ ID NO: 647973 - RNA, 26 nt, Human
ugaaaugaguaacaccuggaagacca

SEQ ID NO: 647974 - RNA, 23 nt, Human
ugaccucaaguaacccacccgcc

SEQ ID NO: 647975 - RNA, 23 nt, Human
ugagaagccuaaagaaaaaaaac

SEQ ID NO: 647976 - RNA, 19 nt, Human
ugagccccccaaguagcug

SEQ ID NO: 647977 - RNA, 19 nt, Human
ugcacuggaggauacgaag

SEQ ID NO: 647978 - RNA, 23 nt, Human
ugcaguggcccaaucucagcuca

SEQ ID NO: 647979 - RNA, 21 nt, Human
ugccugagccccccaaguagc

SEQ ID NO: 647980 - RNA, 24 nt, Human
ugccugagccccccaaguagcugg

SEQ ID NO: 647981 - RNA, 24 nt, Human
ugcugggauuacagacgugagcca

SEQ ID NO: 647982 - RNA, 21 nt, Human
uggaggcagcucuccccgcca

SEQ ID NO: 647983 - RNA, 19 nt, Human
uggagugcaguggcccaau

SEQ ID NO: 647984 - RNA, 23 nt, Human
uggagugcaguggcccaaucuca

SEQ ID NO: 647985 - RNA, 24 nt, Human
uggcccaaucucagcucacugcaa

SEQ ID NO: 647986 - RNA, 18 nt, Human
ugggauuacagacgugag

SEQ ID NO: 647987 - RNA, 19 nt, Human
ugggauuacagacgugagc

SEQ ID NO: 647988 - RNA, 21 nt, Human
ugggauuacagacgugagcca

SEQ ID NO: 647989 - RNA, 22 nt, Human
ugggauuacagacgugagccau

SEQ ID NO: 647990 - RNA, 27 nt, Human
ugggauuacagacgugagccauggcgc

SEQ ID NO: 647991 - RNA, 31 nt, Human
ugggauuacagacgugagccauggcgcccgg

SEQ ID NO: 647992 - RNA, 18 nt, Human
ugggauuacaggcgcgug

SEQ ID NO: 647993 - RNA, 24 nt, Human
ugggauuacaggcgcgugacacca

SEQ ID NO: 647994 - RNA, 20 nt, Human
uggggucugggugcccggcc

SEQ ID NO: 647995 - RNA, 24 nt, Human
uggguucaggcaauucuccugccu

SEQ ID NO: 647996 - RNA, 23 nt, Human
ugguauacuacacauaauugaaa

SEQ ID NO: 647997 - RNA, 30 nt, Human
uuaggaucuuuaaaaaaaaaaaaaaaaaaa

SEQ ID NO: 647998 - RNA, 24 nt, Human
uuaguuaagaugggguuucgccau

SEQ ID NO: 647999 - RNA, 19 nt, Human
uugaaaugaguaacaccug

SEQ ID NO: 648000 - RNA, 21 nt, Human
uuucgccauguuugccaggcu

SEQ ID NO: 648001 - RNA, 23 nt, Human
uuuuuaguuaagaugggguuucg

SEQ ID NO: 648002 - RNA, 24 nt, Human
uuuuuaguuaagaugggguuucgc

SEQ ID NO: 648003 - RNA, 24 nt, Human
uuuuuuguauuuuuaguuaagaug

SEQ ID NO: 648004 - RNA, 27 nt, Human
uuuuuuuuuuucugagaccgagucuca

SEQ ID NO: 648005 - RNA, 18 nt, Human
uuuuuuuuuuuuuuucug

SEQ ID NO: 648006 - RNA, 21 nt, Human
aaaaggaaaggggccugugca

SEQ ID NO: 648007 - RNA, 27 nt, Human
aacaaaacaagugacagacgggacaau

SEQ ID NO: 648008 - RNA, 20 nt, Human
aacauagcaagaccucaucu

SEQ ID NO: 648009 - RNA, 25 nt, Human
aagaaagaaaauggagaaaaaagga

SEQ ID NO: 648010 - RNA, 21 nt, Human
aagggggagaaaaaagaaaga

SEQ ID NO: 648011 - RNA, 21 nt, Human
aauggagaaaaaaggaaaggg

SEQ ID NO: 648012 - RNA, 20 nt, Human
acaaagggagacccugucuc

SEQ ID NO: 648013 - RNA, 20 nt, Human
acaccuguagucccagcuaa

SEQ ID NO: 648014 - RNA, 18 nt, Human
acccgccccacaaccaaa

SEQ ID NO: 648015 - RNA, 19 nt, Human
accucagcuuugaccucca

SEQ ID NO: 648016 - RNA, 18 nt, Human
accucaucucuacuaaag

SEQ ID NO: 648017 - RNA, 22 nt, Human
accuguagucccagcuacucau

SEQ ID NO: 648018 - RNA, 22 nt, Human
acuccagccugggagacaaagg

SEQ ID NO: 648019 - RNA, 18 nt, Human
acugcacuccagccuggg

SEQ ID NO: 648020 - RNA, 18 nt, Human
acugcacuccagccuggg

SEQ ID NO: 648021 - RNA, 20 nt, Human
agaaaaaagaaagaaaaugg

SEQ ID NO: 648022 - RNA, 22 nt, Human
agaaaaaagaaagaaaauggag

SEQ ID NO: 648023 - RNA, 24 nt, Human
agaaagaaaauggagaaaaaagga

SEQ ID NO: 648024 - RNA, 26 nt, Human
agaaagaaaauggagaaaagggaccc

SEQ ID NO: 648025 - RNA, 23 nt, Human
agaaguucaagaccagccugggc

SEQ ID NO: 648026 - RNA, 23 nt, Human
agccugggcaacauagcaagacc

SEQ ID NO: 648027 - RNA, 24 nt, Human
agccugggcaacauagcaagaccu

SEQ ID NO: 648028 - RNA, 18 nt, Human
aggcaagaggauugcuug

SEQ ID NO: 648029 - RNA, 18 nt, Human
aggcaagaggauugcuug

SEQ ID NO: 648030 - RNA, 24 nt, Human
aggcaagaggauugcuugagucua

SEQ ID NO: 648031 - RNA, 24 nt, Human
aggccgaggcaagaggauugcuug

SEQ ID NO: 648032 - RNA, 24 nt, Human
aggcugaggcgguaggauuacuug

SEQ ID NO: 648033 - RNA, 28 nt, Human
aguaauccuccuaauacgggcauuucuu

SEQ ID NO: 648034 - RNA, 27 nt, Human
agucuagaaguucaagaccagccuggg

SEQ ID NO: 648035 - RNA, 20 nt, Human
agugcaguggaguaaucaug

SEQ ID NO: 648036 - RNA, 24 nt, Human
agugcaguggaguaaucauggcuc

SEQ ID NO: 648037 - RNA, 23 nt, Human
aguggcucaugccuguaauccca

SEQ ID NO: 648038 - RNA, 24 nt, Human
aguggcucaugccuguaaucccag

SEQ ID NO: 648039 - RNA, 24 nt, Human
aucaugccacugcacuccagccug

SEQ ID NO: 648040 - RNA, 19 nt, Human
augccuguaaucccagcac

SEQ ID NO: 648041 - RNA, 20 nt, Human
cacaaccaaacauucagaug

SEQ ID NO: 648042 - RNA, 20 nt, Human
caccauuuguguucaagaca

SEQ ID NO: 648043 - RNA, 19 nt, Human
caccuguagucccagcuac

SEQ ID NO: 648044 - RNA, 21 nt, Human
caccuguagucccagcuacuc

SEQ ID NO: 648045 - RNA, 18 nt, Human
cacugcacuccagccugg

SEQ ID NO: 648046 - RNA, 19 nt, Human
cacugcacuccagccuggg

SEQ ID NO: 648047 - RNA, 22 nt, Human
cacugcacuccagccugggaga

SEQ ID NO: 648048 - RNA, 24 nt, Human
cacugcacuccagccugggagaca

SEQ ID NO: 648049 - RNA, 25 nt, Human
cacugcacuccagccugggagacaa

SEQ ID NO: 648050 - RNA, 23 nt, Human
cagcacuuugggaggccgaggca

SEQ ID NO: 648051 - RNA, 25 nt, Human
cagcacuuugggaggccgaggcaag

SEQ ID NO: 648052 - RNA, 19 nt, Human
cagggcacagacugaaucc

SEQ ID NO: 648053 - RNA, 24 nt, Human
cagggccuggcucuguugcccagg

SEQ ID NO: 648054 - RNA, 25 nt, Human
cauagcaagaccucaucucuacuaa

SEQ ID NO: 648055 - RNA, 24 nt, Human
caugccuguaaucccagcacuuug

SEQ ID NO: 648056 - RNA, 19 nt, Human
ccacaccuguagucccagc

SEQ ID NO: 648057 - RNA, 20 nt, Human
ccacaccuguagucccagcu

SEQ ID NO: 648058 - RNA, 19 nt, Human
ccacugcacuccagccugg

SEQ ID NO: 648059 - RNA, 20 nt, Human
ccacugcacuccagccuggg

SEQ ID NO: 648060 - RNA, 22 nt, Human
ccacugcacuccagccugggag

SEQ ID NO: 648061 - RNA, 24 nt, Human
ccacugcacuccagccugggagac

SEQ ID NO: 648062 - RNA, 21 nt, Human
ccaggcgggaccguaggcccc

SEQ ID NO: 648063 - RNA, 20 nt, Human
ccagggcucaaguaauccuc

SEQ ID NO: 648064 - RNA, 22 nt, Human
cccacaccuguagucccagcua

SEQ ID NO: 648065 - RNA, 24 nt, Human
cccacaccuguagucccagcuacu

SEQ ID NO: 648066 - RNA, 19 nt, Human
ccugccucccagaaaaggg

SEQ ID NO: 648067 - RNA, 24 nt, Human
ccuggcucuguugcccaggcugga

SEQ ID NO: 648068 - RNA, 24 nt, Human
ccugggcaacauagcaagaccuca

SEQ ID NO: 648069 - RNA, 22 nt, Human
ccuguaaucccagcacuuuggg

SEQ ID NO: 648070 - RNA, 22 nt, Human
ccuguagucccagcuacucaug

SEQ ID NO: 648071 - RNA, 20 nt, Human
ccugugcaguggcucaugcc

SEQ ID NO: 648072 - RNA, 25 nt, Human
cgaggcaagaggauugcuugagucu

SEQ ID NO: 648073 - RNA, 21 nt, Human
cucagcuuugaccuccagggc

SEQ ID NO: 648074 - RNA, 24 nt, Human
cucaugccuguaaucccagcacuu

SEQ ID NO: 648075 - RNA, 22 nt, Human
cucccagaaaagggggagaaaa

SEQ ID NO: 648076 - RNA, 25 nt, Human
cucuacuaaagaaaaaaaaaauuag

SEQ ID NO: 648077 - RNA, 20 nt, Human
cucuguugcccaggcuggag

SEQ ID NO: 648078 - RNA, 21 nt, Human
cugggagacaaagggagaccc

SEQ ID NO: 648079 - RNA, 24 nt, Human
cugugcaguggcucaugccuguaa

SEQ ID NO: 648080 - RNA, 22 nt, Human
cuucagaacccgccccacaacc

SEQ ID NO: 648081 - RNA, 21 nt, Human
gacaaagggagacccugucuc

SEQ ID NO: 648082 - RNA, 24 nt, Human
gagugcaguggaguaaucauggcu

SEQ ID NO: 648083 - RNA, 21 nt, Human
gaucaugccacugcacuccag

SEQ ID NO: 648084 - RNA, 21 nt, Human
gcaacaaaacaagugacagac

SEQ ID NO: 648085 - RNA, 29 nt, Human
gcacuccagccugggagacaaagggagag

SEQ ID NO: 648086 - RNA, 19 nt, Human
gcccaggcuggagugcagu

SEQ ID NO: 648087 - RNA, 28 nt, Human
gcguggacacccacaccuguagucccag

SEQ ID NO: 648088 - RNA, 22 nt, Human
gcucaaguaauccuccuaauac

SEQ ID NO: 648089 - RNA, 25 nt, Human
gcucuguugcccaggcuggagugca

SEQ ID NO: 648090 - RNA, 21 nt, Human
ggagacaaagggagacccugu

SEQ ID NO: 648091 - RNA, 19 nt, Human
ggcuggagugcaguggagu

SEQ ID NO: 648092 - RNA, 21 nt, Human
uaagacaacucccacagcugg

SEQ ID NO: 648093 - RNA, 23 nt, Human
uagcugggcguggacacccacag

SEQ ID NO: 648094 - RNA, 20 nt, Human
uaggauuacuugagcccaga

SEQ ID NO: 648095 - RNA, 24 nt, Human
uaggcuaugucucaugaggagacu

SEQ ID NO: 648096 - RNA, 25 nt, Human
ucaaccucaccauuuguguucaaga

SEQ ID NO: 648097 - RNA, 23 nt, Human
ucaagacagacccacaaccaggc

SEQ ID NO: 648098 - RNA, 23 nt, Human
ucagaacccgccccacaaccaaa

SEQ ID NO: 648099 - RNA, 24 nt, Human
ucagaacccgccccacaaccaaac

SEQ ID NO: 648100 - RNA, 25 nt, Human
ucaucucuacuaaagaaaaaaaaaa

SEQ ID NO: 648101 - RNA, 23 nt, Human
ucaugccacugcacuccagccug

SEQ ID NO: 648102 - RNA, 22 nt, Human
ucaugccuguaaucccagcacu

SEQ ID NO: 648103 - RNA, 22 nt, Human
uccagccugggagacaaaggga

SEQ ID NO: 648104 - RNA, 18 nt, Human
ucuaagcaagcaggcaag

SEQ ID NO: 648105 - RNA, 24 nt, Human
ucuaagcuagcaucuggaauacaa

SEQ ID NO: 648106 - RNA, 18 nt, Human
ucuagaaguucaagacca

SEQ ID NO: 648107 - RNA, 18 nt, Human
ucuguugcccaggcugga

SEQ ID NO: 648108 - RNA, 24 nt, Human
ucuguugcccaggcuggagugcag

SEQ ID NO: 648109 - RNA, 25 nt, Human
ugaccuccagggcucaaguaauccu

SEQ ID NO: 648110 - RNA, 23 nt, Human
ugagcccagaaguuugaaccugc

SEQ ID NO: 648111 - RNA, 22 nt, Human
ugauacagggccuggcucuguu

SEQ ID NO: 648112 - RNA, 18 nt, Human
ugcccaggcuggagugca

SEQ ID NO: 648113 - RNA, 21 nt, Human
ugcccaggcuggagugcagug

SEQ ID NO: 648114 - RNA, 22 nt, Human
ugcccaggcuggagugcagugg

SEQ ID NO: 648115 - RNA, 23 nt, Human
ugccuguaaucccagcacuuugg

SEQ ID NO: 648116 - RNA, 23 nt, Human
ugccuguaaucccagcacuuugg

SEQ ID NO: 648117 - RNA, 24 nt, Human
uggagugcaguggaguaaucaugg

SEQ ID NO: 648118 - RNA, 24 nt, Human
uggcucaccucagcuuugaccucc

SEQ ID NO: 648119 - RNA, 24 nt, Human
uggcucaugccuguaaucccagca

SEQ ID NO: 648120 - RNA, 24 nt, Human
uggcucuguugcccaggcuggagu

SEQ ID NO: 648121 - RNA, 19 nt, Human
ugggaggccgaggcaagag

SEQ ID NO: 648122 - RNA, 22 nt, Human
ugggaggccgaggcaagaggau

SEQ ID NO: 648123 - RNA, 24 nt, Human
ugggaggccgaggcaagaggauug

SEQ ID NO: 648124 - RNA, 20 nt, Human
ugggcguggacacccacacc

SEQ ID NO: 648125 - RNA, 18 nt, Human
uguucaagacagacccac

SEQ ID NO: 648126 - RNA, 23 nt, Human
uugcccaggcuggagugcagugg

SEQ ID NO: 648127 - RNA, 20 nt, Human
uugggaggccgaggcaagag

SEQ ID NO: 648128 - RNA, 22 nt, Human
uugggaggccgaggcaagagga

SEQ ID NO: 648129 - RNA, 24 nt, Human
uuuuuuuuuugauacagggccugg

SEQ ID NO: 648130 - RNA, 18 nt, Human
uuuuuuuuuuuuuuuuug

SEQ ID NO: 648131 - RNA, 28 nt, Human
uuuuuuuuuuuuuuuuuuugauacaggg

SEQ ID NO: 648132 - RNA, 27 nt, Human
aaacagaaacaggaaaagacagcagga

SEQ ID NO: 648133 - RNA, 18 nt, Human
aaacaggaaaagacagca

SEQ ID NO: 648134 - RNA, 18 nt, Human
aaacaggaaaagacagca

SEQ ID NO: 648135 - RNA, 21 nt, Human
aaacaggaaaagacagcagga

SEQ ID NO: 648136 - RNA, 21 nt, Human
aacuccucagccaggcgcucu

SEQ ID NO: 648137 - RNA, 24 nt, Human
aacucgccccgcagccccggcccc

SEQ ID NO: 648138 - RNA, 19 nt, Human
acagaaacaggaaaagaca

SEQ ID NO: 648139 - RNA, 24 nt, Human
accacaguccacugaaguugacca

SEQ ID NO: 648140 - RNA, 24 nt, Human
acucuugggccgaggggcaagggu

SEQ ID NO: 648141 - RNA, 23 nt, Human
agagacuuggcugagggcagggg

SEQ ID NO: 648142 - RNA, 23 nt, Human
agaggugggccaccgcuggacac

SEQ ID NO: 648143 - RNA, 19 nt, Human
agccaggcgcucugaaacc

SEQ ID NO: 648144 - RNA, 18 nt, Human
agccccggccccggcuuc

SEQ ID NO: 648145 - RNA, 20 nt, Human
aggguggacauagcauuggc

SEQ ID NO: 648146 - RNA, 21 nt, Human
aggguggacauagcauuggca

SEQ ID NO: 648147 - RNA, 21 nt, Human
aguggaacuccucagccaggc

SEQ ID NO: 648148 - RNA, 20 nt, Human
caaacagaaacaggaaaaga

SEQ ID NO: 648149 - RNA, 19 nt, Human
cagcucccggcccagggcc

SEQ ID NO: 648150 - RNA, 20 nt, Human
ccaaagggcugcuccagugc

SEQ ID NO: 648151 - RNA, 24 nt, Human
ccagcucccggcccagggccgaca

SEQ ID NO: 648152 - RNA, 19 nt, Human
cccagggccgacaacucgc

SEQ ID NO: 648153 - RNA, 18 nt, Human
ccccgcagccccggcccc

SEQ ID NO: 648154 - RNA, 20 nt, Human
ccccgcagccccggccccgg

SEQ ID NO: 648155 - RNA, 20 nt, Human
ccgacccagcgcggucgcac

SEQ ID NO: 648156 - RNA, 21 nt, Human
ccgagacagaccaaggcucac

SEQ ID NO: 648157 - RNA, 22 nt, Human
ccgagcaacuccccccggcuga

SEQ ID NO: 648158 - RNA, 25 nt, Human
ccgcagccccggccccggcuucccu

SEQ ID NO: 648159 - RNA, 22 nt, Human
ccggccccggcuucccucgugc

SEQ ID NO: 648160 - RNA, 21 nt, Human
cgacccagcgcggucgcacga

SEQ ID NO: 648161 - RNA, 18 nt, Human
cgcagccccggccccggc

SEQ ID NO: 648162 - RNA, 19 nt, Human
cgugggcugguccaucucc

SEQ ID NO: 648163 - RNA, 22 nt, Human
cucagccaggcgcucugaaacc

SEQ ID NO: 648164 - RNA, 21 nt, Human
cuccccccggcugaggcggcu

SEQ ID NO: 648165 - RNA, 25 nt, Human
cucgccccgcagccccggccccggc

SEQ ID NO: 648166 - RNA, 23 nt, Human
cucugaaaccaaccacaguccac

SEQ ID NO: 648167 - RNA, 22 nt, Human
cugaaaccaaccacaguccacu

SEQ ID NO: 648168 - RNA, 21 nt, Human
cugaagaccaaaucccuugcc

SEQ ID NO: 648169 - RNA, 22 nt, Human
gaaaagacagcaggagcacaga

SEQ ID NO: 648170 - RNA, 19 nt, Human
gccccggcuucccucgugc

SEQ ID NO: 648171 - RNA, 22 nt, Human
gccugcucacuuccgacccagc

SEQ ID NO: 648172 - RNA, 21 nt, Human
gcgugggcugguccaucuccc

SEQ ID NO: 648173 - RNA, 18 nt, Human
ggaaaagacagcaggagc

SEQ ID NO: 648174 - RNA, 21 nt, Human
ggcucuucgggggcugggccg

SEQ ID NO: 648175 - RNA, 24 nt, Human
ggcuguagugggaggaagaggugg

SEQ ID NO: 648176 - RNA, 18 nt, Human
gggccgaggggcaagggu

SEQ ID NO: 648177 - RNA, 24 nt, Human
gggcugggccgggaccuaugaguu

SEQ ID NO: 648178 - RNA, 20 nt, Human
gggcugguccaucucccucc

SEQ ID NO: 648179 - RNA, 20 nt, Human
guggaacuccucagccaggc

SEQ ID NO: 648180 - RNA, 22 nt, Human
uaagucaaacgcaaacagaaac

SEQ ID NO: 648181 - RNA, 20 nt, Human
ucagccugcucacuuccgac

SEQ ID NO: 648182 - RNA, 23 nt, Human
uccucagccaggcgcucugaaac

SEQ ID NO: 648183 - RNA, 18 nt, Human
ucucccuccucagccucu

SEQ ID NO: 648184 - RNA, 23 nt, Human
ucuugggccgaggggcaagggug

SEQ ID NO: 648185 - RNA, 19 nt, Human
ugaaaccaaccacagucca

SEQ ID NO: 648186 - RNA, 24 nt, Human
ugaaaccaaccacaguccacugaa

SEQ ID NO: 648187 - RNA, 25 nt, Human
ugaaaccaaccacaguccacugaag

SEQ ID NO: 648188 - RNA, 20 nt, Human
ugaccacccuaccgagacag

SEQ ID NO: 648189 - RNA, 21 nt, Human
ugagggcagggguggaaggau

SEQ ID NO: 648190 - RNA, 20 nt, Human
ugccauggagccaggugcca

SEQ ID NO: 648191 - RNA, 24 nt, Human
uggacguuugaguccgagcaacuc

SEQ ID NO: 648192 - RNA, 20 nt, Human
uggcagcaagagacuuggcu

SEQ ID NO: 648193 - RNA, 22 nt, Human
uggcauggcagcaagagacuug

SEQ ID NO: 648194 - RNA, 21 nt, Human
uuuuacuguugaggcuguagu

SEQ ID NO: 648195 - RNA, 22 nt, Human
aaaaaaaaaaaaaaucccagag

SEQ ID NO: 648196 - RNA, 24 nt, Human
aaaaaaaaaaucccagagccugga

SEQ ID NO: 648197 - RNA, 18 nt, Human
aaaaaaaucccagagccu

SEQ ID NO: 648198 - RNA, 21 nt, Human
aaaaaagaaaaaaguaaaaag

SEQ ID NO: 648199 - RNA, 18 nt, Human
aaacacaugaucccacca

SEQ ID NO: 648200 - RNA, 20 nt, Human
aaauguccuacccaggccac

SEQ ID NO: 648201 - RNA, 19 nt, Human
aacauggugaaaccccguc

SEQ ID NO: 648202 - RNA, 20 nt, Human
aacauggugaaaccccgucu

SEQ ID NO: 648203 - RNA, 21 nt, Human
aacauggugaaaccccgucuc

SEQ ID NO: 648204 - RNA, 19 nt, Human
aacuaagcaaguuaucccc

SEQ ID NO: 648205 - RNA, 23 nt, Human
aagaauugcuggacgcugggagg

SEQ ID NO: 648206 - RNA, 24 nt, Human
aagcaggcagggaccacaccugag

SEQ ID NO: 648207 - RNA, 23 nt, Human
aagcaucuuauuuaucucaauau

SEQ ID NO: 648208 - RNA, 21 nt, Human
aagcccccaaacacaugaucc

SEQ ID NO: 648209 - RNA, 22 nt, Human
aagcccccaaacacaugauccc

SEQ ID NO: 648210 - RNA, 24 nt, Human
aagcccccaaacacaugaucccuu

SEQ ID NO: 648211 - RNA, 18 nt, Human
acaccacugcacuccagc

SEQ ID NO: 648212 - RNA, 20 nt, Human
acaccacugcacuccagccu

SEQ ID NO: 648213 - RNA, 20 nt, Human
acacccagcccccgucucca

SEQ ID NO: 648214 - RNA, 26 nt, Human
acacgagagcccucuguggccugcca

SEQ ID NO: 648215 - RNA, 21 nt, Human
accacaccugagacacaaggg

SEQ ID NO: 648216 - RNA, 19 nt, Human
accacugcacuccagccug

SEQ ID NO: 648217 - RNA, 24 nt, Human
accccgucucuacuaaaaauacaa

SEQ ID NO: 648218 - RNA, 24 nt, Human
acugcacuccagccugggugacag

SEQ ID NO: 648219 - RNA, 26 nt, Human
acugcacuccagccugggugacagag

SEQ ID NO: 648220 - RNA, 24 nt, Human
acuugaggucaggaguucgagacc

SEQ ID NO: 648221 - RNA, 22 nt, Human
acuuguggcaugaagaagugaa

SEQ ID NO: 648222 - RNA, 22 nt, Human
agagggcuugguuccucccaau

SEQ ID NO: 648223 - RNA, 23 nt, Human
agaucacuugaggucaggaguuc

SEQ ID NO: 648224 - RNA, 21 nt, Human
agcacuuuggguggccaaggc

SEQ ID NO: 648225 - RNA, 18 nt, Human
agccugggcugggcacag

SEQ ID NO: 648226 - RNA, 23 nt, Human
agccugggcugggcacaguggcu

SEQ ID NO: 648227 - RNA, 24 nt, Human
agccugggugacagagacagacuc

SEQ ID NO: 648228 - RNA, 18 nt, Human
agcuggguccccuaaaag

SEQ ID NO: 648229 - RNA, 22 nt, Human
aggaagaaucaaacucagucaa

SEQ ID NO: 648230 - RNA, 23 nt, Human
aggaguucgagaccagucuggcc

SEQ ID NO: 648231 - RNA, 21 nt, Human
aggcgggcagaucacuugagg

SEQ ID NO: 648232 - RNA, 23 nt, Human
aggcgggcagaucacuugagguc

SEQ ID NO: 648233 - RNA, 26 nt, Human
aggcgggcagaucacuugaggucagg

SEQ ID NO: 648234 - RNA, 20 nt, Human
aggggaccgggagugggcca

SEQ ID NO: 648235 - RNA, 20 nt, Human
aguaagcacguggagccugg

SEQ ID NO: 648236 - RNA, 20 nt, Human
aguaggugaccaauaugugc

SEQ ID NO: 648237 - RNA, 22 nt, Human
agucuggccaacauggugaaac

SEQ ID NO: 648238 - RNA, 24 nt, Human
agucuggccaacauggugaaaccc

SEQ ID NO: 648239 - RNA, 24 nt, Human
aguggcucaugccuguaacccuag

SEQ ID NO: 648240 - RNA, 21 nt, Human
aucacuugaggucaggaguuc

SEQ ID NO: 648241 - RNA, 25 nt, Human
aucuuauuuaucucaauauucccaa

SEQ ID NO: 648242 - RNA, 23 nt, Human
aucuuguucaucucugugcccca

SEQ ID NO: 648243 - RNA, 19 nt, Human
augccuguaacccuagcac

SEQ ID NO: 648244 - RNA, 23 nt, Human
auggcacgcaccuauagucccag

SEQ ID NO: 648245 - RNA, 18 nt, Human
auucccaucccauagcuc

SEQ ID NO: 648246 - RNA, 24 nt, Human
caacauggugaaaccccgucucua

SEQ ID NO: 648247 - RNA, 24 nt, Human
caaggcgggcagaucacuugaggu

SEQ ID NO: 648248 - RNA, 26 nt, Human
caaggcgggcagaucacuugagguca

SEQ ID NO: 648249 - RNA, 19 nt, Human
cacacaguaggugaccaau

SEQ ID NO: 648250 - RNA, 21 nt, Human
cacaccacugcacuccagccu

SEQ ID NO: 648251 - RNA, 26 nt, Human
cacagcaggugcucaguaaguguacc

SEQ ID NO: 648252 - RNA, 20 nt, Human
cacaggugcucaauaaacac

SEQ ID NO: 648253 - RNA, 20 nt, Human
caccaccccacacgagagcc

SEQ ID NO: 648254 - RNA, 26 nt, Human
caccacugcacuccagccugggugac

SEQ ID NO: 648255 - RNA, 24 nt, Human
cacccagcccccgucuccaacugg

SEQ ID NO: 648256 - RNA, 21 nt, Human
caccuauagucccagcuacuu

SEQ ID NO: 648257 - RNA, 23 nt, Human
caccuauagucccagcuacuugg

SEQ ID NO: 648258 - RNA, 24 nt, Human
caccuauagucccagcuacuuggg

SEQ ID NO: 648259 - RNA, 18 nt, Human
cacuccagccugggugac

SEQ ID NO: 648260 - RNA, 22 nt, Human
cacuccagccugggugacagag

SEQ ID NO: 648261 - RNA, 19 nt, Human
cacugcacuccagccuggg

SEQ ID NO: 648262 - RNA, 19 nt, Human
cacugcacuccagccuggg

SEQ ID NO: 648263 - RNA, 21 nt, Human
cacugcacuccagccugggug

SEQ ID NO: 648264 - RNA, 22 nt, Human
cacugcacuccagccuggguga

SEQ ID NO: 648265 - RNA, 24 nt, Human
cacugcacuccagccugggugaca

SEQ ID NO: 648266 - RNA, 25 nt, Human
cacugcacuccagccugggugacag

SEQ ID NO: 648267 - RNA, 23 nt, Human
cacuugaggucaggaguucgaga

SEQ ID NO: 648268 - RNA, 27 nt, Human
cagaucacuugaggucaggaguucgag

SEQ ID NO: 648269 - RNA, 22 nt, Human
cagcuacuugggaggccgagaa

SEQ ID NO: 648270 - RNA, 18 nt, Human
caggaccugugcuugccc

SEQ ID NO: 648271 - RNA, 23 nt, Human
cagggaccacaccugagacacaa

SEQ ID NO: 648272 - RNA, 23 nt, Human
caggggaccgggagugggccagg

SEQ ID NO: 648273 - RNA, 21 nt, Human
caggggggcuaacauguggcg

SEQ ID NO: 648274 - RNA, 19 nt, Human
caggugcucaauaaacacu

SEQ ID NO: 648275 - RNA, 21 nt, Human
caggugcuuaauaaaugcugg

SEQ ID NO: 648276 - RNA, 19 nt, Human
cagugcagcuggguccccu

SEQ ID NO: 648277 - RNA, 20 nt, Human
caugccuguaacccuagcac

SEQ ID NO: 648278 - RNA, 24 nt, Human
caugccuguaacccuagcacuuug

SEQ ID NO: 648279 - RNA, 23 nt, Human
ccacaccugagacacaagggcca

SEQ ID NO: 648280 - RNA, 20 nt, Human
ccacugcacuccagccuggg

SEQ ID NO: 648281 - RNA, 20 nt, Human
ccacugcacuccagccuggg

SEQ ID NO: 648282 - RNA, 20 nt, Human
ccacugcacuccagccuggg

SEQ ID NO: 648283 - RNA, 21 nt, Human
ccacugcacuccagccugggu

SEQ ID NO: 648284 - RNA, 21 nt, Human
ccacugcacuccagccugggu

SEQ ID NO: 648285 - RNA, 23 nt, Human
ccacugcacuccagccuggguga

SEQ ID NO: 648286 - RNA, 24 nt, Human
ccacugcacuccagccugggugac

SEQ ID NO: 648287 - RNA, 28 nt, Human
cccaacacacaguaggcacucaauaaau

SEQ ID NO: 648288 - RNA, 21 nt, Human
cccaugaucgaaaaugcagac

SEQ ID NO: 648289 - RNA, 27 nt, Human
cccaugaucgaaaaugcagacugaaca

SEQ ID NO: 648290 - RNA, 20 nt, Human
cccccaaacacaugauccca

SEQ ID NO: 648291 - RNA, 18 nt, Human
cccuaaaagcccccaaac

SEQ ID NO: 648292 - RNA, 24 nt, Human
ccgauggcugcuuuggcuuucugg

SEQ ID NO: 648293 - RNA, 19 nt, Human
ccuaaaagcccccaaacac

SEQ ID NO: 648294 - RNA, 21 nt, Human
ccuauagucccagcuacuugg

SEQ ID NO: 648295 - RNA, 19 nt, Human
ccucccucuuggguggugg

SEQ ID NO: 648296 - RNA, 22 nt, Human
ccugggugacagagacagacuc

SEQ ID NO: 648297 - RNA, 22 nt, Human
ccuguaacccuagcacuuuggg

SEQ ID NO: 648298 - RNA, 24 nt, Human
cgagaccagucuggccaacauggu

SEQ ID NO: 648299 - RNA, 24 nt, Human
cgcugggaggcgcaggcugcagug

SEQ ID NO: 648300 - RNA, 18 nt, Human
cgggcagaucacuugagg

SEQ ID NO: 648301 - RNA, 24 nt, Human
cgggcagaucacuugaggucagga

SEQ ID NO: 648302 - RNA, 26 nt, Human
cuaaaagcccccaaacacaugauccc

SEQ ID NO: 648303 - RNA, 23 nt, Human
cuagcacuuuggguggccaaggc

SEQ ID NO: 648304 - RNA, 21 nt, Human
cuauagucccagcuacuuggg

SEQ ID NO: 648305 - RNA, 21 nt, Human
cucaguaaguguaccgaauca

SEQ ID NO: 648306 - RNA, 24 nt, Human
cucaugccuguaacccuagcacuu

SEQ ID NO: 648307 - RNA, 22 nt, Human
cuggccaacauggugaaacccc

SEQ ID NO: 648308 - RNA, 18 nt, Human
cuuaaaaaaaaaaaaaaa

SEQ ID NO: 648309 - RNA, 26 nt, Human
cuuaaaaaaaaaaaaaaaaaaaaaau

SEQ ID NO: 648310 - RNA, 22 nt, Human
cuugcugggaaauguccuaccc

SEQ ID NO: 648311 - RNA, 18 nt, Human
gaacaacugucacacucu

SEQ ID NO: 648312 - RNA, 23 nt, Human
gacgaccgaggguacaggaagaa

SEQ ID NO: 648313 - RNA, 23 nt, Human
gagagcccucuguggccugccaa

SEQ ID NO: 648314 - RNA, 24 nt, Human
gaucacuugaggucaggaguucga

SEQ ID NO: 648315 - RNA, 21 nt, Human
gcaggugcucaguaaguguac

SEQ ID NO: 648316 - RNA, 24 nt, Human
gccaacauggugaaaccccgucuc

SEQ ID NO: 648317 - RNA, 22 nt, Human
gccccugguggcggaagagcua

SEQ ID NO: 648318 - RNA, 20 nt, Human
gcucaauaaacacuuguggc

SEQ ID NO: 648319 - RNA, 18 nt, Human
gcucagcucccugcacac

SEQ ID NO: 648320 - RNA, 19 nt, Human
gcugggcacaguggcucau

SEQ ID NO: 648321 - RNA, 21 nt, Human
ggaaauguccuacccaggcca

SEQ ID NO: 648322 - RNA, 23 nt, Human
ggcacaguggcucaugccuguaa

SEQ ID NO: 648323 - RNA, 25 nt, Human
ggcacaguggcucaugccuguaacc

SEQ ID NO: 648324 - RNA, 21 nt, Human
ggcacgcaccuauagucccag

SEQ ID NO: 648325 - RNA, 25 nt, Human
ggcagaucacuugaggucaggaguu

SEQ ID NO: 648326 - RNA, 18 nt, Human
ggcagugccccagugcag

SEQ ID NO: 648327 - RNA, 23 nt, Human
ggcugggcacaguggcucaugcc

SEQ ID NO: 648328 - RNA, 18 nt, Human
gggcacaguggcucaugc

SEQ ID NO: 648329 - RNA, 23 nt, Human
ggguccagagguggcccugaugu

SEQ ID NO: 648330 - RNA, 24 nt, Human
gucacaccacugcacuccagccug

SEQ ID NO: 648331 - RNA, 19 nt, Human
gucugcacacagcucagac

SEQ ID NO: 648332 - RNA, 24 nt, Human
gugcagcuggguccccuaaaagcc

SEQ ID NO: 648333 - RNA, 21 nt, Human
gugugggaaagaagccaauga

SEQ ID NO: 648334 - RNA, 21 nt, Human
uaaaaauacaaaaacuagcca

SEQ ID NO: 648335 - RNA, 23 nt, Human
uaccuuguuuacucccauuccca

SEQ ID NO: 648336 - RNA, 24 nt, Human
uagaagcaucuuauuuaucucaau

SEQ ID NO: 648337 - RNA, 20 nt, Human
uagcaagagcuggcuggaca

SEQ ID NO: 648338 - RNA, 24 nt, Human
uagcacuuuggguggccaaggcgg

SEQ ID NO: 648339 - RNA, 19 nt, Human
uagcagugaggaaaaaaag

SEQ ID NO: 648340 - RNA, 21 nt, Human
uagcagugaggaaaaaaagaa

SEQ ID NO: 648341 - RNA, 24 nt, Human
uaucacuagugccugauucuuaau

SEQ ID NO: 648342 - RNA, 23 nt, Human
ucacaccacugcacuccagccug

SEQ ID NO: 648343 - RNA, 20 nt, Human
ucacuugaggucaggaguuc

SEQ ID NO: 648344 - RNA, 21 nt, Human
ucaucucugugccccagcacu

SEQ ID NO: 648345 - RNA, 20 nt, Human
uccagccugggugacagaga

SEQ ID NO: 648346 - RNA, 19 nt, Human
ucccagagccuggaauggc

SEQ ID NO: 648347 - RNA, 22 nt, Human
ucccagagccuggaauggcacc

SEQ ID NO: 648348 - RNA, 21 nt, Human
ucccagagccugggcugggca

SEQ ID NO: 648349 - RNA, 24 nt, Human
uccccaagagggugaagcaccgcu

SEQ ID NO: 648350 - RNA, 19 nt, Human
uccccuaaaagcccccaaa

SEQ ID NO: 648351 - RNA, 24 nt, Human
uccccuaaaagcccccaaacacau

SEQ ID NO: 648352 - RNA, 22 nt, Human
ucccucuuggguggugggggga

SEQ ID NO: 648353 - RNA, 22 nt, Human
ucccugcacacagcaggugcuc

SEQ ID NO: 648354 - RNA, 19 nt, Human
ucgaaaaugcagacugaac

SEQ ID NO: 648355 - RNA, 24 nt, Human
ucuacucuuaaaaaaaaaaaaaaa

SEQ ID NO: 648356 - RNA, 22 nt, Human
ucuccaacuggcgcccccucca

SEQ ID NO: 648357 - RNA, 21 nt, Human
ucucuacuaaaaauacaaaaa

SEQ ID NO: 648358 - RNA, 24 nt, Human
ucuggccaacauggugaaaccccg

SEQ ID NO: 648359 - RNA, 19 nt, Human
ugaagaagugaaggaaccg

SEQ ID NO: 648360 - RNA, 18 nt, Human
ugaagagggcuugguucc

SEQ ID NO: 648361 - RNA, 25 nt, Human
ugagaaguucccacaccgucuagca

SEQ ID NO: 648362 - RNA, 18 nt, Human
ugagugccaggcacacag

SEQ ID NO: 648363 - RNA, 21 nt, Human
ugaucaguaacugcuugauga

SEQ ID NO: 648364 - RNA, 19 nt, Human
ugccaagggguccagaggu

SEQ ID NO: 648365 - RNA, 26 nt, Human
uggacaccaccccacacgagagcccu

SEQ ID NO: 648366 - RNA, 20 nt, Human
uggagggaacaauuaugccu

SEQ ID NO: 648367 - RNA, 24 nt, Human
uggccaacauggugaaaccccguc

SEQ ID NO: 648368 - RNA, 19 nt, Human
uggcucaugccuguaaccc

SEQ ID NO: 648369 - RNA, 19 nt, Human
uggcucaugccuguaaccc

SEQ ID NO: 648370 - RNA, 23 nt, Human
uggcucaugccuguaacccuagc

SEQ ID NO: 648371 - RNA, 24 nt, Human
uggcucaugccuguaacccuagca

SEQ ID NO: 648372 - RNA, 19 nt, Human
ugggaaauguccuacccag

SEQ ID NO: 648373 - RNA, 23 nt, Human
ugggaaauguccuacccaggcca

SEQ ID NO: 648374 - RNA, 26 nt, Human
ugggaggccgagaaacaagaauugcu

SEQ ID NO: 648375 - RNA, 18 nt, Human
uggguccccuaaaagccc

SEQ ID NO: 648376 - RNA, 24 nt, Human
uggguggccaaggcgggcagauca

SEQ ID NO: 648377 - RNA, 18 nt, Human
ugggugguggggggaugu

SEQ ID NO: 648378 - RNA, 27 nt, Human
ugggugguggggggauguugucugcaa

SEQ ID NO: 648379 - RNA, 20 nt, Human
uguggccugccaaggggucc

SEQ ID NO: 648380 - RNA, 19 nt, Human
ugugugcacgugauugcuu

SEQ ID NO: 648381 - RNA, 21 nt, Human
ugugugcacgugauugcuuag

SEQ ID NO: 648382 - RNA, 20 nt, Human
uuaaaaaaaaaaaaaaaaaa

SEQ ID NO: 648383 - RNA, 20 nt, Human
uuaaaaaaaaaaaaaaaaaa

SEQ ID NO: 648384 - RNA, 21 nt, Human
uucccagagccugggcugggc

SEQ ID NO: 648385 - RNA, 23 nt, Human
uugggaggccgagaaacaagaau

SEQ ID NO: 648386 - RNA, 18 nt, Human
uuuuuuuuuuuuuuuuug

SEQ ID NO: 648387 - RNA, 19 nt, Human
aaacugacaccucaguuga

SEQ ID NO: 648388 - RNA, 22 nt, Human
aagauuuuucuaauucuugcca

SEQ ID NO: 648389 - RNA, 23 nt, Human
acugucacauggacaaaaugaaa

SEQ ID NO: 648390 - RNA, 19 nt, Human
acuugggucuucucccucu

SEQ ID NO: 648391 - RNA, 25 nt, Human
agaaacugacaccucaguugaauaa

SEQ ID NO: 648392 - RNA, 20 nt, Human
agaacugacagcauuuucag

SEQ ID NO: 648393 - RNA, 22 nt, Human
agcaauauuugugguuuugcuc

SEQ ID NO: 648394 - RNA, 19 nt, Human
auaaaacagguacaucccc

SEQ ID NO: 648395 - RNA, 32 nt, Human
auacuugggucuucucccucuuuuauaaaaag

SEQ ID NO: 648396 - RNA, 18 nt, Human
caauggcauugcugugca

SEQ ID NO: 648397 - RNA, 26 nt, Human
cauucucacugcuauuacucaaagau

SEQ ID NO: 648398 - RNA, 19 nt, Human
ccuuuucacaauggcuucg

SEQ ID NO: 648399 - RNA, 21 nt, Human
cuucaugacugucacauggac

SEQ ID NO: 648400 - RNA, 18 nt, Human
cuuucagggacugacuga

SEQ ID NO: 648401 - RNA, 18 nt, Human
gaaaacuggcugcugugu

SEQ ID NO: 648402 - RNA, 20 nt, Human
gcauuuucaguggaagaaac

SEQ ID NO: 648403 - RNA, 19 nt, Human
gcucugugguugcugcugg

SEQ ID NO: 648404 - RNA, 24 nt, Human
gcugcuguguacaaugaccgaggg

SEQ ID NO: 648405 - RNA, 20 nt, Human
guuuugcucagugauccucc

SEQ ID NO: 648406 - RNA, 21 nt, Human
uaacuaaaaaaaaccaccaac

SEQ ID NO: 648407 - RNA, 19 nt, Human
uacuauuuguggagguucc

SEQ ID NO: 648408 - RNA, 23 nt, Human
ucacaauggcuucguuuccaauu

SEQ ID NO: 648409 - RNA, 25 nt, Human
uccuucaugacugucacauggacaa

SEQ ID NO: 648410 - RNA, 20 nt, Human
ugcucagugauccuccaggg

SEQ ID NO: 648411 - RNA, 19 nt, Human
ugcuguguacaaugaccga

SEQ ID NO: 648412 - RNA, 21 nt, Human
ugguugcugcuggucauggca

SEQ ID NO: 648413 - RNA, 23 nt, Human
ugugauguaguuuucuuugguug

SEQ ID NO: 648414 - RNA, 22 nt, Human
uucaguggaagaaacugacacc

SEQ ID NO: 648415 - RNA, 24 nt, Human
uuugacuccuccgguauuucuccc

SEQ ID NO: 648416 - RNA, 20 nt, Human
uuuuuuuuuuuuucacuccu

SEQ ID NO: 648417 - RNA, 25 nt, Human
uuuuuuuuuuuuucacuccuucaug

SEQ ID NO: 648418 - RNA, 26 nt, Human
uuuuuuuuuuuuuuuuuucacuccuu

SEQ ID NO: 648419 - RNA, 23 nt, Human
aagaaaaggacccugccccagga

SEQ ID NO: 648420 - RNA, 20 nt, Human
acagagagcgcucugcagag

SEQ ID NO: 648421 - RNA, 20 nt, Human
accugggaagaaaaggaccc

SEQ ID NO: 648422 - RNA, 23 nt, Human
acgcggagucagccucgccuggc

SEQ ID NO: 648423 - RNA, 21 nt, Human
agaccgugauauaaacuggua

SEQ ID NO: 648424 - RNA, 19 nt, Human
agacucagagaggcaggug

SEQ ID NO: 648425 - RNA, 23 nt, Human
agaggaaggggcauggugggcac

SEQ ID NO: 648426 - RNA, 20 nt, Human
agcagaggcagcgcugagga

SEQ ID NO: 648427 - RNA, 19 nt, Human
agcaggcccugggguggcu

SEQ ID NO: 648428 - RNA, 21 nt, Human
agcaggcccugggguggcucc

SEQ ID NO: 648429 - RNA, 22 nt, Human
agcgcugaggaccugggaagaa

SEQ ID NO: 648430 - RNA, 21 nt, Human
agcuugggucaggaucucaca

SEQ ID NO: 648431 - RNA, 19 nt, Human
agguccagagcccgggccc

SEQ ID NO: 648432 - RNA, 24 nt, Human
cacguccccagcaagggcacgcuc

SEQ ID NO: 648433 - RNA, 22 nt, Human
cagaaaaaccccgccuuaacca

SEQ ID NO: 648434 - RNA, 27 nt, Human
cagagguaggaggagaaagaggaaggg

SEQ ID NO: 648435 - RNA, 19 nt, Human
cagccacguccccagcaag

SEQ ID NO: 648436 - RNA, 19 nt, Human
cagggcagagguaggagga

SEQ ID NO: 648437 - RNA, 18 nt, Human
cauggccaaagccuuucc

SEQ ID NO: 648438 - RNA, 23 nt, Human
cauggccaaagccuuuccuacaa

SEQ ID NO: 648439 - RNA, 22 nt, Human
ccaaccaucucacgcggaguca

SEQ ID NO: 648440 - RNA, 19 nt, Human
ccagcagaggcagcgcuga

SEQ ID NO: 648441 - RNA, 18 nt, Human
ccagguccagagcccggg

SEQ ID NO: 648442 - RNA, 23 nt, Human
ccauggccaaagccuuuccuaca

SEQ ID NO: 648443 - RNA, 19 nt, Human
cccugggggcaacugaggg

SEQ ID NO: 648444 - RNA, 21 nt, Human
ccucacgccccagaaaaaccc

SEQ ID NO: 648445 - RNA, 19 nt, Human
ccugggagcaggcccuggg

SEQ ID NO: 648446 - RNA, 22 nt, Human
cgcccggugucguucuaccuga

SEQ ID NO: 648447 - RNA, 23 nt, Human
cgccucgagcacucccugggagc

SEQ ID NO: 648448 - RNA, 21 nt, Human
gaaaaggacccugccccagga

SEQ ID NO: 648449 - RNA, 19 nt, Human
gaaggcaccagcagaggca

SEQ ID NO: 648450 - RNA, 18 nt, Human
gcagagggcagcccucgc

SEQ ID NO: 648451 - RNA, 23 nt, Human
gcagagggcagcccucgcaggca

SEQ ID NO: 648452 - RNA, 23 nt, Human
ggaacugagacccaagacucaga

SEQ ID NO: 648453 - RNA, 18 nt, Human
ggaggagaaagaggaagg

SEQ ID NO: 648454 - RNA, 20 nt, Human
ggcagcccucgcaggcagac

SEQ ID NO: 648455 - RNA, 21 nt, Human
ggcagccguguggcccagcgg

SEQ ID NO: 648456 - RNA, 19 nt, Human
gggaagaaaaggacccugc

SEQ ID NO: 648457 - RNA, 21 nt, Human
gggcacagccacguccccagc

SEQ ID NO: 648458 - RNA, 19 nt, Human
gggcacccagcccuggggg

SEQ ID NO: 648459 - RNA, 20 nt, Human
gggugugccugagcuugggu

SEQ ID NO: 648460 - RNA, 20 nt, Human
gguaggaggagaaagaggaa

SEQ ID NO: 648461 - RNA, 19 nt, Human
uaauccaugagacaucguc

SEQ ID NO: 648462 - RNA, 20 nt, Human
uacaaugucccaucugagag

SEQ ID NO: 648463 - RNA, 19 nt, Human
uaggaacugagacccaaga

SEQ ID NO: 648464 - RNA, 20 nt, Human
ucccugggagcaggcccugg

SEQ ID NO: 648465 - RNA, 24 nt, Human
ucccugggagcaggcccuggggug

SEQ ID NO: 648466 - RNA, 26 nt, Human
ucccugggagcaggcccugggguggc

SEQ ID NO: 648467 - RNA, 23 nt, Human
ucucacaggccucacgccccaga

SEQ ID NO: 648468 - RNA, 27 nt, Human
ucucacgcggagucagccucgccuggc

SEQ ID NO: 648469 - RNA, 18 nt, Human
ucuugggucucuggcucu

SEQ ID NO: 648470 - RNA, 21 nt, Human
ugagacccaagacucagagag

SEQ ID NO: 648471 - RNA, 27 nt, Human
uggcucucuggcacacagagagcgcuc

SEQ ID NO: 648472 - RNA, 22 nt, Human
ugggaagaaaaggacccugccc

SEQ ID NO: 648473 - RNA, 22 nt, Human
uggugggcacccagcccugggg

SEQ ID NO: 648474 - RNA, 19 nt, Human
ugucccaucugagagccuu

SEQ ID NO: 648475 - RNA, 21 nt, Human
ugucccaucugagagccuuau

SEQ ID NO: 648476 - RNA, 19 nt, Human
uguucucugcccccagacc

SEQ ID NO: 648477 - RNA, 20 nt, Human
uuaauccaugagacaucguc

SEQ ID NO: 648478 - RNA, 21 nt, Human
uuaauccaugagacaucgucc

SEQ ID NO: 648479 - RNA, 25 nt, Human
uuuccuacaaugucccaucugagag

SEQ ID NO: 648480 - RNA, 22 nt, Human
uuuuuuuuuuuuuuuuugccau

SEQ ID NO: 648481 - RNA, 25 nt, Human
uuuuuuuuuuuuuuuuuugccauaa

SEQ ID NO: 648482 - RNA, 20 nt, Human
uuuuuuuuuuuuuuuuuugg

SEQ ID NO: 648483 - RNA, 19 nt, Human
aaagaggcuguucaccucc

SEQ ID NO: 648484 - RNA, 18 nt, Human
aaaugcugcugaggcuga

SEQ ID NO: 648485 - RNA, 22 nt, Human
aagcagaaagaaaggggacccc

SEQ ID NO: 648486 - RNA, 22 nt, Human
aauaaaaagcagaaagaaagga

SEQ ID NO: 648487 - RNA, 23 nt, Human
agaaagaaaggaaaugcugcuga

SEQ ID NO: 648488 - RNA, 19 nt, Human
augauaaaaaggcaaaaua

SEQ ID NO: 648489 - RNA, 25 nt, Human
caaaagaggcuguucaccuccaagu

SEQ ID NO: 648490 - RNA, 26 nt, Human
caaaauaaauaaaaagcagaaagaaa

SEQ ID NO: 648491 - RNA, 21 nt, Human
caacagcccugcacggagcac

SEQ ID NO: 648492 - RNA, 18 nt, Human
cacagcaguagcaaaacc

SEQ ID NO: 648493 - RNA, 20 nt, Human
cacagcaguagcaaaaccuu

SEQ ID NO: 648494 - RNA, 23 nt, Human
ccaaacagaugcuggucuccuca

SEQ ID NO: 648495 - RNA, 20 nt, Human
ccacagcuaacaagguuuug

SEQ ID NO: 648496 - RNA, 24 nt, Human
cccugcacggagcacuugcugcuc

SEQ ID NO: 648497 - RNA, 21 nt, Human
ccuccaagugauagcaacagc

SEQ ID NO: 648498 - RNA, 18 nt, Human
cugcugaggcugagggcu

SEQ ID NO: 648499 - RNA, 18 nt, Human
ggagcacuugcugcucug

SEQ ID NO: 648500 - RNA, 19 nt, Human
ggagcacuugcugcucugc

SEQ ID NO: 648501 - RNA, 21 nt, Human
uaaaaagcagaaagaaaggaa

SEQ ID NO: 648502 - RNA, 26 nt, Human
uaaaaaggcaaaauaaauaaaaagca

SEQ ID NO: 648503 - RNA, 21 nt, Human
uaauccacuaguaauuagaua

SEQ ID NO: 648504 - RNA, 19 nt, Human
uagauuuaaucagagcaca

SEQ ID NO: 648505 - RNA, 23 nt, Human
uagcaacagcccugcacggagca

SEQ ID NO: 648506 - RNA, 23 nt, Human
ucacugaauaccggcaaaagagg

SEQ ID NO: 648507 - RNA, 22 nt, Human
ucaguguguuauauuauuaucc

SEQ ID NO: 648508 - RNA, 18 nt, Human
ucugcacagcagcgacuu

SEQ ID NO: 648509 - RNA, 24 nt, Human
ucuuccaguguuaucauucuuaua

SEQ ID NO: 648510 - RNA, 23 nt, Human
ucuuucacuccagugagagaacu

SEQ ID NO: 648511 - RNA, 19 nt, Human
ucuuuuaucuucccaaaca

SEQ ID NO: 648512 - RNA, 20 nt, Human
ugauaaaaaggcaaaauaaa

SEQ ID NO: 648513 - RNA, 24 nt, Human
ugauagcaacagcccugcacggag

SEQ ID NO: 648514 - RNA, 19 nt, Human
ugcacggagcacuugcugc

SEQ ID NO: 648515 - RNA, 19 nt, Human
ugcugcucugcacagcagc

SEQ ID NO: 648516 - RNA, 18 nt, Human
ugcuggucuccucauugc

SEQ ID NO: 648517 - RNA, 25 nt, Human
aaaaacacaagcaccucugccacca

SEQ ID NO: 648518 - RNA, 22 nt, Human
agcagcuuuauugcccuucagg

SEQ ID NO: 648519 - RNA, 26 nt, Human
caaaaacacaagcaccucugccacca

SEQ ID NO: 648520 - RNA, 26 nt, Human
caaaaacacaagcaccucugccagca

SEQ ID NO: 648521 - RNA, 19 nt, Human
cacaagcaccucugccacc

SEQ ID NO: 648522 - RNA, 19 nt, Human
ccucugccaccaccggaac

SEQ ID NO: 648523 - RNA, 22 nt, Human
uagcagcuuuauugcccuucag

SEQ ID NO: 648524 - RNA, 21 nt, Human
uauugcccuucaggggccaug

SEQ ID NO: 648525 - RNA, 20 nt, Human
ucuccuguaccgacaaaaac

SEQ ID NO: 648526 - RNA, 23 nt, Human
uguaccgacaaaaacacaagcac

SEQ ID NO: 648527 - RNA, 24 nt, Human
uguauuaauaaacuagcagcuuua

SEQ ID NO: 648528 - RNA, 20 nt, Human
uuuuuuuuuuuuuuuuuugg

SEQ ID NO: 648529 - RNA, 23 nt, Human
uuuuuuuuuuuuuuuuuuguauu

SEQ ID NO: 648530 - RNA, 21 nt, Human
acccagcuccagggggccggg

SEQ ID NO: 648531 - RNA, 26 nt, Human
agcaggguggcacccugacccguggc

SEQ ID NO: 648532 - RNA, 20 nt, Human
aggcagcucugugacacagu

SEQ ID NO: 648533 - RNA, 24 nt, Human
aggcagcucugugacacagugggg

SEQ ID NO: 648534 - RNA, 23 nt, Human
aggccccuucagcaggaggcccc

SEQ ID NO: 648535 - RNA, 19 nt, Human
aggcucgaagguccaacag

SEQ ID NO: 648536 - RNA, 20 nt, Human
aggggcugggaccugugcca

SEQ ID NO: 648537 - RNA, 18 nt, Human
aggguccaggcaggcauc

SEQ ID NO: 648538 - RNA, 21 nt, Human
caaccacaccuccaccucuuc

SEQ ID NO: 648539 - RNA, 26 nt, Human
cacaaccacaccuccaccucuucuuc

SEQ ID NO: 648540 - RNA, 19 nt, Human
caccacaaccacaccucca

SEQ ID NO: 648541 - RNA, 27 nt, Human
cagacccagcuccagggggccgggcaa

SEQ ID NO: 648542 - RNA, 18 nt, Human
cagccaccaacagggucc

SEQ ID NO: 648543 - RNA, 21 nt, Human
cagcuccagggggccgggcaa

SEQ ID NO: 648544 - RNA, 26 nt, Human
caggaagggcagguggccgaguccug

SEQ ID NO: 648545 - RNA, 18 nt, Human
caggaggccccugagaga

SEQ ID NO: 648546 - RNA, 24 nt, Human
caggcaggcauccuccugccuccc

SEQ ID NO: 648547 - RNA, 26 nt, Human
caggcaggcauccuccugccuccccc

SEQ ID NO: 648548 - RNA, 23 nt, Human
ccaccucuucuuccucccgaccu

SEQ ID NO: 648549 - RNA, 21 nt, Human
ccagaggucuucagccaccaa

SEQ ID NO: 648550 - RNA, 22 nt, Human
cccagcagucugcacaggguca

SEQ ID NO: 648551 - RNA, 21 nt, Human
ccccugagagaaaauccagcc

SEQ ID NO: 648552 - RNA, 21 nt, Human
ccccugagcccugagcugcuc

SEQ ID NO: 648553 - RNA, 25 nt, Human
ccccugagcccugagcugcuccagg

SEQ ID NO: 648554 - RNA, 20 nt, Human
cccugagcccugagcugcuc

SEQ ID NO: 648555 - RNA, 22 nt, Human
ccgggcaaauguggccuccccu

SEQ ID NO: 648556 - RNA, 21 nt, Human
ccuccuuguggcccccugagc

SEQ ID NO: 648557 - RNA, 24 nt, Human
ccuccuuguggcccccugagcccu

SEQ ID NO: 648558 - RNA, 23 nt, Human
ccugagcccugagcugcuccagg

SEQ ID NO: 648559 - RNA, 19 nt, Human
ccuucagcuggggcucaga

SEQ ID NO: 648560 - RNA, 20 nt, Human
ccuuguggcccccugagccc

SEQ ID NO: 648561 - RNA, 20 nt, Human
cuccugccucccccagcagu

SEQ ID NO: 648562 - RNA, 23 nt, Human
cucgaagguccaacaggcuaaca

SEQ ID NO: 648563 - RNA, 18 nt, Human
gaagccagcuggccagag

SEQ ID NO: 648564 - RNA, 21 nt, Human
gacccagcuccagggggccgg

SEQ ID NO: 648565 - RNA, 24 nt, Human
gaccugccuccuuguggcccccug

SEQ ID NO: 648566 - RNA, 19 nt, Human
gcacccugacccguggcuc

SEQ ID NO: 648567 - RNA, 21 nt, Human
gcugcuuccccaccaagggcc

SEQ ID NO: 648568 - RNA, 21 nt, Human
gggcaaauguggccuccccuu

SEQ ID NO: 648569 - RNA, 18 nt, Human
gggcuagcuggugcucuc

SEQ ID NO: 648570 - RNA, 21 nt, Human
ggucuucagccaccaacaggg

SEQ ID NO: 648571 - RNA, 21 nt, Human
gugcaggaagggcagguggcc

SEQ ID NO: 648572 - RNA, 19 nt, Human
uaaaauccucugaaggccc

SEQ ID NO: 648573 - RNA, 22 nt, Human
uaaaauccucugaaggccccuu

SEQ ID NO: 648574 - RNA, 19 nt, Human
ucaaaaccuaguucugcug

SEQ ID NO: 648575 - RNA, 20 nt, Human
uccaacaggcuaacagcaaa

SEQ ID NO: 648576 - RNA, 23 nt, Human
uccaacaggcuaacagcaaagca

SEQ ID NO: 648577 - RNA, 23 nt, Human
uccaccacaaccacaccuccacc

SEQ ID NO: 648578 - RNA, 20 nt, Human
uccccaccaagggcggaagc

SEQ ID NO: 648579 - RNA, 22 nt, Human
ucccccagcagucugcacaggg

SEQ ID NO: 648580 - RNA, 18 nt, Human
ucuugagcuggccagucg

SEQ ID NO: 648581 - RNA, 20 nt, Human
ugagagaaaauccagccauc

SEQ ID NO: 648582 - RNA, 25 nt, Human
ugagagaaaauccagccaucugagg

SEQ ID NO: 648583 - RNA, 18 nt, Human
ugccaggcagcucuguga

SEQ ID NO: 648584 - RNA, 18 nt, Human
ugccaggcagcucuguga

SEQ ID NO: 648585 - RNA, 24 nt, Human
ugcucuccaccacaaccacaccuc

SEQ ID NO: 648586 - RNA, 19 nt, Human
ugcuuccccaccaagggcg

SEQ ID NO: 648587 - RNA, 19 nt, Human
uggaaggggcuagcuggug

SEQ ID NO: 648588 - RNA, 19 nt, Human
uguggccuccccuucugga

SEQ ID NO: 648589 - RNA, 21 nt, Human
uguggccuccccuucuggaag

SEQ ID NO: 648590 - RNA, 24 nt, Human
uuuuuuuuuuucaaagggucugcu

SEQ ID NO: 648591 - RNA, 20 nt, Human
uuuuuuuuuuuucaaaggga

SEQ ID NO: 648592 - RNA, 23 nt, Human
uuuuuuuuuuuuuuuucaaaggg

SEQ ID NO: 648593 - RNA, 18 nt, Human
acacaacugacugcaagg

SEQ ID NO: 648594 - RNA, 21 nt, Human
acccucaacaccccccuccau

SEQ ID NO: 648595 - RNA, 25 nt, Human
accgcaaagucccaaagggcuacag

SEQ ID NO: 648596 - RNA, 19 nt, Human
agacagaggcccccaggag

SEQ ID NO: 648597 - RNA, 18 nt, Human
agcagacagaggccccca

SEQ ID NO: 648598 - RNA, 26 nt, Human
aggcacuccugccccuuaggauucug

SEQ ID NO: 648599 - RNA, 22 nt, Human
aggcauuuauuucuggagcaac

SEQ ID NO: 648600 - RNA, 26 nt, Human
cacaacugacugcaaggcucccacag

SEQ ID NO: 648601 - RNA, 20 nt, Human
caccccccuccauuugucaa

SEQ ID NO: 648602 - RNA, 18 nt, Human
cagacagaggcccccagg

SEQ ID NO: 648603 - RNA, 19 nt, Human
caugcccaggcacuccugc

SEQ ID NO: 648604 - RNA, 23 nt, Human
ccaaacacaacugacugcaaggc

SEQ ID NO: 648605 - RNA, 19 nt, Human
cccccaggagacaggccca

SEQ ID NO: 648606 - RNA, 19 nt, Human
cccccaggagacaggccca

SEQ ID NO: 648607 - RNA, 22 nt, Human
ccugcaugccacaggaaucagc

SEQ ID NO: 648608 - RNA, 25 nt, Human
cgacagauugcagguuguggggagg

SEQ ID NO: 648609 - RNA, 21 nt, Human
ucccacagacacaugcccagg

SEQ ID NO: 648610 - RNA, 19 nt, Human
ugaaggcgccggcccagag

SEQ ID NO: 648611 - RNA, 23 nt, Human
ugacugcaaggcucccacagaca

SEQ ID NO: 648612 - RNA, 19 nt, Human
ugccacaggaaucagcagc

SEQ ID NO: 648613 - RNA, 19 nt, Human
uguccaaacacaacugacu

SEQ ID NO: 648614 - RNA, 22 nt, Human
uuugucaaccucuacagccugc

SEQ ID NO: 648615 - RNA, 19 nt, Human
uuuuuuuuuuuuuuuuuaa

SEQ ID NO: 648616 - RNA, 24 nt, Human
aacaggccaguccccacauggagc

SEQ ID NO: 648617 - RNA, 20 nt, Human
acaaggcacaagaaagaggu

SEQ ID NO: 648618 - RNA, 19 nt, Human
aggaaacaggccagucccc

SEQ ID NO: 648619 - RNA, 23 nt, Human
aggcucagggaggucgugucugg

SEQ ID NO: 648620 - RNA, 21 nt, Human
agggaggucgugucuggcucu

SEQ ID NO: 648621 - RNA, 21 nt, Human
aguccauuuauuggccacaug

SEQ ID NO: 648622 - RNA, 22 nt, Human
agugaacaaggcacaagaaaga

SEQ ID NO: 648623 - RNA, 22 nt, Human
caagaaacaaguuagaagguua

SEQ ID NO: 648624 - RNA, 22 nt, Human
caggugacuccuguaagccugu

SEQ ID NO: 648625 - RNA, 21 nt, Human
caguacgagggguucaacaga

SEQ ID NO: 648626 - RNA, 19 nt, Human
gcgccggggaggaggggcu

SEQ ID NO: 648627 - RNA, 18 nt, Human
ggaggaggggcugccgcc

SEQ ID NO: 648628 - RNA, 18 nt, Human
ggcgccggggaggagggg

SEQ ID NO: 648629 - RNA, 23 nt, Human
gucaagaaacaaguuagaagguu

SEQ ID NO: 648630 - RNA, 21 nt, Human
gugucuggcucuggccugcug

SEQ ID NO: 648631 - RNA, 27 nt, Human
ucuggccugcuggagcacacggccgcu

SEQ ID NO: 648632 - RNA, 22 nt, Human
ucuguguucaggaaacaggcca

SEQ ID NO: 648633 - RNA, 22 nt, Human
ugagggcgccggggaggagggg

SEQ ID NO: 648634 - RNA, 22 nt, Human
ugggggguccugagggcgccgg

SEQ ID NO: 648635 - RNA, 18 nt, Human
ugugaggcucagggaggu

SEQ ID NO: 648636 - RNA, 24 nt, Human
uuuuuuuuuuuuuuuuuuuucaag

SEQ ID NO: 648637 - RNA, 19 nt, Human
aaacaccccucucugaggg

SEQ ID NO: 648638 - RNA, 20 nt, Human
aaacaccccucucugagggc

SEQ ID NO: 648639 - RNA, 24 nt, Human
aagaaccuuuauuggaaaaauguc

SEQ ID NO: 648640 - RNA, 22 nt, Human
aagaggauggguaccaggccug

SEQ ID NO: 648641 - RNA, 18 nt, Human
acagaaacaccccucucu

SEQ ID NO: 648642 - RNA, 22 nt, Human
acaguggaaagaggauggguac

SEQ ID NO: 648643 - RNA, 18 nt, Human
accccaucccuaucccca

SEQ ID NO: 648644 - RNA, 20 nt, Human
aggcaagauguggggcagcu

SEQ ID NO: 648645 - RNA, 19 nt, Human
agucuguccgggagcaggg

SEQ ID NO: 648646 - RNA, 18 nt, Human
caguuguuagugcaucuc

SEQ ID NO: 648647 - RNA, 19 nt, Human
cauuggaguagugcagugc

SEQ ID NO: 648648 - RNA, 21 nt, Human
ccacggagucuguccgggagc

SEQ ID NO: 648649 - RNA, 18 nt, Human
ccacuccccagguccagg

SEQ ID NO: 648650 - RNA, 18 nt, Human
ccccagggcucgagcggg

SEQ ID NO: 648651 - RNA, 24 nt, Human
ccccagguccaggggcacagacuc

SEQ ID NO: 648652 - RNA, 18 nt, Human
ccccaucccuauccccag

SEQ ID NO: 648653 - RNA, 20 nt, Human
ccccuggaccggggaaugga

SEQ ID NO: 648654 - RNA, 21 nt, Human
ccgucccggagagccagccgc

SEQ ID NO: 648655 - RNA, 21 nt, Human
ccucucugagggccagaggcu

SEQ ID NO: 648656 - RNA, 21 nt, Human
ccuggguccccggugcgggag

SEQ ID NO: 648657 - RNA, 21 nt, Human
cgacgcgggcagcgcggggcc

SEQ ID NO: 648658 - RNA, 18 nt, Human
cgacucgguggcgcugcc

SEQ ID NO: 648659 - RNA, 21 nt, Human
cgcgggcagcgcggggccgag

SEQ ID NO: 648660 - RNA, 20 nt, Human
cgggaggcagugcggcggcc

SEQ ID NO: 648661 - RNA, 22 nt, Human
cuagggucagacaauuccuuuu

SEQ ID NO: 648662 - RNA, 21 nt, Human
cucccccugaccccaucccua

SEQ ID NO: 648663 - RNA, 23 nt, Human
cugccucuagggucagacaauuc

SEQ ID NO: 648664 - RNA, 20 nt, Human
gagcugcgggcggagcgggc

SEQ ID NO: 648665 - RNA, 23 nt, Human
gcccggacgcuggccuggguccc

SEQ ID NO: 648666 - RNA, 21 nt, Human
gccgccgccuucugcagcgcu

SEQ ID NO: 648667 - RNA, 21 nt, Human
gccuggguccccggugcggga

SEQ ID NO: 648668 - RNA, 20 nt, Human
gcgggcgcgggucugcggag

SEQ ID NO: 648669 - RNA, 21 nt, Human
gcugcgggcggagcgggcgcg

SEQ ID NO: 648670 - RNA, 21 nt, Human
gcuggccuggguccccggugc

SEQ ID NO: 648671 - RNA, 19 nt, Human
ggcagaucaccaucuuggg

SEQ ID NO: 648672 - RNA, 21 nt, Human
ggccacggagucuguccggga

SEQ ID NO: 648673 - RNA, 18 nt, Human
gggaugcucagaguccug

SEQ ID NO: 648674 - RNA, 20 nt, Human
gggcguugcccggacgcugg

SEQ ID NO: 648675 - RNA, 19 nt, Human
ggggcacagacucugaaca

SEQ ID NO: 648676 - RNA, 21 nt, Human
gggggcugcucggugcccaga

SEQ ID NO: 648677 - RNA, 23 nt, Human
uagugcagugcagcaucugccuc

SEQ ID NO: 648678 - RNA, 25 nt, Human
uagugcaucucucuucugggugugu

SEQ ID NO: 648679 - RNA, 21 nt, Human
uauccacuccccagguccagg

SEQ ID NO: 648680 - RNA, 25 nt, Human
uccaagaaccuuuauuggaaaaaug

SEQ ID NO: 648681 - RNA, 21 nt, Human
uccaggggcacagacucugaa

SEQ ID NO: 648682 - RNA, 22 nt, Human
uccccaguuguuagugcaucuc

SEQ ID NO: 648683 - RNA, 22 nt, Human
ucccggagagccagccgccgcc

SEQ ID NO: 648684 - RNA, 20 nt, Human
ucugcagcgcuggccccgcu

SEQ ID NO: 648685 - RNA, 19 nt, Human
ucugcggagcccccagggc

SEQ ID NO: 648686 - RNA, 21 nt, Human
ucuugggcucccccugacccc

SEQ ID NO: 648687 - RNA, 26 nt, Human
ugcccggacgcuggccuggguccccg

SEQ ID NO: 648688 - RNA, 18 nt, Human
ugcggagcccccagggcu

SEQ ID NO: 648689 - RNA, 18 nt, Human
uggaagacauuggaguag

SEQ ID NO: 648690 - RNA, 18 nt, Human
uggaaggagauaucccau

SEQ ID NO: 648691 - RNA, 22 nt, Human
uggaaggagauaucccaucuga

SEQ ID NO: 648692 - RNA, 19 nt, Human
ugggagucucgggcagauc

SEQ ID NO: 648693 - RNA, 24 nt, Human
ugggagucucgggcagaucaccau

SEQ ID NO: 648694 - RNA, 25 nt, Human
uggucaggccucggggggcugcucg

SEQ ID NO: 648695 - RNA, 18 nt, Human
ugugggaguggcauuacc

SEQ ID NO: 648696 - RNA, 20 nt, Human
uuuauuggaaaaauguccaa

SEQ ID NO: 648697 - RNA, 22 nt, Human
uuuuuuuuuuuuuuuccaguuu

SEQ ID NO: 648698 - RNA, 23 nt, Human
uuuuuuuuuuuuuuuuuuuccag

SEQ ID NO: 648699 - RNA, 21 nt, Human
aacagcuauuauuuggugaag

SEQ ID NO: 648700 - RNA, 21 nt, Human
ccugcagcagccaaaauacaa

SEQ ID NO: 648701 - RNA, 22 nt, Human
cgccgguccaaaacacagaccc

SEQ ID NO: 648702 - RNA, 20 nt, Human
cgggcccgccuucccugucg

SEQ ID NO: 648703 - RNA, 18 nt, Human
cucgggcccgccuucccu

SEQ ID NO: 648704 - RNA, 22 nt, Human
cucgggcccgccuucccugucg

SEQ ID NO: 648705 - RNA, 22 nt, Human
gccaaaauacaaacagcuauua

SEQ ID NO: 648706 - RNA, 22 nt, Human
ggugaaguuuagcucagacacc

SEQ ID NO: 648707 - RNA, 24 nt, Human
uaaaauggcuccugcagcagccaa

SEQ ID NO: 648708 - RNA, 19 nt, Human
uagcucagacacccugcaa

SEQ ID NO: 648709 - RNA, 20 nt, Human
ucagacacccugcaaggaca

SEQ ID NO: 648710 - RNA, 20 nt, Human
ugcaaggacacccuaaccca

SEQ ID NO: 648711 - RNA, 21 nt, Human
ugcaaggacacccuaacccag

SEQ ID NO: 648712 - RNA, 21 nt, Human
ugcaaggacacccuaacccau

SEQ ID NO: 648713 - RNA, 19 nt, Human
uucaucuauugaaggaagg

SEQ ID NO: 648714 - RNA, 21 nt, Human
uucccugucgcgccauugggc

SEQ ID NO: 648715 - RNA, 20 nt, Human
aaaaacauccaaaacccucg

SEQ ID NO: 648716 - RNA, 19 nt, Human
aaaaagcuaagcaggaccc

SEQ ID NO: 648717 - RNA, 22 nt, Human
aaaagcccagggcagcagggua

SEQ ID NO: 648718 - RNA, 22 nt, Human
aaaauuuucaaagcaucucaca

SEQ ID NO: 648719 - RNA, 18 nt, Human
aaagcccagggcagcagg

SEQ ID NO: 648720 - RNA, 18 nt, Human
aaagcgccuuccaaacca

SEQ ID NO: 648721 - RNA, 21 nt, Human
aacccuggcuguccccgcuga

SEQ ID NO: 648722 - RNA, 21 nt, Human
aagcagggugucuggccaggg

SEQ ID NO: 648723 - RNA, 18 nt, Human
aagcauccaaaacucuga

SEQ ID NO: 648724 - RNA, 22 nt, Human
acaaacagcgucccagccccac

SEQ ID NO: 648725 - RNA, 22 nt, Human
acagaggcugauggagacccca

SEQ ID NO: 648726 - RNA, 21 nt, Human
acagcgucccagccccacccc

SEQ ID NO: 648727 - RNA, 20 nt, Human
acaucaaaacugcauccgga

SEQ ID NO: 648728 - RNA, 19 nt, Human
acccugagacaccccacag

SEQ ID NO: 648729 - RNA, 23 nt, Human
acccugcguccgcacagccgccu

SEQ ID NO: 648730 - RNA, 24 nt, Human
acccugcguccgcacagccgccuu

SEQ ID NO: 648731 - RNA, 18 nt, Human
accugcacggcaggggca

SEQ ID NO: 648732 - RNA, 23 nt, Human
accugcacggcaggggcagcccc

SEQ ID NO: 648733 - RNA, 25 nt, Human
acggggugggggcagagcgugcggu

SEQ ID NO: 648734 - RNA, 20 nt, Human
agaaggaaggggaucuccgc

SEQ ID NO: 648735 - RNA, 18 nt, Human
agacaccccacagaggcu

SEQ ID NO: 648736 - RNA, 19 nt, Human
agcaucucacaggccaaaa

SEQ ID NO: 648737 - RNA, 20 nt, Human
agccagaagugagggagcca

SEQ ID NO: 648738 - RNA, 18 nt, Human
agccauugcccaugaggg

SEQ ID NO: 648739 - RNA, 19 nt, Human
agcccuggcgaugcucagc

SEQ ID NO: 648740 - RNA, 23 nt, Human
agccucagcccggcccccucagc

SEQ ID NO: 648741 - RNA, 24 nt, Human
agcggccccuccaccugcggaagg

SEQ ID NO: 648742 - RNA, 20 nt, Human
agcgucccagccccaccccc

SEQ ID NO: 648743 - RNA, 22 nt, Human
agcguggaacaucuucccaugg

SEQ ID NO: 648744 - RNA, 23 nt, Human
aggcagcguggaacaucuuccca

SEQ ID NO: 648745 - RNA, 21 nt, Human
aggccaaaagcccagggcagc

SEQ ID NO: 648746 - RNA, 21 nt, Human
aggccccaguaccccccacuc

SEQ ID NO: 648747 - RNA, 20 nt, Human
aggccucgcagccacuccaa

SEQ ID NO: 648748 - RNA, 18 nt, Human
agggugucacggggucga

SEQ ID NO: 648749 - RNA, 19 nt, Human
agggugucuggccagggug

SEQ ID NO: 648750 - RNA, 19 nt, Human
auccucguccuccccacug

SEQ ID NO: 648751 - RNA, 18 nt, Human
caaaaagcuaagcaggac

SEQ ID NO: 648752 - RNA, 23 nt, Human
caaaacccucggggccagaucaa

SEQ ID NO: 648753 - RNA, 22 nt, Human
caaagcaucucacaggccaaaa

SEQ ID NO: 648754 - RNA, 19 nt, Human
cacagccucagcccggccc

SEQ ID NO: 648755 - RNA, 21 nt, Human
cacagccucagcccggccccc

SEQ ID NO: 648756 - RNA, 22 nt, Human
cacagccucagcccggcccccu

SEQ ID NO: 648757 - RNA, 19 nt, Human
cacaggccaaaaagcuaag

SEQ ID NO: 648758 - RNA, 22 nt, Human
cacccagaaggaaggggaucuc

SEQ ID NO: 648759 - RNA, 20 nt, Human
caccccaguccaagcagggu

SEQ ID NO: 648760 - RNA, 20 nt, Human
cacccugagacaccccacag

SEQ ID NO: 648761 - RNA, 21 nt, Human
caccgacugucagaaaacccg

SEQ ID NO: 648762 - RNA, 25 nt, Human
cagacuggcggcucccacugcagcc

SEQ ID NO: 648763 - RNA, 22 nt, Human
cagaggcugauggagaccccaa

SEQ ID NO: 648764 - RNA, 21 nt, Human
cagcacacgggggugggcagu

SEQ ID NO: 648765 - RNA, 20 nt, Human
caggauccacaaaugguuua

SEQ ID NO: 648766 - RNA, 20 nt, Human
caggccaaaaagcuaagcag

SEQ ID NO: 648767 - RNA, 20 nt, Human
caggccccaguaccccccac

SEQ ID NO: 648768 - RNA, 19 nt, Human
cauccuaaaaacauccaaa

SEQ ID NO: 648769 - RNA, 23 nt, Human
caucucugccacaccugcagggg

SEQ ID NO: 648770 - RNA, 20 nt, Human
ccaccuggagcagguuccug

SEQ ID NO: 648771 - RNA, 24 nt, Human
ccacugcagccagaagugagggag

SEQ ID NO: 648772 - RNA, 22 nt, Human
ccacugcccacccugagacacc

SEQ ID NO: 648773 - RNA, 28 nt, Human
ccacugcccacccugagacaccccacag

SEQ ID NO: 648774 - RNA, 19 nt, Human
ccagaggcugacaagagca

SEQ ID NO: 648775 - RNA, 22 nt, Human
ccagcagagcccaagaguggcg

SEQ ID NO: 648776 - RNA, 24 nt, Human
ccccaaggacucgaggagaaccag

SEQ ID NO: 648777 - RNA, 25 nt, Human
ccccaaugcccgugccccaucucug

SEQ ID NO: 648778 - RNA, 18 nt, Human
ccccacccccacugccca

SEQ ID NO: 648779 - RNA, 25 nt, Human
ccccacccccacugcccacccugag

SEQ ID NO: 648780 - RNA, 26 nt, Human
ccccacccccacugcccacccugaga

SEQ ID NO: 648781 - RNA, 20 nt, Human
ccccagcccucccccgugcc

SEQ ID NO: 648782 - RNA, 19 nt, Human
ccccaucucugccacaccu

SEQ ID NO: 648783 - RNA, 21 nt, Human
ccccaucucugccacaccugc

SEQ ID NO: 648784 - RNA, 19 nt, Human
cccguguguccaccuggag

SEQ ID NO: 648785 - RNA, 19 nt, Human
cccugcguccgcacagccg

SEQ ID NO: 648786 - RNA, 21 nt, Human
cccuggacccgagaccgucuc

SEQ ID NO: 648787 - RNA, 19 nt, Human
ccuaaaaacauccaaaacc

SEQ ID NO: 648788 - RNA, 22 nt, Human
ccuaaaaacauccaaaacccuc

SEQ ID NO: 648789 - RNA, 22 nt, Human
ccucuugcaacggggugggggc

SEQ ID NO: 648790 - RNA, 25 nt, Human
ccuggaagauggacaucaaaacugg

SEQ ID NO: 648791 - RNA, 21 nt, Human
cggaggugcagucugcaccca

SEQ ID NO: 648792 - RNA, 22 nt, Human
cggcugcggucagugcaaggcu

SEQ ID NO: 648793 - RNA, 23 nt, Human
cucaaagcgccuuccaaaccaga

SEQ ID NO: 648794 - RNA, 20 nt, Human
cucacaggccaaaaagcuaa

SEQ ID NO: 648795 - RNA, 22 nt, Human
cucacaggccaaaaagcuaagc

SEQ ID NO: 648796 - RNA, 19 nt, Human
cucccccgugccagacccc

SEQ ID NO: 648797 - RNA, 19 nt, Human
cuccugcggucaccccagc

SEQ ID NO: 648798 - RNA, 20 nt, Human
cucgcagccacuccaaaggc

SEQ ID NO: 648799 - RNA, 21 nt, Human
cucgcagccacuccaaaggcc

SEQ ID NO: 648800 - RNA, 18 nt, Human
cugccacaccugcagggg

SEQ ID NO: 648801 - RNA, 25 nt, Human
cugccacaccugcaggggccacggc

SEQ ID NO: 648802 - RNA, 19 nt, Human
cugccacagcagcggggac

SEQ ID NO: 648803 - RNA, 18 nt, Human
cuggagcagguuccugca

SEQ ID NO: 648804 - RNA, 19 nt, Human
cuggagcagguuccugcag

SEQ ID NO: 648805 - RNA, 18 nt, Human
gaagugagggagccagca

SEQ ID NO: 648806 - RNA, 25 nt, Human
gagcacggugacccugcguccgcac

SEQ ID NO: 648807 - RNA, 19 nt, Human
gcaggggcagcccccucca

SEQ ID NO: 648808 - RNA, 18 nt, Human
gccacggcacccacccuc

SEQ ID NO: 648809 - RNA, 18 nt, Human
gccccacccccacugccc

SEQ ID NO: 648810 - RNA, 22 nt, Human
gcuagcccuggcgaugcucagc

SEQ ID NO: 648811 - RNA, 21 nt, Human
gcugacauggugugaccucuu

SEQ ID NO: 648812 - RNA, 20 nt, Human
ggaaaacucgaggaggaggc

SEQ ID NO: 648813 - RNA, 23 nt, Human
ggacaggaugcggcaggccccag

SEQ ID NO: 648814 - RNA, 18 nt, Human
ggacucaaagcgccuucc

SEQ ID NO: 648815 - RNA, 24 nt, Human
ggaggucagggcccaccagugccc

SEQ ID NO: 648816 - RNA, 18 nt, Human
ggcaguggacaggacagg

SEQ ID NO: 648817 - RNA, 19 nt, Human
ggccugggggccggcugcg

SEQ ID NO: 648818 - RNA, 22 nt, Human
ggcgcucugccacagcagcggg

SEQ ID NO: 648819 - RNA, 22 nt, Human
ggugugaccucuugcaacgggg

SEQ ID NO: 648820 - RNA, 20 nt, Human
gugccagaccccuggguagc

SEQ ID NO: 648821 - RNA, 27 nt, Human
uaaaaacauccaaaacccucggggcca

SEQ ID NO: 648822 - RNA, 20 nt, Human
uaaggcgccaucggccagga

SEQ ID NO: 648823 - RNA, 23 nt, Human
uaccaggcagagaaagccccagc

SEQ ID NO: 648824 - RNA, 27 nt, Human
uaccaggcagagaaagccccagcccuc

SEQ ID NO: 648825 - RNA, 25 nt, Human
uagcagaggccaccccaaucaacgg

SEQ ID NO: 648826 - RNA, 20 nt, Human
ucagaaaacccggagcacgg

SEQ ID NO: 648827 - RNA, 18 nt, Human
uccaagcagggugucugg

SEQ ID NO: 648828 - RNA, 19 nt, Human
uccaagcagggugucuggc

SEQ ID NO: 648829 - RNA, 20 nt, Human
uccaccugcggaagggaaga

SEQ ID NO: 648830 - RNA, 19 nt, Human
ucccacauccucguccucc

SEQ ID NO: 648831 - RNA, 21 nt, Human
ucccacauccucguccucccc

SEQ ID NO: 648832 - RNA, 20 nt, Human
ucccacugcagccagaagug

SEQ ID NO: 648833 - RNA, 19 nt, Human
ucccagccccacccccacu

SEQ ID NO: 648834 - RNA, 19 nt, Human
ucccauggccacggccccg

SEQ ID NO: 648835 - RNA, 20 nt, Human
ucccccgugccagaccccug

SEQ ID NO: 648836 - RNA, 20 nt, Human
uccgcacagccgccuuuccg

SEQ ID NO: 648837 - RNA, 22 nt, Human
uccgcacagccgccuuuccgug

SEQ ID NO: 648838 - RNA, 20 nt, Human
uccgcucacaggccuuacag

SEQ ID NO: 648839 - RNA, 18 nt, Human
uccugcggucaccccagc

SEQ ID NO: 648840 - RNA, 19 nt, Human
ucgcggcugcuggcccgug

SEQ ID NO: 648841 - RNA, 21 nt, Human
ucgcuggcaucugccacgucc

SEQ ID NO: 648842 - RNA, 23 nt, Human
ucggggccagaucaacccuggag

SEQ ID NO: 648843 - RNA, 18 nt, Human
ucugccacagcagcgggg

SEQ ID NO: 648844 - RNA, 19 nt, Human
ugacaagagcagcaugagc

SEQ ID NO: 648845 - RNA, 21 nt, Human
ugacauggugugaccucuugc

SEQ ID NO: 648846 - RNA, 23 nt, Human
ugagcacaaacagcgucccagcc

SEQ ID NO: 648847 - RNA, 21 nt, Human
ugaggcaauuaccgcuacaaa

SEQ ID NO: 648848 - RNA, 21 nt, Human
ugagggagccagcacacgggg

SEQ ID NO: 648849 - RNA, 21 nt, Human
ugauggagaccccaaugcccg

SEQ ID NO: 648850 - RNA, 18 nt, Human
ugcggcaggccccaguac

SEQ ID NO: 648851 - RNA, 25 nt, Human
ugcucagccgggcuggacacagcgg

SEQ ID NO: 648852 - RNA, 18 nt, Human
ugcuggcccgugugucca

SEQ ID NO: 648853 - RNA, 22 nt, Human
ugcuucaggccaaaagcccagg

SEQ ID NO: 648854 - RNA, 22 nt, Human
uggaagauggacaucaaaacug

SEQ ID NO: 648855 - RNA, 21 nt, Human
uggacaggacaggaugcggca

SEQ ID NO: 648856 - RNA, 24 nt, Human
uggagccgcacggaagcauccaaa

SEQ ID NO: 648857 - RNA, 24 nt, Human
uggcgugcagacugcaugugcaca

SEQ ID NO: 648858 - RNA, 20 nt, Human
ugggcaguggacaggacagg

SEQ ID NO: 648859 - RNA, 19 nt, Human
uguaccuugggcucagacg

SEQ ID NO: 648860 - RNA, 22 nt, Human
ugucauccuaaaaacauccaaa

SEQ ID NO: 648861 - RNA, 20 nt, Human
uuuuuuuucaggauccacaa

SEQ ID NO: 648862 - RNA, 19 nt, Human
uuuuuuuuuuucaggaucc

SEQ ID NO: 648863 - RNA, 23 nt, Human
uuuuuuuuuuuuuuuuuuucagg

SEQ ID NO: 648864 - RNA, 23 nt, Human
aaacacagucaccagcacuauac

SEQ ID NO: 648865 - RNA, 18 nt, Human
agacagcccuggacuggg

SEQ ID NO: 648866 - RNA, 18 nt, Human
agacagcccuggacuggg

SEQ ID NO: 648867 - RNA, 18 nt, Human
caccagcacuauacucac

SEQ ID NO: 648868 - RNA, 21 nt, Human
caccagcacuauacucacucc

SEQ ID NO: 648869 - RNA, 23 nt, Human
caccagcacuauacucacuccua

SEQ ID NO: 648870 - RNA, 26 nt, Human
cacccuuggccccgccucccugaccu

SEQ ID NO: 648871 - RNA, 22 nt, Human
ccaaaccagccuuccuuccucc

SEQ ID NO: 648872 - RNA, 25 nt, Human
ccccaccaaaccagccuuccuuccu

SEQ ID NO: 648873 - RNA, 21 nt, Human
ccccccgacaccaugcccucc

SEQ ID NO: 648874 - RNA, 19 nt, Human
ccccgacaccaugcccucc

SEQ ID NO: 648875 - RNA, 19 nt, Human
ccggccgcugcuccugucc

SEQ ID NO: 648876 - RNA, 23 nt, Human
ccucccugaccuccccacuaccc

SEQ ID NO: 648877 - RNA, 21 nt, Human
ccuggacuggggcuaugaaac

SEQ ID NO: 648878 - RNA, 18 nt, Human
ccuguccugaguccaaag

SEQ ID NO: 648879 - RNA, 21 nt, Human
cgccgccgagcgcccucccca

SEQ ID NO: 648880 - RNA, 23 nt, Human
cgccgccgagcgcccuccccacc

SEQ ID NO: 648881 - RNA, 27 nt, Human
cuccccaccggccgcugcuccugucca

SEQ ID NO: 648882 - RNA, 20 nt, Human
cuccccacuaccccaccaaa

SEQ ID NO: 648883 - RNA, 22 nt, Human
cuggcuggugcucugugguggg

SEQ ID NO: 648884 - RNA, 23 nt, Human
gaccuccccacuaccccaccaaa

SEQ ID NO: 648885 - RNA, 22 nt, Human
gccgccgagcgcccuccccacc

SEQ ID NO: 648886 - RNA, 21 nt, Human
gccucccugaccuccccacua

SEQ ID NO: 648887 - RNA, 18 nt, Human
gcgaaggggagaggaggg

SEQ ID NO: 648888 - RNA, 22 nt, Human
ggacagcgaaggggagaggagg

SEQ ID NO: 648889 - RNA, 21 nt, Human
ggagacaagcuccugggugcu

SEQ ID NO: 648890 - RNA, 19 nt, Human
ggcccuguccugaguccaa

SEQ ID NO: 648891 - RNA, 28 nt, Human
uccagggggaggggacagcgaaggggag

SEQ ID NO: 648892 - RNA, 22 nt, Human
ucccugaccuccccacuacccc

SEQ ID NO: 648893 - RNA, 23 nt, Human
uccucgguccuccgguccucccg

SEQ ID NO: 648894 - RNA, 20 nt, Human
uccugaguccaaagauuccc

SEQ ID NO: 648895 - RNA, 21 nt, Human
uccugaguccaaagauuccca

SEQ ID NO: 648896 - RNA, 18 nt, Human
uccuggagacaagcuccu

SEQ ID NO: 648897 - RNA, 22 nt, Human
uccuggagacaagcuccugggu

SEQ ID NO: 648898 - RNA, 21 nt, Human
ucuuucuguccucgguccucc

SEQ ID NO: 648899 - RNA, 18 nt, Human
ugaccuccccacuacccc

SEQ ID NO: 648900 - RNA, 21 nt, Human
ugaccuccccacuaccccacc

SEQ ID NO: 648901 - RNA, 18 nt, Human
ugaguaggggacggggcc

SEQ ID NO: 648902 - RNA, 24 nt, Human
ugcaccuggcccuguccugagucc

SEQ ID NO: 648903 - RNA, 19 nt, Human
uuuuuuuuuuuuggagucu

SEQ ID NO: 648904 - RNA, 18 nt, Human
uuuuuuuuuuuuuuuuug

SEQ ID NO: 648905 - RNA, 19 nt, Human
uuuuuuuuuuuuuuuuugg

SEQ ID NO: 648906 - RNA, 24 nt, Human
aaaguucugggauuccgaguguga

SEQ ID NO: 648907 - RNA, 22 nt, Human
aaccagguggcuugacgaagac

SEQ ID NO: 648908 - RNA, 21 nt, Human
accagguggcuugacgaagac

SEQ ID NO: 648909 - RNA, 24 nt, Human
acuauauuguccaggcuggucuug

SEQ ID NO: 648910 - RNA, 24 nt, Human
caaaguucugggauuccgagugug

SEQ ID NO: 648911 - RNA, 27 nt, Human
caagugaucuuccugccuugaccuccc

SEQ ID NO: 648912 - RNA, 24 nt, Human
cacuauauuguccaggcuggucuu

SEQ ID NO: 648913 - RNA, 21 nt, Human
cagcugaaguucccacugcca

SEQ ID NO: 648914 - RNA, 24 nt, Human
ccaaaguucugggauuccgagugu

SEQ ID NO: 648915 - RNA, 24 nt, Human
ccaggcuggucuugaacuccuggg

SEQ ID NO: 648916 - RNA, 22 nt, Human
ccugggcucaagugaucuuccu

SEQ ID NO: 648917 - RNA, 23 nt, Human
ccugggcucaagugaucuuccug

SEQ ID NO: 648918 - RNA, 21 nt, Human
ccuguaguauguggaccccuc

SEQ ID NO: 648919 - RNA, 19 nt, Human
cgagugugagucaagugcu

SEQ ID NO: 648920 - RNA, 23 nt, Human
cucaagugaucuuccugccuuga

SEQ ID NO: 648921 - RNA, 25 nt, Human
cuccugggcucaagugaucuuccug

SEQ ID NO: 648922 - RNA, 22 nt, Human
cuuccugccuugaccucccaaa

SEQ ID NO: 648923 - RNA, 20 nt, Human
gccacggaaaugucaagaug

SEQ ID NO: 648924 - RNA, 18 nt, Human
ggcuggucuugaacuccu

SEQ ID NO: 648925 - RNA, 22 nt, Human
gggcucaagugaucuuccugcc

SEQ ID NO: 648926 - RNA, 24 nt, Human
gggggucucacuauauuguccagg

SEQ ID NO: 648927 - RNA, 19 nt, Human
guagagaugggggucucac

SEQ ID NO: 648928 - RNA, 22 nt, Human
guggaccccuccauccuggucc

SEQ ID NO: 648929 - RNA, 23 nt, Human
uaguauguggaccccuccauccu

SEQ ID NO: 648930 - RNA, 24 nt, Human
uauauuguccaggcuggucuugaa

SEQ ID NO: 648931 - RNA, 22 nt, Human
ucaauggccgucuguccccucu

SEQ ID NO: 648932 - RNA, 18 nt, Human
ucccaaaguucugggauu

SEQ ID NO: 648933 - RNA, 20 nt, Human
uccugggcucaagugaucuu

SEQ ID NO: 648934 - RNA, 22 nt, Human
uccugggcucaagugaucuucc

SEQ ID NO: 648935 - RNA, 24 nt, Human
uccugggcucaagugaucuuccug

SEQ ID NO: 648936 - RNA, 22 nt, Human
ucucacuauauuguccaggcug

SEQ ID NO: 648937 - RNA, 23 nt, Human
ucucacuauauuguccaggcugg

SEQ ID NO: 648938 - RNA, 22 nt, Human
ucuugaacuccugggcucaagu

SEQ ID NO: 648939 - RNA, 23 nt, Human
ucuugaacuccugggcucaagug

SEQ ID NO: 648940 - RNA, 18 nt, Human
ugacaguaacuguggcaa

SEQ ID NO: 648941 - RNA, 22 nt, Human
ugaucuuccugccuugaccucc

SEQ ID NO: 648942 - RNA, 24 nt, Human
ugggcucaagugaucuuccugccu

SEQ ID NO: 648943 - RNA, 24 nt, Human
uguccaggcuggucuugaacuccu

SEQ ID NO: 648944 - RNA, 20 nt, Human
ugugaauuuccaccuccugc

SEQ ID NO: 648945 - RNA, 24 nt, Human
uuguagagaugggggucucacuau

SEQ ID NO: 648946 - RNA, 25 nt, Human
uuuguagagaugggggucucacuau

SEQ ID NO: 648947 - RNA, 20 nt, Human
uuuuuuguagagaugggggu

SEQ ID NO: 648948 - RNA, 29 nt, Human
uuuuuuuuuuguagagaugggggucucaa

SEQ ID NO: 648949 - RNA, 19 nt, Human
uuuuuuuuuuuuuuuuugu

SEQ ID NO: 648950 - RNA, 26 nt, Human
uuuuuuuuuuuuuuuuuguagagaug

SEQ ID NO: 648951 - RNA, 22 nt, Human
aaaagcuagcccggggcuugag

SEQ ID NO: 648952 - RNA, 22 nt, Human
aaaggcaucuaauauuccagga

SEQ ID NO: 648953 - RNA, 19 nt, Human
aaccauccuccugagcacc

SEQ ID NO: 648954 - RNA, 24 nt, Human
aaccccgagccacccgggccggga

SEQ ID NO: 648955 - RNA, 21 nt, Human
aagaaaagggaaguggcauuc

SEQ ID NO: 648956 - RNA, 22 nt, Human
aagcagcagggccagauccaga

SEQ ID NO: 648957 - RNA, 18 nt, Human
aagcgcgccagcgcggag

SEQ ID NO: 648958 - RNA, 23 nt, Human
aauucagaacuuuuucacccgga

SEQ ID NO: 648959 - RNA, 26 nt, Human
agaagaaaagggaaguggcauuccag

SEQ ID NO: 648960 - RNA, 19 nt, Human
aggaccaggcgagguuccu

SEQ ID NO: 648961 - RNA, 19 nt, Human
aguuaaacggggaguuuuc

SEQ ID NO: 648962 - RNA, 23 nt, Human
aucagaucuuagaguuauacaau

SEQ ID NO: 648963 - RNA, 18 nt, Human
auggcaauaaaaaauaua

SEQ ID NO: 648964 - RNA, 19 nt, Human
auggcaauaaaaaauauac

SEQ ID NO: 648965 - RNA, 18 nt, Human
auggccgugcacuccgcc

SEQ ID NO: 648966 - RNA, 22 nt, Human
caaccccgagccacccgggccc

SEQ ID NO: 648967 - RNA, 19 nt, Human
caccgcggucaggcccagc

SEQ ID NO: 648968 - RNA, 22 nt, Human
cacugaaucacuuuucuucucc

SEQ ID NO: 648969 - RNA, 19 nt, Human
cagaaguccaaaagacgaa

SEQ ID NO: 648970 - RNA, 21 nt, Human
caggcgacagcccccagcgcc

SEQ ID NO: 648971 - RNA, 22 nt, Human
caggguagauccagagcugcgc

SEQ ID NO: 648972 - RNA, 20 nt, Human
cauggccgugcacuccgccc

SEQ ID NO: 648973 - RNA, 21 nt, Human
ccacccgggccgggauugcgc

SEQ ID NO: 648974 - RNA, 21 nt, Human
cccauggccgugcacuccgcc

SEQ ID NO: 648975 - RNA, 22 nt, Human
ccccauggccgugcacuccgcc

SEQ ID NO: 648976 - RNA, 26 nt, Human
cccccagcgccaccgcggucaggccc

SEQ ID NO: 648977 - RNA, 18 nt, Human
cccccuugcaggauuuca

SEQ ID NO: 648978 - RNA, 19 nt, Human
cccggaacuggagaaggag

SEQ ID NO: 648979 - RNA, 18 nt, Human
ccgcagguugccgcugcg

SEQ ID NO: 648980 - RNA, 22 nt, Human
ccggggcuugagaagaaaaggg

SEQ ID NO: 648981 - RNA, 23 nt, Human
ccucgcucaccggcacccccuug

SEQ ID NO: 648982 - RNA, 18 nt, Human
cggcgccaggcgacagcc

SEQ ID NO: 648983 - RNA, 21 nt, Human
cgugcacucugcacuugugca

SEQ ID NO: 648984 - RNA, 20 nt, Human
cuccaggccgugcacucugc

SEQ ID NO: 648985 - RNA, 19 nt, Human
cuccgucauuagcugaggg

SEQ ID NO: 648986 - RNA, 23 nt, Human
cucuuucucuucuucucuuucuc

SEQ ID NO: 648987 - RNA, 19 nt, Human
cugaaaucacugaaucacu

SEQ ID NO: 648988 - RNA, 19 nt, Human
cuuagaguuauacaaucag

SEQ ID NO: 648989 - RNA, 21 nt, Human
cuuccagcccacccacucuuc

SEQ ID NO: 648990 - RNA, 20 nt, Human
gacauucuuccagcccaccc

SEQ ID NO: 648991 - RNA, 23 nt, Human
gagaagaaaagggaaguggcauu

SEQ ID NO: 648992 - RNA, 19 nt, Human
gagaagcagcagggccaga

SEQ ID NO: 648993 - RNA, 23 nt, Human
gauaaacggagaagcaggagaaa

SEQ ID NO: 648994 - RNA, 20 nt, Human
gcagcagccgccggcgccgc

SEQ ID NO: 648995 - RNA, 23 nt, Human
gccccauggccgugcacuccgcc

SEQ ID NO: 648996 - RNA, 19 nt, Human
gccgugcacuccgccucgc

SEQ ID NO: 648997 - RNA, 19 nt, Human
gcgcggcgccaggcgacag

SEQ ID NO: 648998 - RNA, 22 nt, Human
gcugcgccacugugcccaccug

SEQ ID NO: 648999 - RNA, 22 nt, Human
ggagaagcaggagaaagaacua

SEQ ID NO: 649000 - RNA, 21 nt, Human
gggaguuuucagaauccuguc

SEQ ID NO: 649001 - RNA, 25 nt, Human
gggccagauccagaucuauggaaaa

SEQ ID NO: 649002 - RNA, 19 nt, Human
ggucagggaaaucaggacc

SEQ ID NO: 649003 - RNA, 24 nt, Human
gguugaucacaagccaaaaccugg

SEQ ID NO: 649004 - RNA, 22 nt, Human
gucagggugucaccaucgcagg

SEQ ID NO: 649005 - RNA, 19 nt, Human
uaaaaggcaucuaauauuc

SEQ ID NO: 649006 - RNA, 23 nt, Human
ucaaaggacaaaauggcaauaaa

SEQ ID NO: 649007 - RNA, 23 nt, Human
ucaaguguugucauuuuugagaa

SEQ ID NO: 649008 - RNA, 21 nt, Human
ucacaagccaaaaccuguccc

SEQ ID NO: 649009 - RNA, 20 nt, Human
ucacugaaucacuuuucuuu

SEQ ID NO: 649010 - RNA, 22 nt, Human
ucagaucuuagaguuauacaau

SEQ ID NO: 649011 - RNA, 23 nt, Human
ucaggcccagcgcggcaaccccg

SEQ ID NO: 649012 - RNA, 23 nt, Human
ucaguuaaaaaauagauauuggg

SEQ ID NO: 649013 - RNA, 18 nt, Human
uccaaaagacgaaaaaug

SEQ ID NO: 649014 - RNA, 22 nt, Human
uccagccauauuuggggugcaa

SEQ ID NO: 649015 - RNA, 18 nt, Human
uccuccaugacuacacaa

SEQ ID NO: 649016 - RNA, 24 nt, Human
ucgcaggucagggaaaucaggacc

SEQ ID NO: 649017 - RNA, 26 nt, Human
ucucaguucugaaacaccaugcuuca

SEQ ID NO: 649018 - RNA, 19 nt, Human
ucuuccucuuucucuucuu

SEQ ID NO: 649019 - RNA, 18 nt, Human
ucuuucucuucuucucuu

SEQ ID NO: 649020 - RNA, 21 nt, Human
ugacuacacaaccauccuccu

SEQ ID NO: 649021 - RNA, 22 nt, Human
ugagaacauuuuuaaaaggcau

SEQ ID NO: 649022 - RNA, 20 nt, Human
ugagaagaaaagggaagugg

SEQ ID NO: 649023 - RNA, 22 nt, Human
ugagacaccagaaguccaaaag

SEQ ID NO: 649024 - RNA, 26 nt, Human
ugcacuccgccucgcucaccggcacc

SEQ ID NO: 649025 - RNA, 22 nt, Human
ugcacugggacauugaagcauu

SEQ ID NO: 649026 - RNA, 18 nt, Human
ugcagcagccgccggcgc

SEQ ID NO: 649027 - RNA, 26 nt, Human
uguuucccuccugguugaucacaagc

SEQ ID NO: 649028 - RNA, 20 nt, Human
uuaaagguuuucaguagucu

SEQ ID NO: 649029 - RNA, 24 nt, Human
uuuuuuuuuuuuuuuuuuucaaag

SEQ ID NO: 649030 - RNA, 23 nt, Human
aaaaagguacucuacagcagcug

SEQ ID NO: 649031 - RNA, 23 nt, Human
aaacauuuuaaacaaauaaaguc

SEQ ID NO: 649032 - RNA, 24 nt, Human
aaagcaaaagcaaaaucaaacccc

SEQ ID NO: 649033 - RNA, 19 nt, Human
aaagcaaaaucaaacccac

SEQ ID NO: 649034 - RNA, 23 nt, Human
aacccacaucaaaagacccacag

SEQ ID NO: 649035 - RNA, 20 nt, Human
aacccugugcaagggugccu

SEQ ID NO: 649036 - RNA, 23 nt, Human
aagcaaaagcaaaaucaaaccca

SEQ ID NO: 649037 - RNA, 18 nt, Human
acaggguacggggcaccg

SEQ ID NO: 649038 - RNA, 25 nt, Human
acccacucgcccucccuucuuaguu

SEQ ID NO: 649039 - RNA, 23 nt, Human
acccagagcuucugaggaugcac

SEQ ID NO: 649040 - RNA, 21 nt, Human
acccugggacccccagguggc

SEQ ID NO: 649041 - RNA, 23 nt, Human
acccugggccgggcaccagcccu

SEQ ID NO: 649042 - RNA, 22 nt, Human
acccuggguccagagccccggc

SEQ ID NO: 649043 - RNA, 19 nt, Human
acuguacaagccacaaggc

SEQ ID NO: 649044 - RNA, 23 nt, Human
agaaaagcaaaagcaaaaucaaa

SEQ ID NO: 649045 - RNA, 21 nt, Human
agaaauggcaaaggcgguggc

SEQ ID NO: 649046 - RNA, 20 nt, Human
agaaugugacccaccugaaa

SEQ ID NO: 649047 - RNA, 25 nt, Human
agacaaauauauauauauguaugua

SEQ ID NO: 649048 - RNA, 24 nt, Human
agagaguuaacuucaagcucaaag

SEQ ID NO: 649049 - RNA, 22 nt, Human
agaguuaacuucaagcucaaag

SEQ ID NO: 649050 - RNA, 23 nt, Human
agcacccgucccaccccgagcag

SEQ ID NO: 649051 - RNA, 21 nt, Human
aggagaccucugcaagcugcg

SEQ ID NO: 649052 - RNA, 20 nt, Human
aggcgguggcaggugcuggg

SEQ ID NO: 649053 - RNA, 21 nt, Human
aguuggcaccagguggcuguc

SEQ ID NO: 649054 - RNA, 22 nt, Human
auguauguauauauauuaaaca

SEQ ID NO: 649055 - RNA, 19 nt, Human
caaaagacccacagaagac

SEQ ID NO: 649056 - RNA, 22 nt, Human
caaaagacccacagaagacuaa

SEQ ID NO: 649057 - RNA, 23 nt, Human
caaaauaauaaggggguaaugua

SEQ ID NO: 649058 - RNA, 23 nt, Human
caagcucaaagaaauggcaaagg

SEQ ID NO: 649059 - RNA, 22 nt, Human
caaggcaaacucaucaaucucc

SEQ ID NO: 649060 - RNA, 18 nt, Human
cacccgucccaccccgag

SEQ ID NO: 649061 - RNA, 22 nt, Human
cacccgucccaccccgagcaga

SEQ ID NO: 649062 - RNA, 25 nt, Human
cacccgucccaccccgagcagauug

SEQ ID NO: 649063 - RNA, 20 nt, Human
caccggcagccaggaugggu

SEQ ID NO: 649064 - RNA, 22 nt, Human
caccugccacccccaccacccu

SEQ ID NO: 649065 - RNA, 24 nt, Human
cacgugugcacaugugcccaggga

SEQ ID NO: 649066 - RNA, 21 nt, Human
cagagccccggcuggggugcu

SEQ ID NO: 649067 - RNA, 19 nt, Human
cagcuagaaaagcaaaagc

SEQ ID NO: 649068 - RNA, 24 nt, Human
caggugcugggguacgcuacgugg

SEQ ID NO: 649069 - RNA, 22 nt, Human
ccacccccaccacccugggacc

SEQ ID NO: 649070 - RNA, 24 nt, Human
ccacggaggaugagggaagaccag

SEQ ID NO: 649071 - RNA, 22 nt, Human
cccacagaagacuaaagaaaug

SEQ ID NO: 649072 - RNA, 24 nt, Human
cccacaucaaaagacccacagaag

SEQ ID NO: 649073 - RNA, 19 nt, Human
cccaccacccugggacccu

SEQ ID NO: 649074 - RNA, 19 nt, Human
ccccaucccacccugcccc

SEQ ID NO: 649075 - RNA, 22 nt, Human
cccccaccacccugggaccccc

SEQ ID NO: 649076 - RNA, 22 nt, Human
cccccgaagacacccagauugc

SEQ ID NO: 649077 - RNA, 18 nt, Human
ccccgcggccccggcgcc

SEQ ID NO: 649078 - RNA, 22 nt, Human
cccugccccgaaaaaaaaaacc

SEQ ID NO: 649079 - RNA, 22 nt, Human
cccugggacccccagguggcug

SEQ ID NO: 649080 - RNA, 18 nt, Human
ccgccgccgccgcugcuc

SEQ ID NO: 649081 - RNA, 23 nt, Human
ccgccgccgccgcugcucuccaa

SEQ ID NO: 649082 - RNA, 26 nt, Human
ccggcgccggcgccuggagccugguu

SEQ ID NO: 649083 - RNA, 22 nt, Human
ccggcgccuggagccugguucc

SEQ ID NO: 649084 - RNA, 24 nt, Human
ccugccccgaaaaaaaaaaccguc

SEQ ID NO: 649085 - RNA, 21 nt, Human
cgaaaaaaaaaaccgucaaaa

SEQ ID NO: 649086 - RNA, 20 nt, Human
cgaagacacccagauugcac

SEQ ID NO: 649087 - RNA, 28 nt, Human
cgacucccaaggcaaacucaucaaucuc

SEQ ID NO: 649088 - RNA, 23 nt, Human
cgcccggggugccgccgccgccg

SEQ ID NO: 649089 - RNA, 18 nt, Human
cucccugaggggcccgcu

SEQ ID NO: 649090 - RNA, 25 nt, Human
cugcagcccuuccagacgggccccc

SEQ ID NO: 649091 - RNA, 21 nt, Human
cugccccgaaaaaaaaaaccg

SEQ ID NO: 649092 - RNA, 21 nt, Human
cuggagccugguuccugcugc

SEQ ID NO: 649093 - RNA, 21 nt, Human
cuggcacacccagagcuucug

SEQ ID NO: 649094 - RNA, 23 nt, Human
cugguuaccuggagacacagggg

SEQ ID NO: 649095 - RNA, 18 nt, Human
cuuccccaucccacccug

SEQ ID NO: 649096 - RNA, 20 nt, Human
cuugguuucugccuuggggu

SEQ ID NO: 649097 - RNA, 24 nt, Human
cuugugccugggcacgugugcaca

SEQ ID NO: 649098 - RNA, 25 nt, Human
gaaaagcaaaagcaaaaucaaaccc

SEQ ID NO: 649099 - RNA, 23 nt, Human
gaacuuggagcagagcccccugg

SEQ ID NO: 649100 - RNA, 18 nt, Human
gacccacucgcccucccu

SEQ ID NO: 649101 - RNA, 21 nt, Human
gagcagauuggagcucaaugu

SEQ ID NO: 649102 - RNA, 21 nt, Human
gaugucgggaagggggaaaga

SEQ ID NO: 649103 - RNA, 19 nt, Human
gcagccaggaugggugcug

SEQ ID NO: 649104 - RNA, 20 nt, Human
gcagcccuuccagacgggcc

SEQ ID NO: 649105 - RNA, 25 nt, Human
gcaggcggcucagugaguuggcacc

SEQ ID NO: 649106 - RNA, 21 nt, Human
gcagggagcgaagucgccucc

SEQ ID NO: 649107 - RNA, 18 nt, Human
gccacccccaccacccug

SEQ ID NO: 649108 - RNA, 24 nt, Human
gccacccccaccacccugggaccc

SEQ ID NO: 649109 - RNA, 27 nt, Human
gccacccccaccacccugggaccccca

SEQ ID NO: 649110 - RNA, 26 nt, Human
gcgccuggagccugguuccugcugcg

SEQ ID NO: 649111 - RNA, 22 nt, Human
ggaaagaggagccuguguugga

SEQ ID NO: 649112 - RNA, 22 nt, Human
ggaaggaaaguaacagaacagc

SEQ ID NO: 649113 - RNA, 18 nt, Human
ggaagggggaaagaggag

SEQ ID NO: 649114 - RNA, 19 nt, Human
ggagacacaggggaauugc

SEQ ID NO: 649115 - RNA, 21 nt, Human
ggagaugcagagagagcuaga

SEQ ID NO: 649116 - RNA, 22 nt, Human
ggaucuguacaagggaaacauu

SEQ ID NO: 649117 - RNA, 22 nt, Human
gggaagcacccgucccaccccg

SEQ ID NO: 649118 - RNA, 23 nt, Human
gggaauugcugcagcccuuccag

SEQ ID NO: 649119 - RNA, 20 nt, Human
gggcacagguggaaggaaag

SEQ ID NO: 649120 - RNA, 22 nt, Human
gggcacgugugcacaugugccc

SEQ ID NO: 649121 - RNA, 20 nt, Human
gggccagacagaauuccuaa

SEQ ID NO: 649122 - RNA, 20 nt, Human
gggcccccgaagacacccag

SEQ ID NO: 649123 - RNA, 29 nt, Human
gggugcuuauuugccugcagacaguucuu

SEQ ID NO: 649124 - RNA, 23 nt, Human
ggguggggucgagggucccaggg

SEQ ID NO: 649125 - RNA, 20 nt, Human
gggugucggggggugggaga

SEQ ID NO: 649126 - RNA, 24 nt, Human
guccucuggcacacccagagcuuc

SEQ ID NO: 649127 - RNA, 20 nt, Human
gugcugggguacgcuacgug

SEQ ID NO: 649128 - RNA, 22 nt, Human
guuuaaaacauaauucuuacag

SEQ ID NO: 649129 - RNA, 21 nt, Human
uaaaagaauaaauacagggua

SEQ ID NO: 649130 - RNA, 25 nt, Human
uaacagaacagccagagagagggga

SEQ ID NO: 649131 - RNA, 18 nt, Human
uacaagccacaaggcucu

SEQ ID NO: 649132 - RNA, 19 nt, Human
uacagcagcuguuuaaaaa

SEQ ID NO: 649133 - RNA, 19 nt, Human
uacagguaagguccccugc

SEQ ID NO: 649134 - RNA, 23 nt, Human
uacguggagggguugccagggau

SEQ ID NO: 649135 - RNA, 20 nt, Human
uagaacgggaguuucaaaac

SEQ ID NO: 649136 - RNA, 20 nt, Human
uauauauauguauguauaua

SEQ ID NO: 649137 - RNA, 18 nt, Human
uauauauguauguauaua

SEQ ID NO: 649138 - RNA, 20 nt, Human
uaucccagggagggcacagg

SEQ ID NO: 649139 - RNA, 19 nt, Human
uauguauguauauauauua

SEQ ID NO: 649140 - RNA, 22 nt, Human
uauguauguauauauauuaaac

SEQ ID NO: 649141 - RNA, 23 nt, Human
uauguauguauauauauuaaacc

SEQ ID NO: 649142 - RNA, 24 nt, Human
ucaaacccacaucaaaagacccac

SEQ ID NO: 649143 - RNA, 18 nt, Human
ucagaaugugacccaccu

SEQ ID NO: 649144 - RNA, 25 nt, Human
ucagcuagaaaagcaaaagcaaaau

SEQ ID NO: 649145 - RNA, 26 nt, Human
ucagcuagaaaagcaaaagcaaaauc

SEQ ID NO: 649146 - RNA, 22 nt, Human
ucccagaggugugggaagcacc

SEQ ID NO: 649147 - RNA, 21 nt, Human
ucccagggagggcacagguga

SEQ ID NO: 649148 - RNA, 25 nt, Human
ucccagggagggcacagguggaagg

SEQ ID NO: 649149 - RNA, 20 nt, Human
ucccagggugucggggggug

SEQ ID NO: 649150 - RNA, 23 nt, Human
ucgccuccuccccgcggccccgg

SEQ ID NO: 649151 - RNA, 21 nt, Human
ucucagagcugugguaccacc

SEQ ID NO: 649152 - RNA, 23 nt, Human
ucucggggaauggagacccacuc

SEQ ID NO: 649153 - RNA, 21 nt, Human
ucugaggaugcacuugggaaa

SEQ ID NO: 649154 - RNA, 18 nt, Human
ucuuaguaccccugguau

SEQ ID NO: 649155 - RNA, 20 nt, Human
ucuuccccaucccacccugc

SEQ ID NO: 649156 - RNA, 18 nt, Human
ucuugguuucugccuugg

SEQ ID NO: 649157 - RNA, 22 nt, Human
ucuuuuuucaaagagggguugu

SEQ ID NO: 649158 - RNA, 22 nt, Human
ugagcccaagaguuagcuggga

SEQ ID NO: 649159 - RNA, 21 nt, Human
ugaggcucugagagggguugg

SEQ ID NO: 649160 - RNA, 21 nt, Human
ugaugucgggaagggggaaag

SEQ ID NO: 649161 - RNA, 23 nt, Human
ugcagggcaagggacccagagac

SEQ ID NO: 649162 - RNA, 20 nt, Human
ugcccagggagggcgggcga

SEQ ID NO: 649163 - RNA, 20 nt, Human
ugccgguccaaggugcaggg

SEQ ID NO: 649164 - RNA, 21 nt, Human
ugccugagcccaagaguuagc

SEQ ID NO: 649165 - RNA, 21 nt, Human
uggaaacugcagggcaaggga

SEQ ID NO: 649166 - RNA, 20 nt, Human
uggaaggaaaguaacagaac

SEQ ID NO: 649167 - RNA, 19 nt, Human
uggagacccacucgcccuc

SEQ ID NO: 649168 - RNA, 24 nt, Human
uggcacacccagagcuucugagga

SEQ ID NO: 649169 - RNA, 22 nt, Human
uggcuucugugaggcucgacuc

SEQ ID NO: 649170 - RNA, 18 nt, Human
ugggaucuguacaaggga

SEQ ID NO: 649171 - RNA, 24 nt, Human
ugggcacccugggccgggggaggu

SEQ ID NO: 649172 - RNA, 20 nt, Human
ugggcugguaggaaagaagg

SEQ ID NO: 649173 - RNA, 24 nt, Human
ugggcugguaggaaagaagggugg

SEQ ID NO: 649174 - RNA, 21 nt, Human
uguacaagggaaacauucauc

SEQ ID NO: 649175 - RNA, 21 nt, Human
uguaccugugcagaaaugaac

SEQ ID NO: 649176 - RNA, 19 nt, Human
ugugcccagggagggcggg

SEQ ID NO: 649177 - RNA, 21 nt, Human
ugugucuuuuuucaaagaggg

SEQ ID NO: 649178 - RNA, 22 nt, Human
uuacagacaaauauauauauau

SEQ ID NO: 649179 - RNA, 25 nt, Human
uuaccuggagacacaggggaauugc

SEQ ID NO: 649180 - RNA, 20 nt, Human
uuagcugguuaccuggagac

SEQ ID NO: 649181 - RNA, 19 nt, Human
uucuugguuucugccuugg

SEQ ID NO: 649182 - RNA, 18 nt, Human
uuucucacccagucuugg

SEQ ID NO: 649183 - RNA, 25 nt, Human
ggaaagagaaacauuauauaaacau

SEQ ID NO: 649184 - RNA, 23 nt, Human
uaaagagaaaucuuacagguaag

SEQ ID NO: 649185 - RNA, 20 nt, Human
uaagaugucauggaaagaga

SEQ ID NO: 649186 - RNA, 25 nt, Human
ugacaaaacauucauauaaagagaa

SEQ ID NO: 649187 - RNA, 25 nt, Human
uuuuuuuuuuuuuuuuuuuuagggg

SEQ ID NO: 649188 - RNA, 25 nt, Human
aaacagcuccagacaucucuucuca

SEQ ID NO: 649189 - RNA, 20 nt, Human
aacccugucuuuggccuugc

SEQ ID NO: 649190 - RNA, 19 nt, Human
aagccccagcuccugaggc

SEQ ID NO: 649191 - RNA, 23 nt, Human
aaggccccagggaaaccccacac

SEQ ID NO: 649192 - RNA, 20 nt, Human
aaguaccccuucggccaggc

SEQ ID NO: 649193 - RNA, 21 nt, Human
acucucaaacgugucuuucuc

SEQ ID NO: 649194 - RNA, 19 nt, Human
agaacuccuccagcagcuc

SEQ ID NO: 649195 - RNA, 24 nt, Human
agaacuccuccagcagcuccccaa

SEQ ID NO: 649196 - RNA, 22 nt, Human
agcuccccaagccccagcuccu

SEQ ID NO: 649197 - RNA, 20 nt, Human
aggagcaggaaaaugucaug

SEQ ID NO: 649198 - RNA, 24 nt, Human
aggcagcggcggcggcggcccgag

SEQ ID NO: 649199 - RNA, 19 nt, Human
agugacaagaagggguggu

SEQ ID NO: 649200 - RNA, 20 nt, Human
cacaaggccccagggaaacc

SEQ ID NO: 649201 - RNA, 22 nt, Human
caccuguacgguacucucaaac

SEQ ID NO: 649202 - RNA, 20 nt, Human
cagcaaagauggggugggug

SEQ ID NO: 649203 - RNA, 25 nt, Human
cagcagcuccccaagccccagcucc

SEQ ID NO: 649204 - RNA, 23 nt, Human
cagcuccccaagccccagcuccu

SEQ ID NO: 649205 - RNA, 22 nt, Human
cagcuccugaggcggcugguug

SEQ ID NO: 649206 - RNA, 22 nt, Human
cauggcccagccccgcgucccc

SEQ ID NO: 649207 - RNA, 23 nt, Human
ccagccccgcguccccucagugu

SEQ ID NO: 649208 - RNA, 22 nt, Human
ccccuucggccaggcauggcuu

SEQ ID NO: 649209 - RNA, 26 nt, Human
ccgaggcagcggcggcggcggcccuu

SEQ ID NO: 649210 - RNA, 19 nt, Human
ccuccagcagcuccccaag

SEQ ID NO: 649211 - RNA, 23 nt, Human
ccuggaaguaccccuucggccag

SEQ ID NO: 649212 - RNA, 21 nt, Human
cggccaaacagcuccagacau

SEQ ID NO: 649213 - RNA, 18 nt, Human
cucaaugcgcucaaccuu

SEQ ID NO: 649214 - RNA, 19 nt, Human
cucagaacucucauacucc

SEQ ID NO: 649215 - RNA, 20 nt, Human
cucagcuuuggggcugccau

SEQ ID NO: 649216 - RNA, 22 nt, Human
cucagugcaggugaucccuccu

SEQ ID NO: 649217 - RNA, 20 nt, Human
cuccagcagcuccccaagcc

SEQ ID NO: 649218 - RNA, 19 nt, Human
cuccccaagccccagcucc

SEQ ID NO: 649219 - RNA, 24 nt, Human
cuccuccagcagcuccccaagccc

SEQ ID NO: 649220 - RNA, 23 nt, Human
cugaguccgggagaacuccucca

SEQ ID NO: 649221 - RNA, 21 nt, Human
gaagaggccgaggaccccgcc

SEQ ID NO: 649222 - RNA, 18 nt, Human
gagcaggaaaaugucaug

SEQ ID NO: 649223 - RNA, 21 nt, Human
gaggcagcggcggcggcggcc

SEQ ID NO: 649224 - RNA, 20 nt, Human
gaggcuggggguuggaaaac

SEQ ID NO: 649225 - RNA, 23 nt, Human
gauaguggccacagauauccccc

SEQ ID NO: 649226 - RNA, 19 nt, Human
gaucccuccuccccagaaa

SEQ ID NO: 649227 - RNA, 21 nt, Human
gcagcggcggcggcggcccga

SEQ ID NO: 649228 - RNA, 25 nt, Human
gcagcggcggcggcggcccgagcgc

SEQ ID NO: 649229 - RNA, 20 nt, Human
gcggcggcggcggcccgagc

SEQ ID NO: 649230 - RNA, 22 nt, Human
ggcuggggguuggaaaacccug

SEQ ID NO: 649231 - RNA, 18 nt, Human
gggacugaaauuuccccu

SEQ ID NO: 649232 - RNA, 26 nt, Human
ggggugggugggagacagugacaaga

SEQ ID NO: 649233 - RNA, 22 nt, Human
gucaaacugccucauucucagu

SEQ ID NO: 649234 - RNA, 20 nt, Human
uccccaagccccagcuccug

SEQ ID NO: 649235 - RNA, 19 nt, Human
ucccuccuccccagaaaca

SEQ ID NO: 649236 - RNA, 20 nt, Human
uccuccccagaaacaagaac

SEQ ID NO: 649237 - RNA, 20 nt, Human
uccugaggcggcugguugcc

SEQ ID NO: 649238 - RNA, 23 nt, Human
ucuuucuccuucucagaacucuc

SEQ ID NO: 649239 - RNA, 22 nt, Human
ugauuuuauuuugugaucugug

SEQ ID NO: 649240 - RNA, 27 nt, Human
ugcgcucaaccuuagagccgccggucc

SEQ ID NO: 649241 - RNA, 19 nt, Human
uggaugaggucuugcaacu

SEQ ID NO: 649242 - RNA, 22 nt, Human
uggccacagauauccccauucg

SEQ ID NO: 649243 - RNA, 20 nt, Human
uggcuuccacaaggccccuc

SEQ ID NO: 649244 - RNA, 19 nt, Human
uggggugggugggagacag

SEQ ID NO: 649245 - RNA, 19 nt, Human
uggggugggugggagacag

SEQ ID NO: 649246 - RNA, 21 nt, Human
uggggugggugggagacagug

SEQ ID NO: 649247 - RNA, 22 nt, Human
ugucuuuggccuugcucagcuu

SEQ ID NO: 649248 - RNA, 24 nt, Human
uuccccugaccuggaaguaccccc

SEQ ID NO: 649249 - RNA, 18 nt, Human
uugcucagcuuuggggcu

SEQ ID NO: 649250 - RNA, 21 nt, Human
uuuuuuuuuuucaaaaagacu

SEQ ID NO: 649251 - RNA, 25 nt, Human
uuuuuuuuuuuucaaaaagacuuug

SEQ ID NO: 649252 - RNA, 18 nt, Human
aaaacagccagagcgcac

SEQ ID NO: 649253 - RNA, 24 nt, Human
aagcugaaguagccaaaugugguc

SEQ ID NO: 649254 - RNA, 18 nt, Human
acucggucucggcaucug

SEQ ID NO: 649255 - RNA, 19 nt, Human
agaaaacagccagagcgca

SEQ ID NO: 649256 - RNA, 23 nt, Human
agaaaacagccagagcgcaccac

SEQ ID NO: 649257 - RNA, 24 nt, Human
agaaaacagccagagcgcaccacu

SEQ ID NO: 649258 - RNA, 21 nt, Human
agagagguauacccaguuccc

SEQ ID NO: 649259 - RNA, 22 nt, Human
agccagagcgcaccacucaccu

SEQ ID NO: 649260 - RNA, 27 nt, Human
aggaagaggcgggcggcuccgacagaa

SEQ ID NO: 649261 - RNA, 19 nt, Human
aggaagggaggagguggga

SEQ ID NO: 649262 - RNA, 22 nt, Human
aggcaggaggucgaaggcaggg

SEQ ID NO: 649263 - RNA, 22 nt, Human
aggcagggacaggaaggucagg

SEQ ID NO: 649264 - RNA, 23 nt, Human
aggcagggacaggaaggucaggg

SEQ ID NO: 649265 - RNA, 26 nt, Human
aggcagggacaggaaggucaggguuu

SEQ ID NO: 649266 - RNA, 23 nt, Human
aguguuuguuacacacacaugca

SEQ ID NO: 649267 - RNA, 21 nt, Human
auccaugccugugugugagua

SEQ ID NO: 649268 - RNA, 21 nt, Human
auggguguguguuccuuccug

SEQ ID NO: 649269 - RNA, 28 nt, Human
cacacacaugcauccaugccugugugug

SEQ ID NO: 649270 - RNA, 22 nt, Human
caccugagugccagguaaacac

SEQ ID NO: 649271 - RNA, 21 nt, Human
caccugcagcagcggcgaagc

SEQ ID NO: 649272 - RNA, 24 nt, Human
cagaaaacagccagagcgcaccac

SEQ ID NO: 649273 - RNA, 19 nt, Human
cagagcgcaccacucaccu

SEQ ID NO: 649274 - RNA, 20 nt, Human
cagagugaggccccaggaag

SEQ ID NO: 649275 - RNA, 25 nt, Human
cagauaauggguguguguuccuucc

SEQ ID NO: 649276 - RNA, 23 nt, Human
cagcagcggcgaagcggugucag

SEQ ID NO: 649277 - RNA, 18 nt, Human
caggagucccaugccuau

SEQ ID NO: 649278 - RNA, 22 nt, Human
cccaucgcccuuggccuggggc

SEQ ID NO: 649279 - RNA, 24 nt, Human
ccuccugggcaggccagcaaggac

SEQ ID NO: 649280 - RNA, 19 nt, Human
ccugagugccagguaaaca

SEQ ID NO: 649281 - RNA, 18 nt, Human
cgacagaaaacagccaga

SEQ ID NO: 649282 - RNA, 24 nt, Human
cucaggggcccaucgcccuuggcc

SEQ ID NO: 649283 - RNA, 20 nt, Human
cugagugccagguaaacacc

SEQ ID NO: 649284 - RNA, 21 nt, Human
cugcagcagcggcgaagcggu

SEQ ID NO: 649285 - RNA, 19 nt, Human
gaagggaggaggugggaca

SEQ ID NO: 649286 - RNA, 18 nt, Human
gaccacggcggcgcugcc

SEQ ID NO: 649287 - RNA, 23 nt, Human
gccuggggccccuccgugccguc

SEQ ID NO: 649288 - RNA, 23 nt, Human
gcggcuccgacagaaaacagcca

SEQ ID NO: 649289 - RNA, 19 nt, Human
ggaccacggcggcgcugcc

SEQ ID NO: 649290 - RNA, 20 nt, Human
ggcaaagcgcagagugaggc

SEQ ID NO: 649291 - RNA, 25 nt, Human
ggcaaagcgcagagugaggccccag

SEQ ID NO: 649292 - RNA, 24 nt, Human
ggcgaagcggugucagggcucagg

SEQ ID NO: 649293 - RNA, 21 nt, Human
ggcgcugccggccaggggcac

SEQ ID NO: 649294 - RNA, 25 nt, Human
ggggcccaucgcccuuggccugggg

SEQ ID NO: 649295 - RNA, 22 nt, Human
ggggccccuccgugccgucggg

SEQ ID NO: 649296 - RNA, 28 nt, Human
uacacacacaugcauccaugccugugug

SEQ ID NO: 649297 - RNA, 18 nt, Human
ucagaguagcacugagcu

SEQ ID NO: 649298 - RNA, 18 nt, Human
ucccgaggcacccauggg

SEQ ID NO: 649299 - RNA, 21 nt, Human
ugaaguagccaaaugugguca

SEQ ID NO: 649300 - RNA, 21 nt, Human
ugaggccccaggaagggagga

SEQ ID NO: 649301 - RNA, 21 nt, Human
uggcaaagcgcagagugaggc

SEQ ID NO: 649302 - RNA, 18 nt, Human
uggcagagaagcgacuuu

SEQ ID NO: 649303 - RNA, 21 nt, Human
uggcagagaagcgacuuuggc

SEQ ID NO: 649304 - RNA, 19 nt, Human
uggucagcaguauuguauu

SEQ ID NO: 649305 - RNA, 23 nt, Human
uguuacacacacaugcauccaug

SEQ ID NO: 649306 - RNA, 24 nt, Human
uuaagcugaaguagccaaaugugg

SEQ ID NO: 649307 - RNA, 24 nt, Human
uucagaguagcacugagcugaaga

SEQ ID NO: 649308 - RNA, 22 nt, Human
uuuuuuuuuuugggacugagca

SEQ ID NO: 649309 - RNA, 18 nt, Human
uuuuuuuuuuuuuuuuug

SEQ ID NO: 649310 - RNA, 18 nt, Human
uuuuuuuuuuuuuuuuug

SEQ ID NO: 649311 - RNA, 21 nt, Human
aaaaaaaaaauucagcuggaa

SEQ ID NO: 649312 - RNA, 22 nt, Human
aaaaaaauucagcuggaaccac

SEQ ID NO: 649313 - RNA, 24 nt, Human
aaacugaucuaaucucccuuucua

SEQ ID NO: 649314 - RNA, 24 nt, Human
aaagaaaaaggagugaagaaagag

SEQ ID NO: 649315 - RNA, 18 nt, Human
aagaaaaaggagugaaga

SEQ ID NO: 649316 - RNA, 22 nt, Human
aagaaagagagagggaaaaaaa

SEQ ID NO: 649317 - RNA, 20 nt, Human
aagaaagagagagggaaaag

SEQ ID NO: 649318 - RNA, 20 nt, Human
aagaagagacuauaauggua

SEQ ID NO: 649319 - RNA, 24 nt, Human
aagacccugacuccuaggaaagcc

SEQ ID NO: 649320 - RNA, 18 nt, Human
aagagaaaacugaucuaa

SEQ ID NO: 649321 - RNA, 22 nt, Human
aaugacgagaagaguccaaaga

SEQ ID NO: 649322 - RNA, 24 nt, Human
aaugcucacugcuacuuagaugac

SEQ ID NO: 649323 - RNA, 19 nt, Human
aauuuacaaacagcauccc

SEQ ID NO: 649324 - RNA, 21 nt, Human
acaaacagcaucccauuuccu

SEQ ID NO: 649325 - RNA, 24 nt, Human
acccaggcuggagugcaauggcau

SEQ ID NO: 649326 - RNA, 19 nt, Human
accuuuccccaaccuucuc

SEQ ID NO: 649327 - RNA, 20 nt, Human
acugcaaccuccaccugcug

SEQ ID NO: 649328 - RNA, 23 nt, Human
agaaauaucuagcaggaaagucc

SEQ ID NO: 649329 - RNA, 19 nt, Human
agaagaauucuuucuaagg

SEQ ID NO: 649330 - RNA, 20 nt, Human
agaagugguuagcucaguac

SEQ ID NO: 649331 - RNA, 24 nt, Human
agagagagggaaaaaaaaaauuca

SEQ ID NO: 649332 - RNA, 22 nt, Human
agagagggaaaaaaaaaauuca

SEQ ID NO: 649333 - RNA, 23 nt, Human
agaugccuuuuuacagaugaauc

SEQ ID NO: 649334 - RNA, 20 nt, Human
agccgggaccagggucaggg

SEQ ID NO: 649335 - RNA, 21 nt, Human
agcuggaaccacaugguugcc

SEQ ID NO: 649336 - RNA, 21 nt, Human
aggaaaacgcgaggcggaaag

SEQ ID NO: 649337 - RNA, 19 nt, Human
agugaagaaagagagaggg

SEQ ID NO: 649338 - RNA, 24 nt, Human
agugcaauggcauaaucuuggcuc

SEQ ID NO: 649339 - RNA, 21 nt, Human
auucacucuucuccaucuccc

SEQ ID NO: 649340 - RNA, 24 nt, Human
caaauagugagauuaguauagagu

SEQ ID NO: 649341 - RNA, 19 nt, Human
caaaugaaguuaagucaga

SEQ ID NO: 649342 - RNA, 26 nt, Human
caaccuccaccugcuggauuuuccua

SEQ ID NO: 649343 - RNA, 22 nt, Human
caccaugcccggcuaccuuccu

SEQ ID NO: 649344 - RNA, 22 nt, Human
caccucaccuuuccccaaccuu

SEQ ID NO: 649345 - RNA, 21 nt, Human
cacugcaaccuccaccugcug

SEQ ID NO: 649346 - RNA, 23 nt, Human
cagaaagaagagacuauaauggu

SEQ ID NO: 649347 - RNA, 19 nt, Human
caucugguuguguggcugg

SEQ ID NO: 649348 - RNA, 21 nt, Human
caugaagauggaaagcucuuc

SEQ ID NO: 649349 - RNA, 20 nt, Human
ccaccagcuggcgcccggac

SEQ ID NO: 649350 - RNA, 22 nt, Human
ccaucucccacuauuucaacuc

SEQ ID NO: 649351 - RNA, 22 nt, Human
ccaugcccggcuaccuuccuug

SEQ ID NO: 649352 - RNA, 24 nt, Human
cccacuauuucaacuccccuugaa

SEQ ID NO: 649353 - RNA, 18 nt, Human
ccccugggggcagauggg

SEQ ID NO: 649354 - RNA, 24 nt, Human
ccccugggggcagaugggcucccg

SEQ ID NO: 649355 - RNA, 21 nt, Human
cccgcucagcugcugcuuggc

SEQ ID NO: 649356 - RNA, 20 nt, Human
ccgcucagcugcugcuuggc

SEQ ID NO: 649357 - RNA, 22 nt, Human
ccggccccgcgccccgugcccc

SEQ ID NO: 649358 - RNA, 21 nt, Human
ccgugcaaugcucacugcuac

SEQ ID NO: 649359 - RNA, 19 nt, Human
ccucgggcgagcugggcgc

SEQ ID NO: 649360 - RNA, 21 nt, Human
cgccccgugccccugggggca

SEQ ID NO: 649361 - RNA, 20 nt, Human
cggccgggcgccuccgacgg

SEQ ID NO: 649362 - RNA, 24 nt, Human
cgggcgagcugggcgcggcgccuc

SEQ ID NO: 649363 - RNA, 23 nt, Human
cucaccuuuccccaaccuucuca

SEQ ID NO: 649364 - RNA, 23 nt, Human
cucacugcaaccuccaccugcug

SEQ ID NO: 649365 - RNA, 19 nt, Human
cucagcugcugcuuggcuc

SEQ ID NO: 649366 - RNA, 21 nt, Human
cucauucacucuucuccaucu

SEQ ID NO: 649367 - RNA, 21 nt, Human
cuccaucucccacuauuucaa

SEQ ID NO: 649368 - RNA, 24 nt, Human
cugcaaccuccaccugcuggauuu

SEQ ID NO: 649369 - RNA, 25 nt, Human
cugcaaccuccaccugcuggauuuu

SEQ ID NO: 649370 - RNA, 23 nt, Human
cugcugcuuggcuccggggcggc

SEQ ID NO: 649371 - RNA, 21 nt, Human
cugguuucacauuuucucaga

SEQ ID NO: 649372 - RNA, 24 nt, Human
cuugcuuugucacccaggcuggag

SEQ ID NO: 649373 - RNA, 20 nt, Human
cuuugucacccaggcuggag

SEQ ID NO: 649374 - RNA, 18 nt, Human
gaaagaaaaaggagugaa

SEQ ID NO: 649375 - RNA, 23 nt, Human
gaagaaagagagagggaaaaaaa

SEQ ID NO: 649376 - RNA, 21 nt, Human
gacaaaugaaguuaagucaga

SEQ ID NO: 649377 - RNA, 18 nt, Human
gagaagaguccaaagacc

SEQ ID NO: 649378 - RNA, 25 nt, Human
gagccgggaccagggucagggagga

SEQ ID NO: 649379 - RNA, 18 nt, Human
gagucuugcuuugucacc

SEQ ID NO: 649380 - RNA, 25 nt, Human
gaucuaaucucccuuucuaguccac

SEQ ID NO: 649381 - RNA, 22 nt, Human
gccccgugccccugggggcaga

SEQ ID NO: 649382 - RNA, 20 nt, Human
gccuccgacggaccucgggc

SEQ ID NO: 649383 - RNA, 22 nt, Human
gcgcgcgagguggcugcagcca

SEQ ID NO: 649384 - RNA, 24 nt, Human
gcgcgcgagguggcugcagccaug

SEQ ID NO: 649385 - RNA, 23 nt, Human
gcuccggggcggccgggcgccuc

SEQ ID NO: 649386 - RNA, 19 nt, Human
gcugcugcuuggcuccggg

SEQ ID NO: 649387 - RNA, 20 nt, Human
gcugcuuggcuccggggcgg

SEQ ID NO: 649388 - RNA, 23 nt, Human
gcuggauuuuccuacaggugccu

SEQ ID NO: 649389 - RNA, 18 nt, Human
ggaaagcucuucacaauc

SEQ ID NO: 649390 - RNA, 19 nt, Human
ggaccagggucagggagga

SEQ ID NO: 649391 - RNA, 22 nt, Human
ggagccgggaccagggucaggg

SEQ ID NO: 649392 - RNA, 22 nt, Human
ggagugaagaaagagagaggga

SEQ ID NO: 649393 - RNA, 22 nt, Human
ggcuggugacuugagcucccgg

SEQ ID NO: 649394 - RNA, 22 nt, Human
gggagccgggaccagggucagg

SEQ ID NO: 649395 - RNA, 19 nt, Human
gggcagaugggcucccggc

SEQ ID NO: 649396 - RNA, 22 nt, Human
uagaaaauuuacaaacagcauc

SEQ ID NO: 649397 - RNA, 23 nt, Human
uauuaagagaaaacugaucuaau

SEQ ID NO: 649398 - RNA, 25 nt, Human
uauuuucuccuuccagaaauaucua

SEQ ID NO: 649399 - RNA, 22 nt, Human
ucaacaauccucauaacaucau

SEQ ID NO: 649400 - RNA, 23 nt, Human
ucacaaauuuuugucuccuuuca

SEQ ID NO: 649401 - RNA, 18 nt, Human
ucacccaggcuggagugc

SEQ ID NO: 649402 - RNA, 19 nt, Human
ucaccucaccuuuccccaa

SEQ ID NO: 649403 - RNA, 18 nt, Human
ucacugcaaccuccaccu

SEQ ID NO: 649404 - RNA, 19 nt, Human
ucacugcaaccuccaccug

SEQ ID NO: 649405 - RNA, 20 nt, Human
ucacugcaaccuccaccugc

SEQ ID NO: 649406 - RNA, 24 nt, Human
ucacugcaaccuccaccugcugga

SEQ ID NO: 649407 - RNA, 23 nt, Human
ucagcuggaaccacaugguugcc

SEQ ID NO: 649408 - RNA, 25 nt, Human
ucagggaggaaaacgcgaggcggaa

SEQ ID NO: 649409 - RNA, 19 nt, Human
ucaugaagauggaaagcuc

SEQ ID NO: 649410 - RNA, 21 nt, Human
uccaaagacccugacuccuag

SEQ ID NO: 649411 - RNA, 18 nt, Human
ucccacuauuucaacucc

SEQ ID NO: 649412 - RNA, 18 nt, Human
uccccaaccuucucacca

SEQ ID NO: 649413 - RNA, 19 nt, Human
uccccggacgcgggcgcuu

SEQ ID NO: 649414 - RNA, 23 nt, Human
uccccggacgcgggcgcuucccc

SEQ ID NO: 649415 - RNA, 20 nt, Human
ucccuuuuucucuagaagaa

SEQ ID NO: 649416 - RNA, 22 nt, Human
uccggggcggccgggcgccucc

SEQ ID NO: 649417 - RNA, 23 nt, Human
ucuugcuuugucacccaggcugg

SEQ ID NO: 649418 - RNA, 24 nt, Human
ucuugcuuugucacccaggcugga

SEQ ID NO: 649419 - RNA, 25 nt, Human
ugcgcgcgagguggcugcagccaug

SEQ ID NO: 649420 - RNA, 19 nt, Human
uggagucuugcuuugucac

SEQ ID NO: 649421 - RNA, 23 nt, Human
uggagugcaauggcauaaucuug

SEQ ID NO: 649422 - RNA, 24 nt, Human
uggagugcaauggcauaaucuugg

SEQ ID NO: 649423 - RNA, 21 nt, Human
uggcgcccggacgggagccgg

SEQ ID NO: 649424 - RNA, 24 nt, Human
uggcucacugcaaccuccaccugc

SEQ ID NO: 649425 - RNA, 18 nt, Human
uggcugcagccaugugcc

SEQ ID NO: 649426 - RNA, 22 nt, Human
ugggcucaauacaaauagugag

SEQ ID NO: 649427 - RNA, 19 nt, Human
ugguauguuggguaaucuu

SEQ ID NO: 649428 - RNA, 19 nt, Human
ugguuagcucaguacaugg

SEQ ID NO: 649429 - RNA, 18 nt, Human
ugucacccaggcuggagu

SEQ ID NO: 649430 - RNA, 20 nt, Human
ugucacccaggcuggagugc

SEQ ID NO: 649431 - RNA, 24 nt, Human
ugugaaucaaagcacugauacaaa

SEQ ID NO: 649432 - RNA, 21 nt, Human
uguuggguaaucuuucagcau

SEQ ID NO: 649433 - RNA, 18 nt, Human
uuacucuggucuaaaggc

SEQ ID NO: 649434 - RNA, 18 nt, Human
uucaccucaccuuucccc

SEQ ID NO: 649435 - RNA, 20 nt, Human
uucguggaacacuuuucccu

SEQ ID NO: 649436 - RNA, 18 nt, Human
uugagauggagucuugcu

SEQ ID NO: 649437 - RNA, 23 nt, Human
uugcaauucugguuucacauuuu

SEQ ID NO: 649438 - RNA, 24 nt, Human
uugcuuugucacccaggcuggagu

SEQ ID NO: 649439 - RNA, 23 nt, Human
uuggacuccugcuuucccuuacu

SEQ ID NO: 649440 - RNA, 22 nt, Human
uuguauuuucuccuuccagaaa

SEQ ID NO: 649441 - RNA, 22 nt, Human
uuuacagaugaaucagcuuaca

SEQ ID NO: 649442 - RNA, 24 nt, Human
uuugucacccaggcuggagugcaa

SEQ ID NO: 649443 - RNA, 20 nt, Human
uuuugggcucaauacaaaua

SEQ ID NO: 649444 - RNA, 24 nt, Human
uuuuuuuuuuuugagauggagucu

SEQ ID NO: 649445 - RNA, 22 nt, Human
uuuuuuuuuuuuuugagaugga

SEQ ID NO: 649446 - RNA, 22 nt, Human
aaacuuagaagcucaacaagcu

SEQ ID NO: 649447 - RNA, 25 nt, Human
aagaaaaccugagcuagaacucagg

SEQ ID NO: 649448 - RNA, 24 nt, Human
aagaaacuuagaagcucaacaagc

SEQ ID NO: 649449 - RNA, 19 nt, Human
aagcucaacaagcugaaga

SEQ ID NO: 649450 - RNA, 19 nt, Human
aaugcuuauuugccaauga

SEQ ID NO: 649451 - RNA, 24 nt, Human
acaaaguauucuuuuccuucaaag

SEQ ID NO: 649452 - RNA, 21 nt, Human
agagauguuauccuggugccc

SEQ ID NO: 649453 - RNA, 25 nt, Human
aggaagcagacagauuuguuggcuc

SEQ ID NO: 649454 - RNA, 19 nt, Human
agguccaggaaggcagugg

SEQ ID NO: 649455 - RNA, 20 nt, Human
auaguucuguagaucccugu

SEQ ID NO: 649456 - RNA, 20 nt, Human
aucccaucaggcauuuccca

SEQ ID NO: 649457 - RNA, 21 nt, Human
caauucaagcagucauugucc

SEQ ID NO: 649458 - RNA, 24 nt, Human
cacaugaauuauuuucccaacuuc

SEQ ID NO: 649459 - RNA, 20 nt, Human
ccccucuuuccaggcccuuu

SEQ ID NO: 649460 - RNA, 18 nt, Human
ccugagcuagaacucagg

SEQ ID NO: 649461 - RNA, 19 nt, Human
cugaggcagcagccaaaga

SEQ ID NO: 649462 - RNA, 22 nt, Human
cugugcugaggcagcagccaaa

SEQ ID NO: 649463 - RNA, 23 nt, Human
ggccaggcagggucuggagaucu

SEQ ID NO: 649464 - RNA, 19 nt, Human
gguagaaugaagggaaaga

SEQ ID NO: 649465 - RNA, 21 nt, Human
guagaaugaagggaaagaaac

SEQ ID NO: 649466 - RNA, 26 nt, Human
guggagcugccgcugccuuccuuggu

SEQ ID NO: 649467 - RNA, 19 nt, Human
uacagaacuuggcuugcag

SEQ ID NO: 649468 - RNA, 19 nt, Human
uagaacucaggcauuucuc

SEQ ID NO: 649469 - RNA, 25 nt, Human
uauauguuuguugccuuaauuugaa

SEQ ID NO: 649470 - RNA, 19 nt, Human
uaucuuguucauauuggag

SEQ ID NO: 649471 - RNA, 23 nt, Human
uauucuuuuccuucaaagcuuca

SEQ ID NO: 649472 - RNA, 19 nt, Human
ucauuccucaaggccucaa

SEQ ID NO: 649473 - RNA, 21 nt, Human
ucccauaggccuugucaacuc

SEQ ID NO: 649474 - RNA, 25 nt, Human
ucugugcugaggcagcagccaaaga

SEQ ID NO: 649475 - RNA, 28 nt, Human
ucuugcucuuguuugcucacggucggac

SEQ ID NO: 649476 - RNA, 27 nt, Human
ucuugcucuuguuugcucacggucggc

SEQ ID NO: 649477 - RNA, 26 nt, Human
uggaagguauauguuuguugccuuaa

SEQ ID NO: 649478 - RNA, 25 nt, Human
uggagaucuaaauucagaguaagaa

SEQ ID NO: 649479 - RNA, 18 nt, Human
ugugaggaagcagacaga

SEQ ID NO: 649480 - RNA, 24 nt, Human
uguggccaggcagggucuggagau

SEQ ID NO: 649481 - RNA, 21 nt, Human
uuagaagcucaacaagcugaa

SEQ ID NO: 649482 - RNA, 20 nt, Human
uucagaguaagaaaaccuga

SEQ ID NO: 649483 - RNA, 19 nt, Human
uuccaggcccuuuucuacu

SEQ ID NO: 649484 - RNA, 26 nt, Human
uuguuggcuccccucuuuccaggccc

SEQ ID NO: 649485 - RNA, 22 nt, Human
aaccauggcucucgggaagcuu

SEQ ID NO: 649486 - RNA, 21 nt, Human
accccaccccacccuggguua

SEQ ID NO: 649487 - RNA, 24 nt, Human
agaccccuccaccccaccccaccc

SEQ ID NO: 649488 - RNA, 21 nt, Human
agagcccuuucaugcuacauu

SEQ ID NO: 649489 - RNA, 21 nt, Human
caccccaccccaccccacccu

SEQ ID NO: 649490 - RNA, 19 nt, Human
cagacagcuggaaucccac

SEQ ID NO: 649491 - RNA, 19 nt, Human
cagaccccuccaccccacc

SEQ ID NO: 649492 - RNA, 24 nt, Human
cagcuggaaucccaccgcgguguc

SEQ ID NO: 649493 - RNA, 18 nt, Human
ccaccccaccccacccca

SEQ ID NO: 649494 - RNA, 19 nt, Human
ccaccccaccccaccccac

SEQ ID NO: 649495 - RNA, 20 nt, Human
ccaccccaccccaccccacc

SEQ ID NO: 649496 - RNA, 18 nt, Human
ccaccccaccccacccug

SEQ ID NO: 649497 - RNA, 24 nt, Human
cccaccccaccccacccuggguua

SEQ ID NO: 649498 - RNA, 22 nt, Human
cccaccccacccuggguuagca

SEQ ID NO: 649499 - RNA, 18 nt, Human
ccccaccccacccugggu

SEQ ID NO: 649500 - RNA, 24 nt, Human
ccccaccccacccuggguuagcag

SEQ ID NO: 649501 - RNA, 25 nt, Human
ccccuccaccccaccccaccccacc

SEQ ID NO: 649502 - RNA, 19 nt, Human
ccuccaccccaccccaccc

SEQ ID NO: 649503 - RNA, 24 nt, Human
cggcguggagagcagugagcgccg

SEQ ID NO: 649504 - RNA, 23 nt, Human
cuacaagcagaccccuccacccc

SEQ ID NO: 649505 - RNA, 20 nt, Human
cuccaccccaccccacccca

SEQ ID NO: 649506 - RNA, 23 nt, Human
cugcacugcccauccuuacugua

SEQ ID NO: 649507 - RNA, 19 nt, Human
gaccccuccaccccacccc

SEQ ID NO: 649508 - RNA, 20 nt, Human
gcagccgcuccacgaggugc

SEQ ID NO: 649509 - RNA, 18 nt, Human
uaauccgacuccuccuug

SEQ ID NO: 649510 - RNA, 19 nt, Human
uauugcaguacaauuacuc

SEQ ID NO: 649511 - RNA, 20 nt, Human
uccaccccaccccaccccac

SEQ ID NO: 649512 - RNA, 18 nt, Human
ucccaccgcggugucuuc

SEQ ID NO: 649513 - RNA, 22 nt, Human
ugagaguacuacaagcagaccc

SEQ ID NO: 649514 - RNA, 21 nt, Human
ugagcgccuugcaggcugccu

SEQ ID NO: 649515 - RNA, 18 nt, Human
ugccuggaccaaccaugg

SEQ ID NO: 649516 - RNA, 22 nt, Human
uggagagcagugagcgccgaga

SEQ ID NO: 649517 - RNA, 20 nt, Human
uguuuuguuuuuuguuuuuu

SEQ ID NO: 649518 - RNA, 21 nt, Human
uuauugcaguacaauuacucc

SEQ ID NO: 649519 - RNA, 24 nt, Human
uucgguggaaauguccccggcgug

SEQ ID NO: 649520 - RNA, 19 nt, Human
uugcaggcugccuuuccag

SEQ ID NO: 649521 - RNA, 23 nt, Human
uuuguuuuguuuuuuguuuuuug

SEQ ID NO: 649522 - RNA, 18 nt, Human
uuuuuuuuuuuuuuuuug

SEQ ID NO: 649523 - RNA, 25 nt, Human
uuuuuuuuuuuuuuuuuguuuuguu

SEQ ID NO: 649524 - RNA, 24 nt, Human
uuuuuuuuuuuuuuuuuuuguuuu

SEQ ID NO: 649525 - RNA, 23 nt, Human
aagcaauaccuggauaccaagac

SEQ ID NO: 649526 - RNA, 21 nt, Human
accaagacucagagugaggau

SEQ ID NO: 649527 - RNA, 22 nt, Human
aggcugagccuuucgaccacaa

SEQ ID NO: 649528 - RNA, 22 nt, Human
agggauccaaaucucagacacc

SEQ ID NO: 649529 - RNA, 21 nt, Human
aggggcugcuucggucuccag

SEQ ID NO: 649530 - RNA, 18 nt, Human
auggagcucugagcccag

SEQ ID NO: 649531 - RNA, 18 nt, Human
caacucugugaagccaag

SEQ ID NO: 649532 - RNA, 19 nt, Human
cacuggcaggggcugaagu

SEQ ID NO: 649533 - RNA, 24 nt, Human
cagagcggacuccccucuccccua

SEQ ID NO: 649534 - RNA, 21 nt, Human
cauguccacagacuucaugua

SEQ ID NO: 649535 - RNA, 23 nt, Human
ccuccaaaguccugagaaaucaa

SEQ ID NO: 649536 - RNA, 18 nt, Human
cucagagugaggauaugg

SEQ ID NO: 649537 - RNA, 24 nt, Human
gagcugacaguuuugcugauccug

SEQ ID NO: 649538 - RNA, 18 nt, Human
gcagcagcuucuaaccaa

SEQ ID NO: 649539 - RNA, 19 nt, Human
ggagcugacaguuuugcug

SEQ ID NO: 649540 - RNA, 22 nt, Human
gggcugaaguccagaaauggug

SEQ ID NO: 649541 - RNA, 21 nt, Human
ggugacaguaagccugagaaa

SEQ ID NO: 649542 - RNA, 24 nt, Human
gucagagcccuccaaaguccugag

SEQ ID NO: 649543 - RNA, 19 nt, Human
gucuccagccacaacucug

SEQ ID NO: 649544 - RNA, 19 nt, Human
gugaagccaagccacgcgc

SEQ ID NO: 649545 - RNA, 18 nt, Human
guugcagcagcuucuaac

SEQ ID NO: 649546 - RNA, 21 nt, Human
guuuccuaccugugucaccuc

SEQ ID NO: 649547 - RNA, 25 nt, Human
uauaaugaugggagagggcaguugc

SEQ ID NO: 649548 - RNA, 22 nt, Human
ucagacaccaguuugaagcaau

SEQ ID NO: 649549 - RNA, 23 nt, Human
ucaggacagagcggacuccccuc

SEQ ID NO: 649550 - RNA, 18 nt, Human
uccaaaucucagacacca

SEQ ID NO: 649551 - RNA, 18 nt, Human
ugaaguccagaaauggug

SEQ ID NO: 649552 - RNA, 21 nt, Human
ugaugggagagggcaguugca

SEQ ID NO: 649553 - RNA, 23 nt, Human
uggauuuugggagcugacaguuu

SEQ ID NO: 649554 - RNA, 19 nt, Human
uggcaggggcugaagucca

SEQ ID NO: 649555 - RNA, 20 nt, Human
ugggagagggcaguugcagc

SEQ ID NO: 649556 - RNA, 21 nt, Human
ugggagagggcaguugcagca

SEQ ID NO: 649557 - RNA, 24 nt, Human
uggugucagagcccuccaaagucc

SEQ ID NO: 649558 - RNA, 21 nt, Human
uguagcucuagucauucuuau

SEQ ID NO: 649559 - RNA, 25 nt, Human
ugugacgggacccaggccucgugcc

SEQ ID NO: 649560 - RNA, 23 nt, Human
uguguagcucuagucauucuuau

SEQ ID NO: 649561 - RNA, 22 nt, Human
uguuuccuaccugugucaccuc

SEQ ID NO: 649562 - RNA, 21 nt, Human
uuccauccugugcacccagug

SEQ ID NO: 649563 - RNA, 24 nt, Human
uugcagcagcuucuaaccaagugu

SEQ ID NO: 649564 - RNA, 20 nt, Human
uuuuuuuuuuuuuuauaaga

SEQ ID NO: 649565 - RNA, 19 nt, Human
aaaaaaauaugaacacaca

SEQ ID NO: 649566 - RNA, 20 nt, Human
aaaaauacugcgggcgccgc

SEQ ID NO: 649567 - RNA, 21 nt, Human
aaacagaaaagguguggcuga

SEQ ID NO: 649568 - RNA, 23 nt, Human
aagcagaaggagaauggggggac

SEQ ID NO: 649569 - RNA, 22 nt, Human
aagcagaaggagaaugggucgg

SEQ ID NO: 649570 - RNA, 19 nt, Human
agagggcaagagaagcagg

SEQ ID NO: 649571 - RNA, 19 nt, Human
aggagggagcaggggcugc

SEQ ID NO: 649572 - RNA, 21 nt, Human
agggagcaggggcugcucgga

SEQ ID NO: 649573 - RNA, 23 nt, Human
agggcaagagaagcagaaggaga

SEQ ID NO: 649574 - RNA, 19 nt, Human
cagaagcaagcgauucggc

SEQ ID NO: 649575 - RNA, 20 nt, Human
cagcacugaaaaauacugcg

SEQ ID NO: 649576 - RNA, 20 nt, Human
cagcgcgggguggggcacgg

SEQ ID NO: 649577 - RNA, 25 nt, Human
caucaguagugacgcagccguggcc

SEQ ID NO: 649578 - RNA, 22 nt, Human
ccaggagggagcaggggcugcu

SEQ ID NO: 649579 - RNA, 25 nt, Human
ccggcgggcggcggugggggcccuu

SEQ ID NO: 649580 - RNA, 18 nt, Human
cggagcgggaucagaagc

SEQ ID NO: 649581 - RNA, 21 nt, Human
cggcacacaggcgcuuggcca

SEQ ID NO: 649582 - RNA, 24 nt, Human
cgggcggcggugggggcccguggc

SEQ ID NO: 649583 - RNA, 25 nt, Human
cgggcggcggugggggcccguggcc

SEQ ID NO: 649584 - RNA, 22 nt, Human
cuaccagaguaauucaagacgc

SEQ ID NO: 649585 - RNA, 18 nt, Human
cuccaggaggagcucggg

SEQ ID NO: 649586 - RNA, 24 nt, Human
cuccaggagggagcaggggcugcu

SEQ ID NO: 649587 - RNA, 18 nt, Human
cuccgacuugagaaugaa

SEQ ID NO: 649588 - RNA, 21 nt, Human
gagaagcagaaggagaauggg

SEQ ID NO: 649589 - RNA, 22 nt, Human
gagaagcagaaggagaauggga

SEQ ID NO: 649590 - RNA, 25 nt, Human
ggaaauacauauucugcggcaggga

SEQ ID NO: 649591 - RNA, 21 nt, Human
ggagcaggggcugcucggcca

SEQ ID NO: 649592 - RNA, 26 nt, Human
ggagcuugaggauaaggucccagagg

SEQ ID NO: 649593 - RNA, 19 nt, Human
ggcaagagaagcagaagga

SEQ ID NO: 649594 - RNA, 20 nt, Human
ggccugggcuuugccugcag

SEQ ID NO: 649595 - RNA, 23 nt, Human
ggcggcggugggggcccguggcc

SEQ ID NO: 649596 - RNA, 24 nt, Human
ggugacaagggucuccaggaggga

SEQ ID NO: 649597 - RNA, 20 nt, Human
gguuguggugcuaugaggag

SEQ ID NO: 649598 - RNA, 22 nt, Human
gugccgcccugggaaagguugg

SEQ ID NO: 649599 - RNA, 24 nt, Human
uaaaacuaacaaaaaaauaugaac

SEQ ID NO: 649600 - RNA, 21 nt, Human
uaaggucaagguugguaugug

SEQ ID NO: 649601 - RNA, 21 nt, Human
ucuccaggagggagcaggggc

SEQ ID NO: 649602 - RNA, 18 nt, Human
ugcauggacagcgcgggg

SEQ ID NO: 649603 - RNA, 23 nt, Human
ugcccuggagcuugaggauaagg

SEQ ID NO: 649604 - RNA, 22 nt, Human
ugccgcccugggaaagguuggu

SEQ ID NO: 649605 - RNA, 19 nt, Human
ugcucggccaggcugcccu

SEQ ID NO: 649606 - RNA, 23 nt, Human
ugcucggccaggcugcccuggag

SEQ ID NO: 649607 - RNA, 19 nt, Human
uggacagcgcggggugggg

SEQ ID NO: 649608 - RNA, 18 nt, Human
uggccugggcuuugccug

SEQ ID NO: 649609 - RNA, 19 nt, Human
ugguauguguugcuccgac

SEQ ID NO: 649610 - RNA, 21 nt, Human
uuggcagguuuagaaaauaaa

SEQ ID NO: 649611 - RNA, 20 nt, Human
uuggugugaagaagagggca

SEQ ID NO: 649612 - RNA, 19 nt, Human
uuuggugugaagaagaggg

SEQ ID NO: 649613 - RNA, 18 nt, Human
uuuuuuuuuuuuuuuuug

SEQ ID NO: 649614 - RNA, 23 nt, Human
uuuuuuuuuuuuuuuuuggcagg

SEQ ID NO: 649615 - RNA, 24 nt, Human
uuuuuuuuuuuuuuuuuggcaggu

SEQ ID NO: 649616 - RNA, 22 nt, Human
uuuuuuuuuuuuuuuuuuuggc

SEQ ID NO: 649617 - RNA, 24 nt, Human
aaagugcugggacugcaggcguga

SEQ ID NO: 649618 - RNA, 26 nt, Human
aagacagggccgccauagacaggaaa

SEQ ID NO: 649619 - RNA, 19 nt, Human
aagugcugggacugcaggc

SEQ ID NO: 649620 - RNA, 26 nt, Human
aagugcugggacugcaggcgugagcc

SEQ ID NO: 649621 - RNA, 24 nt, Human
accguguuggccaggcuggucuug

SEQ ID NO: 649622 - RNA, 23 nt, Human
acgccuuggccucccaaagugcu

SEQ ID NO: 649623 - RNA, 18 nt, Human
acgggguuucaccguguu

SEQ ID NO: 649624 - RNA, 23 nt, Human
acgggguuucaccguguuggcca

SEQ ID NO: 649625 - RNA, 24 nt, Human
acgggguuucaccguguuggccag

SEQ ID NO: 649626 - RNA, 25 nt, Human
acucuguugcccaggcuggagugca

SEQ ID NO: 649627 - RNA, 19 nt, Human
agagacgggguuucaccgu

SEQ ID NO: 649628 - RNA, 18 nt, Human
agccacacuucuggcacc

SEQ ID NO: 649629 - RNA, 21 nt, Human
agcugcugaaauaccgcccac

SEQ ID NO: 649630 - RNA, 25 nt, Human
aggcuggagugcaguggcgcgaucu

SEQ ID NO: 649631 - RNA, 24 nt, Human
aggugauccacacgccuuggccuc

SEQ ID NO: 649632 - RNA, 20 nt, Human
aguagagacgggguuucacc

SEQ ID NO: 649633 - RNA, 21 nt, Human
aguagagacgggguuucaccg

SEQ ID NO: 649634 - RNA, 20 nt, Human
agugcaguggcgcgaucucg

SEQ ID NO: 649635 - RNA, 23 nt, Human
agugcaguggcgcgaucucggcu

SEQ ID NO: 649636 - RNA, 24 nt, Human
agugcaguggcgcgaucucggcuc

SEQ ID NO: 649637 - RNA, 24 nt, Human
caaagugcugggacugcaggcgug

SEQ ID NO: 649638 - RNA, 30 nt, Human
caacauggucuucucuuugaugaaggcccu

SEQ ID NO: 649639 - RNA, 22 nt, Human
caagugauucucgugccucagc

SEQ ID NO: 649640 - RNA, 28 nt, Human
caagugauucucgugccucagccucccg

SEQ ID NO: 649641 - RNA, 24 nt, Human
caccacaccuggcuaauuuuugua

SEQ ID NO: 649642 - RNA, 21 nt, Human
caccguguuggccaggcuggu

SEQ ID NO: 649643 - RNA, 24 nt, Human
caccguguuggccaggcuggucuu

SEQ ID NO: 649644 - RNA, 24 nt, Human
cacucuguugcccaggcuggagug

SEQ ID NO: 649645 - RNA, 21 nt, Human
cacugcaaccuccgccuccca

SEQ ID NO: 649646 - RNA, 24 nt, Human
cagagucucacucuguugcccagg

SEQ ID NO: 649647 - RNA, 19 nt, Human
cagcugcugaaauaccgcc

SEQ ID NO: 649648 - RNA, 26 nt, Human
caggacagagcuggaggcucauccug

SEQ ID NO: 649649 - RNA, 21 nt, Human
caggcgugagccaccgcgccc

SEQ ID NO: 649650 - RNA, 22 nt, Human
ccaaagugcugggacugcaggc

SEQ ID NO: 649651 - RNA, 24 nt, Human
ccaaagugcugggacugcaggcgu

SEQ ID NO: 649652 - RNA, 20 nt, Human
ccacacacagcagaugagua

SEQ ID NO: 649653 - RNA, 24 nt, Human
cccaaagugcugggacugcaggcg

SEQ ID NO: 649654 - RNA, 20 nt, Human
cccagguucaagugauucuc

SEQ ID NO: 649655 - RNA, 20 nt, Human
cccagguucaagugauucuc

SEQ ID NO: 649656 - RNA, 21 nt, Human
cccgagccuccacucccucuu

SEQ ID NO: 649657 - RNA, 20 nt, Human
cccgaguaacugggacuaca

SEQ ID NO: 649658 - RNA, 25 nt, Human
cccggccaacauggucuucucuuug

SEQ ID NO: 649659 - RNA, 24 nt, Human
ccgccucccagguucaagugauuc

SEQ ID NO: 649660 - RNA, 22 nt, Human
ccucccagguucaagugauucu

SEQ ID NO: 649661 - RNA, 20 nt, Human
ccugaccucaggugauccac

SEQ ID NO: 649662 - RNA, 20 nt, Human
ccugaccucaggugauccac

SEQ ID NO: 649663 - RNA, 22 nt, Human
cgccucccagguucaagugauu

SEQ ID NO: 649664 - RNA, 21 nt, Human
cggaggccaggcgcagggggc

SEQ ID NO: 649665 - RNA, 24 nt, Human
cgggguuucaccguguuggccagg

SEQ ID NO: 649666 - RNA, 24 nt, Human
cguguuggccaggcuggucuugaa

SEQ ID NO: 649667 - RNA, 18 nt, Human
cuacugacucccaggccu

SEQ ID NO: 649668 - RNA, 24 nt, Human
cucacucuguugcccaggcuggag

SEQ ID NO: 649669 - RNA, 24 nt, Human
cucacugcaaccuccgccucccag

SEQ ID NO: 649670 - RNA, 19 nt, Human
cucccagguucaagugauu

SEQ ID NO: 649671 - RNA, 23 nt, Human
cucgugccucagccucccgagua

SEQ ID NO: 649672 - RNA, 23 nt, Human
cugcaaccuccgccucccagguu

SEQ ID NO: 649673 - RNA, 24 nt, Human
cugcaaccuccgccucccagguuc

SEQ ID NO: 649674 - RNA, 23 nt, Human
gaccucaggugauccacacgccu

SEQ ID NO: 649675 - RNA, 18 nt, Human
gacugcaggcgugagcca

SEQ ID NO: 649676 - RNA, 21 nt, Human
gacugcaggcgugagccaccg

SEQ ID NO: 649677 - RNA, 22 nt, Human
gacugcaggcgugagccaccgc

SEQ ID NO: 649678 - RNA, 24 nt, Human
gagacgggguuucaccguguuggc

SEQ ID NO: 649679 - RNA, 22 nt, Human
gaguaacugggacuacauaagc

SEQ ID NO: 649680 - RNA, 21 nt, Human
gauucucgugccucagccucc

SEQ ID NO: 649681 - RNA, 22 nt, Human
gcaaccuccgccucccagguuc

SEQ ID NO: 649682 - RNA, 19 nt, Human
gcagugccagggccaagaa

SEQ ID NO: 649683 - RNA, 19 nt, Human
gcccaggcuggagugcagu

SEQ ID NO: 649684 - RNA, 20 nt, Human
gcccaggcuggagugcagug

SEQ ID NO: 649685 - RNA, 19 nt, Human
gccccgagccuccacuccc

SEQ ID NO: 649686 - RNA, 22 nt, Human
gccuuggccucccaaagugcug

SEQ ID NO: 649687 - RNA, 23 nt, Human
gcuggucuugaacuccugaccuc

SEQ ID NO: 649688 - RNA, 24 nt, Human
ggcuggucuugaacuccugaccuc

SEQ ID NO: 649689 - RNA, 23 nt, Human
gggguuucaccguguuggccagg

SEQ ID NO: 649690 - RNA, 19 nt, Human
ggucuugaacuccugaccu

SEQ ID NO: 649691 - RNA, 20 nt, Human
guacagcucccacaacgccc

SEQ ID NO: 649692 - RNA, 23 nt, Human
guagagacgggguuucaccgugu

SEQ ID NO: 649693 - RNA, 24 nt, Human
gugauccacacgccuuggccuccc

SEQ ID NO: 649694 - RNA, 24 nt, Human
gugauucucgugccucagccuccc

SEQ ID NO: 649695 - RNA, 19 nt, Human
gugccucagccucccgagu

SEQ ID NO: 649696 - RNA, 22 nt, Human
gugccucagccucccgaguaac

SEQ ID NO: 649697 - RNA, 18 nt, Human
guggccccgagccuccac

SEQ ID NO: 649698 - RNA, 22 nt, Human
guggccccgagccuccacuccc

SEQ ID NO: 649699 - RNA, 23 nt, Human
uaauuuuuguauuuuuuaguaga

SEQ ID NO: 649700 - RNA, 25 nt, Human
uaauuuuuguauuuuuuaguagaga

SEQ ID NO: 649701 - RNA, 21 nt, Human
uacagcucccacaacgcccuc

SEQ ID NO: 649702 - RNA, 24 nt, Human
uacauaagcgugagccaccacacc

SEQ ID NO: 649703 - RNA, 26 nt, Human
uaccgcccacguuugccaugcugcac

SEQ ID NO: 649704 - RNA, 19 nt, Human
uaggaaacuacugacuccc

SEQ ID NO: 649705 - RNA, 22 nt, Human
uaggaccaggagcagcguccgc

SEQ ID NO: 649706 - RNA, 21 nt, Human
uaguagagacgggguuucacc

SEQ ID NO: 649707 - RNA, 24 nt, Human
uaguagagacgggguuucaccgug

SEQ ID NO: 649708 - RNA, 26 nt, Human
uaguagagacgggguuucaccguguu

SEQ ID NO: 649709 - RNA, 24 nt, Human
ucaccguguuggccaggcuggucu

SEQ ID NO: 649710 - RNA, 24 nt, Human
ucacucuguugcccaggcuggagu

SEQ ID NO: 649711 - RNA, 19 nt, Human
ucacugcaaccuccgccuc

SEQ ID NO: 649712 - RNA, 24 nt, Human
ucacugcaaccuccgccucccagg

SEQ ID NO: 649713 - RNA, 25 nt, Human
ucacugcaaccuccgccucccaggu

SEQ ID NO: 649714 - RNA, 27 nt, Human
ucacugcaaccuccgccucccagguuc

SEQ ID NO: 649715 - RNA, 18 nt, Human
ucccaaagugcugggacu

SEQ ID NO: 649716 - RNA, 24 nt, Human
ucccaaagugcugggacugcaggc

SEQ ID NO: 649717 - RNA, 18 nt, Human
ucccaggccugagccucu

SEQ ID NO: 649718 - RNA, 21 nt, Human
ucccagguucaagugauucuc

SEQ ID NO: 649719 - RNA, 21 nt, Human
ucccagguucaagugauucuc

SEQ ID NO: 649720 - RNA, 23 nt, Human
ucucacucuguugcccaggcugg

SEQ ID NO: 649721 - RNA, 24 nt, Human
ucucacucuguugcccaggcugga

SEQ ID NO: 649722 - RNA, 26 nt, Human
ucucacucuguugcccaggcuggagu

SEQ ID NO: 649723 - RNA, 27 nt, Human
ucucacucuguugcccaggcuggagug

SEQ ID NO: 649724 - RNA, 18 nt, Human
ucuccuggcgucuuggcu

SEQ ID NO: 649725 - RNA, 22 nt, Human
ucuggcaccacacacagcagau

SEQ ID NO: 649726 - RNA, 18 nt, Human
ucuguugcccaggcugga

SEQ ID NO: 649727 - RNA, 24 nt, Human
ucuguugcccaggcuggagugcag

SEQ ID NO: 649728 - RNA, 23 nt, Human
ucuugaacuccugaccucaggug

SEQ ID NO: 649729 - RNA, 24 nt, Human
ugaaauaccgcccacguuugccau

SEQ ID NO: 649730 - RNA, 23 nt, Human
ugaccucaggugauccacacgcc

SEQ ID NO: 649731 - RNA, 24 nt, Human
ugaccucaggugauccacacgccu

SEQ ID NO: 649732 - RNA, 25 nt, Human
ugaccucaggugauccacacgccuu

SEQ ID NO: 649733 - RNA, 25 nt, Human
ugacucccaggccugagccucuccu

SEQ ID NO: 649734 - RNA, 18 nt, Human
ugagacagagucucacuc

SEQ ID NO: 649735 - RNA, 22 nt, Human
ugagacagagucucacucuguu

SEQ ID NO: 649736 - RNA, 20 nt, Human
ugaguacagccauuaggacc

SEQ ID NO: 649737 - RNA, 23 nt, Human
ugccagggccaagaagacagggc

SEQ ID NO: 649738 - RNA, 18 nt, Human
ugcccaggcuggagugca

SEQ ID NO: 649739 - RNA, 21 nt, Human
ugcccaggcuggagugcagug

SEQ ID NO: 649740 - RNA, 22 nt, Human
ugcccaggcuggagugcagugg

SEQ ID NO: 649741 - RNA, 24 nt, Human
ugcccaggcuggagugcaguggcg

SEQ ID NO: 649742 - RNA, 24 nt, Human
ugccucagccucccgaguaacugg

SEQ ID NO: 649743 - RNA, 23 nt, Human
uggagugcaguggcgcgaucucg

SEQ ID NO: 649744 - RNA, 24 nt, Human
uggagugcaguggcgcgaucucgg

SEQ ID NO: 649745 - RNA, 24 nt, Human
uggccaggcuggucuugaacuccu

SEQ ID NO: 649746 - RNA, 24 nt, Human
ugggacuacauaagcgugagccac

SEQ ID NO: 649747 - RNA, 26 nt, Human
ugggacuacauaagcgugagccacca

SEQ ID NO: 649748 - RNA, 18 nt, Human
ugggacugcaggcgugag

SEQ ID NO: 649749 - RNA, 19 nt, Human
ugggacugcaggcgugagc

SEQ ID NO: 649750 - RNA, 21 nt, Human
ugggacugcaggcgugagcca

SEQ ID NO: 649751 - RNA, 23 nt, Human
ugggacugcaggcgugagccacc

SEQ ID NO: 649752 - RNA, 24 nt, Human
ugggacugcaggcgugagccaccg

SEQ ID NO: 649753 - RNA, 19 nt, Human
uggggaggccgggccucgg

SEQ ID NO: 649754 - RNA, 18 nt, Human
uuaguagagacgggguuu

SEQ ID NO: 649755 - RNA, 22 nt, Human
uuaguagagacgggguuucacc

SEQ ID NO: 649756 - RNA, 24 nt, Human
uuaguagagacgggguuucaccgu

SEQ ID NO: 649757 - RNA, 23 nt, Human
uucaagugauucucgugccucag

SEQ ID NO: 649758 - RNA, 24 nt, Human
uuucaccguguuggccaggcuggu

SEQ ID NO: 649759 - RNA, 22 nt, Human
uuuuguauuuuuuaguagagac

SEQ ID NO: 649760 - RNA, 24 nt, Human
uuuuuaguagagacgggguuucac

SEQ ID NO: 649761 - RNA, 21 nt, Human
uuuuuguauuuuuuaguagag

SEQ ID NO: 649762 - RNA, 23 nt, Human
uuuuuuaguagagacgggguuuc

SEQ ID NO: 649763 - RNA, 20 nt, Human
uuuuuuuuuuugagacagag

SEQ ID NO: 649764 - RNA, 26 nt, Human
uuuuuuuuuuuugagacagagucuca

SEQ ID NO: 649765 - RNA, 18 nt, Human
uuuuuuuuuuuuuuuuug

SEQ ID NO: 649766 - RNA, 22 nt, Human
aagcacgcacaaaauggaguga

SEQ ID NO: 649767 - RNA, 22 nt, Human
aggaaagagaaccagguggccu

SEQ ID NO: 649768 - RNA, 18 nt, Human
cugcgcaaugaauugugg

SEQ ID NO: 649769 - RNA, 19 nt, Human
cugcgcaaugaauugugga

SEQ ID NO: 649770 - RNA, 20 nt, Human
gaaagcacgcacaaaaugga

SEQ ID NO: 649771 - RNA, 18 nt, Human
gggagaaacaaggaggcu

SEQ ID NO: 649772 - RNA, 20 nt, Human
ucacugggagaaacaaggag

SEQ ID NO: 649773 - RNA, 20 nt, Human
ucacugggagaaacaaggag

SEQ ID NO: 649774 - RNA, 19 nt, Human
uggagcacaaauuucacaa

SEQ ID NO: 649775 - RNA, 20 nt, Human
ugggagaaacaaggaggcuu

SEQ ID NO: 649776 - RNA, 23 nt, Human
uuuuuugacacuucauaaauguu

SEQ ID NO: 649777 - RNA, 18 nt, Human
uuuuuuuuuuuuuuuuug

SEQ ID NO: 649778 - RNA, 18 nt, Human
aaaaggagugggguggag

SEQ ID NO: 649779 - RNA, 22 nt, Human
aaacaaacgcccugucuggaac

SEQ ID NO: 649780 - RNA, 19 nt, Human
aaacauuucccaggacauc

SEQ ID NO: 649781 - RNA, 19 nt, Human
aaaugcacugaggcugggc

SEQ ID NO: 649782 - RNA, 22 nt, Human
aaaugcuucuguccaaacucca

SEQ ID NO: 649783 - RNA, 18 nt, Human
aagccgcccccgaccccg

SEQ ID NO: 649784 - RNA, 20 nt, Human
aagccgcccccgaccccggc

SEQ ID NO: 649785 - RNA, 21 nt, Human
aagccgcuagaaacuggggcc

SEQ ID NO: 649786 - RNA, 18 nt, Human
aaggugccagucuacaug

SEQ ID NO: 649787 - RNA, 31 nt, Human
aaucuucaaggugccagucuacaugcccaaa

SEQ ID NO: 649788 - RNA, 23 nt, Human
aaugcacugaggcugggcaaugg

SEQ ID NO: 649789 - RNA, 20 nt, Human
acaagcggcagagagggaag

SEQ ID NO: 649790 - RNA, 20 nt, Human
acagcaguggaggcaucagu

SEQ ID NO: 649791 - RNA, 22 nt, Human
accacagagggcagggagugac

SEQ ID NO: 649792 - RNA, 23 nt, Human
accaccacagagggcagggagug

SEQ ID NO: 649793 - RNA, 21 nt, Human
acgccgcaaaggcgagcacac

SEQ ID NO: 649794 - RNA, 24 nt, Human
acggagcuggcugugggcuggggg

SEQ ID NO: 649795 - RNA, 24 nt, Human
acuggcuuuucucgugagucuuuc

SEQ ID NO: 649796 - RNA, 23 nt, Human
agaaaaacagugaccaccacaga

SEQ ID NO: 649797 - RNA, 21 nt, Human
agaaaaccaccagccagccca

SEQ ID NO: 649798 - RNA, 19 nt, Human
agagaaaaacagugaccac

SEQ ID NO: 649799 - RNA, 21 nt, Human
agagggcagggagugacaaag

SEQ ID NO: 649800 - RNA, 22 nt, Human
agccgcuagaaacuggggccac

SEQ ID NO: 649801 - RNA, 24 nt, Human
agcuguucgccucuuccugacccc

SEQ ID NO: 649802 - RNA, 19 nt, Human
aggaaaacauuucccagga

SEQ ID NO: 649803 - RNA, 24 nt, Human
aggacauccucagguuggucucca

SEQ ID NO: 649804 - RNA, 19 nt, Human
aggagaugccaaccucagc

SEQ ID NO: 649805 - RNA, 22 nt, Human
agggaggaaggcauggacaaaa

SEQ ID NO: 649806 - RNA, 21 nt, Human
agggcagggagugacaaagcu

SEQ ID NO: 649807 - RNA, 19 nt, Human
aggggcuggggcaggugca

SEQ ID NO: 649808 - RNA, 19 nt, Human
auccgcgcgacgggcccac

SEQ ID NO: 649809 - RNA, 18 nt, Human
auucacuccagagucccg

SEQ ID NO: 649810 - RNA, 24 nt, Human
caaaacaaacgcccugucuggaac

SEQ ID NO: 649811 - RNA, 22 nt, Human
caaaggcgagcacacaccgcca

SEQ ID NO: 649812 - RNA, 21 nt, Human
caaagggcacgccucuaggac

SEQ ID NO: 649813 - RNA, 21 nt, Human
caaaguaagcauuugccaaau

SEQ ID NO: 649814 - RNA, 19 nt, Human
caccacagagggcagggag

SEQ ID NO: 649815 - RNA, 21 nt, Human
cacucuauccgcucacaggaa

SEQ ID NO: 649816 - RNA, 24 nt, Human
cagacacaaggacaagcggcagag

SEQ ID NO: 649817 - RNA, 26 nt, Human
cagaguucagagccccagagccaccc

SEQ ID NO: 649818 - RNA, 21 nt, Human
cagcacaaggacuuggagcag

SEQ ID NO: 649819 - RNA, 20 nt, Human
cagcccagacacaaggacaa

SEQ ID NO: 649820 - RNA, 18 nt, Human
cagcgagcagcgcggggg

SEQ ID NO: 649821 - RNA, 23 nt, Human
caggaagagcaccagucaggagg

SEQ ID NO: 649822 - RNA, 18 nt, Human
cauggggucuccaggcug

SEQ ID NO: 649823 - RNA, 19 nt, Human
ccaagccugagauccuacc

SEQ ID NO: 649824 - RNA, 21 nt, Human
ccacccgggauguggcggcaa

SEQ ID NO: 649825 - RNA, 23 nt, Human
ccagacacaaggacaagcggcag

SEQ ID NO: 649826 - RNA, 20 nt, Human
cccagaggccacuguugccu

SEQ ID NO: 649827 - RNA, 18 nt, Human
cccagaugcagguguggc

SEQ ID NO: 649828 - RNA, 25 nt, Human
cccgaccccggcgcuagccucgaug

SEQ ID NO: 649829 - RNA, 22 nt, Human
cccgauaucuggcugccacaau

SEQ ID NO: 649830 - RNA, 20 nt, Human
cccgcugcugccgcccugga

SEQ ID NO: 649831 - RNA, 18 nt, Human
cccggccccaagccugag

SEQ ID NO: 649832 - RNA, 29 nt, Human
cccggccccaagccugagauccgguuccg

SEQ ID NO: 649833 - RNA, 22 nt, Human
ccgccaugccgcccagugaccc

SEQ ID NO: 649834 - RNA, 22 nt, Human
ccgcccagugacccuccgugcc

SEQ ID NO: 649835 - RNA, 19 nt, Human
ccgguagagaaauggggau

SEQ ID NO: 649836 - RNA, 19 nt, Human
ccgugcccggcagcgacgg

SEQ ID NO: 649837 - RNA, 20 nt, Human
ccucggggucuguguccggc

SEQ ID NO: 649838 - RNA, 18 nt, Human
ccucuaggacugcguccc

SEQ ID NO: 649839 - RNA, 25 nt, Human
ccugagauccuaccaacuucccgag

SEQ ID NO: 649840 - RNA, 23 nt, Human
ccuguguggaccacucacugcuu

SEQ ID NO: 649841 - RNA, 24 nt, Human
cgcccccgaccccggcgcuagccu

SEQ ID NO: 649842 - RNA, 21 nt, Human
cgcgcgacgggcccacgccgc

SEQ ID NO: 649843 - RNA, 22 nt, Human
cgcuggggacgcccacucgggc

SEQ ID NO: 649844 - RNA, 22 nt, Human
cggcagcgacgcgaagaucucc

SEQ ID NO: 649845 - RNA, 23 nt, Human
cggccgccgccgucucggccggg

SEQ ID NO: 649846 - RNA, 19 nt, Human
cgggggcggcggcgagggg

SEQ ID NO: 649847 - RNA, 20 nt, Human
cucacggcaacgccuccucc

SEQ ID NO: 649848 - RNA, 21 nt, Human
cuccaaagcuggaggggcugg

SEQ ID NO: 649849 - RNA, 28 nt, Human
cuccuggcaccuguguggaccacucacu

SEQ ID NO: 649850 - RNA, 18 nt, Human
cugugcccaucacaccug

SEQ ID NO: 649851 - RNA, 19 nt, Human
cuucaggagaugccaaccu

SEQ ID NO: 649852 - RNA, 19 nt, Human
cuuccugacccccucccag

SEQ ID NO: 649853 - RNA, 22 nt, Human
cuuggcuccaaagcuggagggg

SEQ ID NO: 649854 - RNA, 27 nt, Human
gacacaaggacaagcggcagagaggga

SEQ ID NO: 649855 - RNA, 20 nt, Human
gagacaguggccggcagccg

SEQ ID NO: 649856 - RNA, 19 nt, Human
gagacaguggccggcagcu

SEQ ID NO: 649857 - RNA, 21 nt, Human
gagagggaaggcucgcugggg

SEQ ID NO: 649858 - RNA, 18 nt, Human
gagcuggcugugggcugg

SEQ ID NO: 649859 - RNA, 22 nt, Human
gaucuccaccagcagcucgggc

SEQ ID NO: 649860 - RNA, 21 nt, Human
gcaaaggcgagcacacaccgc

SEQ ID NO: 649861 - RNA, 19 nt, Human
gcaacgccuccuccagaug

SEQ ID NO: 649862 - RNA, 20 nt, Human
gcaccuguguggaccacuca

SEQ ID NO: 649863 - RNA, 21 nt, Human
gccaugccgcccagugacccu

SEQ ID NO: 649864 - RNA, 18 nt, Human
gcccagggugcgggaacc

SEQ ID NO: 649865 - RNA, 19 nt, Human
gcccggcagcgacgcgaag

SEQ ID NO: 649866 - RNA, 18 nt, Human
gccgggccccggcgcugc

SEQ ID NO: 649867 - RNA, 22 nt, Human
gccucuuccugacccccuccca

SEQ ID NO: 649868 - RNA, 21 nt, Human
gcgcacaagccgcccccgacc

SEQ ID NO: 649869 - RNA, 21 nt, Human
ggacgcccacucgggcacgga

SEQ ID NO: 649870 - RNA, 22 nt, Human
ggagaugccaaccucagccaag

SEQ ID NO: 649871 - RNA, 18 nt, Human
ggaggguccugcuucccg

SEQ ID NO: 649872 - RNA, 18 nt, Human
ggcaagagagaaaaacag

SEQ ID NO: 649873 - RNA, 19 nt, Human
ggcagggagugacaaagcu

SEQ ID NO: 649874 - RNA, 21 nt, Human
ggcagggagugacaaagcuug

SEQ ID NO: 649875 - RNA, 18 nt, Human
ggcgaggggcccgcgcac

SEQ ID NO: 649876 - RNA, 20 nt, Human
ggcggcagcuccagcagcga

SEQ ID NO: 649877 - RNA, 20 nt, Human
ggcuggggcaggugcauggg

SEQ ID NO: 649878 - RNA, 19 nt, Human
ggcuguccccuacaucugc

SEQ ID NO: 649879 - RNA, 18 nt, Human
ggcugugggcugggggaa

SEQ ID NO: 649880 - RNA, 19 nt, Human
gggcggcagcuccagcagc

SEQ ID NO: 649881 - RNA, 22 nt, Human
gggcugggggaagggccagcuc

SEQ ID NO: 649882 - RNA, 19 nt, Human
gggugcgggaaccccaccg

SEQ ID NO: 649883 - RNA, 18 nt, Human
ggguggagcacaugcguc

SEQ ID NO: 649884 - RNA, 24 nt, Human
gguggggaagcugagaucagaggu

SEQ ID NO: 649885 - RNA, 21 nt, Human
gucccacagugugcucuucaa

SEQ ID NO: 649886 - RNA, 25 nt, Human
guccccacacgcagguguuaacaca

SEQ ID NO: 649887 - RNA, 21 nt, Human
gucuccacaccaaggcacaca

SEQ ID NO: 649888 - RNA, 25 nt, Human
gucucggccgggccccggcgcugcu

SEQ ID NO: 649889 - RNA, 22 nt, Human
guucagagccccagagccaccc

SEQ ID NO: 649890 - RNA, 19 nt, Human
uagguccgugcccggcagg

SEQ ID NO: 649891 - RNA, 22 nt, Human
uauggcccgauaucuggcugcc

SEQ ID NO: 649892 - RNA, 20 nt, Human
uaugucacacucucuacaua

SEQ ID NO: 649893 - RNA, 20 nt, Human
ucaccgucacucagagacug

SEQ ID NO: 649894 - RNA, 24 nt, Human
ucagcaguccuccguauggcccga

SEQ ID NO: 649895 - RNA, 23 nt, Human
uccaaagcuggaggggcuggggc

SEQ ID NO: 649896 - RNA, 19 nt, Human
uccaagcaagccgguagag

SEQ ID NO: 649897 - RNA, 24 nt, Human
uccaagcaagccgguagagaaaug

SEQ ID NO: 649898 - RNA, 19 nt, Human
ucccagaggccacuguugc

SEQ ID NO: 649899 - RNA, 22 nt, Human
ucccaggacauccucagguugg

SEQ ID NO: 649900 - RNA, 19 nt, Human
ucccccaaaaggagugggg

SEQ ID NO: 649901 - RNA, 21 nt, Human
ucccgaggucccucaccagca

SEQ ID NO: 649902 - RNA, 22 nt, Human
ucccuuagagcgaggcucgggc

SEQ ID NO: 649903 - RNA, 25 nt, Human
ucccuuagagcgaggcucgggcucc

SEQ ID NO: 649904 - RNA, 23 nt, Human
uccgcgcgacgggcccacgccgc

SEQ ID NO: 649905 - RNA, 19 nt, Human
ucgcuggggacgcccacuc

SEQ ID NO: 649906 - RNA, 22 nt, Human
ucgcuggggacgcccacucggg

SEQ ID NO: 649907 - RNA, 18 nt, Human
ucgcugucggccgccgcc

SEQ ID NO: 649908 - RNA, 21 nt, Human
ucuagaaagcuguccccucac

SEQ ID NO: 649909 - RNA, 22 nt, Human
ucuccacaccaaggcacacaga

SEQ ID NO: 649910 - RNA, 22 nt, Human
ugaaaugcuucuguccaaacuc

SEQ ID NO: 649911 - RNA, 21 nt, Human
ugagauccuaccaacuucccc

SEQ ID NO: 649912 - RNA, 19 nt, Human
ugcacugaggcugggcaau

SEQ ID NO: 649913 - RNA, 24 nt, Human
ugcagaccugggccaagcugggua

SEQ ID NO: 649914 - RNA, 25 nt, Human
ugccagucuacaugcccaacagucc

SEQ ID NO: 649915 - RNA, 22 nt, Human
ugcccagcacaaggacuuggag

SEQ ID NO: 649916 - RNA, 21 nt, Human
ugcgccggaacuucgugcaga

SEQ ID NO: 649917 - RNA, 24 nt, Human
ugcgugcagggaggaaggcaugga

SEQ ID NO: 649918 - RNA, 24 nt, Human
ugcucagcuucuuccaucauggca

SEQ ID NO: 649919 - RNA, 18 nt, Human
ugcuggcggcgccgacau

SEQ ID NO: 649920 - RNA, 19 nt, Human
uggagccuugcguucugga

SEQ ID NO: 649921 - RNA, 20 nt, Human
uggaggggcuggggcaggug

SEQ ID NO: 649922 - RNA, 23 nt, Human
uggcaagagagaaaaacaguggc

SEQ ID NO: 649923 - RNA, 18 nt, Human
uggcuggacugggccccc

SEQ ID NO: 649924 - RNA, 21 nt, Human
uggggcaggugcaugggcugg

SEQ ID NO: 649925 - RNA, 22 nt, Human
uggggccacacacaagagccag

SEQ ID NO: 649926 - RNA, 22 nt, Human
ugucuggaacaggccgucgagg

SEQ ID NO: 649927 - RNA, 20 nt, Human
uucaaggccacagucaccgu

SEQ ID NO: 649928 - RNA, 20 nt, Human
uucaucaggaaaacauuucc

SEQ ID NO: 649929 - RNA, 21 nt, Human
uuccugacccccucccagagg

SEQ ID NO: 649930 - RNA, 23 nt, Human
uucgccucuuccugacccccucc

SEQ ID NO: 649931 - RNA, 23 nt, Human
uuuaaucagaagcacgugcgucc

SEQ ID NO: 649932 - RNA, 20 nt, Human
uuucgcaaacaccauacucc

SEQ ID NO: 649933 - RNA, 23 nt, Human
uuucgcaaacaccauacuccuca

SEQ ID NO: 649934 - RNA, 19 nt, Human
uuuuuuuuuuuugagaucu

SEQ ID NO: 649935 - RNA, 18 nt, Human
uuuuuuuuuuuuuuuuug

SEQ ID NO: 649936 - RNA, 22 nt, Human
aaaaaaaaaaaaccacaaagaa

SEQ ID NO: 649937 - RNA, 25 nt, Human
aaaacaguaaagauuaaugggaaag

SEQ ID NO: 649938 - RNA, 22 nt, Human
aaaaugccacacauacauguag

SEQ ID NO: 649939 - RNA, 24 nt, Human
aaaucagucuguaaaccauccuga

SEQ ID NO: 649940 - RNA, 23 nt, Human
aaccucacucccaccucuuucac

SEQ ID NO: 649941 - RNA, 22 nt, Human
aaccuggucugggaaggggcau

SEQ ID NO: 649942 - RNA, 19 nt, Human
aagaaacaaagugggggcc

SEQ ID NO: 649943 - RNA, 25 nt, Human
aagaagcauccccaauuagcaagcc

SEQ ID NO: 649944 - RNA, 20 nt, Human
acaagaaauuuucccaucuc

SEQ ID NO: 649945 - RNA, 23 nt, Human
acaccccuguccaccaggaaucc

SEQ ID NO: 649946 - RNA, 24 nt, Human
acauacagcucaugcacacacauc

SEQ ID NO: 649947 - RNA, 23 nt, Human
accgggcacucgcgcacggaggc

SEQ ID NO: 649948 - RNA, 21 nt, Human
acuuaaacagcgacagugaug

SEQ ID NO: 649949 - RNA, 21 nt, Human
agaaaaccucacucccaccuc

SEQ ID NO: 649950 - RNA, 19 nt, Human
agaaaagaguuaguacacc

SEQ ID NO: 649951 - RNA, 21 nt, Human
agaagcuccccacucaguagc

SEQ ID NO: 649952 - RNA, 20 nt, Human
agacaaacacaguccaaaca

SEQ ID NO: 649953 - RNA, 18 nt, Human
agacagaucugacacccc

SEQ ID NO: 649954 - RNA, 19 nt, Human
agacagaucugacaccccu

SEQ ID NO: 649955 - RNA, 27 nt, Human
agcagccaggggaguugauguggaaga

SEQ ID NO: 649956 - RNA, 26 nt, Human
agcgacagugaugacuccaaaaaaaa

SEQ ID NO: 649957 - RNA, 25 nt, Human
aggaggcccuagcgggaggcagccc

SEQ ID NO: 649958 - RNA, 26 nt, Human
aggcacaaaagcagcaaacagcagaa

SEQ ID NO: 649959 - RNA, 18 nt, Human
aggcagccugcugcggag

SEQ ID NO: 649960 - RNA, 19 nt, Human
aggcccuagcgggaggcag

SEQ ID NO: 649961 - RNA, 22 nt, Human
agucuguaaaccauccugaguc

SEQ ID NO: 649962 - RNA, 19 nt, Human
aguugugagaggcaaaguc

SEQ ID NO: 649963 - RNA, 21 nt, Human
auacccgcacacagacacaca

SEQ ID NO: 649964 - RNA, 21 nt, Human
augggagcacaaaagccucac

SEQ ID NO: 649965 - RNA, 18 nt, Human
caaaaaugccacacauac

SEQ ID NO: 649966 - RNA, 24 nt, Human
caaaaaugccacacauacauguag

SEQ ID NO: 649967 - RNA, 18 nt, Human
caaaagcagcaaacagca

SEQ ID NO: 649968 - RNA, 23 nt, Human
caacagagacauggauggacacg

SEQ ID NO: 649969 - RNA, 23 nt, Human
caacagccacgacauucagcaau

SEQ ID NO: 649970 - RNA, 20 nt, Human
cacacacacacacacacaca

SEQ ID NO: 649971 - RNA, 26 nt, Human
cacacacacacacacacacagccuca

SEQ ID NO: 649972 - RNA, 24 nt, Human
cagaaaagaguuaguacaccacaa

SEQ ID NO: 649973 - RNA, 20 nt, Human
cagcacccacugccugcucc

SEQ ID NO: 649974 - RNA, 20 nt, Human
cagcacccacugccugcucu

SEQ ID NO: 649975 - RNA, 19 nt, Human
cagcagccaggggaguuga

SEQ ID NO: 649976 - RNA, 23 nt, Human
cagcccauaaauauuuuuaacca

SEQ ID NO: 649977 - RNA, 20 nt, Human
cagcgacagugaugacucca

SEQ ID NO: 649978 - RNA, 22 nt, Human
cagcgacagugaugacuccaaa

SEQ ID NO: 649979 - RNA, 23 nt, Human
cagcgacagugaugacuccaaaa

SEQ ID NO: 649980 - RNA, 21 nt, Human
caggauccugccucuuccagg

SEQ ID NO: 649981 - RNA, 25 nt, Human
caggauccugccucuuccagggccg

SEQ ID NO: 649982 - RNA, 23 nt, Human
cagggccaugcaggucuccauga

SEQ ID NO: 649983 - RNA, 20 nt, Human
caggucuuucccuacacugu

SEQ ID NO: 649984 - RNA, 23 nt, Human
caugcacacacaucagcacccac

SEQ ID NO: 649985 - RNA, 23 nt, Human
ccaacagccacgacauucagcaa

SEQ ID NO: 649986 - RNA, 20 nt, Human
ccaggaaucccacccauacc

SEQ ID NO: 649987 - RNA, 19 nt, Human
cccaauuagcaagccucag

SEQ ID NO: 649988 - RNA, 20 nt, Human
cccaucucuggcccccucca

SEQ ID NO: 649989 - RNA, 25 nt, Human
cccccucccaacaacuaucugacuc

SEQ ID NO: 649990 - RNA, 19 nt, Human
ccccugugaauuacccaag

SEQ ID NO: 649991 - RNA, 20 nt, Human
cccuccauuagaaaugaaau

SEQ ID NO: 649992 - RNA, 20 nt, Human
ccucacucccaccucuuuca

SEQ ID NO: 649993 - RNA, 20 nt, Human
ccucagugaugacuuagcac

SEQ ID NO: 649994 - RNA, 20 nt, Human
cgcacacacacacacacaca

SEQ ID NO: 649995 - RNA, 20 nt, Human
cgcgcacacacacacacagu

SEQ ID NO: 649996 - RNA, 28 nt, Human
cgcgcacacaccgggcacucgcgcacgg

SEQ ID NO: 649997 - RNA, 24 nt, Human
cgggacuccagaggugauggaaag

SEQ ID NO: 649998 - RNA, 20 nt, Human
cgggccccugcucucgccgg

SEQ ID NO: 649999 - RNA, 23 nt, Human
cguccagacgggacuccagaggu

SEQ ID NO: 650000 - RNA, 19 nt, Human
cuaagaagcauccccaauu

SEQ ID NO: 650001 - RNA, 20 nt, Human
cuaaugcucccuuuaagacu

SEQ ID NO: 650002 - RNA, 24 nt, Human
cucaugcacacacaucagcaccca

SEQ ID NO: 650003 - RNA, 19 nt, Human
cuggcccccuccauuagaa

SEQ ID NO: 650004 - RNA, 24 nt, Human
cuuaaacagcgacagugaugacuc

SEQ ID NO: 650005 - RNA, 22 nt, Human
cuucauaagcccaucaccagca

SEQ ID NO: 650006 - RNA, 20 nt, Human
cuucuuuacacucaccacca

SEQ ID NO: 650007 - RNA, 26 nt, Human
gacagugaugacuccaaaaaaaaugg

SEQ ID NO: 650008 - RNA, 22 nt, Human
gagcacaaaagccucacaaaac

SEQ ID NO: 650009 - RNA, 23 nt, Human
gaguucgggccgcggcgggcggg

SEQ ID NO: 650010 - RNA, 22 nt, Human
gaucugacaccccuguccacca

SEQ ID NO: 650011 - RNA, 26 nt, Human
gcaaagucuucuuuacacucaccacc

SEQ ID NO: 650012 - RNA, 18 nt, Human
gcaggaagggacguccag

SEQ ID NO: 650013 - RNA, 22 nt, Human
gccuucccaggaauccuaaccu

SEQ ID NO: 650014 - RNA, 23 nt, Human
gcgcacacacacacacacacaca

SEQ ID NO: 650015 - RNA, 26 nt, Human
gcgcacacacacacacacacacagcc

SEQ ID NO: 650016 - RNA, 23 nt, Human
gcgcacacacacacacacacagg

SEQ ID NO: 650017 - RNA, 18 nt, Human
gcgggcggggagccgggc

SEQ ID NO: 650018 - RNA, 23 nt, Human
gcucaugcaccccaauuacagca

SEQ ID NO: 650019 - RNA, 20 nt, Human
ggaaucccacccauacccgc

SEQ ID NO: 650020 - RNA, 22 nt, Human
ggaaucccacccauacccgcac

SEQ ID NO: 650021 - RNA, 20 nt, Human
ggagggguucggccgaggcg

SEQ ID NO: 650022 - RNA, 23 nt, Human
ggauccugccucuuccagggccg

SEQ ID NO: 650023 - RNA, 30 nt, Human
ggcacaaaagcagcaaacagcagaaggaaa

SEQ ID NO: 650024 - RNA, 22 nt, Human
ggccaugcaggucuccaugaga

SEQ ID NO: 650025 - RNA, 22 nt, Human
guccagacgggacuccagaggu

SEQ ID NO: 650026 - RNA, 19 nt, Human
gugagcagccgugcuuagc

SEQ ID NO: 650027 - RNA, 18 nt, Human
gugguguguacaaggguc

SEQ ID NO: 650028 - RNA, 27 nt, Human
guuucaggccacuuggguaccuuucag

SEQ ID NO: 650029 - RNA, 23 nt, Human
uaaaaaaaaaaaaccacaaagaa

SEQ ID NO: 650030 - RNA, 18 nt, Human
uaacaaaaaugccacaca

SEQ ID NO: 650031 - RNA, 18 nt, Human
uaaccaacacaaccucau

SEQ ID NO: 650032 - RNA, 18 nt, Human
uaaccuggucugggaagg

SEQ ID NO: 650033 - RNA, 22 nt, Human
uacaccacaagcauuuucuaca

SEQ ID NO: 650034 - RNA, 21 nt, Human
uagcaagccucagccagaaac

SEQ ID NO: 650035 - RNA, 21 nt, Human
uagcaggaagggacguccaga

SEQ ID NO: 650036 - RNA, 18 nt, Human
uauuuuguggugauugug

SEQ ID NO: 650037 - RNA, 19 nt, Human
ucauucacucuagcucuag

SEQ ID NO: 650038 - RNA, 22 nt, Human
ucauucacucuagcucuagaau

SEQ ID NO: 650039 - RNA, 22 nt, Human
uccaugagaucaggcuuuuuug

SEQ ID NO: 650040 - RNA, 19 nt, Human
ucccaggaauccuaaccug

SEQ ID NO: 650041 - RNA, 23 nt, Human
uccgcggccuucccaggaauccu

SEQ ID NO: 650042 - RNA, 20 nt, Human
ucgggcuggcauaaaggcuu

SEQ ID NO: 650043 - RNA, 20 nt, Human
ucgguagccagcagccaggg

SEQ ID NO: 650044 - RNA, 20 nt, Human
ucuggcccccuccauuagaa

SEQ ID NO: 650045 - RNA, 19 nt, Human
ucuuguccucccccuccca

SEQ ID NO: 650046 - RNA, 23 nt, Human
ugagcaugacuggggcuccucag

SEQ ID NO: 650047 - RNA, 21 nt, Human
ugaugacuccaaaaaaaaugu

SEQ ID NO: 650048 - RNA, 23 nt, Human
ugccacacauacauguaguugug

SEQ ID NO: 650049 - RNA, 24 nt, Human
uggacacgggcacgcgcacacaca

SEQ ID NO: 650050 - RNA, 25 nt, Human
ugggagcacaaaagccucacaaaac

SEQ ID NO: 650051 - RNA, 19 nt, Human
ugggucauuuucuuggggc

SEQ ID NO: 650052 - RNA, 25 nt, Human
uguaacagauauaugcauguguaca

SEQ ID NO: 650053 - RNA, 18 nt, Human
ugucgggcuggcauaaag

SEQ ID NO: 650054 - RNA, 22 nt, Human
ugugagaggcaaagucuucuuu

SEQ ID NO: 650055 - RNA, 24 nt, Human
uguguacaagggucugagaguaua

SEQ ID NO: 650056 - RNA, 21 nt, Human
uguguacauacagcucaugca

SEQ ID NO: 650057 - RNA, 25 nt, Human
uguguacauacagcucaugcacaca

SEQ ID NO: 650058 - RNA, 24 nt, Human
uuaaaaggaucucuaaugcucccu

SEQ ID NO: 650059 - RNA, 25 nt, Human
uuagcaagccucagccagaaacuac

SEQ ID NO: 650060 - RNA, 23 nt, Human
aaucacagcuacaauagauguac

SEQ ID NO: 650061 - RNA, 21 nt, Human
accuuaaaaggcacuacuggg

SEQ ID NO: 650062 - RNA, 19 nt, Human
aggcacuacuggguccagu

SEQ ID NO: 650063 - RNA, 20 nt, Human
aguaauuacaguucccuuca

SEQ ID NO: 650064 - RNA, 22 nt, Human
auaaaucaauaaucauggccuu

SEQ ID NO: 650065 - RNA, 23 nt, Human
caauccaguucauuaccacccua

SEQ ID NO: 650066 - RNA, 23 nt, Human
cacacagaaacuggaauaaucac

SEQ ID NO: 650067 - RNA, 22 nt, Human
caccuuaaaaggcacuacuggg

SEQ ID NO: 650068 - RNA, 23 nt, Human
cuacuaaaugaauucuuuugcau

SEQ ID NO: 650069 - RNA, 18 nt, Human
gaugauggaaaaaaagua

SEQ ID NO: 650070 - RNA, 27 nt, Human
uaaaaauagaaacagaaagaugaugua

SEQ ID NO: 650071 - RNA, 22 nt, Human
uaacaaacauuuaacguauggc

SEQ ID NO: 650072 - RNA, 21 nt, Human
uacaaguaauuacaguucccu

SEQ ID NO: 650073 - RNA, 18 nt, Human
uacaggacguuuaagaca

SEQ ID NO: 650074 - RNA, 22 nt, Human
uauacaauucuauuauauaaau

SEQ ID NO: 650075 - RNA, 26 nt, Human
uauacagaugauggaaaaaaaguaac

SEQ ID NO: 650076 - RNA, 21 nt, Human
uauauacagaugauggaaaaa

SEQ ID NO: 650077 - RNA, 19 nt, Human
ugacaaaacugugcaaaaa

SEQ ID NO: 650078 - RNA, 20 nt, Human
uggaaaaaaaguaacuuuca

SEQ ID NO: 650079 - RNA, 20 nt, Human
uguacauaauauacaucaug

SEQ ID NO: 650080 - RNA, 23 nt, Human
uuuaagacacuuauucaccuuau

SEQ ID NO: 650081 - RNA, 24 nt, Human
uuucugcuguaucaguagcuacaa

SEQ ID NO: 650082 - RNA, 22 nt, Human
accuuccccagugccccuccau

SEQ ID NO: 650083 - RNA, 27 nt, Human
accuuccccagugccccuccaugcucg

SEQ ID NO: 650084 - RNA, 21 nt, Human
acgggcgccggcggcuccccg

SEQ ID NO: 650085 - RNA, 19 nt, Human
agagggagacaaguccgca

SEQ ID NO: 650086 - RNA, 21 nt, Human
agcugugcacgcuggaccccu

SEQ ID NO: 650087 - RNA, 21 nt, Human
aggagaugccacugggggugc

SEQ ID NO: 650088 - RNA, 19 nt, Human
aggagcugggggaaaggug

SEQ ID NO: 650089 - RNA, 19 nt, Human
aguaacaccucuuuacuca

SEQ ID NO: 650090 - RNA, 22 nt, Human
caaaggcuggaaucugcccaug

SEQ ID NO: 650091 - RNA, 21 nt, Human
caagaucccugaucgccagcc

SEQ ID NO: 650092 - RNA, 21 nt, Human
cacgcuggaccccuggccagc

SEQ ID NO: 650093 - RNA, 22 nt, Human
cagcgcccccgccaggcccucc

SEQ ID NO: 650094 - RNA, 23 nt, Human
cagguccugagcuuuggacuccu

SEQ ID NO: 650095 - RNA, 19 nt, Human
ccaaaggcuggaaucugcc

SEQ ID NO: 650096 - RNA, 22 nt, Human
ccaaaggcuggaaucugcccau

SEQ ID NO: 650097 - RNA, 20 nt, Human
ccaaggacggcacagaacgu

SEQ ID NO: 650098 - RNA, 20 nt, Human
cccaaaggcuggaaucugcc

SEQ ID NO: 650099 - RNA, 23 nt, Human
ccccagugccccuccaugcucga

SEQ ID NO: 650100 - RNA, 19 nt, Human
ccccgcuccuccacggaca

SEQ ID NO: 650101 - RNA, 22 nt, Human
cccgccaggcccuccgaggcca

SEQ ID NO: 650102 - RNA, 21 nt, Human
cccgcuccuccacggacagca

SEQ ID NO: 650103 - RNA, 22 nt, Human
ccuagcucccugucaccuccuc

SEQ ID NO: 650104 - RNA, 22 nt, Human
ccuccaggugggccauaccugu

SEQ ID NO: 650105 - RNA, 18 nt, Human
ccuccuccuucaccuccc

SEQ ID NO: 650106 - RNA, 27 nt, Human
cgaagcggacccaggaggggccccgcu

SEQ ID NO: 650107 - RNA, 21 nt, Human
cggaagccagcgcccccgcca

SEQ ID NO: 650108 - RNA, 21 nt, Human
cggaagccagcgcccccgccg

SEQ ID NO: 650109 - RNA, 20 nt, Human
cuccaggugggccauaccug

SEQ ID NO: 650110 - RNA, 23 nt, Human
cucccaaugcaacaagaucccug

SEQ ID NO: 650111 - RNA, 23 nt, Human
cucccugucaccuccuccaccuc

SEQ ID NO: 650112 - RNA, 27 nt, Human
cucgggcucacagugcagccccgccuc

SEQ ID NO: 650113 - RNA, 22 nt, Human
cugcucccaaugcaacaagauc

SEQ ID NO: 650114 - RNA, 19 nt, Human
cuggaccccuggccagcca

SEQ ID NO: 650115 - RNA, 21 nt, Human
gaaagcuccccaucccccugg

SEQ ID NO: 650116 - RNA, 22 nt, Human
gaggaacacggccagcaccacg

SEQ ID NO: 650117 - RNA, 20 nt, Human
gaguaacaccucuuuacuca

SEQ ID NO: 650118 - RNA, 27 nt, Human
gcccaaaggcuggaaucugcccaugcc

SEQ ID NO: 650119 - RNA, 21 nt, Human
gcucccugucaccuccuccac

SEQ ID NO: 650120 - RNA, 18 nt, Human
ggcggcgggccggauccu

SEQ ID NO: 650121 - RNA, 21 nt, Human
ggcugccuagcucccugucac

SEQ ID NO: 650122 - RNA, 19 nt, Human
gugcagccccgccuccucc

SEQ ID NO: 650123 - RNA, 21 nt, Human
uagucagguccugagcuuugg

SEQ ID NO: 650124 - RNA, 20 nt, Human
ucccucgggggaccuucccc

SEQ ID NO: 650125 - RNA, 19 nt, Human
ucccucuuggccucaugga

SEQ ID NO: 650126 - RNA, 21 nt, Human
uccgcacuggagggagcacgg

SEQ ID NO: 650127 - RNA, 20 nt, Human
uccuccuucaccucccgcug

SEQ ID NO: 650128 - RNA, 19 nt, Human
ugcaacaagaucccugauc

SEQ ID NO: 650129 - RNA, 22 nt, Human
ugcagaaagcuccccauccccc

SEQ ID NO: 650130 - RNA, 23 nt, Human
ugcaggccuuucccaaggacggc

SEQ ID NO: 650131 - RNA, 21 nt, Human
ugccaggcugugccagccaua

SEQ ID NO: 650132 - RNA, 18 nt, Human
uggagggagcacggcugc

SEQ ID NO: 650133 - RNA, 21 nt, Human
uggccagccagcacggaagcc

SEQ ID NO: 650134 - RNA, 21 nt, Human
uuccgcagccgcacgggcgcc

SEQ ID NO: 650135 - RNA, 23 nt, Human
uuuuuuuuuuuuuuuuuucaagg

SEQ ID NO: 650136 - RNA, 23 nt, Human
aaacagacccaaggcugaaagca

SEQ ID NO: 650137 - RNA, 21 nt, Human
aagcagacgaagauucccucg

SEQ ID NO: 650138 - RNA, 18 nt, Human
aagucccaggcacccuuc

SEQ ID NO: 650139 - RNA, 18 nt, Human
acagcaacccaggaaggc

SEQ ID NO: 650140 - RNA, 18 nt, Human
acccgcaggccuccucaa

SEQ ID NO: 650141 - RNA, 25 nt, Human
accuuccucuccagcagcugcccac

SEQ ID NO: 650142 - RNA, 24 nt, Human
acuguaggagagaccaagccgugg

SEQ ID NO: 650143 - RNA, 18 nt, Human
agaacaguauugcauaca

SEQ ID NO: 650144 - RNA, 20 nt, Human
agacccaaggcugaaagcag

SEQ ID NO: 650145 - RNA, 23 nt, Human
agauccuuggcugaaggcaacuc

SEQ ID NO: 650146 - RNA, 21 nt, Human
agcagcugcccacugcccaug

SEQ ID NO: 650147 - RNA, 18 nt, Human
agcaggcccuggggaguu

SEQ ID NO: 650148 - RNA, 19 nt, Human
agcagugcagaugggggca

SEQ ID NO: 650149 - RNA, 18 nt, Human
agccuccagucccaagca

SEQ ID NO: 650150 - RNA, 19 nt, Human
aggcacccuucccugauca

SEQ ID NO: 650151 - RNA, 23 nt, Human
augggggcagguggcccuggagg

SEQ ID NO: 650152 - RNA, 20 nt, Human
caagucccaggcacccuucc

SEQ ID NO: 650153 - RNA, 21 nt, Human
caauaggcucacagugccccc

SEQ ID NO: 650154 - RNA, 20 nt, Human
cacagugcccccgaagucaa

SEQ ID NO: 650155 - RNA, 24 nt, Human
cacugcccauguccagcaguucca

SEQ ID NO: 650156 - RNA, 22 nt, Human
cagacccaaggcugaaagcaga

SEQ ID NO: 650157 - RNA, 19 nt, Human
cagcaacccaggaaggccu

SEQ ID NO: 650158 - RNA, 21 nt, Human
cagcagugcagaugggggcag

SEQ ID NO: 650159 - RNA, 21 nt, Human
cagcagugcagaugggggcag

SEQ ID NO: 650160 - RNA, 22 nt, Human
cagcccacacaaaacagaccca

SEQ ID NO: 650161 - RNA, 22 nt, Human
caggccagagugcccugaaaug

SEQ ID NO: 650162 - RNA, 19 nt, Human
caguggcucccugggggac

SEQ ID NO: 650163 - RNA, 23 nt, Human
caugggacccuccaagucccagg

SEQ ID NO: 650164 - RNA, 23 nt, Human
ccaaggcugaaagcagacgaaga

SEQ ID NO: 650165 - RNA, 21 nt, Human
ccacagcccgcguaccaccgu

SEQ ID NO: 650166 - RNA, 24 nt, Human
ccagcccacacaaaacagacccaa

SEQ ID NO: 650167 - RNA, 21 nt, Human
ccagucccaagcaagccucca

SEQ ID NO: 650168 - RNA, 23 nt, Human
cccacacaaaacagacccaaggc

SEQ ID NO: 650169 - RNA, 24 nt, Human
cccacacaaaacagacccaaggcu

SEQ ID NO: 650170 - RNA, 19 nt, Human
cccgaagucaagcaacagc

SEQ ID NO: 650171 - RNA, 24 nt, Human
cccgaagucaagcaacagcaggcc

SEQ ID NO: 650172 - RNA, 24 nt, Human
cccgcaggccuccucaaacaccag

SEQ ID NO: 650173 - RNA, 19 nt, Human
cccgcaggcuccgccgcug

SEQ ID NO: 650174 - RNA, 20 nt, Human
cccuccaagucccaggcacc

SEQ ID NO: 650175 - RNA, 19 nt, Human
ccggaaugugcugcugugu

SEQ ID NO: 650176 - RNA, 18 nt, Human
ccuacaggugccuccugc

SEQ ID NO: 650177 - RNA, 18 nt, Human
ccucgggucuccagcucu

SEQ ID NO: 650178 - RNA, 20 nt, Human
cggagcaggguccggaaguc

SEQ ID NO: 650179 - RNA, 25 nt, Human
cucaguucuucuggagugagcuggg

SEQ ID NO: 650180 - RNA, 24 nt, Human
cucuccagcagcugcccacugccc

SEQ ID NO: 650181 - RNA, 22 nt, Human
cugcccacugcccauguccagc

SEQ ID NO: 650182 - RNA, 18 nt, Human
cuguguccuagaaaugau

SEQ ID NO: 650183 - RNA, 24 nt, Human
cuuccucauccuccaugccggggg

SEQ ID NO: 650184 - RNA, 19 nt, Human
gaccuuccucuccagcagc

SEQ ID NO: 650185 - RNA, 21 nt, Human
gaggauggaggccagagccug

SEQ ID NO: 650186 - RNA, 18 nt, Human
gcagguggcccuggagga
